(19) United States
(12) Patent Application Publication
(10) Pub. No.: US 2024/0175014 A1
(43) Pub. Date: May 30, 2024

(54) MATERIALS AND METHODS FOR TREATMENT OF ALPHA-1 ANTITRYPSIN DEFICIENCY

(71) Applicant: CRISPR Therapeutics AG, Zug (CH)

(72) Inventors: Chad Albert COWAN, South Boston, MA (US); Roman Lvovitch BOGORAD, South Boston, MA (US); Jeffrey LI, South Boston, MA (US); Ante Sven LUNDBERG, South Boston, MA (US); Matthias Johannes JOHN, South Boston, MA (US); Jeffrey William STEBBINS, South Boston, MA (US); Thao Thi NGUYEN, South Boston, MA (US)

(21) Appl. No.: 18/540,860

(22) Filed: Dec. 14, 2023

Related U.S. Application Data
(63) Continuation of application No. 15/779,836, filed on May 29, 2018, now Pat. No. 11,851,653.
(60) Provisional application No. 62/261,661, filed on Dec. 1, 2015.
(60) Provisional application No. 62/324,056, filed on Apr. 18, 2016.

(51) Int. Cl. C12N 15/11; A61K 9/00; A61K 31/7088; C12N 9/22; C12N 15/10; A61K 48/00

(52) U.S. Cl. CPC C12N 15/111; A61K 9/0019; A61K 31/7088; C12N 9/22; C12N 15/102; A61K 48/00; C12N 2310/20; C12N 2320/30; C12N 2320/32; C12N 2800/80

(57) ABSTRACT

The present application provides materials and methods for treating a patient with Alpha-1 antitrypsin deficiency (AATD) both ex vivo and in vivo. In addition, the present application provides materials and methods for editing the SERPINA1 gene in a cell by genome editing.

### RELATED APPLICATIONS

[0001] This application is a continuation application of U.S. application Ser. No. 15/779,836, filed May 29, 2018, which is a national phase filing under 35 USC § 371 of International Application No. PCT/IB2016/001845, filed Dec. 1, 2016, which claims the benefit and priority of U.S. Provisional Application No. 62/261,661, filed Dec. 1, 2015; and U.S. Provisional Application No. 62/324,056, filed Apr. 18, 2016; the contents of each of which are incorporated herein by reference in their entirety.

### FIELD OF THE INVENTION

[0002] The present application provides materials and methods for treating a patient with alpha-1 antitrypsin deficiency (AATD) both ex vivo and in vivo. In addition, the present application provides materials and methods for modulating the expression, function, and/or activity of the SERPINA1 gene and/or the alpha-1 antitrypsin (AAT) protein in a cell by genome editing.

### INCORPORATION BY REFERENCE OF SEQUENCE LISTING

[0003] This application contains a Sequence Listing in computer readable form (filename: 80EM-341766-US2_SequenceListing.xml; 85,118 KB in size; created Feb. 12, 2024), which is incorporated herein by reference in its entirety and forms part of the disclosure.

### BACKGROUND OF THE INVENTION

[0004] Alpha-1 antitrypsin deficiency (AATD) is an autosomal recessive disorder characterized by an increased risk for: chronic obstructive pulmonary disease, including, emphysema, airflow obstruction, and/or chronic bronchitis, with evident manifestation in adults by the 4th-5th decades; liver disease, in a small portion of affected patients, with manifestation as obstructive jaundice; and increased aminotransferase levels in the early period of life. The liver disease in adults can even manifest as fibrosis and cirrhosis in the absence of a history of liver complications during childhood. Patients with AATD also have a higher incidence of hepatocellular carcinoma. (See e.g., Stoller J K, Aboussouan L S, “A review of alpha1-antitrypsin deficiency.” Am J Respir Crit Care Med 2012, 185(3):246-259; Teckman J H, “Liver disease in alpha-1 antitrypsin deficiency: current understanding and future therapy.” COPD 2013, 10 Suppl 1:35-43; and Stoller J K, et al, “Alpha-1 Antitrypsin Deficiency.” In: GeneReviews®. Edited by Pagon R A, et al. Seattle (WA); 1993).

[0005] The diagnosis of AATD is confirmed by demonstration of a low concentration of alpha-1 antitrypsin (AAT) in serum, followed by detection of a functionally deficient AAT protein or detection of bi-allelic pathogenic variants in SERPINA1, the gene encoding alpha-1 antitrypsin. (See e.g., Aboussouan L S, Stoller J K; “Detection of alpha-1 antitrypsin deficiency: a review.” Respir Med 2009, 103(3):335-341). The prevalence of AATD is about 40:100K (Swedish ancestry—50-60:100K). More than 100 variants of the AAT gene (SERPINA1) have been described, but the majority of the patients (at least with the liver phenotype) are homozygous for PI Z (PI, GLU342LYS ON M1A [dbSNP:rs28929474]).

[0006] Current therapy for AATD includes: standard therapy for chronic obstructive pulmonary disease, which includes bronchodilators, inhaled corticosteroids, pulmonary rehabilitation, supplemental oxygen, and vaccinations (e.g., influenza and pneumococcal). Specific therapy for AATD, including periodic intravenous infusion of pooled human serum alpha-antitrypsin (augmentation therapy) is also used. (See e.g., Mohanka M, Khemasuwan D, Stoller J K, “A review of augmentation therapy for alpha-1 antitrypsin deficiency.” Expert Opin Biol Ther 2012, 12(6): 685-700). Individuals with end-stage lung disease often have to undergo lung transplantation. A major treatment for patients with the liver disease is liver transplantation because other approaches, such as conventional therapies (chemical chaperones, stimulation of autophagy, antifibrotic therapy), often have a minimal effect.

[0007] Some newer approaches have been tested recently. (See e.g., Wewers M D, et al., “Replacement therapy for alpha 1-antitrypsin deficiency associated with emphysema.” N Engl J Med 1987, 316(17): 1055-1062; Wewers M D, Crystal R G, “Alpha-1 antitrypsin augmentation therapy.” COPD 2013, 10 Suppl 1:64-67; and Teckman J H, “Lack of effect of oral 4-phenylbutyrate on serum alpha-1-antitrypsin in patients with alpha-1-antitrypsin deficiency: a preliminary study.” J Pediatr Gastroenterol Nutr 2004, 39(1):34-37). ARC-AAT is a single dose Phase 1 clinical study and ALNY-AAT is a Phase 1 clinical study. Both studies are harnessing the RNA interference approach to reduce the amount of mutant AAT deposited in hepatocytes. However, these approaches do not address the lack of normal AAT in the circulation, and depend upon combination with augmentation therapy. In addition, rAAV1-CB-hAAT is a Phase 2 clinical study that combines downregulation of endogenous AAT with microRNA and simultaneous upregulation of exogenous AAT. (See e.g., Flotte T R, et al., “Phase 2 clinical trial of a recombinant adeno-associated viral vector expressing alpha1-antitrypsin: interim results.” Hum Gene Ther 2011, 22(10): 1239-1247; Mueller C, et al., “Sustained miRNA-mediated knockdown of mutant AAT with simultaneous augmentation of wild-type AAT has minimal effect on global liver miRNA profiles.” Mol Ther 2012, 20(3):590-600).

[0008] Genome engineering refers to the strategies and techniques for the targeted, specific modification of the genetic information (genome) of living organisms. Genome engineering is a very active field of research because of the wide range of possible applications, particularly in the areas of human health; the correction of a gene carrying a harmful mutation, for example, or to explore the function of a gene. Early technologies developed to insert a gene into a living cell, such as transgenesis, were often limited by the random nature of the insertion of the new sequence into the genome. The new gene was usually positioned blindly, and may have inactivated or disturbed the functioning of other genes, or even caused severe unwanted effects. Furthermore, these technologies generally offered no degree of reproducibility, as there was no guarantee that the new sequence would be inserted at the same place in two different cells. More recent genome engineering strategies, such as ZFNs, TALENs, HEs and MegaTALs, enable a specific area of the DNA to be modified, thereby increasing the precision of the correction or insertion compared to early technologies, and offering some degree of reproducibility. Despite this, such recent genome engineering strategies have limitations.

[0009] Despite efforts from researchers and medical professionals worldwide who have been trying to address AATD, and despite the promise of genome engineering approaches, there still remains a critical need for developing safe and effective treatments for AATD.

[0010] Prior approaches addressing AATD have severe limitations, such as limited success and lack of adequate available therapies. The present invention solves these problems by using genome engineering tools to create permanent changes to the genome that can restore the AAT protein activity with a single treatment. Thus, the present invention corrects the underlying genetic defect causing the disease.

### SUMMARY OF THE INVENTION

[0011] Provided herein are cellular, ex vivo and in vivo methods for creating permanent changes to the genome by inserting, deleting, correcting, or modulating the expression or function of one or more mutations or exons within or near the SERPINA1 gene or other DNA sequences that encode regulatory elements of the SERPINA1 gene or knocking-in SERPINA1 cDNA or minigene into a safe harbor locus by genome editing and restoring alpha-1-antitrypsin (AAT) protein activity, which can be used to treat alpha-1 antitrypsin deficiency (AATD). Also provided herein are components, kits and compositions for performing such methods. Also provided are cells produced by them.

[0012] Provided herein is a method for editing a SERPINA1 gene in a human cell by genome editing, the method comprising the step of introducing into the human cell one or more deoxyribonucleic acid (DNA) endonucleases to effect one or more single-strand breaks (SSBs) or one or more double-strand breaks (DSBs) within or near the SERPINA1 gene or other DNA sequences that encode regulatory elements of the SERPINA1 gene that results in at least one of a permanent insertion, deletion, correction, or modulation of expression or function of one or more mutations or exons within or near or affecting the expression or function of the SERPINA1 gene, or within or near a safe harbor locus that results in a permanent insertion of the SERPINA1 gene or minigene, and results in restoration of alpha-1-antitrypsin (AAT) protein activity.

[0013] Also provided herein is a method for inserting a SERPINA1 gene in a human cell by genome editing, the method comprising the step of: introducing into the human cell one or more deoxyribonucleic acid (DNA) endonucleases to effect one or more single-strand breaks (SSBs) or double-strand breaks (DSBs) within or near a safe harbor locus that results in a permanent insertion of the SERPINA1 gene or minigene, and results in restoration of alpha-1-antitrypsin (AAT) protein activity.

[0014] In one aspect, provided herein is a method for editing the SERPINA1 gene in a human cell by genome editing comprising introducing into the cell one or more deoxyribonucleic acid (DNA) endonucleases to effect one or more single-strand breaks (SSBs) or double-strand breaks (DSBs) within or near the SERPINA1 gene or other DNA sequences that encode regulatory elements of the SERPINA1 gene of the cell that results in permanent deletion, insertion, or correction of one or more mutations or exons within or near the SERPINA1 gene, or within or near a safe harbor locus that results in permanent insertion of the SERPINA1 gene or minigene, and restoration of alpha-1-antitrypsin (AAT) protein activity.

[0015] In another aspect, provided herein is an ex vivo method for treating a patient with alpha-1 antitrypsin deficiency (AATD) comprising the steps of: creating a patient specific induced pluripotent stem cell (iPSC); editing within or near the SERPINA1 gene of the iPSC or other DNA sequences that encode regulatory elements of the SERPINA1 gene of the iPSC or editing within or near a safe harbor locus of the iPSC; differentiating the genome edited iPSC into a hepatocyte; and implanting the hepatocyte into the patient.

[0016] In some embodiments, the step of creating a patient specific induced pluripotent stem cell (iPSC) comprises: isolating a somatic cell from the patient; and introducing a set of pluripotency-associated genes into the somatic cell to induce the cell to become a pluripotent stem cell. In some embodiments, the somatic cell is a fibroblast. In some embodiments, the set of pluripotency-associated genes is one or more of the genes selected from the group consisting of OCT4, SOX2, KLF4, Lin28, NANOG and cMYC.

[0017] The step of editing within or near a SERPINA1 gene or other DNA sequences that encode regulatory elements of the SERPINA1 gene of the iPSC or editing within or near a safe harbor locus of the SERPINA1 gene of the iPSC or editing within or near a locus of the first exon of the SERPINA1 gene of the iPSC can comprise introducing into the iPSC one or more deoxyribonucleic acid (DNA) endonucleases to effect one or more single-strand breaks (SSBs) or double-strand breaks (DSBs) within or near the SERPINA1 gene or other DNA sequences that encode regulatory elements of the SERPINA1 gene that results in a permanent insertion, correction, deletion, or modulation of expression or function of one or more mutations or exons within or near or affecting the expression or function of the SERPINA1 gene or within or near a safe harbor locus that results in a permanent insertion of the SERPINA1 gene results in restoration of AAT protein activity. The safe harbor locus can be selected from the group consisting of: AAVS1 (PPP1R12C), ALB, Angptl3, ApoC3, ASGR2, CCR5, FIX (F9), G6PC, Gys2, HGD, Lp(a), Pcsk9, Serpina1, TF, and TTR. The safe harbor locus can be selected from the group consisting of: exon 1-2 of AAVS1 (PPP1R12C), exon 1-2 of ALB, exon 1-2 of Angptl3, exon 1-2 of ApoC3, exon 1-2 of ASGR2, exon 1-2 of CCR5, exon 1-2 of FIX (F9), exon 1-2 of G6PC, exon 1-2 of Gys2, exon 1-2 of HGD, exon 1-2 of Lp(a), exon 1-2 of Pcsk9, exon 1-2 of Serpina1, exon 1-2 of TF, and exon 1-2 of TTR.

[0018] In some embodiments, the step of editing the SERPINA1 gene of the iPSC comprises introducing into the iPSC one or more deoxyribonucleic acid (DNA) endonucleases to effect one or more double-strand breaks (DSBs) within or near the SERPINA1 gene that results in permanent deletion, insertion, or correction of one or more mutations within or near the SERPINA1 gene and restoration of alpha-1-antitrypsin (AAT) protein activity.

[0019] In some embodiments, the step of differentiating the genome edited iPSC into a liver progenitor cell or a hepatocyte comprises one or more of the following: contacting the genome edited iPSC with one or more of activin, B27 supplement, FGF4, HGF, BMP2, BMP4, Oncostatin M, or Dexamethasone.

[0020] In some embodiments, the step of implanting the hepatocyte into the patient comprises implanting the hepatocyte into the patient by transplantation, local injection, or systemic infusion, or combinations thereof.

[0021] In another aspect, provided herein is an ex vivo method for treating a patient with alpha-1 antitrypsin deficiency (AATD) comprising the steps of: performing a biopsy of the patient's liver; isolating a liver specific progenitor cell or primary hepatocyte; editing within or near the SERPINA1 gene or other DNA sequences that encode regulatory elements of the SERPINA1 gene of the progenitor cell or primary hepatocyte or editing within or near a safe harbor locus of the progenitor cell or primary hepatocyte; and implanting the genome-edited progenitor cell or primary hepatocyte into the patient.

[0022] In some embodiments, the step of isolating a liver specific progenitor cell or primary hepatocyte from the patient comprises: perfusion of fresh liver tissues with digestion enzymes, cell differential centrifugation, and cell culturing, or combinations thereof.

[0023] In some embodiments, the step of editing within or near the SERPINA1 gene of the progenitor cell or primary hepatocyte or other DNA sequences that encode regulatory elements of the SERPINA1 gene of the progenitor cell or primary hepatocyte or editing within or near a safe harbor locus of the white blood cell of the progenitor cell or primary hepatocyte comprises introducing into the progenitor cell or primary hepatocyte one or more deoxyribonucleic acid (DNA) endonucleases to effect one or more single-strand breaks (SSBs) or double-strand breaks (DSBs) within or near the SERPINA1 gene or other DNA sequences that encode regulatory elements of the SERPINA1 gene that results in permanent insertion, correction, deletion, or modulation of expression or function of one or more mutations or exons within or near or affecting the expression or function of the SERPINA1 gene or editing within or near a safe harbor locus that results in permanent deletion, insertion, or correction of one or more mutations within or near the SERPINA1 gene and restoration of alpha-1-antitrypsin (AAT) protein activity. The safe harbor locus can be selected from the group consisting of: AAVS1 (PPP1R12C), ALB, Angptl3, ApoC3, ASGR2, CCR5, FIX (F9), G6PC, Gys2, HGD, Lp(a), Pcsk9, Serpina1, TF, and TTR. The safe harbor locus can be selected from the group consisting of: exon 1-2 of AAVS1 (PPP1R12C), exon 1-2 of ALB, exon 1-2 of Angptl3, exon 1-2 of ApoC3, exon 1-2 of ASGR2, exon 1-2 of CCR5, exon 1-2 of FIX (F9), exon 1-2 of G6PC, exon 1-2 of Gys2, exon 1-2 of HGD, exon 1-2 of Lp(a), exon 1-2 of Pcsk9, exon 1-2 of Serpina1, exon 1-2 of TF, and exon 1-2 of TTR.

[0024] In some embodiments, the step of implanting the progenitor cell or primary hepatocyte into the patient comprises implanting the progenitor cell or primary hepatocyte into the patient by transplantation, local injection, or systemic infusion, or combinations thereof.

[0025] In an aspect, provided herein is an ex vivo method for treating a patient with alpha-1 antitrypsin deficiency (AATD), the method comprising the steps of: i) isolating a mesenchymal stem cell from the patient; ii) editing within or near a SERPINA1 gene or other DNA sequences that encode regulatory elements of the SERPINA1 gene of the mesenchymal stem cell or editing within or near a safe harbor locus of the SERPINA1 gene of the mesenchymal cell; iii) differentiating the genome-edited mesenchymal stem cell into a hepatocyte; and iv) implanting the hepatocyte into the patient.

[0026] In an aspect, provided herein is an ex vivo method for treating a patient with alpha-1 antitrypsin deficiency (AATD) comprising the steps of: performing a biopsy of the patient's bone marrow; isolating a mesenchymal stem cell; editing the SERPINA1 gene of the stem cell; differentiating the stem cell into a hepatocyte; and implanting the hepatocyte into the patient.

[0027] The mesenchymal stem cell can be isolated from the patient's bone marrow by performing a biopsy of the patient's bone marrow or the mesenchymal stem cell can be isolated from peripheral blood.

[0028] In some embodiments, the step of isolating a mesenchymal stem cell comprises: aspiration of bone marrow and isolation of mesenchymal cells by density centrifugation using Percoll™.

[0029] In some embodiments, the step of editing within or near the SERPINA1 gene of the stem cell or other DNA sequences that encode regulatory elements of the SERPINA1 gene of the mesenchymal stem cell comprises introducing into the mesenchymal stem cell one or more deoxyribonucleic acid (DNA) endonucleases to effect one or more single-strand breaks (SSBs) or double-strand breaks (DSBs) within or near the SERPINA1 gene or other DNA sequences that encode regulatory elements of the SERPINA1 gene that results in permanent deletion, insertion, correction, or modulation of expression or function of one or more mutations or exons within or near or affecting the expression or function of the SERPINA1 gene or within or near a safe harbor locus that results of one or more mutations within or near the SERPINA1 gene that results in permanent insertion of the SERPINA1 gene or minigene, and restoration of alpha-1-antitrypsin (AAT) protein activity. The safe harbor locus can be selected from the group consisting of: AAVS1 (PPP1R12C), ALB, Angptl3, ApoC3, ASGR2, CCR5, FIX (F9), G6PC, Gys2, HGD, Lp(a), Pcsk9, Serpina1, TF, and TTR. The safe harbor locus can be selected from the group consisting of: exon 1-2 of AAVS1 (PPP1R12C), exon 1-2 of ALB, exon 1-2 of Angptl3, exon 1-2 of ApoC3, exon 1-2 of ASGR2, exon 1-2 of CCR5, exon 1-2 of FIX (F9), exon 1-2 of G6PC, exon 1-2 of Gys2, exon 1-2 of HGD, exon 1-2 of Lp(a), exon 1-2 of Pcsk9, exon 1-2 of Serpina1, exon 1-2 of TF, and exon 1-2 of TTR.

[0030] In some embodiments, the step of differentiating the genome-edited mesenchymal stem cell into a hepatocyte comprises one or more of the following to differentiate the genome edited mesenchymal stem cell into a hepatocyte: contacting the genome edited mesenchymal stem cell with one or more of insulin, transferrin, FGF4, HGF, or bile acids.

[0031] In some embodiments, the step of implanting the hepatocyte into the patient comprises implanting the hepatocyte into the patient by transplantation, local injection, or systemic infusion, or combinations thereof.

[0032] In another aspect, provided herein is an in vivo method for treating a patient with alpha-1 antitrypsin deficiency (AATD) comprising the step of editing the SERPINA1 gene in a cell of the patient, or other DNA sequences that encode regulatory elements of the SERPINA1 gene, or editing within or near a safe harbor locus in a cell of the patient.

[0033] In some embodiments, the step of editing the SERPINA1 gene in a cell of the patient comprises introducing into the cell one or more deoxyribonucleic acid (DNA) endonucleases to effect one or more single-strand breaks (SSBs) or double-strand breaks (DSBs) within or near the SERPINA1 gene or other DNA sequences that encode regulatory elements of the SERPINA1 gene that results in permanent deletion, insertion, or correction or modulation of one or more mutations or exons within the SERPINA1 gene that results in permanent insertion of the SERPINA1 gene or minigene, and restoration of AAT protein activity.

[0034] In some embodiments, the step of editing the SERPINA1 gene in a cell of the patient comprises introducing into the cell one or more deoxyribonucleic acid (DNA) endonucleases to effect one or more double-strand breaks (DSBs) within or near the SERPINA1 gene or DNA sequences that encode regulatory elements of the SERPINA1 gene or editing within or near a safe harbor locus of the SERPINA1 gene that results in permanent deletion, insertion, correction, or correction, or modulation of expression or function of one or more exons within or near or affecting the expression or function of the SERPINA1 gene and restoration of alpha-1-antitrypsin (AAT) protein activity.

[0035] In some embodiments, the one or more DNA endonucleases is a Cas1, Cas1B, Cas2, Cas3, Cas4, Cas5, Cas6, Cas7, Cas8, Cas9 (also known as Csn1 and Csx12), Cas100, Csy1, Csy2, Csy3, Cse1, Cse2, Csc1, Csc2, Csa5, Csn2, Csm2, Csm3, Csm4, Csm5, Csm6, Cmr1, Cmr3, Cmr4, Cmr5, Cmr6, Csb1, Csb2, Csb3, Csx17, Csx14, Csx10, Csx16, CsaX, Csx3, Csx1, Csx15, Csf1, Csf2, Csf3, Csf4, or Cpf1 endonuclease; a homolog thereof, recombination of the naturally occurring molecule, codon-optimized, or modified version thereof, and combinations of any of the foregoing.

[0036] In some embodiments, the method comprises introducing into the cell one or more polynucleotides encoding the one or more DNA endonucleases. In some embodiments, the method comprises introducing into the cell one or more ribonucleic acids (RNAs) encoding the one or more DNA endonucleases. In some embodiments, the one or more polynucleotides or one or more RNAs is one or more modified polynucleotides or one or more modified RNAs. In some embodiments, the method comprises introducing into the cell one or more DNA endonucleases wherein the endonuclease is a protein or polypeptide.

[0037] In some embodiments, the method further comprises introducing into the cell one or more guide ribonucleic acids (gRNAs). In some embodiments, the one or more gRNAs are single-molecule guide RNA (sgRNAs). In some embodiments, the one or more gRNAs or one or more sgRNAs is one or more modified gRNAs, one or more modified sgRNAs, or combinations thereof.

[0038] In some embodiments, the one or more DNA endonucleases is pre-complexed with one or more gRNAs or one or more sgRNAs, or combinations thereof.

[0039] In some embodiments, the method further comprises introducing into the cell a polynucleotide donor template comprising a part of the wild-type SERPINA1 gene or minigene (comprised of, natural or synthetic enhancer and promoter, one or more exons, and natural or synthetic introns, and natural or synthetic 3′UTR and polyadenylation signal), DNA sequences that encode wild-type regulatory elements of the SERPINA1 gene, and/or cDNA. In some embodiments, the part of the wild-type SERPINA1 gene or cDNA can be exon 1, exon 2, exon 3, exon 4, exon 5, intronic regions, fragments or combinations thereof, or the entire SERPINA1 gene or cDNA. In some embodiments, the donor template is either a single or double stranded polynucleotide. In some embodiments, the donor template has homologous arms to the 14q32.13 region.

[0040] In some embodiments, the method further comprises introducing into the cell one guide ribonucleic acid (gRNA) and a polynucleotide donor template comprising at least a portion of the wild-type SERPINA1 gene. In some embodiments, the method further comprises introducing into the cell one guide ribonucleic acid (gRNA) and a polynucleotide donor template comprising at least a portion of a codon optimized or modified SERPINA1 gene. The one or more DNA endonucleases is one or more Cas9 endonucleases that effect one double-strand break (DSB) at a DSB locus within or near the SERPINA1 gene (or codon optimized or modified SERPINA1 gene) or other DNA sequences that encode regulatory elements of the SERPINA1 gene, or within or near a safe harbor locus that facilitates insertion of a new sequence from the polynucleotide donor template into the chromosomal DNA at the locus or safe harbor locus that results in a permanent insertion or correction of a part of the chromosomal DNA of the SERPINA1 gene or other DNA sequences that encode regulator elements of the SERPINA1 gene proximal to the locus or safe harbor locus and restoration of AAT protein activity. In some embodiments, the gRNA comprises a spacer sequence that is complementary to a segment of the locus or safe harbor locus. In some embodiments, proximal means nucleotides both upstream and downstream of the locus or safe harbor locus.

[0041] In some embodiments, the method further comprises introducing into the cell two guide ribonucleic acid (gRNAs) and a polynucleotide donor template comprising at least a portion of the wild-type SERPINA1 gene, and wherein the one or more DNA endonucleases is two or more Cas9 endonucleases that effect a pair of double-strand breaks (DSBs), the first at a 5′ DSB locus and the second at a 3′ DSB locus, within or near the SERPINA1 gene or other DNA sequences that encode regulatory elements of the SERPINA1 gene, or within or near a safe harbor locus that facilitates insertion of a new sequence from the polynucleotide donor template into the chromosomal DNA between the 5′ DSB locus and the 3′ DSB locus that results in permanent insertion or correction of the chromosomal DNA between the 5′ DSB locus and the 3′ DSB locus within or near the SERPINA1 gene or other DNA sequences that encode regulatory elements of the SERPINA1 gene, or within or near a safe harbor locus and restoration of AAT protein activity, and wherein the first guide RNA comprises a spacer sequence that is complementary to a segment of the 5′ DSB locus and the second guide RNA comprises a spacer sequence that is complementary to a segment of the 3′ DSB locus.

[0042] In some embodiments, the one or more gRNAs are one or more single-molecule guide RNA (sgRNAs). In some embodiments, the one or more gRNAs or one or more sgRNAs is one or more modified gRNAs or one or more modified sgRNAs.

[0043] In some embodiments, the one or more DNA endonucleases is pre-complexed with one or more gRNAs or one or more sgRNAs.

[0044] In some embodiments, the part of the wild-type SERPINA1 gene or cDNA is the entire SERPINA1 gene or cDNA.

[0045] In some embodiments, the donor template is either single or double stranded. In some embodiments, the donor template has homologous arms to the 14q32.13 region.

[0046] In some embodiments, the DSB, or 5′ DSB and 3′ DSB are in the first exon, first intron, or both the first exon and first intron of the SERPINA1 gene.

[0047] In some embodiments, the gRNA or sgRNA is directed to one or more of the following pathological variants: rs764325655, rs121912713, rs28929474, rs17580, rs121912714, rs764220898, rs199422211, rs751235320, rs199422210, rs267606950, rs55819880, rs28931570.

[0048] In some embodiments, the insertion or correction is by homology directed repair (HDR).

[0049] In some embodiments, the method further comprises introducing into the cell two guide ribonucleic acid (gRNAs), and wherein the one or more DNA endonucleases is two or more Cas9 endonucleases that effect a pair of double-strand breaks (DSBs), the first at a 5′ DSB locus and the second at a 3′ DSB locus, within or near the SERPINA1 gene or other DNA sequences that encode regulatory elements of the SERPINA1 gene, or within or near a safe harbor locus that causes a deletion of the chromosomal DNA between the 5′ DSB locus and the 3′ DSB locus that results in permanent deletion of the chromosomal DNA between the 5′ DSB locus and the 3′ DSB locus within or near the SERPINA1 gene or other DNA sequences that encode regulatory elements of the SERPINA1 gene, or within or near a safe harbor locus and restoration of AAT protein activity, and wherein the first guide RNA comprises a spacer sequence that is complementary to a segment of the 5′ DSB locus and the second guide RNA comprises a spacer sequence that is complementary to a segment of the 3′ DSB locus.

[0050] In some embodiments, the two gRNAs are two single-molecule guide RNA (sgRNAs). In some embodiments, the two gRNAs or two sgRNAs are two modified gRNAs or two modified sgRNAs.

[0051] In some embodiments, the one or more DNA endonucleases is pre-complexed with one or two gRNAs or one or two sgRNAs.

[0052] In some embodiments, both the 5′ DSB and 3′ DSB are in or near either the first exon, second exon, third exon, fourth exon or fifth exon or introns of the SERPINA1 gene.

[0053] In some embodiments, the correction is by homology directed repair (HDR).

[0054] In some embodiments, the deletion is a deletion of 1 kb or less.

[0055] In some embodiments, the Cas9 or Cpf1 mRNA, gRNA, and donor template are either each formulated separately into lipid nanoparticles or all co-formulated into a lipid nanoparticle.

[0056] In some embodiments, the Cas9 or Cpf1 mRNA, gRNA, and donor template are formulated into separate exosomes or are co-formulated into an exosome.

[0057] In some embodiments, the Cas9 or Cpf1 mRNA is formulated into a lipid nanoparticle, and both the gRNA and donor template are delivered to the cell by a viral vector. In some embodiments, the viral vector is an adeno-associated virus (AAV) vector. In some embodiments, the AAV vector is an AAV6 vector.

[0058] The Cas9 or Cpf1 mRNA can be formulated into a lipid nanoparticle, and the gRNA can be delivered to the cell by electroporation and donor template can be delivered to the cell by a viral vector. In some embodiments, the viral vector is an adeno-associated virus (AAV) vector. In some embodiments, the AAV vector is an AAV6 vector.

[0059] In some embodiments, the SERPINA1 gene is located on Chromosome 14: 1,493,319-1,507,264 (Genome Reference Consortium—GRCh38/hg38).

[0060] The restoration of AAT protein activity can be compared to wild-type or normal AAT protein activity.

[0061] In another aspect, provided herein is one or more guide ribonucleic acids (gRNAs) comprising a spacer sequence selected from the group consisting of the nucleic acid sequences in Examples 1-6 and in SEQ ID NOs 54,860-68,297: for editing the SERPINA1 gene in a cell from a patient with alpha-1 antitrypsin deficiency. In some embodiments, the one or more gRNAs are one or more single-molecule guide RNAs (sgRNAs). In some embodiments, the one or more gRNAs or one or more sgRNAs is one or more modified gRNAs or one or more modified sgRNAs.

[0062] In another aspect, provided herein is one or more guide ribonucleic acids (gRNAs) comprising a spacer sequence selected from the group consisting of the nucleic acid sequences in SEQ ID NOs: 1-54,859 for editing a safe harbor locus in a cell from a patient with alpha-1 antitrypsin deficiency, wherein the safe harbor locus is selected from the group consisting of AAVS1 (PPP1R12C), ALB, Angptl3, ApoC3, ASGR2, CCR5, FIX (F9), G6PC, Gys2, HGD, Lp(a), Pcsk9, Serpina1, TF, and TTR. In some embodiments, the one or more gRNAs are one or more single-molecule guide RNAs (sgRNAs). In some embodiments, the one or more gRNAs or one or more sgRNAs is one or more modified gRNAs or one or more modified sgRNAs.

[0063] In another aspect, provided herein are cells that have been modified by the preceding methods to permanently correct one or more mutations within the SERPINA1 gene and restore AAT protein activity. Further provided herein are methods for ameliorating Alpha-1 Antitrypsin Deficiency (AATD) by the administration of cells that have been modified by the preceding methods to an AATD patient.

[0064] In some embodiments, the methods and compositions of the disclosure comprise one or more modified guide ribonucleic acids (gRNAs). Non-limiting examples of modifications can comprise one or more nucleotides modified at the 2′ position of the sugar, in some embodiments a 2′-O-alkyl, 2′-O-alkyl-O-alkyl, or 2′-fluoro-modified nucleotide. In some embodiments, RNA modifications include 2′-fluoro, 2′-amino or 2′ O-methyl modifications on the ribose of pyrimidines, abasic residues, desoxy nucleotides, or an inverted base at the 3′ end of the RNA.

[0065] In some embodiments, the one or more modified guide ribonucleic acids (gRNAs) comprise a modification that makes the modified gRNA more resistant to nuclease digestion than the native oligonucleotide. Non-limiting examples of such modifications include those comprising modified backbones, for example, phosphorothioates, phosphorothyos, phosphotriesters, methyl phosphonates, short chain alkyl or cycloalkyl intersugar linkages or short chain heteroatomic or heterocyclic intersugar linkages.

[0066] Various other aspects are described and exemplified herein.

### BRIEF DESCRIPTION OF THE DRAWINGS

[0067] Various aspects of materials and methods for treatment of Alpha-1 Antitrypsin Deficiency (AATD) disclosed and described in this specification can be better understood by reference to the accompanying figures, in which:

[0068] FIG. 1A is an illustration of a plasmid (referred to herein as “CTx-1”) comprising a codon optimized gene for S. pyogenes Cas9 endonuclease. The CTx-1 plasmid also comprises a gRNA scaffold sequence, which includes a 20 bp spacer sequence from the sequences listed in Examples 1 and 8.

[0069] FIG. 1B is an illustration of a plasmid (referred to herein as “CTx-2”) comprising a different codon optimized gene for S. pyogenes Cas9 endonuclease. The CTx-2 plasmid also comprises a gRNA scaffold sequence, which includes a 20 bp spacer sequence from the sequences listed in Examples 1 and 8.

[0070] FIG. 1C is an illustration of a plasmid (referred to herein as “CTx-3”) comprising yet another different codon optimized gene for S. pyogenes Cas9 endonuclease. The CTx-3 plasmid also comprises a gRNA scaffold sequence, which includes a 20 bp spacer sequence from the sequences listed in Examples 1 and 8.

[0071] FIG. 2A is an illustration depicting the type II CRISPR/Cas system.

[0072] FIG. 2B is another illustration depicting the type II CRISPR/Cas system.

[0073] FIG. 3 is a graph depicting cutting efficiencies of gRNAs transcribed in vitro and transfected using messenger Max into HEK293T cells that constitutively express Cas9, as evaluated using TIDE analysis.

### BRIEF DESCRIPTION OF THE SEQUENCE LISTING

[0074] SEQ ID NOs: 1-2,032 are 20 bp spacer sequences for targeting an AAVS1 (PPP1R12C) gene with a S. pyogenes Cas9 endonuclease.

[0075] SEQ ID NOs: 2,033-2,203 are 20 bp spacer sequences for targeting an AAVS1 (PPP1R12C) gene with a S. aureus Cas9 endonuclease.

[0076] SEQ ID NOs: 2,204-2,221 are 20 bp spacer sequences for targeting an AAVS1 (PPP1R12C) gene with a S. thermophilus Cas9 endonuclease.

[0077] SEQ ID NOs: 2,222-2,230 are 20 bp spacer sequences for targeting an AAVS1 (PPP1R12C) gene with a T. denticola Cas9 endonuclease.

[0078] SEQ ID NOs: 2,231-2,305 are 20 bp spacer sequences for targeting an AAVS1 (PPP1R12C) gene with a N. meningitides Cas9 endonuclease.

[0079] SEQ ID NOs: 2,306-3,481 are 22 bp spacer sequences for targeting an AAVS1 (PPP1R12C) gene with an Acidaminococcus, Lachnospiraceae, and Francisella novicida Cpf1 endonuclease.

[0080] SEQ ID NOs: 3,482-3,649 are 20 bp spacer sequences for targeting an Alb gene with a S. pyogenes Cas9 endonuclease.

[0081] SEQ ID NOs: 3,650-3,677 are 20 bp spacer sequences for targeting an Alb gene with a S. aureus Cas9 endonuclease.

[0082] SEQ ID NOs: 3,678-3,695 are 20 bp spacer sequences for targeting an Alb gene with a S. thermophilus Cas9 endonuclease.

[0083] SEQ ID NOs: 3,696-3,700 are 20 bp spacer sequences for targeting an Alb gene with a T. denticola Cas9 endonuclease.

[0084] SEQ ID NOs: 3,701-3,724 are 20 bp spacer sequences for targeting an Alb gene with a N. meningitides Cas9 endonuclease.

[0085] SEQ ID NOs: 3,725-4,103 are 22 bp spacer sequences for targeting an Alb gene with an Acidaminococcus, Lachnospiraceae, and Francisella novicida Cpf1 endonuclease.

[0086] SEQ ID NOs: 4, 104-4,448 are 20 bp spacer sequences for targeting an Angpt13 gene with a S. pyogenes Cas9 endonuclease.

[0087] SEQ ID NOs: 4,449-4,484 are 20 bp spacer sequences for targeting an Angpt13 gene with a S. aureus Cas9 endonuclease.

[0088] SEQ ID NOs: 4,485-4,507 are 20 bp spacer sequences for targeting an Angpt13 gene with a S. thermophilus Cas9 endonuclease.

[0089] SEQ ID NOs: 4,508-4,520 are 20 bp spacer sequences for targeting an Angpt13 gene with a T. denticola Cas9 endonuclease.

[0090] SEQ ID NOs: 4,521-4,583 are 20 bp spacer sequences for targeting an Angpt13 gene with a N. meningitides Cas9 endonuclease.

[0091] SEQ ID NOs: 4,584-5,431 are 22 bp spacer sequences for targeting an Angpt13 gene with an Acidaminococcus, Lachnospiraceae, and Francisella novicida Cpf1 endonuclease.

[0092] SEQ ID NOs: 5,432-5,834 are 20 bp spacer sequences for targeting an ApoC3 gene with a S. pyogenes Cas9 endonuclease.

[0093] SEQ ID NOs: 5,835-5,859 are 20 bp spacer sequences for targeting an ApoC3 gene with a S. aureus Cas9 endonuclease.

[0094] SEQ ID NOs: 5,860-5,862 are 20 bp spacer sequences for targeting an ApoC3 gene with a S. thermophilus Cas9 endonuclease.

[0095] SEQ ID NOs: 5,863-5,864 are 20 bp spacer sequences for targeting an ApoC3 gene with a T. denticola Cas9 endonuclease.

[0096] SEQ ID NOs: 5,865-5,876 are 20 bp spacer sequences for targeting an ApoC3 gene with a N. meningitides Cas9 endonuclease.

[0097] SEQ ID NOs: 5,877-6,108 are 22 bp spacer sequences for targeting an ApoC3 gene with an Acidaminococcus, Lachnospiraceae, and Francisella novicida Cpf1 endonuclease.

[0098] SEQ ID NOs: 6,109-7,876 are 20 bp spacer sequences for targeting an ASGR2 gene with a S. pyogenes Cas9 endonuclease.

[0099] SEQ ID NOs: 7,877-8,082 are 20 bp spacer sequences for targeting an ASGR2 gene with a S. aureus Cas9 endonuclease.

[0100] SEQ ID NOs: 8,083-8, 106 are 20 bp spacer sequences for targeting an ASGR2 gene with a S. thermophilus Cas9 endonuclease.

[0101] SEQ ID NOs: 8,107-8,118 are 20 bp spacer sequences for targeting an ASGR2 gene with a T. denticola Cas9 endonuclease.

[0102] SEQ ID NOs: 8,119-8,201 are 20 bp spacer sequences for targeting an ASGR2 gene with a N. meningitides Cas9 endonuclease.

[0103] SEQ ID NOs: 8,202-9,641 are 22 bp spacer sequences for targeting an ASGR2 gene with an Acidaminococcus, Lachnospiraceae, and Francisella novicida Cpf1 endonuclease.

[0104] SEQ ID NOs: 9,642-9,844 are 20 bp spacer sequences for targeting a CCR5 gene with a S. pyogenes Cas9 endonuclease.

[0105] SEQ ID NOs: 9,845-9,876 are 20 bp spacer sequences for targeting a CCR5 gene with a S. aureus Cas9 endonuclease.

[0106] SEQ ID NOs: 9,877-9,890 are 20 bp spacer sequences for targeting a CCR5 gene with a S. thermophilus Cas9 endonuclease.

[0107] SEQ ID NOs: 9,891-9,892 are 20 bp spacer sequences for targeting a CCR5 gene with a T. denticola Cas9 endonuclease.

[0108] SEQ ID NOs: 9,893-9,920 are 20 bp spacer sequences for targeting a CCR5 gene with a N. meningitides Cas9 endonuclease.

[0109] SEQ ID NOs: 9,921-10,220 are 22 bp spacer sequences for targeting a CCR5 gene with an Acidaminococcus, Lachnospiraceae, and Francisella novicida Cpf1 endonuclease.

[0110] SEQ ID NOs: 10,221-11,686 are 20 bp spacer sequences for targeting an F9 gene with a S. pyogenes Cas9 endonuclease.

[0111] SEQ ID NOs: 11,687-11,849 are 20 bp spacer sequences for targeting an F9 gene with a S. aureus Cas9 endonuclease.

[0112] SEQ ID NOs: 11,850-11,910 are 20 bp spacer sequences for targeting an F9 gene with a S. thermophilus Cas9 endonuclease.

[0113] SEQ ID NOs: 11,911-11,935 are 20 bp spacer sequences for targeting an F9 gene with a T. denticola Cas9 endonuclease.

[0114] SEQ ID NOs: 11,936-12,088 are 20 bp spacer sequences for targeting an F9 gene with a N. meningitides Cas9 endonuclease.

[0115] SEQ ID NOs: 12,089-14,229 are 22 bp spacer sequences for targeting an F9 gene with an Acidaminococcus, Lachnospiraceae, and Francisella novicida Cpf1 endonuclease.

[0116] SEQ ID NOs: 14,230-15,245 are 20 bp spacer sequences for targeting a G6PC gene with a S. pyogenes Cas9 endonuclease.

[0117] SEQ ID NOs: 15,246-15,362 are 20 bp spacer sequences for targeting a G6PC gene with a S. aureus Cas9 endonuclease.

[0118] SEQ ID NOs: 15,363-15,386 are 20 bp spacer sequences for targeting a G6PC gene with a S. thermophilus Cas9 endonuclease.

[0119] SEQ ID NOs: 15,387-15,395 are 20 bp spacer sequences for targeting a G6PC gene with a T. denticola Cas9 endonuclease.

[0120] SEQ ID NOs: 15,396-15,485 are 20 bp spacer sequences for targeting a G6PC gene with a N. meningitides Cas9 endonuclease.

[0121] SEQ ID NOs: 15,486-16,580 are 22 bp spacer sequences for targeting a G6PC gene with an Acidaminococcus, Lachnospiraceae, and Francisella novicida Cpf1 endonuclease.

[0122] SEQ ID NOs: 16,581-22,073 are 20 bp spacer sequences for targeting a Gys2 gene with a S. pyogenes Cas9 endonuclease.

[0123] SEQ ID NOs: 22,074-22,749 are 20 bp spacer sequences for targeting a Gys2 gene with a S. aureus Cas9 endonuclease.

[0124] SEQ ID NOs: 22,750-20,327 are 20 bp spacer sequences for targeting a Gys2 gene with a S. thermophilus Cas9 endonuclease.

[0125] SEQ ID NOs: 23,028-23,141 are 20 bp spacer sequences for targeting a Gys2 gene with a T. denticola Cas9 endonuclease.

[0126] SEQ ID NOs: 23, 142-23,821 are 20 bp spacer sequences for targeting a Gys2 gene with a N. meningitides Cas9 endonuclease.

[0127] SEQ ID NOs: 23,822-32,253 are 22 bp spacer sequences for targeting a Gys2 gene with an Acidaminococcus, Lachnospiraceae, and Francisella novicida Cpf1 endonuclease.

[0128] SEQ ID NOs: 32,254-33,946 are 20 bp spacer sequences for targeting an HGD gene with a S. pyogenes Cas9 endonuclease.

[0129] SEQ ID NOs: 33,947-34,160 are 20 bp spacer sequences for targeting an HGD gene with a S. aureus Cas9 endonuclease.

[0130] SEQ ID NOs: 34,161-34,243 are 20 bp spacer sequences for targeting an HGD gene with a S. thermophilus Cas9 endonuclease.

[0131] SEQ ID NOs: 34,244-34,262 are 20 bp spacer sequences for targeting an HGD gene with a T. denticola Cas9 endonuclease.

[0132] SEQ ID NOs: 34,263-34,463 are 20 bp spacer sequences for targeting an HGD gene with a N. meningitides Cas9 endonuclease.

[0133] SEQ ID NOs: 34,464-36,788 are 22 bp spacer sequences for targeting an HGD gene with an Acidaminococcus, Lachnospiraceae, and Francisella novicida Cpf1 endonuclease.

[0134] SEQ ID NOs: 36,789-40,583 are 20 bp spacer sequences for targeting an Lp(a) gene with a S. pyogenes Cas9 endonuclease.

[0135] SEQ ID NOs: 40,584-40,993 are 20 bp spacer sequences for targeting an Lp(a) gene with a S. aureus Cas9 endonuclease.

[0136] SEQ ID NOs: 40,994-41,129 are 20 bp spacer sequences for targeting an Lp(a) gene with a S. thermophilus Cas9 endonuclease.

[0137] SEQ ID NOs: 41,130-41,164 are 20 bp spacer sequences for targeting an Lp(a) gene with a T. denticola Cas9 endonuclease.

[0138] SEQ ID NOs: 41,165-41,532 are 20 bp spacer sequences for targeting an Lp(a) gene with a N. meningitides Cas9 endonuclease.

[0139] SEQ ID NOs: 41,533-46,153 are 22 bp spacer sequences for targeting an Lp(a) gene with an Acidaminococcus, Lachnospiraceae, and Francisella novicida Cpf1 endonuclease.

[0140] SEQ ID NOs: 46, 154-48,173 are 20 bp spacer sequences for targeting a PCSK9 gene with a S. pyogenes Cas9 endonuclease.

[0141] SEQ ID NOs: 48, 174-48,360 are 20 bp spacer sequences for targeting a PCSK9 gene with a S. aureus Cas9 endonuclease.

[0142] SEQ ID NOs: 48,361-48,396 are 20 bp spacer sequences for targeting a PCSK9 gene with a S. thermophilus Cas9 endonuclease.

[0143] SEQ ID NOs: 48,397-48,410 are 20 bp spacer sequences for targeting a PCSK9 gene with a T. denticola Cas9 endonuclease.

[0144] SEQ ID NOs: 48,411-48,550 are 20 bp spacer sequences for targeting a PCSK9 gene with a N. meningitides Cas9 endonuclease.

[0145] SEQ ID NOs: 48,551-50,344 are 22 bp spacer sequences for targeting a PCSK9 gene with an Acidaminococcus, Lachnospiraceae, and Francisella novicida Cpf1 endonuclease.

[0146] SEQ ID NOs: 50,345-51,482 are 20 bp spacer sequences for targeting a Serpina1 gene as a safe harbor locus with a S. pyogenes Cas9 endonuclease.

[0147] SEQ ID NOs: 51,483-51,575 are 20 bp spacer sequences for targeting a Serpina1 gene as a safe harbor locus with a S. aureus Cas9 endonuclease.

[0148] SEQ ID NOs: 51,576-51,587 are 20 bp spacer sequences for targeting a Serpina1 gene as a safe harbor locus with a S. thermophilus Cas9 endonuclease.

[0149] SEQ ID NOs: 51,588-51,590 are 20 bp spacer sequences for targeting a Serpina1 gene as a safe harbor locus with a T. denticola Cas9 endonuclease.

[0150] SEQ ID NOs: 51,591-51,641 are 20 bp spacer sequences for targeting a Serpina1 gene as a safe harbor locus with a N. meningitides Cas9 endonuclease.

[0151] SEQ ID NOs: 51,642-52,445 are 22 bp spacer sequences for targeting a Serpina1 gene as a safe harbor locus with an Acidaminococcus, Lachnospiraceae, and Francisella novicida Cpf1 endonuclease.

[0152] SEQ ID NOs: 52,446-53,277 are 20 bp spacer sequences for targeting a TF gene with a S. pyogenes Cas9 endonuclease.

[0153] SEQ ID NOs: 53,278-53,363 are 20 bp spacer sequences for targeting a TF gene with a S. aureus Cas9 endonuclease.

[0154] SEQ ID NOs: 53,364-53,375 are 20 bp spacer sequences for targeting a TF gene with a S. thermophilus Cas9 endonuclease.

[0155] SEQ ID NOs: 53,376-53,382 are 20 bp spacer sequences for targeting a TF gene with a T. denticola Cas9 endonuclease.

[0156] SEQ ID NOs: 53,383-53,426 are 20 bp spacer sequences for targeting a TF gene with a N. meningitides Cas9 endonuclease.

[0157] SEQ ID NOs: 53,427-54,062 are 22 bp spacer sequences for targeting a TF gene with an Acidaminococcus, Lachnospiraceae, and Francisella novicida Cpf1 endonuclease.

[0158] SEQ ID NOs: 54,063-54,362 are 20 bp spacer sequences for targeting a TTR gene with a S. pyogenes Cas9 endonuclease.

[0159] SEQ ID NOs: 54,363-54,403 are 20 bp spacer sequences for targeting a TTR gene with a S. aureus Cas9 endonuclease.

[0160] SEQ ID NOs: 54,404-54,420 are 20 bp spacer sequences for targeting a TTR gene with a S. thermophilus Cas9 endonuclease.

[0161] SEQ ID NOs: 54,421-54,422 are 20 bp spacer sequences for targeting a TTR gene with a T. denticola Cas9 endonuclease.

[0162] SEQ ID NOs: 54,423-54,457 are 20 bp spacer sequences for targeting a TTR gene with a N. meningitides Cas9 endonuclease.

[0163] SEQ ID NOs: 54,458-54,859 are 22 bp spacer sequences for targeting a TTR gene with an Acidaminococcus, Lachnospiraceae, and Francisella novicida Cpf1 endonuclease.

[0164] SEQ ID NOs: 54,860-61,324 are 20 bp spacer sequences for targeting a SERPINA1 gene (other than as a safe harbor locus) with a S. pyogenes Cas9 endonuclease.

[0165] SEQ ID NOs: 61,325-61,936 are 20 bp spacer sequences for targeting a SERPINA1 gene (other than as a safe harbor locus) with a S. aureus Cas9 endonuclease.

[0166] SEQ ID NOs: 61,937-62,069 are 20 bp spacer sequences for targeting a SERPINA1 gene (other than as a safe harbor locus) with a S. thermophilus Cas9 endonuclease.

[0167] SEQ ID NOs: 62,070-62,120 are 20 bp spacer sequences for targeting a SERPINA1 gene (other than as a safe harbor locus) with a T. denticola Cas9 endonuclease.

[0168] SEQ ID NOs: 62, 121-62,563 are 20 bp spacer sequences for targeting a SERPINA1 gene (other than as a safe harbor locus) with a N. meningitides Cas9 endonuclease.

[0169] SEQ ID NOs: 62,564-68,297 are 22 bp spacer sequences for targeting a SERPINA1 gene (other than as a safe harbor locus) with an Acidaminococcus, Lachnospiraceae, and Francisella novicida Cpf1 endonuclease.

### DETAILED DESCRIPTION

### Alpha-1 Antitrypsin Deficiency (AATD)

[0170] AATD is caused by mutations, or more rarely by deletions, to the SERPINA1 gene. The SERPINA1 gene is located at 14q32.13, with genomic coordinates (GRCh38) at chr14:1,493,319-1,507,264. SERPINA1 is comprised of five exons and has a total length of 12.2 kb. The gene has two promoters, with one controlling expression in macrophages. Multiple transcript variants have been reported; however, they all encode the same AAT protein. About 95% of AATD results from pathological alleles PI Z or PI S or their combination.

[0171] The SERPINA1 gene encodes alpha-1-antitrypsin (AAT), also known as protease inhibitor (PI), a major plasma serine protease inhibitor. AAT complexes predominantly with elastase, but also with other serine proteases. An important inhibitory action of AAT is against neutrophil elastase, a protease that degrades elastin of the alveolar walls as well as other structural proteins in a variety of tissues.

### Therapeutic Approach

[0172] As the known forms of AATD are monogenic disorders with recessive inheritance, it is likely that correcting one of the mutant alleles per cell will be sufficient for correction and restoration or partial restoration of AATD function. The correction of one allele can coincide with one copy that remains with the original mutation, or a copy that was cleaved and repaired by non-homologous end joining (NHEJ) and therefore was not properly corrected. Bi-allelic correction can also occur. Various editing strategies that can be employed for specific mutations are discussed below.

[0173] Correction of one or possibly both of the mutant alleles provides an important improvement over existing or potential therapies, such as introduction of SERPINA1 expression cassettes through lentivirus delivery and integration. Gene editing has the advantage of precise genome modification and lower adverse effects, for example, the mutation can be corrected by the insertions or deletions that arise due to the NHEJ repair pathway. If the patient's SERPINA1 gene has an inserted or deleted base, a targeted cleavage can result in a NHEJ-mediated insertion or deletion that restores the frame. Missense mutations can also be corrected through NHEJ-mediated correction using one or more guide RNA. The ability or likelihood of the cut(s) to correct the mutation can be designed or evaluated based on the local sequence and micro-homologies. NHEJ can also be used to delete segments of the gene, either directly or by altering splice donor or acceptor sites through cleavage by one gRNA targeting several locations, or several gRNAs. This may be useful if an amino acid, domain or exon contains the mutations and can be removed or inverted, or if the deletion otherwise restored function to the protein. Pairs of guide strands have been used for deletions and corrections of inversions.

[0174] Alternatively, the donor for correction by HDR contains the corrected sequence with small or large flanking homology arms to allow for annealing. HDR is essentially an error-free mechanism that uses a supplied homologous DNA sequence as a template during DSB repair. The rate of HDR is a function of the distance between the mutation and the cut site so choosing overlapping or nearby target sites is important. Templates can include extra sequences flanked by the homologous regions or can contain a sequence that differs from the genomic sequence, thus allowing sequence editing.

[0175] In addition to correcting mutations by NHEJ or HDR, a range of other options are possible. If there are small or large deletions or multiple mutations, a cDNA can be knocked in that contains the exons affected. A full length cDNA can be knocked into any “safe harbor”—i.e., non-deleterious insertion point that is not the SERPINA1 gene itself—, with or without suitable regulatory sequences. If this construct is knocked-in near the SERPINA1 regulatory elements, it should have physiological control, similar to the normal gene. Two or more (e.g., a pair) nucleases can be used to delete mutated gene regions, though a donor would usually have to be provided to restore function. In this case two gRNA and one donor sequence would be supplied.

[0176] Provided herein are methods to correct the specific mutation in the gene by inducing a double stranded break with Cas9 and a sgRNA or a pair of double stranded breaks around the mutation using two appropriate sgRNAs, and to provide a donor DNA template to induce Homology-Directed Repair (HDR). In some embodiments, the donor DNA template can be a short single stranded oligonucleotide, a short double stranded oligonucleotide, a long single or double stranded DNA molecule. These methods use gRNAs and donor DNA molecules for each of the variants of SERPINA1.

[0177] Provided herein are methods to knock-in SERPINA1 cDNA or a minigene (comprised of one or more exons and introns or natural or synthetic introns) into the locus of the corresponding gene. These methods use a pair of sgRNA targeting the first exon and/or the first intron of the SERPINA1 gene. In some embodiments, the donor DNA is single or double stranded DNA having homologous arms to the 17q21 region.

[0178] Provided herein are methods to knock-in SERPINA1 cDNA or a minigene (comprised of one or more exons and introns or natural or synthetic introns) into the locus of the hot-spot, e.g., ALB gene. These methods use a pair of sgRNA targeting the first exon and/or the first intron of the gene located in the liver hotspot. In some embodiments, the donor DNA is single or double stranded DNA having homologous arms to the corresponding region.

[0179] Provided herein are cellular, ex vivo and in vivo methods for using genome engineering tools to create permanent changes to the genome by: 1) correcting, by insertions or deletions that arise due to the imprecise NHEJ pathway, one or more mutations within or near the SERPINA1 gene or other DNA sequences that encode regulatory elements of the SERPINA1 gene, 2) correcting, by HDR, one or more mutations within or near the SERPINA1 gene or other DNA sequences that encode regulatory elements of the SERPINA1 gene, or 3) deletion of the mutant region and/or knocking-in SERPINA1 cDNA or minigene (comprised of, natural or synthetic enhancer and promoter, one or more exons, and natural or synthetic introns, and natural or synthetic 3′UTR and polyadenylation signal) into the gene locus or a safe harbor locus of the SERPINA1 gene, and restoring AAT protein activity. Such methods use endonucleases, such as CRISPR-associated (CRISPR/Cas9, Cpf1, and the like) nucleases, to permanently delete, insert, edit, correct, or replace one or more exons or portions thereof (i.e., mutations within or near the coding and/or splicing sequences) or insert in the genomic locus of the SERPINA1 gene or other DNA sequences that encode regulatory elements of the SERPINA1 gene. In this way, examples set forth in the present disclosure can help to restore the reading frame or the wild-type sequence of, or otherwise correct, the gene with a single treatment (rather than deliver potential therapies for the lifetime of the patient). SERPINA1 gene.

[0180] Provided herein are methods for treating a patient with AATD. An embodiment of such method is an ex vivo cell based therapy. For example, a patient specific induced pluripotent stem cell (iPSC) is created. Then, the chromosomal DNA of these iPS cells is edited using the materials and methods described herein. Next, the genome-edited iPSCs are differentiated into hepatocytes. Finally, the hepatocytes are implanted into the patient.

[0181] Another embodiment of such method is an ex vivo cell based therapy. For example, a biopsy of the patient's liver is performed. Then, a liver specific progenitor cell or primary hepatocyte is isolated from the patient, e.g., by a biopsy. Next, the chromosomal DNA of these progenitor cells or primary hepatocytes is edited using the materials and methods described herein. Finally, the genome-edited progenitor cells or primary hepatocytes are implanted into the patient.

[0182] Yet another embodiment of such method is an ex vivo cell based therapy. For example, a biopsy of the patient's bone marrow is performed. Then, a mesenchymal stem cell is isolated from the patient, which can be isolated from the patient's bone marrow, e.g., by biopsy, or peripheral blood. Next, the chromosomal DNA of these mesenchymal stem cells is edited using the materials and methods described herein. Next, the genome-edited mesenchymal stem cells are differentiated into hepatocytes. Finally, these hepatocytes are implanted into the patient.

[0183] One advantage of an ex vivo cell therapy approach is the ability to conduct a comprehensive analysis of the therapeutic prior to administration. All nuclease based therapeutics have some level of off-target effects. Performing gene correction ex vivo allows one to fully characterize the corrected cell population prior to implantation. Aspects of the invention include sequencing the entire genome of the corrected cells to ensure that the off-target cuts, if any, are in genomic locations associated with minimal risk to the patient. Furthermore, populations of specific cells, including clonal populations, can be isolated prior to implantation.

[0184] Another advantage of ex vivo cell therapy relates to genetic correction in iPSCs compared to other primary cell sources. iPSCs are prolific, making it easy to obtain the large number of cells that will be required for a cell based therapy. Furthermore, iPSCs are an ideal cell type for performing clonal isolations. This allows screening for the correct genomic correction, without risking a decrease in viability. In contrast, other potential cell types, such as primary hepatocytes, are viable for only a few passages and difficult to clonally expand. Thus, manipulation of AATD iPSCs will be much easier, and will shorten the amount of time needed to make the desired genetic correction.

[0185] Another embodiment of such method is an in vivo based therapy. In this method, the chromosomal DNA of the cells in the patient is corrected using the materials and methods described herein.

[0186] An advantage of in vivo gene therapy is the ease of therapeutic production and administration. The same therapeutic approach and therapy will have the potential to be used to treat more than one patient, for example a number of patients who share the same or similar genotype or allele. In contrast, ex vivo cell therapy typically requires using a patient's own cells, which are isolated, manipulated and returned to the same patient.

[0187] Also provided herein is a cellular method for editing the SERPINA1 gene in a cell by genome editing. For example, a cell is isolated from a patient or animal. Then, the chromosomal DNA of the cell is edited using the materials and methods described herein.

[0188] The methods of the invention, regardless of whether a cellular or ex vivo or in vivo method, involves one or a combination of the following: 1) correcting, by insertions or deletions that arise due to the imprecise NHEJ pathway, one or more mutations within or near the SERPINA1 gene or other DNA sequences that encode regulatory elements of the SERPINA1 gene, 2) correcting, by HDR, one or more mutations within or near the SERPINA1 gene or other DNA sequences that encode regulatory elements of the SERPINA1 gene, or 3) deletion of the mutant region and/or knocking in SERPINA1 cDNA or a minigene (comprised of one or more exons or introns or natural or synthetic introns) or introducing exogenous SERPINA1 DNA or cDNA sequence or a fragment thereof into the locus of the gene or at a heterologous location in the genome (such as a safe harbor locus, such as, e.g., targeting an AAVS1 (PPP1R12C), an ALB gene, an Angptl3 gene, an ApoC3 gene, an ASGR2 gene, a CCR5 gene, a FIX (F9) gene, a G6PC gene, a Gys2 gene, an HGD gene, a Lp(a) gene, a Pcsk9 gene, a Serpina1 gene, a TF gene, and a TTR gene). Assessment of efficiency of HDR mediated knock-in of cDNA into the first exon can utilize cDNA knock-in into “safe harbor” sites such as: single-stranded or double-stranded DNA having homologous arms to one of the following regions, for example: ApoC3 (chr11:116829908-116833071), Angptl3 (chr1:62,597,487-62,606,305), Serpina1 (chr14:94376747-94390692), Lp(a) (chr6:160531483-160664259), Pcsk9 (chr1:55,039,475-55,064,852), FIX (chrX:139,530,736-139,563,458), ALB (chr4:73,404,254-73,421,411), TTR (chr18:31,591,766-31,599,023), TF (chr3:133,661,997-133,779,005), G6PC (chr17:42,900,796-42,914,432), Gys2 (chr12:21,536,188-21,604,857), AAVS1(PPP1R12C) (chr19:55,090,912-55,117,599), HGD (chr3:120,628,167-120,682,570), CCR5 (chr3:46,370,854-46,376,206), ASGR2 (chr17:7,101,322-7,114,310). Both the correction and knock-in strategies utilize a donor DNA template in Homology-Directed Repair (HDR). HDR in either strategy may be accomplished by making one or more double-stranded breaks (DSBs) at specific sites in the genome by using one or more endonucleases.

[0189] For example, the NHEJ correction strategy can involve restoring the reading frame in the SERPINA1 gene by inducing one single stranded break or double stranded break in the gene of interest with one or more CRISPR endonucleases and a gRNA (e.g., crRNA+tracrRNA, or sgRNA), or two or more single stranded breaks or double stranded breaks in the gene of interest with two or more CRISPR endonucleases and two or more sgRNAs. This approach can require development and optimization of sgRNAs for the SERPINA1 gene.

[0190] For example, the HDR correction strategy involves restoring the reading frame in the SERPINA1 gene by inducing one double stranded break in the gene of interest with one or more CRISPR endonucleases and gRNA (e.g., crRNA+tracrRNA, or sgRNA), or two or more double stranded breaks in the gene of interest with one or more CRISPR endonucleases and two or more appropriate sgRNAs, in the presence of a donor DNA template introduced exogenously to direct the cellular DSB response to Homology-Directed Repair (the donor DNA template can be a short single stranded oligonucleotide, a short double stranded oligonucleotide, a long single or double stranded DNA molecule). This approach requires development and optimization of gRNAS and donor DNA molecules for the major variant of the SERPINA1 gene (PI Z).

[0191] For example, the knock-in strategy involves knocking-in SERPINA1 cDNA or a minigene (comprised of, natural or synthetic enhancer and promoter, one or more exons, and natural or synthetic introns, and natural or synthetic 3′UTR and polyadenylation signal) into the locus of the gene using a gRNA (e.g., crRNA+tracrRNA, or sgRNA) or a pair of sgRNAs targeting upstream of or in the first or other exon and/or intron of the SERPINA1 gene, or in a safe harbor site (such as AAVS1 (PPP1R12C), ALB, Angptl3, ApoC3, ASGR2, CCR5, FIX (F9), G6PC, Gys2, HGD, Lp(a), Pcsk9, Serpina1, TF, and/or TTR). The donor DNA will be single or double stranded DNA having homologous arms to the 14q32.13 region.

[0192] For example, the deletion strategy involves deleting one or more mutations in one or more of the five exons of the SERPINA1 gene using one or more endonucleases and two or more gRNAs or sgRNAs.

[0193] The advantages for the above strategies (correction and knock-in and deletion) are similar, including in principle both short and long term beneficial clinical and laboratory effects. In addition, it may be that only a low percentage of AAT activity is required to provide therapeutic benefit. Another advantage for all strategies is that most patients have low-level gene and protein activity, therefore suggesting that additional protein expression, for example following gene correction, should not necessarily lead to an immune response against the target gene product. The knock-in approach does provide one advantage over the correction or deletion approach—the ability to treat all patients versus only a subset of patients. While there are common mutations in this gene, there are also many other possible mutations, and using the knock-in method could treat all of them. The other issue with gene editing in this manner is the need for a DNA donor for HDR.

[0194] In addition to the above genome editing strategies, another strategy involves modulating expression, function, or activity of SERPINA1 by editing in the regulatory sequence.

[0195] In addition to the editing options listed above, Cas9 or similar proteins can be used to target effector domains to the same target sites that can be identified for editing, or additional target sites within range of the effector domain. A range of chromatin modifying enzymes, methylases or demethylases can be used to alter expression of the target gene. One possibility is increasing the expression of the AAT protein if the mutation leads to lower activity. These types of epigenetic regulation have some advantages, particularly as they are limited in possible off-target effects.

[0196] A number of types of genomic target sites are present in addition to mutations in the coding and splicing sequences.

[0197] The regulation of transcription and translation implicates a number of different classes of sites that interact with cellular proteins or nucleotides. Often the DNA binding sites of transcription factors or other proteins can be targeted for mutation or deletion to study the role of the site, though they can also be targeted to change gene expression. Sites can be added through non-homologous end joining (NHEJ) or direct genome editing by homology directed repair (HDR). Increased use of genome sequencing, RNA expression and genome-wide studies of transcription factor binding have increased the ability to identify how the sites lead to developmental or temporal gene regulation. These control systems may be direct or may involve extensive cooperative regulation that can require the integration of activities from multiple enhancers. Transcription factors typically bind 6-12 bp-long degenerate DNA sequences. The low level of specificity provided by individual sites suggests that complex interactions and rules are involved in binding and the functional outcome. Binding sites with less degeneracy may provide simpler means of regulation. Artificial transcription factors can be designed to specify longer sequences that have less similar sequences in the genome and have lower potential for off-target cleavage. Any of these types of binding sites can be mutated, deleted or even created to enable changes in gene regulation or expression (Canver, M. C. et al., Nature (2015)).

[0198] Another class of gene regulatory regions having these features is microRNA (miRNA) binding sites. miRNAs are non-coding RNAs that play key roles in post-transcriptional gene regulation. miRNA may regulate the expression of 30% of all mammalian protein-encoding genes. Specific and potent gene silencing by double stranded RNA (RNAi) was discovered, plus additional small noncoding RNA (Canver, M. C. et al., Nature (2015)). The largest class of noncoding RNAs important for gene silencing are miRNAs. In mammals, miRNAs are first transcribed as a long RNA transcripts, which can be separate transcriptional units, part of protein introns, or other transcripts. The long transcripts are called primary miRNA (pri-miRNA) that include imperfectly base-paired hairpin structures. These pri-miRNA are cleaved into one or more shorter precursor miRNAs (pre-miRNAs) by Microprocessor, a protein complex in the nucleus, involving Drosha.

[0199] Pre-miRNAs are short stem loops ˜70 nucleotides in length with a 2-nucleotide 3′-overhang that are exported, into the mature 19-25 nucleotide miRNA:miRNA* duplexes. The miRNA strand with lower base pairing stability (the guide strand) is loaded onto the RNA-induced silencing complex (RISC). The passenger guide strand (marked with *), may be functional, but is usually degraded. The mature miRNA tethers RISC to partly complementary sequence motifs in target m As predominantly found within the untranslated regions (T s) and induces posttranscriptional gene silencing (Bartel, D. P. Cell/136, 215-233 (2009); Saj, A. & Lai, E. C. Curr Opin Genet Dev 21, 504-510 (2011)).

[0200] miRNAs are important in development, differentiation, cell cycle and growth control, and in virtually all biological pathways in mammals and other multicellular organisms. miRNAs are also involved in cell cycle control, apoptosis and stem cell differentiation, hematopoiesis, hypoxia, muscle development, neurogenesis, insulin secretion, cholesterol metabolism, aging, viral replication and immune responses.

[0201] A single miRNA can target hundreds of different mRNA transcripts, while an individual transcript can be targeted by many different miRNAs. More than 28645 microRNAs have been annotated in the latest release of miRBase (v.21). Some miRNAs are encoded by multiple loci, some of which are expressed from tandemly co-transcribed clusters. The features allow for complex regulatory networks with multiple pathways and feedback controls. miRNAs are integral parts of these feedback and regulatory circuits and can help regulate gene expression by keeping protein production within limits (Herranz, H. & Cohen, S. M. Genes Dev 24, 1339-1344 (2010); Posadas, D. M. & Carthew, R. W. Curr Opin Genet Dev 27, 1-6 (2014)).

[0202] miRNA are also important in a large number of human diseases that are associated with abnormal miRNA expression. This association underscores the importance of the miRNA regulatory pathway. Recent miRNA deletion studies have linked miRNA with regulation of the immune responses (Stern-Ginossar, N. et al., Science 317, 376-381 (2007)).

[0203] miRNA also have a strong link to cancer and may play a role in different types of cancer. miRNAs have been found to be downregulated in a number of tumors. miRNA are important in the regulation of key cancer-related pathways, such as cell cycle control and the DNA damage response, and are therefore used in diagnosis and are being targeted clinically. MicroRNAs delicately regulate the balance of angiogenesis, such that experiments depleting all microRNAs suppresses tumor angiogenesis (Chen, S. et al., Genes Dev 28, 1054-1067 (2014)).

[0204] As has been shown for protein coding genes, miRNA genes are also subject to epigenetic changes occurring with cancer. Many miRNA loci are associated with CpG islands increasing their opportunity for regulation by DNA methylation (Weber, B., Stresemann, C., Brueckner, B. & Lyko, F. Cell Cycle 6, 1001-1005 (2007)). The majority of studies have used treatment with chromatin remodeling drugs to reveal epigenetically silenced miRNAs.

[0205] In addition to their role in RNA silencing, miRNA can also activate translation (Posadas, D. M. & Carthew, R. W. Curr Opin Genet Dev 27, 1-6 (2014)). Knocking out these sites may lead to decreased expression of the targeted gene, while introducing these sites may increase expression.

[0206] Individual miRNA can be knocked out most effectively by mutating the seed sequence (bases 2-8 of the microRNA), which is important for binding specificity. Cleavage in this region, followed by mis-repair by NHEJ can effectively abolish miRNA function by blocking binding to target sites. miRNA could also be inhibited by specific targeting of the special loop region adjacent to the palindromic sequence. Catalytically inactive Cas9 can also be used to inhibit shRNA expression (Zhao, Y. et al., Sci Rep 4, 3943 (2014)). In addition to targeting the miRNA, the binding sites can also be targeted and mutated to prevent the silencing by miRNA.

### Human Cells

[0207] For ameliorating AATD, as described and illustrated herein, the principal targets for gene editing are human cells. For example, in the ex vivo methods, the human cells are somatic cells, which after being modified using the techniques as described, can give rise to hepatocytes or progenitor cells. For example, in the in vivo methods, the human cells are hepatocytes, renal cells or cells from other affected organs.

[0208] By performing gene editing in autologous cells that are derived from and therefore already completely matched with the patient in need, it is possible to generate cells that can be safely re-introduced into the patient, and effectively give rise to a population of cells that will be effective in ameliorating one or more clinical conditions associated with the patient's disease.

[0209] Progenitor cells (also referred to as stem cells herein) are capable of both proliferation and giving rise to more progenitor cells, these in turn having the ability to generate a large number of mother cells that can in turn give rise to differentiated or differentiable daughter cells. The daughter cells themselves can be induced to proliferate and produce progeny that subsequently differentiate into one or more mature cell types, while also retaining one or more cells with parental developmental potential. The term “stem cell” refers then, to a cell with the capacity or potential, under particular circumstances, to differentiate to a more specialized or differentiated phenotype, and which retains the capacity, under certain circumstances, to proliferate without substantially differentiating. In one embodiment, the term progenitor or stem cell refers to a generalized mother cell whose descendants (progeny) specialize, often in different directions, by differentiation, e.g., by acquiring completely individual characters, as occurs in progressive diversification of embryonic cells and tissues. Cellular differentiation is a complex process typically occurring through many cell divisions. A differentiated cell may derive from a multipotent cell that itself is derived from a multipotent cell, and so on. While each of these multipotent cells may be considered stem cells, the range of cell types that each can give rise to may vary considerably. Some differentiated cells also have the capacity to give rise to cells of greater developmental potential. Such capacity may be natural or may be induced artificially upon treatment with various factors. In many biological instances, stem cells are also “multipotent” because they can produce progeny of more than one distinct cell type, but this is not required for “stem-ness.”

[0210] Self-renewal is another important aspect of the stem cell. In theory, self-renewal can occur by either of two major mechanisms. Stem cells may divide asymmetrically, with one daughter retaining the stem state and the other daughter expressing some distinct other specific function and phenotype. Alternatively, some of the stem cells in a population can divide symmetrically into two stems, thus maintaining some stem cells in the population as a whole, while other cells in the population give rise to differentiated progeny only. Generally, “progenitor cells” have a cellular phenotype that is more primitive (i.e., is at an earlier step along a developmental pathway or progression than is a fully differentiated cell). Often, progenitor cells also have significant or very high proliferative potential. Progenitor cells can give rise to multiple distinct differentiated cell types or to a single differentiated cell type, depending on the developmental pathway and on the environment in which the cells develop and differentiate.

[0211] In the context of cell ontogeny, the adjective “differentiated,” or “differentiating” is a relative term. A “differentiated cell” is a cell that has progressed further down the developmental pathway than the cell to which it is being compared. Thus, stem cells can differentiate into lineage-restricted precursor cells (such as a myocyte progenitor cell), which in turn can differentiate into other types of precursor cells further down the pathway (such as a myocyte precursor), and then to an end-stage differentiated cell, such as a myocyte, which plays a characteristic role in a certain tissue type, and may or may not retain the capacity to proliferate further.

### Induced Pluripotent Stem Cells

[0212] In some embodiments, the genetically engineered human cells described herein are induced pluripotent stem cells (iPSCs). An advantage of using iPSCs is that the cells can be derived from the same subject to which the progenitor cells are to be administered. That is, a somatic cell can be obtained from a subject, reprogrammed to an induced pluripotent stem cell, and then re-differentiated into a progenitor cell to be administered to the subject (e.g., autologous cells). Because the progenitors are essentially derived from an autologous source, the risk of engraftment rejection or allergic response is reduced compared to the use of cells from another subject or group of subjects. In addition, the use of iPSCs negates the need for cells obtained from an embryonic source. Thus, in one embodiment, the stem cells used in the disclosed methods are not embryonic stem cells.

[0213] Although differentiation is generally irreversible under physiological contexts, several methods have been recently developed to reprogram somatic cells to iPSCs. Exemplary methods are known to those of skill in the art and are described briefly herein below.

[0214] The term “reprogramming” refers to a process that alters or reverses the differentiation state of a differentiated cell (e.g., a somatic cell). Stated another way, reprogramming refers to a process of driving the differentiation of a cell backwards to a more undifferentiated or more primitive type of cell. It should be noted that placing many primary cells in culture can lead to some loss of fully differentiated characteristics. Thus, simply culturing such cells included in the term differentiated cells does not render these cells non-differentiated cells (e.g., undifferentiated cells) or pluripotent cells. The transition of a differentiated cell to pluripotency requires a reprogramming stimulus beyond the stimuli that lead to partial loss of differentiated character in culture. Reprogrammed cells also have the characteristic of the capacity of extended passaging without loss of growth potential, relative to primary cell parents, which generally have capacity for only a limited number of divisions in culture.

[0215] The cell to be reprogrammed can be either partially or terminally differentiated prior to reprogramming. In some embodiments, reprogramming encompasses complete reversion of the differentiation state of a differentiated cell (e.g., a somatic cell) to a pluripotent state or a multipotent state. In some embodiments, reprogramming encompasses complete or partial reversion of the differentiation state of a differentiated cell (e.g., a somatic cell) to an undifferentiated cell (e.g., an embryonic-like cell). Reprogramming can result in expression of particular genes by the cells, the expression of which further contributes to reprogramming. In certain embodiments described herein, reprogramming of a differentiated cell (e.g., a somatic cell) causes the differentiated cell to assume an undifferentiated state (e.g., is an undifferentiated cell). The resulting cells are referred to as “reprogrammed cells,” or “induced pluripotent stem cells (iPSCs or iPS cells).”

[0216] Reprogramming can involve alteration, e.g., reversal, of at least some of the heritable patterns of nucleic acid modification (e.g., methylation), chromatin condensation, epigenetic changes, genomic imprinting, etc., that occur during cellular differentiation. Reprogramming is distinct from simply maintaining the existing undifferentiated state of a cell that is already pluripotent or maintaining the existing less than fully differentiated state of a cell that is already a multipotent cell (e.g., a myogenic stem cell). Reprogramming is also distinct from promoting the self-renewal or proliferation of cells that are already pluripotent or multipotent, although the compositions and methods described herein can also be of use for such purposes, in some embodiments.

[0217] Many methods are known in the art that can be used to generate pluripotent stem cells from somatic cells. Any such method that reprograms a somatic cell to the pluripotent phenotype would be appropriate for use in the methods described herein.

[0218] Reprogramming methodologies for generating pluripotent cells using defined combinations of transcription factors have been described. Mouse somatic cells can be converted to ES cell-like cells with expanded developmental potential by the direct transduction of Oct4, Sox2, Klf4, and c-Myc; see, e.g., Takahashi and Yamanaka, Cell 126(4): 663-76 (2006). iPSCs resemble ES cells, as they restore the pluripotency-associated transcriptional circuitry and much of the epigenetic landscape. In addition, mouse iPSCs satisfy all the standard assays for pluripotency: specifically, in vitro differentiation into cell types of the three germ layers, teratoma formation, contribution to chimeras, germline transmission [see, e.g., Maherali and Hochedlinger, Cell Stem Cell. 3(6):595-605 (2008)], and tetraploid complementation.

[0219] Human iPSCs can be obtained using similar transduction methods, and the transcription factor trio, OCT4, SOX2, and NANOG, has been established as the core set of transcription factors that govern pluripotency; see, e.g., Budniatzky and Gepstein, Stem Cells Transl Med. 3(4):448-57 (2014); Barrett et al., Stem Cells Trans Med 3:1-6 sctm.2014-0121 (2014); Focosi et al., Blood Cancer Journal 4: e211 (2014); and references cited therein. The production of iPSCs can be achieved by the introduction of nucleic acid sequences encoding stem cell-associated genes into an adult, somatic cell, historically using viral vectors.

[0220] iPSCs can be generated or derived from terminally differentiated somatic cells, as well as from adult stem cells, or somatic stem cells. That is, a non-pluripotent progenitor cell can be rendered pluripotent or multipotent by reprogramming. In such instances, it may not be necessary to include as many reprogramming factors as required to reprogram a terminally differentiated cell. Further, reprogramming can be induced by the non-viral introduction of reprogramming factors, e.g., by introducing the proteins themselves, or by introducing nucleic acids that encode the reprogramming factors, or by introducing messenger RNAs that upon translation produce the reprogramming factors (see e.g., Warren et al., Cell Stem Cell, 7(5):618-30 (2010). Reprogramming can be achieved by introducing a combination of nucleic acids encoding stem cell-associated genes, including, for example, Oct-4 (also known as Oct-3/4 or Pouf51), SoxI, Sox2, Sox3, Sox 15, Sox 18, NANOG, KIfI, KIf2, KIf4, KIf5, NR5A2, c-Myc, 1-Myc, n-Myc, Rem2, Tert, and LIN28. In one embodiment, reprogramming using the methods and compositions described herein can further comprise introducing one or more of Oct-3/4, a member of the Sox family, a member of the Klf family, and a member of the Myc family to a somatic cell. In one embodiment, the methods and compositions described herein further comprise introducing one or more of each of Oct-4, Sox2, Nanog, c-MYC and Klf4 for reprogramming. As noted above, the exact method used for reprogramming is not necessarily critical to the methods and compositions described herein. However, where cells differentiated from the reprogrammed cells are to be used in, e.g., human therapy, in one embodiment the reprogramming is not effected by a method that alters the genome. Thus, in such embodiments, reprogramming is achieved, e.g., without the use of viral or plasmid vectors.

[0221] The efficiency of reprogramming (i.e., the number of reprogrammed cells) derived from a population of starting cells can be enhanced by the addition of various agents, e.g., small molecules, as shown by Shi et al., Cell-Stem Cell 2:525-528 (2008); Huangfu et al., Nature Biotechnology 26(7):795-797 (2008) and Marson et al., Cell-Stem Cell 3: 132-135 (2008). Thus, an agent or combination of agents that enhance the efficiency or rate of induced pluripotent stem cell production can be used in the production of patient-specific or disease-specific iPSCs. Some non-limiting examples of agents that enhance reprogramming efficiency include soluble Wnt, Wnt conditioned media, BIX-01294 (a G9a histone methyltransferase), PD0325901 (a MEK inhibitor), DNA methyltransferase inhibitors, histone deacetylase (HDAC) inhibitors, valproic acid, 5′-azacytidine, dexamethasone, suberoylanilide, hydroxamic acid (SAHA), vitamin C, and trichostatin (TSA), among others.

[0222] Other non-limiting examples of reprogramming enhancing agents include: Suberoylanilide Hydroxamic Acid (SAHA (e.g., MK0683, vorinostat) and other hydroxamic acids), BML-210, Depudecin (e.g., (−)-Depudecin), HC Toxin, Nullscript (4-(1,3-Dioxo-IH,3H-benzo[de]isoquinolin-2-yl)-N-hydroxybutanamide), Phenylbutyrate (e.g., sodium phenylbutyrate) and Valproic Acid ((VP A) and other short chain fatty acids), Scriptaid, Suramin Sodium, Trichostatin A (TSA), APHA Compound 8, Apicidin, Sodium Butyrate, pivaloyloxymethyl butyrate (Pivanex, AN-9), Trapoxin B, Chlamydocin, Depsipeptide (also known as FR901228 or FK228), benzamides (e.g., CI-994 (e.g., N-acetyl dinaline) and MS-27-275), MGCD0103, NVP-LAQ-824, CBHA (m-carboxycinnaminic acid bishydroxamic acid), JNJ16241199, Tubacin, A-161906, proxamide, oxamflatin, 3-CI-UCHA (e.g., 6-(3-chlorophenylureido)caproic hydroxamic acid), AOE (2-amino-8-oxo-9,10-epoxydecanoic acid), CHAP31 and CHAP 50. Other reprogramming enhancing agents include, for example, dominant negative forms of the HDACs (e.g., catalytically inactive forms), siRNA inhibitors of the HDACs, and antibodies that specifically bind to the HDACs. Such inhibitors are available, e.g., from BIOMOL International, Fukazawa, Merck Biosciences, Novartis, Gloucester Pharmaceuticals, Titan Pharmaceuticals, MethylGene, and Sigma Aldrich.

[0223] To confirm the induction of pluripotent stem cells for use with the methods described herein, isolated clones can be tested for the expression of a stem cell marker. Such expression in a cell derived from a somatic cell identifies the cells as induced pluripotent stem cells. Stem cell markers are selected from the non-limiting group including SSEA3, SSEA4, CD9, Nanog, Fbxl5, EcatI, EsgI, Eras, Gdf3, Fgf4, Cripto, DaxI, Zpf296, Slc2a3, RexI, UtfI, and NatI. In one embodiment, a cell that expresses Oct4 or Nanog is identified as pluripotent. Methods for detecting the expression of such markers can include, for example, RT-PCR and immunological methods that detect the presence of the encoded polypeptides, such as Western blots or flow cytometric analyses. In some embodiments, detection involves not only RT-PCR, but also includes detection of protein markers. Intracellular markers may be best identified via RT-PCR, or protein detection methods such as immunocytochemistry, while cell surface markers are readily identified, e.g., by immunocytochemistry.

[0224] The pluripotent stem cell character of isolated cells can be confirmed by tests evaluating the ability of the iPSCs to differentiate into cells of each of the three germ layers. As one example, teratoma formation in nude mice can be used to evaluate the pluripotent character of the isolated clones. The cells are introduced into nude mice and histology and/or immunohistochemistry is performed on a tumor arising from the cells. The growth of a tumor comprising cells from all three germ layers, for example, further indicates that the cells are pluripotent stem cells.

### Hepatocytes

[0225] In some embodiments, the genetically engineered human cells described herein are hepatocytes. A hepatocyte is a cell of the main parenchymal tissue of the liver. Hepatocytes make up 70-85% of the liver's mass. These cells are involved in: protein synthesis; protein storage; transformation of carbohydrates; synthesis of cholesterol, bile salts and phospholipids; detoxification, modification, and excretion of exogenous and endogenous substances; and initiation of formation and secretion of bile.

[0226] SERPINA1 is primarily expressed in hepatocytes (parenchymal liver cells), which are a major source of circulating protein, with secondary expression in monocytes and neutrophils. Therefore, the correction of SERPINA1 would be primarily targeted at hepatocytes and the liver.

Creating Patient Specific iPSCs

[0227] One step of the ex vivo methods of the invention involves creating a patient specific iPS cell, patient specific iPS cells, or a patient specific iPS cell line. There are many established methods in the art for creating patient specific iPS cells, as described in Takahashi and Yamanaka 2006; Takahashi, Tanabe et al. 2007. For example, the creating step comprises: a) isolating a somatic cell, such as a skin cell or fibroblast from the patient; and b) introducing a set of pluripotency-associated genes into the somatic cell in order to induce the cell to become a pluripotent stem cell. In some embodiments, the set of pluripotency-associated genes is one or more of the genes selected from the group consisting of OCT4, SOX2, KLF4, Lin28, NANOG, and cMYC.

### Performing a Biopsy or Aspirate of the Patient's Liver or Bone Marrow

[0228] A biopsy or aspirate is a sample of tissue or fluid taken from the body. There are many different kinds of biopsies or aspirates. Nearly all of them involve using a sharp tool to remove a small amount of tissue. If the biopsy will be on the skin or other sensitive area, numbing medicine is applied first. A biopsy or aspirate may be performed according to any of the known methods in the art. For example, in a liver biopsy, a needle is injected into the liver through the skin of the belly, capturing the liver tissue. For example, in a bone marrow aspirate, a large needle is used to enter the pelvis bone to collect bone marrow.

### Isolating a Liver Specific Progenitor Cell or Primary Hepatocyte

[0229] Liver specific progenitor cells and primary hepatocytes may be isolated according to any method known in the art. For example, human hepatocytes are isolated from fresh surgical specimens (e.g., an autologous sample). Healthy liver tissue is used to isolate hepatocytes by collagenase digestion. The obtained cell suspension is filtered through a 100-mm nylon mesh and sedimented by centrifugation at 50 g for 5 minutes, resuspended, and washed two to three times in cold wash medium. Human liver stem cells are obtained by culturing under stringent conditions of hepatocytes obtained from fresh liver preparations. Hepatocytes seeded on collagen-coated plates are cultured for 2 weeks. After 2 weeks, surviving cells are removed, and characterized for expression of stem cells markers (Herrera et al, STEM CELLS 2006; 24: 2840-2850).

### Isolating a Mesenchymal Stem Cell

[0230] Mesenchymal stem cells may be isolated according to any method known in the art, such as from a patient's bone marrow or peripheral blood. For example, marrow aspirate is collected into a syringe with heparin. Cells are washed and centrifuged on a Percoll™. Cells, such as blood cells, liver cells, interstitial cells, macrophages, mast cells, and thymocytes, are separated using Percoll™. The cells are cultured in Dulbecco's modified Eagle's medium (DMEM) (low glucose) containing 10% fetal bovine serum (FBS) (Pittinger M F, Mackay A M, Beck S C et al., Science 1999; 284:143-147).

### Genome Editing

[0231] Genome editing generally refers to the process of modifying the nucleotide sequence of a genome, preferably in a precise or pre-determined manner. Examples of methods of genome editing described herein include methods of using site-directed nucleases to cut deoxyribonucleic acid (DNA) at precise target locations in the genome, thereby creating double-strand or single-strand DNA breaks at particular locations within the genome. Such breaks can be and regularly are repaired by natural, endogenous cellular processes, such as homology-directed repair (HDR) and non-homologous end-joining (NHEJ), as recently reviewed in Cox et al., Nature Medicine 21(2), 121-31 (2015). These two main DNA repair processes consist of a family of alternative pathways. NHEJ directly joins the DNA ends resulting from a double-strand break, sometimes with the loss or addition of nucleotide sequence, which may disrupt or enhance gene expression. HDR utilizes a homologous sequence, or donor sequence, as a template for inserting a defined DNA sequence at the break point. The homologous sequence may be in the endogenous genome, such as a sister chromatid. Alternatively, the donor may be an exogenous nucleic acid, such as a plasmid, a single-strand oligonucleotide, a double-stranded oligonucleotide, a duplex oligonucleotide or a virus, that has regions of high homology with the nuclease-cleaved locus, but which may also contain additional sequence or sequence changes including deletions that can be incorporated into the cleaved target locus. A third repair mechanism is microhomology-mediated end joining (MMEJ), also referred to as “Alternative NHEJ”, in which the genetic outcome is similar to NHEJ in that small deletions and insertions can occur at the cleavage site. MMEJ makes use of homologous sequences of a few basepairs flanking the DNA break site to drive a more favored DNA end joining repair outcome, and recent reports have further elucidated the molecular mechanism of this process; see, e.g., Cho and Greenberg, Nature 518, 174-76 (2015); Kent et al., Nature Structural and Molecular Biology, Adv. Online doi: 10.1038/nsmb.2961(2015); Mateos-Gomez et al., Nature 518, 254-57 (2015); Ceccaldi et al., Nature 528, 258-62 (2015). In some instances it may be possible to predict likely repair outcomes based on analysis of potential microhomologies at the site of the DNA break.

[0232] Each of these genome editing mechanisms can be used to create desired genomic alterations. A step in the genome editing process is to create one or two DNA breaks, the latter as double-strand breaks or as two single-stranded breaks, in the target locus as close as possible to the site of intended mutation. This can be achieved via the use of site-directed polypeptides, as described and illustrated herein.

[0233] Site-directed polypeptides, such as a DNA endonuclease, can introduce double-strand breaks or single-strand breaks in nucleic acids, e.g., genomic DNA. The double-strand break can stimulate a cell's endogenous DNA-repair pathways (e.g., homology-dependent repair or non-homologous end joining or alternative non-homologous end joining (A-NHEJ) or microhomology-mediated end joining). NHEJ can repair cleaved target nucleic acid without the need for a homologous template. This can sometimes result in small deletions or insertions (indels) in the target nucleic acid at the site of cleavage, and can lead to disruption or alteration of gene expression. HDR can occur when a homologous repair template, or donor, is available. The homologous donor template comprises sequences that are homologous to sequences flanking the target nucleic acid cleavage site. The sister chromatid is generally used by the cell as the repair template. However, for the purposes of genome editing, the repair template is often supplied as an exogenous nucleic acid, such as a plasmid, duplex oligonucleotide, single-strand oligonucleotide, double-stranded oligonucleotide, or viral nucleic acid. With exogenous donor templates, it is common to introduce an additional nucleic acid sequence (such as a transgene) or modification (such as a single or multiple base change or a deletion) between the flanking regions of homology so that the additional or altered nucleic acid sequence also becomes incorporated into the target locus. MMEJ results in a genetic outcome that is similar to NHEJ in that small deletions and insertions can occur at the cleavage site. MMEJ makes use of homologous sequences of a few basepairs flanking the cleavage site to drive a favored end-joining DNA repair outcome. In some instances it may be possible to predict likely repair outcomes based on analysis of potential microhomologies in the nuclease target regions.

[0234] Thus, in some cases, homologous recombination is used to insert an exogenous polynucleotide sequence into the target nucleic acid cleavage site. An exogenous polynucleotide sequence is termed a donor polynucleotide (or donor or donor sequence or polynucleotide donor template) herein. In some embodiments, the donor polynucleotide, a portion of the donor polynucleotide, a copy of the donor polynucleotide, or a portion of a copy of the donor polynucleotide is inserted into the target nucleic acid cleavage site. In some embodiments, the donor polynucleotide is an exogenous polynucleotide sequence, i.e., a sequence that does not naturally occur at the target nucleic acid cleavage site.

[0235] The modifications of the target DNA due to NHEJ and/or HDR can lead to, for example, mutations, deletions, alterations, integrations, gene correction, gene replacement, gene tagging, transgene insertion, nucleotide deletion, gene disruption, translocations and/or gene mutation. The processes of deleting genomic DNA and integrating non-native nucleic acid into genomic DNA are examples of genome editing.

### CRISPR Endonuclease System

[0236] A CRISPR (Clustered Regularly Interspaced Short Palindromic Repeats) genomic locus can be found in the genomes of many prokaryotes (e.g., bacteria and archaea). In prokaryotes, the CRISPR locus encodes products that function as a type of immune system to help defend the prokaryotes against foreign invaders, such as virus and phage. There are three stages of CRISPR locus function: integration of new sequences into the CRISPR locus, expression of CRISPR RNA (crRNA), and silencing of foreign invader nucleic acid. Five types of CRISPR systems (e.g., Type I, Type II, Type III, Type U, and Type V) have been identified.

[0237] A CRISPR locus includes a number of short repeating sequences referred to as “repeats.” When expressed, the repeats can form secondary hairpin structures (e.g., hairpins) and/or comprise unstructured single-stranded sequences. The repeats usually occur in clusters and frequently diverge between species. The repeats are regularly interspaced with unique intervening sequences referred to as “spacers,” resulting in a repeat-spacer-repeat locus architecture. The spacers are identical to or have high homology with known foreign invader sequences. A spacer-repeat unit encodes a crisprRNA (crRNA), which is processed into a mature form of the spacer-repeat unit. A crRNA comprises a “seed” or spacer sequence that is involved in targeting a target nucleic acid (in the naturally occurring form in prokaryotes, the spacer sequence targets the foreign invader nucleic acid). A spacer sequence is located at the 5′ or 3′ end of the crRNA.

[0238] A CRISPR locus also comprises polynucleotide sequences encoding CRISPR Associated (Cas) genes. Cas genes encode endonucleases involved in the biogenesis and the interference stages of crRNA function in prokaryotes. Some Cas genes comprise homologous secondary and/or tertiary structures.

### Type II CRISPR Systems

[0239] crRNA biogenesis in a Type II CRISPR system in nature requires a trans-activating CRISPR RNA (tracrRNA). The tracrRNA is modified by endogenous RNaseIII, and then hybridizes to a crRNA repeat in the pre-crRNA array. Endogenous RNaseIII is recruited to cleave the pre-crRNA. Cleaved crRNAs are subjected to exoribonuclease trimming to produce the mature crRNA form (e.g., 5′ trimming). The tracrRNA remains hybridized to the crRNA, and the tracrRNA and the crRNA associate with a site-directed polypeptide (e.g., Cas9). The crRNA of the crRNA-tracrRNA-Cas9 complex guides the complex to a target nucleic acid to which the crRNA can hybridize. Hybridization of the crRNA to the target nucleic acid activates Cas9 for targeted nucleic acid cleavage. The target nucleic acid in a Type II CRISPR system is referred to as a protospacer adjacent motif (PAM). In nature, the PAM is essential to facilitate binding of a site-directed polypeptide (e.g., Cas9) to the target nucleic acid. Type II systems (also referred to as Nmeni or CASS4) are further subdivided into Type II-A (CASS4) and II-B (CASS4a). Jinek et al., Science, 337(6096):816-821 (2012) showed that the CRISPR/Cas9 system is useful for RNA-programmable genome editing, and international patent application publication number WO2013/176772 provides numerous examples and applications of the CRISPR/Cas endonuclease system for site-specific gene editing.

### Type V CRISPR Systems

[0240] Type V CRISPR systems have several important differences from Type II systems. For example, Cpf1 is a single RNA-guided endonuclease that, in contrast to Type II systems, lacks tracrRNA. In fact, Cpf1-associated CRISPR arrays are processed into mature crRNAS without the requirement of an additional trans-activating tracrRNA. The Type V CRISPR array is processed into short mature crRNAs of 42-44 nucleotides in length, with each mature crRNA beginning with 19 nucleotides of direct repeat followed by 23-25 nucleotides of spacer sequence. In contrast, mature crRNAs in Type II systems start with 20-24 nucleotides of spacer sequence followed by about 22 nucleotides of direct repeat. Also, Cpf1 utilizes a T-rich protospacer-adjacent motif such that Cpf1-crRNA complexes efficiently cleave target DNA preceded by a short T-rich PAM, which is in contrast to the G-rich PAM following the target DNA for Type II systems. Thus, Type V systems cleave at a point that is distant from the PAM, while Type II systems cleave at a point that is adjacent to the PAM. In addition, in contrast to Type II systems, Cpf1 cleaves DNA via a staggered DNA double-stranded break with a 4 or 5 nucleotide 5′ overhang. Type II systems cleave via a blunt double-stranded break. Similar to Type II systems, Cpf1 contains a predicted RuvC-like endonuclease domain, but lacks a second HNH endonuclease domain, which is in contrast to Type II systems.

### Cas Genes/Polypeptides and Protospacer Adjacent Motifs

[0241] Exemplary CRISPR/Cas polypeptides include the Cas9 polypeptides in FIG. 1 of Fonfara et al., Nucleic Acids Research, 42: 2577-2590 (2014). The CRISPR/Cas gene naming system has undergone extensive rewriting since the Cas genes were discovered. FIG. 5 of Fonfara, supra, provides PAM sequences for the Cas9 polypeptides from various species.

### Site-Directed Polypeptides

[0242] A site-directed polypeptide is a nuclease used in genome editing to cleave DNA. The site-directed may be administered to a cell or a patient as either: one or more polypeptides, or one or more mRNAs encoding the polypeptide.

[0243] In the context of a CRISPR/Cas or CRISPR/Cpf1 system, the site-directed polypeptide can bind to a guide RNA that, in turn, specifies the site in the target DNA to which the polypeptide is directed. In embodiments of CRISPR/Cas or CRISPR/Cpf1 systems herein, the site-directed polypeptide is an endonuclease, such as a DNA endonuclease.

[0244] In some embodiments, a site-directed polypeptide comprises a plurality of nucleic acid-cleaving (i.e., nuclease) domains. Two or more nucleic acid-cleaving domains can be linked together via a linker. In some embodiments, the linker comprises a flexible linker. Linkers may comprise 1, 2, 3, 4, 5, 6, 7, 8, 9, 10, 11, 12, 13, 14, 15, 16, 17, 18, 19, 20, 21, 22, 23, 24, 25, 30, 35, 40 or more amino acids in length.

[0245] Naturally-occurring wild-type Cas9 enzymes comprise two nuclease domains, a HNH nuclease domain and a RuvC domain. Herein, the “Cas9” refers to both naturally-occurring and recombinant Cas9s. Cas9 enzymes contemplated herein comprises a HNH or HNH-like nuclease domain, and/or a RuvC or RuvC-like nuclease domain.

[0246] HNH or HNH-like domains comprise a McrA-like fold. HNH or HNH-like domains comprises two antiparallel-strands and an -helix. HNH or HNH-like domains comprises a metal binding site (e.g., a divalent cation binding site). HNH or HNH-like domains can cleave one strand of a target nucleic acid (e.g., the complementary strand of the crRNA targeted strand).

[0247] RuvC or RuvC-like domains comprise an RNaseH or RNaseH-like fold. RuvC/RNaseH domains are involved in a diverse set of nucleic acid-based functions including acting on both RNA and DNA. The RNaseH domain comprises 5-strands surrounded by a plurality of—helices. RuvC/RNaseH or RuvC/RNaseH-like domains comprise a metal binding site (e.g., a divalent cation binding site). RuvC/RNaseH or RuvC/RNaseH-like domains can cleave one strand of a target nucleic acid (e.g., the non-complementary strand of a double-stranded target DNA).

[0248] Site-directed polypeptides can introduce double-strand breaks or single-strand breaks in nucleic acids, e.g., genomic DNA. The double-strand break can stimulate a cell's endogenous DNA-repair pathways (e.g., homology-dependent repair (HDR) or non-homologous end joining (NHEJ) or alternative non-homologous end joining (A-NHEJ) or microhomology-mediated end joining (MMEJ)). NHEJ can repair cleaved target nucleic acid without the need for a homologous template. This can sometimes result in small deletions or insertions (indels) in the target nucleic acid at the site of cleavage, and can lead to disruption or alteration of gene expression. HDR can occur when a homologous repair template, or donor, is available. The homologous donor template comprises sequences that are homologous to sequences flanking the target nucleic acid cleavage site. The sister chromatid is generally used by the cell as the repair template. However, for the purposes of genome editing, the repair template is often supplied as an exogenous nucleic acid, such as a plasmid, duplex oligonucleotide, single-strand oligonucleotide or viral nucleic acid. With exogenous donor templates, it is common to introduce an additional nucleic acid sequence (such as a transgene) or modification (such as a single or multiple base change or a deletion) between the flanking regions of homology so that the additional or altered nucleic acid sequence also becomes incorporated into the target locus. MMEJ results in a genetic outcome that is similar to NHEJ in that small deletions and insertions can occur at the cleavage site. MMEJ makes use of homologous sequences of a few basepairs flanking the cleavage site to drive a favored end-joining DNA repair outcome. In some instances it may be possible to predict likely repair outcomes based on analysis of potential microhomologies in the nuclease target regions.

[0249] Thus, in some cases, homologous recombination is used to insert an exogenous polynucleotide sequence into the target nucleic acid cleavage site. An exogenous polynucleotide sequence is termed a donor polynucleotide (or donor or donor sequence) herein. In some embodiments, the donor polynucleotide, a portion of the donor polynucleotide, a copy of the donor polynucleotide, or a portion of a copy of the donor polynucleotide is inserted into the target nucleic acid cleavage site. In some embodiments, the donor polynucleotide is an exogenous polynucleotide sequence, i.e., a sequence that does not naturally occur at the target nucleic acid cleavage site.

[0250] The modifications of the target DNA due to NHEJ and/or HDR can lead to, for example, mutations, deletions, alterations, integrations, gene correction, gene replacement, gene tagging, transgene insertion, nucleotide deletion, gene disruption, translocations and/or gene mutation. The processes of deleting genomic DNA and integrating non-native nucleic acid into genomic DNA are examples of genome editing.

[0251] In some embodiments, the site-directed polypeptide comprises an amino acid sequence having at least 10%, at least 15%, at least 20%, at least 30%, at least 40%, at least 50%, at least 60%, at least 70%, at least 75%, at least 80%, at least 85%, at least 90%, at least 95%, at least 99%, or 100% amino acid sequence identity to a wild-type exemplary site-directed polypeptide [e.g., Cas9 from S. pyogenes, US2014/0068797 Sequence ID No. 8 or Sapranauskas et al., Nucleic Acids Res, 39(21): 9275-9282 (2011)], and various other site-directed polypeptides).

[0252] In some embodiments, the site-directed polypeptide comprises an amino acid sequence having at least 10%, at least 15%, at least 20%, at least 30%, at least 40%, at least 50%, at least 60%, at least 70%, at least 75%, at least 80%, at least 85%, at least 90%, at least 95%, at least 99%, or 100% amino acid sequence identity to the nuclease domain of a wild-type exemplary site-directed polypeptide (e.g., Cas9 from S. pyogenes, supra).

[0253] In some embodiments, a site-directed polypeptide comprises at least 70, 75, 80, 85, 90, 95, 97, 99, or 100% identity to a wild-type site-directed polypeptide (e.g., Cas9 from S. pyogenes, supra) over 10 contiguous amino acids. In some embodiments, a site-directed polypeptide comprises at most: 70, 75, 80, 85, 90, 95, 97, 99, or 100% identity to a wild-type site-directed polypeptide (e.g., Cas9 from S. pyogenes, supra) over 10 contiguous amino acids. In some embodiments, a site-directed polypeptide comprises at least: 70, 75, 80, 85, 90, 95, 97, 99, or 100% identity to a wild-type site-directed polypeptide (e.g., Cas9 from S. pyogenes, supra) over 10 contiguous amino acids in a HNH nuclease domain of the site-directed polypeptide. In some embodiments, a site-directed polypeptide comprises at most: 70, 75, 80, 85, 90, 95, 97, 99, or 100% identity to a wild-type site-directed polypeptide (e.g., Cas9 from S. pyogenes, supra) over 10 contiguous amino acids in a HNH nuclease domain of the site-directed polypeptide. In some embodiments, a site-directed polypeptide comprises at least: 70, 75, 80, 85, 90, 95, 97, 99, or 100% identity to a wild-type site-directed polypeptide (e.g., Cas9 from S. pyogenes, supra) over 10 contiguous amino acids in a RuvC nuclease domain of the site-directed polypeptide. In some embodiments, a site-directed polypeptide comprises at most: 70, 75, 80, 85, 90, 95, 97, 99, or 100% identity to a wild-type site-directed polypeptide (e.g., Cas9 from S. pyogenes, supra) over 10 contiguous amino acids in a RuvC nuclease domain of the site-directed polypeptide.

[0254] In some embodiments, the site-directed polypeptide comprises a modified form of a wild-type exemplary site-directed polypeptide. The modified form of the wild-type exemplary site-directed polypeptide comprises a mutation that reduces the nucleic acid-cleaving activity of the site-directed polypeptide. In some embodiments, the modified form of the wild-type exemplary site-directed polypeptide has less than 90%, less than 80%, less than 70%, less than 60%, less than 50%, less than 40%, less than 30%, less than 20%, less than 10%, less than 5%, or less than 1% of the nucleic acid-cleaving activity of the wild-type exemplary site-directed polypeptide (e.g., Cas9 from S. pyogenes, supra). The modified form of the site-directed polypeptide can have no substantial nucleic acid-cleaving activity. When a site-directed polypeptide is a modified form that has no substantial nucleic acid-cleaving activity, it is referred to herein as “enzymatically inactive.”

[0255] In some embodiments, the modified form of the site-directed polypeptide comprises a mutation such that it can induce a single-strand break (SSB) on a target nucleic acid (e.g., by cutting only one of the sugar-phosphate backbones of a double-strand target nucleic acid). In some embodiments, the mutation results in less than 90%, less than 80%, less than 70%, less than 60%, less than 50%, less than 40%, less than 30%, less than 20%, less than 10%, less than 5%, or less than 1% of the nucleic acid-cleaving activity in one or more of the plurality of nucleic acid-cleaving domains of the wild-type site directed polypeptide (e.g., Cas9 from S. pyogenes, supra). In some embodiments, the mutation results in one or more of the plurality of nucleic acid-cleaving domains retaining the ability to cleave the complementary strand of the target nucleic acid, but reducing its ability to cleave the non-complementary strand of the target nucleic acid. In some embodiments, the mutation results in one or more of the plurality of nucleic acid-cleaving domains retaining the ability to cleave the non-complementary strand of the target nucleic acid, but reducing its ability to cleave the complementary strand of the target nucleic acid. For example, residues in the wild-type exemplary S. pyogenes Cas9 polypeptide, such as Asp10, His840, Asn854 and Asn856, are mutated to inactivate one or more of the plurality of nucleic acid-cleaving domains (e.g., nuclease domains). In some embodiments, the residues to be mutated correspond to residues Asp10, His840, Asn854 and Asn856 in the wild-type exemplary S. pyogenes Cas9 polypeptide (e.g., as determined by sequence and/or structural alignment). Non-limiting examples of mutations include D10A, H840A, N854A or N856A. One skilled in the art will recognize that mutations other than alanine substitutions are suitable.

[0256] In some embodiments, a D10A mutation is combined with one or more of H840A, N854A, or N856A mutations to produce a site-directed polypeptide substantially lacking DNA cleavage activity. In some embodiments, a H840A mutation is combined with one or more of D10A, N854A, or N856A mutations to produce a site-directed polypeptide substantially lacking DNA cleavage activity. In some embodiments, a N854A mutation is combined with one or more of H840A, D10A, or N856A mutations to produce a site-directed polypeptide substantially lacking DNA cleavage activity. In some embodiments, a N856A mutation is combined with one or more of H840A, N854A, or D10A mutations to produce a site-directed polypeptide substantially lacking DNA cleavage activity. Site-directed polypeptides that comprise one substantially inactive nuclease domain are referred to as “nickases”.

[0257] Nickase variants of RNA-guided endonucleases, for example Cas9, can be used to increase the specificity of CRISPR-mediated genome editing. Wild type Cas9 is typically guided by a single guide RNA designed to hybridize with a specified ˜20 nucleotide sequence in the target sequence (such as an endogenous genomic locus). However, several mismatches can be tolerated between the guide RNA and the target locus, effectively reducing the length of required homology in the target site to, for example, as little as 13 nt of homology, and thereby resulting in elevated potential for binding and double-strand nucleic acid cleavage by the CRISPR/Cas9 complex elsewhere in the target genome—also known as off-target cleavage. Because nickase variants of Cas9 each only cut one strand, in order to create a double-strand break it is necessary for a pair of nickases to bind in close proximity and on opposite strands of the target nucleic acid, thereby creating a pair of nicks, which is the equivalent of a double-strand break. This requires that two separate guide RNAs—one for each nickase—must bind in close proximity and on opposite strands of the target nucleic acid. This requirement essentially doubles the minimum length of homology needed for the double-strand break to occur, thereby reducing the likelihood that a double-strand cleavage event will occur elsewhere in the genome, where the two guide RNA sites—if they exist—are unlikely to be sufficiently close to each other to enable the double-strand break to form. As described in the art, nickases can also be used to promote HDR versus NHEJ. HDR can be used to introduce selected changes into target sites in the genome through the use of specific donor sequences that effectively mediate the desired changes. Descriptions of various CRISPR/Cas systems for use in gene editing can be found, e.g., in international patent application publication number WO2013/176772, and in Nature Biotechnology 32, 347-355 (2014), and references cited therein.

[0258] Mutations contemplated include substitutions, additions, and deletions, or any combination thereof. In some embodiments, the mutation converts the mutated amino acid to alanine. In some embodiments, the mutation converts the mutated amino acid to another amino acid (e.g., glycine, serine, threonine, cysteine, valine, leucine, isoleucine, methionine, proline, phenylalanine, tyrosine, tryptophan, aspartic acid, glutamic acid, asparagines, glutamine, histidine, lysine, or arginine). In some embodiments, the mutation converts the mutated amino acid to a non-natural amino acid (e.g., selenomethionine). In some embodiments, the mutation converts the mutated amino acid to amino acid mimics (e.g., phosphomimics). In some embodiments, the mutation is a conservative mutation. For example, the mutation can convert the mutated amino acid to amino acids that resemble the size, shape, charge, polarity, conformation, and/or rotamers of the mutated amino acids (e.g., cysteine/serine mutation, lysine/asparagine mutation, histidine/phenylalanine mutation). In some embodiments, the mutation causes a shift in reading frame and/or the creation of a premature stop codon. In some embodiments, mutations cause changes to regulatory regions of genes or loci that affect expression of one or more genes.

[0259] In some embodiments, the site-directed polypeptide (e.g., variant, mutated, enzymatically inactive and/or conditionally enzymatically inactive site-directed polypeptide) targets nucleic acid. In some embodiments, the site-directed polypeptide (e.g., variant, mutated, enzymatically inactive and/or conditionally enzymatically inactive endoribonuclease) targets DNA. In some embodiments, the site-directed polypeptide (e.g., variant, mutated, enzymatically inactive and/or conditionally enzymatically inactive endoribonuclease) targets RNA.

[0260] In some embodiments, the site-directed polypeptide comprises one or more non-native sequences (e.g., the site-directed polypeptide is a fusion protein).

[0261] In some embodiments, the site-directed polypeptide comprises an amino acid sequence comprising at least 15% amino acid identity to a Cas9 from a bacterium (e.g., S. pyogenes), a nucleic acid binding domain, and two nucleic acid cleaving domains (i.e., a HNH domain and a RuvC domain).

[0262] In some embodiments, the site-directed polypeptide comprises an amino acid sequence comprising at least 15% amino acid identity to a Cas9 from a bacterium (e.g., S. pyogenes), and two nucleic acid cleaving domains (i.e., a HNH domain and a RuvC domain).

[0263] In some embodiments, the site-directed polypeptide comprises an amino acid sequence comprising at least 15% amino acid identity to a Cas9 from a bacterium (e.g., S. pyogenes), and two nucleic acid cleaving domains, wherein one or both of the nucleic acid cleaving domains comprise at least 50% amino acid identity to a nuclease domain from Cas9 from a bacterium (e.g., S. pyogenes).

[0264] In some embodiments, the site-directed polypeptide comprises an amino acid sequence comprising at least 15% amino acid identity to a Cas9 from a bacterium (e.g., S. pyogenes), two nucleic acid cleaving domains (i.e., a HNH domain and a RuvC domain), and non-native sequence (for example, a nuclear localization signal) or a linker linking the site-directed polypeptide to a non-native sequence.

[0265] In some embodiments, the site-directed polypeptide comprises an amino acid sequence comprising at least 15% amino acid identity to a Cas9 from a bacterium (e.g., S. pyogenes), two nucleic acid cleaving domains (i.e., a HNH domain and a RuvC domain), wherein the site-directed polypeptide comprises a mutation in one or both of the nucleic acid cleaving domains that reduces the cleaving activity of the nuclease domains by at least 50%.

[0266] In some embodiments, the site-directed polypeptide comprises an amino acid sequence comprising at least 15% amino acid identity to a Cas9 from a bacterium (e.g., S. pyogenes), and two nucleic acid cleaving domains (i.e., a HNH domain and a RuvC domain), wherein one of the nuclease domains comprises mutation of aspartic acid 10, and/or wherein one of the nuclease domains comprises mutation of histidine 840, and wherein the mutation reduces the cleaving activity of the nuclease domain(s) by at least 50%.

[0267] In some embodiments of the invention, the one or more site-directed polypeptides, e.g. DNA endonucleases, include two nickases that together effect one double-strand break at a specific locus in the genome, or four nickases that together effect two double-strand breaks at specific loci in the genome. Alternatively, one site-directed polypeptide, e.g. DNA endonuclease, effects one double-strand break at a specific locus in the genome.

### Genome-Targeting Nucleic Acid

[0268] The present disclosure provides a genome-targeting nucleic acid that can direct the activities of an associated polypeptide (e.g., a site-directed polypeptide) to a specific target sequence within a target nucleic acid. In some embodiments, the genome-targeting nucleic acid is an RNA. A genome-targeting RNA is referred to as a “guide RNA” or “gRNA” herein. A guide RNA comprises at least a spacer sequence that hybridizes to a target nucleic acid sequence of interest, and a CRISPR repeat sequence. In Type II systems, the gRNA also comprises a second RNA called the tracrRNA sequence. In the Type II guide RNA (gRNA), the CRISPR repeat sequence and tracrRNA sequence hybridize to each other to form a duplex. In the Type V guide RNA (gRNA), the crRNA forms a duplex. In both systems, the duplex binds a site-directed polypeptide, such that the guide RNA and site-direct polypeptide form a complex. The genome-targeting nucleic acid provides target specificity to the complex by virtue of its association with the site-directed polypeptide. The genome-targeting nucleic acid thus directs the activity of the site-directed polypeptide.

[0269] Exemplary guide RNAs include the spacer sequences in SEQ ID NOs: 1-68,297, for example, in SEQ ID NOs: 54,860-68,297, shown with the genome location of their target sequence and the associated Cas9 or Cpf1 cut site, wherein the genome location is based on the GRCh38/hg38 human genome assembly. As is understood by the person of ordinary skill in the art, each guide RNA is designed to include a spacer sequence complementary to its genomic target sequence. For example, each of the spacer sequences in SEQ ID NOs: 1-68,297, for example, in SEQ ID NOs: 54,860-68,297 may be put into a single RNA chimera or a crRNA (along with a corresponding tracrRNA). See Jinek et al., Science, 337, 816-821 (2012) and Deltcheva et al., Nature, 471, 602-607 (2011).

[0270] In some embodiments, the genome-targeting nucleic acid is a double-molecule guide RNA. In some embodiments, the genome-targeting nucleic acid is a single-molecule guide RNA.

[0271] A double-molecule guide RNA comprises two strands of RNA. The first strand comprises in the 5′ to 3′ direction, an optional spacer extension sequence, a spacer sequence and a minimum CRISPR repeat sequence. The second strand comprises a minimum tracrRNA sequence (complementary to the minimum CRISPR repeat sequence), a 3′ tracrRNA sequence and an optional tracrRNA extension sequence.

[0272] A single-molecule guide RNA (sgRNA) in a Type II system comprises, in the 5′ to 3′ direction, an optional spacer extension sequence, a spacer sequence, a minimum CRISPR repeat sequence, a single-molecule guide linker, a minimum tracrRNA sequence, a 3′ tracrRNA sequence and an optional tracrRNA extension sequence. The optional tracrRNA extension may comprise elements that contribute additional functionality (e.g., stability) to the guide RNA. The single-molecule guide linker links the minimum CRISPR repeat and the minimum tracrRNA sequence to form a hairpin structure. The optional tracrRNA extension comprises one or more hairpins.

[0273] A single-molecule guide RNA (sgRNA) in a Type V system comprises, in the 5′ to 3′ direction, a minimum CRISPR repeat sequence and a spacer sequence.

[0274] By way of illustration, guide RNAs used in the CRISPR/Cas system, or other smaller RNAs can be readily synthesized by chemical means, as illustrated below and described in the art. While chemical synthetic procedures are continually expanding, purifications of such RNAs by procedures such as high performance liquid chromatography (HPLC, which avoids the use of gels such as PAGE) tends to become more challenging as polynucleotide lengths increase significantly beyond a hundred or so nucleotides. One approach used for generating RNAs of greater length is to produce two or more molecules that are ligated together. Much longer RNAs, such as those encoding a Cas9 or Cpf1 endonuclease, are more readily generated enzymatically. Various types of RNA modifications can be introduced during or after chemical synthesis and/or enzymatic generation of RNAs, e.g., modifications that enhance stability, reduce the likelihood or degree of innate immune response, and/or enhance other attributes, as described in the art.

### Spacer Extension Sequence

[0275] In some embodiments of genome-targeting nucleic acids, a spacer extension sequence can provide stability and/or provide a location for modifications of a genome-targeting nucleic acid. A spacer extension sequence can modify on- or off-target activity or specificity. In some embodiments, a spacer extension sequence is provided. A spacer extension sequence may have a length of more than 1, 5, 10, 15, 20, 25, 30, 35, 40, 45, 50, 60, 70, 80, 90, 100, 120, 140, 160, 180, 200, 220, 240, 260, 280, 300, 320, 340, 360, 380, 400, 1000, 2000, 3000, 4000, 5000, 6000, or 7000 or more nucleotides. A spacer extension sequence may have a length of less than 1, 5, 10, 15, 20, 25, 30, 35, 40, 45, 50, 60, 70, 80, 90, 100, 120, 140, 160, 180, 200, 220, 240, 260, 280, 300, 320, 340, 360, 380, 400, 1000, 2000, 3000, 4000, 5000, 6000, 7000 or more nucleotides. In some embodiments, a spacer extension sequence is less than 10 nucleotides in length. In some embodiments, a spacer extension sequence is between 10-30 nucleotides in length. In some embodiments, a spacer extension sequence is between 30-70 nucleotides in length.

[0276] In some embodiments, the spacer extension sequence comprises another moiety (e.g., a stability control sequence, an endoribonuclease binding sequence, a ribozyme). In some embodiments, the moiety decreases or increases the stability of a nucleic acid targeting nucleic acid. In some embodiments, the moiety is a transcriptional terminator segment (i.e., a transcription termination sequence). In some embodiments, the moiety functions in a eukaryotic cell. In some embodiments, the moiety functions in a prokaryotic cell. In some embodiments, the moiety functions in both eukaryotic and prokaryotic cells. Non-limiting examples of suitable moieties include: a 5′ cap (e.g., a 7-methylguanylate cap (m7 G)), a riboswitch sequence (e.g., to allow for regulated stability and/or regulated accessibility by proteins and protein complexes), a sequence that forms a dsRNA duplex (i.e., a hairpin), a sequence that targets the RNA to a subcellular location (e.g., nucleus, mitochondria, chloroplasts, and the like), a modification or sequence that provides for tracking (e.g., direct conjugation to a fluorescent molecule, conjugation to a moiety that facilitates fluorescent detection, a sequence that allows for fluorescent detection, etc.), and/or a modification or sequence that provides a binding site for proteins (e.g., proteins that act on DNA, including transcriptional activators, transcriptional repressors, DNA methyltransferases, DNA demethylases, histone acetyltransferases, histone deacetylases, and the like).

### Spacer Sequence

[0277] The spacer sequence hybridizes to a sequence in a target nucleic acid of interest. The spacer of a genome-targeting nucleic acid interacts with a target nucleic acid in a sequence-specific manner via hybridization (i.e., base pairing). The nucleotide sequence of the spacer thus varies depending on the sequence of the target nucleic acid of interest.

[0278] In a CRISPR/Cas system herein, the spacer sequence is designed to hybridize to a target nucleic acid that is located 5′ of a PAM of the Cas9 enzyme used in the system. The spacer may perfectly match the target sequence or may have mismatches. Each Cas9 enzyme has a particular PAM sequence that it recognizes in a target DNA. For example, S. pyogenes recognizes in a target nucleic acid a PAM that comprises the sequence 5′-NRG-3′, where R comprises either A or G, where N is any nucleotide and N is immediately 3′ of the target nucleic acid sequence targeted by the spacer sequence.

[0279] In some embodiments, the target nucleic acid sequence comprises 20 nucleotides. In some embodiments, the target nucleic acid comprises less than 20 nucleotides. In some embodiments, the target nucleic acid comprises more than 20 nucleotides. In some embodiments, the target nucleic acid comprises at least: 5, 10, 15, 16, 17, 18, 19, 20, 21, 22, 23, 24, 25, 30 or more nucleotides. In some embodiments, the target nucleic acid comprises at most: 5, 10, 15, 16, 17, 18, 19, 20, 21, 22, 23, 24, 25, 30 or more nucleotides. In some embodiments, the target nucleic acid sequence comprises 20 bases immediately 5′ of the first nucleotide of the PAM. For example, in a sequence comprising 5′-NNNNNNNNNNNNNNNNNNNNNRG-3′ (SEQ ID NO: 68,298), the target nucleic acid comprises the sequence that corresponds to the Ns, wherein N is any nucleotide, and the underlined NRG sequence is the S. pyogenes PAM.

[0280] In some embodiments, the spacer sequence that hybridizes to the target nucleic acid has a length of at least about 6 nucleotides (nt). The spacer sequence can be at least about 6 nt, at least about 10 nt, at least about 15 nt, at least about 18 nt, at least about 19 nt, at least about 20 nt, at least about 25 nt, at least about 30 nt, at least about 35 nt or at least about 40 nt, from about 6 nt to about 80 nt, from about 6 nt to about 50 nt, from about 6 nt to about 45 nt, from about 6 nt to about 40 nt, from about 6 nt to about 35 nt, from about 6 nt to about 30 nt, from about 6 nt to about 25 nt, from about 6 nt to about 20 nt, from about 6 nt to about 19 nt, from about 10 nt to about 50 nt, from about 10 nt to about 45 nt, from about 10 nt to about 40 nt, from about 10 nt to about 35 nt, from about 10 nt to about 30 nt, from about 10 nt to about 25 nt, from about 10 nt to about 20 nt, from about 10 nt to about 19 nt, from about 19 nt to about 25 nt, from about 19 nt to about 30 nt, from about 19 nt to about 35 nt, from about 19 nt to about 40 nt, from about 19 nt to about 45 nt, from about 19 nt to about 50 nt, from about 19 nt to about 60 nt, from about 20 nt to about 25 nt, from about 20 nt to about 30 nt, from about 20 nt to about 35 nt, from about 20 nt to about 40 nt, from about 20 nt to about 45 nt, from about 20 nt to about 50 nt, or from about 20 nt to about 60 nt. In some embodiments, the spacer sequence comprises 20 nucleotides. In some embodiments, the spacer comprises 19 nucleotides.

[0281] In some embodiments, the percent complementarity between the spacer sequence and the target nucleic acid is at least about 30%, at least about 40%, at least about 50%, at least about 60%, at least about 65%, at least about 70%, at least about 75%, at least about 80%, at least about 85%, at least about 90%, at least about 95%, at least about 97%, at least about 98%, at least about 99%, or 100%. In some embodiments, the percent complementarity between the spacer sequence and the target nucleic acid is at most about 30%, at most about 40%, at most about 50%, at most about 60%, at most about 65%, at most about 70%, at most about 75%, at most about 80%, at most about 85%, at most about 90%, at most about 95%, at most about 97%, at most about 98%, at most about 99%, or 100%. In some embodiments, the percent complementarity between the spacer sequence and the target nucleic acid is 100% over the six contiguous 5′-most nucleotides of the target sequence of the complementary strand of the target nucleic acid. In some embodiments, the percent complementarity between the spacer sequence and the target nucleic acid is at least 60% over about 20 contiguous nucleotides. The length of the spacer sequence and the target nucleic acid can differ by 1 to 6 nucleotides, which may be thought of as a bulge or bulges.

[0282] In some embodiments, a spacer sequence is designed or chosen using a computer program. The computer program can use variables, such as predicted melting temperature, secondary structure formation, predicted annealing temperature, sequence identity, genomic context, chromatin accessibility, % GC, frequency of genomic occurrence (e.g., of sequences that are identical or are similar but vary in one or more spots as a result of mismatch, insertion or deletion), methylation status, presence of SNPs, and the like.

### Minimum CRISPR Repeat Sequence

[0283] In some embodiments, a minimum CRISPR repeat sequence is a sequence with at least about 30%, about 40%, about 50%, about 60%, about 65%, about 70%, about 75%, about 80%, about 85%, about 90%, about 95%, or 100% sequence identity to a reference CRISPR repeat sequence (e.g., crRNA from S. pyogenes).

[0284] A minimum CRISPR repeat sequence comprises nucleotides that can hybridize to a minimum tracrRNA sequence in a cell. The minimum CRISPR repeat sequence and a minimum tracrRNA sequence form a duplex, i.e. a base-paired double-stranded structure. Together, the minimum CRISPR repeat sequence and the minimum tracrRNA sequence bind to the site-directed polypeptide. At least a part of the minimum CRISPR repeat sequence hybridizes to the minimum tracrRNA sequence. In some embodiments, at least a part of the minimum CRISPR repeat sequence comprises at least about 30%, about 40%, about 50%, about 60%, about 65%, about 70%, about 75%, about 80%, about 85%, about 90%, about 95%, or 100% complementary to the minimum tracrRNA sequence. In some embodiments, at least a part of the minimum CRISPR repeat sequence comprises at most about 30%, about 40%, about 50%, about 60%, about 65%, about 70%, about 75%, about 80%, about 85%, about 90%, about 95%, or 100% complementary to the minimum tracrRNA sequence.

[0285] The minimum CRISPR repeat sequence can have a length from about 7 nucleotides to about 100 nucleotides. For example, the length of the minimum CRISPR repeat sequence is from about 7 nucleotides (nt) to about 50 nt, from about 7 nt to about 40 nt, from about 7 nt to about 30 nt, from about 7 nt to about 25 nt, from about 7 nt to about 20 nt, from about 7 nt to about 15 nt, from about 8 nt to about 40 nt, from about 8 nt to about 30 nt, from about 8 nt to about 25 nt, from about 8 nt to about 20 nt, from about 8 nt to about 15 nt, from about 15 nt to about 100 nt, from about 15 nt to about 80 nt, from about 15 nt to about 50 nt, from about 15 nt to about 40 nt, from about 15 nt to about 30 nt, or from about 15 nt to about 25 nt. In some embodiments, the minimum CRISPR repeat sequence is approximately 9 nucleotides in length. In some embodiments, the minimum CRISPR repeat sequence is approximately 12 nucleotides in length.

[0286] In some embodiments, the minimum CRISPR repeat sequence is at least about 60% identical to a reference minimum CRISPR repeat sequence (e.g., wild-type crRNA from S. pyogenes) over a stretch of at least 6, 7, or 8 contiguous nucleotides. For example, the minimum CRISPR repeat sequence is at least about 65% identical, at least about 70% identical, at least about 75% identical, at least about 80% identical, at least about 85% identical, at least about 90% identical, at least about 95% identical, at least about 98% identical, at least about 99% identical or 100% identical to a reference minimum CRISPR repeat sequence over a stretch of at least 6, 7, or 8 contiguous nucleotides.

Minimum tracrRNA Sequence

[0287] In some embodiments, a minimum tracrRNA sequence is a sequence with at least about 30%, about 40%, about 50%, about 60%, about 65%, about 70%, about 75%, about 80%, about 85%, about 90%, about 95%, or 100% sequence identity to a reference tracrRNA sequence (e.g., wild type tracrRNA from S. pyogenes).

[0288] A minimum tracrRNA sequence comprises nucleotides that hybridize to a minimum CRISPR repeat sequence in a cell. A minimum tracrRNA sequence and a minimum CRISPR repeat sequence form a duplex, i.e. a base-paired double-stranded structure. Together, the minimum tracrRNA sequence and the minimum CRISPR repeat bind to a site-directed polypeptide. At least a part of the minimum tracrRNA sequence can hybridize to the minimum CRISPR repeat sequence. In some embodiments, the minimum tracrRNA sequence is at least about 30%, about 40%, about 50%, about 60%, about 65%, about 70%, about 75%, about 80%, about 85%, about 90%, about 95%, or 100% complementary to the minimum CRISPR repeat sequence.

[0289] The minimum tracrRNA sequence can have a length from about 7 nucleotides to about 100 nucleotides. For example, the minimum tracrRNA sequence can be from about 7 nucleotides (nt) to about 50 nt, from about 7 nt to about 40 nt, from about 7 nt to about 30 nt, from about 7 nt to about 25 nt, from about 7 nt to about 20 nt, from about 7 nt to about 15 nt, from about 8 nt to about 40 nt, from about 8 nt to about 30 nt, from about 8 nt to about 25 nt, from about 8 nt to about 20 nt, from about 8 nt to about 15 nt, from about 15 nt to about 100 nt, from about 15 nt to about 80 nt, from about 15 nt to about 50 nt, from about 15 nt to about 40 nt, from about 15 nt to about 30 nt or from about 15 nt to about 25 nt long. In some embodiments, the minimum tracrRNA sequence is approximately 9 nucleotides in length. In some embodiments, the minimum tracrRNA sequence is approximately 12 nucleotides. In some embodiments, the minimum tracrRNA consists of tracrRNA nt 23-48 described in Jinek et al., supra.

[0290] In some embodiments, the minimum tracrRNA sequence is at least about 60% identical to a reference minimum tracrRNA (e.g., wild type, tracrRNA from S. pyogenes) sequence over a stretch of at least 6, 7, or 8 contiguous nucleotides. For example, the minimum tracrRNA sequence is at least about 65% identical, about 70% identical, about 75% identical, about 80% identical, about 85% identical, about 90% identical, about 95% identical, about 98% identical, about 99% identical or 100% identical to a reference minimum tracrRNA sequence over a stretch of at least 6, 7, or 8 contiguous nucleotides.

[0291] In some embodiments, the duplex between the minimum CRISPR RNA and the minimum tracrRNA comprises a double helix. In some embodiments, the duplex between the minimum CRISPR RNA and the minimum tracrRNA comprises at least about 1, 2, 3, 4, 5, 6, 7, 8, 9, or 10 or more nucleotides. In some embodiments, the duplex between the minimum CRISPR RNA and the minimum tracrRNA comprises at most about 1, 2, 3, 4, 5, 6, 7, 8, 9, or 10 or more nucleotides.

[0292] In some embodiments, the duplex comprises a mismatch (i.e., the two strands of the duplex are not 100% complementary). In some embodiments, the duplex comprises at least about 1, 2, 3, 4, or 5 or mismatches. In some embodiments, the duplex comprises at most about 1, 2, 3, 4, or 5 or mismatches. In some embodiments, the duplex comprises no more than 2 mismatches.

### Bulges

[0293] In some embodiments, there is a “bulge” in the duplex between the minimum CRISPR RNA and the minimum tracrRNA. The bulge is an unpaired region of nucleotides within the duplex. In some embodiments, the bulge contributes to the binding of the duplex to the site-directed polypeptide. A bulge comprises, on one side of the duplex, an unpaired 5′-XXXY-3′ where X is any purine and Y comprises a nucleotide that can form a wobble pair with a nucleotide on the opposite strand, and an unpaired nucleotide region on the other side of the duplex. The number of unpaired nucleotides on the two sides of the duplex can be different.

[0294] In one example, the bulge comprises an unpaired purine (e.g., adenine) on the minimum CRISPR repeat strand of the bulge. In some embodiments, a bulge comprises an unpaired 5′-AAGY-3′ of the minimum tracrRNA sequence strand of the bulge, where Y comprises a nucleotide that can form a wobble pairing with a nucleotide on the minimum CRISPR repeat strand.

[0295] In some embodiments, a bulge on the minimum CRISPR repeat side of the duplex comprises at least 1, 2, 3, 4, or 5 or more unpaired nucleotides. In some embodiments, a bulge on the minimum CRISPR repeat side of the duplex comprises at most 1, 2, 3, 4, or 5 or more unpaired nucleotides. In some embodiments, a bulge on the minimum CRISPR repeat side of the duplex comprises 1 unpaired nucleotide.

[0296] In some embodiments, a bulge on the minimum tracrRNA sequence side of the duplex comprises at least 1, 2, 3, 4, 5, 6, 7, 8, 9, or 10 or more unpaired nucleotides. In some embodiments, a bulge on the minimum tracrRNA sequence side of the duplex comprises at most 1, 2, 3, 4, 5, 6, 7, 8, 9, or 10 or more unpaired nucleotides. In some embodiments, a bulge on a second side of the duplex (e.g., the minimum tracrRNA sequence side of the duplex) comprises 4 unpaired nucleotides.

[0297] In some embodiments, a bulge comprises at least one wobble pairing. In some embodiments, a bulge comprises at most one wobble pairing. In some embodiments, a bulge comprises at least one purine nucleotide. In some embodiments, a bulge comprises at least 3 purine nucleotides. In some embodiments, a bulge sequence comprises at least 5 purine nucleotides. In some embodiments, a bulge sequence comprises at least one guanine nucleotide. In some embodiments, a bulge sequence comprises at least one adenine nucleotide.

### Hairpins

[0298] In various embodiments, one or more hairpins are located 3′ to the minimum tracrRNA in the 3′ tracrRNA sequence.

[0299] In some embodiments, the hairpin starts at least about 1, 2, 3, 4, 5, 6, 7, 8, 9, 10, 15, or 20 or more nucleotides 3′ from the last paired nucleotide in the minimum CRISPR repeat and minimum tracrRNA sequence duplex. In some embodiments, the hairpin can start at most about 1, 2, 3, 4, 5, 6, 7, 8, 9 or 10 or more nucleotides 3′ of the last paired nucleotide in the minimum CRISPR repeat and minimum tracrRNA sequence duplex.

[0300] In some embodiments, a hairpin comprises at least about 1, 2, 3, 4, 5, 6, 7, 8, 9, 10, 15, or 20 or more consecutive nucleotides. In some embodiments, a hairpin comprises at most about 1, 2, 3, 4, 5, 6, 7, 8, 9, 10, 15, or more consecutive nucleotides.

[0301] In some embodiments, a hairpin comprises a CC dinucleotide (i.e., two consecutive cytosine nucleotides).

[0302] In some embodiments, a hairpin comprises duplexed nucleotides (e.g., nucleotides in a hairpin, hybridized together). For example, a hairpin comprises a CC dinucleotide that is hybridized to a GG dinucleotide in a hairpin duplex of the 3′ tracrRNA sequence.

[0303] One or more of the hairpins can interact with guide RNA-interacting regions of a site-directed polypeptide.

[0304] In some embodiments, there are two or more hairpins, and in some embodiments there are three or more hairpins.

3′ tracrRNA Sequence

[0305] In some embodiments, a 3′ tracrRNA sequence comprises a sequence with at least about 30%, about 40%, about 50%, about 60%, about 65%, about 70%, about 75%, about 80%, about 85%, about 90%, about 95%, or 100% sequence identity to a reference tracrRNA sequence (e.g., a tracrRNA from S. pyogenes).

[0306] In some embodiments, the 3′ tracrRNA sequence has a length from about 6 nucleotides to about 100 nucleotides. For example, the 3′ tracrRNA sequence can have a length from about 6 nucleotides (nt) to about 50 nt, from about 6 nt to about 40 nt, from about 6 nt to about 30 nt, from about 6 nt to about 25 nt, from about 6 nt to about 20 nt, from about 6 nt to about 15 nt, from about 8 nt to about 40 nt, from about 8 nt to about 30 nt, from about 8 nt to about 25 nt, from about 8 nt to about 20 nt, from about 8 nt to about 15 nt, from about 15 nt to about 100 nt, from about 15 nt to about 80 nt, from about 15 nt to about 50 nt, from about 15 nt to about 40 nt, from about 15 nt to about 30 nt, or from about 15 nt to about 25 nt. In some embodiments, the 3′ tracrRNA sequence has a length of approximately 14 nucleotides.

[0307] In some embodiments, the 3′ tracrRNA sequence is at least about 60% identical to a reference 3′ tracrRNA sequence (e.g., wild type 3′ tracrRNA sequence from S. pyogenes) over a stretch of at least 6, 7, or 8 contiguous nucleotides. For example, the 3′ tracrRNA sequence is at least about 60% identical, about 65% identical, about 70% identical, about 75% identical, about 80% identical, about 85% identical, about 90% identical, about 95% identical, about 98% identical, about 99% identical, or 100% identical, to a reference 3′ tracrRNA sequence (e.g., wild type 3′ tracrRNA sequence from S. pyogenes) over a stretch of at least 6, 7, or 8 contiguous nucleotides.

[0308] In some embodiments, a 3′ tracrRNA sequence comprises more than one duplexed region (e.g., hairpin, hybridized region). In some embodiments, a 3′ tracrRNA sequence comprises two duplexed regions.

[0309] In some embodiments, the 3′ tracrRNA sequence comprises a stem loop structure. In some embodiments, a stem loop structure in the 3′ tracrRNA comprises at least 1, 2, 3, 4, 5, 6, 7, 8, 9, 10, 15 or 20 or more nucleotides. In some embodiments, the stem loop structure in the 3′ tracrRNA comprises at most 1, 2, 3, 4, 5, 6, 7, 8, 9 or 10 or more nucleotides. In some embodiments, the stem loop structure comprises a functional moiety. For example, the stem loop structure may comprise an aptamer, a ribozyme, a protein-interacting hairpin, a CRISPR array, an intron, or an exon. In some embodiments, the stem loop structure comprises at least about 1, 2, 3, 4, or 5 or more functional moieties. In some embodiments, the stem loop structure comprises at most about 1, 2, 3, 4, or 5 or more functional moieties.

[0310] In some embodiments, the hairpin in the 3′ tracrRNA sequence comprises a P-domain. In some embodiments, the P-domain comprises a double-stranded region in the hairpin.

tracrRNA Extension Sequence

[0311] A tracrRNA extension sequence may be provided whether the tracrRNA is in the context of single-molecule guides or double-molecule guides. In some embodiments, a tracrRNA extension sequence has a length from about 1 nucleotide to about 400 nucleotides. In some embodiments, a tracrRNA extension sequence has a length of more than 1, 5, 10, 15, 20, 25, 30, 35, 40, 45, 50, 60, 70, 80, 90, 100, 120, 140, 160, 180, 200, 220, 240, 260, 280, 300, 320, 340, 360, 380, or 400 nucleotides. In some embodiments, a tracrRNA extension sequence has a length from about 20 to about 5000 or more nucleotides. In some embodiments, a tracrRNA extension sequence has a length of more than 1000 nucleotides. In some embodiments, a tracrRNA extension sequence has a length of less than 1, 5, 10, 15, 20, 25, 30, 35, 40, 45, 50, 60, 70, 80, 90, 100, 120, 140, 160, 180, 200, 220, 240, 260, 280, 300, 320, 340, 360, 380, 400 or more nucleotides. In some embodiments, a tracrRNA extension sequence can have a length of less than 1000 nucleotides. In some embodiments, a tracrRNA extension sequence comprises less than 10 nucleotides in length. In some embodiments, a tracrRNA extension sequence is 10-30 nucleotides in length. In some embodiments, tracrRNA extension sequence is 30-70 nucleotides in length.

[0312] In some embodiments, the tracrRNA extension sequence comprises a functional moiety (e.g., a stability control sequence, ribozyme, endoribonuclease binding sequence). In some embodiments, the functional moiety comprises a transcriptional terminator segment (i.e., a transcription termination sequence). In some embodiments, the functional moiety has a total length from about 10 nucleotides (nt) to about 100 nucleotides, from about 10 nt to about 20 nt, from about 20 nt to about 30 nt, from about 30 nt to about 40 nt, from about 40 nt to about 50 nt, from about 50 nt to about 60 nt, from about 60 nt to about 70 nt, from about 70 nt to about 80 nt, from about 80 nt to about 90 nt, or from about 90 nt to about 100 nt, from about 15 nt to about 80 nt, from about 15 nt to about 50 nt, from about 15 nt to about 40 nt, from about 15 nt to about 30 nt, or from about 15 nt to about 25 nt. In some embodiments, the functional moiety functions in a eukaryotic cell. In some embodiments, the functional moiety functions in a prokaryotic cell. In some embodiments, the functional moiety functions in both eukaryotic and prokaryotic cells.

[0313] Non-limiting examples of suitable tracrRNA extension functional moieties include a 3′ poly-adenylated tail, a riboswitch sequence (e.g., to allow for regulated stability and/or regulated accessibility by proteins and protein complexes), a sequence that forms a dsRNA duplex (i.e., a hairpin), a sequence that targets the RNA to a subcellular location (e.g., nucleus, mitochondria, chloroplasts, and the like), a modification or sequence that provides for tracking (e.g., direct conjugation to a fluorescent molecule, conjugation to a moiety that facilitates fluorescent detection, a sequence that allows for fluorescent detection, etc.), and/or a modification or sequence that provides a binding site for proteins (e.g., proteins that act on DNA, including transcriptional activators, transcriptional repressors, DNA methyltransferases, DNA demethylases, histone acetyltransferases, histone deacetylases, and the like). In some embodiments, a tracrRNA extension sequence comprises a primer binding site or a molecular index (e.g., barcode sequence). In some embodiments, the tracrRNA extension sequence comprises one or more affinity tags.

### Single-Molecule Guide Linker Sequence

[0314] In some embodiments, the linker sequence of a single-molecule guide nucleic acid has a length from about 3 nucleotides to about 100 nucleotides. In Jinek et al., supra, for example, a simple 4 nucleotide “tetraloop” (-GAAA-) was used, Science, 337(6096):816-821 (2012). An illustrative linker has a length from about 3 nucleotides (nt) to about 90 nt, from about 3 nt to about 80 nt, from about 3 nt to about 70 nt, from about 3 nt to about 60 nt, from about 3 nt to about 50 nt, from about 3 nt to about 40 nt, from about 3 nt to about 30 nt, from about 3 nt to about 20 nt, from about 3 nt to about 10 nt. For example, the linker can have a length from about 3 nt to about 5 nt, from about 5 nt to about 10 nt, from about 10 nt to about 15 nt, from about 15 nt to about 20 nt, from about 20 nt to about 25 nt, from about 25 nt to about 30 nt, from about 30 nt to about 35 nt, from about 35 nt to about 40 nt, from about 40 nt to about 50 nt, from about 50 nt to about 60 nt, from about 60 nt to about 70 nt, from about 70 nt to about 80 nt, from about 80 nt to about 90 nt, or from about 90 nt to about 100 nt. In some embodiments, the linker of a single-molecule guide nucleic acid is between 4 and 40 nucleotides. In some embodiments, a linker is at least about 100, 500, 1000, 1500, 2000, 2500, 3000, 3500, 4000, 4500, 5000, 5500, 6000, 6500, or 7000 or more nucleotides. In some embodiments, a linker is at most about 100, 500, 1000, 1500, 2000, 2500, 3000, 3500, 4000, 4500, 5000, 5500, 6000, 6500, or 7000 or more nucleotides.

[0315] Linkers can comprise any of a variety of sequences, although preferably the linker will not comprise sequences that have extensive regions of homology with other portions of the guide RNA, which might cause intramolecular binding that could interfere with other functional regions of the guide. In Jinek et al., supra, a simple 4 nucleotide sequence -GAAA- was used, Science, 337(6096): 816-821 (2012), but numerous other sequences, including longer sequences can likewise be used.

[0316] In some embodiments, the linker sequence comprises a functional moiety. For example, the linker sequence may comprise one or more features, including an aptamer, a ribozyme, a protein-interacting hairpin, a protein binding site, a CRISPR array, an intron, or an exon. In some embodiments, the linker sequence comprises at least about 1, 2, 3, 4, or 5 or more functional moieties. In some embodiments, the linker sequence comprises at most about 1, 2, 3, 4, or 5 or more functional moieties.

Genome Engineering Strategies to Correct Cells by Insertion, Correction, Deletion, or Replacement of One or More Mutations or Exons within or Near the Gene, or by Knocking-In SERPINA1 cDNA or a Minigene into the Locus of the Corresponding Gene or Safe Harbor Site

[0317] The methods of the present disclosure can involve correction of one or both of the mutant alleles. Gene editing to correct the mutation has the advantage of restoration of correct expression levels and temporal control. Sequencing the patient's SERPINA1 alleles allows for design of the gene editing strategy to best correct the identified mutation(s).

[0318] A step of the ex vivo methods of the invention involves editing/correcting the patient specific iPS cells using genome engineering. Alternatively, a step of the ex vivo methods of the invention involves editing/correcting the progenitor cell, primary hepatocyte, mesenchymal stem cell, or liver progenitor cell. Likewise, a step of the in vivo methods of the invention involves editing/correcting the cells in an AATD patient using genome engineering. Similarly, a step in the cellular methods of the invention involves editing/correcting the SERPINA1 gene in a human cell by genome engineering.

[0319] AATD patients exhibit one or more mutations in the SERPINA1 gene. Therefore, different patients will generally require different correction strategies. Any CRISPR endonuclease may be used in the methods of the invention, each CRISPR endonuclease having its own associated PAM, which may or may not be disease specific. For example, gRNA spacer sequences for targeting the SERPINA1 gene with a CRISPR/Cas9 endonuclease from S. pyogenes have been identified in SEQ ID NOs: 54,860-61,324. gRNA spacer sequences for targeting the SERPINA1 gene with a CRISPR/Cas9 endonuclease from S. aureus have been identified in SEQ ID NOs: 61,325-61,936. gRNA spacer sequences for targeting the SERPINA1 gene with a CRISPR/Cas9 endonuclease from S. thermophilus have been identified in SEQ ID NOs: 61,9347-62,069. gRNA spacer sequences for targeting the SERPINA1 gene with a CRISPR/Cas9 endonuclease from T. denticola have been identified in SEQ ID NOs: 62,070-62,120. gRNA spacer sequences for targeting the SERPINA1 gene with a CRISPR/Cas9 endonuclease from N. meningitides have been identified in SEQ ID NOs: 62, 121-62,563. gRNA spacer sequences for targeting the SERPINA1 gene with a CRISPR/Cpf1 endonuclease from Acidaminococcus, Lachnospiraceae, and Francisella novicida have been identified in SEQ ID NOs: 62,564-68,297. gRNA spacer sequences for targeting, e.g., targeting exon 1-2 of AAVS1 (PPP1R12C), ALB, Angptl3, ApoC3, ASGR2, CCR5, FIX (F9), G6PC, Gys2, HGD, Lp(a), Pcsk9, Serpina1, TF, and TTR with a CRISPR/Cas9 endonuclease from S. pyogenes have been identified in Example 7. gRNA spacer sequences for targeting, e.g., targeting exon 1-2 of, AAVS1 (PPP1R12C), ALB, Angptl3, ApoC3, ASGR2, CCR5, FIX (F9), G6PC, Gys2, HGD, Lp(a), Pcsk9, Serpina1, TF, and TTR with a CRISPR/Cas9 endonuclease from S. aureus have been identified in Example 8. gRNA spacer sequences for targeting, e.g., targeting exon 1-2 of, AAVS1 (PPP1R12C), ALB, Angptl3, ApoC3, ASGR2, CCR5, FIX (F9), G6PC, Gys2, HGD, Lp(a), Pcsk9, Serpina1, TF, and TTR with a CRISPR/Cas9 endonuclease from S. thermophilus have been identified in Example 9. gRNA spacer sequences for targeting, e.g., targeting exon 1-2 of, AAVS1 (PPP1R12C), ALB, Angptl3, ApoC3, ASGR2, CCR5, FIX (F9), G6PC, Gys2, HGD, Lp(a), Pcsk9, Serpina1, TF, and TTR with a CRISPR/Cas9 endonuclease from T. denticola have been identified in Example 10. gRNA spacer sequences for targeting, e.g., targeting exon 1-2 of, AAVS1 (PPP1R12C), ALB, Angptl3, ApoC3, ASGR2, CCR5, FIX (F9), G6PC, Gys2, HGD, Lp(a), Pcsk9, Serpina1, TF, and TTR with a CRISPR/Cas9 endonuclease from N. meningitides have been identified in Example 11. gRNA spacer sequences for targeting, e.g., targeting exon 1-2 of, AAVS1 (PPP1R12C), ALB, Angptl3, ApoC3, ASGR2, CCR5, FIX (F9), G6PC, Gys2, HGD, Lp(a), Pcsk9, Serpina1, TF, and TTR with a CRISPR/Cas9 endonuclease from Acidaminococcus, Lachnospiraceae, and Francisella novicida have been identified in Example 12.

[0320] For example, the mutation can be corrected by the insertions or deletions that arise due to the imprecise NHEJ repair pathway. If the patient's SERPINA1 gene has an inserted or deleted base, a targeted cleavage can result in a NHEJ-mediated insertion or deletion that restores the frame. Missense mutations can also be corrected through NHEJ-mediated correction using one or more guide RNA. The ability or likelihood of the cut(s) to correct the mutation can be designed or evaluated based on the local sequence and micro-homologies. NHEJ can also be used to delete segments of the gene, either directly or by altering splice donor or acceptor sites through cleavage by one gRNA targeting several locations, or several gRNAs. This may be useful if an amino acid, domain or exon contains the mutations and can be removed or inverted, or if the deletion otherwise restored function to the protein. Pairs of guide strands have been used for deletions and corrections of inversions.

[0321] Alternatively, the donor for correction by HDR contains the corrected sequence with small or large flanking homology arms to allow for annealing. HDR is essentially an error-free mechanism that uses a supplied homologous DNA sequence as a template during DSB repair. The rate of homology directed repair (HDR) is a function of the distance between the mutation and the cut site so choosing overlapping or nearest target sites is important. Templates can include extra sequences flanked by the homologous regions or can contain a sequence that differs from the genomic sequence, thus allowing sequence editing.

[0322] In addition to correcting mutations by NHEJ or HDR, a range of other options are possible. If there are small or large deletions or multiple mutations, a cDNA can be knocked in that contains the exons affected. A full length cDNA can be knocked into any “safe harbor”, but must use a supplied or other promoter. If this construct is knocked into the correct location, it will have physiological control, similar to the normal gene. Pairs of nucleases can be used to delete mutated gene regions, though a donor would usually have to be provided to restore function. In this case two gRNA would be supplied and one donor sequence.

[0323] Some genome engineering strategies involve correction of one or more mutations in or near the SERPINA1 gene or deleting the mutant SERPINA1 DNA and/or knocking-in SERPINA1 cDNA or a minigene (comprised of one or more exons and introns or natural or synthetic introns) into the locus of the corresponding gene or a safe harbor locus by homology directed repair (HDR), which is also known as homologous recombination (HR). Homology directed repair is one strategy for treating patients that have inactivating mutations in or near the SERPINA1 gene. These strategies will restore the SERPINA1 gene and completely reverse, treat, and/or mitigate the diseased state. This strategy will require a more custom approach based on the location of the patient's inactivating mutation(s). Donor nucleotides for correcting mutations are small (<300 bp). This is advantageous, as HDR efficiencies may be inversely related to the size of the donor molecule. Also, it is expected that the donor templates can fit into size constrained viral vector molecules, e.g., adeno-associated virus (AAV) molecules, which have been shown to be an effective means of donor template delivery. Also, it is expected that the donor templates can fit into other size constrained molecules, including, by way of non-limiting example, platelets and/or exosomes or other microvesicles.

[0324] Homology direct repair is a cellular mechanism for repairing double-stranded breaks (DSBs). The most common form is homologous recombination. There are additional pathways for HDR, including single-strand annealing and alternative-HDR. Genome engineering tools allow researchers to manipulate the cellular homologous recombination pathways to create site-specific modifications to the genome. It has been found that cells can repair a double-stranded break using a synthetic donor molecule provided in trans. Therefore, by introducing a double-stranded break near a specific mutation and providing a suitable donor, targeted changes can be made in the genome. Specific cleavage increases the rate of HDR more than 1,000 fold above the rate of 1 in 10⁶ cells receiving a homologous donor alone. The rate of homology directed repair (HDR) at a particular nucleotide is a function of the distance to the cut site, so choosing overlapping or nearest target sites is important. Gene editing offers the advantage over gene addition, as correcting in situ leaves the rest of the genome unperturbed.

[0325] Supplied donors for editing by HDR vary markedly but generally contain the intended sequence with small or large flanking homology arms to allow annealing to the genomic DNA. The homology regions flanking the introduced genetic changes can be 30 bp or smaller, or as large as a multi-kilobase cassette that can contain promoters, cDNAs, etc. Both single-stranded and double-stranded oligonucleotide donors have been used. These oligonucleotides range in size from less than 100 nt to over many kb, though longer ssDNA can also be generated and used. Double-stranded donors are often used, including PCR amplicons, plasmids, and mini-circles. In general, it has been found that an AAV vector is a very effective means of delivery of a donor template, though the packaging limits for individual donors is <5 kb. Active transcription of the donor increased HDR three-fold, indicating the inclusion of promoter may increase conversion. Conversely, CpG methylation of the donor decreased gene expression and HDR.

[0326] In addition to wildtype endonucleases, such as Cas9, nickase variants exist that have one or the other nuclease domain inactivated resulting in cutting of only one DNA strand. HDR can be directed from individual Cas nickases or using pairs of nickases that flank the target area. Donors can be single-stranded, nicked, or dsDNA.

[0327] The donor DNA can be supplied with the nuclease or independently by a variety of different methods, for example by transfection, nano-particle, micro-injection, or viral transduction. A range of tethering options has been proposed to increase the availability of the donors for HDR. Examples include attaching the donor to the nuclease, attaching to DNA binding proteins that bind nearby, or attaching to proteins that are involved in DNA end binding or repair.

[0328] The repair pathway choice can be guided by a number of culture conditions, such as those that influence cell cycling, or by targeting of DNA repair and associated proteins. For example, to increase HDR, key NHEJ molecules can be suppressed, such as KU70, KU80 or DNA ligase IV.

[0329] Without a donor present, the ends from a DNA break or ends from different breaks can be joined using the several nonhomologous repair pathways in which the DNA ends are joined with little or no base-pairing at the junction. In addition to canonical NHEJ, there are similar repair mechanisms, such as alt-NHEJ. If there are two breaks, the intervening segment can be deleted or inverted. NHEJ repair pathways can lead to insertions, deletions or mutations at the joints.

[0330] NHEJ was used to insert a 15-kb inducible gene expression cassette into a defined locus in human cell lines after nuclease cleavage. Maresca, M., Lin, V. G., Guo, N. & Yang, Y., Genome Res 23, 539-546 (2013).

[0331] In addition to genome editing by NHEJ or HDR, site-specific gene insertions have been conducted that use both the NHEJ pathway and HR. A combination approach may be applicable in certain settings, possibly including intron/exon borders. NHEJ may prove effective for ligation in the intron, while the error-free HDR may be better suited in the coding region.

[0332] As stated previously, the SERPINA1 gene contains 5 exons. Any one or more of the 5 exons or nearby introns may be repaired in order to correct a mutation and restore the inactive AAT protein. Alternatively, there are various mutations associated with AATD, which are a combination of missense, nonsense, frameshift and other mutations, with the common effect of inactivating AAT. Any one or more of the mutations may be repaired in order to restore the inactive AAT. For example, one or more of the following pathological variants may be corrected: rs764325655, rs121912713, rs28929474, rs17580, rs121912714, rs764220898, rs199422211, rs751235320, rs199422210, rs267606950, rs55819880, rs28931570 (See Table 1). These variants include deletions, insertions and single nucleotide polymorphisms. As a further alternative, SERPINA1 cDNA or minigene (comprised of, natural or synthetic enhancer and promoter, one or more exons, and natural or synthetic introns, and natural or synthetic 3′UTR and polyadenylation signal) may be knocked-in to the locus of the corresponding gene or knocked-in to a safe harbor site, such as AAVS1 (PPP1R12C), ALB, Angptl3, ApoC3, ASGR2, CCR5, FIX (F9), G6PC, Gys2, HGD, Lp(a), Pcsk9, Serpina1, TF, and/or TTR. The safe harbor locus can be selected from the group consisting of: exon 1-2 of AAVS1 (PPP1R12C), exon 1-2 of ALB, exon 1-2 of Angptl3, exon 1-2 of ApoC3, exon 1-2 of ASGR2, exon 1-2 of CCR5, exon 1-2 of FIX (F9), exon 1-2 of G6PC, exon 1-2 of Gys2, exon 1-2 of HGD, exon 1-2 of Lp(a), exon 1-2 of Pcsk9, exon 1-2 of Serpina1, exon 1-2 of TF, and exon 1-2 of TTR. In some embodiments, the methods provide one gRNA or a pair of gRNAs that can be used to facilitate incorporation of a new sequence from a polynucleotide donor template to correct one or more mutations or to knock-in a part of or the entire SERPINA1 gene or cDNA.

TABLE 1

| Variant | Location | Variant type |
|---|---|---|
| rs764325655 | 94,378,547-94,378,548 | Insertion |
| rs121912713 | 94,378,561 | single nucleotide |
| | | variation |
| rs28929474 | 94,378,610 | single nucleotide |
| | | variation |
| rs17580 | 94,380,925 | single nucleotide |
| | | variation |
| rs121912714 | 94,380,949 | single nucleotide |
| | | variation |
| rs764220898 | 94,381,043 | single nucleotide |
| | | variation |
| rs199422211 | 94,381,067 | single nucleotide |
| | | variation |
| rs751235320 | 94,382,591 | single nucleotide |
| | | variation |
| rs199422210 | 94,382,686 | single nucleotide |
| | | variation |
| rs267606950 | 94,382,686 | Insertion |
| rs55819880 | 94,383,008 | single nucleotide |
| | | variation |
| rs28931570 | 94,383,051 | single nucleotide |
| | | variation |

[0333] Some embodiments of the methods provide gRNA pairs that make a deletion by cutting the gene twice, one gRNA cutting at the 5′ end of one or more mutations and the other gRNA cutting at the 3′ end of one or more mutations that facilitates insertion of a new sequence from a polynucleotide donor template to replace the one or more mutations, or deletion may exclude mutant amino acids or amino acids adjacent to it (e.g., premature stop codon) and lead to expression of a functional protein, or restore an open reading frame. The cutting may be accomplished by a pair of DNA endonucleases that each makes a DSB in the genome, or by multiple nickases that together make a DSB in the genome.

[0334] Alternatively, some embodiments of the methods provide one gRNA to make one double-strand cut around one or more mutations that facilitates insertion of a new sequence from a polynucleotide donor template to replace the one or more mutations. The double-strand cut may be made by a single DNA endonuclease or multiple nickases that together make a DSB in the genome, or single gRNA may lead to deletion (MMEJ), which may exclude mutant amino acid (e.g., premature stop codon) and lead to expression of a functional protein, or restore an open reading frame.

[0335] Illustrative modifications within the SERPINA1 gene include replacements within or near (proximal) to the mutations referred to above, such as within the region of less than 3 kb, less than 2 kb, less than 1 kb, less than 0.5 kb upstream or downstream of the specific mutation. Given the relatively wide variations of mutations in the SERPINA1 gene, it will be appreciated that numerous variations of the replacements referenced above (including without limitation larger as well as smaller deletions), would be expected to result in restoration of AAT protein activity.

[0336] Such variants include replacements that are larger in the 5′ and/or 3′ direction than the specific mutation in question, or smaller in either direction. Accordingly, by “near” or “proximal” with respect to specific replacements, it is intended that the SSB or DSB locus associated with a desired replacement boundary (also referred to herein as an endpoint) may be within a region that is less than about 3 kb from the reference locus noted. In some embodiments, the DSB locus is more proximal and within 2 kb, within 1 kb, within 0.5 kb, or within 0.1 kb. In the case of small replacement, the desired endpoint is at or “adjacent to” the reference locus, by which it is intended that the endpoint is within 100 bp, within 50 bp, within 25 bp, or less than about 10 bp to 5 bp from the reference locus.

[0337] Embodiments comprising larger or smaller replacements are expected to provide the same benefit, as long as the AAT protein activity is restored. It is thus expected that many variations of the replacements described and illustrated herein will be effective for ameliorating AATD.

[0338] Another genome engineering strategy involves exon deletion. Targeted deletion of specific exons is an attractive strategy for treating a large subset of patients with a single therapeutic cocktail. Deletions can either be single exon deletions or multi-exon deletions. While multi-exon deletions can reach a larger number of patients, for larger deletions the efficiency of deletion greatly decreases with increased size. Therefore, deletions range can be from 40 to 10,000 base pairs (bp) in size. For example, deletions may range from 40-100; 100-300; 300-500; 500-1,000; 1,000-2,000; 2,000-3,000; 3,000-5,000; or 5,000-10,000 base pairs in size.

[0339] Deletions can occur in enhancer, promoter, 1st intron, and/or 3′UTR leading to upregulation of the gene expression, and/or through deletion of the regulatory elements.

[0340] As stated previously, the AAT gene contains 5 exons. Any one or more of the 5 exons, or aberrant intronic splice acceptor or donor sites, may be deleted in order to restore the AAT reading frame. In some embodiments, the methods provide gRNA pairs that can be used to delete exons 1, 2, 3, 4, or 5, or any combination of them.

[0341] In order to ensure that the pre-mRNA is properly processed following exon deletion, the surrounding splicing signals can be deleted. Splicing donor and acceptors are generally within 100 base pairs of the neighboring intron. Therefore, in some examples, methods can provide all gRNAs that cut approximately +/−100-3100 bp with respect to each exon/intron junction of interest.

[0342] For any of the genome editing strategies, gene editing can be confirmed by sequencing or PCR analysis.

### Target Sequence Selection

[0343] Shifts in the location of the 5′ boundary and/or the 3′ boundary relative to particular reference loci are used to facilitate or enhance particular applications of gene editing, which depend in part on the endonuclease system selected for the editing, as further described and illustrated herein.

[0344] In a first, non-limiting example of such target sequence selection, many endonuclease systems have rules or criteria that guide the initial selection of potential target sites for cleavage, such as the requirement of a PAM sequence motif in a particular position adjacent to the DNA cleavage sites in the case of CRISPR Type II or Type V endonucleases.

[0345] In another non-limiting example of target sequence selection or optimization, the frequency of “off-target” activity for a particular combination of target sequence and gene editing endonuclease (i.e. the frequency of DSBs occurring at sites other than the selected target sequence) is assessed relative to the frequency of on-target activity. In some cases, cells that have been correctly edited at the desired locus may have a selective advantage relative to other cells. Illustrative, but nonlimiting, examples of a selective advantage include the acquisition of attributes such as enhanced rates of replication, persistence, resistance to certain conditions, enhanced rates of successful engraftment or persistence in vivo following introduction into a patient, and other attributes associated with the maintenance or increased numbers or viability of such cells. In other cases, cells that have been correctly edited at the desired locus may be positively selected for by one or more screening methods used to identify, sort or otherwise select for cells that have been correctly edited. Both selective advantage and directed selection methods may take advantage of the phenotype associated with the correction. In some embodiments, cells may be edited two or more times in order to create a second modification that creates a new phenotype that is used to select or purify the intended population of cells. Such a second modification could be created by adding a second gRNA for a selectable or screenable marker. In some cases, cells can be correctly edited at the desired locus using a DNA fragment that contains the cDNA and also a selectable marker.

[0346] Whether any selective advantage is applicable or any directed selection is to be applied in a particular case, target sequence selection is also guided by consideration of off-target frequencies in order to enhance the effectiveness of the application and/or reduce the potential for undesired alterations at sites other than the desired target. As described further and illustrated herein and in the art, the occurrence of off-target activity is influenced by a number of factors including similarities and dissimilarities between the target site and various off target sites, as well as the particular endonuclease used. Bioinformatics tools are available that assist in the prediction of off-target activity, and frequently such tools can also be used to identify the most likely sites of off-target activity, which can then be assessed in experimental settings to evaluate relative frequencies of off-target to on-target activity, thereby allowing the selection of sequences that have higher relative on-target activities. Illustrative examples of such techniques are provided herein, and others are known in the art.

[0347] Another aspect of target sequence selection relates to homologous recombination events. Sequences sharing regions of homology can serve as focal points for homologous recombination events that result in deletion of intervening sequences. Such recombination events occur during the normal course of replication of chromosomes and other DNA sequences, and also at other times when DNA sequences are being synthesized, such as in the case of repairs of double-strand breaks (DSBs), which occur on a regular basis during the normal cell replication cycle but may also be enhanced by the occurrence of various events (such as UV light and other inducers of DNA breakage) or the presence of certain agents (such as various chemical inducers). Many such inducers cause DSBs to occur indiscriminately in the genome, and DSBs are regularly being induced and repaired in normal cells. During repair, the original sequence may be reconstructed with complete fidelity, however, in some cases, small insertions or deletions (referred to as “indels”) are introduced at the DSB site.

[0348] DSBs may also be specifically induced at particular locations, as in the case of the endonucleases systems described herein, which can be used to cause directed or preferential gene modification events at selected chromosomal locations. The tendency for homologous sequences to be subject to recombination in the context of DNA repair (as well as replication) can be taken advantage of in a number of circumstances, and is the basis for one application of gene editing systems, such as CRISPR, in which homology directed repair is used to insert a sequence of interest, provided through use of a “donor” polynucleotide, into a desired chromosomal location.

[0349] Regions of homology between particular sequences, which can be small regions of “microhomology” that may comprise as few as ten basepairs or less, can also be used to bring about desired deletions. For example, a single DSB is introduced at a site that exhibits microhomology with a nearby sequence. During the normal course of repair of such DSB, a result that occurs with high frequency is the deletion of the intervening sequence as a result of recombination being facilitated by the DSB and concomitant cellular repair process.

[0350] In some circumstances, however, selecting target sequences within regions of homology can also give rise to much larger deletions, including gene fusions (when the deletions are in coding regions), which may or may not be desired given the particular circumstances.

[0351] The examples provided herein further illustrate the selection of various target regions for the creation of DSBs designed to induce replacements that result in restoration of AAT protein activity, as well as the selection of specific target sequences within such regions that are designed to minimize off-target events relative to on-target events.

### Nucleic Acid Modifications

[0352] In some embodiments, polynucleotides introduced into cells comprise one or more modifications that can be used individually or in combination, for example, to enhance activity, stability or specificity, alter delivery, reduce innate immune responses in host cells, or for other enhancements, as further described herein and known in the art.

[0353] In certain embodiments, modified polynucleotides are used in the CRISPR/Cas9/Cpf1 system, in which case the guide RNAs (either single-molecule guides or double-molecule guides) and/or a DNA or an RNA encoding a Cas or Cpf1 endonuclease introduced into a cell can be modified, as described and illustrated below. Such modified polynucleotides can be used in the CRISPR/Cas9/Cpf1 system to edit any one or more genomic loci.

[0354] Using the CRISPR/Cas9/Cpf1 system for purposes of nonlimiting illustrations of such uses, modifications of guide RNAs can be used to enhance the formation or stability of the CRISPR/Cas9/Cpf1 genome editing complex comprising guide RNAs, which may be single-molecule guides or double-molecule, and a Cas or Cpf1 endonuclease. Modifications of guide RNAs can also or alternatively be used to enhance the initiation, stability or kinetics of interactions between the genome editing complex with the target sequence in the genome, which can be used, for example, to enhance on-target activity. Modifications of guide RNAs can also or alternatively be used to enhance specificity, e.g., the relative rates of genome editing at the on-target site as compared to effects at other (off-target) sites.

[0355] Modifications can also or alternatively be used to increase the stability of a guide RNA, e.g., by increasing its resistance to degradation by ribonucleases (RNases) present in a cell, thereby causing its half-life in the cell to be increased. Modifications enhancing guide RNA half-life can be particularly useful in embodiments in which a Cas or Cpf1 endonuclease is introduced into the cell to be edited via an RNA that needs to be translated in order to generate endonuclease, because increasing the half-life of guide RNAs introduced at the same time as the RNA encoding the endonuclease can be used to increase the time that the guide RNAs and the encoded Cas or Cpf1 endonuclease co-exist in the cell.

[0356] Modifications can also or alternatively be used to decrease the likelihood or degree to which RNAs introduced into cells elicit innate immune responses. Such responses, which have been well characterized in the context of RNA interference (RNAi), including small-interfering RNAs (siRNAs), as described below and in the art, tend to be associated with reduced half-life of the RNA and/or the elicitation of cytokines or other factors associated with immune responses.

[0357] One or more types of modifications can also be made to RNAs encoding an endonuclease that are introduced into a cell, including, without limitation, modifications that enhance the stability of the RNA (such as by increasing its degradation by RNAses present in the cell), modifications that enhance translation of the resulting product (i.e. the endonuclease), and/or modifications that decrease the likelihood or degree to which the RNAs introduced into cells elicit innate immune responses.

[0358] Combinations of modifications, such as the foregoing and others, can likewise be used. In the case of CRISPR/Cas9/Cpf1, for example, one or more types of modifications can be made to guide RNAs (including those exemplified above), and/or one or more types of modifications can be made to RNAs encoding Cas endonuclease (including those exemplified above).

[0359] By way of illustration, guide RNAs used in the CRISPR/Cas9/Cpf1 system, or other smaller RNAs can be readily synthesized by chemical means, enabling a number of modifications to be readily incorporated, as illustrated below and described in the art. While chemical synthetic procedures are continually expanding, purifications of such RNAs by procedures such as high performance liquid chromatography (HPLC, which avoids the use of gels such as PAGE) tends to become more challenging as polynucleotide lengths increase significantly beyond a hundred or so nucleotides. One approach used for generating chemically-modified RNAs of greater length is to produce two or more molecules that are ligated together. Much longer RNAs, such as those encoding a Cas9 endonuclease, are more readily generated enzymatically. While fewer types of modifications are generally available for use in enzymatically produced RNAs, there are still modifications that can be used to, e.g., enhance stability, reduce the likelihood or degree of innate immune response, and/or enhance other attributes, as described further below and in the art; and new types of modifications are regularly being developed.

[0360] By way of illustration of various types of modifications, especially those used frequently with smaller chemically synthesized RNAs, modifications can comprise one or more nucleotides modified at the 2′ position of the sugar, in some embodiments a 2′-O-alkyl, 2′-O-alkyl-O-alkyl, or 2′-fluoro-modified nucleotide. In some embodiments, RNA modifications include 2′-fluoro, 2′-amino or 2′ O-methyl modifications on the ribose of pyrimidines, abasic residues, or an inverted base at the 3′ end of the RNA. Such modifications are routinely incorporated into oligonucleotides and these oligonucleotides have been shown to have a higher Tm (i.e., higher target binding affinity) than 2′-deoxyoligonucleotides against a given target.

[0361] A number of nucleotide and nucleoside modifications have been shown to make the oligonucleotide into which they are incorporated more resistant to nuclease digestion than the native oligonucleotide; these modified oligos survive intact for a longer time than unmodified oligonucleotides. Specific examples of modified oligonucleotides include those comprising modified backbones, for example, phosphorothioates, phosphotriesters, methyl phosphonates, short chain alkyl or cycloalkyl intersugar linkages or short chain heteroatomic or heterocyclic intersugar linkages. Some oligonucleotides are oligonucleotides with phosphorothioate backbones and those with heteroatom backbones, particularly CH2—NH—O—CH2, CH,˜N(CH3)˜O˜CH2 (known as a methylene(methylimino) or MMI backbone), CH2—O—N (CH3)—CH2, CH2—N(CH3)—N(CH3)—CH2 and O—N (CH3)—CH2—CH2 backbones, wherein the native phosphodiester backbone is represented as O—P—O—CH); amide backbones [see De Mesmaeker et al., Ace. Chem. Res., 28:366-374 (1995)]; morpholino backbone structures (see Summerton and Weller, U.S. Pat. No. 5,034,506); peptide nucleic acid (PNA) backbone (wherein the phosphodiester backbone of the oligonucleotide is replaced with a polyamide backbone, the nucleotides being bound directly or indirectly to the aza nitrogen atoms of the polyamide backbone, see Nielsen et al., Science 1991, 254, 1497). Phosphorus-containing linkages include, but are not limited to, phosphorothioates, chiral phosphorothioates, phosphorodithioates, phosphotriesters, aminoalkylphosphotriesters, methyl and other alkyl phosphonates comprising 3′ alkylene phosphonates and chiral phosphonates, phosphinates, phosphoramidates comprising 3′-amino phosphoramidate and aminoalkylphosphoramidates, thionophosphoramidates, thionoalkylphosphonates, thionoalkylphosphotriesters, and boranophosphates having normal 3′-5′ linkages, 2′-5′ linked analogs of these, and those having inverted polarity wherein the adjacent pairs of nucleoside units are linked 3′-5′ to 5′-3′ or 2′-5′ to 5′-2′; see U.S. Pat. Nos. 3,687,808; 4,469,863; 4,476,301; 5,023,243; 5,177,196; 5,188,897; 5,264,423; 5,276,019; 5,278,302; 5,286,717; 5,321,131; 5,399,676; 5,405,939; 5,453,496; 5,455,233; 5,466,677; 5,476,925; 5,519,126; 5,536,821; 5,541,306; 5,550,111; 5,563,253; 5,571,799; 5,587,361; and 5,625,050.

[0362] Morpholino-based oligomeric compounds are described in Braasch and David Corey, Biochemistry, 41(14): 4503-4510 (2002); Genesis, Volume 30, Issue 3, (2001); Heasman, Dev. Biol., 243: 209-214 (2002); Nasevicius et al., Nat. Genet., 26:216-220 (2000); Lacerra et al., Proc. Natl. Acad. Sci., 97: 9591-9596 (2000); and U.S. Pat. No. 5,034,506, issued Jul. 23, 1991.

[0363] Cyclohexenyl nucleic acid oligonucleotide mimetics are described in Wang et al., J. Am. Chem. Soc., 122: 8595-8602 (2000).

[0364] Modified oligonucleotide backbones that do not include a phosphorus atom therein have backbones that are formed by short chain alkyl or cycloalkyl internucleoside linkages, mixed heteroatom and alkyl or cycloalkyl internucleoside linkages, or one or more short chain heteroatomic or heterocyclic internucleoside linkages. These comprise those having morpholino linkages (formed in part from the sugar portion of a nucleoside); siloxane backbones; sulfide, sulfoxide and sulfone backbones; formacetyl and thioformacetyl backbones; methylene formacetyl and thioformacetyl backbones; alkene containing backbones; sulfamate backbones; methyleneimino and methylenehydrazino backbones; sulfonate and sulfonamide backbones; amide backbones; and others having mixed N, O, S, and CH2 component parts; see U.S. Pat. Nos. 5,034,506; 5, 166,315; 5,185,444; 5,214,134; 5,216,141; 5,235,033; 5,264,562; 5,264,564; 5,405,938; 5,434,257; 5,466,677; 5,470,967; 5,489,677; 5,541,307; 5,561,225; 5,596,086; 5,602,240; 5,610,289; 5,602,240; 5,608,046; 5,610,289; 5,618,704; 5,623,070; 5,663,312; 5,633,360; 5,677,437; and 5,677,439, each of which is herein incorporated by reference.

[0365] One or more substituted sugar moieties can also be included, e.g., one of the following at the 2′ position: OH, SH, SCH3, F, OCN, OCH3 OCH3, OCH3 O(CH2)n CH3, O(CH2)n NH2, or O(CH2)n CH3, where n is from 1 to about 10; C1 to C10 lower alkyl, alkoxyalkoxy, substituted lower alkyl, alkaryl or aralkyl; Cl; Br; CN; CF3; OCF3; O-, S-, or N-alkyl; O-, S-, or N-alkenyl; SOCH3; SO2 CH3; ONO2; NO2; N3; NH2; heterocycloalkyl; heterocycloalkaryl; aminoalkylamino; polyalkylamino; substituted silyl; an RNA cleaving group; a reporter group; an intercalator; a group for improving the pharmacokinetic properties of an oligonucleotide; or a group for improving the pharmacodynamic properties of an oligonucleotide and other substituents having similar properties. In some embodiments, a modification includes 2′-methoxyethoxy (2′-O—CH2CH2OCH3, also known as 2′-O-(2-methoxyethyl)) (Martin et al, Helv. Chim. Acta, 1995, 78, 486). Other modifications include 2′-methoxy (2′-O—CH3), 2′-propoxy (2′—OCH2 CH2CH3) and 2′-fluoro (2′-F). Similar modifications may also be made at other positions on the oligonucleotide, particularly the 3′ position of the sugar on the 3′ terminal nucleotide and the 5′ position of 5′ terminal nucleotide. Oligonucleotides may also have sugar mimetics, such as cyclobutyls in place of the pentofuranosyl group.

[0366] In some embodiments, both a sugar and an internucleoside linkage, i.e., the backbone, of the nucleotide units are replaced with novel groups. The base units are maintained for hybridization with an appropriate nucleic acid target compound. One such oligomeric compound, an oligonucleotide mimetic that has been shown to have excellent hybridization properties, is referred to as a peptide nucleic acid (PNA). In PNA compounds, the sugar-backbone of an oligonucleotide is replaced with an amide containing backbone, for example, an aminoethylglycine backbone. The nucleobases are retained and are bound directly or indirectly to aza nitrogen atoms of the amide portion of the backbone. Representative United States patents that teach the preparation of PNA compounds comprise, but are not limited to, U.S. Pat. Nos. 5,539,082; 5,714,331; and 5,719,262. Further teaching of PNA compounds can be found in Nielsen et al, Science, 254: 1497-1500 (1991).

[0367] Guide RNAs can also include, additionally or alternatively, nucleobase (often referred to in the art simply as “base”) modifications or substitutions. As used herein, “unmodified” or “natural” nucleobases include adenine (A), guanine (G), thymine (T), cytosine (C), and uracil (U). Modified nucleobases include nucleobases found only infrequently or transiently in natural nucleic acids, e.g., hypoxanthine, 6-methyladenine, 5-Me pyrimidines, particularly 5-methylcytosine (also referred to as 5-methyl-2′ deoxycytosine and often referred to in the art as 5-Me-C), 5-hydroxymethylcytosine (HMC), glycosyl HMC and gentiobiosyl HMC, as well as synthetic nucleobases, e.g., 2-aminoadenine, 2-(methylamino)adenine, 2-(imidazolylalkyl)adenine, 2-(aminoalkylamino)adenine or other heterosubstituted alkyladenines, 2-thiouracil, 2-thiothymine, 5-bromouracil, 5-hydroxymethyluracil, 8-azaguanine, 7-deazaguanine, N6 (6-aminohexyl)adenine, and 2,6-diaminopurine. Kornberg, A., DNA Replication, W. H. Freeman & Co., San Francisco, pp 75-77 (1980); Gebeyehu et al., Nucl. Acids Res. 15:4513 (1997). A “universal” base known in the art, e.g., inosine, can also be included. 5-Me-C substitutions have been shown to increase nucleic acid duplex stability by 0.6-1.2° C. (Sanghvi, Y. S., in Crooke, S. T. and Lebleu, B., eds., Antisense Research and Applications, CRC Press, Boca Raton, 1993, pp. 276-278) and are embodiments of base substitutions.

[0368] Modified nucleobases comprise other synthetic and natural nucleobases, such as 5-methylcytosine (5-me-C), 5-hydroxymethyl cytosine, xanthine, hypoxanthine, 2-aminoadenine, 6-methyl and other alkyl derivatives of adenine and guanine, 2-propyl and other alkyl derivatives of adenine and guanine, 2-thiouracil, 2-thiothymine and 2-thiocytosine, 5-halouracil and cytosine, 5-propynyl uracil and cytosine, 6-azo uracil, cytosine and thymine, 5-uracil (pseudo-uracil), 4-thiouracil, 8-halo, 8-amino, 8-thiol, 8-thioalkyl, 8-hydroxyl and other 8-substituted adenines and guanines, 5-halo particularly 5-bromo, 5-trifluoromethyl and other 5-substituted uracils and cytosines, 7-methylguanine and 7-methyladenine, 8-azaguanine and 8-azaadenine, 7-deazaguanine and 7-deazaadenine, and 3-deazaguanine and 3-deazaadenine.

[0369] Further, nucleobases comprise those disclosed in U.S. Pat. No. 3,687,808, those disclosed in ‘The Concise Encyclopedia of Polymer Science And Engineering’, pages 858-859, Kroschwitz, J. I., ed. John Wiley & Sons, 1990, those disclosed by Englisch et al., Angewandle Chemie, International Edition’, 1991, 30, page 613, and those disclosed by Sanghvi, Y. S., Chapter 15, Antisense Research and Applications’, pages 289-302, Crooke, S. T. and Lebleu, B. ea., CRC Press, 1993. Certain of these nucleobases are particularly useful for increasing the binding affinity of the oligomeric compounds of the invention. These include 5-substituted pyrimidines, 6-azapyrimidines and N-2, N-6 and 0-6 substituted purines, comprising 2-aminopropyladenine, 5-propynyluracil and 5-propynylcytosine. 5-methylcytosine substitutions have been shown to increase nucleic acid duplex stability by 0.6-1.2° C. (Sanghvi, Y. S., Crooke, S. T. and Lebleu, B., eds, ‘Antisense Research and Applications’, CRC Press, Boca Raton, 1993, pp. 276-278) and are embodiments of base substitutions, even more particularly when combined with 2′-O-methoxyethyl sugar modifications. Modified nucleobases are described in U.S. Pat. No. 3,687,808, as well as U.S. Pat. Nos. 4,845,205; 5,130,302; 5,134,066; 5,175,273; 5,367,066; 5,432,272; 5,457,187; 5,459,255; 5,484,908; 5,502,177; 5,525,711; 5,552,540; 5,587,469; 5,596,091; 5,614,617; 5,681,941; 5,750,692; 5,763,588; 5,830,653; 6,005,096; and U.S. Patent Application Publication 2003/0158403.

[0370] Thus, the term “modified” refers to a non-natural sugar, phosphate, or base that is incorporated into a guide RNA, an endonuclease, or both a guide RNA and an endonuclease. It is not necessary for all positions in a given oligonucleotide to be uniformly modified, and in fact more than one of the aforementioned modifications may be incorporated in a single oligonucleotide, or even in a single nucleoside within an oligonucleotide.

[0371] In some embodiments, the guide RNAs and/or mRNA (or DNA) encoding an endonuclease are chemically linked to one or more moieties or conjugates that enhance the activity, cellular distribution, or cellular uptake of the oligonucleotide. Such moieties comprise, but are not limited to, lipid moieties such as a cholesterol moiety [Letsinger et al., Proc. Natl. Acad. Sci. USA, 86: 6553-6556 (1989)]; cholic acid [Manoharan et al., Bioorg. Med. Chem. Let., 4: 1053-1060 (1994)]; a thioether, e.g., hexyl-S-tritylthiol [Manoharan et al, Ann. N. Y. Acad. Sci., 660: 306-309 (1992) and Manoharan et al., Bioorg. Med. Chem. Let., 3: 2765-2770 (1993)]; a thiocholesterol [Oberhauser et al., Nucl. Acids Res., 20: 533-538 (1992)]; an aliphatic chain, e.g., dodecandiol or undecyl residues [Kabanov et al., FEBS Lett., 259: 327-330 (1990) and Svinarchuk et al., Biochimie, 75: 49-54 (1993)]; a phospholipid, e.g., di-hexadecyl-rac-glycerol or triethylammonium 1,2-di-O-hexadecyl-rac-glycero-3-H-phosphonate [Manoharan et al., Tetrahedron Lett., 36: 3651-3654 (1995) and Shea et al., Nucl. Acids Res., 18: 3777-3783 (1990)]; a polyamine or a polyethylene glycol chain [Mancharan et al., Nucleosides & Nucleotides, 14: 969-973 (1995)]; adamantane acetic acid [Manoharan et al., Tetrahedron Lett., 36: 3651-3654 (1995)]; a palmityl moiety [(Mishra et al., Biochim. Biophys. Acta, 1264: 229-237 (1995)]; or an octadecylamine or hexylamino-carbonyl-t oxycholesterol moiety [Crooke et al., J. Pharmacol. Exp. Ther., 277: 923-937 (1996)]. See also U.S. Pat. Nos. 4,828,979; 4,948,882; 5,218,105; 5,525,465; 5,541,313; 5,545,730; 5,552,538; 5,578,717, 5,580,731; 5,580,731; 5,591,584; 5,109,124; 5,118,802; 5,138,045; 5,414,077; 5,486,603; 5,512,439; 5,578,718; 5,608,046; 4,587,044; 4,605,735; 4,667,025; 4,762,779; 4,789,737; 4,824,941; 4,835,263; 4,876,335; 4,904,582; 4,958,013; 5,082,830; 5,112,963; 5,214,136; 5,082,830; 5,112,963; 5,214, 136; 5,245,022; 5,254,469; 5,258,506; 5,262,536; 5,272,250; 5,292,873; 5,317,098; 5,371,241, 5,391,723; 5,416,203, 5,451,463; 5,510,475; 5,512,667; 5,514,785; 5,565,552; 5,567,810; 5,574,142; 5,585,481; 5,587,371; 5,595,726; 5,597,696; 5,599,923; 5,599, 928 and 5,688,941.

[0372] Sugars and other moieties can be used to target proteins and complexes comprising nucleotides, such as cationic polysomes and liposomes, to particular sites. For example, hepatic cell directed transfer can be mediated via asialoglycoprotein receptors (ASGPRs); see, e.g., Hu, et al., Protein Pept Lett. 21(10): 1025-30 (2014). Other systems known in the art and regularly developed can be used to target biomolecules of use in the present case and/or complexes thereof to particular target cells of interest.

[0373] These targeting moieties or conjugates can include conjugate groups covalently bound to functional groups, such as primary or secondary hydroxyl groups. Conjugate groups of the invention include intercalators, reporter molecules, polyamines, polyamides, polyethylene glycols, polyethers, groups that enhance the pharmacodynamic properties of oligomers, and groups that enhance the pharmacokinetic properties of oligomers. Typical conjugate groups include cholesterols, lipids, phospholipids, biotin, phenazine, folate, phenanthridine, anthraquinone, acridine, fluoresceins, rhodamines, coumarins, and dyes. Groups that enhance the pharmacodynamic properties, in the context of this invention, include groups that improve uptake, enhance resistance to degradation, and/or strengthen sequence-specific hybridization with the target nucleic acid. Groups that enhance the pharmacokinetic properties, in the context of this invention, include groups that improve uptake, distribution, metabolism or excretion of the compounds of the present invention. Representative conjugate groups are disclosed in International Patent Application No. PCT/US92/09196, filed Oct. 23, 1992, and U.S. Pat. No. 6,287,860, which are incorporated herein by reference. Conjugate moieties include, but are not limited to, lipid moieties such as a cholesterol moiety, cholic acid, a thioether, e.g., hexyl-5-tritylthiol, a thiocholesterol, an aliphatic chain, e.g., dodecandiol or undecyl residues, a phospholipid, e.g., di-hexadecyl-rac-glycerol or triethylammonium 1,2-di-O-hexadecyl-rac-glycero-3-H-phosphonate, a polyamine or a polyethylene glycol chain, or adamantane acetic acid, a palmityl moiety, or an octadecylamine or hexylamino-carbonyl-oxy cholesterol moiety. See, e.g., U.S. Pat. Nos. 4,828,979; 4,948,882; 5,218,105; 5,525,465; 5,541,313; 5,545,730; 5,552,538; 5,578,717, 5,580,731; 5,580,731; 5,591,584; 5,109,124; 5,118,802; 5,138,045; 5,414,077; 5,486,603; 5,512,439; 5,578,718; 5,608,046; 4,587,044; 4,605,735; 4,667,025; 4,762,779; 4,789,737; 4,824,941; 4,835,263; 4,876,335; 4,904,582; 4,958,013; 5,082,830; 5,112,963; 5,214,136; 5,082,830; 5,112,963; 5,214,136; 5,245,022; 5,254,469; 5,258,506; 5,262,536; 5,272,250; 5,292,873; 5,317,098; 5,371,241, 5,391,723; 5,416,203, 5,451,463; 5,510,475; 5,512,667; 5,514,785; 5,565,552; 5,567,810; 5,574,142; 5,585,481; 5,587,371; 5,595,726; 5,597,696; 5,599,923; 5,599,928 and 5,688,941.

[0374] Longer polynucleotides that are less amenable to chemical synthesis and are typically produced by enzymatic synthesis can also be modified by various means. Such modifications can include, for example, the introduction of certain nucleotide analogs, the incorporation of particular sequences or other moieties at the 5′ or 3′ ends of molecules, and other modifications. By way of illustration, the mRNA encoding Cas9 is approximately 4 kb in length and can be synthesized by in vitro transcription. Modifications to the mRNA can be applied to, e.g., increase its translation or stability (such as by increasing its resistance to degradation with a cell), or to reduce the tendency of the RNA to elicit an innate immune response that is often observed in cells following introduction of exogenous RNAs, particularly longer RNAs such as that encoding Cas9.

[0375] Numerous such modifications have been described in the art, such as polyA tails, 5′ cap analogs (e.g., Anti Reverse Cap Analog (ARCA) or m7G(5′)ppp(5′)G (mCAP)), modified 5′ or 3′ untranslated regions (UTRs), use of modified bases (such as Pseudo-UTP, 2-Thio-UTP, 5-Methylcytidine-5′-Triphosphate (5-Methyl-CTP) or N6-Methyl-ATP), or treatment with phosphatase to remove 5′ terminal phosphates. These and other modifications are known in the art, and new modifications of RNAs are regularly being developed.

[0376] There are numerous commercial suppliers of modified RNAs, including for example, TriLink Biotech, AxoLabs, Bio-Synthesis Inc., Dharmacon and many others. As described by TriLink, for example, 5-Methyl-CTP can be used to impart desirable characteristics, such as increased nuclease stability, increased translation or reduced interaction of innate immune receptors with in vitro transcribed RNA. 5-Methylcytidine-5′-Triphosphate (5-Methyl-CTP), N6-Methyl-ATP, as well as Pseudo-UTP and 2-Thio-UTP, have also been shown to reduce innate immune stimulation in culture and in vivo while enhancing translation, as illustrated in publications by Kormann et al. and Warren et al. referred to below.

[0377] It has been shown that chemically modified mRNA delivered in vivo can be used to achieve improved therapeutic effects; see, e.g., Kormann et al., Nature Biotechnology 29, 154-157 (2011). Such modifications can be used, for example, to increase the stability of the RNA molecule and/or reduce its immunogenicity. Using chemical modifications such as Pseudo-U, N6-Methyl-A, 2-Thio-U and 5-Methyl-C, it was found that substituting just one quarter of the uridine and cytidine residues with 2-Thio-U and 5-Methyl-C respectively resulted in a significant decrease in toll-like receptor (TLR) mediated recognition of the mRNA in mice. By reducing the activation of the innate immune system, these modifications can be used to effectively increase the stability and longevity of the mRNA in vivo; see, e.g., Kormann et al., supra.

[0378] It has also been shown that repeated administration of synthetic messenger RNAs incorporating modifications designed to bypass innate anti-viral responses can reprogram differentiated human cells to pluripotency. See, e.g., Warren, et al., Cell Stem Cell, 7(5):618-30 (2010). Such modified mRNAs that act as primary reprogramming proteins can be an efficient means of reprogramming multiple human cell types. Such cells are referred to as induced pluripotency stem cells (iPSCs), and it was found that enzymatically synthesized RNA incorporating 5-Methyl-CTP, Pseudo-UTP and an Anti Reverse Cap Analog (ARCA) could be used to effectively evade the cell's antiviral response; see, e.g., Warren et al., supra.

[0379] Other modifications of polynucleotides described in the art include, for example, the use of polyA tails, the addition of 5′ cap analogs (such as m7G(5′)ppp(5′)G (mCAP)), modifications of 5′ or 3′ untranslated regions (UTRs), or treatment with phosphatase to remove 5′ terminal phosphates—and new approaches are regularly being developed.

[0380] A number of compositions and techniques applicable to the generation of modified RNAs for use herein have been developed in connection with the modification of RNA interference (RNAi), including small-interfering RNAs (siRNAs). siRNAs present particular challenges in vivo because their effects on gene silencing via mRNA interference are generally transient, which can require repeat administration. In addition, siRNAs are double-stranded RNAs (dsRNA) and mammalian cells have immune responses that have evolved to detect and neutralize dsRNA, which is often a by-product of viral infection. Thus, there are mammalian enzymes such as PKR (dsRNA-responsive kinase), and potentially retinoic acid-inducible gene I (RIG-I), that can mediate cellular responses to dsRNA, as well as Toll-like receptors (such as TLR3, TLR7 and TLR8) that can trigger the induction of cytokines in response to such molecules; see, e.g., the reviews by Angart et al., Pharmaceuticals (Basel) 6(4): 440-468 (2013); Kanasty et al., Molecular Therapy 20(3): 513-524 (2012); Burnett et al., Biotechnol J. 6(9): 1130-46 (2011); Judge and MacLachlan, Hum Gene Ther 19(2):111-24 (2008); and references cited therein.

[0381] A large variety of modifications have been developed and applied to enhance RNA stability, reduce innate immune responses, and/or achieve other benefits that can be useful in connection with the introduction of polynucleotides into human cells, as described herein; see, e.g., the reviews by Whitehead K A et al., Annual Review of Chemical and Biomolecular Engineering, 2: 77-96 (2011); Gaglione and Messere, Mini Rev Med Chem, 10(7):578-95 (2010); Chernolovskaya et al, Curr Opin Mol Ther., 12(2): 158-67 (2010); Deleavey et al., Curr Protoc Nucleic Acid Chem Chapter 16: Unit 16.3 (2009); Behlke, Oligonucleotides 18(4):305-19 (2008); Fucini et al., Nucleic Acid Ther 22(3): 205-210 (2012); Bremsen et al., Front Genet 3:154 (2012).

[0382] As noted above, there are a number of commercial suppliers of modified RNAs, many of which have specialized in modifications designed to improve the effectiveness of siRNAs. A variety of approaches are offered based on various findings reported in the literature. For example, Dharmacon notes that replacement of a non-bridging oxygen with sulfur (phosphorothioate, PS) has been extensively used to improve nuclease resistance of siRNAs, as reported by Kole, Nature Reviews Drug Discovery 11:125-140 (2012). Modifications of the 2′-position of the ribose have been reported to improve nuclease resistance of the internucleotide phosphate bond while increasing duplex stability (Tm), which has also been shown to provide protection from immune activation. A combination of moderate PS backbone modifications with small, well-tolerated 2′-substitutions (2′-O-Methyl, 2′-Fluoro, 2′-Hydro) have been associated with highly stable siRNAs for applications in vivo, as reported by Soutschek et al. Nature 432:173-178 (2004); and 2′-O-Methyl modifications have been reported to be effective in improving stability as reported by Volkov, Oligonucleotides 19:191-202 (2009). With respect to decreasing the induction of innate immune responses, modifying specific sequences with 2′-O-Methyl, 2′-Fluoro, 2′-Hydro have been reported to reduce TLR7/TLR8 interaction while generally preserving silencing activity; see, e.g., Judge et al., Mol. Ther. 13:494-505 (2006); and Cekaite et al., J. Mol. Biol. 365:90-108 (2007). Additional modifications, such as 2-thiouracil, pseudouracil, 5-methylcytosine, 5-methyluracil, and N6-methyladenosine have also been shown to minimize the immune effects mediated by TLR3, TLR7, and TLR8; see, e.g., Kariko, K. et al., Immunity 23:165-175 (2005).

[0383] As is also known in the art, and commercially available, a number of conjugates can be applied to polynucleotides, such as RNAs, for use herein that can enhance their delivery and/or uptake by cells, including for example, cholesterol, tocopherol and folic acid, lipids, peptides, polymers, linkers and aptamers; see, e.g., the review by Winkler, Ther. Deliv. 4:791-809 (2013), and references cited therein.

### Codon-Optimization

[0384] In some embodiments, a polynucleotide encoding a site-directed polypeptide is codon-optimized according to methods standard in the art for expression in the cell containing the target DNA of interest. For example, if the intended target nucleic acid is in a human cell, a human codon-optimized polynucleotide encoding Cas9 is contemplated for use for producing the Cas9 polypeptide.

### Complexes of a Genome-Targeting Nucleic Acid and a Site-Directed Polypeptide

[0385] A genome-targeting nucleic acid interacts with a site-directed polypeptide (e.g., a nucleic acid-guided nuclease such as Cas9), thereby forming a complex. The genome-targeting nucleic acid guides the site-directed polypeptide to a target nucleic acid.

### RNPs

[0386] As stated previously, the site-directed polypeptide and genome-targeting nucleic acid may each be administered separately to a cell or a patient. On the other hand, the site-directed polypeptide may be pre-complexed with one or more guide RNAs, or one or more crRNA together with a tracrRNA. The pre-complexed material may then be administered to a cell or a patient. Such pre-complexed material is known as a ribonucleoprotein particle (RNP).

### Nucleic Acids Encoding System Components

[0387] In another aspect, the present disclosure provides a nucleic acid comprising a nucleotide sequence encoding a genome-targeting nucleic acid of the disclosure, a site-directed polypeptide of the disclosure, and/or any nucleic acid or proteinaceous molecule necessary to carry out the embodiments of the methods of the disclosure.

[0388] In some embodiments, the nucleic acid encoding a genome-targeting nucleic acid of the disclosure, a site-directed polypeptide of the disclosure, and/or any nucleic acid or proteinaceous molecule necessary to carry out the embodiments of the methods of the disclosure comprises a vector (e.g., a recombinant expression vector).

[0389] The term “vector” refers to a nucleic acid molecule capable of transporting another nucleic acid to which it has been linked. One type of vector is a “plasmid”, which refers to a circular double-stranded DNA loop into which additional nucleic acid segments can be ligated. Another type of vector is a viral vector, wherein additional nucleic acid segments can be ligated into the viral genome. Certain vectors are capable of autonomous replication in a host cell into which they are introduced (e.g., bacterial vectors having a bacterial origin of replication and episomal mammalian vectors). Other vectors (e.g., non-episomal mammalian vectors) are integrated into the genome of a host cell upon introduction into the host cell, and thereby are replicated along with the host genome.

[0390] In some embodiments, vectors are capable of directing the expression of nucleic acids to which they are operatively linked. Such vectors are referred to herein as “recombinant expression vectors”, or more simply “expression vectors”, which serve equivalent functions.

[0391] The term “operably linked” means that the nucleotide sequence of interest is linked to regulatory sequence(s) in a manner that allows for expression of the nucleotide sequence. The term “regulatory sequence” is intended to include, for example, promoters, enhancers and other expression control elements (e.g., polyadenylation signals). Such regulatory sequences are well known in the art and are described, for example, in Goeddel; Gene Expression Technology: Methods in Enzymology 185, Academic Press, San Diego, CA (1990). Regulatory sequences include those that direct constitutive expression of a nucleotide sequence in many types of host cells, and those that direct expression of the nucleotide sequence only in certain host cells (e.g., tissue-specific regulatory sequences). It will be appreciated by those skilled in the art that the design of the expression vector can depend on such factors as the choice of the target cell, the level of expression desired, and the like.

[0392] Expression vectors contemplated include, but are not limited to, viral vectors based on vaccinia virus, poliovirus, adenovirus, adeno-associated virus, SV40, herpes simplex virus, human immunodeficiency virus, retrovirus (e.g., Murine Leukemia Virus, spleen necrosis virus, and vectors derived from retroviruses such as Rous Sarcoma Virus, Harvey Sarcoma Virus, avian leukosis virus, a lentivirus, human immunodeficiency virus, myeloproliferative sarcoma virus, and mammary tumor virus) and other recombinant vectors. Other vectors contemplated for eukaryotic target cells include, but are not limited to, the vectors pXT1, pSG5, pSVK3, pBPV, pMSG, and pSVLSV40 (Pharmacia). Additional vectors contemplated for eukaryotic target cells include, but are not limited to, the vectors pCTx-1, pCTx-2, and pCTx-3, which are described in FIGS. 1A-1C. Other vectors may be used so long as they are compatible with the host cell.

[0393] In some embodiments, a vector comprises one or more transcription and/or translation control elements. Depending on the host/vector system utilized, any of a number of suitable transcription and translation control elements, including constitutive and inducible promoters, transcription enhancer elements, transcription terminators, etc. may be used in the expression vector. In some embodiments, the vector is a self-inactivating vector that either inactivates the viral sequences or the components of the CRISPR machinery or other elements.

[0394] Non-limiting examples of suitable eukaryotic promoters (i.e., promoters functional in a eukaryotic cell) include those from cytomegalovirus (CMV) immediate early, herpes simplex virus (HSV) thymidine kinase, early and late SV40, long terminal repeats (LTRs) from retrovirus, human elongation factor-1 promoter (EF1), a hybrid construct comprising the cytomegalovirus (CMV) enhancer fused to the chicken beta-actin promoter (CAG), murine stem cell virus promoter (MSCV), phosphoglycerate kinase-1 locus promoter (PGK), and mouse metallothionein-I.

[0395] For expressing small RNAs, including guide RNAs used in connection with Cas endonuclease, various promoters such as RNA polymerase III promoters, including for example U6 and H1, can be advantageous. Descriptions of and parameters for enhancing the use of such promoters are known in art, and additional information and approaches are regularly being described; see, e.g., Ma, H. et al., Molecular Therapy—Nucleic Acids 3, e161 (2014) doi: 10.1038/mtna.2014.12.

[0396] The expression vector may also contain a ribosome binding site for translation initiation and a transcription terminator. The expression vector may also include appropriate sequences for amplifying expression. The expression vector may also include nucleotide sequences encoding non-native tags (e.g., histidine tag, hemagglutinin tag, green fluorescent protein, etc.) that are fused to the site-directed polypeptide, thus resulting in a fusion protein.

[0397] In some embodiments, a promoter is an inducible promoter (e.g., a heat shock promoter, tetracycline-regulated promoter, steroid-regulated promoter, metal-regulated promoter, estrogen receptor-regulated promoter, etc.). In some embodiments, a promoter is a constitutive promoter (e.g., CMV promoter, UBC promoter). In some embodiments, the promoter is a spatially restricted and/or temporally restricted promoter (e.g., a tissue specific promoter, a cell type specific promoter, etc.).

[0398] In some embodiments, the nucleic acid encoding a genome-targeting nucleic acid of the disclosure and/or a site-directed polypeptide are packaged into or on the surface of delivery vehicles for delivery to cells. Delivery vehicles contemplated include, but are not limited to, nanospheres, liposomes, quantum dots, nanoparticles, polyethylene glycol particles, hydrogels, and micelles. As described in the art, a variety of targeting moieties can be used to enhance the preferential interaction of such vehicles with desired cell types or locations.

[0399] Introduction of the complexes, polypeptides, and nucleic acids of the disclosure into cells can occur by viral or bacteriophage infection, transfection, conjugation, protoplast fusion, lipofection, electroporation, nucleofection, calcium phosphate precipitation, polyethyleneimine (PEI)-mediated transfection, DEAE-dextran mediated transfection, liposome-mediated transfection, particle gun technology, calcium phosphate precipitation, direct micro-injection, nanoparticle-mediated nucleic acid delivery, and the like.

### Delivery

[0400] Guide RNA polynucleotides (RNA or DNA) and/or endonuclease polynucleotide(s) (RNA or DNA) can be delivered by viral or non-viral delivery vehicles known in the art. Alternatively, endonuclease polypeptide(s) may be delivered by non-viral delivery vehicles known in the art, such as electroporation or lipid nanoparticles. In some embodiments, the DNA endonuclease may be delivered as one or more polypeptides, either alone or pre-complexed with one or more guide RNAs, or one or more crRNA together with a tracrRNA.

[0401] Polynucleotides may be delivered by non-viral delivery vehicles including, but not limited to, nanoparticles, liposomes, ribonucleoproteins, positively charged peptides, small molecule RNA-conjugates, aptamer-RNA chimeras, and RNA-fusion protein complexes. Some exemplary non-viral delivery vehicles are described in Peer and Lieberman, Gene Therapy, 18: 1127-1133 (2011) (which focuses on non-viral delivery vehicles for siRNA that are also useful for delivery of other polynucleotides).

[0402] Polynucleotides, such as guide RNA, sgRNA, and mRNA encoding an endonuclease, may be delivered to a cell or a patient by a lipid nanoparticle (LNP).

[0403] A LNP refers to any particle having a diameter of less than 1000 nm, 500 nm, 250 nm, 200 nm, 150 nm, 100 nm, 75 nm, 50 nm, or 25 nm. Alternatively, a nanoparticle may range in size from 1-1000 nm, 1-500 nm, 1-250 nm, 25-200 nm, 25-100 nm, 35-75 nm, or 25-60 nm.

[0404] LNPs may be made from cationic, anionic, or neutral lipids. Neutral lipids, such as the fusogenic phospholipid DOPE or the membrane component cholesterol, may be included in LNPs as ‘helper lipids’ to enhance transfection activity and nanoparticle stability. Limitations of cationic lipids include low efficacy owing to poor stability and rapid clearance, as well as the generation of inflammatory or anti-inflammatory responses.

[0405] LNPs may also be comprised of hydrophobic lipids, hydrophilic lipids, or both hydrophobic and hydrophilic lipids.

[0406] Any lipid or combination of lipids that are known in the art may be used to produce a LNP. Examples of lipids used to produce LNPs are: DOTMA, DOSPA, DOTAP, DMRIE, DC-cholesterol, DOTAP-cholesterol, GAP-DMORIE-DPyPE, and GL67A-DOPE-DMPE-polyethylene glycol (PEG). Examples of cationic lipids are: 98N12-5, C12-200, DLin-KC2-DMA (KC2), DLin-MC3-DMA (MC3), XTC, MD1, and 7C1. Examples of neutral lipids are: DPSC, DPPC, POPC, DOPE, and SM. Examples of PEG-modified lipids are: PEG-DMG, PEG-CerC14, and PEG-CerC20.

[0407] The lipids may be combined in any number of molar ratios to produce a LNP. In addition, the polynucleotide(s) may be combined with lipid(s) in a wide range of molar ratios to produce a LNP.

[0408] As stated previously, the site-directed polypeptide and genome-targeting nucleic acid may each be administered separately to a cell or a patient. On the other hand, the site-directed polypeptide may be pre-complexed with one or more guide RNAs, or one or more crRNA together with a tracrRNA. The pre-complexed material may then be administered to a cell or a patient. Such pre-complexed material is known as a ribonucleoprotein particle (RNP).

[0409] RNA is capable of forming specific interactions with RNA or DNA. While this property is exploited in many biological processes, it also comes with the risk of promiscuous interactions in a nucleic acid-rich cellular environment. One solution to this problem is the formation of ribonucleoprotein particles (RNPs), in which the RNA is pre-complexed with an endonuclease. Another benefit of the RNP is protection of the RNA from degradation.

[0410] The endonuclease in the RNP may be modified or unmodified. Likewise, the gRNA, crRNA, tracrRNA, or sgRNA may be modified or unmodified. Numerous modifications are known in the art and may be used.

[0411] The endonuclease and sgRNA are generally combined in a 1:1 molar ratio. Alternatively, the endonuclease, crRNA and tracrRNA are generally combined in a 1:1:1 molar ratio. However, a wide range of molar ratios may be used to produce a RNP.

[0412] A recombinant adeno-associated virus (AAV) vector may be used for delivery. Techniques to produce rAAV particles, in which an AAV genome to be packaged that includes the polynucleotide to be delivered, rep and cap genes, and helper virus functions are provided to a cell are standard in the art. Production of rAAV requires that the following components are present within a single cell (denoted herein as a packaging cell): a rAAV genome, AAV rep and cap genes separate from (i.e., not in) the rAAV genome, and helper virus functions. The AAV rep and cap genes may be from any AAV serotype for which recombinant virus can be derived, and may be from a different AAV serotype than the rAAV genome ITRs, including, but not limited to, AAV serotypes AAV-1, AAV-2, AAV-3, AAV-4, AAV-5, AAV-6, AAV-7, AAV-8, AAV-9, AAV-10, AAV-11, AAV-12, AAV-13 and AAV rh.74. Production of pseudotyped rAAV is disclosed in, for example, international patent application publication number WO 01/83692. See Table 2.

TABLE 2

| AAV Serotype | Genbank Accession No. |
|---|---|
| AAV-1 | NC_002077.1 |
| AAV-2 | NC_001401.2 |
| AAV-3 | NC_001729.1 |
| AAV-3B | AF028705.1 |
| AAV-4 | NC_001829.1 |
| AAV-5 | NC_006152.1 |
| AAV-6 | AF028704.1 |
| AAV-7 | NC_006260.1 |
| AAV-8 | NC_006261.1 |
| AAV-9 | AX753250.1 |
| AAV-10 | AY631965.1 |
| AAV-11 | AY631966.1 |
| AAV-12 | DQ813647.1 |
| AAV-13 | EU285562.1 |

[0413] A method of generating a packaging cell involves creating a cell line that stably expresses all of the necessary components for AAV particle production. For example, a plasmid (or multiple plasmids) comprising a rAAV genome lacking AAV rep and cap genes, AAV rep and cap genes separate from the rAAV genome, and a selectable marker, such as a neomycin resistance gene, are integrated into the genome of a cell. AAV genomes have been introduced into bacterial plasmids by procedures such as GC tailing (Samulski et al., 1982, Proc. Natl. Acad. S6. USA, 79:2077-2081), addition of synthetic linkers containing restriction endonuclease cleavage sites (Laughlin et al., 1983, Gene, 23:65-73) or by direct, blunt-end ligation (Senapathy & Carter, 1984, J. Biol. Chem., 259:4661-4666). The packaging cell line is then infected with a helper virus, such as adenovirus. The advantages of this method are that the cells are selectable and are suitable for large-scale production of rAAV. Other examples of suitable methods employ adenovirus or baculovirus, rather than plasmids, to introduce rAAV genomes and/or rep and cap genes into packaging cells.

[0414] General principles of rAAV production are reviewed in, for example, Carter, 1992, Current Opinions in Biotechnology, 1533-539; and Muzyczka, 1992, Curr. Topics in Microbial. and Immunol., 158:97-129). Various approaches are described in Ratschin et al., Mol. Cell. Biol. 4:2072 (1984); Hermonat et al., Proc. Natl. Acad. Sci. USA, 81:6466 (1984); Tratschin et al., Mo1. Cell. Biol. 5:3251 (1985); McLaughlin et al., J. Virol., 62:1963 (1988); and Lebkowski et al., 1988 Mol. Cell. Biol., 7:349 (1988). Samulski et al. (1989, J. Virol., 63:3822-3828); U.S. Pat. No. 5,173,414; WO 95/13365 and corresponding U.S. Pat. No. 5,658,776; WO 95/13392; WO 96/17947; PCT/US98/18600; WO 97/09441 (PCT/US96/14423); WO 97/08298 (PCT/US96/13872); WO 97/21825 (PCT/US96/20777); WO 97/06243 (PCT/FR96/01064); WO 99/11764; Perrin et al. (1995) Vaccine 13:1244-1250; Paul et al. (1993) Human Gene Therapy 4:609-615; Clark et al. (1996) Gene Therapy 3:1124-1132; U.S. Pat. Nos. 5,786,211; 5,871,982; and 6,258,595.

[0415] AAV vector serotypes can be matched to target cell types. For example, the following exemplary cell types may be transduced by the indicated AAV serotypes among others. See Table 3.

TABLE 3

| Tissue/Cell Type | Serotype |
|---|---|
| Liver | AAV3, AAV5, AAV8, AAV9 |
| Skeletal muscle | AAV1, AAV7, AAV6, AAV8, AAV9 |
| Central nervous system | AAV5, AAV1, AAV4 |
| RPE | AAV5, AAV4 |
| Photoreceptor cells | AAV5 |
| Lung | AAV9 |
| Heart | AAV8 |
| Pancreas | AAV8 |
| Kidney | AAV2, AAV8 |

[0416] In addition to adeno-associated viral vectors, other viral vectors can be used. Such viral vectors include, but are not limited to, lentivirus, alphavirus, enterovirus, pestivirus, baculovirus, herpesvirus, Epstein Barr virus, papovavirus, poxvirus, vaccinia virus, and herpes simplex virus.

[0417] In some embodiments, Cas9 mRNA, sgRNA targeting one or two loci in SERPINA1 genes, and donor DNA are each separately formulated into lipid nanoparticles, or are all co-formulated into one lipid nanoparticle, or co-formulated into two or more lipid nanoparticles.

[0418] In some embodiments, Cas9 mRNA is formulated in a lipid nanoparticle, while sgRNA and donor DNA are delivered in an AAV vector. In some embodiments, Cas9 mRNA and sgRNA are co-formulated in a lipid nanoparticle, while donor DNA is delivered in an AAV vector.

[0419] Options are available to deliver the Cas9 nuclease as a DNA plasmid, as mRNA or as a protein. The guide RNA can be expressed from the same DNA, or can also be delivered as an RNA. The RNA can be chemically modified to alter or improve its half-life, or decrease the likelihood or degree of immune response. The endonuclease protein can be complexed with the gRNA prior to delivery. Viral vectors allow efficient delivery; split versions of Cas9 and smaller orthologs of Cas9 can be packaged in AAV, as can donors for HDR. A range of non-viral delivery methods also exist that can deliver each of these components, or non-viral and viral methods can be employed in tandem. For example, nano-particles can be used to deliver the protein and guide RNA, while AAV can be used to deliver a donor DNA.

### Exosomes

[0420] Exosomes, a type of microvesicle bound by phospholipid bilayer, can be used to deliver nucleic acids to specific tissue. Many different types of cells within the body naturally secrete exosomes. Exosomes form within the cytoplasm when endosomes invaginate and form multivesicular-endosomes (MVE). When the MVE fuses with the cellular membrane, the exosomes are secreted in the extracellular space. Ranging between 30-120 nm in diameter, exosomes can shuttle various molecules from one cell to another in a form of cell-to-cell communication. Cells that naturally produce exosomes, such as mast cells, can be genetically altered to produce exosomes with surface proteins that target specific tissues, alternatively exosomes can be isolated from the bloodstream. Specific nucleic acids can be placed within the engineered exosomes with electroporation. When introduced systemically, the exosomes can deliver the nucleic acids to the specific target tissue.

### Genetically Modified Cells

[0421] The term “genetically modified cell” refers to a cell that comprises at least one genetic modification introduced by genome editing (e.g., using the CRISPR/Cas system). In some ex vivo embodiments herein, the genetically modified cell is a genetically modified progenitor cell. In some in vivo embodiments herein, the genetically modified cell is a genetically modified liver cell. A genetically modified cell comprising an exogenous genome-targeting nucleic acid and/or an exogenous nucleic acid encoding a genome-targeting nucleic acid is contemplated herein.

[0422] The term “control treated population” describes a population of cells that has been treated with identical media, viral induction, nucleic acid sequences, temperature, confluency, flask size, pH, etc., with the exception of the addition of the genome editing components. Any method known in the art can be used to measure restoration of SERPINA1 gene or protein expression or activity, for example, Western Blot analysis of the AAT protein or quantifying SERPINA1 mRNA.

[0423] The term “isolated cell” refers to a cell that has been removed from an organism in which it was originally found, or a descendant of such a cell. Optionally, the cell has been cultured in vitro, e.g., under defined conditions or in the presence of other cells. Optionally, the cell is later introduced into a second organism or re-introduced into the organism from which it (or the cell from which it is descended) was isolated.

[0424] The term “isolated population” with respect to an isolated population of cells refers to a population of cells that has been removed and separated from a mixed or heterogeneous population of cells. In some embodiments, an isolated population is a substantially pure population of cells, as compared to the heterogeneous population from which the cells were isolated or enriched. In some embodiments, the isolated population is an isolated population of human progenitor cells, e.g., a substantially pure population of human progenitor cells, as compared to a heterogeneous population of cells comprising human progenitor cells and cells from which the human progenitor cells were derived.

[0425] The term “substantially enhanced,” with respect to a particular cell population, refers to a population of cells in which the occurrence of a particular type of cell is increased relative to pre-existing or reference levels, by at least 2-fold, at least 3-, at least 4-, at least 5-, at least 6-, at least 7-, at least 8-, at least 9, at least 10-, at least 20-, at least 50-, at least 100-, at least 400-, at least 1000-, at least 5000-, at least 20000-, at least 100000- or more fold depending, e.g., on the desired levels of such cells for ameliorating AATD.

[0426] The term “substantially enriched” with respect to a particular cell population, refers to a population of cells that is at least about 10%, about 20%, about 30%, about 40%, about 50%, about 60%, about 70% or more with respect to the cells making up a total cell population.

[0427] The terms “substantially enriched” or “substantially pure” with respect to a particular cell population, refers to a population of cells that is at least about 75%, at least about 85%, at least about 90%, or at least about 95% pure, with respect to the cells making up a total cell population. That is, the terms “substantially pure” or “essentially purified,” with regard to a population of progenitor cells, refers to a population of cells that contain fewer than about 20%, about 15%, about 10%, about 9%, about 8%, about 7%, about 6%, about 5%, about 4%, about 3%, about 2%, about 1%, or less than 1%, of cells that are not progenitor cells as defined by the terms herein.

Differentiation of Genome Edited iPSCs into Hepatocytes

[0428] Another step of the ex vivo methods of the invention involves differentiating the genome edited iPSCs into hepatocytes. The differentiating step may be performed according to any method known in the art. For example, hiPSC are differentiated into definitive endoderm using various treatments, including activin and B27 supplement (Life Technology). The definitive endoderm is further differentiated into hepatocyte, the treatment includes: FGF4, HGF, BMP2, BMP4, Oncostatin M, Dexametasonatc. (Duan et al, STEM CELLS; 2010; 28:674-686, Ma et al, STEM CELLS TRANSLATIONAL MEDICINE 2013; 2:409-419).

Differentiation of Genome Edited Mesenchymal Stem Cells into Hepatocytes

[0429] Another step of the ex vivo methods of the invention involves differentiating the genome edited mesenchymal stem cells into hepatocytes. The differentiating step may be performed according to any method known in the art. For example, hMSC are treated with various factors and hormones, including insulin, transferrin, FGF4, HGF, bile acids (Sawitza I et al, Sci Rep. 2015; 5: 13320).

Implanting Cells into Patients

[0430] Another step of the ex vivo methods of the invention involves implanting the hepatocytes into patients. This implanting step may be accomplished using any method of implantation known in the art. For example, the genetically modified cells may be injected directly in the patient's liver or otherwise administered to the patient.

[0431] Another step of the ex vivo methods of the invention involves implanting the progenitor cells or primary hepatocytes into patients. This implanting step may be accomplished using any method of implantation known in the art. For example, the genetically modified cells may be injected directly in the patient's liver or otherwise administered to the patient. The genetically modified cells may be purified ex vivo using a selected marker.

### Pharmaceutically Acceptable Carriers

[0432] The ex vivo methods of administering progenitor cells to a subject contemplated herein involve the use of therapeutic compositions comprising progenitor cells.

[0433] Therapeutic compositions contain a physiologically tolerable carrier together with the cell composition, and optionally at least one additional bioactive agent as described herein, dissolved or dispersed therein as an active ingredient. In some embodiments, the therapeutic composition is not substantially immunogenic when administered to a mammal or human patient for therapeutic purposes, unless so desired.

[0434] In general, the progenitor cells described herein are administered as a suspension with a pharmaceutically acceptable carrier. One of skill in the art will recognize that a pharmaceutically acceptable carrier to be used in a cell composition will not include buffers, compounds, cryopreservation agents, preservatives, or other agents in amounts that substantially interfere with the viability of the cells to be delivered to the subject. A formulation comprising cells can include e.g., osmotic buffers that permit cell membrane integrity to be maintained, and optionally, nutrients to maintain cell viability or enhance engraftment upon administration. Such formulations and suspensions are known to those of skill in the art and/or can be adapted for use with the progenitor cells, as described herein, using routine experimentation.

[0435] A cell composition can also be emulsified or presented as a liposome composition, provided that the emulsification procedure does not adversely affect cell viability. The cells and any other active ingredient can be mixed with excipients that are pharmaceutically acceptable and compatible with the active ingredient, and in amounts suitable for use in the therapeutic methods described herein.

[0436] Additional agents included in a cell composition can include pharmaceutically acceptable salts of the components therein. Pharmaceutically acceptable salts include the acid addition salts (formed with the free amino groups of the polypeptide) that are formed with inorganic acids, such as, for example, hydrochloric or phosphoric acids, or such organic acids as acetic, tartaric, mandelic and the like. Salts formed with the free carboxyl groups can also be derived from inorganic bases, such as, for example, sodium, potassium, ammonium, calcium or ferric hydroxides, and such organic bases as isopropylamine, trimethylamine, 2-ethylamino ethanol, histidine, procaine and the like.

[0437] Physiologically tolerable carriers are well known in the art. Exemplary liquid carriers are sterile aqueous solutions that contain no materials in addition to the active ingredients and water, or contain a buffer such as sodium phosphate at physiological pH value, physiological saline or both, such as phosphate-buffered saline. Still further, aqueous carriers can contain more than one buffer salt, as well as salts such as sodium and potassium chlorides, dextrose, polyethylene glycol and other solutes. Liquid compositions can also contain liquid phases in addition to and to the exclusion of water. Exemplary of such additional liquid phases are glycerin, vegetable oils such as cottonseed oil, and water-oil emulsions. The amount of an active compound used in the cell compositions that is effective in the treatment of a particular disorder or condition will depend on the nature of the disorder or condition, and can be determined by standard clinical techniques.

### Administration & Efficacy

[0438] The terms “administering,” “introducing” and “transplanting” are used interchangeably in the context of the placement of cells, e.g., progenitor cells, into a subject, by a method or route that results in at least partial localization of the introduced cells at a desired site, such as a site of injury or repair, such that a desired effect(s) is produced. The cells e.g., progenitor cells, or their differentiated progeny can be administered by any appropriate route that results in delivery to a desired location in the subject where at least a portion of the implanted cells or components of the cells remain viable. The period of viability of the cells after administration to a subject can be as short as a few hours, e.g., twenty-four hours, to a few days, to as long as several years, or even the life time of the patient, i.e., long-term engraftment. For example, in some embodiments described herein, an effective amount of myogenic progenitor cells is administered via a systemic route of administration, such as an intraperitoneal or intravenous route.

[0439] The terms “individual”, “subject,” “host” and “patient” are used interchangeably herein and refer to any subject for whom diagnosis, treatment or therapy is desired. In some embodiments, the subject is a mammal. In some embodiments, the subject is a human being.

[0440] When provided prophylactically, progenitor cells described herein can be administered to a subject in advance of any symptom of AATD, e.g., prior to the development of emphysema, airflow obstruction, chronic bronchitis, or liver disease. Accordingly, the prophylactic administration of a liver progenitor cell population serves to prevent AATD.

[0441] When provided therapeutically, liver progenitor cells are provided at (or after) the onset of a symptom or indication of AATD, e.g., upon the onset of lung or liver disease.

[0442] In some embodiments described herein, the liver progenitor cell population being administered according to the methods described herein comprises allogeneic liver progenitor cells obtained from one or more donors. “Allogeneic” refers to a liver progenitor cell or biological samples comprising liver progenitor cells or biological samples obtained from one or more different donors of the same species, where the genes at one or more loci are not identical. For example, a liver progenitor cell population being administered to a subject can be derived from one more unrelated donor subjects, or from one or more non-identical siblings. In some embodiments, syngeneic liver progenitor cell populations can be used, such as those obtained from genetically identical animals, or from identical twins. In other embodiments, the liver progenitor cells are autologous cells; that is, the liver progenitor cells are obtained or isolated from a subject and administered to the same subject, i.e., the donor and recipient are the same.

[0443] In one embodiment, the term “effective amount” refers to the amount of a population of progenitor cells or their progeny needed to prevent or alleviate at least one or more signs or symptoms of AATD, and relates to a sufficient amount of a composition to provide the desired effect, e.g., to treat a subject having AATD. The term “therapeutically effective amount” therefore refers to an amount of progenitor cells or a composition comprising progenitor cells that is sufficient to promote a particular effect when administered to a typical subject, such as one who has or is at risk for AATD. An effective amount would also include an amount sufficient to prevent or delay the development of a symptom of the disease, alter the course of a symptom of the disease (for example but not limited to, slow the progression of a symptom of the disease), or reverse a symptom of the disease. It is understood that for any given case, an appropriate “effective amount” can be determined by one of ordinary skill in the art using routine experimentation.

[0444] For use in the various embodiments described herein, an effective amount of progenitor cells comprises at least 10² progenitor cells, at least 5×10² progenitor cells, at least 10³ progenitor cells, at least 5×10³ progenitor cells, at least 10⁴ progenitor cells, at least 5×10⁴ progenitor cells, at least 10⁵ progenitor cells, at least 2×10⁵ progenitor cells, at least 3×10⁵ progenitor cells, at least 4×10⁵ progenitor cells, at least 5×10⁵ progenitor cells, at least 6×10⁵ progenitor cells, at least 7×10⁵ progenitor cells, at least 8×10⁵ progenitor cells, at least 9×10⁵ progenitor cells, at least 1×10⁶ progenitor cells, at least 2×10⁶ progenitor cells, at least 3×10⁶ progenitor cells, at least 4×10⁶ progenitor cells, at least 5×10⁶ progenitor cells, at least 6×10⁶ progenitor cells, at least 7×10⁶ progenitor cells, at least 8×10⁶ progenitor cells, at least 9×10⁶ progenitor cells, or multiples thereof. The progenitor cells are derived from one or more donors, or are obtained from an autologous source. In some embodiments described herein, the progenitor cells are expanded in culture prior to administration to a subject in need thereof.

[0445] Modest and incremental increases in the levels of functional AAT expressed in cells of patients having AATD can be beneficial for ameliorating one or more symptoms of the disease, for increasing long-term survival, and/or for reducing side effects associated with other treatments. Upon administration of such cells to human patients, the presence of liver progenitors that are producing increased levels of functional AAT is beneficial. In some embodiments, effective treatment of a subject gives rise to at least about 3%, 5% or 7% functional AAT relative to total AAT in the treated subject. In some embodiments, functional AAT will be at least about 10% of total AAT. In some embodiments, functional AAT will be at least about 20% to 30% of total AAT. Similarly, the introduction of even relatively limited subpopulations of cells having significantly elevated levels of functional AAT can be beneficial in various patients because in some situations normalized cells will have a selective advantage relative to diseased cells. However, even modest levels of liver progenitors with elevated levels of functional AAT can be beneficial for ameliorating one or more aspects of AATD in patients. In some embodiments, about 10%, about 20%, about 30%, about 40%, about 50%, about 60%, about 70%, about 80%, about 90% or more of the liver progenitors in patients to whom such cells are administered are producing increased levels of functional AAT.

[0446] “Administered” refers to the delivery of a progenitor cell composition into a subject by a method or route that results in at least partial localization of the cell composition at a desired site. A cell composition can be administered by any appropriate route that results in effective treatment in the subject, i.e. administration results in delivery to a desired location in the subject where at least a portion of the composition delivered, i.e. at least 1×10⁴ cells are delivered to the desired site for a period of time. Modes of administration include injection, infusion, instillation, or ingestion. “Injection” includes, without limitation, intravenous, intramuscular, intra-arterial, intrathecal, intraventricular, intracapsular, intraorbital, intracardiac, intradermal, intraperitoneal, transtracheal, subcutaneous, subcuticular, intraarticular, sub capsular, subarachnoid, intraspinal, intracerebral spinal, and intrasternal injection and infusion. In some embodiments, the route is intravenous. For the delivery of cells, administration by injection or infusion can be made.

[0447] In one embodiment, the cells are administered systemically. The phrases “systemic administration,” “administered systemically”, “peripheral administration” and “administered peripherally” refer to the administration of a population of progenitor cells other than directly into a target site, tissue, or organ, such that it enters, instead, the subject's circulatory system and, thus, is subject to metabolism and other like processes.

[0448] The efficacy of a treatment comprising a composition for the treatment of AATD can be determined by the skilled clinician. However, a treatment is considered “effective treatment,” if any one or all of the signs or symptoms of, as but one example, levels of functional AAT are altered in a beneficial manner (e.g., increased by at least 10%), or other clinically accepted symptoms or markers of disease are improved or ameliorated. Efficacy can also be measured by failure of an individual to worsen as assessed by hospitalization or need for medical interventions (e.g., chronic obstructive pulmonary disease, or progression of the disease is halted or at least slowed). Methods of measuring these indicators are known to those of skill in the art and/or described herein. Treatment includes any treatment of a disease in an individual or an animal (some non-limiting examples include a human, or a mammal) and includes: (1) inhibiting the disease, e.g., arresting, or slowing the progression of symptoms; or (2) relieving the disease, e.g., causing regression of symptoms; and (3) preventing or reducing the likelihood of the development of symptoms.

[0449] The treatment according to the present invention ameliorates one or more symptoms associated with AATD by increasing the amount of functional AAT in the individual. Early signs typically associated with AATD, include for example, emphysema, airflow obstruction, chronic bronchitis, or liver disease (obstructive jaundice and increased aminotransferase levels in early life, and fibrosis and cirrhosis in the absence of a history of liver complications during childhood).

### Kits

[0450] The present disclosure provides kits for carrying out the methods of the invention. A kit can include one or more of a genome-targeting nucleic acid, a polynucleotide encoding a genome-targeting nucleic acid, a site-directed polypeptide, a polynucleotide encoding a site-directed polypeptide, and/or any nucleic acid or proteinaceous molecule necessary to carry out the embodiments of the methods of the invention, or any combination thereof.

[0451] In some embodiments, a kit comprises: (1) a vector comprising a nucleotide sequence encoding a genome-targeting nucleic acid, and (2) the site-directed polypeptide or a vector comprising a nucleotide sequence encoding the site-directed polypeptide and (3) a reagent for reconstitution and/or dilution of the vector(s) and or polypeptide.

[0452] In some embodiments, a kit comprises: (1) a vector comprising (i) a nucleotide sequence encoding a genome-targeting nucleic acid, and (ii) a nucleotide sequence encoding the site-directed polypeptide and (2) a reagent for reconstitution and/or dilution of the vector.

[0453] In some embodiments of any of the above kits, the kit comprises a single-molecule guide genome-targeting nucleic acid. In some embodiments of any of the above kits, the kit comprises a double-molecule genome-targeting nucleic acid. In some embodiments of any of the above kits, the kit comprises two or more double-molecule guides or single-molecule guides. In some embodiments, the kits comprise a vector that encodes the nucleic acid targeting nucleic acid.

[0454] In some embodiments of any of the above kits, the kit can further comprise a polynucleotide to be inserted to effect the desired genetic modification.

[0455] Components of a kit may be in separate containers, or combined in a single container.

[0456] In some embodiments, a kit described above further comprises one or more additional reagents, where such additional reagents are selected from a buffer, a buffer for introducing a polypeptide or polynucleotide into a cell, a wash buffer, a control reagent, a control vector, a control RNA polynucleotide, a reagent for in vitro production of the polypeptide from DNA, adaptors for sequencing and the like. A buffer can be a stabilization buffer, a reconstituting buffer, a diluting buffer, or the like. In some embodiments, a kit can also include one or more components that may be used to facilitate or enhance the on-target binding or the cleavage of DNA by the endonuclease, or improve the specificity of targeting.

[0457] In addition to the above-mentioned components, a kit can further include instructions for using the components of the kit to practice the methods. The instructions for practicing the methods are generally recorded on a suitable recording medium. For example, the instructions may be printed on a substrate, such as paper or plastic, etc. The instructions may be present in the kits as a package insert, in the labeling of the container of the kit or components thereof (i.e., associated with the packaging or subpackaging), etc. The instructions can be present as an electronic storage data file present on a suitable computer readable storage medium, e.g. CD-ROM, diskette, flash drive, etc. In some instances, the actual instructions are not present in the kit, but means for obtaining the instructions from a remote source (e.g. via the Internet), can be provided. An example of this embodiment is a kit that includes a web address where the instructions can be viewed and/or from which the instructions can be downloaded. As with the instructions, this means for obtaining the instructions can be recorded on a suitable substrate.

### Guide RNA Formulation

[0458] Guide RNAs of the invention are formulated with pharmaceutically acceptable excipients such as carriers, solvents, stabilizers, adjuvants, diluents, etc., depending upon the particular mode of administration and dosage form. Guide RNA compositions are generally formulated to achieve a physiologically compatible pH, and range from a pH of about 3 to a pH of about 11, about pH 3 to about pH 7, depending on the formulation and route of administration. In some embodiments, the pH is adjusted to a range from about pH 5.0 to about pH 8. In some embodiments, the compositions comprise a therapeutically effective amount of at least one compound as described herein, together with one or more pharmaceutically acceptable excipients. Optionally, the compositions comprise a combination of the compounds described herein, or may include a second active ingredient useful in the treatment or prevention of bacterial growth (for example and without limitation, anti-bacterial or anti-microbial agents), or may include a combination of reagents of the invention.

[0459] Suitable excipients include, for example, carrier molecules that include large, slowly metabolized macromolecules such as proteins, polysaccharides, polylactic acids, polyglycolic acids, polymeric amino acids, amino acid copolymers, and inactive virus particles. Other exemplary excipients include antioxidants (for example and without limitation, ascorbic acid), chelating agents (for example and without limitation, EDTA), carbohydrates (for example and without limitation, dextrin, hydroxyalkylcellulose, and hydroxyalkylmethylcellulose), stearic acid, liquids (for example and without limitation, oils, water, saline, glycerol and ethanol), wetting or emulsifying agents, pH buffering substances, and the like.

### Other Possible Therapeutic Approaches

[0460] Gene editing can be conducted using nucleases engineered to target specific sequences. To date there are four major types of nucleases: meganucleases and their derivatives, zinc finger nucleases (ZFNs), transcription activator like effector nucleases (TALENs), and CRISPR-Cas9 nuclease systems. The nuclease platforms vary in difficulty of design, targeting density and mode of action, particularly as the specificity of ZFNs and TALENs is through protein-DNA interactions, while RNA-DNA interactions primarily guide Cas9. Cas9 cleavage also requires an adjacent motif, the PAM, which differs between different CRISPR systems. Cas9 from Streptococcus pyogenes cleaves using a NRG PAM, CRISPR from Neisseria meningitidis can cleave at sites with PAMs including NNNNGATT, NNNNNGTTT and NNNNGCTT. A number of other Cas9 orthologs target protospacer adjacent to alternative PAMs.

[0461] CRISPR endonucleases, such as Cas9, can be used in the methods of the invention. However, the teachings described herein, such as therapeutic target sites, could be applied to other forms of endonucleases, such as ZFNs, TALENS, HEs, or MegaTALs, or using combinations of nucleases. However, in order to apply the teachings of the present invention to such endonucleases, one would need to, among other things, engineer proteins directed to the specific target sites.

[0462] Additional binding domains can be fused to the Cas9 protein to increase specificity. The target sites of these constructs would map to the identified gRNA specified site, but would require additional binding motifs, such as for a zinc finger domain. In the case of Mega-TAL, a meganuclease can be fused to a TALE DNA-binding domain. The meganuclease domain can increase specificity and provide the cleavage. Similarly, inactivated or dead Cas9 (dCas9) can be fused to a cleavage domain and require the sgRNA/Cas9 target site and adjacent binding site for the fused DNA-binding domain. This likely would require some protein engineering of the dCas9, in addition to the catalytic inactivation, to decrease binding without the additional binding site.

### Zinc Finger Nucleases

[0463] Zinc finger nucleases (ZFNs) are modular proteins comprised of an engineered zinc finger DNA binding domain linked to the catalytic domain of the type II endonuclease FokI. Because FokI functions only as a dimer, a pair of ZFNs must be engineered to bind to cognate target “half-site” sequences on opposite DNA strands and with precise spacing between them to enable the catalytically active FokI dimer to form. Upon dimerization of the FokI domain, which itself has no sequence specificity per se, a DNA double-strand break is generated between the ZFN half-sites as the initiating step in genome editing.

[0464] The DNA binding domain of each ZFN is typically comprised of 3-6 zinc fingers of the abundant Cys2-His2 architecture, with each finger primarily recognizing a triplet of nucleotides on one strand of the target DNA sequence, although cross-strand interaction with a fourth nucleotide also can be important. Alteration of the amino acids of a finger in positions that make key contacts with the DNA alters the sequence specificity of a given finger. Thus, a four-finger zinc finger protein will selectively recognize a 12 bp target sequence, where the target sequence is a composite of the triplet preferences contributed by each finger, although triplet preference can be influenced to varying degrees by neighboring fingers. An important aspect of ZFNs is that they can be readily re-targeted to almost any genomic address simply by modifying individual fingers, although considerable expertise is required to do this well. In most applications of ZFNs, proteins of 4-6 fingers are used, recognizing 12-18 bp respectively. Hence, a pair of ZFNs will typically recognize a combined target sequence of 24-36 bp, not including the 5-7 bp spacer between half-sites. The binding sites can be separated further with larger spacers, including 15-17 bp. A target sequence of this length is likely to be unique in the human genome, assuming repetitive sequences or gene homologs are excluded during the design process. Nevertheless, the ZFN protein-DNA interactions are not absolute in their specificity so off-target binding and cleavage events do occur, either as a heterodimer between the two ZFNs, or as a homodimer of one or the other of the ZFNs. The latter possibility has been effectively eliminated by engineering the dimerization interface of the FokI domain to create “plus” and “minus” variants, also known as obligate heterodimer variants, which can only dimerize with each other, and not with themselves. Forcing the obligate heterodimer prevents formation of the homodimer. This has greatly enhanced specificity of ZFNs, as well as any other nuclease that adopts these FokI variants.

[0465] A variety of ZFN-based systems have been described in the art, modifications thereof are regularly reported, and numerous references describe rules and parameters that are used to guide the design of ZFNs; see, e.g., Segal et al., Proc Natl Acad Sci USA 96(6):2758-63 (1999); Dreier B et al., J Mol Biol. 303(4): 489-502 (2000); Liu Q et al., J Biol Chem. 277(6):3850-6 (2002); Dreier et al., J Biol Chem 280(42):35588-97 (2005); and Dreier et al., J Biol Chem. 276(31):29466-78 (2001).

### Transcription Activator-Like Effector Nucleases (TALENs)

[0466] TALENs represent another format of modular nucleases whereby, as with ZFNs, an engineered DNA binding domain is linked to the FokI nuclease domain, and a pair of TALENs operate in tandem to achieve targeted DNA cleavage. The major difference from ZFNs is the nature of the DNA binding domain and the associated target DNA sequence recognition properties. The TALEN DNA binding domain derives from TALE proteins, which were originally described in the plant bacterial pathogen Xanthomonas sp. TALEs are comprised of tandem arrays of 33-35 amino acid repeats, with each repeat recognizing a single basepair in the target DNA sequence that is typically up to 20 bp in length, giving a total target sequence length of up to 40 bp. Nucleotide specificity of each repeat is determined by the repeat variable diresidue (RVD), which includes just two amino acids at positions 12 and 13. The bases guanine, adenine, cytosine and thymine are predominantly recognized by the four RVDs: Asn-Asn, Asn-Ile, His-Asp and Asn-Gly, respectively. This constitutes a much simpler recognition code than for zinc fingers, and thus represents an advantage over the latter for nuclease design. Nevertheless, as with ZFNs, the protein-DNA interactions of TALENs are not absolute in their specificity, and TALENs have also benefitted from the use of obligate heterodimer variants of the FokI domain to reduce off-target activity.

[0467] Additional variants of the FokI domain have been created that are deactivated in their catalytic function. If one half of either a TALEN or a ZFN pair contains an inactive FokI domain, then only single-strand DNA cleavage (nicking) will occur at the target site, rather than a DSB. The outcome is comparable to the use of CRISPR/Cas9 “nickase” mutants in which one of the Cas9 cleavage domains has been deactivated. DNA nicks can be used to drive genome editing by HDR, but at lower efficiency than with a DSB. The main benefit is that off-target nicks are quickly and accurately repaired, unlike the DSB, which is prone to NHEJ-mediated mis-repair.

[0468] A variety of TALEN-based systems have been described in the art, and modifications thereof are regularly reported; see, e.g., Boch, Science 326(5959): 1509-12 (2009); Mak et al., Science 335(6069):716-9 (2012); and Moscou et al., Science 326(5959): 1501 (2009). The use of TALENs based on the “Golden Gate” platform, or cloning scheme, has been described by multiple groups; see, e.g., Cermak et al., Nucleic Acids Res. 39(12): e82 (2011); Li et al., Nucleic Acids Res. 39(14):6315-25(2011); Weber et al., PLOS One. 6(2): e16765 (2011); Wang et al., J Genet Genomics 41(6): 339-47, Epub 2014 May 17 (2014); and Cermak T et al., Methods Mol Biol. 1239:133-59 (2015).

### Homing Endonucleases

[0469] Homing endonucleases (HEs) are sequence-specific endonucleases that have long recognition sequences (14-44 base pairs) and cleave DNA with high specificity—often at sites unique in the genome. There are at least six known families of HEs as classified by their structure, including LAGLIDADG (SEQ ID NO: 68,299), GIY-YIG, His-Cis box, H—N—H, PD-(D/E)xK, and Vsr-like that are derived from a broad range of hosts, including eukarya, protists, bacteria, archaea, cyanobacteria and phage. As with ZFNs and TALENs, HEs can be used to create a DSB at a target locus as the initial step in genome editing. In addition, some natural and engineered HEs cut only a single strand of DNA, thereby functioning as site-specific nickases. The large target sequence of HEs and the specificity that they offer have made them attractive candidates to create site-specific DSBs.

[0470] A variety of HE-based systems have been described in the art, and modifications thereof are regularly reported; see, e.g., the reviews by Steentoft et al., Glycobiology 24(8):663-80 (2014); Belfort and Bonocora, Methods Mol Biol. 1123:1-26 (2014); Hafez and Hausner, Genome 55(8):553-69 (2012); and references cited therein.

### MegaTAL/Tev-mTALEN/MegaTev

[0471] As further examples of hybrid nucleases, the MegaTAL platform and Tev-mTALEN platform use a fusion of TALE DNA binding domains and catalytically active HEs, taking advantage of both the tunable DNA binding and specificity of the TALE, as well as the cleavage sequence specificity of the HE; see, e.g., Boissel et al., NAR 42: 2591-2601 (2014); Kleinstiver et al., G3 4:1155-65 (2014); and Boissel and Scharenberg, Methods Mol. Biol. 1239: 171-96 (2015).

[0472] In a further variation, the MegaTev architecture is the fusion of a meganuclease (Mega) with the nuclease domain derived from the GIY-YIG homing endonuclease I-TevI (Tev). The two active sites are positioned ˜30 bp apart on a DNA substrate and generate two DSBs with non-compatible cohesive ends; see, e.g., Wolfs et al., NAR 42, 8816-29 (2014). It is anticipated that other combinations of existing nuclease-based approaches will evolve and be useful in achieving the targeted genome modifications described herein.

dCas9-FokI and Other Nucleases

[0473] Combining the structural and functional properties of the nuclease platforms described above offers a further approach to genome editing that can potentially overcome some of the inherent deficiencies. As an example, the CRISPR genome editing system typically uses a single Cas9 endonuclease to create a DSB. The specificity of targeting is driven by a 20 or 22 nucleotide sequence in the guide RNA that undergoes Watson-Crick base-pairing with the target DNA (plus an additional 2 bases in the adjacent NAG or NGG PAM sequence in the case of Cas9 from S. pyogenes). Such a sequence is long enough to be unique in the human genome, however, the specificity of the RNA/DNA interaction is not absolute, with significant promiscuity sometimes tolerated, particularly in the 5′ half of the target sequence, effectively reducing the number of bases that drive specificity. One solution to this has been to completely deactivate the Cas9 catalytic function—retaining only the RNA-guided DNA binding function—and instead fusing a FokI domain to the deactivated Cas9; see, e.g., Tsai et al., Nature Biotech 32: 569-76 (2014); and Guilinger et al., Nature Biotech. 32: 577-82 (2014). Because FokI must dimerize to become catalytically active, two guide RNAs are required to tether two Cas9-FokI fusions in close proximity to form the dimer and cleave DNA. This essentially doubles the number of bases in the combined target sites, thereby increasing the stringency of targeting by CRISPR-based systems.

[0474] As further example, fusion of the TALE DNA binding domain to a catalytically active HE, such as I-TevI, takes advantage of both the tunable DNA binding and specificity of the TALE, as well as the cleavage sequence specificity of I-TevI, with the expectation that off-target cleavage may be further reduced.

### Methods and Compositions of the Invention

[0475] Accordingly, the present disclosure relates in particular to the following non-limiting inventions: In a first method, Method 1, the present disclosure provides a method for editing the SERPINA1 gene in a human cell by genome editing, the method comprising the step of introducing into the human cell one or more deoxyribonucleic acid (DNA) endonucleases to effect one or more single-strand breaks (SSBs) or double-strand breaks (DSBs) within or near the SERPINA1 gene or other DNA sequences that encode regulatory elements of the SERPINA1 gene that results in a permanent deletion, insertion, or correction or modulation of expression or function of one or more mutations or exons within or near or affecting the expression or function of the SERPINA1 gene or other DNA sequences that encode regulatory elements of the SERPINA1 gene and restoration of alpha-1-antitrypsin (AAT) protein activity.

[0476] In another method, Method 2, the present disclosure provides a method for inserting a SERPINA1 gene in a human cell by genome editing, the method comprising introducing into the human cell one or more deoxyribonucleic acid (DNA) endonucleases to effect one or more single-strand breaks (SSBs) or double-strand breaks (DSBs) within or near a safe harbor locus that results in a permanent insertion of the SERPINA1 gene or minigene, and results in restoration of AAT activity.

[0477] In another method, Method 3, the present disclosure provides an ex vivo method for treating a patient with alpha-1 antitrypsin deficiency (AATD) comprising the steps of: i) creating a patient specific induced pluripotent stem cell (iPSC); ii) editing within or near a SERPINA1 gene or other DNA sequences that encode regulatory elements of the SERPINA1 gene of the iPSC, or within or near a safe harbor locus of the iPSC; iii) differentiating the genome edited iPSC into a hepatocyte; and iv) implanting the hepatocyte into the patient.

[0478] In another method, Method 4, the present disclosure provides the method of Method 3, wherein the creating step comprises: a) isolating a somatic cell from the patient; and b) introducing a set of pluripotency-associated genes into the somatic cell to induce the somatic cell to become a pluripotent stem cell.

[0479] In another method, Method 5, the present disclosure provides the method of Method 4, wherein the somatic cell is a fibroblast.

[0480] In another method, Method 6, the present disclosure provides the method of Method 4, wherein the set of pluripotency-associated genes is one or more of the genes selected from the group consisting of OCT4, SOX2, KLF4, Lin28, NANOG and cMYC.

[0481] In another method, Method 7, the present disclosure provides the method of any one of Methods 3-6, wherein the editing step comprises introducing into the iPSC one or more deoxyribonucleic acid (DNA) endonucleases to effect one or more single-strand breaks (SSBs) or double-strand breaks (DSBs) within or near the SERPINA1 gene or other DNA sequences that encode regulatory elements of the SERPINA1 gene that results in permanent deletion, insertion, or correction or modulation of expression or function of one or more mutations or exons within or near or affecting the expression or function of the SERPINA1 gene or other DNA sequences that encode regulatory elements of the SERPINA1 gene, or within or near a safe harbor locus that results in permanent insertion of the SERPINA1 or minigene, and restoration of alpha-1-antitrypsin (AAT) protein activity.

[0482] In another method, Method 8, the present disclosure provides the method of Method 7, wherein the safe harbor locus is selected from the group consisting of AAVS1 (PPP1R12C), ALB, Angptl3, ApoC3, ASGR2, CCR5, FIX (F9), G6PC, Gys2, HGD, Lp(a), Pcsk9, Serpina1, TF, and TTR.

[0483] In another method, Method 9, the present disclosure provides the method of any one of Methods 3-8, wherein the differentiating step comprises one or more of the following to differentiate the genome edited iPSC into a hepatocyte: contacting the genome edited iPSC with one or more of activin, B27 supplement, FGF4, HGF, BMP2, BMP4, Oncostatin M, Dexamethasone.

[0484] In another method, Method 10, the present disclosure provides the method of any one of Methods 3-9, wherein the implanting step comprises implanting the hepatocyte into the patient by transplantation, local injection, or systemic infusion, or combinations thereof.

[0485] In another method, Method 11, the present disclosure provides an ex vivo method for treating a patient with alpha-1 antitrypsin deficiency (AATD), the method comprising the steps of: i) performing a biopsy of the patient's liver; ii) isolating a liver specific progenitor cell or primary hepatocyte; iii) editing within or near the SERPINA1 gene or other DNA sequences that encode regulatory elements of the SERPINA1 gene of the progenitor cell or primary hepatocyte or editing within or near a safe harbor locus of the progenitor cell or primary hepatocyte; and iv) implanting the genome-edited progenitor cell or primary hepatocyte into the patient.

[0486] In another method, Method 12, the present disclosure provides the method of Method 11, wherein the isolating step comprises: perfusion of fresh liver tissues with digestion enzymes, cell differential centrifugation, cell culturing, and combinations thereof.

[0487] In another method, Method 13, the present disclosure provides the method of any one of Methods 11-12, wherein the editing step comprises introducing into the progenitor cell or primary hepatocyte one or more deoxyribonucleic acid (DNA) endonucleases to effect one or more single-strand breaks (SSBs) or double-strand breaks (DSBs) within or near the SERPINA1 gene or other DNA sequences that encode regulatory elements of the SERPINA1 gene that results in a permanent deletion, insertion, correction, or modulation of expression or function of one or more mutations or exons within or near or affecting the expression or function the SERPINA1 gene or other DNA sequences that encode regulatory elements of the SERPINA1 gene, or within or near a safe harbor locus that results in permanent insertion of the SERPINA1 gene or minigene, and restoration of alpha-1-antitrypsin (AAT) protein activity.

[0488] In another method, Method 14, the present disclosure provides the method of Method 13, wherein the safe harbor locus is selected from the group consisting of AAVS1 (PPP1R12C), ALB, Angptl3, ApoC3, ASGR2, CCR5, FIX (F9), G6PC, Gys2, HGD, Lp(a), Pcsk9, Serpina1, TF, and TTR.

[0489] In another method, Method 15, the present disclosure provides the method of any one of Methods 11-14, wherein the implanting step comprises implanting the genome-edited progenitor cell or primary hepatocyte into the patient by transplantation, local injection, or systemic infusion, or combinations thereof.

[0490] In another method, Method 16, the present disclosure provides an ex vivo method for treating a patient with alpha-1 antitrypsin deficiency (AATD), the method comprising the steps of: i) performing a biopsy of the patient's bone marrow; ii) isolating a mesenchymal stem cell from the patient; iii) editing within or near the SERPINA1 gene or other DNA sequences that encode regulatory elements of the SERPINA1 gene of the mesenchymal stem cell or editing within or near a safe harbor locus of the mesenchymal stem cell; iv) differentiating the genome-edited mesenchymal stem cell into a hepatocyte; and v) implanting the hepatocyte into the patient.

[0491] In another method, Method 17, the present disclosure provides the method of Method 16, wherein the mesenchymal stem cell is isolated from the patient's bone marrow or peripheral blood.

[0492] In another method, Method 18, the present disclosure provides the method of Method 16, wherein the isolating step comprises: aspiration of bone marrow and isolation of mesenchymal cells by density centrifugation using Percoll™.

[0493] In another method, Method 19, the present disclosure provides the method of any one of Methods 16-18, wherein the editing step comprises introducing into the mesenchymal stem cell one or more deoxyribonucleic acid (DNA) endonucleases to effect one or more single-strand breaks (SSBs) or double-strand breaks (DSBs) within or near the SERPINA1 gene or other DNA sequences that encode regulatory elements of the SERPINA1 gene that results in permanent deletion, insertion, correction, or modulation of expression or function of one or more mutations or exons within or near or affecting the expression or function of the SERPINA1 gene or other DNA sequences that encode regulatory elements of the SERPINA1 gene, or within or near a safe harbor locus that results in permanent insertion of the SERPINA1 gene or minigene, and restoration of alpha-1-antitrypsin (AAT) protein activity.

[0494] In another method, Method 20, the present disclosure provides the method of Method 19, wherein the safe harbor locus is selected from the group consisting of AAVS1 (PPP1R12C), ALB, Angptl3, ApoC3, ASGR2, CCR5, FIX (F9), G6PC, Gys2, HGD, Lp(a), Pcsk9, Serpina1, TF, and TTR.

[0495] In another method, Method 21, the present disclosure provides the method of any one of Methods 16-19, wherein the differentiating step comprises one or more of the following to differentiate the genome edited stem cell into a hepatocyte: contacting the genome edited mesenchymal stem cell with one or more of insulin, transferrin, FGF4, HGF, or bile acids.

[0496] In another method, Method 22, the present disclosure provides the method of any one of Methods 16-21, wherein the implanting step comprises implanting the hepatocyte into the patient by transplantation, local injection, or systemic infusion, or combinations thereof.

[0497] In another method, Method 23, the present disclosure provides an in vivo method for treating a patient with alpha-1 antitrypsin deficiency (AATD), the method comprising the step of editing the SERPINA1 gene in a cell of the patient, or other DNA sequences that encode regulatory elements of the SERPINA1 gene, or editing within or near a safe harbor locus in a cell of the patient.

[0498] In another method, Method 24, the present disclosure provides the method of Method 23, wherein the editing step comprises introducing into the cell one or more deoxyribonucleic acid (DNA) endonucleases to effect one or more single-strand breaks (SSBs) or double-strand breaks (DSBs) within or near the SERPINA1 gene or other DNA sequences that encode regulatory elements of the SERPINA1 gene that results in permanent deletion, insertion, or correction or modulation of one or more mutations or exons within or near the SERPINA1 gene or other DNA sequences that encode regulatory elements of the SERPINA1 gene, or within or near a safe harbor locus that results in permanent insertion of the SERPINA1 gene or minigene, and restoration of alpha-1-antitrypsin (AAT) protein activity.

[0499] In another method, Method 25, the present disclosure provides the method of any one of Methods 1, 2, 7, 13, 19, or 24, wherein the one or more DNA endonucleases is a Cas1, Cas1B, Cas2, Cas3, Cas4, Cas5, Cas6, Cas7, Cas8, Cas9 (also known as Csn1 and Csx12), Cas100, Csy1, Csy2, Csy3, Cse1, Cse2, Csc1, Csc2, Csa5, Csn2, Csm2, Csm3, Csm4, Csm5, Csm6, Cmr1, Cmr3, Cmr4, Cmr5, Cmr6, Csb1, Csb2, Csb3, Csx17, Csx14, Csx10, Csx16, CsaX, Csx3, Csx1, Csx15, Csf1, Csf2, Csf3, Csf4, or Cpf1 endonuclease; or a homolog thereof, recombination of the naturally occurring molecule, codon-optimized, or modified version thereof, and combinations thereof.

[0500] In another method, Method 26, the present disclosure provides the method of Method 25, wherein the method comprises introducing into the cell one or more polynucleotides encoding the one or more DNA endonucleases.

[0501] In another method, Method 27, the present disclosure provides the method of Method 25, wherein the method comprises introducing into the cell one or more ribonucleic acids (RNAs) encoding the one or more DNA endonucleases.

[0502] In another method, Method 28, the present disclosure provides the method of any one of Methods 26 or 27, wherein the one or more polynucleotides or one or more RNAs is one or more modified polynucleotides or one or more modified RNAs, the present disclosure provides the method of

[0503] In another method, Method 29, the present disclosure provides the method of Method 26, wherein the DNA endonuclease is a protein or polypeptide.

[0504] In another method, Method 30, the present disclosure provides the method of The method of any one of the preceding Methods, wherein the method further comprises introducing into the cell one or more guide ribonucleic acids (gRNAs).

[0505] In another method, Method 31, the present disclosure provides the method of Method 30, wherein the one or more gRNAs are single-molecule guide RNA (sgRNAs).

[0506] In another method, Method 32, the present disclosure provides the method of any one of Methods 30-31, wherein the one or more gRNAs or one or more sgRNAs is one or more modified gRNAs or one or more modified sgRNAs.

[0507] In another method, Method 33, the present disclosure provides the method of any one of Methods 30-32, wherein the one or more DNA endonucleases is pre-complexed with one or more gRNAs or one or more sgRNAs.

[0508] In another method, Method 34, the present disclosure provides the method of The method of any one of the preceding Methods, wherein the method further comprises introducing into the cell a polynucleotide donor template comprising at least a portion of the wild-type SERPINA1 gene or minigene or cDNA.

[0509] In another method, Method 35, the present disclosure provides the method of Method 34, wherein the at least a portion of the wild-type SERPINA1 gene or minigene or cDNA is exon 1, exon 2, exon 3, exon 4, exon 5, intronic regions, fragments or combinations thereof, the entire SERPINA1 gene, DNA sequences that encode wild type regulatory elements of the SERPINA1 gene, minigene or cDNA.

[0510] In another method, Method 36, the present disclosure provides the method of any one of Methods 34-35, wherein the donor template is either a single or double stranded polynucleotide.

[0511] In another method, Method 37, the present disclosure provides the method of any one of Methods 34-36, wherein the donor template has homologous arms to the 14q32.13 region.

[0512] In another method, Method 38, the present disclosure provides the method of any one of Methods 1, 2, 7, 13, 19, or 24, wherein the method further comprises introducing into the cell one guide ribonucleic acid (gRNA) and a polynucleotide donor template comprising at least a portion of the wild-type SERPINA1 gene, and wherein the one or more DNA endonucleases is one or more Cas9 endonucleases that effect one double-strand break (DSB) at a DSB locus within or near the SERPINA1 gene or other DNA sequences that encode regulatory elements of the SERPINA1 gene, or within or near a safe harbor locus that facilitates insertion of a new sequence from the polynucleotide donor template into the chromosomal DNA at the locus or safe harbor locus that results in permanent insertion or correction of a part of the chromosomal DNA of the SERPINA1 gene or other DNA sequences that encode regulatory elements of the SERPINA1 gene proximal to the locus or safe harbor locus and restoration of AAT protein activity, and wherein the gRNA comprises a spacer sequence that is complementary to a segment of the locus or safe harbor locus.

[0513] In another method, Method 39, the present disclosure provides the method of Method 38, wherein proximal means nucleotides both upstream and downstream of the locus or safe harbor locus.

[0514] In another method, Method 40, the present disclosure provides the method of any one of Methods 1, 2, 7, 13, 19, or 24, wherein the method further comprises introducing into the cell two guide ribonucleic acid (gRNAs) and a polynucleotide donor template comprising at least a portion of the wild-type SERPINA1 gene, and wherein the one or more DNA endonucleases is two or more Cas9 endonucleases that effect a pair of double-strand breaks (DSBs), the first at a 5′ DSB locus and the second at a 3′ DSB locus, within or near the SERPINA1 gene or other DNA sequences that encode regulatory elements of the SERPINA1 gene, or within or near a safe harbor locus that facilitates insertion of a new sequence from the polynucleotide donor template into the chromosomal DNA between the 5′ DSB locus and the 3′ DSB locus that results in permanent insertion or correction of the chromosomal DNA between the 5′ DSB locus and the 3′ DSB locus within or near the SERPINA1 gene or other DNA sequences that encode regulatory elements of the SERPINA1 gene, or within or near a safe harbor locus and restoration of AAT protein activity, and wherein the first guide RNA comprises a spacer sequence that is complementary to a segment of the 5′ DSB locus and the second guide RNA comprises a spacer sequence that is complementary to a segment of the 3′ DSB locus.

[0515] In another method, Method 41, the present disclosure provides the method of any one of Methods 38-40, wherein the one or two gRNAs are one or two single-molecule guide RNA (sgRNAs).

[0516] In another method, Method 42, the present disclosure provides the method of any one of Methods 38-41, wherein the one or two gRNAs or one or two sgRNAs is one or two modified gRNAs or one or two modified sgRNAs.

[0517] In another method, Method 43, the present disclosure provides the method of any one of Methods 38-42, wherein the one or more DNA endonucleases is pre-complexed with one or two gRNAs or one or two sgRNAs.

[0518] In another method, Method 44, the present disclosure provides the method of any one of Methods 38-43, wherein the at least a portion of the wild-type SERPINA1 gene or minigene or cDNA is exon 1, exon 2, exon 3, exon 4, exon 5, intronic regions, fragments or combinations thereof, the entire SERPINA1 gene, DNA sequences that encode wild-type regulatory elements of the SERPINA1 gene, minigene, or cDNA.

[0519] In another method, Method 45, the present disclosure provides the method of any one of Methods 38-44, wherein the donor template is either a single or double stranded polynucleotide.

[0520] In another method, Method 46, the present disclosure provides the method of any one of Methods 38-45, wherein the donor template has homologous arms to the 14q32.13 region.

[0521] In another method, Method 47, the present disclosure provides the method of Method 44, wherein the DSB, or 5′ DSB and 3′ DSB are in the first, second, third, fourth, fifth exon or intron, SERPINA1 gene.

[0522] In another method, Method 48, the present disclosure provides the method of any one of Methods 1, 2, 7, 13, 19, 24, 30-33, or 38-41, wherein the gRNA or sgRNA is directed to one or more of the following pathological variants: rs764325655, rs121912713, rs28929474, rs17580, rs121912714, rs764220898, rs199422211, rs751235320, rs199422210, rs267606950, rs55819880, rs28931570.

[0523] In another method, Method 49, the present disclosure provides the method of any one of Methods 1, 2, 7, 13, 19, or 24-48, wherein the insertion or correction is by homology directed repair (HDR).

[0524] In another method, Method 50, the present disclosure provides the method of any one of Methods 1, 2, 7, 13, 19, or 24, wherein the method further comprises introducing into the cell two guide ribonucleic acid (gRNAs), and wherein the one or more DNA endonucleases is two or more Cas9 endonucleases that effect a pair of double-strand breaks (DSBs), the first at a 5′ DSB locus and the second at a 3′ DSB locus, within or near the SERPINA1 gene that causes a deletion of the chromosomal DNA between the 5′ DSB locus and the 3′ DSB locus that results in permanent deletion of the chromosomal DNA between the 5′ DSB locus and the 3′ DSB locus within or near the SERPINA1 gene and restoration of AAT protein activity, and wherein the first guide RNA comprises a spacer sequence that is complementary to a segment of the 5′ DSB locus and the second guide RNA comprises a spacer sequence that is complementary to a segment of the 3′ DSB locus.

[0525] In another method, Method 51, the present disclosure provides the method of Method 50, wherein the two gRNAs are two single-molecule guide RNA (sgRNAs).

[0526] In another method, Method 52, the present disclosure provides the method of any one of Methods 50-51, wherein the two gRNAs or two sgRNAs are two modified gRNAs or two modified sgRNAs.

[0527] In another method, Method 53, the present disclosure provides the method of any one of Methods 50-52, wherein the one or more DNA endonucleases is pre-complexed with one or two gRNAs or one or two sgRNAs.

[0528] In another method, Method 54, the present disclosure provides the method of any one of Methods 50-53, wherein both the 5′ DSB and 3′ DSB are in or near either the first exon, second exon, third exon, fourth exon or fifth exon of the SERPINA1 gene.

[0529] In another method, Method 55, the present disclosure provides the method of any one of Method 50-54, wherein the deletion is a deletion of 1 kb or less.

[0530] In another method, Method 56, the present disclosure provides the method of any one of Methods 1, 2, 7, 13, or 19-55, wherein the Cas9 or Cpf1 mRNA, gRNA, and a donor template are either each formulated into separate lipid nanoparticles or all co-formulated into a lipid nanoparticle.

[0531] In another method, Method 57, the present disclosure provides the method of any one of Methods 1, 6, 11, 15 or 19-55, wherein the Cas9 or Cpf1 mRNA is formulated into a lipid nanoparticle, and both the gRNA and donor template are delivered by a viral vector.

[0532] In another method, Method 58, the present disclosure provides the method of Method 57, wherein the viral vector is an adeno-associated virus (AAV).

[0533] In another method, Method 59, the present disclosure provides the method of Method 58, wherein the AAV vector is an AAV6 vector.

[0534] In another method, Method 60, the present disclosure provides the method of any one of Methods 1, 2, 7, 13, 19 or 24-55, wherein the Cas9 or Cpf1 mRNA, gRNA and a donor template are either each formulated into separate exosomes or all co-formulated into an exosome.

[0535] In another method, Method 61, the present disclosure provides the method of any one of Methods 1, 2, 7, 13, 19 or 24-55, wherein the Cas9 or Cpf1 mRNA is formulated into a lipid nanoparticle, and the gRNA is delivered to the cell by electroporation and donor template is delivered to the cell by a viral vector, the present disclosure provides the method of

[0536] In another method, Method 62, the present disclosure provides the method of Method 61, wherein the viral vector is an adeno-associated virus (AAV) vector.

[0537] In another method, Method 63, the present disclosure provides the method of Method 62, wherein the AAV vector is an AAV6 vector.

[0538] In another method, Method 64, the present disclosure provides the method of any one of the preceding Methods, wherein the SERPINA1 gene is located on Chromosome 14: 1,493,319-1,507,264 (Genome Reference Consortium—GRCh38/hg38).

[0539] In another method, Method 65, the present disclosure provides the method of any one of Methods 1, 2, 7, 13, 19 or 24-55, wherein the restoration of AAT protein activity is compared to wild-type or normal AAT protein activity.

[0540] In another method, Method 66, the present disclosure provides the method of Method 1, wherein the human cell is a liver cell.

[0541] In another method, Method 67, the present disclosure provides the method of Method 23, wherein the cell is a liver cell.

[0542] In another method, Method 68, the present disclosure provides the method of any one of Methods 1, 2, 7, 13, 19 or 24-55, wherein the SERPINA1 gene is operably linked to an exogenous promoter that drives expression of the SERPINA1 gene.

[0543] In another method, Method 69, the present disclosure provides the method of any one of Methods 1, 2, 7, 13, 19 or 24-55, wherein the one or more DSBs occurs at a location immediately 3′ to an endogenous promoter locus.

[0544] The present disclosure also provides a composition, Composition 1, of one or more guide ribonucleic acids (gRNAs) for editing a SERPINA1 gene in a cell from a patient with alpha-1 antitrypsin deficiency (AATD), the one or more gRNAs comprising a spacer sequence selected from the group consisting of the nucleic acid sequences in SEQ ID NOs: 54,860-68,297 for editing the SERPINA1 gene in a cell from a patient with alpha-1 antitrypsin deficiency.

[0545] In another composition, Composition 2, the present disclosure provides the composition of Composition 1, wherein the one or more gRNAs are one or more single-molecule guide RNAs (sgRNAs).

[0546] In another composition, Composition 3, the present disclosure provides the composition of Composition 1 or Composition 2, wherein the one or more gRNAs or one or more sgRNAs is one or more modified gRNAs or one or more modified sgRNAs.

[0547] In another composition, Composition 4, the present disclosure provides the composition of Composition 1 or Composition 2 or Composition 3, wherein the cell is a liver cell.

[0548] The present disclosure also provides a composition, Composition 5, of one or more guide ribonucleic acids (gRNAs) for editing a safe harbor locus in a cell from a patient with alpha-1 antitrypsin deficiency (AATD), the one or more gRNAs comprising a spacer sequence selected from the group consisting of the nucleic acid sequences in SEQ ID NOs: 1-54,859 for editing the safe harbor locus in a cell from a patient with alpha-1 antitrypsin deficiency, wherein the safe harbor locus is selected from the group consisting of AAVS1 (PPP1R12C), ALB, Angptl3, ApoC3, ASGR2, CCR5, FIX (F9), G6PC, Gys2, HGD, Lp(a), Pcsk9, Serpina1, TF, and TTR.

[0549] In another composition, Composition 6, the present disclosure provides the composition of Composition 5, wherein the one or more gRNAs are one or more single-molecule guide RNAs (sgRNAs).

[0550] In another composition, Composition 7, the present disclosure provides the composition of Composition 5 or Composition 6, wherein the one or more gRNAs or one or more sgRNAs is one or more modified gRNAs or one or more modified sgRNAs.

[0551] In another composition, Composition 8, the present disclosure provides the composition of Composition 5 or Composition 6 or Composition 7, wherein the cell is a liver cell.

### Definitions

[0552] The term “comprising” or “comprises” is used in reference to compositions, methods, and respective component(s) thereof, that are essential to the invention, yet open to the inclusion of unspecified elements, whether essential or not.

[0553] The term “consisting essentially of” refers to those elements required for a given embodiment. The term permits the presence of additional elements that do not materially affect the basic and novel or functional characteristic(s) of that embodiment of the invention.

[0554] The term “consisting of” refers to compositions, methods, and respective components thereof as described herein, which are exclusive of any element not recited in that description of the embodiment.

[0555] The singular forms “a,” “an,” and “the” include plural references, unless the context clearly dictates otherwise.

[0556] Certain numerical values presented herein are preceded by the term “about.” The term “about” is used to provide literal support for the numerical value the term “about” precedes, as well as a numerical value that is approximately the numerical value, that is the approximating unrecited numerical value may be a number which, in the context it is presented, is the substantial equivalent of the specifically recited numerical value. The term “about” means numerical values within ±10% of the recited numerical value.

[0557] When a range of numerical values is presented herein, it is contemplated that each intervening value between the lower and upper limit of the range, the values that are the upper and lower limits of the range, and all stated values with the range are encompassed within the disclosure. All the possible sub-ranges within the lower and upper limits of the range are also contemplated by the disclosure.

### EXAMPLES

[0558] The invention will be more fully understood by reference to the following examples, which provide illustrative non-limiting embodiments of the invention.

[0559] The examples describe the use of the CRISPR system as an illustrative genome editing technique to create defined therapeutic genomic replacements, termed “genomic modifications” herein, in the SERPINA1 gene that lead to permanent correction of mutations in the genomic locus, or expression at a heterologous locus, that restore AAT protein activity. Introduction of the defined therapeutic modifications represents a novel therapeutic strategy for the potential amelioration of AATD, as described and illustrated herein.

### Example 1—CRISPR/SpCas9 Target Sites for the SERPINA1 Gene (Other than as a Safe Harbor Locus)

[0560] Regions of the SERPINA1 gene were scanned for target sites. Each area was scanned for a protospacer adjacent motif (PAM) having the sequence NRG. gRNA 20 bp spacer sequences corresponding to the PAM were identified, as shown in SEQ ID NOs: 54,860-61,324.

### Example 2—CRISPR/SaCas9 Target Sites for the SERPINA1 Gene (Other than as a Safe Harbor Locus)

[0561] Regions of the SERPINA1 gene were scanned for target sites. Each area was scanned for a protospacer adjacent motif (PAM) having the sequence NNGRRT. gRNA 20 bp spacer sequences corresponding to the PAM were identified, as shown in SEQ ID NOs: 61,324-61,936.

### Example 3—CRISPR/StCas9 Target Sites for the SERPINA1 Gene (Other than as a Safe Harbor Locus)

[0562] Regions of the SERPINA1 gene were scanned for target sites. Each area was scanned for a protospacer adjacent motif (PAM) having the sequence NNAGAAW. gRNA 20 bp spacer sequences corresponding to the PAM were identified, as shown in SEQ ID NOs: 61,937-62,069.

### Example 4—CRISPR/TdCas9 Target Sites for the SERPINA1 Gene (Other than as a Safe Harbor Locus)

[0563] Regions of the SERPINA1 gene were scanned for target sites. Each area was scanned for a protospacer adjacent motif (PAM) having the sequence NAAAAC. gRNA 20 bp spacer sequences corresponding to the PAM were identified, as shown in SEQ ID NOs: 69,070-62,120.

### Example 5—CRISPR/NmCas9 Target Sites for the SERPINA1 Gene (Other than as a Safe Harbor Locus)

[0564] Regions of the SERPINA1 gene were scanned for target sites. Each area was scanned for a protospacer adjacent motif (PAM) having the sequence NNNNGHTT. gRNA 20 bp spacer sequences corresponding to the PAM were identified, as shown in SEQ ID NOs: 62, 121-62,563.

### Example 6—CRISPR/Cpf1 Target Sites for the SERPINA1 Gene (Other than as a Safe Harbor Locus)

[0565] Regions of the SERPINA1 gene were scanned for target sites. Each area was scanned for a protospacer adjacent motif (PAM) having the sequence YTN. gRNA 22 bp spacer sequences corresponding to the PAM were identified, as shown in SEQ ID NOs: 62,564-68,297.

### Example 7—CRISPR/SpCas9 Target Sites for Safe Harbor Loci

[0566] The following safe harbor loci were scanned for target sites: Exons 1-2 of AAVS1 (PPP1R12C), Exons 1-2 of ALB, Exons 1-2 of Angptl3, Exons 1-2 of ApoC3, Exons 1-2 of ASGR2, Exons 1-2 of CCR5, Exons 1-2 of FIX (F9), Exons 1-2 of G6PC, Exons 1-2 of Gys2, Exons 1-2 of HGD, Exons 1-2 of Lp(a), Exons 1-2 of Pcsk9, Exons 1-2 of Serpina1, Exons 1-2 of TF, and Exons 1-2 of TTR. Each area was scanned for a protospacer adjacent motif (PAM) having the sequence NRG. gRNA 20 bp spacer sequences corresponding to the PAM were identified, as shown in the following sequences: AAVS1 (PPP1R12C): SEQ ID NOs. 1-2,032; ALB: SEQ ID NOs. 3,482-3,649; Angptl3: SEQ ID NOs. 4,104-4,448; ApoC3: SEQ ID NOs. 5,432-5,834; ASGR2: SEQ ID NOs. 6,109-7,876; CCR5: SEQ ID NOS. 9,642-9,844; FIX (F9): SEQ ID NOs. 10,221-11,686; G6PC: SEQ ID NOs. 14,230-15,245; Gys2: SEQ ID NOs. 16,581-22,073; HGD: SEQ ID NOs. 32,254-33,946; Lp(a): SEQ ID NOs. 36,789-40,583; Pcsk9: SEQ ID NOs. 46, 154-48,173; Serpina1: SEQ ID NOs. 50,345-51,482; TF: SEQ ID NOs. 52,446-53,277; and TTR: SEQ ID NOs. 54,063-54,362.

### Example 8—CRISPR/SaCas9 Target Sites for Safe Harbor Loci

[0567] The following safe harbor loci were scanned for target sites: Exons 1-2 of AAVS1 (PPP1R12C), Exons 1-2 of ALB, Exons 1-2 of Angptl3, Exons 1-2 of ApoC3, Exons 1-2 of ASGR2, Exons 1-2 of CCR5, Exons 1-2 of FIX (F9), Exons 1-2 of G6PC, Exons 1-2 of Gys2, Exons 1-2 of HGD, Exons 1-2 of Lp(a), Exons 1-2 of Pcsk9, Exons 1-2 of Serpina1, Exons 1-2 of TF, and Exons 1-2 of TTR. Each area was scanned for a protospacer adjacent motif (PAM) having the sequence NNGRRT. gRNA 20 bp spacer sequences corresponding to the PAM were identified, as shown in the following sequences: AAVS1 (PPP1R12C): SEQ ID NOs. 2,033-2,203; ALB: SEQ ID NOs. 3,650-3,677; Angpt3: SEQ ID NOs. 4,449-4,484; ApoC3: SEQ ID NOs. 5,835-5,859; ASGR2: SEQ ID NOs. 7,877-8,082; CCR5: SEQ ID NOs. 9,845-9,876; FIX (F9): SEQ ID NOs. 11,687-11,849; G6PC: SEQ ID NOs. 15,246-15,362; Gys2: SEQ ID NOs. 22,074-22,749; HGD: SEQ ID NOs. 33,947-34,160; Lp(a): SEQ ID NOs. 40,584-40,993; Pcsk9: SEQ ID NOs. 48,174-48,360; Serpina1: SEQ ID NOs. 51,483-51,575; TF: SEQ ID NOs. 53,278-53,363; and TTR: SEQ ID NOs. 54,363-54,403.

### Example 9—CRISPR/StCas9 Target Sites for Safe Harbor Loci

[0568] The following safe harbor loci were scanned for target sites: Exons 1-2 of AAVS1 (PPP1R12C), Exons 1-2 of ALB, Exons 1-2 of Angptl3, Exons 1-2 of ApoC3, Exons 1-2 of ASGR2, Exons 1-2 of CCR5, Exons 1-2 of FIX (F9), Exons 1-2 of G6PC, Exons 1-2 of Gys2, Exons 1-2 of HGD, Exons 1-2 of Lp(a), Exons 1-2 of Pcsk9, Exons 1-2 of Serpina1, Exons 1-2 of TF, and Exons 1-2 of TTR. Each area was scanned for a protospacer adjacent motif (PAM) having the sequence NNAGAAW. gRNA 20 bp spacer sequences corresponding to the PAM were identified, as shown in the following sequences: AAVS1 (PPP1R12C): SEQ ID NOs. 2,204-2,221; ALB: SEQ ID NOs. 3,678-3,695; Angptl3: SEQ ID NOs. 4,485-4,507; ApoC3: SEQ ID NOs. 5,860-5,862; ASGR2: SEQ ID NOs. 8,083-8,106; CCR5: SEQ ID NOs. 9,877-9,890; FIX (F9): SEQ ID NOs. 11,850-11,910; G6PC: SEQ ID NOs. 15,363-15,386; Gys2: SEQ ID NOs. 22,750-20,327; HGD: SEQ ID NOs. 34,161-34,243; Lp(a): SEQ ID NOs. 40,994-41,129; Pcsk9: SEQ ID NOs. 48,361-48,396; Serpina1: SEQ ID NOs. 51,576-51,587; TF: SEQ ID NOs. 53,364-53,375; and TTR: SEQ ID NOs. 54,404-54,420.

### Example 10—CRISPR/TdCas9 Target Sites for Safe Harbor Loci

[0569] The following safe harbor loci were scanned for target sites: Exons 1-2 of AAVS1 (PPP1R12C), Exons 1-2 of ALB, Exons 1-2 of Angptl3, Exons 1-2 of ApoC3, Exons 1-2 of ASGR2, Exons 1-2 of CCR5, Exons 1-2 of FIX (F9), Exons 1-2 of G6PC, Exons 1-2 of Gys2, Exons 1-2 of HGD, Exons 1-2 of Lp(a), Exons 1-2 of Pcsk9, Exons 1-2 of Serpina1, Exons 1-2 of TF, and Exons 1-2 of TTR. Each area was scanned for a protospacer adjacent motif (PAM) having the sequence NAAAAC. gRNA 20 bp spacer sequences corresponding to the PAM were identified, as shown in the following sequences: AAVS1 (PPP1R12C): SEQ ID NOs. 2,222-2,230; ALB: SEQ ID NOs. 3,696-3,700; Angptl3: SEQ ID NOs. 4,508-4,520; ApoC3: SEQ ID NOs. 5,863-5,864; ASGR2: SEQ ID NOs. 8,107-8,118; CCR5: SEQ ID NOs. 9,891-9,892; FIX (F9): SEQ ID NOs. 11,911-11,935; G6PC: SEQ ID NOs. 15,387-15,395; Gys2: SEQ ID NOs. 23,028-23,141; HGD: SEQ ID NOs. 34,244-34,262; Lp(a): SEQ ID NOs. 41,130-41,164; Pcsk9: SEQ ID NOs. 48,397-48,410; Serpina1: SEQ ID NOs. 51,588-51,590; TF: SEQ ID NOs. 53,376-53,382; and TTR: SEQ ID NOs. 54,421-54,422.

### Example 11—CRISPR/NmCas9 Target Sites for Safe Harbor Loci

[0570] The following safe harbor loci were scanned for target sites: Exons 1-2 of AAVS1 (PPP1R12C), Exons 1-2 of ALB, Exons 1-2 of Angptl3, Exons 1-2 of ApoC3, Exons 1-2 of ASGR2, Exons 1-2 of CCR5, Exons 1-2 of FIX (F9), Exons 1-2 of G6PC, Exons 1-2 of Gys2, Exons 1-2 of HGD, Exons 1-2 of Lp(a), Exons 1-2 of Pcsk9, Exons 1-2 of Serpina1, Exons 1-2 of TF, and Exons 1-2 of TTR. Each area was scanned for a protospacer adjacent motif (PAM) having the sequence NNNNGHTT. gRNA 20 bp spacer sequences corresponding to the PAM were identified, as shown in the following sequences: AAVS1 (PPP1R12C): SEQ ID NOs. 2,231-2,305; ALB: SEQ ID NOs. 3,701-3,724; Angptl3: SEQ ID NOs. 4,521-4,583; ApoC3: SEQ ID NOs. 5,865-5,876; ASGR2: SEQ ID NOs. 8,119-8,201; CCR5: SEQ ID NOs. 9,893-9,920; FIX (F9): SEQ ID NOs. 11,936-12,088; G6PC: SEQ ID NOs. 15,396-15,485; Gys2: SEQ ID NOs. 23,142-23,821; HGD: SEQ ID NOs. 34,263-34,463; Lp(a): SEQ ID NOs. 41,165-41,532; Pcsk9: SEQ ID NOS. 48,411-48,550; Serpina1: SEQ ID NOs. 51,591-51,641; TF: SEQ ID NOs. 53,383-53,426; and TTR: SEQ ID NOs. 54,423-54,457.

### Example 12—CRISPR/Cpf1 Target Sites for Safe Harbor Loci

[0571] Exons 1-2 of the AAVS1 (PPP1R12C) gene were scanned for target sites. The following safe harbor loci were scanned for target sites: Exons 1-2 of AAVS1 (PPP1R12C), Exons 1-2 of ALB, Exons 1-2 of Angptl3, Exons 1-2 of ApoC3, Exons 1-2 of ASGR2, Exons 1-2 of CCR5, Exons 1-2 of FIX (F9), Exons 1-2 of G6PC, Exons 1-2 of Gys2, Exons 1-2 of HGD, Exons 1-2 of Lp(a), Exons 1-2 of Pcsk9, Exons 1-2 of Serpina1, Exons 1-2 of TF, and Exons 1-2 of TTR. Each area was scanned for a protospacer adjacent motif (PAM) having the sequence YTN. gRNA 22 bp spacer sequences corresponding to the PAM were identified, as shown in the following sequences: AAVS1 (PPP1R12C): SEQ ID NOs. 2,306-3,481; ALB: SEQ ID NOs. 3,725-4, 103; Angptl3: SEQ ID NOs. 4,584-5,431; ApoC3: SEQ ID NOs. 5,877-6, 108; ASGR2: SEQ ID NOs. 8,202-9,641; CCR5: SEQ ID NOs. 9,921-10,220; FIX (F9): SEQ ID NOs. 12,089-14,229; G6PC: SEQ ID NOS. 15,486-16,580; Gys2: SEQ ID NOs. 23,822-32,253; HGD: SEQ ID NOs. 34,464-36,788; Lp(a): SEQ ID NOs. 41,533-46,153; Pcsk9: SEQ ID NOs. 48,551-50,344; Serpina1: SEQ ID NOs. 51,642-52,445; TF: SEQ ID NOs. 53,427-54,062; and TTR: SEQ ID NOs. 54,458-54,859.

### Example 13—Bioinformatics Analysis of the Guide Strands

[0572] Candidate guides will be screened and selected in a multi-step process that involves both theoretical binding and experimentally assessed activity. By way of illustration, candidate guides having sequences that match a particular on-target site, such as a site within the SERPINA1 gene, with adjacent PAM can be assessed for their potential to cleave at off-target sites having similar sequences, using one or more of a variety of bioinformatics tools available for assessing off-target binding, as described and illustrated in more detail below, in order to assess the likelihood of effects at chromosomal positions other than those intended. Candidates predicted to have relatively lower potential for off-target activity can then be assessed experimentally to measure their on-target activity, and then off-target activities at various sites. Preferred guides have sufficiently high on-target activity to achieve desired levels of gene editing at the selected locus, and relatively lower off-target activity to reduce the likelihood of alterations at other chromosomal loci. The ratio of on-target to off-target activity is often referred to as the “specificity” of a guide.

[0573] For initial screening of predicted off-target activities, there are a number of bioinformatics tools known and publicly available that can be used to predict the most likely off-target sites; and since binding to target sites in the CRISPR/Cas9/Cpf1 nuclease system is driven by Watson-Crick base pairing between complementary sequences, the degree of dissimilarity (and therefore reduced potential for off-target binding) is essentially related to primary sequence differences: mismatches and bulges, i.e. bases that are changed to a non-complementary base, and insertions or deletions of bases in the potential off-target site relative to the target site. An exemplary bioinformatics tool called COSMID (CRISPR Off-target Sites with Mismatches, Insertions and Deletions) (available on the web at crispr.bme.gatech.edu) compiles such similarities. Other bioinformatics tools include, but are not limited to, GUIDO, autoCOSMID, and CCtop.

[0574] Bioinformatics were used to minimize off-target cleavage in order to reduce the detrimental effects of mutations and chromosomal rearrangements. Studies on CRISPR/Cas9 systems suggested the possibility of high off-target activity due to nonspecific hybridization of the guide strand to DNA sequences with base pair mismatches and/or bulges, particularly at positions distal from the PAM region. Therefore, it is important to have a bioinformatics tool that can identify potential off-target sites that have insertions and/or deletions between the RNA guide strand and genomic sequences, in addition to base-pair mismatches. The bioinformatics-based tool, COSMID (CRISPR Off-target Sites with Mismatches, Insertions and Deletions) was therefore used to search genomes for potential CRISPR off-target sites (available on the web at crispr.bme.gatech.edu). COSMID output ranked lists of the potential off-target sites based on the number and location of mismatches, allowing more informed choice of target sites, and avoiding the use of sites with more likely off-target cleavage.

[0575] Additional bioinformatics pipelines were employed that weigh the estimated on- and/or off-target activity of gRNA targeting sites in a region. Other features that may be used to predict activity include information about the cell type in question, DNA accessibility, chromatin state, transcription factor binding sites, transcription factor binding data, and other CHIP-seq data. Additional factors are weighed that predict editing efficiency, such as relative positions and directions of pairs of gRNAs, local sequence features and micro-homologies.

### Example 14—Testing of Preferred Guides in Cells for On-Target Activity

[0576] The gRNAs predicted to have the lowest off target activity will then be tested for on-target activity in a model cell line, such as Huh-7 cells, and evaluated for indel frequency using TIDE or next generation sequencing. TIDE is a web tool to rapidly assess genome editing by CRISPR-Cas9 of a target locus determined by a guide RNA (gRNA or sgRNA). Based on the quantitative sequence trace data from two standard capillary sequencing reactions, the TIDE software quantifies the editing efficacy and identifies the predominant types of insertions and deletions (indels) in the DNA of a targeted cell pool. See Brinkman et al, Nucl. Acids Res. (2014) for a detailed explanation and examples. Next-generation sequencing (NGS), also known as high-throughput sequencing, is the catch-all term used to describe a number of different modern sequencing technologies including: Illumina (Solexa) sequencing, Roche 454 sequencing, Ion torrent: Proton/PGM sequencing, and SOLID sequencing. These recent technologies allow one to sequence DNA and RNA much more quickly and cheaply than the previously used Sanger sequencing, and as such have revolutionized the study of genomics and molecular biology.

[0577] Transfection of tissue culture cells, allows screening of different constructs and a robust means of testing activity and specificity. Tissue culture cell lines, such as Huh-7 cells, are easily transfected and result in high activity. These or other cell lines will be evaluated to determine the cell lines that provide the best surrogate. These cells will then be used for many early stage tests. For example, individual gRNAs for S. pyogenes Cas9 will be transfected into the cells using plasmids, such as, for example, CTx-1, CTx-2, or CTx-3 described in FIG. 1A-1C, which are suitable for expression in human cells. Several days later, the genomic DNA is harvested and the target site amplified by PCR. The cutting activity can be measured by the rate of insertions, deletions and mutations introduced by NHEJ repair of the free DNA ends. Although this method cannot differentiate correctly repaired sequences from uncleaved DNA, the level of cutting can be gauged by the amount of mis-repair. Off-target activity can be observed by amplifying identified putative off-target sites and using similar methods to detect cleavage. Translocation can also be assayed using primers flanking cut sites, to determine if specific cutting and translocations happen. Un-guided assays have been developed allowing complementary testing of off-target cleavage including guide-seq. The gRNA or pairs of gRNA with significant activity can then be followed up in cultured cells to measure correction of SERPINA1 mutation. Off-target events can be followed again. These experiments allow optimization of nuclease and donor design and delivery.

### Example 15—Testing of Preferred Guides in Cells for Off-Target Activity

[0578] The gRNAs having the best on-target activity from the TIDE and next generation sequencing studies in the above example will then be tested for off-target activity using whole genome sequencing.

### Example 16—Testing Different Approaches for HDR Gene Editing

[0579] After testing the gRNAs for both on-target activity and off-target activity, the mutation correction and knock-in strategies will be tested for HDR gene editing.

[0580] For the mutation correction approach, the donor DNA template will be provided as a short single-stranded oligonucleotide, a short double-stranded oligonucleotide (PAM sequence intact/PAM sequence mutated), a long single-stranded DNA molecule (PAM sequence intact/PAM sequence mutated) or a long double-stranded DNA molecule (PAM sequence intact/PAM sequence mutated). In addition, the donor DNA template will be delivered by AAV.

[0581] For the cDNA knock-in approach, a single-stranded or double-stranded DNA having homologous arms to the 14q32.13 region may include more than 40 nt of the first exon (the first coding exon) of the SERPINA1 gene, the complete CDS of the SERPINA1 gene and 3′UTR of the SERPINA1 gene, and at least 40 nt of the following intron. The single-stranded or double-stranded DNA having homologous arms to the 14q32.13 region, which includes more than 80 nt of the first exon of the SERPINA1 gene, the complete CDS of the SERPINA1 gene and 3′UTR of the SERPINA1 gene, and at least 80 nt of the following intron. The single-stranded or double-stranded DNA having homologous arms to the 14q32.13 region may include more than 100 nt of the first exon of the SERPINA1 gene, the complete CDS of the SERPINA1 gene and 3′UTR of the SERPINA1 gene, and at least 100 nt of the following intron. The single-stranded or double-stranded DNA having homologous arms to the 14q32.13 region may include more than 150 nt of the first exon of the SERPINA1 gene, the complete CDS of the SERPINA1 gene and 3′UTR of the SERPINA1 gene, and at least 150 nt of the following intron. The single-stranded or double-stranded DNA having homologous arms to the 14q32.13 region may include more than 300 nt of the first exon of the SERPINA1 gene, the complete CDS of the SERPINA1 gene and 3′UTR of the SERPINA1 gene, and at least 300 nt of the following intron. The single-stranded or double-stranded DNA having homologous arms to the 14q32.13 region may include more than 400 nt of the first exon of the SERPINA1 gene, the complete CDS of the SERPINA1 gene and 3′UTR of the SERPINA1 gene, and at least 400 nt of the following the first intron. Alternatively, the DNA template will be delivered by AAV.

[0582] For the cDNA or minigene knock-in approach, a single-stranded or double-stranded DNA having homologous arms to the 14q32.13, which includes more than 80 nt of the second exon (the first coding exon) of the SERPINA1 gene, the complete CDS of the SERPINA1 gene and 3′UTR of the SERPINA1 gene, and at least 80 nt of the following intron. Alternatively, the DNA template will be delivered by AAV.

[0583] Next, the efficiency of HDR mediated correction of the common mutation of the PI Z allele of SERPINA1 and knock-in of cDNA minigene (comprised of, natural or synthetic enhancer and promoter, one or more exons, and natural or synthetic introns, and natural or synthetic 3′UTR and polyadenylation signal) into the 2nd exon will be assessed.

### Example 17—Re-Assessment of Lead CRISPR-Cas9/DNA Donor Combinations

[0584] After testing the different strategies for HDR gene editing, the lead CRISPR-Cas9/DNA donor combinations will be re-assessed in primary human hepatocytes for efficiency of deletion, recombination, and off-target specificity. Cas9 mRNA or RNP will be formulated into lipid nanoparticles for delivery, sgRNAs will be formulated into nanoparticles or delivered as AAV, and donor DNA will be formulated into nanoparticles or delivered as AAV.

### Example 18—In Vivo Testing in Relevant Mouse Model

[0585] After the CRISPR-Cas9/DNA donor combinations have been re-assessed, the lead formulations will be tested in vivo in an animal model. Suitable animal models include, by way of non-limiting example, a FGR mouse model with the livers repopulated with human hepatocytes or iPSC derived hepatocytes (normal or AAT deficient).

[0586] Culture in human cells allows direct testing on the human target and the background human genome, as described above.

[0587] Preclinical efficacy and safety evaluations can be observed through engraftment of modified mouse or human hepatocytes in FGR mice. The modified cells can be observed in the months after engraftment.

### Example 19—Screening of gRNAs

[0588] To identify a large spectrum of pairs of gRNAs able to edit the SERPINA1 DNA target region, an in vitro transcribed (IVT) gRNA screen was conducted. SERPINA1 genomic sequence was submitted for analysis using gRNA design software. The resulting list of gRNAs was narrowed to a list of about 200 gRNAs based on uniqueness of sequence—only gRNAs without a perfect match somewhere else in the genome were screened—and minimal predicted off targets. This set of gRNAs was transcribed in vitro and transfected using messenger Max into HEK293T cells that constitutively express Cas9. Cells were harvested 48 hours post transfection, the genomic DNA was isolated, and cutting efficiency was evaluated using TIDE analysis. The cutting efficiency of the gRNA (% indels) is listed in Table 4.

[0589] It was found that about 14% of the tested gRNAs induced cutting efficiencies over 70%. (FIG. 3).

TABLE 4
gRNA sequences and cutting efficiencies
in HEK293T-Cas9 cells

| Guide Name | Guide Sequence | % Indel |
|---|---|---|
| SERPINA1_T61 | CCCAATGTCTAGAAGGTCTT (SEQ ID NO: 55,783) | 70.3 |
| SFRPINA1_T37 | GCCCAATGTCTAGAAGGTCT (SEQ ID NO: 55,782) | 50.6 |
| SERPINA1_T185 | ATCAAGGCCCAATGTCTAGA (SEQ ID NO: 55,781) | 58.1 |
| SERPINA1_T70 | GCCCAAGACCTTCTAGACAT (SEQ ID NO: 60,476) | 56.1 |
| SERPINA1_T88 | CCCAAGACCTTCTAGACATT (SEQ ID NO: 60,477) | 60 |
| SERPINA1_T162 | GTGTCAGTATGGATAAATCA (SEQ ID NO: 55,778) | 59.2 |
| SFRPINA1_T170 | CAAACCTTTCTGTGTCAGTA (SEQ ID NO: 55,776) | 7.1 |
| SERPINA1_T390 | TTATCCATACTGACACAGAA (SEQ ID NO: 60,480) | 64.7 |
| SERPINA1_T388 | CATACTGACACAGAAAGGTT (SEQ ID NO: 60,481) | 63.6 |
| SERPINA1_T283 | ATACTGACACAGAAAGGTTT (SEQ ID NO: 60,482) | 70.5 |
| SERPINA1_T282 | TTTGGGCTAAGTTGTTTCAA (SEQ ID NO: 60,485) | 40.5 |
| SERPINA1_T72 | CACCAAATCTCACAGATCGA (SEQ ID NO: 55,771) | 81.6 |
| SFRPINA1_T73 | CTCCTTCGATCTGTGAGATT (SEQ ID NO: 60,487) | 47.3 |
| SERPINA1_T259 | GCTAAAGATGACACTTATTT (SEQ ID NO: 60,490) | 73.9 |
| SERPINA1_T275 | CACTTATTTTGGAAAACTAA (SEQ ID NO: 60,492) | 0.6 |
| SERPINA1_T182 | ATGGAACTGCAGTTGTTCAT (SEQ ID NO: 55,764) | 52.8 |
| SERPINA1_T323 | AACAACTGCAGTTCCATGAA (SEQ ID NO: 60,494) | 66.2 |
| SERPINA1_T383 | CAAGATAATGCAGCCATTCA (SEQ ID NO: 55,762) | 50.7 |
| SERPINA1_T177 | CATGAATGGCTGCATTATCT (SEQ ID NO: 60,495) | 22 |
| SERPINA1_T280 | ATGAATGGCTGCATTATCTT (SEQ ID NO: 60,496) | 57.8 |
| SERPINA1_T244 | TGAATGGCTGCATTATCTTG (SEQ ID NO: 60,497) | 51.8 |
| SERPINA1_T66 | GGCTGCATTATCTTGGGGTC (SEQ ID NO: 60,498) | 18 |
| SERPINA1_T128 | GCTGCATTATCTTGGGGTCT (SEQ ID NO: 60,499) | 34.8 |
| 5FRPINA1_T385 | CACTGTGAAGGTCACTGCCA (SEQ ID NO: 60,504) | 50.8 |
| SERPINA1_T194 | CTCCTTGAGGACACGGACCC (SEQ ID NO: 55,756) | 15.2 |
| SERPINA1_T418 | TGCCAGGGTCCGTGTCCTCA (SEQ ID NO: 60,506) | 49.6 |
| SERPINA1_T59 | ACACGGCTTGAAGCTCCTTG (SEQ ID NO: 55,754) | 49.2 |
| SERPINA1_T257 | GCTCTCTCCTTTCTAGTACA (SEQ ID NO: 55,751) | 90.1 |
| SERPINA1_T13 | CTTCAAGCCGTGTACTAGAA (SEQ ID NO: 60,511) | 15.5 |
| SERPINA1_T291 | TACTAGAAAGGAGAGAGCCC (SEQ ID NO: 60,515) | 45.8 |
| SERPINA1_T431 | TAGAAAGGAGAGAGCCCTGG (SEQ ID NO: 60,517) | 60.1 |
| SERPINA1_T341 | TCACTCCACGTCTGCCTCCA (SEQ ID NO: 55,749) | 83.9 |
| SERPINA1_T471 | GTCACTCCACGTCTGCCTCC (SEQ ID NO: 55,748) | 51.7 |
| SERPINA1_T294 | GAGAGCCCTGGAGGCAGACG (SEQ ID NO: 60,519) | 44.8 |
| SERPINA1_T187 | TGCACCCACAACTCAGAACA (SEQ ID NO: 55,744) | 77.1 |
| SERPINA1_T92 | GTGCACCCACAACTCAGAAC (SEQ ID NO: 55,743) | 46.5 |
| SERPINA1_T314 | CTCTTCCCTGTTCTGAGTTG (SEQ ID NO: 60,522) | 27.8 |
| SERPINA1_T120 | AGTTGTGGGTGCACCTGAGC (SEQ ID NO: 60,526) | 10.6 |
| SERPINA1_T224 | GTTGTGGGTGCACCTGAGCA (SEQ ID NO: 60,527) | 72.5 |
| SERPINA1_T274 | TTGTGGGTGCACCTGAGCAG (SEQ ID NO: 60,528) | 39.8 |
| SERPINA1_T167 | AAGCGCCTCTCCCCCTGCTC (SEQ ID NO: 55,740) | 36.8 |
| SERPINA1_T437 | TGTGGGTGCACCTGAGCAGG (SEQ ID NO: 60,529) | 42.7 |
| SERPINA1_T81 | CAGGGGGAGAGGCGCTTGTC (SEQ ID NO: 60,534) | 15.8 |
| SERPINA1_T168 | AGAGGCGCTTGTCAGGAAGA (SEQ ID NO: 60,536) | 38 |
| SERPINA1_T336 | CTTGTCAGGAAGATGGACAG (SEQ ID NO: 60,539) | 46 |
| SERPINA1_T360 | TTGTCAGGAAGATGGACAGA (SEQ ID NO: 60,540) | 45.1 |
| SERPINA1_T405 | TGTCAGGAAGATGGACAGAG (SEQ ID NO: 60,541) | 80.2 |
| SERPINA1_T379 | AAGGCTTTGGCTGATGGGGC (SEQ ID NO: 55,737) | 17.5 |
| SERPINA1_T180 | CCTCAAGGCTTTGGCTGATG (SEQ ID NO: 55,736) | 14 |
| SERPINA1_T135 | TCCTCAAGGCTTTGGCTGAT (SEQ ID NO: 55,735) | 25.9 |
| SERPINA1_T197 | CTCCTCAAGGCTTTGGCTGA (SEQ ID NO: 55,734) | 20.3 |
| SERPINA1_T345 | CTTGCTCCTCCTCAAGGCTT (SEQ ID NO: 55,733) | 23.8 |
| SERPIN20_T150 | CCCCATCAGCCAAAGCCTTG (SEQ ID NO: 60,547) | 34.9 |
| SERPINA1_T328 | CATCAGCCAAAGCCTTGAGG (SEQ ID NO: 60,549) | 35.7 |
| SERPINA1_T138 | ATAGGCCTTGCTCCTCCTCA (SEQ ID NO: 55,732) | 76.2 |
| SERPINA1_T348 | CAAAGCCTTGAGGAGGAGCA (SEQ ID NO: 60,552) | 24.4 |
| SERPINA1_T176 | AGGAGCAAGGCCTATGTGAC (SEQ ID NO: 60,554) | 32.7 |
| SERPINA1_T376 | CCTCTCCCTCCCTGTCACAT (SEQ ID NO: 55,730) | 70.1 |
| SERPINA1_T308 | GGAGCAAGGCCTATGTGACA (SEQ ID NO: 60,555) | 58.8 |
| SERPINA1_T181 | GCAAGGCCTATGTGACAGGG (SEQ ID NO: 60,557) | 71 |
| SERPINA1_T265 | CAAGGCCTATGTGACAGGGA (SEQ ID NO: 60,558) | 44.6 |
| SERPINA1_T465 | CCTATGTGACAGGGAGGGAG (SEQ ID NO: 60,561) | 24.5 |
| SERPINA1_T392 | CAGGGAGGGAGAGGATGTGC (SEQ ID NO: 60,563) | 26.9 |
| SERPINA1_T372 | AGGGAGGGAGAGGATGTGCA (SEQ ID NO: 60,564) | 74.3 |
| SERPINA1_T459 | GGGAGAGGATGTGCAGGGCC (SEQ ID NO: 60,566) | 16. |
| SERPINA1_T444 | GGAGAGGATGTGCAGGGCCA (SEQ ID NO: 60,567) | 32.7 |
| SERPINA1_T113 | TCACTCCCCCTGGACGGCCC (SEQ ID NO: 55,728) | 9.7 |
| SERPINA1_T253 | GTGCAGGGCCAGGGCCGTCC (SEQ ID NO: 60,569) | 67.9 |
| SERPINA1_T312 | TGCAGGGCCAGGGCCGTCCA (SEQ ID NO: 60,570) | 63.7 |
| SERPINA1_T445 | GCAGGGCCAGGGCCGTCCAG (SEQ ID NO: 60,571) | 59.7 |
| SERPINA1_T441 | CAGGGCCAGGGCCGTCCAGG (SEQ ID NO: 60,572) | 55.8 |
| SERPINA1_T51 | AAGCGCTCACTCCCCCTGGA (SEQ ID NO: 55,727) | 72.9 |
| SERPINA1_T114 | CAGGAAGCGCTCACTCCCCC (SEQ ID NO: 55,726) | 69.2 |
| SERPINA1_T164 | CAGGGGGAGTGAGCGCTTCC (SEQ ID NO: 60,575) | 56.2 |
| SERPINA1_T155 | AGGGGGAGTGAGCGCTTCCT (SEQ ID NO: 60,576) | 37.3 |
| SERPINA1_T240 | GGGAGTGAGCGCTTCCTGGG (SEQ ID NO: 60,578) | 71.3 |
| SERPINA1_T46 | GGCTCACGTGGACACCTCCC (SEQ ID NO: 55,724) | 65.4 |
| SERPINA1_T30 | GGCCTCGAGCAAGGCTCACG (SEQ ID NO: 55,722) | 72.2 |
| SERPINA3_T7 | GTCCACGTGAGCCTTGCTCG (SEQ ID NO: 60,581) | 58.6 |
| SERPINA1_T209 | CTGATCCCAGGCCTCGAGCA (SEQ ID NO: 55,721) | 69.2 |
| SERPINA1_T476 | CGTGAGCCTTGCTCGAGGCC (SEQ ID NO: 60,582) | 13.4 |
| SERPINA1_T67 | GTGAGCCTTGCTCGAGGCCT (SEQ ID NO: 60,583) | 0.2 |
| SERPINA1_T34 | CACGTTGTAAGGCTGATCCC (SEQ ID NO: 55,718) | 66 |
| SERPINA3_T139 | AGAAGCAGAGACACGTTGTA (SEQ ID NO: 55,716) | 76.4 |
| SERPINA1_T49 | GCCTTATGCACGGCCTGGAG (SEQ ID NO: 55,709) | 66.2 |
| SERPINA1_T19 | AGCCTTATGCACGGCCTGGA (SEQ ID NO: 55,708) | 74.2 |
| SERPINA1 T52 | CAGCCTTATGCACGGCCTGG (SEQ ID NO: 55,707) | 25.1 |
| SERPINA1_T32 | GCACAGCCTTATGCACGGCC (SEQ ID NO: 55,705) | 65.9 |
| SERPINA1_T54 | TCCCCTCCAGGCCGTGCATA (SEQ ID NO: 60,588) | 73.8 |
| SERPINA3_T107 | GGTCAGCACAGCCTTATGCA (SEQ ID NO: 55,704) | 82.2 |
| SERPINA1_T9 | TTCAGTCCCTTTCTCGTCGA (SEQ ID NO: 55,701) | 42 |
| SERPINA1_T5 | GTGCTGACCATCGACGAGAA (SEQ ID NO: 60,591) | 53.9 |
| SERPINA1_T14 | TGCTGACCATCGACGAGAAA (SEQ ID NO: 60,592) | 40.5 |
| SERPINA1_T355 | GAGAAAGGGACTGAAGCTGC (SEQ ID NO: 60,594) | 15.3 |
| SERPINA3_T75 | GGGTATGGCCTCTAAAAACA (SEQ ID NO: 55,697) | 33.5 |
| SERPINA1_T175 | TGCTGGGGCCATGTTTTTAG (SEQ ID NO: 60,599) | 45.3 |
| SERPINA1_T213 | GGGGGGGATAGACATGGGTA (SEQ ID NO: 55,696) | 55 |
| SERPINA1_T11 | ACCTCGGGGGGGATAGACAT (SEQ ID NO: 55,695) | 39.3 |
| SERPINA1_733 | GACCTCGGGGGGGATAGACA (SEQ ID NO: 55,694) | 49.4 |
| SERPINA1_T6 | ACCCATGTCTATCCCCCCCG (SEQ ID NO: 60,601) | 66.5 |
| SERPINA1_T31 | TGTTGAACTTGACCTCGGGG (SEQ ID NO: 55,692) | 13.3 |
| SERPINA1_T29 | TTGTTGAACTTGACCTCGGG (SEQ ID NO: 55,691) | 4.6 |
| SERPINA1_T23 | TTTGTTGAACTTGACCTCGG (SEQ ID NO: 55,690) | 36.4 |
| SERPINA1_T18 | GTTTGTTGAACTTGACCTCG (SEQ ID NO: 55,689) | 20 |
| SERPINA1_T74 | GGTTTGTTGAACTTGACCTC (SEQ ID NO: 55,688) | 56.9 |
| SERPINA1_T63 | GGGTTTGTTGAACTTGACCT (SEQ ID NO: 55,687) | 32.2 |
| SERPINA1_T317 | TCAATCATTAAGAAGACAAA (SEQ ID NO: 55,686) | 63.2 |
| SERPINA1_T276 | TTCAATCATTAAGAAGACAA (SEQ ID NO: 55,685) | 15.5 |
| SERPINA1_T365 | TCCCATGAAGAGGGGAGACT (SEQ ID NO: 55,681) | 28.2 |
| SERPINA1_T188 | TACCAAGTCTCCCCTCTTCA (SEQ ID NO: 60,604) | 27.4 |
| SERPINA1_T243 | ACCAAGTCTCCCCTCTTCAT (SEQ ID NO: 60,605) | 46.2 |
| SERPINA1_T289 | CACCACTTTTCCCATGAAGA (SEQ ID NO: 55,678) | 20.6 |
| SERPINA1_T293 | TCACCACTTTTCCCATGAAG (SEQ ID NO: 55,677) | 24.5 |
| SERPINA1_T334 | TCCCCTCTTCATGGGAAAAG (SEQ ID NO: 60,607) | 48.9 |
| SERPINA1_T252 | AGAGGCAGTTATTTTTGGGT (SEQ ID NO: 55,674) | 14.1 |
| SERPINA1_T346 | GAGAGGCAGTTATTTTTGGG (SEQ ID NO: 55,673) | 9.5 |
| SERPINA1_T134 | AGCGAGAGGCAGTTATTTTT (SEQ ID NO: 55,672) | 47.8 |
| SERPINA1_T331 | GAGCGAGAGGCAGTTATTTT (SEQ ID NO: 55,671) | 54.3 |
| SERPINA1_T399 | GGGAGGGGTTGAGGAGCGAG (SEQ ID NO: 55,669) | 54.1 |
| SERPINA1_T464 | GGGAGGGGGCCAGGGATGGA (SEQ ID NO: 55,658) | 13.9 |
| SERPINA1_T460 | AGGGAGGGGGCCAGGGATGG (SEQ ID NO: 55,657) | 1.5 |
| SERPINA1_T462 | CAACCCCTCCCCTCCATCCC (SEQ ID NO: 60,608) | 21.9 |
| SERPINA1_T256 | CCCTTCTTTAATGTCATCCA (SEQ ID NO: 55,646) | 55 |
| 5E5PINA1_T96 | ACCCTTCTTTAATGTCATCC (SEQ ID NO: 55,645) | 35.6 |
| SERPINA1_T229 | ACATTAAAGAAGGGTTGAGC (SEQ ID NO: 60,615) | 30 |
| SERPINA1_T361 | TTTACAGTCACATGCAGGCA (SEQ ID NO: 55,642) | 50.7 |
| SERPINA1_T201 | ATTTACAGTCACATGCAGGC (SEQ ID NO: 55,641) | 49.4 |
| SERPINA1_T132 | AGGGATTTACAGTCACATGC (SEQ ID NO: 55,639) | 70.7 |
| SERPINA1_T316 | AGACTCAGAGAAAACATGGG (SEQ ID NO: 55,635) | 43.6 |
| SERPINA1_T302 | AGACTCAGAGAAAACATGGG (SEQ ID NO: 55,633) | 41.3 |
| SERPINA1_T271 | ATACAGCCTCAGCAGGCAAA (SEQ ID NO: 55,628) | 67.7 |
| SERPINA1_T193 | CATACAGCCTCAGCAGGCAA (SEQ ID NO: 55,627) | 40.5 |
| SERPINA1_T340 | GAGTCTCCCTTTGCCTGCTG (SEQ ID NO: 60,618) | 72.6 |
| SERPINA1_T169 | AGCCCACATACAGCCTCAGC (SEQ ID NO: 55,625) | 49.8 |
| 5E5PINA1_T129 | TTGCCTGCTGAGGCTGTATG (SEQ ID NO: 60,619) | 74.3 |
| SERPINA1_T145 | TGCCTGCTGAGGCTGTATGT (SEQ ID NO: 60,620) | 41.2 |
| SERPINA1_T204 | TGAGGCTGTATGTGGGCTCC (SEQ ID NO: 60,622) | 42.6 |
| SERPINA1_T35 | CCGAAGACAGCACTGTTACC (SEQ ID NO: 55,620) | 29 |
| SERPINA1_T184 | CCAGGTAACAGTGCTGTCTT (SEQ ID NO: 60,624) | 0 |
| SERPINA1_T178 | CAGGTAACAGTGCTGTCTTC (SEQ ID NO: 60,625) | 0 |
| SERPINA1_T157 | CTCCATGAACACAGTTCAGG (SEQ ID NO: 55,617) | 0 |
| SERPINA1_T140 | GCTCCATGAACACAGTTCAG (SEQ ID NO: 55,616) | 41.6 |
| SERPINA1_T147 | AACTGTGTTCATGGAGCATC (SEQ ID NO: 60,628) | 18.2 |
| SE5PINA1_T273 | TGTTCATGGAGCATCTGGCT (SEQ ID NO: 60,630) | 61.9 |
| SERPINA1_T247 | CATGGAGCATCTGGCTGGGT (SEQ ID NO: 60,632) | 49.1 |
| SERPINA1_T380 | CTGGCTGGGTAGGCACATGC (SEQ ID NO: 60,633) | 77.7 |
| SERPINA1_T456 | CACATGCTGGGCTTGAATCC (SEQ ID NO: 60,636) | 0 |
| SERPINA1_T352 | ACATGCTGGGCTTGAATCCA (SEQ ID NO: 60,637) | 63.2 |
| SE5PINA1_T443 | ATGCTGGGCTTGAATCCAGG (SEQ ID NO: 60,639) | 71.8 |
| SERPINA1_T377 | TGCTGGGCTTGAATCCAGGG (SEQ ID NO: 60,640) | 57.3 |
| SERPINA1_T76 | GCTGAGGATTCAGTCCCCCC (SEQ ID NO: 55,607) | 80.9 |
| SERPINA1_T44 | GGGCCCAGGTCCGTAAGGTG (SEQ ID NO: 55,605) | 42.7 |
| SERPINA1_T160 | GGGACTGAATCCTCAGCTTA (SEQ ID NO: 60,642) | 58.7 |
| SERPINA1_T4 | GAATCCTCAGCTTACGGACC (SEQ ID NO: 60,643) | 13.7 |
| SERPINA1_T20 | AATCCTCAGCTTACGGACCT (SEQ ID NO: 60,644) | 6.1 |
| SERPINA1_T207 | CTCCAGAAACAGATGGGCCC (SEQ ID NO: 55,602) | 43 |
| SERPINA1_T260 | GGAGCCCTCCAGAAACAGAT (SEQ ID NO: 55,600) | 74.5 |
| SERPINA1_T403 | TGGAGCCCTCCAGAAACAGA (SEQ ID NO: 55,599) | 37.8 |
| SERPINA1_T87 | GACCTGGGCCCATCTGTTTC (SEQ ID NO: 60,645) | 49.4 |
| SERPINA1_T284 | CTGGGCCCATCTGTTTCTGG (SEQ ID NO: 60,647) | 32.7 |
| SERPINA1_T228 | TGGGCCCATCTGTTTCTGGA (SEQ ID NO: 60,648) | 72.4 |
| SERPINA1_T406 | CAAGACAGGACAAGGAAGAC (SEO ID NO: 55,595) | 22.2 |
| SERPINA1_T304 | CAGTCTTCCTTGTCCTGTCT (SEQ ID NO: 60,650) | 37.4 |
| SERPINA1_T126 | CTTCTTGGGGACTCCAAGAC (SEQ ID NO: 55,591) | 30.1 |
| SERPINA1_T137 | CTGTCTTGGAGTCCCCAAGA (SEQ ID NO: 60,654) | 0 |
| SERPINA1_T324 | CTCCCCTGTGATTCCTTCTT (SEQ ID NO: 55,587) | 41.3 |
| SERPINA1_T367 | CCTCCCCTGTGATTCCTTCT (SEQ ID NO: 55,586) | 46.3 |
| SERPINA1_T248 | GTCCCCAAGAAGGAATCACA (SEQ ID NO: 60,657) | 51 |
| SERPINA1_T310 | TCCCCAAGAAGGAATCACAG (SEQ ID NO: 60,658) | 27.8 |
| SERPINA1_T342 | CCAAGAAGGAATCACAGGGG (SEQ ID NO: 60,660) | 49 |
| SERPINA1_T332 | GTGGAGGCTGGGGTCATGGC (SEQ ID NO: 55,584) | 48.7 |
| SERPINA1_T358 | CTTGGTGGAGCCTGGGGTCA (SEQ ID NO: 55,583) | 30 |
| SERPINA1_T395 | CAGATACCAGCCATGACCCC (SEQ ID NO: 60,664) | 20.8 |
| SERPINA1_T362 | AAGATGCTTGGTGGAGCCTG (SEQ ID NO: 55,582) | 21.1 |
| SERPINA1_T235 | GAAGATGCTTGGTGGAGCCT (SEQ ID NO: 55,581) | 4.1 |
| SERPINA1_T238 | TGAAGATGCTTGGTGGAGCC (SEQ ID NO: 55,580) | 5.8 |
| SERPINA1_T255 | GGGGACATGAAGATGCTTGG (SEQ ID NO: 55,578) | 59.5 |
| SERPINA1_T296 | CAGGGGGACATGAAGATGCT (SEQ ID NO: 55,577) | 64.9 |
| SERPINA1_T455 | GGGAGTGGGGGATGAGCAGG (SEQ ID NO: 55,575) | 43.7 |
| SERPINA1_T347 | GGGGAGTGGGGGATGAGCAG (SEQ ID NO: 55,574) | 67.5 |
| SERPINA1_T387 | GGGGGAGTGGGGGATGAGCA (SEQ ID NO: 55,573) | 27 |
| SERPINA1_T416 | GGGGGGAGTGGGGGATGAGC (SEQ ID NO: 55,572) | 15.8 |
| SERPINA1_T440 | CTCTGGGTGGGGGGGAGTGG (SEQ ID NO: 55,569) | 31.4 |
| SERPINA1_T430 | ACTCTGGGTGGGGGGGAGTG (SEQ ID NO: 55,568) | 11.8 |
| SERPINA1_T389 | AACTCTGGGTGGGGGGGAGT (SEQ ID NO: 55,567) | 6.7 |
| SERPINA1_T398 | CAACTCTGGGTGGGGGGGAG (SEQ ID NO: 55,566) | 6.1 |
| SERPINA1_T415 | ATGAGCAACTCTGGGTGGGG (SEQ ID NO: 55,564) | 35.7 |
| SERPINA1_T412 | GATGAGCAACTCTGGGTGGG (SEQ ID NO: 55,563) | 30.3 |
| SERPINA1_T396 | GGATGAGCAACTCTGGGTGG (SEQ ID NO: 55,562) | 30.4 |
| SERPINA1_T426 | AGGATGAGCAACTCTGGGTG (SEQ ID NO: 55,561) | 18.5 |
| SERPINA1_T246 | CAGGATGAGCAACTCTGGGT (SEQ ID NO: 55,560) | 35.1 |
| SERPINA1_T373 | GCAGGATGAGCAACTCTGGG (SEQ ID NO: 55,559) | 40.8 |
| SERPINA1_T205 | CTGGCAGGATGAGCAACTCT (SEQ ID NO: 55,558) | #N/A |
| SERPINA1_T174 | CCTGGCAGGATGAGCAACTC (SEQ ID NO: 55,557) | #N/A |
| SERPINA1_T219 | CCAGAGTTGCTCATCCTGCC (SEQ ID NO: 60,669) | #N/A |
| SERPINA1_T171 | CAGAGTTGCTCATCCTGCCA (SEQ ID NO: 60,670) | #N/A |

### Note Regarding Illustrative Embodiments

[0590] While the present disclosure provides descriptions of various specific embodiments for the purpose of illustrating various aspects of the present invention and/or its potential applications, it is understood that variations and modifications will occur to those skilled in the art. Accordingly, the invention or inventions described herein should be understood to be at least as broad as they are claimed, and not as more narrowly defined by particular illustrative embodiments provided herein.

[0591] Any patent, publication, or other disclosure material identified herein is incorporated by reference into this specification in its entirety unless otherwise indicated, but only to the extent that the incorporated material does not conflict with existing descriptions, definitions, statements, or other disclosure material expressly set forth in this specification. As such, and to the extent necessary, the express disclosure as set forth in this specification supersedes any conflicting material incorporated by reference. Any material, or portion thereof, that is said to be incorporated by reference into this specification, but which conflicts with existing definitions, statements, or other disclosure material set forth herein, is only incorporated to the extent that no conflict arises between that incorporated material and the existing disclosure material. Applicants reserve the right to amend this specification to expressly recite any subject matter, or portion thereof, incorporated by reference herein.

1. A method for editing the SERPINA1 gene in a human cell, the method comprising introducing into the human cell one or more deoxyribonucleic acid (DNA) endonucleases and one or more guide ribonucleic acids (gRNAs) comprising a spacer sequence comprising an RNA sequence corresponding to a sequence selected from the group consisting of SEQ ID NOs: 55,559, 55,574, 55,575, 55,577, 55,578, 55,584, 55,586, 55,587, 55,600, 55,602, 55,605, 55,607, 55,616, 55,625, 55,627, 55,628, 55,633, 55,635, 55,639, 55,641, 55,642, 55,646, 55,669, 55,671, 55,672, 55,686, 55,688, 55,694, 55,696, 55,701, 55,704, 55,705, 55,708, 55,709, 55,716, 55,718, 55,721, 55,722, 55,724, 55,726, 55,727, 55,730, 55,732, 55,743, 55,744, 55,748, 55,749, 55,751, 55,754, 55,762, 55,764, 55,771, 55,778, 55,781-55,783, 60,476, 60,477, 60,480-60,482, 60,485, 60,487, 60,490, 60,494, 60,496, 60,497, 60,504, 60,506, 60,515, 60,517, 60,519, 60,527, 60,529, 60,539-60,541, 60,555, 60,557, 60,558, 60,564, 60,569-60,572, 60,575, 60,578, 60,581, 60,588, 60,591, 60,592, 60,599, 60,601, 60,605, 60,607, 60,618-60,620, 60,622, 60,630, 60,632, 60,633, 60,637, 60,639, 60,640, 60,642, 60,645, 60,648, 60,657, and 60,660;
thereby to effect one or more single-strand breaks (SSBs) or double-strand breaks (DSBs) within or near the SERPINA1 gene or other DNA sequences that encode regulatory elements of the SERPINA1 gene.

2.-24. (canceled)

25. The method of claim 1, wherein the one or more DNA endonucleases is a Cas1, Cas1B, Cas2, Cas3, Cas4, Cas5, Cas8, Cas7, Cas8, Cas9 (also known as Csn1 and Csx12), Cas100, Csy1, Csy2, Csy3, Cse1, Cse2, Csc1, Csc2, Csa5, Csn2, Csm2, Csm3, Csm4, Csm5, Csm6, Cmr1 Cmr3, Cmr4, Cmr5, Cmr6, Csb1, Csb2, Gsb3, Csx17, Csx14, Csx10, Csx16, CsaX, Csx3, Csx1, Csx15, Csf1, Csf2, Csf3, Csf4, or Cpf1 endonuclease; or a homolog thereof, recombination of the naturally occurring molecule, codon-optimized, or modified version thereof, and combinations thereof.

26. The method of claim 25, wherein the method comprises introducing into the cell one or more polynucleotides encoding the one or more DNA endonucleases.

27. The method of claim 25, wherein the method comprises introducing into the cell one or more ribonucleic acids (RNAs) encoding the one or more DNA endonucleases.

28. The method of claim 27, wherein the one or more RNAs is one or more modified RNAs.

29. (canceled)

30. (canceled)

31. The method of claim 1, wherein the one or more gRNAs are single-molecule guide RNA (sgRNAs).

32. The method of claim 31, wherein the one or more gRNAs or one or more sgRNAs is one or more modified gRNAs or one or more modified sgRNAs.

33. The method of claim 31, wherein the one or more DNA endonucleases is pre-complexed with the one or more gRNAs or the one or more sgRNAs.

34. The method of claim 1, wherein the method further comprises introducing into the cell a polynucleotide donor template comprising at least a portion of the wild-type SERPINA1 gene or minigene or cDNA.

35. The method of claim 34, wherein the at least a portion of the wild-type SERPINA1 gene or minigene or cDNA is one or more of:
(i) exon 1, exon 2, exon 3, exon 4, exon 5, intronic regions, fragments or combinations thereof,
(ii) the entire SERPINA1 gene, and
(iii) DNA sequences that encode wild type regulatory elements of the SERPINA1 gene, minigene or cDNA.

36. (canceled)

37. The method of claim 34, wherein the donor template has homologous arms to the 14q32.13 region of the human genome.

38.-47. (canceled)

48. The method of claim 1, wherein the one or more gRNAs are directed to one or more of the following pathological variants: rs784325655, rs121912713, rs28929474, rs17580, rs121912714, rs784220898, rs199422211, rs751235320, rs199422210, rs267608950, rs55819880, and rs28931570.

49. The method of claim 34, wherein the insertion or correction is by homology directed repair (HDR), wherein the at least a portion the wild-type SERPINA1 gene or minigene or cDNA is inserted into the SERPINA1 gene locus, thereby restoring alpha-1-antitrypsin (AAT) protein activity.

50.-55. (canceled)

56. The method of claim 26, wherein the one or more polynucleotides encoding the one or more DNA endonucleases and the one or more gRNAs are either each formulated into separate lipid nanoparticles or exosomes or all co-formulated into a lipid nanoparticle or an exosome.

57.-59. (canceled)

60. The method of claim 26, wherein the one or more polynucleotides encoding the one or more DNA endonucleases and the one or more gRNAs are either each formulated into separate exosomes or all co-formulated into an exosome.

61.-65. (canceled)

66. The method of claim 1, wherein the human cell is a liver cell.

67. (canceled)

68. The method claim 34, wherein the at least a portion of the wild-type SERPINA1 gene or minigene or cDNA is operably linked to an exogenous promoter that drives expression of the SERPINA1 gene.

69. The method of claim 1, wherein the one or more DSBs occurs at a location immediately 3′ to an endogenous promoter locus.

70.-77. (canceled)

78. The method of claim 1, comprising introducing into the human cell a polynucleotide donor template comprising a nucleic acid sequence comprising at least a portion of the wild-type SERPINA1 gene.

79. The method of claim 78, wherein the polynucleotide donor template comprises one or more of:
(a) at least a fragment of an exon of the SERPINA1 gene;
(b) at least a fragment of an intron of the SERPINA1 gene;
(c) at least a fragment of a regulatory element of the SERPINA1 gene;
(d) the complete CDS of the SERPINA1 gene; and
(e) at least 40 nucleotides of the first exon of the SERPINA1 gene, the complete CDS of the SERPINA1 gene and the 3′UTR of the SERPINA1 gene.

The application's sequence listing, which the Patent Office published only in electronic form, follows.

SEQUENCE LISTING (68299 sequences)

SEQ ID NO: 1 - DNA, 20 bp, synthetic construct
  misc_feature 1..20: note = chemically synthesized
  source 1..20: mol_type = other DNA
tggcgatatctaggtagcca

SEQ ID NO: 2 - DNA, 20 bp, synthetic construct
  misc_feature 1..20: note = chemically synthesized
  source 1..20: mol_type = other DNA
ggcgatatctaggtagccac

SEQ ID NO: 3 - DNA, 20 bp, synthetic construct
  misc_feature 1..20: note = chemically synthesized
  source 1..20: mol_type = other DNA
cgatatctaggtagccacag

SEQ ID NO: 4 - DNA, 20 bp, synthetic construct
  misc_feature 1..20: note = chemically synthesized
  source 1..20: mol_type = other DNA
gatatctaggtagccacagg

SEQ ID NO: 5 - DNA, 20 bp, synthetic construct
  misc_feature 1..20: note = chemically synthesized
  source 1..20: mol_type = other DNA
atctaggtagccacaggagg

SEQ ID NO: 6 - DNA, 20 bp, synthetic construct
  misc_feature 1..20: note = chemically synthesized
  source 1..20: mol_type = other DNA
ccacaggaggcggccacgtg

SEQ ID NO: 7 - DNA, 20 bp, synthetic construct
  misc_feature 1..20: note = chemically synthesized
  source 1..20: mol_type = other DNA
caggaggcggccacgtgcag

SEQ ID NO: 8 - DNA, 20 bp, synthetic construct
  misc_feature 1..20: note = chemically synthesized
  source 1..20: mol_type = other DNA
cggccacgtgcagtggcgtc

SEQ ID NO: 9 - DNA, 20 bp, synthetic construct
  misc_feature 1..20: note = chemically synthesized
  source 1..20: mol_type = other DNA
tccagccctcgttgtctgcc

SEQ ID NO: 10 - DNA, 20 bp, synthetic construct
  misc_feature 1..20: note = chemically synthesized
  source 1..20: mol_type = other DNA
ctcgttgtctgcctggttca

SEQ ID NO: 11 - DNA, 20 bp, synthetic construct
  misc_feature 1..20: note = chemically synthesized
  source 1..20: mol_type = other DNA
gttgtctgcctggttcacag

SEQ ID NO: 12 - DNA, 20 bp, synthetic construct
  misc_feature 1..20: note = chemically synthesized
  source 1..20: mol_type = other DNA
cagtggcgccctgctccacc

SEQ ID NO: 13 - DNA, 20 bp, synthetic construct
  misc_feature 1..20: note = chemically synthesized
  source 1..20: mol_type = other DNA
tggcgccctgctccaccaag

SEQ ID NO: 14 - DNA, 20 bp, synthetic construct
  misc_feature 1..20: note = chemically synthesized
  source 1..20: mol_type = other DNA
accaagaagcgcaccacctc

SEQ ID NO: 15 - DNA, 20 bp, synthetic construct
  misc_feature 1..20: note = chemically synthesized
  source 1..20: mol_type = other DNA
ccaagaagcgcaccacctcc

SEQ ID NO: 16 - DNA, 20 bp, synthetic construct
  misc_feature 1..20: note = chemically synthesized
  source 1..20: mol_type = other DNA
cctccaggttctcatcaatg

SEQ ID NO: 17 - DNA, 20 bp, synthetic construct
  misc_feature 1..20: note = chemically synthesized
  source 1..20: mol_type = other DNA
ctccaggttctcatcaatgc

SEQ ID NO: 18 - DNA, 20 bp, synthetic construct
  misc_feature 1..20: note = chemically synthesized
  source 1..20: mol_type = other DNA
ggttctcatcaatgcaggcc

SEQ ID NO: 19 - DNA, 20 bp, synthetic construct
  misc_feature 1..20: note = chemically synthesized
  source 1..20: mol_type = other DNA
gttctcatcaatgcaggcct

SEQ ID NO: 20 - DNA, 20 bp, synthetic construct
  misc_feature 1..20: note = chemically synthesized
  source 1..20: mol_type = other DNA
ttctcatcaatgcaggcctg

SEQ ID NO: 21 - DNA, 20 bp, synthetic construct
  misc_feature 1..20: note = chemically synthesized
  source 1..20: mol_type = other DNA
tctcatcaatgcaggcctgg

SEQ ID NO: 22 - DNA, 20 bp, synthetic construct
  misc_feature 1..20: note = chemically synthesized
  source 1..20: mol_type = other DNA
catcaatgcaggcctggggg

SEQ ID NO: 23 - DNA, 20 bp, synthetic construct
  misc_feature 1..20: note = chemically synthesized
  source 1..20: mol_type = other DNA
atcaatgcaggcctgggggt

SEQ ID NO: 24 - DNA, 20 bp, synthetic construct
  misc_feature 1..20: note = chemically synthesized
  source 1..20: mol_type = other DNA
gcaggcctgggggtgggaaa

SEQ ID NO: 25 - DNA, 20 bp, synthetic construct
  misc_feature 1..20: note = chemically synthesized
  source 1..20: mol_type = other DNA
tgggggtgggaaacagccgt

SEQ ID NO: 26 - DNA, 20 bp, synthetic construct
  misc_feature 1..20: note = chemically synthesized
  source 1..20: mol_type = other DNA
gccgtcagccgcacctaccc

SEQ ID NO: 27 - DNA, 20 bp, synthetic construct
  misc_feature 1..20: note = chemically synthesized
  source 1..20: mol_type = other DNA
agccgcacctaccccagcca

SEQ ID NO: 28 - DNA, 20 bp, synthetic construct
  misc_feature 1..20: note = chemically synthesized
  source 1..20: mol_type = other DNA
ctaccccagccacggtgtcc

SEQ ID NO: 29 - DNA, 20 bp, synthetic construct
  misc_feature 1..20: note = chemically synthesized
  source 1..20: mol_type = other DNA
cccagccacggtgtcccagc

SEQ ID NO: 30 - DNA, 20 bp, synthetic construct
  misc_feature 1..20: note = chemically synthesized
  source 1..20: mol_type = other DNA
gccacggtgtcccagcaagt

SEQ ID NO: 31 - DNA, 20 bp, synthetic construct
  misc_feature 1..20: note = chemically synthesized
  source 1..20: mol_type = other DNA
ccacggtgtcccagcaagtc

SEQ ID NO: 32 - DNA, 20 bp, synthetic construct
  misc_feature 1..20: note = chemically synthesized
  source 1..20: mol_type = other DNA
gtcccagcaagtcgggactc

SEQ ID NO: 33 - DNA, 20 bp, synthetic construct
  misc_feature 1..20: note = chemically synthesized
  source 1..20: mol_type = other DNA
cccagcaagtcgggactcca

SEQ ID NO: 34 - DNA, 20 bp, synthetic construct
  misc_feature 1..20: note = chemically synthesized
  source 1..20: mol_type = other DNA
ccagcaagtcgggactccag

SEQ ID NO: 35 - DNA, 20 bp, synthetic construct
  misc_feature 1..20: note = chemically synthesized
  source 1..20: mol_type = other DNA
cagcaagtcgggactccaga

SEQ ID NO: 36 - DNA, 20 bp, synthetic construct
  misc_feature 1..20: note = chemically synthesized
  source 1..20: mol_type = other DNA
gcaagtcgggactccagagg

SEQ ID NO: 37 - DNA, 20 bp, synthetic construct
  misc_feature 1..20: note = chemically synthesized
  source 1..20: mol_type = other DNA
tccagagggagccacgaaaa

SEQ ID NO: 38 - DNA, 20 bp, synthetic construct
  misc_feature 1..20: note = chemically synthesized
  source 1..20: mol_type = other DNA
gggagccacgaaaacagatc

SEQ ID NO: 39 - DNA, 20 bp, synthetic construct
  misc_feature 1..20: note = chemically synthesized
  source 1..20: mol_type = other DNA
ggagccacgaaaacagatcc

SEQ ID NO: 40 - DNA, 20 bp, synthetic construct
  misc_feature 1..20: note = chemically synthesized
  source 1..20: mol_type = other DNA
gagccacgaaaacagatcca

SEQ ID NO: 41 - DNA, 20 bp, synthetic construct
  misc_feature 1..20: note = chemically synthesized
  source 1..20: mol_type = other DNA
cgaaaacagatccagggaca

SEQ ID NO: 42 - DNA, 20 bp, synthetic construct
  misc_feature 1..20: note = chemically synthesized
  source 1..20: mol_type = other DNA
cagatccagggacacggtgc

SEQ ID NO: 43 - DNA, 20 bp, synthetic construct
  misc_feature 1..20: note = chemically synthesized
  source 1..20: mol_type = other DNA
agatccagggacacggtgct

SEQ ID NO: 44 - DNA, 20 bp, synthetic construct
  misc_feature 1..20: note = chemically synthesized
  source 1..20: mol_type = other DNA
ccagggacacggtgctagga

SEQ ID NO: 45 - DNA, 20 bp, synthetic construct
  misc_feature 1..20: note = chemically synthesized
  source 1..20: mol_type = other DNA
gggacacggtgctaggacag

SEQ ID NO: 46 - DNA, 20 bp, synthetic construct
  misc_feature 1..20: note = chemically synthesized
  source 1..20: mol_type = other DNA
ggacacggtgctaggacagt

SEQ ID NO: 47 - DNA, 20 bp, synthetic construct
  misc_feature 1..20: note = chemically synthesized
  source 1..20: mol_type = other DNA
gacacggtgctaggacagtg

SEQ ID NO: 48 - DNA, 20 bp, synthetic construct
  misc_feature 1..20: note = chemically synthesized
  source 1..20: mol_type = other DNA
cagtggggaaaatgacccaa

SEQ ID NO: 49 - DNA, 20 bp, synthetic construct
  misc_feature 1..20: note = chemically synthesized
  source 1..20: mol_type = other DNA
gaaaatgacccaacagcctc

SEQ ID NO: 50 - DNA, 20 bp, synthetic construct
  misc_feature 1..20: note = chemically synthesized
  source 1..20: mol_type = other DNA
acccaacagcctctggccac

SEQ ID NO: 51 - DNA, 20 bp, synthetic construct
  misc_feature 1..20: note = chemically synthesized
  source 1..20: mol_type = other DNA
cctctggccactggctgttt

SEQ ID NO: 52 - DNA, 20 bp, synthetic construct
  misc_feature 1..20: note = chemically synthesized
  source 1..20: mol_type = other DNA
ctggctgtttaagatacgcc

SEQ ID NO: 53 - DNA, 20 bp, synthetic construct
  misc_feature 1..20: note = chemically synthesized
  source 1..20: mol_type = other DNA
ttaagatacgcctggttgcc

SEQ ID NO: 54 - DNA, 20 bp, synthetic construct
  misc_feature 1..20: note = chemically synthesized
  source 1..20: mol_type = other DNA
agatacgcctggttgcccag

SEQ ID NO: 55 - DNA, 20 bp, synthetic construct
  misc_feature 1..20: note = chemically synthesized
  source 1..20: mol_type = other DNA
acgcctggttgcccagtggt

SEQ ID NO: 56 - DNA, 20 bp, synthetic construct
  misc_feature 1..20: note = chemically synthesized
  source 1..20: mol_type = other DNA
cgcctggttgcccagtggtc

SEQ ID NO: 57 - DNA, 20 bp, synthetic construct
  misc_feature 1..20: note = chemically synthesized
  source 1..20: mol_type = other DNA
tggttgcccagtggtcaggc

SEQ ID NO: 58 - DNA, 20 bp, synthetic construct
  misc_feature 1..20: note = chemically synthesized
  source 1..20: mol_type = other DNA
tgcccagtggtcaggccggc

SEQ ID NO: 59 - DNA, 20 bp, synthetic construct
  misc_feature 1..20: note = chemically synthesized
  source 1..20: mol_type = other DNA
gcccagtggtcaggccggcc

SEQ ID NO: 60 - DNA, 20 bp, synthetic construct
  misc_feature 1..20: note = chemically synthesized
  source 1..20: mol_type = other DNA
ggtcaggccggccaggcctt

SEQ ID NO: 61 - DNA, 20 bp, synthetic construct
  misc_feature 1..20: note = chemically synthesized
  source 1..20: mol_type = other DNA
ccggccaggccttcagtgct

SEQ ID NO: 62 - DNA, 20 bp, synthetic construct
  misc_feature 1..20: note = chemically synthesized
  source 1..20: mol_type = other DNA
gccaggccttcagtgctcag

SEQ ID NO: 63 - DNA, 20 bp, synthetic construct
  misc_feature 1..20: note = chemically synthesized
  source 1..20: mol_type = other DNA
gtgctcagtggaaaccacga

SEQ ID NO: 64 - DNA, 20 bp, synthetic construct
  misc_feature 1..20: note = chemically synthesized
  source 1..20: mol_type = other DNA
tgctcagtggaaaccacgaa

SEQ ID NO: 65 - DNA, 20 bp, synthetic construct
  misc_feature 1..20: note = chemically synthesized
  source 1..20: mol_type = other DNA
ggaaaccacgaaaggactcc

SEQ ID NO: 66 - DNA, 20 bp, synthetic construct
  misc_feature 1..20: note = chemically synthesized
  source 1..20: mol_type = other DNA
gactcctggctatctgcaaa

SEQ ID NO: 67 - DNA, 20 bp, synthetic construct
  misc_feature 1..20: note = chemically synthesized
  source 1..20: mol_type = other DNA
actcctggctatctgcaaac

SEQ ID NO: 68 - DNA, 20 bp, synthetic construct
  misc_feature 1..20: note = chemically synthesized
  source 1..20: mol_type = other DNA
cctggctatctgcaaacagg

SEQ ID NO: 69 - DNA, 20 bp, synthetic construct
  misc_feature 1..20: note = chemically synthesized
  source 1..20: mol_type = other DNA
atctgcaaacaggaagtgaa

SEQ ID NO: 70 - DNA, 20 bp, synthetic construct
  misc_feature 1..20: note = chemically synthesized
  source 1..20: mol_type = other DNA
tctgcaaacaggaagtgaac

SEQ ID NO: 71 - DNA, 20 bp, synthetic construct
  misc_feature 1..20: note = chemically synthesized
  source 1..20: mol_type = other DNA
ctgcaaacaggaagtgaacg

SEQ ID NO: 72 - DNA, 20 bp, synthetic construct
  misc_feature 1..20: note = chemically synthesized
  source 1..20: mol_type = other DNA
caaacaggaagtgaacgggg

SEQ ID NO: 73 - DNA, 20 bp, synthetic construct
  misc_feature 1..20: note = chemically synthesized
  source 1..20: mol_type = other DNA
aaacaggaagtgaacgggga

SEQ ID NO: 74 - DNA, 20 bp, synthetic construct
  misc_feature 1..20: note = chemically synthesized
  source 1..20: mol_type = other DNA
aacaggaagtgaacggggaa

SEQ ID NO: 75 - DNA, 20 bp, synthetic construct
  misc_feature 1..20: note = chemically synthesized
  source 1..20: mol_type = other DNA
caggaagtgaacggggaagg

SEQ ID NO: 76 - DNA, 20 bp, synthetic construct
  misc_feature 1..20: note = chemically synthesized
  source 1..20: mol_type = other DNA
aggaagtgaacggggaaggg

SEQ ID NO: 77 - DNA, 20 bp, synthetic construct
  misc_feature 1..20: note = chemically synthesized
  source 1..20: mol_type = other DNA
ggaagtgaacggggaaggga

SEQ ID NO: 78 - DNA, 20 bp, synthetic construct
  misc_feature 1..20: note = chemically synthesized
  source 1..20: mol_type = other DNA
gaagtgaacggggaagggag

SEQ ID NO: 79 - DNA, 20 bp, synthetic construct
  misc_feature 1..20: note = chemically synthesized
  source 1..20: mol_type = other DNA
aagtgaacggggaagggagg

SEQ ID NO: 80 - DNA, 20 bp, synthetic construct
  misc_feature 1..20: note = chemically synthesized
  source 1..20: mol_type = other DNA
aagggagggggcttctcatc

SEQ ID NO: 81 - DNA, 20 bp, synthetic construct
  misc_feature 1..20: note = chemically synthesized
  source 1..20: mol_type = other DNA
agggagggggcttctcatct

SEQ ID NO: 82 - DNA, 20 bp, synthetic construct
  misc_feature 1..20: note = chemically synthesized
  source 1..20: mol_type = other DNA
gggggcttctcatctgggtg

SEQ ID NO: 83 - DNA, 20 bp, synthetic construct
  misc_feature 1..20: note = chemically synthesized
  source 1..20: mol_type = other DNA
ggggcttctcatctgggtgc

SEQ ID NO: 84 - DNA, 20 bp, synthetic construct
  misc_feature 1..20: note = chemically synthesized
  source 1..20: mol_type = other DNA
ctgggtgcgggaaccccaca

SEQ ID NO: 85 - DNA, 20 bp, synthetic construct
  misc_feature 1..20: note = chemically synthesized
  source 1..20: mol_type = other DNA
gaaccccacatggtacctgt

SEQ ID NO: 86 - DNA, 20 bp, synthetic construct
  misc_feature 1..20: note = chemically synthesized
  source 1..20: mol_type = other DNA
cacatggtacctgttagaca

SEQ ID NO: 87 - DNA, 20 bp, synthetic construct
  misc_feature 1..20: note = chemically synthesized
  source 1..20: mol_type = other DNA
aaaacccccgtcaccaccca

SEQ ID NO: 88 - DNA, 20 bp, synthetic construct
  misc_feature 1..20: note = chemically synthesized
  source 1..20: mol_type = other DNA
aaacccccgtcaccacccac

SEQ ID NO: 89 - DNA, 20 bp, synthetic construct
  misc_feature 1..20: note = chemically synthesized
  source 1..20: mol_type = other DNA
cccccgtcaccacccacagg

SEQ ID NO: 90 - DNA, 20 bp, synthetic construct
  misc_feature 1..20: note = chemically synthesized
  source 1..20: mol_type = other DNA
ccacccacaggtggcgcttc

SEQ ID NO: 91 - DNA, 20 bp, synthetic construct
  misc_feature 1..20: note = chemically synthesized
  source 1..20: mol_type = other DNA
caggtggcgcttccagtgct

SEQ ID NO: 92 - DNA, 20 bp, synthetic construct
  misc_feature 1..20: note = chemically synthesized
  source 1..20: mol_type = other DNA
ggcgcttccagtgctcagac

SEQ ID NO: 93 - DNA, 20 bp, synthetic construct
  misc_feature 1..20: note = chemically synthesized
  source 1..20: mol_type = other DNA
gcgcttccagtgctcagact

SEQ ID NO: 94 - DNA, 20 bp, synthetic construct
  misc_feature 1..20: note = chemically synthesized
  source 1..20: mol_type = other DNA
cgcttccagtgctcagacta

SEQ ID NO: 95 - DNA, 20 bp, synthetic construct
  misc_feature 1..20: note = chemically synthesized
  source 1..20: mol_type = other DNA
ttccagtgctcagactaggg

SEQ ID NO: 96 - DNA, 20 bp, synthetic construct
  misc_feature 1..20: note = chemically synthesized
  source 1..20: mol_type = other DNA
ccagtgctcagactagggaa

SEQ ID NO: 97 - DNA, 20 bp, synthetic construct
  misc_feature 1..20: note = chemically synthesized
  source 1..20: mol_type = other DNA
cagtgctcagactagggaag

SEQ ID NO: 98 - DNA, 20 bp, synthetic construct
  misc_feature 1..20: note = chemically synthesized
  source 1..20: mol_type = other DNA
tcagactagggaagaggttc

SEQ ID NO: 99 - DNA, 20 bp, synthetic construct
  misc_feature 1..20: note = chemically synthesized
  source 1..20: mol_type = other DNA
ggttccagcccctcctcctt

SEQ ID NO: 100 - DNA, 20 bp, synthetic construct
  misc_feature 1..20: note = chemically synthesized
  source 1..20: mol_type = other DNA
ttccagcccctcctccttca

SEQ ID NO: 101 - DNA, 20 bp, synthetic construct
  misc_feature 1..20: note = chemically synthesized
  source 1..20: mol_type = other DNA
agcccctcctccttcagagc

SEQ ID NO: 102 - DNA, 20 bp, synthetic construct
  misc_feature 1..20: note = chemically synthesized
  source 1..20: mol_type = other DNA
gcccctcctccttcagagcc

SEQ ID NO: 103 - DNA, 20 bp, synthetic construct
  misc_feature 1..20: note = chemically synthesized
  source 1..20: mol_type = other DNA
ccctcctccttcagagccag

SEQ ID NO: 104 - DNA, 20 bp, synthetic construct
  misc_feature 1..20: note = chemically synthesized
  source 1..20: mol_type = other DNA
tccttcagagccaggagtcc

SEQ ID NO: 105 - DNA, 20 bp, synthetic construct
  misc_feature 1..20: note = chemically synthesized
  source 1..20: mol_type = other DNA
gagccaggagtcctggcccc

SEQ ID NO: 106 - DNA, 20 bp, synthetic construct
  misc_feature 1..20: note = chemically synthesized
  source 1..20: mol_type = other DNA
agcccctcctgccttaaacc

SEQ ID NO: 107 - DNA, 20 bp, synthetic construct
  misc_feature 1..20: note = chemically synthesized
  source 1..20: mol_type = other DNA
cctcctgccttaaacccagc

SEQ ID NO: 108 - DNA, 20 bp, synthetic construct
  misc_feature 1..20: note = chemically synthesized
  source 1..20: mol_type = other DNA
ctcctgccttaaacccagcc

SEQ ID NO: 109 - DNA, 20 bp, synthetic construct
  misc_feature 1..20: note = chemically synthesized
  source 1..20: mol_type = other DNA
aaacccagccaggtccttcc

SEQ ID NO: 110 - DNA, 20 bp, synthetic construct
  misc_feature 1..20: note = chemically synthesized
  source 1..20: mol_type = other DNA
aacccagccaggtccttcca

SEQ ID NO: 111 - DNA, 20 bp, synthetic construct
  misc_feature 1..20: note = chemically synthesized
  source 1..20: mol_type = other DNA
acccagccaggtccttccaa

SEQ ID NO: 112 - DNA, 20 bp, synthetic construct
  misc_feature 1..20: note = chemically synthesized
  source 1..20: mol_type = other DNA
gccaggtccttccaagggtc

SEQ ID NO: 113 - DNA, 20 bp, synthetic construct
  misc_feature 1..20: note = chemically synthesized
  source 1..20: mol_type = other DNA
gtccttccaagggtcaagct

SEQ ID NO: 114 - DNA, 20 bp, synthetic construct
  misc_feature 1..20: note = chemically synthesized
  source 1..20: mol_type = other DNA
gtcaagctcggaaaccaccc

SEQ ID NO: 115 - DNA, 20 bp, synthetic construct
  misc_feature 1..20: note = chemically synthesized
  source 1..20: mol_type = other DNA
aagctcggaaaccaccccag

SEQ ID NO: 116 - DNA, 20 bp, synthetic construct
  misc_feature 1..20: note = chemically synthesized
  source 1..20: mol_type = other DNA
ccaccccagcagatactctg

SEQ ID NO: 117 - DNA, 20 bp, synthetic construct
  misc_feature 1..20: note = chemically synthesized
  source 1..20: mol_type = other DNA
caccccagcagatactctgc

SEQ ID NO: 118 - DNA, 20 bp, synthetic construct
  misc_feature 1..20: note = chemically synthesized
  source 1..20: mol_type = other DNA
gcagatactctgcaggaacg

SEQ ID NO: 119 - DNA, 20 bp, synthetic construct
  misc_feature 1..20: note = chemically synthesized
  source 1..20: mol_type = other DNA
actctgcaggaacgaagccg

SEQ ID NO: 120 - DNA, 20 bp, synthetic construct
  misc_feature 1..20: note = chemically synthesized
  source 1..20: mol_type = other DNA
ctctgcaggaacgaagccgt

SEQ ID NO: 121 - DNA, 20 bp, synthetic construct
  misc_feature 1..20: note = chemically synthesized
  source 1..20: mol_type = other DNA
caggaacgaagccgtgggcc

SEQ ID NO: 122 - DNA, 20 bp, synthetic construct
  misc_feature 1..20: note = chemically synthesized
  source 1..20: mol_type = other DNA
aggaacgaagccgtgggccc

SEQ ID NO: 123 - DNA, 20 bp, synthetic construct
  misc_feature 1..20: note = chemically synthesized
  source 1..20: mol_type = other DNA
ggaacgaagccgtgggccca

SEQ ID NO: 124 - DNA, 20 bp, synthetic construct
  misc_feature 1..20: note = chemically synthesized
  source 1..20: mol_type = other DNA
gccgtgggcccagggctatg

SEQ ID NO: 125 - DNA, 20 bp, synthetic construct
  misc_feature 1..20: note = chemically synthesized
  source 1..20: mol_type = other DNA
ccgtgggcccagggctatgc

SEQ ID NO: 126 - DNA, 20 bp, synthetic construct
  misc_feature 1..20: note = chemically synthesized
  source 1..20: mol_type = other DNA
cgtgggcccagggctatgca

SEQ ID NO: 127 - DNA, 20 bp, synthetic construct
  misc_feature 1..20: note = chemically synthesized
  source 1..20: mol_type = other DNA
gggcccagggctatgcaggg

SEQ ID NO: 128 - DNA, 20 bp, synthetic construct
  misc_feature 1..20: note = chemically synthesized
  source 1..20: mol_type = other DNA
gcccagggctatgcagggtg

SEQ ID NO: 129 - DNA, 20 bp, synthetic construct
  misc_feature 1..20: note = chemically synthesized
  source 1..20: mol_type = other DNA
cccagggctatgcagggtgg

SEQ ID NO: 130 - DNA, 20 bp, synthetic construct
  misc_feature 1..20: note = chemically synthesized
  source 1..20: mol_type = other DNA
agggctatgcagggtggagg

SEQ ID NO: 131 - DNA, 20 bp, synthetic construct
  misc_feature 1..20: note = chemically synthesized
  source 1..20: mol_type = other DNA
gggctatgcagggtggagga

SEQ ID NO: 132 - DNA, 20 bp, synthetic construct
  misc_feature 1..20: note = chemically synthesized
  source 1..20: mol_type = other DNA
ggaggaaggccaccctgtgc

SEQ ID NO: 133 - DNA, 20 bp, synthetic construct
  misc_feature 1..20: note = chemically synthesized
  source 1..20: mol_type = other DNA
gaggaaggccaccctgtgct

SEQ ID NO: 134 - DNA, 20 bp, synthetic construct
  misc_feature 1..20: note = chemically synthesized
  source 1..20: mol_type = other DNA
aaggccaccctgtgctggga

SEQ ID NO: 135 - DNA, 20 bp, synthetic construct
  misc_feature 1..20: note = chemically synthesized
  source 1..20: mol_type = other DNA
accctgtgctgggacagact

SEQ ID NO: 136 - DNA, 20 bp, synthetic construct
  misc_feature 1..20: note = chemically synthesized
  source 1..20: mol_type = other DNA
ccctgtgctgggacagactc

SEQ ID NO: 137 - DNA, 20 bp, synthetic construct
  misc_feature 1..20: note = chemically synthesized
  source 1..20: mol_type = other DNA
cctgtgctgggacagactca

SEQ ID NO: 138 - DNA, 20 bp, synthetic construct
  misc_feature 1..20: note = chemically synthesized
  source 1..20: mol_type = other DNA
ctgtgctgggacagactcag

SEQ ID NO: 139 - DNA, 20 bp, synthetic construct
  misc_feature 1..20: note = chemically synthesized
  source 1..20: mol_type = other DNA
ctgggacagactcaggggcc

SEQ ID NO: 140 - DNA, 20 bp, synthetic construct
  misc_feature 1..20: note = chemically synthesized
  source 1..20: mol_type = other DNA
tgggacagactcaggggcct

SEQ ID NO: 141 - DNA, 20 bp, synthetic construct
  misc_feature 1..20: note = chemically synthesized
  source 1..20: mol_type = other DNA
gacagactcaggggcctggg

SEQ ID NO: 142 - DNA, 20 bp, synthetic construct
  misc_feature 1..20: note = chemically synthesized
  source 1..20: mol_type = other DNA
acagactcaggggcctgggc

SEQ ID NO: 143 - DNA, 20 bp, synthetic construct
  misc_feature 1..20: note = chemically synthesized
  source 1..20: mol_type = other DNA
aggggcctgggcgggactcc

SEQ ID NO: 144 - DNA, 20 bp, synthetic construct
  misc_feature 1..20: note = chemically synthesized
  source 1..20: mol_type = other DNA
gggcctgggcgggactccca

SEQ ID NO: 145 - DNA, 20 bp, synthetic construct
  misc_feature 1..20: note = chemically synthesized
  source 1..20: mol_type = other DNA
ggcctgggcgggactcccag

SEQ ID NO: 146 - DNA, 20 bp, synthetic construct
  misc_feature 1..20: note = chemically synthesized
  source 1..20: mol_type = other DNA
gcctgggcgggactcccaga

SEQ ID NO: 147 - DNA, 20 bp, synthetic construct
  misc_feature 1..20: note = chemically synthesized
  source 1..20: mol_type = other DNA
cctgggcgggactcccagag

SEQ ID NO: 148 - DNA, 20 bp, synthetic construct
  misc_feature 1..20: note = chemically synthesized
  source 1..20: mol_type = other DNA
ggcgggactcccagaggggt

SEQ ID NO: 149 - DNA, 20 bp, synthetic construct
  misc_feature 1..20: note = chemically synthesized
  source 1..20: mol_type = other DNA
ggactcccagaggggtgaga

SEQ ID NO: 150 - DNA, 20 bp, synthetic construct
  misc_feature 1..20: note = chemically synthesized
  source 1..20: mol_type = other DNA
cagctgcacacctgtgtgcc

SEQ ID NO: 151 - DNA, 20 bp, synthetic construct
  misc_feature 1..20: note = chemically synthesized
  source 1..20: mol_type = other DNA
agctgcacacctgtgtgcct

SEQ ID NO: 152 - DNA, 20 bp, synthetic construct
  misc_feature 1..20: note = chemically synthesized
  source 1..20: mol_type = other DNA
acacctgtgtgcctgggccc

SEQ ID NO: 153 - DNA, 20 bp, synthetic construct
  misc_feature 1..20: note = chemically synthesized
  source 1..20: mol_type = other DNA
cacctgtgtgcctgggcccc

SEQ ID NO: 154 - DNA, 20 bp, synthetic construct
  misc_feature 1..20: note = chemically synthesized
  source 1..20: mol_type = other DNA
ggccccaggctgtcacactc

SEQ ID NO: 155 - DNA, 20 bp, synthetic construct
  misc_feature 1..20: note = chemically synthesized
  source 1..20: mol_type = other DNA
ctgtcacactccagttcact

SEQ ID NO: 156 - DNA, 20 bp, synthetic construct
  misc_feature 1..20: note = chemically synthesized
  source 1..20: mol_type = other DNA
tgtcacactccagttcactg

SEQ ID NO: 157 - DNA, 20 bp, synthetic construct
  misc_feature 1..20: note = chemically synthesized
  source 1..20: mol_type = other DNA
tcactgaggccccctctgca

SEQ ID NO: 158 - DNA, 20 bp, synthetic construct
  misc_feature 1..20: note = chemically synthesized
  source 1..20: mol_type = other DNA
cactgaggccccctctgcac

SEQ ID NO: 159 - DNA, 20 bp, synthetic construct
  misc_feature 1..20: note = chemically synthesized
  source 1..20: mol_type = other DNA
actgaggccccctctgcacg

SEQ ID NO: 160 - DNA, 20 bp, synthetic construct
  misc_feature 1..20: note = chemically synthesized
  source 1..20: mol_type = other DNA
cccctctgcacggggccctg

SEQ ID NO: 161 - DNA, 20 bp, synthetic construct
  misc_feature 1..20: note = chemically synthesized
  source 1..20: mol_type = other DNA
tctgcacggggccctgcagc

SEQ ID NO: 162 - DNA, 20 bp, synthetic construct
  misc_feature 1..20: note = chemically synthesized
  source 1..20: mol_type = other DNA
ctgcacggggccctgcagcc

SEQ ID NO: 163 - DNA, 20 bp, synthetic construct
  misc_feature 1..20: note = chemically synthesized
  source 1..20: mol_type = other DNA
tgcacggggccctgcagcca

SEQ ID NO: 164 - DNA, 20 bp, synthetic construct
  misc_feature 1..20: note = chemically synthesized
  source 1..20: mol_type = other DNA
gcacggggccctgcagccag

SEQ ID NO: 165 - DNA, 20 bp, synthetic construct
  misc_feature 1..20: note = chemically synthesized
  source 1..20: mol_type = other DNA
cctgcagccaggggctgaca

SEQ ID NO: 166 - DNA, 20 bp, synthetic construct
  misc_feature 1..20: note = chemically synthesized
  source 1..20: mol_type = other DNA
ctgcagccaggggctgacac

SEQ ID NO: 167 - DNA, 20 bp, synthetic construct
  misc_feature 1..20: note = chemically synthesized
  source 1..20: mol_type = other DNA
accgtttctcattcttccct

SEQ ID NO: 168 - DNA, 20 bp, synthetic construct
  misc_feature 1..20: note = chemically synthesized
  source 1..20: mol_type = other DNA
ccgtttctcattcttccctt

SEQ ID NO: 169 - DNA, 20 bp, synthetic construct
  misc_feature 1..20: note = chemically synthesized
  source 1..20: mol_type = other DNA
cgtttctcattcttccctta

SEQ ID NO: 170 - DNA, 20 bp, synthetic construct
  misc_feature 1..20: note = chemically synthesized
  source 1..20: mol_type = other DNA
gtttctcattcttcccttag

SEQ ID NO: 171 - DNA, 20 bp, synthetic construct
  misc_feature 1..20: note = chemically synthesized
  source 1..20: mol_type = other DNA
tcccttaggggtccaaaact

SEQ ID NO: 172 - DNA, 20 bp, synthetic construct
  misc_feature 1..20: note = chemically synthesized
  source 1..20: mol_type = other DNA
cccttaggggtccaaaactt

SEQ ID NO: 173 - DNA, 20 bp, synthetic construct
  misc_feature 1..20: note = chemically synthesized
  source 1..20: mol_type = other DNA
ccttaggggtccaaaacttg

SEQ ID NO: 174 - DNA, 20 bp, synthetic construct
  misc_feature 1..20: note = chemically synthesized
  source 1..20: mol_type = other DNA
cttaggggtccaaaacttgg

SEQ ID NO: 175 - DNA, 20 bp, synthetic construct
  misc_feature 1..20: note = chemically synthesized
  source 1..20: mol_type = other DNA
ttaggggtccaaaacttggg

SEQ ID NO: 176 - DNA, 20 bp, synthetic construct
  misc_feature 1..20: note = chemically synthesized
  source 1..20: mol_type = other DNA
tccaaaacttggggggacaa

SEQ ID NO: 177 - DNA, 20 bp, synthetic construct
  misc_feature 1..20: note = chemically synthesized
  source 1..20: mol_type = other DNA
acttggggggacaaaagccg

SEQ ID NO: 178 - DNA, 20 bp, synthetic construct
  misc_feature 1..20: note = chemically synthesized
  source 1..20: mol_type = other DNA
gggggacaaaagccgaagtc

SEQ ID NO: 179 - DNA, 20 bp, synthetic construct
  misc_feature 1..20: note = chemically synthesized
  source 1..20: mol_type = other DNA
ggggacaaaagccgaagtcc

SEQ ID NO: 180 - DNA, 20 bp, synthetic construct
  misc_feature 1..20: note = chemically synthesized
  source 1..20: mol_type = other DNA
gggacaaaagccgaagtcca

SEQ ID NO: 181 - DNA, 20 bp, synthetic construct
  misc_feature 1..20: note = chemically synthesized
  source 1..20: mol_type = other DNA
ggacaaaagccgaagtccag

SEQ ID NO: 182 - DNA, 20 bp, synthetic construct
  misc_feature 1..20: note = chemically synthesized
  source 1..20: mol_type = other DNA
gacaaaagccgaagtccagg

SEQ ID NO: 183 - DNA, 20 bp, synthetic construct
  misc_feature 1..20: note = chemically synthesized
  source 1..20: mol_type = other DNA
aaagccgaagtccagggggt

SEQ ID NO: 184 - DNA, 20 bp, synthetic construct
  misc_feature 1..20: note = chemically synthesized
  source 1..20: mol_type = other DNA
agccgaagtccagggggtcg

SEQ ID NO: 185 - DNA, 20 bp, synthetic construct
  misc_feature 1..20: note = chemically synthesized
  source 1..20: mol_type = other DNA
gccgaagtccagggggtcgg

SEQ ID NO: 186 - DNA, 20 bp, synthetic construct
  misc_feature 1..20: note = chemically synthesized
  source 1..20: mol_type = other DNA
cgaagtccagggggtcggag

SEQ ID NO: 187 - DNA, 20 bp, synthetic construct
  misc_feature 1..20: note = chemically synthesized
  source 1..20: mol_type = other DNA
gaagtccagggggtcggagg

SEQ ID NO: 188 - DNA, 20 bp, synthetic construct
  misc_feature 1..20: note = chemically synthesized
  source 1..20: mol_type = other DNA
aagtccagggggtcggagga

SEQ ID NO: 189 - DNA, 20 bp, synthetic construct
  misc_feature 1..20: note = chemically synthesized
  source 1..20: mol_type = other DNA
gtcggaggagggacttgccc

SEQ ID NO: 190 - DNA, 20 bp, synthetic construct
  misc_feature 1..20: note = chemically synthesized
  source 1..20: mol_type = other DNA
tcggaggagggacttgcccc

SEQ ID NO: 191 - DNA, 20 bp, synthetic construct
  misc_feature 1..20: note = chemically synthesized
  source 1..20: mol_type = other DNA
gggacttgccccaggccttg

SEQ ID NO: 192 - DNA, 20 bp, synthetic construct
  misc_feature 1..20: note = chemically synthesized
  source 1..20: mol_type = other DNA
gccccaggccttgtggacac

SEQ ID NO: 193 - DNA, 20 bp, synthetic construct
  misc_feature 1..20: note = chemically synthesized
  source 1..20: mol_type = other DNA
ccccaggccttgtggacact

SEQ ID NO: 194 - DNA, 20 bp, synthetic construct
  misc_feature 1..20: note = chemically synthesized
  source 1..20: mol_type = other DNA
caggccttgtggacactggg

SEQ ID NO: 195 - DNA, 20 bp, synthetic construct
  misc_feature 1..20: note = chemically synthesized
  source 1..20: mol_type = other DNA
aggccttgtggacactgggt

SEQ ID NO: 196 - DNA, 20 bp, synthetic construct
  misc_feature 1..20: note = chemically synthesized
  source 1..20: mol_type = other DNA
tgtggacactgggtgggctc

SEQ ID NO: 197 - DNA, 20 bp, synthetic construct
  misc_feature 1..20: note = chemically synthesized
  source 1..20: mol_type = other DNA
gtggacactgggtgggctcc

SEQ ID NO: 198 - DNA, 20 bp, synthetic construct
  misc_feature 1..20: note = chemically synthesized
  source 1..20: mol_type = other DNA
gtgggctccgggacctgaac

SEQ ID NO: 199 - DNA, 20 bp, synthetic construct
  misc_feature 1..20: note = chemically synthesized
  source 1..20: mol_type = other DNA
gggctccgggacctgaactg

SEQ ID NO: 200 - DNA, 20 bp, synthetic construct
  misc_feature 1..20: note = chemically synthesized
  source 1..20: mol_type = other DNA
ccgggacctgaactggagct

SEQ ID NO: 201 - DNA, 20 bp, synthetic construct
  misc_feature 1..20: note = chemically synthesized
  source 1..20: mol_type = other DNA
cgggacctgaactggagctg

SEQ ID NO: 202 - DNA, 20 bp, synthetic construct
  misc_feature 1..20: note = chemically synthesized
  source 1..20: mol_type = other DNA
gacctgaactggagctgagg

SEQ ID NO: 203 - DNA, 20 bp, synthetic construct
  misc_feature 1..20: note = chemically synthesized
  source 1..20: mol_type = other DNA
acctgaactggagctgagga

SEQ ID NO: 204 - DNA, 20 bp, synthetic construct
  misc_feature 1..20: note = chemically synthesized
  source 1..20: mol_type = other DNA
ctgaactggagctgaggaag

SEQ ID NO: 205 - DNA, 20 bp, synthetic construct
  misc_feature 1..20: note = chemically synthesized
  source 1..20: mol_type = other DNA
ctggagctgaggaaggagtg

SEQ ID NO: 206 - DNA, 20 bp, synthetic construct
  misc_feature 1..20: note = chemically synthesized
  source 1..20: mol_type = other DNA
aaggagtgaagctaaactcc

SEQ ID NO: 207 - DNA, 20 bp, synthetic construct
  misc_feature 1..20: note = chemically synthesized
  source 1..20: mol_type = other DNA
aagctaaactcctagatcca

SEQ ID NO: 208 - DNA, 20 bp, synthetic construct
  misc_feature 1..20: note = chemically synthesized
  source 1..20: mol_type = other DNA
agctaaactcctagatccac

SEQ ID NO: 209 - DNA, 20 bp, synthetic construct
  misc_feature 1..20: note = chemically synthesized
  source 1..20: mol_type = other DNA
cacgggataaattacccccc

SEQ ID NO: 210 - DNA, 20 bp, synthetic construct
  misc_feature 1..20: note = chemically synthesized
  source 1..20: mol_type = other DNA
ccaagtccctcacctctcca

SEQ ID NO: 211 - DNA, 20 bp, synthetic construct
  misc_feature 1..20: note = chemically synthesized
  source 1..20: mol_type = other DNA
cctctccaaagctgcccatc

SEQ ID NO: 212 - DNA, 20 bp, synthetic construct
  misc_feature 1..20: note = chemically synthesized
  source 1..20: mol_type = other DNA
tctccaaagctgcccatctg

SEQ ID NO: 213 - DNA, 20 bp, synthetic construct
  misc_feature 1..20: note = chemically synthesized
  source 1..20: mol_type = other DNA
ctccaaagctgcccatctgg

SEQ ID NO: 214 - DNA, 20 bp, synthetic construct
  misc_feature 1..20: note = chemically synthesized
  source 1..20: mol_type = other DNA
ccaaagctgcccatctggag

SEQ ID NO: 215 - DNA, 20 bp, synthetic construct
  misc_feature 1..20: note = chemically synthesized
  source 1..20: mol_type = other DNA
caaagctgcccatctggagg

SEQ ID NO: 216 - DNA, 20 bp, synthetic construct
  misc_feature 1..20: note = chemically synthesized
  source 1..20: mol_type = other DNA
agctgcccatctggaggagg

SEQ ID NO: 217 - DNA, 20 bp, synthetic construct
  misc_feature 1..20: note = chemically synthesized
  source 1..20: mol_type = other DNA
gctgcccatctggaggaggc

SEQ ID NO: 218 - DNA, 20 bp, synthetic construct
  misc_feature 1..20: note = chemically synthesized
  source 1..20: mol_type = other DNA
tgcccatctggaggaggcgg

SEQ ID NO: 219 - DNA, 20 bp, synthetic construct
  misc_feature 1..20: note = chemically synthesized
  source 1..20: mol_type = other DNA
gcccatctggaggaggcggg

SEQ ID NO: 220 - DNA, 20 bp, synthetic construct
  misc_feature 1..20: note = chemically synthesized
  source 1..20: mol_type = other DNA
cccatctggaggaggcggga

SEQ ID NO: 221 - DNA, 20 bp, synthetic construct
  misc_feature 1..20: note = chemically synthesized
  source 1..20: mol_type = other DNA
catctggaggaggcgggagg

SEQ ID NO: 222 - DNA, 20 bp, synthetic construct
  misc_feature 1..20: note = chemically synthesized
  source 1..20: mol_type = other DNA
aggaggcgggagggagctac

SEQ ID NO: 223 - DNA, 20 bp, synthetic construct
  misc_feature 1..20: note = chemically synthesized
  source 1..20: mol_type = other DNA
ggaggcgggagggagctacg

SEQ ID NO: 224 - DNA, 20 bp, synthetic construct
  misc_feature 1..20: note = chemically synthesized
  source 1..20: mol_type = other DNA
gaggcgggagggagctacga

SEQ ID NO: 225 - DNA, 20 bp, synthetic construct
  misc_feature 1..20: note = chemically synthesized
  source 1..20: mol_type = other DNA
gggagggagctacgagggcc

SEQ ID NO: 226 - DNA, 20 bp, synthetic construct
  misc_feature 1..20: note = chemically synthesized
  source 1..20: mol_type = other DNA
gagggagctacgagggccaa

SEQ ID NO: 227 - DNA, 20 bp, synthetic construct
  misc_feature 1..20: note = chemically synthesized
  source 1..20: mol_type = other DNA
gctacgagggccaagagcat

SEQ ID NO: 228 - DNA, 20 bp, synthetic construct
  misc_feature 1..20: note = chemically synthesized
  source 1..20: mol_type = other DNA
ctacgagggccaagagcatg

SEQ ID NO: 229 - DNA, 20 bp, synthetic construct
  misc_feature 1..20: note = chemically synthesized
  source 1..20: mol_type = other DNA
gggccaagagcatgaggtca

SEQ ID NO: 230 - DNA, 20 bp, synthetic construct
  misc_feature 1..20: note = chemically synthesized
  source 1..20: mol_type = other DNA
agcatgaggtcatggaaact

SEQ ID NO: 231 - DNA, 20 bp, synthetic construct
  misc_feature 1..20: note = chemically synthesized
  source 1..20: mol_type = other DNA
gcatgaggtcatggaaactc

SEQ ID NO: 232 - DNA, 20 bp, synthetic construct
  misc_feature 1..20: note = chemically synthesized
  source 1..20: mol_type = other DNA
tcatggaaactcgggctgtg

SEQ ID NO: 233 - DNA, 20 bp, synthetic construct
  misc_feature 1..20: note = chemically synthesized
  source 1..20: mol_type = other DNA
catggaaactcgggctgtga

SEQ ID NO: 234 - DNA, 20 bp, synthetic construct
  misc_feature 1..20: note = chemically synthesized
  source 1..20: mol_type = other DNA
atggaaactcgggctgtgaa

SEQ ID NO: 235 - DNA, 20 bp, synthetic construct
  misc_feature 1..20: note = chemically synthesized
  source 1..20: mol_type = other DNA
tggaaactcgggctgtgaag

SEQ ID NO: 236 - DNA, 20 bp, synthetic construct
  misc_feature 1..20: note = chemically synthesized
  source 1..20: mol_type = other DNA
tgaaggggccgcacgtgccc

SEQ ID NO: 237 - DNA, 20 bp, synthetic construct
  misc_feature 1..20: note = chemically synthesized
  source 1..20: mol_type = other DNA
gaaggggccgcacgtgccct

SEQ ID NO: 238 - DNA, 20 bp, synthetic construct
  misc_feature 1..20: note = chemically synthesized
  source 1..20: mol_type = other DNA
ggccgcacgtgccctgggaa

SEQ ID NO: 239 - DNA, 20 bp, synthetic construct
  misc_feature 1..20: note = chemically synthesized
  source 1..20: mol_type = other DNA
gccgcacgtgccctgggaac

SEQ ID NO: 240 - DNA, 20 bp, synthetic construct
  misc_feature 1..20: note = chemically synthesized
  source 1..20: mol_type = other DNA
ccctgggaacgggatgaact

SEQ ID NO: 241 - DNA, 20 bp, synthetic construct
  misc_feature 1..20: note = chemically synthesized
  source 1..20: mol_type = other DNA
tcggctcgtttatttccacc

SEQ ID NO: 242 - DNA, 20 bp, synthetic construct
  misc_feature 1..20: note = chemically synthesized
  source 1..20: mol_type = other DNA
ttatttccacccagttgtca

SEQ ID NO: 243 - DNA, 20 bp, synthetic construct
  misc_feature 1..20: note = chemically synthesized
  source 1..20: mol_type = other DNA
ccacccagttgtcatggcga

SEQ ID NO: 244 - DNA, 20 bp, synthetic construct
  misc_feature 1..20: note = chemically synthesized
  source 1..20: mol_type = other DNA
cacccagttgtcatggcgat

SEQ ID NO: 245 - DNA, 20 bp, synthetic construct
  misc_feature 1..20: note = chemically synthesized
  source 1..20: mol_type = other DNA
acccagttgtcatggcgata

SEQ ID NO: 246 - DNA, 20 bp, synthetic construct
  misc_feature 1..20: note = chemically synthesized
  source 1..20: mol_type = other DNA
cccagttgtcatggcgatag

SEQ ID NO: 247 - DNA, 20 bp, synthetic construct
  misc_feature 1..20: note = chemically synthesized
  source 1..20: mol_type = other DNA
cagttgtcatggcgataggg

SEQ ID NO: 248 - DNA, 20 bp, synthetic construct
  misc_feature 1..20: note = chemically synthesized
  source 1..20: mol_type = other DNA
agttgtcatggcgatagggg

SEQ ID NO: 249 - DNA, 20 bp, synthetic construct
  misc_feature 1..20: note = chemically synthesized
  source 1..20: mol_type = other DNA
gttgtcatggcgatagggga

SEQ ID NO: 250 - DNA, 20 bp, synthetic construct
  misc_feature 1..20: note = chemically synthesized
  source 1..20: mol_type = other DNA
ttgtcatggcgataggggag

SEQ ID NO: 251 - DNA, 20 bp, synthetic construct
  misc_feature 1..20: note = chemically synthesized
  source 1..20: mol_type = other DNA
tgtcatggcgataggggagg

SEQ ID NO: 252 - DNA, 20 bp, synthetic construct
  misc_feature 1..20: note = chemically synthesized
  source 1..20: mol_type = other DNA
gtcatggcgataggggaggg

SEQ ID NO: 253 - DNA, 20 bp, synthetic construct
  misc_feature 1..20: note = chemically synthesized
  source 1..20: mol_type = other DNA
tggcgataggggaggggggc

SEQ ID NO: 254 - DNA, 20 bp, synthetic construct
  misc_feature 1..20: note = chemically synthesized
  source 1..20: mol_type = other DNA
ggcgataggggaggggggca

SEQ ID NO: 255 - DNA, 20 bp, synthetic construct
  misc_feature 1..20: note = chemically synthesized
  source 1..20: mol_type = other DNA
cgataggggaggggggcaag

SEQ ID NO: 256 - DNA, 20 bp, synthetic construct
  misc_feature 1..20: note = chemically synthesized
  source 1..20: mol_type = other DNA
ataggggaggggggcaagga

SEQ ID NO: 257 - DNA, 20 bp, synthetic construct
  misc_feature 1..20: note = chemically synthesized
  source 1..20: mol_type = other DNA
gaggggggcaaggagagcaa

SEQ ID NO: 258 - DNA, 20 bp, synthetic construct
  misc_feature 1..20: note = chemically synthesized
  source 1..20: mol_type = other DNA
aggggggcaaggagagcaat

SEQ ID NO: 259 - DNA, 20 bp, synthetic construct
  misc_feature 1..20: note = chemically synthesized
  source 1..20: mol_type = other DNA
gcaatgggcctttccctttc

SEQ ID NO: 260 - DNA, 20 bp, synthetic construct
  misc_feature 1..20: note = chemically synthesized
  source 1..20: mol_type = other DNA
caatgggcctttccctttca

SEQ ID NO: 261 - DNA, 20 bp, synthetic construct
  misc_feature 1..20: note = chemically synthesized
  source 1..20: mol_type = other DNA
ttccctttcaaggacctgcc

SEQ ID NO: 262 - DNA, 20 bp, synthetic construct
  misc_feature 1..20: note = chemically synthesized
  source 1..20: mol_type = other DNA
tttcaaggacctgcccagta

SEQ ID NO: 263 - DNA, 20 bp, synthetic construct
  misc_feature 1..20: note = chemically synthesized
  source 1..20: mol_type = other DNA
ttcaaggacctgcccagtac

SEQ ID NO: 264 - DNA, 20 bp, synthetic construct
  misc_feature 1..20: note = chemically synthesized
  source 1..20: mol_type = other DNA
cagtacaggcatccctgtga

SEQ ID NO: 265 - DNA, 20 bp, synthetic construct
  misc_feature 1..20: note = chemically synthesized
  source 1..20: mol_type = other DNA
catccctgtgaaagatgcct

SEQ ID NO: 266 - DNA, 20 bp, synthetic construct
  misc_feature 1..20: note = chemically synthesized
  source 1..20: mol_type = other DNA
atccctgtgaaagatgcctg

SEQ ID NO: 267 - DNA, 20 bp, synthetic construct
  misc_feature 1..20: note = chemically synthesized
  source 1..20: mol_type = other DNA
tgtgaaagatgcctgaggcc

SEQ ID NO: 268 - DNA, 20 bp, synthetic construct
  misc_feature 1..20: note = chemically synthesized
  source 1..20: mol_type = other DNA
gtgaaagatgcctgaggcct

SEQ ID NO: 269 - DNA, 20 bp, synthetic construct
  misc_feature 1..20: note = chemically synthesized
  source 1..20: mol_type = other DNA
gatgcctgaggcctgggcac

SEQ ID NO: 270 - DNA, 20 bp, synthetic construct
  misc_feature 1..20: note = chemically synthesized
  source 1..20: mol_type = other DNA
atgcctgaggcctgggcacc

SEQ ID NO: 271 - DNA, 20 bp, synthetic construct
  misc_feature 1..20: note = chemically synthesized
  source 1..20: mol_type = other DNA
tgcctgaggcctgggcacca

SEQ ID NO: 272 - DNA, 20 bp, synthetic construct
  misc_feature 1..20: note = chemically synthesized
  source 1..20: mol_type = other DNA
ggcctgggcaccagggactc

SEQ ID NO: 273 - DNA, 20 bp, synthetic construct
  misc_feature 1..20: note = chemically synthesized
  source 1..20: mol_type = other DNA
cctgggcaccagggactcca

SEQ ID NO: 274 - DNA, 20 bp, synthetic construct
  misc_feature 1..20: note = chemically synthesized
  source 1..20: mol_type = other DNA
gcaccagggactccagagtc

SEQ ID NO: 275 - DNA, 20 bp, synthetic construct
  misc_feature 1..20: note = chemically synthesized
  source 1..20: mol_type = other DNA
caccagggactccagagtcc

SEQ ID NO: 276 - DNA, 20 bp, synthetic construct
  misc_feature 1..20: note = chemically synthesized
  source 1..20: mol_type = other DNA
caacccctccccattcaacc

SEQ ID NO: 277 - DNA, 20 bp, synthetic construct
  misc_feature 1..20: note = chemically synthesized
  source 1..20: mol_type = other DNA
aacccctccccattcaaccc

SEQ ID NO: 278 - DNA, 20 bp, synthetic construct
  misc_feature 1..20: note = chemically synthesized
  source 1..20: mol_type = other DNA
cccctccccattcaacccag

SEQ ID NO: 279 - DNA, 20 bp, synthetic construct
  misc_feature 1..20: note = chemically synthesized
  source 1..20: mol_type = other DNA
ccctccccattcaacccagg

SEQ ID NO: 280 - DNA, 20 bp, synthetic construct
  misc_feature 1..20: note = chemically synthesized
  source 1..20: mol_type = other DNA
ccccattcaacccaggaggc

SEQ ID NO: 281 - DNA, 20 bp, synthetic construct
  misc_feature 1..20: note = chemically synthesized
  source 1..20: mol_type = other DNA
cccattcaacccaggaggcc

SEQ ID NO: 282 - DNA, 20 bp, synthetic construct
  misc_feature 1..20: note = chemically synthesized
  source 1..20: mol_type = other DNA
caacccaggaggccaggccc

SEQ ID NO: 283 - DNA, 20 bp, synthetic construct
  misc_feature 1..20: note = chemically synthesized
  source 1..20: mol_type = other DNA
ggccccagcccttccgccct

SEQ ID NO: 284 - DNA, 20 bp, synthetic construct
  misc_feature 1..20: note = chemically synthesized
  source 1..20: mol_type = other DNA
agcccttccgccctcagatg

SEQ ID NO: 285 - DNA, 20 bp, synthetic construct
  misc_feature 1..20: note = chemically synthesized
  source 1..20: mol_type = other DNA
gcccttccgccctcagatga

SEQ ID NO: 286 - DNA, 20 bp, synthetic construct
  misc_feature 1..20: note = chemically synthesized
  source 1..20: mol_type = other DNA
ccttccgccctcagatgaag

SEQ ID NO: 287 - DNA, 20 bp, synthetic construct
  misc_feature 1..20: note = chemically synthesized
  source 1..20: mol_type = other DNA
cgccctcagatgaaggagtc

SEQ ID NO: 288 - DNA, 20 bp, synthetic construct
  misc_feature 1..20: note = chemically synthesized
  source 1..20: mol_type = other DNA
gccctcagatgaaggagtcc

SEQ ID NO: 289 - DNA, 20 bp, synthetic construct
  misc_feature 1..20: note = chemically synthesized
  source 1..20: mol_type = other DNA
gatgaaggagtccaggcccc

SEQ ID NO: 290 - DNA, 20 bp, synthetic construct
  misc_feature 1..20: note = chemically synthesized
  source 1..20: mol_type = other DNA
gcccccagcctctccccatt

SEQ ID NO: 291 - DNA, 20 bp, synthetic construct
  misc_feature 1..20: note = chemically synthesized
  source 1..20: mol_type = other DNA
agcctctccccattcagacc

SEQ ID NO: 292 - DNA, 20 bp, synthetic construct
  misc_feature 1..20: note = chemically synthesized
  source 1..20: mol_type = other DNA
gcctctccccattcagaccc

SEQ ID NO: 293 - DNA, 20 bp, synthetic construct
  misc_feature 1..20: note = chemically synthesized
  source 1..20: mol_type = other DNA
cctctccccattcagaccca

SEQ ID NO: 294 - DNA, 20 bp, synthetic construct
  misc_feature 1..20: note = chemically synthesized
  source 1..20: mol_type = other DNA
ctctccccattcagacccag

SEQ ID NO: 295 - DNA, 20 bp, synthetic construct
  misc_feature 1..20: note = chemically synthesized
  source 1..20: mol_type = other DNA
cccattcagacccaggggtc

SEQ ID NO: 296 - DNA, 20 bp, synthetic construct
  misc_feature 1..20: note = chemically synthesized
  source 1..20: mol_type = other DNA
ccattcagacccaggggtcc

SEQ ID NO: 297 - DNA, 20 bp, synthetic construct
  misc_feature 1..20: note = chemically synthesized
  source 1..20: mol_type = other DNA
cagacccaggggtccaggcc

SEQ ID NO: 298 - DNA, 20 bp, synthetic construct
  misc_feature 1..20: note = chemically synthesized
  source 1..20: mol_type = other DNA
aggcccagccccgcctccct

SEQ ID NO: 299 - DNA, 20 bp, synthetic construct
  misc_feature 1..20: note = chemically synthesized
  source 1..20: mol_type = other DNA
agccccgcctccctaagacc

SEQ ID NO: 300 - DNA, 20 bp, synthetic construct
  misc_feature 1..20: note = chemically synthesized
  source 1..20: mol_type = other DNA
cccgcctccctaagacccag

SEQ ID NO: 301 - DNA, 20 bp, synthetic construct
  misc_feature 1..20: note = chemically synthesized
  source 1..20: mol_type = other DNA
ctccctaagacccagaagtc

SEQ ID NO: 302 - DNA, 20 bp, synthetic construct
  misc_feature 1..20: note = chemically synthesized
  source 1..20: mol_type = other DNA
tccctaagacccagaagtcc

SEQ ID NO: 303 - DNA, 20 bp, synthetic construct
  misc_feature 1..20: note = chemically synthesized
  source 1..20: mol_type = other DNA
gacccagaagtccaggcccc

SEQ ID NO: 304 - DNA, 20 bp, synthetic construct
  misc_feature 1..20: note = chemically synthesized
  source 1..20: mol_type = other DNA
gcccccagcccctcctccct

SEQ ID NO: 305 - DNA, 20 bp, synthetic construct
  misc_feature 1..20: note = chemically synthesized
  source 1..20: mol_type = other DNA
ccctcctccctcagacccac

SEQ ID NO: 306 - DNA, 20 bp, synthetic construct
  misc_feature 1..20: note = chemically synthesized
  source 1..20: mol_type = other DNA
ctccctcagacccacgagtc

SEQ ID NO: 307 - DNA, 20 bp, synthetic construct
  misc_feature 1..20: note = chemically synthesized
  source 1..20: mol_type = other DNA
tccctcagacccacgagtcc

SEQ ID NO: 308 - DNA, 20 bp, synthetic construct
  misc_feature 1..20: note = chemically synthesized
  source 1..20: mol_type = other DNA
agacccacgagtccaggccc

SEQ ID NO: 309 - DNA, 20 bp, synthetic construct
  misc_feature 1..20: note = chemically synthesized
  source 1..20: mol_type = other DNA
ggccccagcccctcctccct

SEQ ID NO: 310 - DNA, 20 bp, synthetic construct
  misc_feature 1..20: note = chemically synthesized
  source 1..20: mol_type = other DNA
agcccctcctccctcggacc

SEQ ID NO: 311 - DNA, 20 bp, synthetic construct
  misc_feature 1..20: note = chemically synthesized
  source 1..20: mol_type = other DNA
gcccctcctccctcggaccc

SEQ ID NO: 312 - DNA, 20 bp, synthetic construct
  misc_feature 1..20: note = chemically synthesized
  source 1..20: mol_type = other DNA
ccctcctccctcggacccag

SEQ ID NO: 313 - DNA, 20 bp, synthetic construct
  misc_feature 1..20: note = chemically synthesized
  source 1..20: mol_type = other DNA
ctccctcggacccaggagtc

SEQ ID NO: 314 - DNA, 20 bp, synthetic construct
  misc_feature 1..20: note = chemically synthesized
  source 1..20: mol_type = other DNA
tccctcggacccaggagtcc

SEQ ID NO: 315 - DNA, 20 bp, synthetic construct
  misc_feature 1..20: note = chemically synthesized
  source 1..20: mol_type = other DNA
gacccaggagtccaggcccc

SEQ ID NO: 316 - DNA, 20 bp, synthetic construct
  misc_feature 1..20: note = chemically synthesized
  source 1..20: mol_type = other DNA
gcccccagtccctccaccct

SEQ ID NO: 317 - DNA, 20 bp, synthetic construct
  misc_feature 1..20: note = chemically synthesized
  source 1..20: mol_type = other DNA
agtccctccaccctcagacc

SEQ ID NO: 318 - DNA, 20 bp, synthetic construct
  misc_feature 1..20: note = chemically synthesized
  source 1..20: mol_type = other DNA
gtccctccaccctcagaccc

SEQ ID NO: 319 - DNA, 20 bp, synthetic construct
  misc_feature 1..20: note = chemically synthesized
  source 1..20: mol_type = other DNA
ccctccaccctcagacccag

SEQ ID NO: 320 - DNA, 20 bp, synthetic construct
  misc_feature 1..20: note = chemically synthesized
  source 1..20: mol_type = other DNA
caccctcagacccaggagtc

SEQ ID NO: 321 - DNA, 20 bp, synthetic construct
  misc_feature 1..20: note = chemically synthesized
  source 1..20: mol_type = other DNA
accctcagacccaggagtcc

SEQ ID NO: 322 - DNA, 20 bp, synthetic construct
  misc_feature 1..20: note = chemically synthesized
  source 1..20: mol_type = other DNA
agacccaggagtccaggccc

SEQ ID NO: 323 - DNA, 20 bp, synthetic construct
  misc_feature 1..20: note = chemically synthesized
  source 1..20: mol_type = other DNA
ggccccagcccctcctccct

SEQ ID NO: 324 - DNA, 20 bp, synthetic construct
  misc_feature 1..20: note = chemically synthesized
  source 1..20: mol_type = other DNA
agcccctcctccctcggacc

SEQ ID NO: 325 - DNA, 20 bp, synthetic construct
  misc_feature 1..20: note = chemically synthesized
  source 1..20: mol_type = other DNA
gcccctcctccctcggaccc

SEQ ID NO: 326 - DNA, 20 bp, synthetic construct
  misc_feature 1..20: note = chemically synthesized
  source 1..20: mol_type = other DNA
ccctcctccctcggacccag

SEQ ID NO: 327 - DNA, 20 bp, synthetic construct
  misc_feature 1..20: note = chemically synthesized
  source 1..20: mol_type = other DNA
ctccctcggacccaggagtc

SEQ ID NO: 328 - DNA, 20 bp, synthetic construct
  misc_feature 1..20: note = chemically synthesized
  source 1..20: mol_type = other DNA
tccctcggacccaggagtcc

SEQ ID NO: 329 - DNA, 20 bp, synthetic construct
  misc_feature 1..20: note = chemically synthesized
  source 1..20: mol_type = other DNA
ggacccaggagtccaggccc

SEQ ID NO: 330 - DNA, 20 bp, synthetic construct
  misc_feature 1..20: note = chemically synthesized
  source 1..20: mol_type = other DNA
agcccctcctctctcaaacc

SEQ ID NO: 331 - DNA, 20 bp, synthetic construct
  misc_feature 1..20: note = chemically synthesized
  source 1..20: mol_type = other DNA
gcccctcctctctcaaaccc

SEQ ID NO: 332 - DNA, 20 bp, synthetic construct
  misc_feature 1..20: note = chemically synthesized
  source 1..20: mol_type = other DNA
ccctcctctctcaaacccag

SEQ ID NO: 333 - DNA, 20 bp, synthetic construct
  misc_feature 1..20: note = chemically synthesized
  source 1..20: mol_type = other DNA
ctctctcaaacccaggagcc

SEQ ID NO: 334 - DNA, 20 bp, synthetic construct
  misc_feature 1..20: note = chemically synthesized
  source 1..20: mol_type = other DNA
tctctcaaacccaggagccc

SEQ ID NO: 335 - DNA, 20 bp, synthetic construct
  misc_feature 1..20: note = chemically synthesized
  source 1..20: mol_type = other DNA
aacccaggagcccaggcccc

SEQ ID NO: 336 - DNA, 20 bp, synthetic construct
  misc_feature 1..20: note = chemically synthesized
  source 1..20: mol_type = other DNA
gcccccagctcttctctgtt

SEQ ID NO: 337 - DNA, 20 bp, synthetic construct
  misc_feature 1..20: note = chemically synthesized
  source 1..20: mol_type = other DNA
gctcttctctgttcagccct

SEQ ID NO: 338 - DNA, 20 bp, synthetic construct
  misc_feature 1..20: note = chemically synthesized
  source 1..20: mol_type = other DNA
ctgttcagccctaagaatcc

SEQ ID NO: 339 - DNA, 20 bp, synthetic construct
  misc_feature 1..20: note = chemically synthesized
  source 1..20: mol_type = other DNA
agccctaagaatcctggctc

SEQ ID NO: 340 - DNA, 20 bp, synthetic construct
  misc_feature 1..20: note = chemically synthesized
  source 1..20: mol_type = other DNA
ggctccagcccctcctactc

SEQ ID NO: 341 - DNA, 20 bp, synthetic construct
  misc_feature 1..20: note = chemically synthesized
  source 1..20: mol_type = other DNA
tactctagcccccaaccccc

SEQ ID NO: 342 - DNA, 20 bp, synthetic construct
  misc_feature 1..20: note = chemically synthesized
  source 1..20: mol_type = other DNA
cccccaaccccctagccact

SEQ ID NO: 343 - DNA, 20 bp, synthetic construct
  misc_feature 1..20: note = chemically synthesized
  source 1..20: mol_type = other DNA
ccccaaccccctagccacta

SEQ ID NO: 344 - DNA, 20 bp, synthetic construct
  misc_feature 1..20: note = chemically synthesized
  source 1..20: mol_type = other DNA
cccctagccactaaggcaat

SEQ ID NO: 345 - DNA, 20 bp, synthetic construct
  misc_feature 1..20: note = chemically synthesized
  source 1..20: mol_type = other DNA
ccctagccactaaggcaatt

SEQ ID NO: 346 - DNA, 20 bp, synthetic construct
  misc_feature 1..20: note = chemically synthesized
  source 1..20: mol_type = other DNA
cctagccactaaggcaattg

SEQ ID NO: 347 - DNA, 20 bp, synthetic construct
  misc_feature 1..20: note = chemically synthesized
  source 1..20: mol_type = other DNA
ccactaaggcaattggggtg

SEQ ID NO: 348 - DNA, 20 bp, synthetic construct
  misc_feature 1..20: note = chemically synthesized
  source 1..20: mol_type = other DNA
cactaaggcaattggggtgc

SEQ ID NO: 349 - DNA, 20 bp, synthetic construct
  misc_feature 1..20: note = chemically synthesized
  source 1..20: mol_type = other DNA
aggcaattggggtgcaggaa

SEQ ID NO: 350 - DNA, 20 bp, synthetic construct
  misc_feature 1..20: note = chemically synthesized
  source 1..20: mol_type = other DNA
ggcaattggggtgcaggaat

SEQ ID NO: 351 - DNA, 20 bp, synthetic construct
  misc_feature 1..20: note = chemically synthesized
  source 1..20: mol_type = other DNA
gcaattggggtgcaggaatg

SEQ ID NO: 352 - DNA, 20 bp, synthetic construct
  misc_feature 1..20: note = chemically synthesized
  source 1..20: mol_type = other DNA
caattggggtgcaggaatgg

SEQ ID NO: 353 - DNA, 20 bp, synthetic construct
  misc_feature 1..20: note = chemically synthesized
  source 1..20: mol_type = other DNA
ttggggtgcaggaatggggg

SEQ ID NO: 354 - DNA, 20 bp, synthetic construct
  misc_feature 1..20: note = chemically synthesized
  source 1..20: mol_type = other DNA
tggggtgcaggaatgggggc

SEQ ID NO: 355 - DNA, 20 bp, synthetic construct
  misc_feature 1..20: note = chemically synthesized
  source 1..20: mol_type = other DNA
ggggtgcaggaatgggggca

SEQ ID NO: 356 - DNA, 20 bp, synthetic construct
  misc_feature 1..20: note = chemically synthesized
  source 1..20: mol_type = other DNA
caggaatgggggcagggtac

SEQ ID NO: 357 - DNA, 20 bp, synthetic construct
  misc_feature 1..20: note = chemically synthesized
  source 1..20: mol_type = other DNA
ggcagggtaccagcctcacc

SEQ ID NO: 358 - DNA, 20 bp, synthetic construct
  misc_feature 1..20: note = chemically synthesized
  source 1..20: mol_type = other DNA
agggtaccagcctcaccaag

SEQ ID NO: 359 - DNA, 20 bp, synthetic construct
  misc_feature 1..20: note = chemically synthesized
  source 1..20: mol_type = other DNA
aagtggttgataaacccacg

SEQ ID NO: 360 - DNA, 20 bp, synthetic construct
  misc_feature 1..20: note = chemically synthesized
  source 1..20: mol_type = other DNA
agtggttgataaacccacgt

SEQ ID NO: 361 - DNA, 20 bp, synthetic construct
  misc_feature 1..20: note = chemically synthesized
  source 1..20: mol_type = other DNA
gtggttgataaacccacgtg

SEQ ID NO: 362 - DNA, 20 bp, synthetic construct
  misc_feature 1..20: note = chemically synthesized
  source 1..20: mol_type = other DNA
aaacccacgtggggtaccct

SEQ ID NO: 363 - DNA, 20 bp, synthetic construct
  misc_feature 1..20: note = chemically synthesized
  source 1..20: mol_type = other DNA
cgtggggtaccctaagaact

SEQ ID NO: 364 - DNA, 20 bp, synthetic construct
  misc_feature 1..20: note = chemically synthesized
  source 1..20: mol_type = other DNA
gtggggtaccctaagaactt

SEQ ID NO: 365 - DNA, 20 bp, synthetic construct
  misc_feature 1..20: note = chemically synthesized
  source 1..20: mol_type = other DNA
gtaccctaagaacttgggaa

SEQ ID NO: 366 - DNA, 20 bp, synthetic construct
  misc_feature 1..20: note = chemically synthesized
  source 1..20: mol_type = other DNA
taagaacttgggaacagcca

SEQ ID NO: 367 - DNA, 20 bp, synthetic construct
  misc_feature 1..20: note = chemically synthesized
  source 1..20: mol_type = other DNA
gaacttgggaacagccacag

SEQ ID NO: 368 - DNA, 20 bp, synthetic construct
  misc_feature 1..20: note = chemically synthesized
  source 1..20: mol_type = other DNA
aacttgggaacagccacagc

SEQ ID NO: 369 - DNA, 20 bp, synthetic construct
  misc_feature 1..20: note = chemically synthesized
  source 1..20: mol_type = other DNA
acttgggaacagccacagca

SEQ ID NO: 370 - DNA, 20 bp, synthetic construct
  misc_feature 1..20: note = chemically synthesized
  source 1..20: mol_type = other DNA
cttgggaacagccacagcag

SEQ ID NO: 371 - DNA, 20 bp, synthetic construct
  misc_feature 1..20: note = chemically synthesized
  source 1..20: mol_type = other DNA
ttgggaacagccacagcagg

SEQ ID NO: 372 - DNA, 20 bp, synthetic construct
  misc_feature 1..20: note = chemically synthesized
  source 1..20: mol_type = other DNA
tgggaacagccacagcaggg

SEQ ID NO: 373 - DNA, 20 bp, synthetic construct
  misc_feature 1..20: note = chemically synthesized
  source 1..20: mol_type = other DNA
cacagcaggggggcgatgct

SEQ ID NO: 374 - DNA, 20 bp, synthetic construct
  misc_feature 1..20: note = chemically synthesized
  source 1..20: mol_type = other DNA
acagcaggggggcgatgctt

SEQ ID NO: 375 - DNA, 20 bp, synthetic construct
  misc_feature 1..20: note = chemically synthesized
  source 1..20: mol_type = other DNA
cagcaggggggcgatgcttg

SEQ ID NO: 376 - DNA, 20 bp, synthetic construct
  misc_feature 1..20: note = chemically synthesized
  source 1..20: mol_type = other DNA
gcgatgcttggggacctgcc

SEQ ID NO: 377 - DNA, 20 bp, synthetic construct
  misc_feature 1..20: note = chemically synthesized
  source 1..20: mol_type = other DNA
gatgcttggggacctgcctg

SEQ ID NO: 378 - DNA, 20 bp, synthetic construct
  misc_feature 1..20: note = chemically synthesized
  source 1..20: mol_type = other DNA
gcttggggacctgcctggag

SEQ ID NO: 379 - DNA, 20 bp, synthetic construct
  misc_feature 1..20: note = chemically synthesized
  source 1..20: mol_type = other DNA
cttggggacctgcctggaga

SEQ ID NO: 380 - DNA, 20 bp, synthetic construct
  misc_feature 1..20: note = chemically synthesized
  source 1..20: mol_type = other DNA
gacctgcctggagaaggatg

SEQ ID NO: 381 - DNA, 20 bp, synthetic construct
  misc_feature 1..20: note = chemically synthesized
  source 1..20: mol_type = other DNA
acctgcctggagaaggatgc

SEQ ID NO: 382 - DNA, 20 bp, synthetic construct
  misc_feature 1..20: note = chemically synthesized
  source 1..20: mol_type = other DNA
cctggagaaggatgcaggac

SEQ ID NO: 383 - DNA, 20 bp, synthetic construct
  misc_feature 1..20: note = chemically synthesized
  source 1..20: mol_type = other DNA
aggatgcaggacgagaaaca

SEQ ID NO: 384 - DNA, 20 bp, synthetic construct
  misc_feature 1..20: note = chemically synthesized
  source 1..20: mol_type = other DNA
caggacgagaaacacagccc

SEQ ID NO: 385 - DNA, 20 bp, synthetic construct
  misc_feature 1..20: note = chemically synthesized
  source 1..20: mol_type = other DNA
aggacgagaaacacagcccc

SEQ ID NO: 386 - DNA, 20 bp, synthetic construct
  misc_feature 1..20: note = chemically synthesized
  source 1..20: mol_type = other DNA
acgagaaacacagccccagg

SEQ ID NO: 387 - DNA, 20 bp, synthetic construct
  misc_feature 1..20: note = chemically synthesized
  source 1..20: mol_type = other DNA
gagaaacacagccccaggtg

SEQ ID NO: 388 - DNA, 20 bp, synthetic construct
  misc_feature 1..20: note = chemically synthesized
  source 1..20: mol_type = other DNA
acagccccaggtggagaaac

SEQ ID NO: 389 - DNA, 20 bp, synthetic construct
  misc_feature 1..20: note = chemically synthesized
  source 1..20: mol_type = other DNA
ccccaggtggagaaactggc

SEQ ID NO: 390 - DNA, 20 bp, synthetic construct
  misc_feature 1..20: note = chemically synthesized
  source 1..20: mol_type = other DNA
cccaggtggagaaactggcc

SEQ ID NO: 391 - DNA, 20 bp, synthetic construct
  misc_feature 1..20: note = chemically synthesized
  source 1..20: mol_type = other DNA
ggagaaactggccgggaatc

SEQ ID NO: 392 - DNA, 20 bp, synthetic construct
  misc_feature 1..20: note = chemically synthesized
  source 1..20: mol_type = other DNA
agaaactggccgggaatcaa

SEQ ID NO: 393 - DNA, 20 bp, synthetic construct
  misc_feature 1..20: note = chemically synthesized
  source 1..20: mol_type = other DNA
gccgggaatcaagagtcacc

SEQ ID NO: 394 - DNA, 20 bp, synthetic construct
  misc_feature 1..20: note = chemically synthesized
  source 1..20: mol_type = other DNA
cgggaatcaagagtcaccca

SEQ ID NO: 395 - DNA, 20 bp, synthetic construct
  misc_feature 1..20: note = chemically synthesized
  source 1..20: mol_type = other DNA
aatcaagagtcacccagaga

SEQ ID NO: 396 - DNA, 20 bp, synthetic construct
  misc_feature 1..20: note = chemically synthesized
  source 1..20: mol_type = other DNA
accaaccatccctgttttcc

SEQ ID NO: 397 - DNA, 20 bp, synthetic construct
  misc_feature 1..20: note = chemically synthesized
  source 1..20: mol_type = other DNA
ccaaccatccctgttttcct

SEQ ID NO: 398 - DNA, 20 bp, synthetic construct
  misc_feature 1..20: note = chemically synthesized
  source 1..20: mol_type = other DNA
atccctgttttcctaggact

SEQ ID NO: 399 - DNA, 20 bp, synthetic construct
  misc_feature 1..20: note = chemically synthesized
  source 1..20: mol_type = other DNA
tccctgttttcctaggactg

SEQ ID NO: 400 - DNA, 20 bp, synthetic construct
  misc_feature 1..20: note = chemically synthesized
  source 1..20: mol_type = other DNA
ccctgttttcctaggactga

SEQ ID NO: 401 - DNA, 20 bp, synthetic construct
  misc_feature 1..20: note = chemically synthesized
  source 1..20: mol_type = other DNA
tttcctaggactgagggttt

SEQ ID NO: 402 - DNA, 20 bp, synthetic construct
  misc_feature 1..20: note = chemically synthesized
  source 1..20: mol_type = other DNA
gagggtttcagtgctaaaac

SEQ ID NO: 403 - DNA, 20 bp, synthetic construct
  misc_feature 1..20: note = chemically synthesized
  source 1..20: mol_type = other DNA
agggtttcagtgctaaaact

SEQ ID NO: 404 - DNA, 20 bp, synthetic construct
  misc_feature 1..20: note = chemically synthesized
  source 1..20: mol_type = other DNA
gtgctaaaactaggctgtcc

SEQ ID NO: 405 - DNA, 20 bp, synthetic construct
  misc_feature 1..20: note = chemically synthesized
  source 1..20: mol_type = other DNA
tgctaaaactaggctgtcct

SEQ ID NO: 406 - DNA, 20 bp, synthetic construct
  misc_feature 1..20: note = chemically synthesized
  source 1..20: mol_type = other DNA
actaggctgtcctgggcaaa

SEQ ID NO: 407 - DNA, 20 bp, synthetic construct
  misc_feature 1..20: note = chemically synthesized
  source 1..20: mol_type = other DNA
ctgtcctgggcaaacagcat

SEQ ID NO: 408 - DNA, 20 bp, synthetic construct
  misc_feature 1..20: note = chemically synthesized
  source 1..20: mol_type = other DNA
cctgggcaaacagcataagc

SEQ ID NO: 409 - DNA, 20 bp, synthetic construct
  misc_feature 1..20: note = chemically synthesized
  source 1..20: mol_type = other DNA
taagctggtcaccccacacc

SEQ ID NO: 410 - DNA, 20 bp, synthetic construct
  misc_feature 1..20: note = chemically synthesized
  source 1..20: mol_type = other DNA
acccagacctgacccaaacc

SEQ ID NO: 411 - DNA, 20 bp, synthetic construct
  misc_feature 1..20: note = chemically synthesized
  source 1..20: mol_type = other DNA
aacccagctcccctgcttct

SEQ ID NO: 412 - DNA, 20 bp, synthetic construct
  misc_feature 1..20: note = chemically synthesized
  source 1..20: mol_type = other DNA
gcttcttggccacgtaacct

SEQ ID NO: 413 - DNA, 20 bp, synthetic construct
  misc_feature 1..20: note = chemically synthesized
  source 1..20: mol_type = other DNA
tcttggccacgtaacctgag

SEQ ID NO: 414 - DNA, 20 bp, synthetic construct
  misc_feature 1..20: note = chemically synthesized
  source 1..20: mol_type = other DNA
cttggccacgtaacctgaga

SEQ ID NO: 415 - DNA, 20 bp, synthetic construct
  misc_feature 1..20: note = chemically synthesized
  source 1..20: mol_type = other DNA
ttggccacgtaacctgagaa

SEQ ID NO: 416 - DNA, 20 bp, synthetic construct
  misc_feature 1..20: note = chemically synthesized
  source 1..20: mol_type = other DNA
aatccctcctctctgaaccc

SEQ ID NO: 417 - DNA, 20 bp, synthetic construct
  misc_feature 1..20: note = chemically synthesized
  source 1..20: mol_type = other DNA
cccagcccaccccaatgctc

SEQ ID NO: 418 - DNA, 20 bp, synthetic construct
  misc_feature 1..20: note = chemically synthesized
  source 1..20: mol_type = other DNA
ccagcccaccccaatgctcc

SEQ ID NO: 419 - DNA, 20 bp, synthetic construct
  misc_feature 1..20: note = chemically synthesized
  source 1..20: mol_type = other DNA
ccccaatgctccaggcctcc

SEQ ID NO: 420 - DNA, 20 bp, synthetic construct
  misc_feature 1..20: note = chemically synthesized
  source 1..20: mol_type = other DNA
cccaatgctccaggcctcct

SEQ ID NO: 421 - DNA, 20 bp, synthetic construct
  misc_feature 1..20: note = chemically synthesized
  source 1..20: mol_type = other DNA
aggcctcctgggataccccg

SEQ ID NO: 422 - DNA, 20 bp, synthetic construct
  misc_feature 1..20: note = chemically synthesized
  source 1..20: mol_type = other DNA
gcctcctgggataccccgaa

SEQ ID NO: 423 - DNA, 20 bp, synthetic construct
  misc_feature 1..20: note = chemically synthesized
  source 1..20: mol_type = other DNA
cctgggataccccgaagagt

SEQ ID NO: 424 - DNA, 20 bp, synthetic construct
  misc_feature 1..20: note = chemically synthesized
  source 1..20: mol_type = other DNA
ccccgaagagtgagtttgcc

SEQ ID NO: 425 - DNA, 20 bp, synthetic construct
  misc_feature 1..20: note = chemically synthesized
  source 1..20: mol_type = other DNA
cgaagagtgagtttgccaag

SEQ ID NO: 426 - DNA, 20 bp, synthetic construct
  misc_feature 1..20: note = chemically synthesized
  source 1..20: mol_type = other DNA
tttgccaagcagtcacccca

SEQ ID NO: 427 - DNA, 20 bp, synthetic construct
  misc_feature 1..20: note = chemically synthesized
  source 1..20: mol_type = other DNA
ccaagcagtcaccccacagt

SEQ ID NO: 428 - DNA, 20 bp, synthetic construct
  misc_feature 1..20: note = chemically synthesized
  source 1..20: mol_type = other DNA
aagcagtcaccccacagttg

SEQ ID NO: 429 - DNA, 20 bp, synthetic construct
  misc_feature 1..20: note = chemically synthesized
  source 1..20: mol_type = other DNA
agcagtcaccccacagttgg

SEQ ID NO: 430 - DNA, 20 bp, synthetic construct
  misc_feature 1..20: note = chemically synthesized
  source 1..20: mol_type = other DNA
cagtcaccccacagttggag

SEQ ID NO: 431 - DNA, 20 bp, synthetic construct
  misc_feature 1..20: note = chemically synthesized
  source 1..20: mol_type = other DNA
ttggaggagaatccacccaa

SEQ ID NO: 432 - DNA, 20 bp, synthetic construct
  misc_feature 1..20: note = chemically synthesized
  source 1..20: mol_type = other DNA
tggaggagaatccacccaaa

SEQ ID NO: 433 - DNA, 20 bp, synthetic construct
  misc_feature 1..20: note = chemically synthesized
  source 1..20: mol_type = other DNA
aggagaatccacccaaaagg

SEQ ID NO: 434 - DNA, 20 bp, synthetic construct
  misc_feature 1..20: note = chemically synthesized
  source 1..20: mol_type = other DNA
aatccacccaaaaggcagcc

SEQ ID NO: 435 - DNA, 20 bp, synthetic construct
  misc_feature 1..20: note = chemically synthesized
  source 1..20: mol_type = other DNA
ccacccaaaaggcagcctgg

SEQ ID NO: 436 - DNA, 20 bp, synthetic construct
  misc_feature 1..20: note = chemically synthesized
  source 1..20: mol_type = other DNA
ccaaaaggcagcctggtaga

SEQ ID NO: 437 - DNA, 20 bp, synthetic construct
  misc_feature 1..20: note = chemically synthesized
  source 1..20: mol_type = other DNA
caaaaggcagcctggtagac

SEQ ID NO: 438 - DNA, 20 bp, synthetic construct
  misc_feature 1..20: note = chemically synthesized
  source 1..20: mol_type = other DNA
aaaaggcagcctggtagaca

SEQ ID NO: 439 - DNA, 20 bp, synthetic construct
  misc_feature 1..20: note = chemically synthesized
  source 1..20: mol_type = other DNA
ggcagcctggtagacagggc

SEQ ID NO: 440 - DNA, 20 bp, synthetic construct
  misc_feature 1..20: note = chemically synthesized
  source 1..20: mol_type = other DNA
gcagcctggtagacagggct

SEQ ID NO: 441 - DNA, 20 bp, synthetic construct
  misc_feature 1..20: note = chemically synthesized
  source 1..20: mol_type = other DNA
cagcctggtagacagggctg

SEQ ID NO: 442 - DNA, 20 bp, synthetic construct
  misc_feature 1..20: note = chemically synthesized
  source 1..20: mol_type = other DNA
cctggtagacagggctgggg

SEQ ID NO: 443 - DNA, 20 bp, synthetic construct
  misc_feature 1..20: note = chemically synthesized
  source 1..20: mol_type = other DNA
agggctggggtggcctctcg

SEQ ID NO: 444 - DNA, 20 bp, synthetic construct
  misc_feature 1..20: note = chemically synthesized
  source 1..20: mol_type = other DNA
gggctggggtggcctctcgt

SEQ ID NO: 445 - DNA, 20 bp, synthetic construct
  misc_feature 1..20: note = chemically synthesized
  source 1..20: mol_type = other DNA
ggctggggtggcctctcgtg

SEQ ID NO: 446 - DNA, 20 bp, synthetic construct
  misc_feature 1..20: note = chemically synthesized
  source 1..20: mol_type = other DNA
gggtggcctctcgtggggtc

SEQ ID NO: 447 - DNA, 20 bp, synthetic construct
  misc_feature 1..20: note = chemically synthesized
  source 1..20: mol_type = other DNA
ggtggcctctcgtggggtcc

SEQ ID NO: 448 - DNA, 20 bp, synthetic construct
  misc_feature 1..20: note = chemically synthesized
  source 1..20: mol_type = other DNA
cctctcgtggggtccaggcc

SEQ ID NO: 449 - DNA, 20 bp, synthetic construct
  misc_feature 1..20: note = chemically synthesized
  source 1..20: mol_type = other DNA
ctcgtggggtccaggccaag

SEQ ID NO: 450 - DNA, 20 bp, synthetic construct
  misc_feature 1..20: note = chemically synthesized
  source 1..20: mol_type = other DNA
tcgtggggtccaggccaagt

SEQ ID NO: 451 - DNA, 20 bp, synthetic construct
  misc_feature 1..20: note = chemically synthesized
  source 1..20: mol_type = other DNA
tggggtccaggccaagtagg

SEQ ID NO: 452 - DNA, 20 bp, synthetic construct
  misc_feature 1..20: note = chemically synthesized
  source 1..20: mol_type = other DNA
tccaggccaagtaggtggcc

SEQ ID NO: 453 - DNA, 20 bp, synthetic construct
  misc_feature 1..20: note = chemically synthesized
  source 1..20: mol_type = other DNA
ccaggccaagtaggtggcct

SEQ ID NO: 454 - DNA, 20 bp, synthetic construct
  misc_feature 1..20: note = chemically synthesized
  source 1..20: mol_type = other DNA
caggccaagtaggtggcctg

SEQ ID NO: 455 - DNA, 20 bp, synthetic construct
  misc_feature 1..20: note = chemically synthesized
  source 1..20: mol_type = other DNA
agtaggtggcctggggcctc

SEQ ID NO: 456 - DNA, 20 bp, synthetic construct
  misc_feature 1..20: note = chemically synthesized
  source 1..20: mol_type = other DNA
gtaggtggcctggggcctct

SEQ ID NO: 457 - DNA, 20 bp, synthetic construct
  misc_feature 1..20: note = chemically synthesized
  source 1..20: mol_type = other DNA
taggtggcctggggcctctg

SEQ ID NO: 458 - DNA, 20 bp, synthetic construct
  misc_feature 1..20: note = chemically synthesized
  source 1..20: mol_type = other DNA
aggtggcctggggcctctgg

SEQ ID NO: 459 - DNA, 20 bp, synthetic construct
  misc_feature 1..20: note = chemically synthesized
  source 1..20: mol_type = other DNA
cctggggcctctgggggatg

SEQ ID NO: 460 - DNA, 20 bp, synthetic construct
  misc_feature 1..20: note = chemically synthesized
  source 1..20: mol_type = other DNA
ctggggcctctgggggatgc

SEQ ID NO: 461 - DNA, 20 bp, synthetic construct
  misc_feature 1..20: note = chemically synthesized
  source 1..20: mol_type = other DNA
tggggcctctgggggatgca

SEQ ID NO: 462 - DNA, 20 bp, synthetic construct
  misc_feature 1..20: note = chemically synthesized
  source 1..20: mol_type = other DNA
ggggcctctgggggatgcag

SEQ ID NO: 463 - DNA, 20 bp, synthetic construct
  misc_feature 1..20: note = chemically synthesized
  source 1..20: mol_type = other DNA
gcctctgggggatgcagggg

SEQ ID NO: 464 - DNA, 20 bp, synthetic construct
  misc_feature 1..20: note = chemically synthesized
  source 1..20: mol_type = other DNA
cctctgggggatgcagggga

SEQ ID NO: 465 - DNA, 20 bp, synthetic construct
  misc_feature 1..20: note = chemically synthesized
  source 1..20: mol_type = other DNA
ctctgggggatgcaggggaa

SEQ ID NO: 466 - DNA, 20 bp, synthetic construct
  misc_feature 1..20: note = chemically synthesized
  source 1..20: mol_type = other DNA
tctgggggatgcaggggaag

SEQ ID NO: 467 - DNA, 20 bp, synthetic construct
  misc_feature 1..20: note = chemically synthesized
  source 1..20: mol_type = other DNA
ctgggggatgcaggggaagg

SEQ ID NO: 468 - DNA, 20 bp, synthetic construct
  misc_feature 1..20: note = chemically synthesized
  source 1..20: mol_type = other DNA
gatgcaggggaagggggatg

SEQ ID NO: 469 - DNA, 20 bp, synthetic construct
  misc_feature 1..20: note = chemically synthesized
  source 1..20: mol_type = other DNA
atgcaggggaagggggatgc

SEQ ID NO: 470 - DNA, 20 bp, synthetic construct
  misc_feature 1..20: note = chemically synthesized
  source 1..20: mol_type = other DNA
tgcaggggaagggggatgca

SEQ ID NO: 471 - DNA, 20 bp, synthetic construct
  misc_feature 1..20: note = chemically synthesized
  source 1..20: mol_type = other DNA
gcaggggaagggggatgcag

SEQ ID NO: 472 - DNA, 20 bp, synthetic construct
  misc_feature 1..20: note = chemically synthesized
  source 1..20: mol_type = other DNA
ggaagggggatgcaggggaa

SEQ ID NO: 473 - DNA, 20 bp, synthetic construct
  misc_feature 1..20: note = chemically synthesized
  source 1..20: mol_type = other DNA
gaagggggatgcaggggaac

SEQ ID NO: 474 - DNA, 20 bp, synthetic construct
  misc_feature 1..20: note = chemically synthesized
  source 1..20: mol_type = other DNA
aagggggatgcaggggaacg

SEQ ID NO: 475 - DNA, 20 bp, synthetic construct
  misc_feature 1..20: note = chemically synthesized
  source 1..20: mol_type = other DNA
gatgcaggggaacggggatg

SEQ ID NO: 476 - DNA, 20 bp, synthetic construct
  misc_feature 1..20: note = chemically synthesized
  source 1..20: mol_type = other DNA
atgcaggggaacggggatgc

SEQ ID NO: 477 - DNA, 20 bp, synthetic construct
  misc_feature 1..20: note = chemically synthesized
  source 1..20: mol_type = other DNA
tgcaggggaacggggatgca

SEQ ID NO: 478 - DNA, 20 bp, synthetic construct
  misc_feature 1..20: note = chemically synthesized
  source 1..20: mol_type = other DNA
gcaggggaacggggatgcag

SEQ ID NO: 479 - DNA, 20 bp, synthetic construct
  misc_feature 1..20: note = chemically synthesized
  source 1..20: mol_type = other DNA
ggaacggggatgcaggggaa

SEQ ID NO: 480 - DNA, 20 bp, synthetic construct
  misc_feature 1..20: note = chemically synthesized
  source 1..20: mol_type = other DNA
gaacggggatgcaggggaac

SEQ ID NO: 481 - DNA, 20 bp, synthetic construct
  misc_feature 1..20: note = chemically synthesized
  source 1..20: mol_type = other DNA
aacggggatgcaggggaacg

SEQ ID NO: 482 - DNA, 20 bp, synthetic construct
  misc_feature 1..20: note = chemically synthesized
  source 1..20: mol_type = other DNA
ggatgcaggggaacggggct

SEQ ID NO: 483 - DNA, 20 bp, synthetic construct
  misc_feature 1..20: note = chemically synthesized
  source 1..20: mol_type = other DNA
ggggaacggggctcagtctg

SEQ ID NO: 484 - DNA, 20 bp, synthetic construct
  misc_feature 1..20: note = chemically synthesized
  source 1..20: mol_type = other DNA
ggaacggggctcagtctgaa

SEQ ID NO: 485 - DNA, 20 bp, synthetic construct
  misc_feature 1..20: note = chemically synthesized
  source 1..20: mol_type = other DNA
acggggctcagtctgaagag

SEQ ID NO: 486 - DNA, 20 bp, synthetic construct
  misc_feature 1..20: note = chemically synthesized
  source 1..20: mol_type = other DNA
ggggctcagtctgaagagca

SEQ ID NO: 487 - DNA, 20 bp, synthetic construct
  misc_feature 1..20: note = chemically synthesized
  source 1..20: mol_type = other DNA
ctcagtctgaagagcagagc

SEQ ID NO: 488 - DNA, 20 bp, synthetic construct
  misc_feature 1..20: note = chemically synthesized
  source 1..20: mol_type = other DNA
tcagtctgaagagcagagcc

SEQ ID NO: 489 - DNA, 20 bp, synthetic construct
  misc_feature 1..20: note = chemically synthesized
  source 1..20: mol_type = other DNA
agcagagccaggaacccctg

SEQ ID NO: 490 - DNA, 20 bp, synthetic construct
  misc_feature 1..20: note = chemically synthesized
  source 1..20: mol_type = other DNA
gcagagccaggaacccctgt

SEQ ID NO: 491 - DNA, 20 bp, synthetic construct
  misc_feature 1..20: note = chemically synthesized
  source 1..20: mol_type = other DNA
cagagccaggaacccctgta

SEQ ID NO: 492 - DNA, 20 bp, synthetic construct
  misc_feature 1..20: note = chemically synthesized
  source 1..20: mol_type = other DNA
agccaggaacccctgtaggg

SEQ ID NO: 493 - DNA, 20 bp, synthetic construct
  misc_feature 1..20: note = chemically synthesized
  source 1..20: mol_type = other DNA
gccaggaacccctgtaggga

SEQ ID NO: 494 - DNA, 20 bp, synthetic construct
  misc_feature 1..20: note = chemically synthesized
  source 1..20: mol_type = other DNA
ccaggaacccctgtagggaa

SEQ ID NO: 495 - DNA, 20 bp, synthetic construct
  misc_feature 1..20: note = chemically synthesized
  source 1..20: mol_type = other DNA
caggaacccctgtagggaag

SEQ ID NO: 496 - DNA, 20 bp, synthetic construct
  misc_feature 1..20: note = chemically synthesized
  source 1..20: mol_type = other DNA
gaacccctgtagggaagggg

SEQ ID NO: 497 - DNA, 20 bp, synthetic construct
  misc_feature 1..20: note = chemically synthesized
  source 1..20: mol_type = other DNA
aacccctgtagggaaggggc

SEQ ID NO: 498 - DNA, 20 bp, synthetic construct
  misc_feature 1..20: note = chemically synthesized
  source 1..20: mol_type = other DNA
cccctgtagggaaggggcag

SEQ ID NO: 499 - DNA, 20 bp, synthetic construct
  misc_feature 1..20: note = chemically synthesized
  source 1..20: mol_type = other DNA
cctgtagggaaggggcagga

SEQ ID NO: 500 - DNA, 20 bp, synthetic construct
  misc_feature 1..20: note = chemically synthesized
  source 1..20: mol_type = other DNA
tagggaaggggcaggagagc

SEQ ID NO: 501 - DNA, 20 bp, synthetic construct
  misc_feature 1..20: note = chemically synthesized
  source 1..20: mol_type = other DNA
agggaaggggcaggagagcc

SEQ ID NO: 502 - DNA, 20 bp, synthetic construct
  misc_feature 1..20: note = chemically synthesized
  source 1..20: mol_type = other DNA
gggaaggggcaggagagcca

SEQ ID NO: 503 - DNA, 20 bp, synthetic construct
  misc_feature 1..20: note = chemically synthesized
  source 1..20: mol_type = other DNA
ggaaggggcaggagagccag

SEQ ID NO: 504 - DNA, 20 bp, synthetic construct
  misc_feature 1..20: note = chemically synthesized
  source 1..20: mol_type = other DNA
ggcaggagagccaggggcat

SEQ ID NO: 505 - DNA, 20 bp, synthetic construct
  misc_feature 1..20: note = chemically synthesized
  source 1..20: mol_type = other DNA
ggagagccaggggcatgaga

SEQ ID NO: 506 - DNA, 20 bp, synthetic construct
  misc_feature 1..20: note = chemically synthesized
  source 1..20: mol_type = other DNA
gagccaggggcatgagatgg

SEQ ID NO: 507 - DNA, 20 bp, synthetic construct
  misc_feature 1..20: note = chemically synthesized
  source 1..20: mol_type = other DNA
aggggcatgagatggtggac

SEQ ID NO: 508 - DNA, 20 bp, synthetic construct
  misc_feature 1..20: note = chemically synthesized
  source 1..20: mol_type = other DNA
ggggcatgagatggtggacg

SEQ ID NO: 509 - DNA, 20 bp, synthetic construct
  misc_feature 1..20: note = chemically synthesized
  source 1..20: mol_type = other DNA
gcatgagatggtggacgagg

SEQ ID NO: 510 - DNA, 20 bp, synthetic construct
  misc_feature 1..20: note = chemically synthesized
  source 1..20: mol_type = other DNA
catgagatggtggacgagga

SEQ ID NO: 511 - DNA, 20 bp, synthetic construct
  misc_feature 1..20: note = chemically synthesized
  source 1..20: mol_type = other DNA
atgagatggtggacgaggaa

SEQ ID NO: 512 - DNA, 20 bp, synthetic construct
  misc_feature 1..20: note = chemically synthesized
  source 1..20: mol_type = other DNA
tgagatggtggacgaggaag

SEQ ID NO: 513 - DNA, 20 bp, synthetic construct
  misc_feature 1..20: note = chemically synthesized
  source 1..20: mol_type = other DNA
gagatggtggacgaggaagg

SEQ ID NO: 514 - DNA, 20 bp, synthetic construct
  misc_feature 1..20: note = chemically synthesized
  source 1..20: mol_type = other DNA
tggtggacgaggaaggggga

SEQ ID NO: 515 - DNA, 20 bp, synthetic construct
  misc_feature 1..20: note = chemically synthesized
  source 1..20: mol_type = other DNA
ggtggacgaggaagggggac

SEQ ID NO: 516 - DNA, 20 bp, synthetic construct
  misc_feature 1..20: note = chemically synthesized
  source 1..20: mol_type = other DNA
gtggacgaggaagggggaca

SEQ ID NO: 517 - DNA, 20 bp, synthetic construct
  misc_feature 1..20: note = chemically synthesized
  source 1..20: mol_type = other DNA
gacgaggaagggggacaggg

SEQ ID NO: 518 - DNA, 20 bp, synthetic construct
  misc_feature 1..20: note = chemically synthesized
  source 1..20: mol_type = other DNA
gaagggggacagggaagcct

SEQ ID NO: 519 - DNA, 20 bp, synthetic construct
  misc_feature 1..20: note = chemically synthesized
  source 1..20: mol_type = other DNA
ggaagcctgagcgcctctcc

SEQ ID NO: 520 - DNA, 20 bp, synthetic construct
  misc_feature 1..20: note = chemically synthesized
  source 1..20: mol_type = other DNA
gaagcctgagcgcctctcct

SEQ ID NO: 521 - DNA, 20 bp, synthetic construct
  misc_feature 1..20: note = chemically synthesized
  source 1..20: mol_type = other DNA
gcgcctctcctgggcttgcc

SEQ ID NO: 522 - DNA, 20 bp, synthetic construct
  misc_feature 1..20: note = chemically synthesized
  source 1..20: mol_type = other DNA
cgcctctcctgggcttgcca

SEQ ID NO: 523 - DNA, 20 bp, synthetic construct
  misc_feature 1..20: note = chemically synthesized
  source 1..20: mol_type = other DNA
gcttgccaaggactcaaacc

SEQ ID NO: 524 - DNA, 20 bp, synthetic construct
  misc_feature 1..20: note = chemically synthesized
  source 1..20: mol_type = other DNA
tgccaaggactcaaacccag

SEQ ID NO: 525 - DNA, 20 bp, synthetic construct
  misc_feature 1..20: note = chemically synthesized
  source 1..20: mol_type = other DNA
aggactcaaacccagaagcc

SEQ ID NO: 526 - DNA, 20 bp, synthetic construct
  misc_feature 1..20: note = chemically synthesized
  source 1..20: mol_type = other DNA
gactcaaacccagaagccca

SEQ ID NO: 527 - DNA, 20 bp, synthetic construct
  misc_feature 1..20: note = chemically synthesized
  source 1..20: mol_type = other DNA
tcaaacccagaagcccagag

SEQ ID NO: 528 - DNA, 20 bp, synthetic construct
  misc_feature 1..20: note = chemically synthesized
  source 1..20: mol_type = other DNA
caaacccagaagcccagagc

SEQ ID NO: 529 - DNA, 20 bp, synthetic construct
  misc_feature 1..20: note = chemically synthesized
  source 1..20: mol_type = other DNA
aaacccagaagcccagagca

SEQ ID NO: 530 - DNA, 20 bp, synthetic construct
  misc_feature 1..20: note = chemically synthesized
  source 1..20: mol_type = other DNA
agaagcccagagcagggcct

SEQ ID NO: 531 - DNA, 20 bp, synthetic construct
  misc_feature 1..20: note = chemically synthesized
  source 1..20: mol_type = other DNA
gaagcccagagcagggcctt

SEQ ID NO: 532 - DNA, 20 bp, synthetic construct
  misc_feature 1..20: note = chemically synthesized
  source 1..20: mol_type = other DNA
aagcccagagcagggcctta

SEQ ID NO: 533 - DNA, 20 bp, synthetic construct
  misc_feature 1..20: note = chemically synthesized
  source 1..20: mol_type = other DNA
cccagagcagggccttaggg

SEQ ID NO: 534 - DNA, 20 bp, synthetic construct
  misc_feature 1..20: note = chemically synthesized
  source 1..20: mol_type = other DNA
agagcagggccttagggaag

SEQ ID NO: 535 - DNA, 20 bp, synthetic construct
  misc_feature 1..20: note = chemically synthesized
  source 1..20: mol_type = other DNA
gagcagggccttagggaagc

SEQ ID NO: 536 - DNA, 20 bp, synthetic construct
  misc_feature 1..20: note = chemically synthesized
  source 1..20: mol_type = other DNA
agggaagcgggaccctgctc

SEQ ID NO: 537 - DNA, 20 bp, synthetic construct
  misc_feature 1..20: note = chemically synthesized
  source 1..20: mol_type = other DNA
gggaagcgggaccctgctct

SEQ ID NO: 538 - DNA, 20 bp, synthetic construct
  misc_feature 1..20: note = chemically synthesized
  source 1..20: mol_type = other DNA
aagcgggaccctgctctggg

SEQ ID NO: 539 - DNA, 20 bp, synthetic construct
  misc_feature 1..20: note = chemically synthesized
  source 1..20: mol_type = other DNA
gcgggaccctgctctgggcg

SEQ ID NO: 540 - DNA, 20 bp, synthetic construct
  misc_feature 1..20: note = chemically synthesized
  source 1..20: mol_type = other DNA
cgggaccctgctctgggcgg

SEQ ID NO: 541 - DNA, 20 bp, synthetic construct
  misc_feature 1..20: note = chemically synthesized
  source 1..20: mol_type = other DNA
ctgggcggaggaatatgtcc

SEQ ID NO: 542 - DNA, 20 bp, synthetic construct
  misc_feature 1..20: note = chemically synthesized
  source 1..20: mol_type = other DNA
gcggaggaatatgtcccaga

SEQ ID NO: 543 - DNA, 20 bp, synthetic construct
  misc_feature 1..20: note = chemically synthesized
  source 1..20: mol_type = other DNA
gaatatgtcccagatagcac

SEQ ID NO: 544 - DNA, 20 bp, synthetic construct
  misc_feature 1..20: note = chemically synthesized
  source 1..20: mol_type = other DNA
aatatgtcccagatagcact

SEQ ID NO: 545 - DNA, 20 bp, synthetic construct
  misc_feature 1..20: note = chemically synthesized
  source 1..20: mol_type = other DNA
atatgtcccagatagcactg

SEQ ID NO: 546 - DNA, 20 bp, synthetic construct
  misc_feature 1..20: note = chemically synthesized
  source 1..20: mol_type = other DNA
gatagcactggggactcttt

SEQ ID NO: 547 - DNA, 20 bp, synthetic construct
  misc_feature 1..20: note = chemically synthesized
  source 1..20: mol_type = other DNA
atagcactggggactcttta

SEQ ID NO: 548 - DNA, 20 bp, synthetic construct
  misc_feature 1..20: note = chemically synthesized
  source 1..20: mol_type = other DNA
cactggggactctttaagga

SEQ ID NO: 549 - DNA, 20 bp, synthetic construct
  misc_feature 1..20: note = chemically synthesized
  source 1..20: mol_type = other DNA
tggggactctttaaggaaag

SEQ ID NO: 550 - DNA, 20 bp, synthetic construct
  misc_feature 1..20: note = chemically synthesized
  source 1..20: mol_type = other DNA
ggggactctttaaggaaaga

SEQ ID NO: 551 - DNA, 20 bp, synthetic construct
  misc_feature 1..20: note = chemically synthesized
  source 1..20: mol_type = other DNA
actctttaaggaaagaagga

SEQ ID NO: 552 - DNA, 20 bp, synthetic construct
  misc_feature 1..20: note = chemically synthesized
  source 1..20: mol_type = other DNA
tctttaaggaaagaaggatg

SEQ ID NO: 553 - DNA, 20 bp, synthetic construct
  misc_feature 1..20: note = chemically synthesized
  source 1..20: mol_type = other DNA
taaggaaagaaggatggaga

SEQ ID NO: 554 - DNA, 20 bp, synthetic construct
  misc_feature 1..20: note = chemically synthesized
  source 1..20: mol_type = other DNA
aggaaagaaggatggagaaa

SEQ ID NO: 555 - DNA, 20 bp, synthetic construct
  misc_feature 1..20: note = chemically synthesized
  source 1..20: mol_type = other DNA
aagaaggatggagaaagaga

SEQ ID NO: 556 - DNA, 20 bp, synthetic construct
  misc_feature 1..20: note = chemically synthesized
  source 1..20: mol_type = other DNA
agaaggatggagaaagagaa

SEQ ID NO: 557 - DNA, 20 bp, synthetic construct
  misc_feature 1..20: note = chemically synthesized
  source 1..20: mol_type = other DNA
gaaggatggagaaagagaaa

SEQ ID NO: 558 - DNA, 20 bp, synthetic construct
  misc_feature 1..20: note = chemically synthesized
  source 1..20: mol_type = other DNA
aggatggagaaagagaaagg

SEQ ID NO: 559 - DNA, 20 bp, synthetic construct
  misc_feature 1..20: note = chemically synthesized
  source 1..20: mol_type = other DNA
atggagaaagagaaagggag

SEQ ID NO: 560 - DNA, 20 bp, synthetic construct
  misc_feature 1..20: note = chemically synthesized
  source 1..20: mol_type = other DNA
ggagaaagagaaagggagta

SEQ ID NO: 561 - DNA, 20 bp, synthetic construct
  misc_feature 1..20: note = chemically synthesized
  source 1..20: mol_type = other DNA
gagaaagagaaagggagtag

SEQ ID NO: 562 - DNA, 20 bp, synthetic construct
  misc_feature 1..20: note = chemically synthesized
  source 1..20: mol_type = other DNA
aaagagaaagggagtagagg

SEQ ID NO: 563 - DNA, 20 bp, synthetic construct
  misc_feature 1..20: note = chemically synthesized
  source 1..20: mol_type = other DNA
gagtagaggcggccacgacc

SEQ ID NO: 564 - DNA, 20 bp, synthetic construct
  misc_feature 1..20: note = chemically synthesized
  source 1..20: mol_type = other DNA
gccacgacctggtgaacacc

SEQ ID NO: 565 - DNA, 20 bp, synthetic construct
  misc_feature 1..20: note = chemically synthesized
  source 1..20: mol_type = other DNA
ccacgacctggtgaacacct

SEQ ID NO: 566 - DNA, 20 bp, synthetic construct
  misc_feature 1..20: note = chemically synthesized
  source 1..20: mol_type = other DNA
taggacgcaccattctcaca

SEQ ID NO: 567 - DNA, 20 bp, synthetic construct
  misc_feature 1..20: note = chemically synthesized
  source 1..20: mol_type = other DNA
aggacgcaccattctcacaa

SEQ ID NO: 568 - DNA, 20 bp, synthetic construct
  misc_feature 1..20: note = chemically synthesized
  source 1..20: mol_type = other DNA
ggacgcaccattctcacaaa

SEQ ID NO: 569 - DNA, 20 bp, synthetic construct
  misc_feature 1..20: note = chemically synthesized
  source 1..20: mol_type = other DNA
acgcaccattctcacaaagg

SEQ ID NO: 570 - DNA, 20 bp, synthetic construct
  misc_feature 1..20: note = chemically synthesized
  source 1..20: mol_type = other DNA
cacaaagggagttttccaca

SEQ ID NO: 571 - DNA, 20 bp, synthetic construct
  misc_feature 1..20: note = chemically synthesized
  source 1..20: mol_type = other DNA
ggacacccccctcctcacca

SEQ ID NO: 572 - DNA, 20 bp, synthetic construct
  misc_feature 1..20: note = chemically synthesized
  source 1..20: mol_type = other DNA
cctcctcaccacagccctgc

SEQ ID NO: 573 - DNA, 20 bp, synthetic construct
  misc_feature 1..20: note = chemically synthesized
  source 1..20: mol_type = other DNA
ctcctcaccacagccctgcc

SEQ ID NO: 574 - DNA, 20 bp, synthetic construct
  misc_feature 1..20: note = chemically synthesized
  source 1..20: mol_type = other DNA
tcaccacagccctgccagga

SEQ ID NO: 575 - DNA, 20 bp, synthetic construct
  misc_feature 1..20: note = chemically synthesized
  source 1..20: mol_type = other DNA
caccacagccctgccaggac

SEQ ID NO: 576 - DNA, 20 bp, synthetic construct
  misc_feature 1..20: note = chemically synthesized
  source 1..20: mol_type = other DNA
accacagccctgccaggacg

SEQ ID NO: 577 - DNA, 20 bp, synthetic construct
  misc_feature 1..20: note = chemically synthesized
  source 1..20: mol_type = other DNA
cagccctgccaggacggggc

SEQ ID NO: 578 - DNA, 20 bp, synthetic construct
  misc_feature 1..20: note = chemically synthesized
  source 1..20: mol_type = other DNA
gccaggacggggctggctac

SEQ ID NO: 579 - DNA, 20 bp, synthetic construct
  misc_feature 1..20: note = chemically synthesized
  source 1..20: mol_type = other DNA
tggctactggccttatctca

SEQ ID NO: 580 - DNA, 20 bp, synthetic construct
  misc_feature 1..20: note = chemically synthesized
  source 1..20: mol_type = other DNA
ggctactggccttatctcac

SEQ ID NO: 581 - DNA, 20 bp, synthetic construct
  misc_feature 1..20: note = chemically synthesized
  source 1..20: mol_type = other DNA
tcacaggtaaaactgacgca

SEQ ID NO: 582 - DNA, 20 bp, synthetic construct
  misc_feature 1..20: note = chemically synthesized
  source 1..20: mol_type = other DNA
acaggtaaaactgacgcacg

SEQ ID NO: 583 - DNA, 20 bp, synthetic construct
  misc_feature 1..20: note = chemically synthesized
  source 1..20: mol_type = other DNA
caggtaaaactgacgcacgg

SEQ ID NO: 584 - DNA, 20 bp, synthetic construct
  misc_feature 1..20: note = chemically synthesized
  source 1..20: mol_type = other DNA
cacggaggaacaatataaat

SEQ ID NO: 585 - DNA, 20 bp, synthetic construct
  misc_feature 1..20: note = chemically synthesized
  source 1..20: mol_type = other DNA
acggaggaacaatataaatt

SEQ ID NO: 586 - DNA, 20 bp, synthetic construct
  misc_feature 1..20: note = chemically synthesized
  source 1..20: mol_type = other DNA
cggaggaacaatataaattg

SEQ ID NO: 587 - DNA, 20 bp, synthetic construct
  misc_feature 1..20: note = chemically synthesized
  source 1..20: mol_type = other DNA
gaacaatataaattggggac

SEQ ID NO: 588 - DNA, 20 bp, synthetic construct
  misc_feature 1..20: note = chemically synthesized
  source 1..20: mol_type = other DNA
aatataaattggggactaga

SEQ ID NO: 589 - DNA, 20 bp, synthetic construct
  misc_feature 1..20: note = chemically synthesized
  source 1..20: mol_type = other DNA
atataaattggggactagaa

SEQ ID NO: 590 - DNA, 20 bp, synthetic construct
  misc_feature 1..20: note = chemically synthesized
  source 1..20: mol_type = other DNA
aattggggactagaaaggtg

SEQ ID NO: 591 - DNA, 20 bp, synthetic construct
  misc_feature 1..20: note = chemically synthesized
  source 1..20: mol_type = other DNA
ttggggactagaaaggtgaa

SEQ ID NO: 592 - DNA, 20 bp, synthetic construct
  misc_feature 1..20: note = chemically synthesized
  source 1..20: mol_type = other DNA
actagaaaggtgaagagcca

SEQ ID NO: 593 - DNA, 20 bp, synthetic construct
  misc_feature 1..20: note = chemically synthesized
  source 1..20: mol_type = other DNA
gaaaggtgaagagccaaagt

SEQ ID NO: 594 - DNA, 20 bp, synthetic construct
  misc_feature 1..20: note = chemically synthesized
  source 1..20: mol_type = other DNA
gaagagccaaagttagaact

SEQ ID NO: 595 - DNA, 20 bp, synthetic construct
  misc_feature 1..20: note = chemically synthesized
  source 1..20: mol_type = other DNA
aagagccaaagttagaactc

SEQ ID NO: 596 - DNA, 20 bp, synthetic construct
  misc_feature 1..20: note = chemically synthesized
  source 1..20: mol_type = other DNA
ttccaaactgcttctcctct

SEQ ID NO: 597 - DNA, 20 bp, synthetic construct
  misc_feature 1..20: note = chemically synthesized
  source 1..20: mol_type = other DNA
tccaaactgcttctcctctt

SEQ ID NO: 598 - DNA, 20 bp, synthetic construct
  misc_feature 1..20: note = chemically synthesized
  source 1..20: mol_type = other DNA
aaactgcttctcctcttggg

SEQ ID NO: 599 - DNA, 20 bp, synthetic construct
  misc_feature 1..20: note = chemically synthesized
  source 1..20: mol_type = other DNA
cttctcctcttgggaagtgt

SEQ ID NO: 600 - DNA, 20 bp, synthetic construct
  misc_feature 1..20: note = chemically synthesized
  source 1..20: mol_type = other DNA
ttctcctcttgggaagtgta

SEQ ID NO: 601 - DNA, 20 bp, synthetic construct
  misc_feature 1..20: note = chemically synthesized
  source 1..20: mol_type = other DNA
tcctcttgggaagtgtaagg

SEQ ID NO: 602 - DNA, 20 bp, synthetic construct
  misc_feature 1..20: note = chemically synthesized
  source 1..20: mol_type = other DNA
tgggaagtgtaaggaagctg

SEQ ID NO: 603 - DNA, 20 bp, synthetic construct
  misc_feature 1..20: note = chemically synthesized
  source 1..20: mol_type = other DNA
gtgtaaggaagctgcagcac

SEQ ID NO: 604 - DNA, 20 bp, synthetic construct
  misc_feature 1..20: note = chemically synthesized
  source 1..20: mol_type = other DNA
tgtaaggaagctgcagcacc

SEQ ID NO: 605 - DNA, 20 bp, synthetic construct
  misc_feature 1..20: note = chemically synthesized
  source 1..20: mol_type = other DNA
ggaagctgcagcaccaggat

SEQ ID NO: 606 - DNA, 20 bp, synthetic construct
  misc_feature 1..20: note = chemically synthesized
  source 1..20: mol_type = other DNA
ccaggatcagtgaaacgcac

SEQ ID NO: 607 - DNA, 20 bp, synthetic construct
  misc_feature 1..20: note = chemically synthesized
  source 1..20: mol_type = other DNA
gatcagtgaaacgcaccaga

SEQ ID NO: 608 - DNA, 20 bp, synthetic construct
  misc_feature 1..20: note = chemically synthesized
  source 1..20: mol_type = other DNA
aacgcaccagacggccgcgt

SEQ ID NO: 609 - DNA, 20 bp, synthetic construct
  misc_feature 1..20: note = chemically synthesized
  source 1..20: mol_type = other DNA
cgcaccagacggccgcgtca

SEQ ID NO: 610 - DNA, 20 bp, synthetic construct
  misc_feature 1..20: note = chemically synthesized
  source 1..20: mol_type = other DNA
accagacggccgcgtcagag

SEQ ID NO: 611 - DNA, 20 bp, synthetic construct
  misc_feature 1..20: note = chemically synthesized
  source 1..20: mol_type = other DNA
acggccgcgtcagagcagct

SEQ ID NO: 612 - DNA, 20 bp, synthetic construct
  misc_feature 1..20: note = chemically synthesized
  source 1..20: mol_type = other DNA
cggccgcgtcagagcagctc

SEQ ID NO: 613 - DNA, 20 bp, synthetic construct
  misc_feature 1..20: note = chemically synthesized
  source 1..20: mol_type = other DNA
cgtcagagcagctcaggttc

SEQ ID NO: 614 - DNA, 20 bp, synthetic construct
  misc_feature 1..20: note = chemically synthesized
  source 1..20: mol_type = other DNA
gtcagagcagctcaggttct

SEQ ID NO: 615 - DNA, 20 bp, synthetic construct
  misc_feature 1..20: note = chemically synthesized
  source 1..20: mol_type = other DNA
cagagcagctcaggttctgg

SEQ ID NO: 616 - DNA, 20 bp, synthetic construct
  misc_feature 1..20: note = chemically synthesized
  source 1..20: mol_type = other DNA
gagcagctcaggttctggga

SEQ ID NO: 617 - DNA, 20 bp, synthetic construct
  misc_feature 1..20: note = chemically synthesized
  source 1..20: mol_type = other DNA
agcagctcaggttctgggag

SEQ ID NO: 618 - DNA, 20 bp, synthetic construct
  misc_feature 1..20: note = chemically synthesized
  source 1..20: mol_type = other DNA
gcagctcaggttctgggaga

SEQ ID NO: 619 - DNA, 20 bp, synthetic construct
  misc_feature 1..20: note = chemically synthesized
  source 1..20: mol_type = other DNA
gctcaggttctgggagaggg

SEQ ID NO: 620 - DNA, 20 bp, synthetic construct
  misc_feature 1..20: note = chemically synthesized
  source 1..20: mol_type = other DNA
ggttctgggagagggtagcg

SEQ ID NO: 621 - DNA, 20 bp, synthetic construct
  misc_feature 1..20: note = chemically synthesized
  source 1..20: mol_type = other DNA
gttctgggagagggtagcgc

SEQ ID NO: 622 - DNA, 20 bp, synthetic construct
  misc_feature 1..20: note = chemically synthesized
  source 1..20: mol_type = other DNA
ttctgggagagggtagcgca

SEQ ID NO: 623 - DNA, 20 bp, synthetic construct
  misc_feature 1..20: note = chemically synthesized
  source 1..20: mol_type = other DNA
tgggagagggtagcgcaggg

SEQ ID NO: 624 - DNA, 20 bp, synthetic construct
  misc_feature 1..20: note = chemically synthesized
  source 1..20: mol_type = other DNA
ggtagcgcagggtggccact

SEQ ID NO: 625 - DNA, 20 bp, synthetic construct
  misc_feature 1..20: note = chemically synthesized
  source 1..20: mol_type = other DNA
gcagggtggccactgagaac

SEQ ID NO: 626 - DNA, 20 bp, synthetic construct
  misc_feature 1..20: note = chemically synthesized
  source 1..20: mol_type = other DNA
cagggtggccactgagaacc

SEQ ID NO: 627 - DNA, 20 bp, synthetic construct
  misc_feature 1..20: note = chemically synthesized
  source 1..20: mol_type = other DNA
ggtggccactgagaaccggg

SEQ ID NO: 628 - DNA, 20 bp, synthetic construct
  misc_feature 1..20: note = chemically synthesized
  source 1..20: mol_type = other DNA
gtggccactgagaaccgggc

SEQ ID NO: 629 - DNA, 20 bp, synthetic construct
  misc_feature 1..20: note = chemically synthesized
  source 1..20: mol_type = other DNA
cttccctcccaccccctgcc

SEQ ID NO: 630 - DNA, 20 bp, synthetic construct
  misc_feature 1..20: note = chemically synthesized
  source 1..20: mol_type = other DNA
ccctgccaagctctccctcc

SEQ ID NO: 631 - DNA, 20 bp, synthetic construct
  misc_feature 1..20: note = chemically synthesized
  source 1..20: mol_type = other DNA
cctgccaagctctccctccc

SEQ ID NO: 632 - DNA, 20 bp, synthetic construct
  misc_feature 1..20: note = chemically synthesized
  source 1..20: mol_type = other DNA
ctccctcccaggatcctctc

SEQ ID NO: 633 - DNA, 20 bp, synthetic construct
  misc_feature 1..20: note = chemically synthesized
  source 1..20: mol_type = other DNA
atcctctctggctccatcgt

SEQ ID NO: 634 - DNA, 20 bp, synthetic construct
  misc_feature 1..20: note = chemically synthesized
  source 1..20: mol_type = other DNA
gctccatcgtaagcaaacct

SEQ ID NO: 635 - DNA, 20 bp, synthetic construct
  misc_feature 1..20: note = chemically synthesized
  source 1..20: mol_type = other DNA
tccatcgtaagcaaacctta

SEQ ID NO: 636 - DNA, 20 bp, synthetic construct
  misc_feature 1..20: note = chemically synthesized
  source 1..20: mol_type = other DNA
ccatcgtaagcaaaccttag

SEQ ID NO: 637 - DNA, 20 bp, synthetic construct
  misc_feature 1..20: note = chemically synthesized
  source 1..20: mol_type = other DNA
taagcaaaccttagaggttc

SEQ ID NO: 638 - DNA, 20 bp, synthetic construct
  misc_feature 1..20: note = chemically synthesized
  source 1..20: mol_type = other DNA
caaaccttagaggttctggc

SEQ ID NO: 639 - DNA, 20 bp, synthetic construct
  misc_feature 1..20: note = chemically synthesized
  source 1..20: mol_type = other DNA
aaaccttagaggttctggca

SEQ ID NO: 640 - DNA, 20 bp, synthetic construct
  misc_feature 1..20: note = chemically synthesized
  source 1..20: mol_type = other DNA
accttagaggttctggcaag

SEQ ID NO: 641 - DNA, 20 bp, synthetic construct
  misc_feature 1..20: note = chemically synthesized
  source 1..20: mol_type = other DNA
cttagaggttctggcaagga

SEQ ID NO: 642 - DNA, 20 bp, synthetic construct
  misc_feature 1..20: note = chemically synthesized
  source 1..20: mol_type = other DNA
tagaggttctggcaaggaga

SEQ ID NO: 643 - DNA, 20 bp, synthetic construct
  misc_feature 1..20: note = chemically synthesized
  source 1..20: mol_type = other DNA
ggttctggcaaggagagaga

SEQ ID NO: 644 - DNA, 20 bp, synthetic construct
  misc_feature 1..20: note = chemically synthesized
  source 1..20: mol_type = other DNA
ggcaaggagagagatggctc

SEQ ID NO: 645 - DNA, 20 bp, synthetic construct
  misc_feature 1..20: note = chemically synthesized
  source 1..20: mol_type = other DNA
gcaaggagagagatggctcc

SEQ ID NO: 646 - DNA, 20 bp, synthetic construct
  misc_feature 1..20: note = chemically synthesized
  source 1..20: mol_type = other DNA
agagagatggctccaggaaa

SEQ ID NO: 647 - DNA, 20 bp, synthetic construct
  misc_feature 1..20: note = chemically synthesized
  source 1..20: mol_type = other DNA
gagagatggctccaggaaat

SEQ ID NO: 648 - DNA, 20 bp, synthetic construct
  misc_feature 1..20: note = chemically synthesized
  source 1..20: mol_type = other DNA
agagatggctccaggaaatg

SEQ ID NO: 649 - DNA, 20 bp, synthetic construct
  misc_feature 1..20: note = chemically synthesized
  source 1..20: mol_type = other DNA
gagatggctccaggaaatgg

SEQ ID NO: 650 - DNA, 20 bp, synthetic construct
  misc_feature 1..20: note = chemically synthesized
  source 1..20: mol_type = other DNA
aggaaatgggggtgtgtcac

SEQ ID NO: 651 - DNA, 20 bp, synthetic construct
  misc_feature 1..20: note = chemically synthesized
  source 1..20: mol_type = other DNA
atgggggtgtgtcaccagat

SEQ ID NO: 652 - DNA, 20 bp, synthetic construct
  misc_feature 1..20: note = chemically synthesized
  source 1..20: mol_type = other DNA
tgggggtgtgtcaccagata

SEQ ID NO: 653 - DNA, 20 bp, synthetic construct
  misc_feature 1..20: note = chemically synthesized
  source 1..20: mol_type = other DNA
cagataaggaatctgcctaa

SEQ ID NO: 654 - DNA, 20 bp, synthetic construct
  misc_feature 1..20: note = chemically synthesized
  source 1..20: mol_type = other DNA
agataaggaatctgcctaac

SEQ ID NO: 655 - DNA, 20 bp, synthetic construct
  misc_feature 1..20: note = chemically synthesized
  source 1..20: mol_type = other DNA
ataaggaatctgcctaacag

SEQ ID NO: 656 - DNA, 20 bp, synthetic construct
  misc_feature 1..20: note = chemically synthesized
  source 1..20: mol_type = other DNA
taaggaatctgcctaacagg

SEQ ID NO: 657 - DNA, 20 bp, synthetic construct
  misc_feature 1..20: note = chemically synthesized
  source 1..20: mol_type = other DNA
ggaatctgcctaacaggagg

SEQ ID NO: 658 - DNA, 20 bp, synthetic construct
  misc_feature 1..20: note = chemically synthesized
  source 1..20: mol_type = other DNA
gaatctgcctaacaggaggt

SEQ ID NO: 659 - DNA, 20 bp, synthetic construct
  misc_feature 1..20: note = chemically synthesized
  source 1..20: mol_type = other DNA
aatctgcctaacaggaggtg

SEQ ID NO: 660 - DNA, 20 bp, synthetic construct
  misc_feature 1..20: note = chemically synthesized
  source 1..20: mol_type = other DNA
atctgcctaacaggaggtgg

SEQ ID NO: 661 - DNA, 20 bp, synthetic construct
  misc_feature 1..20: note = chemically synthesized
  source 1..20: mol_type = other DNA
gcctaacaggaggtgggggt

SEQ ID NO: 662 - DNA, 20 bp, synthetic construct
  misc_feature 1..20: note = chemically synthesized
  source 1..20: mol_type = other DNA
gtgggggttagacccaatat

SEQ ID NO: 663 - DNA, 20 bp, synthetic construct
  misc_feature 1..20: note = chemically synthesized
  source 1..20: mol_type = other DNA
tgggggttagacccaatatc

SEQ ID NO: 664 - DNA, 20 bp, synthetic construct
  misc_feature 1..20: note = chemically synthesized
  source 1..20: mol_type = other DNA
ggggttagacccaatatcag

SEQ ID NO: 665 - DNA, 20 bp, synthetic construct
  misc_feature 1..20: note = chemically synthesized
  source 1..20: mol_type = other DNA
tagacccaatatcaggagac

SEQ ID NO: 666 - DNA, 20 bp, synthetic construct
  misc_feature 1..20: note = chemically synthesized
  source 1..20: mol_type = other DNA
agacccaatatcaggagact

SEQ ID NO: 667 - DNA, 20 bp, synthetic construct
  misc_feature 1..20: note = chemically synthesized
  source 1..20: mol_type = other DNA
cccaatatcaggagactagg

SEQ ID NO: 668 - DNA, 20 bp, synthetic construct
  misc_feature 1..20: note = chemically synthesized
  source 1..20: mol_type = other DNA
ccaatatcaggagactagga

SEQ ID NO: 669 - DNA, 20 bp, synthetic construct
  misc_feature 1..20: note = chemically synthesized
  source 1..20: mol_type = other DNA
aatatcaggagactaggaag

SEQ ID NO: 670 - DNA, 20 bp, synthetic construct
  misc_feature 1..20: note = chemically synthesized
  source 1..20: mol_type = other DNA
atatcaggagactaggaagg

SEQ ID NO: 671 - DNA, 20 bp, synthetic construct
  misc_feature 1..20: note = chemically synthesized
  source 1..20: mol_type = other DNA
atcaggagactaggaaggag

SEQ ID NO: 672 - DNA, 20 bp, synthetic construct
  misc_feature 1..20: note = chemically synthesized
  source 1..20: mol_type = other DNA
tcaggagactaggaaggagg

SEQ ID NO: 673 - DNA, 20 bp, synthetic construct
  misc_feature 1..20: note = chemically synthesized
  source 1..20: mol_type = other DNA
gactaggaaggaggaggcct

SEQ ID NO: 674 - DNA, 20 bp, synthetic construct
  misc_feature 1..20: note = chemically synthesized
  source 1..20: mol_type = other DNA
actaggaaggaggaggccta

SEQ ID NO: 675 - DNA, 20 bp, synthetic construct
  misc_feature 1..20: note = chemically synthesized
  source 1..20: mol_type = other DNA
ggaaggaggaggcctaagga

SEQ ID NO: 676 - DNA, 20 bp, synthetic construct
  misc_feature 1..20: note = chemically synthesized
  source 1..20: mol_type = other DNA
gaaggaggaggcctaaggat

SEQ ID NO: 677 - DNA, 20 bp, synthetic construct
  misc_feature 1..20: note = chemically synthesized
  source 1..20: mol_type = other DNA
aaggaggaggcctaaggatg

SEQ ID NO: 678 - DNA, 20 bp, synthetic construct
  misc_feature 1..20: note = chemically synthesized
  source 1..20: mol_type = other DNA
tctgtcaccaatcctgtccc

SEQ ID NO: 679 - DNA, 20 bp, synthetic construct
  misc_feature 1..20: note = chemically synthesized
  source 1..20: mol_type = other DNA
gtcaccaatcctgtccctag

SEQ ID NO: 680 - DNA, 20 bp, synthetic construct
  misc_feature 1..20: note = chemically synthesized
  source 1..20: mol_type = other DNA
tgtccctagtggccccactg

SEQ ID NO: 681 - DNA, 20 bp, synthetic construct
  misc_feature 1..20: note = chemically synthesized
  source 1..20: mol_type = other DNA
gtccctagtggccccactgt

SEQ ID NO: 682 - DNA, 20 bp, synthetic construct
  misc_feature 1..20: note = chemically synthesized
  source 1..20: mol_type = other DNA
tccctagtggccccactgtg

SEQ ID NO: 683 - DNA, 20 bp, synthetic construct
  misc_feature 1..20: note = chemically synthesized
  source 1..20: mol_type = other DNA
ctagtggccccactgtgggg

SEQ ID NO: 684 - DNA, 20 bp, synthetic construct
  misc_feature 1..20: note = chemically synthesized
  source 1..20: mol_type = other DNA
agtggccccactgtggggtg

SEQ ID NO: 685 - DNA, 20 bp, synthetic construct
  misc_feature 1..20: note = chemically synthesized
  source 1..20: mol_type = other DNA
gtggccccactgtggggtgg

SEQ ID NO: 686 - DNA, 20 bp, synthetic construct
  misc_feature 1..20: note = chemically synthesized
  source 1..20: mol_type = other DNA
tggccccactgtggggtgga

SEQ ID NO: 687 - DNA, 20 bp, synthetic construct
  misc_feature 1..20: note = chemically synthesized
  source 1..20: mol_type = other DNA
ggccccactgtggggtggag

SEQ ID NO: 688 - DNA, 20 bp, synthetic construct
  misc_feature 1..20: note = chemically synthesized
  source 1..20: mol_type = other DNA
ccactgtggggtggagggga

SEQ ID NO: 689 - DNA, 20 bp, synthetic construct
  misc_feature 1..20: note = chemically synthesized
  source 1..20: mol_type = other DNA
ggggtggaggggacagataa

SEQ ID NO: 690 - DNA, 20 bp, synthetic construct
  misc_feature 1..20: note = chemically synthesized
  source 1..20: mol_type = other DNA
aggggacagataaaagtacc

SEQ ID NO: 691 - DNA, 20 bp, synthetic construct
  misc_feature 1..20: note = chemically synthesized
  source 1..20: mol_type = other DNA
cagataaaagtacccagaac

SEQ ID NO: 692 - DNA, 20 bp, synthetic construct
  misc_feature 1..20: note = chemically synthesized
  source 1..20: mol_type = other DNA
gataaaagtacccagaacca

SEQ ID NO: 693 - DNA, 20 bp, synthetic construct
  misc_feature 1..20: note = chemically synthesized
  source 1..20: mol_type = other DNA
agaaccagagccacattaac

SEQ ID NO: 694 - DNA, 20 bp, synthetic construct
  misc_feature 1..20: note = chemically synthesized
  source 1..20: mol_type = other DNA
agagccacattaaccggccc

SEQ ID NO: 695 - DNA, 20 bp, synthetic construct
  misc_feature 1..20: note = chemically synthesized
  source 1..20: mol_type = other DNA
gagccacattaaccggccct

SEQ ID NO: 696 - DNA, 20 bp, synthetic construct
  misc_feature 1..20: note = chemically synthesized
  source 1..20: mol_type = other DNA
ttaaccggccctgggaatat

SEQ ID NO: 697 - DNA, 20 bp, synthetic construct
  misc_feature 1..20: note = chemically synthesized
  source 1..20: mol_type = other DNA
taaccggccctgggaatata

SEQ ID NO: 698 - DNA, 20 bp, synthetic construct
  misc_feature 1..20: note = chemically synthesized
  source 1..20: mol_type = other DNA
ccggccctgggaatataagg

SEQ ID NO: 699 - DNA, 20 bp, synthetic construct
  misc_feature 1..20: note = chemically synthesized
  source 1..20: mol_type = other DNA
ctgggaatataaggtggtcc

SEQ ID NO: 700 - DNA, 20 bp, synthetic construct
  misc_feature 1..20: note = chemically synthesized
  source 1..20: mol_type = other DNA
aatataaggtggtcccagct

SEQ ID NO: 701 - DNA, 20 bp, synthetic construct
  misc_feature 1..20: note = chemically synthesized
  source 1..20: mol_type = other DNA
atataaggtggtcccagctc

SEQ ID NO: 702 - DNA, 20 bp, synthetic construct
  misc_feature 1..20: note = chemically synthesized
  source 1..20: mol_type = other DNA
tataaggtggtcccagctcg

SEQ ID NO: 703 - DNA, 20 bp, synthetic construct
  misc_feature 1..20: note = chemically synthesized
  source 1..20: mol_type = other DNA
gtggtcccagctcggggaca

SEQ ID NO: 704 - DNA, 20 bp, synthetic construct
  misc_feature 1..20: note = chemically synthesized
  source 1..20: mol_type = other DNA
tggtcccagctcggggacac

SEQ ID NO: 705 - DNA, 20 bp, synthetic construct
  misc_feature 1..20: note = chemically synthesized
  source 1..20: mol_type = other DNA
gctcggggacacaggatccc

SEQ ID NO: 706 - DNA, 20 bp, synthetic construct
  misc_feature 1..20: note = chemically synthesized
  source 1..20: mol_type = other DNA
tcggggacacaggatccctg

SEQ ID NO: 707 - DNA, 20 bp, synthetic construct
  misc_feature 1..20: note = chemically synthesized
  source 1..20: mol_type = other DNA
cggggacacaggatccctgg

SEQ ID NO: 708 - DNA, 20 bp, synthetic construct
  misc_feature 1..20: note = chemically synthesized
  source 1..20: mol_type = other DNA
ggacacaggatccctggagg

SEQ ID NO: 709 - DNA, 20 bp, synthetic construct
  misc_feature 1..20: note = chemically synthesized
  source 1..20: mol_type = other DNA
gcagcaaacatgctgtcctg

SEQ ID NO: 710 - DNA, 20 bp, synthetic construct
  misc_feature 1..20: note = chemically synthesized
  source 1..20: mol_type = other DNA
gcaaacatgctgtcctgaag

SEQ ID NO: 711 - DNA, 20 bp, synthetic construct
  misc_feature 1..20: note = chemically synthesized
  source 1..20: mol_type = other DNA
atgctgtcctgaagtggaca

SEQ ID NO: 712 - DNA, 20 bp, synthetic construct
  misc_feature 1..20: note = chemically synthesized
  source 1..20: mol_type = other DNA
tgctgtcctgaagtggacat

SEQ ID NO: 713 - DNA, 20 bp, synthetic construct
  misc_feature 1..20: note = chemically synthesized
  source 1..20: mol_type = other DNA
gctgtcctgaagtggacata

SEQ ID NO: 714 - DNA, 20 bp, synthetic construct
  misc_feature 1..20: note = chemically synthesized
  source 1..20: mol_type = other DNA
ctgtcctgaagtggacatag

SEQ ID NO: 715 - DNA, 20 bp, synthetic construct
  misc_feature 1..20: note = chemically synthesized
  source 1..20: mol_type = other DNA
ctgaagtggacataggggcc

SEQ ID NO: 716 - DNA, 20 bp, synthetic construct
  misc_feature 1..20: note = chemically synthesized
  source 1..20: mol_type = other DNA
tgaagtggacataggggccc

SEQ ID NO: 717 - DNA, 20 bp, synthetic construct
  misc_feature 1..20: note = chemically synthesized
  source 1..20: mol_type = other DNA
gtggacataggggcccgggt

SEQ ID NO: 718 - DNA, 20 bp, synthetic construct
  misc_feature 1..20: note = chemically synthesized
  source 1..20: mol_type = other DNA
ggacataggggcccgggttg

SEQ ID NO: 719 - DNA, 20 bp, synthetic construct
  misc_feature 1..20: note = chemically synthesized
  source 1..20: mol_type = other DNA
gacataggggcccgggttgg

SEQ ID NO: 720 - DNA, 20 bp, synthetic construct
  misc_feature 1..20: note = chemically synthesized
  source 1..20: mol_type = other DNA
ataggggcccgggttggagg

SEQ ID NO: 721 - DNA, 20 bp, synthetic construct
  misc_feature 1..20: note = chemically synthesized
  source 1..20: mol_type = other DNA
ggggcccgggttggaggaag

SEQ ID NO: 722 - DNA, 20 bp, synthetic construct
  misc_feature 1..20: note = chemically synthesized
  source 1..20: mol_type = other DNA
ccgggttggaggaagaagac

SEQ ID NO: 723 - DNA, 20 bp, synthetic construct
  misc_feature 1..20: note = chemically synthesized
  source 1..20: mol_type = other DNA
ttggaggaagaagactagct

SEQ ID NO: 724 - DNA, 20 bp, synthetic construct
  misc_feature 1..20: note = chemically synthesized
  source 1..20: mol_type = other DNA
aagaagactagctgagctct

SEQ ID NO: 725 - DNA, 20 bp, synthetic construct
  misc_feature 1..20: note = chemically synthesized
  source 1..20: mol_type = other DNA
tagctgagctctcggacccc

SEQ ID NO: 726 - DNA, 20 bp, synthetic construct
  misc_feature 1..20: note = chemically synthesized
  source 1..20: mol_type = other DNA
ctgagctctcggacccctgg

SEQ ID NO: 727 - DNA, 20 bp, synthetic construct
  misc_feature 1..20: note = chemically synthesized
  source 1..20: mol_type = other DNA
acccctggaagatgccatga

SEQ ID NO: 728 - DNA, 20 bp, synthetic construct
  misc_feature 1..20: note = chemically synthesized
  source 1..20: mol_type = other DNA
cccctggaagatgccatgac

SEQ ID NO: 729 - DNA, 20 bp, synthetic construct
  misc_feature 1..20: note = chemically synthesized
  source 1..20: mol_type = other DNA
ccctggaagatgccatgaca

SEQ ID NO: 730 - DNA, 20 bp, synthetic construct
  misc_feature 1..20: note = chemically synthesized
  source 1..20: mol_type = other DNA
cctggaagatgccatgacag

SEQ ID NO: 731 - DNA, 20 bp, synthetic construct
  misc_feature 1..20: note = chemically synthesized
  source 1..20: mol_type = other DNA
ctggaagatgccatgacagg

SEQ ID NO: 732 - DNA, 20 bp, synthetic construct
  misc_feature 1..20: note = chemically synthesized
  source 1..20: mol_type = other DNA
aagatgccatgacagggggc

SEQ ID NO: 733 - DNA, 20 bp, synthetic construct
  misc_feature 1..20: note = chemically synthesized
  source 1..20: mol_type = other DNA
atgccatgacagggggctgg

SEQ ID NO: 734 - DNA, 20 bp, synthetic construct
  misc_feature 1..20: note = chemically synthesized
  source 1..20: mol_type = other DNA
gccatgacagggggctggaa

SEQ ID NO: 735 - DNA, 20 bp, synthetic construct
  misc_feature 1..20: note = chemically synthesized
  source 1..20: mol_type = other DNA
tgacagggggctggaagagc

SEQ ID NO: 736 - DNA, 20 bp, synthetic construct
  misc_feature 1..20: note = chemically synthesized
  source 1..20: mol_type = other DNA
gggggctggaagagctagca

SEQ ID NO: 737 - DNA, 20 bp, synthetic construct
  misc_feature 1..20: note = chemically synthesized
  source 1..20: mol_type = other DNA
ctggaagagctagcacagac

SEQ ID NO: 738 - DNA, 20 bp, synthetic construct
  misc_feature 1..20: note = chemically synthesized
  source 1..20: mol_type = other DNA
ggaagagctagcacagacta

SEQ ID NO: 739 - DNA, 20 bp, synthetic construct
  misc_feature 1..20: note = chemically synthesized
  source 1..20: mol_type = other DNA
aagagctagcacagactaga

SEQ ID NO: 740 - DNA, 20 bp, synthetic construct
  misc_feature 1..20: note = chemically synthesized
  source 1..20: mol_type = other DNA
agagctagcacagactagag

SEQ ID NO: 741 - DNA, 20 bp, synthetic construct
  misc_feature 1..20: note = chemically synthesized
  source 1..20: mol_type = other DNA
ctagcacagactagagaggt

SEQ ID NO: 742 - DNA, 20 bp, synthetic construct
  misc_feature 1..20: note = chemically synthesized
  source 1..20: mol_type = other DNA
tagcacagactagagaggta

SEQ ID NO: 743 - DNA, 20 bp, synthetic construct
  misc_feature 1..20: note = chemically synthesized
  source 1..20: mol_type = other DNA
agcacagactagagaggtaa

SEQ ID NO: 744 - DNA, 20 bp, synthetic construct
  misc_feature 1..20: note = chemically synthesized
  source 1..20: mol_type = other DNA
gcacagactagagaggtaag

SEQ ID NO: 745 - DNA, 20 bp, synthetic construct
  misc_feature 1..20: note = chemically synthesized
  source 1..20: mol_type = other DNA
cacagactagagaggtaagg

SEQ ID NO: 746 - DNA, 20 bp, synthetic construct
  misc_feature 1..20: note = chemically synthesized
  source 1..20: mol_type = other DNA
acagactagagaggtaaggg

SEQ ID NO: 747 - DNA, 20 bp, synthetic construct
  misc_feature 1..20: note = chemically synthesized
  source 1..20: mol_type = other DNA
gactagagaggtaagggggg

SEQ ID NO: 748 - DNA, 20 bp, synthetic construct
  misc_feature 1..20: note = chemically synthesized
  source 1..20: mol_type = other DNA
actagagaggtaaggggggt

SEQ ID NO: 749 - DNA, 20 bp, synthetic construct
  misc_feature 1..20: note = chemically synthesized
  source 1..20: mol_type = other DNA
ctagagaggtaaggggggta

SEQ ID NO: 750 - DNA, 20 bp, synthetic construct
  misc_feature 1..20: note = chemically synthesized
  source 1..20: mol_type = other DNA
tagagaggtaaggggggtag

SEQ ID NO: 751 - DNA, 20 bp, synthetic construct
  misc_feature 1..20: note = chemically synthesized
  source 1..20: mol_type = other DNA
gagaggtaaggggggtaggg

SEQ ID NO: 752 - DNA, 20 bp, synthetic construct
  misc_feature 1..20: note = chemically synthesized
  source 1..20: mol_type = other DNA
taggggagctgcccaaatga

SEQ ID NO: 753 - DNA, 20 bp, synthetic construct
  misc_feature 1..20: note = chemically synthesized
  source 1..20: mol_type = other DNA
aggggagctgcccaaatgaa

SEQ ID NO: 754 - DNA, 20 bp, synthetic construct
  misc_feature 1..20: note = chemically synthesized
  source 1..20: mol_type = other DNA
gggagctgcccaaatgaaag

SEQ ID NO: 755 - DNA, 20 bp, synthetic construct
  misc_feature 1..20: note = chemically synthesized
  source 1..20: mol_type = other DNA
gctgcccaaatgaaaggagt

SEQ ID NO: 756 - DNA, 20 bp, synthetic construct
  misc_feature 1..20: note = chemically synthesized
  source 1..20: mol_type = other DNA
tgcccaaatgaaaggagtga

SEQ ID NO: 757 - DNA, 20 bp, synthetic construct
  misc_feature 1..20: note = chemically synthesized
  source 1..20: mol_type = other DNA
gcccaaatgaaaggagtgag

SEQ ID NO: 758 - DNA, 20 bp, synthetic construct
  misc_feature 1..20: note = chemically synthesized
  source 1..20: mol_type = other DNA
tgagaggtgacccgaatcca

SEQ ID NO: 759 - DNA, 20 bp, synthetic construct
  misc_feature 1..20: note = chemically synthesized
  source 1..20: mol_type = other DNA
gagaggtgacccgaatccac

SEQ ID NO: 760 - DNA, 20 bp, synthetic construct
  misc_feature 1..20: note = chemically synthesized
  source 1..20: mol_type = other DNA
gaggtgacccgaatccacag

SEQ ID NO: 761 - DNA, 20 bp, synthetic construct
  misc_feature 1..20: note = chemically synthesized
  source 1..20: mol_type = other DNA
gacccgaatccacaggagaa

SEQ ID NO: 762 - DNA, 20 bp, synthetic construct
  misc_feature 1..20: note = chemically synthesized
  source 1..20: mol_type = other DNA
acccgaatccacaggagaac

SEQ ID NO: 763 - DNA, 20 bp, synthetic construct
  misc_feature 1..20: note = chemically synthesized
  source 1..20: mol_type = other DNA
cccgaatccacaggagaacg

SEQ ID NO: 764 - DNA, 20 bp, synthetic construct
  misc_feature 1..20: note = chemically synthesized
  source 1..20: mol_type = other DNA
ccacaggagaacggggtgtc

SEQ ID NO: 765 - DNA, 20 bp, synthetic construct
  misc_feature 1..20: note = chemically synthesized
  source 1..20: mol_type = other DNA
cacaggagaacggggtgtcc

SEQ ID NO: 766 - DNA, 20 bp, synthetic construct
  misc_feature 1..20: note = chemically synthesized
  source 1..20: mol_type = other DNA
gagaacggggtgtccaggca

SEQ ID NO: 767 - DNA, 20 bp, synthetic construct
  misc_feature 1..20: note = chemically synthesized
  source 1..20: mol_type = other DNA
acggggtgtccaggcaaaga

SEQ ID NO: 768 - DNA, 20 bp, synthetic construct
  misc_feature 1..20: note = chemically synthesized
  source 1..20: mol_type = other DNA
ggtgtccaggcaaagaaagc

SEQ ID NO: 769 - DNA, 20 bp, synthetic construct
  misc_feature 1..20: note = chemically synthesized
  source 1..20: mol_type = other DNA
tgtccaggcaaagaaagcaa

SEQ ID NO: 770 - DNA, 20 bp, synthetic construct
  misc_feature 1..20: note = chemically synthesized
  source 1..20: mol_type = other DNA
gtccaggcaaagaaagcaag

SEQ ID NO: 771 - DNA, 20 bp, synthetic construct
  misc_feature 1..20: note = chemically synthesized
  source 1..20: mol_type = other DNA
aggcaaagaaagcaagagga

SEQ ID NO: 772 - DNA, 20 bp, synthetic construct
  misc_feature 1..20: note = chemically synthesized
  source 1..20: mol_type = other DNA
gcaaagaaagcaagaggatg

SEQ ID NO: 773 - DNA, 20 bp, synthetic construct
  misc_feature 1..20: note = chemically synthesized
  source 1..20: mol_type = other DNA
aaagaaagcaagaggatgga

SEQ ID NO: 774 - DNA, 20 bp, synthetic construct
  misc_feature 1..20: note = chemically synthesized
  source 1..20: mol_type = other DNA
aagaaagcaagaggatggag

SEQ ID NO: 775 - DNA, 20 bp, synthetic construct
  misc_feature 1..20: note = chemically synthesized
  source 1..20: mol_type = other DNA
aaagcaagaggatggagagg

SEQ ID NO: 776 - DNA, 20 bp, synthetic construct
  misc_feature 1..20: note = chemically synthesized
  source 1..20: mol_type = other DNA
agaggatggagaggtggcta

SEQ ID NO: 777 - DNA, 20 bp, synthetic construct
  misc_feature 1..20: note = chemically synthesized
  source 1..20: mol_type = other DNA
gatggagaggtggctaaagc

SEQ ID NO: 778 - DNA, 20 bp, synthetic construct
  misc_feature 1..20: note = chemically synthesized
  source 1..20: mol_type = other DNA
atggagaggtggctaaagcc

SEQ ID NO: 779 - DNA, 20 bp, synthetic construct
  misc_feature 1..20: note = chemically synthesized
  source 1..20: mol_type = other DNA
tggagaggtggctaaagcca

SEQ ID NO: 780 - DNA, 20 bp, synthetic construct
  misc_feature 1..20: note = chemically synthesized
  source 1..20: mol_type = other DNA
gagaggtggctaaagccagg

SEQ ID NO: 781 - DNA, 20 bp, synthetic construct
  misc_feature 1..20: note = chemically synthesized
  source 1..20: mol_type = other DNA
ggtggctaaagccagggaga

SEQ ID NO: 782 - DNA, 20 bp, synthetic construct
  misc_feature 1..20: note = chemically synthesized
  source 1..20: mol_type = other DNA
gtggctaaagccagggagac

SEQ ID NO: 783 - DNA, 20 bp, synthetic construct
  misc_feature 1..20: note = chemically synthesized
  source 1..20: mol_type = other DNA
tggctaaagccagggagacg

SEQ ID NO: 784 - DNA, 20 bp, synthetic construct
  misc_feature 1..20: note = chemically synthesized
  source 1..20: mol_type = other DNA
gccagggagacggggtactt

SEQ ID NO: 785 - DNA, 20 bp, synthetic construct
  misc_feature 1..20: note = chemically synthesized
  source 1..20: mol_type = other DNA
ccagggagacggggtacttt

SEQ ID NO: 786 - DNA, 20 bp, synthetic construct
  misc_feature 1..20: note = chemically synthesized
  source 1..20: mol_type = other DNA
cagggagacggggtactttg

SEQ ID NO: 787 - DNA, 20 bp, synthetic construct
  misc_feature 1..20: note = chemically synthesized
  source 1..20: mol_type = other DNA
cggggtactttggggttgtc

SEQ ID NO: 788 - DNA, 20 bp, synthetic construct
  misc_feature 1..20: note = chemically synthesized
  source 1..20: mol_type = other DNA
tttggggttgtccagaaaaa

SEQ ID NO: 789 - DNA, 20 bp, synthetic construct
  misc_feature 1..20: note = chemically synthesized
  source 1..20: mol_type = other DNA
ccagaaaaacggtgatgatg

SEQ ID NO: 790 - DNA, 20 bp, synthetic construct
  misc_feature 1..20: note = chemically synthesized
  source 1..20: mol_type = other DNA
cagaaaaacggtgatgatgc

SEQ ID NO: 791 - DNA, 20 bp, synthetic construct
  misc_feature 1..20: note = chemically synthesized
  source 1..20: mol_type = other DNA
cggtgatgatgcaggcctac

SEQ ID NO: 792 - DNA, 20 bp, synthetic construct
  misc_feature 1..20: note = chemically synthesized
  source 1..20: mol_type = other DNA
tgatgatgcaggcctacaag

SEQ ID NO: 793 - DNA, 20 bp, synthetic construct
  misc_feature 1..20: note = chemically synthesized
  source 1..20: mol_type = other DNA
gatgatgcaggcctacaaga

SEQ ID NO: 794 - DNA, 20 bp, synthetic construct
  misc_feature 1..20: note = chemically synthesized
  source 1..20: mol_type = other DNA
atgatgcaggcctacaagaa

SEQ ID NO: 795 - DNA, 20 bp, synthetic construct
  misc_feature 1..20: note = chemically synthesized
  source 1..20: mol_type = other DNA
tgatgcaggcctacaagaag

SEQ ID NO: 796 - DNA, 20 bp, synthetic construct
  misc_feature 1..20: note = chemically synthesized
  source 1..20: mol_type = other DNA
atgcaggcctacaagaaggg

SEQ ID NO: 797 - DNA, 20 bp, synthetic construct
  misc_feature 1..20: note = chemically synthesized
  source 1..20: mol_type = other DNA
tgcaggcctacaagaagggg

SEQ ID NO: 798 - DNA, 20 bp, synthetic construct
  misc_feature 1..20: note = chemically synthesized
  source 1..20: mol_type = other DNA
aggcctacaagaaggggagg

SEQ ID NO: 799 - DNA, 20 bp, synthetic construct
  misc_feature 1..20: note = chemically synthesized
  source 1..20: mol_type = other DNA
ggcctacaagaaggggaggc

SEQ ID NO: 800 - DNA, 20 bp, synthetic construct
  misc_feature 1..20: note = chemically synthesized
  source 1..20: mol_type = other DNA
aagaaggggaggcgggacgc

SEQ ID NO: 801 - DNA, 20 bp, synthetic construct
  misc_feature 1..20: note = chemically synthesized
  source 1..20: mol_type = other DNA
agaaggggaggcgggacgca

SEQ ID NO: 802 - DNA, 20 bp, synthetic construct
  misc_feature 1..20: note = chemically synthesized
  source 1..20: mol_type = other DNA
gaaggggaggcgggacgcaa

SEQ ID NO: 803 - DNA, 20 bp, synthetic construct
  misc_feature 1..20: note = chemically synthesized
  source 1..20: mol_type = other DNA
aggggaggcgggacgcaagg

SEQ ID NO: 804 - DNA, 20 bp, synthetic construct
  misc_feature 1..20: note = chemically synthesized
  source 1..20: mol_type = other DNA
gacgcaagggagacatccgt

SEQ ID NO: 805 - DNA, 20 bp, synthetic construct
  misc_feature 1..20: note = chemically synthesized
  source 1..20: mol_type = other DNA
cgcaagggagacatccgtcg

SEQ ID NO: 806 - DNA, 20 bp, synthetic construct
  misc_feature 1..20: note = chemically synthesized
  source 1..20: mol_type = other DNA
aagggagacatccgtcggag

SEQ ID NO: 807 - DNA, 20 bp, synthetic construct
  misc_feature 1..20: note = chemically synthesized
  source 1..20: mol_type = other DNA
agggagacatccgtcggaga

SEQ ID NO: 808 - DNA, 20 bp, synthetic construct
  misc_feature 1..20: note = chemically synthesized
  source 1..20: mol_type = other DNA
ccgtcggagaaggccatcct

SEQ ID NO: 809 - DNA, 20 bp, synthetic construct
  misc_feature 1..20: note = chemically synthesized
  source 1..20: mol_type = other DNA
agaaggccatcctaagaaac

SEQ ID NO: 810 - DNA, 20 bp, synthetic construct
  misc_feature 1..20: note = chemically synthesized
  source 1..20: mol_type = other DNA
aaggccatcctaagaaacga

SEQ ID NO: 811 - DNA, 20 bp, synthetic construct
  misc_feature 1..20: note = chemically synthesized
  source 1..20: mol_type = other DNA
ccatcctaagaaacgagaga

SEQ ID NO: 812 - DNA, 20 bp, synthetic construct
  misc_feature 1..20: note = chemically synthesized
  source 1..20: mol_type = other DNA
ctaagaaacgagagatggca

SEQ ID NO: 813 - DNA, 20 bp, synthetic construct
  misc_feature 1..20: note = chemically synthesized
  source 1..20: mol_type = other DNA
taagaaacgagagatggcac

SEQ ID NO: 814 - DNA, 20 bp, synthetic construct
  misc_feature 1..20: note = chemically synthesized
  source 1..20: mol_type = other DNA
acgagagatggcacaggccc

SEQ ID NO: 815 - DNA, 20 bp, synthetic construct
  misc_feature 1..20: note = chemically synthesized
  source 1..20: mol_type = other DNA
agagatggcacaggccccag

SEQ ID NO: 816 - DNA, 20 bp, synthetic construct
  misc_feature 1..20: note = chemically synthesized
  source 1..20: mol_type = other DNA
gagatggcacaggccccaga

SEQ ID NO: 817 - DNA, 20 bp, synthetic construct
  misc_feature 1..20: note = chemically synthesized
  source 1..20: mol_type = other DNA
gatggcacaggccccagaag

SEQ ID NO: 818 - DNA, 20 bp, synthetic construct
  misc_feature 1..20: note = chemically synthesized
  source 1..20: mol_type = other DNA
ggcacaggccccagaaggag

SEQ ID NO: 819 - DNA, 20 bp, synthetic construct
  misc_feature 1..20: note = chemically synthesized
  source 1..20: mol_type = other DNA
gcacaggccccagaaggaga

SEQ ID NO: 820 - DNA, 20 bp, synthetic construct
  misc_feature 1..20: note = chemically synthesized
  source 1..20: mol_type = other DNA
ggccccagaaggagaaggaa

SEQ ID NO: 821 - DNA, 20 bp, synthetic construct
  misc_feature 1..20: note = chemically synthesized
  source 1..20: mol_type = other DNA
gccccagaaggagaaggaaa

SEQ ID NO: 822 - DNA, 20 bp, synthetic construct
  misc_feature 1..20: note = chemically synthesized
  source 1..20: mol_type = other DNA
ccccagaaggagaaggaaaa

SEQ ID NO: 823 - DNA, 20 bp, synthetic construct
  misc_feature 1..20: note = chemically synthesized
  source 1..20: mol_type = other DNA
aggagaaggaaaagggaacc

SEQ ID NO: 824 - DNA, 20 bp, synthetic construct
  misc_feature 1..20: note = chemically synthesized
  source 1..20: mol_type = other DNA
gaaggaaaagggaacccagc

SEQ ID NO: 825 - DNA, 20 bp, synthetic construct
  misc_feature 1..20: note = chemically synthesized
  source 1..20: mol_type = other DNA
aaaagggaacccagcgagtg

SEQ ID NO: 826 - DNA, 20 bp, synthetic construct
  misc_feature 1..20: note = chemically synthesized
  source 1..20: mol_type = other DNA
gggaacccagcgagtgaaga

SEQ ID NO: 827 - DNA, 20 bp, synthetic construct
  misc_feature 1..20: note = chemically synthesized
  source 1..20: mol_type = other DNA
cccagcgagtgaagacggca

SEQ ID NO: 828 - DNA, 20 bp, synthetic construct
  misc_feature 1..20: note = chemically synthesized
  source 1..20: mol_type = other DNA
ccagcgagtgaagacggcat

SEQ ID NO: 829 - DNA, 20 bp, synthetic construct
  misc_feature 1..20: note = chemically synthesized
  source 1..20: mol_type = other DNA
cagcgagtgaagacggcatg

SEQ ID NO: 830 - DNA, 20 bp, synthetic construct
  misc_feature 1..20: note = chemically synthesized
  source 1..20: mol_type = other DNA
gagtgaagacggcatggggt

SEQ ID NO: 831 - DNA, 20 bp, synthetic construct
  misc_feature 1..20: note = chemically synthesized
  source 1..20: mol_type = other DNA
agtgaagacggcatggggtt

SEQ ID NO: 832 - DNA, 20 bp, synthetic construct
  misc_feature 1..20: note = chemically synthesized
  source 1..20: mol_type = other DNA
aagacggcatggggttgggt

SEQ ID NO: 833 - DNA, 20 bp, synthetic construct
  misc_feature 1..20: note = chemically synthesized
  source 1..20: mol_type = other DNA
agacggcatggggttgggtg

SEQ ID NO: 834 - DNA, 20 bp, synthetic construct
  misc_feature 1..20: note = chemically synthesized
  source 1..20: mol_type = other DNA
gacggcatggggttgggtga

SEQ ID NO: 835 - DNA, 20 bp, synthetic construct
  misc_feature 1..20: note = chemically synthesized
  source 1..20: mol_type = other DNA
cggcatggggttgggtgagg

SEQ ID NO: 836 - DNA, 20 bp, synthetic construct
  misc_feature 1..20: note = chemically synthesized
  source 1..20: mol_type = other DNA
ggcatggggttgggtgaggg

SEQ ID NO: 837 - DNA, 20 bp, synthetic construct
  misc_feature 1..20: note = chemically synthesized
  source 1..20: mol_type = other DNA
catggggttgggtgagggag

SEQ ID NO: 838 - DNA, 20 bp, synthetic construct
  misc_feature 1..20: note = chemically synthesized
  source 1..20: mol_type = other DNA
tggggttgggtgagggagga

SEQ ID NO: 839 - DNA, 20 bp, synthetic construct
  misc_feature 1..20: note = chemically synthesized
  source 1..20: mol_type = other DNA
ggtgagggaggagagatgcc

SEQ ID NO: 840 - DNA, 20 bp, synthetic construct
  misc_feature 1..20: note = chemically synthesized
  source 1..20: mol_type = other DNA
tgagggaggagagatgcccg

SEQ ID NO: 841 - DNA, 20 bp, synthetic construct
  misc_feature 1..20: note = chemically synthesized
  source 1..20: mol_type = other DNA
agggaggagagatgcccgga

SEQ ID NO: 842 - DNA, 20 bp, synthetic construct
  misc_feature 1..20: note = chemically synthesized
  source 1..20: mol_type = other DNA
gggaggagagatgcccggag

SEQ ID NO: 843 - DNA, 20 bp, synthetic construct
  misc_feature 1..20: note = chemically synthesized
  source 1..20: mol_type = other DNA
agagatgcccggagaggacc

SEQ ID NO: 844 - DNA, 20 bp, synthetic construct
  misc_feature 1..20: note = chemically synthesized
  source 1..20: mol_type = other DNA
gcccggagaggacccagaca

SEQ ID NO: 845 - DNA, 20 bp, synthetic construct
  misc_feature 1..20: note = chemically synthesized
  source 1..20: mol_type = other DNA
cccggagaggacccagacac

SEQ ID NO: 846 - DNA, 20 bp, synthetic construct
  misc_feature 1..20: note = chemically synthesized
  source 1..20: mol_type = other DNA
ccggagaggacccagacacg

SEQ ID NO: 847 - DNA, 20 bp, synthetic construct
  misc_feature 1..20: note = chemically synthesized
  source 1..20: mol_type = other DNA
ggagaggacccagacacggg

SEQ ID NO: 848 - DNA, 20 bp, synthetic construct
  misc_feature 1..20: note = chemically synthesized
  source 1..20: mol_type = other DNA
gagaggacccagacacgggg

SEQ ID NO: 849 - DNA, 20 bp, synthetic construct
  misc_feature 1..20: note = chemically synthesized
  source 1..20: mol_type = other DNA
agacacggggaggatccgct

SEQ ID NO: 850 - DNA, 20 bp, synthetic construct
  misc_feature 1..20: note = chemically synthesized
  source 1..20: mol_type = other DNA
acacggggaggatccgctca

SEQ ID NO: 851 - DNA, 20 bp, synthetic construct
  misc_feature 1..20: note = chemically synthesized
  source 1..20: mol_type = other DNA
cacggggaggatccgctcag

SEQ ID NO: 852 - DNA, 20 bp, synthetic construct
  misc_feature 1..20: note = chemically synthesized
  source 1..20: mol_type = other DNA
tccgctcagaggacatcacg

SEQ ID NO: 853 - DNA, 20 bp, synthetic construct
  misc_feature 1..20: note = chemically synthesized
  source 1..20: mol_type = other DNA
tcagaggacatcacgtggtg

SEQ ID NO: 854 - DNA, 20 bp, synthetic construct
  misc_feature 1..20: note = chemically synthesized
  source 1..20: mol_type = other DNA
acatcacgtggtgcagcgcc

SEQ ID NO: 855 - DNA, 20 bp, synthetic construct
  misc_feature 1..20: note = chemically synthesized
  source 1..20: mol_type = other DNA
tcacgtggtgcagcgccgag

SEQ ID NO: 856 - DNA, 20 bp, synthetic construct
  misc_feature 1..20: note = chemically synthesized
  source 1..20: mol_type = other DNA
cacgtggtgcagcgccgaga

SEQ ID NO: 857 - DNA, 20 bp, synthetic construct
  misc_feature 1..20: note = chemically synthesized
  source 1..20: mol_type = other DNA
gtggtgcagcgccgagaagg

SEQ ID NO: 858 - DNA, 20 bp, synthetic construct
  misc_feature 1..20: note = chemically synthesized
  source 1..20: mol_type = other DNA
gcgccgagaaggaagtgctc

SEQ ID NO: 859 - DNA, 20 bp, synthetic construct
  misc_feature 1..20: note = chemically synthesized
  source 1..20: mol_type = other DNA
cgagaaggaagtgctccgga

SEQ ID NO: 860 - DNA, 20 bp, synthetic construct
  misc_feature 1..20: note = chemically synthesized
  source 1..20: mol_type = other DNA
agaaggaagtgctccggaaa

SEQ ID NO: 861 - DNA, 20 bp, synthetic construct
  misc_feature 1..20: note = chemically synthesized
  source 1..20: mol_type = other DNA
tgctccggaaagagcatcct

SEQ ID NO: 862 - DNA, 20 bp, synthetic construct
  misc_feature 1..20: note = chemically synthesized
  source 1..20: mol_type = other DNA
gctccggaaagagcatcctt

SEQ ID NO: 863 - DNA, 20 bp, synthetic construct
  misc_feature 1..20: note = chemically synthesized
  source 1..20: mol_type = other DNA
ccggaaagagcatccttggg

SEQ ID NO: 864 - DNA, 20 bp, synthetic construct
  misc_feature 1..20: note = chemically synthesized
  source 1..20: mol_type = other DNA
agcatccttgggcagcaaca

SEQ ID NO: 865 - DNA, 20 bp, synthetic construct
  misc_feature 1..20: note = chemically synthesized
  source 1..20: mol_type = other DNA
atccttgggcagcaacacag

SEQ ID NO: 866 - DNA, 20 bp, synthetic construct
  misc_feature 1..20: note = chemically synthesized
  source 1..20: mol_type = other DNA
ccttgggcagcaacacagca

SEQ ID NO: 867 - DNA, 20 bp, synthetic construct
  misc_feature 1..20: note = chemically synthesized
  source 1..20: mol_type = other DNA
ttgggcagcaacacagcaga

SEQ ID NO: 868 - DNA, 20 bp, synthetic construct
  misc_feature 1..20: note = chemically synthesized
  source 1..20: mol_type = other DNA
gcagcaacacagcagagagc

SEQ ID NO: 869 - DNA, 20 bp, synthetic construct
  misc_feature 1..20: note = chemically synthesized
  source 1..20: mol_type = other DNA
cagcaacacagcagagagca

SEQ ID NO: 870 - DNA, 20 bp, synthetic construct
  misc_feature 1..20: note = chemically synthesized
  source 1..20: mol_type = other DNA
agcaacacagcagagagcaa

SEQ ID NO: 871 - DNA, 20 bp, synthetic construct
  misc_feature 1..20: note = chemically synthesized
  source 1..20: mol_type = other DNA
gcaacacagcagagagcaag

SEQ ID NO: 872 - DNA, 20 bp, synthetic construct
  misc_feature 1..20: note = chemically synthesized
  source 1..20: mol_type = other DNA
acacagcagagagcaagggg

SEQ ID NO: 873 - DNA, 20 bp, synthetic construct
  misc_feature 1..20: note = chemically synthesized
  source 1..20: mol_type = other DNA
acagcagagagcaaggggaa

SEQ ID NO: 874 - DNA, 20 bp, synthetic construct
  misc_feature 1..20: note = chemically synthesized
  source 1..20: mol_type = other DNA
cagcagagagcaaggggaag

SEQ ID NO: 875 - DNA, 20 bp, synthetic construct
  misc_feature 1..20: note = chemically synthesized
  source 1..20: mol_type = other DNA
agcagagagcaaggggaaga

SEQ ID NO: 876 - DNA, 20 bp, synthetic construct
  misc_feature 1..20: note = chemically synthesized
  source 1..20: mol_type = other DNA
cagagagcaaggggaagagg

SEQ ID NO: 877 - DNA, 20 bp, synthetic construct
  misc_feature 1..20: note = chemically synthesized
  source 1..20: mol_type = other DNA
agagcaaggggaagagggag

SEQ ID NO: 878 - DNA, 20 bp, synthetic construct
  misc_feature 1..20: note = chemically synthesized
  source 1..20: mol_type = other DNA
agcaaggggaagagggagtg

SEQ ID NO: 879 - DNA, 20 bp, synthetic construct
  misc_feature 1..20: note = chemically synthesized
  source 1..20: mol_type = other DNA
gcaaggggaagagggagtgg

SEQ ID NO: 880 - DNA, 20 bp, synthetic construct
  misc_feature 1..20: note = chemically synthesized
  source 1..20: mol_type = other DNA
aggggaagagggagtggagg

SEQ ID NO: 881 - DNA, 20 bp, synthetic construct
  misc_feature 1..20: note = chemically synthesized
  source 1..20: mol_type = other DNA
gaagagggagtggaggaaga

SEQ ID NO: 882 - DNA, 20 bp, synthetic construct
  misc_feature 1..20: note = chemically synthesized
  source 1..20: mol_type = other DNA
gtggaggaagacggaacctg

SEQ ID NO: 883 - DNA, 20 bp, synthetic construct
  misc_feature 1..20: note = chemically synthesized
  source 1..20: mol_type = other DNA
tggaggaagacggaacctga

SEQ ID NO: 884 - DNA, 20 bp, synthetic construct
  misc_feature 1..20: note = chemically synthesized
  source 1..20: mol_type = other DNA
gaggaagacggaacctgaag

SEQ ID NO: 885 - DNA, 20 bp, synthetic construct
  misc_feature 1..20: note = chemically synthesized
  source 1..20: mol_type = other DNA
aggaagacggaacctgaagg

SEQ ID NO: 886 - DNA, 20 bp, synthetic construct
  misc_feature 1..20: note = chemically synthesized
  source 1..20: mol_type = other DNA
aagacggaacctgaaggagg

SEQ ID NO: 887 - DNA, 20 bp, synthetic construct
  misc_feature 1..20: note = chemically synthesized
  source 1..20: mol_type = other DNA
acggaacctgaaggaggcgg

SEQ ID NO: 888 - DNA, 20 bp, synthetic construct
  misc_feature 1..20: note = chemically synthesized
  source 1..20: mol_type = other DNA
cggaacctgaaggaggcggc

SEQ ID NO: 889 - DNA, 20 bp, synthetic construct
  misc_feature 1..20: note = chemically synthesized
  source 1..20: mol_type = other DNA
ggaacctgaaggaggcggca

SEQ ID NO: 890 - DNA, 20 bp, synthetic construct
  misc_feature 1..20: note = chemically synthesized
  source 1..20: mol_type = other DNA
acctgaaggaggcggcaggg

SEQ ID NO: 891 - DNA, 20 bp, synthetic construct
  misc_feature 1..20: note = chemically synthesized
  source 1..20: mol_type = other DNA
cctgaaggaggcggcaggga

SEQ ID NO: 892 - DNA, 20 bp, synthetic construct
  misc_feature 1..20: note = chemically synthesized
  source 1..20: mol_type = other DNA
ggaggcggcagggaaggatc

SEQ ID NO: 893 - DNA, 20 bp, synthetic construct
  misc_feature 1..20: note = chemically synthesized
  source 1..20: mol_type = other DNA
gaggcggcagggaaggatct

SEQ ID NO: 894 - DNA, 20 bp, synthetic construct
  misc_feature 1..20: note = chemically synthesized
  source 1..20: mol_type = other DNA
cggcagggaaggatctgggc

SEQ ID NO: 895 - DNA, 20 bp, synthetic construct
  misc_feature 1..20: note = chemically synthesized
  source 1..20: mol_type = other DNA
ggaaggatctgggccagccg

SEQ ID NO: 896 - DNA, 20 bp, synthetic construct
  misc_feature 1..20: note = chemically synthesized
  source 1..20: mol_type = other DNA
aaggatctgggccagccgta

SEQ ID NO: 897 - DNA, 20 bp, synthetic construct
  misc_feature 1..20: note = chemically synthesized
  source 1..20: mol_type = other DNA
aggatctgggccagccgtag

SEQ ID NO: 898 - DNA, 20 bp, synthetic construct
  misc_feature 1..20: note = chemically synthesized
  source 1..20: mol_type = other DNA
ggccagccgtagaggtgacc

SEQ ID NO: 899 - DNA, 20 bp, synthetic construct
  misc_feature 1..20: note = chemically synthesized
  source 1..20: mol_type = other DNA
gccagccgtagaggtgaccc

SEQ ID NO: 900 - DNA, 20 bp, synthetic construct
  misc_feature 1..20: note = chemically synthesized
  source 1..20: mol_type = other DNA
gtagaggtgacccaggccac

SEQ ID NO: 901 - DNA, 20 bp, synthetic construct
  misc_feature 1..20: note = chemically synthesized
  source 1..20: mol_type = other DNA
gtgacccaggccacaagctg

SEQ ID NO: 902 - DNA, 20 bp, synthetic construct
  misc_feature 1..20: note = chemically synthesized
  source 1..20: mol_type = other DNA
cccaggccacaagctgcaga

SEQ ID NO: 903 - DNA, 20 bp, synthetic construct
  misc_feature 1..20: note = chemically synthesized
  source 1..20: mol_type = other DNA
ggccacaagctgcagacaga

SEQ ID NO: 904 - DNA, 20 bp, synthetic construct
  misc_feature 1..20: note = chemically synthesized
  source 1..20: mol_type = other DNA
cacaagctgcagacagaaag

SEQ ID NO: 905 - DNA, 20 bp, synthetic construct
  misc_feature 1..20: note = chemically synthesized
  source 1..20: mol_type = other DNA
gctgcagacagaaagcggca

SEQ ID NO: 906 - DNA, 20 bp, synthetic construct
  misc_feature 1..20: note = chemically synthesized
  source 1..20: mol_type = other DNA
ctgcagacagaaagcggcac

SEQ ID NO: 907 - DNA, 20 bp, synthetic construct
  misc_feature 1..20: note = chemically synthesized
  source 1..20: mol_type = other DNA
gacagaaagcggcacaggcc

SEQ ID NO: 908 - DNA, 20 bp, synthetic construct
  misc_feature 1..20: note = chemically synthesized
  source 1..20: mol_type = other DNA
acagaaagcggcacaggccc

SEQ ID NO: 909 - DNA, 20 bp, synthetic construct
  misc_feature 1..20: note = chemically synthesized
  source 1..20: mol_type = other DNA
cagaaagcggcacaggccca

SEQ ID NO: 910 - DNA, 20 bp, synthetic construct
  misc_feature 1..20: note = chemically synthesized
  source 1..20: mol_type = other DNA
agaaagcggcacaggcccag

SEQ ID NO: 911 - DNA, 20 bp, synthetic construct
  misc_feature 1..20: note = chemically synthesized
  source 1..20: mol_type = other DNA
aaagcggcacaggcccaggg

SEQ ID NO: 912 - DNA, 20 bp, synthetic construct
  misc_feature 1..20: note = chemically synthesized
  source 1..20: mol_type = other DNA
agcggcacaggcccagggga

SEQ ID NO: 913 - DNA, 20 bp, synthetic construct
  misc_feature 1..20: note = chemically synthesized
  source 1..20: mol_type = other DNA
caggcccaggggagagaatg

SEQ ID NO: 914 - DNA, 20 bp, synthetic construct
  misc_feature 1..20: note = chemically synthesized
  source 1..20: mol_type = other DNA
aggcccaggggagagaatgc

SEQ ID NO: 915 - DNA, 20 bp, synthetic construct
  misc_feature 1..20: note = chemically synthesized
  source 1..20: mol_type = other DNA
ccaggggagagaatgcaggt

SEQ ID NO: 916 - DNA, 20 bp, synthetic construct
  misc_feature 1..20: note = chemically synthesized
  source 1..20: mol_type = other DNA
aggggagagaatgcaggtca

SEQ ID NO: 917 - DNA, 20 bp, synthetic construct
  misc_feature 1..20: note = chemically synthesized
  source 1..20: mol_type = other DNA
gagagaatgcaggtcagaga

SEQ ID NO: 918 - DNA, 20 bp, synthetic construct
  misc_feature 1..20: note = chemically synthesized
  source 1..20: mol_type = other DNA
agaatgcaggtcagagaaag

SEQ ID NO: 919 - DNA, 20 bp, synthetic construct
  misc_feature 1..20: note = chemically synthesized
  source 1..20: mol_type = other DNA
gaatgcaggtcagagaaagc

SEQ ID NO: 920 - DNA, 20 bp, synthetic construct
  misc_feature 1..20: note = chemically synthesized
  source 1..20: mol_type = other DNA
cagagaaagcaggacctgcc

SEQ ID NO: 921 - DNA, 20 bp, synthetic construct
  misc_feature 1..20: note = chemically synthesized
  source 1..20: mol_type = other DNA
agagaaagcaggacctgcct

SEQ ID NO: 922 - DNA, 20 bp, synthetic construct
  misc_feature 1..20: note = chemically synthesized
  source 1..20: mol_type = other DNA
gaaagcaggacctgcctggg

SEQ ID NO: 923 - DNA, 20 bp, synthetic construct
  misc_feature 1..20: note = chemically synthesized
  source 1..20: mol_type = other DNA
aaagcaggacctgcctggga

SEQ ID NO: 924 - DNA, 20 bp, synthetic construct
  misc_feature 1..20: note = chemically synthesized
  source 1..20: mol_type = other DNA
aagcaggacctgcctgggaa

SEQ ID NO: 925 - DNA, 20 bp, synthetic construct
  misc_feature 1..20: note = chemically synthesized
  source 1..20: mol_type = other DNA
agcaggacctgcctgggaag

SEQ ID NO: 926 - DNA, 20 bp, synthetic construct
  misc_feature 1..20: note = chemically synthesized
  source 1..20: mol_type = other DNA
acctgcctgggaaggggaaa

SEQ ID NO: 927 - DNA, 20 bp, synthetic construct
  misc_feature 1..20: note = chemically synthesized
  source 1..20: mol_type = other DNA
tgcctgggaaggggaaacag

SEQ ID NO: 928 - DNA, 20 bp, synthetic construct
  misc_feature 1..20: note = chemically synthesized
  source 1..20: mol_type = other DNA
gcctgggaaggggaaacagt

SEQ ID NO: 929 - DNA, 20 bp, synthetic construct
  misc_feature 1..20: note = chemically synthesized
  source 1..20: mol_type = other DNA
gggaaggggaaacagtgggc

SEQ ID NO: 930 - DNA, 20 bp, synthetic construct
  misc_feature 1..20: note = chemically synthesized
  source 1..20: mol_type = other DNA
gaaggggaaacagtgggcca

SEQ ID NO: 931 - DNA, 20 bp, synthetic construct
  misc_feature 1..20: note = chemically synthesized
  source 1..20: mol_type = other DNA
aaggggaaacagtgggccag

SEQ ID NO: 932 - DNA, 20 bp, synthetic construct
  misc_feature 1..20: note = chemically synthesized
  source 1..20: mol_type = other DNA
gggaaacagtgggccagagg

SEQ ID NO: 933 - DNA, 20 bp, synthetic construct
  misc_feature 1..20: note = chemically synthesized
  source 1..20: mol_type = other DNA
acagtgggccagaggcggcg

SEQ ID NO: 934 - DNA, 20 bp, synthetic construct
  misc_feature 1..20: note = chemically synthesized
  source 1..20: mol_type = other DNA
gtgggccagaggcggcgcag

SEQ ID NO: 935 - DNA, 20 bp, synthetic construct
  misc_feature 1..20: note = chemically synthesized
  source 1..20: mol_type = other DNA
gccagaggcggcgcagaagc

SEQ ID NO: 936 - DNA, 20 bp, synthetic construct
  misc_feature 1..20: note = chemically synthesized
  source 1..20: mol_type = other DNA
agaggcggcgcagaagccag

SEQ ID NO: 937 - DNA, 20 bp, synthetic construct
  misc_feature 1..20: note = chemically synthesized
  source 1..20: mol_type = other DNA
aggcggcgcagaagccagta

SEQ ID NO: 938 - DNA, 20 bp, synthetic construct
  misc_feature 1..20: note = chemically synthesized
  source 1..20: mol_type = other DNA
gcagaagccagtagagctca

SEQ ID NO: 939 - DNA, 20 bp, synthetic construct
  misc_feature 1..20: note = chemically synthesized
  source 1..20: mol_type = other DNA
gaagccagtagagctcaaag

SEQ ID NO: 940 - DNA, 20 bp, synthetic construct
  misc_feature 1..20: note = chemically synthesized
  source 1..20: mol_type = other DNA
cagtagagctcaaagtggtc

SEQ ID NO: 941 - DNA, 20 bp, synthetic construct
  misc_feature 1..20: note = chemically synthesized
  source 1..20: mol_type = other DNA
agctcaaagtggtccggact

SEQ ID NO: 942 - DNA, 20 bp, synthetic construct
  misc_feature 1..20: note = chemically synthesized
  source 1..20: mol_type = other DNA
gctcaaagtggtccggactc

SEQ ID NO: 943 - DNA, 20 bp, synthetic construct
  misc_feature 1..20: note = chemically synthesized
  source 1..20: mol_type = other DNA
tcaaagtggtccggactcag

SEQ ID NO: 944 - DNA, 20 bp, synthetic construct
  misc_feature 1..20: note = chemically synthesized
  source 1..20: mol_type = other DNA
aaagtggtccggactcagga

SEQ ID NO: 945 - DNA, 20 bp, synthetic construct
  misc_feature 1..20: note = chemically synthesized
  source 1..20: mol_type = other DNA
agtggtccggactcaggaga

SEQ ID NO: 946 - DNA, 20 bp, synthetic construct
  misc_feature 1..20: note = chemically synthesized
  source 1..20: mol_type = other DNA
gtccggactcaggagagaga

SEQ ID NO: 947 - DNA, 20 bp, synthetic construct
  misc_feature 1..20: note = chemically synthesized
  source 1..20: mol_type = other DNA
cggactcaggagagagacgg

SEQ ID NO: 948 - DNA, 20 bp, synthetic construct
  misc_feature 1..20: note = chemically synthesized
  source 1..20: mol_type = other DNA
caggagagagacggcagcgt

SEQ ID NO: 949 - DNA, 20 bp, synthetic construct
  misc_feature 1..20: note = chemically synthesized
  source 1..20: mol_type = other DNA
ggagagagacggcagcgtta

SEQ ID NO: 950 - DNA, 20 bp, synthetic construct
  misc_feature 1..20: note = chemically synthesized
  source 1..20: mol_type = other DNA
gagagagacggcagcgttag

SEQ ID NO: 951 - DNA, 20 bp, synthetic construct
  misc_feature 1..20: note = chemically synthesized
  source 1..20: mol_type = other DNA
agagagacggcagcgttaga

SEQ ID NO: 952 - DNA, 20 bp, synthetic construct
  misc_feature 1..20: note = chemically synthesized
  source 1..20: mol_type = other DNA
gagacggcagcgttagaggg

SEQ ID NO: 953 - DNA, 20 bp, synthetic construct
  misc_feature 1..20: note = chemically synthesized
  source 1..20: mol_type = other DNA
gacggcagcgttagagggca

SEQ ID NO: 954 - DNA, 20 bp, synthetic construct
  misc_feature 1..20: note = chemically synthesized
  source 1..20: mol_type = other DNA
agcgttagagggcagagttc

SEQ ID NO: 955 - DNA, 20 bp, synthetic construct
  misc_feature 1..20: note = chemically synthesized
  source 1..20: mol_type = other DNA
gttagagggcagagttccgg

SEQ ID NO: 956 - DNA, 20 bp, synthetic construct
  misc_feature 1..20: note = chemically synthesized
  source 1..20: mol_type = other DNA
agggcagagttccggcggca

SEQ ID NO: 957 - DNA, 20 bp, synthetic construct
  misc_feature 1..20: note = chemically synthesized
  source 1..20: mol_type = other DNA
cagagttccggcggcacagc

SEQ ID NO: 958 - DNA, 20 bp, synthetic construct
  misc_feature 1..20: note = chemically synthesized
  source 1..20: mol_type = other DNA
agagttccggcggcacagca

SEQ ID NO: 959 - DNA, 20 bp, synthetic construct
  misc_feature 1..20: note = chemically synthesized
  source 1..20: mol_type = other DNA
gagttccggcggcacagcaa

SEQ ID NO: 960 - DNA, 20 bp, synthetic construct
  misc_feature 1..20: note = chemically synthesized
  source 1..20: mol_type = other DNA
ggcggcacagcaagggcact

SEQ ID NO: 961 - DNA, 20 bp, synthetic construct
  misc_feature 1..20: note = chemically synthesized
  source 1..20: mol_type = other DNA
gcggcacagcaagggcactc

SEQ ID NO: 962 - DNA, 20 bp, synthetic construct
  misc_feature 1..20: note = chemically synthesized
  source 1..20: mol_type = other DNA
cggcacagcaagggcactcg

SEQ ID NO: 963 - DNA, 20 bp, synthetic construct
  misc_feature 1..20: note = chemically synthesized
  source 1..20: mol_type = other DNA
ggcacagcaagggcactcgg

SEQ ID NO: 964 - DNA, 20 bp, synthetic construct
  misc_feature 1..20: note = chemically synthesized
  source 1..20: mol_type = other DNA
cagcaagggcactcgggggc

SEQ ID NO: 965 - DNA, 20 bp, synthetic construct
  misc_feature 1..20: note = chemically synthesized
  source 1..20: mol_type = other DNA
gcaagggcactcgggggcga

SEQ ID NO: 966 - DNA, 20 bp, synthetic construct
  misc_feature 1..20: note = chemically synthesized
  source 1..20: mol_type = other DNA
caagggcactcgggggcgag

SEQ ID NO: 967 - DNA, 20 bp, synthetic construct
  misc_feature 1..20: note = chemically synthesized
  source 1..20: mol_type = other DNA
agggcactcgggggcgagag

SEQ ID NO: 968 - DNA, 20 bp, synthetic construct
  misc_feature 1..20: note = chemically synthesized
  source 1..20: mol_type = other DNA
gggcactcgggggcgagagg

SEQ ID NO: 969 - DNA, 20 bp, synthetic construct
  misc_feature 1..20: note = chemically synthesized
  source 1..20: mol_type = other DNA
ggcactcgggggcgagagga

SEQ ID NO: 970 - DNA, 20 bp, synthetic construct
  misc_feature 1..20: note = chemically synthesized
  source 1..20: mol_type = other DNA
actcgggggcgagaggaggg

SEQ ID NO: 971 - DNA, 20 bp, synthetic construct
  misc_feature 1..20: note = chemically synthesized
  source 1..20: mol_type = other DNA
ggcgagaggagggcagcgca

SEQ ID NO: 972 - DNA, 20 bp, synthetic construct
  misc_feature 1..20: note = chemically synthesized
  source 1..20: mol_type = other DNA
agggcagcgcaaagtgacaa

SEQ ID NO: 973 - DNA, 20 bp, synthetic construct
  misc_feature 1..20: note = chemically synthesized
  source 1..20: mol_type = other DNA
cagcgcaaagtgacaatggc

SEQ ID NO: 974 - DNA, 20 bp, synthetic construct
  misc_feature 1..20: note = chemically synthesized
  source 1..20: mol_type = other DNA
agcgcaaagtgacaatggcc

SEQ ID NO: 975 - DNA, 20 bp, synthetic construct
  misc_feature 1..20: note = chemically synthesized
  source 1..20: mol_type = other DNA
gcgcaaagtgacaatggcca

SEQ ID NO: 976 - DNA, 20 bp, synthetic construct
  misc_feature 1..20: note = chemically synthesized
  source 1..20: mol_type = other DNA
aaagtgacaatggccagggc

SEQ ID NO: 977 - DNA, 20 bp, synthetic construct
  misc_feature 1..20: note = chemically synthesized
  source 1..20: mol_type = other DNA
aagtgacaatggccagggcc

SEQ ID NO: 978 - DNA, 20 bp, synthetic construct
  misc_feature 1..20: note = chemically synthesized
  source 1..20: mol_type = other DNA
tgacaatggccagggccagg

SEQ ID NO: 979 - DNA, 20 bp, synthetic construct
  misc_feature 1..20: note = chemically synthesized
  source 1..20: mol_type = other DNA
aatggccagggccaggcaga

SEQ ID NO: 980 - DNA, 20 bp, synthetic construct
  misc_feature 1..20: note = chemically synthesized
  source 1..20: mol_type = other DNA
ccagggccaggcagatagac

SEQ ID NO: 981 - DNA, 20 bp, synthetic construct
  misc_feature 1..20: note = chemically synthesized
  source 1..20: mol_type = other DNA
ccaggcagatagaccagact

SEQ ID NO: 982 - DNA, 20 bp, synthetic construct
  misc_feature 1..20: note = chemically synthesized
  source 1..20: mol_type = other DNA
agatagaccagactgagcta

SEQ ID NO: 983 - DNA, 20 bp, synthetic construct
  misc_feature 1..20: note = chemically synthesized
  source 1..20: mol_type = other DNA
gatagaccagactgagctat

SEQ ID NO: 984 - DNA, 20 bp, synthetic construct
  misc_feature 1..20: note = chemically synthesized
  source 1..20: mol_type = other DNA
tagaccagactgagctatgg

SEQ ID NO: 985 - DNA, 20 bp, synthetic construct
  misc_feature 1..20: note = chemically synthesized
  source 1..20: mol_type = other DNA
ccagactgagctatgggagc

SEQ ID NO: 986 - DNA, 20 bp, synthetic construct
  misc_feature 1..20: note = chemically synthesized
  source 1..20: mol_type = other DNA
ctgagctatgggagctggct

SEQ ID NO: 987 - DNA, 20 bp, synthetic construct
  misc_feature 1..20: note = chemically synthesized
  source 1..20: mol_type = other DNA
tgagctatgggagctggctc

SEQ ID NO: 988 - DNA, 20 bp, synthetic construct
  misc_feature 1..20: note = chemically synthesized
  source 1..20: mol_type = other DNA
tatgggagctggctcaggtt

SEQ ID NO: 989 - DNA, 20 bp, synthetic construct
  misc_feature 1..20: note = chemically synthesized
  source 1..20: mol_type = other DNA
atgggagctggctcaggttc

SEQ ID NO: 990 - DNA, 20 bp, synthetic construct
  misc_feature 1..20: note = chemically synthesized
  source 1..20: mol_type = other DNA
gggagctggctcaggttcag

SEQ ID NO: 991 - DNA, 20 bp, synthetic construct
  misc_feature 1..20: note = chemically synthesized
  source 1..20: mol_type = other DNA
gagctggctcaggttcagga

SEQ ID NO: 992 - DNA, 20 bp, synthetic construct
  misc_feature 1..20: note = chemically synthesized
  source 1..20: mol_type = other DNA
agctggctcaggttcaggag

SEQ ID NO: 993 - DNA, 20 bp, synthetic construct
  misc_feature 1..20: note = chemically synthesized
  source 1..20: mol_type = other DNA
gctggctcaggttcaggaga

SEQ ID NO: 994 - DNA, 20 bp, synthetic construct
  misc_feature 1..20: note = chemically synthesized
  source 1..20: mol_type = other DNA
ggctcaggttcaggagaggg

SEQ ID NO: 995 - DNA, 20 bp, synthetic construct
  misc_feature 1..20: note = chemically synthesized
  source 1..20: mol_type = other DNA
gctcaggttcaggagagggc

SEQ ID NO: 996 - DNA, 20 bp, synthetic construct
  misc_feature 1..20: note = chemically synthesized
  source 1..20: mol_type = other DNA
ctcaggttcaggagagggca

SEQ ID NO: 997 - DNA, 20 bp, synthetic construct
  misc_feature 1..20: note = chemically synthesized
  source 1..20: mol_type = other DNA
aggttcaggagagggcaggg

SEQ ID NO: 998 - DNA, 20 bp, synthetic construct
  misc_feature 1..20: note = chemically synthesized
  source 1..20: mol_type = other DNA
ggttcaggagagggcagggc

SEQ ID NO: 999 - DNA, 20 bp, synthetic construct
  misc_feature 1..20: note = chemically synthesized
  source 1..20: mol_type = other DNA
gttcaggagagggcagggca

SEQ ID NO: 1000 - DNA, 20 bp, synthetic construct
  misc_feature 1..20: note = chemically synthesized
  source 1..20: mol_type = other DNA
caggagagggcagggcaggg

SEQ ID NO: 1001 - DNA, 20 bp, synthetic construct
  misc_feature 1..20: note = chemically synthesized
  source 1..20: mol_type = other DNA
aggagagggcagggcaggga

SEQ ID NO: 1002 - DNA, 20 bp, synthetic construct
  misc_feature 1..20: note = chemically synthesized
  source 1..20: mol_type = other DNA
gagagggcagggcagggaag

SEQ ID NO: 1003 - DNA, 20 bp, synthetic construct
  misc_feature 1..20: note = chemically synthesized
  source 1..20: mol_type = other DNA
gcagggcagggaaggagaca

SEQ ID NO: 1004 - DNA, 20 bp, synthetic construct
  misc_feature 1..20: note = chemically synthesized
  source 1..20: mol_type = other DNA
gcagggaaggagacaaagtc

SEQ ID NO: 1005 - DNA, 20 bp, synthetic construct
  misc_feature 1..20: note = chemically synthesized
  source 1..20: mol_type = other DNA
cagggaaggagacaaagtcc

SEQ ID NO: 1006 - DNA, 20 bp, synthetic construct
  misc_feature 1..20: note = chemically synthesized
  source 1..20: mol_type = other DNA
aaggagacaaagtccaggac

SEQ ID NO: 1007 - DNA, 20 bp, synthetic construct
  misc_feature 1..20: note = chemically synthesized
  source 1..20: mol_type = other DNA
agacaaagtccaggaccggc

SEQ ID NO: 1008 - DNA, 20 bp, synthetic construct
  misc_feature 1..20: note = chemically synthesized
  source 1..20: mol_type = other DNA
acaaagtccaggaccggctg

SEQ ID NO: 1009 - DNA, 20 bp, synthetic construct
  misc_feature 1..20: note = chemically synthesized
  source 1..20: mol_type = other DNA
caaagtccaggaccggctgg

SEQ ID NO: 1010 - DNA, 20 bp, synthetic construct
  misc_feature 1..20: note = chemically synthesized
  source 1..20: mol_type = other DNA
aaagtccaggaccggctgga

SEQ ID NO: 1011 - DNA, 20 bp, synthetic construct
  misc_feature 1..20: note = chemically synthesized
  source 1..20: mol_type = other DNA
aagtccaggaccggctggag

SEQ ID NO: 1012 - DNA, 20 bp, synthetic construct
  misc_feature 1..20: note = chemically synthesized
  source 1..20: mol_type = other DNA
cggctggaggggctcaacat

SEQ ID NO: 1013 - DNA, 20 bp, synthetic construct
  misc_feature 1..20: note = chemically synthesized
  source 1..20: mol_type = other DNA
ctggaggggctcaacatcgg

SEQ ID NO: 1014 - DNA, 20 bp, synthetic construct
  misc_feature 1..20: note = chemically synthesized
  source 1..20: mol_type = other DNA
ggaggggctcaacatcggaa

SEQ ID NO: 1015 - DNA, 20 bp, synthetic construct
  misc_feature 1..20: note = chemically synthesized
  source 1..20: mol_type = other DNA
gaggggctcaacatcggaag

SEQ ID NO: 1016 - DNA, 20 bp, synthetic construct
  misc_feature 1..20: note = chemically synthesized
  source 1..20: mol_type = other DNA
aggggctcaacatcggaaga

SEQ ID NO: 1017 - DNA, 20 bp, synthetic construct
  misc_feature 1..20: note = chemically synthesized
  source 1..20: mol_type = other DNA
ggggctcaacatcggaagag

SEQ ID NO: 1018 - DNA, 20 bp, synthetic construct
  misc_feature 1..20: note = chemically synthesized
  source 1..20: mol_type = other DNA
gctcaacatcggaagagggg

SEQ ID NO: 1019 - DNA, 20 bp, synthetic construct
  misc_feature 1..20: note = chemically synthesized
  source 1..20: mol_type = other DNA
acatcggaagaggggaagtc

SEQ ID NO: 1020 - DNA, 20 bp, synthetic construct
  misc_feature 1..20: note = chemically synthesized
  source 1..20: mol_type = other DNA
catcggaagaggggaagtcg

SEQ ID NO: 1021 - DNA, 20 bp, synthetic construct
  misc_feature 1..20: note = chemically synthesized
  source 1..20: mol_type = other DNA
atcggaagaggggaagtcga

SEQ ID NO: 1022 - DNA, 20 bp, synthetic construct
  misc_feature 1..20: note = chemically synthesized
  source 1..20: mol_type = other DNA
cggaagaggggaagtcgagg

SEQ ID NO: 1023 - DNA, 20 bp, synthetic construct
  misc_feature 1..20: note = chemically synthesized
  source 1..20: mol_type = other DNA
ggaagaggggaagtcgaggg

SEQ ID NO: 1024 - DNA, 20 bp, synthetic construct
  misc_feature 1..20: note = chemically synthesized
  source 1..20: mol_type = other DNA
gaagaggggaagtcgaggga

SEQ ID NO: 1025 - DNA, 20 bp, synthetic construct
  misc_feature 1..20: note = chemically synthesized
  source 1..20: mol_type = other DNA
aggggaagtcgagggaggga

SEQ ID NO: 1026 - DNA, 20 bp, synthetic construct
  misc_feature 1..20: note = chemically synthesized
  source 1..20: mol_type = other DNA
gaagtcgagggagggatggt

SEQ ID NO: 1027 - DNA, 20 bp, synthetic construct
  misc_feature 1..20: note = chemically synthesized
  source 1..20: mol_type = other DNA
aagtcgagggagggatggta

SEQ ID NO: 1028 - DNA, 20 bp, synthetic construct
  misc_feature 1..20: note = chemically synthesized
  source 1..20: mol_type = other DNA
gtcgagggagggatggtaag

SEQ ID NO: 1029 - DNA, 20 bp, synthetic construct
  misc_feature 1..20: note = chemically synthesized
  source 1..20: mol_type = other DNA
tcgagggagggatggtaagg

SEQ ID NO: 1030 - DNA, 20 bp, synthetic construct
  misc_feature 1..20: note = chemically synthesized
  source 1..20: mol_type = other DNA
ggatggtaaggaggactgca

SEQ ID NO: 1031 - DNA, 20 bp, synthetic construct
  misc_feature 1..20: note = chemically synthesized
  source 1..20: mol_type = other DNA
gatggtaaggaggactgcat

SEQ ID NO: 1032 - DNA, 20 bp, synthetic construct
  misc_feature 1..20: note = chemically synthesized
  source 1..20: mol_type = other DNA
gtaaggaggactgcatgggt

SEQ ID NO: 1033 - DNA, 20 bp, synthetic construct
  misc_feature 1..20: note = chemically synthesized
  source 1..20: mol_type = other DNA
gaggactgcatgggtcagca

SEQ ID NO: 1034 - DNA, 20 bp, synthetic construct
  misc_feature 1..20: note = chemically synthesized
  source 1..20: mol_type = other DNA
aggactgcatgggtcagcac

SEQ ID NO: 1035 - DNA, 20 bp, synthetic construct
  misc_feature 1..20: note = chemically synthesized
  source 1..20: mol_type = other DNA
tgggtcagcacaggctgcca

SEQ ID NO: 1036 - DNA, 20 bp, synthetic construct
  misc_feature 1..20: note = chemically synthesized
  source 1..20: mol_type = other DNA
tcagcacaggctgccaaagc

SEQ ID NO: 1037 - DNA, 20 bp, synthetic construct
  misc_feature 1..20: note = chemically synthesized
  source 1..20: mol_type = other DNA
cagcacaggctgccaaagcc

SEQ ID NO: 1038 - DNA, 20 bp, synthetic construct
  misc_feature 1..20: note = chemically synthesized
  source 1..20: mol_type = other DNA
agcacaggctgccaaagcca

SEQ ID NO: 1039 - DNA, 20 bp, synthetic construct
  misc_feature 1..20: note = chemically synthesized
  source 1..20: mol_type = other DNA
caggctgccaaagccagggc

SEQ ID NO: 1040 - DNA, 20 bp, synthetic construct
  misc_feature 1..20: note = chemically synthesized
  source 1..20: mol_type = other DNA
gccaaagccagggccagtta

SEQ ID NO: 1041 - DNA, 20 bp, synthetic construct
  misc_feature 1..20: note = chemically synthesized
  source 1..20: mol_type = other DNA
cagttaaagcgactccaatg

SEQ ID NO: 1042 - DNA, 20 bp, synthetic construct
  misc_feature 1..20: note = chemically synthesized
  source 1..20: mol_type = other DNA
ttaaagcgactccaatgcgg

SEQ ID NO: 1043 - DNA, 20 bp, synthetic construct
  misc_feature 1..20: note = chemically synthesized
  source 1..20: mol_type = other DNA
aaagcgactccaatgcggaa

SEQ ID NO: 1044 - DNA, 20 bp, synthetic construct
  misc_feature 1..20: note = chemically synthesized
  source 1..20: mol_type = other DNA
agcgactccaatgcggaaga

SEQ ID NO: 1045 - DNA, 20 bp, synthetic construct
  misc_feature 1..20: note = chemically synthesized
  source 1..20: mol_type = other DNA
gactccaatgcggaagagag

SEQ ID NO: 1046 - DNA, 20 bp, synthetic construct
  misc_feature 1..20: note = chemically synthesized
  source 1..20: mol_type = other DNA
actccaatgcggaagagagt

SEQ ID NO: 1047 - DNA, 20 bp, synthetic construct
  misc_feature 1..20: note = chemically synthesized
  source 1..20: mol_type = other DNA
atgcggaagagagtaggtcg

SEQ ID NO: 1048 - DNA, 20 bp, synthetic construct
  misc_feature 1..20: note = chemically synthesized
  source 1..20: mol_type = other DNA
tgcggaagagagtaggtcga

SEQ ID NO: 1049 - DNA, 20 bp, synthetic construct
  misc_feature 1..20: note = chemically synthesized
  source 1..20: mol_type = other DNA
gcggaagagagtaggtcgaa

SEQ ID NO: 1050 - DNA, 20 bp, synthetic construct
  misc_feature 1..20: note = chemically synthesized
  source 1..20: mol_type = other DNA
cggaagagagtaggtcgaag

SEQ ID NO: 1051 - DNA, 20 bp, synthetic construct
  misc_feature 1..20: note = chemically synthesized
  source 1..20: mol_type = other DNA
gagagtaggtcgaaggggaa

SEQ ID NO: 1052 - DNA, 20 bp, synthetic construct
  misc_feature 1..20: note = chemically synthesized
  source 1..20: mol_type = other DNA
gtaggtcgaaggggaatggt

SEQ ID NO: 1053 - DNA, 20 bp, synthetic construct
  misc_feature 1..20: note = chemically synthesized
  source 1..20: mol_type = other DNA
taggtcgaaggggaatggta

SEQ ID NO: 1054 - DNA, 20 bp, synthetic construct
  misc_feature 1..20: note = chemically synthesized
  source 1..20: mol_type = other DNA
ggtcgaaggggaatggtaag

SEQ ID NO: 1055 - DNA, 20 bp, synthetic construct
  misc_feature 1..20: note = chemically synthesized
  source 1..20: mol_type = other DNA
gtcgaaggggaatggtaagg

SEQ ID NO: 1056 - DNA, 20 bp, synthetic construct
  misc_feature 1..20: note = chemically synthesized
  source 1..20: mol_type = other DNA
aggggaatggtaaggaggcc

SEQ ID NO: 1057 - DNA, 20 bp, synthetic construct
  misc_feature 1..20: note = chemically synthesized
  source 1..20: mol_type = other DNA
ggggaatggtaaggaggcct

SEQ ID NO: 1058 - DNA, 20 bp, synthetic construct
  misc_feature 1..20: note = chemically synthesized
  source 1..20: mol_type = other DNA
gggaatggtaaggaggcctg

SEQ ID NO: 1059 - DNA, 20 bp, synthetic construct
  misc_feature 1..20: note = chemically synthesized
  source 1..20: mol_type = other DNA
aatggtaaggaggcctgggg

SEQ ID NO: 1060 - DNA, 20 bp, synthetic construct
  misc_feature 1..20: note = chemically synthesized
  source 1..20: mol_type = other DNA
tggtaaggaggcctggggca

SEQ ID NO: 1061 - DNA, 20 bp, synthetic construct
  misc_feature 1..20: note = chemically synthesized
  source 1..20: mol_type = other DNA
taaggaggcctggggcagag

SEQ ID NO: 1062 - DNA, 20 bp, synthetic construct
  misc_feature 1..20: note = chemically synthesized
  source 1..20: mol_type = other DNA
gaggcctggggcagagtggt

SEQ ID NO: 1063 - DNA, 20 bp, synthetic construct
  misc_feature 1..20: note = chemically synthesized
  source 1..20: mol_type = other DNA
ctggggcagagtggtcagca

SEQ ID NO: 1064 - DNA, 20 bp, synthetic construct
  misc_feature 1..20: note = chemically synthesized
  source 1..20: mol_type = other DNA
ggggcagagtggtcagcaca

SEQ ID NO: 1065 - DNA, 20 bp, synthetic construct
  misc_feature 1..20: note = chemically synthesized
  source 1..20: mol_type = other DNA
gcagagtggtcagcacagag

SEQ ID NO: 1066 - DNA, 20 bp, synthetic construct
  misc_feature 1..20: note = chemically synthesized
  source 1..20: mol_type = other DNA
gtggtcagcacagagtggct

SEQ ID NO: 1067 - DNA, 20 bp, synthetic construct
  misc_feature 1..20: note = chemically synthesized
  source 1..20: mol_type = other DNA
cagcacagagtggctaagcc

SEQ ID NO: 1068 - DNA, 20 bp, synthetic construct
  misc_feature 1..20: note = chemically synthesized
  source 1..20: mol_type = other DNA
agcacagagtggctaagccc

SEQ ID NO: 1069 - DNA, 20 bp, synthetic construct
  misc_feature 1..20: note = chemically synthesized
  source 1..20: mol_type = other DNA
gcacagagtggctaagccca

SEQ ID NO: 1070 - DNA, 20 bp, synthetic construct
  misc_feature 1..20: note = chemically synthesized
  source 1..20: mol_type = other DNA
agagtggctaagcccagggc

SEQ ID NO: 1071 - DNA, 20 bp, synthetic construct
  misc_feature 1..20: note = chemically synthesized
  source 1..20: mol_type = other DNA
gctaagcccagggccagttg

SEQ ID NO: 1072 - DNA, 20 bp, synthetic construct
  misc_feature 1..20: note = chemically synthesized
  source 1..20: mol_type = other DNA
aagcccagggccagttgaag

SEQ ID NO: 1073 - DNA, 20 bp, synthetic construct
  misc_feature 1..20: note = chemically synthesized
  source 1..20: mol_type = other DNA
cagttgaagcggctccaatt

SEQ ID NO: 1074 - DNA, 20 bp, synthetic construct
  misc_feature 1..20: note = chemically synthesized
  source 1..20: mol_type = other DNA
ttgaagcggctccaattcgg

SEQ ID NO: 1075 - DNA, 20 bp, synthetic construct
  misc_feature 1..20: note = chemically synthesized
  source 1..20: mol_type = other DNA
aagcggctccaattcggaag

SEQ ID NO: 1076 - DNA, 20 bp, synthetic construct
  misc_feature 1..20: note = chemically synthesized
  source 1..20: mol_type = other DNA
agcggctccaattcggaagt

SEQ ID NO: 1077 - DNA, 20 bp, synthetic construct
  misc_feature 1..20: note = chemically synthesized
  source 1..20: mol_type = other DNA
gcggctccaattcggaagtg

SEQ ID NO: 1078 - DNA, 20 bp, synthetic construct
  misc_feature 1..20: note = chemically synthesized
  source 1..20: mol_type = other DNA
gctccaattcggaagtgggg

SEQ ID NO: 1079 - DNA, 20 bp, synthetic construct
  misc_feature 1..20: note = chemically synthesized
  source 1..20: mol_type = other DNA
attcggaagtggggtggtcg

SEQ ID NO: 1080 - DNA, 20 bp, synthetic construct
  misc_feature 1..20: note = chemically synthesized
  source 1..20: mol_type = other DNA
ttcggaagtggggtggtcga

SEQ ID NO: 1081 - DNA, 20 bp, synthetic construct
  misc_feature 1..20: note = chemically synthesized
  source 1..20: mol_type = other DNA
tcggaagtggggtggtcgaa

SEQ ID NO: 1082 - DNA, 20 bp, synthetic construct
  misc_feature 1..20: note = chemically synthesized
  source 1..20: mol_type = other DNA
cggaagtggggtggtcgaag

SEQ ID NO: 1083 - DNA, 20 bp, synthetic construct
  misc_feature 1..20: note = chemically synthesized
  source 1..20: mol_type = other DNA
gtggggtggtcgaaggggaa

SEQ ID NO: 1084 - DNA, 20 bp, synthetic construct
  misc_feature 1..20: note = chemically synthesized
  source 1..20: mol_type = other DNA
ggtggtcgaaggggaatggt

SEQ ID NO: 1085 - DNA, 20 bp, synthetic construct
  misc_feature 1..20: note = chemically synthesized
  source 1..20: mol_type = other DNA
gtggtcgaaggggaatggta

SEQ ID NO: 1086 - DNA, 20 bp, synthetic construct
  misc_feature 1..20: note = chemically synthesized
  source 1..20: mol_type = other DNA
tggtcgaaggggaatggtaa

SEQ ID NO: 1087 - DNA, 20 bp, synthetic construct
  misc_feature 1..20: note = chemically synthesized
  source 1..20: mol_type = other DNA
ggtcgaaggggaatggtaag

SEQ ID NO: 1088 - DNA, 20 bp, synthetic construct
  misc_feature 1..20: note = chemically synthesized
  source 1..20: mol_type = other DNA
gtcgaaggggaatggtaagg

SEQ ID NO: 1089 - DNA, 20 bp, synthetic construct
  misc_feature 1..20: note = chemically synthesized
  source 1..20: mol_type = other DNA
aggggaatggtaagggggac

SEQ ID NO: 1090 - DNA, 20 bp, synthetic construct
  misc_feature 1..20: note = chemically synthesized
  source 1..20: mol_type = other DNA
ggggaatggtaagggggact

SEQ ID NO: 1091 - DNA, 20 bp, synthetic construct
  misc_feature 1..20: note = chemically synthesized
  source 1..20: mol_type = other DNA
aatggtaagggggactggga

SEQ ID NO: 1092 - DNA, 20 bp, synthetic construct
  misc_feature 1..20: note = chemically synthesized
  source 1..20: mol_type = other DNA
atggtaagggggactgggac

SEQ ID NO: 1093 - DNA, 20 bp, synthetic construct
  misc_feature 1..20: note = chemically synthesized
  source 1..20: mol_type = other DNA
tggtaagggggactgggacg

SEQ ID NO: 1094 - DNA, 20 bp, synthetic construct
  misc_feature 1..20: note = chemically synthesized
  source 1..20: mol_type = other DNA
gggggactgggacggggtgt

SEQ ID NO: 1095 - DNA, 20 bp, synthetic construct
  misc_feature 1..20: note = chemically synthesized
  source 1..20: mol_type = other DNA
actgggacggggtgtcagca

SEQ ID NO: 1096 - DNA, 20 bp, synthetic construct
  misc_feature 1..20: note = chemically synthesized
  source 1..20: mol_type = other DNA
ctgggacggggtgtcagcat

SEQ ID NO: 1097 - DNA, 20 bp, synthetic construct
  misc_feature 1..20: note = chemically synthesized
  source 1..20: mol_type = other DNA
tgggacggggtgtcagcata

SEQ ID NO: 1098 - DNA, 20 bp, synthetic construct
  misc_feature 1..20: note = chemically synthesized
  source 1..20: mol_type = other DNA
gacggggtgtcagcataggg

SEQ ID NO: 1099 - DNA, 20 bp, synthetic construct
  misc_feature 1..20: note = chemically synthesized
  source 1..20: mol_type = other DNA
ggtgtcagcatagggtggca

SEQ ID NO: 1100 - DNA, 20 bp, synthetic construct
  misc_feature 1..20: note = chemically synthesized
  source 1..20: mol_type = other DNA
cagcatagggtggcaaagcc

SEQ ID NO: 1101 - DNA, 20 bp, synthetic construct
  misc_feature 1..20: note = chemically synthesized
  source 1..20: mol_type = other DNA
agcatagggtggcaaagccc

SEQ ID NO: 1102 - DNA, 20 bp, synthetic construct
  misc_feature 1..20: note = chemically synthesized
  source 1..20: mol_type = other DNA
gcatagggtggcaaagccca

SEQ ID NO: 1103 - DNA, 20 bp, synthetic construct
  misc_feature 1..20: note = chemically synthesized
  source 1..20: mol_type = other DNA
agggtggcaaagcccagggc

SEQ ID NO: 1104 - DNA, 20 bp, synthetic construct
  misc_feature 1..20: note = chemically synthesized
  source 1..20: mol_type = other DNA
gggtggcaaagcccagggcc

SEQ ID NO: 1105 - DNA, 20 bp, synthetic construct
  misc_feature 1..20: note = chemically synthesized
  source 1..20: mol_type = other DNA
aagcccagggccaggaacga

SEQ ID NO: 1106 - DNA, 20 bp, synthetic construct
  misc_feature 1..20: note = chemically synthesized
  source 1..20: mol_type = other DNA
agcccagggccaggaacgac

SEQ ID NO: 1107 - DNA, 20 bp, synthetic construct
  misc_feature 1..20: note = chemically synthesized
  source 1..20: mol_type = other DNA
gcccagggccaggaacgacg

SEQ ID NO: 1108 - DNA, 20 bp, synthetic construct
  misc_feature 1..20: note = chemically synthesized
  source 1..20: mol_type = other DNA
cagggccaggaacgacgggg

SEQ ID NO: 1109 - DNA, 20 bp, synthetic construct
  misc_feature 1..20: note = chemically synthesized
  source 1..20: mol_type = other DNA
caggaacgacggggcggatc

SEQ ID NO: 1110 - DNA, 20 bp, synthetic construct
  misc_feature 1..20: note = chemically synthesized
  source 1..20: mol_type = other DNA
acgacggggcggatcgagac

SEQ ID NO: 1111 - DNA, 20 bp, synthetic construct
  misc_feature 1..20: note = chemically synthesized
  source 1..20: mol_type = other DNA
gggcggatcgagactggcaa

SEQ ID NO: 1112 - DNA, 20 bp, synthetic construct
  misc_feature 1..20: note = chemically synthesized
  source 1..20: mol_type = other DNA
ggcggatcgagactggcaac

SEQ ID NO: 1113 - DNA, 20 bp, synthetic construct
  misc_feature 1..20: note = chemically synthesized
  source 1..20: mol_type = other DNA
gcggatcgagactggcaacg

SEQ ID NO: 1114 - DNA, 20 bp, synthetic construct
  misc_feature 1..20: note = chemically synthesized
  source 1..20: mol_type = other DNA
gatcgagactggcaacgggg

SEQ ID NO: 1115 - DNA, 20 bp, synthetic construct
  misc_feature 1..20: note = chemically synthesized
  source 1..20: mol_type = other DNA
atcgagactggcaacgggga

SEQ ID NO: 1116 - DNA, 20 bp, synthetic construct
  misc_feature 1..20: note = chemically synthesized
  source 1..20: mol_type = other DNA
cgagactggcaacggggaag

SEQ ID NO: 1117 - DNA, 20 bp, synthetic construct
  misc_feature 1..20: note = chemically synthesized
  source 1..20: mol_type = other DNA
gagactggcaacggggaagg

SEQ ID NO: 1118 - DNA, 20 bp, synthetic construct
  misc_feature 1..20: note = chemically synthesized
  source 1..20: mol_type = other DNA
aacggggaaggaggatgccc

SEQ ID NO: 1119 - DNA, 20 bp, synthetic construct
  misc_feature 1..20: note = chemically synthesized
  source 1..20: mol_type = other DNA
acggggaaggaggatgcccc

SEQ ID NO: 1120 - DNA, 20 bp, synthetic construct
  misc_feature 1..20: note = chemically synthesized
  source 1..20: mol_type = other DNA
gggaaggaggatgccccagg

SEQ ID NO: 1121 - DNA, 20 bp, synthetic construct
  misc_feature 1..20: note = chemically synthesized
  source 1..20: mol_type = other DNA
ggaggatgccccaggtggcg

SEQ ID NO: 1122 - DNA, 20 bp, synthetic construct
  misc_feature 1..20: note = chemically synthesized
  source 1..20: mol_type = other DNA
ggatgccccaggtggcgcag

SEQ ID NO: 1123 - DNA, 20 bp, synthetic construct
  misc_feature 1..20: note = chemically synthesized
  source 1..20: mol_type = other DNA
atgccccaggtggcgcagca

SEQ ID NO: 1124 - DNA, 20 bp, synthetic construct
  misc_feature 1..20: note = chemically synthesized
  source 1..20: mol_type = other DNA
tgccccaggtggcgcagcag

SEQ ID NO: 1125 - DNA, 20 bp, synthetic construct
  misc_feature 1..20: note = chemically synthesized
  source 1..20: mol_type = other DNA
gccccaggtggcgcagcaga

SEQ ID NO: 1126 - DNA, 20 bp, synthetic construct
  misc_feature 1..20: note = chemically synthesized
  source 1..20: mol_type = other DNA
ccaggtggcgcagcagaggg

SEQ ID NO: 1127 - DNA, 20 bp, synthetic construct
  misc_feature 1..20: note = chemically synthesized
  source 1..20: mol_type = other DNA
ggcgcagcagagggtggacc

SEQ ID NO: 1128 - DNA, 20 bp, synthetic construct
  misc_feature 1..20: note = chemically synthesized
  source 1..20: mol_type = other DNA
gcagagggtggacctggccc

SEQ ID NO: 1129 - DNA, 20 bp, synthetic construct
  misc_feature 1..20: note = chemically synthesized
  source 1..20: mol_type = other DNA
cagagggtggacctggcccc

SEQ ID NO: 1130 - DNA, 20 bp, synthetic construct
  misc_feature 1..20: note = chemically synthesized
  source 1..20: mol_type = other DNA
gagggtggacctggccccgg

SEQ ID NO: 1131 - DNA, 20 bp, synthetic construct
  misc_feature 1..20: note = chemically synthesized
  source 1..20: mol_type = other DNA
gacctggccccgggagacgc

SEQ ID NO: 1132 - DNA, 20 bp, synthetic construct
  misc_feature 1..20: note = chemically synthesized
  source 1..20: mol_type = other DNA
acctggccccgggagacgcc

SEQ ID NO: 1133 - DNA, 20 bp, synthetic construct
  misc_feature 1..20: note = chemically synthesized
  source 1..20: mol_type = other DNA
tggccccgggagacgccggg

SEQ ID NO: 1134 - DNA, 20 bp, synthetic construct
  misc_feature 1..20: note = chemically synthesized
  source 1..20: mol_type = other DNA
ggccccgggagacgccgggc

SEQ ID NO: 1135 - DNA, 20 bp, synthetic construct
  misc_feature 1..20: note = chemically synthesized
  source 1..20: mol_type = other DNA
gccccgggagacgccgggcg

SEQ ID NO: 1136 - DNA, 20 bp, synthetic construct
  misc_feature 1..20: note = chemically synthesized
  source 1..20: mol_type = other DNA
ccccgggagacgccgggcgg

SEQ ID NO: 1137 - DNA, 20 bp, synthetic construct
  misc_feature 1..20: note = chemically synthesized
  source 1..20: mol_type = other DNA
cccgggagacgccgggcggg

SEQ ID NO: 1138 - DNA, 20 bp, synthetic construct
  misc_feature 1..20: note = chemically synthesized
  source 1..20: mol_type = other DNA
ccgggcggggggcgctgacc

SEQ ID NO: 1139 - DNA, 20 bp, synthetic construct
  misc_feature 1..20: note = chemically synthesized
  source 1..20: mol_type = other DNA
cggggggcgctgacctggtg

SEQ ID NO: 1140 - DNA, 20 bp, synthetic construct
  misc_feature 1..20: note = chemically synthesized
  source 1..20: mol_type = other DNA
ggggggcgctgacctggtgc

SEQ ID NO: 1141 - DNA, 20 bp, synthetic construct
  misc_feature 1..20: note = chemically synthesized
  source 1..20: mol_type = other DNA
gggggcgctgacctggtgca

SEQ ID NO: 1142 - DNA, 20 bp, synthetic construct
  misc_feature 1..20: note = chemically synthesized
  source 1..20: mol_type = other DNA
gtgcagggcgctgataccgt

SEQ ID NO: 1143 - DNA, 20 bp, synthetic construct
  misc_feature 1..20: note = chemically synthesized
  source 1..20: mol_type = other DNA
ggcgctgataccgtcggcgt

SEQ ID NO: 1144 - DNA, 20 bp, synthetic construct
  misc_feature 1..20: note = chemically synthesized
  source 1..20: mol_type = other DNA
gctgataccgtcggcgttgg

SEQ ID NO: 1145 - DNA, 20 bp, synthetic construct
  misc_feature 1..20: note = chemically synthesized
  source 1..20: mol_type = other DNA
tgataccgtcggcgttggtg

SEQ ID NO: 1146 - DNA, 20 bp, synthetic construct
  misc_feature 1..20: note = chemically synthesized
  source 1..20: mol_type = other DNA
ccgtcggcgttggtggagtc

SEQ ID NO: 1147 - DNA, 20 bp, synthetic construct
  misc_feature 1..20: note = chemically synthesized
  source 1..20: mol_type = other DNA
ggcgttggtggagtccagca

SEQ ID NO: 1148 - DNA, 20 bp, synthetic construct
  misc_feature 1..20: note = chemically synthesized
  source 1..20: mol_type = other DNA
tggtggagtccagcacggcg

SEQ ID NO: 1149 - DNA, 20 bp, synthetic construct
  misc_feature 1..20: note = chemically synthesized
  source 1..20: mol_type = other DNA
ggtggagtccagcacggcgc

SEQ ID NO: 1150 - DNA, 20 bp, synthetic construct
  misc_feature 1..20: note = chemically synthesized
  source 1..20: mol_type = other DNA
ggagtccagcacggcgcggg

SEQ ID NO: 1151 - DNA, 20 bp, synthetic construct
  misc_feature 1..20: note = chemically synthesized
  source 1..20: mol_type = other DNA
gagtccagcacggcgcgggc

SEQ ID NO: 1152 - DNA, 20 bp, synthetic construct
  misc_feature 1..20: note = chemically synthesized
  source 1..20: mol_type = other DNA
tccagcacggcgcgggcggg

SEQ ID NO: 1153 - DNA, 20 bp, synthetic construct
  misc_feature 1..20: note = chemically synthesized
  source 1..20: mol_type = other DNA
agcacggcgcgggcgggcgg

SEQ ID NO: 1154 - DNA, 20 bp, synthetic construct
  misc_feature 1..20: note = chemically synthesized
  source 1..20: mol_type = other DNA
ggcgcgggcgggcggcggcg

SEQ ID NO: 1155 - DNA, 20 bp, synthetic construct
  misc_feature 1..20: note = chemically synthesized
  source 1..20: mol_type = other DNA
gcgggcgggcggcggcgcgg

SEQ ID NO: 1156 - DNA, 20 bp, synthetic construct
  misc_feature 1..20: note = chemically synthesized
  source 1..20: mol_type = other DNA
cgggcgggcggcggcgcggc

SEQ ID NO: 1157 - DNA, 20 bp, synthetic construct
  misc_feature 1..20: note = chemically synthesized
  source 1..20: mol_type = other DNA
gggcgggcggcggcgcggcg

SEQ ID NO: 1158 - DNA, 20 bp, synthetic construct
  misc_feature 1..20: note = chemically synthesized
  source 1..20: mol_type = other DNA
ggcggcggcgcggcggggtc

SEQ ID NO: 1159 - DNA, 20 bp, synthetic construct
  misc_feature 1..20: note = chemically synthesized
  source 1..20: mol_type = other DNA
cggcgcggcggggtcgagct

SEQ ID NO: 1160 - DNA, 20 bp, synthetic construct
  misc_feature 1..20: note = chemically synthesized
  source 1..20: mol_type = other DNA
ggcggggtcgagctcggcgc

SEQ ID NO: 1161 - DNA, 20 bp, synthetic construct
  misc_feature 1..20: note = chemically synthesized
  source 1..20: mol_type = other DNA
gcggggtcgagctcggcgcc

SEQ ID NO: 1162 - DNA, 20 bp, synthetic construct
  misc_feature 1..20: note = chemically synthesized
  source 1..20: mol_type = other DNA
cggggtcgagctcggcgccg

SEQ ID NO: 1163 - DNA, 20 bp, synthetic construct
  misc_feature 1..20: note = chemically synthesized
  source 1..20: mol_type = other DNA
gtcgagctcggcgccggggc

SEQ ID NO: 1164 - DNA, 20 bp, synthetic construct
  misc_feature 1..20: note = chemically synthesized
  source 1..20: mol_type = other DNA
tcgagctcggcgccggggcc

SEQ ID NO: 1165 - DNA, 20 bp, synthetic construct
  misc_feature 1..20: note = chemically synthesized
  source 1..20: mol_type = other DNA
cgagctcggcgccggggcca

SEQ ID NO: 1166 - DNA, 20 bp, synthetic construct
  misc_feature 1..20: note = chemically synthesized
  source 1..20: mol_type = other DNA
ctcggcgccggggccagggt

SEQ ID NO: 1167 - DNA, 20 bp, synthetic construct
  misc_feature 1..20: note = chemically synthesized
  source 1..20: mol_type = other DNA
ggcgccggggccagggtcgg

SEQ ID NO: 1168 - DNA, 20 bp, synthetic construct
  misc_feature 1..20: note = chemically synthesized
  source 1..20: mol_type = other DNA
gggccagggtcggcggcgcg

SEQ ID NO: 1169 - DNA, 20 bp, synthetic construct
  misc_feature 1..20: note = chemically synthesized
  source 1..20: mol_type = other DNA
gggtcggcggcgcgcagcat

SEQ ID NO: 1170 - DNA, 20 bp, synthetic construct
  misc_feature 1..20: note = chemically synthesized
  source 1..20: mol_type = other DNA
agcatcagacgcgcctcgtc

SEQ ID NO: 1171 - DNA, 20 bp, synthetic construct
  misc_feature 1..20: note = chemically synthesized
  source 1..20: mol_type = other DNA
gcatcagacgcgcctcgtcc

SEQ ID NO: 1172 - DNA, 20 bp, synthetic construct
  misc_feature 1..20: note = chemically synthesized
  source 1..20: mol_type = other DNA
cgtccaggtcgccgcccgca

SEQ ID NO: 1173 - DNA, 20 bp, synthetic construct
  misc_feature 1..20: note = chemically synthesized
  source 1..20: mol_type = other DNA
gtccaggtcgccgcccgcac

SEQ ID NO: 1174 - DNA, 20 bp, synthetic construct
  misc_feature 1..20: note = chemically synthesized
  source 1..20: mol_type = other DNA
tcgccgcccgcacaggccgc

SEQ ID NO: 1175 - DNA, 20 bp, synthetic construct
  misc_feature 1..20: note = chemically synthesized
  source 1..20: mol_type = other DNA
cgccgcccgcacaggccgcc

SEQ ID NO: 1176 - DNA, 20 bp, synthetic construct
  misc_feature 1..20: note = chemically synthesized
  source 1..20: mol_type = other DNA
cgcacaggccgccaggaact

SEQ ID NO: 1177 - DNA, 20 bp, synthetic construct
  misc_feature 1..20: note = chemically synthesized
  source 1..20: mol_type = other DNA
acaggccgccaggaactcgg

SEQ ID NO: 1178 - DNA, 20 bp, synthetic construct
  misc_feature 1..20: note = chemically synthesized
  source 1..20: mol_type = other DNA
ggaactcggcggcgcgctcg

SEQ ID NO: 1179 - DNA, 20 bp, synthetic construct
  misc_feature 1..20: note = chemically synthesized
  source 1..20: mol_type = other DNA
actcggcggcgcgctcgaag

SEQ ID NO: 1180 - DNA, 20 bp, synthetic construct
  misc_feature 1..20: note = chemically synthesized
  source 1..20: mol_type = other DNA
ggcggcgcgctcgaagcgga

SEQ ID NO: 1181 - DNA, 20 bp, synthetic construct
  misc_feature 1..20: note = chemically synthesized
  source 1..20: mol_type = other DNA
cgcgctcgaagcggacggtg

SEQ ID NO: 1182 - DNA, 20 bp, synthetic construct
  misc_feature 1..20: note = chemically synthesized
  source 1..20: mol_type = other DNA
gcgctcgaagcggacggtgc

SEQ ID NO: 1183 - DNA, 20 bp, synthetic construct
  misc_feature 1..20: note = chemically synthesized
  source 1..20: mol_type = other DNA
cgaagcggacggtgcgggcg

SEQ ID NO: 1184 - DNA, 20 bp, synthetic construct
  misc_feature 1..20: note = chemically synthesized
  source 1..20: mol_type = other DNA
ggtgcgggcgcggcgctctc

SEQ ID NO: 1185 - DNA, 20 bp, synthetic construct
  misc_feature 1..20: note = chemically synthesized
  source 1..20: mol_type = other DNA
gtgcgggcgcggcgctctcc

SEQ ID NO: 1186 - DNA, 20 bp, synthetic construct
  misc_feature 1..20: note = chemically synthesized
  source 1..20: mol_type = other DNA
tgcgggcgcggcgctctccg

SEQ ID NO: 1187 - DNA, 20 bp, synthetic construct
  misc_feature 1..20: note = chemically synthesized
  source 1..20: mol_type = other DNA
ggcgcggcgctctccggggc

SEQ ID NO: 1188 - DNA, 20 bp, synthetic construct
  misc_feature 1..20: note = chemically synthesized
  source 1..20: mol_type = other DNA
gcgcggcgctctccggggcc

SEQ ID NO: 1189 - DNA, 20 bp, synthetic construct
  misc_feature 1..20: note = chemically synthesized
  source 1..20: mol_type = other DNA
gcgctctccggggccaggct

SEQ ID NO: 1190 - DNA, 20 bp, synthetic construct
  misc_feature 1..20: note = chemically synthesized
  source 1..20: mol_type = other DNA
gcccgcgccccccactgccg

SEQ ID NO: 1191 - DNA, 20 bp, synthetic construct
  misc_feature 1..20: note = chemically synthesized
  source 1..20: mol_type = other DNA
gctgctcccgtcgccgctcc

SEQ ID NO: 1192 - DNA, 20 bp, synthetic construct
  misc_feature 1..20: note = chemically synthesized
  source 1..20: mol_type = other DNA
ctgctcccgtcgccgctccc

SEQ ID NO: 1193 - DNA, 20 bp, synthetic construct
  misc_feature 1..20: note = chemically synthesized
  source 1..20: mol_type = other DNA
ctcccgtcgccgctcccggg

SEQ ID NO: 1194 - DNA, 20 bp, synthetic construct
  misc_feature 1..20: note = chemically synthesized
  source 1..20: mol_type = other DNA
gcagccgccgccgccgcccc

SEQ ID NO: 1195 - DNA, 20 bp, synthetic construct
  misc_feature 1..20: note = chemically synthesized
  source 1..20: mol_type = other DNA
cagccgccgccgccgccccc

SEQ ID NO: 1196 - DNA, 20 bp, synthetic construct
  misc_feature 1..20: note = chemically synthesized
  source 1..20: mol_type = other DNA
cgccgccgccgcccccgggc

SEQ ID NO: 1197 - DNA, 20 bp, synthetic construct
  misc_feature 1..20: note = chemically synthesized
  source 1..20: mol_type = other DNA
gccgcccccgggccagccgc

SEQ ID NO: 1198 - DNA, 20 bp, synthetic construct
  misc_feature 1..20: note = chemically synthesized
  source 1..20: mol_type = other DNA
ccgcccccgggccagccgcc

SEQ ID NO: 1199 - DNA, 20 bp, synthetic construct
  misc_feature 1..20: note = chemically synthesized
  source 1..20: mol_type = other DNA
agccgccgggccatcctctc

SEQ ID NO: 1200 - DNA, 20 bp, synthetic construct
  misc_feature 1..20: note = chemically synthesized
  source 1..20: mol_type = other DNA
catcgcaccgcccgcccgcc

SEQ ID NO: 1201 - DNA, 20 bp, synthetic construct
  misc_feature 1..20: note = chemically synthesized
  source 1..20: mol_type = other DNA
gcaccgcccgcccgcccagc

SEQ ID NO: 1202 - DNA, 20 bp, synthetic construct
  misc_feature 1..20: note = chemically synthesized
  source 1..20: mol_type = other DNA
cgcccgcccgcccagcgagc

SEQ ID NO: 1203 - DNA, 20 bp, synthetic construct
  misc_feature 1..20: note = chemically synthesized
  source 1..20: mol_type = other DNA
cgcccgcccagcgagcgagc

SEQ ID NO: 1204 - DNA, 20 bp, synthetic construct
  misc_feature 1..20: note = chemically synthesized
  source 1..20: mol_type = other DNA
ccagcgagcgagcgagcgcc

SEQ ID NO: 1205 - DNA, 20 bp, synthetic construct
  misc_feature 1..20: note = chemically synthesized
  source 1..20: mol_type = other DNA
tggtggcggcggttggggct

SEQ ID NO: 1206 - DNA, 20 bp, synthetic construct
  misc_feature 1..20: note = chemically synthesized
  source 1..20: mol_type = other DNA
ctcggcgctcgctcgctcgc

SEQ ID NO: 1207 - DNA, 20 bp, synthetic construct
  misc_feature 1..20: note = chemically synthesized
  source 1..20: mol_type = other DNA
tcggcgctcgctcgctcgct

SEQ ID NO: 1208 - DNA, 20 bp, synthetic construct
  misc_feature 1..20: note = chemically synthesized
  source 1..20: mol_type = other DNA
gcgctcgctcgctcgctggg

SEQ ID NO: 1209 - DNA, 20 bp, synthetic construct
  misc_feature 1..20: note = chemically synthesized
  source 1..20: mol_type = other DNA
cgctcgctcgctcgctgggc

SEQ ID NO: 1210 - DNA, 20 bp, synthetic construct
  misc_feature 1..20: note = chemically synthesized
  source 1..20: mol_type = other DNA
tcgctcgctcgctgggcggg

SEQ ID NO: 1211 - DNA, 20 bp, synthetic construct
  misc_feature 1..20: note = chemically synthesized
  source 1..20: mol_type = other DNA
cgctcgctcgctgggcgggc

SEQ ID NO: 1212 - DNA, 20 bp, synthetic construct
  misc_feature 1..20: note = chemically synthesized
  source 1..20: mol_type = other DNA
tcgctcgctgggcgggcggg

SEQ ID NO: 1213 - DNA, 20 bp, synthetic construct
  misc_feature 1..20: note = chemically synthesized
  source 1..20: mol_type = other DNA
cgggcgggcggtgcgatgtc

SEQ ID NO: 1214 - DNA, 20 bp, synthetic construct
  misc_feature 1..20: note = chemically synthesized
  source 1..20: mol_type = other DNA
ggcgggcggtgcgatgtccg

SEQ ID NO: 1215 - DNA, 20 bp, synthetic construct
  misc_feature 1..20: note = chemically synthesized
  source 1..20: mol_type = other DNA
cgggcggtgcgatgtccgga

SEQ ID NO: 1216 - DNA, 20 bp, synthetic construct
  misc_feature 1..20: note = chemically synthesized
  source 1..20: mol_type = other DNA
gggcggtgcgatgtccggag

SEQ ID NO: 1217 - DNA, 20 bp, synthetic construct
  misc_feature 1..20: note = chemically synthesized
  source 1..20: mol_type = other DNA
ggtgcgatgtccggagagga

SEQ ID NO: 1218 - DNA, 20 bp, synthetic construct
  misc_feature 1..20: note = chemically synthesized
  source 1..20: mol_type = other DNA
gatgtccggagaggatggcc

SEQ ID NO: 1219 - DNA, 20 bp, synthetic construct
  misc_feature 1..20: note = chemically synthesized
  source 1..20: mol_type = other DNA
gtccggagaggatggcccgg

SEQ ID NO: 1220 - DNA, 20 bp, synthetic construct
  misc_feature 1..20: note = chemically synthesized
  source 1..20: mol_type = other DNA
ggagaggatggcccggcggc

SEQ ID NO: 1221 - DNA, 20 bp, synthetic construct
  misc_feature 1..20: note = chemically synthesized
  source 1..20: mol_type = other DNA
ggatggcccggcggctggcc

SEQ ID NO: 1222 - DNA, 20 bp, synthetic construct
  misc_feature 1..20: note = chemically synthesized
  source 1..20: mol_type = other DNA
gatggcccggcggctggccc

SEQ ID NO: 1223 - DNA, 20 bp, synthetic construct
  misc_feature 1..20: note = chemically synthesized
  source 1..20: mol_type = other DNA
atggcccggcggctggcccg

SEQ ID NO: 1224 - DNA, 20 bp, synthetic construct
  misc_feature 1..20: note = chemically synthesized
  source 1..20: mol_type = other DNA
tggcccggcggctggcccgg

SEQ ID NO: 1225 - DNA, 20 bp, synthetic construct
  misc_feature 1..20: note = chemically synthesized
  source 1..20: mol_type = other DNA
cccggcggctggcccggggg

SEQ ID NO: 1226 - DNA, 20 bp, synthetic construct
  misc_feature 1..20: note = chemically synthesized
  source 1..20: mol_type = other DNA
ggcggctggcccgggggcgg

SEQ ID NO: 1227 - DNA, 20 bp, synthetic construct
  misc_feature 1..20: note = chemically synthesized
  source 1..20: mol_type = other DNA
ggctggcccgggggcggcgg

SEQ ID NO: 1228 - DNA, 20 bp, synthetic construct
  misc_feature 1..20: note = chemically synthesized
  source 1..20: mol_type = other DNA
tggcccgggggcggcggcgg

SEQ ID NO: 1229 - DNA, 20 bp, synthetic construct
  misc_feature 1..20: note = chemically synthesized
  source 1..20: mol_type = other DNA
gggcggcggcggcggctgcc

SEQ ID NO: 1230 - DNA, 20 bp, synthetic construct
  misc_feature 1..20: note = chemically synthesized
  source 1..20: mol_type = other DNA
ggcggcggcggcggctgccc

SEQ ID NO: 1231 - DNA, 20 bp, synthetic construct
  misc_feature 1..20: note = chemically synthesized
  source 1..20: mol_type = other DNA
cggcggcggcggctgcccgg

SEQ ID NO: 1232 - DNA, 20 bp, synthetic construct
  misc_feature 1..20: note = chemically synthesized
  source 1..20: mol_type = other DNA
cggcggcggctgcccgggag

SEQ ID NO: 1233 - DNA, 20 bp, synthetic construct
  misc_feature 1..20: note = chemically synthesized
  source 1..20: mol_type = other DNA
cggctgcccgggagcggcga

SEQ ID NO: 1234 - DNA, 20 bp, synthetic construct
  misc_feature 1..20: note = chemically synthesized
  source 1..20: mol_type = other DNA
ggctgcccgggagcggcgac

SEQ ID NO: 1235 - DNA, 20 bp, synthetic construct
  misc_feature 1..20: note = chemically synthesized
  source 1..20: mol_type = other DNA
ctgcccgggagcggcgacgg

SEQ ID NO: 1236 - DNA, 20 bp, synthetic construct
  misc_feature 1..20: note = chemically synthesized
  source 1..20: mol_type = other DNA
cccgggagcggcgacgggag

SEQ ID NO: 1237 - DNA, 20 bp, synthetic construct
  misc_feature 1..20: note = chemically synthesized
  source 1..20: mol_type = other DNA
agcggcgacgggagcagctg

SEQ ID NO: 1238 - DNA, 20 bp, synthetic construct
  misc_feature 1..20: note = chemically synthesized
  source 1..20: mol_type = other DNA
ggcgacgggagcagctgcgg

SEQ ID NO: 1239 - DNA, 20 bp, synthetic construct
  misc_feature 1..20: note = chemically synthesized
  source 1..20: mol_type = other DNA
gacgggagcagctgcggcag

SEQ ID NO: 1240 - DNA, 20 bp, synthetic construct
  misc_feature 1..20: note = chemically synthesized
  source 1..20: mol_type = other DNA
acgggagcagctgcggcagt

SEQ ID NO: 1241 - DNA, 20 bp, synthetic construct
  misc_feature 1..20: note = chemically synthesized
  source 1..20: mol_type = other DNA
cgggagcagctgcggcagtg

SEQ ID NO: 1242 - DNA, 20 bp, synthetic construct
  misc_feature 1..20: note = chemically synthesized
  source 1..20: mol_type = other DNA
gggagcagctgcggcagtgg

SEQ ID NO: 1243 - DNA, 20 bp, synthetic construct
  misc_feature 1..20: note = chemically synthesized
  source 1..20: mol_type = other DNA
ggagcagctgcggcagtggg

SEQ ID NO: 1244 - DNA, 20 bp, synthetic construct
  misc_feature 1..20: note = chemically synthesized
  source 1..20: mol_type = other DNA
agctgcggcagtggggggcg

SEQ ID NO: 1245 - DNA, 20 bp, synthetic construct
  misc_feature 1..20: note = chemically synthesized
  source 1..20: mol_type = other DNA
gctgcggcagtggggggcgc

SEQ ID NO: 1246 - DNA, 20 bp, synthetic construct
  misc_feature 1..20: note = chemically synthesized
  source 1..20: mol_type = other DNA
gcggcagtggggggcgcggg

SEQ ID NO: 1247 - DNA, 20 bp, synthetic construct
  misc_feature 1..20: note = chemically synthesized
  source 1..20: mol_type = other DNA
cggcagtggggggcgcgggc

SEQ ID NO: 1248 - DNA, 20 bp, synthetic construct
  misc_feature 1..20: note = chemically synthesized
  source 1..20: mol_type = other DNA
ggggggcgcgggcgggcgcc

SEQ ID NO: 1249 - DNA, 20 bp, synthetic construct
  misc_feature 1..20: note = chemically synthesized
  source 1..20: mol_type = other DNA
gcgcgggcgggcgccgagcc

SEQ ID NO: 1250 - DNA, 20 bp, synthetic construct
  misc_feature 1..20: note = chemically synthesized
  source 1..20: mol_type = other DNA
gcgggcgccgagcctggccc

SEQ ID NO: 1251 - DNA, 20 bp, synthetic construct
  misc_feature 1..20: note = chemically synthesized
  source 1..20: mol_type = other DNA
gggcgccgagcctggccccg

SEQ ID NO: 1252 - DNA, 20 bp, synthetic construct
  misc_feature 1..20: note = chemically synthesized
  source 1..20: mol_type = other DNA
gcgccgagcctggccccgga

SEQ ID NO: 1253 - DNA, 20 bp, synthetic construct
  misc_feature 1..20: note = chemically synthesized
  source 1..20: mol_type = other DNA
gcgcccgcaccgtccgcttc

SEQ ID NO: 1254 - DNA, 20 bp, synthetic construct
  misc_feature 1..20: note = chemically synthesized
  source 1..20: mol_type = other DNA
tccgcttcgagcgcgccgcc

SEQ ID NO: 1255 - DNA, 20 bp, synthetic construct
  misc_feature 1..20: note = chemically synthesized
  source 1..20: mol_type = other DNA
cgagcgcgccgccgagttcc

SEQ ID NO: 1256 - DNA, 20 bp, synthetic construct
  misc_feature 1..20: note = chemically synthesized
  source 1..20: mol_type = other DNA
gcgcgccgccgagttcctgg

SEQ ID NO: 1257 - DNA, 20 bp, synthetic construct
  misc_feature 1..20: note = chemically synthesized
  source 1..20: mol_type = other DNA
cgagttcctggcggcctgtg

SEQ ID NO: 1258 - DNA, 20 bp, synthetic construct
  misc_feature 1..20: note = chemically synthesized
  source 1..20: mol_type = other DNA
gagttcctggcggcctgtgc

SEQ ID NO: 1259 - DNA, 20 bp, synthetic construct
  misc_feature 1..20: note = chemically synthesized
  source 1..20: mol_type = other DNA
ttcctggcggcctgtgcggg

SEQ ID NO: 1260 - DNA, 20 bp, synthetic construct
  misc_feature 1..20: note = chemically synthesized
  source 1..20: mol_type = other DNA
ggcctgtgcgggcggcgacc

SEQ ID NO: 1261 - DNA, 20 bp, synthetic construct
  misc_feature 1..20: note = chemically synthesized
  source 1..20: mol_type = other DNA
gtgcgggcggcgacctggac

SEQ ID NO: 1262 - DNA, 20 bp, synthetic construct
  misc_feature 1..20: note = chemically synthesized
  source 1..20: mol_type = other DNA
tgcgggcggcgacctggacg

SEQ ID NO: 1263 - DNA, 20 bp, synthetic construct
  misc_feature 1..20: note = chemically synthesized
  source 1..20: mol_type = other DNA
atgctgcgcgccgccgaccc

SEQ ID NO: 1264 - DNA, 20 bp, synthetic construct
  misc_feature 1..20: note = chemically synthesized
  source 1..20: mol_type = other DNA
cgcgccgccgaccctggccc

SEQ ID NO: 1265 - DNA, 20 bp, synthetic construct
  misc_feature 1..20: note = chemically synthesized
  source 1..20: mol_type = other DNA
ccgaccctggccccggcgcc

SEQ ID NO: 1266 - DNA, 20 bp, synthetic construct
  misc_feature 1..20: note = chemically synthesized
  source 1..20: mol_type = other DNA
gccgcccgcccgcgccgtgc

SEQ ID NO: 1267 - DNA, 20 bp, synthetic construct
  misc_feature 1..20: note = chemically synthesized
  source 1..20: mol_type = other DNA
ctggactccaccaacgccga

SEQ ID NO: 1268 - DNA, 20 bp, synthetic construct
  misc_feature 1..20: note = chemically synthesized
  source 1..20: mol_type = other DNA
tccaccaacgccgacggtat

SEQ ID NO: 1269 - DNA, 20 bp, synthetic construct
  misc_feature 1..20: note = chemically synthesized
  source 1..20: mol_type = other DNA
acggtatcagcgccctgcac

SEQ ID NO: 1270 - DNA, 20 bp, synthetic construct
  misc_feature 1..20: note = chemically synthesized
  source 1..20: mol_type = other DNA
cggtatcagcgccctgcacc

SEQ ID NO: 1271 - DNA, 20 bp, synthetic construct
  misc_feature 1..20: note = chemically synthesized
  source 1..20: mol_type = other DNA
atcagcgccctgcaccaggt

SEQ ID NO: 1272 - DNA, 20 bp, synthetic construct
  misc_feature 1..20: note = chemically synthesized
  source 1..20: mol_type = other DNA
ccaggtcagcgccccccgcc

SEQ ID NO: 1273 - DNA, 20 bp, synthetic construct
  misc_feature 1..20: note = chemically synthesized
  source 1..20: mol_type = other DNA
gccccccgcccggcgtctcc

SEQ ID NO: 1274 - DNA, 20 bp, synthetic construct
  misc_feature 1..20: note = chemically synthesized
  source 1..20: mol_type = other DNA
ccccccgcccggcgtctccc

SEQ ID NO: 1275 - DNA, 20 bp, synthetic construct
  misc_feature 1..20: note = chemically synthesized
  source 1..20: mol_type = other DNA
cccccgcccggcgtctcccg

SEQ ID NO: 1276 - DNA, 20 bp, synthetic construct
  misc_feature 1..20: note = chemically synthesized
  source 1..20: mol_type = other DNA
cgcccggcgtctcccggggc

SEQ ID NO: 1277 - DNA, 20 bp, synthetic construct
  misc_feature 1..20: note = chemically synthesized
  source 1..20: mol_type = other DNA
gcccggcgtctcccggggcc

SEQ ID NO: 1278 - DNA, 20 bp, synthetic construct
  misc_feature 1..20: note = chemically synthesized
  source 1..20: mol_type = other DNA
ccaccctctgctgcgccacc

SEQ ID NO: 1279 - DNA, 20 bp, synthetic construct
  misc_feature 1..20: note = chemically synthesized
  source 1..20: mol_type = other DNA
caccctctgctgcgccacct

SEQ ID NO: 1280 - DNA, 20 bp, synthetic construct
  misc_feature 1..20: note = chemically synthesized
  source 1..20: mol_type = other DNA
accctctgctgcgccacctg

SEQ ID NO: 1281 - DNA, 20 bp, synthetic construct
  misc_feature 1..20: note = chemically synthesized
  source 1..20: mol_type = other DNA
gcatcctccttccccgttgc

SEQ ID NO: 1282 - DNA, 20 bp, synthetic construct
  misc_feature 1..20: note = chemically synthesized
  source 1..20: mol_type = other DNA
tcgatccgccccgtcgttcc

SEQ ID NO: 1283 - DNA, 20 bp, synthetic construct
  misc_feature 1..20: note = chemically synthesized
  source 1..20: mol_type = other DNA
cgccccgtcgttcctggccc

SEQ ID NO: 1284 - DNA, 20 bp, synthetic construct
  misc_feature 1..20: note = chemically synthesized
  source 1..20: mol_type = other DNA
gccccgtcgttcctggccct

SEQ ID NO: 1285 - DNA, 20 bp, synthetic construct
  misc_feature 1..20: note = chemically synthesized
  source 1..20: mol_type = other DNA
cctatgctgacaccccgtcc

SEQ ID NO: 1286 - DNA, 20 bp, synthetic construct
  misc_feature 1..20: note = chemically synthesized
  source 1..20: mol_type = other DNA
cgaccaccccacttccgaat

SEQ ID NO: 1287 - DNA, 20 bp, synthetic construct
  misc_feature 1..20: note = chemically synthesized
  source 1..20: mol_type = other DNA
accaccccacttccgaattg

SEQ ID NO: 1288 - DNA, 20 bp, synthetic construct
  misc_feature 1..20: note = chemically synthesized
  source 1..20: mol_type = other DNA
cgaattggagccgcttcaac

SEQ ID NO: 1289 - DNA, 20 bp, synthetic construct
  misc_feature 1..20: note = chemically synthesized
  source 1..20: mol_type = other DNA
ggagccgcttcaactggccc

SEQ ID NO: 1290 - DNA, 20 bp, synthetic construct
  misc_feature 1..20: note = chemically synthesized
  source 1..20: mol_type = other DNA
gagccgcttcaactggccct

SEQ ID NO: 1291 - DNA, 20 bp, synthetic construct
  misc_feature 1..20: note = chemically synthesized
  source 1..20: mol_type = other DNA
gcttcaactggccctgggct

SEQ ID NO: 1292 - DNA, 20 bp, synthetic construct
  misc_feature 1..20: note = chemically synthesized
  source 1..20: mol_type = other DNA
ctgtgctgaccactctgccc

SEQ ID NO: 1293 - DNA, 20 bp, synthetic construct
  misc_feature 1..20: note = chemically synthesized
  source 1..20: mol_type = other DNA
tgtgctgaccactctgcccc

SEQ ID NO: 1294 - DNA, 20 bp, synthetic construct
  misc_feature 1..20: note = chemically synthesized
  source 1..20: mol_type = other DNA
cgacctactctcttccgcat

SEQ ID NO: 1295 - DNA, 20 bp, synthetic construct
  misc_feature 1..20: note = chemically synthesized
  source 1..20: mol_type = other DNA
acctactctcttccgcattg

SEQ ID NO: 1296 - DNA, 20 bp, synthetic construct
  misc_feature 1..20: note = chemically synthesized
  source 1..20: mol_type = other DNA
cgcattggagtcgctttaac

SEQ ID NO: 1297 - DNA, 20 bp, synthetic construct
  misc_feature 1..20: note = chemically synthesized
  source 1..20: mol_type = other DNA
ggagtcgctttaactggccc

SEQ ID NO: 1298 - DNA, 20 bp, synthetic construct
  misc_feature 1..20: note = chemically synthesized
  source 1..20: mol_type = other DNA
gctttaactggccctggctt

SEQ ID NO: 1299 - DNA, 20 bp, synthetic construct
  misc_feature 1..20: note = chemically synthesized
  source 1..20: mol_type = other DNA
ttaactggccctggctttgg

SEQ ID NO: 1300 - DNA, 20 bp, synthetic construct
  misc_feature 1..20: note = chemically synthesized
  source 1..20: mol_type = other DNA
gcagcctgtgctgacccatg

SEQ ID NO: 1301 - DNA, 20 bp, synthetic construct
  misc_feature 1..20: note = chemically synthesized
  source 1..20: mol_type = other DNA
acttcccctcttccgatgtt

SEQ ID NO: 1302 - DNA, 20 bp, synthetic construct
  misc_feature 1..20: note = chemically synthesized
  source 1..20: mol_type = other DNA
cttccgatgttgagcccctc

SEQ ID NO: 1303 - DNA, 20 bp, synthetic construct
  misc_feature 1..20: note = chemically synthesized
  source 1..20: mol_type = other DNA
cgatgttgagcccctccagc

SEQ ID NO: 1304 - DNA, 20 bp, synthetic construct
  misc_feature 1..20: note = chemically synthesized
  source 1..20: mol_type = other DNA
tgagcccctccagccggtcc

SEQ ID NO: 1305 - DNA, 20 bp, synthetic construct
  misc_feature 1..20: note = chemically synthesized
  source 1..20: mol_type = other DNA
ccctgccctctcctgaacct

SEQ ID NO: 1306 - DNA, 20 bp, synthetic construct
  misc_feature 1..20: note = chemically synthesized
  source 1..20: mol_type = other DNA
gccctctcctgaacctgagc

SEQ ID NO: 1307 - DNA, 20 bp, synthetic construct
  misc_feature 1..20: note = chemically synthesized
  source 1..20: mol_type = other DNA
tgaacctgagccagctccca

SEQ ID NO: 1308 - DNA, 20 bp, synthetic construct
  misc_feature 1..20: note = chemically synthesized
  source 1..20: mol_type = other DNA
ctgagccagctcccatagct

SEQ ID NO: 1309 - DNA, 20 bp, synthetic construct
  misc_feature 1..20: note = chemically synthesized
  source 1..20: mol_type = other DNA
ccagctcccatagctcagtc

SEQ ID NO: 1310 - DNA, 20 bp, synthetic construct
  misc_feature 1..20: note = chemically synthesized
  source 1..20: mol_type = other DNA
ctcagtctggtctatctgcc

SEQ ID NO: 1311 - DNA, 20 bp, synthetic construct
  misc_feature 1..20: note = chemically synthesized
  source 1..20: mol_type = other DNA
ctggtctatctgcctggccc

SEQ ID NO: 1312 - DNA, 20 bp, synthetic construct
  misc_feature 1..20: note = chemically synthesized
  source 1..20: mol_type = other DNA
gctgccctcctctcgccccc

SEQ ID NO: 1313 - DNA, 20 bp, synthetic construct
  misc_feature 1..20: note = chemically synthesized
  source 1..20: mol_type = other DNA
gagtgcccttgctgtgccgc

SEQ ID NO: 1314 - DNA, 20 bp, synthetic construct
  misc_feature 1..20: note = chemically synthesized
  source 1..20: mol_type = other DNA
aacgctgccgtctctctcct

SEQ ID NO: 1315 - DNA, 20 bp, synthetic construct
  misc_feature 1..20: note = chemically synthesized
  source 1..20: mol_type = other DNA
tgccgtctctctcctgagtc

SEQ ID NO: 1316 - DNA, 20 bp, synthetic construct
  misc_feature 1..20: note = chemically synthesized
  source 1..20: mol_type = other DNA
tcctgagtccggaccacttt

SEQ ID NO: 1317 - DNA, 20 bp, synthetic construct
  misc_feature 1..20: note = chemically synthesized
  source 1..20: mol_type = other DNA
cggaccactttgagctctac

SEQ ID NO: 1318 - DNA, 20 bp, synthetic construct
  misc_feature 1..20: note = chemically synthesized
  source 1..20: mol_type = other DNA
actggcttctgcgccgcctc

SEQ ID NO: 1319 - DNA, 20 bp, synthetic construct
  misc_feature 1..20: note = chemically synthesized
  source 1..20: mol_type = other DNA
ggcccactgtttccccttcc

SEQ ID NO: 1320 - DNA, 20 bp, synthetic construct
  misc_feature 1..20: note = chemically synthesized
  source 1..20: mol_type = other DNA
gcccactgtttccccttccc

SEQ ID NO: 1321 - DNA, 20 bp, synthetic construct
  misc_feature 1..20: note = chemically synthesized
  source 1..20: mol_type = other DNA
cactgtttccccttcccagg

SEQ ID NO: 1322 - DNA, 20 bp, synthetic construct
  misc_feature 1..20: note = chemically synthesized
  source 1..20: mol_type = other DNA
actgtttccccttcccaggc

SEQ ID NO: 1323 - DNA, 20 bp, synthetic construct
  misc_feature 1..20: note = chemically synthesized
  source 1..20: mol_type = other DNA
ctgacctgcattctctcccc

SEQ ID NO: 1324 - DNA, 20 bp, synthetic construct
  misc_feature 1..20: note = chemically synthesized
  source 1..20: mol_type = other DNA
tgacctgcattctctcccct

SEQ ID NO: 1325 - DNA, 20 bp, synthetic construct
  misc_feature 1..20: note = chemically synthesized
  source 1..20: mol_type = other DNA
cctgtgccgctttctgtctg

SEQ ID NO: 1326 - DNA, 20 bp, synthetic construct
  misc_feature 1..20: note = chemically synthesized
  source 1..20: mol_type = other DNA
cgctttctgtctgcagcttg

SEQ ID NO: 1327 - DNA, 20 bp, synthetic construct
  misc_feature 1..20: note = chemically synthesized
  source 1..20: mol_type = other DNA
tctgtctgcagcttgtggcc

SEQ ID NO: 1328 - DNA, 20 bp, synthetic construct
  misc_feature 1..20: note = chemically synthesized
  source 1..20: mol_type = other DNA
ctgtctgcagcttgtggcct

SEQ ID NO: 1329 - DNA, 20 bp, synthetic construct
  misc_feature 1..20: note = chemically synthesized
  source 1..20: mol_type = other DNA
tgtggcctgggtcacctcta

SEQ ID NO: 1330 - DNA, 20 bp, synthetic construct
  misc_feature 1..20: note = chemically synthesized
  source 1..20: mol_type = other DNA
gcctgggtcacctctacggc

SEQ ID NO: 1331 - DNA, 20 bp, synthetic construct
  misc_feature 1..20: note = chemically synthesized
  source 1..20: mol_type = other DNA
ggtcacctctacggctggcc

SEQ ID NO: 1332 - DNA, 20 bp, synthetic construct
  misc_feature 1..20: note = chemically synthesized
  source 1..20: mol_type = other DNA
tccttccctgccgcctcctt

SEQ ID NO: 1333 - DNA, 20 bp, synthetic construct
  misc_feature 1..20: note = chemically synthesized
  source 1..20: mol_type = other DNA
ccttccctgccgcctccttc

SEQ ID NO: 1334 - DNA, 20 bp, synthetic construct
  misc_feature 1..20: note = chemically synthesized
  source 1..20: mol_type = other DNA
tctctgctgtgttgctgccc

SEQ ID NO: 1335 - DNA, 20 bp, synthetic construct
  misc_feature 1..20: note = chemically synthesized
  source 1..20: mol_type = other DNA
ctctgctgtgttgctgccca

SEQ ID NO: 1336 - DNA, 20 bp, synthetic construct
  misc_feature 1..20: note = chemically synthesized
  source 1..20: mol_type = other DNA
ctgcccaaggatgctctttc

SEQ ID NO: 1337 - DNA, 20 bp, synthetic construct
  misc_feature 1..20: note = chemically synthesized
  source 1..20: mol_type = other DNA
gcccaaggatgctctttccg

SEQ ID NO: 1338 - DNA, 20 bp, synthetic construct
  misc_feature 1..20: note = chemically synthesized
  source 1..20: mol_type = other DNA
tttccggagcacttccttct

SEQ ID NO: 1339 - DNA, 20 bp, synthetic construct
  misc_feature 1..20: note = chemically synthesized
  source 1..20: mol_type = other DNA
tgcaccacgtgatgtcctct

SEQ ID NO: 1340 - DNA, 20 bp, synthetic construct
  misc_feature 1..20: note = chemically synthesized
  source 1..20: mol_type = other DNA
accacgtgatgtcctctgag

SEQ ID NO: 1341 - DNA, 20 bp, synthetic construct
  misc_feature 1..20: note = chemically synthesized
  source 1..20: mol_type = other DNA
gagcggatcctccccgtgtc

SEQ ID NO: 1342 - DNA, 20 bp, synthetic construct
  misc_feature 1..20: note = chemically synthesized
  source 1..20: mol_type = other DNA
agcggatcctccccgtgtct

SEQ ID NO: 1343 - DNA, 20 bp, synthetic construct
  misc_feature 1..20: note = chemically synthesized
  source 1..20: mol_type = other DNA
ccccgtgtctgggtcctctc

SEQ ID NO: 1344 - DNA, 20 bp, synthetic construct
  misc_feature 1..20: note = chemically synthesized
  source 1..20: mol_type = other DNA
cccgtgtctgggtcctctcc

SEQ ID NO: 1345 - DNA, 20 bp, synthetic construct
  misc_feature 1..20: note = chemically synthesized
  source 1..20: mol_type = other DNA
cccatgccgtcttcactcgc

SEQ ID NO: 1346 - DNA, 20 bp, synthetic construct
  misc_feature 1..20: note = chemically synthesized
  source 1..20: mol_type = other DNA
ccatgccgtcttcactcgct

SEQ ID NO: 1347 - DNA, 20 bp, synthetic construct
  misc_feature 1..20: note = chemically synthesized
  source 1..20: mol_type = other DNA
ttcccttttccttctccttc

SEQ ID NO: 1348 - DNA, 20 bp, synthetic construct
  misc_feature 1..20: note = chemically synthesized
  source 1..20: mol_type = other DNA
tcccttttccttctccttct

SEQ ID NO: 1349 - DNA, 20 bp, synthetic construct
  misc_feature 1..20: note = chemically synthesized
  source 1..20: mol_type = other DNA
cccttttccttctccttctg

SEQ ID NO: 1350 - DNA, 20 bp, synthetic construct
  misc_feature 1..20: note = chemically synthesized
  source 1..20: mol_type = other DNA
ctgtgccatctctcgtttct

SEQ ID NO: 1351 - DNA, 20 bp, synthetic construct
  misc_feature 1..20: note = chemically synthesized
  source 1..20: mol_type = other DNA
tgtgccatctctcgtttctt

SEQ ID NO: 1352 - DNA, 20 bp, synthetic construct
  misc_feature 1..20: note = chemically synthesized
  source 1..20: mol_type = other DNA
ccatctctcgtttcttagga

SEQ ID NO: 1353 - DNA, 20 bp, synthetic construct
  misc_feature 1..20: note = chemically synthesized
  source 1..20: mol_type = other DNA
cttaggatggccttctccga

SEQ ID NO: 1354 - DNA, 20 bp, synthetic construct
  misc_feature 1..20: note = chemically synthesized
  source 1..20: mol_type = other DNA
cgtcccgcctccccttcttg

SEQ ID NO: 1355 - DNA, 20 bp, synthetic construct
  misc_feature 1..20: note = chemically synthesized
  source 1..20: mol_type = other DNA
gtcccgcctccccttcttgt

SEQ ID NO: 1356 - DNA, 20 bp, synthetic construct
  misc_feature 1..20: note = chemically synthesized
  source 1..20: mol_type = other DNA
ctgcatcatcaccgtttttc

SEQ ID NO: 1357 - DNA, 20 bp, synthetic construct
  misc_feature 1..20: note = chemically synthesized
  source 1..20: mol_type = other DNA
cgtttttctggacaacccca

SEQ ID NO: 1358 - DNA, 20 bp, synthetic construct
  misc_feature 1..20: note = chemically synthesized
  source 1..20: mol_type = other DNA
cccaaagtaccccgtctccc

SEQ ID NO: 1359 - DNA, 20 bp, synthetic construct
  misc_feature 1..20: note = chemically synthesized
  source 1..20: mol_type = other DNA
gtaccccgtctccctggctt

SEQ ID NO: 1360 - DNA, 20 bp, synthetic construct
  misc_feature 1..20: note = chemically synthesized
  source 1..20: mol_type = other DNA
atcctcttgctttctttgcc

SEQ ID NO: 1361 - DNA, 20 bp, synthetic construct
  misc_feature 1..20: note = chemically synthesized
  source 1..20: mol_type = other DNA
ctggacaccccgttctcctg

SEQ ID NO: 1362 - DNA, 20 bp, synthetic construct
  misc_feature 1..20: note = chemically synthesized
  source 1..20: mol_type = other DNA
accccgttctcctgtggatt

SEQ ID NO: 1363 - DNA, 20 bp, synthetic construct
  misc_feature 1..20: note = chemically synthesized
  source 1..20: mol_type = other DNA
ccccgttctcctgtggattc

SEQ ID NO: 1364 - DNA, 20 bp, synthetic construct
  misc_feature 1..20: note = chemically synthesized
  source 1..20: mol_type = other DNA
cacctctcactcctttcatt

SEQ ID NO: 1365 - DNA, 20 bp, synthetic construct
  misc_feature 1..20: note = chemically synthesized
  source 1..20: mol_type = other DNA
acctctcactcctttcattt

SEQ ID NO: 1366 - DNA, 20 bp, synthetic construct
  misc_feature 1..20: note = chemically synthesized
  source 1..20: mol_type = other DNA
tctcactcctttcatttggg

SEQ ID NO: 1367 - DNA, 20 bp, synthetic construct
  misc_feature 1..20: note = chemically synthesized
  source 1..20: mol_type = other DNA
ccctaccccccttacctctc

SEQ ID NO: 1368 - DNA, 20 bp, synthetic construct
  misc_feature 1..20: note = chemically synthesized
  source 1..20: mol_type = other DNA
cttacctctctagtctgtgc

SEQ ID NO: 1369 - DNA, 20 bp, synthetic construct
  misc_feature 1..20: note = chemically synthesized
  source 1..20: mol_type = other DNA
ctagtctgtgctagctcttc

SEQ ID NO: 1370 - DNA, 20 bp, synthetic construct
  misc_feature 1..20: note = chemically synthesized
  source 1..20: mol_type = other DNA
gctcttccagccccctgtca

SEQ ID NO: 1371 - DNA, 20 bp, synthetic construct
  misc_feature 1..20: note = chemically synthesized
  source 1..20: mol_type = other DNA
ccccctgtcatggcatcttc

SEQ ID NO: 1372 - DNA, 20 bp, synthetic construct
  misc_feature 1..20: note = chemically synthesized
  source 1..20: mol_type = other DNA
cccctgtcatggcatcttcc

SEQ ID NO: 1373 - DNA, 20 bp, synthetic construct
  misc_feature 1..20: note = chemically synthesized
  source 1..20: mol_type = other DNA
ccctgtcatggcatcttcca

SEQ ID NO: 1374 - DNA, 20 bp, synthetic construct
  misc_feature 1..20: note = chemically synthesized
  source 1..20: mol_type = other DNA
cctgtcatggcatcttccag

SEQ ID NO: 1375 - DNA, 20 bp, synthetic construct
  misc_feature 1..20: note = chemically synthesized
  source 1..20: mol_type = other DNA
atggcatcttccaggggtcc

SEQ ID NO: 1376 - DNA, 20 bp, synthetic construct
  misc_feature 1..20: note = chemically synthesized
  source 1..20: mol_type = other DNA
ggcatcttccaggggtccga

SEQ ID NO: 1377 - DNA, 20 bp, synthetic construct
  misc_feature 1..20: note = chemically synthesized
  source 1..20: mol_type = other DNA
cttccaggggtccgagagct

SEQ ID NO: 1378 - DNA, 20 bp, synthetic construct
  misc_feature 1..20: note = chemically synthesized
  source 1..20: mol_type = other DNA
caggggtccgagagctcagc

SEQ ID NO: 1379 - DNA, 20 bp, synthetic construct
  misc_feature 1..20: note = chemically synthesized
  source 1..20: mol_type = other DNA
ctagtcttcttcctccaacc

SEQ ID NO: 1380 - DNA, 20 bp, synthetic construct
  misc_feature 1..20: note = chemically synthesized
  source 1..20: mol_type = other DNA
tagtcttcttcctccaaccc

SEQ ID NO: 1381 - DNA, 20 bp, synthetic construct
  misc_feature 1..20: note = chemically synthesized
  source 1..20: mol_type = other DNA
ccgggcccctatgtccactt

SEQ ID NO: 1382 - DNA, 20 bp, synthetic construct
  misc_feature 1..20: note = chemically synthesized
  source 1..20: mol_type = other DNA
cgggcccctatgtccacttc

SEQ ID NO: 1383 - DNA, 20 bp, synthetic construct
  misc_feature 1..20: note = chemically synthesized
  source 1..20: mol_type = other DNA
cccctatgtccacttcagga

SEQ ID NO: 1384 - DNA, 20 bp, synthetic construct
  misc_feature 1..20: note = chemically synthesized
  source 1..20: mol_type = other DNA
gacagcatgtttgctgcctc

SEQ ID NO: 1385 - DNA, 20 bp, synthetic construct
  misc_feature 1..20: note = chemically synthesized
  source 1..20: mol_type = other DNA
acagcatgtttgctgcctcc

SEQ ID NO: 1386 - DNA, 20 bp, synthetic construct
  misc_feature 1..20: note = chemically synthesized
  source 1..20: mol_type = other DNA
cagcatgtttgctgcctcca

SEQ ID NO: 1387 - DNA, 20 bp, synthetic construct
  misc_feature 1..20: note = chemically synthesized
  source 1..20: mol_type = other DNA
tccagggatcctgtgtcccc

SEQ ID NO: 1388 - DNA, 20 bp, synthetic construct
  misc_feature 1..20: note = chemically synthesized
  source 1..20: mol_type = other DNA
gggatcctgtgtccccgagc

SEQ ID NO: 1389 - DNA, 20 bp, synthetic construct
  misc_feature 1..20: note = chemically synthesized
  source 1..20: mol_type = other DNA
ggatcctgtgtccccgagct

SEQ ID NO: 1390 - DNA, 20 bp, synthetic construct
  misc_feature 1..20: note = chemically synthesized
  source 1..20: mol_type = other DNA
ctgggaccaccttatattcc

SEQ ID NO: 1391 - DNA, 20 bp, synthetic construct
  misc_feature 1..20: note = chemically synthesized
  source 1..20: mol_type = other DNA
tgggaccaccttatattccc

SEQ ID NO: 1392 - DNA, 20 bp, synthetic construct
  misc_feature 1..20: note = chemically synthesized
  source 1..20: mol_type = other DNA
gggaccaccttatattccca

SEQ ID NO: 1393 - DNA, 20 bp, synthetic construct
  misc_feature 1..20: note = chemically synthesized
  source 1..20: mol_type = other DNA
ccaccttatattcccagggc

SEQ ID NO: 1394 - DNA, 20 bp, synthetic construct
  misc_feature 1..20: note = chemically synthesized
  source 1..20: mol_type = other DNA
attcccagggccggttaatg

SEQ ID NO: 1395 - DNA, 20 bp, synthetic construct
  misc_feature 1..20: note = chemically synthesized
  source 1..20: mol_type = other DNA
agggccggttaatgtggctc

SEQ ID NO: 1396 - DNA, 20 bp, synthetic construct
  misc_feature 1..20: note = chemically synthesized
  source 1..20: mol_type = other DNA
ggttaatgtggctctggttc

SEQ ID NO: 1397 - DNA, 20 bp, synthetic construct
  misc_feature 1..20: note = chemically synthesized
  source 1..20: mol_type = other DNA
gttaatgtggctctggttct

SEQ ID NO: 1398 - DNA, 20 bp, synthetic construct
  misc_feature 1..20: note = chemically synthesized
  source 1..20: mol_type = other DNA
tatctgtcccctccacccca

SEQ ID NO: 1399 - DNA, 20 bp, synthetic construct
  misc_feature 1..20: note = chemically synthesized
  source 1..20: mol_type = other DNA
ctgtcccctccaccccacag

SEQ ID NO: 1400 - DNA, 20 bp, synthetic construct
  misc_feature 1..20: note = chemically synthesized
  source 1..20: mol_type = other DNA
tgtcccctccaccccacagt

SEQ ID NO: 1401 - DNA, 20 bp, synthetic construct
  misc_feature 1..20: note = chemically synthesized
  source 1..20: mol_type = other DNA
gtcccctccaccccacagtg

SEQ ID NO: 1402 - DNA, 20 bp, synthetic construct
  misc_feature 1..20: note = chemically synthesized
  source 1..20: mol_type = other DNA
ccaccccacagtggggccac

SEQ ID NO: 1403 - DNA, 20 bp, synthetic construct
  misc_feature 1..20: note = chemically synthesized
  source 1..20: mol_type = other DNA
caccccacagtggggccact

SEQ ID NO: 1404 - DNA, 20 bp, synthetic construct
  misc_feature 1..20: note = chemically synthesized
  source 1..20: mol_type = other DNA
accccacagtggggccacta

SEQ ID NO: 1405 - DNA, 20 bp, synthetic construct
  misc_feature 1..20: note = chemically synthesized
  source 1..20: mol_type = other DNA
cacagtggggccactaggga

SEQ ID NO: 1406 - DNA, 20 bp, synthetic construct
  misc_feature 1..20: note = chemically synthesized
  source 1..20: mol_type = other DNA
acagtggggccactagggac

SEQ ID NO: 1407 - DNA, 20 bp, synthetic construct
  misc_feature 1..20: note = chemically synthesized
  source 1..20: mol_type = other DNA
ggggccactagggacaggat

SEQ ID NO: 1408 - DNA, 20 bp, synthetic construct
  misc_feature 1..20: note = chemically synthesized
  source 1..20: mol_type = other DNA
actagggacaggattggtga

SEQ ID NO: 1409 - DNA, 20 bp, synthetic construct
  misc_feature 1..20: note = chemically synthesized
  source 1..20: mol_type = other DNA
ggacaggattggtgacagaa

SEQ ID NO: 1410 - DNA, 20 bp, synthetic construct
  misc_feature 1..20: note = chemically synthesized
  source 1..20: mol_type = other DNA
tgacagaaaagccccatcct

SEQ ID NO: 1411 - DNA, 20 bp, synthetic construct
  misc_feature 1..20: note = chemically synthesized
  source 1..20: mol_type = other DNA
gacagaaaagccccatcctt

SEQ ID NO: 1412 - DNA, 20 bp, synthetic construct
  misc_feature 1..20: note = chemically synthesized
  source 1..20: mol_type = other DNA
tccttaggcctcctccttcc

SEQ ID NO: 1413 - DNA, 20 bp, synthetic construct
  misc_feature 1..20: note = chemically synthesized
  source 1..20: mol_type = other DNA
ccttcctagtctcctgatat

SEQ ID NO: 1414 - DNA, 20 bp, synthetic construct
  misc_feature 1..20: note = chemically synthesized
  source 1..20: mol_type = other DNA
cttcctagtctcctgatatt

SEQ ID NO: 1415 - DNA, 20 bp, synthetic construct
  misc_feature 1..20: note = chemically synthesized
  source 1..20: mol_type = other DNA
gtctaacccccacctcctgt

SEQ ID NO: 1416 - DNA, 20 bp, synthetic construct
  misc_feature 1..20: note = chemically synthesized
  source 1..20: mol_type = other DNA
tctaacccccacctcctgtt

SEQ ID NO: 1417 - DNA, 20 bp, synthetic construct
  misc_feature 1..20: note = chemically synthesized
  source 1..20: mol_type = other DNA
aacccccacctcctgttagg

SEQ ID NO: 1418 - DNA, 20 bp, synthetic construct
  misc_feature 1..20: note = chemically synthesized
  source 1..20: mol_type = other DNA
tgttaggcagattccttatc

SEQ ID NO: 1419 - DNA, 20 bp, synthetic construct
  misc_feature 1..20: note = chemically synthesized
  source 1..20: mol_type = other DNA
ggtgacacacccccatttcc

SEQ ID NO: 1420 - DNA, 20 bp, synthetic construct
  misc_feature 1..20: note = chemically synthesized
  source 1..20: mol_type = other DNA
tgacacacccccatttcctg

SEQ ID NO: 1421 - DNA, 20 bp, synthetic construct
  misc_feature 1..20: note = chemically synthesized
  source 1..20: mol_type = other DNA
ggagccatctctctccttgc

SEQ ID NO: 1422 - DNA, 20 bp, synthetic construct
  misc_feature 1..20: note = chemically synthesized
  source 1..20: mol_type = other DNA
ctctccttgccagaacctct

SEQ ID NO: 1423 - DNA, 20 bp, synthetic construct
  misc_feature 1..20: note = chemically synthesized
  source 1..20: mol_type = other DNA
tctccttgccagaacctcta

SEQ ID NO: 1424 - DNA, 20 bp, synthetic construct
  misc_feature 1..20: note = chemically synthesized
  source 1..20: mol_type = other DNA
cctctaaggtttgcttacga

SEQ ID NO: 1425 - DNA, 20 bp, synthetic construct
  misc_feature 1..20: note = chemically synthesized
  source 1..20: mol_type = other DNA
tctaaggtttgcttacgatg

SEQ ID NO: 1426 - DNA, 20 bp, synthetic construct
  misc_feature 1..20: note = chemically synthesized
  source 1..20: mol_type = other DNA
aggtttgcttacgatggagc

SEQ ID NO: 1427 - DNA, 20 bp, synthetic construct
  misc_feature 1..20: note = chemically synthesized
  source 1..20: mol_type = other DNA
gtttgcttacgatggagcca

SEQ ID NO: 1428 - DNA, 20 bp, synthetic construct
  misc_feature 1..20: note = chemically synthesized
  source 1..20: mol_type = other DNA
ttgcttacgatggagccaga

SEQ ID NO: 1429 - DNA, 20 bp, synthetic construct
  misc_feature 1..20: note = chemically synthesized
  source 1..20: mol_type = other DNA
tgcttacgatggagccagag

SEQ ID NO: 1430 - DNA, 20 bp, synthetic construct
  misc_feature 1..20: note = chemically synthesized
  source 1..20: mol_type = other DNA
gatggagccagagaggatcc

SEQ ID NO: 1431 - DNA, 20 bp, synthetic construct
  misc_feature 1..20: note = chemically synthesized
  source 1..20: mol_type = other DNA
atggagccagagaggatcct

SEQ ID NO: 1432 - DNA, 20 bp, synthetic construct
  misc_feature 1..20: note = chemically synthesized
  source 1..20: mol_type = other DNA
ggagccagagaggatcctgg

SEQ ID NO: 1433 - DNA, 20 bp, synthetic construct
  misc_feature 1..20: note = chemically synthesized
  source 1..20: mol_type = other DNA
gagccagagaggatcctggg

SEQ ID NO: 1434 - DNA, 20 bp, synthetic construct
  misc_feature 1..20: note = chemically synthesized
  source 1..20: mol_type = other DNA
agccagagaggatcctggga

SEQ ID NO: 1435 - DNA, 20 bp, synthetic construct
  misc_feature 1..20: note = chemically synthesized
  source 1..20: mol_type = other DNA
ccagagaggatcctgggagg

SEQ ID NO: 1436 - DNA, 20 bp, synthetic construct
  misc_feature 1..20: note = chemically synthesized
  source 1..20: mol_type = other DNA
agagaggatcctgggaggga

SEQ ID NO: 1437 - DNA, 20 bp, synthetic construct
  misc_feature 1..20: note = chemically synthesized
  source 1..20: mol_type = other DNA
ggatcctgggagggagagct

SEQ ID NO: 1438 - DNA, 20 bp, synthetic construct
  misc_feature 1..20: note = chemically synthesized
  source 1..20: mol_type = other DNA
tcctgggagggagagcttgg

SEQ ID NO: 1439 - DNA, 20 bp, synthetic construct
  misc_feature 1..20: note = chemically synthesized
  source 1..20: mol_type = other DNA
cctgggagggagagcttggc

SEQ ID NO: 1440 - DNA, 20 bp, synthetic construct
  misc_feature 1..20: note = chemically synthesized
  source 1..20: mol_type = other DNA
ctgggagggagagcttggca

SEQ ID NO: 1441 - DNA, 20 bp, synthetic construct
  misc_feature 1..20: note = chemically synthesized
  source 1..20: mol_type = other DNA
tgggagggagagcttggcag

SEQ ID NO: 1442 - DNA, 20 bp, synthetic construct
  misc_feature 1..20: note = chemically synthesized
  source 1..20: mol_type = other DNA
gggagggagagcttggcagg

SEQ ID NO: 1443 - DNA, 20 bp, synthetic construct
  misc_feature 1..20: note = chemically synthesized
  source 1..20: mol_type = other DNA
agggagagcttggcaggggg

SEQ ID NO: 1444 - DNA, 20 bp, synthetic construct
  misc_feature 1..20: note = chemically synthesized
  source 1..20: mol_type = other DNA
gggagagcttggcagggggt

SEQ ID NO: 1445 - DNA, 20 bp, synthetic construct
  misc_feature 1..20: note = chemically synthesized
  source 1..20: mol_type = other DNA
gagagcttggcagggggtgg

SEQ ID NO: 1446 - DNA, 20 bp, synthetic construct
  misc_feature 1..20: note = chemically synthesized
  source 1..20: mol_type = other DNA
agagcttggcagggggtggg

SEQ ID NO: 1447 - DNA, 20 bp, synthetic construct
  misc_feature 1..20: note = chemically synthesized
  source 1..20: mol_type = other DNA
gagcttggcagggggtggga

SEQ ID NO: 1448 - DNA, 20 bp, synthetic construct
  misc_feature 1..20: note = chemically synthesized
  source 1..20: mol_type = other DNA
cttggcagggggtgggaggg

SEQ ID NO: 1449 - DNA, 20 bp, synthetic construct
  misc_feature 1..20: note = chemically synthesized
  source 1..20: mol_type = other DNA
ttggcagggggtgggaggga

SEQ ID NO: 1450 - DNA, 20 bp, synthetic construct
  misc_feature 1..20: note = chemically synthesized
  source 1..20: mol_type = other DNA
tggcagggggtgggagggaa

SEQ ID NO: 1451 - DNA, 20 bp, synthetic construct
  misc_feature 1..20: note = chemically synthesized
  source 1..20: mol_type = other DNA
ggcagggggtgggagggaag

SEQ ID NO: 1452 - DNA, 20 bp, synthetic construct
  misc_feature 1..20: note = chemically synthesized
  source 1..20: mol_type = other DNA
gcagggggtgggagggaagg

SEQ ID NO: 1453 - DNA, 20 bp, synthetic construct
  misc_feature 1..20: note = chemically synthesized
  source 1..20: mol_type = other DNA
cagggggtgggagggaaggg

SEQ ID NO: 1454 - DNA, 20 bp, synthetic construct
  misc_feature 1..20: note = chemically synthesized
  source 1..20: mol_type = other DNA
agggggtgggagggaagggg

SEQ ID NO: 1455 - DNA, 20 bp, synthetic construct
  misc_feature 1..20: note = chemically synthesized
  source 1..20: mol_type = other DNA
ggggggatgcgtgacctgcc

SEQ ID NO: 1456 - DNA, 20 bp, synthetic construct
  misc_feature 1..20: note = chemically synthesized
  source 1..20: mol_type = other DNA
tgcgtgacctgcccggttct

SEQ ID NO: 1457 - DNA, 20 bp, synthetic construct
  misc_feature 1..20: note = chemically synthesized
  source 1..20: mol_type = other DNA
gtgacctgcccggttctcag

SEQ ID NO: 1458 - DNA, 20 bp, synthetic construct
  misc_feature 1..20: note = chemically synthesized
  source 1..20: mol_type = other DNA
caccctgcgctaccctctcc

SEQ ID NO: 1459 - DNA, 20 bp, synthetic construct
  misc_feature 1..20: note = chemically synthesized
  source 1..20: mol_type = other DNA
gctaccctctcccagaacct

SEQ ID NO: 1460 - DNA, 20 bp, synthetic construct
  misc_feature 1..20: note = chemically synthesized
  source 1..20: mol_type = other DNA
gaacctgagctgctctgacg

SEQ ID NO: 1461 - DNA, 20 bp, synthetic construct
  misc_feature 1..20: note = chemically synthesized
  source 1..20: mol_type = other DNA
gctgctctgacgcggccgtc

SEQ ID NO: 1462 - DNA, 20 bp, synthetic construct
  misc_feature 1..20: note = chemically synthesized
  source 1..20: mol_type = other DNA
ctggtgcgtttcactgatcc

SEQ ID NO: 1463 - DNA, 20 bp, synthetic construct
  misc_feature 1..20: note = chemically synthesized
  source 1..20: mol_type = other DNA
tttcactgatcctggtgctg

SEQ ID NO: 1464 - DNA, 20 bp, synthetic construct
  misc_feature 1..20: note = chemically synthesized
  source 1..20: mol_type = other DNA
gcagcttccttacacttccc

SEQ ID NO: 1465 - DNA, 20 bp, synthetic construct
  misc_feature 1..20: note = chemically synthesized
  source 1..20: mol_type = other DNA
agcttccttacacttcccaa

SEQ ID NO: 1466 - DNA, 20 bp, synthetic construct
  misc_feature 1..20: note = chemically synthesized
  source 1..20: mol_type = other DNA
gcttccttacacttcccaag

SEQ ID NO: 1467 - DNA, 20 bp, synthetic construct
  misc_feature 1..20: note = chemically synthesized
  source 1..20: mol_type = other DNA
ttccttacacttcccaagag

SEQ ID NO: 1468 - DNA, 20 bp, synthetic construct
  misc_feature 1..20: note = chemically synthesized
  source 1..20: mol_type = other DNA
cttacacttcccaagaggag

SEQ ID NO: 1469 - DNA, 20 bp, synthetic construct
  misc_feature 1..20: note = chemically synthesized
  source 1..20: mol_type = other DNA
acacttcccaagaggagaag

SEQ ID NO: 1470 - DNA, 20 bp, synthetic construct
  misc_feature 1..20: note = chemically synthesized
  source 1..20: mol_type = other DNA
tcccaagaggagaagcagtt

SEQ ID NO: 1471 - DNA, 20 bp, synthetic construct
  misc_feature 1..20: note = chemically synthesized
  source 1..20: mol_type = other DNA
gcagtttggaaaaacaaaat

SEQ ID NO: 1472 - DNA, 20 bp, synthetic construct
  misc_feature 1..20: note = chemically synthesized
  source 1..20: mol_type = other DNA
tggaaaaacaaaatcagaat

SEQ ID NO: 1473 - DNA, 20 bp, synthetic construct
  misc_feature 1..20: note = chemically synthesized
  source 1..20: mol_type = other DNA
aaaacaaaatcagaataagt

SEQ ID NO: 1474 - DNA, 20 bp, synthetic construct
  misc_feature 1..20: note = chemically synthesized
  source 1..20: mol_type = other DNA
aatcagaataagttggtcct

SEQ ID NO: 1475 - DNA, 20 bp, synthetic construct
  misc_feature 1..20: note = chemically synthesized
  source 1..20: mol_type = other DNA
ttggtcctgagttctaactt

SEQ ID NO: 1476 - DNA, 20 bp, synthetic construct
  misc_feature 1..20: note = chemically synthesized
  source 1..20: mol_type = other DNA
actttggctcttcacctttc

SEQ ID NO: 1477 - DNA, 20 bp, synthetic construct
  misc_feature 1..20: note = chemically synthesized
  source 1..20: mol_type = other DNA
tatattgttcctccgtgcgt

SEQ ID NO: 1478 - DNA, 20 bp, synthetic construct
  misc_feature 1..20: note = chemically synthesized
  source 1..20: mol_type = other DNA
cgtgcgtcagttttacctgt

SEQ ID NO: 1479 - DNA, 20 bp, synthetic construct
  misc_feature 1..20: note = chemically synthesized
  source 1..20: mol_type = other DNA
gtcagttttacctgtgagat

SEQ ID NO: 1480 - DNA, 20 bp, synthetic construct
  misc_feature 1..20: note = chemically synthesized
  source 1..20: mol_type = other DNA
tcagttttacctgtgagata

SEQ ID NO: 1481 - DNA, 20 bp, synthetic construct
  misc_feature 1..20: note = chemically synthesized
  source 1..20: mol_type = other DNA
ttttacctgtgagataaggc

SEQ ID NO: 1482 - DNA, 20 bp, synthetic construct
  misc_feature 1..20: note = chemically synthesized
  source 1..20: mol_type = other DNA
tacctgtgagataaggccag

SEQ ID NO: 1483 - DNA, 20 bp, synthetic construct
  misc_feature 1..20: note = chemically synthesized
  source 1..20: mol_type = other DNA
tgtgagataaggccagtagc

SEQ ID NO: 1484 - DNA, 20 bp, synthetic construct
  misc_feature 1..20: note = chemically synthesized
  source 1..20: mol_type = other DNA
gccagtagccagccccgtcc

SEQ ID NO: 1485 - DNA, 20 bp, synthetic construct
  misc_feature 1..20: note = chemically synthesized
  source 1..20: mol_type = other DNA
agtagccagccccgtcctgg

SEQ ID NO: 1486 - DNA, 20 bp, synthetic construct
  misc_feature 1..20: note = chemically synthesized
  source 1..20: mol_type = other DNA
gtagccagccccgtcctggc

SEQ ID NO: 1487 - DNA, 20 bp, synthetic construct
  misc_feature 1..20: note = chemically synthesized
  source 1..20: mol_type = other DNA
tagccagccccgtcctggca

SEQ ID NO: 1488 - DNA, 20 bp, synthetic construct
  misc_feature 1..20: note = chemically synthesized
  source 1..20: mol_type = other DNA
gccccgtcctggcagggctg

SEQ ID NO: 1489 - DNA, 20 bp, synthetic construct
  misc_feature 1..20: note = chemically synthesized
  source 1..20: mol_type = other DNA
cgtcctggcagggctgtggt

SEQ ID NO: 1490 - DNA, 20 bp, synthetic construct
  misc_feature 1..20: note = chemically synthesized
  source 1..20: mol_type = other DNA
gtcctggcagggctgtggtg

SEQ ID NO: 1491 - DNA, 20 bp, synthetic construct
  misc_feature 1..20: note = chemically synthesized
  source 1..20: mol_type = other DNA
cctggcagggctgtggtgag

SEQ ID NO: 1492 - DNA, 20 bp, synthetic construct
  misc_feature 1..20: note = chemically synthesized
  source 1..20: mol_type = other DNA
ctggcagggctgtggtgagg

SEQ ID NO: 1493 - DNA, 20 bp, synthetic construct
  misc_feature 1..20: note = chemically synthesized
  source 1..20: mol_type = other DNA
tggcagggctgtggtgagga

SEQ ID NO: 1494 - DNA, 20 bp, synthetic construct
  misc_feature 1..20: note = chemically synthesized
  source 1..20: mol_type = other DNA
ggcagggctgtggtgaggag

SEQ ID NO: 1495 - DNA, 20 bp, synthetic construct
  misc_feature 1..20: note = chemically synthesized
  source 1..20: mol_type = other DNA
gcagggctgtggtgaggagg

SEQ ID NO: 1496 - DNA, 20 bp, synthetic construct
  misc_feature 1..20: note = chemically synthesized
  source 1..20: mol_type = other DNA
cagggctgtggtgaggaggg

SEQ ID NO: 1497 - DNA, 20 bp, synthetic construct
  misc_feature 1..20: note = chemically synthesized
  source 1..20: mol_type = other DNA
tgaggaggggggtgtccgtg

SEQ ID NO: 1498 - DNA, 20 bp, synthetic construct
  misc_feature 1..20: note = chemically synthesized
  source 1..20: mol_type = other DNA
gtgtggaaaactccctttgt

SEQ ID NO: 1499 - DNA, 20 bp, synthetic construct
  misc_feature 1..20: note = chemically synthesized
  source 1..20: mol_type = other DNA
gaaaactccctttgtgagaa

SEQ ID NO: 1500 - DNA, 20 bp, synthetic construct
  misc_feature 1..20: note = chemically synthesized
  source 1..20: mol_type = other DNA
tttgtgagaatggtgcgtcc

SEQ ID NO: 1501 - DNA, 20 bp, synthetic construct
  misc_feature 1..20: note = chemically synthesized
  source 1..20: mol_type = other DNA
ttgtgagaatggtgcgtcct

SEQ ID NO: 1502 - DNA, 20 bp, synthetic construct
  misc_feature 1..20: note = chemically synthesized
  source 1..20: mol_type = other DNA
ggtgcgtcctaggtgttcac

SEQ ID NO: 1503 - DNA, 20 bp, synthetic construct
  misc_feature 1..20: note = chemically synthesized
  source 1..20: mol_type = other DNA
gtgcgtcctaggtgttcacc

SEQ ID NO: 1504 - DNA, 20 bp, synthetic construct
  misc_feature 1..20: note = chemically synthesized
  source 1..20: mol_type = other DNA
cctaggtgttcaccaggtcg

SEQ ID NO: 1505 - DNA, 20 bp, synthetic construct
  misc_feature 1..20: note = chemically synthesized
  source 1..20: mol_type = other DNA
tctccatccttctttcctta

SEQ ID NO: 1506 - DNA, 20 bp, synthetic construct
  misc_feature 1..20: note = chemically synthesized
  source 1..20: mol_type = other DNA
tccatccttctttccttaaa

SEQ ID NO: 1507 - DNA, 20 bp, synthetic construct
  misc_feature 1..20: note = chemically synthesized
  source 1..20: mol_type = other DNA
ttctttccttaaagagtccc

SEQ ID NO: 1508 - DNA, 20 bp, synthetic construct
  misc_feature 1..20: note = chemically synthesized
  source 1..20: mol_type = other DNA
aaagagtccccagtgctatc

SEQ ID NO: 1509 - DNA, 20 bp, synthetic construct
  misc_feature 1..20: note = chemically synthesized
  source 1..20: mol_type = other DNA
aagagtccccagtgctatct

SEQ ID NO: 1510 - DNA, 20 bp, synthetic construct
  misc_feature 1..20: note = chemically synthesized
  source 1..20: mol_type = other DNA
ctgggacatattcctccgcc

SEQ ID NO: 1511 - DNA, 20 bp, synthetic construct
  misc_feature 1..20: note = chemically synthesized
  source 1..20: mol_type = other DNA
gggacatattcctccgccca

SEQ ID NO: 1512 - DNA, 20 bp, synthetic construct
  misc_feature 1..20: note = chemically synthesized
  source 1..20: mol_type = other DNA
acatattcctccgcccagag

SEQ ID NO: 1513 - DNA, 20 bp, synthetic construct
  misc_feature 1..20: note = chemically synthesized
  source 1..20: mol_type = other DNA
catattcctccgcccagagc

SEQ ID NO: 1514 - DNA, 20 bp, synthetic construct
  misc_feature 1..20: note = chemically synthesized
  source 1..20: mol_type = other DNA
atattcctccgcccagagca

SEQ ID NO: 1515 - DNA, 20 bp, synthetic construct
  misc_feature 1..20: note = chemically synthesized
  source 1..20: mol_type = other DNA
gagcagggtcccgcttccct

SEQ ID NO: 1516 - DNA, 20 bp, synthetic construct
  misc_feature 1..20: note = chemically synthesized
  source 1..20: mol_type = other DNA
agcagggtcccgcttcccta

SEQ ID NO: 1517 - DNA, 20 bp, synthetic construct
  misc_feature 1..20: note = chemically synthesized
  source 1..20: mol_type = other DNA
gcttccctaaggccctgctc

SEQ ID NO: 1518 - DNA, 20 bp, synthetic construct
  misc_feature 1..20: note = chemically synthesized
  source 1..20: mol_type = other DNA
cttccctaaggccctgctct

SEQ ID NO: 1519 - DNA, 20 bp, synthetic construct
  misc_feature 1..20: note = chemically synthesized
  source 1..20: mol_type = other DNA
aaggccctgctctgggcttc

SEQ ID NO: 1520 - DNA, 20 bp, synthetic construct
  misc_feature 1..20: note = chemically synthesized
  source 1..20: mol_type = other DNA
aggccctgctctgggcttct

SEQ ID NO: 1521 - DNA, 20 bp, synthetic construct
  misc_feature 1..20: note = chemically synthesized
  source 1..20: mol_type = other DNA
tgctctgggcttctgggttt

SEQ ID NO: 1522 - DNA, 20 bp, synthetic construct
  misc_feature 1..20: note = chemically synthesized
  source 1..20: mol_type = other DNA
ggcttctgggtttgagtcct

SEQ ID NO: 1523 - DNA, 20 bp, synthetic construct
  misc_feature 1..20: note = chemically synthesized
  source 1..20: mol_type = other DNA
tctgggtttgagtccttggc

SEQ ID NO: 1524 - DNA, 20 bp, synthetic construct
  misc_feature 1..20: note = chemically synthesized
  source 1..20: mol_type = other DNA
gtttgagtccttggcaagcc

SEQ ID NO: 1525 - DNA, 20 bp, synthetic construct
  misc_feature 1..20: note = chemically synthesized
  source 1..20: mol_type = other DNA
tttgagtccttggcaagccc

SEQ ID NO: 1526 - DNA, 20 bp, synthetic construct
  misc_feature 1..20: note = chemically synthesized
  source 1..20: mol_type = other DNA
tgagtccttggcaagcccag

SEQ ID NO: 1527 - DNA, 20 bp, synthetic construct
  misc_feature 1..20: note = chemically synthesized
  source 1..20: mol_type = other DNA
agtccttggcaagcccagga

SEQ ID NO: 1528 - DNA, 20 bp, synthetic construct
  misc_feature 1..20: note = chemically synthesized
  source 1..20: mol_type = other DNA
gtccttggcaagcccaggag

SEQ ID NO: 1529 - DNA, 20 bp, synthetic construct
  misc_feature 1..20: note = chemically synthesized
  source 1..20: mol_type = other DNA
gcaagcccaggagaggcgct

SEQ ID NO: 1530 - DNA, 20 bp, synthetic construct
  misc_feature 1..20: note = chemically synthesized
  source 1..20: mol_type = other DNA
caagcccaggagaggcgctc

SEQ ID NO: 1531 - DNA, 20 bp, synthetic construct
  misc_feature 1..20: note = chemically synthesized
  source 1..20: mol_type = other DNA
cgtccaccatctcatgcccc

SEQ ID NO: 1532 - DNA, 20 bp, synthetic construct
  misc_feature 1..20: note = chemically synthesized
  source 1..20: mol_type = other DNA
gctctcctgccccttcccta

SEQ ID NO: 1533 - DNA, 20 bp, synthetic construct
  misc_feature 1..20: note = chemically synthesized
  source 1..20: mol_type = other DNA
ctctcctgccccttccctac

SEQ ID NO: 1534 - DNA, 20 bp, synthetic construct
  misc_feature 1..20: note = chemically synthesized
  source 1..20: mol_type = other DNA
tctcctgccccttccctaca

SEQ ID NO: 1535 - DNA, 20 bp, synthetic construct
  misc_feature 1..20: note = chemically synthesized
  source 1..20: mol_type = other DNA
ctcctgccccttccctacag

SEQ ID NO: 1536 - DNA, 20 bp, synthetic construct
  misc_feature 1..20: note = chemically synthesized
  source 1..20: mol_type = other DNA
cccttccctacaggggttcc

SEQ ID NO: 1537 - DNA, 20 bp, synthetic construct
  misc_feature 1..20: note = chemically synthesized
  source 1..20: mol_type = other DNA
gggttcctggctctgctctt

SEQ ID NO: 1538 - DNA, 20 bp, synthetic construct
  misc_feature 1..20: note = chemically synthesized
  source 1..20: mol_type = other DNA
ctggctctgctcttcagact

SEQ ID NO: 1539 - DNA, 20 bp, synthetic construct
  misc_feature 1..20: note = chemically synthesized
  source 1..20: mol_type = other DNA
cccccttcccctgcatcccc

SEQ ID NO: 1540 - DNA, 20 bp, synthetic construct
  misc_feature 1..20: note = chemically synthesized
  source 1..20: mol_type = other DNA
cccttcccctgcatccccca

SEQ ID NO: 1541 - DNA, 20 bp, synthetic construct
  misc_feature 1..20: note = chemically synthesized
  source 1..20: mol_type = other DNA
ccttcccctgcatcccccag

SEQ ID NO: 1542 - DNA, 20 bp, synthetic construct
  misc_feature 1..20: note = chemically synthesized
  source 1..20: mol_type = other DNA
cctgcatcccccagaggccc

SEQ ID NO: 1543 - DNA, 20 bp, synthetic construct
  misc_feature 1..20: note = chemically synthesized
  source 1..20: mol_type = other DNA
ctgcatcccccagaggcccc

SEQ ID NO: 1544 - DNA, 20 bp, synthetic construct
  misc_feature 1..20: note = chemically synthesized
  source 1..20: mol_type = other DNA
gaggccccaggccacctact

SEQ ID NO: 1545 - DNA, 20 bp, synthetic construct
  misc_feature 1..20: note = chemically synthesized
  source 1..20: mol_type = other DNA
cccaggccacctacttggcc

SEQ ID NO: 1546 - DNA, 20 bp, synthetic construct
  misc_feature 1..20: note = chemically synthesized
  source 1..20: mol_type = other DNA
ctacttggcctggaccccac

SEQ ID NO: 1547 - DNA, 20 bp, synthetic construct
  misc_feature 1..20: note = chemically synthesized
  source 1..20: mol_type = other DNA
acttggcctggaccccacga

SEQ ID NO: 1548 - DNA, 20 bp, synthetic construct
  misc_feature 1..20: note = chemically synthesized
  source 1..20: mol_type = other DNA
cttggcctggaccccacgag

SEQ ID NO: 1549 - DNA, 20 bp, synthetic construct
  misc_feature 1..20: note = chemically synthesized
  source 1..20: mol_type = other DNA
gaccccacgagaggccaccc

SEQ ID NO: 1550 - DNA, 20 bp, synthetic construct
  misc_feature 1..20: note = chemically synthesized
  source 1..20: mol_type = other DNA
gccaccccagccctgtctac

SEQ ID NO: 1551 - DNA, 20 bp, synthetic construct
  misc_feature 1..20: note = chemically synthesized
  source 1..20: mol_type = other DNA
ccaccccagccctgtctacc

SEQ ID NO: 1552 - DNA, 20 bp, synthetic construct
  misc_feature 1..20: note = chemically synthesized
  source 1..20: mol_type = other DNA
ctgtctaccaggctgccttt

SEQ ID NO: 1553 - DNA, 20 bp, synthetic construct
  misc_feature 1..20: note = chemically synthesized
  source 1..20: mol_type = other DNA
tgtctaccaggctgcctttt

SEQ ID NO: 1554 - DNA, 20 bp, synthetic construct
  misc_feature 1..20: note = chemically synthesized
  source 1..20: mol_type = other DNA
ctaccaggctgccttttggg

SEQ ID NO: 1555 - DNA, 20 bp, synthetic construct
  misc_feature 1..20: note = chemically synthesized
  source 1..20: mol_type = other DNA
ggtggattctcctccaactg

SEQ ID NO: 1556 - DNA, 20 bp, synthetic construct
  misc_feature 1..20: note = chemically synthesized
  source 1..20: mol_type = other DNA
gtggattctcctccaactgt

SEQ ID NO: 1557 - DNA, 20 bp, synthetic construct
  misc_feature 1..20: note = chemically synthesized
  source 1..20: mol_type = other DNA
tggattctcctccaactgtg

SEQ ID NO: 1558 - DNA, 20 bp, synthetic construct
  misc_feature 1..20: note = chemically synthesized
  source 1..20: mol_type = other DNA
ccaactgtggggtgactgct

SEQ ID NO: 1559 - DNA, 20 bp, synthetic construct
  misc_feature 1..20: note = chemically synthesized
  source 1..20: mol_type = other DNA
tgcttggcaaactcactctt

SEQ ID NO: 1560 - DNA, 20 bp, synthetic construct
  misc_feature 1..20: note = chemically synthesized
  source 1..20: mol_type = other DNA
gcttggcaaactcactcttc

SEQ ID NO: 1561 - DNA, 20 bp, synthetic construct
  misc_feature 1..20: note = chemically synthesized
  source 1..20: mol_type = other DNA
cttggcaaactcactcttcg

SEQ ID NO: 1562 - DNA, 20 bp, synthetic construct
  misc_feature 1..20: note = chemically synthesized
  source 1..20: mol_type = other DNA
actcactcttcggggtatcc

SEQ ID NO: 1563 - DNA, 20 bp, synthetic construct
  misc_feature 1..20: note = chemically synthesized
  source 1..20: mol_type = other DNA
ctcactcttcggggtatccc

SEQ ID NO: 1564 - DNA, 20 bp, synthetic construct
  misc_feature 1..20: note = chemically synthesized
  source 1..20: mol_type = other DNA
cactcttcggggtatcccag

SEQ ID NO: 1565 - DNA, 20 bp, synthetic construct
  misc_feature 1..20: note = chemically synthesized
  source 1..20: mol_type = other DNA
actcttcggggtatcccagg

SEQ ID NO: 1566 - DNA, 20 bp, synthetic construct
  misc_feature 1..20: note = chemically synthesized
  source 1..20: mol_type = other DNA
tcggggtatcccaggaggcc

SEQ ID NO: 1567 - DNA, 20 bp, synthetic construct
  misc_feature 1..20: note = chemically synthesized
  source 1..20: mol_type = other DNA
ggggtatcccaggaggcctg

SEQ ID NO: 1568 - DNA, 20 bp, synthetic construct
  misc_feature 1..20: note = chemically synthesized
  source 1..20: mol_type = other DNA
tcccaggaggcctggagcat

SEQ ID NO: 1569 - DNA, 20 bp, synthetic construct
  misc_feature 1..20: note = chemically synthesized
  source 1..20: mol_type = other DNA
cccaggaggcctggagcatt

SEQ ID NO: 1570 - DNA, 20 bp, synthetic construct
  misc_feature 1..20: note = chemically synthesized
  source 1..20: mol_type = other DNA
ccaggaggcctggagcattg

SEQ ID NO: 1571 - DNA, 20 bp, synthetic construct
  misc_feature 1..20: note = chemically synthesized
  source 1..20: mol_type = other DNA
ggaggcctggagcattgggg

SEQ ID NO: 1572 - DNA, 20 bp, synthetic construct
  misc_feature 1..20: note = chemically synthesized
  source 1..20: mol_type = other DNA
gaggcctggagcattggggt

SEQ ID NO: 1573 - DNA, 20 bp, synthetic construct
  misc_feature 1..20: note = chemically synthesized
  source 1..20: mol_type = other DNA
cctggagcattggggtgggc

SEQ ID NO: 1574 - DNA, 20 bp, synthetic construct
  misc_feature 1..20: note = chemically synthesized
  source 1..20: mol_type = other DNA
ctggagcattggggtgggct

SEQ ID NO: 1575 - DNA, 20 bp, synthetic construct
  misc_feature 1..20: note = chemically synthesized
  source 1..20: mol_type = other DNA
tggagcattggggtgggctg

SEQ ID NO: 1576 - DNA, 20 bp, synthetic construct
  misc_feature 1..20: note = chemically synthesized
  source 1..20: mol_type = other DNA
cattggggtgggctggggtt

SEQ ID NO: 1577 - DNA, 20 bp, synthetic construct
  misc_feature 1..20: note = chemically synthesized
  source 1..20: mol_type = other DNA
ttggggtgggctggggttca

SEQ ID NO: 1578 - DNA, 20 bp, synthetic construct
  misc_feature 1..20: note = chemically synthesized
  source 1..20: mol_type = other DNA
ggggtgggctggggttcaga

SEQ ID NO: 1579 - DNA, 20 bp, synthetic construct
  misc_feature 1..20: note = chemically synthesized
  source 1..20: mol_type = other DNA
gggtgggctggggttcagag

SEQ ID NO: 1580 - DNA, 20 bp, synthetic construct
  misc_feature 1..20: note = chemically synthesized
  source 1..20: mol_type = other DNA
gtgggctggggttcagagag

SEQ ID NO: 1581 - DNA, 20 bp, synthetic construct
  misc_feature 1..20: note = chemically synthesized
  source 1..20: mol_type = other DNA
tgggctggggttcagagagg

SEQ ID NO: 1582 - DNA, 20 bp, synthetic construct
  misc_feature 1..20: note = chemically synthesized
  source 1..20: mol_type = other DNA
gggctggggttcagagagga

SEQ ID NO: 1583 - DNA, 20 bp, synthetic construct
  misc_feature 1..20: note = chemically synthesized
  source 1..20: mol_type = other DNA
gagaggagggattcccttct

SEQ ID NO: 1584 - DNA, 20 bp, synthetic construct
  misc_feature 1..20: note = chemically synthesized
  source 1..20: mol_type = other DNA
agaggagggattcccttctc

SEQ ID NO: 1585 - DNA, 20 bp, synthetic construct
  misc_feature 1..20: note = chemically synthesized
  source 1..20: mol_type = other DNA
gattcccttctcaggttacg

SEQ ID NO: 1586 - DNA, 20 bp, synthetic construct
  misc_feature 1..20: note = chemically synthesized
  source 1..20: mol_type = other DNA
ccttctcaggttacgtggcc

SEQ ID NO: 1587 - DNA, 20 bp, synthetic construct
  misc_feature 1..20: note = chemically synthesized
  source 1..20: mol_type = other DNA
tctcaggttacgtggccaag

SEQ ID NO: 1588 - DNA, 20 bp, synthetic construct
  misc_feature 1..20: note = chemically synthesized
  source 1..20: mol_type = other DNA
caggttacgtggccaagaag

SEQ ID NO: 1589 - DNA, 20 bp, synthetic construct
  misc_feature 1..20: note = chemically synthesized
  source 1..20: mol_type = other DNA
aggttacgtggccaagaagc

SEQ ID NO: 1590 - DNA, 20 bp, synthetic construct
  misc_feature 1..20: note = chemically synthesized
  source 1..20: mol_type = other DNA
ggttacgtggccaagaagca

SEQ ID NO: 1591 - DNA, 20 bp, synthetic construct
  misc_feature 1..20: note = chemically synthesized
  source 1..20: mol_type = other DNA
gttacgtggccaagaagcag

SEQ ID NO: 1592 - DNA, 20 bp, synthetic construct
  misc_feature 1..20: note = chemically synthesized
  source 1..20: mol_type = other DNA
tacgtggccaagaagcaggg

SEQ ID NO: 1593 - DNA, 20 bp, synthetic construct
  misc_feature 1..20: note = chemically synthesized
  source 1..20: mol_type = other DNA
tggccaagaagcaggggagc

SEQ ID NO: 1594 - DNA, 20 bp, synthetic construct
  misc_feature 1..20: note = chemically synthesized
  source 1..20: mol_type = other DNA
ggccaagaagcaggggagct

SEQ ID NO: 1595 - DNA, 20 bp, synthetic construct
  misc_feature 1..20: note = chemically synthesized
  source 1..20: mol_type = other DNA
agaagcaggggagctgggtt

SEQ ID NO: 1596 - DNA, 20 bp, synthetic construct
  misc_feature 1..20: note = chemically synthesized
  source 1..20: mol_type = other DNA
gaagcaggggagctgggttt

SEQ ID NO: 1597 - DNA, 20 bp, synthetic construct
  misc_feature 1..20: note = chemically synthesized
  source 1..20: mol_type = other DNA
caggggagctgggtttgggt

SEQ ID NO: 1598 - DNA, 20 bp, synthetic construct
  misc_feature 1..20: note = chemically synthesized
  source 1..20: mol_type = other DNA
aggggagctgggtttgggtc

SEQ ID NO: 1599 - DNA, 20 bp, synthetic construct
  misc_feature 1..20: note = chemically synthesized
  source 1..20: mol_type = other DNA
agctgggtttgggtcaggtc

SEQ ID NO: 1600 - DNA, 20 bp, synthetic construct
  misc_feature 1..20: note = chemically synthesized
  source 1..20: mol_type = other DNA
gctgggtttgggtcaggtct

SEQ ID NO: 1601 - DNA, 20 bp, synthetic construct
  misc_feature 1..20: note = chemically synthesized
  source 1..20: mol_type = other DNA
gtttgggtcaggtctgggtg

SEQ ID NO: 1602 - DNA, 20 bp, synthetic construct
  misc_feature 1..20: note = chemically synthesized
  source 1..20: mol_type = other DNA
tttgggtcaggtctgggtgt

SEQ ID NO: 1603 - DNA, 20 bp, synthetic construct
  misc_feature 1..20: note = chemically synthesized
  source 1..20: mol_type = other DNA
ttgggtcaggtctgggtgtg

SEQ ID NO: 1604 - DNA, 20 bp, synthetic construct
  misc_feature 1..20: note = chemically synthesized
  source 1..20: mol_type = other DNA
aggtctgggtgtggggtgac

SEQ ID NO: 1605 - DNA, 20 bp, synthetic construct
  misc_feature 1..20: note = chemically synthesized
  source 1..20: mol_type = other DNA
accagcttatgctgtttgcc

SEQ ID NO: 1606 - DNA, 20 bp, synthetic construct
  misc_feature 1..20: note = chemically synthesized
  source 1..20: mol_type = other DNA
ccagcttatgctgtttgccc

SEQ ID NO: 1607 - DNA, 20 bp, synthetic construct
  misc_feature 1..20: note = chemically synthesized
  source 1..20: mol_type = other DNA
cttatgctgtttgcccagga

SEQ ID NO: 1608 - DNA, 20 bp, synthetic construct
  misc_feature 1..20: note = chemically synthesized
  source 1..20: mol_type = other DNA
gctgtttgcccaggacagcc

SEQ ID NO: 1609 - DNA, 20 bp, synthetic construct
  misc_feature 1..20: note = chemically synthesized
  source 1..20: mol_type = other DNA
tgcccaggacagcctagttt

SEQ ID NO: 1610 - DNA, 20 bp, synthetic construct
  misc_feature 1..20: note = chemically synthesized
  source 1..20: mol_type = other DNA
agttttagcactgaaaccct

SEQ ID NO: 1611 - DNA, 20 bp, synthetic construct
  misc_feature 1..20: note = chemically synthesized
  source 1..20: mol_type = other DNA
agcactgaaaccctcagtcc

SEQ ID NO: 1612 - DNA, 20 bp, synthetic construct
  misc_feature 1..20: note = chemically synthesized
  source 1..20: mol_type = other DNA
gcactgaaaccctcagtcct

SEQ ID NO: 1613 - DNA, 20 bp, synthetic construct
  misc_feature 1..20: note = chemically synthesized
  source 1..20: mol_type = other DNA
aaccctcagtcctaggaaaa

SEQ ID NO: 1614 - DNA, 20 bp, synthetic construct
  misc_feature 1..20: note = chemically synthesized
  source 1..20: mol_type = other DNA
accctcagtcctaggaaaac

SEQ ID NO: 1615 - DNA, 20 bp, synthetic construct
  misc_feature 1..20: note = chemically synthesized
  source 1..20: mol_type = other DNA
ccctcagtcctaggaaaaca

SEQ ID NO: 1616 - DNA, 20 bp, synthetic construct
  misc_feature 1..20: note = chemically synthesized
  source 1..20: mol_type = other DNA
cagtcctaggaaaacaggga

SEQ ID NO: 1617 - DNA, 20 bp, synthetic construct
  misc_feature 1..20: note = chemically synthesized
  source 1..20: mol_type = other DNA
cctaggaaaacagggatggt

SEQ ID NO: 1618 - DNA, 20 bp, synthetic construct
  misc_feature 1..20: note = chemically synthesized
  source 1..20: mol_type = other DNA
ggatggttggtcactgtctc

SEQ ID NO: 1619 - DNA, 20 bp, synthetic construct
  misc_feature 1..20: note = chemically synthesized
  source 1..20: mol_type = other DNA
gatggttggtcactgtctct

SEQ ID NO: 1620 - DNA, 20 bp, synthetic construct
  misc_feature 1..20: note = chemically synthesized
  source 1..20: mol_type = other DNA
tctgggtgactcttgattcc

SEQ ID NO: 1621 - DNA, 20 bp, synthetic construct
  misc_feature 1..20: note = chemically synthesized
  source 1..20: mol_type = other DNA
ggtgactcttgattcccggc

SEQ ID NO: 1622 - DNA, 20 bp, synthetic construct
  misc_feature 1..20: note = chemically synthesized
  source 1..20: mol_type = other DNA
tcccggccagtttctccacc

SEQ ID NO: 1623 - DNA, 20 bp, synthetic construct
  misc_feature 1..20: note = chemically synthesized
  source 1..20: mol_type = other DNA
cccggccagtttctccacct

SEQ ID NO: 1624 - DNA, 20 bp, synthetic construct
  misc_feature 1..20: note = chemically synthesized
  source 1..20: mol_type = other DNA
ccggccagtttctccacctg

SEQ ID NO: 1625 - DNA, 20 bp, synthetic construct
  misc_feature 1..20: note = chemically synthesized
  source 1..20: mol_type = other DNA
tctcgtcctgcatccttctc

SEQ ID NO: 1626 - DNA, 20 bp, synthetic construct
  misc_feature 1..20: note = chemically synthesized
  source 1..20: mol_type = other DNA
ctcgtcctgcatccttctcc

SEQ ID NO: 1627 - DNA, 20 bp, synthetic construct
  misc_feature 1..20: note = chemically synthesized
  source 1..20: mol_type = other DNA
gtcctgcatccttctccagg

SEQ ID NO: 1628 - DNA, 20 bp, synthetic construct
  misc_feature 1..20: note = chemically synthesized
  source 1..20: mol_type = other DNA
tcctgcatccttctccaggc

SEQ ID NO: 1629 - DNA, 20 bp, synthetic construct
  misc_feature 1..20: note = chemically synthesized
  source 1..20: mol_type = other DNA
ccttctccaggcaggtcccc

SEQ ID NO: 1630 - DNA, 20 bp, synthetic construct
  misc_feature 1..20: note = chemically synthesized
  source 1..20: mol_type = other DNA
caagcatcgcccccctgctg

SEQ ID NO: 1631 - DNA, 20 bp, synthetic construct
  misc_feature 1..20: note = chemically synthesized
  source 1..20: mol_type = other DNA
cccctgctgtggctgttccc

SEQ ID NO: 1632 - DNA, 20 bp, synthetic construct
  misc_feature 1..20: note = chemically synthesized
  source 1..20: mol_type = other DNA
tgtggctgttcccaagttct

SEQ ID NO: 1633 - DNA, 20 bp, synthetic construct
  misc_feature 1..20: note = chemically synthesized
  source 1..20: mol_type = other DNA
gtggctgttcccaagttctt

SEQ ID NO: 1634 - DNA, 20 bp, synthetic construct
  misc_feature 1..20: note = chemically synthesized
  source 1..20: mol_type = other DNA
tggctgttcccaagttctta

SEQ ID NO: 1635 - DNA, 20 bp, synthetic construct
  misc_feature 1..20: note = chemically synthesized
  source 1..20: mol_type = other DNA
agttcttagggtaccccacg

SEQ ID NO: 1636 - DNA, 20 bp, synthetic construct
  misc_feature 1..20: note = chemically synthesized
  source 1..20: mol_type = other DNA
gttcttagggtaccccacgt

SEQ ID NO: 1637 - DNA, 20 bp, synthetic construct
  misc_feature 1..20: note = chemically synthesized
  source 1..20: mol_type = other DNA
acgtgggtttatcaaccact

SEQ ID NO: 1638 - DNA, 20 bp, synthetic construct
  misc_feature 1..20: note = chemically synthesized
  source 1..20: mol_type = other DNA
gggtttatcaaccacttggt

SEQ ID NO: 1639 - DNA, 20 bp, synthetic construct
  misc_feature 1..20: note = chemically synthesized
  source 1..20: mol_type = other DNA
ggtttatcaaccacttggtg

SEQ ID NO: 1640 - DNA, 20 bp, synthetic construct
  misc_feature 1..20: note = chemically synthesized
  source 1..20: mol_type = other DNA
tatcaaccacttggtgaggc

SEQ ID NO: 1641 - DNA, 20 bp, synthetic construct
  misc_feature 1..20: note = chemically synthesized
  source 1..20: mol_type = other DNA
ttcctgcaccccaattgcct

SEQ ID NO: 1642 - DNA, 20 bp, synthetic construct
  misc_feature 1..20: note = chemically synthesized
  source 1..20: mol_type = other DNA
ctgcaccccaattgccttag

SEQ ID NO: 1643 - DNA, 20 bp, synthetic construct
  misc_feature 1..20: note = chemically synthesized
  source 1..20: mol_type = other DNA
accccaattgccttagtggc

SEQ ID NO: 1644 - DNA, 20 bp, synthetic construct
  misc_feature 1..20: note = chemically synthesized
  source 1..20: mol_type = other DNA
ccccaattgccttagtggct

SEQ ID NO: 1645 - DNA, 20 bp, synthetic construct
  misc_feature 1..20: note = chemically synthesized
  source 1..20: mol_type = other DNA
cccaattgccttagtggcta

SEQ ID NO: 1646 - DNA, 20 bp, synthetic construct
  misc_feature 1..20: note = chemically synthesized
  source 1..20: mol_type = other DNA
ccaattgccttagtggctag

SEQ ID NO: 1647 - DNA, 20 bp, synthetic construct
  misc_feature 1..20: note = chemically synthesized
  source 1..20: mol_type = other DNA
caattgccttagtggctagg

SEQ ID NO: 1648 - DNA, 20 bp, synthetic construct
  misc_feature 1..20: note = chemically synthesized
  source 1..20: mol_type = other DNA
tgccttagtggctagggggt

SEQ ID NO: 1649 - DNA, 20 bp, synthetic construct
  misc_feature 1..20: note = chemically synthesized
  source 1..20: mol_type = other DNA
gccttagtggctagggggtt

SEQ ID NO: 1650 - DNA, 20 bp, synthetic construct
  misc_feature 1..20: note = chemically synthesized
  source 1..20: mol_type = other DNA
ccttagtggctagggggttg

SEQ ID NO: 1651 - DNA, 20 bp, synthetic construct
  misc_feature 1..20: note = chemically synthesized
  source 1..20: mol_type = other DNA
cttagtggctagggggttgg

SEQ ID NO: 1652 - DNA, 20 bp, synthetic construct
  misc_feature 1..20: note = chemically synthesized
  source 1..20: mol_type = other DNA
gtggctagggggttgggggc

SEQ ID NO: 1653 - DNA, 20 bp, synthetic construct
  misc_feature 1..20: note = chemically synthesized
  source 1..20: mol_type = other DNA
ggctagggggttgggggcta

SEQ ID NO: 1654 - DNA, 20 bp, synthetic construct
  misc_feature 1..20: note = chemically synthesized
  source 1..20: mol_type = other DNA
tagggggttgggggctagag

SEQ ID NO: 1655 - DNA, 20 bp, synthetic construct
  misc_feature 1..20: note = chemically synthesized
  source 1..20: mol_type = other DNA
agggggttgggggctagagt

SEQ ID NO: 1656 - DNA, 20 bp, synthetic construct
  misc_feature 1..20: note = chemically synthesized
  source 1..20: mol_type = other DNA
ggggttgggggctagagtag

SEQ ID NO: 1657 - DNA, 20 bp, synthetic construct
  misc_feature 1..20: note = chemically synthesized
  source 1..20: mol_type = other DNA
gggttgggggctagagtagg

SEQ ID NO: 1658 - DNA, 20 bp, synthetic construct
  misc_feature 1..20: note = chemically synthesized
  source 1..20: mol_type = other DNA
ggttgggggctagagtagga

SEQ ID NO: 1659 - DNA, 20 bp, synthetic construct
  misc_feature 1..20: note = chemically synthesized
  source 1..20: mol_type = other DNA
gttgggggctagagtaggag

SEQ ID NO: 1660 - DNA, 20 bp, synthetic construct
  misc_feature 1..20: note = chemically synthesized
  source 1..20: mol_type = other DNA
ggggctagagtaggaggggc

SEQ ID NO: 1661 - DNA, 20 bp, synthetic construct
  misc_feature 1..20: note = chemically synthesized
  source 1..20: mol_type = other DNA
ggctagagtaggaggggctg

SEQ ID NO: 1662 - DNA, 20 bp, synthetic construct
  misc_feature 1..20: note = chemically synthesized
  source 1..20: mol_type = other DNA
agagtaggaggggctggagc

SEQ ID NO: 1663 - DNA, 20 bp, synthetic construct
  misc_feature 1..20: note = chemically synthesized
  source 1..20: mol_type = other DNA
gagtaggaggggctggagcc

SEQ ID NO: 1664 - DNA, 20 bp, synthetic construct
  misc_feature 1..20: note = chemically synthesized
  source 1..20: mol_type = other DNA
ggggctggagccaggattct

SEQ ID NO: 1665 - DNA, 20 bp, synthetic construct
  misc_feature 1..20: note = chemically synthesized
  source 1..20: mol_type = other DNA
gggctggagccaggattctt

SEQ ID NO: 1666 - DNA, 20 bp, synthetic construct
  misc_feature 1..20: note = chemically synthesized
  source 1..20: mol_type = other DNA
ggctggagccaggattctta

SEQ ID NO: 1667 - DNA, 20 bp, synthetic construct
  misc_feature 1..20: note = chemically synthesized
  source 1..20: mol_type = other DNA
ccaggattcttagggctgaa

SEQ ID NO: 1668 - DNA, 20 bp, synthetic construct
  misc_feature 1..20: note = chemically synthesized
  source 1..20: mol_type = other DNA
aggattcttagggctgaaca

SEQ ID NO: 1669 - DNA, 20 bp, synthetic construct
  misc_feature 1..20: note = chemically synthesized
  source 1..20: mol_type = other DNA
attcttagggctgaacagag

SEQ ID NO: 1670 - DNA, 20 bp, synthetic construct
  misc_feature 1..20: note = chemically synthesized
  source 1..20: mol_type = other DNA
tcttagggctgaacagagaa

SEQ ID NO: 1671 - DNA, 20 bp, synthetic construct
  misc_feature 1..20: note = chemically synthesized
  source 1..20: mol_type = other DNA
agggctgaacagagaagagc

SEQ ID NO: 1672 - DNA, 20 bp, synthetic construct
  misc_feature 1..20: note = chemically synthesized
  source 1..20: mol_type = other DNA
gggctgaacagagaagagct

SEQ ID NO: 1673 - DNA, 20 bp, synthetic construct
  misc_feature 1..20: note = chemically synthesized
  source 1..20: mol_type = other DNA
ggctgaacagagaagagctg

SEQ ID NO: 1674 - DNA, 20 bp, synthetic construct
  misc_feature 1..20: note = chemically synthesized
  source 1..20: mol_type = other DNA
gctgaacagagaagagctgg

SEQ ID NO: 1675 - DNA, 20 bp, synthetic construct
  misc_feature 1..20: note = chemically synthesized
  source 1..20: mol_type = other DNA
acagagaagagctgggggcc

SEQ ID NO: 1676 - DNA, 20 bp, synthetic construct
  misc_feature 1..20: note = chemically synthesized
  source 1..20: mol_type = other DNA
cagagaagagctgggggcct

SEQ ID NO: 1677 - DNA, 20 bp, synthetic construct
  misc_feature 1..20: note = chemically synthesized
  source 1..20: mol_type = other DNA
gagctgggggcctgggctcc

SEQ ID NO: 1678 - DNA, 20 bp, synthetic construct
  misc_feature 1..20: note = chemically synthesized
  source 1..20: mol_type = other DNA
agctgggggcctgggctcct

SEQ ID NO: 1679 - DNA, 20 bp, synthetic construct
  misc_feature 1..20: note = chemically synthesized
  source 1..20: mol_type = other DNA
gggcctgggctcctgggttt

SEQ ID NO: 1680 - DNA, 20 bp, synthetic construct
  misc_feature 1..20: note = chemically synthesized
  source 1..20: mol_type = other DNA
gcctgggctcctgggtttga

SEQ ID NO: 1681 - DNA, 20 bp, synthetic construct
  misc_feature 1..20: note = chemically synthesized
  source 1..20: mol_type = other DNA
ctgggctcctgggtttgaga

SEQ ID NO: 1682 - DNA, 20 bp, synthetic construct
  misc_feature 1..20: note = chemically synthesized
  source 1..20: mol_type = other DNA
tgggctcctgggtttgagag

SEQ ID NO: 1683 - DNA, 20 bp, synthetic construct
  misc_feature 1..20: note = chemically synthesized
  source 1..20: mol_type = other DNA
ggctcctgggtttgagagag

SEQ ID NO: 1684 - DNA, 20 bp, synthetic construct
  misc_feature 1..20: note = chemically synthesized
  source 1..20: mol_type = other DNA
gctcctgggtttgagagagg

SEQ ID NO: 1685 - DNA, 20 bp, synthetic construct
  misc_feature 1..20: note = chemically synthesized
  source 1..20: mol_type = other DNA
ctcctgggtttgagagagga

SEQ ID NO: 1686 - DNA, 20 bp, synthetic construct
  misc_feature 1..20: note = chemically synthesized
  source 1..20: mol_type = other DNA
tcctgggtttgagagaggag

SEQ ID NO: 1687 - DNA, 20 bp, synthetic construct
  misc_feature 1..20: note = chemically synthesized
  source 1..20: mol_type = other DNA
gggtttgagagaggaggggc

SEQ ID NO: 1688 - DNA, 20 bp, synthetic construct
  misc_feature 1..20: note = chemically synthesized
  source 1..20: mol_type = other DNA
ggtttgagagaggaggggct

SEQ ID NO: 1689 - DNA, 20 bp, synthetic construct
  misc_feature 1..20: note = chemically synthesized
  source 1..20: mol_type = other DNA
gtttgagagaggaggggctg

SEQ ID NO: 1690 - DNA, 20 bp, synthetic construct
  misc_feature 1..20: note = chemically synthesized
  source 1..20: mol_type = other DNA
agagaggaggggctggggcc

SEQ ID NO: 1691 - DNA, 20 bp, synthetic construct
  misc_feature 1..20: note = chemically synthesized
  source 1..20: mol_type = other DNA
ggggctggggcctggactcc

SEQ ID NO: 1692 - DNA, 20 bp, synthetic construct
  misc_feature 1..20: note = chemically synthesized
  source 1..20: mol_type = other DNA
gggctggggcctggactcct

SEQ ID NO: 1693 - DNA, 20 bp, synthetic construct
  misc_feature 1..20: note = chemically synthesized
  source 1..20: mol_type = other DNA
gggcctggactcctgggtcc

SEQ ID NO: 1694 - DNA, 20 bp, synthetic construct
  misc_feature 1..20: note = chemically synthesized
  source 1..20: mol_type = other DNA
ggcctggactcctgggtccg

SEQ ID NO: 1695 - DNA, 20 bp, synthetic construct
  misc_feature 1..20: note = chemically synthesized
  source 1..20: mol_type = other DNA
gcctggactcctgggtccga

SEQ ID NO: 1696 - DNA, 20 bp, synthetic construct
  misc_feature 1..20: note = chemically synthesized
  source 1..20: mol_type = other DNA
ctggactcctgggtccgagg

SEQ ID NO: 1697 - DNA, 20 bp, synthetic construct
  misc_feature 1..20: note = chemically synthesized
  source 1..20: mol_type = other DNA
tggactcctgggtccgaggg

SEQ ID NO: 1698 - DNA, 20 bp, synthetic construct
  misc_feature 1..20: note = chemically synthesized
  source 1..20: mol_type = other DNA
gactcctgggtccgagggag

SEQ ID NO: 1699 - DNA, 20 bp, synthetic construct
  misc_feature 1..20: note = chemically synthesized
  source 1..20: mol_type = other DNA
actcctgggtccgagggagg

SEQ ID NO: 1700 - DNA, 20 bp, synthetic construct
  misc_feature 1..20: note = chemically synthesized
  source 1..20: mol_type = other DNA
ctcctgggtccgagggagga

SEQ ID NO: 1701 - DNA, 20 bp, synthetic construct
  misc_feature 1..20: note = chemically synthesized
  source 1..20: mol_type = other DNA
tcctgggtccgagggaggag

SEQ ID NO: 1702 - DNA, 20 bp, synthetic construct
  misc_feature 1..20: note = chemically synthesized
  source 1..20: mol_type = other DNA
gggtccgagggaggaggggc

SEQ ID NO: 1703 - DNA, 20 bp, synthetic construct
  misc_feature 1..20: note = chemically synthesized
  source 1..20: mol_type = other DNA
ggtccgagggaggaggggct

SEQ ID NO: 1704 - DNA, 20 bp, synthetic construct
  misc_feature 1..20: note = chemically synthesized
  source 1..20: mol_type = other DNA
gtccgagggaggaggggctg

SEQ ID NO: 1705 - DNA, 20 bp, synthetic construct
  misc_feature 1..20: note = chemically synthesized
  source 1..20: mol_type = other DNA
agggaggaggggctggggcc

SEQ ID NO: 1706 - DNA, 20 bp, synthetic construct
  misc_feature 1..20: note = chemically synthesized
  source 1..20: mol_type = other DNA
ggggctggggcctggactcc

SEQ ID NO: 1707 - DNA, 20 bp, synthetic construct
  misc_feature 1..20: note = chemically synthesized
  source 1..20: mol_type = other DNA
gggctggggcctggactcct

SEQ ID NO: 1708 - DNA, 20 bp, synthetic construct
  misc_feature 1..20: note = chemically synthesized
  source 1..20: mol_type = other DNA
gggcctggactcctgggtct

SEQ ID NO: 1709 - DNA, 20 bp, synthetic construct
  misc_feature 1..20: note = chemically synthesized
  source 1..20: mol_type = other DNA
ggcctggactcctgggtctg

SEQ ID NO: 1710 - DNA, 20 bp, synthetic construct
  misc_feature 1..20: note = chemically synthesized
  source 1..20: mol_type = other DNA
gcctggactcctgggtctga

SEQ ID NO: 1711 - DNA, 20 bp, synthetic construct
  misc_feature 1..20: note = chemically synthesized
  source 1..20: mol_type = other DNA
tggactcctgggtctgaggg

SEQ ID NO: 1712 - DNA, 20 bp, synthetic construct
  misc_feature 1..20: note = chemically synthesized
  source 1..20: mol_type = other DNA
gactcctgggtctgagggtg

SEQ ID NO: 1713 - DNA, 20 bp, synthetic construct
  misc_feature 1..20: note = chemically synthesized
  source 1..20: mol_type = other DNA
actcctgggtctgagggtgg

SEQ ID NO: 1714 - DNA, 20 bp, synthetic construct
  misc_feature 1..20: note = chemically synthesized
  source 1..20: mol_type = other DNA
ctcctgggtctgagggtgga

SEQ ID NO: 1715 - DNA, 20 bp, synthetic construct
  misc_feature 1..20: note = chemically synthesized
  source 1..20: mol_type = other DNA
gggtctgagggtggagggac

SEQ ID NO: 1716 - DNA, 20 bp, synthetic construct
  misc_feature 1..20: note = chemically synthesized
  source 1..20: mol_type = other DNA
ggtctgagggtggagggact

SEQ ID NO: 1717 - DNA, 20 bp, synthetic construct
  misc_feature 1..20: note = chemically synthesized
  source 1..20: mol_type = other DNA
gtctgagggtggagggactg

SEQ ID NO: 1718 - DNA, 20 bp, synthetic construct
  misc_feature 1..20: note = chemically synthesized
  source 1..20: mol_type = other DNA
tctgagggtggagggactgg

SEQ ID NO: 1719 - DNA, 20 bp, synthetic construct
  misc_feature 1..20: note = chemically synthesized
  source 1..20: mol_type = other DNA
gggtggagggactgggggcc

SEQ ID NO: 1720 - DNA, 20 bp, synthetic construct
  misc_feature 1..20: note = chemically synthesized
  source 1..20: mol_type = other DNA
ggactgggggcctggactcc

SEQ ID NO: 1721 - DNA, 20 bp, synthetic construct
  misc_feature 1..20: note = chemically synthesized
  source 1..20: mol_type = other DNA
gactgggggcctggactcct

SEQ ID NO: 1722 - DNA, 20 bp, synthetic construct
  misc_feature 1..20: note = chemically synthesized
  source 1..20: mol_type = other DNA
gggcctggactcctgggtcc

SEQ ID NO: 1723 - DNA, 20 bp, synthetic construct
  misc_feature 1..20: note = chemically synthesized
  source 1..20: mol_type = other DNA
ggcctggactcctgggtccg

SEQ ID NO: 1724 - DNA, 20 bp, synthetic construct
  misc_feature 1..20: note = chemically synthesized
  source 1..20: mol_type = other DNA
gcctggactcctgggtccga

SEQ ID NO: 1725 - DNA, 20 bp, synthetic construct
  misc_feature 1..20: note = chemically synthesized
  source 1..20: mol_type = other DNA
ctggactcctgggtccgagg

SEQ ID NO: 1726 - DNA, 20 bp, synthetic construct
  misc_feature 1..20: note = chemically synthesized
  source 1..20: mol_type = other DNA
tggactcctgggtccgaggg

SEQ ID NO: 1727 - DNA, 20 bp, synthetic construct
  misc_feature 1..20: note = chemically synthesized
  source 1..20: mol_type = other DNA
gactcctgggtccgagggag

SEQ ID NO: 1728 - DNA, 20 bp, synthetic construct
  misc_feature 1..20: note = chemically synthesized
  source 1..20: mol_type = other DNA
actcctgggtccgagggagg

SEQ ID NO: 1729 - DNA, 20 bp, synthetic construct
  misc_feature 1..20: note = chemically synthesized
  source 1..20: mol_type = other DNA
ctcctgggtccgagggagga

SEQ ID NO: 1730 - DNA, 20 bp, synthetic construct
  misc_feature 1..20: note = chemically synthesized
  source 1..20: mol_type = other DNA
tcctgggtccgagggaggag

SEQ ID NO: 1731 - DNA, 20 bp, synthetic construct
  misc_feature 1..20: note = chemically synthesized
  source 1..20: mol_type = other DNA
gggtccgagggaggaggggc

SEQ ID NO: 1732 - DNA, 20 bp, synthetic construct
  misc_feature 1..20: note = chemically synthesized
  source 1..20: mol_type = other DNA
ggtccgagggaggaggggct

SEQ ID NO: 1733 - DNA, 20 bp, synthetic construct
  misc_feature 1..20: note = chemically synthesized
  source 1..20: mol_type = other DNA
gtccgagggaggaggggctg

SEQ ID NO: 1734 - DNA, 20 bp, synthetic construct
  misc_feature 1..20: note = chemically synthesized
  source 1..20: mol_type = other DNA
agggaggaggggctggggcc

SEQ ID NO: 1735 - DNA, 20 bp, synthetic construct
  misc_feature 1..20: note = chemically synthesized
  source 1..20: mol_type = other DNA
ggggctggggcctggactcg

SEQ ID NO: 1736 - DNA, 20 bp, synthetic construct
  misc_feature 1..20: note = chemically synthesized
  source 1..20: mol_type = other DNA
gggctggggcctggactcgt

SEQ ID NO: 1737 - DNA, 20 bp, synthetic construct
  misc_feature 1..20: note = chemically synthesized
  source 1..20: mol_type = other DNA
gggcctggactcgtgggtct

SEQ ID NO: 1738 - DNA, 20 bp, synthetic construct
  misc_feature 1..20: note = chemically synthesized
  source 1..20: mol_type = other DNA
ggcctggactcgtgggtctg

SEQ ID NO: 1739 - DNA, 20 bp, synthetic construct
  misc_feature 1..20: note = chemically synthesized
  source 1..20: mol_type = other DNA
gcctggactcgtgggtctga

SEQ ID NO: 1740 - DNA, 20 bp, synthetic construct
  misc_feature 1..20: note = chemically synthesized
  source 1..20: mol_type = other DNA
ctggactcgtgggtctgagg

SEQ ID NO: 1741 - DNA, 20 bp, synthetic construct
  misc_feature 1..20: note = chemically synthesized
  source 1..20: mol_type = other DNA
tggactcgtgggtctgaggg

SEQ ID NO: 1742 - DNA, 20 bp, synthetic construct
  misc_feature 1..20: note = chemically synthesized
  source 1..20: mol_type = other DNA
gactcgtgggtctgagggag

SEQ ID NO: 1743 - DNA, 20 bp, synthetic construct
  misc_feature 1..20: note = chemically synthesized
  source 1..20: mol_type = other DNA
actcgtgggtctgagggagg

SEQ ID NO: 1744 - DNA, 20 bp, synthetic construct
  misc_feature 1..20: note = chemically synthesized
  source 1..20: mol_type = other DNA
ctcgtgggtctgagggagga

SEQ ID NO: 1745 - DNA, 20 bp, synthetic construct
  misc_feature 1..20: note = chemically synthesized
  source 1..20: mol_type = other DNA
tcgtgggtctgagggaggag

SEQ ID NO: 1746 - DNA, 20 bp, synthetic construct
  misc_feature 1..20: note = chemically synthesized
  source 1..20: mol_type = other DNA
gggtctgagggaggaggggc

SEQ ID NO: 1747 - DNA, 20 bp, synthetic construct
  misc_feature 1..20: note = chemically synthesized
  source 1..20: mol_type = other DNA
ggtctgagggaggaggggct

SEQ ID NO: 1748 - DNA, 20 bp, synthetic construct
  misc_feature 1..20: note = chemically synthesized
  source 1..20: mol_type = other DNA
gtctgagggaggaggggctg

SEQ ID NO: 1749 - DNA, 20 bp, synthetic construct
  misc_feature 1..20: note = chemically synthesized
  source 1..20: mol_type = other DNA
tctgagggaggaggggctgg

SEQ ID NO: 1750 - DNA, 20 bp, synthetic construct
  misc_feature 1..20: note = chemically synthesized
  source 1..20: mol_type = other DNA
gggaggaggggctgggggcc

SEQ ID NO: 1751 - DNA, 20 bp, synthetic construct
  misc_feature 1..20: note = chemically synthesized
  source 1..20: mol_type = other DNA
gggctgggggcctggacttc

SEQ ID NO: 1752 - DNA, 20 bp, synthetic construct
  misc_feature 1..20: note = chemically synthesized
  source 1..20: mol_type = other DNA
ggctgggggcctggacttct

SEQ ID NO: 1753 - DNA, 20 bp, synthetic construct
  misc_feature 1..20: note = chemically synthesized
  source 1..20: mol_type = other DNA
gggcctggacttctgggtct

SEQ ID NO: 1754 - DNA, 20 bp, synthetic construct
  misc_feature 1..20: note = chemically synthesized
  source 1..20: mol_type = other DNA
ggcctggacttctgggtctt

SEQ ID NO: 1755 - DNA, 20 bp, synthetic construct
  misc_feature 1..20: note = chemically synthesized
  source 1..20: mol_type = other DNA
gcctggacttctgggtctta

SEQ ID NO: 1756 - DNA, 20 bp, synthetic construct
  misc_feature 1..20: note = chemically synthesized
  source 1..20: mol_type = other DNA
ctggacttctgggtcttagg

SEQ ID NO: 1757 - DNA, 20 bp, synthetic construct
  misc_feature 1..20: note = chemically synthesized
  source 1..20: mol_type = other DNA
tggacttctgggtcttaggg

SEQ ID NO: 1758 - DNA, 20 bp, synthetic construct
  misc_feature 1..20: note = chemically synthesized
  source 1..20: mol_type = other DNA
acttctgggtcttagggagg

SEQ ID NO: 1759 - DNA, 20 bp, synthetic construct
  misc_feature 1..20: note = chemically synthesized
  source 1..20: mol_type = other DNA
cttctgggtcttagggaggc

SEQ ID NO: 1760 - DNA, 20 bp, synthetic construct
  misc_feature 1..20: note = chemically synthesized
  source 1..20: mol_type = other DNA
ttctgggtcttagggaggcg

SEQ ID NO: 1761 - DNA, 20 bp, synthetic construct
  misc_feature 1..20: note = chemically synthesized
  source 1..20: mol_type = other DNA
gggtcttagggaggcggggc

SEQ ID NO: 1762 - DNA, 20 bp, synthetic construct
  misc_feature 1..20: note = chemically synthesized
  source 1..20: mol_type = other DNA
ggtcttagggaggcggggct

SEQ ID NO: 1763 - DNA, 20 bp, synthetic construct
  misc_feature 1..20: note = chemically synthesized
  source 1..20: mol_type = other DNA
tagggaggcggggctgggcc

SEQ ID NO: 1764 - DNA, 20 bp, synthetic construct
  misc_feature 1..20: note = chemically synthesized
  source 1..20: mol_type = other DNA
cggggctgggcctggacccc

SEQ ID NO: 1765 - DNA, 20 bp, synthetic construct
  misc_feature 1..20: note = chemically synthesized
  source 1..20: mol_type = other DNA
ggggctgggcctggacccct

SEQ ID NO: 1766 - DNA, 20 bp, synthetic construct
  misc_feature 1..20: note = chemically synthesized
  source 1..20: mol_type = other DNA
cctggacccctgggtctgaa

SEQ ID NO: 1767 - DNA, 20 bp, synthetic construct
  misc_feature 1..20: note = chemically synthesized
  source 1..20: mol_type = other DNA
ctggacccctgggtctgaat

SEQ ID NO: 1768 - DNA, 20 bp, synthetic construct
  misc_feature 1..20: note = chemically synthesized
  source 1..20: mol_type = other DNA
tggacccctgggtctgaatg

SEQ ID NO: 1769 - DNA, 20 bp, synthetic construct
  misc_feature 1..20: note = chemically synthesized
  source 1..20: mol_type = other DNA
gacccctgggtctgaatggg

SEQ ID NO: 1770 - DNA, 20 bp, synthetic construct
  misc_feature 1..20: note = chemically synthesized
  source 1..20: mol_type = other DNA
cccctgggtctgaatgggga

SEQ ID NO: 1771 - DNA, 20 bp, synthetic construct
  misc_feature 1..20: note = chemically synthesized
  source 1..20: mol_type = other DNA
ccctgggtctgaatggggag

SEQ ID NO: 1772 - DNA, 20 bp, synthetic construct
  misc_feature 1..20: note = chemically synthesized
  source 1..20: mol_type = other DNA
gggtctgaatggggagaggc

SEQ ID NO: 1773 - DNA, 20 bp, synthetic construct
  misc_feature 1..20: note = chemically synthesized
  source 1..20: mol_type = other DNA
ggtctgaatggggagaggct

SEQ ID NO: 1774 - DNA, 20 bp, synthetic construct
  misc_feature 1..20: note = chemically synthesized
  source 1..20: mol_type = other DNA
gtctgaatggggagaggctg

SEQ ID NO: 1775 - DNA, 20 bp, synthetic construct
  misc_feature 1..20: note = chemically synthesized
  source 1..20: mol_type = other DNA
tctgaatggggagaggctgg

SEQ ID NO: 1776 - DNA, 20 bp, synthetic construct
  misc_feature 1..20: note = chemically synthesized
  source 1..20: mol_type = other DNA
atggggagaggctgggggcc

SEQ ID NO: 1777 - DNA, 20 bp, synthetic construct
  misc_feature 1..20: note = chemically synthesized
  source 1..20: mol_type = other DNA
gggcctggactccttcatct

SEQ ID NO: 1778 - DNA, 20 bp, synthetic construct
  misc_feature 1..20: note = chemically synthesized
  source 1..20: mol_type = other DNA
ggcctggactccttcatctg

SEQ ID NO: 1779 - DNA, 20 bp, synthetic construct
  misc_feature 1..20: note = chemically synthesized
  source 1..20: mol_type = other DNA
gcctggactccttcatctga

SEQ ID NO: 1780 - DNA, 20 bp, synthetic construct
  misc_feature 1..20: note = chemically synthesized
  source 1..20: mol_type = other DNA
tggactccttcatctgaggg

SEQ ID NO: 1781 - DNA, 20 bp, synthetic construct
  misc_feature 1..20: note = chemically synthesized
  source 1..20: mol_type = other DNA
actccttcatctgagggcgg

SEQ ID NO: 1782 - DNA, 20 bp, synthetic construct
  misc_feature 1..20: note = chemically synthesized
  source 1..20: mol_type = other DNA
ctccttcatctgagggcgga

SEQ ID NO: 1783 - DNA, 20 bp, synthetic construct
  misc_feature 1..20: note = chemically synthesized
  source 1..20: mol_type = other DNA
tccttcatctgagggcggaa

SEQ ID NO: 1784 - DNA, 20 bp, synthetic construct
  misc_feature 1..20: note = chemically synthesized
  source 1..20: mol_type = other DNA
tcatctgagggcggaagggc

SEQ ID NO: 1785 - DNA, 20 bp, synthetic construct
  misc_feature 1..20: note = chemically synthesized
  source 1..20: mol_type = other DNA
catctgagggcggaagggct

SEQ ID NO: 1786 - DNA, 20 bp, synthetic construct
  misc_feature 1..20: note = chemically synthesized
  source 1..20: mol_type = other DNA
atctgagggcggaagggctg

SEQ ID NO: 1787 - DNA, 20 bp, synthetic construct
  misc_feature 1..20: note = chemically synthesized
  source 1..20: mol_type = other DNA
agggcggaagggctggggcc

SEQ ID NO: 1788 - DNA, 20 bp, synthetic construct
  misc_feature 1..20: note = chemically synthesized
  source 1..20: mol_type = other DNA
agggctggggcctggcctcc

SEQ ID NO: 1789 - DNA, 20 bp, synthetic construct
  misc_feature 1..20: note = chemically synthesized
  source 1..20: mol_type = other DNA
gggctggggcctggcctcct

SEQ ID NO: 1790 - DNA, 20 bp, synthetic construct
  misc_feature 1..20: note = chemically synthesized
  source 1..20: mol_type = other DNA
gcctggcctcctgggttgaa

SEQ ID NO: 1791 - DNA, 20 bp, synthetic construct
  misc_feature 1..20: note = chemically synthesized
  source 1..20: mol_type = other DNA
cctggcctcctgggttgaat

SEQ ID NO: 1792 - DNA, 20 bp, synthetic construct
  misc_feature 1..20: note = chemically synthesized
  source 1..20: mol_type = other DNA
ctggcctcctgggttgaatg

SEQ ID NO: 1793 - DNA, 20 bp, synthetic construct
  misc_feature 1..20: note = chemically synthesized
  source 1..20: mol_type = other DNA
ggcctcctgggttgaatggg

SEQ ID NO: 1794 - DNA, 20 bp, synthetic construct
  misc_feature 1..20: note = chemically synthesized
  source 1..20: mol_type = other DNA
gcctcctgggttgaatgggg

SEQ ID NO: 1795 - DNA, 20 bp, synthetic construct
  misc_feature 1..20: note = chemically synthesized
  source 1..20: mol_type = other DNA
cctcctgggttgaatgggga

SEQ ID NO: 1796 - DNA, 20 bp, synthetic construct
  misc_feature 1..20: note = chemically synthesized
  source 1..20: mol_type = other DNA
ctcctgggttgaatggggag

SEQ ID NO: 1797 - DNA, 20 bp, synthetic construct
  misc_feature 1..20: note = chemically synthesized
  source 1..20: mol_type = other DNA
tgggttgaatggggaggggt

SEQ ID NO: 1798 - DNA, 20 bp, synthetic construct
  misc_feature 1..20: note = chemically synthesized
  source 1..20: mol_type = other DNA
gggttgaatggggaggggtt

SEQ ID NO: 1799 - DNA, 20 bp, synthetic construct
  misc_feature 1..20: note = chemically synthesized
  source 1..20: mol_type = other DNA
gaatggggaggggttgggcc

SEQ ID NO: 1800 - DNA, 20 bp, synthetic construct
  misc_feature 1..20: note = chemically synthesized
  source 1..20: mol_type = other DNA
gaggggttgggcctggactc

SEQ ID NO: 1801 - DNA, 20 bp, synthetic construct
  misc_feature 1..20: note = chemically synthesized
  source 1..20: mol_type = other DNA
ggggttgggcctggactctg

SEQ ID NO: 1802 - DNA, 20 bp, synthetic construct
  misc_feature 1..20: note = chemically synthesized
  source 1..20: mol_type = other DNA
ggcctggactctggagtccc

SEQ ID NO: 1803 - DNA, 20 bp, synthetic construct
  misc_feature 1..20: note = chemically synthesized
  source 1..20: mol_type = other DNA
actctggagtccctggtgcc

SEQ ID NO: 1804 - DNA, 20 bp, synthetic construct
  misc_feature 1..20: note = chemically synthesized
  source 1..20: mol_type = other DNA
ctctggagtccctggtgccc

SEQ ID NO: 1805 - DNA, 20 bp, synthetic construct
  misc_feature 1..20: note = chemically synthesized
  source 1..20: mol_type = other DNA
agtccctggtgcccaggcct

SEQ ID NO: 1806 - DNA, 20 bp, synthetic construct
  misc_feature 1..20: note = chemically synthesized
  source 1..20: mol_type = other DNA
gtccctggtgcccaggcctc

SEQ ID NO: 1807 - DNA, 20 bp, synthetic construct
  misc_feature 1..20: note = chemically synthesized
  source 1..20: mol_type = other DNA
caggcctcaggcatctttca

SEQ ID NO: 1808 - DNA, 20 bp, synthetic construct
  misc_feature 1..20: note = chemically synthesized
  source 1..20: mol_type = other DNA
aggcctcaggcatctttcac

SEQ ID NO: 1809 - DNA, 20 bp, synthetic construct
  misc_feature 1..20: note = chemically synthesized
  source 1..20: mol_type = other DNA
ggcctcaggcatctttcaca

SEQ ID NO: 1810 - DNA, 20 bp, synthetic construct
  misc_feature 1..20: note = chemically synthesized
  source 1..20: mol_type = other DNA
tttcacagggatgcctgtac

SEQ ID NO: 1811 - DNA, 20 bp, synthetic construct
  misc_feature 1..20: note = chemically synthesized
  source 1..20: mol_type = other DNA
ttcacagggatgcctgtact

SEQ ID NO: 1812 - DNA, 20 bp, synthetic construct
  misc_feature 1..20: note = chemically synthesized
  source 1..20: mol_type = other DNA
acagggatgcctgtactggg

SEQ ID NO: 1813 - DNA, 20 bp, synthetic construct
  misc_feature 1..20: note = chemically synthesized
  source 1..20: mol_type = other DNA
cagggatgcctgtactgggc

SEQ ID NO: 1814 - DNA, 20 bp, synthetic construct
  misc_feature 1..20: note = chemically synthesized
  source 1..20: mol_type = other DNA
tgtactgggcaggtccttga

SEQ ID NO: 1815 - DNA, 20 bp, synthetic construct
  misc_feature 1..20: note = chemically synthesized
  source 1..20: mol_type = other DNA
gtactgggcaggtccttgaa

SEQ ID NO: 1816 - DNA, 20 bp, synthetic construct
  misc_feature 1..20: note = chemically synthesized
  source 1..20: mol_type = other DNA
tactgggcaggtccttgaaa

SEQ ID NO: 1817 - DNA, 20 bp, synthetic construct
  misc_feature 1..20: note = chemically synthesized
  source 1..20: mol_type = other DNA
gggcaggtccttgaaaggga

SEQ ID NO: 1818 - DNA, 20 bp, synthetic construct
  misc_feature 1..20: note = chemically synthesized
  source 1..20: mol_type = other DNA
ggcaggtccttgaaagggaa

SEQ ID NO: 1819 - DNA, 20 bp, synthetic construct
  misc_feature 1..20: note = chemically synthesized
  source 1..20: mol_type = other DNA
tcccctatcgccatgacaac

SEQ ID NO: 1820 - DNA, 20 bp, synthetic construct
  misc_feature 1..20: note = chemically synthesized
  source 1..20: mol_type = other DNA
cccctatcgccatgacaact

SEQ ID NO: 1821 - DNA, 20 bp, synthetic construct
  misc_feature 1..20: note = chemically synthesized
  source 1..20: mol_type = other DNA
ctatcgccatgacaactggg

SEQ ID NO: 1822 - DNA, 20 bp, synthetic construct
  misc_feature 1..20: note = chemically synthesized
  source 1..20: mol_type = other DNA
acaactgggtggaaataaac

SEQ ID NO: 1823 - DNA, 20 bp, synthetic construct
  misc_feature 1..20: note = chemically synthesized
  source 1..20: mol_type = other DNA
tgggtggaaataaacgagcc

SEQ ID NO: 1824 - DNA, 20 bp, synthetic construct
  misc_feature 1..20: note = chemically synthesized
  source 1..20: mol_type = other DNA
agccgagttcatcccgttcc

SEQ ID NO: 1825 - DNA, 20 bp, synthetic construct
  misc_feature 1..20: note = chemically synthesized
  source 1..20: mol_type = other DNA
gccgagttcatcccgttccc

SEQ ID NO: 1826 - DNA, 20 bp, synthetic construct
  misc_feature 1..20: note = chemically synthesized
  source 1..20: mol_type = other DNA
ccgagttcatcccgttccca

SEQ ID NO: 1827 - DNA, 20 bp, synthetic construct
  misc_feature 1..20: note = chemically synthesized
  source 1..20: mol_type = other DNA
tcccgttcccagggcacgtg

SEQ ID NO: 1828 - DNA, 20 bp, synthetic construct
  misc_feature 1..20: note = chemically synthesized
  source 1..20: mol_type = other DNA
gggcacgtgcggccccttca

SEQ ID NO: 1829 - DNA, 20 bp, synthetic construct
  misc_feature 1..20: note = chemically synthesized
  source 1..20: mol_type = other DNA
gtgcggccccttcacagccc

SEQ ID NO: 1830 - DNA, 20 bp, synthetic construct
  misc_feature 1..20: note = chemically synthesized
  source 1..20: mol_type = other DNA
tttccatgacctcatgctct

SEQ ID NO: 1831 - DNA, 20 bp, synthetic construct
  misc_feature 1..20: note = chemically synthesized
  source 1..20: mol_type = other DNA
cctcatgctcttggccctcg

SEQ ID NO: 1832 - DNA, 20 bp, synthetic construct
  misc_feature 1..20: note = chemically synthesized
  source 1..20: mol_type = other DNA
tagctccctcccgcctcctc

SEQ ID NO: 1833 - DNA, 20 bp, synthetic construct
  misc_feature 1..20: note = chemically synthesized
  source 1..20: mol_type = other DNA
tccctcccgcctcctccaga

SEQ ID NO: 1834 - DNA, 20 bp, synthetic construct
  misc_feature 1..20: note = chemically synthesized
  source 1..20: mol_type = other DNA
ccctcccgcctcctccagat

SEQ ID NO: 1835 - DNA, 20 bp, synthetic construct
  misc_feature 1..20: note = chemically synthesized
  source 1..20: mol_type = other DNA
tcccgcctcctccagatggg

SEQ ID NO: 1836 - DNA, 20 bp, synthetic construct
  misc_feature 1..20: note = chemically synthesized
  source 1..20: mol_type = other DNA
ctcctccagatgggcagctt

SEQ ID NO: 1837 - DNA, 20 bp, synthetic construct
  misc_feature 1..20: note = chemically synthesized
  source 1..20: mol_type = other DNA
cctccagatgggcagctttg

SEQ ID NO: 1838 - DNA, 20 bp, synthetic construct
  misc_feature 1..20: note = chemically synthesized
  source 1..20: mol_type = other DNA
tccagatgggcagctttgga

SEQ ID NO: 1839 - DNA, 20 bp, synthetic construct
  misc_feature 1..20: note = chemically synthesized
  source 1..20: mol_type = other DNA
ccagatgggcagctttggag

SEQ ID NO: 1840 - DNA, 20 bp, synthetic construct
  misc_feature 1..20: note = chemically synthesized
  source 1..20: mol_type = other DNA
atgggcagctttggagaggt

SEQ ID NO: 1841 - DNA, 20 bp, synthetic construct
  misc_feature 1..20: note = chemically synthesized
  source 1..20: mol_type = other DNA
tgggcagctttggagaggtg

SEQ ID NO: 1842 - DNA, 20 bp, synthetic construct
  misc_feature 1..20: note = chemically synthesized
  source 1..20: mol_type = other DNA
gggcagctttggagaggtga

SEQ ID NO: 1843 - DNA, 20 bp, synthetic construct
  misc_feature 1..20: note = chemically synthesized
  source 1..20: mol_type = other DNA
ctttggagaggtgagggact

SEQ ID NO: 1844 - DNA, 20 bp, synthetic construct
  misc_feature 1..20: note = chemically synthesized
  source 1..20: mol_type = other DNA
tttggagaggtgagggactt

SEQ ID NO: 1845 - DNA, 20 bp, synthetic construct
  misc_feature 1..20: note = chemically synthesized
  source 1..20: mol_type = other DNA
ttggagaggtgagggacttg

SEQ ID NO: 1846 - DNA, 20 bp, synthetic construct
  misc_feature 1..20: note = chemically synthesized
  source 1..20: mol_type = other DNA
tggagaggtgagggacttgg

SEQ ID NO: 1847 - DNA, 20 bp, synthetic construct
  misc_feature 1..20: note = chemically synthesized
  source 1..20: mol_type = other DNA
ggagaggtgagggacttggg

SEQ ID NO: 1848 - DNA, 20 bp, synthetic construct
  misc_feature 1..20: note = chemically synthesized
  source 1..20: mol_type = other DNA
ttggggggtaatttatcccg

SEQ ID NO: 1849 - DNA, 20 bp, synthetic construct
  misc_feature 1..20: note = chemically synthesized
  source 1..20: mol_type = other DNA
ggtaatttatcccgtggatc

SEQ ID NO: 1850 - DNA, 20 bp, synthetic construct
  misc_feature 1..20: note = chemically synthesized
  source 1..20: mol_type = other DNA
gtaatttatcccgtggatct

SEQ ID NO: 1851 - DNA, 20 bp, synthetic construct
  misc_feature 1..20: note = chemically synthesized
  source 1..20: mol_type = other DNA
aatttatcccgtggatctag

SEQ ID NO: 1852 - DNA, 20 bp, synthetic construct
  misc_feature 1..20: note = chemically synthesized
  source 1..20: mol_type = other DNA
atcccgtggatctaggagtt

SEQ ID NO: 1853 - DNA, 20 bp, synthetic construct
  misc_feature 1..20: note = chemically synthesized
  source 1..20: mol_type = other DNA
gtttagcttcactccttcct

SEQ ID NO: 1854 - DNA, 20 bp, synthetic construct
  misc_feature 1..20: note = chemically synthesized
  source 1..20: mol_type = other DNA
cttcactccttcctcagctc

SEQ ID NO: 1855 - DNA, 20 bp, synthetic construct
  misc_feature 1..20: note = chemically synthesized
  source 1..20: mol_type = other DNA
ctccttcctcagctccagtt

SEQ ID NO: 1856 - DNA, 20 bp, synthetic construct
  misc_feature 1..20: note = chemically synthesized
  source 1..20: mol_type = other DNA
tccttcctcagctccagttc

SEQ ID NO: 1857 - DNA, 20 bp, synthetic construct
  misc_feature 1..20: note = chemically synthesized
  source 1..20: mol_type = other DNA
ctcagctccagttcaggtcc

SEQ ID NO: 1858 - DNA, 20 bp, synthetic construct
  misc_feature 1..20: note = chemically synthesized
  source 1..20: mol_type = other DNA
cagctccagttcaggtcccg

SEQ ID NO: 1859 - DNA, 20 bp, synthetic construct
  misc_feature 1..20: note = chemically synthesized
  source 1..20: mol_type = other DNA
ttcaggtcccggagcccacc

SEQ ID NO: 1860 - DNA, 20 bp, synthetic construct
  misc_feature 1..20: note = chemically synthesized
  source 1..20: mol_type = other DNA
ggagcccacccagtgtccac

SEQ ID NO: 1861 - DNA, 20 bp, synthetic construct
  misc_feature 1..20: note = chemically synthesized
  source 1..20: mol_type = other DNA
gagcccacccagtgtccaca

SEQ ID NO: 1862 - DNA, 20 bp, synthetic construct
  misc_feature 1..20: note = chemically synthesized
  source 1..20: mol_type = other DNA
cacccagtgtccacaaggcc

SEQ ID NO: 1863 - DNA, 20 bp, synthetic construct
  misc_feature 1..20: note = chemically synthesized
  source 1..20: mol_type = other DNA
acccagtgtccacaaggcct

SEQ ID NO: 1864 - DNA, 20 bp, synthetic construct
  misc_feature 1..20: note = chemically synthesized
  source 1..20: mol_type = other DNA
cccagtgtccacaaggcctg

SEQ ID NO: 1865 - DNA, 20 bp, synthetic construct
  misc_feature 1..20: note = chemically synthesized
  source 1..20: mol_type = other DNA
gtgtccacaaggcctggggc

SEQ ID NO: 1866 - DNA, 20 bp, synthetic construct
  misc_feature 1..20: note = chemically synthesized
  source 1..20: mol_type = other DNA
aagtccctcctccgaccccc

SEQ ID NO: 1867 - DNA, 20 bp, synthetic construct
  misc_feature 1..20: note = chemically synthesized
  source 1..20: mol_type = other DNA
tcctccgaccccctggactt

SEQ ID NO: 1868 - DNA, 20 bp, synthetic construct
  misc_feature 1..20: note = chemically synthesized
  source 1..20: mol_type = other DNA
acttcggcttttgtcccccc

SEQ ID NO: 1869 - DNA, 20 bp, synthetic construct
  misc_feature 1..20: note = chemically synthesized
  source 1..20: mol_type = other DNA
gcttttgtccccccaagttt

SEQ ID NO: 1870 - DNA, 20 bp, synthetic construct
  misc_feature 1..20: note = chemically synthesized
  source 1..20: mol_type = other DNA
cccccaagttttggacccct

SEQ ID NO: 1871 - DNA, 20 bp, synthetic construct
  misc_feature 1..20: note = chemically synthesized
  source 1..20: mol_type = other DNA
ccccaagttttggaccccta

SEQ ID NO: 1872 - DNA, 20 bp, synthetic construct
  misc_feature 1..20: note = chemically synthesized
  source 1..20: mol_type = other DNA
cccaagttttggacccctaa

SEQ ID NO: 1873 - DNA, 20 bp, synthetic construct
  misc_feature 1..20: note = chemically synthesized
  source 1..20: mol_type = other DNA
aagttttggacccctaaggg

SEQ ID NO: 1874 - DNA, 20 bp, synthetic construct
  misc_feature 1..20: note = chemically synthesized
  source 1..20: mol_type = other DNA
tggacccctaagggaagaat

SEQ ID NO: 1875 - DNA, 20 bp, synthetic construct
  misc_feature 1..20: note = chemically synthesized
  source 1..20: mol_type = other DNA
cctaagggaagaatgagaaa

SEQ ID NO: 1876 - DNA, 20 bp, synthetic construct
  misc_feature 1..20: note = chemically synthesized
  source 1..20: mol_type = other DNA
aagggaagaatgagaaacgg

SEQ ID NO: 1877 - DNA, 20 bp, synthetic construct
  misc_feature 1..20: note = chemically synthesized
  source 1..20: mol_type = other DNA
tgagaaacggtggcccgtgt

SEQ ID NO: 1878 - DNA, 20 bp, synthetic construct
  misc_feature 1..20: note = chemically synthesized
  source 1..20: mol_type = other DNA
cggtggcccgtgtcagcccc

SEQ ID NO: 1879 - DNA, 20 bp, synthetic construct
  misc_feature 1..20: note = chemically synthesized
  source 1..20: mol_type = other DNA
cccgtgtcagcccctggctg

SEQ ID NO: 1880 - DNA, 20 bp, synthetic construct
  misc_feature 1..20: note = chemically synthesized
  source 1..20: mol_type = other DNA
ccgtgtcagcccctggctgc

SEQ ID NO: 1881 - DNA, 20 bp, synthetic construct
  misc_feature 1..20: note = chemically synthesized
  source 1..20: mol_type = other DNA
cgtgtcagcccctggctgca

SEQ ID NO: 1882 - DNA, 20 bp, synthetic construct
  misc_feature 1..20: note = chemically synthesized
  source 1..20: mol_type = other DNA
cctggctgcagggccccgtg

SEQ ID NO: 1883 - DNA, 20 bp, synthetic construct
  misc_feature 1..20: note = chemically synthesized
  source 1..20: mol_type = other DNA
tggctgcagggccccgtgca

SEQ ID NO: 1884 - DNA, 20 bp, synthetic construct
  misc_feature 1..20: note = chemically synthesized
  source 1..20: mol_type = other DNA
ggctgcagggccccgtgcag

SEQ ID NO: 1885 - DNA, 20 bp, synthetic construct
  misc_feature 1..20: note = chemically synthesized
  source 1..20: mol_type = other DNA
gctgcagggccccgtgcaga

SEQ ID NO: 1886 - DNA, 20 bp, synthetic construct
  misc_feature 1..20: note = chemically synthesized
  source 1..20: mol_type = other DNA
ctgcagggccccgtgcagag

SEQ ID NO: 1887 - DNA, 20 bp, synthetic construct
  misc_feature 1..20: note = chemically synthesized
  source 1..20: mol_type = other DNA
tgcagggccccgtgcagagg

SEQ ID NO: 1888 - DNA, 20 bp, synthetic construct
  misc_feature 1..20: note = chemically synthesized
  source 1..20: mol_type = other DNA
gccccgtgcagagggggcct

SEQ ID NO: 1889 - DNA, 20 bp, synthetic construct
  misc_feature 1..20: note = chemically synthesized
  source 1..20: mol_type = other DNA
cagagggggcctcagtgaac

SEQ ID NO: 1890 - DNA, 20 bp, synthetic construct
  misc_feature 1..20: note = chemically synthesized
  source 1..20: mol_type = other DNA
gagggggcctcagtgaactg

SEQ ID NO: 1891 - DNA, 20 bp, synthetic construct
  misc_feature 1..20: note = chemically synthesized
  source 1..20: mol_type = other DNA
ctcagtgaactggagtgtga

SEQ ID NO: 1892 - DNA, 20 bp, synthetic construct
  misc_feature 1..20: note = chemically synthesized
  source 1..20: mol_type = other DNA
tgaactggagtgtgacagcc

SEQ ID NO: 1893 - DNA, 20 bp, synthetic construct
  misc_feature 1..20: note = chemically synthesized
  source 1..20: mol_type = other DNA
gaactggagtgtgacagcct

SEQ ID NO: 1894 - DNA, 20 bp, synthetic construct
  misc_feature 1..20: note = chemically synthesized
  source 1..20: mol_type = other DNA
aactggagtgtgacagcctg

SEQ ID NO: 1895 - DNA, 20 bp, synthetic construct
  misc_feature 1..20: note = chemically synthesized
  source 1..20: mol_type = other DNA
gagtgtgacagcctggggcc

SEQ ID NO: 1896 - DNA, 20 bp, synthetic construct
  misc_feature 1..20: note = chemically synthesized
  source 1..20: mol_type = other DNA
agtgtgacagcctggggccc

SEQ ID NO: 1897 - DNA, 20 bp, synthetic construct
  misc_feature 1..20: note = chemically synthesized
  source 1..20: mol_type = other DNA
cagcctggggcccaggcaca

SEQ ID NO: 1898 - DNA, 20 bp, synthetic construct
  misc_feature 1..20: note = chemically synthesized
  source 1..20: mol_type = other DNA
agcctggggcccaggcacac

SEQ ID NO: 1899 - DNA, 20 bp, synthetic construct
  misc_feature 1..20: note = chemically synthesized
  source 1..20: mol_type = other DNA
ggcccaggcacacaggtgtg

SEQ ID NO: 1900 - DNA, 20 bp, synthetic construct
  misc_feature 1..20: note = chemically synthesized
  source 1..20: mol_type = other DNA
gtgcagctgtctcacccctc

SEQ ID NO: 1901 - DNA, 20 bp, synthetic construct
  misc_feature 1..20: note = chemically synthesized
  source 1..20: mol_type = other DNA
tgcagctgtctcacccctct

SEQ ID NO: 1902 - DNA, 20 bp, synthetic construct
  misc_feature 1..20: note = chemically synthesized
  source 1..20: mol_type = other DNA
cagctgtctcacccctctgg

SEQ ID NO: 1903 - DNA, 20 bp, synthetic construct
  misc_feature 1..20: note = chemically synthesized
  source 1..20: mol_type = other DNA
acccctctgggagtcccgcc

SEQ ID NO: 1904 - DNA, 20 bp, synthetic construct
  misc_feature 1..20: note = chemically synthesized
  source 1..20: mol_type = other DNA
cccctctgggagtcccgccc

SEQ ID NO: 1905 - DNA, 20 bp, synthetic construct
  misc_feature 1..20: note = chemically synthesized
  source 1..20: mol_type = other DNA
ggagtcccgcccaggcccct

SEQ ID NO: 1906 - DNA, 20 bp, synthetic construct
  misc_feature 1..20: note = chemically synthesized
  source 1..20: mol_type = other DNA
ccaggcccctgagtctgtcc

SEQ ID NO: 1907 - DNA, 20 bp, synthetic construct
  misc_feature 1..20: note = chemically synthesized
  source 1..20: mol_type = other DNA
cccctgagtctgtcccagca

SEQ ID NO: 1908 - DNA, 20 bp, synthetic construct
  misc_feature 1..20: note = chemically synthesized
  source 1..20: mol_type = other DNA
ccctgagtctgtcccagcac

SEQ ID NO: 1909 - DNA, 20 bp, synthetic construct
  misc_feature 1..20: note = chemically synthesized
  source 1..20: mol_type = other DNA
cctgagtctgtcccagcaca

SEQ ID NO: 1910 - DNA, 20 bp, synthetic construct
  misc_feature 1..20: note = chemically synthesized
  source 1..20: mol_type = other DNA
gagtctgtcccagcacaggg

SEQ ID NO: 1911 - DNA, 20 bp, synthetic construct
  misc_feature 1..20: note = chemically synthesized
  source 1..20: mol_type = other DNA
tggccttcctccaccctgca

SEQ ID NO: 1912 - DNA, 20 bp, synthetic construct
  misc_feature 1..20: note = chemically synthesized
  source 1..20: mol_type = other DNA
tcctccaccctgcatagccc

SEQ ID NO: 1913 - DNA, 20 bp, synthetic construct
  misc_feature 1..20: note = chemically synthesized
  source 1..20: mol_type = other DNA
cctccaccctgcatagccct

SEQ ID NO: 1914 - DNA, 20 bp, synthetic construct
  misc_feature 1..20: note = chemically synthesized
  source 1..20: mol_type = other DNA
cctgcatagccctgggccca

SEQ ID NO: 1915 - DNA, 20 bp, synthetic construct
  misc_feature 1..20: note = chemically synthesized
  source 1..20: mol_type = other DNA
ggcccacggcttcgttcctg

SEQ ID NO: 1916 - DNA, 20 bp, synthetic construct
  misc_feature 1..20: note = chemically synthesized
  source 1..20: mol_type = other DNA
cccacggcttcgttcctgca

SEQ ID NO: 1917 - DNA, 20 bp, synthetic construct
  misc_feature 1..20: note = chemically synthesized
  source 1..20: mol_type = other DNA
cgttcctgcagagtatctgc

SEQ ID NO: 1918 - DNA, 20 bp, synthetic construct
  misc_feature 1..20: note = chemically synthesized
  source 1..20: mol_type = other DNA
gttcctgcagagtatctgct

SEQ ID NO: 1919 - DNA, 20 bp, synthetic construct
  misc_feature 1..20: note = chemically synthesized
  source 1..20: mol_type = other DNA
ttcctgcagagtatctgctg

SEQ ID NO: 1920 - DNA, 20 bp, synthetic construct
  misc_feature 1..20: note = chemically synthesized
  source 1..20: mol_type = other DNA
ctgcagagtatctgctgggg

SEQ ID NO: 1921 - DNA, 20 bp, synthetic construct
  misc_feature 1..20: note = chemically synthesized
  source 1..20: mol_type = other DNA
tatctgctggggtggtttcc

SEQ ID NO: 1922 - DNA, 20 bp, synthetic construct
  misc_feature 1..20: note = chemically synthesized
  source 1..20: mol_type = other DNA
tggtttccgagcttgaccct

SEQ ID NO: 1923 - DNA, 20 bp, synthetic construct
  misc_feature 1..20: note = chemically synthesized
  source 1..20: mol_type = other DNA
tttccgagcttgacccttgg

SEQ ID NO: 1924 - DNA, 20 bp, synthetic construct
  misc_feature 1..20: note = chemically synthesized
  source 1..20: mol_type = other DNA
ttccgagcttgacccttgga

SEQ ID NO: 1925 - DNA, 20 bp, synthetic construct
  misc_feature 1..20: note = chemically synthesized
  source 1..20: mol_type = other DNA
gcttgacccttggaaggacc

SEQ ID NO: 1926 - DNA, 20 bp, synthetic construct
  misc_feature 1..20: note = chemically synthesized
  source 1..20: mol_type = other DNA
gacccttggaaggacctggc

SEQ ID NO: 1927 - DNA, 20 bp, synthetic construct
  misc_feature 1..20: note = chemically synthesized
  source 1..20: mol_type = other DNA
acccttggaaggacctggct

SEQ ID NO: 1928 - DNA, 20 bp, synthetic construct
  misc_feature 1..20: note = chemically synthesized
  source 1..20: mol_type = other DNA
ggaaggacctggctgggttt

SEQ ID NO: 1929 - DNA, 20 bp, synthetic construct
  misc_feature 1..20: note = chemically synthesized
  source 1..20: mol_type = other DNA
gaaggacctggctgggttta

SEQ ID NO: 1930 - DNA, 20 bp, synthetic construct
  misc_feature 1..20: note = chemically synthesized
  source 1..20: mol_type = other DNA
ggacctggctgggtttaagg

SEQ ID NO: 1931 - DNA, 20 bp, synthetic construct
  misc_feature 1..20: note = chemically synthesized
  source 1..20: mol_type = other DNA
gacctggctgggtttaaggc

SEQ ID NO: 1932 - DNA, 20 bp, synthetic construct
  misc_feature 1..20: note = chemically synthesized
  source 1..20: mol_type = other DNA
cctggctgggtttaaggcag

SEQ ID NO: 1933 - DNA, 20 bp, synthetic construct
  misc_feature 1..20: note = chemically synthesized
  source 1..20: mol_type = other DNA
ctggctgggtttaaggcagg

SEQ ID NO: 1934 - DNA, 20 bp, synthetic construct
  misc_feature 1..20: note = chemically synthesized
  source 1..20: mol_type = other DNA
tggctgggtttaaggcagga

SEQ ID NO: 1935 - DNA, 20 bp, synthetic construct
  misc_feature 1..20: note = chemically synthesized
  source 1..20: mol_type = other DNA
ggctgggtttaaggcaggag

SEQ ID NO: 1936 - DNA, 20 bp, synthetic construct
  misc_feature 1..20: note = chemically synthesized
  source 1..20: mol_type = other DNA
gggtttaaggcaggaggggc

SEQ ID NO: 1937 - DNA, 20 bp, synthetic construct
  misc_feature 1..20: note = chemically synthesized
  source 1..20: mol_type = other DNA
ggtttaaggcaggaggggct

SEQ ID NO: 1938 - DNA, 20 bp, synthetic construct
  misc_feature 1..20: note = chemically synthesized
  source 1..20: mol_type = other DNA
gtttaaggcaggaggggctg

SEQ ID NO: 1939 - DNA, 20 bp, synthetic construct
  misc_feature 1..20: note = chemically synthesized
  source 1..20: mol_type = other DNA
tttaaggcaggaggggctgg

SEQ ID NO: 1940 - DNA, 20 bp, synthetic construct
  misc_feature 1..20: note = chemically synthesized
  source 1..20: mol_type = other DNA
aggcaggaggggctgggggc

SEQ ID NO: 1941 - DNA, 20 bp, synthetic construct
  misc_feature 1..20: note = chemically synthesized
  source 1..20: mol_type = other DNA
ggcaggaggggctgggggcc

SEQ ID NO: 1942 - DNA, 20 bp, synthetic construct
  misc_feature 1..20: note = chemically synthesized
  source 1..20: mol_type = other DNA
gggctgggggccaggactcc

SEQ ID NO: 1943 - DNA, 20 bp, synthetic construct
  misc_feature 1..20: note = chemically synthesized
  source 1..20: mol_type = other DNA
ggccaggactcctggctctg

SEQ ID NO: 1944 - DNA, 20 bp, synthetic construct
  misc_feature 1..20: note = chemically synthesized
  source 1..20: mol_type = other DNA
gccaggactcctggctctga

SEQ ID NO: 1945 - DNA, 20 bp, synthetic construct
  misc_feature 1..20: note = chemically synthesized
  source 1..20: mol_type = other DNA
caggactcctggctctgaag

SEQ ID NO: 1946 - DNA, 20 bp, synthetic construct
  misc_feature 1..20: note = chemically synthesized
  source 1..20: mol_type = other DNA
aggactcctggctctgaagg

SEQ ID NO: 1947 - DNA, 20 bp, synthetic construct
  misc_feature 1..20: note = chemically synthesized
  source 1..20: mol_type = other DNA
gactcctggctctgaaggag

SEQ ID NO: 1948 - DNA, 20 bp, synthetic construct
  misc_feature 1..20: note = chemically synthesized
  source 1..20: mol_type = other DNA
actcctggctctgaaggagg

SEQ ID NO: 1949 - DNA, 20 bp, synthetic construct
  misc_feature 1..20: note = chemically synthesized
  source 1..20: mol_type = other DNA
ctcctggctctgaaggagga

SEQ ID NO: 1950 - DNA, 20 bp, synthetic construct
  misc_feature 1..20: note = chemically synthesized
  source 1..20: mol_type = other DNA
tcctggctctgaaggaggag

SEQ ID NO: 1951 - DNA, 20 bp, synthetic construct
  misc_feature 1..20: note = chemically synthesized
  source 1..20: mol_type = other DNA
ggctctgaaggaggaggggc

SEQ ID NO: 1952 - DNA, 20 bp, synthetic construct
  misc_feature 1..20: note = chemically synthesized
  source 1..20: mol_type = other DNA
aggggctggaacctcttccc

SEQ ID NO: 1953 - DNA, 20 bp, synthetic construct
  misc_feature 1..20: note = chemically synthesized
  source 1..20: mol_type = other DNA
tggaacctcttccctagtct

SEQ ID NO: 1954 - DNA, 20 bp, synthetic construct
  misc_feature 1..20: note = chemically synthesized
  source 1..20: mol_type = other DNA
ctcttccctagtctgagcac

SEQ ID NO: 1955 - DNA, 20 bp, synthetic construct
  misc_feature 1..20: note = chemically synthesized
  source 1..20: mol_type = other DNA
ttccctagtctgagcactgg

SEQ ID NO: 1956 - DNA, 20 bp, synthetic construct
  misc_feature 1..20: note = chemically synthesized
  source 1..20: mol_type = other DNA
agcactggaagcgccacctg

SEQ ID NO: 1957 - DNA, 20 bp, synthetic construct
  misc_feature 1..20: note = chemically synthesized
  source 1..20: mol_type = other DNA
gcactggaagcgccacctgt

SEQ ID NO: 1958 - DNA, 20 bp, synthetic construct
  misc_feature 1..20: note = chemically synthesized
  source 1..20: mol_type = other DNA
ctggaagcgccacctgtggg

SEQ ID NO: 1959 - DNA, 20 bp, synthetic construct
  misc_feature 1..20: note = chemically synthesized
  source 1..20: mol_type = other DNA
gcgccacctgtgggtggtga

SEQ ID NO: 1960 - DNA, 20 bp, synthetic construct
  misc_feature 1..20: note = chemically synthesized
  source 1..20: mol_type = other DNA
cgccacctgtgggtggtgac

SEQ ID NO: 1961 - DNA, 20 bp, synthetic construct
  misc_feature 1..20: note = chemically synthesized
  source 1..20: mol_type = other DNA
gccacctgtgggtggtgacg

SEQ ID NO: 1962 - DNA, 20 bp, synthetic construct
  misc_feature 1..20: note = chemically synthesized
  source 1..20: mol_type = other DNA
ccacctgtgggtggtgacgg

SEQ ID NO: 1963 - DNA, 20 bp, synthetic construct
  misc_feature 1..20: note = chemically synthesized
  source 1..20: mol_type = other DNA
gggggttttgccgtgtctaa

SEQ ID NO: 1964 - DNA, 20 bp, synthetic construct
  misc_feature 1..20: note = chemically synthesized
  source 1..20: mol_type = other DNA
ggggttttgccgtgtctaac

SEQ ID NO: 1965 - DNA, 20 bp, synthetic construct
  misc_feature 1..20: note = chemically synthesized
  source 1..20: mol_type = other DNA
cgtgtctaacaggtaccatg

SEQ ID NO: 1966 - DNA, 20 bp, synthetic construct
  misc_feature 1..20: note = chemically synthesized
  source 1..20: mol_type = other DNA
gtgtctaacaggtaccatgt

SEQ ID NO: 1967 - DNA, 20 bp, synthetic construct
  misc_feature 1..20: note = chemically synthesized
  source 1..20: mol_type = other DNA
tgtctaacaggtaccatgtg

SEQ ID NO: 1968 - DNA, 20 bp, synthetic construct
  misc_feature 1..20: note = chemically synthesized
  source 1..20: mol_type = other DNA
ccatgtggggttcccgcacc

SEQ ID NO: 1969 - DNA, 20 bp, synthetic construct
  misc_feature 1..20: note = chemically synthesized
  source 1..20: mol_type = other DNA
tggggttcccgcacccagat

SEQ ID NO: 1970 - DNA, 20 bp, synthetic construct
  misc_feature 1..20: note = chemically synthesized
  source 1..20: mol_type = other DNA
ggttcccgcacccagatgag

SEQ ID NO: 1971 - DNA, 20 bp, synthetic construct
  misc_feature 1..20: note = chemically synthesized
  source 1..20: mol_type = other DNA
ccccgttcacttcctgtttg

SEQ ID NO: 1972 - DNA, 20 bp, synthetic construct
  misc_feature 1..20: note = chemically synthesized
  source 1..20: mol_type = other DNA
gttcacttcctgtttgcaga

SEQ ID NO: 1973 - DNA, 20 bp, synthetic construct
  misc_feature 1..20: note = chemically synthesized
  source 1..20: mol_type = other DNA
acttcctgtttgcagatagc

SEQ ID NO: 1974 - DNA, 20 bp, synthetic construct
  misc_feature 1..20: note = chemically synthesized
  source 1..20: mol_type = other DNA
cttcctgtttgcagatagcc

SEQ ID NO: 1975 - DNA, 20 bp, synthetic construct
  misc_feature 1..20: note = chemically synthesized
  source 1..20: mol_type = other DNA
tcctgtttgcagatagccag

SEQ ID NO: 1976 - DNA, 20 bp, synthetic construct
  misc_feature 1..20: note = chemically synthesized
  source 1..20: mol_type = other DNA
gatagccaggagtcctttcg

SEQ ID NO: 1977 - DNA, 20 bp, synthetic construct
  misc_feature 1..20: note = chemically synthesized
  source 1..20: mol_type = other DNA
gtcctttcgtggtttccact

SEQ ID NO: 1978 - DNA, 20 bp, synthetic construct
  misc_feature 1..20: note = chemically synthesized
  source 1..20: mol_type = other DNA
gtggtttccactgagcactg

SEQ ID NO: 1979 - DNA, 20 bp, synthetic construct
  misc_feature 1..20: note = chemically synthesized
  source 1..20: mol_type = other DNA
tggtttccactgagcactga

SEQ ID NO: 1980 - DNA, 20 bp, synthetic construct
  misc_feature 1..20: note = chemically synthesized
  source 1..20: mol_type = other DNA
tccactgagcactgaaggcc

SEQ ID NO: 1981 - DNA, 20 bp, synthetic construct
  misc_feature 1..20: note = chemically synthesized
  source 1..20: mol_type = other DNA
ctgagcactgaaggcctggc

SEQ ID NO: 1982 - DNA, 20 bp, synthetic construct
  misc_feature 1..20: note = chemically synthesized
  source 1..20: mol_type = other DNA
ggcctggccggcctgaccac

SEQ ID NO: 1983 - DNA, 20 bp, synthetic construct
  misc_feature 1..20: note = chemically synthesized
  source 1..20: mol_type = other DNA
gcctggccggcctgaccact

SEQ ID NO: 1984 - DNA, 20 bp, synthetic construct
  misc_feature 1..20: note = chemically synthesized
  source 1..20: mol_type = other DNA
cggcctgaccactgggcaac

SEQ ID NO: 1985 - DNA, 20 bp, synthetic construct
  misc_feature 1..20: note = chemically synthesized
  source 1..20: mol_type = other DNA
ggcctgaccactgggcaacc

SEQ ID NO: 1986 - DNA, 20 bp, synthetic construct
  misc_feature 1..20: note = chemically synthesized
  source 1..20: mol_type = other DNA
gcaaccaggcgtatcttaaa

SEQ ID NO: 1987 - DNA, 20 bp, synthetic construct
  misc_feature 1..20: note = chemically synthesized
  source 1..20: mol_type = other DNA
ccaggcgtatcttaaacagc

SEQ ID NO: 1988 - DNA, 20 bp, synthetic construct
  misc_feature 1..20: note = chemically synthesized
  source 1..20: mol_type = other DNA
ggcgtatcttaaacagccag

SEQ ID NO: 1989 - DNA, 20 bp, synthetic construct
  misc_feature 1..20: note = chemically synthesized
  source 1..20: mol_type = other DNA
tatcttaaacagccagtggc

SEQ ID NO: 1990 - DNA, 20 bp, synthetic construct
  misc_feature 1..20: note = chemically synthesized
  source 1..20: mol_type = other DNA
tcttaaacagccagtggcca

SEQ ID NO: 1991 - DNA, 20 bp, synthetic construct
  misc_feature 1..20: note = chemically synthesized
  source 1..20: mol_type = other DNA
cttaaacagccagtggccag

SEQ ID NO: 1992 - DNA, 20 bp, synthetic construct
  misc_feature 1..20: note = chemically synthesized
  source 1..20: mol_type = other DNA
agccagtggccagaggctgt

SEQ ID NO: 1993 - DNA, 20 bp, synthetic construct
  misc_feature 1..20: note = chemically synthesized
  source 1..20: mol_type = other DNA
gccagtggccagaggctgtt

SEQ ID NO: 1994 - DNA, 20 bp, synthetic construct
  misc_feature 1..20: note = chemically synthesized
  source 1..20: mol_type = other DNA
ggtcattttccccactgtcc

SEQ ID NO: 1995 - DNA, 20 bp, synthetic construct
  misc_feature 1..20: note = chemically synthesized
  source 1..20: mol_type = other DNA
ctgtcctagcaccgtgtccc

SEQ ID NO: 1996 - DNA, 20 bp, synthetic construct
  misc_feature 1..20: note = chemically synthesized
  source 1..20: mol_type = other DNA
tgtccctggatctgttttcg

SEQ ID NO: 1997 - DNA, 20 bp, synthetic construct
  misc_feature 1..20: note = chemically synthesized
  source 1..20: mol_type = other DNA
tctgttttcgtggctccctc

SEQ ID NO: 1998 - DNA, 20 bp, synthetic construct
  misc_feature 1..20: note = chemically synthesized
  source 1..20: mol_type = other DNA
tgttttcgtggctccctctg

SEQ ID NO: 1999 - DNA, 20 bp, synthetic construct
  misc_feature 1..20: note = chemically synthesized
  source 1..20: mol_type = other DNA
cctctggagtcccgacttgc

SEQ ID NO: 2000 - DNA, 20 bp, synthetic construct
  misc_feature 1..20: note = chemically synthesized
  source 1..20: mol_type = other DNA
ctctggagtcccgacttgct

SEQ ID NO: 2001 - DNA, 20 bp, synthetic construct
  misc_feature 1..20: note = chemically synthesized
  source 1..20: mol_type = other DNA
cccgacttgctgggacaccg

SEQ ID NO: 2002 - DNA, 20 bp, synthetic construct
  misc_feature 1..20: note = chemically synthesized
  source 1..20: mol_type = other DNA
acttgctgggacaccgtggc

SEQ ID NO: 2003 - DNA, 20 bp, synthetic construct
  misc_feature 1..20: note = chemically synthesized
  source 1..20: mol_type = other DNA
cttgctgggacaccgtggct

SEQ ID NO: 2004 - DNA, 20 bp, synthetic construct
  misc_feature 1..20: note = chemically synthesized
  source 1..20: mol_type = other DNA
ttgctgggacaccgtggctg

SEQ ID NO: 2005 - DNA, 20 bp, synthetic construct
  misc_feature 1..20: note = chemically synthesized
  source 1..20: mol_type = other DNA
ctgggacaccgtggctgggg

SEQ ID NO: 2006 - DNA, 20 bp, synthetic construct
  misc_feature 1..20: note = chemically synthesized
  source 1..20: mol_type = other DNA
tgggacaccgtggctggggt

SEQ ID NO: 2007 - DNA, 20 bp, synthetic construct
  misc_feature 1..20: note = chemically synthesized
  source 1..20: mol_type = other DNA
caccgtggctggggtaggtg

SEQ ID NO: 2008 - DNA, 20 bp, synthetic construct
  misc_feature 1..20: note = chemically synthesized
  source 1..20: mol_type = other DNA
gctggggtaggtgcggctga

SEQ ID NO: 2009 - DNA, 20 bp, synthetic construct
  misc_feature 1..20: note = chemically synthesized
  source 1..20: mol_type = other DNA
tgacggctgtttcccacccc

SEQ ID NO: 2010 - DNA, 20 bp, synthetic construct
  misc_feature 1..20: note = chemically synthesized
  source 1..20: mol_type = other DNA
gacggctgtttcccaccccc

SEQ ID NO: 2011 - DNA, 20 bp, synthetic construct
  misc_feature 1..20: note = chemically synthesized
  source 1..20: mol_type = other DNA
acccccaggcctgcattgat

SEQ ID NO: 2012 - DNA, 20 bp, synthetic construct
  misc_feature 1..20: note = chemically synthesized
  source 1..20: mol_type = other DNA
ggcctgcattgatgagaacc

SEQ ID NO: 2013 - DNA, 20 bp, synthetic construct
  misc_feature 1..20: note = chemically synthesized
  source 1..20: mol_type = other DNA
cctgcattgatgagaacctg

SEQ ID NO: 2014 - DNA, 20 bp, synthetic construct
  misc_feature 1..20: note = chemically synthesized
  source 1..20: mol_type = other DNA
ctgcattgatgagaacctgg

SEQ ID NO: 2015 - DNA, 20 bp, synthetic construct
  misc_feature 1..20: note = chemically synthesized
  source 1..20: mol_type = other DNA
cattgatgagaacctggagg

SEQ ID NO: 2016 - DNA, 20 bp, synthetic construct
  misc_feature 1..20: note = chemically synthesized
  source 1..20: mol_type = other DNA
cctggaggtggtgcgcttct

SEQ ID NO: 2017 - DNA, 20 bp, synthetic construct
  misc_feature 1..20: note = chemically synthesized
  source 1..20: mol_type = other DNA
ggaggtggtgcgcttcttgg

SEQ ID NO: 2018 - DNA, 20 bp, synthetic construct
  misc_feature 1..20: note = chemically synthesized
  source 1..20: mol_type = other DNA
aggtggtgcgcttcttggtg

SEQ ID NO: 2019 - DNA, 20 bp, synthetic construct
  misc_feature 1..20: note = chemically synthesized
  source 1..20: mol_type = other DNA
tggtgcgcttcttggtggag

SEQ ID NO: 2020 - DNA, 20 bp, synthetic construct
  misc_feature 1..20: note = chemically synthesized
  source 1..20: mol_type = other DNA
ggtgcgcttcttggtggagc

SEQ ID NO: 2021 - DNA, 20 bp, synthetic construct
  misc_feature 1..20: note = chemically synthesized
  source 1..20: mol_type = other DNA
gtgcgcttcttggtggagca

SEQ ID NO: 2022 - DNA, 20 bp, synthetic construct
  misc_feature 1..20: note = chemically synthesized
  source 1..20: mol_type = other DNA
agcagggcgccactgtgaac

SEQ ID NO: 2023 - DNA, 20 bp, synthetic construct
  misc_feature 1..20: note = chemically synthesized
  source 1..20: mol_type = other DNA
gcagggcgccactgtgaacc

SEQ ID NO: 2024 - DNA, 20 bp, synthetic construct
  misc_feature 1..20: note = chemically synthesized
  source 1..20: mol_type = other DNA
gggcgccactgtgaaccagg

SEQ ID NO: 2025 - DNA, 20 bp, synthetic construct
  misc_feature 1..20: note = chemically synthesized
  source 1..20: mol_type = other DNA
ctgtgaaccaggcagacaac

SEQ ID NO: 2026 - DNA, 20 bp, synthetic construct
  misc_feature 1..20: note = chemically synthesized
  source 1..20: mol_type = other DNA
tgtgaaccaggcagacaacg

SEQ ID NO: 2027 - DNA, 20 bp, synthetic construct
  misc_feature 1..20: note = chemically synthesized
  source 1..20: mol_type = other DNA
gtgaaccaggcagacaacga

SEQ ID NO: 2028 - DNA, 20 bp, synthetic construct
  misc_feature 1..20: note = chemically synthesized
  source 1..20: mol_type = other DNA
accaggcagacaacgagggc

SEQ ID NO: 2029 - DNA, 20 bp, synthetic construct
  misc_feature 1..20: note = chemically synthesized
  source 1..20: mol_type = other DNA
gggctggacgccactgcacg

SEQ ID NO: 2030 - DNA, 20 bp, synthetic construct
  misc_feature 1..20: note = chemically synthesized
  source 1..20: mol_type = other DNA
ctgcacgtggccgcctcctg

SEQ ID NO: 2031 - DNA, 20 bp, synthetic construct
  misc_feature 1..20: note = chemically synthesized
  source 1..20: mol_type = other DNA
ggccgcctcctgtggctacc

SEQ ID NO: 2032 - DNA, 20 bp, synthetic construct
  misc_feature 1..20: note = chemically synthesized
  source 1..20: mol_type = other DNA
tgtggctacctagatatcgc

SEQ ID NO: 2033 - DNA, 20 bp, synthetic construct
  misc_feature 1..20: note = chemically synthesized
  source 1..20: mol_type = other DNA
gttctcatcaatgcaggcct

SEQ ID NO: 2034 - DNA, 20 bp, synthetic construct
  misc_feature 1..20: note = chemically synthesized
  source 1..20: mol_type = other DNA
gaagggagggggcttctcat

SEQ ID NO: 2035 - DNA, 20 bp, synthetic construct
  misc_feature 1..20: note = chemically synthesized
  source 1..20: mol_type = other DNA
gcccctcctccttcagagcc

SEQ ID NO: 2036 - DNA, 20 bp, synthetic construct
  misc_feature 1..20: note = chemically synthesized
  source 1..20: mol_type = other DNA
aaacccagccaggtccttcc

SEQ ID NO: 2037 - DNA, 20 bp, synthetic construct
  misc_feature 1..20: note = chemically synthesized
  source 1..20: mol_type = other DNA
gccgtgggcccagggctatg

SEQ ID NO: 2038 - DNA, 20 bp, synthetic construct
  misc_feature 1..20: note = chemically synthesized
  source 1..20: mol_type = other DNA
ggcctgggcgggactcccag

SEQ ID NO: 2039 - DNA, 20 bp, synthetic construct
  misc_feature 1..20: note = chemically synthesized
  source 1..20: mol_type = other DNA
ccgtttctcattcttccctt

SEQ ID NO: 2040 - DNA, 20 bp, synthetic construct
  misc_feature 1..20: note = chemically synthesized
  source 1..20: mol_type = other DNA
gggacaaaagccgaagtcca

SEQ ID NO: 2041 - DNA, 20 bp, synthetic construct
  misc_feature 1..20: note = chemically synthesized
  source 1..20: mol_type = other DNA
tgccccaggccttgtggaca

SEQ ID NO: 2042 - DNA, 20 bp, synthetic construct
  misc_feature 1..20: note = chemically synthesized
  source 1..20: mol_type = other DNA
acctgaactggagctgagga

SEQ ID NO: 2043 - DNA, 20 bp, synthetic construct
  misc_feature 1..20: note = chemically synthesized
  source 1..20: mol_type = other DNA
aagctaaactcctagatcca

SEQ ID NO: 2044 - DNA, 20 bp, synthetic construct
  misc_feature 1..20: note = chemically synthesized
  source 1..20: mol_type = other DNA
ggccgcacgtgccctgggaa

SEQ ID NO: 2045 - DNA, 20 bp, synthetic construct
  misc_feature 1..20: note = chemically synthesized
  source 1..20: mol_type = other DNA
ggcctgggcaccagggactc

SEQ ID NO: 2046 - DNA, 20 bp, synthetic construct
  misc_feature 1..20: note = chemically synthesized
  source 1..20: mol_type = other DNA
gcccttccgccctcagatga

SEQ ID NO: 2047 - DNA, 20 bp, synthetic construct
  misc_feature 1..20: note = chemically synthesized
  source 1..20: mol_type = other DNA
gcctctccccattcagaccc

SEQ ID NO: 2048 - DNA, 20 bp, synthetic construct
  misc_feature 1..20: note = chemically synthesized
  source 1..20: mol_type = other DNA
gcccctcctccctcagaccc

SEQ ID NO: 2049 - DNA, 20 bp, synthetic construct
  misc_feature 1..20: note = chemically synthesized
  source 1..20: mol_type = other DNA
gcccctcctccctcggaccc

SEQ ID NO: 2050 - DNA, 20 bp, synthetic construct
  misc_feature 1..20: note = chemically synthesized
  source 1..20: mol_type = other DNA
gtccctccaccctcagaccc

SEQ ID NO: 2051 - DNA, 20 bp, synthetic construct
  misc_feature 1..20: note = chemically synthesized
  source 1..20: mol_type = other DNA
gcccctcctccctcggaccc

SEQ ID NO: 2052 - DNA, 20 bp, synthetic construct
  misc_feature 1..20: note = chemically synthesized
  source 1..20: mol_type = other DNA
gctcttctctgttcagccct

SEQ ID NO: 2053 - DNA, 20 bp, synthetic construct
  misc_feature 1..20: note = chemically synthesized
  source 1..20: mol_type = other DNA
cccctagccactaaggcaat

SEQ ID NO: 2054 - DNA, 20 bp, synthetic construct
  misc_feature 1..20: note = chemically synthesized
  source 1..20: mol_type = other DNA
cactaaggcaattggggtgc

SEQ ID NO: 2055 - DNA, 20 bp, synthetic construct
  misc_feature 1..20: note = chemically synthesized
  source 1..20: mol_type = other DNA
ttggggtgcaggaatggggg

SEQ ID NO: 2056 - DNA, 20 bp, synthetic construct
  misc_feature 1..20: note = chemically synthesized
  source 1..20: mol_type = other DNA
aagtggttgataaacccacg

SEQ ID NO: 2057 - DNA, 20 bp, synthetic construct
  misc_feature 1..20: note = chemically synthesized
  source 1..20: mol_type = other DNA
gcttggggacctgcctggag

SEQ ID NO: 2058 - DNA, 20 bp, synthetic construct
  misc_feature 1..20: note = chemically synthesized
  source 1..20: mol_type = other DNA
cccaggtggagaaactggcc

SEQ ID NO: 2059 - DNA, 20 bp, synthetic construct
  misc_feature 1..20: note = chemically synthesized
  source 1..20: mol_type = other DNA
ggagaaactggccgggaatc

SEQ ID NO: 2060 - DNA, 20 bp, synthetic construct
  misc_feature 1..20: note = chemically synthesized
  source 1..20: mol_type = other DNA
atccctgttttcctaggact

SEQ ID NO: 2061 - DNA, 20 bp, synthetic construct
  misc_feature 1..20: note = chemically synthesized
  source 1..20: mol_type = other DNA
ttggccacgtaacctgagaa

SEQ ID NO: 2062 - DNA, 20 bp, synthetic construct
  misc_feature 1..20: note = chemically synthesized
  source 1..20: mol_type = other DNA
ccccaatgctccaggcctcc

SEQ ID NO: 2063 - DNA, 20 bp, synthetic construct
  misc_feature 1..20: note = chemically synthesized
  source 1..20: mol_type = other DNA
aggcctcctgggataccccg

SEQ ID NO: 2064 - DNA, 20 bp, synthetic construct
  misc_feature 1..20: note = chemically synthesized
  source 1..20: mol_type = other DNA
ctcctgggataccccgaaga

SEQ ID NO: 2065 - DNA, 20 bp, synthetic construct
  misc_feature 1..20: note = chemically synthesized
  source 1..20: mol_type = other DNA
cagtcaccccacagttggag

SEQ ID NO: 2066 - DNA, 20 bp, synthetic construct
  misc_feature 1..20: note = chemically synthesized
  source 1..20: mol_type = other DNA
ggcagcctggtagacagggc

SEQ ID NO: 2067 - DNA, 20 bp, synthetic construct
  misc_feature 1..20: note = chemically synthesized
  source 1..20: mol_type = other DNA
agggctggggtggcctctcg

SEQ ID NO: 2068 - DNA, 20 bp, synthetic construct
  misc_feature 1..20: note = chemically synthesized
  source 1..20: mol_type = other DNA
taggtggcctggggcctctg

SEQ ID NO: 2069 - DNA, 20 bp, synthetic construct
  misc_feature 1..20: note = chemically synthesized
  source 1..20: mol_type = other DNA
tctgggggatgcaggggaag

SEQ ID NO: 2070 - DNA, 20 bp, synthetic construct
  misc_feature 1..20: note = chemically synthesized
  source 1..20: mol_type = other DNA
gaagggggatgcaggggaac

SEQ ID NO: 2071 - DNA, 20 bp, synthetic construct
  misc_feature 1..20: note = chemically synthesized
  source 1..20: mol_type = other DNA
cgggaccctgctctgggcgg

SEQ ID NO: 2072 - DNA, 20 bp, synthetic construct
  misc_feature 1..20: note = chemically synthesized
  source 1..20: mol_type = other DNA
tggggactctttaaggaaag

SEQ ID NO: 2073 - DNA, 20 bp, synthetic construct
  misc_feature 1..20: note = chemically synthesized
  source 1..20: mol_type = other DNA
gaaggatggagaaagagaaa

SEQ ID NO: 2074 - DNA, 20 bp, synthetic construct
  misc_feature 1..20: note = chemically synthesized
  source 1..20: mol_type = other DNA
ggacgcaccattctcacaaa

SEQ ID NO: 2075 - DNA, 20 bp, synthetic construct
  misc_feature 1..20: note = chemically synthesized
  source 1..20: mol_type = other DNA
gtgtaaggaagctgcagcac

SEQ ID NO: 2076 - DNA, 20 bp, synthetic construct
  misc_feature 1..20: note = chemically synthesized
  source 1..20: mol_type = other DNA
gagcagctcaggttctggga

SEQ ID NO: 2077 - DNA, 20 bp, synthetic construct
  misc_feature 1..20: note = chemically synthesized
  source 1..20: mol_type = other DNA
ggttctgggagagggtagcg

SEQ ID NO: 2078 - DNA, 20 bp, synthetic construct
  misc_feature 1..20: note = chemically synthesized
  source 1..20: mol_type = other DNA
ccctgccaagctctccctcc

SEQ ID NO: 2079 - DNA, 20 bp, synthetic construct
  misc_feature 1..20: note = chemically synthesized
  source 1..20: mol_type = other DNA
gagagatggctccaggaaat

SEQ ID NO: 2080 - DNA, 20 bp, synthetic construct
  misc_feature 1..20: note = chemically synthesized
  source 1..20: mol_type = other DNA
tgggggtgtgtcaccagata

SEQ ID NO: 2081 - DNA, 20 bp, synthetic construct
  misc_feature 1..20: note = chemically synthesized
  source 1..20: mol_type = other DNA
gaatctgcctaacaggaggt

SEQ ID NO: 2082 - DNA, 20 bp, synthetic construct
  misc_feature 1..20: note = chemically synthesized
  source 1..20: mol_type = other DNA
gactaggaaggaggaggcct

SEQ ID NO: 2083 - DNA, 20 bp, synthetic construct
  misc_feature 1..20: note = chemically synthesized
  source 1..20: mol_type = other DNA
tgtccctagtggccccactg

SEQ ID NO: 2084 - DNA, 20 bp, synthetic construct
  misc_feature 1..20: note = chemically synthesized
  source 1..20: mol_type = other DNA
gagccacattaaccggccct

SEQ ID NO: 2085 - DNA, 20 bp, synthetic construct
  misc_feature 1..20: note = chemically synthesized
  source 1..20: mol_type = other DNA
gtggtcccagctcggggaca

SEQ ID NO: 2086 - DNA, 20 bp, synthetic construct
  misc_feature 1..20: note = chemically synthesized
  source 1..20: mol_type = other DNA
cctgaagtggacataggggc

SEQ ID NO: 2087 - DNA, 20 bp, synthetic construct
  misc_feature 1..20: note = chemically synthesized
  source 1..20: mol_type = other DNA
gcacagactagagaggtaag

SEQ ID NO: 2088 - DNA, 20 bp, synthetic construct
  misc_feature 1..20: note = chemically synthesized
  source 1..20: mol_type = other DNA
aggggagctgcccaaatgaa

SEQ ID NO: 2089 - DNA, 20 bp, synthetic construct
  misc_feature 1..20: note = chemically synthesized
  source 1..20: mol_type = other DNA
tgaaaggagtgagaggtgac

SEQ ID NO: 2090 - DNA, 20 bp, synthetic construct
  misc_feature 1..20: note = chemically synthesized
  source 1..20: mol_type = other DNA
gacccgaatccacaggagaa

SEQ ID NO: 2091 - DNA, 20 bp, synthetic construct
  misc_feature 1..20: note = chemically synthesized
  source 1..20: mol_type = other DNA
tgtccaggcaaagaaagcaa

SEQ ID NO: 2092 - DNA, 20 bp, synthetic construct
  misc_feature 1..20: note = chemically synthesized
  source 1..20: mol_type = other DNA
ggtggctaaagccagggaga

SEQ ID NO: 2093 - DNA, 20 bp, synthetic construct
  misc_feature 1..20: note = chemically synthesized
  source 1..20: mol_type = other DNA
gccagggagacggggtactt

SEQ ID NO: 2094 - DNA, 20 bp, synthetic construct
  misc_feature 1..20: note = chemically synthesized
  source 1..20: mol_type = other DNA
gagaaggaaaagggaaccca

SEQ ID NO: 2095 - DNA, 20 bp, synthetic construct
  misc_feature 1..20: note = chemically synthesized
  source 1..20: mol_type = other DNA
cccagcgagtgaagacggca

SEQ ID NO: 2096 - DNA, 20 bp, synthetic construct
  misc_feature 1..20: note = chemically synthesized
  source 1..20: mol_type = other DNA
cgagtgaagacggcatgggg

SEQ ID NO: 2097 - DNA, 20 bp, synthetic construct
  misc_feature 1..20: note = chemically synthesized
  source 1..20: mol_type = other DNA
ggagaggacccagacacggg

SEQ ID NO: 2098 - DNA, 20 bp, synthetic construct
  misc_feature 1..20: note = chemically synthesized
  source 1..20: mol_type = other DNA
agcagagagcaaggggaaga

SEQ ID NO: 2099 - DNA, 20 bp, synthetic construct
  misc_feature 1..20: note = chemically synthesized
  source 1..20: mol_type = other DNA
acctgaaggaggcggcaggg

SEQ ID NO: 2100 - DNA, 20 bp, synthetic construct
  misc_feature 1..20: note = chemically synthesized
  source 1..20: mol_type = other DNA
agcggcacaggcccagggga

SEQ ID NO: 2101 - DNA, 20 bp, synthetic construct
  misc_feature 1..20: note = chemically synthesized
  source 1..20: mol_type = other DNA
gagacggcagcgttagaggg

SEQ ID NO: 2102 - DNA, 20 bp, synthetic construct
  misc_feature 1..20: note = chemically synthesized
  source 1..20: mol_type = other DNA
ggaagaggggaagtcgaggg

SEQ ID NO: 2103 - DNA, 20 bp, synthetic construct
  misc_feature 1..20: note = chemically synthesized
  source 1..20: mol_type = other DNA
gggatggtaaggaggactgc

SEQ ID NO: 2104 - DNA, 20 bp, synthetic construct
  misc_feature 1..20: note = chemically synthesized
  source 1..20: mol_type = other DNA
aaagcgactccaatgcggaa

SEQ ID NO: 2105 - DNA, 20 bp, synthetic construct
  misc_feature 1..20: note = chemically synthesized
  source 1..20: mol_type = other DNA
cggaagagagtaggtcgaag

SEQ ID NO: 2106 - DNA, 20 bp, synthetic construct
  misc_feature 1..20: note = chemically synthesized
  source 1..20: mol_type = other DNA
aatggtaaggaggcctgggg

SEQ ID NO: 2107 - DNA, 20 bp, synthetic construct
  misc_feature 1..20: note = chemically synthesized
  source 1..20: mol_type = other DNA
ctggggcagagtggtcagca

SEQ ID NO: 2108 - DNA, 20 bp, synthetic construct
  misc_feature 1..20: note = chemically synthesized
  source 1..20: mol_type = other DNA
aagcggctccaattcggaag

SEQ ID NO: 2109 - DNA, 20 bp, synthetic construct
  misc_feature 1..20: note = chemically synthesized
  source 1..20: mol_type = other DNA
cggaagtggggtggtcgaag

SEQ ID NO: 2110 - DNA, 20 bp, synthetic construct
  misc_feature 1..20: note = chemically synthesized
  source 1..20: mol_type = other DNA
aatggtaagggggactggga

SEQ ID NO: 2111 - DNA, 20 bp, synthetic construct
  misc_feature 1..20: note = chemically synthesized
  source 1..20: mol_type = other DNA
actgggacggggtgtcagca

SEQ ID NO: 2112 - DNA, 20 bp, synthetic construct
  misc_feature 1..20: note = chemically synthesized
  source 1..20: mol_type = other DNA
ccagggccaggaacgacggg

SEQ ID NO: 2113 - DNA, 20 bp, synthetic construct
  misc_feature 1..20: note = chemically synthesized
  source 1..20: mol_type = other DNA
cgagactggcaacggggaag

SEQ ID NO: 2114 - DNA, 20 bp, synthetic construct
  misc_feature 1..20: note = chemically synthesized
  source 1..20: mol_type = other DNA
atgccccaggtggcgcagca

SEQ ID NO: 2115 - DNA, 20 bp, synthetic construct
  misc_feature 1..20: note = chemically synthesized
  source 1..20: mol_type = other DNA
gctgataccgtcggcgttgg

SEQ ID NO: 2116 - DNA, 20 bp, synthetic construct
  misc_feature 1..20: note = chemically synthesized
  source 1..20: mol_type = other DNA
gcgggcgggcggcggcgcgg

SEQ ID NO: 2117 - DNA, 20 bp, synthetic construct
  misc_feature 1..20: note = chemically synthesized
  source 1..20: mol_type = other DNA
gtcgagctcggcgccggggc

SEQ ID NO: 2118 - DNA, 20 bp, synthetic construct
  misc_feature 1..20: note = chemically synthesized
  source 1..20: mol_type = other DNA
cgggcggtgcgatgtccgga

SEQ ID NO: 2119 - DNA, 20 bp, synthetic construct
  misc_feature 1..20: note = chemically synthesized
  source 1..20: mol_type = other DNA
cgtccgcttcgagcgcgccg

SEQ ID NO: 2120 - DNA, 20 bp, synthetic construct
  misc_feature 1..20: note = chemically synthesized
  source 1..20: mol_type = other DNA
ccccttcgaccaccccactt

SEQ ID NO: 2121 - DNA, 20 bp, synthetic construct
  misc_feature 1..20: note = chemically synthesized
  source 1..20: mol_type = other DNA
cgacctactctcttccgcat

SEQ ID NO: 2122 - DNA, 20 bp, synthetic construct
  misc_feature 1..20: note = chemically synthesized
  source 1..20: mol_type = other DNA
gcgctgccctcctctcgccc

SEQ ID NO: 2123 - DNA, 20 bp, synthetic construct
  misc_feature 1..20: note = chemically synthesized
  source 1..20: mol_type = other DNA
ctaacgctgccgtctctctc

SEQ ID NO: 2124 - DNA, 20 bp, synthetic construct
  misc_feature 1..20: note = chemically synthesized
  source 1..20: mol_type = other DNA
ttctgtctgcagcttgtggc

SEQ ID NO: 2125 - DNA, 20 bp, synthetic construct
  misc_feature 1..20: note = chemically synthesized
  source 1..20: mol_type = other DNA
tctctgctgtgttgctgccc

SEQ ID NO: 2126 - DNA, 20 bp, synthetic construct
  misc_feature 1..20: note = chemically synthesized
  source 1..20: mol_type = other DNA
caccacgtgatgtcctctga

SEQ ID NO: 2127 - DNA, 20 bp, synthetic construct
  misc_feature 1..20: note = chemically synthesized
  source 1..20: mol_type = other DNA
tgagcggatcctccccgtgt

SEQ ID NO: 2128 - DNA, 20 bp, synthetic construct
  misc_feature 1..20: note = chemically synthesized
  source 1..20: mol_type = other DNA
ccccatgccgtcttcactcg

SEQ ID NO: 2129 - DNA, 20 bp, synthetic construct
  misc_feature 1..20: note = chemically synthesized
  source 1..20: mol_type = other DNA
ctgtgccatctctcgtttct

SEQ ID NO: 2130 - DNA, 20 bp, synthetic construct
  misc_feature 1..20: note = chemically synthesized
  source 1..20: mol_type = other DNA
tcttaggatggccttctccg

SEQ ID NO: 2131 - DNA, 20 bp, synthetic construct
  misc_feature 1..20: note = chemically synthesized
  source 1..20: mol_type = other DNA
cctggacaccccgttctcct

SEQ ID NO: 2132 - DNA, 20 bp, synthetic construct
  misc_feature 1..20: note = chemically synthesized
  source 1..20: mol_type = other DNA
caccccgttctcctgtggat

SEQ ID NO: 2133 - DNA, 20 bp, synthetic construct
  misc_feature 1..20: note = chemically synthesized
  source 1..20: mol_type = other DNA
cccctgtcatggcatcttcc

SEQ ID NO: 2134 - DNA, 20 bp, synthetic construct
  misc_feature 1..20: note = chemically synthesized
  source 1..20: mol_type = other DNA
acagcatgtttgctgcctcc

SEQ ID NO: 2135 - DNA, 20 bp, synthetic construct
  misc_feature 1..20: note = chemically synthesized
  source 1..20: mol_type = other DNA
cggttaatgtggctctggtt

SEQ ID NO: 2136 - DNA, 20 bp, synthetic construct
  misc_feature 1..20: note = chemically synthesized
  source 1..20: mol_type = other DNA
cacagtggggccactaggga

SEQ ID NO: 2137 - DNA, 20 bp, synthetic construct
  misc_feature 1..20: note = chemically synthesized
  source 1..20: mol_type = other DNA
tccttcctagtctcctgata

SEQ ID NO: 2138 - DNA, 20 bp, synthetic construct
  misc_feature 1..20: note = chemically synthesized
  source 1..20: mol_type = other DNA
ttgcttacgatggagccaga

SEQ ID NO: 2139 - DNA, 20 bp, synthetic construct
  misc_feature 1..20: note = chemically synthesized
  source 1..20: mol_type = other DNA
ctgggagggagagcttggca

SEQ ID NO: 2140 - DNA, 20 bp, synthetic construct
  misc_feature 1..20: note = chemically synthesized
  source 1..20: mol_type = other DNA
cagggggtgggagggaaggg

SEQ ID NO: 2141 - DNA, 20 bp, synthetic construct
  misc_feature 1..20: note = chemically synthesized
  source 1..20: mol_type = other DNA
gcagtttggaaaaacaaaat

SEQ ID NO: 2142 - DNA, 20 bp, synthetic construct
  misc_feature 1..20: note = chemically synthesized
  source 1..20: mol_type = other DNA
aaaatcagaataagttggtc

SEQ ID NO: 2143 - DNA, 20 bp, synthetic construct
  misc_feature 1..20: note = chemically synthesized
  source 1..20: mol_type = other DNA
ggcagggctgtggtgaggag

SEQ ID NO: 2144 - DNA, 20 bp, synthetic construct
  misc_feature 1..20: note = chemically synthesized
  source 1..20: mol_type = other DNA
gtgtggaaaactccctttgt

SEQ ID NO: 2145 - DNA, 20 bp, synthetic construct
  misc_feature 1..20: note = chemically synthesized
  source 1..20: mol_type = other DNA
tctccatccttctttcctta

SEQ ID NO: 2146 - DNA, 20 bp, synthetic construct
  misc_feature 1..20: note = chemically synthesized
  source 1..20: mol_type = other DNA
acatattcctccgcccagag

SEQ ID NO: 2147 - DNA, 20 bp, synthetic construct
  misc_feature 1..20: note = chemically synthesized
  source 1..20: mol_type = other DNA
taaggccctgctctgggctt

SEQ ID NO: 2148 - DNA, 20 bp, synthetic construct
  misc_feature 1..20: note = chemically synthesized
  source 1..20: mol_type = other DNA
cctgctctgggcttctgggt

SEQ ID NO: 2149 - DNA, 20 bp, synthetic construct
  misc_feature 1..20: note = chemically synthesized
  source 1..20: mol_type = other DNA
ctctcctgccccttccctac

SEQ ID NO: 2150 - DNA, 20 bp, synthetic construct
  misc_feature 1..20: note = chemically synthesized
  source 1..20: mol_type = other DNA
cctgtctaccaggctgcctt

SEQ ID NO: 2151 - DNA, 20 bp, synthetic construct
  misc_feature 1..20: note = chemically synthesized
  source 1..20: mol_type = other DNA
tctaccaggctgccttttgg

SEQ ID NO: 2152 - DNA, 20 bp, synthetic construct
  misc_feature 1..20: note = chemically synthesized
  source 1..20: mol_type = other DNA
ggtggattctcctccaactg

SEQ ID NO: 2153 - DNA, 20 bp, synthetic construct
  misc_feature 1..20: note = chemically synthesized
  source 1..20: mol_type = other DNA
tgcttggcaaactcactctt

SEQ ID NO: 2154 - DNA, 20 bp, synthetic construct
  misc_feature 1..20: note = chemically synthesized
  source 1..20: mol_type = other DNA
tcccaggaggcctggagcat

SEQ ID NO: 2155 - DNA, 20 bp, synthetic construct
  misc_feature 1..20: note = chemically synthesized
  source 1..20: mol_type = other DNA
cctggagcattggggtgggc

SEQ ID NO: 2156 - DNA, 20 bp, synthetic construct
  misc_feature 1..20: note = chemically synthesized
  source 1..20: mol_type = other DNA
tgggctggggttcagagagg

SEQ ID NO: 2157 - DNA, 20 bp, synthetic construct
  misc_feature 1..20: note = chemically synthesized
  source 1..20: mol_type = other DNA
gtggccaagaagcaggggag

SEQ ID NO: 2158 - DNA, 20 bp, synthetic construct
  misc_feature 1..20: note = chemically synthesized
  source 1..20: mol_type = other DNA
aagaagcaggggagctgggt

SEQ ID NO: 2159 - DNA, 20 bp, synthetic construct
  misc_feature 1..20: note = chemically synthesized
  source 1..20: mol_type = other DNA
gagctgggtttgggtcaggt

SEQ ID NO: 2160 - DNA, 20 bp, synthetic construct
  misc_feature 1..20: note = chemically synthesized
  source 1..20: mol_type = other DNA
gtttgggtcaggtctgggtg

SEQ ID NO: 2161 - DNA, 20 bp, synthetic construct
  misc_feature 1..20: note = chemically synthesized
  source 1..20: mol_type = other DNA
accctcagtcctaggaaaac

SEQ ID NO: 2162 - DNA, 20 bp, synthetic construct
  misc_feature 1..20: note = chemically synthesized
  source 1..20: mol_type = other DNA
gggatggttggtcactgtct

SEQ ID NO: 2163 - DNA, 20 bp, synthetic construct
  misc_feature 1..20: note = chemically synthesized
  source 1..20: mol_type = other DNA
tgtggctgttcccaagttct

SEQ ID NO: 2164 - DNA, 20 bp, synthetic construct
  misc_feature 1..20: note = chemically synthesized
  source 1..20: mol_type = other DNA
aagttcttagggtaccccac

SEQ ID NO: 2165 - DNA, 20 bp, synthetic construct
  misc_feature 1..20: note = chemically synthesized
  source 1..20: mol_type = other DNA
cccaattgccttagtggcta

SEQ ID NO: 2166 - DNA, 20 bp, synthetic construct
  misc_feature 1..20: note = chemically synthesized
  source 1..20: mol_type = other DNA
gtggctagggggttgggggc

SEQ ID NO: 2167 - DNA, 20 bp, synthetic construct
  misc_feature 1..20: note = chemically synthesized
  source 1..20: mol_type = other DNA
agagtaggaggggctggagc

SEQ ID NO: 2168 - DNA, 20 bp, synthetic construct
  misc_feature 1..20: note = chemically synthesized
  source 1..20: mol_type = other DNA
agagctgggggcctgggctc

SEQ ID NO: 2169 - DNA, 20 bp, synthetic construct
  misc_feature 1..20: note = chemically synthesized
  source 1..20: mol_type = other DNA
aggggctggggcctggactc

SEQ ID NO: 2170 - DNA, 20 bp, synthetic construct
  misc_feature 1..20: note = chemically synthesized
  source 1..20: mol_type = other DNA
aggggctggggcctggactc

SEQ ID NO: 2171 - DNA, 20 bp, synthetic construct
  misc_feature 1..20: note = chemically synthesized
  source 1..20: mol_type = other DNA
gggcctggactcctgggtct

SEQ ID NO: 2172 - DNA, 20 bp, synthetic construct
  misc_feature 1..20: note = chemically synthesized
  source 1..20: mol_type = other DNA
gggactgggggcctggactc

SEQ ID NO: 2173 - DNA, 20 bp, synthetic construct
  misc_feature 1..20: note = chemically synthesized
  source 1..20: mol_type = other DNA
aggggctggggcctggactc

SEQ ID NO: 2174 - DNA, 20 bp, synthetic construct
  misc_feature 1..20: note = chemically synthesized
  source 1..20: mol_type = other DNA
ggggctgggggcctggactt

SEQ ID NO: 2175 - DNA, 20 bp, synthetic construct
  misc_feature 1..20: note = chemically synthesized
  source 1..20: mol_type = other DNA
gcggggctgggcctggaccc

SEQ ID NO: 2176 - DNA, 20 bp, synthetic construct
  misc_feature 1..20: note = chemically synthesized
  source 1..20: mol_type = other DNA
ctgggcctggacccctgggt

SEQ ID NO: 2177 - DNA, 20 bp, synthetic construct
  misc_feature 1..20: note = chemically synthesized
  source 1..20: mol_type = other DNA
aagggctggggcctggcctc

SEQ ID NO: 2178 - DNA, 20 bp, synthetic construct
  misc_feature 1..20: note = chemically synthesized
  source 1..20: mol_type = other DNA
ctggggcctggcctcctggg

SEQ ID NO: 2179 - DNA, 20 bp, synthetic construct
  misc_feature 1..20: note = chemically synthesized
  source 1..20: mol_type = other DNA
gcctcctgggttgaatgggg

SEQ ID NO: 2180 - DNA, 20 bp, synthetic construct
  misc_feature 1..20: note = chemically synthesized
  source 1..20: mol_type = other DNA
gaggggttgggcctggactc

SEQ ID NO: 2181 - DNA, 20 bp, synthetic construct
  misc_feature 1..20: note = chemically synthesized
  source 1..20: mol_type = other DNA
aggcctcaggcatctttcac

SEQ ID NO: 2182 - DNA, 20 bp, synthetic construct
  misc_feature 1..20: note = chemically synthesized
  source 1..20: mol_type = other DNA
ctcccctatcgccatgacaa

SEQ ID NO: 2183 - DNA, 20 bp, synthetic construct
  misc_feature 1..20: note = chemically synthesized
  source 1..20: mol_type = other DNA
actgggtggaaataaacgag

SEQ ID NO: 2184 - DNA, 20 bp, synthetic construct
  misc_feature 1..20: note = chemically synthesized
  source 1..20: mol_type = other DNA
acgtgcggccccttcacagc

SEQ ID NO: 2185 - DNA, 20 bp, synthetic construct
  misc_feature 1..20: note = chemically synthesized
  source 1..20: mol_type = other DNA
ttggagaggtgagggacttg

SEQ ID NO: 2186 - DNA, 20 bp, synthetic construct
  misc_feature 1..20: note = chemically synthesized
  source 1..20: mol_type = other DNA
cttggggggtaatttatccc

SEQ ID NO: 2187 - DNA, 20 bp, synthetic construct
  misc_feature 1..20: note = chemically synthesized
  source 1..20: mol_type = other DNA
gtaatttatcccgtggatct

SEQ ID NO: 2188 - DNA, 20 bp, synthetic construct
  misc_feature 1..20: note = chemically synthesized
  source 1..20: mol_type = other DNA
aagttttggacccctaaggg

SEQ ID NO: 2189 - DNA, 20 bp, synthetic construct
  misc_feature 1..20: note = chemically synthesized
  source 1..20: mol_type = other DNA
cagagggggcctcagtgaac

SEQ ID NO: 2190 - DNA, 20 bp, synthetic construct
  misc_feature 1..20: note = chemically synthesized
  source 1..20: mol_type = other DNA
tgcagctgtctcacccctct

SEQ ID NO: 2191 - DNA, 20 bp, synthetic construct
  misc_feature 1..20: note = chemically synthesized
  source 1..20: mol_type = other DNA
tgggagtcccgcccaggccc

SEQ ID NO: 2192 - DNA, 20 bp, synthetic construct
  misc_feature 1..20: note = chemically synthesized
  source 1..20: mol_type = other DNA
cccctgagtctgtcccagca

SEQ ID NO: 2193 - DNA, 20 bp, synthetic construct
  misc_feature 1..20: note = chemically synthesized
  source 1..20: mol_type = other DNA
ggcccacggcttcgttcctg

SEQ ID NO: 2194 - DNA, 20 bp, synthetic construct
  misc_feature 1..20: note = chemically synthesized
  source 1..20: mol_type = other DNA
cgttcctgcagagtatctgc

SEQ ID NO: 2195 - DNA, 20 bp, synthetic construct
  misc_feature 1..20: note = chemically synthesized
  source 1..20: mol_type = other DNA
tgacccttggaaggacctgg

SEQ ID NO: 2196 - DNA, 20 bp, synthetic construct
  misc_feature 1..20: note = chemically synthesized
  source 1..20: mol_type = other DNA
gagcactggaagcgccacct

SEQ ID NO: 2197 - DNA, 20 bp, synthetic construct
  misc_feature 1..20: note = chemically synthesized
  source 1..20: mol_type = other DNA
cgccacctgtgggtggtgac

SEQ ID NO: 2198 - DNA, 20 bp, synthetic construct
  misc_feature 1..20: note = chemically synthesized
  source 1..20: mol_type = other DNA
cgtgtctaacaggtaccatg

SEQ ID NO: 2199 - DNA, 20 bp, synthetic construct
  misc_feature 1..20: note = chemically synthesized
  source 1..20: mol_type = other DNA
cttcctgtttgcagatagcc

SEQ ID NO: 2200 - DNA, 20 bp, synthetic construct
  misc_feature 1..20: note = chemically synthesized
  source 1..20: mol_type = other DNA
cagccagtggccagaggctg

SEQ ID NO: 2201 - DNA, 20 bp, synthetic construct
  misc_feature 1..20: note = chemically synthesized
  source 1..20: mol_type = other DNA
actgtcctagcaccgtgtcc

SEQ ID NO: 2202 - DNA, 20 bp, synthetic construct
  misc_feature 1..20: note = chemically synthesized
  source 1..20: mol_type = other DNA
tctgttttcgtggctccctc

SEQ ID NO: 2203 - DNA, 20 bp, synthetic construct
  misc_feature 1..20: note = chemically synthesized
  source 1..20: mol_type = other DNA
acttgctgggacaccgtggc

SEQ ID NO: 2204 - DNA, 20 bp, synthetic construct
  misc_feature 1..20: note = chemically synthesized
  source 1..20: mol_type = other DNA
agctcttctctgttcagccc

SEQ ID NO: 2205 - DNA, 20 bp, synthetic construct
  misc_feature 1..20: note = chemically synthesized
  source 1..20: mol_type = other DNA
gcctggagaaggatgcagga

SEQ ID NO: 2206 - DNA, 20 bp, synthetic construct
  misc_feature 1..20: note = chemically synthesized
  source 1..20: mol_type = other DNA
cgagaaacacagccccaggt

SEQ ID NO: 2207 - DNA, 20 bp, synthetic construct
  misc_feature 1..20: note = chemically synthesized
  source 1..20: mol_type = other DNA
gcagtcaccccacagttgga

SEQ ID NO: 2208 - DNA, 20 bp, synthetic construct
  misc_feature 1..20: note = chemically synthesized
  source 1..20: mol_type = other DNA
ctctttaaggaaagaaggat

SEQ ID NO: 2209 - DNA, 20 bp, synthetic construct
  misc_feature 1..20: note = chemically synthesized
  source 1..20: mol_type = other DNA
aaggaaagaaggatggagaa

SEQ ID NO: 2210 - DNA, 20 bp, synthetic construct
  misc_feature 1..20: note = chemically synthesized
  source 1..20: mol_type = other DNA
ggaacaatataaattgggga

SEQ ID NO: 2211 - DNA, 20 bp, synthetic construct
  misc_feature 1..20: note = chemically synthesized
  source 1..20: mol_type = other DNA
ggagaacggggtgtccaggc

SEQ ID NO: 2212 - DNA, 20 bp, synthetic construct
  misc_feature 1..20: note = chemically synthesized
  source 1..20: mol_type = other DNA
acggggtactttggggttgt

SEQ ID NO: 2213 - DNA, 20 bp, synthetic construct
  misc_feature 1..20: note = chemically synthesized
  source 1..20: mol_type = other DNA
tccgtcggagaaggccatcc

SEQ ID NO: 2214 - DNA, 20 bp, synthetic construct
  misc_feature 1..20: note = chemically synthesized
  source 1..20: mol_type = other DNA
acccaggccacaagctgcag

SEQ ID NO: 2215 - DNA, 20 bp, synthetic construct
  misc_feature 1..20: note = chemically synthesized
  source 1..20: mol_type = other DNA
aagcggcacaggcccagggg

SEQ ID NO: 2216 - DNA, 20 bp, synthetic construct
  misc_feature 1..20: note = chemically synthesized
  source 1..20: mol_type = other DNA
caggggagagaatgcaggtc

SEQ ID NO: 2217 - DNA, 20 bp, synthetic construct
  misc_feature 1..20: note = chemically synthesized
  source 1..20: mol_type = other DNA
cactagggacaggattggtg

SEQ ID NO: 2218 - DNA, 20 bp, synthetic construct
  misc_feature 1..20: note = chemically synthesized
  source 1..20: mol_type = other DNA
agcagtttggaaaaacaaaa

SEQ ID NO: 2219 - DNA, 20 bp, synthetic construct
  misc_feature 1..20: note = chemically synthesized
  source 1..20: mol_type = other DNA
cgtgtggaaaactccctttg

SEQ ID NO: 2220 - DNA, 20 bp, synthetic construct
  misc_feature 1..20: note = chemically synthesized
  source 1..20: mol_type = other DNA
caagttttggacccctaagg

SEQ ID NO: 2221 - DNA, 20 bp, synthetic construct
  misc_feature 1..20: note = chemically synthesized
  source 1..20: mol_type = other DNA
ttggacccctaagggaagaa

SEQ ID NO: 2222 - DNA, 20 bp, synthetic construct
  misc_feature 1..20: note = chemically synthesized
  source 1..20: mol_type = other DNA
gggactccagagggagccac

SEQ ID NO: 2223 - DNA, 20 bp, synthetic construct
  misc_feature 1..20: note = chemically synthesized
  source 1..20: mol_type = other DNA
atggtacctgttagacacgg

SEQ ID NO: 2224 - DNA, 20 bp, synthetic construct
  misc_feature 1..20: note = chemically synthesized
  source 1..20: mol_type = other DNA
tcattcttcccttaggggtc

SEQ ID NO: 2225 - DNA, 20 bp, synthetic construct
  misc_feature 1..20: note = chemically synthesized
  source 1..20: mol_type = other DNA
aggactgagggtttcagtgc

SEQ ID NO: 2226 - DNA, 20 bp, synthetic construct
  misc_feature 1..20: note = chemically synthesized
  source 1..20: mol_type = other DNA
tactggccttatctcacagg

SEQ ID NO: 2227 - DNA, 20 bp, synthetic construct
  misc_feature 1..20: note = chemically synthesized
  source 1..20: mol_type = other DNA
ggtactttggggttgtccag

SEQ ID NO: 2228 - DNA, 20 bp, synthetic construct
  misc_feature 1..20: note = chemically synthesized
  source 1..20: mol_type = other DNA
caagaggagaagcagtttgg

SEQ ID NO: 2229 - DNA, 20 bp, synthetic construct
  misc_feature 1..20: note = chemically synthesized
  source 1..20: mol_type = other DNA
aggaggggggtgtccgtgtg

SEQ ID NO: 2230 - DNA, 20 bp, synthetic construct
  misc_feature 1..20: note = chemically synthesized
  source 1..20: mol_type = other DNA
actgaaaccctcagtcctag

SEQ ID NO: 2231 - DNA, 20 bp, synthetic construct
  misc_feature 1..20: note = chemically synthesized
  source 1..20: mol_type = other DNA
cccaacagcctctggccact

SEQ ID NO: 2232 - DNA, 20 bp, synthetic construct
  misc_feature 1..20: note = chemically synthesized
  source 1..20: mol_type = other DNA
ggaagtgaacggggaaggga

SEQ ID NO: 2233 - DNA, 20 bp, synthetic construct
  misc_feature 1..20: note = chemically synthesized
  source 1..20: mol_type = other DNA
cccccgtcaccacccacagg

SEQ ID NO: 2234 - DNA, 20 bp, synthetic construct
  misc_feature 1..20: note = chemically synthesized
  source 1..20: mol_type = other DNA
agccaggggctgacacgggc

SEQ ID NO: 2235 - DNA, 20 bp, synthetic construct
  misc_feature 1..20: note = chemically synthesized
  source 1..20: mol_type = other DNA
ctgggaacgggatgaactcg

SEQ ID NO: 2236 - DNA, 20 bp, synthetic construct
  misc_feature 1..20: note = chemically synthesized
  source 1..20: mol_type = other DNA
gaacagccacagcagggggg

SEQ ID NO: 2237 - DNA, 20 bp, synthetic construct
  misc_feature 1..20: note = chemically synthesized
  source 1..20: mol_type = other DNA
cagagacagtgaccaaccat

SEQ ID NO: 2238 - DNA, 20 bp, synthetic construct
  misc_feature 1..20: note = chemically synthesized
  source 1..20: mol_type = other DNA
atccctgttttcctaggact

SEQ ID NO: 2239 - DNA, 20 bp, synthetic construct
  misc_feature 1..20: note = chemically synthesized
  source 1..20: mol_type = other DNA
acctgacccaaacccagctc

SEQ ID NO: 2240 - DNA, 20 bp, synthetic construct
  misc_feature 1..20: note = chemically synthesized
  source 1..20: mol_type = other DNA
ctcctgggataccccgaaga

SEQ ID NO: 2241 - DNA, 20 bp, synthetic construct
  misc_feature 1..20: note = chemically synthesized
  source 1..20: mol_type = other DNA
gggaagcctgagcgcctctc

SEQ ID NO: 2242 - DNA, 20 bp, synthetic construct
  misc_feature 1..20: note = chemically synthesized
  source 1..20: mol_type = other DNA
ggacgcaccattctcacaaa

SEQ ID NO: 2243 - DNA, 20 bp, synthetic construct
  misc_feature 1..20: note = chemically synthesized
  source 1..20: mol_type = other DNA
tagaactcaggaccaactta

SEQ ID NO: 2244 - DNA, 20 bp, synthetic construct
  misc_feature 1..20: note = chemically synthesized
  source 1..20: mol_type = other DNA
tcaggaccaacttattctga

SEQ ID NO: 2245 - DNA, 20 bp, synthetic construct
  misc_feature 1..20: note = chemically synthesized
  source 1..20: mol_type = other DNA
attctgattttgtttttcca

SEQ ID NO: 2246 - DNA, 20 bp, synthetic construct
  misc_feature 1..20: note = chemically synthesized
  source 1..20: mol_type = other DNA
ggaaggaggaggcctaagga

SEQ ID NO: 2247 - DNA, 20 bp, synthetic construct
  misc_feature 1..20: note = chemically synthesized
  source 1..20: mol_type = other DNA
gagagcgccgcgcccgcacc

SEQ ID NO: 2248 - DNA, 20 bp, synthetic construct
  misc_feature 1..20: note = chemically synthesized
  source 1..20: mol_type = other DNA
ccgccccgtcgttcctggcc

SEQ ID NO: 2249 - DNA, 20 bp, synthetic construct
  misc_feature 1..20: note = chemically synthesized
  source 1..20: mol_type = other DNA
ccaccccacttccgaattgg

SEQ ID NO: 2250 - DNA, 20 bp, synthetic construct
  misc_feature 1..20: note = chemically synthesized
  source 1..20: mol_type = other DNA
tggagccgcttcaactggcc

SEQ ID NO: 2251 - DNA, 20 bp, synthetic construct
  misc_feature 1..20: note = chemically synthesized
  source 1..20: mol_type = other DNA
cctactctcttccgcattgg

SEQ ID NO: 2252 - DNA, 20 bp, synthetic construct
  misc_feature 1..20: note = chemically synthesized
  source 1..20: mol_type = other DNA
ttggagtcgctttaactggc

SEQ ID NO: 2253 - DNA, 20 bp, synthetic construct
  misc_feature 1..20: note = chemically synthesized
  source 1..20: mol_type = other DNA
tccggaccactttgagctct

SEQ ID NO: 2254 - DNA, 20 bp, synthetic construct
  misc_feature 1..20: note = chemically synthesized
  source 1..20: mol_type = other DNA
cttctgcgccgcctctggcc

SEQ ID NO: 2255 - DNA, 20 bp, synthetic construct
  misc_feature 1..20: note = chemically synthesized
  source 1..20: mol_type = other DNA
gtttccccttcccaggcagg

SEQ ID NO: 2256 - DNA, 20 bp, synthetic construct
  misc_feature 1..20: note = chemically synthesized
  source 1..20: mol_type = other DNA
cattctctcccctgggcctg

SEQ ID NO: 2257 - DNA, 20 bp, synthetic construct
  misc_feature 1..20: note = chemically synthesized
  source 1..20: mol_type = other DNA
ggcctgtgccgctttctgtc

SEQ ID NO: 2258 - DNA, 20 bp, synthetic construct
  misc_feature 1..20: note = chemically synthesized
  source 1..20: mol_type = other DNA
cttctggggcctgtgccatc

SEQ ID NO: 2259 - DNA, 20 bp, synthetic construct
  misc_feature 1..20: note = chemically synthesized
  source 1..20: mol_type = other DNA
ttcttgtaggcctgcatcat

SEQ ID NO: 2260 - DNA, 20 bp, synthetic construct
  misc_feature 1..20: note = chemically synthesized
  source 1..20: mol_type = other DNA
accccaaagtaccccgtctc

SEQ ID NO: 2261 - DNA, 20 bp, synthetic construct
  misc_feature 1..20: note = chemically synthesized
  source 1..20: mol_type = other DNA
ctttagccacctctccatcc

SEQ ID NO: 2262 - DNA, 20 bp, synthetic construct
  misc_feature 1..20: note = chemically synthesized
  source 1..20: mol_type = other DNA
gcctggacaccccgttctcc

SEQ ID NO: 2263 - DNA, 20 bp, synthetic construct
  misc_feature 1..20: note = chemically synthesized
  source 1..20: mol_type = other DNA
cctatgtccacttcaggaca

SEQ ID NO: 2264 - DNA, 20 bp, synthetic construct
  misc_feature 1..20: note = chemically synthesized
  source 1..20: mol_type = other DNA
ccacagtggggccactaggg

SEQ ID NO: 2265 - DNA, 20 bp, synthetic construct
  misc_feature 1..20: note = chemically synthesized
  source 1..20: mol_type = other DNA
ctaacccccacctcctgtta

SEQ ID NO: 2266 - DNA, 20 bp, synthetic construct
  misc_feature 1..20: note = chemically synthesized
  source 1..20: mol_type = other DNA
tctctccttgccagaacctc

SEQ ID NO: 2267 - DNA, 20 bp, synthetic construct
  misc_feature 1..20: note = chemically synthesized
  source 1..20: mol_type = other DNA
tccttgccagaacctctaag

SEQ ID NO: 2268 - DNA, 20 bp, synthetic construct
  misc_feature 1..20: note = chemically synthesized
  source 1..20: mol_type = other DNA
ccagagaggatcctgggagg

SEQ ID NO: 2269 - DNA, 20 bp, synthetic construct
  misc_feature 1..20: note = chemically synthesized
  source 1..20: mol_type = other DNA
tgctctgacgcggccgtctg

SEQ ID NO: 2270 - DNA, 20 bp, synthetic construct
  misc_feature 1..20: note = chemically synthesized
  source 1..20: mol_type = other DNA
cgtttcactgatcctggtgc

SEQ ID NO: 2271 - DNA, 20 bp, synthetic construct
  misc_feature 1..20: note = chemically synthesized
  source 1..20: mol_type = other DNA
ttacacttcccaagaggaga

SEQ ID NO: 2272 - DNA, 20 bp, synthetic construct
  misc_feature 1..20: note = chemically synthesized
  source 1..20: mol_type = other DNA
tttatattgttcctccgtgc

SEQ ID NO: 2273 - DNA, 20 bp, synthetic construct
  misc_feature 1..20: note = chemically synthesized
  source 1..20: mol_type = other DNA
ttcctccgcccagagcaggg

SEQ ID NO: 2274 - DNA, 20 bp, synthetic construct
  misc_feature 1..20: note = chemically synthesized
  source 1..20: mol_type = other DNA
cgcttccctaaggccctgct

SEQ ID NO: 2275 - DNA, 20 bp, synthetic construct
  misc_feature 1..20: note = chemically synthesized
  source 1..20: mol_type = other DNA
taaggccctgctctgggctt

SEQ ID NO: 2276 - DNA, 20 bp, synthetic construct
  misc_feature 1..20: note = chemically synthesized
  source 1..20: mol_type = other DNA
ggcaagcccaggagaggcgc

SEQ ID NO: 2277 - DNA, 20 bp, synthetic construct
  misc_feature 1..20: note = chemically synthesized
  source 1..20: mol_type = other DNA
gtctaccaggctgccttttg

SEQ ID NO: 2278 - DNA, 20 bp, synthetic construct
  misc_feature 1..20: note = chemically synthesized
  source 1..20: mol_type = other DNA
ttctcctccaactgtggggt

SEQ ID NO: 2279 - DNA, 20 bp, synthetic construct
  misc_feature 1..20: note = chemically synthesized
  source 1..20: mol_type = other DNA
gtgggctggggttcagagag

SEQ ID NO: 2280 - DNA, 20 bp, synthetic construct
  misc_feature 1..20: note = chemically synthesized
  source 1..20: mol_type = other DNA
gtggccaagaagcaggggag

SEQ ID NO: 2281 - DNA, 20 bp, synthetic construct
  misc_feature 1..20: note = chemically synthesized
  source 1..20: mol_type = other DNA
tcaggtctgggtgtggggtg

SEQ ID NO: 2282 - DNA, 20 bp, synthetic construct
  misc_feature 1..20: note = chemically synthesized
  source 1..20: mol_type = other DNA
ggtgtggggtgaccagctta

SEQ ID NO: 2283 - DNA, 20 bp, synthetic construct
  misc_feature 1..20: note = chemically synthesized
  source 1..20: mol_type = other DNA
atgctgtttgcccaggacag

SEQ ID NO: 2284 - DNA, 20 bp, synthetic construct
  misc_feature 1..20: note = chemically synthesized
  source 1..20: mol_type = other DNA
ggtcactgtctctgggtgac

SEQ ID NO: 2285 - DNA, 20 bp, synthetic construct
  misc_feature 1..20: note = chemically synthesized
  source 1..20: mol_type = other DNA
tgggtgactcttgattcccg

SEQ ID NO: 2286 - DNA, 20 bp, synthetic construct
  misc_feature 1..20: note = chemically synthesized
  source 1..20: mol_type = other DNA
gccagtttctccacctgggg

SEQ ID NO: 2287 - DNA, 20 bp, synthetic construct
  misc_feature 1..20: note = chemically synthesized
  source 1..20: mol_type = other DNA
aagttcttagggtaccccac

SEQ ID NO: 2288 - DNA, 20 bp, synthetic construct
  misc_feature 1..20: note = chemically synthesized
  source 1..20: mol_type = other DNA
tagagtaggaggggctggag

SEQ ID NO: 2289 - DNA, 20 bp, synthetic construct
  misc_feature 1..20: note = chemically synthesized
  source 1..20: mol_type = other DNA
agagctgggggcctgggctc

SEQ ID NO: 2290 - DNA, 20 bp, synthetic construct
  misc_feature 1..20: note = chemically synthesized
  source 1..20: mol_type = other DNA
acgtgcggccccttcacagc

SEQ ID NO: 2291 - DNA, 20 bp, synthetic construct
  misc_feature 1..20: note = chemically synthesized
  source 1..20: mol_type = other DNA
cctcccgcctcctccagatg

SEQ ID NO: 2292 - DNA, 20 bp, synthetic construct
  misc_feature 1..20: note = chemically synthesized
  source 1..20: mol_type = other DNA
gtaatttatcccgtggatct

SEQ ID NO: 2293 - DNA, 20 bp, synthetic construct
  misc_feature 1..20: note = chemically synthesized
  source 1..20: mol_type = other DNA
ttatcccgtggatctaggag

SEQ ID NO: 2294 - DNA, 20 bp, synthetic construct
  misc_feature 1..20: note = chemically synthesized
  source 1..20: mol_type = other DNA
cctcctccgaccccctggac

SEQ ID NO: 2295 - DNA, 20 bp, synthetic construct
  misc_feature 1..20: note = chemically synthesized
  source 1..20: mol_type = other DNA
ggacttcggcttttgtcccc

SEQ ID NO: 2296 - DNA, 20 bp, synthetic construct
  misc_feature 1..20: note = chemically synthesized
  source 1..20: mol_type = other DNA
accctgcatagccctgggcc

SEQ ID NO: 2297 - DNA, 20 bp, synthetic construct
  misc_feature 1..20: note = chemically synthesized
  source 1..20: mol_type = other DNA
tcctgcagagtatctgctgg

SEQ ID NO: 2298 - DNA, 20 bp, synthetic construct
  misc_feature 1..20: note = chemically synthesized
  source 1..20: mol_type = other DNA
agtatctgctggggtggttt

SEQ ID NO: 2299 - DNA, 20 bp, synthetic construct
  misc_feature 1..20: note = chemically synthesized
  source 1..20: mol_type = other DNA
tgacccttggaaggacctgg

SEQ ID NO: 2300 - DNA, 20 bp, synthetic construct
  misc_feature 1..20: note = chemically synthesized
  source 1..20: mol_type = other DNA
cgccacctgtgggtggtgac

SEQ ID NO: 2301 - DNA, 20 bp, synthetic construct
  misc_feature 1..20: note = chemically synthesized
  source 1..20: mol_type = other DNA
ccctcccttccccgttcact

SEQ ID NO: 2302 - DNA, 20 bp, synthetic construct
  misc_feature 1..20: note = chemically synthesized
  source 1..20: mol_type = other DNA
cagatagccaggagtccttt

SEQ ID NO: 2303 - DNA, 20 bp, synthetic construct
  misc_feature 1..20: note = chemically synthesized
  source 1..20: mol_type = other DNA
tcctagcaccgtgtccctgg

SEQ ID NO: 2304 - DNA, 20 bp, synthetic construct
  misc_feature 1..20: note = chemically synthesized
  source 1..20: mol_type = other DNA
ctggggtaggtgcggctgac

SEQ ID NO: 2305 - DNA, 20 bp, synthetic construct
  misc_feature 1..20: note = chemically synthesized
  source 1..20: mol_type = other DNA
ttgatgagaacctggaggtg

SEQ ID NO: 2306 - DNA, 22 bp, synthetic construct
  misc_feature 1..22: note = chemically synthesized
  source 1..22: mol_type = other DNA
gcgatatctaggtagccacagg

SEQ ID NO: 2307 - DNA, 22 bp, synthetic construct
  misc_feature 1..22: note = chemically synthesized
  source 1..22: mol_type = other DNA
ggtagccacaggaggcggccac

SEQ ID NO: 2308 - DNA, 22 bp, synthetic construct
  misc_feature 1..22: note = chemically synthesized
  source 1..22: mol_type = other DNA
gttgtctgcctggttcacagtg

SEQ ID NO: 2309 - DNA, 22 bp, synthetic construct
  misc_feature 1..22: note = chemically synthesized
  source 1..22: mol_type = other DNA
tctgcctggttcacagtggcgc

SEQ ID NO: 2310 - DNA, 22 bp, synthetic construct
  misc_feature 1..22: note = chemically synthesized
  source 1..22: mol_type = other DNA
cctggttcacagtggcgccctg

SEQ ID NO: 2311 - DNA, 22 bp, synthetic construct
  misc_feature 1..22: note = chemically synthesized
  source 1..22: mol_type = other DNA
gttcacagtggcgccctgctcc

SEQ ID NO: 2312 - DNA, 22 bp, synthetic construct
  misc_feature 1..22: note = chemically synthesized
  source 1..22: mol_type = other DNA
acagtggcgccctgctccacca

SEQ ID NO: 2313 - DNA, 22 bp, synthetic construct
  misc_feature 1..22: note = chemically synthesized
  source 1..22: mol_type = other DNA
ctccaccaagaagcgcaccacc

SEQ ID NO: 2314 - DNA, 22 bp, synthetic construct
  misc_feature 1..22: note = chemically synthesized
  source 1..22: mol_type = other DNA
caccaagaagcgcaccacctcc

SEQ ID NO: 2315 - DNA, 22 bp, synthetic construct
  misc_feature 1..22: note = chemically synthesized
  source 1..22: mol_type = other DNA
caggttctcatcaatgcaggcc

SEQ ID NO: 2316 - DNA, 22 bp, synthetic construct
  misc_feature 1..22: note = chemically synthesized
  source 1..22: mol_type = other DNA
tcatcaatgcaggcctgggggt

SEQ ID NO: 2317 - DNA, 22 bp, synthetic construct
  misc_feature 1..22: note = chemically synthesized
  source 1..22: mol_type = other DNA
atcaatgcaggcctgggggtgg

SEQ ID NO: 2318 - DNA, 22 bp, synthetic construct
  misc_feature 1..22: note = chemically synthesized
  source 1..22: mol_type = other DNA
ggggtgggaaacagccgtcagc

SEQ ID NO: 2319 - DNA, 22 bp, synthetic construct
  misc_feature 1..22: note = chemically synthesized
  source 1..22: mol_type = other DNA
ccccagccacggtgtcccagca

SEQ ID NO: 2320 - DNA, 22 bp, synthetic construct
  misc_feature 1..22: note = chemically synthesized
  source 1..22: mol_type = other DNA
cagagggagccacgaaaacaga

SEQ ID NO: 2321 - DNA, 22 bp, synthetic construct
  misc_feature 1..22: note = chemically synthesized
  source 1..22: mol_type = other DNA
ggacagtggggaaaatgaccca

SEQ ID NO: 2322 - DNA, 22 bp, synthetic construct
  misc_feature 1..22: note = chemically synthesized
  source 1..22: mol_type = other DNA
tggccactggctgtttaagata

SEQ ID NO: 2323 - DNA, 22 bp, synthetic construct
  misc_feature 1..22: note = chemically synthesized
  source 1..22: mol_type = other DNA
gccactggctgtttaagatacg

SEQ ID NO: 2324 - DNA, 22 bp, synthetic construct
  misc_feature 1..22: note = chemically synthesized
  source 1..22: mol_type = other DNA
gctgtttaagatacgcctggtt

SEQ ID NO: 2325 - DNA, 22 bp, synthetic construct
  misc_feature 1..22: note = chemically synthesized
  source 1..22: mol_type = other DNA
tttaagatacgcctggttgccc

SEQ ID NO: 2326 - DNA, 22 bp, synthetic construct
  misc_feature 1..22: note = chemically synthesized
  source 1..22: mol_type = other DNA
aagatacgcctggttgcccagt

SEQ ID NO: 2327 - DNA, 22 bp, synthetic construct
  misc_feature 1..22: note = chemically synthesized
  source 1..22: mol_type = other DNA
agatacgcctggttgcccagtg

SEQ ID NO: 2328 - DNA, 22 bp, synthetic construct
  misc_feature 1..22: note = chemically synthesized
  source 1..22: mol_type = other DNA
gttgcccagtggtcaggccggc

SEQ ID NO: 2329 - DNA, 22 bp, synthetic construct
  misc_feature 1..22: note = chemically synthesized
  source 1..22: mol_type = other DNA
cccagtggtcaggccggccagg

SEQ ID NO: 2330 - DNA, 22 bp, synthetic construct
  misc_feature 1..22: note = chemically synthesized
  source 1..22: mol_type = other DNA
cagtgctcagtggaaaccacga

SEQ ID NO: 2331 - DNA, 22 bp, synthetic construct
  misc_feature 1..22: note = chemically synthesized
  source 1..22: mol_type = other DNA
agtgctcagtggaaaccacgaa

SEQ ID NO: 2332 - DNA, 22 bp, synthetic construct
  misc_feature 1..22: note = chemically synthesized
  source 1..22: mol_type = other DNA
agtggaaaccacgaaaggactc

SEQ ID NO: 2333 - DNA, 22 bp, synthetic construct
  misc_feature 1..22: note = chemically synthesized
  source 1..22: mol_type = other DNA
ctggctatctgcaaacaggaag

SEQ ID NO: 2334 - DNA, 22 bp, synthetic construct
  misc_feature 1..22: note = chemically synthesized
  source 1..22: mol_type = other DNA
gctatctgcaaacaggaagtga

SEQ ID NO: 2335 - DNA, 22 bp, synthetic construct
  misc_feature 1..22: note = chemically synthesized
  source 1..22: mol_type = other DNA
tctgcaaacaggaagtgaacgg

SEQ ID NO: 2336 - DNA, 22 bp, synthetic construct
  misc_feature 1..22: note = chemically synthesized
  source 1..22: mol_type = other DNA
caaacaggaagtgaacggggaa

SEQ ID NO: 2337 - DNA, 22 bp, synthetic construct
  misc_feature 1..22: note = chemically synthesized
  source 1..22: mol_type = other DNA
ctcatctgggtgcgggaacccc

SEQ ID NO: 2338 - DNA, 22 bp, synthetic construct
  misc_feature 1..22: note = chemically synthesized
  source 1..22: mol_type = other DNA
tcatctgggtgcgggaacccca

SEQ ID NO: 2339 - DNA, 22 bp, synthetic construct
  misc_feature 1..22: note = chemically synthesized
  source 1..22: mol_type = other DNA
atctgggtgcgggaaccccaca

SEQ ID NO: 2340 - DNA, 22 bp, synthetic construct
  misc_feature 1..22: note = chemically synthesized
  source 1..22: mol_type = other DNA
ggtgcgggaaccccacatggta

SEQ ID NO: 2341 - DNA, 22 bp, synthetic construct
  misc_feature 1..22: note = chemically synthesized
  source 1..22: mol_type = other DNA
ttagacacggcaaaacccccgt

SEQ ID NO: 2342 - DNA, 22 bp, synthetic construct
  misc_feature 1..22: note = chemically synthesized
  source 1..22: mol_type = other DNA
gacacggcaaaacccccgtcac

SEQ ID NO: 2343 - DNA, 22 bp, synthetic construct
  misc_feature 1..22: note = chemically synthesized
  source 1..22: mol_type = other DNA
ccagtgctcagactagggaaga

SEQ ID NO: 2344 - DNA, 22 bp, synthetic construct
  misc_feature 1..22: note = chemically synthesized
  source 1..22: mol_type = other DNA
cagtgctcagactagggaagag

SEQ ID NO: 2345 - DNA, 22 bp, synthetic construct
  misc_feature 1..22: note = chemically synthesized
  source 1..22: mol_type = other DNA
agactagggaagaggttccagc

SEQ ID NO: 2346 - DNA, 22 bp, synthetic construct
  misc_feature 1..22: note = chemically synthesized
  source 1..22: mol_type = other DNA
gggaagaggttccagcccctcc

SEQ ID NO: 2347 - DNA, 22 bp, synthetic construct
  misc_feature 1..22: note = chemically synthesized
  source 1..22: mol_type = other DNA
cagcccctcctccttcagagcc

SEQ ID NO: 2348 - DNA, 22 bp, synthetic construct
  misc_feature 1..22: note = chemically synthesized
  source 1..22: mol_type = other DNA
ctccttcagagccaggagtcct

SEQ ID NO: 2349 - DNA, 22 bp, synthetic construct
  misc_feature 1..22: note = chemically synthesized
  source 1..22: mol_type = other DNA
cttcagagccaggagtcctggc

SEQ ID NO: 2350 - DNA, 22 bp, synthetic construct
  misc_feature 1..22: note = chemically synthesized
  source 1..22: mol_type = other DNA
cagagccaggagtcctggcccc

SEQ ID NO: 2351 - DNA, 22 bp, synthetic construct
  misc_feature 1..22: note = chemically synthesized
  source 1..22: mol_type = other DNA
agagccaggagtcctggccccc

SEQ ID NO: 2352 - DNA, 22 bp, synthetic construct
  misc_feature 1..22: note = chemically synthesized
  source 1..22: mol_type = other DNA
gcccccagcccctcctgcctta

SEQ ID NO: 2353 - DNA, 22 bp, synthetic construct
  misc_feature 1..22: note = chemically synthesized
  source 1..22: mol_type = other DNA
ctgccttaaacccagccaggtc

SEQ ID NO: 2354 - DNA, 22 bp, synthetic construct
  misc_feature 1..22: note = chemically synthesized
  source 1..22: mol_type = other DNA
ccttaaacccagccaggtcctt

SEQ ID NO: 2355 - DNA, 22 bp, synthetic construct
  misc_feature 1..22: note = chemically synthesized
  source 1..22: mol_type = other DNA
aaacccagccaggtccttccaa

SEQ ID NO: 2356 - DNA, 22 bp, synthetic construct
  misc_feature 1..22: note = chemically synthesized
  source 1..22: mol_type = other DNA
aacccagccaggtccttccaag

SEQ ID NO: 2357 - DNA, 22 bp, synthetic construct
  misc_feature 1..22: note = chemically synthesized
  source 1..22: mol_type = other DNA
ccaagggtcaagctcggaaacc

SEQ ID NO: 2358 - DNA, 22 bp, synthetic construct
  misc_feature 1..22: note = chemically synthesized
  source 1..22: mol_type = other DNA
caagggtcaagctcggaaacca

SEQ ID NO: 2359 - DNA, 22 bp, synthetic construct
  misc_feature 1..22: note = chemically synthesized
  source 1..22: mol_type = other DNA
ggaaaccaccccagcagatact

SEQ ID NO: 2360 - DNA, 22 bp, synthetic construct
  misc_feature 1..22: note = chemically synthesized
  source 1..22: mol_type = other DNA
tgcaggaacgaagccgtgggcc

SEQ ID NO: 2361 - DNA, 22 bp, synthetic construct
  misc_feature 1..22: note = chemically synthesized
  source 1..22: mol_type = other DNA
caggaacgaagccgtgggccca

SEQ ID NO: 2362 - DNA, 22 bp, synthetic construct
  misc_feature 1..22: note = chemically synthesized
  source 1..22: mol_type = other DNA
tgcagggtggaggaaggccacc

SEQ ID NO: 2363 - DNA, 22 bp, synthetic construct
  misc_feature 1..22: note = chemically synthesized
  source 1..22: mol_type = other DNA
tgctgggacagactcaggggcc

SEQ ID NO: 2364 - DNA, 22 bp, synthetic construct
  misc_feature 1..22: note = chemically synthesized
  source 1..22: mol_type = other DNA
ggacagactcaggggcctgggc

SEQ ID NO: 2365 - DNA, 22 bp, synthetic construct
  misc_feature 1..22: note = chemically synthesized
  source 1..22: mol_type = other DNA
aggggcctgggcgggactccca

SEQ ID NO: 2366 - DNA, 22 bp, synthetic construct
  misc_feature 1..22: note = chemically synthesized
  source 1..22: mol_type = other DNA
ggcgggactcccagaggggtga

SEQ ID NO: 2367 - DNA, 22 bp, synthetic construct
  misc_feature 1..22: note = chemically synthesized
  source 1..22: mol_type = other DNA
ccagaggggtgagacagctgca

SEQ ID NO: 2368 - DNA, 22 bp, synthetic construct
  misc_feature 1..22: note = chemically synthesized
  source 1..22: mol_type = other DNA
cacacctgtgtgcctgggcccc

SEQ ID NO: 2369 - DNA, 22 bp, synthetic construct
  misc_feature 1..22: note = chemically synthesized
  source 1..22: mol_type = other DNA
tgtgcctgggccccaggctgtc

SEQ ID NO: 2370 - DNA, 22 bp, synthetic construct
  misc_feature 1..22: note = chemically synthesized
  source 1..22: mol_type = other DNA
ggccccaggctgtcacactcca

SEQ ID NO: 2371 - DNA, 22 bp, synthetic construct
  misc_feature 1..22: note = chemically synthesized
  source 1..22: mol_type = other DNA
tcacactccagttcactgaggc

SEQ ID NO: 2372 - DNA, 22 bp, synthetic construct
  misc_feature 1..22: note = chemically synthesized
  source 1..22: mol_type = other DNA
cagttcactgaggccccctctg

SEQ ID NO: 2373 - DNA, 22 bp, synthetic construct
  misc_feature 1..22: note = chemically synthesized
  source 1..22: mol_type = other DNA
actgaggccccctctgcacggg

SEQ ID NO: 2374 - DNA, 22 bp, synthetic construct
  misc_feature 1..22: note = chemically synthesized
  source 1..22: mol_type = other DNA
aggccccctctgcacggggccc

SEQ ID NO: 2375 - DNA, 22 bp, synthetic construct
  misc_feature 1..22: note = chemically synthesized
  source 1..22: mol_type = other DNA
tgcacggggccctgcagccagg

SEQ ID NO: 2376 - DNA, 22 bp, synthetic construct
  misc_feature 1..22: note = chemically synthesized
  source 1..22: mol_type = other DNA
cacggggccctgcagccagggg

SEQ ID NO: 2377 - DNA, 22 bp, synthetic construct
  misc_feature 1..22: note = chemically synthesized
  source 1..22: mol_type = other DNA
cagccaggggctgacacgggcc

SEQ ID NO: 2378 - DNA, 22 bp, synthetic construct
  misc_feature 1..22: note = chemically synthesized
  source 1..22: mol_type = other DNA
acacgggccaccgtttctcatt

SEQ ID NO: 2379 - DNA, 22 bp, synthetic construct
  misc_feature 1..22: note = chemically synthesized
  source 1..22: mol_type = other DNA
ctcattcttcccttaggggtcc

SEQ ID NO: 2380 - DNA, 22 bp, synthetic construct
  misc_feature 1..22: note = chemically synthesized
  source 1..22: mol_type = other DNA
tcattcttcccttaggggtcca

SEQ ID NO: 2381 - DNA, 22 bp, synthetic construct
  misc_feature 1..22: note = chemically synthesized
  source 1..22: mol_type = other DNA
attcttcccttaggggtccaaa

SEQ ID NO: 2382 - DNA, 22 bp, synthetic construct
  misc_feature 1..22: note = chemically synthesized
  source 1..22: mol_type = other DNA
ttcccttaggggtccaaaactt

SEQ ID NO: 2383 - DNA, 22 bp, synthetic construct
  misc_feature 1..22: note = chemically synthesized
  source 1..22: mol_type = other DNA
cccttaggggtccaaaacttgg

SEQ ID NO: 2384 - DNA, 22 bp, synthetic construct
  misc_feature 1..22: note = chemically synthesized
  source 1..22: mol_type = other DNA
ccttaggggtccaaaacttggg

SEQ ID NO: 2385 - DNA, 22 bp, synthetic construct
  misc_feature 1..22: note = chemically synthesized
  source 1..22: mol_type = other DNA
aggggtccaaaacttgggggga

SEQ ID NO: 2386 - DNA, 22 bp, synthetic construct
  misc_feature 1..22: note = chemically synthesized
  source 1..22: mol_type = other DNA
ggggtccaaaacttggggggac

SEQ ID NO: 2387 - DNA, 22 bp, synthetic construct
  misc_feature 1..22: note = chemically synthesized
  source 1..22: mol_type = other DNA
ggggggacaaaagccgaagtcc

SEQ ID NO: 2388 - DNA, 22 bp, synthetic construct
  misc_feature 1..22: note = chemically synthesized
  source 1..22: mol_type = other DNA
gggggacaaaagccgaagtcca

SEQ ID NO: 2389 - DNA, 22 bp, synthetic construct
  misc_feature 1..22: note = chemically synthesized
  source 1..22: mol_type = other DNA
gccccaggccttgtggacactg

SEQ ID NO: 2390 - DNA, 22 bp, synthetic construct
  misc_feature 1..22: note = chemically synthesized
  source 1..22: mol_type = other DNA
ccccaggccttgtggacactgg

SEQ ID NO: 2391 - DNA, 22 bp, synthetic construct
  misc_feature 1..22: note = chemically synthesized
  source 1..22: mol_type = other DNA
gtggacactgggtgggctccgg

SEQ ID NO: 2392 - DNA, 22 bp, synthetic construct
  misc_feature 1..22: note = chemically synthesized
  source 1..22: mol_type = other DNA
tggacactgggtgggctccggg

SEQ ID NO: 2393 - DNA, 22 bp, synthetic construct
  misc_feature 1..22: note = chemically synthesized
  source 1..22: mol_type = other DNA
ggtgggctccgggacctgaact

SEQ ID NO: 2394 - DNA, 22 bp, synthetic construct
  misc_feature 1..22: note = chemically synthesized
  source 1..22: mol_type = other DNA
cgggacctgaactggagctgag

SEQ ID NO: 2395 - DNA, 22 bp, synthetic construct
  misc_feature 1..22: note = chemically synthesized
  source 1..22: mol_type = other DNA
aactggagctgaggaaggagtg

SEQ ID NO: 2396 - DNA, 22 bp, synthetic construct
  misc_feature 1..22: note = chemically synthesized
  source 1..22: mol_type = other DNA
gagctgaggaaggagtgaagct

SEQ ID NO: 2397 - DNA, 22 bp, synthetic construct
  misc_feature 1..22: note = chemically synthesized
  source 1..22: mol_type = other DNA
aggaaggagtgaagctaaactc

SEQ ID NO: 2398 - DNA, 22 bp, synthetic construct
  misc_feature 1..22: note = chemically synthesized
  source 1..22: mol_type = other DNA
aactcctagatccacgggataa

SEQ ID NO: 2399 - DNA, 22 bp, synthetic construct
  misc_feature 1..22: note = chemically synthesized
  source 1..22: mol_type = other DNA
ctagatccacgggataaattac

SEQ ID NO: 2400 - DNA, 22 bp, synthetic construct
  misc_feature 1..22: note = chemically synthesized
  source 1..22: mol_type = other DNA
gatccacgggataaattacccc

SEQ ID NO: 2401 - DNA, 22 bp, synthetic construct
  misc_feature 1..22: note = chemically synthesized
  source 1..22: mol_type = other DNA
ccccccaagtccctcacctctc

SEQ ID NO: 2402 - DNA, 22 bp, synthetic construct
  misc_feature 1..22: note = chemically synthesized
  source 1..22: mol_type = other DNA
acctctccaaagctgcccatct

SEQ ID NO: 2403 - DNA, 22 bp, synthetic construct
  misc_feature 1..22: note = chemically synthesized
  source 1..22: mol_type = other DNA
tccaaagctgcccatctggagg

SEQ ID NO: 2404 - DNA, 22 bp, synthetic construct
  misc_feature 1..22: note = chemically synthesized
  source 1..22: mol_type = other DNA
caaagctgcccatctggaggag

SEQ ID NO: 2405 - DNA, 22 bp, synthetic construct
  misc_feature 1..22: note = chemically synthesized
  source 1..22: mol_type = other DNA
cccatctggaggaggcgggagg

SEQ ID NO: 2406 - DNA, 22 bp, synthetic construct
  misc_feature 1..22: note = chemically synthesized
  source 1..22: mol_type = other DNA
gaggaggcgggagggagctacg

SEQ ID NO: 2407 - DNA, 22 bp, synthetic construct
  misc_feature 1..22: note = chemically synthesized
  source 1..22: mol_type = other DNA
cgagggccaagagcatgaggtc

SEQ ID NO: 2408 - DNA, 22 bp, synthetic construct
  misc_feature 1..22: note = chemically synthesized
  source 1..22: mol_type = other DNA
gggctgtgaaggggccgcacgt

SEQ ID NO: 2409 - DNA, 22 bp, synthetic construct
  misc_feature 1..22: note = chemically synthesized
  source 1..22: mol_type = other DNA
tgaaggggccgcacgtgccctg

SEQ ID NO: 2410 - DNA, 22 bp, synthetic construct
  misc_feature 1..22: note = chemically synthesized
  source 1..22: mol_type = other DNA
ggaacgggatgaactcggctcg

SEQ ID NO: 2411 - DNA, 22 bp, synthetic construct
  misc_feature 1..22: note = chemically synthesized
  source 1..22: mol_type = other DNA
ggctcgtttatttccacccagt

SEQ ID NO: 2412 - DNA, 22 bp, synthetic construct
  misc_feature 1..22: note = chemically synthesized
  source 1..22: mol_type = other DNA
gtttatttccacccagttgtca

SEQ ID NO: 2413 - DNA, 22 bp, synthetic construct
  misc_feature 1..22: note = chemically synthesized
  source 1..22: mol_type = other DNA
atttccacccagttgtcatggc

SEQ ID NO: 2414 - DNA, 22 bp, synthetic construct
  misc_feature 1..22: note = chemically synthesized
  source 1..22: mol_type = other DNA
tttccacccagttgtcatggcg

SEQ ID NO: 2415 - DNA, 22 bp, synthetic construct
  misc_feature 1..22: note = chemically synthesized
  source 1..22: mol_type = other DNA
ccacccagttgtcatggcgata

SEQ ID NO: 2416 - DNA, 22 bp, synthetic construct
  misc_feature 1..22: note = chemically synthesized
  source 1..22: mol_type = other DNA
cacccagttgtcatggcgatag

SEQ ID NO: 2417 - DNA, 22 bp, synthetic construct
  misc_feature 1..22: note = chemically synthesized
  source 1..22: mol_type = other DNA
tcatggcgataggggagggggg

SEQ ID NO: 2418 - DNA, 22 bp, synthetic construct
  misc_feature 1..22: note = chemically synthesized
  source 1..22: mol_type = other DNA
tccctttcaaggacctgcccag

SEQ ID NO: 2419 - DNA, 22 bp, synthetic construct
  misc_feature 1..22: note = chemically synthesized
  source 1..22: mol_type = other DNA
ccctttcaaggacctgcccagt

SEQ ID NO: 2420 - DNA, 22 bp, synthetic construct
  misc_feature 1..22: note = chemically synthesized
  source 1..22: mol_type = other DNA
cctttcaaggacctgcccagta

SEQ ID NO: 2421 - DNA, 22 bp, synthetic construct
  misc_feature 1..22: note = chemically synthesized
  source 1..22: mol_type = other DNA
tcaaggacctgcccagtacagg

SEQ ID NO: 2422 - DNA, 22 bp, synthetic construct
  misc_feature 1..22: note = chemically synthesized
  source 1..22: mol_type = other DNA
caaggacctgcccagtacaggc

SEQ ID NO: 2423 - DNA, 22 bp, synthetic construct
  misc_feature 1..22: note = chemically synthesized
  source 1..22: mol_type = other DNA
aaggacctgcccagtacaggca

SEQ ID NO: 2424 - DNA, 22 bp, synthetic construct
  misc_feature 1..22: note = chemically synthesized
  source 1..22: mol_type = other DNA
cccagtacaggcatccctgtga

SEQ ID NO: 2425 - DNA, 22 bp, synthetic construct
  misc_feature 1..22: note = chemically synthesized
  source 1..22: mol_type = other DNA
tgaaagatgcctgaggcctggg

SEQ ID NO: 2426 - DNA, 22 bp, synthetic construct
  misc_feature 1..22: note = chemically synthesized
  source 1..22: mol_type = other DNA
aggcctgggcaccagggactcc

SEQ ID NO: 2427 - DNA, 22 bp, synthetic construct
  misc_feature 1..22: note = chemically synthesized
  source 1..22: mol_type = other DNA
ggcaccagggactccagagtcc

SEQ ID NO: 2428 - DNA, 22 bp, synthetic construct
  misc_feature 1..22: note = chemically synthesized
  source 1..22: mol_type = other DNA
cagagtccaggcccaacccctc

SEQ ID NO: 2429 - DNA, 22 bp, synthetic construct
  misc_feature 1..22: note = chemically synthesized
  source 1..22: mol_type = other DNA
cccattcaacccaggaggccag

SEQ ID NO: 2430 - DNA, 22 bp, synthetic construct
  misc_feature 1..22: note = chemically synthesized
  source 1..22: mol_type = other DNA
aacccaggaggccaggccccag

SEQ ID NO: 2431 - DNA, 22 bp, synthetic construct
  misc_feature 1..22: note = chemically synthesized
  source 1..22: mol_type = other DNA
ccgccctcagatgaaggagtcc

SEQ ID NO: 2432 - DNA, 22 bp, synthetic construct
  misc_feature 1..22: note = chemically synthesized
  source 1..22: mol_type = other DNA
cgccctcagatgaaggagtcca

SEQ ID NO: 2433 - DNA, 22 bp, synthetic construct
  misc_feature 1..22: note = chemically synthesized
  source 1..22: mol_type = other DNA
agatgaaggagtccaggccccc

SEQ ID NO: 2434 - DNA, 22 bp, synthetic construct
  misc_feature 1..22: note = chemically synthesized
  source 1..22: mol_type = other DNA
tccccattcagacccaggggtc

SEQ ID NO: 2435 - DNA, 22 bp, synthetic construct
  misc_feature 1..22: note = chemically synthesized
  source 1..22: mol_type = other DNA
cccattcagacccaggggtcca

SEQ ID NO: 2436 - DNA, 22 bp, synthetic construct
  misc_feature 1..22: note = chemically synthesized
  source 1..22: mol_type = other DNA
agacccaggggtccaggcccag

SEQ ID NO: 2437 - DNA, 22 bp, synthetic construct
  misc_feature 1..22: note = chemically synthesized
  source 1..22: mol_type = other DNA
cctaagacccagaagtccaggc

SEQ ID NO: 2438 - DNA, 22 bp, synthetic construct
  misc_feature 1..22: note = chemically synthesized
  source 1..22: mol_type = other DNA
agacccagaagtccaggccccc

SEQ ID NO: 2439 - DNA, 22 bp, synthetic construct
  misc_feature 1..22: note = chemically synthesized
  source 1..22: mol_type = other DNA
ctccctcagacccacgagtcca

SEQ ID NO: 2440 - DNA, 22 bp, synthetic construct
  misc_feature 1..22: note = chemically synthesized
  source 1..22: mol_type = other DNA
cctcagacccacgagtccaggc

SEQ ID NO: 2441 - DNA, 22 bp, synthetic construct
  misc_feature 1..22: note = chemically synthesized
  source 1..22: mol_type = other DNA
agacccacgagtccaggcccca

SEQ ID NO: 2442 - DNA, 22 bp, synthetic construct
  misc_feature 1..22: note = chemically synthesized
  source 1..22: mol_type = other DNA
ctccctcggacccaggagtcca

SEQ ID NO: 2443 - DNA, 22 bp, synthetic construct
  misc_feature 1..22: note = chemically synthesized
  source 1..22: mol_type = other DNA
cctcggacccaggagtccaggc

SEQ ID NO: 2444 - DNA, 22 bp, synthetic construct
  misc_feature 1..22: note = chemically synthesized
  source 1..22: mol_type = other DNA
ggacccaggagtccaggccccc

SEQ ID NO: 2445 - DNA, 22 bp, synthetic construct
  misc_feature 1..22: note = chemically synthesized
  source 1..22: mol_type = other DNA
caccctcagacccaggagtcca

SEQ ID NO: 2446 - DNA, 22 bp, synthetic construct
  misc_feature 1..22: note = chemically synthesized
  source 1..22: mol_type = other DNA
agacccaggagtccaggcccca

SEQ ID NO: 2447 - DNA, 22 bp, synthetic construct
  misc_feature 1..22: note = chemically synthesized
  source 1..22: mol_type = other DNA
ctccctcggacccaggagtcca

SEQ ID NO: 2448 - DNA, 22 bp, synthetic construct
  misc_feature 1..22: note = chemically synthesized
  source 1..22: mol_type = other DNA
cctcggacccaggagtccaggc

SEQ ID NO: 2449 - DNA, 22 bp, synthetic construct
  misc_feature 1..22: note = chemically synthesized
  source 1..22: mol_type = other DNA
ggacccaggagtccaggcccca

SEQ ID NO: 2450 - DNA, 22 bp, synthetic construct
  misc_feature 1..22: note = chemically synthesized
  source 1..22: mol_type = other DNA
ctctctcaaacccaggagccca

SEQ ID NO: 2451 - DNA, 22 bp, synthetic construct
  misc_feature 1..22: note = chemically synthesized
  source 1..22: mol_type = other DNA
tctcaaacccaggagcccaggc

SEQ ID NO: 2452 - DNA, 22 bp, synthetic construct
  misc_feature 1..22: note = chemically synthesized
  source 1..22: mol_type = other DNA
tcaaacccaggagcccaggccc

SEQ ID NO: 2453 - DNA, 22 bp, synthetic construct
  misc_feature 1..22: note = chemically synthesized
  source 1..22: mol_type = other DNA
aaacccaggagcccaggccccc

SEQ ID NO: 2454 - DNA, 22 bp, synthetic construct
  misc_feature 1..22: note = chemically synthesized
  source 1..22: mol_type = other DNA
ttctctgttcagccctaagaat

SEQ ID NO: 2455 - DNA, 22 bp, synthetic construct
  misc_feature 1..22: note = chemically synthesized
  source 1..22: mol_type = other DNA
ctctgttcagccctaagaatcc

SEQ ID NO: 2456 - DNA, 22 bp, synthetic construct
  misc_feature 1..22: note = chemically synthesized
  source 1..22: mol_type = other DNA
tctgttcagccctaagaatcct

SEQ ID NO: 2457 - DNA, 22 bp, synthetic construct
  misc_feature 1..22: note = chemically synthesized
  source 1..22: mol_type = other DNA
tgttcagccctaagaatcctgg

SEQ ID NO: 2458 - DNA, 22 bp, synthetic construct
  misc_feature 1..22: note = chemically synthesized
  source 1..22: mol_type = other DNA
ttcagccctaagaatcctggct

SEQ ID NO: 2459 - DNA, 22 bp, synthetic construct
  misc_feature 1..22: note = chemically synthesized
  source 1..22: mol_type = other DNA
agccctaagaatcctggctcca

SEQ ID NO: 2460 - DNA, 22 bp, synthetic construct
  misc_feature 1..22: note = chemically synthesized
  source 1..22: mol_type = other DNA
agaatcctggctccagcccctc

SEQ ID NO: 2461 - DNA, 22 bp, synthetic construct
  misc_feature 1..22: note = chemically synthesized
  source 1..22: mol_type = other DNA
gctccagcccctcctactctag

SEQ ID NO: 2462 - DNA, 22 bp, synthetic construct
  misc_feature 1..22: note = chemically synthesized
  source 1..22: mol_type = other DNA
cagcccctcctactctagcccc

SEQ ID NO: 2463 - DNA, 22 bp, synthetic construct
  misc_feature 1..22: note = chemically synthesized
  source 1..22: mol_type = other DNA
ctactctagcccccaaccccct

SEQ ID NO: 2464 - DNA, 22 bp, synthetic construct
  misc_feature 1..22: note = chemically synthesized
  source 1..22: mol_type = other DNA
ctctagcccccaaccccctagc

SEQ ID NO: 2465 - DNA, 22 bp, synthetic construct
  misc_feature 1..22: note = chemically synthesized
  source 1..22: mol_type = other DNA
tagcccccaaccccctagccac

SEQ ID NO: 2466 - DNA, 22 bp, synthetic construct
  misc_feature 1..22: note = chemically synthesized
  source 1..22: mol_type = other DNA
gcccccaaccccctagccacta

SEQ ID NO: 2467 - DNA, 22 bp, synthetic construct
  misc_feature 1..22: note = chemically synthesized
  source 1..22: mol_type = other DNA
gccactaaggcaattggggtgc

SEQ ID NO: 2468 - DNA, 22 bp, synthetic construct
  misc_feature 1..22: note = chemically synthesized
  source 1..22: mol_type = other DNA
aggcaattggggtgcaggaatg

SEQ ID NO: 2469 - DNA, 22 bp, synthetic construct
  misc_feature 1..22: note = chemically synthesized
  source 1..22: mol_type = other DNA
gggtgcaggaatgggggcaggg

SEQ ID NO: 2470 - DNA, 22 bp, synthetic construct
  misc_feature 1..22: note = chemically synthesized
  source 1..22: mol_type = other DNA
accaagtggttgataaacccac

SEQ ID NO: 2471 - DNA, 22 bp, synthetic construct
  misc_feature 1..22: note = chemically synthesized
  source 1..22: mol_type = other DNA
ataaacccacgtggggtaccct

SEQ ID NO: 2472 - DNA, 22 bp, synthetic construct
  misc_feature 1..22: note = chemically synthesized
  source 1..22: mol_type = other DNA
agaacttgggaacagccacagc

SEQ ID NO: 2473 - DNA, 22 bp, synthetic construct
  misc_feature 1..22: note = chemically synthesized
  source 1..22: mol_type = other DNA
gggaacagccacagcagggggg

SEQ ID NO: 2474 - DNA, 22 bp, synthetic construct
  misc_feature 1..22: note = chemically synthesized
  source 1..22: mol_type = other DNA
ggaacagccacagcaggggggc

SEQ ID NO: 2475 - DNA, 22 bp, synthetic construct
  misc_feature 1..22: note = chemically synthesized
  source 1..22: mol_type = other DNA
ggggacctgcctggagaaggat

SEQ ID NO: 2476 - DNA, 22 bp, synthetic construct
  misc_feature 1..22: note = chemically synthesized
  source 1..22: mol_type = other DNA
gggacctgcctggagaaggatg

SEQ ID NO: 2477 - DNA, 22 bp, synthetic construct
  misc_feature 1..22: note = chemically synthesized
  source 1..22: mol_type = other DNA
cctggagaaggatgcaggacga

SEQ ID NO: 2478 - DNA, 22 bp, synthetic construct
  misc_feature 1..22: note = chemically synthesized
  source 1..22: mol_type = other DNA
gagaaggatgcaggacgagaaa

SEQ ID NO: 2479 - DNA, 22 bp, synthetic construct
  misc_feature 1..22: note = chemically synthesized
  source 1..22: mol_type = other DNA
gccgggaatcaagagtcaccca

SEQ ID NO: 2480 - DNA, 22 bp, synthetic construct
  misc_feature 1..22: note = chemically synthesized
  source 1..22: mol_type = other DNA
ttttcctaggactgagggtttc

SEQ ID NO: 2481 - DNA, 22 bp, synthetic construct
  misc_feature 1..22: note = chemically synthesized
  source 1..22: mol_type = other DNA
tcctaggactgagggtttcagt

SEQ ID NO: 2482 - DNA, 22 bp, synthetic construct
  misc_feature 1..22: note = chemically synthesized
  source 1..22: mol_type = other DNA
cctaggactgagggtttcagtg

SEQ ID NO: 2483 - DNA, 22 bp, synthetic construct
  misc_feature 1..22: note = chemically synthesized
  source 1..22: mol_type = other DNA
ctaggactgagggtttcagtgc

SEQ ID NO: 2484 - DNA, 22 bp, synthetic construct
  misc_feature 1..22: note = chemically synthesized
  source 1..22: mol_type = other DNA
ggactgagggtttcagtgctaa

SEQ ID NO: 2485 - DNA, 22 bp, synthetic construct
  misc_feature 1..22: note = chemically synthesized
  source 1..22: mol_type = other DNA
agggtttcagtgctaaaactag

SEQ ID NO: 2486 - DNA, 22 bp, synthetic construct
  misc_feature 1..22: note = chemically synthesized
  source 1..22: mol_type = other DNA
cagtgctaaaactaggctgtcc

SEQ ID NO: 2487 - DNA, 22 bp, synthetic construct
  misc_feature 1..22: note = chemically synthesized
  source 1..22: mol_type = other DNA
agtgctaaaactaggctgtcct

SEQ ID NO: 2488 - DNA, 22 bp, synthetic construct
  misc_feature 1..22: note = chemically synthesized
  source 1..22: mol_type = other DNA
aaactaggctgtcctgggcaaa

SEQ ID NO: 2489 - DNA, 22 bp, synthetic construct
  misc_feature 1..22: note = chemically synthesized
  source 1..22: mol_type = other DNA
ggctgtcctgggcaaacagcat

SEQ ID NO: 2490 - DNA, 22 bp, synthetic construct
  misc_feature 1..22: note = chemically synthesized
  source 1..22: mol_type = other DNA
tcctgggcaaacagcataagct

SEQ ID NO: 2491 - DNA, 22 bp, synthetic construct
  misc_feature 1..22: note = chemically synthesized
  source 1..22: mol_type = other DNA
ggcaaacagcataagctggtca

SEQ ID NO: 2492 - DNA, 22 bp, synthetic construct
  misc_feature 1..22: note = chemically synthesized
  source 1..22: mol_type = other DNA
gtcaccccacacccagacctga

SEQ ID NO: 2493 - DNA, 22 bp, synthetic construct
  misc_feature 1..22: note = chemically synthesized
  source 1..22: mol_type = other DNA
acccaaacccagctcccctgct

SEQ ID NO: 2494 - DNA, 22 bp, synthetic construct
  misc_feature 1..22: note = chemically synthesized
  source 1..22: mol_type = other DNA
ccctgcttcttggccacgtaac

SEQ ID NO: 2495 - DNA, 22 bp, synthetic construct
  misc_feature 1..22: note = chemically synthesized
  source 1..22: mol_type = other DNA
cttcttggccacgtaacctgag

SEQ ID NO: 2496 - DNA, 22 bp, synthetic construct
  misc_feature 1..22: note = chemically synthesized
  source 1..22: mol_type = other DNA
cttggccacgtaacctgagaag

SEQ ID NO: 2497 - DNA, 22 bp, synthetic construct
  misc_feature 1..22: note = chemically synthesized
  source 1..22: mol_type = other DNA
ttggccacgtaacctgagaagg

SEQ ID NO: 2498 - DNA, 22 bp, synthetic construct
  misc_feature 1..22: note = chemically synthesized
  source 1..22: mol_type = other DNA
ggccacgtaacctgagaaggga

SEQ ID NO: 2499 - DNA, 22 bp, synthetic construct
  misc_feature 1..22: note = chemically synthesized
  source 1..22: mol_type = other DNA
gccacgtaacctgagaagggaa

SEQ ID NO: 2500 - DNA, 22 bp, synthetic construct
  misc_feature 1..22: note = chemically synthesized
  source 1..22: mol_type = other DNA
agaagggaatccctcctctctg

SEQ ID NO: 2501 - DNA, 22 bp, synthetic construct
  misc_feature 1..22: note = chemically synthesized
  source 1..22: mol_type = other DNA
ctctctgaaccccagcccaccc

SEQ ID NO: 2502 - DNA, 22 bp, synthetic construct
  misc_feature 1..22: note = chemically synthesized
  source 1..22: mol_type = other DNA
tctgaaccccagcccaccccaa

SEQ ID NO: 2503 - DNA, 22 bp, synthetic construct
  misc_feature 1..22: note = chemically synthesized
  source 1..22: mol_type = other DNA
tgaaccccagcccaccccaatg

SEQ ID NO: 2504 - DNA, 22 bp, synthetic construct
  misc_feature 1..22: note = chemically synthesized
  source 1..22: mol_type = other DNA
aaccccagcccaccccaatgct

SEQ ID NO: 2505 - DNA, 22 bp, synthetic construct
  misc_feature 1..22: note = chemically synthesized
  source 1..22: mol_type = other DNA
caggcctcctgggataccccga

SEQ ID NO: 2506 - DNA, 22 bp, synthetic construct
  misc_feature 1..22: note = chemically synthesized
  source 1..22: mol_type = other DNA
ctgggataccccgaagagtgag

SEQ ID NO: 2507 - DNA, 22 bp, synthetic construct
  misc_feature 1..22: note = chemically synthesized
  source 1..22: mol_type = other DNA
ggataccccgaagagtgagttt

SEQ ID NO: 2508 - DNA, 22 bp, synthetic construct
  misc_feature 1..22: note = chemically synthesized
  source 1..22: mol_type = other DNA
gccaagcagtcaccccacagtt

SEQ ID NO: 2509 - DNA, 22 bp, synthetic construct
  misc_feature 1..22: note = chemically synthesized
  source 1..22: mol_type = other DNA
ccaagcagtcaccccacagttg

SEQ ID NO: 2510 - DNA, 22 bp, synthetic construct
  misc_feature 1..22: note = chemically synthesized
  source 1..22: mol_type = other DNA
gaggagaatccacccaaaaggc

SEQ ID NO: 2511 - DNA, 22 bp, synthetic construct
  misc_feature 1..22: note = chemically synthesized
  source 1..22: mol_type = other DNA
gtagacagggctggggtggcct

SEQ ID NO: 2512 - DNA, 22 bp, synthetic construct
  misc_feature 1..22: note = chemically synthesized
  source 1..22: mol_type = other DNA
gggtggcctctcgtggggtcca

SEQ ID NO: 2513 - DNA, 22 bp, synthetic construct
  misc_feature 1..22: note = chemically synthesized
  source 1..22: mol_type = other DNA
tcgtggggtccaggccaagtag

SEQ ID NO: 2514 - DNA, 22 bp, synthetic construct
  misc_feature 1..22: note = chemically synthesized
  source 1..22: mol_type = other DNA
gtggggtccaggccaagtaggt

SEQ ID NO: 2515 - DNA, 22 bp, synthetic construct
  misc_feature 1..22: note = chemically synthesized
  source 1..22: mol_type = other DNA
gggcctctgggggatgcagggg

SEQ ID NO: 2516 - DNA, 22 bp, synthetic construct
  misc_feature 1..22: note = chemically synthesized
  source 1..22: mol_type = other DNA
tgggggatgcaggggaaggggg

SEQ ID NO: 2517 - DNA, 22 bp, synthetic construct
  misc_feature 1..22: note = chemically synthesized
  source 1..22: mol_type = other DNA
ggggatgcaggggaagggggat

SEQ ID NO: 2518 - DNA, 22 bp, synthetic construct
  misc_feature 1..22: note = chemically synthesized
  source 1..22: mol_type = other DNA
agtctgaagagcagagccagga

SEQ ID NO: 2519 - DNA, 22 bp, synthetic construct
  misc_feature 1..22: note = chemically synthesized
  source 1..22: mol_type = other DNA
aagagcagagccaggaacccct

SEQ ID NO: 2520 - DNA, 22 bp, synthetic construct
  misc_feature 1..22: note = chemically synthesized
  source 1..22: mol_type = other DNA
tagggaaggggcaggagagcca

SEQ ID NO: 2521 - DNA, 22 bp, synthetic construct
  misc_feature 1..22: note = chemically synthesized
  source 1..22: mol_type = other DNA
agcgcctctcctgggcttgcca

SEQ ID NO: 2522 - DNA, 22 bp, synthetic construct
  misc_feature 1..22: note = chemically synthesized
  source 1..22: mol_type = other DNA
tcctgggcttgccaaggactca

SEQ ID NO: 2523 - DNA, 22 bp, synthetic construct
  misc_feature 1..22: note = chemically synthesized
  source 1..22: mol_type = other DNA
ctgggcttgccaaggactcaaa

SEQ ID NO: 2524 - DNA, 22 bp, synthetic construct
  misc_feature 1..22: note = chemically synthesized
  source 1..22: mol_type = other DNA
ggcttgccaaggactcaaaccc

SEQ ID NO: 2525 - DNA, 22 bp, synthetic construct
  misc_feature 1..22: note = chemically synthesized
  source 1..22: mol_type = other DNA
gccaaggactcaaacccagaag

SEQ ID NO: 2526 - DNA, 22 bp, synthetic construct
  misc_feature 1..22: note = chemically synthesized
  source 1..22: mol_type = other DNA
ccaaggactcaaacccagaagc

SEQ ID NO: 2527 - DNA, 22 bp, synthetic construct
  misc_feature 1..22: note = chemically synthesized
  source 1..22: mol_type = other DNA
aaacccagaagcccagagcagg

SEQ ID NO: 2528 - DNA, 22 bp, synthetic construct
  misc_feature 1..22: note = chemically synthesized
  source 1..22: mol_type = other DNA
agggaagcgggaccctgctctg

SEQ ID NO: 2529 - DNA, 22 bp, synthetic construct
  misc_feature 1..22: note = chemically synthesized
  source 1..22: mol_type = other DNA
gggaagcgggaccctgctctgg

SEQ ID NO: 2530 - DNA, 22 bp, synthetic construct
  misc_feature 1..22: note = chemically synthesized
  source 1..22: mol_type = other DNA
ctctgggcggaggaatatgtcc

SEQ ID NO: 2531 - DNA, 22 bp, synthetic construct
  misc_feature 1..22: note = chemically synthesized
  source 1..22: mol_type = other DNA
tgggcggaggaatatgtcccag

SEQ ID NO: 2532 - DNA, 22 bp, synthetic construct
  misc_feature 1..22: note = chemically synthesized
  source 1..22: mol_type = other DNA
ggcggaggaatatgtcccagat

SEQ ID NO: 2533 - DNA, 22 bp, synthetic construct
  misc_feature 1..22: note = chemically synthesized
  source 1..22: mol_type = other DNA
gggactctttaaggaaagaagg

SEQ ID NO: 2534 - DNA, 22 bp, synthetic construct
  misc_feature 1..22: note = chemically synthesized
  source 1..22: mol_type = other DNA
tttaaggaaagaaggatggaga

SEQ ID NO: 2535 - DNA, 22 bp, synthetic construct
  misc_feature 1..22: note = chemically synthesized
  source 1..22: mol_type = other DNA
taaggaaagaaggatggagaaa

SEQ ID NO: 2536 - DNA, 22 bp, synthetic construct
  misc_feature 1..22: note = chemically synthesized
  source 1..22: mol_type = other DNA
aaggaaagaaggatggagaaag

SEQ ID NO: 2537 - DNA, 22 bp, synthetic construct
  misc_feature 1..22: note = chemically synthesized
  source 1..22: mol_type = other DNA
aggaaagaaggatggagaaaga

SEQ ID NO: 2538 - DNA, 22 bp, synthetic construct
  misc_feature 1..22: note = chemically synthesized
  source 1..22: mol_type = other DNA
gtgaacacctaggacgcaccat

SEQ ID NO: 2539 - DNA, 22 bp, synthetic construct
  misc_feature 1..22: note = chemically synthesized
  source 1..22: mol_type = other DNA
ggacgcaccattctcacaaagg

SEQ ID NO: 2540 - DNA, 22 bp, synthetic construct
  misc_feature 1..22: note = chemically synthesized
  source 1..22: mol_type = other DNA
tcacaaagggagttttccacac

SEQ ID NO: 2541 - DNA, 22 bp, synthetic construct
  misc_feature 1..22: note = chemically synthesized
  source 1..22: mol_type = other DNA
acaaagggagttttccacacgg

SEQ ID NO: 2542 - DNA, 22 bp, synthetic construct
  misc_feature 1..22: note = chemically synthesized
  source 1..22: mol_type = other DNA
tccacacggacacccccctcct

SEQ ID NO: 2543 - DNA, 22 bp, synthetic construct
  misc_feature 1..22: note = chemically synthesized
  source 1..22: mol_type = other DNA
ccacacggacacccccctcctc

SEQ ID NO: 2544 - DNA, 22 bp, synthetic construct
  misc_feature 1..22: note = chemically synthesized
  source 1..22: mol_type = other DNA
cacacggacacccccctcctca

SEQ ID NO: 2545 - DNA, 22 bp, synthetic construct
  misc_feature 1..22: note = chemically synthesized
  source 1..22: mol_type = other DNA
ctcaccacagccctgccaggac

SEQ ID NO: 2546 - DNA, 22 bp, synthetic construct
  misc_feature 1..22: note = chemically synthesized
  source 1..22: mol_type = other DNA
accacagccctgccaggacggg

SEQ ID NO: 2547 - DNA, 22 bp, synthetic construct
  misc_feature 1..22: note = chemically synthesized
  source 1..22: mol_type = other DNA
ccaggacggggctggctactgg

SEQ ID NO: 2548 - DNA, 22 bp, synthetic construct
  misc_feature 1..22: note = chemically synthesized
  source 1..22: mol_type = other DNA
gctactggccttatctcacagg

SEQ ID NO: 2549 - DNA, 22 bp, synthetic construct
  misc_feature 1..22: note = chemically synthesized
  source 1..22: mol_type = other DNA
ctggccttatctcacaggtaaa

SEQ ID NO: 2550 - DNA, 22 bp, synthetic construct
  misc_feature 1..22: note = chemically synthesized
  source 1..22: mol_type = other DNA
gccttatctcacaggtaaaact

SEQ ID NO: 2551 - DNA, 22 bp, synthetic construct
  misc_feature 1..22: note = chemically synthesized
  source 1..22: mol_type = other DNA
atctcacaggtaaaactgacgc

SEQ ID NO: 2552 - DNA, 22 bp, synthetic construct
  misc_feature 1..22: note = chemically synthesized
  source 1..22: mol_type = other DNA
tctcacaggtaaaactgacgca

SEQ ID NO: 2553 - DNA, 22 bp, synthetic construct
  misc_feature 1..22: note = chemically synthesized
  source 1..22: mol_type = other DNA
acaggtaaaactgacgcacgga

SEQ ID NO: 2554 - DNA, 22 bp, synthetic construct
  misc_feature 1..22: note = chemically synthesized
  source 1..22: mol_type = other DNA
acgcacggaggaacaatataaa

SEQ ID NO: 2555 - DNA, 22 bp, synthetic construct
  misc_feature 1..22: note = chemically synthesized
  source 1..22: mol_type = other DNA
gggactagaaaggtgaagagcc

SEQ ID NO: 2556 - DNA, 22 bp, synthetic construct
  misc_feature 1..22: note = chemically synthesized
  source 1..22: mol_type = other DNA
gaaaggtgaagagccaaagtta

SEQ ID NO: 2557 - DNA, 22 bp, synthetic construct
  misc_feature 1..22: note = chemically synthesized
  source 1..22: mol_type = other DNA
gaactcaggaccaacttattct

SEQ ID NO: 2558 - DNA, 22 bp, synthetic construct
  misc_feature 1..22: note = chemically synthesized
  source 1..22: mol_type = other DNA
aggaccaacttattctgatttt

SEQ ID NO: 2559 - DNA, 22 bp, synthetic construct
  misc_feature 1..22: note = chemically synthesized
  source 1..22: mol_type = other DNA
attctgattttgtttttccaaa

SEQ ID NO: 2560 - DNA, 22 bp, synthetic construct
  misc_feature 1..22: note = chemically synthesized
  source 1..22: mol_type = other DNA
ttctgattttgtttttccaaac

SEQ ID NO: 2561 - DNA, 22 bp, synthetic construct
  misc_feature 1..22: note = chemically synthesized
  source 1..22: mol_type = other DNA
tgattttgtttttccaaactgc

SEQ ID NO: 2562 - DNA, 22 bp, synthetic construct
  misc_feature 1..22: note = chemically synthesized
  source 1..22: mol_type = other DNA
attttgtttttccaaactgctt

SEQ ID NO: 2563 - DNA, 22 bp, synthetic construct
  misc_feature 1..22: note = chemically synthesized
  source 1..22: mol_type = other DNA
tgtttttccaaactgcttctcc

SEQ ID NO: 2564 - DNA, 22 bp, synthetic construct
  misc_feature 1..22: note = chemically synthesized
  source 1..22: mol_type = other DNA
gtttttccaaactgcttctcct

SEQ ID NO: 2565 - DNA, 22 bp, synthetic construct
  misc_feature 1..22: note = chemically synthesized
  source 1..22: mol_type = other DNA
tttttccaaactgcttctcctc

SEQ ID NO: 2566 - DNA, 22 bp, synthetic construct
  misc_feature 1..22: note = chemically synthesized
  source 1..22: mol_type = other DNA
ttccaaactgcttctcctcttg

SEQ ID NO: 2567 - DNA, 22 bp, synthetic construct
  misc_feature 1..22: note = chemically synthesized
  source 1..22: mol_type = other DNA
tccaaactgcttctcctcttgg

SEQ ID NO: 2568 - DNA, 22 bp, synthetic construct
  misc_feature 1..22: note = chemically synthesized
  source 1..22: mol_type = other DNA
ccaaactgcttctcctcttggg

SEQ ID NO: 2569 - DNA, 22 bp, synthetic construct
  misc_feature 1..22: note = chemically synthesized
  source 1..22: mol_type = other DNA
caaactgcttctcctcttggga

SEQ ID NO: 2570 - DNA, 22 bp, synthetic construct
  misc_feature 1..22: note = chemically synthesized
  source 1..22: mol_type = other DNA
cttctcctcttgggaagtgtaa

SEQ ID NO: 2571 - DNA, 22 bp, synthetic construct
  misc_feature 1..22: note = chemically synthesized
  source 1..22: mol_type = other DNA
ctcctcttgggaagtgtaagga

SEQ ID NO: 2572 - DNA, 22 bp, synthetic construct
  misc_feature 1..22: note = chemically synthesized
  source 1..22: mol_type = other DNA
tcctcttgggaagtgtaaggaa

SEQ ID NO: 2573 - DNA, 22 bp, synthetic construct
  misc_feature 1..22: note = chemically synthesized
  source 1..22: mol_type = other DNA
ctcttgggaagtgtaaggaagc

SEQ ID NO: 2574 - DNA, 22 bp, synthetic construct
  misc_feature 1..22: note = chemically synthesized
  source 1..22: mol_type = other DNA
ttgggaagtgtaaggaagctgc

SEQ ID NO: 2575 - DNA, 22 bp, synthetic construct
  misc_feature 1..22: note = chemically synthesized
  source 1..22: mol_type = other DNA
gggaagtgtaaggaagctgcag

SEQ ID NO: 2576 - DNA, 22 bp, synthetic construct
  misc_feature 1..22: note = chemically synthesized
  source 1..22: mol_type = other DNA
ggaagtgtaaggaagctgcagc

SEQ ID NO: 2577 - DNA, 22 bp, synthetic construct
  misc_feature 1..22: note = chemically synthesized
  source 1..22: mol_type = other DNA
cagcaccaggatcagtgaaacg

SEQ ID NO: 2578 - DNA, 22 bp, synthetic construct
  misc_feature 1..22: note = chemically synthesized
  source 1..22: mol_type = other DNA
aggttctgggagagggtagcgc

SEQ ID NO: 2579 - DNA, 22 bp, synthetic construct
  misc_feature 1..22: note = chemically synthesized
  source 1..22: mol_type = other DNA
tgggagagggtagcgcagggtg

SEQ ID NO: 2580 - DNA, 22 bp, synthetic construct
  misc_feature 1..22: note = chemically synthesized
  source 1..22: mol_type = other DNA
ggagagggtagcgcagggtggc

SEQ ID NO: 2581 - DNA, 22 bp, synthetic construct
  misc_feature 1..22: note = chemically synthesized
  source 1..22: mol_type = other DNA
agaaccgggcaggtcacgcatc

SEQ ID NO: 2582 - DNA, 22 bp, synthetic construct
  misc_feature 1..22: note = chemically synthesized
  source 1..22: mol_type = other DNA
ccctcccaccccctgccaagct

SEQ ID NO: 2583 - DNA, 22 bp, synthetic construct
  misc_feature 1..22: note = chemically synthesized
  source 1..22: mol_type = other DNA
cctcccaccccctgccaagctc

SEQ ID NO: 2584 - DNA, 22 bp, synthetic construct
  misc_feature 1..22: note = chemically synthesized
  source 1..22: mol_type = other DNA
ccaccccctgccaagctctccc

SEQ ID NO: 2585 - DNA, 22 bp, synthetic construct
  misc_feature 1..22: note = chemically synthesized
  source 1..22: mol_type = other DNA
ccaagctctccctcccaggatc

SEQ ID NO: 2586 - DNA, 22 bp, synthetic construct
  misc_feature 1..22: note = chemically synthesized
  source 1..22: mol_type = other DNA
tccctcccaggatcctctctgg

SEQ ID NO: 2587 - DNA, 22 bp, synthetic construct
  misc_feature 1..22: note = chemically synthesized
  source 1..22: mol_type = other DNA
cctcccaggatcctctctggct

SEQ ID NO: 2588 - DNA, 22 bp, synthetic construct
  misc_feature 1..22: note = chemically synthesized
  source 1..22: mol_type = other DNA
ccaggatcctctctggctccat

SEQ ID NO: 2589 - DNA, 22 bp, synthetic construct
  misc_feature 1..22: note = chemically synthesized
  source 1..22: mol_type = other DNA
tctggctccatcgtaagcaaac

SEQ ID NO: 2590 - DNA, 22 bp, synthetic construct
  misc_feature 1..22: note = chemically synthesized
  source 1..22: mol_type = other DNA
tggctccatcgtaagcaaacct

SEQ ID NO: 2591 - DNA, 22 bp, synthetic construct
  misc_feature 1..22: note = chemically synthesized
  source 1..22: mol_type = other DNA
gctccatcgtaagcaaacctta

SEQ ID NO: 2592 - DNA, 22 bp, synthetic construct
  misc_feature 1..22: note = chemically synthesized
  source 1..22: mol_type = other DNA
catcgtaagcaaaccttagagg

SEQ ID NO: 2593 - DNA, 22 bp, synthetic construct
  misc_feature 1..22: note = chemically synthesized
  source 1..22: mol_type = other DNA
agaggttctggcaaggagagag

SEQ ID NO: 2594 - DNA, 22 bp, synthetic construct
  misc_feature 1..22: note = chemically synthesized
  source 1..22: mol_type = other DNA
gaggttctggcaaggagagaga

SEQ ID NO: 2595 - DNA, 22 bp, synthetic construct
  misc_feature 1..22: note = chemically synthesized
  source 1..22: mol_type = other DNA
tggcaaggagagagatggctcc

SEQ ID NO: 2596 - DNA, 22 bp, synthetic construct
  misc_feature 1..22: note = chemically synthesized
  source 1..22: mol_type = other DNA
gcaaggagagagatggctccag

SEQ ID NO: 2597 - DNA, 22 bp, synthetic construct
  misc_feature 1..22: note = chemically synthesized
  source 1..22: mol_type = other DNA
caggaaatgggggtgtgtcacc

SEQ ID NO: 2598 - DNA, 22 bp, synthetic construct
  misc_feature 1..22: note = chemically synthesized
  source 1..22: mol_type = other DNA
cctaacaggaggtgggggttag

SEQ ID NO: 2599 - DNA, 22 bp, synthetic construct
  misc_feature 1..22: note = chemically synthesized
  source 1..22: mol_type = other DNA
acaggaggtgggggttagaccc

SEQ ID NO: 2600 - DNA, 22 bp, synthetic construct
  misc_feature 1..22: note = chemically synthesized
  source 1..22: mol_type = other DNA
gacccaatatcaggagactagg

SEQ ID NO: 2601 - DNA, 22 bp, synthetic construct
  misc_feature 1..22: note = chemically synthesized
  source 1..22: mol_type = other DNA
ggaaggaggaggcctaaggatg

SEQ ID NO: 2602 - DNA, 22 bp, synthetic construct
  misc_feature 1..22: note = chemically synthesized
  source 1..22: mol_type = other DNA
aggatggggcttttctgtcacc

SEQ ID NO: 2603 - DNA, 22 bp, synthetic construct
  misc_feature 1..22: note = chemically synthesized
  source 1..22: mol_type = other DNA
ttctgtcaccaatcctgtccct

SEQ ID NO: 2604 - DNA, 22 bp, synthetic construct
  misc_feature 1..22: note = chemically synthesized
  source 1..22: mol_type = other DNA
tctgtcaccaatcctgtcccta

SEQ ID NO: 2605 - DNA, 22 bp, synthetic construct
  misc_feature 1..22: note = chemically synthesized
  source 1..22: mol_type = other DNA
ctgtcaccaatcctgtccctag

SEQ ID NO: 2606 - DNA, 22 bp, synthetic construct
  misc_feature 1..22: note = chemically synthesized
  source 1..22: mol_type = other DNA
tgtcaccaatcctgtccctagt

SEQ ID NO: 2607 - DNA, 22 bp, synthetic construct
  misc_feature 1..22: note = chemically synthesized
  source 1..22: mol_type = other DNA
tcaccaatcctgtccctagtgg

SEQ ID NO: 2608 - DNA, 22 bp, synthetic construct
  misc_feature 1..22: note = chemically synthesized
  source 1..22: mol_type = other DNA
tccctagtggccccactgtggg

SEQ ID NO: 2609 - DNA, 22 bp, synthetic construct
  misc_feature 1..22: note = chemically synthesized
  source 1..22: mol_type = other DNA
gtggccccactgtggggtggag

SEQ ID NO: 2610 - DNA, 22 bp, synthetic construct
  misc_feature 1..22: note = chemically synthesized
  source 1..22: mol_type = other DNA
tggggtggaggggacagataaa

SEQ ID NO: 2611 - DNA, 22 bp, synthetic construct
  misc_feature 1..22: note = chemically synthesized
  source 1..22: mol_type = other DNA
accggccctgggaatataaggt

SEQ ID NO: 2612 - DNA, 22 bp, synthetic construct
  misc_feature 1..22: note = chemically synthesized
  source 1..22: mol_type = other DNA
ggaatataaggtggtcccagct

SEQ ID NO: 2613 - DNA, 22 bp, synthetic construct
  misc_feature 1..22: note = chemically synthesized
  source 1..22: mol_type = other DNA
ggggacacaggatccctggagg

SEQ ID NO: 2614 - DNA, 22 bp, synthetic construct
  misc_feature 1..22: note = chemically synthesized
  source 1..22: mol_type = other DNA
gaggcagcaaacatgctgtcct

SEQ ID NO: 2615 - DNA, 22 bp, synthetic construct
  misc_feature 1..22: note = chemically synthesized
  source 1..22: mol_type = other DNA
tcctgaagtggacataggggcc

SEQ ID NO: 2616 - DNA, 22 bp, synthetic construct
  misc_feature 1..22: note = chemically synthesized
  source 1..22: mol_type = other DNA
aagtggacataggggcccgggt

SEQ ID NO: 2617 - DNA, 22 bp, synthetic construct
  misc_feature 1..22: note = chemically synthesized
  source 1..22: mol_type = other DNA
gaggaagaagactagctgagct

SEQ ID NO: 2618 - DNA, 22 bp, synthetic construct
  misc_feature 1..22: note = chemically synthesized
  source 1..22: mol_type = other DNA
gctgagctctcggacccctgga

SEQ ID NO: 2619 - DNA, 22 bp, synthetic construct
  misc_feature 1..22: note = chemically synthesized
  source 1..22: mol_type = other DNA
agctctcggacccctggaagat

SEQ ID NO: 2620 - DNA, 22 bp, synthetic construct
  misc_feature 1..22: note = chemically synthesized
  source 1..22: mol_type = other DNA
tcggacccctggaagatgccat

SEQ ID NO: 2621 - DNA, 22 bp, synthetic construct
  misc_feature 1..22: note = chemically synthesized
  source 1..22: mol_type = other DNA
ggacccctggaagatgccatga

SEQ ID NO: 2622 - DNA, 22 bp, synthetic construct
  misc_feature 1..22: note = chemically synthesized
  source 1..22: mol_type = other DNA
gaagatgccatgacagggggct

SEQ ID NO: 2623 - DNA, 22 bp, synthetic construct
  misc_feature 1..22: note = chemically synthesized
  source 1..22: mol_type = other DNA
gaagagctagcacagactagag

SEQ ID NO: 2624 - DNA, 22 bp, synthetic construct
  misc_feature 1..22: note = chemically synthesized
  source 1..22: mol_type = other DNA
gcacagactagagaggtaaggg

SEQ ID NO: 2625 - DNA, 22 bp, synthetic construct
  misc_feature 1..22: note = chemically synthesized
  source 1..22: mol_type = other DNA
gagaggtaaggggggtagggga

SEQ ID NO: 2626 - DNA, 22 bp, synthetic construct
  misc_feature 1..22: note = chemically synthesized
  source 1..22: mol_type = other DNA
cccaaatgaaaggagtgagagg

SEQ ID NO: 2627 - DNA, 22 bp, synthetic construct
  misc_feature 1..22: note = chemically synthesized
  source 1..22: mol_type = other DNA
aagccagggagacggggtactt

SEQ ID NO: 2628 - DNA, 22 bp, synthetic construct
  misc_feature 1..22: note = chemically synthesized
  source 1..22: mol_type = other DNA
tggggttgtccagaaaaacggt

SEQ ID NO: 2629 - DNA, 22 bp, synthetic construct
  misc_feature 1..22: note = chemically synthesized
  source 1..22: mol_type = other DNA
ggggttgtccagaaaaacggtg

SEQ ID NO: 2630 - DNA, 22 bp, synthetic construct
  misc_feature 1..22: note = chemically synthesized
  source 1..22: mol_type = other DNA
gggttgtccagaaaaacggtga

SEQ ID NO: 2631 - DNA, 22 bp, synthetic construct
  misc_feature 1..22: note = chemically synthesized
  source 1..22: mol_type = other DNA
tccagaaaaacggtgatgatgc

SEQ ID NO: 2632 - DNA, 22 bp, synthetic construct
  misc_feature 1..22: note = chemically synthesized
  source 1..22: mol_type = other DNA
caagaaggggaggcgggacgca

SEQ ID NO: 2633 - DNA, 22 bp, synthetic construct
  misc_feature 1..22: note = chemically synthesized
  source 1..22: mol_type = other DNA
agaaacgagagatggcacaggc

SEQ ID NO: 2634 - DNA, 22 bp, synthetic construct
  misc_feature 1..22: note = chemically synthesized
  source 1..22: mol_type = other DNA
ggtgagggaggagagatgcccg

SEQ ID NO: 2635 - DNA, 22 bp, synthetic construct
  misc_feature 1..22: note = chemically synthesized
  source 1..22: mol_type = other DNA
agaggacatcacgtggtgcagc

SEQ ID NO: 2636 - DNA, 22 bp, synthetic construct
  misc_feature 1..22: note = chemically synthesized
  source 1..22: mol_type = other DNA
cggaaagagcatccttgggcag

SEQ ID NO: 2637 - DNA, 22 bp, synthetic construct
  misc_feature 1..22: note = chemically synthesized
  source 1..22: mol_type = other DNA
gggcagcaacacagcagagagc

SEQ ID NO: 2638 - DNA, 22 bp, synthetic construct
  misc_feature 1..22: note = chemically synthesized
  source 1..22: mol_type = other DNA
ggcagcaacacagcagagagca

SEQ ID NO: 2639 - DNA, 22 bp, synthetic construct
  misc_feature 1..22: note = chemically synthesized
  source 1..22: mol_type = other DNA
aaggaggcggcagggaaggatc

SEQ ID NO: 2640 - DNA, 22 bp, synthetic construct
  misc_feature 1..22: note = chemically synthesized
  source 1..22: mol_type = other DNA
ggccagccgtagaggtgaccca

SEQ ID NO: 2641 - DNA, 22 bp, synthetic construct
  misc_feature 1..22: note = chemically synthesized
  source 1..22: mol_type = other DNA
cagacagaaagcggcacaggcc

SEQ ID NO: 2642 - DNA, 22 bp, synthetic construct
  misc_feature 1..22: note = chemically synthesized
  source 1..22: mol_type = other DNA
cctgggaaggggaaacagtggg

SEQ ID NO: 2643 - DNA, 22 bp, synthetic construct
  misc_feature 1..22: note = chemically synthesized
  source 1..22: mol_type = other DNA
ggaaggggaaacagtgggccag

SEQ ID NO: 2644 - DNA, 22 bp, synthetic construct
  misc_feature 1..22: note = chemically synthesized
  source 1..22: mol_type = other DNA
aaagtggtccggactcaggaga

SEQ ID NO: 2645 - DNA, 22 bp, synthetic construct
  misc_feature 1..22: note = chemically synthesized
  source 1..22: mol_type = other DNA
aggagagagacggcagcgttag

SEQ ID NO: 2646 - DNA, 22 bp, synthetic construct
  misc_feature 1..22: note = chemically synthesized
  source 1..22: mol_type = other DNA
gagggcagagttccggcggcac

SEQ ID NO: 2647 - DNA, 22 bp, synthetic construct
  misc_feature 1..22: note = chemically synthesized
  source 1..22: mol_type = other DNA
cggcggcacagcaagggcactc

SEQ ID NO: 2648 - DNA, 22 bp, synthetic construct
  misc_feature 1..22: note = chemically synthesized
  source 1..22: mol_type = other DNA
gggggcgagaggagggcagcgc

SEQ ID NO: 2649 - DNA, 22 bp, synthetic construct
  misc_feature 1..22: note = chemically synthesized
  source 1..22: mol_type = other DNA
agctatgggagctggctcaggt

SEQ ID NO: 2650 - DNA, 22 bp, synthetic construct
  misc_feature 1..22: note = chemically synthesized
  source 1..22: mol_type = other DNA
tgggagctggctcaggttcagg

SEQ ID NO: 2651 - DNA, 22 bp, synthetic construct
  misc_feature 1..22: note = chemically synthesized
  source 1..22: mol_type = other DNA
gctcaggttcaggagagggcag

SEQ ID NO: 2652 - DNA, 22 bp, synthetic construct
  misc_feature 1..22: note = chemically synthesized
  source 1..22: mol_type = other DNA
aggttcaggagagggcagggca

SEQ ID NO: 2653 - DNA, 22 bp, synthetic construct
  misc_feature 1..22: note = chemically synthesized
  source 1..22: mol_type = other DNA
aggagagggcagggcagggaag

SEQ ID NO: 2654 - DNA, 22 bp, synthetic construct
  misc_feature 1..22: note = chemically synthesized
  source 1..22: mol_type = other DNA
gaggggctcaacatcggaagag

SEQ ID NO: 2655 - DNA, 22 bp, synthetic construct
  misc_feature 1..22: note = chemically synthesized
  source 1..22: mol_type = other DNA
aacatcggaagaggggaagtcg

SEQ ID NO: 2656 - DNA, 22 bp, synthetic construct
  misc_feature 1..22: note = chemically synthesized
  source 1..22: mol_type = other DNA
catgggtcagcacaggctgcca

SEQ ID NO: 2657 - DNA, 22 bp, synthetic construct
  misc_feature 1..22: note = chemically synthesized
  source 1..22: mol_type = other DNA
ccaaagccagggccagttaaag

SEQ ID NO: 2658 - DNA, 22 bp, synthetic construct
  misc_feature 1..22: note = chemically synthesized
  source 1..22: mol_type = other DNA
aagcgactccaatgcggaagag

SEQ ID NO: 2659 - DNA, 22 bp, synthetic construct
  misc_feature 1..22: note = chemically synthesized
  source 1..22: mol_type = other DNA
caatgcggaagagagtaggtcg

SEQ ID NO: 2660 - DNA, 22 bp, synthetic construct
  misc_feature 1..22: note = chemically synthesized
  source 1..22: mol_type = other DNA
gggcagagtggtcagcacagag

SEQ ID NO: 2661 - DNA, 22 bp, synthetic construct
  misc_feature 1..22: note = chemically synthesized
  source 1..22: mol_type = other DNA
agcccagggccagttgaagcgg

SEQ ID NO: 2662 - DNA, 22 bp, synthetic construct
  misc_feature 1..22: note = chemically synthesized
  source 1..22: mol_type = other DNA
aagcggctccaattcggaagtg

SEQ ID NO: 2663 - DNA, 22 bp, synthetic construct
  misc_feature 1..22: note = chemically synthesized
  source 1..22: mol_type = other DNA
caattcggaagtggggtggtcg

SEQ ID NO: 2664 - DNA, 22 bp, synthetic construct
  misc_feature 1..22: note = chemically synthesized
  source 1..22: mol_type = other DNA
ggaagtggggtggtcgaagggg

SEQ ID NO: 2665 - DNA, 22 bp, synthetic construct
  misc_feature 1..22: note = chemically synthesized
  source 1..22: mol_type = other DNA
ggacggggtgtcagcatagggt

SEQ ID NO: 2666 - DNA, 22 bp, synthetic construct
  misc_feature 1..22: note = chemically synthesized
  source 1..22: mol_type = other DNA
gcaacggggaaggaggatgccc

SEQ ID NO: 2667 - DNA, 22 bp, synthetic construct
  misc_feature 1..22: note = chemically synthesized
  source 1..22: mol_type = other DNA
gccccgggagacgccgggcggg

SEQ ID NO: 2668 - DNA, 22 bp, synthetic construct
  misc_feature 1..22: note = chemically synthesized
  source 1..22: mol_type = other DNA
acctggtgcagggcgctgatac

SEQ ID NO: 2669 - DNA, 22 bp, synthetic construct
  misc_feature 1..22: note = chemically synthesized
  source 1..22: mol_type = other DNA
gtgcagggcgctgataccgtcg

SEQ ID NO: 2670 - DNA, 22 bp, synthetic construct
  misc_feature 1..22: note = chemically synthesized
  source 1..22: mol_type = other DNA
ataccgtcggcgttggtggagt

SEQ ID NO: 2671 - DNA, 22 bp, synthetic construct
  misc_feature 1..22: note = chemically synthesized
  source 1..22: mol_type = other DNA
gtggagtccagcacggcgcggg

SEQ ID NO: 2672 - DNA, 22 bp, synthetic construct
  misc_feature 1..22: note = chemically synthesized
  source 1..22: mol_type = other DNA
ggcgccggggccagggtcggcg

SEQ ID NO: 2673 - DNA, 22 bp, synthetic construct
  misc_feature 1..22: note = chemically synthesized
  source 1..22: mol_type = other DNA
gtccaggtcgccgcccgcacag

SEQ ID NO: 2674 - DNA, 22 bp, synthetic construct
  misc_feature 1..22: note = chemically synthesized
  source 1..22: mol_type = other DNA
ggcggcgcgctcgaagcggacg

SEQ ID NO: 2675 - DNA, 22 bp, synthetic construct
  misc_feature 1..22: note = chemically synthesized
  source 1..22: mol_type = other DNA
gaagcggacggtgcgggcgcgg

SEQ ID NO: 2676 - DNA, 22 bp, synthetic construct
  misc_feature 1..22: note = chemically synthesized
  source 1..22: mol_type = other DNA
tccggggccaggctcggcgccc

SEQ ID NO: 2677 - DNA, 22 bp, synthetic construct
  misc_feature 1..22: note = chemically synthesized
  source 1..22: mol_type = other DNA
cggggccaggctcggcgcccgc

SEQ ID NO: 2678 - DNA, 22 bp, synthetic construct
  misc_feature 1..22: note = chemically synthesized
  source 1..22: mol_type = other DNA
ggcgcccgcccgcgccccccac

SEQ ID NO: 2679 - DNA, 22 bp, synthetic construct
  misc_feature 1..22: note = chemically synthesized
  source 1..22: mol_type = other DNA
ccgcagctgctcccgtcgccgc

SEQ ID NO: 2680 - DNA, 22 bp, synthetic construct
  misc_feature 1..22: note = chemically synthesized
  source 1..22: mol_type = other DNA
ctcccgtcgccgctcccgggca

SEQ ID NO: 2681 - DNA, 22 bp, synthetic construct
  misc_feature 1..22: note = chemically synthesized
  source 1..22: mol_type = other DNA
ccgtcgccgctcccgggcagcc

SEQ ID NO: 2682 - DNA, 22 bp, synthetic construct
  misc_feature 1..22: note = chemically synthesized
  source 1..22: mol_type = other DNA
ccgggcagccgccgccgccgcc

SEQ ID NO: 2683 - DNA, 22 bp, synthetic construct
  misc_feature 1..22: note = chemically synthesized
  source 1..22: mol_type = other DNA
tccggacatcgcaccgcccgcc

SEQ ID NO: 2684 - DNA, 22 bp, synthetic construct
  misc_feature 1..22: note = chemically synthesized
  source 1..22: mol_type = other DNA
cggacatcgcaccgcccgcccg

SEQ ID NO: 2685 - DNA, 22 bp, synthetic construct
  misc_feature 1..22: note = chemically synthesized
  source 1..22: mol_type = other DNA
gggctcggcgctcgctcgctcg

SEQ ID NO: 2686 - DNA, 22 bp, synthetic construct
  misc_feature 1..22: note = chemically synthesized
  source 1..22: mol_type = other DNA
ggcgctcgctcgctcgctgggc

SEQ ID NO: 2687 - DNA, 22 bp, synthetic construct
  misc_feature 1..22: note = chemically synthesized
  source 1..22: mol_type = other DNA
gctcgctcgctgggcgggcggg

SEQ ID NO: 2688 - DNA, 22 bp, synthetic construct
  misc_feature 1..22: note = chemically synthesized
  source 1..22: mol_type = other DNA
gctcgctgggcgggcgggcggt

SEQ ID NO: 2689 - DNA, 22 bp, synthetic construct
  misc_feature 1..22: note = chemically synthesized
  source 1..22: mol_type = other DNA
gctgggcgggcgggcggtgcga

SEQ ID NO: 2690 - DNA, 22 bp, synthetic construct
  misc_feature 1..22: note = chemically synthesized
  source 1..22: mol_type = other DNA
ggcgggcgggcggtgcgatgtc

SEQ ID NO: 2691 - DNA, 22 bp, synthetic construct
  misc_feature 1..22: note = chemically synthesized
  source 1..22: mol_type = other DNA
gcccgggggcggcggcggcggc

SEQ ID NO: 2692 - DNA, 22 bp, synthetic construct
  misc_feature 1..22: note = chemically synthesized
  source 1..22: mol_type = other DNA
cccgggagcggcgacgggagca

SEQ ID NO: 2693 - DNA, 22 bp, synthetic construct
  misc_feature 1..22: note = chemically synthesized
  source 1..22: mol_type = other DNA
cggcagtggggggcgcgggcgg

SEQ ID NO: 2694 - DNA, 22 bp, synthetic construct
  misc_feature 1..22: note = chemically synthesized
  source 1..22: mol_type = other DNA
gccccggagagcgccgcgcccg

SEQ ID NO: 2695 - DNA, 22 bp, synthetic construct
  misc_feature 1..22: note = chemically synthesized
  source 1..22: mol_type = other DNA
cgagcgcgccgccgagttcctg

SEQ ID NO: 2696 - DNA, 22 bp, synthetic construct
  misc_feature 1..22: note = chemically synthesized
  source 1..22: mol_type = other DNA
gagcgcgccgccgagttcctgg

SEQ ID NO: 2697 - DNA, 22 bp, synthetic construct
  misc_feature 1..22: note = chemically synthesized
  source 1..22: mol_type = other DNA
ctggcggcctgtgcgggcggcg

SEQ ID NO: 2698 - DNA, 22 bp, synthetic construct
  misc_feature 1..22: note = chemically synthesized
  source 1..22: mol_type = other DNA
gcggcctgtgcgggcggcgacc

SEQ ID NO: 2699 - DNA, 22 bp, synthetic construct
  misc_feature 1..22: note = chemically synthesized
  source 1..22: mol_type = other DNA
tgcgggcggcgacctggacgag

SEQ ID NO: 2700 - DNA, 22 bp, synthetic construct
  misc_feature 1..22: note = chemically synthesized
  source 1..22: mol_type = other DNA
gacgaggcgcgtctgatgctgc

SEQ ID NO: 2701 - DNA, 22 bp, synthetic construct
  misc_feature 1..22: note = chemically synthesized
  source 1..22: mol_type = other DNA
atgctgcgcgccgccgaccctg

SEQ ID NO: 2702 - DNA, 22 bp, synthetic construct
  misc_feature 1..22: note = chemically synthesized
  source 1..22: mol_type = other DNA
cgcgccgccgaccctggccccg

SEQ ID NO: 2703 - DNA, 22 bp, synthetic construct
  misc_feature 1..22: note = chemically synthesized
  source 1..22: mol_type = other DNA
gccccggcgccgagctcgaccc

SEQ ID NO: 2704 - DNA, 22 bp, synthetic construct
  misc_feature 1..22: note = chemically synthesized
  source 1..22: mol_type = other DNA
gaccccgccgcgccgccgcccg

SEQ ID NO: 2705 - DNA, 22 bp, synthetic construct
  misc_feature 1..22: note = chemically synthesized
  source 1..22: mol_type = other DNA
gactccaccaacgccgacggta

SEQ ID NO: 2706 - DNA, 22 bp, synthetic construct
  misc_feature 1..22: note = chemically synthesized
  source 1..22: mol_type = other DNA
caccaacgccgacggtatcagc

SEQ ID NO: 2707 - DNA, 22 bp, synthetic construct
  misc_feature 1..22: note = chemically synthesized
  source 1..22: mol_type = other DNA
caccaggtcagcgccccccgcc

SEQ ID NO: 2708 - DNA, 22 bp, synthetic construct
  misc_feature 1..22: note = chemically synthesized
  source 1..22: mol_type = other DNA
ccggggccaggtccaccctctg

SEQ ID NO: 2709 - DNA, 22 bp, synthetic construct
  misc_feature 1..22: note = chemically synthesized
  source 1..22: mol_type = other DNA
tgctgcgccacctggggcatcc

SEQ ID NO: 2710 - DNA, 22 bp, synthetic construct
  misc_feature 1..22: note = chemically synthesized
  source 1..22: mol_type = other DNA
ctgcgccacctggggcatcctc

SEQ ID NO: 2711 - DNA, 22 bp, synthetic construct
  misc_feature 1..22: note = chemically synthesized
  source 1..22: mol_type = other DNA
cgccacctggggcatcctcctt

SEQ ID NO: 2712 - DNA, 22 bp, synthetic construct
  misc_feature 1..22: note = chemically synthesized
  source 1..22: mol_type = other DNA
gggcatcctccttccccgttgc

SEQ ID NO: 2713 - DNA, 22 bp, synthetic construct
  misc_feature 1..22: note = chemically synthesized
  source 1..22: mol_type = other DNA
cttccccgttgccagtctcgat

SEQ ID NO: 2714 - DNA, 22 bp, synthetic construct
  misc_feature 1..22: note = chemically synthesized
  source 1..22: mol_type = other DNA
ccccgttgccagtctcgatccg

SEQ ID NO: 2715 - DNA, 22 bp, synthetic construct
  misc_feature 1..22: note = chemically synthesized
  source 1..22: mol_type = other DNA
cccgttgccagtctcgatccgc

SEQ ID NO: 2716 - DNA, 22 bp, synthetic construct
  misc_feature 1..22: note = chemically synthesized
  source 1..22: mol_type = other DNA
ccagtctcgatccgccccgtcg

SEQ ID NO: 2717 - DNA, 22 bp, synthetic construct
  misc_feature 1..22: note = chemically synthesized
  source 1..22: mol_type = other DNA
gatccgccccgtcgttcctggc

SEQ ID NO: 2718 - DNA, 22 bp, synthetic construct
  misc_feature 1..22: note = chemically synthesized
  source 1..22: mol_type = other DNA
ctggccctgggctttgccaccc

SEQ ID NO: 2719 - DNA, 22 bp, synthetic construct
  misc_feature 1..22: note = chemically synthesized
  source 1..22: mol_type = other DNA
gccctgggctttgccaccctat

SEQ ID NO: 2720 - DNA, 22 bp, synthetic construct
  misc_feature 1..22: note = chemically synthesized
  source 1..22: mol_type = other DNA
ggctttgccaccctatgctgac

SEQ ID NO: 2721 - DNA, 22 bp, synthetic construct
  misc_feature 1..22: note = chemically synthesized
  source 1..22: mol_type = other DNA
tgccaccctatgctgacacccc

SEQ ID NO: 2722 - DNA, 22 bp, synthetic construct
  misc_feature 1..22: note = chemically synthesized
  source 1..22: mol_type = other DNA
gccaccctatgctgacaccccg

SEQ ID NO: 2723 - DNA, 22 bp, synthetic construct
  misc_feature 1..22: note = chemically synthesized
  source 1..22: mol_type = other DNA
ccaccctatgctgacaccccgt

SEQ ID NO: 2724 - DNA, 22 bp, synthetic construct
  misc_feature 1..22: note = chemically synthesized
  source 1..22: mol_type = other DNA
tgctgacaccccgtcccagtcc

SEQ ID NO: 2725 - DNA, 22 bp, synthetic construct
  misc_feature 1..22: note = chemically synthesized
  source 1..22: mol_type = other DNA
acaccccgtcccagtccccctt

SEQ ID NO: 2726 - DNA, 22 bp, synthetic construct
  misc_feature 1..22: note = chemically synthesized
  source 1..22: mol_type = other DNA
accattccccttcgaccacccc

SEQ ID NO: 2727 - DNA, 22 bp, synthetic construct
  misc_feature 1..22: note = chemically synthesized
  source 1..22: mol_type = other DNA
ccattccccttcgaccacccca

SEQ ID NO: 2728 - DNA, 22 bp, synthetic construct
  misc_feature 1..22: note = chemically synthesized
  source 1..22: mol_type = other DNA
cccttcgaccaccccacttccg

SEQ ID NO: 2729 - DNA, 22 bp, synthetic construct
  misc_feature 1..22: note = chemically synthesized
  source 1..22: mol_type = other DNA
cgaccaccccacttccgaattg

SEQ ID NO: 2730 - DNA, 22 bp, synthetic construct
  misc_feature 1..22: note = chemically synthesized
  source 1..22: mol_type = other DNA
gaccaccccacttccgaattgg

SEQ ID NO: 2731 - DNA, 22 bp, synthetic construct
  misc_feature 1..22: note = chemically synthesized
  source 1..22: mol_type = other DNA
ccgaattggagccgcttcaact

SEQ ID NO: 2732 - DNA, 22 bp, synthetic construct
  misc_feature 1..22: note = chemically synthesized
  source 1..22: mol_type = other DNA
cgaattggagccgcttcaactg

SEQ ID NO: 2733 - DNA, 22 bp, synthetic construct
  misc_feature 1..22: note = chemically synthesized
  source 1..22: mol_type = other DNA
gagccgcttcaactggccctgg

SEQ ID NO: 2734 - DNA, 22 bp, synthetic construct
  misc_feature 1..22: note = chemically synthesized
  source 1..22: mol_type = other DNA
caactggccctgggcttagcca

SEQ ID NO: 2735 - DNA, 22 bp, synthetic construct
  misc_feature 1..22: note = chemically synthesized
  source 1..22: mol_type = other DNA
aactggccctgggcttagccac

SEQ ID NO: 2736 - DNA, 22 bp, synthetic construct
  misc_feature 1..22: note = chemically synthesized
  source 1..22: mol_type = other DNA
gccctgggcttagccactctgt

SEQ ID NO: 2737 - DNA, 22 bp, synthetic construct
  misc_feature 1..22: note = chemically synthesized
  source 1..22: mol_type = other DNA
ggcttagccactctgtgctgac

SEQ ID NO: 2738 - DNA, 22 bp, synthetic construct
  misc_feature 1..22: note = chemically synthesized
  source 1..22: mol_type = other DNA
agccactctgtgctgaccactc

SEQ ID NO: 2739 - DNA, 22 bp, synthetic construct
  misc_feature 1..22: note = chemically synthesized
  source 1..22: mol_type = other DNA
gccactctgtgctgaccactct

SEQ ID NO: 2740 - DNA, 22 bp, synthetic construct
  misc_feature 1..22: note = chemically synthesized
  source 1..22: mol_type = other DNA
tgtgctgaccactctgccccag

SEQ ID NO: 2741 - DNA, 22 bp, synthetic construct
  misc_feature 1..22: note = chemically synthesized
  source 1..22: mol_type = other DNA
tgctgaccactctgccccaggc

SEQ ID NO: 2742 - DNA, 22 bp, synthetic construct
  misc_feature 1..22: note = chemically synthesized
  source 1..22: mol_type = other DNA
accactctgccccaggcctcct

SEQ ID NO: 2743 - DNA, 22 bp, synthetic construct
  misc_feature 1..22: note = chemically synthesized
  source 1..22: mol_type = other DNA
tgccccaggcctccttaccatt

SEQ ID NO: 2744 - DNA, 22 bp, synthetic construct
  misc_feature 1..22: note = chemically synthesized
  source 1..22: mol_type = other DNA
ccccaggcctccttaccattcc

SEQ ID NO: 2745 - DNA, 22 bp, synthetic construct
  misc_feature 1..22: note = chemically synthesized
  source 1..22: mol_type = other DNA
cttaccattccccttcgaccta

SEQ ID NO: 2746 - DNA, 22 bp, synthetic construct
  misc_feature 1..22: note = chemically synthesized
  source 1..22: mol_type = other DNA
accattccccttcgacctactc

SEQ ID NO: 2747 - DNA, 22 bp, synthetic construct
  misc_feature 1..22: note = chemically synthesized
  source 1..22: mol_type = other DNA
ccattccccttcgacctactct

SEQ ID NO: 2748 - DNA, 22 bp, synthetic construct
  misc_feature 1..22: note = chemically synthesized
  source 1..22: mol_type = other DNA
cccttcgacctactctcttccg

SEQ ID NO: 2749 - DNA, 22 bp, synthetic construct
  misc_feature 1..22: note = chemically synthesized
  source 1..22: mol_type = other DNA
cgacctactctcttccgcattg

SEQ ID NO: 2750 - DNA, 22 bp, synthetic construct
  misc_feature 1..22: note = chemically synthesized
  source 1..22: mol_type = other DNA
gacctactctcttccgcattgg

SEQ ID NO: 2751 - DNA, 22 bp, synthetic construct
  misc_feature 1..22: note = chemically synthesized
  source 1..22: mol_type = other DNA
ctctcttccgcattggagtcgc

SEQ ID NO: 2752 - DNA, 22 bp, synthetic construct
  misc_feature 1..22: note = chemically synthesized
  source 1..22: mol_type = other DNA
tcttccgcattggagtcgcttt

SEQ ID NO: 2753 - DNA, 22 bp, synthetic construct
  misc_feature 1..22: note = chemically synthesized
  source 1..22: mol_type = other DNA
ttccgcattggagtcgctttaa

SEQ ID NO: 2754 - DNA, 22 bp, synthetic construct
  misc_feature 1..22: note = chemically synthesized
  source 1..22: mol_type = other DNA
ccgcattggagtcgctttaact

SEQ ID NO: 2755 - DNA, 22 bp, synthetic construct
  misc_feature 1..22: note = chemically synthesized
  source 1..22: mol_type = other DNA
cgcattggagtcgctttaactg

SEQ ID NO: 2756 - DNA, 22 bp, synthetic construct
  misc_feature 1..22: note = chemically synthesized
  source 1..22: mol_type = other DNA
gagtcgctttaactggccctgg

SEQ ID NO: 2757 - DNA, 22 bp, synthetic construct
  misc_feature 1..22: note = chemically synthesized
  source 1..22: mol_type = other DNA
taactggccctggctttggcag

SEQ ID NO: 2758 - DNA, 22 bp, synthetic construct
  misc_feature 1..22: note = chemically synthesized
  source 1..22: mol_type = other DNA
aactggccctggctttggcagc

SEQ ID NO: 2759 - DNA, 22 bp, synthetic construct
  misc_feature 1..22: note = chemically synthesized
  source 1..22: mol_type = other DNA
actggccctggctttggcagcc

SEQ ID NO: 2760 - DNA, 22 bp, synthetic construct
  misc_feature 1..22: note = chemically synthesized
  source 1..22: mol_type = other DNA
gccctggctttggcagcctgtg

SEQ ID NO: 2761 - DNA, 22 bp, synthetic construct
  misc_feature 1..22: note = chemically synthesized
  source 1..22: mol_type = other DNA
gctttggcagcctgtgctgacc

SEQ ID NO: 2762 - DNA, 22 bp, synthetic construct
  misc_feature 1..22: note = chemically synthesized
  source 1..22: mol_type = other DNA
tggcagcctgtgctgacccatg

SEQ ID NO: 2763 - DNA, 22 bp, synthetic construct
  misc_feature 1..22: note = chemically synthesized
  source 1..22: mol_type = other DNA
ggcagcctgtgctgacccatgc

SEQ ID NO: 2764 - DNA, 22 bp, synthetic construct
  misc_feature 1..22: note = chemically synthesized
  source 1..22: mol_type = other DNA
gcagcctgtgctgacccatgca

SEQ ID NO: 2765 - DNA, 22 bp, synthetic construct
  misc_feature 1..22: note = chemically synthesized
  source 1..22: mol_type = other DNA
tgctgacccatgcagtcctcct

SEQ ID NO: 2766 - DNA, 22 bp, synthetic construct
  misc_feature 1..22: note = chemically synthesized
  source 1..22: mol_type = other DNA
acccatgcagtcctccttacca

SEQ ID NO: 2767 - DNA, 22 bp, synthetic construct
  misc_feature 1..22: note = chemically synthesized
  source 1..22: mol_type = other DNA
cttaccatccctccctcgactt

SEQ ID NO: 2768 - DNA, 22 bp, synthetic construct
  misc_feature 1..22: note = chemically synthesized
  source 1..22: mol_type = other DNA
accatccctccctcgacttccc

SEQ ID NO: 2769 - DNA, 22 bp, synthetic construct
  misc_feature 1..22: note = chemically synthesized
  source 1..22: mol_type = other DNA
ccatccctccctcgacttcccc

SEQ ID NO: 2770 - DNA, 22 bp, synthetic construct
  misc_feature 1..22: note = chemically synthesized
  source 1..22: mol_type = other DNA
cctcgacttcccctcttccgat

SEQ ID NO: 2771 - DNA, 22 bp, synthetic construct
  misc_feature 1..22: note = chemically synthesized
  source 1..22: mol_type = other DNA
gacttcccctcttccgatgttg

SEQ ID NO: 2772 - DNA, 22 bp, synthetic construct
  misc_feature 1..22: note = chemically synthesized
  source 1..22: mol_type = other DNA
cccctcttccgatgttgagccc

SEQ ID NO: 2773 - DNA, 22 bp, synthetic construct
  misc_feature 1..22: note = chemically synthesized
  source 1..22: mol_type = other DNA
ccctcttccgatgttgagcccc

SEQ ID NO: 2774 - DNA, 22 bp, synthetic construct
  misc_feature 1..22: note = chemically synthesized
  source 1..22: mol_type = other DNA
ttccgatgttgagcccctccag

SEQ ID NO: 2775 - DNA, 22 bp, synthetic construct
  misc_feature 1..22: note = chemically synthesized
  source 1..22: mol_type = other DNA
ccgatgttgagcccctccagcc

SEQ ID NO: 2776 - DNA, 22 bp, synthetic construct
  misc_feature 1..22: note = chemically synthesized
  source 1..22: mol_type = other DNA
cgatgttgagcccctccagccg

SEQ ID NO: 2777 - DNA, 22 bp, synthetic construct
  misc_feature 1..22: note = chemically synthesized
  source 1..22: mol_type = other DNA
agcccctccagccggtcctgga

SEQ ID NO: 2778 - DNA, 22 bp, synthetic construct
  misc_feature 1..22: note = chemically synthesized
  source 1..22: mol_type = other DNA
cagccggtcctggactttgtct

SEQ ID NO: 2779 - DNA, 22 bp, synthetic construct
  misc_feature 1..22: note = chemically synthesized
  source 1..22: mol_type = other DNA
gactttgtctccttccctgccc

SEQ ID NO: 2780 - DNA, 22 bp, synthetic construct
  misc_feature 1..22: note = chemically synthesized
  source 1..22: mol_type = other DNA
tgtctccttccctgccctgccc

SEQ ID NO: 2781 - DNA, 22 bp, synthetic construct
  misc_feature 1..22: note = chemically synthesized
  source 1..22: mol_type = other DNA
gtctccttccctgccctgccct

SEQ ID NO: 2782 - DNA, 22 bp, synthetic construct
  misc_feature 1..22: note = chemically synthesized
  source 1..22: mol_type = other DNA
tctccttccctgccctgccctc

SEQ ID NO: 2783 - DNA, 22 bp, synthetic construct
  misc_feature 1..22: note = chemically synthesized
  source 1..22: mol_type = other DNA
cttccctgccctgccctctcct

SEQ ID NO: 2784 - DNA, 22 bp, synthetic construct
  misc_feature 1..22: note = chemically synthesized
  source 1..22: mol_type = other DNA
ccctgccctgccctctcctgaa

SEQ ID NO: 2785 - DNA, 22 bp, synthetic construct
  misc_feature 1..22: note = chemically synthesized
  source 1..22: mol_type = other DNA
cctgccctgccctctcctgaac

SEQ ID NO: 2786 - DNA, 22 bp, synthetic construct
  misc_feature 1..22: note = chemically synthesized
  source 1..22: mol_type = other DNA
ccctgccctctcctgaacctga

SEQ ID NO: 2787 - DNA, 22 bp, synthetic construct
  misc_feature 1..22: note = chemically synthesized
  source 1..22: mol_type = other DNA
ccctctcctgaacctgagccag

SEQ ID NO: 2788 - DNA, 22 bp, synthetic construct
  misc_feature 1..22: note = chemically synthesized
  source 1..22: mol_type = other DNA
tcctgaacctgagccagctccc

SEQ ID NO: 2789 - DNA, 22 bp, synthetic construct
  misc_feature 1..22: note = chemically synthesized
  source 1..22: mol_type = other DNA
ctgaacctgagccagctcccat

SEQ ID NO: 2790 - DNA, 22 bp, synthetic construct
  misc_feature 1..22: note = chemically synthesized
  source 1..22: mol_type = other DNA
aacctgagccagctcccatagc

SEQ ID NO: 2791 - DNA, 22 bp, synthetic construct
  misc_feature 1..22: note = chemically synthesized
  source 1..22: mol_type = other DNA
agccagctcccatagctcagtc

SEQ ID NO: 2792 - DNA, 22 bp, synthetic construct
  misc_feature 1..22: note = chemically synthesized
  source 1..22: mol_type = other DNA
ccatagctcagtctggtctatc

SEQ ID NO: 2793 - DNA, 22 bp, synthetic construct
  misc_feature 1..22: note = chemically synthesized
  source 1..22: mol_type = other DNA
agtctggtctatctgcctggcc

SEQ ID NO: 2794 - DNA, 22 bp, synthetic construct
  misc_feature 1..22: note = chemically synthesized
  source 1..22: mol_type = other DNA
gtctatctgcctggccctggcc

SEQ ID NO: 2795 - DNA, 22 bp, synthetic construct
  misc_feature 1..22: note = chemically synthesized
  source 1..22: mol_type = other DNA
tctgcctggccctggccattgt

SEQ ID NO: 2796 - DNA, 22 bp, synthetic construct
  misc_feature 1..22: note = chemically synthesized
  source 1..22: mol_type = other DNA
cctggccctggccattgtcact

SEQ ID NO: 2797 - DNA, 22 bp, synthetic construct
  misc_feature 1..22: note = chemically synthesized
  source 1..22: mol_type = other DNA
gccctggccattgtcactttgc

SEQ ID NO: 2798 - DNA, 22 bp, synthetic construct
  misc_feature 1..22: note = chemically synthesized
  source 1..22: mol_type = other DNA
gccattgtcactttgcgctgcc

SEQ ID NO: 2799 - DNA, 22 bp, synthetic construct
  misc_feature 1..22: note = chemically synthesized
  source 1..22: mol_type = other DNA
tcactttgcgctgccctcctct

SEQ ID NO: 2800 - DNA, 22 bp, synthetic construct
  misc_feature 1..22: note = chemically synthesized
  source 1..22: mol_type = other DNA
tgcgctgccctcctctcgcccc

SEQ ID NO: 2801 - DNA, 22 bp, synthetic construct
  misc_feature 1..22: note = chemically synthesized
  source 1..22: mol_type = other DNA
gcgctgccctcctctcgccccc

SEQ ID NO: 2802 - DNA, 22 bp, synthetic construct
  misc_feature 1..22: note = chemically synthesized
  source 1..22: mol_type = other DNA
cgctgccctcctctcgcccccg

SEQ ID NO: 2803 - DNA, 22 bp, synthetic construct
  misc_feature 1..22: note = chemically synthesized
  source 1..22: mol_type = other DNA
ccctcctctcgcccccgagtgc

SEQ ID NO: 2804 - DNA, 22 bp, synthetic construct
  misc_feature 1..22: note = chemically synthesized
  source 1..22: mol_type = other DNA
ctctcgcccccgagtgcccttg

SEQ ID NO: 2805 - DNA, 22 bp, synthetic construct
  misc_feature 1..22: note = chemically synthesized
  source 1..22: mol_type = other DNA
tcgcccccgagtgcccttgctg

SEQ ID NO: 2806 - DNA, 22 bp, synthetic construct
  misc_feature 1..22: note = chemically synthesized
  source 1..22: mol_type = other DNA
gcccccgagtgcccttgctgtg

SEQ ID NO: 2807 - DNA, 22 bp, synthetic construct
  misc_feature 1..22: note = chemically synthesized
  source 1..22: mol_type = other DNA
gctgtgccgccggaactctgcc

SEQ ID NO: 2808 - DNA, 22 bp, synthetic construct
  misc_feature 1..22: note = chemically synthesized
  source 1..22: mol_type = other DNA
ctgtgccgccggaactctgccc

SEQ ID NO: 2809 - DNA, 22 bp, synthetic construct
  misc_feature 1..22: note = chemically synthesized
  source 1..22: mol_type = other DNA
tgccgccggaactctgccctct

SEQ ID NO: 2810 - DNA, 22 bp, synthetic construct
  misc_feature 1..22: note = chemically synthesized
  source 1..22: mol_type = other DNA
tgccctctaacgctgccgtctc

SEQ ID NO: 2811 - DNA, 22 bp, synthetic construct
  misc_feature 1..22: note = chemically synthesized
  source 1..22: mol_type = other DNA
ccctctaacgctgccgtctctc

SEQ ID NO: 2812 - DNA, 22 bp, synthetic construct
  misc_feature 1..22: note = chemically synthesized
  source 1..22: mol_type = other DNA
taacgctgccgtctctctcctg

SEQ ID NO: 2813 - DNA, 22 bp, synthetic construct
  misc_feature 1..22: note = chemically synthesized
  source 1..22: mol_type = other DNA
acgctgccgtctctctcctgag

SEQ ID NO: 2814 - DNA, 22 bp, synthetic construct
  misc_feature 1..22: note = chemically synthesized
  source 1..22: mol_type = other DNA
ccgtctctctcctgagtccgga

SEQ ID NO: 2815 - DNA, 22 bp, synthetic construct
  misc_feature 1..22: note = chemically synthesized
  source 1..22: mol_type = other DNA
tctcctgagtccggaccacttt

SEQ ID NO: 2816 - DNA, 22 bp, synthetic construct
  misc_feature 1..22: note = chemically synthesized
  source 1..22: mol_type = other DNA
tcctgagtccggaccactttga

SEQ ID NO: 2817 - DNA, 22 bp, synthetic construct
  misc_feature 1..22: note = chemically synthesized
  source 1..22: mol_type = other DNA
ctgagtccggaccactttgagc

SEQ ID NO: 2818 - DNA, 22 bp, synthetic construct
  misc_feature 1..22: note = chemically synthesized
  source 1..22: mol_type = other DNA
agtccggaccactttgagctct

SEQ ID NO: 2819 - DNA, 22 bp, synthetic construct
  misc_feature 1..22: note = chemically synthesized
  source 1..22: mol_type = other DNA
tgagctctactggcttctgcgc

SEQ ID NO: 2820 - DNA, 22 bp, synthetic construct
  misc_feature 1..22: note = chemically synthesized
  source 1..22: mol_type = other DNA
gagctctactggcttctgcgcc

SEQ ID NO: 2821 - DNA, 22 bp, synthetic construct
  misc_feature 1..22: note = chemically synthesized
  source 1..22: mol_type = other DNA
agctctactggcttctgcgccg

SEQ ID NO: 2822 - DNA, 22 bp, synthetic construct
  misc_feature 1..22: note = chemically synthesized
  source 1..22: mol_type = other DNA
tactggcttctgcgccgcctct

SEQ ID NO: 2823 - DNA, 22 bp, synthetic construct
  misc_feature 1..22: note = chemically synthesized
  source 1..22: mol_type = other DNA
ctggcttctgcgccgcctctgg

SEQ ID NO: 2824 - DNA, 22 bp, synthetic construct
  misc_feature 1..22: note = chemically synthesized
  source 1..22: mol_type = other DNA
gcttctgcgccgcctctggccc

SEQ ID NO: 2825 - DNA, 22 bp, synthetic construct
  misc_feature 1..22: note = chemically synthesized
  source 1..22: mol_type = other DNA
ctgcgccgcctctggcccactg

SEQ ID NO: 2826 - DNA, 22 bp, synthetic construct
  misc_feature 1..22: note = chemically synthesized
  source 1..22: mol_type = other DNA
tgcgccgcctctggcccactgt

SEQ ID NO: 2827 - DNA, 22 bp, synthetic construct
  misc_feature 1..22: note = chemically synthesized
  source 1..22: mol_type = other DNA
cgccgcctctggcccactgttt

SEQ ID NO: 2828 - DNA, 22 bp, synthetic construct
  misc_feature 1..22: note = chemically synthesized
  source 1..22: mol_type = other DNA
tggcccactgtttccccttccc

SEQ ID NO: 2829 - DNA, 22 bp, synthetic construct
  misc_feature 1..22: note = chemically synthesized
  source 1..22: mol_type = other DNA
gcccactgtttccccttcccag

SEQ ID NO: 2830 - DNA, 22 bp, synthetic construct
  misc_feature 1..22: note = chemically synthesized
  source 1..22: mol_type = other DNA
tttccccttcccaggcaggtcc

SEQ ID NO: 2831 - DNA, 22 bp, synthetic construct
  misc_feature 1..22: note = chemically synthesized
  source 1..22: mol_type = other DNA
ccccttcccaggcaggtcctgc

SEQ ID NO: 2832 - DNA, 22 bp, synthetic construct
  misc_feature 1..22: note = chemically synthesized
  source 1..22: mol_type = other DNA
cccttcccaggcaggtcctgct

SEQ ID NO: 2833 - DNA, 22 bp, synthetic construct
  misc_feature 1..22: note = chemically synthesized
  source 1..22: mol_type = other DNA
cccaggcaggtcctgctttctc

SEQ ID NO: 2834 - DNA, 22 bp, synthetic construct
  misc_feature 1..22: note = chemically synthesized
  source 1..22: mol_type = other DNA
ccaggcaggtcctgctttctct

SEQ ID NO: 2835 - DNA, 22 bp, synthetic construct
  misc_feature 1..22: note = chemically synthesized
  source 1..22: mol_type = other DNA
ctttctctgacctgcattctct

SEQ ID NO: 2836 - DNA, 22 bp, synthetic construct
  misc_feature 1..22: note = chemically synthesized
  source 1..22: mol_type = other DNA
tctctgacctgcattctctccc

SEQ ID NO: 2837 - DNA, 22 bp, synthetic construct
  misc_feature 1..22: note = chemically synthesized
  source 1..22: mol_type = other DNA
ctctgacctgcattctctcccc

SEQ ID NO: 2838 - DNA, 22 bp, synthetic construct
  misc_feature 1..22: note = chemically synthesized
  source 1..22: mol_type = other DNA
tctgacctgcattctctcccct

SEQ ID NO: 2839 - DNA, 22 bp, synthetic construct
  misc_feature 1..22: note = chemically synthesized
  source 1..22: mol_type = other DNA
tgacctgcattctctcccctgg

SEQ ID NO: 2840 - DNA, 22 bp, synthetic construct
  misc_feature 1..22: note = chemically synthesized
  source 1..22: mol_type = other DNA
acctgcattctctcccctgggc

SEQ ID NO: 2841 - DNA, 22 bp, synthetic construct
  misc_feature 1..22: note = chemically synthesized
  source 1..22: mol_type = other DNA
cattctctcccctgggcctgtg

SEQ ID NO: 2842 - DNA, 22 bp, synthetic construct
  misc_feature 1..22: note = chemically synthesized
  source 1..22: mol_type = other DNA
tctcccctgggcctgtgccgct

SEQ ID NO: 2843 - DNA, 22 bp, synthetic construct
  misc_feature 1..22: note = chemically synthesized
  source 1..22: mol_type = other DNA
tcccctgggcctgtgccgcttt

SEQ ID NO: 2844 - DNA, 22 bp, synthetic construct
  misc_feature 1..22: note = chemically synthesized
  source 1..22: mol_type = other DNA
ccctgggcctgtgccgctttct

SEQ ID NO: 2845 - DNA, 22 bp, synthetic construct
  misc_feature 1..22: note = chemically synthesized
  source 1..22: mol_type = other DNA
ggcctgtgccgctttctgtctg

SEQ ID NO: 2846 - DNA, 22 bp, synthetic construct
  misc_feature 1..22: note = chemically synthesized
  source 1..22: mol_type = other DNA
tgccgctttctgtctgcagctt

SEQ ID NO: 2847 - DNA, 22 bp, synthetic construct
  misc_feature 1..22: note = chemically synthesized
  source 1..22: mol_type = other DNA
tctgtctgcagcttgtggcctg

SEQ ID NO: 2848 - DNA, 22 bp, synthetic construct
  misc_feature 1..22: note = chemically synthesized
  source 1..22: mol_type = other DNA
ctgtctgcagcttgtggcctgg

SEQ ID NO: 2849 - DNA, 22 bp, synthetic construct
  misc_feature 1..22: note = chemically synthesized
  source 1..22: mol_type = other DNA
tgtctgcagcttgtggcctggg

SEQ ID NO: 2850 - DNA, 22 bp, synthetic construct
  misc_feature 1..22: note = chemically synthesized
  source 1..22: mol_type = other DNA
tctgcagcttgtggcctgggtc

SEQ ID NO: 2851 - DNA, 22 bp, synthetic construct
  misc_feature 1..22: note = chemically synthesized
  source 1..22: mol_type = other DNA
cagcttgtggcctgggtcacct

SEQ ID NO: 2852 - DNA, 22 bp, synthetic construct
  misc_feature 1..22: note = chemically synthesized
  source 1..22: mol_type = other DNA
gtggcctgggtcacctctacgg

SEQ ID NO: 2853 - DNA, 22 bp, synthetic construct
  misc_feature 1..22: note = chemically synthesized
  source 1..22: mol_type = other DNA
tggcctgggtcacctctacggc

SEQ ID NO: 2854 - DNA, 22 bp, synthetic construct
  misc_feature 1..22: note = chemically synthesized
  source 1..22: mol_type = other DNA
ggtcacctctacggctggccca

SEQ ID NO: 2855 - DNA, 22 bp, synthetic construct
  misc_feature 1..22: note = chemically synthesized
  source 1..22: mol_type = other DNA
tacggctggcccagatccttcc

SEQ ID NO: 2856 - DNA, 22 bp, synthetic construct
  misc_feature 1..22: note = chemically synthesized
  source 1..22: mol_type = other DNA
cggctggcccagatccttccct

SEQ ID NO: 2857 - DNA, 22 bp, synthetic construct
  misc_feature 1..22: note = chemically synthesized
  source 1..22: mol_type = other DNA
gcccagatccttccctgccgcc

SEQ ID NO: 2858 - DNA, 22 bp, synthetic construct
  misc_feature 1..22: note = chemically synthesized
  source 1..22: mol_type = other DNA
ccctgccgcctccttcaggttc

SEQ ID NO: 2859 - DNA, 22 bp, synthetic construct
  misc_feature 1..22: note = chemically synthesized
  source 1..22: mol_type = other DNA
cctgccgcctccttcaggttcc

SEQ ID NO: 2860 - DNA, 22 bp, synthetic construct
  misc_feature 1..22: note = chemically synthesized
  source 1..22: mol_type = other DNA
ccgcctccttcaggttccgtct

SEQ ID NO: 2861 - DNA, 22 bp, synthetic construct
  misc_feature 1..22: note = chemically synthesized
  source 1..22: mol_type = other DNA
cttcaggttccgtcttcctcca

SEQ ID NO: 2862 - DNA, 22 bp, synthetic construct
  misc_feature 1..22: note = chemically synthesized
  source 1..22: mol_type = other DNA
caggttccgtcttcctccactc

SEQ ID NO: 2863 - DNA, 22 bp, synthetic construct
  misc_feature 1..22: note = chemically synthesized
  source 1..22: mol_type = other DNA
aggttccgtcttcctccactcc

SEQ ID NO: 2864 - DNA, 22 bp, synthetic construct
  misc_feature 1..22: note = chemically synthesized
  source 1..22: mol_type = other DNA
cgtcttcctccactccctcttc

SEQ ID NO: 2865 - DNA, 22 bp, synthetic construct
  misc_feature 1..22: note = chemically synthesized
  source 1..22: mol_type = other DNA
cctccactccctcttccccttg

SEQ ID NO: 2866 - DNA, 22 bp, synthetic construct
  misc_feature 1..22: note = chemically synthesized
  source 1..22: mol_type = other DNA
ctccactccctcttccccttgc

SEQ ID NO: 2867 - DNA, 22 bp, synthetic construct
  misc_feature 1..22: note = chemically synthesized
  source 1..22: mol_type = other DNA
cactccctcttccccttgctct

SEQ ID NO: 2868 - DNA, 22 bp, synthetic construct
  misc_feature 1..22: note = chemically synthesized
  source 1..22: mol_type = other DNA
cctcttccccttgctctctgct

SEQ ID NO: 2869 - DNA, 22 bp, synthetic construct
  misc_feature 1..22: note = chemically synthesized
  source 1..22: mol_type = other DNA
ttccccttgctctctgctgtgt

SEQ ID NO: 2870 - DNA, 22 bp, synthetic construct
  misc_feature 1..22: note = chemically synthesized
  source 1..22: mol_type = other DNA
ccccttgctctctgctgtgttg

SEQ ID NO: 2871 - DNA, 22 bp, synthetic construct
  misc_feature 1..22: note = chemically synthesized
  source 1..22: mol_type = other DNA
cccttgctctctgctgtgttgc

SEQ ID NO: 2872 - DNA, 22 bp, synthetic construct
  misc_feature 1..22: note = chemically synthesized
  source 1..22: mol_type = other DNA
gctctctgctgtgttgctgccc

SEQ ID NO: 2873 - DNA, 22 bp, synthetic construct
  misc_feature 1..22: note = chemically synthesized
  source 1..22: mol_type = other DNA
ctctctgctgtgttgctgccca

SEQ ID NO: 2874 - DNA, 22 bp, synthetic construct
  misc_feature 1..22: note = chemically synthesized
  source 1..22: mol_type = other DNA
tctgctgtgttgctgcccaagg

SEQ ID NO: 2875 - DNA, 22 bp, synthetic construct
  misc_feature 1..22: note = chemically synthesized
  source 1..22: mol_type = other DNA
tgctgtgttgctgcccaaggat

SEQ ID NO: 2876 - DNA, 22 bp, synthetic construct
  misc_feature 1..22: note = chemically synthesized
  source 1..22: mol_type = other DNA
ctgtgttgctgcccaaggatgc

SEQ ID NO: 2877 - DNA, 22 bp, synthetic construct
  misc_feature 1..22: note = chemically synthesized
  source 1..22: mol_type = other DNA
tgttgctgcccaaggatgctct

SEQ ID NO: 2878 - DNA, 22 bp, synthetic construct
  misc_feature 1..22: note = chemically synthesized
  source 1..22: mol_type = other DNA
ctgcccaaggatgctctttccg

SEQ ID NO: 2879 - DNA, 22 bp, synthetic construct
  misc_feature 1..22: note = chemically synthesized
  source 1..22: mol_type = other DNA
cccaaggatgctctttccggag

SEQ ID NO: 2880 - DNA, 22 bp, synthetic construct
  misc_feature 1..22: note = chemically synthesized
  source 1..22: mol_type = other DNA
tttccggagcacttccttctcg

SEQ ID NO: 2881 - DNA, 22 bp, synthetic construct
  misc_feature 1..22: note = chemically synthesized
  source 1..22: mol_type = other DNA
tccggagcacttccttctcggc

SEQ ID NO: 2882 - DNA, 22 bp, synthetic construct
  misc_feature 1..22: note = chemically synthesized
  source 1..22: mol_type = other DNA
ccggagcacttccttctcggcg

SEQ ID NO: 2883 - DNA, 22 bp, synthetic construct
  misc_feature 1..22: note = chemically synthesized
  source 1..22: mol_type = other DNA
cggagcacttccttctcggcgc

SEQ ID NO: 2884 - DNA, 22 bp, synthetic construct
  misc_feature 1..22: note = chemically synthesized
  source 1..22: mol_type = other DNA
ccttctcggcgctgcaccacgt

SEQ ID NO: 2885 - DNA, 22 bp, synthetic construct
  misc_feature 1..22: note = chemically synthesized
  source 1..22: mol_type = other DNA
cttctcggcgctgcaccacgtg

SEQ ID NO: 2886 - DNA, 22 bp, synthetic construct
  misc_feature 1..22: note = chemically synthesized
  source 1..22: mol_type = other DNA
ctcggcgctgcaccacgtgatg

SEQ ID NO: 2887 - DNA, 22 bp, synthetic construct
  misc_feature 1..22: note = chemically synthesized
  source 1..22: mol_type = other DNA
tcggcgctgcaccacgtgatgt

SEQ ID NO: 2888 - DNA, 22 bp, synthetic construct
  misc_feature 1..22: note = chemically synthesized
  source 1..22: mol_type = other DNA
ggcgctgcaccacgtgatgtcc

SEQ ID NO: 2889 - DNA, 22 bp, synthetic construct
  misc_feature 1..22: note = chemically synthesized
  source 1..22: mol_type = other DNA
caccacgtgatgtcctctgagc

SEQ ID NO: 2890 - DNA, 22 bp, synthetic construct
  misc_feature 1..22: note = chemically synthesized
  source 1..22: mol_type = other DNA
tgagcggatcctccccgtgtct

SEQ ID NO: 2891 - DNA, 22 bp, synthetic construct
  misc_feature 1..22: note = chemically synthesized
  source 1..22: mol_type = other DNA
agcggatcctccccgtgtctgg

SEQ ID NO: 2892 - DNA, 22 bp, synthetic construct
  misc_feature 1..22: note = chemically synthesized
  source 1..22: mol_type = other DNA
cccgtgtctgggtcctctccgg

SEQ ID NO: 2893 - DNA, 22 bp, synthetic construct
  misc_feature 1..22: note = chemically synthesized
  source 1..22: mol_type = other DNA
ggtcctctccgggcatctctcc

SEQ ID NO: 2894 - DNA, 22 bp, synthetic construct
  misc_feature 1..22: note = chemically synthesized
  source 1..22: mol_type = other DNA
tccgggcatctctcctccctca

SEQ ID NO: 2895 - DNA, 22 bp, synthetic construct
  misc_feature 1..22: note = chemically synthesized
  source 1..22: mol_type = other DNA
cgggcatctctcctccctcacc

SEQ ID NO: 2896 - DNA, 22 bp, synthetic construct
  misc_feature 1..22: note = chemically synthesized
  source 1..22: mol_type = other DNA
tcctccctcacccaaccccatg

SEQ ID NO: 2897 - DNA, 22 bp, synthetic construct
  misc_feature 1..22: note = chemically synthesized
  source 1..22: mol_type = other DNA
ctccctcacccaaccccatgcc

SEQ ID NO: 2898 - DNA, 22 bp, synthetic construct
  misc_feature 1..22: note = chemically synthesized
  source 1..22: mol_type = other DNA
cctcacccaaccccatgccgtc

SEQ ID NO: 2899 - DNA, 22 bp, synthetic construct
  misc_feature 1..22: note = chemically synthesized
  source 1..22: mol_type = other DNA
acccaaccccatgccgtcttca

SEQ ID NO: 2900 - DNA, 22 bp, synthetic construct
  misc_feature 1..22: note = chemically synthesized
  source 1..22: mol_type = other DNA
cactcgctgggttcccttttcc

SEQ ID NO: 2901 - DNA, 22 bp, synthetic construct
  misc_feature 1..22: note = chemically synthesized
  source 1..22: mol_type = other DNA
actcgctgggttcccttttcct

SEQ ID NO: 2902 - DNA, 22 bp, synthetic construct
  misc_feature 1..22: note = chemically synthesized
  source 1..22: mol_type = other DNA
gctgggttcccttttccttctc

SEQ ID NO: 2903 - DNA, 22 bp, synthetic construct
  misc_feature 1..22: note = chemically synthesized
  source 1..22: mol_type = other DNA
ggttcccttttccttctccttc

SEQ ID NO: 2904 - DNA, 22 bp, synthetic construct
  misc_feature 1..22: note = chemically synthesized
  source 1..22: mol_type = other DNA
ccttttccttctccttctgggg

SEQ ID NO: 2905 - DNA, 22 bp, synthetic construct
  misc_feature 1..22: note = chemically synthesized
  source 1..22: mol_type = other DNA
ttccttctccttctggggcctg

SEQ ID NO: 2906 - DNA, 22 bp, synthetic construct
  misc_feature 1..22: note = chemically synthesized
  source 1..22: mol_type = other DNA
tccttctccttctggggcctgt

SEQ ID NO: 2907 - DNA, 22 bp, synthetic construct
  misc_feature 1..22: note = chemically synthesized
  source 1..22: mol_type = other DNA
ccttctccttctggggcctgtg

SEQ ID NO: 2908 - DNA, 22 bp, synthetic construct
  misc_feature 1..22: note = chemically synthesized
  source 1..22: mol_type = other DNA
cttctccttctggggcctgtgc

SEQ ID NO: 2909 - DNA, 22 bp, synthetic construct
  misc_feature 1..22: note = chemically synthesized
  source 1..22: mol_type = other DNA
ctccttctggggcctgtgccat

SEQ ID NO: 2910 - DNA, 22 bp, synthetic construct
  misc_feature 1..22: note = chemically synthesized
  source 1..22: mol_type = other DNA
tccttctggggcctgtgccatc

SEQ ID NO: 2911 - DNA, 22 bp, synthetic construct
  misc_feature 1..22: note = chemically synthesized
  source 1..22: mol_type = other DNA
cttctggggcctgtgccatctc

SEQ ID NO: 2912 - DNA, 22 bp, synthetic construct
  misc_feature 1..22: note = chemically synthesized
  source 1..22: mol_type = other DNA
ctggggcctgtgccatctctcg

SEQ ID NO: 2913 - DNA, 22 bp, synthetic construct
  misc_feature 1..22: note = chemically synthesized
  source 1..22: mol_type = other DNA
tggggcctgtgccatctctcgt

SEQ ID NO: 2914 - DNA, 22 bp, synthetic construct
  misc_feature 1..22: note = chemically synthesized
  source 1..22: mol_type = other DNA
gggcctgtgccatctctcgttt

SEQ ID NO: 2915 - DNA, 22 bp, synthetic construct
  misc_feature 1..22: note = chemically synthesized
  source 1..22: mol_type = other DNA
tgccatctctcgtttcttagga

SEQ ID NO: 2916 - DNA, 22 bp, synthetic construct
  misc_feature 1..22: note = chemically synthesized
  source 1..22: mol_type = other DNA
tcgtttcttaggatggccttct

SEQ ID NO: 2917 - DNA, 22 bp, synthetic construct
  misc_feature 1..22: note = chemically synthesized
  source 1..22: mol_type = other DNA
gtttcttaggatggccttctcc

SEQ ID NO: 2918 - DNA, 22 bp, synthetic construct
  misc_feature 1..22: note = chemically synthesized
  source 1..22: mol_type = other DNA
cttaggatggccttctccgacg

SEQ ID NO: 2919 - DNA, 22 bp, synthetic construct
  misc_feature 1..22: note = chemically synthesized
  source 1..22: mol_type = other DNA
ttaggatggccttctccgacgg

SEQ ID NO: 2920 - DNA, 22 bp, synthetic construct
  misc_feature 1..22: note = chemically synthesized
  source 1..22: mol_type = other DNA
aggatggccttctccgacggat

SEQ ID NO: 2921 - DNA, 22 bp, synthetic construct
  misc_feature 1..22: note = chemically synthesized
  source 1..22: mol_type = other DNA
ggatggccttctccgacggatg

SEQ ID NO: 2922 - DNA, 22 bp, synthetic construct
  misc_feature 1..22: note = chemically synthesized
  source 1..22: mol_type = other DNA
ctccgacggatgtctcccttgc

SEQ ID NO: 2923 - DNA, 22 bp, synthetic construct
  misc_feature 1..22: note = chemically synthesized
  source 1..22: mol_type = other DNA
tccgacggatgtctcccttgcg

SEQ ID NO: 2924 - DNA, 22 bp, synthetic construct
  misc_feature 1..22: note = chemically synthesized
  source 1..22: mol_type = other DNA
cgacggatgtctcccttgcgtc

SEQ ID NO: 2925 - DNA, 22 bp, synthetic construct
  misc_feature 1..22: note = chemically synthesized
  source 1..22: mol_type = other DNA
ccttgcgtcccgcctccccttc

SEQ ID NO: 2926 - DNA, 22 bp, synthetic construct
  misc_feature 1..22: note = chemically synthesized
  source 1..22: mol_type = other DNA
gcgtcccgcctccccttcttgt

SEQ ID NO: 2927 - DNA, 22 bp, synthetic construct
  misc_feature 1..22: note = chemically synthesized
  source 1..22: mol_type = other DNA
cgtcccgcctccccttcttgta

SEQ ID NO: 2928 - DNA, 22 bp, synthetic construct
  misc_feature 1..22: note = chemically synthesized
  source 1..22: mol_type = other DNA
cccttcttgtaggcctgcatca

SEQ ID NO: 2929 - DNA, 22 bp, synthetic construct
  misc_feature 1..22: note = chemically synthesized
  source 1..22: mol_type = other DNA
cttgtaggcctgcatcatcacc

SEQ ID NO: 2930 - DNA, 22 bp, synthetic construct
  misc_feature 1..22: note = chemically synthesized
  source 1..22: mol_type = other DNA
ttgtaggcctgcatcatcaccg

SEQ ID NO: 2931 - DNA, 22 bp, synthetic construct
  misc_feature 1..22: note = chemically synthesized
  source 1..22: mol_type = other DNA
gtaggcctgcatcatcaccgtt

SEQ ID NO: 2932 - DNA, 22 bp, synthetic construct
  misc_feature 1..22: note = chemically synthesized
  source 1..22: mol_type = other DNA
taggcctgcatcatcaccgttt

SEQ ID NO: 2933 - DNA, 22 bp, synthetic construct
  misc_feature 1..22: note = chemically synthesized
  source 1..22: mol_type = other DNA
catcatcaccgtttttctggac

SEQ ID NO: 2934 - DNA, 22 bp, synthetic construct
  misc_feature 1..22: note = chemically synthesized
  source 1..22: mol_type = other DNA
ttctggacaaccccaaagtacc

SEQ ID NO: 2935 - DNA, 22 bp, synthetic construct
  misc_feature 1..22: note = chemically synthesized
  source 1..22: mol_type = other DNA
tctggacaaccccaaagtaccc

SEQ ID NO: 2936 - DNA, 22 bp, synthetic construct
  misc_feature 1..22: note = chemically synthesized
  source 1..22: mol_type = other DNA
ctggacaaccccaaagtacccc

SEQ ID NO: 2937 - DNA, 22 bp, synthetic construct
  misc_feature 1..22: note = chemically synthesized
  source 1..22: mol_type = other DNA
tggacaaccccaaagtaccccg

SEQ ID NO: 2938 - DNA, 22 bp, synthetic construct
  misc_feature 1..22: note = chemically synthesized
  source 1..22: mol_type = other DNA
gacaaccccaaagtaccccgtc

SEQ ID NO: 2939 - DNA, 22 bp, synthetic construct
  misc_feature 1..22: note = chemically synthesized
  source 1..22: mol_type = other DNA
cctggctttagccacctctcca

SEQ ID NO: 2940 - DNA, 22 bp, synthetic construct
  misc_feature 1..22: note = chemically synthesized
  source 1..22: mol_type = other DNA
gctttagccacctctccatcct

SEQ ID NO: 2941 - DNA, 22 bp, synthetic construct
  misc_feature 1..22: note = chemically synthesized
  source 1..22: mol_type = other DNA
tagccacctctccatcctcttg

SEQ ID NO: 2942 - DNA, 22 bp, synthetic construct
  misc_feature 1..22: note = chemically synthesized
  source 1..22: mol_type = other DNA
agccacctctccatcctcttgc

SEQ ID NO: 2943 - DNA, 22 bp, synthetic construct
  misc_feature 1..22: note = chemically synthesized
  source 1..22: mol_type = other DNA
gccacctctccatcctcttgct

SEQ ID NO: 2944 - DNA, 22 bp, synthetic construct
  misc_feature 1..22: note = chemically synthesized
  source 1..22: mol_type = other DNA
tccatcctcttgctttctttgc

SEQ ID NO: 2945 - DNA, 22 bp, synthetic construct
  misc_feature 1..22: note = chemically synthesized
  source 1..22: mol_type = other DNA
catcctcttgctttctttgcct

SEQ ID NO: 2946 - DNA, 22 bp, synthetic construct
  misc_feature 1..22: note = chemically synthesized
  source 1..22: mol_type = other DNA
ttgctttctttgcctggacacc

SEQ ID NO: 2947 - DNA, 22 bp, synthetic construct
  misc_feature 1..22: note = chemically synthesized
  source 1..22: mol_type = other DNA
gctttctttgcctggacacccc

SEQ ID NO: 2948 - DNA, 22 bp, synthetic construct
  misc_feature 1..22: note = chemically synthesized
  source 1..22: mol_type = other DNA
ctttctttgcctggacaccccg

SEQ ID NO: 2949 - DNA, 22 bp, synthetic construct
  misc_feature 1..22: note = chemically synthesized
  source 1..22: mol_type = other DNA
tctttgcctggacaccccgttc

SEQ ID NO: 2950 - DNA, 22 bp, synthetic construct
  misc_feature 1..22: note = chemically synthesized
  source 1..22: mol_type = other DNA
ctttgcctggacaccccgttct

SEQ ID NO: 2951 - DNA, 22 bp, synthetic construct
  misc_feature 1..22: note = chemically synthesized
  source 1..22: mol_type = other DNA
tttgcctggacaccccgttctc

SEQ ID NO: 2952 - DNA, 22 bp, synthetic construct
  misc_feature 1..22: note = chemically synthesized
  source 1..22: mol_type = other DNA
tgcctggacaccccgttctcct

SEQ ID NO: 2953 - DNA, 22 bp, synthetic construct
  misc_feature 1..22: note = chemically synthesized
  source 1..22: mol_type = other DNA
gcctggacaccccgttctcctg

SEQ ID NO: 2954 - DNA, 22 bp, synthetic construct
  misc_feature 1..22: note = chemically synthesized
  source 1..22: mol_type = other DNA
cctggacaccccgttctcctgt

SEQ ID NO: 2955 - DNA, 22 bp, synthetic construct
  misc_feature 1..22: note = chemically synthesized
  source 1..22: mol_type = other DNA
gacaccccgttctcctgtggat

SEQ ID NO: 2956 - DNA, 22 bp, synthetic construct
  misc_feature 1..22: note = chemically synthesized
  source 1..22: mol_type = other DNA
tcctgtggattcgggtcacctc

SEQ ID NO: 2957 - DNA, 22 bp, synthetic construct
  misc_feature 1..22: note = chemically synthesized
  source 1..22: mol_type = other DNA
ctgtggattcgggtcacctctc

SEQ ID NO: 2958 - DNA, 22 bp, synthetic construct
  misc_feature 1..22: note = chemically synthesized
  source 1..22: mol_type = other DNA
tggattcgggtcacctctcact

SEQ ID NO: 2959 - DNA, 22 bp, synthetic construct
  misc_feature 1..22: note = chemically synthesized
  source 1..22: mol_type = other DNA
gggtcacctctcactcctttca

SEQ ID NO: 2960 - DNA, 22 bp, synthetic construct
  misc_feature 1..22: note = chemically synthesized
  source 1..22: mol_type = other DNA
tcactcctttcatttgggcagc

SEQ ID NO: 2961 - DNA, 22 bp, synthetic construct
  misc_feature 1..22: note = chemically synthesized
  source 1..22: mol_type = other DNA
actcctttcatttgggcagctc

SEQ ID NO: 2962 - DNA, 22 bp, synthetic construct
  misc_feature 1..22: note = chemically synthesized
  source 1..22: mol_type = other DNA
ctttcatttgggcagctcccct

SEQ ID NO: 2963 - DNA, 22 bp, synthetic construct
  misc_feature 1..22: note = chemically synthesized
  source 1..22: mol_type = other DNA
tcatttgggcagctcccctacc

SEQ ID NO: 2964 - DNA, 22 bp, synthetic construct
  misc_feature 1..22: note = chemically synthesized
  source 1..22: mol_type = other DNA
catttgggcagctcccctaccc

SEQ ID NO: 2965 - DNA, 22 bp, synthetic construct
  misc_feature 1..22: note = chemically synthesized
  source 1..22: mol_type = other DNA
atttgggcagctcccctacccc

SEQ ID NO: 2966 - DNA, 22 bp, synthetic construct
  misc_feature 1..22: note = chemically synthesized
  source 1..22: mol_type = other DNA
gggcagctcccctacccccctt

SEQ ID NO: 2967 - DNA, 22 bp, synthetic construct
  misc_feature 1..22: note = chemically synthesized
  source 1..22: mol_type = other DNA
ggcagctcccctacccccctta

SEQ ID NO: 2968 - DNA, 22 bp, synthetic construct
  misc_feature 1..22: note = chemically synthesized
  source 1..22: mol_type = other DNA
ccctaccccccttacctctcta

SEQ ID NO: 2969 - DNA, 22 bp, synthetic construct
  misc_feature 1..22: note = chemically synthesized
  source 1..22: mol_type = other DNA
ccccccttacctctctagtctg

SEQ ID NO: 2970 - DNA, 22 bp, synthetic construct
  misc_feature 1..22: note = chemically synthesized
  source 1..22: mol_type = other DNA
acctctctagtctgtgctagct

SEQ ID NO: 2971 - DNA, 22 bp, synthetic construct
  misc_feature 1..22: note = chemically synthesized
  source 1..22: mol_type = other DNA
cctctctagtctgtgctagctc

SEQ ID NO: 2972 - DNA, 22 bp, synthetic construct
  misc_feature 1..22: note = chemically synthesized
  source 1..22: mol_type = other DNA
tctagtctgtgctagctcttcc

SEQ ID NO: 2973 - DNA, 22 bp, synthetic construct
  misc_feature 1..22: note = chemically synthesized
  source 1..22: mol_type = other DNA
tagtctgtgctagctcttccag

SEQ ID NO: 2974 - DNA, 22 bp, synthetic construct
  misc_feature 1..22: note = chemically synthesized
  source 1..22: mol_type = other DNA
gtctgtgctagctcttccagcc

SEQ ID NO: 2975 - DNA, 22 bp, synthetic construct
  misc_feature 1..22: note = chemically synthesized
  source 1..22: mol_type = other DNA
tgctagctcttccagccccctg

SEQ ID NO: 2976 - DNA, 22 bp, synthetic construct
  misc_feature 1..22: note = chemically synthesized
  source 1..22: mol_type = other DNA
gctcttccagccccctgtcatg

SEQ ID NO: 2977 - DNA, 22 bp, synthetic construct
  misc_feature 1..22: note = chemically synthesized
  source 1..22: mol_type = other DNA
ttccagccccctgtcatggcat

SEQ ID NO: 2978 - DNA, 22 bp, synthetic construct
  misc_feature 1..22: note = chemically synthesized
  source 1..22: mol_type = other DNA
ccagccccctgtcatggcatct

SEQ ID NO: 2979 - DNA, 22 bp, synthetic construct
  misc_feature 1..22: note = chemically synthesized
  source 1..22: mol_type = other DNA
cagccccctgtcatggcatctt

SEQ ID NO: 2980 - DNA, 22 bp, synthetic construct
  misc_feature 1..22: note = chemically synthesized
  source 1..22: mol_type = other DNA
tcatggcatcttccaggggtcc

SEQ ID NO: 2981 - DNA, 22 bp, synthetic construct
  misc_feature 1..22: note = chemically synthesized
  source 1..22: mol_type = other DNA
ccaggggtccgagagctcagct

SEQ ID NO: 2982 - DNA, 22 bp, synthetic construct
  misc_feature 1..22: note = chemically synthesized
  source 1..22: mol_type = other DNA
caggggtccgagagctcagcta

SEQ ID NO: 2983 - DNA, 22 bp, synthetic construct
  misc_feature 1..22: note = chemically synthesized
  source 1..22: mol_type = other DNA
agctagtcttcttcctccaacc

SEQ ID NO: 2984 - DNA, 22 bp, synthetic construct
  misc_feature 1..22: note = chemically synthesized
  source 1..22: mol_type = other DNA
gtcttcttcctccaacccgggc

SEQ ID NO: 2985 - DNA, 22 bp, synthetic construct
  misc_feature 1..22: note = chemically synthesized
  source 1..22: mol_type = other DNA
cttcctccaacccgggccccta

SEQ ID NO: 2986 - DNA, 22 bp, synthetic construct
  misc_feature 1..22: note = chemically synthesized
  source 1..22: mol_type = other DNA
ttcctccaacccgggcccctat

SEQ ID NO: 2987 - DNA, 22 bp, synthetic construct
  misc_feature 1..22: note = chemically synthesized
  source 1..22: mol_type = other DNA
cctccaacccgggcccctatgt

SEQ ID NO: 2988 - DNA, 22 bp, synthetic construct
  misc_feature 1..22: note = chemically synthesized
  source 1..22: mol_type = other DNA
ctccaacccgggcccctatgtc

SEQ ID NO: 2989 - DNA, 22 bp, synthetic construct
  misc_feature 1..22: note = chemically synthesized
  source 1..22: mol_type = other DNA
caacccgggcccctatgtccac

SEQ ID NO: 2990 - DNA, 22 bp, synthetic construct
  misc_feature 1..22: note = chemically synthesized
  source 1..22: mol_type = other DNA
tgtccacttcaggacagcatgt

SEQ ID NO: 2991 - DNA, 22 bp, synthetic construct
  misc_feature 1..22: note = chemically synthesized
  source 1..22: mol_type = other DNA
caggacagcatgtttgctgcct

SEQ ID NO: 2992 - DNA, 22 bp, synthetic construct
  misc_feature 1..22: note = chemically synthesized
  source 1..22: mol_type = other DNA
aggacagcatgtttgctgcctc

SEQ ID NO: 2993 - DNA, 22 bp, synthetic construct
  misc_feature 1..22: note = chemically synthesized
  source 1..22: mol_type = other DNA
gctgcctccagggatcctgtgt

SEQ ID NO: 2994 - DNA, 22 bp, synthetic construct
  misc_feature 1..22: note = chemically synthesized
  source 1..22: mol_type = other DNA
ctgcctccagggatcctgtgtc

SEQ ID NO: 2995 - DNA, 22 bp, synthetic construct
  misc_feature 1..22: note = chemically synthesized
  source 1..22: mol_type = other DNA
cctccagggatcctgtgtcccc

SEQ ID NO: 2996 - DNA, 22 bp, synthetic construct
  misc_feature 1..22: note = chemically synthesized
  source 1..22: mol_type = other DNA
cagggatcctgtgtccccgagc

SEQ ID NO: 2997 - DNA, 22 bp, synthetic construct
  misc_feature 1..22: note = chemically synthesized
  source 1..22: mol_type = other DNA
tgtccccgagctgggaccacct

SEQ ID NO: 2998 - DNA, 22 bp, synthetic construct
  misc_feature 1..22: note = chemically synthesized
  source 1..22: mol_type = other DNA
ggaccaccttatattcccaggg

SEQ ID NO: 2999 - DNA, 22 bp, synthetic construct
  misc_feature 1..22: note = chemically synthesized
  source 1..22: mol_type = other DNA
atattcccagggccggttaatg

SEQ ID NO: 3000 - DNA, 22 bp, synthetic construct
  misc_feature 1..22: note = chemically synthesized
  source 1..22: mol_type = other DNA
tattcccagggccggttaatgt

SEQ ID NO: 3001 - DNA, 22 bp, synthetic construct
  misc_feature 1..22: note = chemically synthesized
  source 1..22: mol_type = other DNA
ccagggccggttaatgtggctc

SEQ ID NO: 3002 - DNA, 22 bp, synthetic construct
  misc_feature 1..22: note = chemically synthesized
  source 1..22: mol_type = other DNA
atgtggctctggttctgggtac

SEQ ID NO: 3003 - DNA, 22 bp, synthetic construct
  misc_feature 1..22: note = chemically synthesized
  source 1..22: mol_type = other DNA
tggttctgggtacttttatctg

SEQ ID NO: 3004 - DNA, 22 bp, synthetic construct
  misc_feature 1..22: note = chemically synthesized
  source 1..22: mol_type = other DNA
gttctgggtacttttatctgtc

SEQ ID NO: 3005 - DNA, 22 bp, synthetic construct
  misc_feature 1..22: note = chemically synthesized
  source 1..22: mol_type = other DNA
tgggtacttttatctgtcccct

SEQ ID NO: 3006 - DNA, 22 bp, synthetic construct
  misc_feature 1..22: note = chemically synthesized
  source 1..22: mol_type = other DNA
ggtacttttatctgtcccctcc

SEQ ID NO: 3007 - DNA, 22 bp, synthetic construct
  misc_feature 1..22: note = chemically synthesized
  source 1..22: mol_type = other DNA
ttatctgtcccctccaccccac

SEQ ID NO: 3008 - DNA, 22 bp, synthetic construct
  misc_feature 1..22: note = chemically synthesized
  source 1..22: mol_type = other DNA
tatctgtcccctccaccccaca

SEQ ID NO: 3009 - DNA, 22 bp, synthetic construct
  misc_feature 1..22: note = chemically synthesized
  source 1..22: mol_type = other DNA
atctgtcccctccaccccacag

SEQ ID NO: 3010 - DNA, 22 bp, synthetic construct
  misc_feature 1..22: note = chemically synthesized
  source 1..22: mol_type = other DNA
tctgtcccctccaccccacagt

SEQ ID NO: 3011 - DNA, 22 bp, synthetic construct
  misc_feature 1..22: note = chemically synthesized
  source 1..22: mol_type = other DNA
tcccctccaccccacagtgggg

SEQ ID NO: 3012 - DNA, 22 bp, synthetic construct
  misc_feature 1..22: note = chemically synthesized
  source 1..22: mol_type = other DNA
caccccacagtggggccactag

SEQ ID NO: 3013 - DNA, 22 bp, synthetic construct
  misc_feature 1..22: note = chemically synthesized
  source 1..22: mol_type = other DNA
gggacaggattggtgacagaaa

SEQ ID NO: 3014 - DNA, 22 bp, synthetic construct
  misc_feature 1..22: note = chemically synthesized
  source 1..22: mol_type = other DNA
gtgacagaaaagccccatcctt

SEQ ID NO: 3015 - DNA, 22 bp, synthetic construct
  misc_feature 1..22: note = chemically synthesized
  source 1..22: mol_type = other DNA
aggcctcctccttcctagtctc

SEQ ID NO: 3016 - DNA, 22 bp, synthetic construct
  misc_feature 1..22: note = chemically synthesized
  source 1..22: mol_type = other DNA
ggcctcctccttcctagtctcc

SEQ ID NO: 3017 - DNA, 22 bp, synthetic construct
  misc_feature 1..22: note = chemically synthesized
  source 1..22: mol_type = other DNA
ctccttcctagtctcctgatat

SEQ ID NO: 3018 - DNA, 22 bp, synthetic construct
  misc_feature 1..22: note = chemically synthesized
  source 1..22: mol_type = other DNA
cttcctagtctcctgatattgg

SEQ ID NO: 3019 - DNA, 22 bp, synthetic construct
  misc_feature 1..22: note = chemically synthesized
  source 1..22: mol_type = other DNA
cctagtctcctgatattgggtc

SEQ ID NO: 3020 - DNA, 22 bp, synthetic construct
  misc_feature 1..22: note = chemically synthesized
  source 1..22: mol_type = other DNA
ctagtctcctgatattgggtct

SEQ ID NO: 3021 - DNA, 22 bp, synthetic construct
  misc_feature 1..22: note = chemically synthesized
  source 1..22: mol_type = other DNA
gtctcctgatattgggtctaac

SEQ ID NO: 3022 - DNA, 22 bp, synthetic construct
  misc_feature 1..22: note = chemically synthesized
  source 1..22: mol_type = other DNA
ctgatattgggtctaaccccca

SEQ ID NO: 3023 - DNA, 22 bp, synthetic construct
  misc_feature 1..22: note = chemically synthesized
  source 1..22: mol_type = other DNA
atattgggtctaacccccacct

SEQ ID NO: 3024 - DNA, 22 bp, synthetic construct
  misc_feature 1..22: note = chemically synthesized
  source 1..22: mol_type = other DNA
ggtctaacccccacctcctgtt

SEQ ID NO: 3025 - DNA, 22 bp, synthetic construct
  misc_feature 1..22: note = chemically synthesized
  source 1..22: mol_type = other DNA
acccccacctcctgttaggcag

SEQ ID NO: 3026 - DNA, 22 bp, synthetic construct
  misc_feature 1..22: note = chemically synthesized
  source 1..22: mol_type = other DNA
ctgttaggcagattccttatct

SEQ ID NO: 3027 - DNA, 22 bp, synthetic construct
  misc_feature 1..22: note = chemically synthesized
  source 1..22: mol_type = other DNA
ttaggcagattccttatctggt

SEQ ID NO: 3028 - DNA, 22 bp, synthetic construct
  misc_feature 1..22: note = chemically synthesized
  source 1..22: mol_type = other DNA
ggcagattccttatctggtgac

SEQ ID NO: 3029 - DNA, 22 bp, synthetic construct
  misc_feature 1..22: note = chemically synthesized
  source 1..22: mol_type = other DNA
cttatctggtgacacaccccca

SEQ ID NO: 3030 - DNA, 22 bp, synthetic construct
  misc_feature 1..22: note = chemically synthesized
  source 1..22: mol_type = other DNA
atctggtgacacacccccattt

SEQ ID NO: 3031 - DNA, 22 bp, synthetic construct
  misc_feature 1..22: note = chemically synthesized
  source 1..22: mol_type = other DNA
tctggtgacacacccccatttc

SEQ ID NO: 3032 - DNA, 22 bp, synthetic construct
  misc_feature 1..22: note = chemically synthesized
  source 1..22: mol_type = other DNA
gtgacacacccccatttcctgg

SEQ ID NO: 3033 - DNA, 22 bp, synthetic construct
  misc_feature 1..22: note = chemically synthesized
  source 1..22: mol_type = other DNA
cctggagccatctctctccttg

SEQ ID NO: 3034 - DNA, 22 bp, synthetic construct
  misc_feature 1..22: note = chemically synthesized
  source 1..22: mol_type = other DNA
ctggagccatctctctccttgc

SEQ ID NO: 3035 - DNA, 22 bp, synthetic construct
  misc_feature 1..22: note = chemically synthesized
  source 1..22: mol_type = other DNA
gagccatctctctccttgccag

SEQ ID NO: 3036 - DNA, 22 bp, synthetic construct
  misc_feature 1..22: note = chemically synthesized
  source 1..22: mol_type = other DNA
tctccttgccagaacctctaag

SEQ ID NO: 3037 - DNA, 22 bp, synthetic construct
  misc_feature 1..22: note = chemically synthesized
  source 1..22: mol_type = other DNA
tccttgccagaacctctaaggt

SEQ ID NO: 3038 - DNA, 22 bp, synthetic construct
  misc_feature 1..22: note = chemically synthesized
  source 1..22: mol_type = other DNA
cttgccagaacctctaaggttt

SEQ ID NO: 3039 - DNA, 22 bp, synthetic construct
  misc_feature 1..22: note = chemically synthesized
  source 1..22: mol_type = other DNA
gccagaacctctaaggtttgct

SEQ ID NO: 3040 - DNA, 22 bp, synthetic construct
  misc_feature 1..22: note = chemically synthesized
  source 1..22: mol_type = other DNA
ccagaacctctaaggtttgctt

SEQ ID NO: 3041 - DNA, 22 bp, synthetic construct
  misc_feature 1..22: note = chemically synthesized
  source 1..22: mol_type = other DNA
taaggtttgcttacgatggagc

SEQ ID NO: 3042 - DNA, 22 bp, synthetic construct
  misc_feature 1..22: note = chemically synthesized
  source 1..22: mol_type = other DNA
aggtttgcttacgatggagcca

SEQ ID NO: 3043 - DNA, 22 bp, synthetic construct
  misc_feature 1..22: note = chemically synthesized
  source 1..22: mol_type = other DNA
gcttacgatggagccagagagg

SEQ ID NO: 3044 - DNA, 22 bp, synthetic construct
  misc_feature 1..22: note = chemically synthesized
  source 1..22: mol_type = other DNA
cttacgatggagccagagagga

SEQ ID NO: 3045 - DNA, 22 bp, synthetic construct
  misc_feature 1..22: note = chemically synthesized
  source 1..22: mol_type = other DNA
acgatggagccagagaggatcc

SEQ ID NO: 3046 - DNA, 22 bp, synthetic construct
  misc_feature 1..22: note = chemically synthesized
  source 1..22: mol_type = other DNA
cgatggagccagagaggatcct

SEQ ID NO: 3047 - DNA, 22 bp, synthetic construct
  misc_feature 1..22: note = chemically synthesized
  source 1..22: mol_type = other DNA
ggagggagagcttggcaggggg

SEQ ID NO: 3048 - DNA, 22 bp, synthetic construct
  misc_feature 1..22: note = chemically synthesized
  source 1..22: mol_type = other DNA
ggcagggggtgggagggaaggg

SEQ ID NO: 3049 - DNA, 22 bp, synthetic construct
  misc_feature 1..22: note = chemically synthesized
  source 1..22: mol_type = other DNA
gcagggggtgggagggaagggg

SEQ ID NO: 3050 - DNA, 22 bp, synthetic construct
  misc_feature 1..22: note = chemically synthesized
  source 1..22: mol_type = other DNA
cccggttctcagtggccaccct

SEQ ID NO: 3051 - DNA, 22 bp, synthetic construct
  misc_feature 1..22: note = chemically synthesized
  source 1..22: mol_type = other DNA
tcagtggccaccctgcgctacc

SEQ ID NO: 3052 - DNA, 22 bp, synthetic construct
  misc_feature 1..22: note = chemically synthesized
  source 1..22: mol_type = other DNA
agtggccaccctgcgctaccct

SEQ ID NO: 3053 - DNA, 22 bp, synthetic construct
  misc_feature 1..22: note = chemically synthesized
  source 1..22: mol_type = other DNA
cgctaccctctcccagaacctg

SEQ ID NO: 3054 - DNA, 22 bp, synthetic construct
  misc_feature 1..22: note = chemically synthesized
  source 1..22: mol_type = other DNA
ccctctcccagaacctgagctg

SEQ ID NO: 3055 - DNA, 22 bp, synthetic construct
  misc_feature 1..22: note = chemically synthesized
  source 1..22: mol_type = other DNA
tcccagaacctgagctgctctg

SEQ ID NO: 3056 - DNA, 22 bp, synthetic construct
  misc_feature 1..22: note = chemically synthesized
  source 1..22: mol_type = other DNA
ccagaacctgagctgctctgac

SEQ ID NO: 3057 - DNA, 22 bp, synthetic construct
  misc_feature 1..22: note = chemically synthesized
  source 1..22: mol_type = other DNA
agctgctctgacgcggccgtct

SEQ ID NO: 3058 - DNA, 22 bp, synthetic construct
  misc_feature 1..22: note = chemically synthesized
  source 1..22: mol_type = other DNA
ctctgacgcggccgtctggtgc

SEQ ID NO: 3059 - DNA, 22 bp, synthetic construct
  misc_feature 1..22: note = chemically synthesized
  source 1..22: mol_type = other DNA
tgacgcggccgtctggtgcgtt

SEQ ID NO: 3060 - DNA, 22 bp, synthetic construct
  misc_feature 1..22: note = chemically synthesized
  source 1..22: mol_type = other DNA
acgcggccgtctggtgcgtttc

SEQ ID NO: 3061 - DNA, 22 bp, synthetic construct
  misc_feature 1..22: note = chemically synthesized
  source 1..22: mol_type = other DNA
gtgcgtttcactgatcctggtg

SEQ ID NO: 3062 - DNA, 22 bp, synthetic construct
  misc_feature 1..22: note = chemically synthesized
  source 1..22: mol_type = other DNA
cactgatcctggtgctgcagct

SEQ ID NO: 3063 - DNA, 22 bp, synthetic construct
  misc_feature 1..22: note = chemically synthesized
  source 1..22: mol_type = other DNA
actgatcctggtgctgcagctt

SEQ ID NO: 3064 - DNA, 22 bp, synthetic construct
  misc_feature 1..22: note = chemically synthesized
  source 1..22: mol_type = other DNA
atcctggtgctgcagcttcctt

SEQ ID NO: 3065 - DNA, 22 bp, synthetic construct
  misc_feature 1..22: note = chemically synthesized
  source 1..22: mol_type = other DNA
gtgctgcagcttccttacactt

SEQ ID NO: 3066 - DNA, 22 bp, synthetic construct
  misc_feature 1..22: note = chemically synthesized
  source 1..22: mol_type = other DNA
cagcttccttacacttcccaag

SEQ ID NO: 3067 - DNA, 22 bp, synthetic construct
  misc_feature 1..22: note = chemically synthesized
  source 1..22: mol_type = other DNA
ccttacacttcccaagaggaga

SEQ ID NO: 3068 - DNA, 22 bp, synthetic construct
  misc_feature 1..22: note = chemically synthesized
  source 1..22: mol_type = other DNA
cttacacttcccaagaggagaa

SEQ ID NO: 3069 - DNA, 22 bp, synthetic construct
  misc_feature 1..22: note = chemically synthesized
  source 1..22: mol_type = other DNA
acacttcccaagaggagaagca

SEQ ID NO: 3070 - DNA, 22 bp, synthetic construct
  misc_feature 1..22: note = chemically synthesized
  source 1..22: mol_type = other DNA
cacttcccaagaggagaagcag

SEQ ID NO: 3071 - DNA, 22 bp, synthetic construct
  misc_feature 1..22: note = chemically synthesized
  source 1..22: mol_type = other DNA
cccaagaggagaagcagtttgg

SEQ ID NO: 3072 - DNA, 22 bp, synthetic construct
  misc_feature 1..22: note = chemically synthesized
  source 1..22: mol_type = other DNA
ccaagaggagaagcagtttgga

SEQ ID NO: 3073 - DNA, 22 bp, synthetic construct
  misc_feature 1..22: note = chemically synthesized
  source 1..22: mol_type = other DNA
ggaaaaacaaaatcagaataag

SEQ ID NO: 3074 - DNA, 22 bp, synthetic construct
  misc_feature 1..22: note = chemically synthesized
  source 1..22: mol_type = other DNA
gaaaaacaaaatcagaataagt

SEQ ID NO: 3075 - DNA, 22 bp, synthetic construct
  misc_feature 1..22: note = chemically synthesized
  source 1..22: mol_type = other DNA
gtcctgagttctaactttggct

SEQ ID NO: 3076 - DNA, 22 bp, synthetic construct
  misc_feature 1..22: note = chemically synthesized
  source 1..22: mol_type = other DNA
agttctaactttggctcttcac

SEQ ID NO: 3077 - DNA, 22 bp, synthetic construct
  misc_feature 1..22: note = chemically synthesized
  source 1..22: mol_type = other DNA
taactttggctcttcacctttc

SEQ ID NO: 3078 - DNA, 22 bp, synthetic construct
  misc_feature 1..22: note = chemically synthesized
  source 1..22: mol_type = other DNA
actttggctcttcacctttcta

SEQ ID NO: 3079 - DNA, 22 bp, synthetic construct
  misc_feature 1..22: note = chemically synthesized
  source 1..22: mol_type = other DNA
tggctcttcacctttctagtcc

SEQ ID NO: 3080 - DNA, 22 bp, synthetic construct
  misc_feature 1..22: note = chemically synthesized
  source 1..22: mol_type = other DNA
ggctcttcacctttctagtccc

SEQ ID NO: 3081 - DNA, 22 bp, synthetic construct
  misc_feature 1..22: note = chemically synthesized
  source 1..22: mol_type = other DNA
gctcttcacctttctagtcccc

SEQ ID NO: 3082 - DNA, 22 bp, synthetic construct
  misc_feature 1..22: note = chemically synthesized
  source 1..22: mol_type = other DNA
ttcacctttctagtccccaatt

SEQ ID NO: 3083 - DNA, 22 bp, synthetic construct
  misc_feature 1..22: note = chemically synthesized
  source 1..22: mol_type = other DNA
cacctttctagtccccaattta

SEQ ID NO: 3084 - DNA, 22 bp, synthetic construct
  misc_feature 1..22: note = chemically synthesized
  source 1..22: mol_type = other DNA
acctttctagtccccaatttat

SEQ ID NO: 3085 - DNA, 22 bp, synthetic construct
  misc_feature 1..22: note = chemically synthesized
  source 1..22: mol_type = other DNA
tctagtccccaatttatattgt

SEQ ID NO: 3086 - DNA, 22 bp, synthetic construct
  misc_feature 1..22: note = chemically synthesized
  source 1..22: mol_type = other DNA
ctagtccccaatttatattgtt

SEQ ID NO: 3087 - DNA, 22 bp, synthetic construct
  misc_feature 1..22: note = chemically synthesized
  source 1..22: mol_type = other DNA
tagtccccaatttatattgttc

SEQ ID NO: 3088 - DNA, 22 bp, synthetic construct
  misc_feature 1..22: note = chemically synthesized
  source 1..22: mol_type = other DNA
gtccccaatttatattgttcct

SEQ ID NO: 3089 - DNA, 22 bp, synthetic construct
  misc_feature 1..22: note = chemically synthesized
  source 1..22: mol_type = other DNA
atattgttcctccgtgcgtcag

SEQ ID NO: 3090 - DNA, 22 bp, synthetic construct
  misc_feature 1..22: note = chemically synthesized
  source 1..22: mol_type = other DNA
tattgttcctccgtgcgtcagt

SEQ ID NO: 3091 - DNA, 22 bp, synthetic construct
  misc_feature 1..22: note = chemically synthesized
  source 1..22: mol_type = other DNA
ttcctccgtgcgtcagttttac

SEQ ID NO: 3092 - DNA, 22 bp, synthetic construct
  misc_feature 1..22: note = chemically synthesized
  source 1..22: mol_type = other DNA
ctccgtgcgtcagttttacctg

SEQ ID NO: 3093 - DNA, 22 bp, synthetic construct
  misc_feature 1..22: note = chemically synthesized
  source 1..22: mol_type = other DNA
cgtgcgtcagttttacctgtga

SEQ ID NO: 3094 - DNA, 22 bp, synthetic construct
  misc_feature 1..22: note = chemically synthesized
  source 1..22: mol_type = other DNA
tacctgtgagataaggccagta

SEQ ID NO: 3095 - DNA, 22 bp, synthetic construct
  misc_feature 1..22: note = chemically synthesized
  source 1..22: mol_type = other DNA
acctgtgagataaggccagtag

SEQ ID NO: 3096 - DNA, 22 bp, synthetic construct
  misc_feature 1..22: note = chemically synthesized
  source 1..22: mol_type = other DNA
cctgtgagataaggccagtagc

SEQ ID NO: 3097 - DNA, 22 bp, synthetic construct
  misc_feature 1..22: note = chemically synthesized
  source 1..22: mol_type = other DNA
tgagataaggccagtagccagc

SEQ ID NO: 3098 - DNA, 22 bp, synthetic construct
  misc_feature 1..22: note = chemically synthesized
  source 1..22: mol_type = other DNA
gcagggctgtggtgaggagggg

SEQ ID NO: 3099 - DNA, 22 bp, synthetic construct
  misc_feature 1..22: note = chemically synthesized
  source 1..22: mol_type = other DNA
tggtgaggaggggggtgtccgt

SEQ ID NO: 3100 - DNA, 22 bp, synthetic construct
  misc_feature 1..22: note = chemically synthesized
  source 1..22: mol_type = other DNA
cctttgtgagaatggtgcgtcc

SEQ ID NO: 3101 - DNA, 22 bp, synthetic construct
  misc_feature 1..22: note = chemically synthesized
  source 1..22: mol_type = other DNA
tgtgagaatggtgcgtcctagg

SEQ ID NO: 3102 - DNA, 22 bp, synthetic construct
  misc_feature 1..22: note = chemically synthesized
  source 1..22: mol_type = other DNA
gtgagaatggtgcgtcctaggt

SEQ ID NO: 3103 - DNA, 22 bp, synthetic construct
  misc_feature 1..22: note = chemically synthesized
  source 1..22: mol_type = other DNA
tgagaatggtgcgtcctaggtg

SEQ ID NO: 3104 - DNA, 22 bp, synthetic construct
  misc_feature 1..22: note = chemically synthesized
  source 1..22: mol_type = other DNA
ggtgttcaccaggtcgtggccg

SEQ ID NO: 3105 - DNA, 22 bp, synthetic construct
  misc_feature 1..22: note = chemically synthesized
  source 1..22: mol_type = other DNA
accaggtcgtggccgcctctac

SEQ ID NO: 3106 - DNA, 22 bp, synthetic construct
  misc_feature 1..22: note = chemically synthesized
  source 1..22: mol_type = other DNA
tactccctttctctttctccat

SEQ ID NO: 3107 - DNA, 22 bp, synthetic construct
  misc_feature 1..22: note = chemically synthesized
  source 1..22: mol_type = other DNA
ctccctttctctttctccatcc

SEQ ID NO: 3108 - DNA, 22 bp, synthetic construct
  misc_feature 1..22: note = chemically synthesized
  source 1..22: mol_type = other DNA
cctttctctttctccatccttc

SEQ ID NO: 3109 - DNA, 22 bp, synthetic construct
  misc_feature 1..22: note = chemically synthesized
  source 1..22: mol_type = other DNA
tctctttctccatccttctttc

SEQ ID NO: 3110 - DNA, 22 bp, synthetic construct
  misc_feature 1..22: note = chemically synthesized
  source 1..22: mol_type = other DNA
ctctttctccatccttctttcc

SEQ ID NO: 3111 - DNA, 22 bp, synthetic construct
  misc_feature 1..22: note = chemically synthesized
  source 1..22: mol_type = other DNA
tctttctccatccttctttcct

SEQ ID NO: 3112 - DNA, 22 bp, synthetic construct
  misc_feature 1..22: note = chemically synthesized
  source 1..22: mol_type = other DNA
tttctccatccttctttcctta

SEQ ID NO: 3113 - DNA, 22 bp, synthetic construct
  misc_feature 1..22: note = chemically synthesized
  source 1..22: mol_type = other DNA
tctccatccttctttccttaaa

SEQ ID NO: 3114 - DNA, 22 bp, synthetic construct
  misc_feature 1..22: note = chemically synthesized
  source 1..22: mol_type = other DNA
ctccatccttctttccttaaag

SEQ ID NO: 3115 - DNA, 22 bp, synthetic construct
  misc_feature 1..22: note = chemically synthesized
  source 1..22: mol_type = other DNA
tccatccttctttccttaaaga

SEQ ID NO: 3116 - DNA, 22 bp, synthetic construct
  misc_feature 1..22: note = chemically synthesized
  source 1..22: mol_type = other DNA
catccttctttccttaaagagt

SEQ ID NO: 3117 - DNA, 22 bp, synthetic construct
  misc_feature 1..22: note = chemically synthesized
  source 1..22: mol_type = other DNA
ctttccttaaagagtccccagt

SEQ ID NO: 3118 - DNA, 22 bp, synthetic construct
  misc_feature 1..22: note = chemically synthesized
  source 1..22: mol_type = other DNA
tttccttaaagagtccccagtg

SEQ ID NO: 3119 - DNA, 22 bp, synthetic construct
  misc_feature 1..22: note = chemically synthesized
  source 1..22: mol_type = other DNA
tccttaaagagtccccagtgct

SEQ ID NO: 3120 - DNA, 22 bp, synthetic construct
  misc_feature 1..22: note = chemically synthesized
  source 1..22: mol_type = other DNA
ccttaaagagtccccagtgcta

SEQ ID NO: 3121 - DNA, 22 bp, synthetic construct
  misc_feature 1..22: note = chemically synthesized
  source 1..22: mol_type = other DNA
cttaaagagtccccagtgctat

SEQ ID NO: 3122 - DNA, 22 bp, synthetic construct
  misc_feature 1..22: note = chemically synthesized
  source 1..22: mol_type = other DNA
aaagagtccccagtgctatctg

SEQ ID NO: 3123 - DNA, 22 bp, synthetic construct
  misc_feature 1..22: note = chemically synthesized
  source 1..22: mol_type = other DNA
aagagtccccagtgctatctgg

SEQ ID NO: 3124 - DNA, 22 bp, synthetic construct
  misc_feature 1..22: note = chemically synthesized
  source 1..22: mol_type = other DNA
tctgggacatattcctccgccc

SEQ ID NO: 3125 - DNA, 22 bp, synthetic construct
  misc_feature 1..22: note = chemically synthesized
  source 1..22: mol_type = other DNA
ggacatattcctccgcccagag

SEQ ID NO: 3126 - DNA, 22 bp, synthetic construct
  misc_feature 1..22: note = chemically synthesized
  source 1..22: mol_type = other DNA
ctccgcccagagcagggtcccg

SEQ ID NO: 3127 - DNA, 22 bp, synthetic construct
  misc_feature 1..22: note = chemically synthesized
  source 1..22: mol_type = other DNA
cgcccagagcagggtcccgctt

SEQ ID NO: 3128 - DNA, 22 bp, synthetic construct
  misc_feature 1..22: note = chemically synthesized
  source 1..22: mol_type = other DNA
ccctaaggccctgctctgggct

SEQ ID NO: 3129 - DNA, 22 bp, synthetic construct
  misc_feature 1..22: note = chemically synthesized
  source 1..22: mol_type = other DNA
cctaaggccctgctctgggctt

SEQ ID NO: 3130 - DNA, 22 bp, synthetic construct
  misc_feature 1..22: note = chemically synthesized
  source 1..22: mol_type = other DNA
aggccctgctctgggcttctgg

SEQ ID NO: 3131 - DNA, 22 bp, synthetic construct
  misc_feature 1..22: note = chemically synthesized
  source 1..22: mol_type = other DNA
ctctgggcttctgggtttgagt

SEQ ID NO: 3132 - DNA, 22 bp, synthetic construct
  misc_feature 1..22: note = chemically synthesized
  source 1..22: mol_type = other DNA
tgggcttctgggtttgagtcct

SEQ ID NO: 3133 - DNA, 22 bp, synthetic construct
  misc_feature 1..22: note = chemically synthesized
  source 1..22: mol_type = other DNA
ggcttctgggtttgagtccttg

SEQ ID NO: 3134 - DNA, 22 bp, synthetic construct
  misc_feature 1..22: note = chemically synthesized
  source 1..22: mol_type = other DNA
ctgggtttgagtccttggcaag

SEQ ID NO: 3135 - DNA, 22 bp, synthetic construct
  misc_feature 1..22: note = chemically synthesized
  source 1..22: mol_type = other DNA
tgggtttgagtccttggcaagc

SEQ ID NO: 3136 - DNA, 22 bp, synthetic construct
  misc_feature 1..22: note = chemically synthesized
  source 1..22: mol_type = other DNA
ggtttgagtccttggcaagccc

SEQ ID NO: 3137 - DNA, 22 bp, synthetic construct
  misc_feature 1..22: note = chemically synthesized
  source 1..22: mol_type = other DNA
gagtccttggcaagcccaggag

SEQ ID NO: 3138 - DNA, 22 bp, synthetic construct
  misc_feature 1..22: note = chemically synthesized
  source 1..22: mol_type = other DNA
agtccttggcaagcccaggaga

SEQ ID NO: 3139 - DNA, 22 bp, synthetic construct
  misc_feature 1..22: note = chemically synthesized
  source 1..22: mol_type = other DNA
ggcaagcccaggagaggcgctc

SEQ ID NO: 3140 - DNA, 22 bp, synthetic construct
  misc_feature 1..22: note = chemically synthesized
  source 1..22: mol_type = other DNA
gcaagcccaggagaggcgctca

SEQ ID NO: 3141 - DNA, 22 bp, synthetic construct
  misc_feature 1..22: note = chemically synthesized
  source 1..22: mol_type = other DNA
aggcttccctgtcccccttcct

SEQ ID NO: 3142 - DNA, 22 bp, synthetic construct
  misc_feature 1..22: note = chemically synthesized
  source 1..22: mol_type = other DNA
ccctgtcccccttcctcgtcca

SEQ ID NO: 3143 - DNA, 22 bp, synthetic construct
  misc_feature 1..22: note = chemically synthesized
  source 1..22: mol_type = other DNA
cctgtcccccttcctcgtccac

SEQ ID NO: 3144 - DNA, 22 bp, synthetic construct
  misc_feature 1..22: note = chemically synthesized
  source 1..22: mol_type = other DNA
tcccccttcctcgtccaccatc

SEQ ID NO: 3145 - DNA, 22 bp, synthetic construct
  misc_feature 1..22: note = chemically synthesized
  source 1..22: mol_type = other DNA
cctcgtccaccatctcatgccc

SEQ ID NO: 3146 - DNA, 22 bp, synthetic construct
  misc_feature 1..22: note = chemically synthesized
  source 1..22: mol_type = other DNA
ctcgtccaccatctcatgcccc

SEQ ID NO: 3147 - DNA, 22 bp, synthetic construct
  misc_feature 1..22: note = chemically synthesized
  source 1..22: mol_type = other DNA
gtccaccatctcatgcccctgg

SEQ ID NO: 3148 - DNA, 22 bp, synthetic construct
  misc_feature 1..22: note = chemically synthesized
  source 1..22: mol_type = other DNA
atgcccctggctctcctgcccc

SEQ ID NO: 3149 - DNA, 22 bp, synthetic construct
  misc_feature 1..22: note = chemically synthesized
  source 1..22: mol_type = other DNA
gctctcctgccccttccctaca

SEQ ID NO: 3150 - DNA, 22 bp, synthetic construct
  misc_feature 1..22: note = chemically synthesized
  source 1..22: mol_type = other DNA
tcctgccccttccctacagggg

SEQ ID NO: 3151 - DNA, 22 bp, synthetic construct
  misc_feature 1..22: note = chemically synthesized
  source 1..22: mol_type = other DNA
ctgccccttccctacaggggtt

SEQ ID NO: 3152 - DNA, 22 bp, synthetic construct
  misc_feature 1..22: note = chemically synthesized
  source 1..22: mol_type = other DNA
ccccttccctacaggggttcct

SEQ ID NO: 3153 - DNA, 22 bp, synthetic construct
  misc_feature 1..22: note = chemically synthesized
  source 1..22: mol_type = other DNA
ccctacaggggttcctggctct

SEQ ID NO: 3154 - DNA, 22 bp, synthetic construct
  misc_feature 1..22: note = chemically synthesized
  source 1..22: mol_type = other DNA
cctacaggggttcctggctctg

SEQ ID NO: 3155 - DNA, 22 bp, synthetic construct
  misc_feature 1..22: note = chemically synthesized
  source 1..22: mol_type = other DNA
caggggttcctggctctgctct

SEQ ID NO: 3156 - DNA, 22 bp, synthetic construct
  misc_feature 1..22: note = chemically synthesized
  source 1..22: mol_type = other DNA
ctggctctgctcttcagactga

SEQ ID NO: 3157 - DNA, 22 bp, synthetic construct
  misc_feature 1..22: note = chemically synthesized
  source 1..22: mol_type = other DNA
gctctgctcttcagactgagcc

SEQ ID NO: 3158 - DNA, 22 bp, synthetic construct
  misc_feature 1..22: note = chemically synthesized
  source 1..22: mol_type = other DNA
tgctcttcagactgagccccgt

SEQ ID NO: 3159 - DNA, 22 bp, synthetic construct
  misc_feature 1..22: note = chemically synthesized
  source 1..22: mol_type = other DNA
ctcttcagactgagccccgttc

SEQ ID NO: 3160 - DNA, 22 bp, synthetic construct
  misc_feature 1..22: note = chemically synthesized
  source 1..22: mol_type = other DNA
ttcagactgagccccgttcccc

SEQ ID NO: 3161 - DNA, 22 bp, synthetic construct
  misc_feature 1..22: note = chemically synthesized
  source 1..22: mol_type = other DNA
cagactgagccccgttcccctg

SEQ ID NO: 3162 - DNA, 22 bp, synthetic construct
  misc_feature 1..22: note = chemically synthesized
  source 1..22: mol_type = other DNA
agactgagccccgttcccctgc

SEQ ID NO: 3163 - DNA, 22 bp, synthetic construct
  misc_feature 1..22: note = chemically synthesized
  source 1..22: mol_type = other DNA
agccccgttcccctgcatcccc

SEQ ID NO: 3164 - DNA, 22 bp, synthetic construct
  misc_feature 1..22: note = chemically synthesized
  source 1..22: mol_type = other DNA
ccctgcatccccgttcccctgc

SEQ ID NO: 3165 - DNA, 22 bp, synthetic construct
  misc_feature 1..22: note = chemically synthesized
  source 1..22: mol_type = other DNA
catccccgttcccctgcatccc

SEQ ID NO: 3166 - DNA, 22 bp, synthetic construct
  misc_feature 1..22: note = chemically synthesized
  source 1..22: mol_type = other DNA
ccctgcatcccccttcccctgc

SEQ ID NO: 3167 - DNA, 22 bp, synthetic construct
  misc_feature 1..22: note = chemically synthesized
  source 1..22: mol_type = other DNA
catcccccttcccctgcatccc

SEQ ID NO: 3168 - DNA, 22 bp, synthetic construct
  misc_feature 1..22: note = chemically synthesized
  source 1..22: mol_type = other DNA
cccctgcatcccccagaggccc

SEQ ID NO: 3169 - DNA, 22 bp, synthetic construct
  misc_feature 1..22: note = chemically synthesized
  source 1..22: mol_type = other DNA
ccctgcatcccccagaggcccc

SEQ ID NO: 3170 - DNA, 22 bp, synthetic construct
  misc_feature 1..22: note = chemically synthesized
  source 1..22: mol_type = other DNA
catcccccagaggccccaggcc

SEQ ID NO: 3171 - DNA, 22 bp, synthetic construct
  misc_feature 1..22: note = chemically synthesized
  source 1..22: mol_type = other DNA
cttggcctggaccccacgagag

SEQ ID NO: 3172 - DNA, 22 bp, synthetic construct
  misc_feature 1..22: note = chemically synthesized
  source 1..22: mol_type = other DNA
ggcctggaccccacgagaggcc

SEQ ID NO: 3173 - DNA, 22 bp, synthetic construct
  misc_feature 1..22: note = chemically synthesized
  source 1..22: mol_type = other DNA
gcctggaccccacgagaggcca

SEQ ID NO: 3174 - DNA, 22 bp, synthetic construct
  misc_feature 1..22: note = chemically synthesized
  source 1..22: mol_type = other DNA
gaccccacgagaggccacccca

SEQ ID NO: 3175 - DNA, 22 bp, synthetic construct
  misc_feature 1..22: note = chemically synthesized
  source 1..22: mol_type = other DNA
tctaccaggctgccttttgggt

SEQ ID NO: 3176 - DNA, 22 bp, synthetic construct
  misc_feature 1..22: note = chemically synthesized
  source 1..22: mol_type = other DNA
ccaggctgccttttgggtggat

SEQ ID NO: 3177 - DNA, 22 bp, synthetic construct
  misc_feature 1..22: note = chemically synthesized
  source 1..22: mol_type = other DNA
ccttttgggtggattctcctcc

SEQ ID NO: 3178 - DNA, 22 bp, synthetic construct
  misc_feature 1..22: note = chemically synthesized
  source 1..22: mol_type = other DNA
ttgggtggattctcctccaact

SEQ ID NO: 3179 - DNA, 22 bp, synthetic construct
  misc_feature 1..22: note = chemically synthesized
  source 1..22: mol_type = other DNA
tgggtggattctcctccaactg

SEQ ID NO: 3180 - DNA, 22 bp, synthetic construct
  misc_feature 1..22: note = chemically synthesized
  source 1..22: mol_type = other DNA
gggtggattctcctccaactgt

SEQ ID NO: 3181 - DNA, 22 bp, synthetic construct
  misc_feature 1..22: note = chemically synthesized
  source 1..22: mol_type = other DNA
ggtggattctcctccaactgtg

SEQ ID NO: 3182 - DNA, 22 bp, synthetic construct
  misc_feature 1..22: note = chemically synthesized
  source 1..22: mol_type = other DNA
tcctccaactgtggggtgactg

SEQ ID NO: 3183 - DNA, 22 bp, synthetic construct
  misc_feature 1..22: note = chemically synthesized
  source 1..22: mol_type = other DNA
ctccaactgtggggtgactgct

SEQ ID NO: 3184 - DNA, 22 bp, synthetic construct
  misc_feature 1..22: note = chemically synthesized
  source 1..22: mol_type = other DNA
caactgtggggtgactgcttgg

SEQ ID NO: 3185 - DNA, 22 bp, synthetic construct
  misc_feature 1..22: note = chemically synthesized
  source 1..22: mol_type = other DNA
tggggtgactgcttggcaaact

SEQ ID NO: 3186 - DNA, 22 bp, synthetic construct
  misc_feature 1..22: note = chemically synthesized
  source 1..22: mol_type = other DNA
cttggcaaactcactcttcggg

SEQ ID NO: 3187 - DNA, 22 bp, synthetic construct
  misc_feature 1..22: note = chemically synthesized
  source 1..22: mol_type = other DNA
ggcaaactcactcttcggggta

SEQ ID NO: 3188 - DNA, 22 bp, synthetic construct
  misc_feature 1..22: note = chemically synthesized
  source 1..22: mol_type = other DNA
gcaaactcactcttcggggtat

SEQ ID NO: 3189 - DNA, 22 bp, synthetic construct
  misc_feature 1..22: note = chemically synthesized
  source 1..22: mol_type = other DNA
actcttcggggtatcccaggag

SEQ ID NO: 3190 - DNA, 22 bp, synthetic construct
  misc_feature 1..22: note = chemically synthesized
  source 1..22: mol_type = other DNA
ttcggggtatcccaggaggcct

SEQ ID NO: 3191 - DNA, 22 bp, synthetic construct
  misc_feature 1..22: note = chemically synthesized
  source 1..22: mol_type = other DNA
cggggtatcccaggaggcctgg

SEQ ID NO: 3192 - DNA, 22 bp, synthetic construct
  misc_feature 1..22: note = chemically synthesized
  source 1..22: mol_type = other DNA
ggggtatcccaggaggcctgga

SEQ ID NO: 3193 - DNA, 22 bp, synthetic construct
  misc_feature 1..22: note = chemically synthesized
  source 1..22: mol_type = other DNA
gagcattggggtgggctggggt

SEQ ID NO: 3194 - DNA, 22 bp, synthetic construct
  misc_feature 1..22: note = chemically synthesized
  source 1..22: mol_type = other DNA
gggtgggctggggttcagagag

SEQ ID NO: 3195 - DNA, 22 bp, synthetic construct
  misc_feature 1..22: note = chemically synthesized
  source 1..22: mol_type = other DNA
gggttcagagaggagggattcc

SEQ ID NO: 3196 - DNA, 22 bp, synthetic construct
  misc_feature 1..22: note = chemically synthesized
  source 1..22: mol_type = other DNA
agagaggagggattcccttctc

SEQ ID NO: 3197 - DNA, 22 bp, synthetic construct
  misc_feature 1..22: note = chemically synthesized
  source 1..22: mol_type = other DNA
ccttctcaggttacgtggccaa

SEQ ID NO: 3198 - DNA, 22 bp, synthetic construct
  misc_feature 1..22: note = chemically synthesized
  source 1..22: mol_type = other DNA
ctcaggttacgtggccaagaag

SEQ ID NO: 3199 - DNA, 22 bp, synthetic construct
  misc_feature 1..22: note = chemically synthesized
  source 1..22: mol_type = other DNA
tcaggttacgtggccaagaagc

SEQ ID NO: 3200 - DNA, 22 bp, synthetic construct
  misc_feature 1..22: note = chemically synthesized
  source 1..22: mol_type = other DNA
aggttacgtggccaagaagcag

SEQ ID NO: 3201 - DNA, 22 bp, synthetic construct
  misc_feature 1..22: note = chemically synthesized
  source 1..22: mol_type = other DNA
cgtggccaagaagcaggggagc

SEQ ID NO: 3202 - DNA, 22 bp, synthetic construct
  misc_feature 1..22: note = chemically synthesized
  source 1..22: mol_type = other DNA
ggtttgggtcaggtctgggtgt

SEQ ID NO: 3203 - DNA, 22 bp, synthetic construct
  misc_feature 1..22: note = chemically synthesized
  source 1..22: mol_type = other DNA
gggtcaggtctgggtgtggggt

SEQ ID NO: 3204 - DNA, 22 bp, synthetic construct
  misc_feature 1..22: note = chemically synthesized
  source 1..22: mol_type = other DNA
ggtcaggtctgggtgtggggtg

SEQ ID NO: 3205 - DNA, 22 bp, synthetic construct
  misc_feature 1..22: note = chemically synthesized
  source 1..22: mol_type = other DNA
ggtgtggggtgaccagcttatg

SEQ ID NO: 3206 - DNA, 22 bp, synthetic construct
  misc_feature 1..22: note = chemically synthesized
  source 1..22: mol_type = other DNA
atgctgtttgcccaggacagcc

SEQ ID NO: 3207 - DNA, 22 bp, synthetic construct
  misc_feature 1..22: note = chemically synthesized
  source 1..22: mol_type = other DNA
tgctgtttgcccaggacagcct

SEQ ID NO: 3208 - DNA, 22 bp, synthetic construct
  misc_feature 1..22: note = chemically synthesized
  source 1..22: mol_type = other DNA
tttgcccaggacagcctagttt

SEQ ID NO: 3209 - DNA, 22 bp, synthetic construct
  misc_feature 1..22: note = chemically synthesized
  source 1..22: mol_type = other DNA
gcccaggacagcctagttttag

SEQ ID NO: 3210 - DNA, 22 bp, synthetic construct
  misc_feature 1..22: note = chemically synthesized
  source 1..22: mol_type = other DNA
cccaggacagcctagttttagc

SEQ ID NO: 3211 - DNA, 22 bp, synthetic construct
  misc_feature 1..22: note = chemically synthesized
  source 1..22: mol_type = other DNA
gttttagcactgaaaccctcag

SEQ ID NO: 3212 - DNA, 22 bp, synthetic construct
  misc_feature 1..22: note = chemically synthesized
  source 1..22: mol_type = other DNA
tagcactgaaaccctcagtcct

SEQ ID NO: 3213 - DNA, 22 bp, synthetic construct
  misc_feature 1..22: note = chemically synthesized
  source 1..22: mol_type = other DNA
agcactgaaaccctcagtccta

SEQ ID NO: 3214 - DNA, 22 bp, synthetic construct
  misc_feature 1..22: note = chemically synthesized
  source 1..22: mol_type = other DNA
gcactgaaaccctcagtcctag

SEQ ID NO: 3215 - DNA, 22 bp, synthetic construct
  misc_feature 1..22: note = chemically synthesized
  source 1..22: mol_type = other DNA
aaaccctcagtcctaggaaaac

SEQ ID NO: 3216 - DNA, 22 bp, synthetic construct
  misc_feature 1..22: note = chemically synthesized
  source 1..22: mol_type = other DNA
agtcctaggaaaacagggatgg

SEQ ID NO: 3217 - DNA, 22 bp, synthetic construct
  misc_feature 1..22: note = chemically synthesized
  source 1..22: mol_type = other DNA
ggaaaacagggatggttggtca

SEQ ID NO: 3218 - DNA, 22 bp, synthetic construct
  misc_feature 1..22: note = chemically synthesized
  source 1..22: mol_type = other DNA
gtcactgtctctgggtgactct

SEQ ID NO: 3219 - DNA, 22 bp, synthetic construct
  misc_feature 1..22: note = chemically synthesized
  source 1..22: mol_type = other DNA
tctctgggtgactcttgattcc

SEQ ID NO: 3220 - DNA, 22 bp, synthetic construct
  misc_feature 1..22: note = chemically synthesized
  source 1..22: mol_type = other DNA
tgggtgactcttgattcccggc

SEQ ID NO: 3221 - DNA, 22 bp, synthetic construct
  misc_feature 1..22: note = chemically synthesized
  source 1..22: mol_type = other DNA
ggtgactcttgattcccggcca

SEQ ID NO: 3222 - DNA, 22 bp, synthetic construct
  misc_feature 1..22: note = chemically synthesized
  source 1..22: mol_type = other DNA
ttgattcccggccagtttctcc

SEQ ID NO: 3223 - DNA, 22 bp, synthetic construct
  misc_feature 1..22: note = chemically synthesized
  source 1..22: mol_type = other DNA
gattcccggccagtttctccac

SEQ ID NO: 3224 - DNA, 22 bp, synthetic construct
  misc_feature 1..22: note = chemically synthesized
  source 1..22: mol_type = other DNA
attcccggccagtttctccacc

SEQ ID NO: 3225 - DNA, 22 bp, synthetic construct
  misc_feature 1..22: note = chemically synthesized
  source 1..22: mol_type = other DNA
ccggccagtttctccacctggg

SEQ ID NO: 3226 - DNA, 22 bp, synthetic construct
  misc_feature 1..22: note = chemically synthesized
  source 1..22: mol_type = other DNA
ctccacctggggctgtgtttct

SEQ ID NO: 3227 - DNA, 22 bp, synthetic construct
  misc_feature 1..22: note = chemically synthesized
  source 1..22: mol_type = other DNA
tccacctggggctgtgtttctc

SEQ ID NO: 3228 - DNA, 22 bp, synthetic construct
  misc_feature 1..22: note = chemically synthesized
  source 1..22: mol_type = other DNA
cacctggggctgtgtttctcgt

SEQ ID NO: 3229 - DNA, 22 bp, synthetic construct
  misc_feature 1..22: note = chemically synthesized
  source 1..22: mol_type = other DNA
gggctgtgtttctcgtcctgca

SEQ ID NO: 3230 - DNA, 22 bp, synthetic construct
  misc_feature 1..22: note = chemically synthesized
  source 1..22: mol_type = other DNA
tgtttctcgtcctgcatccttc

SEQ ID NO: 3231 - DNA, 22 bp, synthetic construct
  misc_feature 1..22: note = chemically synthesized
  source 1..22: mol_type = other DNA
ctcgtcctgcatccttctccag

SEQ ID NO: 3232 - DNA, 22 bp, synthetic construct
  misc_feature 1..22: note = chemically synthesized
  source 1..22: mol_type = other DNA
tcgtcctgcatccttctccagg

SEQ ID NO: 3233 - DNA, 22 bp, synthetic construct
  misc_feature 1..22: note = chemically synthesized
  source 1..22: mol_type = other DNA
gtcctgcatccttctccaggca

SEQ ID NO: 3234 - DNA, 22 bp, synthetic construct
  misc_feature 1..22: note = chemically synthesized
  source 1..22: mol_type = other DNA
catccttctccaggcaggtccc

SEQ ID NO: 3235 - DNA, 22 bp, synthetic construct
  misc_feature 1..22: note = chemically synthesized
  source 1..22: mol_type = other DNA
ctccaggcaggtccccaagcat

SEQ ID NO: 3236 - DNA, 22 bp, synthetic construct
  misc_feature 1..22: note = chemically synthesized
  source 1..22: mol_type = other DNA
tccaggcaggtccccaagcatc

SEQ ID NO: 3237 - DNA, 22 bp, synthetic construct
  misc_feature 1..22: note = chemically synthesized
  source 1..22: mol_type = other DNA
caggcaggtccccaagcatcgc

SEQ ID NO: 3238 - DNA, 22 bp, synthetic construct
  misc_feature 1..22: note = chemically synthesized
  source 1..22: mol_type = other DNA
ctgtggctgttcccaagttctt

SEQ ID NO: 3239 - DNA, 22 bp, synthetic construct
  misc_feature 1..22: note = chemically synthesized
  source 1..22: mol_type = other DNA
tggctgttcccaagttcttagg

SEQ ID NO: 3240 - DNA, 22 bp, synthetic construct
  misc_feature 1..22: note = chemically synthesized
  source 1..22: mol_type = other DNA
ttcccaagttcttagggtaccc

SEQ ID NO: 3241 - DNA, 22 bp, synthetic construct
  misc_feature 1..22: note = chemically synthesized
  source 1..22: mol_type = other DNA
ccaagttcttagggtaccccac

SEQ ID NO: 3242 - DNA, 22 bp, synthetic construct
  misc_feature 1..22: note = chemically synthesized
  source 1..22: mol_type = other DNA
ttagggtaccccacgtgggttt

SEQ ID NO: 3243 - DNA, 22 bp, synthetic construct
  misc_feature 1..22: note = chemically synthesized
  source 1..22: mol_type = other DNA
agggtaccccacgtgggtttat

SEQ ID NO: 3244 - DNA, 22 bp, synthetic construct
  misc_feature 1..22: note = chemically synthesized
  source 1..22: mol_type = other DNA
gggtaccccacgtgggtttatc

SEQ ID NO: 3245 - DNA, 22 bp, synthetic construct
  misc_feature 1..22: note = chemically synthesized
  source 1..22: mol_type = other DNA
atcaaccacttggtgaggctgg

SEQ ID NO: 3246 - DNA, 22 bp, synthetic construct
  misc_feature 1..22: note = chemically synthesized
  source 1..22: mol_type = other DNA
tcaaccacttggtgaggctggt

SEQ ID NO: 3247 - DNA, 22 bp, synthetic construct
  misc_feature 1..22: note = chemically synthesized
  source 1..22: mol_type = other DNA
ggtgaggctggtaccctgcccc

SEQ ID NO: 3248 - DNA, 22 bp, synthetic construct
  misc_feature 1..22: note = chemically synthesized
  source 1..22: mol_type = other DNA
gtgaggctggtaccctgccccc

SEQ ID NO: 3249 - DNA, 22 bp, synthetic construct
  misc_feature 1..22: note = chemically synthesized
  source 1..22: mol_type = other DNA
gtaccctgcccccattcctgca

SEQ ID NO: 3250 - DNA, 22 bp, synthetic construct
  misc_feature 1..22: note = chemically synthesized
  source 1..22: mol_type = other DNA
cccccattcctgcaccccaatt

SEQ ID NO: 3251 - DNA, 22 bp, synthetic construct
  misc_feature 1..22: note = chemically synthesized
  source 1..22: mol_type = other DNA
ctgcaccccaattgccttagtg

SEQ ID NO: 3252 - DNA, 22 bp, synthetic construct
  misc_feature 1..22: note = chemically synthesized
  source 1..22: mol_type = other DNA
caccccaattgccttagtggct

SEQ ID NO: 3253 - DNA, 22 bp, synthetic construct
  misc_feature 1..22: note = chemically synthesized
  source 1..22: mol_type = other DNA
ccttagtggctagggggttggg

SEQ ID NO: 3254 - DNA, 22 bp, synthetic construct
  misc_feature 1..22: note = chemically synthesized
  source 1..22: mol_type = other DNA
agtggctagggggttgggggct

SEQ ID NO: 3255 - DNA, 22 bp, synthetic construct
  misc_feature 1..22: note = chemically synthesized
  source 1..22: mol_type = other DNA
gtggctagggggttgggggcta

SEQ ID NO: 3256 - DNA, 22 bp, synthetic construct
  misc_feature 1..22: note = chemically synthesized
  source 1..22: mol_type = other DNA
gggggttgggggctagagtagg

SEQ ID NO: 3257 - DNA, 22 bp, synthetic construct
  misc_feature 1..22: note = chemically synthesized
  source 1..22: mol_type = other DNA
ggggctagagtaggaggggctg

SEQ ID NO: 3258 - DNA, 22 bp, synthetic construct
  misc_feature 1..22: note = chemically synthesized
  source 1..22: mol_type = other DNA
gagtaggaggggctggagccag

SEQ ID NO: 3259 - DNA, 22 bp, synthetic construct
  misc_feature 1..22: note = chemically synthesized
  source 1..22: mol_type = other DNA
gagccaggattcttagggctga

SEQ ID NO: 3260 - DNA, 22 bp, synthetic construct
  misc_feature 1..22: note = chemically synthesized
  source 1..22: mol_type = other DNA
ttagggctgaacagagaagagc

SEQ ID NO: 3261 - DNA, 22 bp, synthetic construct
  misc_feature 1..22: note = chemically synthesized
  source 1..22: mol_type = other DNA
agggctgaacagagaagagctg

SEQ ID NO: 3262 - DNA, 22 bp, synthetic construct
  misc_feature 1..22: note = chemically synthesized
  source 1..22: mol_type = other DNA
gggctgaacagagaagagctgg

SEQ ID NO: 3263 - DNA, 22 bp, synthetic construct
  misc_feature 1..22: note = chemically synthesized
  source 1..22: mol_type = other DNA
aacagagaagagctgggggcct

SEQ ID NO: 3264 - DNA, 22 bp, synthetic construct
  misc_feature 1..22: note = chemically synthesized
  source 1..22: mol_type = other DNA
ggggcctgggctcctgggtttg

SEQ ID NO: 3265 - DNA, 22 bp, synthetic construct
  misc_feature 1..22: note = chemically synthesized
  source 1..22: mol_type = other DNA
ggctcctgggtttgagagagga

SEQ ID NO: 3266 - DNA, 22 bp, synthetic construct
  misc_feature 1..22: note = chemically synthesized
  source 1..22: mol_type = other DNA
ctgggtttgagagaggaggggc

SEQ ID NO: 3267 - DNA, 22 bp, synthetic construct
  misc_feature 1..22: note = chemically synthesized
  source 1..22: mol_type = other DNA
ggtttgagagaggaggggctgg

SEQ ID NO: 3268 - DNA, 22 bp, synthetic construct
  misc_feature 1..22: note = chemically synthesized
  source 1..22: mol_type = other DNA
gagagaggaggggctggggcct

SEQ ID NO: 3269 - DNA, 22 bp, synthetic construct
  misc_feature 1..22: note = chemically synthesized
  source 1..22: mol_type = other DNA
agagaggaggggctggggcctg

SEQ ID NO: 3270 - DNA, 22 bp, synthetic construct
  misc_feature 1..22: note = chemically synthesized
  source 1..22: mol_type = other DNA
gggcctggactcctgggtccga

SEQ ID NO: 3271 - DNA, 22 bp, synthetic construct
  misc_feature 1..22: note = chemically synthesized
  source 1..22: mol_type = other DNA
gactcctgggtccgagggagga

SEQ ID NO: 3272 - DNA, 22 bp, synthetic construct
  misc_feature 1..22: note = chemically synthesized
  source 1..22: mol_type = other DNA
ctgggtccgagggaggaggggc

SEQ ID NO: 3273 - DNA, 22 bp, synthetic construct
  misc_feature 1..22: note = chemically synthesized
  source 1..22: mol_type = other DNA
ggtccgagggaggaggggctgg

SEQ ID NO: 3274 - DNA, 22 bp, synthetic construct
  misc_feature 1..22: note = chemically synthesized
  source 1..22: mol_type = other DNA
gggcctggactcctgggtctga

SEQ ID NO: 3275 - DNA, 22 bp, synthetic construct
  misc_feature 1..22: note = chemically synthesized
  source 1..22: mol_type = other DNA
gactcctgggtctgagggtgga

SEQ ID NO: 3276 - DNA, 22 bp, synthetic construct
  misc_feature 1..22: note = chemically synthesized
  source 1..22: mol_type = other DNA
ctgggtctgagggtggagggac

SEQ ID NO: 3277 - DNA, 22 bp, synthetic construct
  misc_feature 1..22: note = chemically synthesized
  source 1..22: mol_type = other DNA
ggtctgagggtggagggactgg

SEQ ID NO: 3278 - DNA, 22 bp, synthetic construct
  misc_feature 1..22: note = chemically synthesized
  source 1..22: mol_type = other DNA
agggtggagggactgggggcct

SEQ ID NO: 3279 - DNA, 22 bp, synthetic construct
  misc_feature 1..22: note = chemically synthesized
  source 1..22: mol_type = other DNA
ggggcctggactcctgggtccg

SEQ ID NO: 3280 - DNA, 22 bp, synthetic construct
  misc_feature 1..22: note = chemically synthesized
  source 1..22: mol_type = other DNA
gactcctgggtccgagggagga

SEQ ID NO: 3281 - DNA, 22 bp, synthetic construct
  misc_feature 1..22: note = chemically synthesized
  source 1..22: mol_type = other DNA
ctgggtccgagggaggaggggc

SEQ ID NO: 3282 - DNA, 22 bp, synthetic construct
  misc_feature 1..22: note = chemically synthesized
  source 1..22: mol_type = other DNA
ggtccgagggaggaggggctgg

SEQ ID NO: 3283 - DNA, 22 bp, synthetic construct
  misc_feature 1..22: note = chemically synthesized
  source 1..22: mol_type = other DNA
gggcctggactcgtgggtctga

SEQ ID NO: 3284 - DNA, 22 bp, synthetic construct
  misc_feature 1..22: note = chemically synthesized
  source 1..22: mol_type = other DNA
gactcgtgggtctgagggagga

SEQ ID NO: 3285 - DNA, 22 bp, synthetic construct
  misc_feature 1..22: note = chemically synthesized
  source 1..22: mol_type = other DNA
gtgggtctgagggaggaggggc

SEQ ID NO: 3286 - DNA, 22 bp, synthetic construct
  misc_feature 1..22: note = chemically synthesized
  source 1..22: mol_type = other DNA
agggaggaggggctgggggcct

SEQ ID NO: 3287 - DNA, 22 bp, synthetic construct
  misc_feature 1..22: note = chemically synthesized
  source 1..22: mol_type = other DNA
ggggcctggacttctgggtctt

SEQ ID NO: 3288 - DNA, 22 bp, synthetic construct
  misc_feature 1..22: note = chemically synthesized
  source 1..22: mol_type = other DNA
gacttctgggtcttagggaggc

SEQ ID NO: 3289 - DNA, 22 bp, synthetic construct
  misc_feature 1..22: note = chemically synthesized
  source 1..22: mol_type = other DNA
ctgggtcttagggaggcggggc

SEQ ID NO: 3290 - DNA, 22 bp, synthetic construct
  misc_feature 1..22: note = chemically synthesized
  source 1..22: mol_type = other DNA
tgggtcttagggaggcggggct

SEQ ID NO: 3291 - DNA, 22 bp, synthetic construct
  misc_feature 1..22: note = chemically synthesized
  source 1..22: mol_type = other DNA
ggtcttagggaggcggggctgg

SEQ ID NO: 3292 - DNA, 22 bp, synthetic construct
  misc_feature 1..22: note = chemically synthesized
  source 1..22: mol_type = other DNA
agggaggcggggctgggcctgg

SEQ ID NO: 3293 - DNA, 22 bp, synthetic construct
  misc_feature 1..22: note = chemically synthesized
  source 1..22: mol_type = other DNA
gggaggcggggctgggcctgga

SEQ ID NO: 3294 - DNA, 22 bp, synthetic construct
  misc_feature 1..22: note = chemically synthesized
  source 1..22: mol_type = other DNA
ggcctggacccctgggtctgaa

SEQ ID NO: 3295 - DNA, 22 bp, synthetic construct
  misc_feature 1..22: note = chemically synthesized
  source 1..22: mol_type = other DNA
gacccctgggtctgaatgggga

SEQ ID NO: 3296 - DNA, 22 bp, synthetic construct
  misc_feature 1..22: note = chemically synthesized
  source 1..22: mol_type = other DNA
ggtctgaatggggagaggctgg

SEQ ID NO: 3297 - DNA, 22 bp, synthetic construct
  misc_feature 1..22: note = chemically synthesized
  source 1..22: mol_type = other DNA
aatggggagaggctgggggcct

SEQ ID NO: 3298 - DNA, 22 bp, synthetic construct
  misc_feature 1..22: note = chemically synthesized
  source 1..22: mol_type = other DNA
ggggcctggactccttcatctg

SEQ ID NO: 3299 - DNA, 22 bp, synthetic construct
  misc_feature 1..22: note = chemically synthesized
  source 1..22: mol_type = other DNA
gactccttcatctgagggcgga

SEQ ID NO: 3300 - DNA, 22 bp, synthetic construct
  misc_feature 1..22: note = chemically synthesized
  source 1..22: mol_type = other DNA
cttcatctgagggcggaagggc

SEQ ID NO: 3301 - DNA, 22 bp, synthetic construct
  misc_feature 1..22: note = chemically synthesized
  source 1..22: mol_type = other DNA
catctgagggcggaagggctgg

SEQ ID NO: 3302 - DNA, 22 bp, synthetic construct
  misc_feature 1..22: note = chemically synthesized
  source 1..22: mol_type = other DNA
atctgagggcggaagggctggg

SEQ ID NO: 3303 - DNA, 22 bp, synthetic construct
  misc_feature 1..22: note = chemically synthesized
  source 1..22: mol_type = other DNA
agggcggaagggctggggcctg

SEQ ID NO: 3304 - DNA, 22 bp, synthetic construct
  misc_feature 1..22: note = chemically synthesized
  source 1..22: mol_type = other DNA
gggcctggcctcctgggttgaa

SEQ ID NO: 3305 - DNA, 22 bp, synthetic construct
  misc_feature 1..22: note = chemically synthesized
  source 1..22: mol_type = other DNA
gcctcctgggttgaatggggag

SEQ ID NO: 3306 - DNA, 22 bp, synthetic construct
  misc_feature 1..22: note = chemically synthesized
  source 1..22: mol_type = other DNA
ctgggttgaatggggaggggtt

SEQ ID NO: 3307 - DNA, 22 bp, synthetic construct
  misc_feature 1..22: note = chemically synthesized
  source 1..22: mol_type = other DNA
ggttgaatggggaggggttggg

SEQ ID NO: 3308 - DNA, 22 bp, synthetic construct
  misc_feature 1..22: note = chemically synthesized
  source 1..22: mol_type = other DNA
aatggggaggggttgggcctgg

SEQ ID NO: 3309 - DNA, 22 bp, synthetic construct
  misc_feature 1..22: note = chemically synthesized
  source 1..22: mol_type = other DNA
ggcctggactctggagtccctg

SEQ ID NO: 3310 - DNA, 22 bp, synthetic construct
  misc_feature 1..22: note = chemically synthesized
  source 1..22: mol_type = other DNA
gactctggagtccctggtgccc

SEQ ID NO: 3311 - DNA, 22 bp, synthetic construct
  misc_feature 1..22: note = chemically synthesized
  source 1..22: mol_type = other DNA
tggagtccctggtgcccaggcc

SEQ ID NO: 3312 - DNA, 22 bp, synthetic construct
  misc_feature 1..22: note = chemically synthesized
  source 1..22: mol_type = other DNA
gagtccctggtgcccaggcctc

SEQ ID NO: 3313 - DNA, 22 bp, synthetic construct
  misc_feature 1..22: note = chemically synthesized
  source 1..22: mol_type = other DNA
gtgcccaggcctcaggcatctt

SEQ ID NO: 3314 - DNA, 22 bp, synthetic construct
  misc_feature 1..22: note = chemically synthesized
  source 1..22: mol_type = other DNA
aggcatctttcacagggatgcc

SEQ ID NO: 3315 - DNA, 22 bp, synthetic construct
  misc_feature 1..22: note = chemically synthesized
  source 1..22: mol_type = other DNA
tcacagggatgcctgtactggg

SEQ ID NO: 3316 - DNA, 22 bp, synthetic construct
  misc_feature 1..22: note = chemically synthesized
  source 1..22: mol_type = other DNA
cacagggatgcctgtactgggc

SEQ ID NO: 3317 - DNA, 22 bp, synthetic construct
  misc_feature 1..22: note = chemically synthesized
  source 1..22: mol_type = other DNA
acagggatgcctgtactgggca

SEQ ID NO: 3318 - DNA, 22 bp, synthetic construct
  misc_feature 1..22: note = chemically synthesized
  source 1..22: mol_type = other DNA
tactgggcaggtccttgaaagg

SEQ ID NO: 3319 - DNA, 22 bp, synthetic construct
  misc_feature 1..22: note = chemically synthesized
  source 1..22: mol_type = other DNA
ggcaggtccttgaaagggaaag

SEQ ID NO: 3320 - DNA, 22 bp, synthetic construct
  misc_feature 1..22: note = chemically synthesized
  source 1..22: mol_type = other DNA
gaaagggaaaggcccattgctc

SEQ ID NO: 3321 - DNA, 22 bp, synthetic construct
  misc_feature 1..22: note = chemically synthesized
  source 1..22: mol_type = other DNA
aaagggaaaggcccattgctct

SEQ ID NO: 3322 - DNA, 22 bp, synthetic construct
  misc_feature 1..22: note = chemically synthesized
  source 1..22: mol_type = other DNA
ctctccttgcccccctccccta

SEQ ID NO: 3323 - DNA, 22 bp, synthetic construct
  misc_feature 1..22: note = chemically synthesized
  source 1..22: mol_type = other DNA
tccttgcccccctcccctatcg

SEQ ID NO: 3324 - DNA, 22 bp, synthetic construct
  misc_feature 1..22: note = chemically synthesized
  source 1..22: mol_type = other DNA
cttgcccccctcccctatcgcc

SEQ ID NO: 3325 - DNA, 22 bp, synthetic construct
  misc_feature 1..22: note = chemically synthesized
  source 1..22: mol_type = other DNA
gcccccctcccctatcgccatg

SEQ ID NO: 3326 - DNA, 22 bp, synthetic construct
  misc_feature 1..22: note = chemically synthesized
  source 1..22: mol_type = other DNA
cccccctcccctatcgccatga

SEQ ID NO: 3327 - DNA, 22 bp, synthetic construct
  misc_feature 1..22: note = chemically synthesized
  source 1..22: mol_type = other DNA
ccctatcgccatgacaactggg

SEQ ID NO: 3328 - DNA, 22 bp, synthetic construct
  misc_feature 1..22: note = chemically synthesized
  source 1..22: mol_type = other DNA
tcgccatgacaactgggtggaa

SEQ ID NO: 3329 - DNA, 22 bp, synthetic construct
  misc_feature 1..22: note = chemically synthesized
  source 1..22: mol_type = other DNA
ggtggaaataaacgagccgagt

SEQ ID NO: 3330 - DNA, 22 bp, synthetic construct
  misc_feature 1..22: note = chemically synthesized
  source 1..22: mol_type = other DNA
atcccgttcccagggcacgtgc

SEQ ID NO: 3331 - DNA, 22 bp, synthetic construct
  misc_feature 1..22: note = chemically synthesized
  source 1..22: mol_type = other DNA
ccagggcacgtgcggccccttc

SEQ ID NO: 3332 - DNA, 22 bp, synthetic construct
  misc_feature 1..22: note = chemically synthesized
  source 1..22: mol_type = other DNA
cacagcccgagtttccatgacc

SEQ ID NO: 3333 - DNA, 22 bp, synthetic construct
  misc_feature 1..22: note = chemically synthesized
  source 1..22: mol_type = other DNA
acagcccgagtttccatgacct

SEQ ID NO: 3334 - DNA, 22 bp, synthetic construct
  misc_feature 1..22: note = chemically synthesized
  source 1..22: mol_type = other DNA
ccatgacctcatgctcttggcc

SEQ ID NO: 3335 - DNA, 22 bp, synthetic construct
  misc_feature 1..22: note = chemically synthesized
  source 1..22: mol_type = other DNA
catgacctcatgctcttggccc

SEQ ID NO: 3336 - DNA, 22 bp, synthetic construct
  misc_feature 1..22: note = chemically synthesized
  source 1..22: mol_type = other DNA
atgctcttggccctcgtagctc

SEQ ID NO: 3337 - DNA, 22 bp, synthetic construct
  misc_feature 1..22: note = chemically synthesized
  source 1..22: mol_type = other DNA
ttggccctcgtagctccctccc

SEQ ID NO: 3338 - DNA, 22 bp, synthetic construct
  misc_feature 1..22: note = chemically synthesized
  source 1..22: mol_type = other DNA
ggccctcgtagctccctcccgc

SEQ ID NO: 3339 - DNA, 22 bp, synthetic construct
  misc_feature 1..22: note = chemically synthesized
  source 1..22: mol_type = other DNA
gccctcgtagctccctcccgcc

SEQ ID NO: 3340 - DNA, 22 bp, synthetic construct
  misc_feature 1..22: note = chemically synthesized
  source 1..22: mol_type = other DNA
gtagctccctcccgcctcctcc

SEQ ID NO: 3341 - DNA, 22 bp, synthetic construct
  misc_feature 1..22: note = chemically synthesized
  source 1..22: mol_type = other DNA
cctcccgcctcctccagatggg

SEQ ID NO: 3342 - DNA, 22 bp, synthetic construct
  misc_feature 1..22: note = chemically synthesized
  source 1..22: mol_type = other DNA
ccgcctcctccagatgggcagc

SEQ ID NO: 3343 - DNA, 22 bp, synthetic construct
  misc_feature 1..22: note = chemically synthesized
  source 1..22: mol_type = other DNA
ctccagatgggcagctttggag

SEQ ID NO: 3344 - DNA, 22 bp, synthetic construct
  misc_feature 1..22: note = chemically synthesized
  source 1..22: mol_type = other DNA
cagatgggcagctttggagagg

SEQ ID NO: 3345 - DNA, 22 bp, synthetic construct
  misc_feature 1..22: note = chemically synthesized
  source 1..22: mol_type = other DNA
tggagaggtgagggacttgggg

SEQ ID NO: 3346 - DNA, 22 bp, synthetic construct
  misc_feature 1..22: note = chemically synthesized
  source 1..22: mol_type = other DNA
ggagaggtgagggacttggggg

SEQ ID NO: 3347 - DNA, 22 bp, synthetic construct
  misc_feature 1..22: note = chemically synthesized
  source 1..22: mol_type = other DNA
gagaggtgagggacttgggggg

SEQ ID NO: 3348 - DNA, 22 bp, synthetic construct
  misc_feature 1..22: note = chemically synthesized
  source 1..22: mol_type = other DNA
ggggggtaatttatcccgtgga

SEQ ID NO: 3349 - DNA, 22 bp, synthetic construct
  misc_feature 1..22: note = chemically synthesized
  source 1..22: mol_type = other DNA
gggggtaatttatcccgtggat

SEQ ID NO: 3350 - DNA, 22 bp, synthetic construct
  misc_feature 1..22: note = chemically synthesized
  source 1..22: mol_type = other DNA
atcccgtggatctaggagttta

SEQ ID NO: 3351 - DNA, 22 bp, synthetic construct
  misc_feature 1..22: note = chemically synthesized
  source 1..22: mol_type = other DNA
tcccgtggatctaggagtttag

SEQ ID NO: 3352 - DNA, 22 bp, synthetic construct
  misc_feature 1..22: note = chemically synthesized
  source 1..22: mol_type = other DNA
ggagtttagcttcactccttcc

SEQ ID NO: 3353 - DNA, 22 bp, synthetic construct
  misc_feature 1..22: note = chemically synthesized
  source 1..22: mol_type = other DNA
agcttcactccttcctcagctc

SEQ ID NO: 3354 - DNA, 22 bp, synthetic construct
  misc_feature 1..22: note = chemically synthesized
  source 1..22: mol_type = other DNA
gcttcactccttcctcagctcc

SEQ ID NO: 3355 - DNA, 22 bp, synthetic construct
  misc_feature 1..22: note = chemically synthesized
  source 1..22: mol_type = other DNA
cactccttcctcagctccagtt

SEQ ID NO: 3356 - DNA, 22 bp, synthetic construct
  misc_feature 1..22: note = chemically synthesized
  source 1..22: mol_type = other DNA
actccttcctcagctccagttc

SEQ ID NO: 3357 - DNA, 22 bp, synthetic construct
  misc_feature 1..22: note = chemically synthesized
  source 1..22: mol_type = other DNA
cttcctcagctccagttcaggt

SEQ ID NO: 3358 - DNA, 22 bp, synthetic construct
  misc_feature 1..22: note = chemically synthesized
  source 1..22: mol_type = other DNA
cctcagctccagttcaggtccc

SEQ ID NO: 3359 - DNA, 22 bp, synthetic construct
  misc_feature 1..22: note = chemically synthesized
  source 1..22: mol_type = other DNA
ctcagctccagttcaggtcccg

SEQ ID NO: 3360 - DNA, 22 bp, synthetic construct
  misc_feature 1..22: note = chemically synthesized
  source 1..22: mol_type = other DNA
agctccagttcaggtcccggag

SEQ ID NO: 3361 - DNA, 22 bp, synthetic construct
  misc_feature 1..22: note = chemically synthesized
  source 1..22: mol_type = other DNA
cagttcaggtcccggagcccac

SEQ ID NO: 3362 - DNA, 22 bp, synthetic construct
  misc_feature 1..22: note = chemically synthesized
  source 1..22: mol_type = other DNA
aggtcccggagcccacccagtg

SEQ ID NO: 3363 - DNA, 22 bp, synthetic construct
  misc_feature 1..22: note = chemically synthesized
  source 1..22: mol_type = other DNA
gggcaagtccctcctccgaccc

SEQ ID NO: 3364 - DNA, 22 bp, synthetic construct
  misc_feature 1..22: note = chemically synthesized
  source 1..22: mol_type = other DNA
ctccgaccccctggacttcggc

SEQ ID NO: 3365 - DNA, 22 bp, synthetic construct
  misc_feature 1..22: note = chemically synthesized
  source 1..22: mol_type = other DNA
cgaccccctggacttcggcttt

SEQ ID NO: 3366 - DNA, 22 bp, synthetic construct
  misc_feature 1..22: note = chemically synthesized
  source 1..22: mol_type = other DNA
gacttcggcttttgtcccccca

SEQ ID NO: 3367 - DNA, 22 bp, synthetic construct
  misc_feature 1..22: note = chemically synthesized
  source 1..22: mol_type = other DNA
cggcttttgtccccccaagttt

SEQ ID NO: 3368 - DNA, 22 bp, synthetic construct
  misc_feature 1..22: note = chemically synthesized
  source 1..22: mol_type = other DNA
ggcttttgtccccccaagtttt

SEQ ID NO: 3369 - DNA, 22 bp, synthetic construct
  misc_feature 1..22: note = chemically synthesized
  source 1..22: mol_type = other DNA
ttgtccccccaagttttggacc

SEQ ID NO: 3370 - DNA, 22 bp, synthetic construct
  misc_feature 1..22: note = chemically synthesized
  source 1..22: mol_type = other DNA
tgtccccccaagttttggaccc

SEQ ID NO: 3371 - DNA, 22 bp, synthetic construct
  misc_feature 1..22: note = chemically synthesized
  source 1..22: mol_type = other DNA
gtccccccaagttttggacccc

SEQ ID NO: 3372 - DNA, 22 bp, synthetic construct
  misc_feature 1..22: note = chemically synthesized
  source 1..22: mol_type = other DNA
tccccccaagttttggacccct

SEQ ID NO: 3373 - DNA, 22 bp, synthetic construct
  misc_feature 1..22: note = chemically synthesized
  source 1..22: mol_type = other DNA
tggacccctaagggaagaatga

SEQ ID NO: 3374 - DNA, 22 bp, synthetic construct
  misc_feature 1..22: note = chemically synthesized
  source 1..22: mol_type = other DNA
ggacccctaagggaagaatgag

SEQ ID NO: 3375 - DNA, 22 bp, synthetic construct
  misc_feature 1..22: note = chemically synthesized
  source 1..22: mol_type = other DNA
gacccctaagggaagaatgaga

SEQ ID NO: 3376 - DNA, 22 bp, synthetic construct
  misc_feature 1..22: note = chemically synthesized
  source 1..22: mol_type = other DNA
agggaagaatgagaaacggtgg

SEQ ID NO: 3377 - DNA, 22 bp, synthetic construct
  misc_feature 1..22: note = chemically synthesized
  source 1..22: mol_type = other DNA
gctgcagggccccgtgcagagg

SEQ ID NO: 3378 - DNA, 22 bp, synthetic construct
  misc_feature 1..22: note = chemically synthesized
  source 1..22: mol_type = other DNA
cagggccccgtgcagagggggc

SEQ ID NO: 3379 - DNA, 22 bp, synthetic construct
  misc_feature 1..22: note = chemically synthesized
  source 1..22: mol_type = other DNA
agtgaactggagtgtgacagcc

SEQ ID NO: 3380 - DNA, 22 bp, synthetic construct
  misc_feature 1..22: note = chemically synthesized
  source 1..22: mol_type = other DNA
gagtgtgacagcctggggccca

SEQ ID NO: 3381 - DNA, 22 bp, synthetic construct
  misc_feature 1..22: note = chemically synthesized
  source 1..22: mol_type = other DNA
gggcccaggcacacaggtgtgc

SEQ ID NO: 3382 - DNA, 22 bp, synthetic construct
  misc_feature 1..22: note = chemically synthesized
  source 1..22: mol_type = other DNA
tctcacccctctgggagtcccg

SEQ ID NO: 3383 - DNA, 22 bp, synthetic construct
  misc_feature 1..22: note = chemically synthesized
  source 1..22: mol_type = other DNA
acccctctgggagtcccgccca

SEQ ID NO: 3384 - DNA, 22 bp, synthetic construct
  misc_feature 1..22: note = chemically synthesized
  source 1..22: mol_type = other DNA
tgggagtcccgcccaggcccct

SEQ ID NO: 3385 - DNA, 22 bp, synthetic construct
  misc_feature 1..22: note = chemically synthesized
  source 1..22: mol_type = other DNA
ggagtcccgcccaggcccctga

SEQ ID NO: 3386 - DNA, 22 bp, synthetic construct
  misc_feature 1..22: note = chemically synthesized
  source 1..22: mol_type = other DNA
agtctgtcccagcacagggtgg

SEQ ID NO: 3387 - DNA, 22 bp, synthetic construct
  misc_feature 1..22: note = chemically synthesized
  source 1..22: mol_type = other DNA
tcccagcacagggtggccttcc

SEQ ID NO: 3388 - DNA, 22 bp, synthetic construct
  misc_feature 1..22: note = chemically synthesized
  source 1..22: mol_type = other DNA
cctccaccctgcatagccctgg

SEQ ID NO: 3389 - DNA, 22 bp, synthetic construct
  misc_feature 1..22: note = chemically synthesized
  source 1..22: mol_type = other DNA
ctccaccctgcatagccctggg

SEQ ID NO: 3390 - DNA, 22 bp, synthetic construct
  misc_feature 1..22: note = chemically synthesized
  source 1..22: mol_type = other DNA
caccctgcatagccctgggccc

SEQ ID NO: 3391 - DNA, 22 bp, synthetic construct
  misc_feature 1..22: note = chemically synthesized
  source 1..22: mol_type = other DNA
catagccctgggcccacggctt

SEQ ID NO: 3392 - DNA, 22 bp, synthetic construct
  misc_feature 1..22: note = chemically synthesized
  source 1..22: mol_type = other DNA
ggcccacggcttcgttcctgca

SEQ ID NO: 3393 - DNA, 22 bp, synthetic construct
  misc_feature 1..22: note = chemically synthesized
  source 1..22: mol_type = other DNA
cgttcctgcagagtatctgctg

SEQ ID NO: 3394 - DNA, 22 bp, synthetic construct
  misc_feature 1..22: note = chemically synthesized
  source 1..22: mol_type = other DNA
gttcctgcagagtatctgctgg

SEQ ID NO: 3395 - DNA, 22 bp, synthetic construct
  misc_feature 1..22: note = chemically synthesized
  source 1..22: mol_type = other DNA
ctgcagagtatctgctggggtg

SEQ ID NO: 3396 - DNA, 22 bp, synthetic construct
  misc_feature 1..22: note = chemically synthesized
  source 1..22: mol_type = other DNA
cagagtatctgctggggtggtt

SEQ ID NO: 3397 - DNA, 22 bp, synthetic construct
  misc_feature 1..22: note = chemically synthesized
  source 1..22: mol_type = other DNA
ctggggtggtttccgagcttga

SEQ ID NO: 3398 - DNA, 22 bp, synthetic construct
  misc_feature 1..22: note = chemically synthesized
  source 1..22: mol_type = other DNA
gggtggtttccgagcttgaccc

SEQ ID NO: 3399 - DNA, 22 bp, synthetic construct
  misc_feature 1..22: note = chemically synthesized
  source 1..22: mol_type = other DNA
ccgagcttgacccttggaagga

SEQ ID NO: 3400 - DNA, 22 bp, synthetic construct
  misc_feature 1..22: note = chemically synthesized
  source 1..22: mol_type = other DNA
cgagcttgacccttggaaggac

SEQ ID NO: 3401 - DNA, 22 bp, synthetic construct
  misc_feature 1..22: note = chemically synthesized
  source 1..22: mol_type = other DNA
gacccttggaaggacctggctg

SEQ ID NO: 3402 - DNA, 22 bp, synthetic construct
  misc_feature 1..22: note = chemically synthesized
  source 1..22: mol_type = other DNA
acccttggaaggacctggctgg

SEQ ID NO: 3403 - DNA, 22 bp, synthetic construct
  misc_feature 1..22: note = chemically synthesized
  source 1..22: mol_type = other DNA
ggaaggacctggctgggtttaa

SEQ ID NO: 3404 - DNA, 22 bp, synthetic construct
  misc_feature 1..22: note = chemically synthesized
  source 1..22: mol_type = other DNA
gaaggacctggctgggtttaag

SEQ ID NO: 3405 - DNA, 22 bp, synthetic construct
  misc_feature 1..22: note = chemically synthesized
  source 1..22: mol_type = other DNA
gctgggtttaaggcaggagggg

SEQ ID NO: 3406 - DNA, 22 bp, synthetic construct
  misc_feature 1..22: note = chemically synthesized
  source 1..22: mol_type = other DNA
ggtttaaggcaggaggggctgg

SEQ ID NO: 3407 - DNA, 22 bp, synthetic construct
  misc_feature 1..22: note = chemically synthesized
  source 1..22: mol_type = other DNA
aaggcaggaggggctgggggcc

SEQ ID NO: 3408 - DNA, 22 bp, synthetic construct
  misc_feature 1..22: note = chemically synthesized
  source 1..22: mol_type = other DNA
aggcaggaggggctgggggcca

SEQ ID NO: 3409 - DNA, 22 bp, synthetic construct
  misc_feature 1..22: note = chemically synthesized
  source 1..22: mol_type = other DNA
ggggccaggactcctggctctg

SEQ ID NO: 3410 - DNA, 22 bp, synthetic construct
  misc_feature 1..22: note = chemically synthesized
  source 1..22: mol_type = other DNA
ctggctctgaaggaggaggggc

SEQ ID NO: 3411 - DNA, 22 bp, synthetic construct
  misc_feature 1..22: note = chemically synthesized
  source 1..22: mol_type = other DNA
gctctgaaggaggaggggctgg

SEQ ID NO: 3412 - DNA, 22 bp, synthetic construct
  misc_feature 1..22: note = chemically synthesized
  source 1..22: mol_type = other DNA
tgaaggaggaggggctggaacc

SEQ ID NO: 3413 - DNA, 22 bp, synthetic construct
  misc_feature 1..22: note = chemically synthesized
  source 1..22: mol_type = other DNA
aaggaggaggggctggaacctc

SEQ ID NO: 3414 - DNA, 22 bp, synthetic construct
  misc_feature 1..22: note = chemically synthesized
  source 1..22: mol_type = other DNA
gaacctcttccctagtctgagc

SEQ ID NO: 3415 - DNA, 22 bp, synthetic construct
  misc_feature 1..22: note = chemically synthesized
  source 1..22: mol_type = other DNA
ttccctagtctgagcactggaa

SEQ ID NO: 3416 - DNA, 22 bp, synthetic construct
  misc_feature 1..22: note = chemically synthesized
  source 1..22: mol_type = other DNA
ccctagtctgagcactggaagc

SEQ ID NO: 3417 - DNA, 22 bp, synthetic construct
  misc_feature 1..22: note = chemically synthesized
  source 1..22: mol_type = other DNA
cctagtctgagcactggaagcg

SEQ ID NO: 3418 - DNA, 22 bp, synthetic construct
  misc_feature 1..22: note = chemically synthesized
  source 1..22: mol_type = other DNA
gtctgagcactggaagcgccac

SEQ ID NO: 3419 - DNA, 22 bp, synthetic construct
  misc_feature 1..22: note = chemically synthesized
  source 1..22: mol_type = other DNA
agcactggaagcgccacctgtg

SEQ ID NO: 3420 - DNA, 22 bp, synthetic construct
  misc_feature 1..22: note = chemically synthesized
  source 1..22: mol_type = other DNA
gaagcgccacctgtgggtggtg

SEQ ID NO: 3421 - DNA, 22 bp, synthetic construct
  misc_feature 1..22: note = chemically synthesized
  source 1..22: mol_type = other DNA
tgggtggtgacgggggttttgc

SEQ ID NO: 3422 - DNA, 22 bp, synthetic construct
  misc_feature 1..22: note = chemically synthesized
  source 1..22: mol_type = other DNA
tgccgtgtctaacaggtaccat

SEQ ID NO: 3423 - DNA, 22 bp, synthetic construct
  misc_feature 1..22: note = chemically synthesized
  source 1..22: mol_type = other DNA
gccgtgtctaacaggtaccatg

SEQ ID NO: 3424 - DNA, 22 bp, synthetic construct
  misc_feature 1..22: note = chemically synthesized
  source 1..22: mol_type = other DNA
ccgtgtctaacaggtaccatgt

SEQ ID NO: 3425 - DNA, 22 bp, synthetic construct
  misc_feature 1..22: note = chemically synthesized
  source 1..22: mol_type = other DNA
acaggtaccatgtggggttccc

SEQ ID NO: 3426 - DNA, 22 bp, synthetic construct
  misc_feature 1..22: note = chemically synthesized
  source 1..22: mol_type = other DNA
ccgcacccagatgagaagcccc

SEQ ID NO: 3427 - DNA, 22 bp, synthetic construct
  misc_feature 1..22: note = chemically synthesized
  source 1..22: mol_type = other DNA
ccttccccgttcacttcctgtt

SEQ ID NO: 3428 - DNA, 22 bp, synthetic construct
  misc_feature 1..22: note = chemically synthesized
  source 1..22: mol_type = other DNA
ccccgttcacttcctgtttgca

SEQ ID NO: 3429 - DNA, 22 bp, synthetic construct
  misc_feature 1..22: note = chemically synthesized
  source 1..22: mol_type = other DNA
cccgttcacttcctgtttgcag

SEQ ID NO: 3430 - DNA, 22 bp, synthetic construct
  misc_feature 1..22: note = chemically synthesized
  source 1..22: mol_type = other DNA
acttcctgtttgcagatagcca

SEQ ID NO: 3431 - DNA, 22 bp, synthetic construct
  misc_feature 1..22: note = chemically synthesized
  source 1..22: mol_type = other DNA
cctgtttgcagatagccaggag

SEQ ID NO: 3432 - DNA, 22 bp, synthetic construct
  misc_feature 1..22: note = chemically synthesized
  source 1..22: mol_type = other DNA
ctgtttgcagatagccaggagt

SEQ ID NO: 3433 - DNA, 22 bp, synthetic construct
  misc_feature 1..22: note = chemically synthesized
  source 1..22: mol_type = other DNA
tttgcagatagccaggagtcct

SEQ ID NO: 3434 - DNA, 22 bp, synthetic construct
  misc_feature 1..22: note = chemically synthesized
  source 1..22: mol_type = other DNA
gcagatagccaggagtcctttc

SEQ ID NO: 3435 - DNA, 22 bp, synthetic construct
  misc_feature 1..22: note = chemically synthesized
  source 1..22: mol_type = other DNA
cagatagccaggagtcctttcg

SEQ ID NO: 3436 - DNA, 22 bp, synthetic construct
  misc_feature 1..22: note = chemically synthesized
  source 1..22: mol_type = other DNA
tcgtggtttccactgagcactg

SEQ ID NO: 3437 - DNA, 22 bp, synthetic construct
  misc_feature 1..22: note = chemically synthesized
  source 1..22: mol_type = other DNA
cgtggtttccactgagcactga

SEQ ID NO: 3438 - DNA, 22 bp, synthetic construct
  misc_feature 1..22: note = chemically synthesized
  source 1..22: mol_type = other DNA
gtggtttccactgagcactgaa

SEQ ID NO: 3439 - DNA, 22 bp, synthetic construct
  misc_feature 1..22: note = chemically synthesized
  source 1..22: mol_type = other DNA
ccactgagcactgaaggcctgg

SEQ ID NO: 3440 - DNA, 22 bp, synthetic construct
  misc_feature 1..22: note = chemically synthesized
  source 1..22: mol_type = other DNA
cactgagcactgaaggcctggc

SEQ ID NO: 3441 - DNA, 22 bp, synthetic construct
  misc_feature 1..22: note = chemically synthesized
  source 1..22: mol_type = other DNA
agcactgaaggcctggccggcc

SEQ ID NO: 3442 - DNA, 22 bp, synthetic construct
  misc_feature 1..22: note = chemically synthesized
  source 1..22: mol_type = other DNA
aaggcctggccggcctgaccac

SEQ ID NO: 3443 - DNA, 22 bp, synthetic construct
  misc_feature 1..22: note = chemically synthesized
  source 1..22: mol_type = other DNA
gccggcctgaccactgggcaac

SEQ ID NO: 3444 - DNA, 22 bp, synthetic construct
  misc_feature 1..22: note = chemically synthesized
  source 1..22: mol_type = other DNA
accactgggcaaccaggcgtat

SEQ ID NO: 3445 - DNA, 22 bp, synthetic construct
  misc_feature 1..22: note = chemically synthesized
  source 1..22: mol_type = other DNA
ggcaaccaggcgtatcttaaac

SEQ ID NO: 3446 - DNA, 22 bp, synthetic construct
  misc_feature 1..22: note = chemically synthesized
  source 1..22: mol_type = other DNA
aaacagccagtggccagaggct

SEQ ID NO: 3447 - DNA, 22 bp, synthetic construct
  misc_feature 1..22: note = chemically synthesized
  source 1..22: mol_type = other DNA
aacagccagtggccagaggctg

SEQ ID NO: 3448 - DNA, 22 bp, synthetic construct
  misc_feature 1..22: note = chemically synthesized
  source 1..22: mol_type = other DNA
ttgggtcattttccccactgtc

SEQ ID NO: 3449 - DNA, 22 bp, synthetic construct
  misc_feature 1..22: note = chemically synthesized
  source 1..22: mol_type = other DNA
ggtcattttccccactgtccta

SEQ ID NO: 3450 - DNA, 22 bp, synthetic construct
  misc_feature 1..22: note = chemically synthesized
  source 1..22: mol_type = other DNA
tccccactgtcctagcaccgtg

SEQ ID NO: 3451 - DNA, 22 bp, synthetic construct
  misc_feature 1..22: note = chemically synthesized
  source 1..22: mol_type = other DNA
ccccactgtcctagcaccgtgt

SEQ ID NO: 3452 - DNA, 22 bp, synthetic construct
  misc_feature 1..22: note = chemically synthesized
  source 1..22: mol_type = other DNA
cccactgtcctagcaccgtgtc

SEQ ID NO: 3453 - DNA, 22 bp, synthetic construct
  misc_feature 1..22: note = chemically synthesized
  source 1..22: mol_type = other DNA
tcctagcaccgtgtccctggat

SEQ ID NO: 3454 - DNA, 22 bp, synthetic construct
  misc_feature 1..22: note = chemically synthesized
  source 1..22: mol_type = other DNA
gcaccgtgtccctggatctgtt

SEQ ID NO: 3455 - DNA, 22 bp, synthetic construct
  misc_feature 1..22: note = chemically synthesized
  source 1..22: mol_type = other DNA
gatctgttttcgtggctccctc

SEQ ID NO: 3456 - DNA, 22 bp, synthetic construct
  misc_feature 1..22: note = chemically synthesized
  source 1..22: mol_type = other DNA
ttttcgtggctccctctggagt

SEQ ID NO: 3457 - DNA, 22 bp, synthetic construct
  misc_feature 1..22: note = chemically synthesized
  source 1..22: mol_type = other DNA
tcgtggctccctctggagtccc

SEQ ID NO: 3458 - DNA, 22 bp, synthetic construct
  misc_feature 1..22: note = chemically synthesized
  source 1..22: mol_type = other DNA
cgtggctccctctggagtcccg

SEQ ID NO: 3459 - DNA, 22 bp, synthetic construct
  misc_feature 1..22: note = chemically synthesized
  source 1..22: mol_type = other DNA
gtggctccctctggagtcccga

SEQ ID NO: 3460 - DNA, 22 bp, synthetic construct
  misc_feature 1..22: note = chemically synthesized
  source 1..22: mol_type = other DNA
cctctggagtcccgacttgctg

SEQ ID NO: 3461 - DNA, 22 bp, synthetic construct
  misc_feature 1..22: note = chemically synthesized
  source 1..22: mol_type = other DNA
tggagtcccgacttgctgggac

SEQ ID NO: 3462 - DNA, 22 bp, synthetic construct
  misc_feature 1..22: note = chemically synthesized
  source 1..22: mol_type = other DNA
gagtcccgacttgctgggacac

SEQ ID NO: 3463 - DNA, 22 bp, synthetic construct
  misc_feature 1..22: note = chemically synthesized
  source 1..22: mol_type = other DNA
gctgggacaccgtggctggggt

SEQ ID NO: 3464 - DNA, 22 bp, synthetic construct
  misc_feature 1..22: note = chemically synthesized
  source 1..22: mol_type = other DNA
ctgggacaccgtggctggggta

SEQ ID NO: 3465 - DNA, 22 bp, synthetic construct
  misc_feature 1..22: note = chemically synthesized
  source 1..22: mol_type = other DNA
ggacaccgtggctggggtaggt

SEQ ID NO: 3466 - DNA, 22 bp, synthetic construct
  misc_feature 1..22: note = chemically synthesized
  source 1..22: mol_type = other DNA
gggtaggtgcggctgacggctg

SEQ ID NO: 3467 - DNA, 22 bp, synthetic construct
  misc_feature 1..22: note = chemically synthesized
  source 1..22: mol_type = other DNA
acggctgtttcccacccccagg

SEQ ID NO: 3468 - DNA, 22 bp, synthetic construct
  misc_feature 1..22: note = chemically synthesized
  source 1..22: mol_type = other DNA
tttcccacccccaggcctgcat

SEQ ID NO: 3469 - DNA, 22 bp, synthetic construct
  misc_feature 1..22: note = chemically synthesized
  source 1..22: mol_type = other DNA
cccacccccaggcctgcattga

SEQ ID NO: 3470 - DNA, 22 bp, synthetic construct
  misc_feature 1..22: note = chemically synthesized
  source 1..22: mol_type = other DNA
ccacccccaggcctgcattgat

SEQ ID NO: 3471 - DNA, 22 bp, synthetic construct
  misc_feature 1..22: note = chemically synthesized
  source 1..22: mol_type = other DNA
cattgatgagaacctggaggtg

SEQ ID NO: 3472 - DNA, 22 bp, synthetic construct
  misc_feature 1..22: note = chemically synthesized
  source 1..22: mol_type = other DNA
atgagaacctggaggtggtgcg

SEQ ID NO: 3473 - DNA, 22 bp, synthetic construct
  misc_feature 1..22: note = chemically synthesized
  source 1..22: mol_type = other DNA
gaggtggtgcgcttcttggtgg

SEQ ID NO: 3474 - DNA, 22 bp, synthetic construct
  misc_feature 1..22: note = chemically synthesized
  source 1..22: mol_type = other DNA
cttggtggagcagggcgccact

SEQ ID NO: 3475 - DNA, 22 bp, synthetic construct
  misc_feature 1..22: note = chemically synthesized
  source 1..22: mol_type = other DNA
ttggtggagcagggcgccactg

SEQ ID NO: 3476 - DNA, 22 bp, synthetic construct
  misc_feature 1..22: note = chemically synthesized
  source 1..22: mol_type = other DNA
ggtggagcagggcgccactgtg

SEQ ID NO: 3477 - DNA, 22 bp, synthetic construct
  misc_feature 1..22: note = chemically synthesized
  source 1..22: mol_type = other DNA
gtggagcagggcgccactgtga

SEQ ID NO: 3478 - DNA, 22 bp, synthetic construct
  misc_feature 1..22: note = chemically synthesized
  source 1..22: mol_type = other DNA
tgaaccaggcagacaacgaggg

SEQ ID NO: 3479 - DNA, 22 bp, synthetic construct
  misc_feature 1..22: note = chemically synthesized
  source 1..22: mol_type = other DNA
gacgccactgcacgtggccgcc

SEQ ID NO: 3480 - DNA, 22 bp, synthetic construct
  misc_feature 1..22: note = chemically synthesized
  source 1..22: mol_type = other DNA
cacgtggccgcctcctgtggct

SEQ ID NO: 3481 - DNA, 22 bp, synthetic construct
  misc_feature 1..22: note = chemically synthesized
  source 1..22: mol_type = other DNA
ctgtggctacctagatatcgcc

SEQ ID NO: 3482 - DNA, 20 bp, synthetic construct
  misc_feature 1..20: note = chemically synthesized
  source 1..20: mol_type = other DNA
taatttccctccgtttgtcc

SEQ ID NO: 3483 - DNA, 20 bp, synthetic construct
  misc_feature 1..20: note = chemically synthesized
  source 1..20: mol_type = other DNA
ctgtcaaccccacacgcctt

SEQ ID NO: 3484 - DNA, 20 bp, synthetic construct
  misc_feature 1..20: note = chemically synthesized
  source 1..20: mol_type = other DNA
cacacgcctttggcacaatg

SEQ ID NO: 3485 - DNA, 20 bp, synthetic construct
  misc_feature 1..20: note = chemically synthesized
  source 1..20: mol_type = other DNA
acgcctttggcacaatgaag

SEQ ID NO: 3486 - DNA, 20 bp, synthetic construct
  misc_feature 1..20: note = chemically synthesized
  source 1..20: mol_type = other DNA
cgcctttggcacaatgaagt

SEQ ID NO: 3487 - DNA, 20 bp, synthetic construct
  misc_feature 1..20: note = chemically synthesized
  source 1..20: mol_type = other DNA
atttcccttctttttctctt

SEQ ID NO: 3488 - DNA, 20 bp, synthetic construct
  misc_feature 1..20: note = chemically synthesized
  source 1..20: mol_type = other DNA
ccttctttttctctttagct

SEQ ID NO: 3489 - DNA, 20 bp, synthetic construct
  misc_feature 1..20: note = chemically synthesized
  source 1..20: mol_type = other DNA
ctctttagctcggcttattc

SEQ ID NO: 3490 - DNA, 20 bp, synthetic construct
  misc_feature 1..20: note = chemically synthesized
  source 1..20: mol_type = other DNA
tctttagctcggcttattcc

SEQ ID NO: 3491 - DNA, 20 bp, synthetic construct
  misc_feature 1..20: note = chemically synthesized
  source 1..20: mol_type = other DNA
ctttagctcggcttattcca

SEQ ID NO: 3492 - DNA, 20 bp, synthetic construct
  misc_feature 1..20: note = chemically synthesized
  source 1..20: mol_type = other DNA
tttagctcggcttattccag

SEQ ID NO: 3493 - DNA, 20 bp, synthetic construct
  misc_feature 1..20: note = chemically synthesized
  source 1..20: mol_type = other DNA
ttccaggggtgtgtttcgtc

SEQ ID NO: 3494 - DNA, 20 bp, synthetic construct
  misc_feature 1..20: note = chemically synthesized
  source 1..20: mol_type = other DNA
tgtttcgtcgagatgcacgt

SEQ ID NO: 3495 - DNA, 20 bp, synthetic construct
  misc_feature 1..20: note = chemically synthesized
  source 1..20: mol_type = other DNA
caacttttattctattttcc

SEQ ID NO: 3496 - DNA, 20 bp, synthetic construct
  misc_feature 1..20: note = chemically synthesized
  source 1..20: mol_type = other DNA
tctattttcccagtaaaata

SEQ ID NO: 3497 - DNA, 20 bp, synthetic construct
  misc_feature 1..20: note = chemically synthesized
  source 1..20: mol_type = other DNA
ttcccagtaaaataaagttt

SEQ ID NO: 3498 - DNA, 20 bp, synthetic construct
  misc_feature 1..20: note = chemically synthesized
  source 1..20: mol_type = other DNA
tagtaaactctgcatcttta

SEQ ID NO: 3499 - DNA, 20 bp, synthetic construct
  misc_feature 1..20: note = chemically synthesized
  source 1..20: mol_type = other DNA
gcatctttaaagaattattt

SEQ ID NO: 3500 - DNA, 20 bp, synthetic construct
  misc_feature 1..20: note = chemically synthesized
  source 1..20: mol_type = other DNA
tttggcatttatttctaaaa

SEQ ID NO: 3501 - DNA, 20 bp, synthetic construct
  misc_feature 1..20: note = chemically synthesized
  source 1..20: mol_type = other DNA
catttatttctaaaatggca

SEQ ID NO: 3502 - DNA, 20 bp, synthetic construct
  misc_feature 1..20: note = chemically synthesized
  source 1..20: mol_type = other DNA
catagtattttgtatttgtg

SEQ ID NO: 3503 - DNA, 20 bp, synthetic construct
  misc_feature 1..20: note = chemically synthesized
  source 1..20: mol_type = other DNA
ttgtatttgtgaagtcttac

SEQ ID NO: 3504 - DNA, 20 bp, synthetic construct
  misc_feature 1..20: note = chemically synthesized
  source 1..20: mol_type = other DNA
tgtatttgtgaagtcttaca

SEQ ID NO: 3505 - DNA, 20 bp, synthetic construct
  misc_feature 1..20: note = chemically synthesized
  source 1..20: mol_type = other DNA
ttaataaaattcaaacatcc

SEQ ID NO: 3506 - DNA, 20 bp, synthetic construct
  misc_feature 1..20: note = chemically synthesized
  source 1..20: mol_type = other DNA
taataaaattcaaacatcct

SEQ ID NO: 3507 - DNA, 20 bp, synthetic construct
  misc_feature 1..20: note = chemically synthesized
  source 1..20: mol_type = other DNA
atcctaggtaaaaaaaaaaa

SEQ ID NO: 3508 - DNA, 20 bp, synthetic construct
  misc_feature 1..20: note = chemically synthesized
  source 1..20: mol_type = other DNA
tcctaggtaaaaaaaaaaaa

SEQ ID NO: 3509 - DNA, 20 bp, synthetic construct
  misc_feature 1..20: note = chemically synthesized
  source 1..20: mol_type = other DNA
aggtaaaaaaaaaaaaaggt

SEQ ID NO: 3510 - DNA, 20 bp, synthetic construct
  misc_feature 1..20: note = chemically synthesized
  source 1..20: mol_type = other DNA
aaaaaaaggtcagaattgtt

SEQ ID NO: 3511 - DNA, 20 bp, synthetic construct
  misc_feature 1..20: note = chemically synthesized
  source 1..20: mol_type = other DNA
gtaattttcttttgcgcact

SEQ ID NO: 3512 - DNA, 20 bp, synthetic construct
  misc_feature 1..20: note = chemically synthesized
  source 1..20: mol_type = other DNA
taattttcttttgcgcacta

SEQ ID NO: 3513 - DNA, 20 bp, synthetic construct
  misc_feature 1..20: note = chemically synthesized
  source 1..20: mol_type = other DNA
tttcttttgcgcactaagga

SEQ ID NO: 3514 - DNA, 20 bp, synthetic construct
  misc_feature 1..20: note = chemically synthesized
  source 1..20: mol_type = other DNA
tgcgcactaaggaaagtgca

SEQ ID NO: 3515 - DNA, 20 bp, synthetic construct
  misc_feature 1..20: note = chemically synthesized
  source 1..20: mol_type = other DNA
aaggaaagtgcaaagtaact

SEQ ID NO: 3516 - DNA, 20 bp, synthetic construct
  misc_feature 1..20: note = chemically synthesized
  source 1..20: mol_type = other DNA
ggaaagtgcaaagtaactta

SEQ ID NO: 3517 - DNA, 20 bp, synthetic construct
  misc_feature 1..20: note = chemically synthesized
  source 1..20: mol_type = other DNA
ttagagtgactgaaacttca

SEQ ID NO: 3518 - DNA, 20 bp, synthetic construct
  misc_feature 1..20: note = chemically synthesized
  source 1..20: mol_type = other DNA
gtgactgaaacttcacagaa

SEQ ID NO: 3519 - DNA, 20 bp, synthetic construct
  misc_feature 1..20: note = chemically synthesized
  source 1..20: mol_type = other DNA
tgactgaaacttcacagaat

SEQ ID NO: 3520 - DNA, 20 bp, synthetic construct
  misc_feature 1..20: note = chemically synthesized
  source 1..20: mol_type = other DNA
gactgaaacttcacagaata

SEQ ID NO: 3521 - DNA, 20 bp, synthetic construct
  misc_feature 1..20: note = chemically synthesized
  source 1..20: mol_type = other DNA
aacttcacagaatagggttg

SEQ ID NO: 3522 - DNA, 20 bp, synthetic construct
  misc_feature 1..20: note = chemically synthesized
  source 1..20: mol_type = other DNA
ttgaattcataactatccca

SEQ ID NO: 3523 - DNA, 20 bp, synthetic construct
  misc_feature 1..20: note = chemically synthesized
  source 1..20: mol_type = other DNA
tgtgctgttgatctcataaa

SEQ ID NO: 3524 - DNA, 20 bp, synthetic construct
  misc_feature 1..20: note = chemically synthesized
  source 1..20: mol_type = other DNA
atttatatttattttcattt

SEQ ID NO: 3525 - DNA, 20 bp, synthetic construct
  misc_feature 1..20: note = chemically synthesized
  source 1..20: mol_type = other DNA
ttcattttagtctgtcttct

SEQ ID NO: 3526 - DNA, 20 bp, synthetic construct
  misc_feature 1..20: note = chemically synthesized
  source 1..20: mol_type = other DNA
gtcttcttggttgctgttga

SEQ ID NO: 3527 - DNA, 20 bp, synthetic construct
  misc_feature 1..20: note = chemically synthesized
  source 1..20: mol_type = other DNA
ttgctgttgatagacactaa

SEQ ID NO: 3528 - DNA, 20 bp, synthetic construct
  misc_feature 1..20: note = chemically synthesized
  source 1..20: mol_type = other DNA
gctgttgatagacactaaaa

SEQ ID NO: 3529 - DNA, 20 bp, synthetic construct
  misc_feature 1..20: note = chemically synthesized
  source 1..20: mol_type = other DNA
gatagacactaaaagagtat

SEQ ID NO: 3530 - DNA, 20 bp, synthetic construct
  misc_feature 1..20: note = chemically synthesized
  source 1..20: mol_type = other DNA
aagagtattagatattatct

SEQ ID NO: 3531 - DNA, 20 bp, synthetic construct
  misc_feature 1..20: note = chemically synthesized
  source 1..20: mol_type = other DNA
tattatctaagtttgaatat

SEQ ID NO: 3532 - DNA, 20 bp, synthetic construct
  misc_feature 1..20: note = chemically synthesized
  source 1..20: mol_type = other DNA
attatctaagtttgaatata

SEQ ID NO: 3533 - DNA, 20 bp, synthetic construct
  misc_feature 1..20: note = chemically synthesized
  source 1..20: mol_type = other DNA
atatttaataatttttaaaa

SEQ ID NO: 3534 - DNA, 20 bp, synthetic construct
  misc_feature 1..20: note = chemically synthesized
  source 1..20: mol_type = other DNA
aatttttaaaatagtattct

SEQ ID NO: 3535 - DNA, 20 bp, synthetic construct
  misc_feature 1..20: note = chemically synthesized
  source 1..20: mol_type = other DNA
ttgaattattcttctgttta

SEQ ID NO: 3536 - DNA, 20 bp, synthetic construct
  misc_feature 1..20: note = chemically synthesized
  source 1..20: mol_type = other DNA
tgaattattcttctgtttaa

SEQ ID NO: 3537 - DNA, 20 bp, synthetic construct
  misc_feature 1..20: note = chemically synthesized
  source 1..20: mol_type = other DNA
attattcttctgtttaaagg

SEQ ID NO: 3538 - DNA, 20 bp, synthetic construct
  misc_feature 1..20: note = chemically synthesized
  source 1..20: mol_type = other DNA
attcttctgtttaaaggcag

SEQ ID NO: 3539 - DNA, 20 bp, synthetic construct
  misc_feature 1..20: note = chemically synthesized
  source 1..20: mol_type = other DNA
aaataattgaacatcatcct

SEQ ID NO: 3540 - DNA, 20 bp, synthetic construct
  misc_feature 1..20: note = chemically synthesized
  source 1..20: mol_type = other DNA
catcatcctgagtttttctg

SEQ ID NO: 3541 - DNA, 20 bp, synthetic construct
  misc_feature 1..20: note = chemically synthesized
  source 1..20: mol_type = other DNA
atcatcctgagtttttctgt

SEQ ID NO: 3542 - DNA, 20 bp, synthetic construct
  misc_feature 1..20: note = chemically synthesized
  source 1..20: mol_type = other DNA
ctgagtttttctgtaggaat

SEQ ID NO: 3543 - DNA, 20 bp, synthetic construct
  misc_feature 1..20: note = chemically synthesized
  source 1..20: mol_type = other DNA
gagtttttctgtaggaatca

SEQ ID NO: 3544 - DNA, 20 bp, synthetic construct
  misc_feature 1..20: note = chemically synthesized
  source 1..20: mol_type = other DNA
ttgaaacaaatgcataatct

SEQ ID NO: 3545 - DNA, 20 bp, synthetic construct
  misc_feature 1..20: note = chemically synthesized
  source 1..20: mol_type = other DNA
aatgcataatctaagtcaaa

SEQ ID NO: 3546 - DNA, 20 bp, synthetic construct
  misc_feature 1..20: note = chemically synthesized
  source 1..20: mol_type = other DNA
cataatctaagtcaaatgga

SEQ ID NO: 3547 - DNA, 20 bp, synthetic construct
  misc_feature 1..20: note = chemically synthesized
  source 1..20: mol_type = other DNA
caaatggaaagaaatataaa

SEQ ID NO: 3548 - DNA, 20 bp, synthetic construct
  misc_feature 1..20: note = chemically synthesized
  source 1..20: mol_type = other DNA
ttattacttcttgttttctt

SEQ ID NO: 3549 - DNA, 20 bp, synthetic construct
  misc_feature 1..20: note = chemically synthesized
  source 1..20: mol_type = other DNA
cttttttttcttcccttgcc

SEQ ID NO: 3550 - DNA, 20 bp, synthetic construct
  misc_feature 1..20: note = chemically synthesized
  source 1..20: mol_type = other DNA
ttttcttcccttgcccagac

SEQ ID NO: 3551 - DNA, 20 bp, synthetic construct
  misc_feature 1..20: note = chemically synthesized
  source 1..20: mol_type = other DNA
ttcttcccttgcccagacaa

SEQ ID NO: 3552 - DNA, 20 bp, synthetic construct
  misc_feature 1..20: note = chemically synthesized
  source 1..20: mol_type = other DNA
tcccttgcccagacaagagt

SEQ ID NO: 3553 - DNA, 20 bp, synthetic construct
  misc_feature 1..20: note = chemically synthesized
  source 1..20: mol_type = other DNA
cccttgcccagacaagagtg

SEQ ID NO: 3554 - DNA, 20 bp, synthetic construct
  misc_feature 1..20: note = chemically synthesized
  source 1..20: mol_type = other DNA
acaagagtgaggttgctcat

SEQ ID NO: 3555 - DNA, 20 bp, synthetic construct
  misc_feature 1..20: note = chemically synthesized
  source 1..20: mol_type = other DNA
tgaggttgctcatcggttta

SEQ ID NO: 3556 - DNA, 20 bp, synthetic construct
  misc_feature 1..20: note = chemically synthesized
  source 1..20: mol_type = other DNA
tgctcatcggtttaaagatt

SEQ ID NO: 3557 - DNA, 20 bp, synthetic construct
  misc_feature 1..20: note = chemically synthesized
  source 1..20: mol_type = other DNA
gctcatcggtttaaagattt

SEQ ID NO: 3558 - DNA, 20 bp, synthetic construct
  misc_feature 1..20: note = chemically synthesized
  source 1..20: mol_type = other DNA
tcatcggtttaaagatttgg

SEQ ID NO: 3559 - DNA, 20 bp, synthetic construct
  misc_feature 1..20: note = chemically synthesized
  source 1..20: mol_type = other DNA
tcggtttaaagatttgggag

SEQ ID NO: 3560 - DNA, 20 bp, synthetic construct
  misc_feature 1..20: note = chemically synthesized
  source 1..20: mol_type = other DNA
tttgggagaagaaaatttca

SEQ ID NO: 3561 - DNA, 20 bp, synthetic construct
  misc_feature 1..20: note = chemically synthesized
  source 1..20: mol_type = other DNA
tcccaaatctttaaaccgat

SEQ ID NO: 3562 - DNA, 20 bp, synthetic construct
  misc_feature 1..20: note = chemically synthesized
  source 1..20: mol_type = other DNA
tgagcaacctcactcttgtc

SEQ ID NO: 3563 - DNA, 20 bp, synthetic construct
  misc_feature 1..20: note = chemically synthesized
  source 1..20: mol_type = other DNA
gagcaacctcactcttgtct

SEQ ID NO: 3564 - DNA, 20 bp, synthetic construct
  misc_feature 1..20: note = chemically synthesized
  source 1..20: mol_type = other DNA
aacctcactcttgtctgggc

SEQ ID NO: 3565 - DNA, 20 bp, synthetic construct
  misc_feature 1..20: note = chemically synthesized
  source 1..20: mol_type = other DNA
acctcactcttgtctgggca

SEQ ID NO: 3566 - DNA, 20 bp, synthetic construct
  misc_feature 1..20: note = chemically synthesized
  source 1..20: mol_type = other DNA
cctcactcttgtctgggcaa

SEQ ID NO: 3567 - DNA, 20 bp, synthetic construct
  misc_feature 1..20: note = chemically synthesized
  source 1..20: mol_type = other DNA
cactcttgtctgggcaaggg

SEQ ID NO: 3568 - DNA, 20 bp, synthetic construct
  misc_feature 1..20: note = chemically synthesized
  source 1..20: mol_type = other DNA
ctgggcaagggaagaaaaaa

SEQ ID NO: 3569 - DNA, 20 bp, synthetic construct
  misc_feature 1..20: note = chemically synthesized
  source 1..20: mol_type = other DNA
tgggcaagggaagaaaaaaa

SEQ ID NO: 3570 - DNA, 20 bp, synthetic construct
  misc_feature 1..20: note = chemically synthesized
  source 1..20: mol_type = other DNA
aaaaggattgttaaatactg

SEQ ID NO: 3571 - DNA, 20 bp, synthetic construct
  misc_feature 1..20: note = chemically synthesized
  source 1..20: mol_type = other DNA
tgttaaatactgaagaaaac

SEQ ID NO: 3572 - DNA, 20 bp, synthetic construct
  misc_feature 1..20: note = chemically synthesized
  source 1..20: mol_type = other DNA
taaatactgaagaaaacaag

SEQ ID NO: 3573 - DNA, 20 bp, synthetic construct
  misc_feature 1..20: note = chemically synthesized
  source 1..20: mol_type = other DNA
atatttctttccatttgact

SEQ ID NO: 3574 - DNA, 20 bp, synthetic construct
  misc_feature 1..20: note = chemically synthesized
  source 1..20: mol_type = other DNA
atgcatttgtttcaaaatat

SEQ ID NO: 3575 - DNA, 20 bp, synthetic construct
  misc_feature 1..20: note = chemically synthesized
  source 1..20: mol_type = other DNA
tgcatttgtttcaaaatatt

SEQ ID NO: 3576 - DNA, 20 bp, synthetic construct
  misc_feature 1..20: note = chemically synthesized
  source 1..20: mol_type = other DNA
atattgggctctgattccta

SEQ ID NO: 3577 - DNA, 20 bp, synthetic construct
  misc_feature 1..20: note = chemically synthesized
  source 1..20: mol_type = other DNA
ctgattcctacagaaaaact

SEQ ID NO: 3578 - DNA, 20 bp, synthetic construct
  misc_feature 1..20: note = chemically synthesized
  source 1..20: mol_type = other DNA
tgattcctacagaaaaactc

SEQ ID NO: 3579 - DNA, 20 bp, synthetic construct
  misc_feature 1..20: note = chemically synthesized
  source 1..20: mol_type = other DNA
ttatttcttctgcctttaaa

SEQ ID NO: 3580 - DNA, 20 bp, synthetic construct
  misc_feature 1..20: note = chemically synthesized
  source 1..20: mol_type = other DNA
tttcttctgcctttaaacag

SEQ ID NO: 3581 - DNA, 20 bp, synthetic construct
  misc_feature 1..20: note = chemically synthesized
  source 1..20: mol_type = other DNA
agaagaataattcaattacc

SEQ ID NO: 3582 - DNA, 20 bp, synthetic construct
  misc_feature 1..20: note = chemically synthesized
  source 1..20: mol_type = other DNA
taaaaattattaaatattta

SEQ ID NO: 3583 - DNA, 20 bp, synthetic construct
  misc_feature 1..20: note = chemically synthesized
  source 1..20: mol_type = other DNA
tatagccttatattcaaact

SEQ ID NO: 3584 - DNA, 20 bp, synthetic construct
  misc_feature 1..20: note = chemically synthesized
  source 1..20: mol_type = other DNA
gataatatctaatactcttt

SEQ ID NO: 3585 - DNA, 20 bp, synthetic construct
  misc_feature 1..20: note = chemically synthesized
  source 1..20: mol_type = other DNA
actcttttagtgtctatcaa

SEQ ID NO: 3586 - DNA, 20 bp, synthetic construct
  misc_feature 1..20: note = chemically synthesized
  source 1..20: mol_type = other DNA
agtgtctatcaacagcaacc

SEQ ID NO: 3587 - DNA, 20 bp, synthetic construct
  misc_feature 1..20: note = chemically synthesized
  source 1..20: mol_type = other DNA
gtctatcaacagcaaccaag

SEQ ID NO: 3588 - DNA, 20 bp, synthetic construct
  misc_feature 1..20: note = chemically synthesized
  source 1..20: mol_type = other DNA
atcaacagcaaccaagaaga

SEQ ID NO: 3589 - DNA, 20 bp, synthetic construct
  misc_feature 1..20: note = chemically synthesized
  source 1..20: mol_type = other DNA
atgaaaataaatataaatac

SEQ ID NO: 3590 - DNA, 20 bp, synthetic construct
  misc_feature 1..20: note = chemically synthesized
  source 1..20: mol_type = other DNA
taaatacaagttctatttat

SEQ ID NO: 3591 - DNA, 20 bp, synthetic construct
  misc_feature 1..20: note = chemically synthesized
  source 1..20: mol_type = other DNA
agttctatttatgagatcaa

SEQ ID NO: 3592 - DNA, 20 bp, synthetic construct
  misc_feature 1..20: note = chemically synthesized
  source 1..20: mol_type = other DNA
tatttatgagatcaacagca

SEQ ID NO: 3593 - DNA, 20 bp, synthetic construct
  misc_feature 1..20: note = chemically synthesized
  source 1..20: mol_type = other DNA
atttatgagatcaacagcac

SEQ ID NO: 3594 - DNA, 20 bp, synthetic construct
  misc_feature 1..20: note = chemically synthesized
  source 1..20: mol_type = other DNA
gatcaacagcacaggttttg

SEQ ID NO: 3595 - DNA, 20 bp, synthetic construct
  misc_feature 1..20: note = chemically synthesized
  source 1..20: mol_type = other DNA
ggttttgtggtttttaaata

SEQ ID NO: 3596 - DNA, 20 bp, synthetic construct
  misc_feature 1..20: note = chemically synthesized
  source 1..20: mol_type = other DNA
tgtggtttttaaataaagca

SEQ ID NO: 3597 - DNA, 20 bp, synthetic construct
  misc_feature 1..20: note = chemically synthesized
  source 1..20: mol_type = other DNA
ttaaataaagcatagtgcaa

SEQ ID NO: 3598 - DNA, 20 bp, synthetic construct
  misc_feature 1..20: note = chemically synthesized
  source 1..20: mol_type = other DNA
ataaagcatagtgcaatgga

SEQ ID NO: 3599 - DNA, 20 bp, synthetic construct
  misc_feature 1..20: note = chemically synthesized
  source 1..20: mol_type = other DNA
taaagcatagtgcaatggat

SEQ ID NO: 3600 - DNA, 20 bp, synthetic construct
  misc_feature 1..20: note = chemically synthesized
  source 1..20: mol_type = other DNA
tagtgcaatggataggtctt

SEQ ID NO: 3601 - DNA, 20 bp, synthetic construct
  misc_feature 1..20: note = chemically synthesized
  source 1..20: mol_type = other DNA
agtgcaatggataggtcttt

SEQ ID NO: 3602 - DNA, 20 bp, synthetic construct
  misc_feature 1..20: note = chemically synthesized
  source 1..20: mol_type = other DNA
caatggataggtctttggga

SEQ ID NO: 3603 - DNA, 20 bp, synthetic construct
  misc_feature 1..20: note = chemically synthesized
  source 1..20: mol_type = other DNA
atcttcaaccctattctgtg

SEQ ID NO: 3604 - DNA, 20 bp, synthetic construct
  misc_feature 1..20: note = chemically synthesized
  source 1..20: mol_type = other DNA
aaccctattctgtgaagttt

SEQ ID NO: 3605 - DNA, 20 bp, synthetic construct
  misc_feature 1..20: note = chemically synthesized
  source 1..20: mol_type = other DNA
tgtgaagtttcagtcactct

SEQ ID NO: 3606 - DNA, 20 bp, synthetic construct
  misc_feature 1..20: note = chemically synthesized
  source 1..20: mol_type = other DNA
aagttactttgcactttcct

SEQ ID NO: 3607 - DNA, 20 bp, synthetic construct
  misc_feature 1..20: note = chemically synthesized
  source 1..20: mol_type = other DNA
gcactttccttagtgcgcaa

SEQ ID NO: 3608 - DNA, 20 bp, synthetic construct
  misc_feature 1..20: note = chemically synthesized
  source 1..20: mol_type = other DNA
tagtgcgcaaaagaaaatta

SEQ ID NO: 3609 - DNA, 20 bp, synthetic construct
  misc_feature 1..20: note = chemically synthesized
  source 1..20: mol_type = other DNA
gacctttttttttttttacc

SEQ ID NO: 3610 - DNA, 20 bp, synthetic construct
  misc_feature 1..20: note = chemically synthesized
  source 1..20: mol_type = other DNA
acctttttttttttttacct

SEQ ID NO: 3611 - DNA, 20 bp, synthetic construct
  misc_feature 1..20: note = chemically synthesized
  source 1..20: mol_type = other DNA
gatgtttgaattttattaat

SEQ ID NO: 3612 - DNA, 20 bp, synthetic construct
  misc_feature 1..20: note = chemically synthesized
  source 1..20: mol_type = other DNA
tattaataagataaccttgt

SEQ ID NO: 3613 - DNA, 20 bp, synthetic construct
  misc_feature 1..20: note = chemically synthesized
  source 1..20: mol_type = other DNA
tacaaaatactatgccattt

SEQ ID NO: 3614 - DNA, 20 bp, synthetic construct
  misc_feature 1..20: note = chemically synthesized
  source 1..20: mol_type = other DNA
aatgccaaaataattcttta

SEQ ID NO: 3615 - DNA, 20 bp, synthetic construct
  misc_feature 1..20: note = chemically synthesized
  source 1..20: mol_type = other DNA
aaaataattctttaaagatg

SEQ ID NO: 3616 - DNA, 20 bp, synthetic construct
  misc_feature 1..20: note = chemically synthesized
  source 1..20: mol_type = other DNA
aataattctttaaagatgca

SEQ ID NO: 3617 - DNA, 20 bp, synthetic construct
  misc_feature 1..20: note = chemically synthesized
  source 1..20: mol_type = other DNA
ttactaaaactttattttac

SEQ ID NO: 3618 - DNA, 20 bp, synthetic construct
  misc_feature 1..20: note = chemically synthesized
  source 1..20: mol_type = other DNA
tactaaaactttattttact

SEQ ID NO: 3619 - DNA, 20 bp, synthetic construct
  misc_feature 1..20: note = chemically synthesized
  source 1..20: mol_type = other DNA
actttattttactgggaaaa

SEQ ID NO: 3620 - DNA, 20 bp, synthetic construct
  misc_feature 1..20: note = chemically synthesized
  source 1..20: mol_type = other DNA
ttactgggaaaatagaataa

SEQ ID NO: 3621 - DNA, 20 bp, synthetic construct
  misc_feature 1..20: note = chemically synthesized
  source 1..20: mol_type = other DNA
atagaataaaagttgaacaa

SEQ ID NO: 3622 - DNA, 20 bp, synthetic construct
  misc_feature 1..20: note = chemically synthesized
  source 1..20: mol_type = other DNA
aaagttgaacaatagaaaaa

SEQ ID NO: 3623 - DNA, 20 bp, synthetic construct
  misc_feature 1..20: note = chemically synthesized
  source 1..20: mol_type = other DNA
atctcgacgaaacacacccc

SEQ ID NO: 3624 - DNA, 20 bp, synthetic construct
  misc_feature 1..20: note = chemically synthesized
  source 1..20: mol_type = other DNA
acgaaacacacccctggaat

SEQ ID NO: 3625 - DNA, 20 bp, synthetic construct
  misc_feature 1..20: note = chemically synthesized
  source 1..20: mol_type = other DNA
acacacccctggaataagcc

SEQ ID NO: 3626 - DNA, 20 bp, synthetic construct
  misc_feature 1..20: note = chemically synthesized
  source 1..20: mol_type = other DNA
ccctggaataagccgagcta

SEQ ID NO: 3627 - DNA, 20 bp, synthetic construct
  misc_feature 1..20: note = chemically synthesized
  source 1..20: mol_type = other DNA
ctggaataagccgagctaaa

SEQ ID NO: 3628 - DNA, 20 bp, synthetic construct
  misc_feature 1..20: note = chemically synthesized
  source 1..20: mol_type = other DNA
taagccgagctaaagagaaa

SEQ ID NO: 3629 - DNA, 20 bp, synthetic construct
  misc_feature 1..20: note = chemically synthesized
  source 1..20: mol_type = other DNA
gccgagctaaagagaaaaag

SEQ ID NO: 3630 - DNA, 20 bp, synthetic construct
  misc_feature 1..20: note = chemically synthesized
  source 1..20: mol_type = other DNA
ccgagctaaagagaaaaaga

SEQ ID NO: 3631 - DNA, 20 bp, synthetic construct
  misc_feature 1..20: note = chemically synthesized
  source 1..20: mol_type = other DNA
cgagctaaagagaaaaagaa

SEQ ID NO: 3632 - DNA, 20 bp, synthetic construct
  misc_feature 1..20: note = chemically synthesized
  source 1..20: mol_type = other DNA
agagaaaaagaagggaaata

SEQ ID NO: 3633 - DNA, 20 bp, synthetic construct
  misc_feature 1..20: note = chemically synthesized
  source 1..20: mol_type = other DNA
gagaaaaagaagggaaataa

SEQ ID NO: 3634 - DNA, 20 bp, synthetic construct
  misc_feature 1..20: note = chemically synthesized
  source 1..20: mol_type = other DNA
ttacccacttcattgtgcca

SEQ ID NO: 3635 - DNA, 20 bp, synthetic construct
  misc_feature 1..20: note = chemically synthesized
  source 1..20: mol_type = other DNA
tacccacttcattgtgccaa

SEQ ID NO: 3636 - DNA, 20 bp, synthetic construct
  misc_feature 1..20: note = chemically synthesized
  source 1..20: mol_type = other DNA
ttcattgtgccaaaggcgtg

SEQ ID NO: 3637 - DNA, 20 bp, synthetic construct
  misc_feature 1..20: note = chemically synthesized
  source 1..20: mol_type = other DNA
tcattgtgccaaaggcgtgt

SEQ ID NO: 3638 - DNA, 20 bp, synthetic construct
  misc_feature 1..20: note = chemically synthesized
  source 1..20: mol_type = other DNA
cattgtgccaaaggcgtgtg

SEQ ID NO: 3639 - DNA, 20 bp, synthetic construct
  misc_feature 1..20: note = chemically synthesized
  source 1..20: mol_type = other DNA
ccaaaggcgtgtggggttga

SEQ ID NO: 3640 - DNA, 20 bp, synthetic construct
  misc_feature 1..20: note = chemically synthesized
  source 1..20: mol_type = other DNA
aaggcgtgtggggttgacag

SEQ ID NO: 3641 - DNA, 20 bp, synthetic construct
  misc_feature 1..20: note = chemically synthesized
  source 1..20: mol_type = other DNA
ggcgtgtggggttgacagaa

SEQ ID NO: 3642 - DNA, 20 bp, synthetic construct
  misc_feature 1..20: note = chemically synthesized
  source 1..20: mol_type = other DNA
gtggggttgacagaagagaa

SEQ ID NO: 3643 - DNA, 20 bp, synthetic construct
  misc_feature 1..20: note = chemically synthesized
  source 1..20: mol_type = other DNA
ggttgacagaagagaaaagc

SEQ ID NO: 3644 - DNA, 20 bp, synthetic construct
  misc_feature 1..20: note = chemically synthesized
  source 1..20: mol_type = other DNA
gttgacagaagagaaaagct

SEQ ID NO: 3645 - DNA, 20 bp, synthetic construct
  misc_feature 1..20: note = chemically synthesized
  source 1..20: mol_type = other DNA
aagagaaaagctaggacaaa

SEQ ID NO: 3646 - DNA, 20 bp, synthetic construct
  misc_feature 1..20: note = chemically synthesized
  source 1..20: mol_type = other DNA
gagaaaagctaggacaaacg

SEQ ID NO: 3647 - DNA, 20 bp, synthetic construct
  misc_feature 1..20: note = chemically synthesized
  source 1..20: mol_type = other DNA
agaaaagctaggacaaacgg

SEQ ID NO: 3648 - DNA, 20 bp, synthetic construct
  misc_feature 1..20: note = chemically synthesized
  source 1..20: mol_type = other DNA
gaaaagctaggacaaacgga

SEQ ID NO: 3649 - DNA, 20 bp, synthetic construct
  misc_feature 1..20: note = chemically synthesized
  source 1..20: mol_type = other DNA
taggacaaacggagggaaat

SEQ ID NO: 3650 - DNA, 20 bp, synthetic construct
  misc_feature 1..20: note = chemically synthesized
  source 1..20: mol_type = other DNA
cacgcctttggcacaatgaa

SEQ ID NO: 3651 - DNA, 20 bp, synthetic construct
  misc_feature 1..20: note = chemically synthesized
  source 1..20: mol_type = other DNA
tctttagctcggcttattcc

SEQ ID NO: 3652 - DNA, 20 bp, synthetic construct
  misc_feature 1..20: note = chemically synthesized
  source 1..20: mol_type = other DNA
tagtaaactctgcatcttta

SEQ ID NO: 3653 - DNA, 20 bp, synthetic construct
  misc_feature 1..20: note = chemically synthesized
  source 1..20: mol_type = other DNA
aggtaaaaaaaaaaaaaggt

SEQ ID NO: 3654 - DNA, 20 bp, synthetic construct
  misc_feature 1..20: note = chemically synthesized
  source 1..20: mol_type = other DNA
aaggaaagtgcaaagtaact

SEQ ID NO: 3655 - DNA, 20 bp, synthetic construct
  misc_feature 1..20: note = chemically synthesized
  source 1..20: mol_type = other DNA
ttagagtgactgaaacttca

SEQ ID NO: 3656 - DNA, 20 bp, synthetic construct
  misc_feature 1..20: note = chemically synthesized
  source 1..20: mol_type = other DNA
gtgactgaaacttcacagaa

SEQ ID NO: 3657 - DNA, 20 bp, synthetic construct
  misc_feature 1..20: note = chemically synthesized
  source 1..20: mol_type = other DNA
tcacagaatagggttgaaga

SEQ ID NO: 3658 - DNA, 20 bp, synthetic construct
  misc_feature 1..20: note = chemically synthesized
  source 1..20: mol_type = other DNA
ttgctgttgatagacactaa

SEQ ID NO: 3659 - DNA, 20 bp, synthetic construct
  misc_feature 1..20: note = chemically synthesized
  source 1..20: mol_type = other DNA
gtattagatattatctaagt

SEQ ID NO: 3660 - DNA, 20 bp, synthetic construct
  misc_feature 1..20: note = chemically synthesized
  source 1..20: mol_type = other DNA
taaaatagtattcttggtaa

SEQ ID NO: 3661 - DNA, 20 bp, synthetic construct
  misc_feature 1..20: note = chemically synthesized
  source 1..20: mol_type = other DNA
agaaataattgaacatcatc

SEQ ID NO: 3662 - DNA, 20 bp, synthetic construct
  misc_feature 1..20: note = chemically synthesized
  source 1..20: mol_type = other DNA
atcatcctgagtttttctgt

SEQ ID NO: 3663 - DNA, 20 bp, synthetic construct
  misc_feature 1..20: note = chemically synthesized
  source 1..20: mol_type = other DNA
ttttcttcccttgcccagac

SEQ ID NO: 3664 - DNA, 20 bp, synthetic construct
  misc_feature 1..20: note = chemically synthesized
  source 1..20: mol_type = other DNA
ctgggcaagggaagaaaaaa

SEQ ID NO: 3665 - DNA, 20 bp, synthetic construct
  misc_feature 1..20: note = chemically synthesized
  source 1..20: mol_type = other DNA
ctgattcctacagaaaaact

SEQ ID NO: 3666 - DNA, 20 bp, synthetic construct
  misc_feature 1..20: note = chemically synthesized
  source 1..20: mol_type = other DNA
tttcttctgcctttaaacag

SEQ ID NO: 3667 - DNA, 20 bp, synthetic construct
  misc_feature 1..20: note = chemically synthesized
  source 1..20: mol_type = other DNA
agaagaataattcaattacc

SEQ ID NO: 3668 - DNA, 20 bp, synthetic construct
  misc_feature 1..20: note = chemically synthesized
  source 1..20: mol_type = other DNA
tttaaataaagcatagtgca

SEQ ID NO: 3669 - DNA, 20 bp, synthetic construct
  misc_feature 1..20: note = chemically synthesized
  source 1..20: mol_type = other DNA
tagtgcaatggataggtctt

SEQ ID NO: 3670 - DNA, 20 bp, synthetic construct
  misc_feature 1..20: note = chemically synthesized
  source 1..20: mol_type = other DNA
gataggtctttgggatagtt

SEQ ID NO: 3671 - DNA, 20 bp, synthetic construct
  misc_feature 1..20: note = chemically synthesized
  source 1..20: mol_type = other DNA
gacctttttttttttttacc

SEQ ID NO: 3672 - DNA, 20 bp, synthetic construct
  misc_feature 1..20: note = chemically synthesized
  source 1..20: mol_type = other DNA
tttttttttacctaggatgt

SEQ ID NO: 3673 - DNA, 20 bp, synthetic construct
  misc_feature 1..20: note = chemically synthesized
  source 1..20: mol_type = other DNA
aaaataattctttaaagatg

SEQ ID NO: 3674 - DNA, 20 bp, synthetic construct
  misc_feature 1..20: note = chemically synthesized
  source 1..20: mol_type = other DNA
actttattttactgggaaaa

SEQ ID NO: 3675 - DNA, 20 bp, synthetic construct
  misc_feature 1..20: note = chemically synthesized
  source 1..20: mol_type = other DNA
aaaagttgaacaatagaaaa

SEQ ID NO: 3676 - DNA, 20 bp, synthetic construct
  misc_feature 1..20: note = chemically synthesized
  source 1..20: mol_type = other DNA
atctcgacgaaacacacccc

SEQ ID NO: 3677 - DNA, 20 bp, synthetic construct
  misc_feature 1..20: note = chemically synthesized
  source 1..20: mol_type = other DNA
ttcattgtgccaaaggcgtg

SEQ ID NO: 3678 - DNA, 20 bp, synthetic construct
  misc_feature 1..20: note = chemically synthesized
  source 1..20: mol_type = other DNA
gtgtttcgtcgagatgcacg

SEQ ID NO: 3679 - DNA, 20 bp, synthetic construct
  misc_feature 1..20: note = chemically synthesized
  source 1..20: mol_type = other DNA
ttagtaaactctgcatcttt

SEQ ID NO: 3680 - DNA, 20 bp, synthetic construct
  misc_feature 1..20: note = chemically synthesized
  source 1..20: mol_type = other DNA
taggtaaaaaaaaaaaaagg

SEQ ID NO: 3681 - DNA, 20 bp, synthetic construct
  misc_feature 1..20: note = chemically synthesized
  source 1..20: mol_type = other DNA
cttagagtgactgaaacttc

SEQ ID NO: 3682 - DNA, 20 bp, synthetic construct
  misc_feature 1..20: note = chemically synthesized
  source 1..20: mol_type = other DNA
tattcttctgtttaaaggca

SEQ ID NO: 3683 - DNA, 20 bp, synthetic construct
  misc_feature 1..20: note = chemically synthesized
  source 1..20: mol_type = other DNA
gcataatctaagtcaaatgg

SEQ ID NO: 3684 - DNA, 20 bp, synthetic construct
  misc_feature 1..20: note = chemically synthesized
  source 1..20: mol_type = other DNA
atcggtttaaagatttggga

SEQ ID NO: 3685 - DNA, 20 bp, synthetic construct
  misc_feature 1..20: note = chemically synthesized
  source 1..20: mol_type = other DNA
tcactcttgtctgggcaagg

SEQ ID NO: 3686 - DNA, 20 bp, synthetic construct
  misc_feature 1..20: note = chemically synthesized
  source 1..20: mol_type = other DNA
aaaaaggattgttaaatact

SEQ ID NO: 3687 - DNA, 20 bp, synthetic construct
  misc_feature 1..20: note = chemically synthesized
  source 1..20: mol_type = other DNA
aatattgggctctgattcct

SEQ ID NO: 3688 - DNA, 20 bp, synthetic construct
  misc_feature 1..20: note = chemically synthesized
  source 1..20: mol_type = other DNA
atttcttctgcctttaaaca

SEQ ID NO: 3689 - DNA, 20 bp, synthetic construct
  misc_feature 1..20: note = chemically synthesized
  source 1..20: mol_type = other DNA
cagaagaataattcaattac

SEQ ID NO: 3690 - DNA, 20 bp, synthetic construct
  misc_feature 1..20: note = chemically synthesized
  source 1..20: mol_type = other DNA
tgcactttccttagtgcgca

SEQ ID NO: 3691 - DNA, 20 bp, synthetic construct
  misc_feature 1..20: note = chemically synthesized
  source 1..20: mol_type = other DNA
atacaaaatactatgccatt

SEQ ID NO: 3692 - DNA, 20 bp, synthetic construct
  misc_feature 1..20: note = chemically synthesized
  source 1..20: mol_type = other DNA
aactttattttactgggaaa

SEQ ID NO: 3693 - DNA, 20 bp, synthetic construct
  misc_feature 1..20: note = chemically synthesized
  source 1..20: mol_type = other DNA
aatagaataaaagttgaaca

SEQ ID NO: 3694 - DNA, 20 bp, synthetic construct
  misc_feature 1..20: note = chemically synthesized
  source 1..20: mol_type = other DNA
cctggaataagccgagctaa

SEQ ID NO: 3695 - DNA, 20 bp, synthetic construct
  misc_feature 1..20: note = chemically synthesized
  source 1..20: mol_type = other DNA
aggcgtgtggggttgacaga

SEQ ID NO: 3696 - DNA, 20 bp, synthetic construct
  misc_feature 1..20: note = chemically synthesized
  source 1..20: mol_type = other DNA
cattgcactatgctttattt

SEQ ID NO: 3697 - DNA, 20 bp, synthetic construct
  misc_feature 1..20: note = chemically synthesized
  source 1..20: mol_type = other DNA
tatgctttatttaaaaacca

SEQ ID NO: 3698 - DNA, 20 bp, synthetic construct
  misc_feature 1..20: note = chemically synthesized
  source 1..20: mol_type = other DNA
aaggattgttaaatactgaa

SEQ ID NO: 3699 - DNA, 20 bp, synthetic construct
  misc_feature 1..20: note = chemically synthesized
  source 1..20: mol_type = other DNA
ttgggctctgattcctacag

SEQ ID NO: 3700 - DNA, 20 bp, synthetic construct
  misc_feature 1..20: note = chemically synthesized
  source 1..20: mol_type = other DNA
tttaaagatgcagagtttac

SEQ ID NO: 3701 - DNA, 20 bp, synthetic construct
  misc_feature 1..20: note = chemically synthesized
  source 1..20: mol_type = other DNA
gtatattagtgctaatttcc

SEQ ID NO: 3702 - DNA, 20 bp, synthetic construct
  misc_feature 1..20: note = chemically synthesized
  source 1..20: mol_type = other DNA
gctaatttccctccgtttgt

SEQ ID NO: 3703 - DNA, 20 bp, synthetic construct
  misc_feature 1..20: note = chemically synthesized
  source 1..20: mol_type = other DNA
tcccttctttttctctttag

SEQ ID NO: 3704 - DNA, 20 bp, synthetic construct
  misc_feature 1..20: note = chemically synthesized
  source 1..20: mol_type = other DNA
tagctcggcttattccaggg

SEQ ID NO: 3705 - DNA, 20 bp, synthetic construct
  misc_feature 1..20: note = chemically synthesized
  source 1..20: mol_type = other DNA
attctattttcccagtaaaa

SEQ ID NO: 3706 - DNA, 20 bp, synthetic construct
  misc_feature 1..20: note = chemically synthesized
  source 1..20: mol_type = other DNA
taaaaaaaaaaaaaggtcag

SEQ ID NO: 3707 - DNA, 20 bp, synthetic construct
  misc_feature 1..20: note = chemically synthesized
  source 1..20: mol_type = other DNA
gaaacttcacagaatagggt

SEQ ID NO: 3708 - DNA, 20 bp, synthetic construct
  misc_feature 1..20: note = chemically synthesized
  source 1..20: mol_type = other DNA
ccaaagacctatccattgca

SEQ ID NO: 3709 - DNA, 20 bp, synthetic construct
  misc_feature 1..20: note = chemically synthesized
  source 1..20: mol_type = other DNA
aaaagagtattagatattat

SEQ ID NO: 3710 - DNA, 20 bp, synthetic construct
  misc_feature 1..20: note = chemically synthesized
  source 1..20: mol_type = other DNA
tcttggtaattgaattattc

SEQ ID NO: 3711 - DNA, 20 bp, synthetic construct
  misc_feature 1..20: note = chemically synthesized
  source 1..20: mol_type = other DNA
agaaataattgaacatcatc

SEQ ID NO: 3712 - DNA, 20 bp, synthetic construct
  misc_feature 1..20: note = chemically synthesized
  source 1..20: mol_type = other DNA
taaaaagtaacattattact

SEQ ID NO: 3713 - DNA, 20 bp, synthetic construct
  misc_feature 1..20: note = chemically synthesized
  source 1..20: mol_type = other DNA
agacaagagtgaggttgctc

SEQ ID NO: 3714 - DNA, 20 bp, synthetic construct
  misc_feature 1..20: note = chemically synthesized
  source 1..20: mol_type = other DNA
agtgaggttgctcatcggtt

SEQ ID NO: 3715 - DNA, 20 bp, synthetic construct
  misc_feature 1..20: note = chemically synthesized
  source 1..20: mol_type = other DNA
tctgggcaagggaagaaaaa

SEQ ID NO: 3716 - DNA, 20 bp, synthetic construct
  misc_feature 1..20: note = chemically synthesized
  source 1..20: mol_type = other DNA
ttatatttctttccatttga

SEQ ID NO: 3717 - DNA, 20 bp, synthetic construct
  misc_feature 1..20: note = chemically synthesized
  source 1..20: mol_type = other DNA
ccatttgacttagattatgc

SEQ ID NO: 3718 - DNA, 20 bp, synthetic construct
  misc_feature 1..20: note = chemically synthesized
  source 1..20: mol_type = other DNA
atttgtttcaaaatattggg

SEQ ID NO: 3719 - DNA, 20 bp, synthetic construct
  misc_feature 1..20: note = chemically synthesized
  source 1..20: mol_type = other DNA
ctatttatgagatcaacagc

SEQ ID NO: 3720 - DNA, 20 bp, synthetic construct
  misc_feature 1..20: note = chemically synthesized
  source 1..20: mol_type = other DNA
gagatcaacagcacaggttt

SEQ ID NO: 3721 - DNA, 20 bp, synthetic construct
  misc_feature 1..20: note = chemically synthesized
  source 1..20: mol_type = other DNA
caatcttcaaccctattctg

SEQ ID NO: 3722 - DNA, 20 bp, synthetic construct
  misc_feature 1..20: note = chemically synthesized
  source 1..20: mol_type = other DNA
cctttttttttttttaccta

SEQ ID NO: 3723 - DNA, 20 bp, synthetic construct
  misc_feature 1..20: note = chemically synthesized
  source 1..20: mol_type = other DNA
aaaataattctttaaagatg

SEQ ID NO: 3724 - DNA, 20 bp, synthetic construct
  misc_feature 1..20: note = chemically synthesized
  source 1..20: mol_type = other DNA
taaaagttgaacaatagaaa

SEQ ID NO: 3725 - DNA, 22 bp, synthetic construct
  misc_feature 1..22: note = chemically synthesized
  source 1..22: mol_type = other DNA
gtgctaatttccctccgtttgt

SEQ ID NO: 3726 - DNA, 22 bp, synthetic construct
  misc_feature 1..22: note = chemically synthesized
  source 1..22: mol_type = other DNA
atttccctccgtttgtcctagc

SEQ ID NO: 3727 - DNA, 22 bp, synthetic construct
  misc_feature 1..22: note = chemically synthesized
  source 1..22: mol_type = other DNA
ccctccgtttgtcctagctttt

SEQ ID NO: 3728 - DNA, 22 bp, synthetic construct
  misc_feature 1..22: note = chemically synthesized
  source 1..22: mol_type = other DNA
cctccgtttgtcctagcttttc

SEQ ID NO: 3729 - DNA, 22 bp, synthetic construct
  misc_feature 1..22: note = chemically synthesized
  source 1..22: mol_type = other DNA
cgtttgtcctagcttttctctt

SEQ ID NO: 3730 - DNA, 22 bp, synthetic construct
  misc_feature 1..22: note = chemically synthesized
  source 1..22: mol_type = other DNA
gtcctagcttttctcttctgtc

SEQ ID NO: 3731 - DNA, 22 bp, synthetic construct
  misc_feature 1..22: note = chemically synthesized
  source 1..22: mol_type = other DNA
tcctagcttttctcttctgtca

SEQ ID NO: 3732 - DNA, 22 bp, synthetic construct
  misc_feature 1..22: note = chemically synthesized
  source 1..22: mol_type = other DNA
gcttttctcttctgtcaacccc

SEQ ID NO: 3733 - DNA, 22 bp, synthetic construct
  misc_feature 1..22: note = chemically synthesized
  source 1..22: mol_type = other DNA
ttctcttctgtcaaccccacac

SEQ ID NO: 3734 - DNA, 22 bp, synthetic construct
  misc_feature 1..22: note = chemically synthesized
  source 1..22: mol_type = other DNA
tctcttctgtcaaccccacacg

SEQ ID NO: 3735 - DNA, 22 bp, synthetic construct
  misc_feature 1..22: note = chemically synthesized
  source 1..22: mol_type = other DNA
ctcttctgtcaaccccacacgc

SEQ ID NO: 3736 - DNA, 22 bp, synthetic construct
  misc_feature 1..22: note = chemically synthesized
  source 1..22: mol_type = other DNA
tcttctgtcaaccccacacgcc

SEQ ID NO: 3737 - DNA, 22 bp, synthetic construct
  misc_feature 1..22: note = chemically synthesized
  source 1..22: mol_type = other DNA
ttctgtcaaccccacacgcctt

SEQ ID NO: 3738 - DNA, 22 bp, synthetic construct
  misc_feature 1..22: note = chemically synthesized
  source 1..22: mol_type = other DNA
ctgtcaaccccacacgcctttg

SEQ ID NO: 3739 - DNA, 22 bp, synthetic construct
  misc_feature 1..22: note = chemically synthesized
  source 1..22: mol_type = other DNA
tgtcaaccccacacgcctttgg

SEQ ID NO: 3740 - DNA, 22 bp, synthetic construct
  misc_feature 1..22: note = chemically synthesized
  source 1..22: mol_type = other DNA
tcaaccccacacgcctttggca

SEQ ID NO: 3741 - DNA, 22 bp, synthetic construct
  misc_feature 1..22: note = chemically synthesized
  source 1..22: mol_type = other DNA
tggcacaatgaagtgggtaacc

SEQ ID NO: 3742 - DNA, 22 bp, synthetic construct
  misc_feature 1..22: note = chemically synthesized
  source 1..22: mol_type = other DNA
ggcacaatgaagtgggtaacct

SEQ ID NO: 3743 - DNA, 22 bp, synthetic construct
  misc_feature 1..22: note = chemically synthesized
  source 1..22: mol_type = other DNA
gcacaatgaagtgggtaacctt

SEQ ID NO: 3744 - DNA, 22 bp, synthetic construct
  misc_feature 1..22: note = chemically synthesized
  source 1..22: mol_type = other DNA
tatttcccttctttttctcttt

SEQ ID NO: 3745 - DNA, 22 bp, synthetic construct
  misc_feature 1..22: note = chemically synthesized
  source 1..22: mol_type = other DNA
atttcccttctttttctcttta

SEQ ID NO: 3746 - DNA, 22 bp, synthetic construct
  misc_feature 1..22: note = chemically synthesized
  source 1..22: mol_type = other DNA
tttcccttctttttctctttag

SEQ ID NO: 3747 - DNA, 22 bp, synthetic construct
  misc_feature 1..22: note = chemically synthesized
  source 1..22: mol_type = other DNA
cccttctttttctctttagctc

SEQ ID NO: 3748 - DNA, 22 bp, synthetic construct
  misc_feature 1..22: note = chemically synthesized
  source 1..22: mol_type = other DNA
ccttctttttctctttagctcg

SEQ ID NO: 3749 - DNA, 22 bp, synthetic construct
  misc_feature 1..22: note = chemically synthesized
  source 1..22: mol_type = other DNA
ctttttctctttagctcggctt

SEQ ID NO: 3750 - DNA, 22 bp, synthetic construct
  misc_feature 1..22: note = chemically synthesized
  source 1..22: mol_type = other DNA
tttttctctttagctcggctta

SEQ ID NO: 3751 - DNA, 22 bp, synthetic construct
  misc_feature 1..22: note = chemically synthesized
  source 1..22: mol_type = other DNA
tttctctttagctcggcttatt

SEQ ID NO: 3752 - DNA, 22 bp, synthetic construct
  misc_feature 1..22: note = chemically synthesized
  source 1..22: mol_type = other DNA
ttctctttagctcggcttattc

SEQ ID NO: 3753 - DNA, 22 bp, synthetic construct
  misc_feature 1..22: note = chemically synthesized
  source 1..22: mol_type = other DNA
tctctttagctcggcttattcc

SEQ ID NO: 3754 - DNA, 22 bp, synthetic construct
  misc_feature 1..22: note = chemically synthesized
  source 1..22: mol_type = other DNA
ctctttagctcggcttattcca

SEQ ID NO: 3755 - DNA, 22 bp, synthetic construct
  misc_feature 1..22: note = chemically synthesized
  source 1..22: mol_type = other DNA
tctttagctcggcttattccag

SEQ ID NO: 3756 - DNA, 22 bp, synthetic construct
  misc_feature 1..22: note = chemically synthesized
  source 1..22: mol_type = other DNA
tttagctcggcttattccaggg

SEQ ID NO: 3757 - DNA, 22 bp, synthetic construct
  misc_feature 1..22: note = chemically synthesized
  source 1..22: mol_type = other DNA
tagctcggcttattccaggggt

SEQ ID NO: 3758 - DNA, 22 bp, synthetic construct
  misc_feature 1..22: note = chemically synthesized
  source 1..22: mol_type = other DNA
agctcggcttattccaggggtg

SEQ ID NO: 3759 - DNA, 22 bp, synthetic construct
  misc_feature 1..22: note = chemically synthesized
  source 1..22: mol_type = other DNA
gctcggcttattccaggggtgt

SEQ ID NO: 3760 - DNA, 22 bp, synthetic construct
  misc_feature 1..22: note = chemically synthesized
  source 1..22: mol_type = other DNA
ggcttattccaggggtgtgttt

SEQ ID NO: 3761 - DNA, 22 bp, synthetic construct
  misc_feature 1..22: note = chemically synthesized
  source 1..22: mol_type = other DNA
attccaggggtgtgtttcgtcg

SEQ ID NO: 3762 - DNA, 22 bp, synthetic construct
  misc_feature 1..22: note = chemically synthesized
  source 1..22: mol_type = other DNA
ttccaggggtgtgtttcgtcga

SEQ ID NO: 3763 - DNA, 22 bp, synthetic construct
  misc_feature 1..22: note = chemically synthesized
  source 1..22: mol_type = other DNA
caggggtgtgtttcgtcgagat

SEQ ID NO: 3764 - DNA, 22 bp, synthetic construct
  misc_feature 1..22: note = chemically synthesized
  source 1..22: mol_type = other DNA
cgtcgagatgcacgtaagaaat

SEQ ID NO: 3765 - DNA, 22 bp, synthetic construct
  misc_feature 1..22: note = chemically synthesized
  source 1..22: mol_type = other DNA
gtcgagatgcacgtaagaaatc

SEQ ID NO: 3766 - DNA, 22 bp, synthetic construct
  misc_feature 1..22: note = chemically synthesized
  source 1..22: mol_type = other DNA
ttctattgttcaacttttattc

SEQ ID NO: 3767 - DNA, 22 bp, synthetic construct
  misc_feature 1..22: note = chemically synthesized
  source 1..22: mol_type = other DNA
tctattgttcaacttttattct

SEQ ID NO: 3768 - DNA, 22 bp, synthetic construct
  misc_feature 1..22: note = chemically synthesized
  source 1..22: mol_type = other DNA
ctattgttcaacttttattcta

SEQ ID NO: 3769 - DNA, 22 bp, synthetic construct
  misc_feature 1..22: note = chemically synthesized
  source 1..22: mol_type = other DNA
tattgttcaacttttattctat

SEQ ID NO: 3770 - DNA, 22 bp, synthetic construct
  misc_feature 1..22: note = chemically synthesized
  source 1..22: mol_type = other DNA
ttgttcaacttttattctattt

SEQ ID NO: 3771 - DNA, 22 bp, synthetic construct
  misc_feature 1..22: note = chemically synthesized
  source 1..22: mol_type = other DNA
ttcaacttttattctattttcc

SEQ ID NO: 3772 - DNA, 22 bp, synthetic construct
  misc_feature 1..22: note = chemically synthesized
  source 1..22: mol_type = other DNA
aacttttattctattttcccag

SEQ ID NO: 3773 - DNA, 22 bp, synthetic construct
  misc_feature 1..22: note = chemically synthesized
  source 1..22: mol_type = other DNA
ttattctattttcccagtaaaa

SEQ ID NO: 3774 - DNA, 22 bp, synthetic construct
  misc_feature 1..22: note = chemically synthesized
  source 1..22: mol_type = other DNA
tattctattttcccagtaaaat

SEQ ID NO: 3775 - DNA, 22 bp, synthetic construct
  misc_feature 1..22: note = chemically synthesized
  source 1..22: mol_type = other DNA
attctattttcccagtaaaata

SEQ ID NO: 3776 - DNA, 22 bp, synthetic construct
  misc_feature 1..22: note = chemically synthesized
  source 1..22: mol_type = other DNA
ttctattttcccagtaaaataa

SEQ ID NO: 3777 - DNA, 22 bp, synthetic construct
  misc_feature 1..22: note = chemically synthesized
  source 1..22: mol_type = other DNA
tattttcccagtaaaataaagt

SEQ ID NO: 3778 - DNA, 22 bp, synthetic construct
  misc_feature 1..22: note = chemically synthesized
  source 1..22: mol_type = other DNA
ttttcccagtaaaataaagttt

SEQ ID NO: 3779 - DNA, 22 bp, synthetic construct
  misc_feature 1..22: note = chemically synthesized
  source 1..22: mol_type = other DNA
tcccagtaaaataaagttttag

SEQ ID NO: 3780 - DNA, 22 bp, synthetic construct
  misc_feature 1..22: note = chemically synthesized
  source 1..22: mol_type = other DNA
cccagtaaaataaagttttagt

SEQ ID NO: 3781 - DNA, 22 bp, synthetic construct
  misc_feature 1..22: note = chemically synthesized
  source 1..22: mol_type = other DNA
ccagtaaaataaagttttagta

SEQ ID NO: 3782 - DNA, 22 bp, synthetic construct
  misc_feature 1..22: note = chemically synthesized
  source 1..22: mol_type = other DNA
tagtaaactctgcatctttaaa

SEQ ID NO: 3783 - DNA, 22 bp, synthetic construct
  misc_feature 1..22: note = chemically synthesized
  source 1..22: mol_type = other DNA
agtaaactctgcatctttaaag

SEQ ID NO: 3784 - DNA, 22 bp, synthetic construct
  misc_feature 1..22: note = chemically synthesized
  source 1..22: mol_type = other DNA
gtaaactctgcatctttaaaga

SEQ ID NO: 3785 - DNA, 22 bp, synthetic construct
  misc_feature 1..22: note = chemically synthesized
  source 1..22: mol_type = other DNA
tgcatctttaaagaattatttt

SEQ ID NO: 3786 - DNA, 22 bp, synthetic construct
  misc_feature 1..22: note = chemically synthesized
  source 1..22: mol_type = other DNA
catctttaaagaattattttgg

SEQ ID NO: 3787 - DNA, 22 bp, synthetic construct
  misc_feature 1..22: note = chemically synthesized
  source 1..22: mol_type = other DNA
taaagaattattttggcattta

SEQ ID NO: 3788 - DNA, 22 bp, synthetic construct
  misc_feature 1..22: note = chemically synthesized
  source 1..22: mol_type = other DNA
aaagaattattttggcatttat

SEQ ID NO: 3789 - DNA, 22 bp, synthetic construct
  misc_feature 1..22: note = chemically synthesized
  source 1..22: mol_type = other DNA
aagaattattttggcatttatt

SEQ ID NO: 3790 - DNA, 22 bp, synthetic construct
  misc_feature 1..22: note = chemically synthesized
  source 1..22: mol_type = other DNA
ttttggcatttatttctaaaat

SEQ ID NO: 3791 - DNA, 22 bp, synthetic construct
  misc_feature 1..22: note = chemically synthesized
  source 1..22: mol_type = other DNA
tggcatttatttctaaaatggc

SEQ ID NO: 3792 - DNA, 22 bp, synthetic construct
  misc_feature 1..22: note = chemically synthesized
  source 1..22: mol_type = other DNA
ggcatttatttctaaaatggca

SEQ ID NO: 3793 - DNA, 22 bp, synthetic construct
  misc_feature 1..22: note = chemically synthesized
  source 1..22: mol_type = other DNA
gcatttatttctaaaatggcat

SEQ ID NO: 3794 - DNA, 22 bp, synthetic construct
  misc_feature 1..22: note = chemically synthesized
  source 1..22: mol_type = other DNA
atttctaaaatggcatagtatt

SEQ ID NO: 3795 - DNA, 22 bp, synthetic construct
  misc_feature 1..22: note = chemically synthesized
  source 1..22: mol_type = other DNA
tttctaaaatggcatagtattt

SEQ ID NO: 3796 - DNA, 22 bp, synthetic construct
  misc_feature 1..22: note = chemically synthesized
  source 1..22: mol_type = other DNA
ctaaaatggcatagtattttgt

SEQ ID NO: 3797 - DNA, 22 bp, synthetic construct
  misc_feature 1..22: note = chemically synthesized
  source 1..22: mol_type = other DNA
taaaatggcatagtattttgta

SEQ ID NO: 3798 - DNA, 22 bp, synthetic construct
  misc_feature 1..22: note = chemically synthesized
  source 1..22: mol_type = other DNA
aaatggcatagtattttgtatt

SEQ ID NO: 3799 - DNA, 22 bp, synthetic construct
  misc_feature 1..22: note = chemically synthesized
  source 1..22: mol_type = other DNA
tgtatttgtgaagtcttacaag

SEQ ID NO: 3800 - DNA, 22 bp, synthetic construct
  misc_feature 1..22: note = chemically synthesized
  source 1..22: mol_type = other DNA
gtatttgtgaagtcttacaagg

SEQ ID NO: 3801 - DNA, 22 bp, synthetic construct
  misc_feature 1..22: note = chemically synthesized
  source 1..22: mol_type = other DNA
tatttgtgaagtcttacaaggt

SEQ ID NO: 3802 - DNA, 22 bp, synthetic construct
  misc_feature 1..22: note = chemically synthesized
  source 1..22: mol_type = other DNA
gtgaagtcttacaaggttatct

SEQ ID NO: 3803 - DNA, 22 bp, synthetic construct
  misc_feature 1..22: note = chemically synthesized
  source 1..22: mol_type = other DNA
tgaagtcttacaaggttatctt

SEQ ID NO: 3804 - DNA, 22 bp, synthetic construct
  misc_feature 1..22: note = chemically synthesized
  source 1..22: mol_type = other DNA
acaaggttatcttattaataaa

SEQ ID NO: 3805 - DNA, 22 bp, synthetic construct
  misc_feature 1..22: note = chemically synthesized
  source 1..22: mol_type = other DNA
caaggttatcttattaataaaa

SEQ ID NO: 3806 - DNA, 22 bp, synthetic construct
  misc_feature 1..22: note = chemically synthesized
  source 1..22: mol_type = other DNA
tcttattaataaaattcaaaca

SEQ ID NO: 3807 - DNA, 22 bp, synthetic construct
  misc_feature 1..22: note = chemically synthesized
  source 1..22: mol_type = other DNA
attaataaaattcaaacatcct

SEQ ID NO: 3808 - DNA, 22 bp, synthetic construct
  misc_feature 1..22: note = chemically synthesized
  source 1..22: mol_type = other DNA
ttaataaaattcaaacatccta

SEQ ID NO: 3809 - DNA, 22 bp, synthetic construct
  misc_feature 1..22: note = chemically synthesized
  source 1..22: mol_type = other DNA
ataaaattcaaacatcctaggt

SEQ ID NO: 3810 - DNA, 22 bp, synthetic construct
  misc_feature 1..22: note = chemically synthesized
  source 1..22: mol_type = other DNA
aaacatcctaggtaaaaaaaaa

SEQ ID NO: 3811 - DNA, 22 bp, synthetic construct
  misc_feature 1..22: note = chemically synthesized
  source 1..22: mol_type = other DNA
ggtaaaaaaaaaaaaaggtcag

SEQ ID NO: 3812 - DNA, 22 bp, synthetic construct
  misc_feature 1..22: note = chemically synthesized
  source 1..22: mol_type = other DNA
tttagtgactgtaattttcttt

SEQ ID NO: 3813 - DNA, 22 bp, synthetic construct
  misc_feature 1..22: note = chemically synthesized
  source 1..22: mol_type = other DNA
agtgactgtaattttcttttgc

SEQ ID NO: 3814 - DNA, 22 bp, synthetic construct
  misc_feature 1..22: note = chemically synthesized
  source 1..22: mol_type = other DNA
gtgactgtaattttcttttgcg

SEQ ID NO: 3815 - DNA, 22 bp, synthetic construct
  misc_feature 1..22: note = chemically synthesized
  source 1..22: mol_type = other DNA
taattttcttttgcgcactaag

SEQ ID NO: 3816 - DNA, 22 bp, synthetic construct
  misc_feature 1..22: note = chemically synthesized
  source 1..22: mol_type = other DNA
tcttttgcgcactaaggaaagt

SEQ ID NO: 3817 - DNA, 22 bp, synthetic construct
  misc_feature 1..22: note = chemically synthesized
  source 1..22: mol_type = other DNA
cttttgcgcactaaggaaagtg

SEQ ID NO: 3818 - DNA, 22 bp, synthetic construct
  misc_feature 1..22: note = chemically synthesized
  source 1..22: mol_type = other DNA
ttttgcgcactaaggaaagtgc

SEQ ID NO: 3819 - DNA, 22 bp, synthetic construct
  misc_feature 1..22: note = chemically synthesized
  source 1..22: mol_type = other DNA
ttgcgcactaaggaaagtgcaa

SEQ ID NO: 3820 - DNA, 22 bp, synthetic construct
  misc_feature 1..22: note = chemically synthesized
  source 1..22: mol_type = other DNA
tgcgcactaaggaaagtgcaaa

SEQ ID NO: 3821 - DNA, 22 bp, synthetic construct
  misc_feature 1..22: note = chemically synthesized
  source 1..22: mol_type = other DNA
gcgcactaaggaaagtgcaaag

SEQ ID NO: 3822 - DNA, 22 bp, synthetic construct
  misc_feature 1..22: note = chemically synthesized
  source 1..22: mol_type = other DNA
cgcactaaggaaagtgcaaagt

SEQ ID NO: 3823 - DNA, 22 bp, synthetic construct
  misc_feature 1..22: note = chemically synthesized
  source 1..22: mol_type = other DNA
aggaaagtgcaaagtaacttag

SEQ ID NO: 3824 - DNA, 22 bp, synthetic construct
  misc_feature 1..22: note = chemically synthesized
  source 1..22: mol_type = other DNA
agagtgactgaaacttcacaga

SEQ ID NO: 3825 - DNA, 22 bp, synthetic construct
  misc_feature 1..22: note = chemically synthesized
  source 1..22: mol_type = other DNA
gagtgactgaaacttcacagaa

SEQ ID NO: 3826 - DNA, 22 bp, synthetic construct
  misc_feature 1..22: note = chemically synthesized
  source 1..22: mol_type = other DNA
aaacttcacagaatagggttga

SEQ ID NO: 3827 - DNA, 22 bp, synthetic construct
  misc_feature 1..22: note = chemically synthesized
  source 1..22: mol_type = other DNA
cacagaatagggttgaagattg

SEQ ID NO: 3828 - DNA, 22 bp, synthetic construct
  misc_feature 1..22: note = chemically synthesized
  source 1..22: mol_type = other DNA
acagaatagggttgaagattga

SEQ ID NO: 3829 - DNA, 22 bp, synthetic construct
  misc_feature 1..22: note = chemically synthesized
  source 1..22: mol_type = other DNA
aagattgaattcataactatcc

SEQ ID NO: 3830 - DNA, 22 bp, synthetic construct
  misc_feature 1..22: note = chemically synthesized
  source 1..22: mol_type = other DNA
aattcataactatcccaaagac

SEQ ID NO: 3831 - DNA, 22 bp, synthetic construct
  misc_feature 1..22: note = chemically synthesized
  source 1..22: mol_type = other DNA
ataactatcccaaagacctatc

SEQ ID NO: 3832 - DNA, 22 bp, synthetic construct
  misc_feature 1..22: note = chemically synthesized
  source 1..22: mol_type = other DNA
tcccaaagacctatccattgca

SEQ ID NO: 3833 - DNA, 22 bp, synthetic construct
  misc_feature 1..22: note = chemically synthesized
  source 1..22: mol_type = other DNA
tccattgcactatgctttattt

SEQ ID NO: 3834 - DNA, 22 bp, synthetic construct
  misc_feature 1..22: note = chemically synthesized
  source 1..22: mol_type = other DNA
cactatgctttatttaaaaacc

SEQ ID NO: 3835 - DNA, 22 bp, synthetic construct
  misc_feature 1..22: note = chemically synthesized
  source 1..22: mol_type = other DNA
tgctttatttaaaaaccacaaa

SEQ ID NO: 3836 - DNA, 22 bp, synthetic construct
  misc_feature 1..22: note = chemically synthesized
  source 1..22: mol_type = other DNA
tatttaaaaaccacaaaacctg

SEQ ID NO: 3837 - DNA, 22 bp, synthetic construct
  misc_feature 1..22: note = chemically synthesized
  source 1..22: mol_type = other DNA
atttaaaaaccacaaaacctgt

SEQ ID NO: 3838 - DNA, 22 bp, synthetic construct
  misc_feature 1..22: note = chemically synthesized
  source 1..22: mol_type = other DNA
tttaaaaaccacaaaacctgtg

SEQ ID NO: 3839 - DNA, 22 bp, synthetic construct
  misc_feature 1..22: note = chemically synthesized
  source 1..22: mol_type = other DNA
aaaaaccacaaaacctgtgctg

SEQ ID NO: 3840 - DNA, 22 bp, synthetic construct
  misc_feature 1..22: note = chemically synthesized
  source 1..22: mol_type = other DNA
aaaaccacaaaacctgtgctgt

SEQ ID NO: 3841 - DNA, 22 bp, synthetic construct
  misc_feature 1..22: note = chemically synthesized
  source 1..22: mol_type = other DNA
tgctgttgatctcataaataga

SEQ ID NO: 3842 - DNA, 22 bp, synthetic construct
  misc_feature 1..22: note = chemically synthesized
  source 1..22: mol_type = other DNA
ttgatctcataaatagaacttg

SEQ ID NO: 3843 - DNA, 22 bp, synthetic construct
  misc_feature 1..22: note = chemically synthesized
  source 1..22: mol_type = other DNA
atctcataaatagaacttgtat

SEQ ID NO: 3844 - DNA, 22 bp, synthetic construct
  misc_feature 1..22: note = chemically synthesized
  source 1..22: mol_type = other DNA
ataaatagaacttgtatttata

SEQ ID NO: 3845 - DNA, 22 bp, synthetic construct
  misc_feature 1..22: note = chemically synthesized
  source 1..22: mol_type = other DNA
gtatttatatttattttcattt

SEQ ID NO: 3846 - DNA, 22 bp, synthetic construct
  misc_feature 1..22: note = chemically synthesized
  source 1..22: mol_type = other DNA
tatttatatttattttcatttt

SEQ ID NO: 3847 - DNA, 22 bp, synthetic construct
  misc_feature 1..22: note = chemically synthesized
  source 1..22: mol_type = other DNA
atatttattttcattttagtct

SEQ ID NO: 3848 - DNA, 22 bp, synthetic construct
  misc_feature 1..22: note = chemically synthesized
  source 1..22: mol_type = other DNA
tatttattttcattttagtctg

SEQ ID NO: 3849 - DNA, 22 bp, synthetic construct
  misc_feature 1..22: note = chemically synthesized
  source 1..22: mol_type = other DNA
attttcattttagtctgtcttc

SEQ ID NO: 3850 - DNA, 22 bp, synthetic construct
  misc_feature 1..22: note = chemically synthesized
  source 1..22: mol_type = other DNA
ttttcattttagtctgtcttct

SEQ ID NO: 3851 - DNA, 22 bp, synthetic construct
  misc_feature 1..22: note = chemically synthesized
  source 1..22: mol_type = other DNA
tcattttagtctgtcttcttgg

SEQ ID NO: 3852 - DNA, 22 bp, synthetic construct
  misc_feature 1..22: note = chemically synthesized
  source 1..22: mol_type = other DNA
cattttagtctgtcttcttggt

SEQ ID NO: 3853 - DNA, 22 bp, synthetic construct
  misc_feature 1..22: note = chemically synthesized
  source 1..22: mol_type = other DNA
attttagtctgtcttcttggtt

SEQ ID NO: 3854 - DNA, 22 bp, synthetic construct
  misc_feature 1..22: note = chemically synthesized
  source 1..22: mol_type = other DNA
tagtctgtcttcttggttgctg

SEQ ID NO: 3855 - DNA, 22 bp, synthetic construct
  misc_feature 1..22: note = chemically synthesized
  source 1..22: mol_type = other DNA
agtctgtcttcttggttgctgt

SEQ ID NO: 3856 - DNA, 22 bp, synthetic construct
  misc_feature 1..22: note = chemically synthesized
  source 1..22: mol_type = other DNA
gtctgtcttcttggttgctgtt

SEQ ID NO: 3857 - DNA, 22 bp, synthetic construct
  misc_feature 1..22: note = chemically synthesized
  source 1..22: mol_type = other DNA
tcttcttggttgctgttgatag

SEQ ID NO: 3858 - DNA, 22 bp, synthetic construct
  misc_feature 1..22: note = chemically synthesized
  source 1..22: mol_type = other DNA
cttggttgctgttgatagacac

SEQ ID NO: 3859 - DNA, 22 bp, synthetic construct
  misc_feature 1..22: note = chemically synthesized
  source 1..22: mol_type = other DNA
ttggttgctgttgatagacact

SEQ ID NO: 3860 - DNA, 22 bp, synthetic construct
  misc_feature 1..22: note = chemically synthesized
  source 1..22: mol_type = other DNA
ggttgctgttgatagacactaa

SEQ ID NO: 3861 - DNA, 22 bp, synthetic construct
  misc_feature 1..22: note = chemically synthesized
  source 1..22: mol_type = other DNA
gttgctgttgatagacactaaa

SEQ ID NO: 3862 - DNA, 22 bp, synthetic construct
  misc_feature 1..22: note = chemically synthesized
  source 1..22: mol_type = other DNA
ctgttgatagacactaaaagag

SEQ ID NO: 3863 - DNA, 22 bp, synthetic construct
  misc_feature 1..22: note = chemically synthesized
  source 1..22: mol_type = other DNA
ttgatagacactaaaagagtat

SEQ ID NO: 3864 - DNA, 22 bp, synthetic construct
  misc_feature 1..22: note = chemically synthesized
  source 1..22: mol_type = other DNA
atagacactaaaagagtattag

SEQ ID NO: 3865 - DNA, 22 bp, synthetic construct
  misc_feature 1..22: note = chemically synthesized
  source 1..22: mol_type = other DNA
aaagagtattagatattatcta

SEQ ID NO: 3866 - DNA, 22 bp, synthetic construct
  misc_feature 1..22: note = chemically synthesized
  source 1..22: mol_type = other DNA
gatattatctaagtttgaatat

SEQ ID NO: 3867 - DNA, 22 bp, synthetic construct
  misc_feature 1..22: note = chemically synthesized
  source 1..22: mol_type = other DNA
tctaagtttgaatataaggcta

SEQ ID NO: 3868 - DNA, 22 bp, synthetic construct
  misc_feature 1..22: note = chemically synthesized
  source 1..22: mol_type = other DNA
agtttgaatataaggctataaa

SEQ ID NO: 3869 - DNA, 22 bp, synthetic construct
  misc_feature 1..22: note = chemically synthesized
  source 1..22: mol_type = other DNA
gaatataaggctataaatattt

SEQ ID NO: 3870 - DNA, 22 bp, synthetic construct
  misc_feature 1..22: note = chemically synthesized
  source 1..22: mol_type = other DNA
aatataaggctataaatattta

SEQ ID NO: 3871 - DNA, 22 bp, synthetic construct
  misc_feature 1..22: note = chemically synthesized
  source 1..22: mol_type = other DNA
taaatatttaataatttttaaa

SEQ ID NO: 3872 - DNA, 22 bp, synthetic construct
  misc_feature 1..22: note = chemically synthesized
  source 1..22: mol_type = other DNA
aataatttttaaaatagtattc

SEQ ID NO: 3873 - DNA, 22 bp, synthetic construct
  misc_feature 1..22: note = chemically synthesized
  source 1..22: mol_type = other DNA
ataatttttaaaatagtattct

SEQ ID NO: 3874 - DNA, 22 bp, synthetic construct
  misc_feature 1..22: note = chemically synthesized
  source 1..22: mol_type = other DNA
ttaaaatagtattcttggtaat

SEQ ID NO: 3875 - DNA, 22 bp, synthetic construct
  misc_feature 1..22: note = chemically synthesized
  source 1..22: mol_type = other DNA
taaaatagtattcttggtaatt

SEQ ID NO: 3876 - DNA, 22 bp, synthetic construct
  misc_feature 1..22: note = chemically synthesized
  source 1..22: mol_type = other DNA
aaaatagtattcttggtaattg

SEQ ID NO: 3877 - DNA, 22 bp, synthetic construct
  misc_feature 1..22: note = chemically synthesized
  source 1..22: mol_type = other DNA
aaatagtattcttggtaattga

SEQ ID NO: 3878 - DNA, 22 bp, synthetic construct
  misc_feature 1..22: note = chemically synthesized
  source 1..22: mol_type = other DNA
ttggtaattgaattattcttct

SEQ ID NO: 3879 - DNA, 22 bp, synthetic construct
  misc_feature 1..22: note = chemically synthesized
  source 1..22: mol_type = other DNA
ggtaattgaattattcttctgt

SEQ ID NO: 3880 - DNA, 22 bp, synthetic construct
  misc_feature 1..22: note = chemically synthesized
  source 1..22: mol_type = other DNA
gtaattgaattattcttctgtt

SEQ ID NO: 3881 - DNA, 22 bp, synthetic construct
  misc_feature 1..22: note = chemically synthesized
  source 1..22: mol_type = other DNA
aattattcttctgtttaaaggc

SEQ ID NO: 3882 - DNA, 22 bp, synthetic construct
  misc_feature 1..22: note = chemically synthesized
  source 1..22: mol_type = other DNA
ttcttctgtttaaaggcagaag

SEQ ID NO: 3883 - DNA, 22 bp, synthetic construct
  misc_feature 1..22: note = chemically synthesized
  source 1..22: mol_type = other DNA
ttctgtttaaaggcagaagaaa

SEQ ID NO: 3884 - DNA, 22 bp, synthetic construct
  misc_feature 1..22: note = chemically synthesized
  source 1..22: mol_type = other DNA
ctgtttaaaggcagaagaaata

SEQ ID NO: 3885 - DNA, 22 bp, synthetic construct
  misc_feature 1..22: note = chemically synthesized
  source 1..22: mol_type = other DNA
tgtttaaaggcagaagaaataa

SEQ ID NO: 3886 - DNA, 22 bp, synthetic construct
  misc_feature 1..22: note = chemically synthesized
  source 1..22: mol_type = other DNA
tttaaaggcagaagaaataatt

SEQ ID NO: 3887 - DNA, 22 bp, synthetic construct
  misc_feature 1..22: note = chemically synthesized
  source 1..22: mol_type = other DNA
aaaggcagaagaaataattgaa

SEQ ID NO: 3888 - DNA, 22 bp, synthetic construct
  misc_feature 1..22: note = chemically synthesized
  source 1..22: mol_type = other DNA
aaggcagaagaaataattgaac

SEQ ID NO: 3889 - DNA, 22 bp, synthetic construct
  misc_feature 1..22: note = chemically synthesized
  source 1..22: mol_type = other DNA
aacatcatcctgagtttttctg

SEQ ID NO: 3890 - DNA, 22 bp, synthetic construct
  misc_feature 1..22: note = chemically synthesized
  source 1..22: mol_type = other DNA
agtttttctgtaggaatcagag

SEQ ID NO: 3891 - DNA, 22 bp, synthetic construct
  misc_feature 1..22: note = chemically synthesized
  source 1..22: mol_type = other DNA
ttctgtaggaatcagagcccaa

SEQ ID NO: 3892 - DNA, 22 bp, synthetic construct
  misc_feature 1..22: note = chemically synthesized
  source 1..22: mol_type = other DNA
tctgtaggaatcagagcccaat

SEQ ID NO: 3893 - DNA, 22 bp, synthetic construct
  misc_feature 1..22: note = chemically synthesized
  source 1..22: mol_type = other DNA
ctgtaggaatcagagcccaata

SEQ ID NO: 3894 - DNA, 22 bp, synthetic construct
  misc_feature 1..22: note = chemically synthesized
  source 1..22: mol_type = other DNA
tgtaggaatcagagcccaatat

SEQ ID NO: 3895 - DNA, 22 bp, synthetic construct
  misc_feature 1..22: note = chemically synthesized
  source 1..22: mol_type = other DNA
taggaatcagagcccaatattt

SEQ ID NO: 3896 - DNA, 22 bp, synthetic construct
  misc_feature 1..22: note = chemically synthesized
  source 1..22: mol_type = other DNA
tgaaacaaatgcataatctaag

SEQ ID NO: 3897 - DNA, 22 bp, synthetic construct
  misc_feature 1..22: note = chemically synthesized
  source 1..22: mol_type = other DNA
gaaacaaatgcataatctaagt

SEQ ID NO: 3898 - DNA, 22 bp, synthetic construct
  misc_feature 1..22: note = chemically synthesized
  source 1..22: mol_type = other DNA
aaacaaatgcataatctaagtc

SEQ ID NO: 3899 - DNA, 22 bp, synthetic construct
  misc_feature 1..22: note = chemically synthesized
  source 1..22: mol_type = other DNA
agtcaaatggaaagaaatataa

SEQ ID NO: 3900 - DNA, 22 bp, synthetic construct
  misc_feature 1..22: note = chemically synthesized
  source 1..22: mol_type = other DNA
ttacttcttgttttcttcagta

SEQ ID NO: 3901 - DNA, 22 bp, synthetic construct
  misc_feature 1..22: note = chemically synthesized
  source 1..22: mol_type = other DNA
cttcttgttttcttcagtattt

SEQ ID NO: 3902 - DNA, 22 bp, synthetic construct
  misc_feature 1..22: note = chemically synthesized
  source 1..22: mol_type = other DNA
cttgttttcttcagtatttaac

SEQ ID NO: 3903 - DNA, 22 bp, synthetic construct
  misc_feature 1..22: note = chemically synthesized
  source 1..22: mol_type = other DNA
ttgttttcttcagtatttaaca

SEQ ID NO: 3904 - DNA, 22 bp, synthetic construct
  misc_feature 1..22: note = chemically synthesized
  source 1..22: mol_type = other DNA
gttttcttcagtatttaacaat

SEQ ID NO: 3905 - DNA, 22 bp, synthetic construct
  misc_feature 1..22: note = chemically synthesized
  source 1..22: mol_type = other DNA
ttttcttcagtatttaacaatc

SEQ ID NO: 3906 - DNA, 22 bp, synthetic construct
  misc_feature 1..22: note = chemically synthesized
  source 1..22: mol_type = other DNA
tcttcagtatttaacaatcctt

SEQ ID NO: 3907 - DNA, 22 bp, synthetic construct
  misc_feature 1..22: note = chemically synthesized
  source 1..22: mol_type = other DNA
cttcagtatttaacaatccttt

SEQ ID NO: 3908 - DNA, 22 bp, synthetic construct
  misc_feature 1..22: note = chemically synthesized
  source 1..22: mol_type = other DNA
ttcagtatttaacaatcctttt

SEQ ID NO: 3909 - DNA, 22 bp, synthetic construct
  misc_feature 1..22: note = chemically synthesized
  source 1..22: mol_type = other DNA
cagtatttaacaatcctttttt

SEQ ID NO: 3910 - DNA, 22 bp, synthetic construct
  misc_feature 1..22: note = chemically synthesized
  source 1..22: mol_type = other DNA
agtatttaacaatccttttttt

SEQ ID NO: 3911 - DNA, 22 bp, synthetic construct
  misc_feature 1..22: note = chemically synthesized
  source 1..22: mol_type = other DNA
aacaatccttttttttcttccc

SEQ ID NO: 3912 - DNA, 22 bp, synthetic construct
  misc_feature 1..22: note = chemically synthesized
  source 1..22: mol_type = other DNA
acaatccttttttttcttccct

SEQ ID NO: 3913 - DNA, 22 bp, synthetic construct
  misc_feature 1..22: note = chemically synthesized
  source 1..22: mol_type = other DNA
ttttttcttcccttgcccagac

SEQ ID NO: 3914 - DNA, 22 bp, synthetic construct
  misc_feature 1..22: note = chemically synthesized
  source 1..22: mol_type = other DNA
tttttcttcccttgcccagaca

SEQ ID NO: 3915 - DNA, 22 bp, synthetic construct
  misc_feature 1..22: note = chemically synthesized
  source 1..22: mol_type = other DNA
ttttcttcccttgcccagacaa

SEQ ID NO: 3916 - DNA, 22 bp, synthetic construct
  misc_feature 1..22: note = chemically synthesized
  source 1..22: mol_type = other DNA
tttcttcccttgcccagacaag

SEQ ID NO: 3917 - DNA, 22 bp, synthetic construct
  misc_feature 1..22: note = chemically synthesized
  source 1..22: mol_type = other DNA
ttcttcccttgcccagacaaga

SEQ ID NO: 3918 - DNA, 22 bp, synthetic construct
  misc_feature 1..22: note = chemically synthesized
  source 1..22: mol_type = other DNA
tcttcccttgcccagacaagag

SEQ ID NO: 3919 - DNA, 22 bp, synthetic construct
  misc_feature 1..22: note = chemically synthesized
  source 1..22: mol_type = other DNA
cttcccttgcccagacaagagt

SEQ ID NO: 3920 - DNA, 22 bp, synthetic construct
  misc_feature 1..22: note = chemically synthesized
  source 1..22: mol_type = other DNA
ttcccttgcccagacaagagtg

SEQ ID NO: 3921 - DNA, 22 bp, synthetic construct
  misc_feature 1..22: note = chemically synthesized
  source 1..22: mol_type = other DNA
cccttgcccagacaagagtgag

SEQ ID NO: 3922 - DNA, 22 bp, synthetic construct
  misc_feature 1..22: note = chemically synthesized
  source 1..22: mol_type = other DNA
ccttgcccagacaagagtgagg

SEQ ID NO: 3923 - DNA, 22 bp, synthetic construct
  misc_feature 1..22: note = chemically synthesized
  source 1..22: mol_type = other DNA
gcccagacaagagtgaggttgc

SEQ ID NO: 3924 - DNA, 22 bp, synthetic construct
  misc_feature 1..22: note = chemically synthesized
  source 1..22: mol_type = other DNA
cccagacaagagtgaggttgct

SEQ ID NO: 3925 - DNA, 22 bp, synthetic construct
  misc_feature 1..22: note = chemically synthesized
  source 1..22: mol_type = other DNA
ctcatcggtttaaagatttggg

SEQ ID NO: 3926 - DNA, 22 bp, synthetic construct
  misc_feature 1..22: note = chemically synthesized
  source 1..22: mol_type = other DNA
atcggtttaaagatttgggaga

SEQ ID NO: 3927 - DNA, 22 bp, synthetic construct
  misc_feature 1..22: note = chemically synthesized
  source 1..22: mol_type = other DNA
aaagatttgggagaagaaaatt

SEQ ID NO: 3928 - DNA, 22 bp, synthetic construct
  misc_feature 1..22: note = chemically synthesized
  source 1..22: mol_type = other DNA
aagatttgggagaagaaaattt

SEQ ID NO: 3929 - DNA, 22 bp, synthetic construct
  misc_feature 1..22: note = chemically synthesized
  source 1..22: mol_type = other DNA
gggagaagaaaatttcaaagcc

SEQ ID NO: 3930 - DNA, 22 bp, synthetic construct
  misc_feature 1..22: note = chemically synthesized
  source 1..22: mol_type = other DNA
ggagaagaaaatttcaaagcct

SEQ ID NO: 3931 - DNA, 22 bp, synthetic construct
  misc_feature 1..22: note = chemically synthesized
  source 1..22: mol_type = other DNA
tgaaattttcttctcccaaatc

SEQ ID NO: 3932 - DNA, 22 bp, synthetic construct
  misc_feature 1..22: note = chemically synthesized
  source 1..22: mol_type = other DNA
gaaattttcttctcccaaatct

SEQ ID NO: 3933 - DNA, 22 bp, synthetic construct
  misc_feature 1..22: note = chemically synthesized
  source 1..22: mol_type = other DNA
aaattttcttctcccaaatctt

SEQ ID NO: 3934 - DNA, 22 bp, synthetic construct
  misc_feature 1..22: note = chemically synthesized
  source 1..22: mol_type = other DNA
tcttctcccaaatctttaaacc

SEQ ID NO: 3935 - DNA, 22 bp, synthetic construct
  misc_feature 1..22: note = chemically synthesized
  source 1..22: mol_type = other DNA
cttctcccaaatctttaaaccg

SEQ ID NO: 3936 - DNA, 22 bp, synthetic construct
  misc_feature 1..22: note = chemically synthesized
  source 1..22: mol_type = other DNA
ttctcccaaatctttaaaccga

SEQ ID NO: 3937 - DNA, 22 bp, synthetic construct
  misc_feature 1..22: note = chemically synthesized
  source 1..22: mol_type = other DNA
ctcccaaatctttaaaccgatg

SEQ ID NO: 3938 - DNA, 22 bp, synthetic construct
  misc_feature 1..22: note = chemically synthesized
  source 1..22: mol_type = other DNA
tcccaaatctttaaaccgatga

SEQ ID NO: 3939 - DNA, 22 bp, synthetic construct
  misc_feature 1..22: note = chemically synthesized
  source 1..22: mol_type = other DNA
ccaaatctttaaaccgatgagc

SEQ ID NO: 3940 - DNA, 22 bp, synthetic construct
  misc_feature 1..22: note = chemically synthesized
  source 1..22: mol_type = other DNA
taaaccgatgagcaacctcact

SEQ ID NO: 3941 - DNA, 22 bp, synthetic construct
  misc_feature 1..22: note = chemically synthesized
  source 1..22: mol_type = other DNA
aaaccgatgagcaacctcactc

SEQ ID NO: 3942 - DNA, 22 bp, synthetic construct
  misc_feature 1..22: note = chemically synthesized
  source 1..22: mol_type = other DNA
aaccgatgagcaacctcactct

SEQ ID NO: 3943 - DNA, 22 bp, synthetic construct
  misc_feature 1..22: note = chemically synthesized
  source 1..22: mol_type = other DNA
actcttgtctgggcaagggaag

SEQ ID NO: 3944 - DNA, 22 bp, synthetic construct
  misc_feature 1..22: note = chemically synthesized
  source 1..22: mol_type = other DNA
ttgtctgggcaagggaagaaaa

SEQ ID NO: 3945 - DNA, 22 bp, synthetic construct
  misc_feature 1..22: note = chemically synthesized
  source 1..22: mol_type = other DNA
gtctgggcaagggaagaaaaaa

SEQ ID NO: 3946 - DNA, 22 bp, synthetic construct
  misc_feature 1..22: note = chemically synthesized
  source 1..22: mol_type = other DNA
tctgggcaagggaagaaaaaaa

SEQ ID NO: 3947 - DNA, 22 bp, synthetic construct
  misc_feature 1..22: note = chemically synthesized
  source 1..22: mol_type = other DNA
ggcaagggaagaaaaaaaagga

SEQ ID NO: 3948 - DNA, 22 bp, synthetic construct
  misc_feature 1..22: note = chemically synthesized
  source 1..22: mol_type = other DNA
ttaaatactgaagaaaacaaga

SEQ ID NO: 3949 - DNA, 22 bp, synthetic construct
  misc_feature 1..22: note = chemically synthesized
  source 1..22: mol_type = other DNA
aatactgaagaaaacaagaagt

SEQ ID NO: 3950 - DNA, 22 bp, synthetic construct
  misc_feature 1..22: note = chemically synthesized
  source 1..22: mol_type = other DNA
aagaaaacaagaagtaataatg

SEQ ID NO: 3951 - DNA, 22 bp, synthetic construct
  misc_feature 1..22: note = chemically synthesized
  source 1..22: mol_type = other DNA
ctttttatatttctttccattt

SEQ ID NO: 3952 - DNA, 22 bp, synthetic construct
  misc_feature 1..22: note = chemically synthesized
  source 1..22: mol_type = other DNA
tttatatttctttccatttgac

SEQ ID NO: 3953 - DNA, 22 bp, synthetic construct
  misc_feature 1..22: note = chemically synthesized
  source 1..22: mol_type = other DNA
ttatatttctttccatttgact

SEQ ID NO: 3954 - DNA, 22 bp, synthetic construct
  misc_feature 1..22: note = chemically synthesized
  source 1..22: mol_type = other DNA
tatatttctttccatttgactt

SEQ ID NO: 3955 - DNA, 22 bp, synthetic construct
  misc_feature 1..22: note = chemically synthesized
  source 1..22: mol_type = other DNA
atatttctttccatttgactta

SEQ ID NO: 3956 - DNA, 22 bp, synthetic construct
  misc_feature 1..22: note = chemically synthesized
  source 1..22: mol_type = other DNA
tatttctttccatttgacttag

SEQ ID NO: 3957 - DNA, 22 bp, synthetic construct
  misc_feature 1..22: note = chemically synthesized
  source 1..22: mol_type = other DNA
ctttccatttgacttagattat

SEQ ID NO: 3958 - DNA, 22 bp, synthetic construct
  misc_feature 1..22: note = chemically synthesized
  source 1..22: mol_type = other DNA
tttccatttgacttagattatg

SEQ ID NO: 3959 - DNA, 22 bp, synthetic construct
  misc_feature 1..22: note = chemically synthesized
  source 1..22: mol_type = other DNA
tccatttgacttagattatgca

SEQ ID NO: 3960 - DNA, 22 bp, synthetic construct
  misc_feature 1..22: note = chemically synthesized
  source 1..22: mol_type = other DNA
ccatttgacttagattatgcat

SEQ ID NO: 3961 - DNA, 22 bp, synthetic construct
  misc_feature 1..22: note = chemically synthesized
  source 1..22: mol_type = other DNA
catttgacttagattatgcatt

SEQ ID NO: 3962 - DNA, 22 bp, synthetic construct
  misc_feature 1..22: note = chemically synthesized
  source 1..22: mol_type = other DNA
gacttagattatgcatttgttt

SEQ ID NO: 3963 - DNA, 22 bp, synthetic construct
  misc_feature 1..22: note = chemically synthesized
  source 1..22: mol_type = other DNA
acttagattatgcatttgtttc

SEQ ID NO: 3964 - DNA, 22 bp, synthetic construct
  misc_feature 1..22: note = chemically synthesized
  source 1..22: mol_type = other DNA
agattatgcatttgtttcaaaa

SEQ ID NO: 3965 - DNA, 22 bp, synthetic construct
  misc_feature 1..22: note = chemically synthesized
  source 1..22: mol_type = other DNA
gattatgcatttgtttcaaaat

SEQ ID NO: 3966 - DNA, 22 bp, synthetic construct
  misc_feature 1..22: note = chemically synthesized
  source 1..22: mol_type = other DNA
tgcatttgtttcaaaatattgg

SEQ ID NO: 3967 - DNA, 22 bp, synthetic construct
  misc_feature 1..22: note = chemically synthesized
  source 1..22: mol_type = other DNA
gtttcaaaatattgggctctga

SEQ ID NO: 3968 - DNA, 22 bp, synthetic construct
  misc_feature 1..22: note = chemically synthesized
  source 1..22: mol_type = other DNA
tttcaaaatattgggctctgat

SEQ ID NO: 3969 - DNA, 22 bp, synthetic construct
  misc_feature 1..22: note = chemically synthesized
  source 1..22: mol_type = other DNA
caaaatattgggctctgattcc

SEQ ID NO: 3970 - DNA, 22 bp, synthetic construct
  misc_feature 1..22: note = chemically synthesized
  source 1..22: mol_type = other DNA
aaaatattgggctctgattcct

SEQ ID NO: 3971 - DNA, 22 bp, synthetic construct
  misc_feature 1..22: note = chemically synthesized
  source 1..22: mol_type = other DNA
ggctctgattcctacagaaaaa

SEQ ID NO: 3972 - DNA, 22 bp, synthetic construct
  misc_feature 1..22: note = chemically synthesized
  source 1..22: mol_type = other DNA
tgattcctacagaaaaactcag

SEQ ID NO: 3973 - DNA, 22 bp, synthetic construct
  misc_feature 1..22: note = chemically synthesized
  source 1..22: mol_type = other DNA
attcctacagaaaaactcagga

SEQ ID NO: 3974 - DNA, 22 bp, synthetic construct
  misc_feature 1..22: note = chemically synthesized
  source 1..22: mol_type = other DNA
ctacagaaaaactcaggatgat

SEQ ID NO: 3975 - DNA, 22 bp, synthetic construct
  misc_feature 1..22: note = chemically synthesized
  source 1..22: mol_type = other DNA
cagaaaaactcaggatgatgtt

SEQ ID NO: 3976 - DNA, 22 bp, synthetic construct
  misc_feature 1..22: note = chemically synthesized
  source 1..22: mol_type = other DNA
aggatgatgttcaattatttct

SEQ ID NO: 3977 - DNA, 22 bp, synthetic construct
  misc_feature 1..22: note = chemically synthesized
  source 1..22: mol_type = other DNA
aattatttcttctgcctttaaa

SEQ ID NO: 3978 - DNA, 22 bp, synthetic construct
  misc_feature 1..22: note = chemically synthesized
  source 1..22: mol_type = other DNA
tttcttctgcctttaaacagaa

SEQ ID NO: 3979 - DNA, 22 bp, synthetic construct
  misc_feature 1..22: note = chemically synthesized
  source 1..22: mol_type = other DNA
cttctgcctttaaacagaagaa

SEQ ID NO: 3980 - DNA, 22 bp, synthetic construct
  misc_feature 1..22: note = chemically synthesized
  source 1..22: mol_type = other DNA
ttctgcctttaaacagaagaat

SEQ ID NO: 3981 - DNA, 22 bp, synthetic construct
  misc_feature 1..22: note = chemically synthesized
  source 1..22: mol_type = other DNA
ctgcctttaaacagaagaataa

SEQ ID NO: 3982 - DNA, 22 bp, synthetic construct
  misc_feature 1..22: note = chemically synthesized
  source 1..22: mol_type = other DNA
tgcctttaaacagaagaataat

SEQ ID NO: 3983 - DNA, 22 bp, synthetic construct
  misc_feature 1..22: note = chemically synthesized
  source 1..22: mol_type = other DNA
cctttaaacagaagaataattc

SEQ ID NO: 3984 - DNA, 22 bp, synthetic construct
  misc_feature 1..22: note = chemically synthesized
  source 1..22: mol_type = other DNA
taaacagaagaataattcaatt

SEQ ID NO: 3985 - DNA, 22 bp, synthetic construct
  misc_feature 1..22: note = chemically synthesized
  source 1..22: mol_type = other DNA
aaacagaagaataattcaatta

SEQ ID NO: 3986 - DNA, 22 bp, synthetic construct
  misc_feature 1..22: note = chemically synthesized
  source 1..22: mol_type = other DNA
aacagaagaataattcaattac

SEQ ID NO: 3987 - DNA, 22 bp, synthetic construct
  misc_feature 1..22: note = chemically synthesized
  source 1..22: mol_type = other DNA
aattaccaagaatactatttta

SEQ ID NO: 3988 - DNA, 22 bp, synthetic construct
  misc_feature 1..22: note = chemically synthesized
  source 1..22: mol_type = other DNA
ccaagaatactattttaaaaat

SEQ ID NO: 3989 - DNA, 22 bp, synthetic construct
  misc_feature 1..22: note = chemically synthesized
  source 1..22: mol_type = other DNA
ttttaaaaattattaaatattt

SEQ ID NO: 3990 - DNA, 22 bp, synthetic construct
  misc_feature 1..22: note = chemically synthesized
  source 1..22: mol_type = other DNA
taaaaattattaaatatttata

SEQ ID NO: 3991 - DNA, 22 bp, synthetic construct
  misc_feature 1..22: note = chemically synthesized
  source 1..22: mol_type = other DNA
aaaaattattaaatatttatag

SEQ ID NO: 3992 - DNA, 22 bp, synthetic construct
  misc_feature 1..22: note = chemically synthesized
  source 1..22: mol_type = other DNA
aaaattattaaatatttatagc

SEQ ID NO: 3993 - DNA, 22 bp, synthetic construct
  misc_feature 1..22: note = chemically synthesized
  source 1..22: mol_type = other DNA
ttaaatatttatagccttatat

SEQ ID NO: 3994 - DNA, 22 bp, synthetic construct
  misc_feature 1..22: note = chemically synthesized
  source 1..22: mol_type = other DNA
aatatttatagccttatattca

SEQ ID NO: 3995 - DNA, 22 bp, synthetic construct
  misc_feature 1..22: note = chemically synthesized
  source 1..22: mol_type = other DNA
atagccttatattcaaacttag

SEQ ID NO: 3996 - DNA, 22 bp, synthetic construct
  misc_feature 1..22: note = chemically synthesized
  source 1..22: mol_type = other DNA
tagccttatattcaaacttaga

SEQ ID NO: 3997 - DNA, 22 bp, synthetic construct
  misc_feature 1..22: note = chemically synthesized
  source 1..22: mol_type = other DNA
atattcaaacttagataatatc

SEQ ID NO: 3998 - DNA, 22 bp, synthetic construct
  misc_feature 1..22: note = chemically synthesized
  source 1..22: mol_type = other DNA
tattcaaacttagataatatct

SEQ ID NO: 3999 - DNA, 22 bp, synthetic construct
  misc_feature 1..22: note = chemically synthesized
  source 1..22: mol_type = other DNA
aaacttagataatatctaatac

SEQ ID NO: 4000 - DNA, 22 bp, synthetic construct
  misc_feature 1..22: note = chemically synthesized
  source 1..22: mol_type = other DNA
agataatatctaatactctttt

SEQ ID NO: 4001 - DNA, 22 bp, synthetic construct
  misc_feature 1..22: note = chemically synthesized
  source 1..22: mol_type = other DNA
gataatatctaatactctttta

SEQ ID NO: 4002 - DNA, 22 bp, synthetic construct
  misc_feature 1..22: note = chemically synthesized
  source 1..22: mol_type = other DNA
atactcttttagtgtctatcaa

SEQ ID NO: 4003 - DNA, 22 bp, synthetic construct
  misc_feature 1..22: note = chemically synthesized
  source 1..22: mol_type = other DNA
ttttagtgtctatcaacagcaa

SEQ ID NO: 4004 - DNA, 22 bp, synthetic construct
  misc_feature 1..22: note = chemically synthesized
  source 1..22: mol_type = other DNA
ttagtgtctatcaacagcaacc

SEQ ID NO: 4005 - DNA, 22 bp, synthetic construct
  misc_feature 1..22: note = chemically synthesized
  source 1..22: mol_type = other DNA
tagtgtctatcaacagcaacca

SEQ ID NO: 4006 - DNA, 22 bp, synthetic construct
  misc_feature 1..22: note = chemically synthesized
  source 1..22: mol_type = other DNA
agtgtctatcaacagcaaccaa

SEQ ID NO: 4007 - DNA, 22 bp, synthetic construct
  misc_feature 1..22: note = chemically synthesized
  source 1..22: mol_type = other DNA
gtgtctatcaacagcaaccaag

SEQ ID NO: 4008 - DNA, 22 bp, synthetic construct
  misc_feature 1..22: note = chemically synthesized
  source 1..22: mol_type = other DNA
tcaacagcaaccaagaagacag

SEQ ID NO: 4009 - DNA, 22 bp, synthetic construct
  misc_feature 1..22: note = chemically synthesized
  source 1..22: mol_type = other DNA
aaatgaaaataaatataaatac

SEQ ID NO: 4010 - DNA, 22 bp, synthetic construct
  misc_feature 1..22: note = chemically synthesized
  source 1..22: mol_type = other DNA
tatttatgagatcaacagcaca

SEQ ID NO: 4011 - DNA, 22 bp, synthetic construct
  misc_feature 1..22: note = chemically synthesized
  source 1..22: mol_type = other DNA
tttatgagatcaacagcacagg

SEQ ID NO: 4012 - DNA, 22 bp, synthetic construct
  misc_feature 1..22: note = chemically synthesized
  source 1..22: mol_type = other DNA
atgagatcaacagcacaggttt

SEQ ID NO: 4013 - DNA, 22 bp, synthetic construct
  misc_feature 1..22: note = chemically synthesized
  source 1..22: mol_type = other DNA
tgagatcaacagcacaggtttt

SEQ ID NO: 4014 - DNA, 22 bp, synthetic construct
  misc_feature 1..22: note = chemically synthesized
  source 1..22: mol_type = other DNA
tgtggtttttaaataaagcata

SEQ ID NO: 4015 - DNA, 22 bp, synthetic construct
  misc_feature 1..22: note = chemically synthesized
  source 1..22: mol_type = other DNA
gtggtttttaaataaagcatag

SEQ ID NO: 4016 - DNA, 22 bp, synthetic construct
  misc_feature 1..22: note = chemically synthesized
  source 1..22: mol_type = other DNA
tggtttttaaataaagcatagt

SEQ ID NO: 4017 - DNA, 22 bp, synthetic construct
  misc_feature 1..22: note = chemically synthesized
  source 1..22: mol_type = other DNA
ttaaataaagcatagtgcaatg

SEQ ID NO: 4018 - DNA, 22 bp, synthetic construct
  misc_feature 1..22: note = chemically synthesized
  source 1..22: mol_type = other DNA
taaataaagcatagtgcaatgg

SEQ ID NO: 4019 - DNA, 22 bp, synthetic construct
  misc_feature 1..22: note = chemically synthesized
  source 1..22: mol_type = other DNA
aaataaagcatagtgcaatgga

SEQ ID NO: 4020 - DNA, 22 bp, synthetic construct
  misc_feature 1..22: note = chemically synthesized
  source 1..22: mol_type = other DNA
aataaagcatagtgcaatggat

SEQ ID NO: 4021 - DNA, 22 bp, synthetic construct
  misc_feature 1..22: note = chemically synthesized
  source 1..22: mol_type = other DNA
tgggatagttatgaattcaatc

SEQ ID NO: 4022 - DNA, 22 bp, synthetic construct
  misc_feature 1..22: note = chemically synthesized
  source 1..22: mol_type = other DNA
gggatagttatgaattcaatct

SEQ ID NO: 4023 - DNA, 22 bp, synthetic construct
  misc_feature 1..22: note = chemically synthesized
  source 1..22: mol_type = other DNA
ggatagttatgaattcaatctt

SEQ ID NO: 4024 - DNA, 22 bp, synthetic construct
  misc_feature 1..22: note = chemically synthesized
  source 1..22: mol_type = other DNA
tgaattcaatcttcaaccctat

SEQ ID NO: 4025 - DNA, 22 bp, synthetic construct
  misc_feature 1..22: note = chemically synthesized
  source 1..22: mol_type = other DNA
aatcttcaaccctattctgtga

SEQ ID NO: 4026 - DNA, 22 bp, synthetic construct
  misc_feature 1..22: note = chemically synthesized
  source 1..22: mol_type = other DNA
caaccctattctgtgaagtttc

SEQ ID NO: 4027 - DNA, 22 bp, synthetic construct
  misc_feature 1..22: note = chemically synthesized
  source 1..22: mol_type = other DNA
aaccctattctgtgaagtttca

SEQ ID NO: 4028 - DNA, 22 bp, synthetic construct
  misc_feature 1..22: note = chemically synthesized
  source 1..22: mol_type = other DNA
ttctgtgaagtttcagtcactc

SEQ ID NO: 4029 - DNA, 22 bp, synthetic construct
  misc_feature 1..22: note = chemically synthesized
  source 1..22: mol_type = other DNA
tgtgaagtttcagtcactctaa

SEQ ID NO: 4030 - DNA, 22 bp, synthetic construct
  misc_feature 1..22: note = chemically synthesized
  source 1..22: mol_type = other DNA
tgaagtttcagtcactctaagt

SEQ ID NO: 4031 - DNA, 22 bp, synthetic construct
  misc_feature 1..22: note = chemically synthesized
  source 1..22: mol_type = other DNA
cagtcactctaagttactttgc

SEQ ID NO: 4032 - DNA, 22 bp, synthetic construct
  misc_feature 1..22: note = chemically synthesized
  source 1..22: mol_type = other DNA
agtcactctaagttactttgca

SEQ ID NO: 4033 - DNA, 22 bp, synthetic construct
  misc_feature 1..22: note = chemically synthesized
  source 1..22: mol_type = other DNA
taagttactttgcactttcctt

SEQ ID NO: 4034 - DNA, 22 bp, synthetic construct
  misc_feature 1..22: note = chemically synthesized
  source 1..22: mol_type = other DNA
agttactttgcactttccttag

SEQ ID NO: 4035 - DNA, 22 bp, synthetic construct
  misc_feature 1..22: note = chemically synthesized
  source 1..22: mol_type = other DNA
ctttgcactttccttagtgcgc

SEQ ID NO: 4036 - DNA, 22 bp, synthetic construct
  misc_feature 1..22: note = chemically synthesized
  source 1..22: mol_type = other DNA
tgcactttccttagtgcgcaaa

SEQ ID NO: 4037 - DNA, 22 bp, synthetic construct
  misc_feature 1..22: note = chemically synthesized
  source 1..22: mol_type = other DNA
gcactttccttagtgcgcaaaa

SEQ ID NO: 4038 - DNA, 22 bp, synthetic construct
  misc_feature 1..22: note = chemically synthesized
  source 1..22: mol_type = other DNA
cactttccttagtgcgcaaaag

SEQ ID NO: 4039 - DNA, 22 bp, synthetic construct
  misc_feature 1..22: note = chemically synthesized
  source 1..22: mol_type = other DNA
tccttagtgcgcaaaagaaaat

SEQ ID NO: 4040 - DNA, 22 bp, synthetic construct
  misc_feature 1..22: note = chemically synthesized
  source 1..22: mol_type = other DNA
ccttagtgcgcaaaagaaaatt

SEQ ID NO: 4041 - DNA, 22 bp, synthetic construct
  misc_feature 1..22: note = chemically synthesized
  source 1..22: mol_type = other DNA
cttagtgcgcaaaagaaaatta

SEQ ID NO: 4042 - DNA, 22 bp, synthetic construct
  misc_feature 1..22: note = chemically synthesized
  source 1..22: mol_type = other DNA
agtgcgcaaaagaaaattacag

SEQ ID NO: 4043 - DNA, 22 bp, synthetic construct
  misc_feature 1..22: note = chemically synthesized
  source 1..22: mol_type = other DNA
gtgcgcaaaagaaaattacagt

SEQ ID NO: 4044 - DNA, 22 bp, synthetic construct
  misc_feature 1..22: note = chemically synthesized
  source 1..22: mol_type = other DNA
cagtcactaaacaattctgacc

SEQ ID NO: 4045 - DNA, 22 bp, synthetic construct
  misc_feature 1..22: note = chemically synthesized
  source 1..22: mol_type = other DNA
aacaattctgaccttttttttt

SEQ ID NO: 4046 - DNA, 22 bp, synthetic construct
  misc_feature 1..22: note = chemically synthesized
  source 1..22: mol_type = other DNA
tgacctttttttttttttacct

SEQ ID NO: 4047 - DNA, 22 bp, synthetic construct
  misc_feature 1..22: note = chemically synthesized
  source 1..22: mol_type = other DNA
acctttttttttttttacctag

SEQ ID NO: 4048 - DNA, 22 bp, synthetic construct
  misc_feature 1..22: note = chemically synthesized
  source 1..22: mol_type = other DNA
tttttttttttacctaggatgt

SEQ ID NO: 4049 - DNA, 22 bp, synthetic construct
  misc_feature 1..22: note = chemically synthesized
  source 1..22: mol_type = other DNA
ttttttttttacctaggatgtt

SEQ ID NO: 4050 - DNA, 22 bp, synthetic construct
  misc_feature 1..22: note = chemically synthesized
  source 1..22: mol_type = other DNA
tttttttttacctaggatgttt

SEQ ID NO: 4051 - DNA, 22 bp, synthetic construct
  misc_feature 1..22: note = chemically synthesized
  source 1..22: mol_type = other DNA
ttttttttacctaggatgtttg

SEQ ID NO: 4052 - DNA, 22 bp, synthetic construct
  misc_feature 1..22: note = chemically synthesized
  source 1..22: mol_type = other DNA
tttttttacctaggatgtttga

SEQ ID NO: 4053 - DNA, 22 bp, synthetic construct
  misc_feature 1..22: note = chemically synthesized
  source 1..22: mol_type = other DNA
ttttttacctaggatgtttgaa

SEQ ID NO: 4054 - DNA, 22 bp, synthetic construct
  misc_feature 1..22: note = chemically synthesized
  source 1..22: mol_type = other DNA
tttttacctaggatgtttgaat

SEQ ID NO: 4055 - DNA, 22 bp, synthetic construct
  misc_feature 1..22: note = chemically synthesized
  source 1..22: mol_type = other DNA
ttttacctaggatgtttgaatt

SEQ ID NO: 4056 - DNA, 22 bp, synthetic construct
  misc_feature 1..22: note = chemically synthesized
  source 1..22: mol_type = other DNA
tttacctaggatgtttgaattt

SEQ ID NO: 4057 - DNA, 22 bp, synthetic construct
  misc_feature 1..22: note = chemically synthesized
  source 1..22: mol_type = other DNA
ttacctaggatgtttgaatttt

SEQ ID NO: 4058 - DNA, 22 bp, synthetic construct
  misc_feature 1..22: note = chemically synthesized
  source 1..22: mol_type = other DNA
tacctaggatgtttgaatttta

SEQ ID NO: 4059 - DNA, 22 bp, synthetic construct
  misc_feature 1..22: note = chemically synthesized
  source 1..22: mol_type = other DNA
acctaggatgtttgaattttat

SEQ ID NO: 4060 - DNA, 22 bp, synthetic construct
  misc_feature 1..22: note = chemically synthesized
  source 1..22: mol_type = other DNA
cctaggatgtttgaattttatt

SEQ ID NO: 4061 - DNA, 22 bp, synthetic construct
  misc_feature 1..22: note = chemically synthesized
  source 1..22: mol_type = other DNA
ggatgtttgaattttattaata

SEQ ID NO: 4062 - DNA, 22 bp, synthetic construct
  misc_feature 1..22: note = chemically synthesized
  source 1..22: mol_type = other DNA
gaattttattaataagataacc

SEQ ID NO: 4063 - DNA, 22 bp, synthetic construct
  misc_feature 1..22: note = chemically synthesized
  source 1..22: mol_type = other DNA
aattttattaataagataacct

SEQ ID NO: 4064 - DNA, 22 bp, synthetic construct
  misc_feature 1..22: note = chemically synthesized
  source 1..22: mol_type = other DNA
tattaataagataaccttgtaa

SEQ ID NO: 4065 - DNA, 22 bp, synthetic construct
  misc_feature 1..22: note = chemically synthesized
  source 1..22: mol_type = other DNA
attaataagataaccttgtaag

SEQ ID NO: 4066 - DNA, 22 bp, synthetic construct
  misc_feature 1..22: note = chemically synthesized
  source 1..22: mol_type = other DNA
ttaataagataaccttgtaaga

SEQ ID NO: 4067 - DNA, 22 bp, synthetic construct
  misc_feature 1..22: note = chemically synthesized
  source 1..22: mol_type = other DNA
ataagataaccttgtaagactt

SEQ ID NO: 4068 - DNA, 22 bp, synthetic construct
  misc_feature 1..22: note = chemically synthesized
  source 1..22: mol_type = other DNA
gtaagacttcacaaatacaaaa

SEQ ID NO: 4069 - DNA, 22 bp, synthetic construct
  misc_feature 1..22: note = chemically synthesized
  source 1..22: mol_type = other DNA
taagacttcacaaatacaaaat

SEQ ID NO: 4070 - DNA, 22 bp, synthetic construct
  misc_feature 1..22: note = chemically synthesized
  source 1..22: mol_type = other DNA
cacaaatacaaaatactatgcc

SEQ ID NO: 4071 - DNA, 22 bp, synthetic construct
  misc_feature 1..22: note = chemically synthesized
  source 1..22: mol_type = other DNA
acaaatacaaaatactatgcca

SEQ ID NO: 4072 - DNA, 22 bp, synthetic construct
  misc_feature 1..22: note = chemically synthesized
  source 1..22: mol_type = other DNA
tgccattttagaaataaatgcc

SEQ ID NO: 4073 - DNA, 22 bp, synthetic construct
  misc_feature 1..22: note = chemically synthesized
  source 1..22: mol_type = other DNA
tagaaataaatgccaaaataat

SEQ ID NO: 4074 - DNA, 22 bp, synthetic construct
  misc_feature 1..22: note = chemically synthesized
  source 1..22: mol_type = other DNA
agaaataaatgccaaaataatt

SEQ ID NO: 4075 - DNA, 22 bp, synthetic construct
  misc_feature 1..22: note = chemically synthesized
  source 1..22: mol_type = other DNA
gaaataaatgccaaaataattc

SEQ ID NO: 4076 - DNA, 22 bp, synthetic construct
  misc_feature 1..22: note = chemically synthesized
  source 1..22: mol_type = other DNA
tttaaagatgcagagtttacta

SEQ ID NO: 4077 - DNA, 22 bp, synthetic construct
  misc_feature 1..22: note = chemically synthesized
  source 1..22: mol_type = other DNA
taaagatgcagagtttactaaa

SEQ ID NO: 4078 - DNA, 22 bp, synthetic construct
  misc_feature 1..22: note = chemically synthesized
  source 1..22: mol_type = other DNA
aaagatgcagagtttactaaaa

SEQ ID NO: 4079 - DNA, 22 bp, synthetic construct
  misc_feature 1..22: note = chemically synthesized
  source 1..22: mol_type = other DNA
aagatgcagagtttactaaaac

SEQ ID NO: 4080 - DNA, 22 bp, synthetic construct
  misc_feature 1..22: note = chemically synthesized
  source 1..22: mol_type = other DNA
actaaaactttattttactggg

SEQ ID NO: 4081 - DNA, 22 bp, synthetic construct
  misc_feature 1..22: note = chemically synthesized
  source 1..22: mol_type = other DNA
ctaaaactttattttactggga

SEQ ID NO: 4082 - DNA, 22 bp, synthetic construct
  misc_feature 1..22: note = chemically synthesized
  source 1..22: mol_type = other DNA
aaactttattttactgggaaaa

SEQ ID NO: 4083 - DNA, 22 bp, synthetic construct
  misc_feature 1..22: note = chemically synthesized
  source 1..22: mol_type = other DNA
tattttactgggaaaatagaat

SEQ ID NO: 4084 - DNA, 22 bp, synthetic construct
  misc_feature 1..22: note = chemically synthesized
  source 1..22: mol_type = other DNA
attttactgggaaaatagaata

SEQ ID NO: 4085 - DNA, 22 bp, synthetic construct
  misc_feature 1..22: note = chemically synthesized
  source 1..22: mol_type = other DNA
ttttactgggaaaatagaataa

SEQ ID NO: 4086 - DNA, 22 bp, synthetic construct
  misc_feature 1..22: note = chemically synthesized
  source 1..22: mol_type = other DNA
tactgggaaaatagaataaaag

SEQ ID NO: 4087 - DNA, 22 bp, synthetic construct
  misc_feature 1..22: note = chemically synthesized
  source 1..22: mol_type = other DNA
actgggaaaatagaataaaagt

SEQ ID NO: 4088 - DNA, 22 bp, synthetic construct
  misc_feature 1..22: note = chemically synthesized
  source 1..22: mol_type = other DNA
ctgggaaaatagaataaaagtt

SEQ ID NO: 4089 - DNA, 22 bp, synthetic construct
  misc_feature 1..22: note = chemically synthesized
  source 1..22: mol_type = other DNA
ggaaaatagaataaaagttgaa

SEQ ID NO: 4090 - DNA, 22 bp, synthetic construct
  misc_feature 1..22: note = chemically synthesized
  source 1..22: mol_type = other DNA
aacaatagaaaaatggatttct

SEQ ID NO: 4091 - DNA, 22 bp, synthetic construct
  misc_feature 1..22: note = chemically synthesized
  source 1..22: mol_type = other DNA
cttacgtgcatctcgacgaaac

SEQ ID NO: 4092 - DNA, 22 bp, synthetic construct
  misc_feature 1..22: note = chemically synthesized
  source 1..22: mol_type = other DNA
ttacgtgcatctcgacgaaaca

SEQ ID NO: 4093 - DNA, 22 bp, synthetic construct
  misc_feature 1..22: note = chemically synthesized
  source 1..22: mol_type = other DNA
acgtgcatctcgacgaaacaca

SEQ ID NO: 4094 - DNA, 22 bp, synthetic construct
  misc_feature 1..22: note = chemically synthesized
  source 1..22: mol_type = other DNA
cgtgcatctcgacgaaacacac

SEQ ID NO: 4095 - DNA, 22 bp, synthetic construct
  misc_feature 1..22: note = chemically synthesized
  source 1..22: mol_type = other DNA
gacgaaacacacccctggaata

SEQ ID NO: 4096 - DNA, 22 bp, synthetic construct
  misc_feature 1..22: note = chemically synthesized
  source 1..22: mol_type = other DNA
gaataagccgagctaaagagaa

SEQ ID NO: 4097 - DNA, 22 bp, synthetic construct
  misc_feature 1..22: note = chemically synthesized
  source 1..22: mol_type = other DNA
aagagaaaaagaagggaaataa

SEQ ID NO: 4098 - DNA, 22 bp, synthetic construct
  misc_feature 1..22: note = chemically synthesized
  source 1..22: mol_type = other DNA
cccacttcattgtgccaaaggc

SEQ ID NO: 4099 - DNA, 22 bp, synthetic construct
  misc_feature 1..22: note = chemically synthesized
  source 1..22: mol_type = other DNA
cattgtgccaaaggcgtgtggg

SEQ ID NO: 4100 - DNA, 22 bp, synthetic construct
  misc_feature 1..22: note = chemically synthesized
  source 1..22: mol_type = other DNA
attgtgccaaaggcgtgtgggg

SEQ ID NO: 4101 - DNA, 22 bp, synthetic construct
  misc_feature 1..22: note = chemically synthesized
  source 1..22: mol_type = other DNA
tgccaaaggcgtgtggggttga

SEQ ID NO: 4102 - DNA, 22 bp, synthetic construct
  misc_feature 1..22: note = chemically synthesized
  source 1..22: mol_type = other DNA
acagaagagaaaagctaggaca

SEQ ID NO: 4103 - DNA, 22 bp, synthetic construct
  misc_feature 1..22: note = chemically synthesized
  source 1..22: mol_type = other DNA
ggacaaacggagggaaattagc

SEQ ID NO: 4104 - DNA, 20 bp, synthetic construct
  misc_feature 1..20: note = chemically synthesized
  source 1..20: mol_type = other DNA
aataaatttacccaacaaaa

SEQ ID NO: 4105 - DNA, 20 bp, synthetic construct
  misc_feature 1..20: note = chemically synthesized
  source 1..20: mol_type = other DNA
aatctcttaaaatcataaaa

SEQ ID NO: 4106 - DNA, 20 bp, synthetic construct
  misc_feature 1..20: note = chemically synthesized
  source 1..20: mol_type = other DNA
aaatcataaaaaagtaaaat

SEQ ID NO: 4107 - DNA, 20 bp, synthetic construct
  misc_feature 1..20: note = chemically synthesized
  source 1..20: mol_type = other DNA
gtaaaattagcttttaaaaa

SEQ ID NO: 4108 - DNA, 20 bp, synthetic construct
  misc_feature 1..20: note = chemically synthesized
  source 1..20: mol_type = other DNA
taaaattagcttttaaaaac

SEQ ID NO: 4109 - DNA, 20 bp, synthetic construct
  misc_feature 1..20: note = chemically synthesized
  source 1..20: mol_type = other DNA
aattagcttttaaaaacagg

SEQ ID NO: 4110 - DNA, 20 bp, synthetic construct
  misc_feature 1..20: note = chemically synthesized
  source 1..20: mol_type = other DNA
ttaaaaacaggtagtcacca

SEQ ID NO: 4111 - DNA, 20 bp, synthetic construct
  misc_feature 1..20: note = chemically synthesized
  source 1..20: mol_type = other DNA
tcaccatagcattgaatgtg

SEQ ID NO: 4112 - DNA, 20 bp, synthetic construct
  misc_feature 1..20: note = chemically synthesized
  source 1..20: mol_type = other DNA
tgaatgtgtagtttataata

SEQ ID NO: 4113 - DNA, 20 bp, synthetic construct
  misc_feature 1..20: note = chemically synthesized
  source 1..20: mol_type = other DNA
gtgtagtttataatacagca

SEQ ID NO: 4114 - DNA, 20 bp, synthetic construct
  misc_feature 1..20: note = chemically synthesized
  source 1..20: mol_type = other DNA
acaatttcaaattacctatt

SEQ ID NO: 4115 - DNA, 20 bp, synthetic construct
  misc_feature 1..20: note = chemically synthesized
  source 1..20: mol_type = other DNA
tttcaaattacctattaagt

SEQ ID NO: 4116 - DNA, 20 bp, synthetic construct
  misc_feature 1..20: note = chemically synthesized
  source 1..20: mol_type = other DNA
ctcatttctttgatttcatt

SEQ ID NO: 4117 - DNA, 20 bp, synthetic construct
  misc_feature 1..20: note = chemically synthesized
  source 1..20: mol_type = other DNA
agcattgatctaactcaatg

SEQ ID NO: 4118 - DNA, 20 bp, synthetic construct
  misc_feature 1..20: note = chemically synthesized
  source 1..20: mol_type = other DNA
attgatctaactcaatgtgg

SEQ ID NO: 4119 - DNA, 20 bp, synthetic construct
  misc_feature 1..20: note = chemically synthesized
  source 1..20: mol_type = other DNA
gatctaactcaatgtggaag

SEQ ID NO: 4120 - DNA, 20 bp, synthetic construct
  misc_feature 1..20: note = chemically synthesized
  source 1..20: mol_type = other DNA
atctaactcaatgtggaaga

SEQ ID NO: 4121 - DNA, 20 bp, synthetic construct
  misc_feature 1..20: note = chemically synthesized
  source 1..20: mol_type = other DNA
gaagaaggttacattcgtgc

SEQ ID NO: 4122 - DNA, 20 bp, synthetic construct
  misc_feature 1..20: note = chemically synthesized
  source 1..20: mol_type = other DNA
tacattcgtgcaagttaaca

SEQ ID NO: 4123 - DNA, 20 bp, synthetic construct
  misc_feature 1..20: note = chemically synthesized
  source 1..20: mol_type = other DNA
cctaccaaccttaccttttc

SEQ ID NO: 4124 - DNA, 20 bp, synthetic construct
  misc_feature 1..20: note = chemically synthesized
  source 1..20: mol_type = other DNA
ctaccaaccttaccttttct

SEQ ID NO: 4125 - DNA, 20 bp, synthetic construct
  misc_feature 1..20: note = chemically synthesized
  source 1..20: mol_type = other DNA
taccttttctgggcaaatat

SEQ ID NO: 4126 - DNA, 20 bp, synthetic construct
  misc_feature 1..20: note = chemically synthesized
  source 1..20: mol_type = other DNA
tgggcaaatattggtatata

SEQ ID NO: 4127 - DNA, 20 bp, synthetic construct
  misc_feature 1..20: note = chemically synthesized
  source 1..20: mol_type = other DNA
ggcaaatattggtatatata

SEQ ID NO: 4128 - DNA, 20 bp, synthetic construct
  misc_feature 1..20: note = chemically synthesized
  source 1..20: mol_type = other DNA
atattggtatatatagagtt

SEQ ID NO: 4129 - DNA, 20 bp, synthetic construct
  misc_feature 1..20: note = chemically synthesized
  source 1..20: mol_type = other DNA
ttggtatatatagagttaag

SEQ ID NO: 4130 - DNA, 20 bp, synthetic construct
  misc_feature 1..20: note = chemically synthesized
  source 1..20: mol_type = other DNA
atatatagagttaagaagtc

SEQ ID NO: 4131 - DNA, 20 bp, synthetic construct
  misc_feature 1..20: note = chemically synthesized
  source 1..20: mol_type = other DNA
tatatagagttaagaagtct

SEQ ID NO: 4132 - DNA, 20 bp, synthetic construct
  misc_feature 1..20: note = chemically synthesized
  source 1..20: mol_type = other DNA
aagaagtctaggtctgcttc

SEQ ID NO: 4133 - DNA, 20 bp, synthetic construct
  misc_feature 1..20: note = chemically synthesized
  source 1..20: mol_type = other DNA
aagtctaggtctgcttccag

SEQ ID NO: 4134 - DNA, 20 bp, synthetic construct
  misc_feature 1..20: note = chemically synthesized
  source 1..20: mol_type = other DNA
ggtctgcttccagaagaaaa

SEQ ID NO: 4135 - DNA, 20 bp, synthetic construct
  misc_feature 1..20: note = chemically synthesized
  source 1..20: mol_type = other DNA
gttgcttgaaattgaaaatc

SEQ ID NO: 4136 - DNA, 20 bp, synthetic construct
  misc_feature 1..20: note = chemically synthesized
  source 1..20: mol_type = other DNA
agataaaaatgttcacaatt

SEQ ID NO: 4137 - DNA, 20 bp, synthetic construct
  misc_feature 1..20: note = chemically synthesized
  source 1..20: mol_type = other DNA
ccttctttttattgttcctc

SEQ ID NO: 4138 - DNA, 20 bp, synthetic construct
  misc_feature 1..20: note = chemically synthesized
  source 1..20: mol_type = other DNA
gttcctctagttatttcctc

SEQ ID NO: 4139 - DNA, 20 bp, synthetic construct
  misc_feature 1..20: note = chemically synthesized
  source 1..20: mol_type = other DNA
tatttcctccagaattgatc

SEQ ID NO: 4140 - DNA, 20 bp, synthetic construct
  misc_feature 1..20: note = chemically synthesized
  source 1..20: mol_type = other DNA
atcatttgattctctatctc

SEQ ID NO: 4141 - DNA, 20 bp, synthetic construct
  misc_feature 1..20: note = chemically synthesized
  source 1..20: mol_type = other DNA
catttgattctctatctcca

SEQ ID NO: 4142 - DNA, 20 bp, synthetic construct
  misc_feature 1..20: note = chemically synthesized
  source 1..20: mol_type = other DNA
ctatctccagagccaaaatc

SEQ ID NO: 4143 - DNA, 20 bp, synthetic construct
  misc_feature 1..20: note = chemically synthesized
  source 1..20: mol_type = other DNA
aaaatcaagatttgctatgt

SEQ ID NO: 4144 - DNA, 20 bp, synthetic construct
  misc_feature 1..20: note = chemically synthesized
  source 1..20: mol_type = other DNA
gttagacgatgtaaaaattt

SEQ ID NO: 4145 - DNA, 20 bp, synthetic construct
  misc_feature 1..20: note = chemically synthesized
  source 1..20: mol_type = other DNA
gatgtaaaaattttagccaa

SEQ ID NO: 4146 - DNA, 20 bp, synthetic construct
  misc_feature 1..20: note = chemically synthesized
  source 1..20: mol_type = other DNA
ttttagccaatggcctcctt

SEQ ID NO: 4147 - DNA, 20 bp, synthetic construct
  misc_feature 1..20: note = chemically synthesized
  source 1..20: mol_type = other DNA
agccaatggcctccttcagt

SEQ ID NO: 4148 - DNA, 20 bp, synthetic construct
  misc_feature 1..20: note = chemically synthesized
  source 1..20: mol_type = other DNA
gccaatggcctccttcagtt

SEQ ID NO: 4149 - DNA, 20 bp, synthetic construct
  misc_feature 1..20: note = chemically synthesized
  source 1..20: mol_type = other DNA
ggcctccttcagttgggaca

SEQ ID NO: 4150 - DNA, 20 bp, synthetic construct
  misc_feature 1..20: note = chemically synthesized
  source 1..20: mol_type = other DNA
tcagttgggacatggtctta

SEQ ID NO: 4151 - DNA, 20 bp, synthetic construct
  misc_feature 1..20: note = chemically synthesized
  source 1..20: mol_type = other DNA
gtcttaaagactttgtccat

SEQ ID NO: 4152 - DNA, 20 bp, synthetic construct
  misc_feature 1..20: note = chemically synthesized
  source 1..20: mol_type = other DNA
aagactttgtccataagacg

SEQ ID NO: 4153 - DNA, 20 bp, synthetic construct
  misc_feature 1..20: note = chemically synthesized
  source 1..20: mol_type = other DNA
agactttgtccataagacga

SEQ ID NO: 4154 - DNA, 20 bp, synthetic construct
  misc_feature 1..20: note = chemically synthesized
  source 1..20: mol_type = other DNA
gactttgtccataagacgaa

SEQ ID NO: 4155 - DNA, 20 bp, synthetic construct
  misc_feature 1..20: note = chemically synthesized
  source 1..20: mol_type = other DNA
aaaaactcaacatatttgat

SEQ ID NO: 4156 - DNA, 20 bp, synthetic construct
  misc_feature 1..20: note = chemically synthesized
  source 1..20: mol_type = other DNA
tatgatctatcgctgcaaac

SEQ ID NO: 4157 - DNA, 20 bp, synthetic construct
  misc_feature 1..20: note = chemically synthesized
  source 1..20: mol_type = other DNA
gctgcaaaccagtgaaatca

SEQ ID NO: 4158 - DNA, 20 bp, synthetic construct
  misc_feature 1..20: note = chemically synthesized
  source 1..20: mol_type = other DNA
gcaaaccagtgaaatcaaag

SEQ ID NO: 4159 - DNA, 20 bp, synthetic construct
  misc_feature 1..20: note = chemically synthesized
  source 1..20: mol_type = other DNA
aaccagtgaaatcaaagaag

SEQ ID NO: 4160 - DNA, 20 bp, synthetic construct
  misc_feature 1..20: note = chemically synthesized
  source 1..20: mol_type = other DNA
gtgaaatcaaagaagaagaa

SEQ ID NO: 4161 - DNA, 20 bp, synthetic construct
  misc_feature 1..20: note = chemically synthesized
  source 1..20: mol_type = other DNA
tgaaatcaaagaagaagaaa

SEQ ID NO: 4162 - DNA, 20 bp, synthetic construct
  misc_feature 1..20: note = chemically synthesized
  source 1..20: mol_type = other DNA
aaagaagaagaaaaggaact

SEQ ID NO: 4163 - DNA, 20 bp, synthetic construct
  misc_feature 1..20: note = chemically synthesized
  source 1..20: mol_type = other DNA
gaagaagaaaaggaactgag

SEQ ID NO: 4164 - DNA, 20 bp, synthetic construct
  misc_feature 1..20: note = chemically synthesized
  source 1..20: mol_type = other DNA
aagaactacatataaactac

SEQ ID NO: 4165 - DNA, 20 bp, synthetic construct
  misc_feature 1..20: note = chemically synthesized
  source 1..20: mol_type = other DNA
taaactacaagtcaaaaatg

SEQ ID NO: 4166 - DNA, 20 bp, synthetic construct
  misc_feature 1..20: note = chemically synthesized
  source 1..20: mol_type = other DNA
aactacaagtcaaaaatgaa

SEQ ID NO: 4167 - DNA, 20 bp, synthetic construct
  misc_feature 1..20: note = chemically synthesized
  source 1..20: mol_type = other DNA
actacaagtcaaaaatgaag

SEQ ID NO: 4168 - DNA, 20 bp, synthetic construct
  misc_feature 1..20: note = chemically synthesized
  source 1..20: mol_type = other DNA
aagtcaaaaatgaagaggta

SEQ ID NO: 4169 - DNA, 20 bp, synthetic construct
  misc_feature 1..20: note = chemically synthesized
  source 1..20: mol_type = other DNA
gaactcaactcaaaacttga

SEQ ID NO: 4170 - DNA, 20 bp, synthetic construct
  misc_feature 1..20: note = chemically synthesized
  source 1..20: mol_type = other DNA
ctcaaaacttgaaagcctcc

SEQ ID NO: 4171 - DNA, 20 bp, synthetic construct
  misc_feature 1..20: note = chemically synthesized
  source 1..20: mol_type = other DNA
aaaacttgaaagcctcctag

SEQ ID NO: 4172 - DNA, 20 bp, synthetic construct
  misc_feature 1..20: note = chemically synthesized
  source 1..20: mol_type = other DNA
aaaaattctacttcaacaaa

SEQ ID NO: 4173 - DNA, 20 bp, synthetic construct
  misc_feature 1..20: note = chemically synthesized
  source 1..20: mol_type = other DNA
tcaacaaaaagtgaaatatt

SEQ ID NO: 4174 - DNA, 20 bp, synthetic construct
  misc_feature 1..20: note = chemically synthesized
  source 1..20: mol_type = other DNA
acaaaaagtgaaatatttag

SEQ ID NO: 4175 - DNA, 20 bp, synthetic construct
  misc_feature 1..20: note = chemically synthesized
  source 1..20: mol_type = other DNA
aaaaagtgaaatatttagaa

SEQ ID NO: 4176 - DNA, 20 bp, synthetic construct
  misc_feature 1..20: note = chemically synthesized
  source 1..20: mol_type = other DNA
tcaaaatcaacctgaaactc

SEQ ID NO: 4177 - DNA, 20 bp, synthetic construct
  misc_feature 1..20: note = chemically synthesized
  source 1..20: mol_type = other DNA
acctgaaactccagaacacc

SEQ ID NO: 4178 - DNA, 20 bp, synthetic construct
  misc_feature 1..20: note = chemically synthesized
  source 1..20: mol_type = other DNA
tgaaactccagaacacccag

SEQ ID NO: 4179 - DNA, 20 bp, synthetic construct
  misc_feature 1..20: note = chemically synthesized
  source 1..20: mol_type = other DNA
cccagaagtaacttcactta

SEQ ID NO: 4180 - DNA, 20 bp, synthetic construct
  misc_feature 1..20: note = chemically synthesized
  source 1..20: mol_type = other DNA
gaagtaacttcacttaaagt

SEQ ID NO: 4181 - DNA, 20 bp, synthetic construct
  misc_feature 1..20: note = chemically synthesized
  source 1..20: mol_type = other DNA
gtaacttcacttaaagtaag

SEQ ID NO: 4182 - DNA, 20 bp, synthetic construct
  misc_feature 1..20: note = chemically synthesized
  source 1..20: mol_type = other DNA
cttaaagtaagtagaaaata

SEQ ID NO: 4183 - DNA, 20 bp, synthetic construct
  misc_feature 1..20: note = chemically synthesized
  source 1..20: mol_type = other DNA
taaagtaagtagaaaataaa

SEQ ID NO: 4184 - DNA, 20 bp, synthetic construct
  misc_feature 1..20: note = chemically synthesized
  source 1..20: mol_type = other DNA
aaagtaagtagaaaataaag

SEQ ID NO: 4185 - DNA, 20 bp, synthetic construct
  misc_feature 1..20: note = chemically synthesized
  source 1..20: mol_type = other DNA
aagtaagtagaaaataaaga

SEQ ID NO: 4186 - DNA, 20 bp, synthetic construct
  misc_feature 1..20: note = chemically synthesized
  source 1..20: mol_type = other DNA
tcatgtttatgttttcaatg

SEQ ID NO: 4187 - DNA, 20 bp, synthetic construct
  misc_feature 1..20: note = chemically synthesized
  source 1..20: mol_type = other DNA
cttttaaaaaaaatatttct

SEQ ID NO: 4188 - DNA, 20 bp, synthetic construct
  misc_feature 1..20: note = chemically synthesized
  source 1..20: mol_type = other DNA
ttttaaaaaaaatatttcta

SEQ ID NO: 4189 - DNA, 20 bp, synthetic construct
  misc_feature 1..20: note = chemically synthesized
  source 1..20: mol_type = other DNA
gttgaaatacttttttttcc

SEQ ID NO: 4190 - DNA, 20 bp, synthetic construct
  misc_feature 1..20: note = chemically synthesized
  source 1..20: mol_type = other DNA
tttccaagaaaaataatctc

SEQ ID NO: 4191 - DNA, 20 bp, synthetic construct
  misc_feature 1..20: note = chemically synthesized
  source 1..20: mol_type = other DNA
aaatttcctattataatttc

SEQ ID NO: 4192 - DNA, 20 bp, synthetic construct
  misc_feature 1..20: note = chemically synthesized
  source 1..20: mol_type = other DNA
ttcctattataatttcaagt

SEQ ID NO: 4193 - DNA, 20 bp, synthetic construct
  misc_feature 1..20: note = chemically synthesized
  source 1..20: mol_type = other DNA
tttatatgaaaattacaaat

SEQ ID NO: 4194 - DNA, 20 bp, synthetic construct
  misc_feature 1..20: note = chemically synthesized
  source 1..20: mol_type = other DNA
atcggttaaattatacaatc

SEQ ID NO: 4195 - DNA, 20 bp, synthetic construct
  misc_feature 1..20: note = chemically synthesized
  source 1..20: mol_type = other DNA
tacactattgtaaattactg

SEQ ID NO: 4196 - DNA, 20 bp, synthetic construct
  misc_feature 1..20: note = chemically synthesized
  source 1..20: mol_type = other DNA
acactattgtaaattactga

SEQ ID NO: 4197 - DNA, 20 bp, synthetic construct
  misc_feature 1..20: note = chemically synthesized
  source 1..20: mol_type = other DNA
tattgtaaattactgaaggt

SEQ ID NO: 4198 - DNA, 20 bp, synthetic construct
  misc_feature 1..20: note = chemically synthesized
  source 1..20: mol_type = other DNA
aattactgaaggtaagtaaa

SEQ ID NO: 4199 - DNA, 20 bp, synthetic construct
  misc_feature 1..20: note = chemically synthesized
  source 1..20: mol_type = other DNA
aaaaatttaaaactattctc

SEQ ID NO: 4200 - DNA, 20 bp, synthetic construct
  misc_feature 1..20: note = chemically synthesized
  source 1..20: mol_type = other DNA
ctattctccagtgtttaaaa

SEQ ID NO: 4201 - DNA, 20 bp, synthetic construct
  misc_feature 1..20: note = chemically synthesized
  source 1..20: mol_type = other DNA
ttaaaacagattaaataata

SEQ ID NO: 4202 - DNA, 20 bp, synthetic construct
  misc_feature 1..20: note = chemically synthesized
  source 1..20: mol_type = other DNA
agattaaataatacagtaaa

SEQ ID NO: 4203 - DNA, 20 bp, synthetic construct
  misc_feature 1..20: note = chemically synthesized
  source 1..20: mol_type = other DNA
aaataatacagtaaatggaa

SEQ ID NO: 4204 - DNA, 20 bp, synthetic construct
  misc_feature 1..20: note = chemically synthesized
  source 1..20: mol_type = other DNA
ttattcatatgaaaatatgc

SEQ ID NO: 4205 - DNA, 20 bp, synthetic construct
  misc_feature 1..20: note = chemically synthesized
  source 1..20: mol_type = other DNA
tattcatatgaaaatatgct

SEQ ID NO: 4206 - DNA, 20 bp, synthetic construct
  misc_feature 1..20: note = chemically synthesized
  source 1..20: mol_type = other DNA
tgggctttttcttttaattg

SEQ ID NO: 4207 - DNA, 20 bp, synthetic construct
  misc_feature 1..20: note = chemically synthesized
  source 1..20: mol_type = other DNA
tttttcttttaattgaagtt

SEQ ID NO: 4208 - DNA, 20 bp, synthetic construct
  misc_feature 1..20: note = chemically synthesized
  source 1..20: mol_type = other DNA
aagttcagaaaatcaaattt

SEQ ID NO: 4209 - DNA, 20 bp, synthetic construct
  misc_feature 1..20: note = chemically synthesized
  source 1..20: mol_type = other DNA
gttcagaaaatcaaatttta

SEQ ID NO: 4210 - DNA, 20 bp, synthetic construct
  misc_feature 1..20: note = chemically synthesized
  source 1..20: mol_type = other DNA
agaaaatcaaattttagaga

SEQ ID NO: 4211 - DNA, 20 bp, synthetic construct
  misc_feature 1..20: note = chemically synthesized
  source 1..20: mol_type = other DNA
tacaatttaaataaaatgtt

SEQ ID NO: 4212 - DNA, 20 bp, synthetic construct
  misc_feature 1..20: note = chemically synthesized
  source 1..20: mol_type = other DNA
acaatttaaataaaatgtta

SEQ ID NO: 4213 - DNA, 20 bp, synthetic construct
  misc_feature 1..20: note = chemically synthesized
  source 1..20: mol_type = other DNA
caaaaatatgtgctatttga

SEQ ID NO: 4214 - DNA, 20 bp, synthetic construct
  misc_feature 1..20: note = chemically synthesized
  source 1..20: mol_type = other DNA
aaatatgtgctatttgaaag

SEQ ID NO: 4215 - DNA, 20 bp, synthetic construct
  misc_feature 1..20: note = chemically synthesized
  source 1..20: mol_type = other DNA
gctatttgaaagaagcatac

SEQ ID NO: 4216 - DNA, 20 bp, synthetic construct
  misc_feature 1..20: note = chemically synthesized
  source 1..20: mol_type = other DNA
ctatttgaaagaagcataca

SEQ ID NO: 4217 - DNA, 20 bp, synthetic construct
  misc_feature 1..20: note = chemically synthesized
  source 1..20: mol_type = other DNA
tatttgaaagaagcatacaa

SEQ ID NO: 4218 - DNA, 20 bp, synthetic construct
  misc_feature 1..20: note = chemically synthesized
  source 1..20: mol_type = other DNA
atttgaaagaagcatacaag

SEQ ID NO: 4219 - DNA, 20 bp, synthetic construct
  misc_feature 1..20: note = chemically synthesized
  source 1..20: mol_type = other DNA
tgaaagaagcatacaagggg

SEQ ID NO: 4220 - DNA, 20 bp, synthetic construct
  misc_feature 1..20: note = chemically synthesized
  source 1..20: mol_type = other DNA
gaaagaagcatacaagggga

SEQ ID NO: 4221 - DNA, 20 bp, synthetic construct
  misc_feature 1..20: note = chemically synthesized
  source 1..20: mol_type = other DNA
tcatttttcaaatccattat

SEQ ID NO: 4222 - DNA, 20 bp, synthetic construct
  misc_feature 1..20: note = chemically synthesized
  source 1..20: mol_type = other DNA
ccattattagtttaaaaatt

SEQ ID NO: 4223 - DNA, 20 bp, synthetic construct
  misc_feature 1..20: note = chemically synthesized
  source 1..20: mol_type = other DNA
tttaaaaatttagattatga

SEQ ID NO: 4224 - DNA, 20 bp, synthetic construct
  misc_feature 1..20: note = chemically synthesized
  source 1..20: mol_type = other DNA
tttagattatgatagtgtta

SEQ ID NO: 4225 - DNA, 20 bp, synthetic construct
  misc_feature 1..20: note = chemically synthesized
  source 1..20: mol_type = other DNA
ttagattatgatagtgttac

SEQ ID NO: 4226 - DNA, 20 bp, synthetic construct
  misc_feature 1..20: note = chemically synthesized
  source 1..20: mol_type = other DNA
atagtgttacaggaaattaa

SEQ ID NO: 4227 - DNA, 20 bp, synthetic construct
  misc_feature 1..20: note = chemically synthesized
  source 1..20: mol_type = other DNA
gttacaggaaattaatagaa

SEQ ID NO: 4228 - DNA, 20 bp, synthetic construct
  misc_feature 1..20: note = chemically synthesized
  source 1..20: mol_type = other DNA
caggaaattaatagaaaaga

SEQ ID NO: 4229 - DNA, 20 bp, synthetic construct
  misc_feature 1..20: note = chemically synthesized
  source 1..20: mol_type = other DNA
ggaaattaatagaaaagaaa

SEQ ID NO: 4230 - DNA, 20 bp, synthetic construct
  misc_feature 1..20: note = chemically synthesized
  source 1..20: mol_type = other DNA
gaaattaatagaaaagaaag

SEQ ID NO: 4231 - DNA, 20 bp, synthetic construct
  misc_feature 1..20: note = chemically synthesized
  source 1..20: mol_type = other DNA
ttaatagaaaagaaagagga

SEQ ID NO: 4232 - DNA, 20 bp, synthetic construct
  misc_feature 1..20: note = chemically synthesized
  source 1..20: mol_type = other DNA
accaacctactctctatatc

SEQ ID NO: 4233 - DNA, 20 bp, synthetic construct
  misc_feature 1..20: note = chemically synthesized
  source 1..20: mol_type = other DNA
tctctatatccagacttttg

SEQ ID NO: 4234 - DNA, 20 bp, synthetic construct
  misc_feature 1..20: note = chemically synthesized
  source 1..20: mol_type = other DNA
ccagacttttgtagaaaaac

SEQ ID NO: 4235 - DNA, 20 bp, synthetic construct
  misc_feature 1..20: note = chemically synthesized
  source 1..20: mol_type = other DNA
tttgtagaaaaacaagataa

SEQ ID NO: 4236 - DNA, 20 bp, synthetic construct
  misc_feature 1..20: note = chemically synthesized
  source 1..20: mol_type = other DNA
aaaacaagataatagcatca

SEQ ID NO: 4237 - DNA, 20 bp, synthetic construct
  misc_feature 1..20: note = chemically synthesized
  source 1..20: mol_type = other DNA
atagcatcaaagaccttctc

SEQ ID NO: 4238 - DNA, 20 bp, synthetic construct
  misc_feature 1..20: note = chemically synthesized
  source 1..20: mol_type = other DNA
caaagaccttctccagaccg

SEQ ID NO: 4239 - DNA, 20 bp, synthetic construct
  misc_feature 1..20: note = chemically synthesized
  source 1..20: mol_type = other DNA
agaccttctccagaccgtgg

SEQ ID NO: 4240 - DNA, 20 bp, synthetic construct
  misc_feature 1..20: note = chemically synthesized
  source 1..20: mol_type = other DNA
aatataaacaattaaaccaa

SEQ ID NO: 4241 - DNA, 20 bp, synthetic construct
  misc_feature 1..20: note = chemically synthesized
  source 1..20: mol_type = other DNA
aaacaattaaaccaacagca

SEQ ID NO: 4242 - DNA, 20 bp, synthetic construct
  misc_feature 1..20: note = chemically synthesized
  source 1..20: mol_type = other DNA
ccaacagcatagtcaaataa

SEQ ID NO: 4243 - DNA, 20 bp, synthetic construct
  misc_feature 1..20: note = chemically synthesized
  source 1..20: mol_type = other DNA
gcatagtcaaataaaagaaa

SEQ ID NO: 4244 - DNA, 20 bp, synthetic construct
  misc_feature 1..20: note = chemically synthesized
  source 1..20: mol_type = other DNA
aaataaaagaaatagaaaat

SEQ ID NO: 4245 - DNA, 20 bp, synthetic construct
  misc_feature 1..20: note = chemically synthesized
  source 1..20: mol_type = other DNA
aataaaagaaatagaaaatc

SEQ ID NO: 4246 - DNA, 20 bp, synthetic construct
  misc_feature 1..20: note = chemically synthesized
  source 1..20: mol_type = other DNA
aaagaaatagaaaatcaggt

SEQ ID NO: 4247 - DNA, 20 bp, synthetic construct
  misc_feature 1..20: note = chemically synthesized
  source 1..20: mol_type = other DNA
aaatagaaaatcaggtaagt

SEQ ID NO: 4248 - DNA, 20 bp, synthetic construct
  misc_feature 1..20: note = chemically synthesized
  source 1..20: mol_type = other DNA
caggtaagtcagtattttaa

SEQ ID NO: 4249 - DNA, 20 bp, synthetic construct
  misc_feature 1..20: note = chemically synthesized
  source 1..20: mol_type = other DNA
ggtatgtcccatctttcaca

SEQ ID NO: 4250 - DNA, 20 bp, synthetic construct
  misc_feature 1..20: note = chemically synthesized
  source 1..20: mol_type = other DNA
gtatgtcccatctttcacac

SEQ ID NO: 4251 - DNA, 20 bp, synthetic construct
  misc_feature 1..20: note = chemically synthesized
  source 1..20: mol_type = other DNA
tgaatcctaaaattatttac

SEQ ID NO: 4252 - DNA, 20 bp, synthetic construct
  misc_feature 1..20: note = chemically synthesized
  source 1..20: mol_type = other DNA
aattatttacaagctttaac

SEQ ID NO: 4253 - DNA, 20 bp, synthetic construct
  misc_feature 1..20: note = chemically synthesized
  source 1..20: mol_type = other DNA
acaagctttaactggatcat

SEQ ID NO: 4254 - DNA, 20 bp, synthetic construct
  misc_feature 1..20: note = chemically synthesized
  source 1..20: mol_type = other DNA
catgagtaaaattatcacat

SEQ ID NO: 4255 - DNA, 20 bp, synthetic construct
  misc_feature 1..20: note = chemically synthesized
  source 1..20: mol_type = other DNA
cagcataactgttaaaattg

SEQ ID NO: 4256 - DNA, 20 bp, synthetic construct
  misc_feature 1..20: note = chemically synthesized
  source 1..20: mol_type = other DNA
agcataactgttaaaattgc

SEQ ID NO: 4257 - DNA, 20 bp, synthetic construct
  misc_feature 1..20: note = chemically synthesized
  source 1..20: mol_type = other DNA
tgttaaaattgcaggctctg

SEQ ID NO: 4258 - DNA, 20 bp, synthetic construct
  misc_feature 1..20: note = chemically synthesized
  source 1..20: mol_type = other DNA
aactacctgcatttaaacca

SEQ ID NO: 4259 - DNA, 20 bp, synthetic construct
  misc_feature 1..20: note = chemically synthesized
  source 1..20: mol_type = other DNA
tacttcacccctttatctct

SEQ ID NO: 4260 - DNA, 20 bp, synthetic construct
  misc_feature 1..20: note = chemically synthesized
  source 1..20: mol_type = other DNA
gtttcctcacatatactaca

SEQ ID NO: 4261 - DNA, 20 bp, synthetic construct
  misc_feature 1..20: note = chemically synthesized
  source 1..20: mol_type = other DNA
atatactacaaagataataa

SEQ ID NO: 4262 - DNA, 20 bp, synthetic construct
  misc_feature 1..20: note = chemically synthesized
  source 1..20: mol_type = other DNA
aaagataataacagaactta

SEQ ID NO: 4263 - DNA, 20 bp, synthetic construct
  misc_feature 1..20: note = chemically synthesized
  source 1..20: mol_type = other DNA
aagataataacagaacttat

SEQ ID NO: 4264 - DNA, 20 bp, synthetic construct
  misc_feature 1..20: note = chemically synthesized
  source 1..20: mol_type = other DNA
agaacttataggattattgt

SEQ ID NO: 4265 - DNA, 20 bp, synthetic construct
  misc_feature 1..20: note = chemically synthesized
  source 1..20: mol_type = other DNA
taagaaaaaaaattaattca

SEQ ID NO: 4266 - DNA, 20 bp, synthetic construct
  misc_feature 1..20: note = chemically synthesized
  source 1..20: mol_type = other DNA
gaaaaaaaattaattcatag

SEQ ID NO: 4267 - DNA, 20 bp, synthetic construct
  misc_feature 1..20: note = chemically synthesized
  source 1..20: mol_type = other DNA
catcttactaaaattcaaat

SEQ ID NO: 4268 - DNA, 20 bp, synthetic construct
  misc_feature 1..20: note = chemically synthesized
  source 1..20: mol_type = other DNA
ctttgctcaaaaccacacaa

SEQ ID NO: 4269 - DNA, 20 bp, synthetic construct
  misc_feature 1..20: note = chemically synthesized
  source 1..20: mol_type = other DNA
gctttccatttcactcatat

SEQ ID NO: 4270 - DNA, 20 bp, synthetic construct
  misc_feature 1..20: note = chemically synthesized
  source 1..20: mol_type = other DNA
tttcactcatattggctctt

SEQ ID NO: 4271 - DNA, 20 bp, synthetic construct
  misc_feature 1..20: note = chemically synthesized
  source 1..20: mol_type = other DNA
tcatattggctctttagacc

SEQ ID NO: 4272 - DNA, 20 bp, synthetic construct
  misc_feature 1..20: note = chemically synthesized
  source 1..20: mol_type = other DNA
ttgggtaatcttggtctaaa

SEQ ID NO: 4273 - DNA, 20 bp, synthetic construct
  misc_feature 1..20: note = chemically synthesized
  source 1..20: mol_type = other DNA
ttggtctaaagagccaatat

SEQ ID NO: 4274 - DNA, 20 bp, synthetic construct
  misc_feature 1..20: note = chemically synthesized
  source 1..20: mol_type = other DNA
aagagccaatatgagtgaaa

SEQ ID NO: 4275 - DNA, 20 bp, synthetic construct
  misc_feature 1..20: note = chemically synthesized
  source 1..20: mol_type = other DNA
gccaatatgagtgaaatgga

SEQ ID NO: 4276 - DNA, 20 bp, synthetic construct
  misc_feature 1..20: note = chemically synthesized
  source 1..20: mol_type = other DNA
tgaaatggaaagctattgtg

SEQ ID NO: 4277 - DNA, 20 bp, synthetic construct
  misc_feature 1..20: note = chemically synthesized
  source 1..20: mol_type = other DNA
gaaagctattgtgtggtttt

SEQ ID NO: 4278 - DNA, 20 bp, synthetic construct
  misc_feature 1..20: note = chemically synthesized
  source 1..20: mol_type = other DNA
ctattgtgtggttttgagca

SEQ ID NO: 4279 - DNA, 20 bp, synthetic construct
  misc_feature 1..20: note = chemically synthesized
  source 1..20: mol_type = other DNA
attgtgtggttttgagcaaa

SEQ ID NO: 4280 - DNA, 20 bp, synthetic construct
  misc_feature 1..20: note = chemically synthesized
  source 1..20: mol_type = other DNA
acatgatctaatttgaattt

SEQ ID NO: 4281 - DNA, 20 bp, synthetic construct
  misc_feature 1..20: note = chemically synthesized
  source 1..20: mol_type = other DNA
gatctaatttgaattttagt

SEQ ID NO: 4282 - DNA, 20 bp, synthetic construct
  misc_feature 1..20: note = chemically synthesized
  source 1..20: mol_type = other DNA
gaattttagtaagatgacat

SEQ ID NO: 4283 - DNA, 20 bp, synthetic construct
  misc_feature 1..20: note = chemically synthesized
  source 1..20: mol_type = other DNA
ttttcttacaataatcctat

SEQ ID NO: 4284 - DNA, 20 bp, synthetic construct
  misc_feature 1..20: note = chemically synthesized
  source 1..20: mol_type = other DNA
aagttctgttattatctttg

SEQ ID NO: 4285 - DNA, 20 bp, synthetic construct
  misc_feature 1..20: note = chemically synthesized
  source 1..20: mol_type = other DNA
attatctttgtagtatatgt

SEQ ID NO: 4286 - DNA, 20 bp, synthetic construct
  misc_feature 1..20: note = chemically synthesized
  source 1..20: mol_type = other DNA
ttatctttgtagtatatgtg

SEQ ID NO: 4287 - DNA, 20 bp, synthetic construct
  misc_feature 1..20: note = chemically synthesized
  source 1..20: mol_type = other DNA
gtagtatatgtgaggaaact

SEQ ID NO: 4288 - DNA, 20 bp, synthetic construct
  misc_feature 1..20: note = chemically synthesized
  source 1..20: mol_type = other DNA
agtatatgtgaggaaactga

SEQ ID NO: 4289 - DNA, 20 bp, synthetic construct
  misc_feature 1..20: note = chemically synthesized
  source 1..20: mol_type = other DNA
tgtgaggaaactgagagata

SEQ ID NO: 4290 - DNA, 20 bp, synthetic construct
  misc_feature 1..20: note = chemically synthesized
  source 1..20: mol_type = other DNA
gtgaggaaactgagagataa

SEQ ID NO: 4291 - DNA, 20 bp, synthetic construct
  misc_feature 1..20: note = chemically synthesized
  source 1..20: mol_type = other DNA
tgaggaaactgagagataaa

SEQ ID NO: 4292 - DNA, 20 bp, synthetic construct
  misc_feature 1..20: note = chemically synthesized
  source 1..20: mol_type = other DNA
gaggaaactgagagataaag

SEQ ID NO: 4293 - DNA, 20 bp, synthetic construct
  misc_feature 1..20: note = chemically synthesized
  source 1..20: mol_type = other DNA
aactgagagataaaggggtg

SEQ ID NO: 4294 - DNA, 20 bp, synthetic construct
  misc_feature 1..20: note = chemically synthesized
  source 1..20: mol_type = other DNA
aggggtgaagtaatttattc

SEQ ID NO: 4295 - DNA, 20 bp, synthetic construct
  misc_feature 1..20: note = chemically synthesized
  source 1..20: mol_type = other DNA
ggggtgaagtaatttattca

SEQ ID NO: 4296 - DNA, 20 bp, synthetic construct
  misc_feature 1..20: note = chemically synthesized
  source 1..20: mol_type = other DNA
aatttattcaaggtcacaca

SEQ ID NO: 4297 - DNA, 20 bp, synthetic construct
  misc_feature 1..20: note = chemically synthesized
  source 1..20: mol_type = other DNA
ttcaaggtcacacaaagttt

SEQ ID NO: 4298 - DNA, 20 bp, synthetic construct
  misc_feature 1..20: note = chemically synthesized
  source 1..20: mol_type = other DNA
caaggtcacacaaagtttta

SEQ ID NO: 4299 - DNA, 20 bp, synthetic construct
  misc_feature 1..20: note = chemically synthesized
  source 1..20: mol_type = other DNA
cacacaaagttttagagcca

SEQ ID NO: 4300 - DNA, 20 bp, synthetic construct
  misc_feature 1..20: note = chemically synthesized
  source 1..20: mol_type = other DNA
ttagagccatggtttaaatg

SEQ ID NO: 4301 - DNA, 20 bp, synthetic construct
  misc_feature 1..20: note = chemically synthesized
  source 1..20: mol_type = other DNA
tagagccatggtttaaatgc

SEQ ID NO: 4302 - DNA, 20 bp, synthetic construct
  misc_feature 1..20: note = chemically synthesized
  source 1..20: mol_type = other DNA
agccatggtttaaatgcagg

SEQ ID NO: 4303 - DNA, 20 bp, synthetic construct
  misc_feature 1..20: note = chemically synthesized
  source 1..20: mol_type = other DNA
tttaaatgcaggtagtttat

SEQ ID NO: 4304 - DNA, 20 bp, synthetic construct
  misc_feature 1..20: note = chemically synthesized
  source 1..20: mol_type = other DNA
tgcaggtagtttattagctt

SEQ ID NO: 4305 - DNA, 20 bp, synthetic construct
  misc_feature 1..20: note = chemically synthesized
  source 1..20: mol_type = other DNA
caggtagtttattagcttca

SEQ ID NO: 4306 - DNA, 20 bp, synthetic construct
  misc_feature 1..20: note = chemically synthesized
  source 1..20: mol_type = other DNA
ttcagagcctgcaattttaa

SEQ ID NO: 4307 - DNA, 20 bp, synthetic construct
  misc_feature 1..20: note = chemically synthesized
  source 1..20: mol_type = other DNA
tgataattttactcatgatc

SEQ ID NO: 4308 - DNA, 20 bp, synthetic construct
  misc_feature 1..20: note = chemically synthesized
  source 1..20: mol_type = other DNA
ttttactcatgatccagtta

SEQ ID NO: 4309 - DNA, 20 bp, synthetic construct
  misc_feature 1..20: note = chemically synthesized
  source 1..20: mol_type = other DNA
ttaaagcttgtaaataattt

SEQ ID NO: 4310 - DNA, 20 bp, synthetic construct
  misc_feature 1..20: note = chemically synthesized
  source 1..20: mol_type = other DNA
taaagcttgtaaataatttt

SEQ ID NO: 4311 - DNA, 20 bp, synthetic construct
  misc_feature 1..20: note = chemically synthesized
  source 1..20: mol_type = other DNA
ttgtaaataattttaggatt

SEQ ID NO: 4312 - DNA, 20 bp, synthetic construct
  misc_feature 1..20: note = chemically synthesized
  source 1..20: mol_type = other DNA
tttaggattcagtgttttta

SEQ ID NO: 4313 - DNA, 20 bp, synthetic construct
  misc_feature 1..20: note = chemically synthesized
  source 1..20: mol_type = other DNA
gtttttacagacctgtgtga

SEQ ID NO: 4314 - DNA, 20 bp, synthetic construct
  misc_feature 1..20: note = chemically synthesized
  source 1..20: mol_type = other DNA
ttacagacctgtgtgaaaga

SEQ ID NO: 4315 - DNA, 20 bp, synthetic construct
  misc_feature 1..20: note = chemically synthesized
  source 1..20: mol_type = other DNA
tacagacctgtgtgaaagat

SEQ ID NO: 4316 - DNA, 20 bp, synthetic construct
  misc_feature 1..20: note = chemically synthesized
  source 1..20: mol_type = other DNA
cttttatttgactatgctgt

SEQ ID NO: 4317 - DNA, 20 bp, synthetic construct
  misc_feature 1..20: note = chemically synthesized
  source 1..20: mol_type = other DNA
gttggtttaattgtttatat

SEQ ID NO: 4318 - DNA, 20 bp, synthetic construct
  misc_feature 1..20: note = chemically synthesized
  source 1..20: mol_type = other DNA
ttgtttatattggtcttcca

SEQ ID NO: 4319 - DNA, 20 bp, synthetic construct
  misc_feature 1..20: note = chemically synthesized
  source 1..20: mol_type = other DNA
tatattggtcttccacggtc

SEQ ID NO: 4320 - DNA, 20 bp, synthetic construct
  misc_feature 1..20: note = chemically synthesized
  source 1..20: mol_type = other DNA
tattggtcttccacggtctg

SEQ ID NO: 4321 - DNA, 20 bp, synthetic construct
  misc_feature 1..20: note = chemically synthesized
  source 1..20: mol_type = other DNA
tggtcttccacggtctggag

SEQ ID NO: 4322 - DNA, 20 bp, synthetic construct
  misc_feature 1..20: note = chemically synthesized
  source 1..20: mol_type = other DNA
ggtcttccacggtctggaga

SEQ ID NO: 4323 - DNA, 20 bp, synthetic construct
  misc_feature 1..20: note = chemically synthesized
  source 1..20: mol_type = other DNA
attatcttgtttttctacaa

SEQ ID NO: 4324 - DNA, 20 bp, synthetic construct
  misc_feature 1..20: note = chemically synthesized
  source 1..20: mol_type = other DNA
cttgtttttctacaaaagtc

SEQ ID NO: 4325 - DNA, 20 bp, synthetic construct
  misc_feature 1..20: note = chemically synthesized
  source 1..20: mol_type = other DNA
tttctacaaaagtctggata

SEQ ID NO: 4326 - DNA, 20 bp, synthetic construct
  misc_feature 1..20: note = chemically synthesized
  source 1..20: mol_type = other DNA
tctacaaaagtctggatata

SEQ ID NO: 4327 - DNA, 20 bp, synthetic construct
  misc_feature 1..20: note = chemically synthesized
  source 1..20: mol_type = other DNA
tacaaaagtctggatataga

SEQ ID NO: 4328 - DNA, 20 bp, synthetic construct
  misc_feature 1..20: note = chemically synthesized
  source 1..20: mol_type = other DNA
aaaagtctggatatagagag

SEQ ID NO: 4329 - DNA, 20 bp, synthetic construct
  misc_feature 1..20: note = chemically synthesized
  source 1..20: mol_type = other DNA
aaagtctggatatagagagt

SEQ ID NO: 4330 - DNA, 20 bp, synthetic construct
  misc_feature 1..20: note = chemically synthesized
  source 1..20: mol_type = other DNA
tctggatatagagagtaggt

SEQ ID NO: 4331 - DNA, 20 bp, synthetic construct
  misc_feature 1..20: note = chemically synthesized
  source 1..20: mol_type = other DNA
atagagagtaggttggttat

SEQ ID NO: 4332 - DNA, 20 bp, synthetic construct
  misc_feature 1..20: note = chemically synthesized
  source 1..20: mol_type = other DNA
ctaaatttttaaactaataa

SEQ ID NO: 4333 - DNA, 20 bp, synthetic construct
  misc_feature 1..20: note = chemically synthesized
  source 1..20: mol_type = other DNA
tggatttgaaaaatgaatat

SEQ ID NO: 4334 - DNA, 20 bp, synthetic construct
  misc_feature 1..20: note = chemically synthesized
  source 1..20: mol_type = other DNA
ccttgtatgcttctttcaaa

SEQ ID NO: 4335 - DNA, 20 bp, synthetic construct
  misc_feature 1..20: note = chemically synthesized
  source 1..20: mol_type = other DNA
attttctgaacttcaattaa

SEQ ID NO: 4336 - DNA, 20 bp, synthetic construct
  misc_feature 1..20: note = chemically synthesized
  source 1..20: mol_type = other DNA
tgaacttcaattaaaagaaa

SEQ ID NO: 4337 - DNA, 20 bp, synthetic construct
  misc_feature 1..20: note = chemically synthesized
  source 1..20: mol_type = other DNA
ttcaattaaaagaaaaagcc

SEQ ID NO: 4338 - DNA, 20 bp, synthetic construct
  misc_feature 1..20: note = chemically synthesized
  source 1..20: mol_type = other DNA
atttaatctgttttaaacac

SEQ ID NO: 4339 - DNA, 20 bp, synthetic construct
  misc_feature 1..20: note = chemically synthesized
  source 1..20: mol_type = other DNA
ttaatctgttttaaacactg

SEQ ID NO: 4340 - DNA, 20 bp, synthetic construct
  misc_feature 1..20: note = chemically synthesized
  source 1..20: mol_type = other DNA
ctgttttaaacactggagaa

SEQ ID NO: 4341 - DNA, 20 bp, synthetic construct
  misc_feature 1..20: note = chemically synthesized
  source 1..20: mol_type = other DNA
tttaactttttacttacctt

SEQ ID NO: 4342 - DNA, 20 bp, synthetic construct
  misc_feature 1..20: note = chemically synthesized
  source 1..20: mol_type = other DNA
ttaccttcagtaatttacaa

SEQ ID NO: 4343 - DNA, 20 bp, synthetic construct
  misc_feature 1..20: note = chemically synthesized
  source 1..20: mol_type = other DNA
tttacaatagtgtaatgaca

SEQ ID NO: 4344 - DNA, 20 bp, synthetic construct
  misc_feature 1..20: note = chemically synthesized
  source 1..20: mol_type = other DNA
agtgtaatgacatagtgttc

SEQ ID NO: 4345 - DNA, 20 bp, synthetic construct
  misc_feature 1..20: note = chemically synthesized
  source 1..20: mol_type = other DNA
tcatataaaatgcaaatttt

SEQ ID NO: 4346 - DNA, 20 bp, synthetic construct
  misc_feature 1..20: note = chemically synthesized
  source 1..20: mol_type = other DNA
agtgttttcatatataacat

SEQ ID NO: 4347 - DNA, 20 bp, synthetic construct
  misc_feature 1..20: note = chemically synthesized
  source 1..20: mol_type = other DNA
gtgttttcatatataacatt

SEQ ID NO: 4348 - DNA, 20 bp, synthetic construct
  misc_feature 1..20: note = chemically synthesized
  source 1..20: mol_type = other DNA
tgttttcatatataacatta

SEQ ID NO: 4349 - DNA, 20 bp, synthetic construct
  misc_feature 1..20: note = chemically synthesized
  source 1..20: mol_type = other DNA
aaactaacttgaaattataa

SEQ ID NO: 4350 - DNA, 20 bp, synthetic construct
  misc_feature 1..20: note = chemically synthesized
  source 1..20: mol_type = other DNA
aactaacttgaaattataat

SEQ ID NO: 4351 - DNA, 20 bp, synthetic construct
  misc_feature 1..20: note = chemically synthesized
  source 1..20: mol_type = other DNA
taataggaaattttattttc

SEQ ID NO: 4352 - DNA, 20 bp, synthetic construct
  misc_feature 1..20: note = chemically synthesized
  source 1..20: mol_type = other DNA
ataggaaattttattttctg

SEQ ID NO: 4353 - DNA, 20 bp, synthetic construct
  misc_feature 1..20: note = chemically synthesized
  source 1..20: mol_type = other DNA
tttctggagattatttttct

SEQ ID NO: 4354 - DNA, 20 bp, synthetic construct
  misc_feature 1..20: note = chemically synthesized
  source 1..20: mol_type = other DNA
attatttttcttggaaaaaa

SEQ ID NO: 4355 - DNA, 20 bp, synthetic construct
  misc_feature 1..20: note = chemically synthesized
  source 1..20: mol_type = other DNA
agtatttcaacaatgcaaca

SEQ ID NO: 4356 - DNA, 20 bp, synthetic construct
  misc_feature 1..20: note = chemically synthesized
  source 1..20: mol_type = other DNA
atgcaacaaagtatttcaaa

SEQ ID NO: 4357 - DNA, 20 bp, synthetic construct
  misc_feature 1..20: note = chemically synthesized
  source 1..20: mol_type = other DNA
gtatttcaaatggcatgcct

SEQ ID NO: 4358 - DNA, 20 bp, synthetic construct
  misc_feature 1..20: note = chemically synthesized
  source 1..20: mol_type = other DNA
cttagaaatattttttttaa

SEQ ID NO: 4359 - DNA, 20 bp, synthetic construct
  misc_feature 1..20: note = chemically synthesized
  source 1..20: mol_type = other DNA
ctttattttctacttacttt

SEQ ID NO: 4360 - DNA, 20 bp, synthetic construct
  misc_feature 1..20: note = chemically synthesized
  source 1..20: mol_type = other DNA
ttttctacttactttaagtg

SEQ ID NO: 4361 - DNA, 20 bp, synthetic construct
  misc_feature 1..20: note = chemically synthesized
  source 1..20: mol_type = other DNA
actttaagtgaagttacttc

SEQ ID NO: 4362 - DNA, 20 bp, synthetic construct
  misc_feature 1..20: note = chemically synthesized
  source 1..20: mol_type = other DNA
ctttaagtgaagttacttct

SEQ ID NO: 4363 - DNA, 20 bp, synthetic construct
  misc_feature 1..20: note = chemically synthesized
  source 1..20: mol_type = other DNA
gaagttacttctgggtgttc

SEQ ID NO: 4364 - DNA, 20 bp, synthetic construct
  misc_feature 1..20: note = chemically synthesized
  source 1..20: mol_type = other DNA
agttacttctgggtgttctg

SEQ ID NO: 4365 - DNA, 20 bp, synthetic construct
  misc_feature 1..20: note = chemically synthesized
  source 1..20: mol_type = other DNA
ttctgggtgttctggagttt

SEQ ID NO: 4366 - DNA, 20 bp, synthetic construct
  misc_feature 1..20: note = chemically synthesized
  source 1..20: mol_type = other DNA
tctgggtgttctggagtttc

SEQ ID NO: 4367 - DNA, 20 bp, synthetic construct
  misc_feature 1..20: note = chemically synthesized
  source 1..20: mol_type = other DNA
tttcaggttgattttgaatt

SEQ ID NO: 4368 - DNA, 20 bp, synthetic construct
  misc_feature 1..20: note = chemically synthesized
  source 1..20: mol_type = other DNA
aggttgattttgaattaagt

SEQ ID NO: 4369 - DNA, 20 bp, synthetic construct
  misc_feature 1..20: note = chemically synthesized
  source 1..20: mol_type = other DNA
tgattttgaattaagttagt

SEQ ID NO: 4370 - DNA, 20 bp, synthetic construct
  misc_feature 1..20: note = chemically synthesized
  source 1..20: mol_type = other DNA
aaatatttcactttttgttg

SEQ ID NO: 4371 - DNA, 20 bp, synthetic construct
  misc_feature 1..20: note = chemically synthesized
  source 1..20: mol_type = other DNA
tatttcactttttgttgaag

SEQ ID NO: 4372 - DNA, 20 bp, synthetic construct
  misc_feature 1..20: note = chemically synthesized
  source 1..20: mol_type = other DNA
tgaagtagaattttttcttc

SEQ ID NO: 4373 - DNA, 20 bp, synthetic construct
  misc_feature 1..20: note = chemically synthesized
  source 1..20: mol_type = other DNA
gaagtagaattttttcttct

SEQ ID NO: 4374 - DNA, 20 bp, synthetic construct
  misc_feature 1..20: note = chemically synthesized
  source 1..20: mol_type = other DNA
agtagaattttttcttctag

SEQ ID NO: 4375 - DNA, 20 bp, synthetic construct
  misc_feature 1..20: note = chemically synthesized
  source 1..20: mol_type = other DNA
gtagaattttttcttctagg

SEQ ID NO: 4376 - DNA, 20 bp, synthetic construct
  misc_feature 1..20: note = chemically synthesized
  source 1..20: mol_type = other DNA
ttttcttctaggaggctttc

SEQ ID NO: 4377 - DNA, 20 bp, synthetic construct
  misc_feature 1..20: note = chemically synthesized
  source 1..20: mol_type = other DNA
ctaggaggctttcaagtttt

SEQ ID NO: 4378 - DNA, 20 bp, synthetic construct
  misc_feature 1..20: note = chemically synthesized
  source 1..20: mol_type = other DNA
aggctttcaagttttgagtt

SEQ ID NO: 4379 - DNA, 20 bp, synthetic construct
  misc_feature 1..20: note = chemically synthesized
  source 1..20: mol_type = other DNA
tcaagttttgagttgagttc

SEQ ID NO: 4380 - DNA, 20 bp, synthetic construct
  misc_feature 1..20: note = chemically synthesized
  source 1..20: mol_type = other DNA
acctcttcatttttgacttg

SEQ ID NO: 4381 - DNA, 20 bp, synthetic construct
  misc_feature 1..20: note = chemically synthesized
  source 1..20: mol_type = other DNA
tttgacttgtagtttatatg

SEQ ID NO: 4382 - DNA, 20 bp, synthetic construct
  misc_feature 1..20: note = chemically synthesized
  source 1..20: mol_type = other DNA
agtttatatgtagttcttct

SEQ ID NO: 4383 - DNA, 20 bp, synthetic construct
  misc_feature 1..20: note = chemically synthesized
  source 1..20: mol_type = other DNA
ttcttcttctttgatttcac

SEQ ID NO: 4384 - DNA, 20 bp, synthetic construct
  misc_feature 1..20: note = chemically synthesized
  source 1..20: mol_type = other DNA
tctttgatttcactggtttg

SEQ ID NO: 4385 - DNA, 20 bp, synthetic construct
  misc_feature 1..20: note = chemically synthesized
  source 1..20: mol_type = other DNA
atttcactggtttgcagcga

SEQ ID NO: 4386 - DNA, 20 bp, synthetic construct
  misc_feature 1..20: note = chemically synthesized
  source 1..20: mol_type = other DNA
ttgcagcgatagatcataaa

SEQ ID NO: 4387 - DNA, 20 bp, synthetic construct
  misc_feature 1..20: note = chemically synthesized
  source 1..20: mol_type = other DNA
aaagactgatcaaatatgtt

SEQ ID NO: 4388 - DNA, 20 bp, synthetic construct
  misc_feature 1..20: note = chemically synthesized
  source 1..20: mol_type = other DNA
tttgaaatatgtcattaatt

SEQ ID NO: 4389 - DNA, 20 bp, synthetic construct
  misc_feature 1..20: note = chemically synthesized
  source 1..20: mol_type = other DNA
taatttggcccttcgtctta

SEQ ID NO: 4390 - DNA, 20 bp, synthetic construct
  misc_feature 1..20: note = chemically synthesized
  source 1..20: mol_type = other DNA
ggcccttcgtcttatggaca

SEQ ID NO: 4391 - DNA, 20 bp, synthetic construct
  misc_feature 1..20: note = chemically synthesized
  source 1..20: mol_type = other DNA
gtcttatggacaaagtcttt

SEQ ID NO: 4392 - DNA, 20 bp, synthetic construct
  misc_feature 1..20: note = chemically synthesized
  source 1..20: mol_type = other DNA
ttaagaccatgtcccaactg

SEQ ID NO: 4393 - DNA, 20 bp, synthetic construct
  misc_feature 1..20: note = chemically synthesized
  source 1..20: mol_type = other DNA
taagaccatgtcccaactga

SEQ ID NO: 4394 - DNA, 20 bp, synthetic construct
  misc_feature 1..20: note = chemically synthesized
  source 1..20: mol_type = other DNA
agaccatgtcccaactgaag

SEQ ID NO: 4395 - DNA, 20 bp, synthetic construct
  misc_feature 1..20: note = chemically synthesized
  source 1..20: mol_type = other DNA
gaccatgtcccaactgaagg

SEQ ID NO: 4396 - DNA, 20 bp, synthetic construct
  misc_feature 1..20: note = chemically synthesized
  source 1..20: mol_type = other DNA
tcccaactgaaggaggccat

SEQ ID NO: 4397 - DNA, 20 bp, synthetic construct
  misc_feature 1..20: note = chemically synthesized
  source 1..20: mol_type = other DNA
aatttttacatcgtctaaca

SEQ ID NO: 4398 - DNA, 20 bp, synthetic construct
  misc_feature 1..20: note = chemically synthesized
  source 1..20: mol_type = other DNA
aacatagcaaatcttgattt

SEQ ID NO: 4399 - DNA, 20 bp, synthetic construct
  misc_feature 1..20: note = chemically synthesized
  source 1..20: mol_type = other DNA
gcaaatcttgattttggctc

SEQ ID NO: 4400 - DNA, 20 bp, synthetic construct
  misc_feature 1..20: note = chemically synthesized
  source 1..20: mol_type = other DNA
aaatcttgattttggctctg

SEQ ID NO: 4401 - DNA, 20 bp, synthetic construct
  misc_feature 1..20: note = chemically synthesized
  source 1..20: mol_type = other DNA
cttgattttggctctggaga

SEQ ID NO: 4402 - DNA, 20 bp, synthetic construct
  misc_feature 1..20: note = chemically synthesized
  source 1..20: mol_type = other DNA
tgattttggctctggagata

SEQ ID NO: 4403 - DNA, 20 bp, synthetic construct
  misc_feature 1..20: note = chemically synthesized
  source 1..20: mol_type = other DNA
tgaattgtcttgatcaattc

SEQ ID NO: 4404 - DNA, 20 bp, synthetic construct
  misc_feature 1..20: note = chemically synthesized
  source 1..20: mol_type = other DNA
aattgtcttgatcaattctg

SEQ ID NO: 4405 - DNA, 20 bp, synthetic construct
  misc_feature 1..20: note = chemically synthesized
  source 1..20: mol_type = other DNA
attgtcttgatcaattctgg

SEQ ID NO: 4406 - DNA, 20 bp, synthetic construct
  misc_feature 1..20: note = chemically synthesized
  source 1..20: mol_type = other DNA
tcaattctggaggaaataac

SEQ ID NO: 4407 - DNA, 20 bp, synthetic construct
  misc_feature 1..20: note = chemically synthesized
  source 1..20: mol_type = other DNA
aattctggaggaaataacta

SEQ ID NO: 4408 - DNA, 20 bp, synthetic construct
  misc_feature 1..20: note = chemically synthesized
  source 1..20: mol_type = other DNA
attctggaggaaataactag

SEQ ID NO: 4409 - DNA, 20 bp, synthetic construct
  misc_feature 1..20: note = chemically synthesized
  source 1..20: mol_type = other DNA
ataactagaggaacaataaa

SEQ ID NO: 4410 - DNA, 20 bp, synthetic construct
  misc_feature 1..20: note = chemically synthesized
  source 1..20: mol_type = other DNA
actagaggaacaataaaaag

SEQ ID NO: 4411 - DNA, 20 bp, synthetic construct
  misc_feature 1..20: note = chemically synthesized
  source 1..20: mol_type = other DNA
ctagaggaacaataaaaaga

SEQ ID NO: 4412 - DNA, 20 bp, synthetic construct
  misc_feature 1..20: note = chemically synthesized
  source 1..20: mol_type = other DNA
agaggaacaataaaaagaag

SEQ ID NO: 4413 - DNA, 20 bp, synthetic construct
  misc_feature 1..20: note = chemically synthesized
  source 1..20: mol_type = other DNA
ttatcttgattttcaatttc

SEQ ID NO: 4414 - DNA, 20 bp, synthetic construct
  misc_feature 1..20: note = chemically synthesized
  source 1..20: mol_type = other DNA
attttcaatttcaagcaacg

SEQ ID NO: 4415 - DNA, 20 bp, synthetic construct
  misc_feature 1..20: note = chemically synthesized
  source 1..20: mol_type = other DNA
aacgtggaactgttttcttc

SEQ ID NO: 4416 - DNA, 20 bp, synthetic construct
  misc_feature 1..20: note = chemically synthesized
  source 1..20: mol_type = other DNA
gtggaactgttttcttctgg

SEQ ID NO: 4417 - DNA, 20 bp, synthetic construct
  misc_feature 1..20: note = chemically synthesized
  source 1..20: mol_type = other DNA
gaactgttttcttctggaag

SEQ ID NO: 4418 - DNA, 20 bp, synthetic construct
  misc_feature 1..20: note = chemically synthesized
  source 1..20: mol_type = other DNA
ttttcttctggaagcagacc

SEQ ID NO: 4419 - DNA, 20 bp, synthetic construct
  misc_feature 1..20: note = chemically synthesized
  source 1..20: mol_type = other DNA
tatatataccaatatttgcc

SEQ ID NO: 4420 - DNA, 20 bp, synthetic construct
  misc_feature 1..20: note = chemically synthesized
  source 1..20: mol_type = other DNA
ataccaatatttgcccagaa

SEQ ID NO: 4421 - DNA, 20 bp, synthetic construct
  misc_feature 1..20: note = chemically synthesized
  source 1..20: mol_type = other DNA
taccaatatttgcccagaaa

SEQ ID NO: 4422 - DNA, 20 bp, synthetic construct
  misc_feature 1..20: note = chemically synthesized
  source 1..20: mol_type = other DNA
aatatttgcccagaaaaggt

SEQ ID NO: 4423 - DNA, 20 bp, synthetic construct
  misc_feature 1..20: note = chemically synthesized
  source 1..20: mol_type = other DNA
atatttgcccagaaaaggta

SEQ ID NO: 4424 - DNA, 20 bp, synthetic construct
  misc_feature 1..20: note = chemically synthesized
  source 1..20: mol_type = other DNA
ttgcccagaaaaggtaaggt

SEQ ID NO: 4425 - DNA, 20 bp, synthetic construct
  misc_feature 1..20: note = chemically synthesized
  source 1..20: mol_type = other DNA
cccagaaaaggtaaggttgg

SEQ ID NO: 4426 - DNA, 20 bp, synthetic construct
  misc_feature 1..20: note = chemically synthesized
  source 1..20: mol_type = other DNA
ccagaaaaggtaaggttggt

SEQ ID NO: 4427 - DNA, 20 bp, synthetic construct
  misc_feature 1..20: note = chemically synthesized
  source 1..20: mol_type = other DNA
gtaaggttggtaggtgaaca

SEQ ID NO: 4428 - DNA, 20 bp, synthetic construct
  misc_feature 1..20: note = chemically synthesized
  source 1..20: mol_type = other DNA
ggtgaacatagttaatcatt

SEQ ID NO: 4429 - DNA, 20 bp, synthetic construct
  misc_feature 1..20: note = chemically synthesized
  source 1..20: mol_type = other DNA
atgtaaccttcttccacatt

SEQ ID NO: 4430 - DNA, 20 bp, synthetic construct
  misc_feature 1..20: note = chemically synthesized
  source 1..20: mol_type = other DNA
aaccttcttccacattgagt

SEQ ID NO: 4431 - DNA, 20 bp, synthetic construct
  misc_feature 1..20: note = chemically synthesized
  source 1..20: mol_type = other DNA
atcaatgctaaatgaaatca

SEQ ID NO: 4432 - DNA, 20 bp, synthetic construct
  misc_feature 1..20: note = chemically synthesized
  source 1..20: mol_type = other DNA
ctaaatgaaatcaaagaaat

SEQ ID NO: 4433 - DNA, 20 bp, synthetic construct
  misc_feature 1..20: note = chemically synthesized
  source 1..20: mol_type = other DNA
gaaatgagcaactaacttaa

SEQ ID NO: 4434 - DNA, 20 bp, synthetic construct
  misc_feature 1..20: note = chemically synthesized
  source 1..20: mol_type = other DNA
aaatgagcaactaacttaat

SEQ ID NO: 4435 - DNA, 20 bp, synthetic construct
  misc_feature 1..20: note = chemically synthesized
  source 1..20: mol_type = other DNA
aaactacacattcaatgcta

SEQ ID NO: 4436 - DNA, 20 bp, synthetic construct
  misc_feature 1..20: note = chemically synthesized
  source 1..20: mol_type = other DNA
tggtgactacctgtttttaa

SEQ ID NO: 4437 - DNA, 20 bp, synthetic construct
  misc_feature 1..20: note = chemically synthesized
  source 1..20: mol_type = other DNA
ttttacttttttatgatttt

SEQ ID NO: 4438 - DNA, 20 bp, synthetic construct
  misc_feature 1..20: note = chemically synthesized
  source 1..20: mol_type = other DNA
ttacttttttatgattttaa

SEQ ID NO: 4439 - DNA, 20 bp, synthetic construct
  misc_feature 1..20: note = chemically synthesized
  source 1..20: mol_type = other DNA
tatgattttaagagatttac

SEQ ID NO: 4440 - DNA, 20 bp, synthetic construct
  misc_feature 1..20: note = chemically synthesized
  source 1..20: mol_type = other DNA
tcaaaaataaacttttttgt

SEQ ID NO: 4441 - DNA, 20 bp, synthetic construct
  misc_feature 1..20: note = chemically synthesized
  source 1..20: mol_type = other DNA
caaaaataaacttttttgtt

SEQ ID NO: 4442 - DNA, 20 bp, synthetic construct
  misc_feature 1..20: note = chemically synthesized
  source 1..20: mol_type = other DNA
gttgggtaaatttattatta

SEQ ID NO: 4443 - DNA, 20 bp, synthetic construct
  misc_feature 1..20: note = chemically synthesized
  source 1..20: mol_type = other DNA
gtaaatttattattaaagtt

SEQ ID NO: 4444 - DNA, 20 bp, synthetic construct
  misc_feature 1..20: note = chemically synthesized
  source 1..20: mol_type = other DNA
taaatttattattaaagttg

SEQ ID NO: 4445 - DNA, 20 bp, synthetic construct
  misc_feature 1..20: note = chemically synthesized
  source 1..20: mol_type = other DNA
aaatttattattaaagttga

SEQ ID NO: 4446 - DNA, 20 bp, synthetic construct
  misc_feature 1..20: note = chemically synthesized
  source 1..20: mol_type = other DNA
aatttattattaaagttgag

SEQ ID NO: 4447 - DNA, 20 bp, synthetic construct
  misc_feature 1..20: note = chemically synthesized
  source 1..20: mol_type = other DNA
tattaaagttgaggggaaaa

SEQ ID NO: 4448 - DNA, 20 bp, synthetic construct
  misc_feature 1..20: note = chemically synthesized
  source 1..20: mol_type = other DNA
ggggaaaaaagtaatgaatt

SEQ ID NO: 4449 - DNA, 20 bp, synthetic construct
  misc_feature 1..20: note = chemically synthesized
  source 1..20: mol_type = other DNA
aacaggtagtcaccatagca

SEQ ID NO: 4450 - DNA, 20 bp, synthetic construct
  misc_feature 1..20: note = chemically synthesized
  source 1..20: mol_type = other DNA
tgggcaaatattggtatata

SEQ ID NO: 4451 - DNA, 20 bp, synthetic construct
  misc_feature 1..20: note = chemically synthesized
  source 1..20: mol_type = other DNA
gttcctctagttatttcctc

SEQ ID NO: 4452 - DNA, 20 bp, synthetic construct
  misc_feature 1..20: note = chemically synthesized
  source 1..20: mol_type = other DNA
aagtcaaaaatgaagaggta

SEQ ID NO: 4453 - DNA, 20 bp, synthetic construct
  misc_feature 1..20: note = chemically synthesized
  source 1..20: mol_type = other DNA
taaagtaagtagaaaataaa

SEQ ID NO: 4454 - DNA, 20 bp, synthetic construct
  misc_feature 1..20: note = chemically synthesized
  source 1..20: mol_type = other DNA
ttcatgtttatgttttcaat

SEQ ID NO: 4455 - DNA, 20 bp, synthetic construct
  misc_feature 1..20: note = chemically synthesized
  source 1..20: mol_type = other DNA
gaaagaagcatacaagggga

SEQ ID NO: 4456 - DNA, 20 bp, synthetic construct
  misc_feature 1..20: note = chemically synthesized
  source 1..20: mol_type = other DNA
cacacaggtctgtaaaaaca

SEQ ID NO: 4457 - DNA, 20 bp, synthetic construct
  misc_feature 1..20: note = chemically synthesized
  source 1..20: mol_type = other DNA
aaattatttacaagctttaa

SEQ ID NO: 4458 - DNA, 20 bp, synthetic construct
  misc_feature 1..20: note = chemically synthesized
  source 1..20: mol_type = other DNA
ttacaagctttaactggatc

SEQ ID NO: 4459 - DNA, 20 bp, synthetic construct
  misc_feature 1..20: note = chemically synthesized
  source 1..20: mol_type = other DNA
ctctaaaactttgtgtgacc

SEQ ID NO: 4460 - DNA, 20 bp, synthetic construct
  misc_feature 1..20: note = chemically synthesized
  source 1..20: mol_type = other DNA
aaagataataacagaactta

SEQ ID NO: 4461 - DNA, 20 bp, synthetic construct
  misc_feature 1..20: note = chemically synthesized
  source 1..20: mol_type = other DNA
tcttggtctaaagagccaat

SEQ ID NO: 4462 - DNA, 20 bp, synthetic construct
  misc_feature 1..20: note = chemically synthesized
  source 1..20: mol_type = other DNA
aaagagaaacatgatctaat

SEQ ID NO: 4463 - DNA, 20 bp, synthetic construct
  misc_feature 1..20: note = chemically synthesized
  source 1..20: mol_type = other DNA
gtaagatgacattggctgct

SEQ ID NO: 4464 - DNA, 20 bp, synthetic construct
  misc_feature 1..20: note = chemically synthesized
  source 1..20: mol_type = other DNA
gtgaggaaactgagagataa

SEQ ID NO: 4465 - DNA, 20 bp, synthetic construct
  misc_feature 1..20: note = chemically synthesized
  source 1..20: mol_type = other DNA
ttaaagcttgtaaataattt

SEQ ID NO: 4466 - DNA, 20 bp, synthetic construct
  misc_feature 1..20: note = chemically synthesized
  source 1..20: mol_type = other DNA
tcttgtttttctacaaaagt

SEQ ID NO: 4467 - DNA, 20 bp, synthetic construct
  misc_feature 1..20: note = chemically synthesized
  source 1..20: mol_type = other DNA
tctacaaaagtctggatata

SEQ ID NO: 4468 - DNA, 20 bp, synthetic construct
  misc_feature 1..20: note = chemically synthesized
  source 1..20: mol_type = other DNA
tctaaatttttaaactaata

SEQ ID NO: 4469 - DNA, 20 bp, synthetic construct
  misc_feature 1..20: note = chemically synthesized
  source 1..20: mol_type = other DNA
actaataatggatttgaaaa

SEQ ID NO: 4470 - DNA, 20 bp, synthetic construct
  misc_feature 1..20: note = chemically synthesized
  source 1..20: mol_type = other DNA
aaagcccagcatattttcat

SEQ ID NO: 4471 - DNA, 20 bp, synthetic construct
  misc_feature 1..20: note = chemically synthesized
  source 1..20: mol_type = other DNA
ttaatctgttttaaacactg

SEQ ID NO: 4472 - DNA, 20 bp, synthetic construct
  misc_feature 1..20: note = chemically synthesized
  source 1..20: mol_type = other DNA
tactttaagtgaagttactt

SEQ ID NO: 4473 - DNA, 20 bp, synthetic construct
  misc_feature 1..20: note = chemically synthesized
  source 1..20: mol_type = other DNA
gaagttacttctgggtgttc

SEQ ID NO: 4474 - DNA, 20 bp, synthetic construct
  misc_feature 1..20: note = chemically synthesized
  source 1..20: mol_type = other DNA
tctggagtttcaggttgatt

SEQ ID NO: 4475 - DNA, 20 bp, synthetic construct
  misc_feature 1..20: note = chemically synthesized
  source 1..20: mol_type = other DNA
tatttcactttttgttgaag

SEQ ID NO: 4476 - DNA, 20 bp, synthetic construct
  misc_feature 1..20: note = chemically synthesized
  source 1..20: mol_type = other DNA
ttctaggaggctttcaagtt

SEQ ID NO: 4477 - DNA, 20 bp, synthetic construct
  misc_feature 1..20: note = chemically synthesized
  source 1..20: mol_type = other DNA
ggaggctttcaagttttgag

SEQ ID NO: 4478 - DNA, 20 bp, synthetic construct
  misc_feature 1..20: note = chemically synthesized
  source 1..20: mol_type = other DNA
aaaaagactgatcaaatatg

SEQ ID NO: 4479 - DNA, 20 bp, synthetic construct
  misc_feature 1..20: note = chemically synthesized
  source 1..20: mol_type = other DNA
tgattttggctctggagata

SEQ ID NO: 4480 - DNA, 20 bp, synthetic construct
  misc_feature 1..20: note = chemically synthesized
  source 1..20: mol_type = other DNA
tggagatagagaatcaaatg

SEQ ID NO: 4481 - DNA, 20 bp, synthetic construct
  misc_feature 1..20: note = chemically synthesized
  source 1..20: mol_type = other DNA
attaagccgtgttaacttgc

SEQ ID NO: 4482 - DNA, 20 bp, synthetic construct
  misc_feature 1..20: note = chemically synthesized
  source 1..20: mol_type = other DNA
gaatgtaaccttcttccaca

SEQ ID NO: 4483 - DNA, 20 bp, synthetic construct
  misc_feature 1..20: note = chemically synthesized
  source 1..20: mol_type = other DNA
gtcaaaaataaacttttttg

SEQ ID NO: 4484 - DNA, 20 bp, synthetic construct
  misc_feature 1..20: note = chemically synthesized
  source 1..20: mol_type = other DNA
aagttgaggggaaaaaagta

SEQ ID NO: 4485 - DNA, 20 bp, synthetic construct
  misc_feature 1..20: note = chemically synthesized
  source 1..20: mol_type = other DNA
gaagtctaggtctgcttcca

SEQ ID NO: 4486 - DNA, 20 bp, synthetic construct
  misc_feature 1..20: note = chemically synthesized
  source 1..20: mol_type = other DNA
tgttcctctagttatttcct

SEQ ID NO: 4487 - DNA, 20 bp, synthetic construct
  misc_feature 1..20: note = chemically synthesized
  source 1..20: mol_type = other DNA
aaaccagtgaaatcaaagaa

SEQ ID NO: 4488 - DNA, 20 bp, synthetic construct
  misc_feature 1..20: note = chemically synthesized
  source 1..20: mol_type = other DNA
caagtcaaaaatgaagaggt

SEQ ID NO: 4489 - DNA, 20 bp, synthetic construct
  misc_feature 1..20: note = chemically synthesized
  source 1..20: mol_type = other DNA
caaaacttgaaagcctccta

SEQ ID NO: 4490 - DNA, 20 bp, synthetic construct
  misc_feature 1..20: note = chemically synthesized
  source 1..20: mol_type = other DNA
agtaacttcacttaaagtaa

SEQ ID NO: 4491 - DNA, 20 bp, synthetic construct
  misc_feature 1..20: note = chemically synthesized
  source 1..20: mol_type = other DNA
tgttgaaatacttttttttc

SEQ ID NO: 4492 - DNA, 20 bp, synthetic construct
  misc_feature 1..20: note = chemically synthesized
  source 1..20: mol_type = other DNA
ttttccaagaaaaataatct

SEQ ID NO: 4493 - DNA, 20 bp, synthetic construct
  misc_feature 1..20: note = chemically synthesized
  source 1..20: mol_type = other DNA
ctttttcttttaattgaagt

SEQ ID NO: 4494 - DNA, 20 bp, synthetic construct
  misc_feature 1..20: note = chemically synthesized
  source 1..20: mol_type = other DNA
gatagtgttacaggaaatta

SEQ ID NO: 4495 - DNA, 20 bp, synthetic construct
  misc_feature 1..20: note = chemically synthesized
  source 1..20: mol_type = other DNA
tgttacaggaaattaataga

SEQ ID NO: 4496 - DNA, 20 bp, synthetic construct
  misc_feature 1..20: note = chemically synthesized
  source 1..20: mol_type = other DNA
ctctctatatccagactttt

SEQ ID NO: 4497 - DNA, 20 bp, synthetic construct
  misc_feature 1..20: note = chemically synthesized
  source 1..20: mol_type = other DNA
accaacagcatagtcaaata

SEQ ID NO: 4498 - DNA, 20 bp, synthetic construct
  misc_feature 1..20: note = chemically synthesized
  source 1..20: mol_type = other DNA
agcatagtcaaataaaagaa

SEQ ID NO: 4499 - DNA, 20 bp, synthetic construct
  misc_feature 1..20: note = chemically synthesized
  source 1..20: mol_type = other DNA
cagaacttataggattattg

SEQ ID NO: 4500 - DNA, 20 bp, synthetic construct
  misc_feature 1..20: note = chemically synthesized
  source 1..20: mol_type = other DNA
tattgtgtggttttgagcaa

SEQ ID NO: 4501 - DNA, 20 bp, synthetic construct
  misc_feature 1..20: note = chemically synthesized
  source 1..20: mol_type = other DNA
gattttctgaacttcaatta

SEQ ID NO: 4502 - DNA, 20 bp, synthetic construct
  misc_feature 1..20: note = chemically synthesized
  source 1..20: mol_type = other DNA
tttaatctgttttaaacact

SEQ ID NO: 4503 - DNA, 20 bp, synthetic construct
  misc_feature 1..20: note = chemically synthesized
  source 1..20: mol_type = other DNA
agtatttcaaatggcatgcc

SEQ ID NO: 4504 - DNA, 20 bp, synthetic construct
  misc_feature 1..20: note = chemically synthesized
  source 1..20: mol_type = other DNA
atatttcactttttgttgaa

SEQ ID NO: 4505 - DNA, 20 bp, synthetic construct
  misc_feature 1..20: note = chemically synthesized
  source 1..20: mol_type = other DNA
ttgattttggctctggagat

SEQ ID NO: 4506 - DNA, 20 bp, synthetic construct
  misc_feature 1..20: note = chemically synthesized
  source 1..20: mol_type = other DNA
ctatatataccaatatttgc

SEQ ID NO: 4507 - DNA, 20 bp, synthetic construct
  misc_feature 1..20: note = chemically synthesized
  source 1..20: mol_type = other DNA
gatcaatgctaaatgaaatc

SEQ ID NO: 4508 - DNA, 20 bp, synthetic construct
  misc_feature 1..20: note = chemically synthesized
  source 1..20: mol_type = other DNA
aaaaagtaaaattagctttt

SEQ ID NO: 4509 - DNA, 20 bp, synthetic construct
  misc_feature 1..20: note = chemically synthesized
  source 1..20: mol_type = other DNA
gtctaggtctgcttccagaa

SEQ ID NO: 4510 - DNA, 20 bp, synthetic construct
  misc_feature 1..20: note = chemically synthesized
  source 1..20: mol_type = other DNA
ccaaattaatgacatatttc

SEQ ID NO: 4511 - DNA, 20 bp, synthetic construct
  misc_feature 1..20: note = chemically synthesized
  source 1..20: mol_type = other DNA
tatgtcacttgaactcaact

SEQ ID NO: 4512 - DNA, 20 bp, synthetic construct
  misc_feature 1..20: note = chemically synthesized
  source 1..20: mol_type = other DNA
gtttccctaatgttatatat

SEQ ID NO: 4513 - DNA, 20 bp, synthetic construct
  misc_feature 1..20: note = chemically synthesized
  source 1..20: mol_type = other DNA
gtaaaaagttaaaaaaaatt

SEQ ID NO: 4514 - DNA, 20 bp, synthetic construct
  misc_feature 1..20: note = chemically synthesized
  source 1..20: mol_type = other DNA
taaaactattctccagtgtt

SEQ ID NO: 4515 - DNA, 20 bp, synthetic construct
  misc_feature 1..20: note = chemically synthesized
  source 1..20: mol_type = other DNA
ctatatccagacttttgtag

SEQ ID NO: 4516 - DNA, 20 bp, synthetic construct
  misc_feature 1..20: note = chemically synthesized
  source 1..20: mol_type = other DNA
catctttcacacaggtctgt

SEQ ID NO: 4517 - DNA, 20 bp, synthetic construct
  misc_feature 1..20: note = chemically synthesized
  source 1..20: mol_type = other DNA
ctgcatttaaaccatggctc

SEQ ID NO: 4518 - DNA, 20 bp, synthetic construct
  misc_feature 1..20: note = chemically synthesized
  source 1..20: mol_type = other DNA
agatcatgtttctctttgct

SEQ ID NO: 4519 - DNA, 20 bp, synthetic construct
  misc_feature 1..20: note = chemically synthesized
  source 1..20: mol_type = other DNA
tatataacattagggaaaca

SEQ ID NO: 4520 - DNA, 20 bp, synthetic construct
  misc_feature 1..20: note = chemically synthesized
  source 1..20: mol_type = other DNA
ttttttaaaagatccacatt

SEQ ID NO: 4521 - DNA, 20 bp, synthetic construct
  misc_feature 1..20: note = chemically synthesized
  source 1..20: mol_type = other DNA
ataataaatttacccaacaa

SEQ ID NO: 4522 - DNA, 20 bp, synthetic construct
  misc_feature 1..20: note = chemically synthesized
  source 1..20: mol_type = other DNA
taaaatcataaaaaagtaaa

SEQ ID NO: 4523 - DNA, 20 bp, synthetic construct
  misc_feature 1..20: note = chemically synthesized
  source 1..20: mol_type = other DNA
agtcaccatagcattgaatg

SEQ ID NO: 4524 - DNA, 20 bp, synthetic construct
  misc_feature 1..20: note = chemically synthesized
  source 1..20: mol_type = other DNA
attaagttagttgctcattt

SEQ ID NO: 4525 - DNA, 20 bp, synthetic construct
  misc_feature 1..20: note = chemically synthesized
  source 1..20: mol_type = other DNA
gttacattcgtgcaagttaa

SEQ ID NO: 4526 - DNA, 20 bp, synthetic construct
  misc_feature 1..20: note = chemically synthesized
  source 1..20: mol_type = other DNA
tcgtgcaagttaacacggct

SEQ ID NO: 4527 - DNA, 20 bp, synthetic construct
  misc_feature 1..20: note = chemically synthesized
  source 1..20: mol_type = other DNA
tatagagttaagaagtctag

SEQ ID NO: 4528 - DNA, 20 bp, synthetic construct
  misc_feature 1..20: note = chemically synthesized
  source 1..20: mol_type = other DNA
tccagaagaaaacagttcca

SEQ ID NO: 4529 - DNA, 20 bp, synthetic construct
  misc_feature 1..20: note = chemically synthesized
  source 1..20: mol_type = other DNA
attgatcaagacaattcatc

SEQ ID NO: 4530 - DNA, 20 bp, synthetic construct
  misc_feature 1..20: note = chemically synthesized
  source 1..20: mol_type = other DNA
ctctatctccagagccaaaa

SEQ ID NO: 4531 - DNA, 20 bp, synthetic construct
  misc_feature 1..20: note = chemically synthesized
  source 1..20: mol_type = other DNA
aagtagaaaataaagagggt

SEQ ID NO: 4532 - DNA, 20 bp, synthetic construct
  misc_feature 1..20: note = chemically synthesized
  source 1..20: mol_type = other DNA
aaaataaagagggttcatgt

SEQ ID NO: 4533 - DNA, 20 bp, synthetic construct
  misc_feature 1..20: note = chemically synthesized
  source 1..20: mol_type = other DNA
atttcctattataatttcaa

SEQ ID NO: 4534 - DNA, 20 bp, synthetic construct
  misc_feature 1..20: note = chemically synthesized
  source 1..20: mol_type = other DNA
attataatttcaagttagtt

SEQ ID NO: 4535 - DNA, 20 bp, synthetic construct
  misc_feature 1..20: note = chemically synthesized
  source 1..20: mol_type = other DNA
aaaaatttaaaactattctc

SEQ ID NO: 4536 - DNA, 20 bp, synthetic construct
  misc_feature 1..20: note = chemically synthesized
  source 1..20: mol_type = other DNA
aactattctccagtgtttaa

SEQ ID NO: 4537 - DNA, 20 bp, synthetic construct
  misc_feature 1..20: note = chemically synthesized
  source 1..20: mol_type = other DNA
ttaaataatacagtaaatgg

SEQ ID NO: 4538 - DNA, 20 bp, synthetic construct
  misc_feature 1..20: note = chemically synthesized
  source 1..20: mol_type = other DNA
tttattcatatgaaaatatg

SEQ ID NO: 4539 - DNA, 20 bp, synthetic construct
  misc_feature 1..20: note = chemically synthesized
  source 1..20: mol_type = other DNA
attcatttttcaaatccatt

SEQ ID NO: 4540 - DNA, 20 bp, synthetic construct
  misc_feature 1..20: note = chemically synthesized
  source 1..20: mol_type = other DNA
atccattattagtttaaaaa

SEQ ID NO: 4541 - DNA, 20 bp, synthetic construct
  misc_feature 1..20: note = chemically synthesized
  source 1..20: mol_type = other DNA
actgaatcctaaaattattt

SEQ ID NO: 4542 - DNA, 20 bp, synthetic construct
  misc_feature 1..20: note = chemically synthesized
  source 1..20: mol_type = other DNA
attacttcacccctttatct

SEQ ID NO: 4543 - DNA, 20 bp, synthetic construct
  misc_feature 1..20: note = chemically synthesized
  source 1..20: mol_type = other DNA
caaagataataacagaactt

SEQ ID NO: 4544 - DNA, 20 bp, synthetic construct
  misc_feature 1..20: note = chemically synthesized
  source 1..20: mol_type = other DNA
ttactaaaattcaaattaga

SEQ ID NO: 4545 - DNA, 20 bp, synthetic construct
  misc_feature 1..20: note = chemically synthesized
  source 1..20: mol_type = other DNA
ctctttgctcaaaaccacac

SEQ ID NO: 4546 - DNA, 20 bp, synthetic construct
  misc_feature 1..20: note = chemically synthesized
  source 1..20: mol_type = other DNA
actcatattggctctttaga

SEQ ID NO: 4547 - DNA, 20 bp, synthetic construct
  misc_feature 1..20: note = chemically synthesized
  source 1..20: mol_type = other DNA
agtgaaatggaaagctattg

SEQ ID NO: 4548 - DNA, 20 bp, synthetic construct
  misc_feature 1..20: note = chemically synthesized
  source 1..20: mol_type = other DNA
gtaatttattcaaggtcaca

SEQ ID NO: 4549 - DNA, 20 bp, synthetic construct
  misc_feature 1..20: note = chemically synthesized
  source 1..20: mol_type = other DNA
gtcacacaaagttttagagc

SEQ ID NO: 4550 - DNA, 20 bp, synthetic construct
  misc_feature 1..20: note = chemically synthesized
  source 1..20: mol_type = other DNA
agagccatggtttaaatgca

SEQ ID NO: 4551 - DNA, 20 bp, synthetic construct
  misc_feature 1..20: note = chemically synthesized
  source 1..20: mol_type = other DNA
ggtttaaatgcaggtagttt

SEQ ID NO: 4552 - DNA, 20 bp, synthetic construct
  misc_feature 1..20: note = chemically synthesized
  source 1..20: mol_type = other DNA
aattttactcatgatccagt

SEQ ID NO: 4553 - DNA, 20 bp, synthetic construct
  misc_feature 1..20: note = chemically synthesized
  source 1..20: mol_type = other DNA
gttaaagcttgtaaataatt

SEQ ID NO: 4554 - DNA, 20 bp, synthetic construct
  misc_feature 1..20: note = chemically synthesized
  source 1..20: mol_type = other DNA
ttgtaaataattttaggatt

SEQ ID NO: 4555 - DNA, 20 bp, synthetic construct
  misc_feature 1..20: note = chemically synthesized
  source 1..20: mol_type = other DNA
taccattaaaatactgactt

SEQ ID NO: 4556 - DNA, 20 bp, synthetic construct
  misc_feature 1..20: note = chemically synthesized
  source 1..20: mol_type = other DNA
ttcttttatttgactatgct

SEQ ID NO: 4557 - DNA, 20 bp, synthetic construct
  misc_feature 1..20: note = chemically synthesized
  source 1..20: mol_type = other DNA
tttgactatgctgttggttt

SEQ ID NO: 4558 - DNA, 20 bp, synthetic construct
  misc_feature 1..20: note = chemically synthesized
  source 1..20: mol_type = other DNA
gaaggtctttgatgctatta

SEQ ID NO: 4559 - DNA, 20 bp, synthetic construct
  misc_feature 1..20: note = chemically synthesized
  source 1..20: mol_type = other DNA
tagagagtaggttggttata

SEQ ID NO: 4560 - DNA, 20 bp, synthetic construct
  misc_feature 1..20: note = chemically synthesized
  source 1..20: mol_type = other DNA
atctaaatttttaaactaat

SEQ ID NO: 4561 - DNA, 20 bp, synthetic construct
  misc_feature 1..20: note = chemically synthesized
  source 1..20: mol_type = other DNA
attggcaattccttcccctt

SEQ ID NO: 4562 - DNA, 20 bp, synthetic construct
  misc_feature 1..20: note = chemically synthesized
  source 1..20: mol_type = other DNA
taaattgtactatctctaaa

SEQ ID NO: 4563 - DNA, 20 bp, synthetic construct
  misc_feature 1..20: note = chemically synthesized
  source 1..20: mol_type = other DNA
tccatttactgtattattta

SEQ ID NO: 4564 - DNA, 20 bp, synthetic construct
  misc_feature 1..20: note = chemically synthesized
  source 1..20: mol_type = other DNA
atctgttttaaacactggag

SEQ ID NO: 4565 - DNA, 20 bp, synthetic construct
  misc_feature 1..20: note = chemically synthesized
  source 1..20: mol_type = other DNA
atagtgtaatgacatagtgt

SEQ ID NO: 4566 - DNA, 20 bp, synthetic construct
  misc_feature 1..20: note = chemically synthesized
  source 1..20: mol_type = other DNA
tgttctagattgtataattt

SEQ ID NO: 4567 - DNA, 20 bp, synthetic construct
  misc_feature 1..20: note = chemically synthesized
  source 1..20: mol_type = other DNA
tcatataaaatgcaaatttt

SEQ ID NO: 4568 - DNA, 20 bp, synthetic construct
  misc_feature 1..20: note = chemically synthesized
  source 1..20: mol_type = other DNA
taataggaaattttattttc

SEQ ID NO: 4569 - DNA, 20 bp, synthetic construct
  misc_feature 1..20: note = chemically synthesized
  source 1..20: mol_type = other DNA
gaagttacttctgggtgttc

SEQ ID NO: 4570 - DNA, 20 bp, synthetic construct
  misc_feature 1..20: note = chemically synthesized
  source 1..20: mol_type = other DNA
ctgggtgttctggagtttca

SEQ ID NO: 4571 - DNA, 20 bp, synthetic construct
  misc_feature 1..20: note = chemically synthesized
  source 1..20: mol_type = other DNA
aagtagaattttttcttcta

SEQ ID NO: 4572 - DNA, 20 bp, synthetic construct
  misc_feature 1..20: note = chemically synthesized
  source 1..20: mol_type = other DNA
ttttttcttctaggaggctt

SEQ ID NO: 4573 - DNA, 20 bp, synthetic construct
  misc_feature 1..20: note = chemically synthesized
  source 1..20: mol_type = other DNA
ttacctcttcatttttgact

SEQ ID NO: 4574 - DNA, 20 bp, synthetic construct
  misc_feature 1..20: note = chemically synthesized
  source 1..20: mol_type = other DNA
tctcagttccttttcttctt

SEQ ID NO: 4575 - DNA, 20 bp, synthetic construct
  misc_feature 1..20: note = chemically synthesized
  source 1..20: mol_type = other DNA
ttttcttcttctttgatttc

SEQ ID NO: 4576 - DNA, 20 bp, synthetic construct
  misc_feature 1..20: note = chemically synthesized
  source 1..20: mol_type = other DNA
aaaaagactgatcaaatatg

SEQ ID NO: 4577 - DNA, 20 bp, synthetic construct
  misc_feature 1..20: note = chemically synthesized
  source 1..20: mol_type = other DNA
acatcgtctaacatagcaaa

SEQ ID NO: 4578 - DNA, 20 bp, synthetic construct
  misc_feature 1..20: note = chemically synthesized
  source 1..20: mol_type = other DNA
ctagaggaacaataaaaaga

SEQ ID NO: 4579 - DNA, 20 bp, synthetic construct
  misc_feature 1..20: note = chemically synthesized
  source 1..20: mol_type = other DNA
cttaattgtgaacattttta

SEQ ID NO: 4580 - DNA, 20 bp, synthetic construct
  misc_feature 1..20: note = chemically synthesized
  source 1..20: mol_type = other DNA
ttcaatttcaagcaacgtgg

SEQ ID NO: 4581 - DNA, 20 bp, synthetic construct
  misc_feature 1..20: note = chemically synthesized
  source 1..20: mol_type = other DNA
cattcaatgctatggtgact

SEQ ID NO: 4582 - DNA, 20 bp, synthetic construct
  misc_feature 1..20: note = chemically synthesized
  source 1..20: mol_type = other DNA
taaaagctaattttactttt

SEQ ID NO: 4583 - DNA, 20 bp, synthetic construct
  misc_feature 1..20: note = chemically synthesized
  source 1..20: mol_type = other DNA
ttttacttttttatgatttt

SEQ ID NO: 4584 - DNA, 22 bp, synthetic construct
  misc_feature 1..22: note = chemically synthesized
  source 1..22: mol_type = other DNA
aattcattacttttttcccctc

SEQ ID NO: 4585 - DNA, 22 bp, synthetic construct
  misc_feature 1..22: note = chemically synthesized
  source 1..22: mol_type = other DNA
attcattacttttttcccctca

SEQ ID NO: 4586 - DNA, 22 bp, synthetic construct
  misc_feature 1..22: note = chemically synthesized
  source 1..22: mol_type = other DNA
attacttttttcccctcaactt

SEQ ID NO: 4587 - DNA, 22 bp, synthetic construct
  misc_feature 1..22: note = chemically synthesized
  source 1..22: mol_type = other DNA
cttttttcccctcaactttaat

SEQ ID NO: 4588 - DNA, 22 bp, synthetic construct
  misc_feature 1..22: note = chemically synthesized
  source 1..22: mol_type = other DNA
ttttcccctcaactttaataat

SEQ ID NO: 4589 - DNA, 22 bp, synthetic construct
  misc_feature 1..22: note = chemically synthesized
  source 1..22: mol_type = other DNA
tttcccctcaactttaataata

SEQ ID NO: 4590 - DNA, 22 bp, synthetic construct
  misc_feature 1..22: note = chemically synthesized
  source 1..22: mol_type = other DNA
ttcccctcaactttaataataa

SEQ ID NO: 4591 - DNA, 22 bp, synthetic construct
  misc_feature 1..22: note = chemically synthesized
  source 1..22: mol_type = other DNA
tcccctcaactttaataataaa

SEQ ID NO: 4592 - DNA, 22 bp, synthetic construct
  misc_feature 1..22: note = chemically synthesized
  source 1..22: mol_type = other DNA
cccctcaactttaataataaat

SEQ ID NO: 4593 - DNA, 22 bp, synthetic construct
  misc_feature 1..22: note = chemically synthesized
  source 1..22: mol_type = other DNA
ccctcaactttaataataaatt

SEQ ID NO: 4594 - DNA, 22 bp, synthetic construct
  misc_feature 1..22: note = chemically synthesized
  source 1..22: mol_type = other DNA
aactttaataataaatttaccc

SEQ ID NO: 4595 - DNA, 22 bp, synthetic construct
  misc_feature 1..22: note = chemically synthesized
  source 1..22: mol_type = other DNA
taataataaatttacccaacaa

SEQ ID NO: 4596 - DNA, 22 bp, synthetic construct
  misc_feature 1..22: note = chemically synthesized
  source 1..22: mol_type = other DNA
aataataaatttacccaacaaa

SEQ ID NO: 4597 - DNA, 22 bp, synthetic construct
  misc_feature 1..22: note = chemically synthesized
  source 1..22: mol_type = other DNA
ataataaatttacccaacaaaa

SEQ ID NO: 4598 - DNA, 22 bp, synthetic construct
  misc_feature 1..22: note = chemically synthesized
  source 1..22: mol_type = other DNA
acccaacaaaaaagtttatttt

SEQ ID NO: 4599 - DNA, 22 bp, synthetic construct
  misc_feature 1..22: note = chemically synthesized
  source 1..22: mol_type = other DNA
cccaacaaaaaagtttattttt

SEQ ID NO: 4600 - DNA, 22 bp, synthetic construct
  misc_feature 1..22: note = chemically synthesized
  source 1..22: mol_type = other DNA
atttttgacttgtaaatctctt

SEQ ID NO: 4601 - DNA, 22 bp, synthetic construct
  misc_feature 1..22: note = chemically synthesized
  source 1..22: mol_type = other DNA
tttttgacttgtaaatctctta

SEQ ID NO: 4602 - DNA, 22 bp, synthetic construct
  misc_feature 1..22: note = chemically synthesized
  source 1..22: mol_type = other DNA
ttgacttgtaaatctcttaaaa

SEQ ID NO: 4603 - DNA, 22 bp, synthetic construct
  misc_feature 1..22: note = chemically synthesized
  source 1..22: mol_type = other DNA
tgacttgtaaatctcttaaaat

SEQ ID NO: 4604 - DNA, 22 bp, synthetic construct
  misc_feature 1..22: note = chemically synthesized
  source 1..22: mol_type = other DNA
gacttgtaaatctcttaaaatc

SEQ ID NO: 4605 - DNA, 22 bp, synthetic construct
  misc_feature 1..22: note = chemically synthesized
  source 1..22: mol_type = other DNA
acttgtaaatctcttaaaatca

SEQ ID NO: 4606 - DNA, 22 bp, synthetic construct
  misc_feature 1..22: note = chemically synthesized
  source 1..22: mol_type = other DNA
gtaaatctcttaaaatcataaa

SEQ ID NO: 4607 - DNA, 22 bp, synthetic construct
  misc_feature 1..22: note = chemically synthesized
  source 1..22: mol_type = other DNA
taaatctcttaaaatcataaaa

SEQ ID NO: 4608 - DNA, 22 bp, synthetic construct
  misc_feature 1..22: note = chemically synthesized
  source 1..22: mol_type = other DNA
ttaaaatcataaaaaagtaaaa

SEQ ID NO: 4609 - DNA, 22 bp, synthetic construct
  misc_feature 1..22: note = chemically synthesized
  source 1..22: mol_type = other DNA
aaaatcataaaaaagtaaaatt

SEQ ID NO: 4610 - DNA, 22 bp, synthetic construct
  misc_feature 1..22: note = chemically synthesized
  source 1..22: mol_type = other DNA
aaatcataaaaaagtaaaatta

SEQ ID NO: 4611 - DNA, 22 bp, synthetic construct
  misc_feature 1..22: note = chemically synthesized
  source 1..22: mol_type = other DNA
gcttttaaaaacaggtagtcac

SEQ ID NO: 4612 - DNA, 22 bp, synthetic construct
  misc_feature 1..22: note = chemically synthesized
  source 1..22: mol_type = other DNA
ttaaaaacaggtagtcaccata

SEQ ID NO: 4613 - DNA, 22 bp, synthetic construct
  misc_feature 1..22: note = chemically synthesized
  source 1..22: mol_type = other DNA
taaaaacaggtagtcaccatag

SEQ ID NO: 4614 - DNA, 22 bp, synthetic construct
  misc_feature 1..22: note = chemically synthesized
  source 1..22: mol_type = other DNA
aaaaacaggtagtcaccatagc

SEQ ID NO: 4615 - DNA, 22 bp, synthetic construct
  misc_feature 1..22: note = chemically synthesized
  source 1..22: mol_type = other DNA
aaaacaggtagtcaccatagca

SEQ ID NO: 4616 - DNA, 22 bp, synthetic construct
  misc_feature 1..22: note = chemically synthesized
  source 1..22: mol_type = other DNA
aatgtgtagtttataatacagc

SEQ ID NO: 4617 - DNA, 22 bp, synthetic construct
  misc_feature 1..22: note = chemically synthesized
  source 1..22: mol_type = other DNA
ataatacagcaaagttaaatac

SEQ ID NO: 4618 - DNA, 22 bp, synthetic construct
  misc_feature 1..22: note = chemically synthesized
  source 1..22: mol_type = other DNA
taatacagcaaagttaaataca

SEQ ID NO: 4619 - DNA, 22 bp, synthetic construct
  misc_feature 1..22: note = chemically synthesized
  source 1..22: mol_type = other DNA
aatacaatttcaaattacctat

SEQ ID NO: 4620 - DNA, 22 bp, synthetic construct
  misc_feature 1..22: note = chemically synthesized
  source 1..22: mol_type = other DNA
caaattacctattaagttagtt

SEQ ID NO: 4621 - DNA, 22 bp, synthetic construct
  misc_feature 1..22: note = chemically synthesized
  source 1..22: mol_type = other DNA
aaattacctattaagttagttg

SEQ ID NO: 4622 - DNA, 22 bp, synthetic construct
  misc_feature 1..22: note = chemically synthesized
  source 1..22: mol_type = other DNA
cctattaagttagttgctcatt

SEQ ID NO: 4623 - DNA, 22 bp, synthetic construct
  misc_feature 1..22: note = chemically synthesized
  source 1..22: mol_type = other DNA
ttaagttagttgctcatttctt

SEQ ID NO: 4624 - DNA, 22 bp, synthetic construct
  misc_feature 1..22: note = chemically synthesized
  source 1..22: mol_type = other DNA
agttagttgctcatttctttga

SEQ ID NO: 4625 - DNA, 22 bp, synthetic construct
  misc_feature 1..22: note = chemically synthesized
  source 1..22: mol_type = other DNA
gttgctcatttctttgatttca

SEQ ID NO: 4626 - DNA, 22 bp, synthetic construct
  misc_feature 1..22: note = chemically synthesized
  source 1..22: mol_type = other DNA
ctcatttctttgatttcattta

SEQ ID NO: 4627 - DNA, 22 bp, synthetic construct
  misc_feature 1..22: note = chemically synthesized
  source 1..22: mol_type = other DNA
atttctttgatttcatttagca

SEQ ID NO: 4628 - DNA, 22 bp, synthetic construct
  misc_feature 1..22: note = chemically synthesized
  source 1..22: mol_type = other DNA
ctttgatttcatttagcattga

SEQ ID NO: 4629 - DNA, 22 bp, synthetic construct
  misc_feature 1..22: note = chemically synthesized
  source 1..22: mol_type = other DNA
tttgatttcatttagcattgat

SEQ ID NO: 4630 - DNA, 22 bp, synthetic construct
  misc_feature 1..22: note = chemically synthesized
  source 1..22: mol_type = other DNA
tgatttcatttagcattgatct

SEQ ID NO: 4631 - DNA, 22 bp, synthetic construct
  misc_feature 1..22: note = chemically synthesized
  source 1..22: mol_type = other DNA
gatttcatttagcattgatcta

SEQ ID NO: 4632 - DNA, 22 bp, synthetic construct
  misc_feature 1..22: note = chemically synthesized
  source 1..22: mol_type = other DNA
atttcatttagcattgatctaa

SEQ ID NO: 4633 - DNA, 22 bp, synthetic construct
  misc_feature 1..22: note = chemically synthesized
  source 1..22: mol_type = other DNA
catttagcattgatctaactca

SEQ ID NO: 4634 - DNA, 22 bp, synthetic construct
  misc_feature 1..22: note = chemically synthesized
  source 1..22: mol_type = other DNA
atttagcattgatctaactcaa

SEQ ID NO: 4635 - DNA, 22 bp, synthetic construct
  misc_feature 1..22: note = chemically synthesized
  source 1..22: mol_type = other DNA
agcattgatctaactcaatgtg

SEQ ID NO: 4636 - DNA, 22 bp, synthetic construct
  misc_feature 1..22: note = chemically synthesized
  source 1..22: mol_type = other DNA
gcattgatctaactcaatgtgg

SEQ ID NO: 4637 - DNA, 22 bp, synthetic construct
  misc_feature 1..22: note = chemically synthesized
  source 1..22: mol_type = other DNA
atctaactcaatgtggaagaag

SEQ ID NO: 4638 - DNA, 22 bp, synthetic construct
  misc_feature 1..22: note = chemically synthesized
  source 1..22: mol_type = other DNA
actcaatgtggaagaaggttac

SEQ ID NO: 4639 - DNA, 22 bp, synthetic construct
  misc_feature 1..22: note = chemically synthesized
  source 1..22: mol_type = other DNA
aatgtggaagaaggttacattc

SEQ ID NO: 4640 - DNA, 22 bp, synthetic construct
  misc_feature 1..22: note = chemically synthesized
  source 1..22: mol_type = other DNA
cattcgtgcaagttaacacggc

SEQ ID NO: 4641 - DNA, 22 bp, synthetic construct
  misc_feature 1..22: note = chemically synthesized
  source 1..22: mol_type = other DNA
gtgcaagttaacacggcttaat

SEQ ID NO: 4642 - DNA, 22 bp, synthetic construct
  misc_feature 1..22: note = chemically synthesized
  source 1..22: mol_type = other DNA
acacggcttaatgattaactat

SEQ ID NO: 4643 - DNA, 22 bp, synthetic construct
  misc_feature 1..22: note = chemically synthesized
  source 1..22: mol_type = other DNA
aatgattaactatgttcaccta

SEQ ID NO: 4644 - DNA, 22 bp, synthetic construct
  misc_feature 1..22: note = chemically synthesized
  source 1..22: mol_type = other DNA
atgattaactatgttcacctac

SEQ ID NO: 4645 - DNA, 22 bp, synthetic construct
  misc_feature 1..22: note = chemically synthesized
  source 1..22: mol_type = other DNA
actatgttcacctaccaacctt

SEQ ID NO: 4646 - DNA, 22 bp, synthetic construct
  misc_feature 1..22: note = chemically synthesized
  source 1..22: mol_type = other DNA
tgttcacctaccaaccttacct

SEQ ID NO: 4647 - DNA, 22 bp, synthetic construct
  misc_feature 1..22: note = chemically synthesized
  source 1..22: mol_type = other DNA
acctaccaaccttaccttttct

SEQ ID NO: 4648 - DNA, 22 bp, synthetic construct
  misc_feature 1..22: note = chemically synthesized
  source 1..22: mol_type = other DNA
ccaaccttaccttttctgggca

SEQ ID NO: 4649 - DNA, 22 bp, synthetic construct
  misc_feature 1..22: note = chemically synthesized
  source 1..22: mol_type = other DNA
accttttctgggcaaatattgg

SEQ ID NO: 4650 - DNA, 22 bp, synthetic construct
  misc_feature 1..22: note = chemically synthesized
  source 1..22: mol_type = other DNA
ccttttctgggcaaatattggt

SEQ ID NO: 4651 - DNA, 22 bp, synthetic construct
  misc_feature 1..22: note = chemically synthesized
  source 1..22: mol_type = other DNA
ttctgggcaaatattggtatat

SEQ ID NO: 4652 - DNA, 22 bp, synthetic construct
  misc_feature 1..22: note = chemically synthesized
  source 1..22: mol_type = other DNA
tctgggcaaatattggtatata

SEQ ID NO: 4653 - DNA, 22 bp, synthetic construct
  misc_feature 1..22: note = chemically synthesized
  source 1..22: mol_type = other DNA
ctgggcaaatattggtatatat

SEQ ID NO: 4654 - DNA, 22 bp, synthetic construct
  misc_feature 1..22: note = chemically synthesized
  source 1..22: mol_type = other DNA
tgggcaaatattggtatatata

SEQ ID NO: 4655 - DNA, 22 bp, synthetic construct
  misc_feature 1..22: note = chemically synthesized
  source 1..22: mol_type = other DNA
ggcaaatattggtatatataga

SEQ ID NO: 4656 - DNA, 22 bp, synthetic construct
  misc_feature 1..22: note = chemically synthesized
  source 1..22: mol_type = other DNA
gtatatatagagttaagaagtc

SEQ ID NO: 4657 - DNA, 22 bp, synthetic construct
  misc_feature 1..22: note = chemically synthesized
  source 1..22: mol_type = other DNA
agaagtctaggtctgcttccag

SEQ ID NO: 4658 - DNA, 22 bp, synthetic construct
  misc_feature 1..22: note = chemically synthesized
  source 1..22: mol_type = other DNA
ggtctgcttccagaagaaaaca

SEQ ID NO: 4659 - DNA, 22 bp, synthetic construct
  misc_feature 1..22: note = chemically synthesized
  source 1..22: mol_type = other DNA
cttccagaagaaaacagttcca

SEQ ID NO: 4660 - DNA, 22 bp, synthetic construct
  misc_feature 1..22: note = chemically synthesized
  source 1..22: mol_type = other DNA
ccagaagaaaacagttccacgt

SEQ ID NO: 4661 - DNA, 22 bp, synthetic construct
  misc_feature 1..22: note = chemically synthesized
  source 1..22: mol_type = other DNA
cagaagaaaacagttccacgtt

SEQ ID NO: 4662 - DNA, 22 bp, synthetic construct
  misc_feature 1..22: note = chemically synthesized
  source 1..22: mol_type = other DNA
cacgttgcttgaaattgaaaat

SEQ ID NO: 4663 - DNA, 22 bp, synthetic construct
  misc_feature 1..22: note = chemically synthesized
  source 1..22: mol_type = other DNA
cttgaaattgaaaatcaagata

SEQ ID NO: 4664 - DNA, 22 bp, synthetic construct
  misc_feature 1..22: note = chemically synthesized
  source 1..22: mol_type = other DNA
gaaattgaaaatcaagataaaa

SEQ ID NO: 4665 - DNA, 22 bp, synthetic construct
  misc_feature 1..22: note = chemically synthesized
  source 1..22: mol_type = other DNA
aaattgaaaatcaagataaaaa

SEQ ID NO: 4666 - DNA, 22 bp, synthetic construct
  misc_feature 1..22: note = chemically synthesized
  source 1..22: mol_type = other DNA
aaaatcaagataaaaatgttca

SEQ ID NO: 4667 - DNA, 22 bp, synthetic construct
  misc_feature 1..22: note = chemically synthesized
  source 1..22: mol_type = other DNA
acaattaagctccttcttttta

SEQ ID NO: 4668 - DNA, 22 bp, synthetic construct
  misc_feature 1..22: note = chemically synthesized
  source 1..22: mol_type = other DNA
agctccttctttttattgttcc

SEQ ID NO: 4669 - DNA, 22 bp, synthetic construct
  misc_feature 1..22: note = chemically synthesized
  source 1..22: mol_type = other DNA
cttctttttattgttcctctag

SEQ ID NO: 4670 - DNA, 22 bp, synthetic construct
  misc_feature 1..22: note = chemically synthesized
  source 1..22: mol_type = other DNA
ctttttattgttcctctagtta

SEQ ID NO: 4671 - DNA, 22 bp, synthetic construct
  misc_feature 1..22: note = chemically synthesized
  source 1..22: mol_type = other DNA
tttttattgttcctctagttat

SEQ ID NO: 4672 - DNA, 22 bp, synthetic construct
  misc_feature 1..22: note = chemically synthesized
  source 1..22: mol_type = other DNA
tttattgttcctctagttattt

SEQ ID NO: 4673 - DNA, 22 bp, synthetic construct
  misc_feature 1..22: note = chemically synthesized
  source 1..22: mol_type = other DNA
ttattgttcctctagttatttc

SEQ ID NO: 4674 - DNA, 22 bp, synthetic construct
  misc_feature 1..22: note = chemically synthesized
  source 1..22: mol_type = other DNA
tattgttcctctagttatttcc

SEQ ID NO: 4675 - DNA, 22 bp, synthetic construct
  misc_feature 1..22: note = chemically synthesized
  source 1..22: mol_type = other DNA
attgttcctctagttatttcct

SEQ ID NO: 4676 - DNA, 22 bp, synthetic construct
  misc_feature 1..22: note = chemically synthesized
  source 1..22: mol_type = other DNA
ttgttcctctagttatttcctc

SEQ ID NO: 4677 - DNA, 22 bp, synthetic construct
  misc_feature 1..22: note = chemically synthesized
  source 1..22: mol_type = other DNA
ttcctctagttatttcctccag

SEQ ID NO: 4678 - DNA, 22 bp, synthetic construct
  misc_feature 1..22: note = chemically synthesized
  source 1..22: mol_type = other DNA
ctctagttatttcctccagaat

SEQ ID NO: 4679 - DNA, 22 bp, synthetic construct
  misc_feature 1..22: note = chemically synthesized
  source 1..22: mol_type = other DNA
tagttatttcctccagaattga

SEQ ID NO: 4680 - DNA, 22 bp, synthetic construct
  misc_feature 1..22: note = chemically synthesized
  source 1..22: mol_type = other DNA
gttatttcctccagaattgatc

SEQ ID NO: 4681 - DNA, 22 bp, synthetic construct
  misc_feature 1..22: note = chemically synthesized
  source 1..22: mol_type = other DNA
tttcctccagaattgatcaaga

SEQ ID NO: 4682 - DNA, 22 bp, synthetic construct
  misc_feature 1..22: note = chemically synthesized
  source 1..22: mol_type = other DNA
cctccagaattgatcaagacaa

SEQ ID NO: 4683 - DNA, 22 bp, synthetic construct
  misc_feature 1..22: note = chemically synthesized
  source 1..22: mol_type = other DNA
ctccagaattgatcaagacaat

SEQ ID NO: 4684 - DNA, 22 bp, synthetic construct
  misc_feature 1..22: note = chemically synthesized
  source 1..22: mol_type = other DNA
cagaattgatcaagacaattca

SEQ ID NO: 4685 - DNA, 22 bp, synthetic construct
  misc_feature 1..22: note = chemically synthesized
  source 1..22: mol_type = other DNA
atcaagacaattcatcatttga

SEQ ID NO: 4686 - DNA, 22 bp, synthetic construct
  misc_feature 1..22: note = chemically synthesized
  source 1..22: mol_type = other DNA
atcatttgattctctatctcca

SEQ ID NO: 4687 - DNA, 22 bp, synthetic construct
  misc_feature 1..22: note = chemically synthesized
  source 1..22: mol_type = other DNA
gattctctatctccagagccaa

SEQ ID NO: 4688 - DNA, 22 bp, synthetic construct
  misc_feature 1..22: note = chemically synthesized
  source 1..22: mol_type = other DNA
attctctatctccagagccaaa

SEQ ID NO: 4689 - DNA, 22 bp, synthetic construct
  misc_feature 1..22: note = chemically synthesized
  source 1..22: mol_type = other DNA
tctatctccagagccaaaatca

SEQ ID NO: 4690 - DNA, 22 bp, synthetic construct
  misc_feature 1..22: note = chemically synthesized
  source 1..22: mol_type = other DNA
tatctccagagccaaaatcaag

SEQ ID NO: 4691 - DNA, 22 bp, synthetic construct
  misc_feature 1..22: note = chemically synthesized
  source 1..22: mol_type = other DNA
tctccagagccaaaatcaagat

SEQ ID NO: 4692 - DNA, 22 bp, synthetic construct
  misc_feature 1..22: note = chemically synthesized
  source 1..22: mol_type = other DNA
cagagccaaaatcaagatttgc

SEQ ID NO: 4693 - DNA, 22 bp, synthetic construct
  misc_feature 1..22: note = chemically synthesized
  source 1..22: mol_type = other DNA
gctatgttagacgatgtaaaaa

SEQ ID NO: 4694 - DNA, 22 bp, synthetic construct
  misc_feature 1..22: note = chemically synthesized
  source 1..22: mol_type = other DNA
ctatgttagacgatgtaaaaat

SEQ ID NO: 4695 - DNA, 22 bp, synthetic construct
  misc_feature 1..22: note = chemically synthesized
  source 1..22: mol_type = other DNA
tgttagacgatgtaaaaatttt

SEQ ID NO: 4696 - DNA, 22 bp, synthetic construct
  misc_feature 1..22: note = chemically synthesized
  source 1..22: mol_type = other DNA
gacgatgtaaaaattttagcca

SEQ ID NO: 4697 - DNA, 22 bp, synthetic construct
  misc_feature 1..22: note = chemically synthesized
  source 1..22: mol_type = other DNA
tagccaatggcctccttcagtt

SEQ ID NO: 4698 - DNA, 22 bp, synthetic construct
  misc_feature 1..22: note = chemically synthesized
  source 1..22: mol_type = other DNA
agccaatggcctccttcagttg

SEQ ID NO: 4699 - DNA, 22 bp, synthetic construct
  misc_feature 1..22: note = chemically synthesized
  source 1..22: mol_type = other DNA
gccaatggcctccttcagttgg

SEQ ID NO: 4700 - DNA, 22 bp, synthetic construct
  misc_feature 1..22: note = chemically synthesized
  source 1..22: mol_type = other DNA
cttcagttgggacatggtctta

SEQ ID NO: 4701 - DNA, 22 bp, synthetic construct
  misc_feature 1..22: note = chemically synthesized
  source 1..22: mol_type = other DNA
cagttgggacatggtcttaaag

SEQ ID NO: 4702 - DNA, 22 bp, synthetic construct
  misc_feature 1..22: note = chemically synthesized
  source 1..22: mol_type = other DNA
agttgggacatggtcttaaaga

SEQ ID NO: 4703 - DNA, 22 bp, synthetic construct
  misc_feature 1..22: note = chemically synthesized
  source 1..22: mol_type = other DNA
ggacatggtcttaaagactttg

SEQ ID NO: 4704 - DNA, 22 bp, synthetic construct
  misc_feature 1..22: note = chemically synthesized
  source 1..22: mol_type = other DNA
aaagactttgtccataagacga

SEQ ID NO: 4705 - DNA, 22 bp, synthetic construct
  misc_feature 1..22: note = chemically synthesized
  source 1..22: mol_type = other DNA
aagactttgtccataagacgaa

SEQ ID NO: 4706 - DNA, 22 bp, synthetic construct
  misc_feature 1..22: note = chemically synthesized
  source 1..22: mol_type = other DNA
tgtccataagacgaagggccaa

SEQ ID NO: 4707 - DNA, 22 bp, synthetic construct
  misc_feature 1..22: note = chemically synthesized
  source 1..22: mol_type = other DNA
gtccataagacgaagggccaaa

SEQ ID NO: 4708 - DNA, 22 bp, synthetic construct
  misc_feature 1..22: note = chemically synthesized
  source 1..22: mol_type = other DNA
tccataagacgaagggccaaat

SEQ ID NO: 4709 - DNA, 22 bp, synthetic construct
  misc_feature 1..22: note = chemically synthesized
  source 1..22: mol_type = other DNA
atgacatatttcaaaaactcaa

SEQ ID NO: 4710 - DNA, 22 bp, synthetic construct
  misc_feature 1..22: note = chemically synthesized
  source 1..22: mol_type = other DNA
caaaaactcaacatatttgatc

SEQ ID NO: 4711 - DNA, 22 bp, synthetic construct
  misc_feature 1..22: note = chemically synthesized
  source 1..22: mol_type = other DNA
aaaaactcaacatatttgatca

SEQ ID NO: 4712 - DNA, 22 bp, synthetic construct
  misc_feature 1..22: note = chemically synthesized
  source 1..22: mol_type = other DNA
aacatatttgatcagtcttttt

SEQ ID NO: 4713 - DNA, 22 bp, synthetic construct
  misc_feature 1..22: note = chemically synthesized
  source 1..22: mol_type = other DNA
gatcagtctttttatgatctat

SEQ ID NO: 4714 - DNA, 22 bp, synthetic construct
  misc_feature 1..22: note = chemically synthesized
  source 1..22: mol_type = other DNA
atcagtctttttatgatctatc

SEQ ID NO: 4715 - DNA, 22 bp, synthetic construct
  misc_feature 1..22: note = chemically synthesized
  source 1..22: mol_type = other DNA
tttatgatctatcgctgcaaac

SEQ ID NO: 4716 - DNA, 22 bp, synthetic construct
  misc_feature 1..22: note = chemically synthesized
  source 1..22: mol_type = other DNA
ttatgatctatcgctgcaaacc

SEQ ID NO: 4717 - DNA, 22 bp, synthetic construct
  misc_feature 1..22: note = chemically synthesized
  source 1..22: mol_type = other DNA
tatgatctatcgctgcaaacca

SEQ ID NO: 4718 - DNA, 22 bp, synthetic construct
  misc_feature 1..22: note = chemically synthesized
  source 1..22: mol_type = other DNA
atgatctatcgctgcaaaccag

SEQ ID NO: 4719 - DNA, 22 bp, synthetic construct
  misc_feature 1..22: note = chemically synthesized
  source 1..22: mol_type = other DNA
tgatctatcgctgcaaaccagt

SEQ ID NO: 4720 - DNA, 22 bp, synthetic construct
  misc_feature 1..22: note = chemically synthesized
  source 1..22: mol_type = other DNA
tcgctgcaaaccagtgaaatca

SEQ ID NO: 4721 - DNA, 22 bp, synthetic construct
  misc_feature 1..22: note = chemically synthesized
  source 1..22: mol_type = other DNA
caaaccagtgaaatcaaagaag

SEQ ID NO: 4722 - DNA, 22 bp, synthetic construct
  misc_feature 1..22: note = chemically synthesized
  source 1..22: mol_type = other DNA
agaagaactacatataaactac

SEQ ID NO: 4723 - DNA, 22 bp, synthetic construct
  misc_feature 1..22: note = chemically synthesized
  source 1..22: mol_type = other DNA
catataaactacaagtcaaaaa

SEQ ID NO: 4724 - DNA, 22 bp, synthetic construct
  misc_feature 1..22: note = chemically synthesized
  source 1..22: mol_type = other DNA
caagtcaaaaatgaagaggtaa

SEQ ID NO: 4725 - DNA, 22 bp, synthetic construct
  misc_feature 1..22: note = chemically synthesized
  source 1..22: mol_type = other DNA
gaactcaactcaaaacttgaaa

SEQ ID NO: 4726 - DNA, 22 bp, synthetic construct
  misc_feature 1..22: note = chemically synthesized
  source 1..22: mol_type = other DNA
aactcaactcaaaacttgaaag

SEQ ID NO: 4727 - DNA, 22 bp, synthetic construct
  misc_feature 1..22: note = chemically synthesized
  source 1..22: mol_type = other DNA
aactcaaaacttgaaagcctcc

SEQ ID NO: 4728 - DNA, 22 bp, synthetic construct
  misc_feature 1..22: note = chemically synthesized
  source 1..22: mol_type = other DNA
aaaacttgaaagcctcctagaa

SEQ ID NO: 4729 - DNA, 22 bp, synthetic construct
  misc_feature 1..22: note = chemically synthesized
  source 1..22: mol_type = other DNA
gaaagcctcctagaagaaaaaa

SEQ ID NO: 4730 - DNA, 22 bp, synthetic construct
  misc_feature 1..22: note = chemically synthesized
  source 1..22: mol_type = other DNA
aaagcctcctagaagaaaaaat

SEQ ID NO: 4731 - DNA, 22 bp, synthetic construct
  misc_feature 1..22: note = chemically synthesized
  source 1..22: mol_type = other DNA
ctagaagaaaaaattctacttc

SEQ ID NO: 4732 - DNA, 22 bp, synthetic construct
  misc_feature 1..22: note = chemically synthesized
  source 1..22: mol_type = other DNA
gaagaaaaaattctacttcaac

SEQ ID NO: 4733 - DNA, 22 bp, synthetic construct
  misc_feature 1..22: note = chemically synthesized
  source 1..22: mol_type = other DNA
tacttcaacaaaaagtgaaata

SEQ ID NO: 4734 - DNA, 22 bp, synthetic construct
  misc_feature 1..22: note = chemically synthesized
  source 1..22: mol_type = other DNA
cttcaacaaaaagtgaaatatt

SEQ ID NO: 4735 - DNA, 22 bp, synthetic construct
  misc_feature 1..22: note = chemically synthesized
  source 1..22: mol_type = other DNA
caacaaaaagtgaaatatttag

SEQ ID NO: 4736 - DNA, 22 bp, synthetic construct
  misc_feature 1..22: note = chemically synthesized
  source 1..22: mol_type = other DNA
aacaaaaagtgaaatatttaga

SEQ ID NO: 4737 - DNA, 22 bp, synthetic construct
  misc_feature 1..22: note = chemically synthesized
  source 1..22: mol_type = other DNA
agaagagcaactaactaactta

SEQ ID NO: 4738 - DNA, 22 bp, synthetic construct
  misc_feature 1..22: note = chemically synthesized
  source 1..22: mol_type = other DNA
gaagagcaactaactaacttaa

SEQ ID NO: 4739 - DNA, 22 bp, synthetic construct
  misc_feature 1..22: note = chemically synthesized
  source 1..22: mol_type = other DNA
actaacttaattcaaaatcaac

SEQ ID NO: 4740 - DNA, 22 bp, synthetic construct
  misc_feature 1..22: note = chemically synthesized
  source 1..22: mol_type = other DNA
acttaattcaaaatcaacctga

SEQ ID NO: 4741 - DNA, 22 bp, synthetic construct
  misc_feature 1..22: note = chemically synthesized
  source 1..22: mol_type = other DNA
aattcaaaatcaacctgaaact

SEQ ID NO: 4742 - DNA, 22 bp, synthetic construct
  misc_feature 1..22: note = chemically synthesized
  source 1..22: mol_type = other DNA
attcaaaatcaacctgaaactc

SEQ ID NO: 4743 - DNA, 22 bp, synthetic construct
  misc_feature 1..22: note = chemically synthesized
  source 1..22: mol_type = other DNA
aaaatcaacctgaaactccaga

SEQ ID NO: 4744 - DNA, 22 bp, synthetic construct
  misc_feature 1..22: note = chemically synthesized
  source 1..22: mol_type = other DNA
aaactccagaacacccagaagt

SEQ ID NO: 4745 - DNA, 22 bp, synthetic construct
  misc_feature 1..22: note = chemically synthesized
  source 1..22: mol_type = other DNA
cagaacacccagaagtaacttc

SEQ ID NO: 4746 - DNA, 22 bp, synthetic construct
  misc_feature 1..22: note = chemically synthesized
  source 1..22: mol_type = other DNA
cacttaaagtaagtagaaaata

SEQ ID NO: 4747 - DNA, 22 bp, synthetic construct
  misc_feature 1..22: note = chemically synthesized
  source 1..22: mol_type = other DNA
acttaaagtaagtagaaaataa

SEQ ID NO: 4748 - DNA, 22 bp, synthetic construct
  misc_feature 1..22: note = chemically synthesized
  source 1..22: mol_type = other DNA
aaagtaagtagaaaataaagag

SEQ ID NO: 4749 - DNA, 22 bp, synthetic construct
  misc_feature 1..22: note = chemically synthesized
  source 1..22: mol_type = other DNA
aagtaagtagaaaataaagagg

SEQ ID NO: 4750 - DNA, 22 bp, synthetic construct
  misc_feature 1..22: note = chemically synthesized
  source 1..22: mol_type = other DNA
atgtttatgttttcaatgtgga

SEQ ID NO: 4751 - DNA, 22 bp, synthetic construct
  misc_feature 1..22: note = chemically synthesized
  source 1..22: mol_type = other DNA
atgttttcaatgtggatctttt

SEQ ID NO: 4752 - DNA, 22 bp, synthetic construct
  misc_feature 1..22: note = chemically synthesized
  source 1..22: mol_type = other DNA
tgttttcaatgtggatctttta

SEQ ID NO: 4753 - DNA, 22 bp, synthetic construct
  misc_feature 1..22: note = chemically synthesized
  source 1..22: mol_type = other DNA
tcaatgtggatcttttaaaaaa

SEQ ID NO: 4754 - DNA, 22 bp, synthetic construct
  misc_feature 1..22: note = chemically synthesized
  source 1..22: mol_type = other DNA
caatgtggatcttttaaaaaaa

SEQ ID NO: 4755 - DNA, 22 bp, synthetic construct
  misc_feature 1..22: note = chemically synthesized
  source 1..22: mol_type = other DNA
aatgtggatcttttaaaaaaaa

SEQ ID NO: 4756 - DNA, 22 bp, synthetic construct
  misc_feature 1..22: note = chemically synthesized
  source 1..22: mol_type = other DNA
ttaaaaaaaatatttctaaggc

SEQ ID NO: 4757 - DNA, 22 bp, synthetic construct
  misc_feature 1..22: note = chemically synthesized
  source 1..22: mol_type = other DNA
taaaaaaaatatttctaaggca

SEQ ID NO: 4758 - DNA, 22 bp, synthetic construct
  misc_feature 1..22: note = chemically synthesized
  source 1..22: mol_type = other DNA
aaaaaaaatatttctaaggcat

SEQ ID NO: 4759 - DNA, 22 bp, synthetic construct
  misc_feature 1..22: note = chemically synthesized
  source 1..22: mol_type = other DNA
aaaaaaatatttctaaggcatg

SEQ ID NO: 4760 - DNA, 22 bp, synthetic construct
  misc_feature 1..22: note = chemically synthesized
  source 1..22: mol_type = other DNA
ctaaggcatgccatttgaaata

SEQ ID NO: 4761 - DNA, 22 bp, synthetic construct
  misc_feature 1..22: note = chemically synthesized
  source 1..22: mol_type = other DNA
taaggcatgccatttgaaatac

SEQ ID NO: 4762 - DNA, 22 bp, synthetic construct
  misc_feature 1..22: note = chemically synthesized
  source 1..22: mol_type = other DNA
aggcatgccatttgaaatactt

SEQ ID NO: 4763 - DNA, 22 bp, synthetic construct
  misc_feature 1..22: note = chemically synthesized
  source 1..22: mol_type = other DNA
gaaatactttgttgcattgttg

SEQ ID NO: 4764 - DNA, 22 bp, synthetic construct
  misc_feature 1..22: note = chemically synthesized
  source 1..22: mol_type = other DNA
aaatactttgttgcattgttga

SEQ ID NO: 4765 - DNA, 22 bp, synthetic construct
  misc_feature 1..22: note = chemically synthesized
  source 1..22: mol_type = other DNA
tgttgcattgttgaaatacttt

SEQ ID NO: 4766 - DNA, 22 bp, synthetic construct
  misc_feature 1..22: note = chemically synthesized
  source 1..22: mol_type = other DNA
gttgcattgttgaaatactttt

SEQ ID NO: 4767 - DNA, 22 bp, synthetic construct
  misc_feature 1..22: note = chemically synthesized
  source 1..22: mol_type = other DNA
ttgcattgttgaaatacttttt

SEQ ID NO: 4768 - DNA, 22 bp, synthetic construct
  misc_feature 1..22: note = chemically synthesized
  source 1..22: mol_type = other DNA
cattgttgaaatactttttttt

SEQ ID NO: 4769 - DNA, 22 bp, synthetic construct
  misc_feature 1..22: note = chemically synthesized
  source 1..22: mol_type = other DNA
ttgaaatacttttttttccaag

SEQ ID NO: 4770 - DNA, 22 bp, synthetic construct
  misc_feature 1..22: note = chemically synthesized
  source 1..22: mol_type = other DNA
aaatacttttttttccaagaaa

SEQ ID NO: 4771 - DNA, 22 bp, synthetic construct
  misc_feature 1..22: note = chemically synthesized
  source 1..22: mol_type = other DNA
ttttttccaagaaaaataatct

SEQ ID NO: 4772 - DNA, 22 bp, synthetic construct
  misc_feature 1..22: note = chemically synthesized
  source 1..22: mol_type = other DNA
tttttccaagaaaaataatctc

SEQ ID NO: 4773 - DNA, 22 bp, synthetic construct
  misc_feature 1..22: note = chemically synthesized
  source 1..22: mol_type = other DNA
ttttccaagaaaaataatctcc

SEQ ID NO: 4774 - DNA, 22 bp, synthetic construct
  misc_feature 1..22: note = chemically synthesized
  source 1..22: mol_type = other DNA
tttccaagaaaaataatctcca

SEQ ID NO: 4775 - DNA, 22 bp, synthetic construct
  misc_feature 1..22: note = chemically synthesized
  source 1..22: mol_type = other DNA
ttccaagaaaaataatctccag

SEQ ID NO: 4776 - DNA, 22 bp, synthetic construct
  misc_feature 1..22: note = chemically synthesized
  source 1..22: mol_type = other DNA
tccaagaaaaataatctccaga

SEQ ID NO: 4777 - DNA, 22 bp, synthetic construct
  misc_feature 1..22: note = chemically synthesized
  source 1..22: mol_type = other DNA
ccaagaaaaataatctccagaa

SEQ ID NO: 4778 - DNA, 22 bp, synthetic construct
  misc_feature 1..22: note = chemically synthesized
  source 1..22: mol_type = other DNA
caagaaaaataatctccagaaa

SEQ ID NO: 4779 - DNA, 22 bp, synthetic construct
  misc_feature 1..22: note = chemically synthesized
  source 1..22: mol_type = other DNA
cagaaaataaaatttcctatta

SEQ ID NO: 4780 - DNA, 22 bp, synthetic construct
  misc_feature 1..22: note = chemically synthesized
  source 1..22: mol_type = other DNA
cctattataatttcaagttagt

SEQ ID NO: 4781 - DNA, 22 bp, synthetic construct
  misc_feature 1..22: note = chemically synthesized
  source 1..22: mol_type = other DNA
ctattataatttcaagttagtt

SEQ ID NO: 4782 - DNA, 22 bp, synthetic construct
  misc_feature 1..22: note = chemically synthesized
  source 1..22: mol_type = other DNA
ttataatttcaagttagttttt

SEQ ID NO: 4783 - DNA, 22 bp, synthetic construct
  misc_feature 1..22: note = chemically synthesized
  source 1..22: mol_type = other DNA
taatttcaagttagttttttgt

SEQ ID NO: 4784 - DNA, 22 bp, synthetic construct
  misc_feature 1..22: note = chemically synthesized
  source 1..22: mol_type = other DNA
caagttagttttttgtttccct

SEQ ID NO: 4785 - DNA, 22 bp, synthetic construct
  misc_feature 1..22: note = chemically synthesized
  source 1..22: mol_type = other DNA
aagttagttttttgtttcccta

SEQ ID NO: 4786 - DNA, 22 bp, synthetic construct
  misc_feature 1..22: note = chemically synthesized
  source 1..22: mol_type = other DNA
gttttttgtttccctaatgtta

SEQ ID NO: 4787 - DNA, 22 bp, synthetic construct
  misc_feature 1..22: note = chemically synthesized
  source 1..22: mol_type = other DNA
tttgtttccctaatgttatata

SEQ ID NO: 4788 - DNA, 22 bp, synthetic construct
  misc_feature 1..22: note = chemically synthesized
  source 1..22: mol_type = other DNA
ttgtttccctaatgttatatat

SEQ ID NO: 4789 - DNA, 22 bp, synthetic construct
  misc_feature 1..22: note = chemically synthesized
  source 1..22: mol_type = other DNA
tgtttccctaatgttatatatg

SEQ ID NO: 4790 - DNA, 22 bp, synthetic construct
  misc_feature 1..22: note = chemically synthesized
  source 1..22: mol_type = other DNA
gtttccctaatgttatatatga

SEQ ID NO: 4791 - DNA, 22 bp, synthetic construct
  misc_feature 1..22: note = chemically synthesized
  source 1..22: mol_type = other DNA
tttccctaatgttatatatgaa

SEQ ID NO: 4792 - DNA, 22 bp, synthetic construct
  misc_feature 1..22: note = chemically synthesized
  source 1..22: mol_type = other DNA
ccctaatgttatatatgaaaac

SEQ ID NO: 4793 - DNA, 22 bp, synthetic construct
  misc_feature 1..22: note = chemically synthesized
  source 1..22: mol_type = other DNA
cctaatgttatatatgaaaaca

SEQ ID NO: 4794 - DNA, 22 bp, synthetic construct
  misc_feature 1..22: note = chemically synthesized
  source 1..22: mol_type = other DNA
atgttatatatgaaaacactga

SEQ ID NO: 4795 - DNA, 22 bp, synthetic construct
  misc_feature 1..22: note = chemically synthesized
  source 1..22: mol_type = other DNA
tatatgaaaacactgaaaattt

SEQ ID NO: 4796 - DNA, 22 bp, synthetic construct
  misc_feature 1..22: note = chemically synthesized
  source 1..22: mol_type = other DNA
aaaatttgcattttatatgaaa

SEQ ID NO: 4797 - DNA, 22 bp, synthetic construct
  misc_feature 1..22: note = chemically synthesized
  source 1..22: mol_type = other DNA
gcattttatatgaaaattacaa

SEQ ID NO: 4798 - DNA, 22 bp, synthetic construct
  misc_feature 1..22: note = chemically synthesized
  source 1..22: mol_type = other DNA
cattttatatgaaaattacaaa

SEQ ID NO: 4799 - DNA, 22 bp, synthetic construct
  misc_feature 1..22: note = chemically synthesized
  source 1..22: mol_type = other DNA
tatatgaaaattacaaatcggt

SEQ ID NO: 4800 - DNA, 22 bp, synthetic construct
  misc_feature 1..22: note = chemically synthesized
  source 1..22: mol_type = other DNA
atatgaaaattacaaatcggtt

SEQ ID NO: 4801 - DNA, 22 bp, synthetic construct
  misc_feature 1..22: note = chemically synthesized
  source 1..22: mol_type = other DNA
tatgaaaattacaaatcggtta

SEQ ID NO: 4802 - DNA, 22 bp, synthetic construct
  misc_feature 1..22: note = chemically synthesized
  source 1..22: mol_type = other DNA
caaatcggttaaattatacaat

SEQ ID NO: 4803 - DNA, 22 bp, synthetic construct
  misc_feature 1..22: note = chemically synthesized
  source 1..22: mol_type = other DNA
aattatacaatctagaacacta

SEQ ID NO: 4804 - DNA, 22 bp, synthetic construct
  misc_feature 1..22: note = chemically synthesized
  source 1..22: mol_type = other DNA
tacaatctagaacactatgtca

SEQ ID NO: 4805 - DNA, 22 bp, synthetic construct
  misc_feature 1..22: note = chemically synthesized
  source 1..22: mol_type = other DNA
gaacactatgtcattacactat

SEQ ID NO: 4806 - DNA, 22 bp, synthetic construct
  misc_feature 1..22: note = chemically synthesized
  source 1..22: mol_type = other DNA
tgtcattacactattgtaaatt

SEQ ID NO: 4807 - DNA, 22 bp, synthetic construct
  misc_feature 1..22: note = chemically synthesized
  source 1..22: mol_type = other DNA
cactattgtaaattactgaagg

SEQ ID NO: 4808 - DNA, 22 bp, synthetic construct
  misc_feature 1..22: note = chemically synthesized
  source 1..22: mol_type = other DNA
ttgtaaattactgaaggtaagt

SEQ ID NO: 4809 - DNA, 22 bp, synthetic construct
  misc_feature 1..22: note = chemically synthesized
  source 1..22: mol_type = other DNA
taaattactgaaggtaagtaaa

SEQ ID NO: 4810 - DNA, 22 bp, synthetic construct
  misc_feature 1..22: note = chemically synthesized
  source 1..22: mol_type = other DNA
ctgaaggtaagtaaaaagttaa

SEQ ID NO: 4811 - DNA, 22 bp, synthetic construct
  misc_feature 1..22: note = chemically synthesized
  source 1..22: mol_type = other DNA
aaggtaagtaaaaagttaaaaa

SEQ ID NO: 4812 - DNA, 22 bp, synthetic construct
  misc_feature 1..22: note = chemically synthesized
  source 1..22: mol_type = other DNA
aaaaaaatttaaaactattctc

SEQ ID NO: 4813 - DNA, 22 bp, synthetic construct
  misc_feature 1..22: note = chemically synthesized
  source 1..22: mol_type = other DNA
aaaactattctccagtgtttaa

SEQ ID NO: 4814 - DNA, 22 bp, synthetic construct
  misc_feature 1..22: note = chemically synthesized
  source 1..22: mol_type = other DNA
aaactattctccagtgtttaaa

SEQ ID NO: 4815 - DNA, 22 bp, synthetic construct
  misc_feature 1..22: note = chemically synthesized
  source 1..22: mol_type = other DNA
ttctccagtgtttaaaacagat

SEQ ID NO: 4816 - DNA, 22 bp, synthetic construct
  misc_feature 1..22: note = chemically synthesized
  source 1..22: mol_type = other DNA
tccagtgtttaaaacagattaa

SEQ ID NO: 4817 - DNA, 22 bp, synthetic construct
  misc_feature 1..22: note = chemically synthesized
  source 1..22: mol_type = other DNA
cagtgtttaaaacagattaaat

SEQ ID NO: 4818 - DNA, 22 bp, synthetic construct
  misc_feature 1..22: note = chemically synthesized
  source 1..22: mol_type = other DNA
aaaacagattaaataatacagt

SEQ ID NO: 4819 - DNA, 22 bp, synthetic construct
  misc_feature 1..22: note = chemically synthesized
  source 1..22: mol_type = other DNA
aaacagattaaataatacagta

SEQ ID NO: 4820 - DNA, 22 bp, synthetic construct
  misc_feature 1..22: note = chemically synthesized
  source 1..22: mol_type = other DNA
aataatacagtaaatggaaaag

SEQ ID NO: 4821 - DNA, 22 bp, synthetic construct
  misc_feature 1..22: note = chemically synthesized
  source 1..22: mol_type = other DNA
attcatatgaaaatatgctggg

SEQ ID NO: 4822 - DNA, 22 bp, synthetic construct
  misc_feature 1..22: note = chemically synthesized
  source 1..22: mol_type = other DNA
ttcatatgaaaatatgctgggc

SEQ ID NO: 4823 - DNA, 22 bp, synthetic construct
  misc_feature 1..22: note = chemically synthesized
  source 1..22: mol_type = other DNA
atatgaaaatatgctgggcttt

SEQ ID NO: 4824 - DNA, 22 bp, synthetic construct
  misc_feature 1..22: note = chemically synthesized
  source 1..22: mol_type = other DNA
ggctttttcttttaattgaagt

SEQ ID NO: 4825 - DNA, 22 bp, synthetic construct
  misc_feature 1..22: note = chemically synthesized
  source 1..22: mol_type = other DNA
tttcttttaattgaagttcaga

SEQ ID NO: 4826 - DNA, 22 bp, synthetic construct
  misc_feature 1..22: note = chemically synthesized
  source 1..22: mol_type = other DNA
ttcttttaattgaagttcagaa

SEQ ID NO: 4827 - DNA, 22 bp, synthetic construct
  misc_feature 1..22: note = chemically synthesized
  source 1..22: mol_type = other DNA
tcttttaattgaagttcagaaa

SEQ ID NO: 4828 - DNA, 22 bp, synthetic construct
  misc_feature 1..22: note = chemically synthesized
  source 1..22: mol_type = other DNA
cttttaattgaagttcagaaaa

SEQ ID NO: 4829 - DNA, 22 bp, synthetic construct
  misc_feature 1..22: note = chemically synthesized
  source 1..22: mol_type = other DNA
ttttaattgaagttcagaaaat

SEQ ID NO: 4830 - DNA, 22 bp, synthetic construct
  misc_feature 1..22: note = chemically synthesized
  source 1..22: mol_type = other DNA
ttaattgaagttcagaaaatca

SEQ ID NO: 4831 - DNA, 22 bp, synthetic construct
  misc_feature 1..22: note = chemically synthesized
  source 1..22: mol_type = other DNA
taattgaagttcagaaaatcaa

SEQ ID NO: 4832 - DNA, 22 bp, synthetic construct
  misc_feature 1..22: note = chemically synthesized
  source 1..22: mol_type = other DNA
aattgaagttcagaaaatcaaa

SEQ ID NO: 4833 - DNA, 22 bp, synthetic construct
  misc_feature 1..22: note = chemically synthesized
  source 1..22: mol_type = other DNA
attgaagttcagaaaatcaaat

SEQ ID NO: 4834 - DNA, 22 bp, synthetic construct
  misc_feature 1..22: note = chemically synthesized
  source 1..22: mol_type = other DNA
aagttcagaaaatcaaatttta

SEQ ID NO: 4835 - DNA, 22 bp, synthetic construct
  misc_feature 1..22: note = chemically synthesized
  source 1..22: mol_type = other DNA
agaaaatcaaattttagagata

SEQ ID NO: 4836 - DNA, 22 bp, synthetic construct
  misc_feature 1..22: note = chemically synthesized
  source 1..22: mol_type = other DNA
tagagatagtacaatttaaata

SEQ ID NO: 4837 - DNA, 22 bp, synthetic construct
  misc_feature 1..22: note = chemically synthesized
  source 1..22: mol_type = other DNA
agagatagtacaatttaaataa

SEQ ID NO: 4838 - DNA, 22 bp, synthetic construct
  misc_feature 1..22: note = chemically synthesized
  source 1..22: mol_type = other DNA
gagatagtacaatttaaataaa

SEQ ID NO: 4839 - DNA, 22 bp, synthetic construct
  misc_feature 1..22: note = chemically synthesized
  source 1..22: mol_type = other DNA
aaataaaatgttaaggacaaaa

SEQ ID NO: 4840 - DNA, 22 bp, synthetic construct
  misc_feature 1..22: note = chemically synthesized
  source 1..22: mol_type = other DNA
aataaaatgttaaggacaaaaa

SEQ ID NO: 4841 - DNA, 22 bp, synthetic construct
  misc_feature 1..22: note = chemically synthesized
  source 1..22: mol_type = other DNA
aggacaaaaatatgtgctattt

SEQ ID NO: 4842 - DNA, 22 bp, synthetic construct
  misc_feature 1..22: note = chemically synthesized
  source 1..22: mol_type = other DNA
tttgaaagaagcatacaagggg

SEQ ID NO: 4843 - DNA, 22 bp, synthetic construct
  misc_feature 1..22: note = chemically synthesized
  source 1..22: mol_type = other DNA
gaaagaagcatacaaggggaag

SEQ ID NO: 4844 - DNA, 22 bp, synthetic construct
  misc_feature 1..22: note = chemically synthesized
  source 1..22: mol_type = other DNA
aaagaagcatacaaggggaagg

SEQ ID NO: 4845 - DNA, 22 bp, synthetic construct
  misc_feature 1..22: note = chemically synthesized
  source 1..22: mol_type = other DNA
ccaatattcatttttcaaatcc

SEQ ID NO: 4846 - DNA, 22 bp, synthetic construct
  misc_feature 1..22: note = chemically synthesized
  source 1..22: mol_type = other DNA
atttttcaaatccattattagt

SEQ ID NO: 4847 - DNA, 22 bp, synthetic construct
  misc_feature 1..22: note = chemically synthesized
  source 1..22: mol_type = other DNA
ttcaaatccattattagtttaa

SEQ ID NO: 4848 - DNA, 22 bp, synthetic construct
  misc_feature 1..22: note = chemically synthesized
  source 1..22: mol_type = other DNA
tcaaatccattattagtttaaa

SEQ ID NO: 4849 - DNA, 22 bp, synthetic construct
  misc_feature 1..22: note = chemically synthesized
  source 1..22: mol_type = other DNA
caaatccattattagtttaaaa

SEQ ID NO: 4850 - DNA, 22 bp, synthetic construct
  misc_feature 1..22: note = chemically synthesized
  source 1..22: mol_type = other DNA
aaatccattattagtttaaaaa

SEQ ID NO: 4851 - DNA, 22 bp, synthetic construct
  misc_feature 1..22: note = chemically synthesized
  source 1..22: mol_type = other DNA
ttagtttaaaaatttagattat

SEQ ID NO: 4852 - DNA, 22 bp, synthetic construct
  misc_feature 1..22: note = chemically synthesized
  source 1..22: mol_type = other DNA
gtttaaaaatttagattatgat

SEQ ID NO: 4853 - DNA, 22 bp, synthetic construct
  misc_feature 1..22: note = chemically synthesized
  source 1..22: mol_type = other DNA
aaaaatttagattatgatagtg

SEQ ID NO: 4854 - DNA, 22 bp, synthetic construct
  misc_feature 1..22: note = chemically synthesized
  source 1..22: mol_type = other DNA
aaaatttagattatgatagtgt

SEQ ID NO: 4855 - DNA, 22 bp, synthetic construct
  misc_feature 1..22: note = chemically synthesized
  source 1..22: mol_type = other DNA
agattatgatagtgttacagga

SEQ ID NO: 4856 - DNA, 22 bp, synthetic construct
  misc_feature 1..22: note = chemically synthesized
  source 1..22: mol_type = other DNA
gattatgatagtgttacaggaa

SEQ ID NO: 4857 - DNA, 22 bp, synthetic construct
  misc_feature 1..22: note = chemically synthesized
  source 1..22: mol_type = other DNA
tgatagtgttacaggaaattaa

SEQ ID NO: 4858 - DNA, 22 bp, synthetic construct
  misc_feature 1..22: note = chemically synthesized
  source 1..22: mol_type = other DNA
caggaaattaatagaaaagaaa

SEQ ID NO: 4859 - DNA, 22 bp, synthetic construct
  misc_feature 1..22: note = chemically synthesized
  source 1..22: mol_type = other DNA
atagaaaagaaagaggaaagca

SEQ ID NO: 4860 - DNA, 22 bp, synthetic construct
  misc_feature 1..22: note = chemically synthesized
  source 1..22: mol_type = other DNA
ataaccaacctactctctatat

SEQ ID NO: 4861 - DNA, 22 bp, synthetic construct
  misc_feature 1..22: note = chemically synthesized
  source 1..22: mol_type = other DNA
taaccaacctactctctatatc

SEQ ID NO: 4862 - DNA, 22 bp, synthetic construct
  misc_feature 1..22: note = chemically synthesized
  source 1..22: mol_type = other DNA
ctctctatatccagacttttgt

SEQ ID NO: 4863 - DNA, 22 bp, synthetic construct
  misc_feature 1..22: note = chemically synthesized
  source 1..22: mol_type = other DNA
tctatatccagacttttgtaga

SEQ ID NO: 4864 - DNA, 22 bp, synthetic construct
  misc_feature 1..22: note = chemically synthesized
  source 1..22: mol_type = other DNA
tatatccagacttttgtagaaa

SEQ ID NO: 4865 - DNA, 22 bp, synthetic construct
  misc_feature 1..22: note = chemically synthesized
  source 1..22: mol_type = other DNA
tatccagacttttgtagaaaaa

SEQ ID NO: 4866 - DNA, 22 bp, synthetic construct
  misc_feature 1..22: note = chemically synthesized
  source 1..22: mol_type = other DNA
ttgtagaaaaacaagataatag

SEQ ID NO: 4867 - DNA, 22 bp, synthetic construct
  misc_feature 1..22: note = chemically synthesized
  source 1..22: mol_type = other DNA
tgtagaaaaacaagataatagc

SEQ ID NO: 4868 - DNA, 22 bp, synthetic construct
  misc_feature 1..22: note = chemically synthesized
  source 1..22: mol_type = other DNA
gtagaaaaacaagataatagca

SEQ ID NO: 4869 - DNA, 22 bp, synthetic construct
  misc_feature 1..22: note = chemically synthesized
  source 1..22: mol_type = other DNA
tagaaaaacaagataatagcat

SEQ ID NO: 4870 - DNA, 22 bp, synthetic construct
  misc_feature 1..22: note = chemically synthesized
  source 1..22: mol_type = other DNA
ctccagaccgtggaagaccaat

SEQ ID NO: 4871 - DNA, 22 bp, synthetic construct
  misc_feature 1..22: note = chemically synthesized
  source 1..22: mol_type = other DNA
tccagaccgtggaagaccaata

SEQ ID NO: 4872 - DNA, 22 bp, synthetic construct
  misc_feature 1..22: note = chemically synthesized
  source 1..22: mol_type = other DNA
cagaccgtggaagaccaatata

SEQ ID NO: 4873 - DNA, 22 bp, synthetic construct
  misc_feature 1..22: note = chemically synthesized
  source 1..22: mol_type = other DNA
aaccaacagcatagtcaaataa

SEQ ID NO: 4874 - DNA, 22 bp, synthetic construct
  misc_feature 1..22: note = chemically synthesized
  source 1..22: mol_type = other DNA
taatggtatgtcccatctttca

SEQ ID NO: 4875 - DNA, 22 bp, synthetic construct
  misc_feature 1..22: note = chemically synthesized
  source 1..22: mol_type = other DNA
aatggtatgtcccatctttcac

SEQ ID NO: 4876 - DNA, 22 bp, synthetic construct
  misc_feature 1..22: note = chemically synthesized
  source 1..22: mol_type = other DNA
atggtatgtcccatctttcaca

SEQ ID NO: 4877 - DNA, 22 bp, synthetic construct
  misc_feature 1..22: note = chemically synthesized
  source 1..22: mol_type = other DNA
tcacacaggtctgtaaaaacac

SEQ ID NO: 4878 - DNA, 22 bp, synthetic construct
  misc_feature 1..22: note = chemically synthesized
  source 1..22: mol_type = other DNA
cacacaggtctgtaaaaacact

SEQ ID NO: 4879 - DNA, 22 bp, synthetic construct
  misc_feature 1..22: note = chemically synthesized
  source 1..22: mol_type = other DNA
acacaggtctgtaaaaacactg

SEQ ID NO: 4880 - DNA, 22 bp, synthetic construct
  misc_feature 1..22: note = chemically synthesized
  source 1..22: mol_type = other DNA
taaaaacactgaatcctaaaat

SEQ ID NO: 4881 - DNA, 22 bp, synthetic construct
  misc_feature 1..22: note = chemically synthesized
  source 1..22: mol_type = other DNA
aatcctaaaattatttacaagc

SEQ ID NO: 4882 - DNA, 22 bp, synthetic construct
  misc_feature 1..22: note = chemically synthesized
  source 1..22: mol_type = other DNA
aaattatttacaagctttaact

SEQ ID NO: 4883 - DNA, 22 bp, synthetic construct
  misc_feature 1..22: note = chemically synthesized
  source 1..22: mol_type = other DNA
tttacaagctttaactggatca

SEQ ID NO: 4884 - DNA, 22 bp, synthetic construct
  misc_feature 1..22: note = chemically synthesized
  source 1..22: mol_type = other DNA
acaagctttaactggatcatga

SEQ ID NO: 4885 - DNA, 22 bp, synthetic construct
  misc_feature 1..22: note = chemically synthesized
  source 1..22: mol_type = other DNA
caagctttaactggatcatgag

SEQ ID NO: 4886 - DNA, 22 bp, synthetic construct
  misc_feature 1..22: note = chemically synthesized
  source 1..22: mol_type = other DNA
taactggatcatgagtaaaatt

SEQ ID NO: 4887 - DNA, 22 bp, synthetic construct
  misc_feature 1..22: note = chemically synthesized
  source 1..22: mol_type = other DNA
aactggatcatgagtaaaatta

SEQ ID NO: 4888 - DNA, 22 bp, synthetic construct
  misc_feature 1..22: note = chemically synthesized
  source 1..22: mol_type = other DNA
actggatcatgagtaaaattat

SEQ ID NO: 4889 - DNA, 22 bp, synthetic construct
  misc_feature 1..22: note = chemically synthesized
  source 1..22: mol_type = other DNA
gatcatgagtaaaattatcaca

SEQ ID NO: 4890 - DNA, 22 bp, synthetic construct
  misc_feature 1..22: note = chemically synthesized
  source 1..22: mol_type = other DNA
tcacatcagcataactgttaaa

SEQ ID NO: 4891 - DNA, 22 bp, synthetic construct
  misc_feature 1..22: note = chemically synthesized
  source 1..22: mol_type = other DNA
ttaaaattgcaggctctgaagc

SEQ ID NO: 4892 - DNA, 22 bp, synthetic construct
  misc_feature 1..22: note = chemically synthesized
  source 1..22: mol_type = other DNA
aaattgcaggctctgaagctaa

SEQ ID NO: 4893 - DNA, 22 bp, synthetic construct
  misc_feature 1..22: note = chemically synthesized
  source 1..22: mol_type = other DNA
caggctctgaagctaataaact

SEQ ID NO: 4894 - DNA, 22 bp, synthetic construct
  misc_feature 1..22: note = chemically synthesized
  source 1..22: mol_type = other DNA
tgaagctaataaactacctgca

SEQ ID NO: 4895 - DNA, 22 bp, synthetic construct
  misc_feature 1..22: note = chemically synthesized
  source 1..22: mol_type = other DNA
aagctaataaactacctgcatt

SEQ ID NO: 4896 - DNA, 22 bp, synthetic construct
  misc_feature 1..22: note = chemically synthesized
  source 1..22: mol_type = other DNA
ataaactacctgcatttaaacc

SEQ ID NO: 4897 - DNA, 22 bp, synthetic construct
  misc_feature 1..22: note = chemically synthesized
  source 1..22: mol_type = other DNA
cctgcatttaaaccatggctct

SEQ ID NO: 4898 - DNA, 22 bp, synthetic construct
  misc_feature 1..22: note = chemically synthesized
  source 1..22: mol_type = other DNA
catttaaaccatggctctaaaa

SEQ ID NO: 4899 - DNA, 22 bp, synthetic construct
  misc_feature 1..22: note = chemically synthesized
  source 1..22: mol_type = other DNA
aaaccatggctctaaaactttg

SEQ ID NO: 4900 - DNA, 22 bp, synthetic construct
  misc_feature 1..22: note = chemically synthesized
  source 1..22: mol_type = other DNA
aaccatggctctaaaactttgt

SEQ ID NO: 4901 - DNA, 22 bp, synthetic construct
  misc_feature 1..22: note = chemically synthesized
  source 1..22: mol_type = other DNA
taaaactttgtgtgaccttgaa

SEQ ID NO: 4902 - DNA, 22 bp, synthetic construct
  misc_feature 1..22: note = chemically synthesized
  source 1..22: mol_type = other DNA
aaactttgtgtgaccttgaata

SEQ ID NO: 4903 - DNA, 22 bp, synthetic construct
  misc_feature 1..22: note = chemically synthesized
  source 1..22: mol_type = other DNA
tgtgtgaccttgaataaattac

SEQ ID NO: 4904 - DNA, 22 bp, synthetic construct
  misc_feature 1..22: note = chemically synthesized
  source 1..22: mol_type = other DNA
gtgtgaccttgaataaattact

SEQ ID NO: 4905 - DNA, 22 bp, synthetic construct
  misc_feature 1..22: note = chemically synthesized
  source 1..22: mol_type = other DNA
tgtgaccttgaataaattactt

SEQ ID NO: 4906 - DNA, 22 bp, synthetic construct
  misc_feature 1..22: note = chemically synthesized
  source 1..22: mol_type = other DNA
gaataaattacttcaccccttt

SEQ ID NO: 4907 - DNA, 22 bp, synthetic construct
  misc_feature 1..22: note = chemically synthesized
  source 1..22: mol_type = other DNA
aataaattacttcaccccttta

SEQ ID NO: 4908 - DNA, 22 bp, synthetic construct
  misc_feature 1..22: note = chemically synthesized
  source 1..22: mol_type = other DNA
cttcacccctttatctctcagt

SEQ ID NO: 4909 - DNA, 22 bp, synthetic construct
  misc_feature 1..22: note = chemically synthesized
  source 1..22: mol_type = other DNA
cacccctttatctctcagtttc

SEQ ID NO: 4910 - DNA, 22 bp, synthetic construct
  misc_feature 1..22: note = chemically synthesized
  source 1..22: mol_type = other DNA
acccctttatctctcagtttcc

SEQ ID NO: 4911 - DNA, 22 bp, synthetic construct
  misc_feature 1..22: note = chemically synthesized
  source 1..22: mol_type = other DNA
tatctctcagtttcctcacata

SEQ ID NO: 4912 - DNA, 22 bp, synthetic construct
  misc_feature 1..22: note = chemically synthesized
  source 1..22: mol_type = other DNA
atctctcagtttcctcacatat

SEQ ID NO: 4913 - DNA, 22 bp, synthetic construct
  misc_feature 1..22: note = chemically synthesized
  source 1..22: mol_type = other DNA
tctctcagtttcctcacatata

SEQ ID NO: 4914 - DNA, 22 bp, synthetic construct
  misc_feature 1..22: note = chemically synthesized
  source 1..22: mol_type = other DNA
tcagtttcctcacatatactac

SEQ ID NO: 4915 - DNA, 22 bp, synthetic construct
  misc_feature 1..22: note = chemically synthesized
  source 1..22: mol_type = other DNA
agtttcctcacatatactacaa

SEQ ID NO: 4916 - DNA, 22 bp, synthetic construct
  misc_feature 1..22: note = chemically synthesized
  source 1..22: mol_type = other DNA
cctcacatatactacaaagata

SEQ ID NO: 4917 - DNA, 22 bp, synthetic construct
  misc_feature 1..22: note = chemically synthesized
  source 1..22: mol_type = other DNA
ctcacatatactacaaagataa

SEQ ID NO: 4918 - DNA, 22 bp, synthetic construct
  misc_feature 1..22: note = chemically synthesized
  source 1..22: mol_type = other DNA
acatatactacaaagataataa

SEQ ID NO: 4919 - DNA, 22 bp, synthetic construct
  misc_feature 1..22: note = chemically synthesized
  source 1..22: mol_type = other DNA
caaagataataacagaacttat

SEQ ID NO: 4920 - DNA, 22 bp, synthetic construct
  misc_feature 1..22: note = chemically synthesized
  source 1..22: mol_type = other DNA
ataggattattgtaagaaaaaa

SEQ ID NO: 4921 - DNA, 22 bp, synthetic construct
  misc_feature 1..22: note = chemically synthesized
  source 1..22: mol_type = other DNA
taggattattgtaagaaaaaaa

SEQ ID NO: 4922 - DNA, 22 bp, synthetic construct
  misc_feature 1..22: note = chemically synthesized
  source 1..22: mol_type = other DNA
ttgtaagaaaaaaaattaattc

SEQ ID NO: 4923 - DNA, 22 bp, synthetic construct
  misc_feature 1..22: note = chemically synthesized
  source 1..22: mol_type = other DNA
taagaaaaaaaattaattcata

SEQ ID NO: 4924 - DNA, 22 bp, synthetic construct
  misc_feature 1..22: note = chemically synthesized
  source 1..22: mol_type = other DNA
attcatagcagccaatgtcatc

SEQ ID NO: 4925 - DNA, 22 bp, synthetic construct
  misc_feature 1..22: note = chemically synthesized
  source 1..22: mol_type = other DNA
atagcagccaatgtcatcttac

SEQ ID NO: 4926 - DNA, 22 bp, synthetic construct
  misc_feature 1..22: note = chemically synthesized
  source 1..22: mol_type = other DNA
actaaaattcaaattagatcat

SEQ ID NO: 4927 - DNA, 22 bp, synthetic construct
  misc_feature 1..22: note = chemically synthesized
  source 1..22: mol_type = other DNA
ctaaaattcaaattagatcatg

SEQ ID NO: 4928 - DNA, 22 bp, synthetic construct
  misc_feature 1..22: note = chemically synthesized
  source 1..22: mol_type = other DNA
aaattcaaattagatcatgttt

SEQ ID NO: 4929 - DNA, 22 bp, synthetic construct
  misc_feature 1..22: note = chemically synthesized
  source 1..22: mol_type = other DNA
aaattagatcatgtttctcttt

SEQ ID NO: 4930 - DNA, 22 bp, synthetic construct
  misc_feature 1..22: note = chemically synthesized
  source 1..22: mol_type = other DNA
gatcatgtttctctttgctcaa

SEQ ID NO: 4931 - DNA, 22 bp, synthetic construct
  misc_feature 1..22: note = chemically synthesized
  source 1..22: mol_type = other DNA
ctctttgctcaaaaccacacaa

SEQ ID NO: 4932 - DNA, 22 bp, synthetic construct
  misc_feature 1..22: note = chemically synthesized
  source 1..22: mol_type = other DNA
tctttgctcaaaaccacacaat

SEQ ID NO: 4933 - DNA, 22 bp, synthetic construct
  misc_feature 1..22: note = chemically synthesized
  source 1..22: mol_type = other DNA
tttgctcaaaaccacacaatag

SEQ ID NO: 4934 - DNA, 22 bp, synthetic construct
  misc_feature 1..22: note = chemically synthesized
  source 1..22: mol_type = other DNA
tgctcaaaaccacacaatagct

SEQ ID NO: 4935 - DNA, 22 bp, synthetic construct
  misc_feature 1..22: note = chemically synthesized
  source 1..22: mol_type = other DNA
gctcaaaaccacacaatagctt

SEQ ID NO: 4936 - DNA, 22 bp, synthetic construct
  misc_feature 1..22: note = chemically synthesized
  source 1..22: mol_type = other DNA
ctcaaaaccacacaatagcttt

SEQ ID NO: 4937 - DNA, 22 bp, synthetic construct
  misc_feature 1..22: note = chemically synthesized
  source 1..22: mol_type = other DNA
aaaaccacacaatagctttcca

SEQ ID NO: 4938 - DNA, 22 bp, synthetic construct
  misc_feature 1..22: note = chemically synthesized
  source 1..22: mol_type = other DNA
tccatttcactcatattggctc

SEQ ID NO: 4939 - DNA, 22 bp, synthetic construct
  misc_feature 1..22: note = chemically synthesized
  source 1..22: mol_type = other DNA
ccatttcactcatattggctct

SEQ ID NO: 4940 - DNA, 22 bp, synthetic construct
  misc_feature 1..22: note = chemically synthesized
  source 1..22: mol_type = other DNA
catttcactcatattggctctt

SEQ ID NO: 4941 - DNA, 22 bp, synthetic construct
  misc_feature 1..22: note = chemically synthesized
  source 1..22: mol_type = other DNA
cactcatattggctctttagac

SEQ ID NO: 4942 - DNA, 22 bp, synthetic construct
  misc_feature 1..22: note = chemically synthesized
  source 1..22: mol_type = other DNA
actcatattggctctttagacc

SEQ ID NO: 4943 - DNA, 22 bp, synthetic construct
  misc_feature 1..22: note = chemically synthesized
  source 1..22: mol_type = other DNA
atattggctctttagaccaaga

SEQ ID NO: 4944 - DNA, 22 bp, synthetic construct
  misc_feature 1..22: note = chemically synthesized
  source 1..22: mol_type = other DNA
gctctttagaccaagattaccc

SEQ ID NO: 4945 - DNA, 22 bp, synthetic construct
  misc_feature 1..22: note = chemically synthesized
  source 1..22: mol_type = other DNA
ggtaatcttggtctaaagagcc

SEQ ID NO: 4946 - DNA, 22 bp, synthetic construct
  misc_feature 1..22: note = chemically synthesized
  source 1..22: mol_type = other DNA
ggtctaaagagccaatatgagt

SEQ ID NO: 4947 - DNA, 22 bp, synthetic construct
  misc_feature 1..22: note = chemically synthesized
  source 1..22: mol_type = other DNA
gtctaaagagccaatatgagtg

SEQ ID NO: 4948 - DNA, 22 bp, synthetic construct
  misc_feature 1..22: note = chemically synthesized
  source 1..22: mol_type = other DNA
aagagccaatatgagtgaaatg

SEQ ID NO: 4949 - DNA, 22 bp, synthetic construct
  misc_feature 1..22: note = chemically synthesized
  source 1..22: mol_type = other DNA
ttgtgtggttttgagcaaagag

SEQ ID NO: 4950 - DNA, 22 bp, synthetic construct
  misc_feature 1..22: note = chemically synthesized
  source 1..22: mol_type = other DNA
tgtggttttgagcaaagagaaa

SEQ ID NO: 4951 - DNA, 22 bp, synthetic construct
  misc_feature 1..22: note = chemically synthesized
  source 1..22: mol_type = other DNA
tgagcaaagagaaacatgatct

SEQ ID NO: 4952 - DNA, 22 bp, synthetic construct
  misc_feature 1..22: note = chemically synthesized
  source 1..22: mol_type = other DNA
gagcaaagagaaacatgatcta

SEQ ID NO: 4953 - DNA, 22 bp, synthetic construct
  misc_feature 1..22: note = chemically synthesized
  source 1..22: mol_type = other DNA
agcaaagagaaacatgatctaa

SEQ ID NO: 4954 - DNA, 22 bp, synthetic construct
  misc_feature 1..22: note = chemically synthesized
  source 1..22: mol_type = other DNA
atttgaattttagtaagatgac

SEQ ID NO: 4955 - DNA, 22 bp, synthetic construct
  misc_feature 1..22: note = chemically synthesized
  source 1..22: mol_type = other DNA
gaattttagtaagatgacattg

SEQ ID NO: 4956 - DNA, 22 bp, synthetic construct
  misc_feature 1..22: note = chemically synthesized
  source 1..22: mol_type = other DNA
aattttagtaagatgacattgg

SEQ ID NO: 4957 - DNA, 22 bp, synthetic construct
  misc_feature 1..22: note = chemically synthesized
  source 1..22: mol_type = other DNA
tagtaagatgacattggctgct

SEQ ID NO: 4958 - DNA, 22 bp, synthetic construct
  misc_feature 1..22: note = chemically synthesized
  source 1..22: mol_type = other DNA
agtaagatgacattggctgcta

SEQ ID NO: 4959 - DNA, 22 bp, synthetic construct
  misc_feature 1..22: note = chemically synthesized
  source 1..22: mol_type = other DNA
gtaagatgacattggctgctat

SEQ ID NO: 4960 - DNA, 22 bp, synthetic construct
  misc_feature 1..22: note = chemically synthesized
  source 1..22: mol_type = other DNA
gctgctatgaattaattttttt

SEQ ID NO: 4961 - DNA, 22 bp, synthetic construct
  misc_feature 1..22: note = chemically synthesized
  source 1..22: mol_type = other DNA
ctatgaattaattttttttctt

SEQ ID NO: 4962 - DNA, 22 bp, synthetic construct
  misc_feature 1..22: note = chemically synthesized
  source 1..22: mol_type = other DNA
tgaattaattttttttcttaca

SEQ ID NO: 4963 - DNA, 22 bp, synthetic construct
  misc_feature 1..22: note = chemically synthesized
  source 1..22: mol_type = other DNA
attttttttcttacaataatcc

SEQ ID NO: 4964 - DNA, 22 bp, synthetic construct
  misc_feature 1..22: note = chemically synthesized
  source 1..22: mol_type = other DNA
tttttcttacaataatcctata

SEQ ID NO: 4965 - DNA, 22 bp, synthetic construct
  misc_feature 1..22: note = chemically synthesized
  source 1..22: mol_type = other DNA
ttttcttacaataatcctataa

SEQ ID NO: 4966 - DNA, 22 bp, synthetic construct
  misc_feature 1..22: note = chemically synthesized
  source 1..22: mol_type = other DNA
tttcttacaataatcctataag

SEQ ID NO: 4967 - DNA, 22 bp, synthetic construct
  misc_feature 1..22: note = chemically synthesized
  source 1..22: mol_type = other DNA
ttcttacaataatcctataagt

SEQ ID NO: 4968 - DNA, 22 bp, synthetic construct
  misc_feature 1..22: note = chemically synthesized
  source 1..22: mol_type = other DNA
tcttacaataatcctataagtt

SEQ ID NO: 4969 - DNA, 22 bp, synthetic construct
  misc_feature 1..22: note = chemically synthesized
  source 1..22: mol_type = other DNA
cttacaataatcctataagttc

SEQ ID NO: 4970 - DNA, 22 bp, synthetic construct
  misc_feature 1..22: note = chemically synthesized
  source 1..22: mol_type = other DNA
ttacaataatcctataagttct

SEQ ID NO: 4971 - DNA, 22 bp, synthetic construct
  misc_feature 1..22: note = chemically synthesized
  source 1..22: mol_type = other DNA
acaataatcctataagttctgt

SEQ ID NO: 4972 - DNA, 22 bp, synthetic construct
  misc_feature 1..22: note = chemically synthesized
  source 1..22: mol_type = other DNA
caataatcctataagttctgtt

SEQ ID NO: 4973 - DNA, 22 bp, synthetic construct
  misc_feature 1..22: note = chemically synthesized
  source 1..22: mol_type = other DNA
taagttctgttattatctttgt

SEQ ID NO: 4974 - DNA, 22 bp, synthetic construct
  misc_feature 1..22: note = chemically synthesized
  source 1..22: mol_type = other DNA
tgttattatctttgtagtatat

SEQ ID NO: 4975 - DNA, 22 bp, synthetic construct
  misc_feature 1..22: note = chemically synthesized
  source 1..22: mol_type = other DNA
ttattatctttgtagtatatgt

SEQ ID NO: 4976 - DNA, 22 bp, synthetic construct
  misc_feature 1..22: note = chemically synthesized
  source 1..22: mol_type = other DNA
ttatctttgtagtatatgtgag

SEQ ID NO: 4977 - DNA, 22 bp, synthetic construct
  misc_feature 1..22: note = chemically synthesized
  source 1..22: mol_type = other DNA
tctttgtagtatatgtgaggaa

SEQ ID NO: 4978 - DNA, 22 bp, synthetic construct
  misc_feature 1..22: note = chemically synthesized
  source 1..22: mol_type = other DNA
tgtagtatatgtgaggaaactg

SEQ ID NO: 4979 - DNA, 22 bp, synthetic construct
  misc_feature 1..22: note = chemically synthesized
  source 1..22: mol_type = other DNA
gtagtatatgtgaggaaactga

SEQ ID NO: 4980 - DNA, 22 bp, synthetic construct
  misc_feature 1..22: note = chemically synthesized
  source 1..22: mol_type = other DNA
tagtatatgtgaggaaactgag

SEQ ID NO: 4981 - DNA, 22 bp, synthetic construct
  misc_feature 1..22: note = chemically synthesized
  source 1..22: mol_type = other DNA
agagataaaggggtgaagtaat

SEQ ID NO: 4982 - DNA, 22 bp, synthetic construct
  misc_feature 1..22: note = chemically synthesized
  source 1..22: mol_type = other DNA
attcaaggtcacacaaagtttt

SEQ ID NO: 4983 - DNA, 22 bp, synthetic construct
  misc_feature 1..22: note = chemically synthesized
  source 1..22: mol_type = other DNA
ttcaaggtcacacaaagtttta

SEQ ID NO: 4984 - DNA, 22 bp, synthetic construct
  misc_feature 1..22: note = chemically synthesized
  source 1..22: mol_type = other DNA
aaggtcacacaaagttttagag

SEQ ID NO: 4985 - DNA, 22 bp, synthetic construct
  misc_feature 1..22: note = chemically synthesized
  source 1..22: mol_type = other DNA
tagagccatggtttaaatgcag

SEQ ID NO: 4986 - DNA, 22 bp, synthetic construct
  misc_feature 1..22: note = chemically synthesized
  source 1..22: mol_type = other DNA
agagccatggtttaaatgcagg

SEQ ID NO: 4987 - DNA, 22 bp, synthetic construct
  misc_feature 1..22: note = chemically synthesized
  source 1..22: mol_type = other DNA
gagccatggtttaaatgcaggt

SEQ ID NO: 4988 - DNA, 22 bp, synthetic construct
  misc_feature 1..22: note = chemically synthesized
  source 1..22: mol_type = other DNA
aaatgcaggtagtttattagct

SEQ ID NO: 4989 - DNA, 22 bp, synthetic construct
  misc_feature 1..22: note = chemically synthesized
  source 1..22: mol_type = other DNA
aatgcaggtagtttattagctt

SEQ ID NO: 4990 - DNA, 22 bp, synthetic construct
  misc_feature 1..22: note = chemically synthesized
  source 1..22: mol_type = other DNA
attagcttcagagcctgcaatt

SEQ ID NO: 4991 - DNA, 22 bp, synthetic construct
  misc_feature 1..22: note = chemically synthesized
  source 1..22: mol_type = other DNA
ttagcttcagagcctgcaattt

SEQ ID NO: 4992 - DNA, 22 bp, synthetic construct
  misc_feature 1..22: note = chemically synthesized
  source 1..22: mol_type = other DNA
gcttcagagcctgcaattttaa

SEQ ID NO: 4993 - DNA, 22 bp, synthetic construct
  misc_feature 1..22: note = chemically synthesized
  source 1..22: mol_type = other DNA
cagagcctgcaattttaacagt

SEQ ID NO: 4994 - DNA, 22 bp, synthetic construct
  misc_feature 1..22: note = chemically synthesized
  source 1..22: mol_type = other DNA
agagcctgcaattttaacagtt

SEQ ID NO: 4995 - DNA, 22 bp, synthetic construct
  misc_feature 1..22: note = chemically synthesized
  source 1..22: mol_type = other DNA
caattttaacagttatgctgat

SEQ ID NO: 4996 - DNA, 22 bp, synthetic construct
  misc_feature 1..22: note = chemically synthesized
  source 1..22: mol_type = other DNA
taacagttatgctgatgtgata

SEQ ID NO: 4997 - DNA, 22 bp, synthetic construct
  misc_feature 1..22: note = chemically synthesized
  source 1..22: mol_type = other DNA
aacagttatgctgatgtgataa

SEQ ID NO: 4998 - DNA, 22 bp, synthetic construct
  misc_feature 1..22: note = chemically synthesized
  source 1..22: mol_type = other DNA
acagttatgctgatgtgataat

SEQ ID NO: 4999 - DNA, 22 bp, synthetic construct
  misc_feature 1..22: note = chemically synthesized
  source 1..22: mol_type = other DNA
tgctgatgtgataattttactc

SEQ ID NO: 5000 - DNA, 22 bp, synthetic construct
  misc_feature 1..22: note = chemically synthesized
  source 1..22: mol_type = other DNA
atgtgataattttactcatgat

SEQ ID NO: 5001 - DNA, 22 bp, synthetic construct
  misc_feature 1..22: note = chemically synthesized
  source 1..22: mol_type = other DNA
tactcatgatccagttaaagct

SEQ ID NO: 5002 - DNA, 22 bp, synthetic construct
  misc_feature 1..22: note = chemically synthesized
  source 1..22: mol_type = other DNA
actcatgatccagttaaagctt

SEQ ID NO: 5003 - DNA, 22 bp, synthetic construct
  misc_feature 1..22: note = chemically synthesized
  source 1..22: mol_type = other DNA
ctcatgatccagttaaagcttg

SEQ ID NO: 5004 - DNA, 22 bp, synthetic construct
  misc_feature 1..22: note = chemically synthesized
  source 1..22: mol_type = other DNA
atgatccagttaaagcttgtaa

SEQ ID NO: 5005 - DNA, 22 bp, synthetic construct
  misc_feature 1..22: note = chemically synthesized
  source 1..22: mol_type = other DNA
aagcttgtaaataattttagga

SEQ ID NO: 5006 - DNA, 22 bp, synthetic construct
  misc_feature 1..22: note = chemically synthesized
  source 1..22: mol_type = other DNA
gtaaataattttaggattcagt

SEQ ID NO: 5007 - DNA, 22 bp, synthetic construct
  misc_feature 1..22: note = chemically synthesized
  source 1..22: mol_type = other DNA
taaataattttaggattcagtg

SEQ ID NO: 5008 - DNA, 22 bp, synthetic construct
  misc_feature 1..22: note = chemically synthesized
  source 1..22: mol_type = other DNA
taggattcagtgtttttacaga

SEQ ID NO: 5009 - DNA, 22 bp, synthetic construct
  misc_feature 1..22: note = chemically synthesized
  source 1..22: mol_type = other DNA
aggattcagtgtttttacagac

SEQ ID NO: 5010 - DNA, 22 bp, synthetic construct
  misc_feature 1..22: note = chemically synthesized
  source 1..22: mol_type = other DNA
ggattcagtgtttttacagacc

SEQ ID NO: 5011 - DNA, 22 bp, synthetic construct
  misc_feature 1..22: note = chemically synthesized
  source 1..22: mol_type = other DNA
agtgtttttacagacctgtgtg

SEQ ID NO: 5012 - DNA, 22 bp, synthetic construct
  misc_feature 1..22: note = chemically synthesized
  source 1..22: mol_type = other DNA
ttacagacctgtgtgaaagatg

SEQ ID NO: 5013 - DNA, 22 bp, synthetic construct
  misc_feature 1..22: note = chemically synthesized
  source 1..22: mol_type = other DNA
tacagacctgtgtgaaagatgg

SEQ ID NO: 5014 - DNA, 22 bp, synthetic construct
  misc_feature 1..22: note = chemically synthesized
  source 1..22: mol_type = other DNA
acagacctgtgtgaaagatggg

SEQ ID NO: 5015 - DNA, 22 bp, synthetic construct
  misc_feature 1..22: note = chemically synthesized
  source 1..22: mol_type = other DNA
cagacctgtgtgaaagatggga

SEQ ID NO: 5016 - DNA, 22 bp, synthetic construct
  misc_feature 1..22: note = chemically synthesized
  source 1..22: mol_type = other DNA
tgtgaaagatgggacataccat

SEQ ID NO: 5017 - DNA, 22 bp, synthetic construct
  misc_feature 1..22: note = chemically synthesized
  source 1..22: mol_type = other DNA
aaatactgacttacctgatttt

SEQ ID NO: 5018 - DNA, 22 bp, synthetic construct
  misc_feature 1..22: note = chemically synthesized
  source 1..22: mol_type = other DNA
acttacctgattttctatttct

SEQ ID NO: 5019 - DNA, 22 bp, synthetic construct
  misc_feature 1..22: note = chemically synthesized
  source 1..22: mol_type = other DNA
acctgattttctatttctttta

SEQ ID NO: 5020 - DNA, 22 bp, synthetic construct
  misc_feature 1..22: note = chemically synthesized
  source 1..22: mol_type = other DNA
cctgattttctatttcttttat

SEQ ID NO: 5021 - DNA, 22 bp, synthetic construct
  misc_feature 1..22: note = chemically synthesized
  source 1..22: mol_type = other DNA
attttctatttcttttatttga

SEQ ID NO: 5022 - DNA, 22 bp, synthetic construct
  misc_feature 1..22: note = chemically synthesized
  source 1..22: mol_type = other DNA
tctatttcttttatttgactat

SEQ ID NO: 5023 - DNA, 22 bp, synthetic construct
  misc_feature 1..22: note = chemically synthesized
  source 1..22: mol_type = other DNA
ctatttcttttatttgactatg

SEQ ID NO: 5024 - DNA, 22 bp, synthetic construct
  misc_feature 1..22: note = chemically synthesized
  source 1..22: mol_type = other DNA
tatttcttttatttgactatgc

SEQ ID NO: 5025 - DNA, 22 bp, synthetic construct
  misc_feature 1..22: note = chemically synthesized
  source 1..22: mol_type = other DNA
tttcttttatttgactatgctg

SEQ ID NO: 5026 - DNA, 22 bp, synthetic construct
  misc_feature 1..22: note = chemically synthesized
  source 1..22: mol_type = other DNA
cttttatttgactatgctgttg

SEQ ID NO: 5027 - DNA, 22 bp, synthetic construct
  misc_feature 1..22: note = chemically synthesized
  source 1..22: mol_type = other DNA
ttttatttgactatgctgttgg

SEQ ID NO: 5028 - DNA, 22 bp, synthetic construct
  misc_feature 1..22: note = chemically synthesized
  source 1..22: mol_type = other DNA
ttatttgactatgctgttggtt

SEQ ID NO: 5029 - DNA, 22 bp, synthetic construct
  misc_feature 1..22: note = chemically synthesized
  source 1..22: mol_type = other DNA
tatttgactatgctgttggttt

SEQ ID NO: 5030 - DNA, 22 bp, synthetic construct
  misc_feature 1..22: note = chemically synthesized
  source 1..22: mol_type = other DNA
atttgactatgctgttggttta

SEQ ID NO: 5031 - DNA, 22 bp, synthetic construct
  misc_feature 1..22: note = chemically synthesized
  source 1..22: mol_type = other DNA
tttgactatgctgttggtttaa

SEQ ID NO: 5032 - DNA, 22 bp, synthetic construct
  misc_feature 1..22: note = chemically synthesized
  source 1..22: mol_type = other DNA
gactatgctgttggtttaattg

SEQ ID NO: 5033 - DNA, 22 bp, synthetic construct
  misc_feature 1..22: note = chemically synthesized
  source 1..22: mol_type = other DNA
actatgctgttggtttaattgt

SEQ ID NO: 5034 - DNA, 22 bp, synthetic construct
  misc_feature 1..22: note = chemically synthesized
  source 1..22: mol_type = other DNA
tgctgttggtttaattgtttat

SEQ ID NO: 5035 - DNA, 22 bp, synthetic construct
  misc_feature 1..22: note = chemically synthesized
  source 1..22: mol_type = other DNA
ttggtttaattgtttatattgg

SEQ ID NO: 5036 - DNA, 22 bp, synthetic construct
  misc_feature 1..22: note = chemically synthesized
  source 1..22: mol_type = other DNA
gtttaattgtttatattggtct

SEQ ID NO: 5037 - DNA, 22 bp, synthetic construct
  misc_feature 1..22: note = chemically synthesized
  source 1..22: mol_type = other DNA
aattgtttatattggtcttcca

SEQ ID NO: 5038 - DNA, 22 bp, synthetic construct
  misc_feature 1..22: note = chemically synthesized
  source 1..22: mol_type = other DNA
attgtttatattggtcttccac

SEQ ID NO: 5039 - DNA, 22 bp, synthetic construct
  misc_feature 1..22: note = chemically synthesized
  source 1..22: mol_type = other DNA
tttatattggtcttccacggtc

SEQ ID NO: 5040 - DNA, 22 bp, synthetic construct
  misc_feature 1..22: note = chemically synthesized
  source 1..22: mol_type = other DNA
atattggtcttccacggtctgg

SEQ ID NO: 5041 - DNA, 22 bp, synthetic construct
  misc_feature 1..22: note = chemically synthesized
  source 1..22: mol_type = other DNA
tattggtcttccacggtctgga

SEQ ID NO: 5042 - DNA, 22 bp, synthetic construct
  misc_feature 1..22: note = chemically synthesized
  source 1..22: mol_type = other DNA
gtcttccacggtctggagaagg

SEQ ID NO: 5043 - DNA, 22 bp, synthetic construct
  misc_feature 1..22: note = chemically synthesized
  source 1..22: mol_type = other DNA
ccacggtctggagaaggtcttt

SEQ ID NO: 5044 - DNA, 22 bp, synthetic construct
  misc_feature 1..22: note = chemically synthesized
  source 1..22: mol_type = other DNA
cacggtctggagaaggtctttg

SEQ ID NO: 5045 - DNA, 22 bp, synthetic construct
  misc_feature 1..22: note = chemically synthesized
  source 1..22: mol_type = other DNA
gagaaggtctttgatgctatta

SEQ ID NO: 5046 - DNA, 22 bp, synthetic construct
  misc_feature 1..22: note = chemically synthesized
  source 1..22: mol_type = other DNA
tgatgctattatcttgtttttc

SEQ ID NO: 5047 - DNA, 22 bp, synthetic construct
  misc_feature 1..22: note = chemically synthesized
  source 1..22: mol_type = other DNA
gatgctattatcttgtttttct

SEQ ID NO: 5048 - DNA, 22 bp, synthetic construct
  misc_feature 1..22: note = chemically synthesized
  source 1..22: mol_type = other DNA
atgctattatcttgtttttcta

SEQ ID NO: 5049 - DNA, 22 bp, synthetic construct
  misc_feature 1..22: note = chemically synthesized
  source 1..22: mol_type = other DNA
ttatcttgtttttctacaaaag

SEQ ID NO: 5050 - DNA, 22 bp, synthetic construct
  misc_feature 1..22: note = chemically synthesized
  source 1..22: mol_type = other DNA
tcttgtttttctacaaaagtct

SEQ ID NO: 5051 - DNA, 22 bp, synthetic construct
  misc_feature 1..22: note = chemically synthesized
  source 1..22: mol_type = other DNA
gtttttctacaaaagtctggat

SEQ ID NO: 5052 - DNA, 22 bp, synthetic construct
  misc_feature 1..22: note = chemically synthesized
  source 1..22: mol_type = other DNA
tttttctacaaaagtctggata

SEQ ID NO: 5053 - DNA, 22 bp, synthetic construct
  misc_feature 1..22: note = chemically synthesized
  source 1..22: mol_type = other DNA
ttctacaaaagtctggatatag

SEQ ID NO: 5054 - DNA, 22 bp, synthetic construct
  misc_feature 1..22: note = chemically synthesized
  source 1..22: mol_type = other DNA
tctacaaaagtctggatataga

SEQ ID NO: 5055 - DNA, 22 bp, synthetic construct
  misc_feature 1..22: note = chemically synthesized
  source 1..22: mol_type = other DNA
ctacaaaagtctggatatagag

SEQ ID NO: 5056 - DNA, 22 bp, synthetic construct
  misc_feature 1..22: note = chemically synthesized
  source 1..22: mol_type = other DNA
tacaaaagtctggatatagaga

SEQ ID NO: 5057 - DNA, 22 bp, synthetic construct
  misc_feature 1..22: note = chemically synthesized
  source 1..22: mol_type = other DNA
caaaagtctggatatagagagt

SEQ ID NO: 5058 - DNA, 22 bp, synthetic construct
  misc_feature 1..22: note = chemically synthesized
  source 1..22: mol_type = other DNA
gatatagagagtaggttggtta

SEQ ID NO: 5059 - DNA, 22 bp, synthetic construct
  misc_feature 1..22: note = chemically synthesized
  source 1..22: mol_type = other DNA
gttataagttgctttcctcttt

SEQ ID NO: 5060 - DNA, 22 bp, synthetic construct
  misc_feature 1..22: note = chemically synthesized
  source 1..22: mol_type = other DNA
taagttgctttcctctttcttt

SEQ ID NO: 5061 - DNA, 22 bp, synthetic construct
  misc_feature 1..22: note = chemically synthesized
  source 1..22: mol_type = other DNA
ctttcctctttcttttctatta

SEQ ID NO: 5062 - DNA, 22 bp, synthetic construct
  misc_feature 1..22: note = chemically synthesized
  source 1..22: mol_type = other DNA
tcctctttcttttctattaatt

SEQ ID NO: 5063 - DNA, 22 bp, synthetic construct
  misc_feature 1..22: note = chemically synthesized
  source 1..22: mol_type = other DNA
cctctttcttttctattaattt

SEQ ID NO: 5064 - DNA, 22 bp, synthetic construct
  misc_feature 1..22: note = chemically synthesized
  source 1..22: mol_type = other DNA
ctctttcttttctattaatttc

SEQ ID NO: 5065 - DNA, 22 bp, synthetic construct
  misc_feature 1..22: note = chemically synthesized
  source 1..22: mol_type = other DNA
tttcttttctattaatttcctg

SEQ ID NO: 5066 - DNA, 22 bp, synthetic construct
  misc_feature 1..22: note = chemically synthesized
  source 1..22: mol_type = other DNA
tcttttctattaatttcctgta

SEQ ID NO: 5067 - DNA, 22 bp, synthetic construct
  misc_feature 1..22: note = chemically synthesized
  source 1..22: mol_type = other DNA
cttttctattaatttcctgtaa

SEQ ID NO: 5068 - DNA, 22 bp, synthetic construct
  misc_feature 1..22: note = chemically synthesized
  source 1..22: mol_type = other DNA
ttttctattaatttcctgtaac

SEQ ID NO: 5069 - DNA, 22 bp, synthetic construct
  misc_feature 1..22: note = chemically synthesized
  source 1..22: mol_type = other DNA
ttctattaatttcctgtaacac

SEQ ID NO: 5070 - DNA, 22 bp, synthetic construct
  misc_feature 1..22: note = chemically synthesized
  source 1..22: mol_type = other DNA
tctattaatttcctgtaacact

SEQ ID NO: 5071 - DNA, 22 bp, synthetic construct
  misc_feature 1..22: note = chemically synthesized
  source 1..22: mol_type = other DNA
ctattaatttcctgtaacacta

SEQ ID NO: 5072 - DNA, 22 bp, synthetic construct
  misc_feature 1..22: note = chemically synthesized
  source 1..22: mol_type = other DNA
tattaatttcctgtaacactat

SEQ ID NO: 5073 - DNA, 22 bp, synthetic construct
  misc_feature 1..22: note = chemically synthesized
  source 1..22: mol_type = other DNA
ttaatttcctgtaacactatca

SEQ ID NO: 5074 - DNA, 22 bp, synthetic construct
  misc_feature 1..22: note = chemically synthesized
  source 1..22: mol_type = other DNA
atttcctgtaacactatcataa

SEQ ID NO: 5075 - DNA, 22 bp, synthetic construct
  misc_feature 1..22: note = chemically synthesized
  source 1..22: mol_type = other DNA
cctgtaacactatcataatcta

SEQ ID NO: 5076 - DNA, 22 bp, synthetic construct
  misc_feature 1..22: note = chemically synthesized
  source 1..22: mol_type = other DNA
ctgtaacactatcataatctaa

SEQ ID NO: 5077 - DNA, 22 bp, synthetic construct
  misc_feature 1..22: note = chemically synthesized
  source 1..22: mol_type = other DNA
taacactatcataatctaaatt

SEQ ID NO: 5078 - DNA, 22 bp, synthetic construct
  misc_feature 1..22: note = chemically synthesized
  source 1..22: mol_type = other DNA
tcataatctaaatttttaaact

SEQ ID NO: 5079 - DNA, 22 bp, synthetic construct
  misc_feature 1..22: note = chemically synthesized
  source 1..22: mol_type = other DNA
aatttttaaactaataatggat

SEQ ID NO: 5080 - DNA, 22 bp, synthetic construct
  misc_feature 1..22: note = chemically synthesized
  source 1..22: mol_type = other DNA
ttaaactaataatggatttgaa

SEQ ID NO: 5081 - DNA, 22 bp, synthetic construct
  misc_feature 1..22: note = chemically synthesized
  source 1..22: mol_type = other DNA
taaactaataatggatttgaaa

SEQ ID NO: 5082 - DNA, 22 bp, synthetic construct
  misc_feature 1..22: note = chemically synthesized
  source 1..22: mol_type = other DNA
aaactaataatggatttgaaaa

SEQ ID NO: 5083 - DNA, 22 bp, synthetic construct
  misc_feature 1..22: note = chemically synthesized
  source 1..22: mol_type = other DNA
aactaataatggatttgaaaaa

SEQ ID NO: 5084 - DNA, 22 bp, synthetic construct
  misc_feature 1..22: note = chemically synthesized
  source 1..22: mol_type = other DNA
ataatggatttgaaaaatgaat

SEQ ID NO: 5085 - DNA, 22 bp, synthetic construct
  misc_feature 1..22: note = chemically synthesized
  source 1..22: mol_type = other DNA
gaaaaatgaatattggcaattc

SEQ ID NO: 5086 - DNA, 22 bp, synthetic construct
  misc_feature 1..22: note = chemically synthesized
  source 1..22: mol_type = other DNA
aaaaatgaatattggcaattcc

SEQ ID NO: 5087 - DNA, 22 bp, synthetic construct
  misc_feature 1..22: note = chemically synthesized
  source 1..22: mol_type = other DNA
gcaattccttccccttgtatgc

SEQ ID NO: 5088 - DNA, 22 bp, synthetic construct
  misc_feature 1..22: note = chemically synthesized
  source 1..22: mol_type = other DNA
cttccccttgtatgcttctttc

SEQ ID NO: 5089 - DNA, 22 bp, synthetic construct
  misc_feature 1..22: note = chemically synthesized
  source 1..22: mol_type = other DNA
ccccttgtatgcttctttcaaa

SEQ ID NO: 5090 - DNA, 22 bp, synthetic construct
  misc_feature 1..22: note = chemically synthesized
  source 1..22: mol_type = other DNA
cccttgtatgcttctttcaaat

SEQ ID NO: 5091 - DNA, 22 bp, synthetic construct
  misc_feature 1..22: note = chemically synthesized
  source 1..22: mol_type = other DNA
gtatgcttctttcaaatagcac

SEQ ID NO: 5092 - DNA, 22 bp, synthetic construct
  misc_feature 1..22: note = chemically synthesized
  source 1..22: mol_type = other DNA
tatgcttctttcaaatagcaca

SEQ ID NO: 5093 - DNA, 22 bp, synthetic construct
  misc_feature 1..22: note = chemically synthesized
  source 1..22: mol_type = other DNA
ctttcaaatagcacatattttt

SEQ ID NO: 5094 - DNA, 22 bp, synthetic construct
  misc_feature 1..22: note = chemically synthesized
  source 1..22: mol_type = other DNA
tttcaaatagcacatatttttg

SEQ ID NO: 5095 - DNA, 22 bp, synthetic construct
  misc_feature 1..22: note = chemically synthesized
  source 1..22: mol_type = other DNA
tcaaatagcacatatttttgtc

SEQ ID NO: 5096 - DNA, 22 bp, synthetic construct
  misc_feature 1..22: note = chemically synthesized
  source 1..22: mol_type = other DNA
caaatagcacatatttttgtcc

SEQ ID NO: 5097 - DNA, 22 bp, synthetic construct
  misc_feature 1..22: note = chemically synthesized
  source 1..22: mol_type = other DNA
aaatagcacatatttttgtcct

SEQ ID NO: 5098 - DNA, 22 bp, synthetic construct
  misc_feature 1..22: note = chemically synthesized
  source 1..22: mol_type = other DNA
ttgtccttaacattttatttaa

SEQ ID NO: 5099 - DNA, 22 bp, synthetic construct
  misc_feature 1..22: note = chemically synthesized
  source 1..22: mol_type = other DNA
tgtccttaacattttatttaaa

SEQ ID NO: 5100 - DNA, 22 bp, synthetic construct
  misc_feature 1..22: note = chemically synthesized
  source 1..22: mol_type = other DNA
gtccttaacattttatttaaat

SEQ ID NO: 5101 - DNA, 22 bp, synthetic construct
  misc_feature 1..22: note = chemically synthesized
  source 1..22: mol_type = other DNA
tccttaacattttatttaaatt

SEQ ID NO: 5102 - DNA, 22 bp, synthetic construct
  misc_feature 1..22: note = chemically synthesized
  source 1..22: mol_type = other DNA
aacattttatttaaattgtact

SEQ ID NO: 5103 - DNA, 22 bp, synthetic construct
  misc_feature 1..22: note = chemically synthesized
  source 1..22: mol_type = other DNA
acattttatttaaattgtacta

SEQ ID NO: 5104 - DNA, 22 bp, synthetic construct
  misc_feature 1..22: note = chemically synthesized
  source 1..22: mol_type = other DNA
tatttaaattgtactatctcta

SEQ ID NO: 5105 - DNA, 22 bp, synthetic construct
  misc_feature 1..22: note = chemically synthesized
  source 1..22: mol_type = other DNA
atttaaattgtactatctctaa

SEQ ID NO: 5106 - DNA, 22 bp, synthetic construct
  misc_feature 1..22: note = chemically synthesized
  source 1..22: mol_type = other DNA
tttaaattgtactatctctaaa

SEQ ID NO: 5107 - DNA, 22 bp, synthetic construct
  misc_feature 1..22: note = chemically synthesized
  source 1..22: mol_type = other DNA
aaattgtactatctctaaaatt

SEQ ID NO: 5108 - DNA, 22 bp, synthetic construct
  misc_feature 1..22: note = chemically synthesized
  source 1..22: mol_type = other DNA
aattgtactatctctaaaattt

SEQ ID NO: 5109 - DNA, 22 bp, synthetic construct
  misc_feature 1..22: note = chemically synthesized
  source 1..22: mol_type = other DNA
tactatctctaaaatttgattt

SEQ ID NO: 5110 - DNA, 22 bp, synthetic construct
  misc_feature 1..22: note = chemically synthesized
  source 1..22: mol_type = other DNA
tctctaaaatttgattttctga

SEQ ID NO: 5111 - DNA, 22 bp, synthetic construct
  misc_feature 1..22: note = chemically synthesized
  source 1..22: mol_type = other DNA
taaaatttgattttctgaactt

SEQ ID NO: 5112 - DNA, 22 bp, synthetic construct
  misc_feature 1..22: note = chemically synthesized
  source 1..22: mol_type = other DNA
aaatttgattttctgaacttca

SEQ ID NO: 5113 - DNA, 22 bp, synthetic construct
  misc_feature 1..22: note = chemically synthesized
  source 1..22: mol_type = other DNA
gattttctgaacttcaattaaa

SEQ ID NO: 5114 - DNA, 22 bp, synthetic construct
  misc_feature 1..22: note = chemically synthesized
  source 1..22: mol_type = other DNA
attttctgaacttcaattaaaa

SEQ ID NO: 5115 - DNA, 22 bp, synthetic construct
  misc_feature 1..22: note = chemically synthesized
  source 1..22: mol_type = other DNA
tctgaacttcaattaaaagaaa

SEQ ID NO: 5116 - DNA, 22 bp, synthetic construct
  misc_feature 1..22: note = chemically synthesized
  source 1..22: mol_type = other DNA
ctgaacttcaattaaaagaaaa

SEQ ID NO: 5117 - DNA, 22 bp, synthetic construct
  misc_feature 1..22: note = chemically synthesized
  source 1..22: mol_type = other DNA
tgaacttcaattaaaagaaaaa

SEQ ID NO: 5118 - DNA, 22 bp, synthetic construct
  misc_feature 1..22: note = chemically synthesized
  source 1..22: mol_type = other DNA
aacttcaattaaaagaaaaagc

SEQ ID NO: 5119 - DNA, 22 bp, synthetic construct
  misc_feature 1..22: note = chemically synthesized
  source 1..22: mol_type = other DNA
caattaaaagaaaaagcccagc

SEQ ID NO: 5120 - DNA, 22 bp, synthetic construct
  misc_feature 1..22: note = chemically synthesized
  source 1..22: mol_type = other DNA
aattaaaagaaaaagcccagca

SEQ ID NO: 5121 - DNA, 22 bp, synthetic construct
  misc_feature 1..22: note = chemically synthesized
  source 1..22: mol_type = other DNA
aaagaaaaagcccagcatattt

SEQ ID NO: 5122 - DNA, 22 bp, synthetic construct
  misc_feature 1..22: note = chemically synthesized
  source 1..22: mol_type = other DNA
tcatatgaataaatcttttcca

SEQ ID NO: 5123 - DNA, 22 bp, synthetic construct
  misc_feature 1..22: note = chemically synthesized
  source 1..22: mol_type = other DNA
catatgaataaatcttttccat

SEQ ID NO: 5124 - DNA, 22 bp, synthetic construct
  misc_feature 1..22: note = chemically synthesized
  source 1..22: mol_type = other DNA
atatgaataaatcttttccatt

SEQ ID NO: 5125 - DNA, 22 bp, synthetic construct
  misc_feature 1..22: note = chemically synthesized
  source 1..22: mol_type = other DNA
ttccatttactgtattatttaa

SEQ ID NO: 5126 - DNA, 22 bp, synthetic construct
  misc_feature 1..22: note = chemically synthesized
  source 1..22: mol_type = other DNA
tccatttactgtattatttaat

SEQ ID NO: 5127 - DNA, 22 bp, synthetic construct
  misc_feature 1..22: note = chemically synthesized
  source 1..22: mol_type = other DNA
ccatttactgtattatttaatc

SEQ ID NO: 5128 - DNA, 22 bp, synthetic construct
  misc_feature 1..22: note = chemically synthesized
  source 1..22: mol_type = other DNA
catttactgtattatttaatct

SEQ ID NO: 5129 - DNA, 22 bp, synthetic construct
  misc_feature 1..22: note = chemically synthesized
  source 1..22: mol_type = other DNA
actgtattatttaatctgtttt

SEQ ID NO: 5130 - DNA, 22 bp, synthetic construct
  misc_feature 1..22: note = chemically synthesized
  source 1..22: mol_type = other DNA
ctgtattatttaatctgtttta

SEQ ID NO: 5131 - DNA, 22 bp, synthetic construct
  misc_feature 1..22: note = chemically synthesized
  source 1..22: mol_type = other DNA
tattatttaatctgttttaaac

SEQ ID NO: 5132 - DNA, 22 bp, synthetic construct
  misc_feature 1..22: note = chemically synthesized
  source 1..22: mol_type = other DNA
tttaatctgttttaaacactgg

SEQ ID NO: 5133 - DNA, 22 bp, synthetic construct
  misc_feature 1..22: note = chemically synthesized
  source 1..22: mol_type = other DNA
aatctgttttaaacactggaga

SEQ ID NO: 5134 - DNA, 22 bp, synthetic construct
  misc_feature 1..22: note = chemically synthesized
  source 1..22: mol_type = other DNA
atctgttttaaacactggagaa

SEQ ID NO: 5135 - DNA, 22 bp, synthetic construct
  misc_feature 1..22: note = chemically synthesized
  source 1..22: mol_type = other DNA
ttttaaacactggagaatagtt

SEQ ID NO: 5136 - DNA, 22 bp, synthetic construct
  misc_feature 1..22: note = chemically synthesized
  source 1..22: mol_type = other DNA
taaacactggagaatagtttta

SEQ ID NO: 5137 - DNA, 22 bp, synthetic construct
  misc_feature 1..22: note = chemically synthesized
  source 1..22: mol_type = other DNA
aaacactggagaatagttttaa

SEQ ID NO: 5138 - DNA, 22 bp, synthetic construct
  misc_feature 1..22: note = chemically synthesized
  source 1..22: mol_type = other DNA
aacactggagaatagttttaaa

SEQ ID NO: 5139 - DNA, 22 bp, synthetic construct
  misc_feature 1..22: note = chemically synthesized
  source 1..22: mol_type = other DNA
gagaatagttttaaattttttt

SEQ ID NO: 5140 - DNA, 22 bp, synthetic construct
  misc_feature 1..22: note = chemically synthesized
  source 1..22: mol_type = other DNA
taaattttttttaactttttac

SEQ ID NO: 5141 - DNA, 22 bp, synthetic construct
  misc_feature 1..22: note = chemically synthesized
  source 1..22: mol_type = other DNA
aaattttttttaactttttact

SEQ ID NO: 5142 - DNA, 22 bp, synthetic construct
  misc_feature 1..22: note = chemically synthesized
  source 1..22: mol_type = other DNA
aattttttttaactttttactt

SEQ ID NO: 5143 - DNA, 22 bp, synthetic construct
  misc_feature 1..22: note = chemically synthesized
  source 1..22: mol_type = other DNA
tttttaactttttacttacctt

SEQ ID NO: 5144 - DNA, 22 bp, synthetic construct
  misc_feature 1..22: note = chemically synthesized
  source 1..22: mol_type = other DNA
ttttaactttttacttaccttc

SEQ ID NO: 5145 - DNA, 22 bp, synthetic construct
  misc_feature 1..22: note = chemically synthesized
  source 1..22: mol_type = other DNA
tttaactttttacttaccttca

SEQ ID NO: 5146 - DNA, 22 bp, synthetic construct
  misc_feature 1..22: note = chemically synthesized
  source 1..22: mol_type = other DNA
ttaactttttacttaccttcag

SEQ ID NO: 5147 - DNA, 22 bp, synthetic construct
  misc_feature 1..22: note = chemically synthesized
  source 1..22: mol_type = other DNA
taactttttacttaccttcagt

SEQ ID NO: 5148 - DNA, 22 bp, synthetic construct
  misc_feature 1..22: note = chemically synthesized
  source 1..22: mol_type = other DNA
aactttttacttaccttcagta

SEQ ID NO: 5149 - DNA, 22 bp, synthetic construct
  misc_feature 1..22: note = chemically synthesized
  source 1..22: mol_type = other DNA
actttttacttaccttcagtaa

SEQ ID NO: 5150 - DNA, 22 bp, synthetic construct
  misc_feature 1..22: note = chemically synthesized
  source 1..22: mol_type = other DNA
tttacttaccttcagtaattta

SEQ ID NO: 5151 - DNA, 22 bp, synthetic construct
  misc_feature 1..22: note = chemically synthesized
  source 1..22: mol_type = other DNA
ttacttaccttcagtaatttac

SEQ ID NO: 5152 - DNA, 22 bp, synthetic construct
  misc_feature 1..22: note = chemically synthesized
  source 1..22: mol_type = other DNA
tacttaccttcagtaatttaca

SEQ ID NO: 5153 - DNA, 22 bp, synthetic construct
  misc_feature 1..22: note = chemically synthesized
  source 1..22: mol_type = other DNA
acttaccttcagtaatttacaa

SEQ ID NO: 5154 - DNA, 22 bp, synthetic construct
  misc_feature 1..22: note = chemically synthesized
  source 1..22: mol_type = other DNA
cttaccttcagtaatttacaat

SEQ ID NO: 5155 - DNA, 22 bp, synthetic construct
  misc_feature 1..22: note = chemically synthesized
  source 1..22: mol_type = other DNA
accttcagtaatttacaatagt

SEQ ID NO: 5156 - DNA, 22 bp, synthetic construct
  misc_feature 1..22: note = chemically synthesized
  source 1..22: mol_type = other DNA
ccttcagtaatttacaatagtg

SEQ ID NO: 5157 - DNA, 22 bp, synthetic construct
  misc_feature 1..22: note = chemically synthesized
  source 1..22: mol_type = other DNA
cagtaatttacaatagtgtaat

SEQ ID NO: 5158 - DNA, 22 bp, synthetic construct
  misc_feature 1..22: note = chemically synthesized
  source 1..22: mol_type = other DNA
agtaatttacaatagtgtaatg

SEQ ID NO: 5159 - DNA, 22 bp, synthetic construct
  misc_feature 1..22: note = chemically synthesized
  source 1..22: mol_type = other DNA
acaatagtgtaatgacatagtg

SEQ ID NO: 5160 - DNA, 22 bp, synthetic construct
  misc_feature 1..22: note = chemically synthesized
  source 1..22: mol_type = other DNA
caatagtgtaatgacatagtgt

SEQ ID NO: 5161 - DNA, 22 bp, synthetic construct
  misc_feature 1..22: note = chemically synthesized
  source 1..22: mol_type = other DNA
tagattgtataatttaaccgat

SEQ ID NO: 5162 - DNA, 22 bp, synthetic construct
  misc_feature 1..22: note = chemically synthesized
  source 1..22: mol_type = other DNA
gattgtataatttaaccgattt

SEQ ID NO: 5163 - DNA, 22 bp, synthetic construct
  misc_feature 1..22: note = chemically synthesized
  source 1..22: mol_type = other DNA
tataatttaaccgatttgtaat

SEQ ID NO: 5164 - DNA, 22 bp, synthetic construct
  misc_feature 1..22: note = chemically synthesized
  source 1..22: mol_type = other DNA
aaccgatttgtaattttcatat

SEQ ID NO: 5165 - DNA, 22 bp, synthetic construct
  misc_feature 1..22: note = chemically synthesized
  source 1..22: mol_type = other DNA
accgatttgtaattttcatata

SEQ ID NO: 5166 - DNA, 22 bp, synthetic construct
  misc_feature 1..22: note = chemically synthesized
  source 1..22: mol_type = other DNA
gtaattttcatataaaatgcaa

SEQ ID NO: 5167 - DNA, 22 bp, synthetic construct
  misc_feature 1..22: note = chemically synthesized
  source 1..22: mol_type = other DNA
taattttcatataaaatgcaaa

SEQ ID NO: 5168 - DNA, 22 bp, synthetic construct
  misc_feature 1..22: note = chemically synthesized
  source 1..22: mol_type = other DNA
tcatataaaatgcaaattttca

SEQ ID NO: 5169 - DNA, 22 bp, synthetic construct
  misc_feature 1..22: note = chemically synthesized
  source 1..22: mol_type = other DNA
catataaaatgcaaattttcag

SEQ ID NO: 5170 - DNA, 22 bp, synthetic construct
  misc_feature 1..22: note = chemically synthesized
  source 1..22: mol_type = other DNA
atataaaatgcaaattttcagt

SEQ ID NO: 5171 - DNA, 22 bp, synthetic construct
  misc_feature 1..22: note = chemically synthesized
  source 1..22: mol_type = other DNA
tcagtgttttcatatataacat

SEQ ID NO: 5172 - DNA, 22 bp, synthetic construct
  misc_feature 1..22: note = chemically synthesized
  source 1..22: mol_type = other DNA
cagtgttttcatatataacatt

SEQ ID NO: 5173 - DNA, 22 bp, synthetic construct
  misc_feature 1..22: note = chemically synthesized
  source 1..22: mol_type = other DNA
agtgttttcatatataacatta

SEQ ID NO: 5174 - DNA, 22 bp, synthetic construct
  misc_feature 1..22: note = chemically synthesized
  source 1..22: mol_type = other DNA
tcatatataacattagggaaac

SEQ ID NO: 5175 - DNA, 22 bp, synthetic construct
  misc_feature 1..22: note = chemically synthesized
  source 1..22: mol_type = other DNA
catatataacattagggaaaca

SEQ ID NO: 5176 - DNA, 22 bp, synthetic construct
  misc_feature 1..22: note = chemically synthesized
  source 1..22: mol_type = other DNA
atatataacattagggaaacaa

SEQ ID NO: 5177 - DNA, 22 bp, synthetic construct
  misc_feature 1..22: note = chemically synthesized
  source 1..22: mol_type = other DNA
gggaaacaaaaaactaacttga

SEQ ID NO: 5178 - DNA, 22 bp, synthetic construct
  misc_feature 1..22: note = chemically synthesized
  source 1..22: mol_type = other DNA
acttgaaattataataggaaat

SEQ ID NO: 5179 - DNA, 22 bp, synthetic construct
  misc_feature 1..22: note = chemically synthesized
  source 1..22: mol_type = other DNA
gaaattataataggaaatttta

SEQ ID NO: 5180 - DNA, 22 bp, synthetic construct
  misc_feature 1..22: note = chemically synthesized
  source 1..22: mol_type = other DNA
aaattataataggaaattttat

SEQ ID NO: 5181 - DNA, 22 bp, synthetic construct
  misc_feature 1..22: note = chemically synthesized
  source 1..22: mol_type = other DNA
taataggaaattttattttctg

SEQ ID NO: 5182 - DNA, 22 bp, synthetic construct
  misc_feature 1..22: note = chemically synthesized
  source 1..22: mol_type = other DNA
tattttctggagattatttttc

SEQ ID NO: 5183 - DNA, 22 bp, synthetic construct
  misc_feature 1..22: note = chemically synthesized
  source 1..22: mol_type = other DNA
attttctggagattatttttct

SEQ ID NO: 5184 - DNA, 22 bp, synthetic construct
  misc_feature 1..22: note = chemically synthesized
  source 1..22: mol_type = other DNA
ttttctggagattatttttctt

SEQ ID NO: 5185 - DNA, 22 bp, synthetic construct
  misc_feature 1..22: note = chemically synthesized
  source 1..22: mol_type = other DNA
tctggagattatttttcttgga

SEQ ID NO: 5186 - DNA, 22 bp, synthetic construct
  misc_feature 1..22: note = chemically synthesized
  source 1..22: mol_type = other DNA
ctggagattatttttcttggaa

SEQ ID NO: 5187 - DNA, 22 bp, synthetic construct
  misc_feature 1..22: note = chemically synthesized
  source 1..22: mol_type = other DNA
tggagattatttttcttggaaa

SEQ ID NO: 5188 - DNA, 22 bp, synthetic construct
  misc_feature 1..22: note = chemically synthesized
  source 1..22: mol_type = other DNA
gagattatttttcttggaaaaa

SEQ ID NO: 5189 - DNA, 22 bp, synthetic construct
  misc_feature 1..22: note = chemically synthesized
  source 1..22: mol_type = other DNA
tttttcttggaaaaaaaagtat

SEQ ID NO: 5190 - DNA, 22 bp, synthetic construct
  misc_feature 1..22: note = chemically synthesized
  source 1..22: mol_type = other DNA
ttcttggaaaaaaaagtatttc

SEQ ID NO: 5191 - DNA, 22 bp, synthetic construct
  misc_feature 1..22: note = chemically synthesized
  source 1..22: mol_type = other DNA
tcttggaaaaaaaagtatttca

SEQ ID NO: 5192 - DNA, 22 bp, synthetic construct
  misc_feature 1..22: note = chemically synthesized
  source 1..22: mol_type = other DNA
cttggaaaaaaaagtatttcaa

SEQ ID NO: 5193 - DNA, 22 bp, synthetic construct
  misc_feature 1..22: note = chemically synthesized
  source 1..22: mol_type = other DNA
ttggaaaaaaaagtatttcaac

SEQ ID NO: 5194 - DNA, 22 bp, synthetic construct
  misc_feature 1..22: note = chemically synthesized
  source 1..22: mol_type = other DNA
ggaaaaaaaagtatttcaacaa

SEQ ID NO: 5195 - DNA, 22 bp, synthetic construct
  misc_feature 1..22: note = chemically synthesized
  source 1..22: mol_type = other DNA
gaaaaaaaagtatttcaacaat

SEQ ID NO: 5196 - DNA, 22 bp, synthetic construct
  misc_feature 1..22: note = chemically synthesized
  source 1..22: mol_type = other DNA
caacaatgcaacaaagtatttc

SEQ ID NO: 5197 - DNA, 22 bp, synthetic construct
  misc_feature 1..22: note = chemically synthesized
  source 1..22: mol_type = other DNA
aacaatgcaacaaagtatttca

SEQ ID NO: 5198 - DNA, 22 bp, synthetic construct
  misc_feature 1..22: note = chemically synthesized
  source 1..22: mol_type = other DNA
caaatggcatgccttagaaata

SEQ ID NO: 5199 - DNA, 22 bp, synthetic construct
  misc_feature 1..22: note = chemically synthesized
  source 1..22: mol_type = other DNA
aaatggcatgccttagaaatat

SEQ ID NO: 5200 - DNA, 22 bp, synthetic construct
  misc_feature 1..22: note = chemically synthesized
  source 1..22: mol_type = other DNA
agaaatattttttttaaaagat

SEQ ID NO: 5201 - DNA, 22 bp, synthetic construct
  misc_feature 1..22: note = chemically synthesized
  source 1..22: mol_type = other DNA
gaaatattttttttaaaagatc

SEQ ID NO: 5202 - DNA, 22 bp, synthetic construct
  misc_feature 1..22: note = chemically synthesized
  source 1..22: mol_type = other DNA
tttttaaaagatccacattgaa

SEQ ID NO: 5203 - DNA, 22 bp, synthetic construct
  misc_feature 1..22: note = chemically synthesized
  source 1..22: mol_type = other DNA
ttttaaaagatccacattgaaa

SEQ ID NO: 5204 - DNA, 22 bp, synthetic construct
  misc_feature 1..22: note = chemically synthesized
  source 1..22: mol_type = other DNA
tttaaaagatccacattgaaaa

SEQ ID NO: 5205 - DNA, 22 bp, synthetic construct
  misc_feature 1..22: note = chemically synthesized
  source 1..22: mol_type = other DNA
ttaaaagatccacattgaaaac

SEQ ID NO: 5206 - DNA, 22 bp, synthetic construct
  misc_feature 1..22: note = chemically synthesized
  source 1..22: mol_type = other DNA
taaaagatccacattgaaaaca

SEQ ID NO: 5207 - DNA, 22 bp, synthetic construct
  misc_feature 1..22: note = chemically synthesized
  source 1..22: mol_type = other DNA
aaaagatccacattgaaaacat

SEQ ID NO: 5208 - DNA, 22 bp, synthetic construct
  misc_feature 1..22: note = chemically synthesized
  source 1..22: mol_type = other DNA
aaagatccacattgaaaacata

SEQ ID NO: 5209 - DNA, 22 bp, synthetic construct
  misc_feature 1..22: note = chemically synthesized
  source 1..22: mol_type = other DNA
aaaacataaacatgaaccctct

SEQ ID NO: 5210 - DNA, 22 bp, synthetic construct
  misc_feature 1..22: note = chemically synthesized
  source 1..22: mol_type = other DNA
tttattttctacttactttaag

SEQ ID NO: 5211 - DNA, 22 bp, synthetic construct
  misc_feature 1..22: note = chemically synthesized
  source 1..22: mol_type = other DNA
tattttctacttactttaagtg

SEQ ID NO: 5212 - DNA, 22 bp, synthetic construct
  misc_feature 1..22: note = chemically synthesized
  source 1..22: mol_type = other DNA
attttctacttactttaagtga

SEQ ID NO: 5213 - DNA, 22 bp, synthetic construct
  misc_feature 1..22: note = chemically synthesized
  source 1..22: mol_type = other DNA
ttttctacttactttaagtgaa

SEQ ID NO: 5214 - DNA, 22 bp, synthetic construct
  misc_feature 1..22: note = chemically synthesized
  source 1..22: mol_type = other DNA
tctacttactttaagtgaagtt

SEQ ID NO: 5215 - DNA, 22 bp, synthetic construct
  misc_feature 1..22: note = chemically synthesized
  source 1..22: mol_type = other DNA
ctacttactttaagtgaagtta

SEQ ID NO: 5216 - DNA, 22 bp, synthetic construct
  misc_feature 1..22: note = chemically synthesized
  source 1..22: mol_type = other DNA
tacttactttaagtgaagttac

SEQ ID NO: 5217 - DNA, 22 bp, synthetic construct
  misc_feature 1..22: note = chemically synthesized
  source 1..22: mol_type = other DNA
cttactttaagtgaagttactt

SEQ ID NO: 5218 - DNA, 22 bp, synthetic construct
  misc_feature 1..22: note = chemically synthesized
  source 1..22: mol_type = other DNA
actttaagtgaagttacttctg

SEQ ID NO: 5219 - DNA, 22 bp, synthetic construct
  misc_feature 1..22: note = chemically synthesized
  source 1..22: mol_type = other DNA
ctttaagtgaagttacttctgg

SEQ ID NO: 5220 - DNA, 22 bp, synthetic construct
  misc_feature 1..22: note = chemically synthesized
  source 1..22: mol_type = other DNA
taagtgaagttacttctgggtg

SEQ ID NO: 5221 - DNA, 22 bp, synthetic construct
  misc_feature 1..22: note = chemically synthesized
  source 1..22: mol_type = other DNA
aagtgaagttacttctgggtgt

SEQ ID NO: 5222 - DNA, 22 bp, synthetic construct
  misc_feature 1..22: note = chemically synthesized
  source 1..22: mol_type = other DNA
agtgaagttacttctgggtgtt

SEQ ID NO: 5223 - DNA, 22 bp, synthetic construct
  misc_feature 1..22: note = chemically synthesized
  source 1..22: mol_type = other DNA
cttctgggtgttctggagtttc

SEQ ID NO: 5224 - DNA, 22 bp, synthetic construct
  misc_feature 1..22: note = chemically synthesized
  source 1..22: mol_type = other DNA
ctgggtgttctggagtttcagg

SEQ ID NO: 5225 - DNA, 22 bp, synthetic construct
  misc_feature 1..22: note = chemically synthesized
  source 1..22: mol_type = other DNA
tgggtgttctggagtttcaggt

SEQ ID NO: 5226 - DNA, 22 bp, synthetic construct
  misc_feature 1..22: note = chemically synthesized
  source 1..22: mol_type = other DNA
ggtgttctggagtttcaggttg

SEQ ID NO: 5227 - DNA, 22 bp, synthetic construct
  misc_feature 1..22: note = chemically synthesized
  source 1..22: mol_type = other DNA
tggagtttcaggttgattttga

SEQ ID NO: 5228 - DNA, 22 bp, synthetic construct
  misc_feature 1..22: note = chemically synthesized
  source 1..22: mol_type = other DNA
gagtttcaggttgattttgaat

SEQ ID NO: 5229 - DNA, 22 bp, synthetic construct
  misc_feature 1..22: note = chemically synthesized
  source 1..22: mol_type = other DNA
caggttgattttgaattaagtt

SEQ ID NO: 5230 - DNA, 22 bp, synthetic construct
  misc_feature 1..22: note = chemically synthesized
  source 1..22: mol_type = other DNA
aggttgattttgaattaagtta

SEQ ID NO: 5231 - DNA, 22 bp, synthetic construct
  misc_feature 1..22: note = chemically synthesized
  source 1..22: mol_type = other DNA
attttgaattaagttagttagt

SEQ ID NO: 5232 - DNA, 22 bp, synthetic construct
  misc_feature 1..22: note = chemically synthesized
  source 1..22: mol_type = other DNA
tgaattaagttagttagttgct

SEQ ID NO: 5233 - DNA, 22 bp, synthetic construct
  misc_feature 1..22: note = chemically synthesized
  source 1..22: mol_type = other DNA
gaattaagttagttagttgctc

SEQ ID NO: 5234 - DNA, 22 bp, synthetic construct
  misc_feature 1..22: note = chemically synthesized
  source 1..22: mol_type = other DNA
aattaagttagttagttgctct

SEQ ID NO: 5235 - DNA, 22 bp, synthetic construct
  misc_feature 1..22: note = chemically synthesized
  source 1..22: mol_type = other DNA
agttagttagttgctcttctaa

SEQ ID NO: 5236 - DNA, 22 bp, synthetic construct
  misc_feature 1..22: note = chemically synthesized
  source 1..22: mol_type = other DNA
gttagttgctcttctaaatatt

SEQ ID NO: 5237 - DNA, 22 bp, synthetic construct
  misc_feature 1..22: note = chemically synthesized
  source 1..22: mol_type = other DNA
gttgctcttctaaatatttcac

SEQ ID NO: 5238 - DNA, 22 bp, synthetic construct
  misc_feature 1..22: note = chemically synthesized
  source 1..22: mol_type = other DNA
ctcttctaaatatttcactttt

SEQ ID NO: 5239 - DNA, 22 bp, synthetic construct
  misc_feature 1..22: note = chemically synthesized
  source 1..22: mol_type = other DNA
ttctaaatatttcactttttgt

SEQ ID NO: 5240 - DNA, 22 bp, synthetic construct
  misc_feature 1..22: note = chemically synthesized
  source 1..22: mol_type = other DNA
ctaaatatttcactttttgttg

SEQ ID NO: 5241 - DNA, 22 bp, synthetic construct
  misc_feature 1..22: note = chemically synthesized
  source 1..22: mol_type = other DNA
taaatatttcactttttgttga

SEQ ID NO: 5242 - DNA, 22 bp, synthetic construct
  misc_feature 1..22: note = chemically synthesized
  source 1..22: mol_type = other DNA
aatatttcactttttgttgaag

SEQ ID NO: 5243 - DNA, 22 bp, synthetic construct
  misc_feature 1..22: note = chemically synthesized
  source 1..22: mol_type = other DNA
cactttttgttgaagtagaatt

SEQ ID NO: 5244 - DNA, 22 bp, synthetic construct
  misc_feature 1..22: note = chemically synthesized
  source 1..22: mol_type = other DNA
actttttgttgaagtagaattt

SEQ ID NO: 5245 - DNA, 22 bp, synthetic construct
  misc_feature 1..22: note = chemically synthesized
  source 1..22: mol_type = other DNA
tttgttgaagtagaattttttc

SEQ ID NO: 5246 - DNA, 22 bp, synthetic construct
  misc_feature 1..22: note = chemically synthesized
  source 1..22: mol_type = other DNA
ttgttgaagtagaattttttct

SEQ ID NO: 5247 - DNA, 22 bp, synthetic construct
  misc_feature 1..22: note = chemically synthesized
  source 1..22: mol_type = other DNA
tgttgaagtagaattttttctt

SEQ ID NO: 5248 - DNA, 22 bp, synthetic construct
  misc_feature 1..22: note = chemically synthesized
  source 1..22: mol_type = other DNA
gttgaagtagaattttttcttc

SEQ ID NO: 5249 - DNA, 22 bp, synthetic construct
  misc_feature 1..22: note = chemically synthesized
  source 1..22: mol_type = other DNA
ttgaagtagaattttttcttct

SEQ ID NO: 5250 - DNA, 22 bp, synthetic construct
  misc_feature 1..22: note = chemically synthesized
  source 1..22: mol_type = other DNA
aagtagaattttttcttctagg

SEQ ID NO: 5251 - DNA, 22 bp, synthetic construct
  misc_feature 1..22: note = chemically synthesized
  source 1..22: mol_type = other DNA
tttcttctaggaggctttcaag

SEQ ID NO: 5252 - DNA, 22 bp, synthetic construct
  misc_feature 1..22: note = chemically synthesized
  source 1..22: mol_type = other DNA
ttcttctaggaggctttcaagt

SEQ ID NO: 5253 - DNA, 22 bp, synthetic construct
  misc_feature 1..22: note = chemically synthesized
  source 1..22: mol_type = other DNA
tcttctaggaggctttcaagtt

SEQ ID NO: 5254 - DNA, 22 bp, synthetic construct
  misc_feature 1..22: note = chemically synthesized
  source 1..22: mol_type = other DNA
cttctaggaggctttcaagttt

SEQ ID NO: 5255 - DNA, 22 bp, synthetic construct
  misc_feature 1..22: note = chemically synthesized
  source 1..22: mol_type = other DNA
ttctaggaggctttcaagtttt

SEQ ID NO: 5256 - DNA, 22 bp, synthetic construct
  misc_feature 1..22: note = chemically synthesized
  source 1..22: mol_type = other DNA
ctaggaggctttcaagttttga

SEQ ID NO: 5257 - DNA, 22 bp, synthetic construct
  misc_feature 1..22: note = chemically synthesized
  source 1..22: mol_type = other DNA
taggaggctttcaagttttgag

SEQ ID NO: 5258 - DNA, 22 bp, synthetic construct
  misc_feature 1..22: note = chemically synthesized
  source 1..22: mol_type = other DNA
ggaggctttcaagttttgagtt

SEQ ID NO: 5259 - DNA, 22 bp, synthetic construct
  misc_feature 1..22: note = chemically synthesized
  source 1..22: mol_type = other DNA
tcaagttttgagttgagttcaa

SEQ ID NO: 5260 - DNA, 22 bp, synthetic construct
  misc_feature 1..22: note = chemically synthesized
  source 1..22: mol_type = other DNA
caagttttgagttgagttcaag

SEQ ID NO: 5261 - DNA, 22 bp, synthetic construct
  misc_feature 1..22: note = chemically synthesized
  source 1..22: mol_type = other DNA
aagttttgagttgagttcaagt

SEQ ID NO: 5262 - DNA, 22 bp, synthetic construct
  misc_feature 1..22: note = chemically synthesized
  source 1..22: mol_type = other DNA
tgagttgagttcaagtgacata

SEQ ID NO: 5263 - DNA, 22 bp, synthetic construct
  misc_feature 1..22: note = chemically synthesized
  source 1..22: mol_type = other DNA
gagttgagttcaagtgacatat

SEQ ID NO: 5264 - DNA, 22 bp, synthetic construct
  misc_feature 1..22: note = chemically synthesized
  source 1..22: mol_type = other DNA
agttgagttcaagtgacatatt

SEQ ID NO: 5265 - DNA, 22 bp, synthetic construct
  misc_feature 1..22: note = chemically synthesized
  source 1..22: mol_type = other DNA
agttcaagtgacatattcttta

SEQ ID NO: 5266 - DNA, 22 bp, synthetic construct
  misc_feature 1..22: note = chemically synthesized
  source 1..22: mol_type = other DNA
aagtgacatattctttacctct

SEQ ID NO: 5267 - DNA, 22 bp, synthetic construct
  misc_feature 1..22: note = chemically synthesized
  source 1..22: mol_type = other DNA
tttacctcttcatttttgactt

SEQ ID NO: 5268 - DNA, 22 bp, synthetic construct
  misc_feature 1..22: note = chemically synthesized
  source 1..22: mol_type = other DNA
tacctcttcatttttgacttgt

SEQ ID NO: 5269 - DNA, 22 bp, synthetic construct
  misc_feature 1..22: note = chemically synthesized
  source 1..22: mol_type = other DNA
acctcttcatttttgacttgta

SEQ ID NO: 5270 - DNA, 22 bp, synthetic construct
  misc_feature 1..22: note = chemically synthesized
  source 1..22: mol_type = other DNA
cctcttcatttttgacttgtag

SEQ ID NO: 5271 - DNA, 22 bp, synthetic construct
  misc_feature 1..22: note = chemically synthesized
  source 1..22: mol_type = other DNA
ttcatttttgacttgtagttta

SEQ ID NO: 5272 - DNA, 22 bp, synthetic construct
  misc_feature 1..22: note = chemically synthesized
  source 1..22: mol_type = other DNA
catttttgacttgtagtttata

SEQ ID NO: 5273 - DNA, 22 bp, synthetic construct
  misc_feature 1..22: note = chemically synthesized
  source 1..22: mol_type = other DNA
atttttgacttgtagtttatat

SEQ ID NO: 5274 - DNA, 22 bp, synthetic construct
  misc_feature 1..22: note = chemically synthesized
  source 1..22: mol_type = other DNA
ttgacttgtagtttatatgtag

SEQ ID NO: 5275 - DNA, 22 bp, synthetic construct
  misc_feature 1..22: note = chemically synthesized
  source 1..22: mol_type = other DNA
tgacttgtagtttatatgtagt

SEQ ID NO: 5276 - DNA, 22 bp, synthetic construct
  misc_feature 1..22: note = chemically synthesized
  source 1..22: mol_type = other DNA
gacttgtagtttatatgtagtt

SEQ ID NO: 5277 - DNA, 22 bp, synthetic construct
  misc_feature 1..22: note = chemically synthesized
  source 1..22: mol_type = other DNA
acttgtagtttatatgtagttc

SEQ ID NO: 5278 - DNA, 22 bp, synthetic construct
  misc_feature 1..22: note = chemically synthesized
  source 1..22: mol_type = other DNA
gtagtttatatgtagttcttct

SEQ ID NO: 5279 - DNA, 22 bp, synthetic construct
  misc_feature 1..22: note = chemically synthesized
  source 1..22: mol_type = other DNA
tagtttatatgtagttcttctc

SEQ ID NO: 5280 - DNA, 22 bp, synthetic construct
  misc_feature 1..22: note = chemically synthesized
  source 1..22: mol_type = other DNA
atatgtagttcttctcagttcc

SEQ ID NO: 5281 - DNA, 22 bp, synthetic construct
  misc_feature 1..22: note = chemically synthesized
  source 1..22: mol_type = other DNA
tatgtagttcttctcagttcct

SEQ ID NO: 5282 - DNA, 22 bp, synthetic construct
  misc_feature 1..22: note = chemically synthesized
  source 1..22: mol_type = other DNA
ttctcagttccttttcttcttc

SEQ ID NO: 5283 - DNA, 22 bp, synthetic construct
  misc_feature 1..22: note = chemically synthesized
  source 1..22: mol_type = other DNA
ctcagttccttttcttcttctt

SEQ ID NO: 5284 - DNA, 22 bp, synthetic construct
  misc_feature 1..22: note = chemically synthesized
  source 1..22: mol_type = other DNA
tcagttccttttcttcttcttt

SEQ ID NO: 5285 - DNA, 22 bp, synthetic construct
  misc_feature 1..22: note = chemically synthesized
  source 1..22: mol_type = other DNA
agttccttttcttcttctttga

SEQ ID NO: 5286 - DNA, 22 bp, synthetic construct
  misc_feature 1..22: note = chemically synthesized
  source 1..22: mol_type = other DNA
cttttcttcttctttgatttca

SEQ ID NO: 5287 - DNA, 22 bp, synthetic construct
  misc_feature 1..22: note = chemically synthesized
  source 1..22: mol_type = other DNA
ttcttcttctttgatttcactg

SEQ ID NO: 5288 - DNA, 22 bp, synthetic construct
  misc_feature 1..22: note = chemically synthesized
  source 1..22: mol_type = other DNA
tcttcttctttgatttcactgg

SEQ ID NO: 5289 - DNA, 22 bp, synthetic construct
  misc_feature 1..22: note = chemically synthesized
  source 1..22: mol_type = other DNA
cttcttctttgatttcactggt

SEQ ID NO: 5290 - DNA, 22 bp, synthetic construct
  misc_feature 1..22: note = chemically synthesized
  source 1..22: mol_type = other DNA
ttcttctttgatttcactggtt

SEQ ID NO: 5291 - DNA, 22 bp, synthetic construct
  misc_feature 1..22: note = chemically synthesized
  source 1..22: mol_type = other DNA
cttctttgatttcactggtttg

SEQ ID NO: 5292 - DNA, 22 bp, synthetic construct
  misc_feature 1..22: note = chemically synthesized
  source 1..22: mol_type = other DNA
ttctttgatttcactggtttgc

SEQ ID NO: 5293 - DNA, 22 bp, synthetic construct
  misc_feature 1..22: note = chemically synthesized
  source 1..22: mol_type = other DNA
ctttgatttcactggtttgcag

SEQ ID NO: 5294 - DNA, 22 bp, synthetic construct
  misc_feature 1..22: note = chemically synthesized
  source 1..22: mol_type = other DNA
tttgatttcactggtttgcagc

SEQ ID NO: 5295 - DNA, 22 bp, synthetic construct
  misc_feature 1..22: note = chemically synthesized
  source 1..22: mol_type = other DNA
tgatttcactggtttgcagcga

SEQ ID NO: 5296 - DNA, 22 bp, synthetic construct
  misc_feature 1..22: note = chemically synthesized
  source 1..22: mol_type = other DNA
gatttcactggtttgcagcgat

SEQ ID NO: 5297 - DNA, 22 bp, synthetic construct
  misc_feature 1..22: note = chemically synthesized
  source 1..22: mol_type = other DNA
atttcactggtttgcagcgata

SEQ ID NO: 5298 - DNA, 22 bp, synthetic construct
  misc_feature 1..22: note = chemically synthesized
  source 1..22: mol_type = other DNA
cactggtttgcagcgatagatc

SEQ ID NO: 5299 - DNA, 22 bp, synthetic construct
  misc_feature 1..22: note = chemically synthesized
  source 1..22: mol_type = other DNA
actggtttgcagcgatagatca

SEQ ID NO: 5300 - DNA, 22 bp, synthetic construct
  misc_feature 1..22: note = chemically synthesized
  source 1..22: mol_type = other DNA
gtttgcagcgatagatcataaa

SEQ ID NO: 5301 - DNA, 22 bp, synthetic construct
  misc_feature 1..22: note = chemically synthesized
  source 1..22: mol_type = other DNA
gcagcgatagatcataaaaaga

SEQ ID NO: 5302 - DNA, 22 bp, synthetic construct
  misc_feature 1..22: note = chemically synthesized
  source 1..22: mol_type = other DNA
cagcgatagatcataaaaagac

SEQ ID NO: 5303 - DNA, 22 bp, synthetic construct
  misc_feature 1..22: note = chemically synthesized
  source 1..22: mol_type = other DNA
atcaaatatgttgagtttttga

SEQ ID NO: 5304 - DNA, 22 bp, synthetic construct
  misc_feature 1..22: note = chemically synthesized
  source 1..22: mol_type = other DNA
agtttttgaaatatgtcattaa

SEQ ID NO: 5305 - DNA, 22 bp, synthetic construct
  misc_feature 1..22: note = chemically synthesized
  source 1..22: mol_type = other DNA
ttgaaatatgtcattaatttgg

SEQ ID NO: 5306 - DNA, 22 bp, synthetic construct
  misc_feature 1..22: note = chemically synthesized
  source 1..22: mol_type = other DNA
tgaaatatgtcattaatttggc

SEQ ID NO: 5307 - DNA, 22 bp, synthetic construct
  misc_feature 1..22: note = chemically synthesized
  source 1..22: mol_type = other DNA
gaaatatgtcattaatttggcc

SEQ ID NO: 5308 - DNA, 22 bp, synthetic construct
  misc_feature 1..22: note = chemically synthesized
  source 1..22: mol_type = other DNA
aaatatgtcattaatttggccc

SEQ ID NO: 5309 - DNA, 22 bp, synthetic construct
  misc_feature 1..22: note = chemically synthesized
  source 1..22: mol_type = other DNA
atttggcccttcgtcttatgga

SEQ ID NO: 5310 - DNA, 22 bp, synthetic construct
  misc_feature 1..22: note = chemically synthesized
  source 1..22: mol_type = other DNA
ggcccttcgtcttatggacaaa

SEQ ID NO: 5311 - DNA, 22 bp, synthetic construct
  misc_feature 1..22: note = chemically synthesized
  source 1..22: mol_type = other DNA
gcccttcgtcttatggacaaag

SEQ ID NO: 5312 - DNA, 22 bp, synthetic construct
  misc_feature 1..22: note = chemically synthesized
  source 1..22: mol_type = other DNA
cgtcttatggacaaagtcttta

SEQ ID NO: 5313 - DNA, 22 bp, synthetic construct
  misc_feature 1..22: note = chemically synthesized
  source 1..22: mol_type = other DNA
gtcttatggacaaagtctttaa

SEQ ID NO: 5314 - DNA, 22 bp, synthetic construct
  misc_feature 1..22: note = chemically synthesized
  source 1..22: mol_type = other DNA
atggacaaagtctttaagacca

SEQ ID NO: 5315 - DNA, 22 bp, synthetic construct
  misc_feature 1..22: note = chemically synthesized
  source 1..22: mol_type = other DNA
tggacaaagtctttaagaccat

SEQ ID NO: 5316 - DNA, 22 bp, synthetic construct
  misc_feature 1..22: note = chemically synthesized
  source 1..22: mol_type = other DNA
taagaccatgtcccaactgaag

SEQ ID NO: 5317 - DNA, 22 bp, synthetic construct
  misc_feature 1..22: note = chemically synthesized
  source 1..22: mol_type = other DNA
aagaccatgtcccaactgaagg

SEQ ID NO: 5318 - DNA, 22 bp, synthetic construct
  misc_feature 1..22: note = chemically synthesized
  source 1..22: mol_type = other DNA
agaccatgtcccaactgaagga

SEQ ID NO: 5319 - DNA, 22 bp, synthetic construct
  misc_feature 1..22: note = chemically synthesized
  source 1..22: mol_type = other DNA
aaggaggccattggctaaaatt

SEQ ID NO: 5320 - DNA, 22 bp, synthetic construct
  misc_feature 1..22: note = chemically synthesized
  source 1..22: mol_type = other DNA
gctaaaatttttacatcgtcta

SEQ ID NO: 5321 - DNA, 22 bp, synthetic construct
  misc_feature 1..22: note = chemically synthesized
  source 1..22: mol_type = other DNA
aaatttttacatcgtctaacat

SEQ ID NO: 5322 - DNA, 22 bp, synthetic construct
  misc_feature 1..22: note = chemically synthesized
  source 1..22: mol_type = other DNA
ttacatcgtctaacatagcaaa

SEQ ID NO: 5323 - DNA, 22 bp, synthetic construct
  misc_feature 1..22: note = chemically synthesized
  source 1..22: mol_type = other DNA
tacatcgtctaacatagcaaat

SEQ ID NO: 5324 - DNA, 22 bp, synthetic construct
  misc_feature 1..22: note = chemically synthesized
  source 1..22: mol_type = other DNA
acatcgtctaacatagcaaatc

SEQ ID NO: 5325 - DNA, 22 bp, synthetic construct
  misc_feature 1..22: note = chemically synthesized
  source 1..22: mol_type = other DNA
catcgtctaacatagcaaatct

SEQ ID NO: 5326 - DNA, 22 bp, synthetic construct
  misc_feature 1..22: note = chemically synthesized
  source 1..22: mol_type = other DNA
acatagcaaatcttgattttgg

SEQ ID NO: 5327 - DNA, 22 bp, synthetic construct
  misc_feature 1..22: note = chemically synthesized
  source 1..22: mol_type = other DNA
gattttggctctggagatagag

SEQ ID NO: 5328 - DNA, 22 bp, synthetic construct
  misc_feature 1..22: note = chemically synthesized
  source 1..22: mol_type = other DNA
attttggctctggagatagaga

SEQ ID NO: 5329 - DNA, 22 bp, synthetic construct
  misc_feature 1..22: note = chemically synthesized
  source 1..22: mol_type = other DNA
tggctctggagatagagaatca

SEQ ID NO: 5330 - DNA, 22 bp, synthetic construct
  misc_feature 1..22: note = chemically synthesized
  source 1..22: mol_type = other DNA
ggctctggagatagagaatcaa

SEQ ID NO: 5331 - DNA, 22 bp, synthetic construct
  misc_feature 1..22: note = chemically synthesized
  source 1..22: mol_type = other DNA
gctctggagatagagaatcaaa

SEQ ID NO: 5332 - DNA, 22 bp, synthetic construct
  misc_feature 1..22: note = chemically synthesized
  source 1..22: mol_type = other DNA
tggagatagagaatcaaatgat

SEQ ID NO: 5333 - DNA, 22 bp, synthetic construct
  misc_feature 1..22: note = chemically synthesized
  source 1..22: mol_type = other DNA
gagatagagaatcaaatgatga

SEQ ID NO: 5334 - DNA, 22 bp, synthetic construct
  misc_feature 1..22: note = chemically synthesized
  source 1..22: mol_type = other DNA
tcttgatcaattctggaggaaa

SEQ ID NO: 5335 - DNA, 22 bp, synthetic construct
  misc_feature 1..22: note = chemically synthesized
  source 1..22: mol_type = other DNA
gatcaattctggaggaaataac

SEQ ID NO: 5336 - DNA, 22 bp, synthetic construct
  misc_feature 1..22: note = chemically synthesized
  source 1..22: mol_type = other DNA
atcaattctggaggaaataact

SEQ ID NO: 5337 - DNA, 22 bp, synthetic construct
  misc_feature 1..22: note = chemically synthesized
  source 1..22: mol_type = other DNA
tggaggaaataactagaggaac

SEQ ID NO: 5338 - DNA, 22 bp, synthetic construct
  misc_feature 1..22: note = chemically synthesized
  source 1..22: mol_type = other DNA
gaggaaataactagaggaacaa

SEQ ID NO: 5339 - DNA, 22 bp, synthetic construct
  misc_feature 1..22: note = chemically synthesized
  source 1..22: mol_type = other DNA
gaggaacaataaaaagaaggag

SEQ ID NO: 5340 - DNA, 22 bp, synthetic construct
  misc_feature 1..22: note = chemically synthesized
  source 1..22: mol_type = other DNA
aattgtgaacatttttatcttg

SEQ ID NO: 5341 - DNA, 22 bp, synthetic construct
  misc_feature 1..22: note = chemically synthesized
  source 1..22: mol_type = other DNA
attgtgaacatttttatcttga

SEQ ID NO: 5342 - DNA, 22 bp, synthetic construct
  misc_feature 1..22: note = chemically synthesized
  source 1..22: mol_type = other DNA
tgaacatttttatcttgatttt

SEQ ID NO: 5343 - DNA, 22 bp, synthetic construct
  misc_feature 1..22: note = chemically synthesized
  source 1..22: mol_type = other DNA
ttatcttgattttcaatttcaa

SEQ ID NO: 5344 - DNA, 22 bp, synthetic construct
  misc_feature 1..22: note = chemically synthesized
  source 1..22: mol_type = other DNA
tatcttgattttcaatttcaag

SEQ ID NO: 5345 - DNA, 22 bp, synthetic construct
  misc_feature 1..22: note = chemically synthesized
  source 1..22: mol_type = other DNA
atcttgattttcaatttcaagc

SEQ ID NO: 5346 - DNA, 22 bp, synthetic construct
  misc_feature 1..22: note = chemically synthesized
  source 1..22: mol_type = other DNA
tcttgattttcaatttcaagca

SEQ ID NO: 5347 - DNA, 22 bp, synthetic construct
  misc_feature 1..22: note = chemically synthesized
  source 1..22: mol_type = other DNA
gattttcaatttcaagcaacgt

SEQ ID NO: 5348 - DNA, 22 bp, synthetic construct
  misc_feature 1..22: note = chemically synthesized
  source 1..22: mol_type = other DNA
attttcaatttcaagcaacgtg

SEQ ID NO: 5349 - DNA, 22 bp, synthetic construct
  misc_feature 1..22: note = chemically synthesized
  source 1..22: mol_type = other DNA
tcaatttcaagcaacgtggaac

SEQ ID NO: 5350 - DNA, 22 bp, synthetic construct
  misc_feature 1..22: note = chemically synthesized
  source 1..22: mol_type = other DNA
caatttcaagcaacgtggaact

SEQ ID NO: 5351 - DNA, 22 bp, synthetic construct
  misc_feature 1..22: note = chemically synthesized
  source 1..22: mol_type = other DNA
aatttcaagcaacgtggaactg

SEQ ID NO: 5352 - DNA, 22 bp, synthetic construct
  misc_feature 1..22: note = chemically synthesized
  source 1..22: mol_type = other DNA
caagcaacgtggaactgttttc

SEQ ID NO: 5353 - DNA, 22 bp, synthetic construct
  misc_feature 1..22: note = chemically synthesized
  source 1..22: mol_type = other DNA
aagcaacgtggaactgttttct

SEQ ID NO: 5354 - DNA, 22 bp, synthetic construct
  misc_feature 1..22: note = chemically synthesized
  source 1..22: mol_type = other DNA
ttttcttctggaagcagaccta

SEQ ID NO: 5355 - DNA, 22 bp, synthetic construct
  misc_feature 1..22: note = chemically synthesized
  source 1..22: mol_type = other DNA
tcttctggaagcagacctagac

SEQ ID NO: 5356 - DNA, 22 bp, synthetic construct
  misc_feature 1..22: note = chemically synthesized
  source 1..22: mol_type = other DNA
cttctggaagcagacctagact

SEQ ID NO: 5357 - DNA, 22 bp, synthetic construct
  misc_feature 1..22: note = chemically synthesized
  source 1..22: mol_type = other DNA
ttctggaagcagacctagactt

SEQ ID NO: 5358 - DNA, 22 bp, synthetic construct
  misc_feature 1..22: note = chemically synthesized
  source 1..22: mol_type = other DNA
ctggaagcagacctagacttct

SEQ ID NO: 5359 - DNA, 22 bp, synthetic construct
  misc_feature 1..22: note = chemically synthesized
  source 1..22: mol_type = other DNA
tggaagcagacctagacttctt

SEQ ID NO: 5360 - DNA, 22 bp, synthetic construct
  misc_feature 1..22: note = chemically synthesized
  source 1..22: mol_type = other DNA
gaagcagacctagacttcttaa

SEQ ID NO: 5361 - DNA, 22 bp, synthetic construct
  misc_feature 1..22: note = chemically synthesized
  source 1..22: mol_type = other DNA
gacttcttaactctatatatac

SEQ ID NO: 5362 - DNA, 22 bp, synthetic construct
  misc_feature 1..22: note = chemically synthesized
  source 1..22: mol_type = other DNA
cttaactctatatataccaata

SEQ ID NO: 5363 - DNA, 22 bp, synthetic construct
  misc_feature 1..22: note = chemically synthesized
  source 1..22: mol_type = other DNA
ttaactctatatataccaatat

SEQ ID NO: 5364 - DNA, 22 bp, synthetic construct
  misc_feature 1..22: note = chemically synthesized
  source 1..22: mol_type = other DNA
aactctatatataccaatattt

SEQ ID NO: 5365 - DNA, 22 bp, synthetic construct
  misc_feature 1..22: note = chemically synthesized
  source 1..22: mol_type = other DNA
actctatatataccaatatttg

SEQ ID NO: 5366 - DNA, 22 bp, synthetic construct
  misc_feature 1..22: note = chemically synthesized
  source 1..22: mol_type = other DNA
tatatataccaatatttgccca

SEQ ID NO: 5367 - DNA, 22 bp, synthetic construct
  misc_feature 1..22: note = chemically synthesized
  source 1..22: mol_type = other DNA
tatataccaatatttgcccaga

SEQ ID NO: 5368 - DNA, 22 bp, synthetic construct
  misc_feature 1..22: note = chemically synthesized
  source 1..22: mol_type = other DNA
gcccagaaaaggtaaggttggt

SEQ ID NO: 5369 - DNA, 22 bp, synthetic construct
  misc_feature 1..22: note = chemically synthesized
  source 1..22: mol_type = other DNA
cccagaaaaggtaaggttggta

SEQ ID NO: 5370 - DNA, 22 bp, synthetic construct
  misc_feature 1..22: note = chemically synthesized
  source 1..22: mol_type = other DNA
gtaggtgaacatagttaatcat

SEQ ID NO: 5371 - DNA, 22 bp, synthetic construct
  misc_feature 1..22: note = chemically synthesized
  source 1..22: mol_type = other DNA
atcattaagccgtgttaacttg

SEQ ID NO: 5372 - DNA, 22 bp, synthetic construct
  misc_feature 1..22: note = chemically synthesized
  source 1..22: mol_type = other DNA
agccgtgttaacttgcacgaat

SEQ ID NO: 5373 - DNA, 22 bp, synthetic construct
  misc_feature 1..22: note = chemically synthesized
  source 1..22: mol_type = other DNA
acttgcacgaatgtaaccttct

SEQ ID NO: 5374 - DNA, 22 bp, synthetic construct
  misc_feature 1..22: note = chemically synthesized
  source 1..22: mol_type = other DNA
gcacgaatgtaaccttcttcca

SEQ ID NO: 5375 - DNA, 22 bp, synthetic construct
  misc_feature 1..22: note = chemically synthesized
  source 1..22: mol_type = other DNA
cacgaatgtaaccttcttccac

SEQ ID NO: 5376 - DNA, 22 bp, synthetic construct
  misc_feature 1..22: note = chemically synthesized
  source 1..22: mol_type = other DNA
cttccacattgagttagatcaa

SEQ ID NO: 5377 - DNA, 22 bp, synthetic construct
  misc_feature 1..22: note = chemically synthesized
  source 1..22: mol_type = other DNA
ttccacattgagttagatcaat

SEQ ID NO: 5378 - DNA, 22 bp, synthetic construct
  misc_feature 1..22: note = chemically synthesized
  source 1..22: mol_type = other DNA
ccacattgagttagatcaatgc

SEQ ID NO: 5379 - DNA, 22 bp, synthetic construct
  misc_feature 1..22: note = chemically synthesized
  source 1..22: mol_type = other DNA
cacattgagttagatcaatgct

SEQ ID NO: 5380 - DNA, 22 bp, synthetic construct
  misc_feature 1..22: note = chemically synthesized
  source 1..22: mol_type = other DNA
agttagatcaatgctaaatgaa

SEQ ID NO: 5381 - DNA, 22 bp, synthetic construct
  misc_feature 1..22: note = chemically synthesized
  source 1..22: mol_type = other DNA
gatcaatgctaaatgaaatcaa

SEQ ID NO: 5382 - DNA, 22 bp, synthetic construct
  misc_feature 1..22: note = chemically synthesized
  source 1..22: mol_type = other DNA
aatgaaatcaaagaaatgagca

SEQ ID NO: 5383 - DNA, 22 bp, synthetic construct
  misc_feature 1..22: note = chemically synthesized
  source 1..22: mol_type = other DNA
acttaataggtaatttgaaatt

SEQ ID NO: 5384 - DNA, 22 bp, synthetic construct
  misc_feature 1..22: note = chemically synthesized
  source 1..22: mol_type = other DNA
aataggtaatttgaaattgtat

SEQ ID NO: 5385 - DNA, 22 bp, synthetic construct
  misc_feature 1..22: note = chemically synthesized
  source 1..22: mol_type = other DNA
ataggtaatttgaaattgtatt

SEQ ID NO: 5386 - DNA, 22 bp, synthetic construct
  misc_feature 1..22: note = chemically synthesized
  source 1..22: mol_type = other DNA
gaaattgtatttaactttgctg

SEQ ID NO: 5387 - DNA, 22 bp, synthetic construct
  misc_feature 1..22: note = chemically synthesized
  source 1..22: mol_type = other DNA
aaattgtatttaactttgctgt

SEQ ID NO: 5388 - DNA, 22 bp, synthetic construct
  misc_feature 1..22: note = chemically synthesized
  source 1..22: mol_type = other DNA
tatttaactttgctgtattata

SEQ ID NO: 5389 - DNA, 22 bp, synthetic construct
  misc_feature 1..22: note = chemically synthesized
  source 1..22: mol_type = other DNA
aactttgctgtattataaacta

SEQ ID NO: 5390 - DNA, 22 bp, synthetic construct
  misc_feature 1..22: note = chemically synthesized
  source 1..22: mol_type = other DNA
actttgctgtattataaactac

SEQ ID NO: 5391 - DNA, 22 bp, synthetic construct
  misc_feature 1..22: note = chemically synthesized
  source 1..22: mol_type = other DNA
tgctgtattataaactacacat

SEQ ID NO: 5392 - DNA, 22 bp, synthetic construct
  misc_feature 1..22: note = chemically synthesized
  source 1..22: mol_type = other DNA
gctgtattataaactacacatt

SEQ ID NO: 5393 - DNA, 22 bp, synthetic construct
  misc_feature 1..22: note = chemically synthesized
  source 1..22: mol_type = other DNA
ctgtattataaactacacattc

SEQ ID NO: 5394 - DNA, 22 bp, synthetic construct
  misc_feature 1..22: note = chemically synthesized
  source 1..22: mol_type = other DNA
tattataaactacacattcaat

SEQ ID NO: 5395 - DNA, 22 bp, synthetic construct
  misc_feature 1..22: note = chemically synthesized
  source 1..22: mol_type = other DNA
taaactacacattcaatgctat

SEQ ID NO: 5396 - DNA, 22 bp, synthetic construct
  misc_feature 1..22: note = chemically synthesized
  source 1..22: mol_type = other DNA
cacattcaatgctatggtgact

SEQ ID NO: 5397 - DNA, 22 bp, synthetic construct
  misc_feature 1..22: note = chemically synthesized
  source 1..22: mol_type = other DNA
aatgctatggtgactacctgtt

SEQ ID NO: 5398 - DNA, 22 bp, synthetic construct
  misc_feature 1..22: note = chemically synthesized
  source 1..22: mol_type = other DNA
tggtgactacctgtttttaaaa

SEQ ID NO: 5399 - DNA, 22 bp, synthetic construct
  misc_feature 1..22: note = chemically synthesized
  source 1..22: mol_type = other DNA
cctgtttttaaaagctaatttt

SEQ ID NO: 5400 - DNA, 22 bp, synthetic construct
  misc_feature 1..22: note = chemically synthesized
  source 1..22: mol_type = other DNA
tttttaaaagctaattttactt

SEQ ID NO: 5401 - DNA, 22 bp, synthetic construct
  misc_feature 1..22: note = chemically synthesized
  source 1..22: mol_type = other DNA
ttaaaagctaattttacttttt

SEQ ID NO: 5402 - DNA, 22 bp, synthetic construct
  misc_feature 1..22: note = chemically synthesized
  source 1..22: mol_type = other DNA
taaaagctaattttactttttt

SEQ ID NO: 5403 - DNA, 22 bp, synthetic construct
  misc_feature 1..22: note = chemically synthesized
  source 1..22: mol_type = other DNA
aaaagctaattttactttttta

SEQ ID NO: 5404 - DNA, 22 bp, synthetic construct
  misc_feature 1..22: note = chemically synthesized
  source 1..22: mol_type = other DNA
aaagctaattttacttttttat

SEQ ID NO: 5405 - DNA, 22 bp, synthetic construct
  misc_feature 1..22: note = chemically synthesized
  source 1..22: mol_type = other DNA
attttacttttttatgatttta

SEQ ID NO: 5406 - DNA, 22 bp, synthetic construct
  misc_feature 1..22: note = chemically synthesized
  source 1..22: mol_type = other DNA
tacttttttatgattttaagag

SEQ ID NO: 5407 - DNA, 22 bp, synthetic construct
  misc_feature 1..22: note = chemically synthesized
  source 1..22: mol_type = other DNA
acttttttatgattttaagaga

SEQ ID NO: 5408 - DNA, 22 bp, synthetic construct
  misc_feature 1..22: note = chemically synthesized
  source 1..22: mol_type = other DNA
cttttttatgattttaagagat

SEQ ID NO: 5409 - DNA, 22 bp, synthetic construct
  misc_feature 1..22: note = chemically synthesized
  source 1..22: mol_type = other DNA
ttttatgattttaagagattta

SEQ ID NO: 5410 - DNA, 22 bp, synthetic construct
  misc_feature 1..22: note = chemically synthesized
  source 1..22: mol_type = other DNA
tttatgattttaagagatttac

SEQ ID NO: 5411 - DNA, 22 bp, synthetic construct
  misc_feature 1..22: note = chemically synthesized
  source 1..22: mol_type = other DNA
ttatgattttaagagatttaca

SEQ ID NO: 5412 - DNA, 22 bp, synthetic construct
  misc_feature 1..22: note = chemically synthesized
  source 1..22: mol_type = other DNA
tatgattttaagagatttacaa

SEQ ID NO: 5413 - DNA, 22 bp, synthetic construct
  misc_feature 1..22: note = chemically synthesized
  source 1..22: mol_type = other DNA
atgattttaagagatttacaag

SEQ ID NO: 5414 - DNA, 22 bp, synthetic construct
  misc_feature 1..22: note = chemically synthesized
  source 1..22: mol_type = other DNA
tgattttaagagatttacaagt

SEQ ID NO: 5415 - DNA, 22 bp, synthetic construct
  misc_feature 1..22: note = chemically synthesized
  source 1..22: mol_type = other DNA
taagagatttacaagtcaaaaa

SEQ ID NO: 5416 - DNA, 22 bp, synthetic construct
  misc_feature 1..22: note = chemically synthesized
  source 1..22: mol_type = other DNA
aagagatttacaagtcaaaaat

SEQ ID NO: 5417 - DNA, 22 bp, synthetic construct
  misc_feature 1..22: note = chemically synthesized
  source 1..22: mol_type = other DNA
agagatttacaagtcaaaaata

SEQ ID NO: 5418 - DNA, 22 bp, synthetic construct
  misc_feature 1..22: note = chemically synthesized
  source 1..22: mol_type = other DNA
acaagtcaaaaataaacttttt

SEQ ID NO: 5419 - DNA, 22 bp, synthetic construct
  misc_feature 1..22: note = chemically synthesized
  source 1..22: mol_type = other DNA
caagtcaaaaataaactttttt

SEQ ID NO: 5420 - DNA, 22 bp, synthetic construct
  misc_feature 1..22: note = chemically synthesized
  source 1..22: mol_type = other DNA
ttttgttgggtaaatttattat

SEQ ID NO: 5421 - DNA, 22 bp, synthetic construct
  misc_feature 1..22: note = chemically synthesized
  source 1..22: mol_type = other DNA
tttgttgggtaaatttattatt

SEQ ID NO: 5422 - DNA, 22 bp, synthetic construct
  misc_feature 1..22: note = chemically synthesized
  source 1..22: mol_type = other DNA
ttgttgggtaaatttattatta

SEQ ID NO: 5423 - DNA, 22 bp, synthetic construct
  misc_feature 1..22: note = chemically synthesized
  source 1..22: mol_type = other DNA
tgttgggtaaatttattattaa

SEQ ID NO: 5424 - DNA, 22 bp, synthetic construct
  misc_feature 1..22: note = chemically synthesized
  source 1..22: mol_type = other DNA
gttgggtaaatttattattaaa

SEQ ID NO: 5425 - DNA, 22 bp, synthetic construct
  misc_feature 1..22: note = chemically synthesized
  source 1..22: mol_type = other DNA
ttgggtaaatttattattaaag

SEQ ID NO: 5426 - DNA, 22 bp, synthetic construct
  misc_feature 1..22: note = chemically synthesized
  source 1..22: mol_type = other DNA
ggtaaatttattattaaagttg

SEQ ID NO: 5427 - DNA, 22 bp, synthetic construct
  misc_feature 1..22: note = chemically synthesized
  source 1..22: mol_type = other DNA
attattaaagttgaggggaaaa

SEQ ID NO: 5428 - DNA, 22 bp, synthetic construct
  misc_feature 1..22: note = chemically synthesized
  source 1..22: mol_type = other DNA
ttattaaagttgaggggaaaaa

SEQ ID NO: 5429 - DNA, 22 bp, synthetic construct
  misc_feature 1..22: note = chemically synthesized
  source 1..22: mol_type = other DNA
ttaaagttgaggggaaaaaagt

SEQ ID NO: 5430 - DNA, 22 bp, synthetic construct
  misc_feature 1..22: note = chemically synthesized
  source 1..22: mol_type = other DNA
aagttgaggggaaaaaagtaat

SEQ ID NO: 5431 - DNA, 22 bp, synthetic construct
  misc_feature 1..22: note = chemically synthesized
  source 1..22: mol_type = other DNA
aggggaaaaaagtaatgaatta

SEQ ID NO: 5432 - DNA, 20 bp, synthetic construct
  misc_feature 1..20: note = chemically synthesized
  source 1..20: mol_type = other DNA
tcccgcccgcttgctgcatc

SEQ ID NO: 5433 - DNA, 20 bp, synthetic construct
  misc_feature 1..20: note = chemically synthesized
  source 1..20: mol_type = other DNA
tgcatctggacaccctgcct

SEQ ID NO: 5434 - DNA, 20 bp, synthetic construct
  misc_feature 1..20: note = chemically synthesized
  source 1..20: mol_type = other DNA
gcatctggacaccctgcctc

SEQ ID NO: 5435 - DNA, 20 bp, synthetic construct
  misc_feature 1..20: note = chemically synthesized
  source 1..20: mol_type = other DNA
cctcaggccctcatctccac

SEQ ID NO: 5436 - DNA, 20 bp, synthetic construct
  misc_feature 1..20: note = chemically synthesized
  source 1..20: mol_type = other DNA
aggccctcatctccactggt

SEQ ID NO: 5437 - DNA, 20 bp, synthetic construct
  misc_feature 1..20: note = chemically synthesized
  source 1..20: mol_type = other DNA
ccctcatctccactggtcag

SEQ ID NO: 5438 - DNA, 20 bp, synthetic construct
  misc_feature 1..20: note = chemically synthesized
  source 1..20: mol_type = other DNA
cctcatctccactggtcagc

SEQ ID NO: 5439 - DNA, 20 bp, synthetic construct
  misc_feature 1..20: note = chemically synthesized
  source 1..20: mol_type = other DNA
gtcagcaggtgacctttgcc

SEQ ID NO: 5440 - DNA, 20 bp, synthetic construct
  misc_feature 1..20: note = chemically synthesized
  source 1..20: mol_type = other DNA
gtgacctttgcccagcgccc

SEQ ID NO: 5441 - DNA, 20 bp, synthetic construct
  misc_feature 1..20: note = chemically synthesized
  source 1..20: mol_type = other DNA
tgacctttgcccagcgccct

SEQ ID NO: 5442 - DNA, 20 bp, synthetic construct
  misc_feature 1..20: note = chemically synthesized
  source 1..20: mol_type = other DNA
tgcccagcgccctgggtcct

SEQ ID NO: 5443 - DNA, 20 bp, synthetic construct
  misc_feature 1..20: note = chemically synthesized
  source 1..20: mol_type = other DNA
gtcctcagtgcctgctgccc

SEQ ID NO: 5444 - DNA, 20 bp, synthetic construct
  misc_feature 1..20: note = chemically synthesized
  source 1..20: mol_type = other DNA
cctcagtgcctgctgccctg

SEQ ID NO: 5445 - DNA, 20 bp, synthetic construct
  misc_feature 1..20: note = chemically synthesized
  source 1..20: mol_type = other DNA
gccctggagatgatataaaa

SEQ ID NO: 5446 - DNA, 20 bp, synthetic construct
  misc_feature 1..20: note = chemically synthesized
  source 1..20: mol_type = other DNA
ccctggagatgatataaaac

SEQ ID NO: 5447 - DNA, 20 bp, synthetic construct
  misc_feature 1..20: note = chemically synthesized
  source 1..20: mol_type = other DNA
ggagatgatataaaacaggt

SEQ ID NO: 5448 - DNA, 20 bp, synthetic construct
  misc_feature 1..20: note = chemically synthesized
  source 1..20: mol_type = other DNA
aaccctcctgcctgtctgct

SEQ ID NO: 5449 - DNA, 20 bp, synthetic construct
  misc_feature 1..20: note = chemically synthesized
  source 1..20: mol_type = other DNA
ctgtctgctcagttcatccc

SEQ ID NO: 5450 - DNA, 20 bp, synthetic construct
  misc_feature 1..20: note = chemically synthesized
  source 1..20: mol_type = other DNA
gtctgctcagttcatcccta

SEQ ID NO: 5451 - DNA, 20 bp, synthetic construct
  misc_feature 1..20: note = chemically synthesized
  source 1..20: mol_type = other DNA
tctgctcagttcatccctag

SEQ ID NO: 5452 - DNA, 20 bp, synthetic construct
  misc_feature 1..20: note = chemically synthesized
  source 1..20: mol_type = other DNA
gctcagttcatccctagagg

SEQ ID NO: 5453 - DNA, 20 bp, synthetic construct
  misc_feature 1..20: note = chemically synthesized
  source 1..20: mol_type = other DNA
atccctagaggcagctgctc

SEQ ID NO: 5454 - DNA, 20 bp, synthetic construct
  misc_feature 1..20: note = chemically synthesized
  source 1..20: mol_type = other DNA
tccctagaggcagctgctcc

SEQ ID NO: 5455 - DNA, 20 bp, synthetic construct
  misc_feature 1..20: note = chemically synthesized
  source 1..20: mol_type = other DNA
ctgctccaggtaatgccctc

SEQ ID NO: 5456 - DNA, 20 bp, synthetic construct
  misc_feature 1..20: note = chemically synthesized
  source 1..20: mol_type = other DNA
tgctccaggtaatgccctct

SEQ ID NO: 5457 - DNA, 20 bp, synthetic construct
  misc_feature 1..20: note = chemically synthesized
  source 1..20: mol_type = other DNA
gctccaggtaatgccctctg

SEQ ID NO: 5458 - DNA, 20 bp, synthetic construct
  misc_feature 1..20: note = chemically synthesized
  source 1..20: mol_type = other DNA
tccaggtaatgccctctggg

SEQ ID NO: 5459 - DNA, 20 bp, synthetic construct
  misc_feature 1..20: note = chemically synthesized
  source 1..20: mol_type = other DNA
ccaggtaatgccctctgggg

SEQ ID NO: 5460 - DNA, 20 bp, synthetic construct
  misc_feature 1..20: note = chemically synthesized
  source 1..20: mol_type = other DNA
caggtaatgccctctgggga

SEQ ID NO: 5461 - DNA, 20 bp, synthetic construct
  misc_feature 1..20: note = chemically synthesized
  source 1..20: mol_type = other DNA
aggtaatgccctctggggag

SEQ ID NO: 5462 - DNA, 20 bp, synthetic construct
  misc_feature 1..20: note = chemically synthesized
  source 1..20: mol_type = other DNA
aatgccctctggggagggga

SEQ ID NO: 5463 - DNA, 20 bp, synthetic construct
  misc_feature 1..20: note = chemically synthesized
  source 1..20: mol_type = other DNA
tgccctctggggaggggaaa

SEQ ID NO: 5464 - DNA, 20 bp, synthetic construct
  misc_feature 1..20: note = chemically synthesized
  source 1..20: mol_type = other DNA
gccctctggggaggggaaag

SEQ ID NO: 5465 - DNA, 20 bp, synthetic construct
  misc_feature 1..20: note = chemically synthesized
  source 1..20: mol_type = other DNA
cctctggggaggggaaagag

SEQ ID NO: 5466 - DNA, 20 bp, synthetic construct
  misc_feature 1..20: note = chemically synthesized
  source 1..20: mol_type = other DNA
ctctggggaggggaaagagg

SEQ ID NO: 5467 - DNA, 20 bp, synthetic construct
  misc_feature 1..20: note = chemically synthesized
  source 1..20: mol_type = other DNA
tctggggaggggaaagagga

SEQ ID NO: 5468 - DNA, 20 bp, synthetic construct
  misc_feature 1..20: note = chemically synthesized
  source 1..20: mol_type = other DNA
ctggggaggggaaagaggag

SEQ ID NO: 5469 - DNA, 20 bp, synthetic construct
  misc_feature 1..20: note = chemically synthesized
  source 1..20: mol_type = other DNA
ggggaggggaaagaggaggg

SEQ ID NO: 5470 - DNA, 20 bp, synthetic construct
  misc_feature 1..20: note = chemically synthesized
  source 1..20: mol_type = other DNA
gggaggggaaagaggagggg

SEQ ID NO: 5471 - DNA, 20 bp, synthetic construct
  misc_feature 1..20: note = chemically synthesized
  source 1..20: mol_type = other DNA
gaggggaaagaggaggggag

SEQ ID NO: 5472 - DNA, 20 bp, synthetic construct
  misc_feature 1..20: note = chemically synthesized
  source 1..20: mol_type = other DNA
aggggaaagaggaggggagg

SEQ ID NO: 5473 - DNA, 20 bp, synthetic construct
  misc_feature 1..20: note = chemically synthesized
  source 1..20: mol_type = other DNA
aagaggaggggaggaggatg

SEQ ID NO: 5474 - DNA, 20 bp, synthetic construct
  misc_feature 1..20: note = chemically synthesized
  source 1..20: mol_type = other DNA
gaggaggggaggaggatgaa

SEQ ID NO: 5475 - DNA, 20 bp, synthetic construct
  misc_feature 1..20: note = chemically synthesized
  source 1..20: mol_type = other DNA
aggaggggaggaggatgaag

SEQ ID NO: 5476 - DNA, 20 bp, synthetic construct
  misc_feature 1..20: note = chemically synthesized
  source 1..20: mol_type = other DNA
ggaggggaggaggatgaaga

SEQ ID NO: 5477 - DNA, 20 bp, synthetic construct
  misc_feature 1..20: note = chemically synthesized
  source 1..20: mol_type = other DNA
gaggggaggaggatgaagag

SEQ ID NO: 5478 - DNA, 20 bp, synthetic construct
  misc_feature 1..20: note = chemically synthesized
  source 1..20: mol_type = other DNA
ggaggaggatgaagaggggc

SEQ ID NO: 5479 - DNA, 20 bp, synthetic construct
  misc_feature 1..20: note = chemically synthesized
  source 1..20: mol_type = other DNA
aggaggatgaagaggggcaa

SEQ ID NO: 5480 - DNA, 20 bp, synthetic construct
  misc_feature 1..20: note = chemically synthesized
  source 1..20: mol_type = other DNA
ggaggatgaagaggggcaag

SEQ ID NO: 5481 - DNA, 20 bp, synthetic construct
  misc_feature 1..20: note = chemically synthesized
  source 1..20: mol_type = other DNA
aggatgaagaggggcaagag

SEQ ID NO: 5482 - DNA, 20 bp, synthetic construct
  misc_feature 1..20: note = chemically synthesized
  source 1..20: mol_type = other DNA
ggcaagaggagctccctgcc

SEQ ID NO: 5483 - DNA, 20 bp, synthetic construct
  misc_feature 1..20: note = chemically synthesized
  source 1..20: mol_type = other DNA
gaggagctccctgcccagcc

SEQ ID NO: 5484 - DNA, 20 bp, synthetic construct
  misc_feature 1..20: note = chemically synthesized
  source 1..20: mol_type = other DNA
agctccctgcccagcccagc

SEQ ID NO: 5485 - DNA, 20 bp, synthetic construct
  misc_feature 1..20: note = chemically synthesized
  source 1..20: mol_type = other DNA
ccctgcccagcccagccagc

SEQ ID NO: 5486 - DNA, 20 bp, synthetic construct
  misc_feature 1..20: note = chemically synthesized
  source 1..20: mol_type = other DNA
cccagcccagccagcaagcc

SEQ ID NO: 5487 - DNA, 20 bp, synthetic construct
  misc_feature 1..20: note = chemically synthesized
  source 1..20: mol_type = other DNA
cagcccagccagcaagcctg

SEQ ID NO: 5488 - DNA, 20 bp, synthetic construct
  misc_feature 1..20: note = chemically synthesized
  source 1..20: mol_type = other DNA
cccagccagcaagcctggag

SEQ ID NO: 5489 - DNA, 20 bp, synthetic construct
  misc_feature 1..20: note = chemically synthesized
  source 1..20: mol_type = other DNA
aagcctggagaagcacttgc

SEQ ID NO: 5490 - DNA, 20 bp, synthetic construct
  misc_feature 1..20: note = chemically synthesized
  source 1..20: mol_type = other DNA
gcctggagaagcacttgcta

SEQ ID NO: 5491 - DNA, 20 bp, synthetic construct
  misc_feature 1..20: note = chemically synthesized
  source 1..20: mol_type = other DNA
gagaagcacttgctagagct

SEQ ID NO: 5492 - DNA, 20 bp, synthetic construct
  misc_feature 1..20: note = chemically synthesized
  source 1..20: mol_type = other DNA
agaagcacttgctagagcta

SEQ ID NO: 5493 - DNA, 20 bp, synthetic construct
  misc_feature 1..20: note = chemically synthesized
  source 1..20: mol_type = other DNA
agcacttgctagagctaagg

SEQ ID NO: 5494 - DNA, 20 bp, synthetic construct
  misc_feature 1..20: note = chemically synthesized
  source 1..20: mol_type = other DNA
tgctagagctaaggaagcct

SEQ ID NO: 5495 - DNA, 20 bp, synthetic construct
  misc_feature 1..20: note = chemically synthesized
  source 1..20: mol_type = other DNA
ctagagctaaggaagcctcg

SEQ ID NO: 5496 - DNA, 20 bp, synthetic construct
  misc_feature 1..20: note = chemically synthesized
  source 1..20: mol_type = other DNA
agctaaggaagcctcggagc

SEQ ID NO: 5497 - DNA, 20 bp, synthetic construct
  misc_feature 1..20: note = chemically synthesized
  source 1..20: mol_type = other DNA
aaggaagcctcggagctgga

SEQ ID NO: 5498 - DNA, 20 bp, synthetic construct
  misc_feature 1..20: note = chemically synthesized
  source 1..20: mol_type = other DNA
aggaagcctcggagctggac

SEQ ID NO: 5499 - DNA, 20 bp, synthetic construct
  misc_feature 1..20: note = chemically synthesized
  source 1..20: mol_type = other DNA
ccacccctcatcataacctg

SEQ ID NO: 5500 - DNA, 20 bp, synthetic construct
  misc_feature 1..20: note = chemically synthesized
  source 1..20: mol_type = other DNA
tcatcataacctgaagaaca

SEQ ID NO: 5501 - DNA, 20 bp, synthetic construct
  misc_feature 1..20: note = chemically synthesized
  source 1..20: mol_type = other DNA
atcataacctgaagaacatg

SEQ ID NO: 5502 - DNA, 20 bp, synthetic construct
  misc_feature 1..20: note = chemically synthesized
  source 1..20: mol_type = other DNA
tcataacctgaagaacatgg

SEQ ID NO: 5503 - DNA, 20 bp, synthetic construct
  misc_feature 1..20: note = chemically synthesized
  source 1..20: mol_type = other DNA
acctgaagaacatggaggcc

SEQ ID NO: 5504 - DNA, 20 bp, synthetic construct
  misc_feature 1..20: note = chemically synthesized
  source 1..20: mol_type = other DNA
cctgaagaacatggaggccc

SEQ ID NO: 5505 - DNA, 20 bp, synthetic construct
  misc_feature 1..20: note = chemically synthesized
  source 1..20: mol_type = other DNA
tgaagaacatggaggcccgg

SEQ ID NO: 5506 - DNA, 20 bp, synthetic construct
  misc_feature 1..20: note = chemically synthesized
  source 1..20: mol_type = other DNA
gaagaacatggaggcccggg

SEQ ID NO: 5507 - DNA, 20 bp, synthetic construct
  misc_feature 1..20: note = chemically synthesized
  source 1..20: mol_type = other DNA
aagaacatggaggcccggga

SEQ ID NO: 5508 - DNA, 20 bp, synthetic construct
  misc_feature 1..20: note = chemically synthesized
  source 1..20: mol_type = other DNA
agaacatggaggcccgggag

SEQ ID NO: 5509 - DNA, 20 bp, synthetic construct
  misc_feature 1..20: note = chemically synthesized
  source 1..20: mol_type = other DNA
ggaggggtgtcacttgccca

SEQ ID NO: 5510 - DNA, 20 bp, synthetic construct
  misc_feature 1..20: note = chemically synthesized
  source 1..20: mol_type = other DNA
gtcacttgcccaaagctaca

SEQ ID NO: 5511 - DNA, 20 bp, synthetic construct
  misc_feature 1..20: note = chemically synthesized
  source 1..20: mol_type = other DNA
tcacttgcccaaagctacac

SEQ ID NO: 5512 - DNA, 20 bp, synthetic construct
  misc_feature 1..20: note = chemically synthesized
  source 1..20: mol_type = other DNA
cacttgcccaaagctacaca

SEQ ID NO: 5513 - DNA, 20 bp, synthetic construct
  misc_feature 1..20: note = chemically synthesized
  source 1..20: mol_type = other DNA
acttgcccaaagctacacag

SEQ ID NO: 5514 - DNA, 20 bp, synthetic construct
  misc_feature 1..20: note = chemically synthesized
  source 1..20: mol_type = other DNA
cttgcccaaagctacacagg

SEQ ID NO: 5515 - DNA, 20 bp, synthetic construct
  misc_feature 1..20: note = chemically synthesized
  source 1..20: mol_type = other DNA
gcccaaagctacacaggggg

SEQ ID NO: 5516 - DNA, 20 bp, synthetic construct
  misc_feature 1..20: note = chemically synthesized
  source 1..20: mol_type = other DNA
cccaaagctacacagggggt

SEQ ID NO: 5517 - DNA, 20 bp, synthetic construct
  misc_feature 1..20: note = chemically synthesized
  source 1..20: mol_type = other DNA
ccaaagctacacagggggtg

SEQ ID NO: 5518 - DNA, 20 bp, synthetic construct
  misc_feature 1..20: note = chemically synthesized
  source 1..20: mol_type = other DNA
agctacacagggggtggggc

SEQ ID NO: 5519 - DNA, 20 bp, synthetic construct
  misc_feature 1..20: note = chemically synthesized
  source 1..20: mol_type = other DNA
tacacagggggtggggctgg

SEQ ID NO: 5520 - DNA, 20 bp, synthetic construct
  misc_feature 1..20: note = chemically synthesized
  source 1..20: mol_type = other DNA
acagggggtggggctggaag

SEQ ID NO: 5521 - DNA, 20 bp, synthetic construct
  misc_feature 1..20: note = chemically synthesized
  source 1..20: mol_type = other DNA
gtggggctggaagtggctcc

SEQ ID NO: 5522 - DNA, 20 bp, synthetic construct
  misc_feature 1..20: note = chemically synthesized
  source 1..20: mol_type = other DNA
gctggaagtggctccaagtg

SEQ ID NO: 5523 - DNA, 20 bp, synthetic construct
  misc_feature 1..20: note = chemically synthesized
  source 1..20: mol_type = other DNA
ctggaagtggctccaagtgc

SEQ ID NO: 5524 - DNA, 20 bp, synthetic construct
  misc_feature 1..20: note = chemically synthesized
  source 1..20: mol_type = other DNA
caggttcccccctcattctt

SEQ ID NO: 5525 - DNA, 20 bp, synthetic construct
  misc_feature 1..20: note = chemically synthesized
  source 1..20: mol_type = other DNA
aggttcccccctcattcttc

SEQ ID NO: 5526 - DNA, 20 bp, synthetic construct
  misc_feature 1..20: note = chemically synthesized
  source 1..20: mol_type = other DNA
cccccctcattcttcaggct

SEQ ID NO: 5527 - DNA, 20 bp, synthetic construct
  misc_feature 1..20: note = chemically synthesized
  source 1..20: mol_type = other DNA
ccccctcattcttcaggctt

SEQ ID NO: 5528 - DNA, 20 bp, synthetic construct
  misc_feature 1..20: note = chemically synthesized
  source 1..20: mol_type = other DNA
cccctcattcttcaggctta

SEQ ID NO: 5529 - DNA, 20 bp, synthetic construct
  misc_feature 1..20: note = chemically synthesized
  source 1..20: mol_type = other DNA
tcattcttcaggcttagggc

SEQ ID NO: 5530 - DNA, 20 bp, synthetic construct
  misc_feature 1..20: note = chemically synthesized
  source 1..20: mol_type = other DNA
attcttcaggcttagggctg

SEQ ID NO: 5531 - DNA, 20 bp, synthetic construct
  misc_feature 1..20: note = chemically synthesized
  source 1..20: mol_type = other DNA
ttcttcaggcttagggctgg

SEQ ID NO: 5532 - DNA, 20 bp, synthetic construct
  misc_feature 1..20: note = chemically synthesized
  source 1..20: mol_type = other DNA
ttcaggcttagggctggagg

SEQ ID NO: 5533 - DNA, 20 bp, synthetic construct
  misc_feature 1..20: note = chemically synthesized
  source 1..20: mol_type = other DNA
cttagggctggaggaagcct

SEQ ID NO: 5534 - DNA, 20 bp, synthetic construct
  misc_feature 1..20: note = chemically synthesized
  source 1..20: mol_type = other DNA
gggctggaggaagccttaga

SEQ ID NO: 5535 - DNA, 20 bp, synthetic construct
  misc_feature 1..20: note = chemically synthesized
  source 1..20: mol_type = other DNA
ggaggaagccttagacagcc

SEQ ID NO: 5536 - DNA, 20 bp, synthetic construct
  misc_feature 1..20: note = chemically synthesized
  source 1..20: mol_type = other DNA
tagacagcccagtcctaccc

SEQ ID NO: 5537 - DNA, 20 bp, synthetic construct
  misc_feature 1..20: note = chemically synthesized
  source 1..20: mol_type = other DNA
cagcccagtcctaccccaga

SEQ ID NO: 5538 - DNA, 20 bp, synthetic construct
  misc_feature 1..20: note = chemically synthesized
  source 1..20: mol_type = other DNA
agcccagtcctaccccagac

SEQ ID NO: 5539 - DNA, 20 bp, synthetic construct
  misc_feature 1..20: note = chemically synthesized
  source 1..20: mol_type = other DNA
gcccagtcctaccccagaca

SEQ ID NO: 5540 - DNA, 20 bp, synthetic construct
  misc_feature 1..20: note = chemically synthesized
  source 1..20: mol_type = other DNA
ctaccccagacagggaaact

SEQ ID NO: 5541 - DNA, 20 bp, synthetic construct
  misc_feature 1..20: note = chemically synthesized
  source 1..20: mol_type = other DNA
taccccagacagggaaactg

SEQ ID NO: 5542 - DNA, 20 bp, synthetic construct
  misc_feature 1..20: note = chemically synthesized
  source 1..20: mol_type = other DNA
cagacagggaaactgaggcc

SEQ ID NO: 5543 - DNA, 20 bp, synthetic construct
  misc_feature 1..20: note = chemically synthesized
  source 1..20: mol_type = other DNA
gacagggaaactgaggcctg

SEQ ID NO: 5544 - DNA, 20 bp, synthetic construct
  misc_feature 1..20: note = chemically synthesized
  source 1..20: mol_type = other DNA
cagggaaactgaggcctgga

SEQ ID NO: 5545 - DNA, 20 bp, synthetic construct
  misc_feature 1..20: note = chemically synthesized
  source 1..20: mol_type = other DNA
agggaaactgaggcctggag

SEQ ID NO: 5546 - DNA, 20 bp, synthetic construct
  misc_feature 1..20: note = chemically synthesized
  source 1..20: mol_type = other DNA
gggaaactgaggcctggaga

SEQ ID NO: 5547 - DNA, 20 bp, synthetic construct
  misc_feature 1..20: note = chemically synthesized
  source 1..20: mol_type = other DNA
aactgaggcctggagagggc

SEQ ID NO: 5548 - DNA, 20 bp, synthetic construct
  misc_feature 1..20: note = chemically synthesized
  source 1..20: mol_type = other DNA
agagggccagaaatcaccca

SEQ ID NO: 5549 - DNA, 20 bp, synthetic construct
  misc_feature 1..20: note = chemically synthesized
  source 1..20: mol_type = other DNA
agaaatcacccaaagacaca

SEQ ID NO: 5550 - DNA, 20 bp, synthetic construct
  misc_feature 1..20: note = chemically synthesized
  source 1..20: mol_type = other DNA
cccaaagacacacagcatgt

SEQ ID NO: 5551 - DNA, 20 bp, synthetic construct
  misc_feature 1..20: note = chemically synthesized
  source 1..20: mol_type = other DNA
aagacacacagcatgttggc

SEQ ID NO: 5552 - DNA, 20 bp, synthetic construct
  misc_feature 1..20: note = chemically synthesized
  source 1..20: mol_type = other DNA
acacagcatgttggctggac

SEQ ID NO: 5553 - DNA, 20 bp, synthetic construct
  misc_feature 1..20: note = chemically synthesized
  source 1..20: mol_type = other DNA
agcatgttggctggactgga

SEQ ID NO: 5554 - DNA, 20 bp, synthetic construct
  misc_feature 1..20: note = chemically synthesized
  source 1..20: mol_type = other DNA
catgttggctggactggacg

SEQ ID NO: 5555 - DNA, 20 bp, synthetic construct
  misc_feature 1..20: note = chemically synthesized
  source 1..20: mol_type = other DNA
tggctggactggacggagat

SEQ ID NO: 5556 - DNA, 20 bp, synthetic construct
  misc_feature 1..20: note = chemically synthesized
  source 1..20: mol_type = other DNA
ggactggacggagatcagtc

SEQ ID NO: 5557 - DNA, 20 bp, synthetic construct
  misc_feature 1..20: note = chemically synthesized
  source 1..20: mol_type = other DNA
acggagatcagtccagaccg

SEQ ID NO: 5558 - DNA, 20 bp, synthetic construct
  misc_feature 1..20: note = chemically synthesized
  source 1..20: mol_type = other DNA
cggagatcagtccagaccgc

SEQ ID NO: 5559 - DNA, 20 bp, synthetic construct
  misc_feature 1..20: note = chemically synthesized
  source 1..20: mol_type = other DNA
accgcaggtgccttgatgtt

SEQ ID NO: 5560 - DNA, 20 bp, synthetic construct
  misc_feature 1..20: note = chemically synthesized
  source 1..20: mol_type = other DNA
aggtgccttgatgttcagtc

SEQ ID NO: 5561 - DNA, 20 bp, synthetic construct
  misc_feature 1..20: note = chemically synthesized
  source 1..20: mol_type = other DNA
tgccttgatgttcagtctgg

SEQ ID NO: 5562 - DNA, 20 bp, synthetic construct
  misc_feature 1..20: note = chemically synthesized
  source 1..20: mol_type = other DNA
gccttgatgttcagtctggt

SEQ ID NO: 5563 - DNA, 20 bp, synthetic construct
  misc_feature 1..20: note = chemically synthesized
  source 1..20: mol_type = other DNA
ccatcccacccacctccctt

SEQ ID NO: 5564 - DNA, 20 bp, synthetic construct
  misc_feature 1..20: note = chemically synthesized
  source 1..20: mol_type = other DNA
catcccacccacctcccttt

SEQ ID NO: 5565 - DNA, 20 bp, synthetic construct
  misc_feature 1..20: note = chemically synthesized
  source 1..20: mol_type = other DNA
ctcgatccctcgcccctcac

SEQ ID NO: 5566 - DNA, 20 bp, synthetic construct
  misc_feature 1..20: note = chemically synthesized
  source 1..20: mol_type = other DNA
ccctcaccagtcccccttct

SEQ ID NO: 5567 - DNA, 20 bp, synthetic construct
  misc_feature 1..20: note = chemically synthesized
  source 1..20: mol_type = other DNA
ctcaccagtcccccttctga

SEQ ID NO: 5568 - DNA, 20 bp, synthetic construct
  misc_feature 1..20: note = chemically synthesized
  source 1..20: mol_type = other DNA
ccccttctgagagcccgtat

SEQ ID NO: 5569 - DNA, 20 bp, synthetic construct
  misc_feature 1..20: note = chemically synthesized
  source 1..20: mol_type = other DNA
cttctgagagcccgtattag

SEQ ID NO: 5570 - DNA, 20 bp, synthetic construct
  misc_feature 1..20: note = chemically synthesized
  source 1..20: mol_type = other DNA
ttctgagagcccgtattagc

SEQ ID NO: 5571 - DNA, 20 bp, synthetic construct
  misc_feature 1..20: note = chemically synthesized
  source 1..20: mol_type = other DNA
tctgagagcccgtattagca

SEQ ID NO: 5572 - DNA, 20 bp, synthetic construct
  misc_feature 1..20: note = chemically synthesized
  source 1..20: mol_type = other DNA
tgagagcccgtattagcagg

SEQ ID NO: 5573 - DNA, 20 bp, synthetic construct
  misc_feature 1..20: note = chemically synthesized
  source 1..20: mol_type = other DNA
agcccgtattagcagggagc

SEQ ID NO: 5574 - DNA, 20 bp, synthetic construct
  misc_feature 1..20: note = chemically synthesized
  source 1..20: mol_type = other DNA
gagccggcccctactccttc

SEQ ID NO: 5575 - DNA, 20 bp, synthetic construct
  misc_feature 1..20: note = chemically synthesized
  source 1..20: mol_type = other DNA
ccggcccctactccttctgg

SEQ ID NO: 5576 - DNA, 20 bp, synthetic construct
  misc_feature 1..20: note = chemically synthesized
  source 1..20: mol_type = other DNA
cctactccttctggcagacc

SEQ ID NO: 5577 - DNA, 20 bp, synthetic construct
  misc_feature 1..20: note = chemically synthesized
  source 1..20: mol_type = other DNA
tccttctggcagacccagct

SEQ ID NO: 5578 - DNA, 20 bp, synthetic construct
  misc_feature 1..20: note = chemically synthesized
  source 1..20: mol_type = other DNA
ccttctggcagacccagcta

SEQ ID NO: 5579 - DNA, 20 bp, synthetic construct
  misc_feature 1..20: note = chemically synthesized
  source 1..20: mol_type = other DNA
acccagctaaggttctacct

SEQ ID NO: 5580 - DNA, 20 bp, synthetic construct
  misc_feature 1..20: note = chemically synthesized
  source 1..20: mol_type = other DNA
cccagctaaggttctacctt

SEQ ID NO: 5581 - DNA, 20 bp, synthetic construct
  misc_feature 1..20: note = chemically synthesized
  source 1..20: mol_type = other DNA
ccagctaaggttctacctta

SEQ ID NO: 5582 - DNA, 20 bp, synthetic construct
  misc_feature 1..20: note = chemically synthesized
  source 1..20: mol_type = other DNA
cagctaaggttctaccttag

SEQ ID NO: 5583 - DNA, 20 bp, synthetic construct
  misc_feature 1..20: note = chemically synthesized
  source 1..20: mol_type = other DNA
taggggccacgccacctccc

SEQ ID NO: 5584 - DNA, 20 bp, synthetic construct
  misc_feature 1..20: note = chemically synthesized
  source 1..20: mol_type = other DNA
aggggccacgccacctcccc

SEQ ID NO: 5585 - DNA, 20 bp, synthetic construct
  misc_feature 1..20: note = chemically synthesized
  source 1..20: mol_type = other DNA
ggggccacgccacctcccca

SEQ ID NO: 5586 - DNA, 20 bp, synthetic construct
  misc_feature 1..20: note = chemically synthesized
  source 1..20: mol_type = other DNA
ggccacgccacctccccagg

SEQ ID NO: 5587 - DNA, 20 bp, synthetic construct
  misc_feature 1..20: note = chemically synthesized
  source 1..20: mol_type = other DNA
gccacgccacctccccaggg

SEQ ID NO: 5588 - DNA, 20 bp, synthetic construct
  misc_feature 1..20: note = chemically synthesized
  source 1..20: mol_type = other DNA
ccacgccacctccccaggga

SEQ ID NO: 5589 - DNA, 20 bp, synthetic construct
  misc_feature 1..20: note = chemically synthesized
  source 1..20: mol_type = other DNA
cacgccacctccccagggag

SEQ ID NO: 5590 - DNA, 20 bp, synthetic construct
  misc_feature 1..20: note = chemically synthesized
  source 1..20: mol_type = other DNA
cacctccccagggaggggtc

SEQ ID NO: 5591 - DNA, 20 bp, synthetic construct
  misc_feature 1..20: note = chemically synthesized
  source 1..20: mol_type = other DNA
cctccccagggaggggtcca

SEQ ID NO: 5592 - DNA, 20 bp, synthetic construct
  misc_feature 1..20: note = chemically synthesized
  source 1..20: mol_type = other DNA
ctccccagggaggggtccag

SEQ ID NO: 5593 - DNA, 20 bp, synthetic construct
  misc_feature 1..20: note = chemically synthesized
  source 1..20: mol_type = other DNA
cagggaggggtccagaggca

SEQ ID NO: 5594 - DNA, 20 bp, synthetic construct
  misc_feature 1..20: note = chemically synthesized
  source 1..20: mol_type = other DNA
agggaggggtccagaggcat

SEQ ID NO: 5595 - DNA, 20 bp, synthetic construct
  misc_feature 1..20: note = chemically synthesized
  source 1..20: mol_type = other DNA
gggaggggtccagaggcatg

SEQ ID NO: 5596 - DNA, 20 bp, synthetic construct
  misc_feature 1..20: note = chemically synthesized
  source 1..20: mol_type = other DNA
ggtccagaggcatggggacc

SEQ ID NO: 5597 - DNA, 20 bp, synthetic construct
  misc_feature 1..20: note = chemically synthesized
  source 1..20: mol_type = other DNA
gtccagaggcatggggacct

SEQ ID NO: 5598 - DNA, 20 bp, synthetic construct
  misc_feature 1..20: note = chemically synthesized
  source 1..20: mol_type = other DNA
tccagaggcatggggacctg

SEQ ID NO: 5599 - DNA, 20 bp, synthetic construct
  misc_feature 1..20: note = chemically synthesized
  source 1..20: mol_type = other DNA
gggacctggggtgcccctca

SEQ ID NO: 5600 - DNA, 20 bp, synthetic construct
  misc_feature 1..20: note = chemically synthesized
  source 1..20: mol_type = other DNA
ggacctggggtgcccctcac

SEQ ID NO: 5601 - DNA, 20 bp, synthetic construct
  misc_feature 1..20: note = chemically synthesized
  source 1..20: mol_type = other DNA
cctcacaggacacttccttg

SEQ ID NO: 5602 - DNA, 20 bp, synthetic construct
  misc_feature 1..20: note = chemically synthesized
  source 1..20: mol_type = other DNA
ctcacaggacacttccttgc

SEQ ID NO: 5603 - DNA, 20 bp, synthetic construct
  misc_feature 1..20: note = chemically synthesized
  source 1..20: mol_type = other DNA
aggacacttccttgcaggaa

SEQ ID NO: 5604 - DNA, 20 bp, synthetic construct
  misc_feature 1..20: note = chemically synthesized
  source 1..20: mol_type = other DNA
gacacttccttgcaggaaca

SEQ ID NO: 5605 - DNA, 20 bp, synthetic construct
  misc_feature 1..20: note = chemically synthesized
  source 1..20: mol_type = other DNA
acacttccttgcaggaacag

SEQ ID NO: 5606 - DNA, 20 bp, synthetic construct
  misc_feature 1..20: note = chemically synthesized
  source 1..20: mol_type = other DNA
gcaggaacagaggtgccatg

SEQ ID NO: 5607 - DNA, 20 bp, synthetic construct
  misc_feature 1..20: note = chemically synthesized
  source 1..20: mol_type = other DNA
acagaggtgccatgcagccc

SEQ ID NO: 5608 - DNA, 20 bp, synthetic construct
  misc_feature 1..20: note = chemically synthesized
  source 1..20: mol_type = other DNA
cagaggtgccatgcagcccc

SEQ ID NO: 5609 - DNA, 20 bp, synthetic construct
  misc_feature 1..20: note = chemically synthesized
  source 1..20: mol_type = other DNA
actccttgttgttgccctcc

SEQ ID NO: 5610 - DNA, 20 bp, synthetic construct
  misc_feature 1..20: note = chemically synthesized
  source 1..20: mol_type = other DNA
tgttgccctcctggcgctcc

SEQ ID NO: 5611 - DNA, 20 bp, synthetic construct
  misc_feature 1..20: note = chemically synthesized
  source 1..20: mol_type = other DNA
cgctcctggcctctgcccgt

SEQ ID NO: 5612 - DNA, 20 bp, synthetic construct
  misc_feature 1..20: note = chemically synthesized
  source 1..20: mol_type = other DNA
ggcctctgcccgtaagcact

SEQ ID NO: 5613 - DNA, 20 bp, synthetic construct
  misc_feature 1..20: note = chemically synthesized
  source 1..20: mol_type = other DNA
ctctgcccgtaagcacttgg

SEQ ID NO: 5614 - DNA, 20 bp, synthetic construct
  misc_feature 1..20: note = chemically synthesized
  source 1..20: mol_type = other DNA
tctgcccgtaagcacttggt

SEQ ID NO: 5615 - DNA, 20 bp, synthetic construct
  misc_feature 1..20: note = chemically synthesized
  source 1..20: mol_type = other DNA
ccgtaagcacttggtgggac

SEQ ID NO: 5616 - DNA, 20 bp, synthetic construct
  misc_feature 1..20: note = chemically synthesized
  source 1..20: mol_type = other DNA
cgtaagcacttggtgggact

SEQ ID NO: 5617 - DNA, 20 bp, synthetic construct
  misc_feature 1..20: note = chemically synthesized
  source 1..20: mol_type = other DNA
agcacttggtgggactgggc

SEQ ID NO: 5618 - DNA, 20 bp, synthetic construct
  misc_feature 1..20: note = chemically synthesized
  source 1..20: mol_type = other DNA
gcacttggtgggactgggct

SEQ ID NO: 5619 - DNA, 20 bp, synthetic construct
  misc_feature 1..20: note = chemically synthesized
  source 1..20: mol_type = other DNA
cacttggtgggactgggctg

SEQ ID NO: 5620 - DNA, 20 bp, synthetic construct
  misc_feature 1..20: note = chemically synthesized
  source 1..20: mol_type = other DNA
acttggtgggactgggctgg

SEQ ID NO: 5621 - DNA, 20 bp, synthetic construct
  misc_feature 1..20: note = chemically synthesized
  source 1..20: mol_type = other DNA
tggtgggactgggctggggg

SEQ ID NO: 5622 - DNA, 20 bp, synthetic construct
  misc_feature 1..20: note = chemically synthesized
  source 1..20: mol_type = other DNA
ggtgggactgggctgggggc

SEQ ID NO: 5623 - DNA, 20 bp, synthetic construct
  misc_feature 1..20: note = chemically synthesized
  source 1..20: mol_type = other DNA
gtgggactgggctgggggca

SEQ ID NO: 5624 - DNA, 20 bp, synthetic construct
  misc_feature 1..20: note = chemically synthesized
  source 1..20: mol_type = other DNA
gcccccagcccagtcccacc

SEQ ID NO: 5625 - DNA, 20 bp, synthetic construct
  misc_feature 1..20: note = chemically synthesized
  source 1..20: mol_type = other DNA
ccagtcccaccaagtgctta

SEQ ID NO: 5626 - DNA, 20 bp, synthetic construct
  misc_feature 1..20: note = chemically synthesized
  source 1..20: mol_type = other DNA
cagtcccaccaagtgcttac

SEQ ID NO: 5627 - DNA, 20 bp, synthetic construct
  misc_feature 1..20: note = chemically synthesized
  source 1..20: mol_type = other DNA
tcccaccaagtgcttacggg

SEQ ID NO: 5628 - DNA, 20 bp, synthetic construct
  misc_feature 1..20: note = chemically synthesized
  source 1..20: mol_type = other DNA
ccaccaagtgcttacgggca

SEQ ID NO: 5629 - DNA, 20 bp, synthetic construct
  misc_feature 1..20: note = chemically synthesized
  source 1..20: mol_type = other DNA
caccaagtgcttacgggcag

SEQ ID NO: 5630 - DNA, 20 bp, synthetic construct
  misc_feature 1..20: note = chemically synthesized
  source 1..20: mol_type = other DNA
aagtgcttacgggcagaggc

SEQ ID NO: 5631 - DNA, 20 bp, synthetic construct
  misc_feature 1..20: note = chemically synthesized
  source 1..20: mol_type = other DNA
agtgcttacgggcagaggcc

SEQ ID NO: 5632 - DNA, 20 bp, synthetic construct
  misc_feature 1..20: note = chemically synthesized
  source 1..20: mol_type = other DNA
tgcttacgggcagaggccag

SEQ ID NO: 5633 - DNA, 20 bp, synthetic construct
  misc_feature 1..20: note = chemically synthesized
  source 1..20: mol_type = other DNA
cgggcagaggccaggagcgc

SEQ ID NO: 5634 - DNA, 20 bp, synthetic construct
  misc_feature 1..20: note = chemically synthesized
  source 1..20: mol_type = other DNA
gggcagaggccaggagcgcc

SEQ ID NO: 5635 - DNA, 20 bp, synthetic construct
  misc_feature 1..20: note = chemically synthesized
  source 1..20: mol_type = other DNA
gcagaggccaggagcgccag

SEQ ID NO: 5636 - DNA, 20 bp, synthetic construct
  misc_feature 1..20: note = chemically synthesized
  source 1..20: mol_type = other DNA
cagaggccaggagcgccagg

SEQ ID NO: 5637 - DNA, 20 bp, synthetic construct
  misc_feature 1..20: note = chemically synthesized
  source 1..20: mol_type = other DNA
agaggccaggagcgccagga

SEQ ID NO: 5638 - DNA, 20 bp, synthetic construct
  misc_feature 1..20: note = chemically synthesized
  source 1..20: mol_type = other DNA
agcgccaggagggcaacaac

SEQ ID NO: 5639 - DNA, 20 bp, synthetic construct
  misc_feature 1..20: note = chemically synthesized
  source 1..20: mol_type = other DNA
gcgccaggagggcaacaaca

SEQ ID NO: 5640 - DNA, 20 bp, synthetic construct
  misc_feature 1..20: note = chemically synthesized
  source 1..20: mol_type = other DNA
gccaggagggcaacaacaag

SEQ ID NO: 5641 - DNA, 20 bp, synthetic construct
  misc_feature 1..20: note = chemically synthesized
  source 1..20: mol_type = other DNA
gggcaacaacaaggagtacc

SEQ ID NO: 5642 - DNA, 20 bp, synthetic construct
  misc_feature 1..20: note = chemically synthesized
  source 1..20: mol_type = other DNA
ggcaacaacaaggagtaccc

SEQ ID NO: 5643 - DNA, 20 bp, synthetic construct
  misc_feature 1..20: note = chemically synthesized
  source 1..20: mol_type = other DNA
gcaacaacaaggagtacccg

SEQ ID NO: 5644 - DNA, 20 bp, synthetic construct
  misc_feature 1..20: note = chemically synthesized
  source 1..20: mol_type = other DNA
aaggagtacccggggctgca

SEQ ID NO: 5645 - DNA, 20 bp, synthetic construct
  misc_feature 1..20: note = chemically synthesized
  source 1..20: mol_type = other DNA
catggcacctctgttcctgc

SEQ ID NO: 5646 - DNA, 20 bp, synthetic construct
  misc_feature 1..20: note = chemically synthesized
  source 1..20: mol_type = other DNA
atggcacctctgttcctgca

SEQ ID NO: 5647 - DNA, 20 bp, synthetic construct
  misc_feature 1..20: note = chemically synthesized
  source 1..20: mol_type = other DNA
gcacctctgttcctgcaagg

SEQ ID NO: 5648 - DNA, 20 bp, synthetic construct
  misc_feature 1..20: note = chemically synthesized
  source 1..20: mol_type = other DNA
cctgcaaggaagtgtcctgt

SEQ ID NO: 5649 - DNA, 20 bp, synthetic construct
  misc_feature 1..20: note = chemically synthesized
  source 1..20: mol_type = other DNA
ctgcaaggaagtgtcctgtg

SEQ ID NO: 5650 - DNA, 20 bp, synthetic construct
  misc_feature 1..20: note = chemically synthesized
  source 1..20: mol_type = other DNA
tgcaaggaagtgtcctgtga

SEQ ID NO: 5651 - DNA, 20 bp, synthetic construct
  misc_feature 1..20: note = chemically synthesized
  source 1..20: mol_type = other DNA
gcaaggaagtgtcctgtgag

SEQ ID NO: 5652 - DNA, 20 bp, synthetic construct
  misc_feature 1..20: note = chemically synthesized
  source 1..20: mol_type = other DNA
gtgtcctgtgaggggcaccc

SEQ ID NO: 5653 - DNA, 20 bp, synthetic construct
  misc_feature 1..20: note = chemically synthesized
  source 1..20: mol_type = other DNA
tgtcctgtgaggggcacccc

SEQ ID NO: 5654 - DNA, 20 bp, synthetic construct
  misc_feature 1..20: note = chemically synthesized
  source 1..20: mol_type = other DNA
accccaggtccccatgcctc

SEQ ID NO: 5655 - DNA, 20 bp, synthetic construct
  misc_feature 1..20: note = chemically synthesized
  source 1..20: mol_type = other DNA
catgcctctggacccctccc

SEQ ID NO: 5656 - DNA, 20 bp, synthetic construct
  misc_feature 1..20: note = chemically synthesized
  source 1..20: mol_type = other DNA
atgcctctggacccctccct

SEQ ID NO: 5657 - DNA, 20 bp, synthetic construct
  misc_feature 1..20: note = chemically synthesized
  source 1..20: mol_type = other DNA
tgcctctggacccctccctg

SEQ ID NO: 5658 - DNA, 20 bp, synthetic construct
  misc_feature 1..20: note = chemically synthesized
  source 1..20: mol_type = other DNA
cctctggacccctccctggg

SEQ ID NO: 5659 - DNA, 20 bp, synthetic construct
  misc_feature 1..20: note = chemically synthesized
  source 1..20: mol_type = other DNA
ctctggacccctccctgggg

SEQ ID NO: 5660 - DNA, 20 bp, synthetic construct
  misc_feature 1..20: note = chemically synthesized
  source 1..20: mol_type = other DNA
tggacccctccctggggagg

SEQ ID NO: 5661 - DNA, 20 bp, synthetic construct
  misc_feature 1..20: note = chemically synthesized
  source 1..20: mol_type = other DNA
ccctccctggggaggtggcg

SEQ ID NO: 5662 - DNA, 20 bp, synthetic construct
  misc_feature 1..20: note = chemically synthesized
  source 1..20: mol_type = other DNA
ggggaggtggcgtggcccct

SEQ ID NO: 5663 - DNA, 20 bp, synthetic construct
  misc_feature 1..20: note = chemically synthesized
  source 1..20: mol_type = other DNA
gggaggtggcgtggccccta

SEQ ID NO: 5664 - DNA, 20 bp, synthetic construct
  misc_feature 1..20: note = chemically synthesized
  source 1..20: mol_type = other DNA
aggtggcgtggcccctaagg

SEQ ID NO: 5665 - DNA, 20 bp, synthetic construct
  misc_feature 1..20: note = chemically synthesized
  source 1..20: mol_type = other DNA
tggcccctaaggtagaacct

SEQ ID NO: 5666 - DNA, 20 bp, synthetic construct
  misc_feature 1..20: note = chemically synthesized
  source 1..20: mol_type = other DNA
ccctaaggtagaaccttagc

SEQ ID NO: 5667 - DNA, 20 bp, synthetic construct
  misc_feature 1..20: note = chemically synthesized
  source 1..20: mol_type = other DNA
cctaaggtagaaccttagct

SEQ ID NO: 5668 - DNA, 20 bp, synthetic construct
  misc_feature 1..20: note = chemically synthesized
  source 1..20: mol_type = other DNA
agaaccttagctgggtctgc

SEQ ID NO: 5669 - DNA, 20 bp, synthetic construct
  misc_feature 1..20: note = chemically synthesized
  source 1..20: mol_type = other DNA
accttagctgggtctgccag

SEQ ID NO: 5670 - DNA, 20 bp, synthetic construct
  misc_feature 1..20: note = chemically synthesized
  source 1..20: mol_type = other DNA
ccttagctgggtctgccaga

SEQ ID NO: 5671 - DNA, 20 bp, synthetic construct
  misc_feature 1..20: note = chemically synthesized
  source 1..20: mol_type = other DNA
ttagctgggtctgccagaag

SEQ ID NO: 5672 - DNA, 20 bp, synthetic construct
  misc_feature 1..20: note = chemically synthesized
  source 1..20: mol_type = other DNA
gctgggtctgccagaaggag

SEQ ID NO: 5673 - DNA, 20 bp, synthetic construct
  misc_feature 1..20: note = chemically synthesized
  source 1..20: mol_type = other DNA
ctgggtctgccagaaggagt

SEQ ID NO: 5674 - DNA, 20 bp, synthetic construct
  misc_feature 1..20: note = chemically synthesized
  source 1..20: mol_type = other DNA
tgggtctgccagaaggagta

SEQ ID NO: 5675 - DNA, 20 bp, synthetic construct
  misc_feature 1..20: note = chemically synthesized
  source 1..20: mol_type = other DNA
gggtctgccagaaggagtag

SEQ ID NO: 5676 - DNA, 20 bp, synthetic construct
  misc_feature 1..20: note = chemically synthesized
  source 1..20: mol_type = other DNA
ctgccagaaggagtaggggc

SEQ ID NO: 5677 - DNA, 20 bp, synthetic construct
  misc_feature 1..20: note = chemically synthesized
  source 1..20: mol_type = other DNA
gggccggctccctgctaata

SEQ ID NO: 5678 - DNA, 20 bp, synthetic construct
  misc_feature 1..20: note = chemically synthesized
  source 1..20: mol_type = other DNA
ggccggctccctgctaatac

SEQ ID NO: 5679 - DNA, 20 bp, synthetic construct
  misc_feature 1..20: note = chemically synthesized
  source 1..20: mol_type = other DNA
tccctgctaatacgggctct

SEQ ID NO: 5680 - DNA, 20 bp, synthetic construct
  misc_feature 1..20: note = chemically synthesized
  source 1..20: mol_type = other DNA
ctgctaatacgggctctcag

SEQ ID NO: 5681 - DNA, 20 bp, synthetic construct
  misc_feature 1..20: note = chemically synthesized
  source 1..20: mol_type = other DNA
tgctaatacgggctctcaga

SEQ ID NO: 5682 - DNA, 20 bp, synthetic construct
  misc_feature 1..20: note = chemically synthesized
  source 1..20: mol_type = other DNA
gctaatacgggctctcagaa

SEQ ID NO: 5683 - DNA, 20 bp, synthetic construct
  misc_feature 1..20: note = chemically synthesized
  source 1..20: mol_type = other DNA
ctaatacgggctctcagaag

SEQ ID NO: 5684 - DNA, 20 bp, synthetic construct
  misc_feature 1..20: note = chemically synthesized
  source 1..20: mol_type = other DNA
taatacgggctctcagaagg

SEQ ID NO: 5685 - DNA, 20 bp, synthetic construct
  misc_feature 1..20: note = chemically synthesized
  source 1..20: mol_type = other DNA
cgggctctcagaagggggac

SEQ ID NO: 5686 - DNA, 20 bp, synthetic construct
  misc_feature 1..20: note = chemically synthesized
  source 1..20: mol_type = other DNA
ctctcagaagggggactggt

SEQ ID NO: 5687 - DNA, 20 bp, synthetic construct
  misc_feature 1..20: note = chemically synthesized
  source 1..20: mol_type = other DNA
tctcagaagggggactggtg

SEQ ID NO: 5688 - DNA, 20 bp, synthetic construct
  misc_feature 1..20: note = chemically synthesized
  source 1..20: mol_type = other DNA
ctcagaagggggactggtga

SEQ ID NO: 5689 - DNA, 20 bp, synthetic construct
  misc_feature 1..20: note = chemically synthesized
  source 1..20: mol_type = other DNA
tcagaagggggactggtgag

SEQ ID NO: 5690 - DNA, 20 bp, synthetic construct
  misc_feature 1..20: note = chemically synthesized
  source 1..20: mol_type = other DNA
aagggggactggtgaggggc

SEQ ID NO: 5691 - DNA, 20 bp, synthetic construct
  misc_feature 1..20: note = chemically synthesized
  source 1..20: mol_type = other DNA
agggggactggtgaggggcg

SEQ ID NO: 5692 - DNA, 20 bp, synthetic construct
  misc_feature 1..20: note = chemically synthesized
  source 1..20: mol_type = other DNA
gggggactggtgaggggcga

SEQ ID NO: 5693 - DNA, 20 bp, synthetic construct
  misc_feature 1..20: note = chemically synthesized
  source 1..20: mol_type = other DNA
ctggtgaggggcgagggatc

SEQ ID NO: 5694 - DNA, 20 bp, synthetic construct
  misc_feature 1..20: note = chemically synthesized
  source 1..20: mol_type = other DNA
tggtgaggggcgagggatcg

SEQ ID NO: 5695 - DNA, 20 bp, synthetic construct
  misc_feature 1..20: note = chemically synthesized
  source 1..20: mol_type = other DNA
gggcgagggatcgaggccca

SEQ ID NO: 5696 - DNA, 20 bp, synthetic construct
  misc_feature 1..20: note = chemically synthesized
  source 1..20: mol_type = other DNA
ggcgagggatcgaggcccaa

SEQ ID NO: 5697 - DNA, 20 bp, synthetic construct
  misc_feature 1..20: note = chemically synthesized
  source 1..20: mol_type = other DNA
gcgagggatcgaggcccaaa

SEQ ID NO: 5698 - DNA, 20 bp, synthetic construct
  misc_feature 1..20: note = chemically synthesized
  source 1..20: mol_type = other DNA
gagggatcgaggcccaaagg

SEQ ID NO: 5699 - DNA, 20 bp, synthetic construct
  misc_feature 1..20: note = chemically synthesized
  source 1..20: mol_type = other DNA
agggatcgaggcccaaaggg

SEQ ID NO: 5700 - DNA, 20 bp, synthetic construct
  misc_feature 1..20: note = chemically synthesized
  source 1..20: mol_type = other DNA
gatcgaggcccaaagggagg

SEQ ID NO: 5701 - DNA, 20 bp, synthetic construct
  misc_feature 1..20: note = chemically synthesized
  source 1..20: mol_type = other DNA
atcgaggcccaaagggaggt

SEQ ID NO: 5702 - DNA, 20 bp, synthetic construct
  misc_feature 1..20: note = chemically synthesized
  source 1..20: mol_type = other DNA
gaggcccaaagggaggtggg

SEQ ID NO: 5703 - DNA, 20 bp, synthetic construct
  misc_feature 1..20: note = chemically synthesized
  source 1..20: mol_type = other DNA
aggcccaaagggaggtgggt

SEQ ID NO: 5704 - DNA, 20 bp, synthetic construct
  misc_feature 1..20: note = chemically synthesized
  source 1..20: mol_type = other DNA
ccaaagggaggtgggtggga

SEQ ID NO: 5705 - DNA, 20 bp, synthetic construct
  misc_feature 1..20: note = chemically synthesized
  source 1..20: mol_type = other DNA
aaagggaggtgggtgggatg

SEQ ID NO: 5706 - DNA, 20 bp, synthetic construct
  misc_feature 1..20: note = chemically synthesized
  source 1..20: mol_type = other DNA
gggaggtgggtgggatggag

SEQ ID NO: 5707 - DNA, 20 bp, synthetic construct
  misc_feature 1..20: note = chemically synthesized
  source 1..20: mol_type = other DNA
ggatggagcagaaaacccac

SEQ ID NO: 5708 - DNA, 20 bp, synthetic construct
  misc_feature 1..20: note = chemically synthesized
  source 1..20: mol_type = other DNA
aacccaccagactgaacatc

SEQ ID NO: 5709 - DNA, 20 bp, synthetic construct
  misc_feature 1..20: note = chemically synthesized
  source 1..20: mol_type = other DNA
acccaccagactgaacatca

SEQ ID NO: 5710 - DNA, 20 bp, synthetic construct
  misc_feature 1..20: note = chemically synthesized
  source 1..20: mol_type = other DNA
actgaacatcaaggcacctg

SEQ ID NO: 5711 - DNA, 20 bp, synthetic construct
  misc_feature 1..20: note = chemically synthesized
  source 1..20: mol_type = other DNA
acatcaaggcacctgcggtc

SEQ ID NO: 5712 - DNA, 20 bp, synthetic construct
  misc_feature 1..20: note = chemically synthesized
  source 1..20: mol_type = other DNA
ggtctggactgatctccgtc

SEQ ID NO: 5713 - DNA, 20 bp, synthetic construct
  misc_feature 1..20: note = chemically synthesized
  source 1..20: mol_type = other DNA
ggactgatctccgtccagtc

SEQ ID NO: 5714 - DNA, 20 bp, synthetic construct
  misc_feature 1..20: note = chemically synthesized
  source 1..20: mol_type = other DNA
gccaacatgctgtgtgtctt

SEQ ID NO: 5715 - DNA, 20 bp, synthetic construct
  misc_feature 1..20: note = chemically synthesized
  source 1..20: mol_type = other DNA
ccaacatgctgtgtgtcttt

SEQ ID NO: 5716 - DNA, 20 bp, synthetic construct
  misc_feature 1..20: note = chemically synthesized
  source 1..20: mol_type = other DNA
gtgtgtctttgggtgatttc

SEQ ID NO: 5717 - DNA, 20 bp, synthetic construct
  misc_feature 1..20: note = chemically synthesized
  source 1..20: mol_type = other DNA
gggtgatttctggccctctc

SEQ ID NO: 5718 - DNA, 20 bp, synthetic construct
  misc_feature 1..20: note = chemically synthesized
  source 1..20: mol_type = other DNA
ggtgatttctggccctctcc

SEQ ID NO: 5719 - DNA, 20 bp, synthetic construct
  misc_feature 1..20: note = chemically synthesized
  source 1..20: mol_type = other DNA
ttctggccctctccaggcct

SEQ ID NO: 5720 - DNA, 20 bp, synthetic construct
  misc_feature 1..20: note = chemically synthesized
  source 1..20: mol_type = other DNA
caggcctcagtttccctgtc

SEQ ID NO: 5721 - DNA, 20 bp, synthetic construct
  misc_feature 1..20: note = chemically synthesized
  source 1..20: mol_type = other DNA
aggcctcagtttccctgtct

SEQ ID NO: 5722 - DNA, 20 bp, synthetic construct
  misc_feature 1..20: note = chemically synthesized
  source 1..20: mol_type = other DNA
ggcctcagtttccctgtctg

SEQ ID NO: 5723 - DNA, 20 bp, synthetic construct
  misc_feature 1..20: note = chemically synthesized
  source 1..20: mol_type = other DNA
ctcagtttccctgtctgggg

SEQ ID NO: 5724 - DNA, 20 bp, synthetic construct
  misc_feature 1..20: note = chemically synthesized
  source 1..20: mol_type = other DNA
tcagtttccctgtctggggt

SEQ ID NO: 5725 - DNA, 20 bp, synthetic construct
  misc_feature 1..20: note = chemically synthesized
  source 1..20: mol_type = other DNA
ttccctgtctggggtaggac

SEQ ID NO: 5726 - DNA, 20 bp, synthetic construct
  misc_feature 1..20: note = chemically synthesized
  source 1..20: mol_type = other DNA
tccctgtctggggtaggact

SEQ ID NO: 5727 - DNA, 20 bp, synthetic construct
  misc_feature 1..20: note = chemically synthesized
  source 1..20: mol_type = other DNA
ggggtaggactgggctgtct

SEQ ID NO: 5728 - DNA, 20 bp, synthetic construct
  misc_feature 1..20: note = chemically synthesized
  source 1..20: mol_type = other DNA
gggtaggactgggctgtcta

SEQ ID NO: 5729 - DNA, 20 bp, synthetic construct
  misc_feature 1..20: note = chemically synthesized
  source 1..20: mol_type = other DNA
gggctgtctaaggcttcctc

SEQ ID NO: 5730 - DNA, 20 bp, synthetic construct
  misc_feature 1..20: note = chemically synthesized
  source 1..20: mol_type = other DNA
ctaaggcttcctccagccct

SEQ ID NO: 5731 - DNA, 20 bp, synthetic construct
  misc_feature 1..20: note = chemically synthesized
  source 1..20: mol_type = other DNA
ttcctccagccctaagcctg

SEQ ID NO: 5732 - DNA, 20 bp, synthetic construct
  misc_feature 1..20: note = chemically synthesized
  source 1..20: mol_type = other DNA
cagccctaagcctgaagaat

SEQ ID NO: 5733 - DNA, 20 bp, synthetic construct
  misc_feature 1..20: note = chemically synthesized
  source 1..20: mol_type = other DNA
agccctaagcctgaagaatg

SEQ ID NO: 5734 - DNA, 20 bp, synthetic construct
  misc_feature 1..20: note = chemically synthesized
  source 1..20: mol_type = other DNA
gccctaagcctgaagaatga

SEQ ID NO: 5735 - DNA, 20 bp, synthetic construct
  misc_feature 1..20: note = chemically synthesized
  source 1..20: mol_type = other DNA
ccctaagcctgaagaatgag

SEQ ID NO: 5736 - DNA, 20 bp, synthetic construct
  misc_feature 1..20: note = chemically synthesized
  source 1..20: mol_type = other DNA
cctaagcctgaagaatgagg

SEQ ID NO: 5737 - DNA, 20 bp, synthetic construct
  misc_feature 1..20: note = chemically synthesized
  source 1..20: mol_type = other DNA
ctaagcctgaagaatgaggg

SEQ ID NO: 5738 - DNA, 20 bp, synthetic construct
  misc_feature 1..20: note = chemically synthesized
  source 1..20: mol_type = other DNA
atgaggggggaacctgcact

SEQ ID NO: 5739 - DNA, 20 bp, synthetic construct
  misc_feature 1..20: note = chemically synthesized
  source 1..20: mol_type = other DNA
gaggggggaacctgcacttg

SEQ ID NO: 5740 - DNA, 20 bp, synthetic construct
  misc_feature 1..20: note = chemically synthesized
  source 1..20: mol_type = other DNA
cctgcacttggagccacttc

SEQ ID NO: 5741 - DNA, 20 bp, synthetic construct
  misc_feature 1..20: note = chemically synthesized
  source 1..20: mol_type = other DNA
ttccagccccaccccctgtg

SEQ ID NO: 5742 - DNA, 20 bp, synthetic construct
  misc_feature 1..20: note = chemically synthesized
  source 1..20: mol_type = other DNA
ccccaccccctgtgtagctt

SEQ ID NO: 5743 - DNA, 20 bp, synthetic construct
  misc_feature 1..20: note = chemically synthesized
  source 1..20: mol_type = other DNA
cccaccccctgtgtagcttt

SEQ ID NO: 5744 - DNA, 20 bp, synthetic construct
  misc_feature 1..20: note = chemically synthesized
  source 1..20: mol_type = other DNA
ccccctgtgtagctttgggc

SEQ ID NO: 5745 - DNA, 20 bp, synthetic construct
  misc_feature 1..20: note = chemically synthesized
  source 1..20: mol_type = other DNA
tgggcaagtgacacccctcc

SEQ ID NO: 5746 - DNA, 20 bp, synthetic construct
  misc_feature 1..20: note = chemically synthesized
  source 1..20: mol_type = other DNA
gggcaagtgacacccctccc

SEQ ID NO: 5747 - DNA, 20 bp, synthetic construct
  misc_feature 1..20: note = chemically synthesized
  source 1..20: mol_type = other DNA
tcccgggcctccatgttctt

SEQ ID NO: 5748 - DNA, 20 bp, synthetic construct
  misc_feature 1..20: note = chemically synthesized
  source 1..20: mol_type = other DNA
cccgggcctccatgttcttc

SEQ ID NO: 5749 - DNA, 20 bp, synthetic construct
  misc_feature 1..20: note = chemically synthesized
  source 1..20: mol_type = other DNA
catgttcttcaggttatgat

SEQ ID NO: 5750 - DNA, 20 bp, synthetic construct
  misc_feature 1..20: note = chemically synthesized
  source 1..20: mol_type = other DNA
atgttcttcaggttatgatg

SEQ ID NO: 5751 - DNA, 20 bp, synthetic construct
  misc_feature 1..20: note = chemically synthesized
  source 1..20: mol_type = other DNA
tgttcttcaggttatgatga

SEQ ID NO: 5752 - DNA, 20 bp, synthetic construct
  misc_feature 1..20: note = chemically synthesized
  source 1..20: mol_type = other DNA
gttcttcaggttatgatgag

SEQ ID NO: 5753 - DNA, 20 bp, synthetic construct
  misc_feature 1..20: note = chemically synthesized
  source 1..20: mol_type = other DNA
cttcaggttatgatgagggg

SEQ ID NO: 5754 - DNA, 20 bp, synthetic construct
  misc_feature 1..20: note = chemically synthesized
  source 1..20: mol_type = other DNA
ttcaggttatgatgaggggt

SEQ ID NO: 5755 - DNA, 20 bp, synthetic construct
  misc_feature 1..20: note = chemically synthesized
  source 1..20: mol_type = other DNA
tcaggttatgatgaggggtg

SEQ ID NO: 5756 - DNA, 20 bp, synthetic construct
  misc_feature 1..20: note = chemically synthesized
  source 1..20: mol_type = other DNA
caggttatgatgaggggtgg

SEQ ID NO: 5757 - DNA, 20 bp, synthetic construct
  misc_feature 1..20: note = chemically synthesized
  source 1..20: mol_type = other DNA
aggttatgatgaggggtggg

SEQ ID NO: 5758 - DNA, 20 bp, synthetic construct
  misc_feature 1..20: note = chemically synthesized
  source 1..20: mol_type = other DNA
aggggtggggggcacccgtc

SEQ ID NO: 5759 - DNA, 20 bp, synthetic construct
  misc_feature 1..20: note = chemically synthesized
  source 1..20: mol_type = other DNA
gggggcacccgtccagctcc

SEQ ID NO: 5760 - DNA, 20 bp, synthetic construct
  misc_feature 1..20: note = chemically synthesized
  source 1..20: mol_type = other DNA
ggggcacccgtccagctccg

SEQ ID NO: 5761 - DNA, 20 bp, synthetic construct
  misc_feature 1..20: note = chemically synthesized
  source 1..20: mol_type = other DNA
gtccagctccgaggcttcct

SEQ ID NO: 5762 - DNA, 20 bp, synthetic construct
  misc_feature 1..20: note = chemically synthesized
  source 1..20: mol_type = other DNA
ctccgaggcttccttagctc

SEQ ID NO: 5763 - DNA, 20 bp, synthetic construct
  misc_feature 1..20: note = chemically synthesized
  source 1..20: mol_type = other DNA
gaggcttccttagctctagc

SEQ ID NO: 5764 - DNA, 20 bp, synthetic construct
  misc_feature 1..20: note = chemically synthesized
  source 1..20: mol_type = other DNA
agctctagcaagtgcttctc

SEQ ID NO: 5765 - DNA, 20 bp, synthetic construct
  misc_feature 1..20: note = chemically synthesized
  source 1..20: mol_type = other DNA
gctctagcaagtgcttctcc

SEQ ID NO: 5766 - DNA, 20 bp, synthetic construct
  misc_feature 1..20: note = chemically synthesized
  source 1..20: mol_type = other DNA
aagtgcttctccaggcttgc

SEQ ID NO: 5767 - DNA, 20 bp, synthetic construct
  misc_feature 1..20: note = chemically synthesized
  source 1..20: mol_type = other DNA
gcttctccaggcttgctggc

SEQ ID NO: 5768 - DNA, 20 bp, synthetic construct
  misc_feature 1..20: note = chemically synthesized
  source 1..20: mol_type = other DNA
cttctccaggcttgctggct

SEQ ID NO: 5769 - DNA, 20 bp, synthetic construct
  misc_feature 1..20: note = chemically synthesized
  source 1..20: mol_type = other DNA
tccaggcttgctggctgggc

SEQ ID NO: 5770 - DNA, 20 bp, synthetic construct
  misc_feature 1..20: note = chemically synthesized
  source 1..20: mol_type = other DNA
ccaggcttgctggctgggct

SEQ ID NO: 5771 - DNA, 20 bp, synthetic construct
  misc_feature 1..20: note = chemically synthesized
  source 1..20: mol_type = other DNA
ggcttgctggctgggctggg

SEQ ID NO: 5772 - DNA, 20 bp, synthetic construct
  misc_feature 1..20: note = chemically synthesized
  source 1..20: mol_type = other DNA
gcttgctggctgggctgggc

SEQ ID NO: 5773 - DNA, 20 bp, synthetic construct
  misc_feature 1..20: note = chemically synthesized
  source 1..20: mol_type = other DNA
cttgctggctgggctgggca

SEQ ID NO: 5774 - DNA, 20 bp, synthetic construct
  misc_feature 1..20: note = chemically synthesized
  source 1..20: mol_type = other DNA
tgctggctgggctgggcagg

SEQ ID NO: 5775 - DNA, 20 bp, synthetic construct
  misc_feature 1..20: note = chemically synthesized
  source 1..20: mol_type = other DNA
cccctcctctttcccctccc

SEQ ID NO: 5776 - DNA, 20 bp, synthetic construct
  misc_feature 1..20: note = chemically synthesized
  source 1..20: mol_type = other DNA
cctcctctttcccctcccca

SEQ ID NO: 5777 - DNA, 20 bp, synthetic construct
  misc_feature 1..20: note = chemically synthesized
  source 1..20: mol_type = other DNA
ctcctctttcccctccccag

SEQ ID NO: 5778 - DNA, 20 bp, synthetic construct
  misc_feature 1..20: note = chemically synthesized
  source 1..20: mol_type = other DNA
tcctctttcccctccccaga

SEQ ID NO: 5779 - DNA, 20 bp, synthetic construct
  misc_feature 1..20: note = chemically synthesized
  source 1..20: mol_type = other DNA
cctccccagagggcattacc

SEQ ID NO: 5780 - DNA, 20 bp, synthetic construct
  misc_feature 1..20: note = chemically synthesized
  source 1..20: mol_type = other DNA
tccccagagggcattacctg

SEQ ID NO: 5781 - DNA, 20 bp, synthetic construct
  misc_feature 1..20: note = chemically synthesized
  source 1..20: mol_type = other DNA
ccagagggcattacctggag

SEQ ID NO: 5782 - DNA, 20 bp, synthetic construct
  misc_feature 1..20: note = chemically synthesized
  source 1..20: mol_type = other DNA
ttacctggagcagctgcctc

SEQ ID NO: 5783 - DNA, 20 bp, synthetic construct
  misc_feature 1..20: note = chemically synthesized
  source 1..20: mol_type = other DNA
tacctggagcagctgcctct

SEQ ID NO: 5784 - DNA, 20 bp, synthetic construct
  misc_feature 1..20: note = chemically synthesized
  source 1..20: mol_type = other DNA
acctggagcagctgcctcta

SEQ ID NO: 5785 - DNA, 20 bp, synthetic construct
  misc_feature 1..20: note = chemically synthesized
  source 1..20: mol_type = other DNA
gctgcctctagggatgaact

SEQ ID NO: 5786 - DNA, 20 bp, synthetic construct
  misc_feature 1..20: note = chemically synthesized
  source 1..20: mol_type = other DNA
gcctctagggatgaactgag

SEQ ID NO: 5787 - DNA, 20 bp, synthetic construct
  misc_feature 1..20: note = chemically synthesized
  source 1..20: mol_type = other DNA
ctagggatgaactgagcaga

SEQ ID NO: 5788 - DNA, 20 bp, synthetic construct
  misc_feature 1..20: note = chemically synthesized
  source 1..20: mol_type = other DNA
tagggatgaactgagcagac

SEQ ID NO: 5789 - DNA, 20 bp, synthetic construct
  misc_feature 1..20: note = chemically synthesized
  source 1..20: mol_type = other DNA
ggatgaactgagcagacagg

SEQ ID NO: 5790 - DNA, 20 bp, synthetic construct
  misc_feature 1..20: note = chemically synthesized
  source 1..20: mol_type = other DNA
gatgaactgagcagacaggc

SEQ ID NO: 5791 - DNA, 20 bp, synthetic construct
  misc_feature 1..20: note = chemically synthesized
  source 1..20: mol_type = other DNA
tgaactgagcagacaggcag

SEQ ID NO: 5792 - DNA, 20 bp, synthetic construct
  misc_feature 1..20: note = chemically synthesized
  source 1..20: mol_type = other DNA
gaactgagcagacaggcagg

SEQ ID NO: 5793 - DNA, 20 bp, synthetic construct
  misc_feature 1..20: note = chemically synthesized
  source 1..20: mol_type = other DNA
aactgagcagacaggcagga

SEQ ID NO: 5794 - DNA, 20 bp, synthetic construct
  misc_feature 1..20: note = chemically synthesized
  source 1..20: mol_type = other DNA
gacctgttttatatcatctc

SEQ ID NO: 5795 - DNA, 20 bp, synthetic construct
  misc_feature 1..20: note = chemically synthesized
  source 1..20: mol_type = other DNA
acctgttttatatcatctcc

SEQ ID NO: 5796 - DNA, 20 bp, synthetic construct
  misc_feature 1..20: note = chemically synthesized
  source 1..20: mol_type = other DNA
cctgttttatatcatctcca

SEQ ID NO: 5797 - DNA, 20 bp, synthetic construct
  misc_feature 1..20: note = chemically synthesized
  source 1..20: mol_type = other DNA
gttttatatcatctccaggg

SEQ ID NO: 5798 - DNA, 20 bp, synthetic construct
  misc_feature 1..20: note = chemically synthesized
  source 1..20: mol_type = other DNA
ttatatcatctccagggcag

SEQ ID NO: 5799 - DNA, 20 bp, synthetic construct
  misc_feature 1..20: note = chemically synthesized
  source 1..20: mol_type = other DNA
tatatcatctccagggcagc

SEQ ID NO: 5800 - DNA, 20 bp, synthetic construct
  misc_feature 1..20: note = chemically synthesized
  source 1..20: mol_type = other DNA
tctccagggcagcaggcact

SEQ ID NO: 5801 - DNA, 20 bp, synthetic construct
  misc_feature 1..20: note = chemically synthesized
  source 1..20: mol_type = other DNA
ctccagggcagcaggcactg

SEQ ID NO: 5802 - DNA, 20 bp, synthetic construct
  misc_feature 1..20: note = chemically synthesized
  source 1..20: mol_type = other DNA
ggcagcaggcactgaggacc

SEQ ID NO: 5803 - DNA, 20 bp, synthetic construct
  misc_feature 1..20: note = chemically synthesized
  source 1..20: mol_type = other DNA
gcagcaggcactgaggaccc

SEQ ID NO: 5804 - DNA, 20 bp, synthetic construct
  misc_feature 1..20: note = chemically synthesized
  source 1..20: mol_type = other DNA
cagcaggcactgaggaccca

SEQ ID NO: 5805 - DNA, 20 bp, synthetic construct
  misc_feature 1..20: note = chemically synthesized
  source 1..20: mol_type = other DNA
gcactgaggacccagggcgc

SEQ ID NO: 5806 - DNA, 20 bp, synthetic construct
  misc_feature 1..20: note = chemically synthesized
  source 1..20: mol_type = other DNA
cactgaggacccagggcgct

SEQ ID NO: 5807 - DNA, 20 bp, synthetic construct
  misc_feature 1..20: note = chemically synthesized
  source 1..20: mol_type = other DNA
aggacccagggcgctgggca

SEQ ID NO: 5808 - DNA, 20 bp, synthetic construct
  misc_feature 1..20: note = chemically synthesized
  source 1..20: mol_type = other DNA
ggacccagggcgctgggcaa

SEQ ID NO: 5809 - DNA, 20 bp, synthetic construct
  misc_feature 1..20: note = chemically synthesized
  source 1..20: mol_type = other DNA
ggcaaaggtcacctgctgac

SEQ ID NO: 5810 - DNA, 20 bp, synthetic construct
  misc_feature 1..20: note = chemically synthesized
  source 1..20: mol_type = other DNA
aaaggtcacctgctgaccag

SEQ ID NO: 5811 - DNA, 20 bp, synthetic construct
  misc_feature 1..20: note = chemically synthesized
  source 1..20: mol_type = other DNA
aggtcacctgctgaccagtg

SEQ ID NO: 5812 - DNA, 20 bp, synthetic construct
  misc_feature 1..20: note = chemically synthesized
  source 1..20: mol_type = other DNA
acctgctgaccagtggagat

SEQ ID NO: 5813 - DNA, 20 bp, synthetic construct
  misc_feature 1..20: note = chemically synthesized
  source 1..20: mol_type = other DNA
cctgctgaccagtggagatg

SEQ ID NO: 5814 - DNA, 20 bp, synthetic construct
  misc_feature 1..20: note = chemically synthesized
  source 1..20: mol_type = other DNA
ctgctgaccagtggagatga

SEQ ID NO: 5815 - DNA, 20 bp, synthetic construct
  misc_feature 1..20: note = chemically synthesized
  source 1..20: mol_type = other DNA
accagtggagatgagggcct

SEQ ID NO: 5816 - DNA, 20 bp, synthetic construct
  misc_feature 1..20: note = chemically synthesized
  source 1..20: mol_type = other DNA
ccagtggagatgagggcctg

SEQ ID NO: 5817 - DNA, 20 bp, synthetic construct
  misc_feature 1..20: note = chemically synthesized
  source 1..20: mol_type = other DNA
gtggagatgagggcctgagg

SEQ ID NO: 5818 - DNA, 20 bp, synthetic construct
  misc_feature 1..20: note = chemically synthesized
  source 1..20: mol_type = other DNA
tggagatgagggcctgaggc

SEQ ID NO: 5819 - DNA, 20 bp, synthetic construct
  misc_feature 1..20: note = chemically synthesized
  source 1..20: mol_type = other DNA
ggagatgagggcctgaggca

SEQ ID NO: 5820 - DNA, 20 bp, synthetic construct
  misc_feature 1..20: note = chemically synthesized
  source 1..20: mol_type = other DNA
agggcctgaggcagggtgtc

SEQ ID NO: 5821 - DNA, 20 bp, synthetic construct
  misc_feature 1..20: note = chemically synthesized
  source 1..20: mol_type = other DNA
tgaggcagggtgtccagatg

SEQ ID NO: 5822 - DNA, 20 bp, synthetic construct
  misc_feature 1..20: note = chemically synthesized
  source 1..20: mol_type = other DNA
gcagggtgtccagatgcagc

SEQ ID NO: 5823 - DNA, 20 bp, synthetic construct
  misc_feature 1..20: note = chemically synthesized
  source 1..20: mol_type = other DNA
gggtgtccagatgcagcaag

SEQ ID NO: 5824 - DNA, 20 bp, synthetic construct
  misc_feature 1..20: note = chemically synthesized
  source 1..20: mol_type = other DNA
ggtgtccagatgcagcaagc

SEQ ID NO: 5825 - DNA, 20 bp, synthetic construct
  misc_feature 1..20: note = chemically synthesized
  source 1..20: mol_type = other DNA
gtccagatgcagcaagcggg

SEQ ID NO: 5826 - DNA, 20 bp, synthetic construct
  misc_feature 1..20: note = chemically synthesized
  source 1..20: mol_type = other DNA
tccagatgcagcaagcgggc

SEQ ID NO: 5827 - DNA, 20 bp, synthetic construct
  misc_feature 1..20: note = chemically synthesized
  source 1..20: mol_type = other DNA
cagatgcagcaagcgggcgg

SEQ ID NO: 5828 - DNA, 20 bp, synthetic construct
  misc_feature 1..20: note = chemically synthesized
  source 1..20: mol_type = other DNA
gatgcagcaagcgggcggga

SEQ ID NO: 5829 - DNA, 20 bp, synthetic construct
  misc_feature 1..20: note = chemically synthesized
  source 1..20: mol_type = other DNA
cagcaagcgggcgggagagt

SEQ ID NO: 5830 - DNA, 20 bp, synthetic construct
  misc_feature 1..20: note = chemically synthesized
  source 1..20: mol_type = other DNA
agcaagcgggcgggagagtt

SEQ ID NO: 5831 - DNA, 20 bp, synthetic construct
  misc_feature 1..20: note = chemically synthesized
  source 1..20: mol_type = other DNA
cgggagagttgggaaatccc

SEQ ID NO: 5832 - DNA, 20 bp, synthetic construct
  misc_feature 1..20: note = chemically synthesized
  source 1..20: mol_type = other DNA
gggagagttgggaaatccct

SEQ ID NO: 5833 - DNA, 20 bp, synthetic construct
  misc_feature 1..20: note = chemically synthesized
  source 1..20: mol_type = other DNA
gagagttgggaaatccctag

SEQ ID NO: 5834 - DNA, 20 bp, synthetic construct
  misc_feature 1..20: note = chemically synthesized
  source 1..20: mol_type = other DNA
tgggaaatccctaggagact

SEQ ID NO: 5835 - DNA, 20 bp, synthetic construct
  misc_feature 1..20: note = chemically synthesized
  source 1..20: mol_type = other DNA
ggtgacctttgcccagcgcc

SEQ ID NO: 5836 - DNA, 20 bp, synthetic construct
  misc_feature 1..20: note = chemically synthesized
  source 1..20: mol_type = other DNA
gaggggaaagaggaggggag

SEQ ID NO: 5837 - DNA, 20 bp, synthetic construct
  misc_feature 1..20: note = chemically synthesized
  source 1..20: mol_type = other DNA
taaggaagcctcggagctgg

SEQ ID NO: 5838 - DNA, 20 bp, synthetic construct
  misc_feature 1..20: note = chemically synthesized
  source 1..20: mol_type = other DNA
gaagaacatggaggcccggg

SEQ ID NO: 5839 - DNA, 20 bp, synthetic construct
  misc_feature 1..20: note = chemically synthesized
  source 1..20: mol_type = other DNA
cacttgcccaaagctacaca

SEQ ID NO: 5840 - DNA, 20 bp, synthetic construct
  misc_feature 1..20: note = chemically synthesized
  source 1..20: mol_type = other DNA
gtgccttgatgttcagtctg

SEQ ID NO: 5841 - DNA, 20 bp, synthetic construct
  misc_feature 1..20: note = chemically synthesized
  source 1..20: mol_type = other DNA
gccacgccacctccccaggg

SEQ ID NO: 5842 - DNA, 20 bp, synthetic construct
  misc_feature 1..20: note = chemically synthesized
  source 1..20: mol_type = other DNA
ggtccagaggcatggggacc

SEQ ID NO: 5843 - DNA, 20 bp, synthetic construct
  misc_feature 1..20: note = chemically synthesized
  source 1..20: mol_type = other DNA
aacagaggtgccatgcagcc

SEQ ID NO: 5844 - DNA, 20 bp, synthetic construct
  misc_feature 1..20: note = chemically synthesized
  source 1..20: mol_type = other DNA
tggtgggactgggctggggg

SEQ ID NO: 5845 - DNA, 20 bp, synthetic construct
  misc_feature 1..20: note = chemically synthesized
  source 1..20: mol_type = other DNA
gcgccaggagggcaacaaca

SEQ ID NO: 5846 - DNA, 20 bp, synthetic construct
  misc_feature 1..20: note = chemically synthesized
  source 1..20: mol_type = other DNA
cccctaaggtagaaccttag

SEQ ID NO: 5847 - DNA, 20 bp, synthetic construct
  misc_feature 1..20: note = chemically synthesized
  source 1..20: mol_type = other DNA
ccttagctgggtctgccaga

SEQ ID NO: 5848 - DNA, 20 bp, synthetic construct
  misc_feature 1..20: note = chemically synthesized
  source 1..20: mol_type = other DNA
agggggactggtgaggggcg

SEQ ID NO: 5849 - DNA, 20 bp, synthetic construct
  misc_feature 1..20: note = chemically synthesized
  source 1..20: mol_type = other DNA
ggatcgaggcccaaagggag

SEQ ID NO: 5850 - DNA, 20 bp, synthetic construct
  misc_feature 1..20: note = chemically synthesized
  source 1..20: mol_type = other DNA
gaggcccaaagggaggtggg

SEQ ID NO: 5851 - DNA, 20 bp, synthetic construct
  misc_feature 1..20: note = chemically synthesized
  source 1..20: mol_type = other DNA
agccaacatgctgtgtgtct

SEQ ID NO: 5852 - DNA, 20 bp, synthetic construct
  misc_feature 1..20: note = chemically synthesized
  source 1..20: mol_type = other DNA
caggcctcagtttccctgtc

SEQ ID NO: 5853 - DNA, 20 bp, synthetic construct
  misc_feature 1..20: note = chemically synthesized
  source 1..20: mol_type = other DNA
ttcctccagccctaagcctg

SEQ ID NO: 5854 - DNA, 20 bp, synthetic construct
  misc_feature 1..20: note = chemically synthesized
  source 1..20: mol_type = other DNA
atgttcttcaggttatgatg

SEQ ID NO: 5855 - DNA, 20 bp, synthetic construct
  misc_feature 1..20: note = chemically synthesized
  source 1..20: mol_type = other DNA
tacctggagcagctgcctct

SEQ ID NO: 5856 - DNA, 20 bp, synthetic construct
  misc_feature 1..20: note = chemically synthesized
  source 1..20: mol_type = other DNA
tgaactgagcagacaggcag

SEQ ID NO: 5857 - DNA, 20 bp, synthetic construct
  misc_feature 1..20: note = chemically synthesized
  source 1..20: mol_type = other DNA
gtggagatgagggcctgagg

SEQ ID NO: 5858 - DNA, 20 bp, synthetic construct
  misc_feature 1..20: note = chemically synthesized
  source 1..20: mol_type = other DNA
cagatgcagcaagcgggcgg

SEQ ID NO: 5859 - DNA, 20 bp, synthetic construct
  misc_feature 1..20: note = chemically synthesized
  source 1..20: mol_type = other DNA
gttgggaaatccctaggaga

SEQ ID NO: 5860 - DNA, 20 bp, synthetic construct
  misc_feature 1..20: note = chemically synthesized
  source 1..20: mol_type = other DNA
aaactgaggcctggagaggg

SEQ ID NO: 5861 - DNA, 20 bp, synthetic construct
  misc_feature 1..20: note = chemically synthesized
  source 1..20: mol_type = other DNA
agggaggtgggtgggatgga

SEQ ID NO: 5862 - DNA, 20 bp, synthetic construct
  misc_feature 1..20: note = chemically synthesized
  source 1..20: mol_type = other DNA
cttcctccagccctaagcct

SEQ ID NO: 5863 - DNA, 20 bp, synthetic construct
  misc_feature 1..20: note = chemically synthesized
  source 1..20: mol_type = other DNA
ctgctgccctggagatgata

SEQ ID NO: 5864 - DNA, 20 bp, synthetic construct
  misc_feature 1..20: note = chemically synthesized
  source 1..20: mol_type = other DNA
gaggtgggtgggatggagca

SEQ ID NO: 5865 - DNA, 20 bp, synthetic construct
  misc_feature 1..20: note = chemically synthesized
  source 1..20: mol_type = other DNA
agggatttcccaactctccc

SEQ ID NO: 5866 - DNA, 20 bp, synthetic construct
  misc_feature 1..20: note = chemically synthesized
  source 1..20: mol_type = other DNA
gcaggttcccccctcattct

SEQ ID NO: 5867 - DNA, 20 bp, synthetic construct
  misc_feature 1..20: note = chemically synthesized
  source 1..20: mol_type = other DNA
gtgccttgatgttcagtctg

SEQ ID NO: 5868 - DNA, 20 bp, synthetic construct
  misc_feature 1..20: note = chemically synthesized
  source 1..20: mol_type = other DNA
gcccccagcccagtcccacc

SEQ ID NO: 5869 - DNA, 20 bp, synthetic construct
  misc_feature 1..20: note = chemically synthesized
  source 1..20: mol_type = other DNA
ccaacatgctgtgtgtcttt

SEQ ID NO: 5870 - DNA, 20 bp, synthetic construct
  misc_feature 1..20: note = chemically synthesized
  source 1..20: mol_type = other DNA
atttctggccctctccaggc

SEQ ID NO: 5871 - DNA, 20 bp, synthetic construct
  misc_feature 1..20: note = chemically synthesized
  source 1..20: mol_type = other DNA
tggggtaggactgggctgtc

SEQ ID NO: 5872 - DNA, 20 bp, synthetic construct
  misc_feature 1..20: note = chemically synthesized
  source 1..20: mol_type = other DNA
acttccagccccaccccctg

SEQ ID NO: 5873 - DNA, 20 bp, synthetic construct
  misc_feature 1..20: note = chemically synthesized
  source 1..20: mol_type = other DNA
ggggggcacccgtccagctc

SEQ ID NO: 5874 - DNA, 20 bp, synthetic construct
  misc_feature 1..20: note = chemically synthesized
  source 1..20: mol_type = other DNA
gaggcttccttagctctagc

SEQ ID NO: 5875 - DNA, 20 bp, synthetic construct
  misc_feature 1..20: note = chemically synthesized
  source 1..20: mol_type = other DNA
tagctctagcaagtgcttct

SEQ ID NO: 5876 - DNA, 20 bp, synthetic construct
  misc_feature 1..20: note = chemically synthesized
  source 1..20: mol_type = other DNA
agacaggcaggagggttctg

SEQ ID NO: 5877 - DNA, 22 bp, synthetic construct
  misc_feature 1..22: note = chemically synthesized
  source 1..22: mol_type = other DNA
agtctcctagggatttcccaac

SEQ ID NO: 5878 - DNA, 22 bp, synthetic construct
  misc_feature 1..22: note = chemically synthesized
  source 1..22: mol_type = other DNA
ctagggatttcccaactctccc

SEQ ID NO: 5879 - DNA, 22 bp, synthetic construct
  misc_feature 1..22: note = chemically synthesized
  source 1..22: mol_type = other DNA
gggatttcccaactctcccgcc

SEQ ID NO: 5880 - DNA, 22 bp, synthetic construct
  misc_feature 1..22: note = chemically synthesized
  source 1..22: mol_type = other DNA
cccaactctcccgcccgcttgc

SEQ ID NO: 5881 - DNA, 22 bp, synthetic construct
  misc_feature 1..22: note = chemically synthesized
  source 1..22: mol_type = other DNA
ccaactctcccgcccgcttgct

SEQ ID NO: 5882 - DNA, 22 bp, synthetic construct
  misc_feature 1..22: note = chemically synthesized
  source 1..22: mol_type = other DNA
tcccgcccgcttgctgcatctg

SEQ ID NO: 5883 - DNA, 22 bp, synthetic construct
  misc_feature 1..22: note = chemically synthesized
  source 1..22: mol_type = other DNA
ccgcccgcttgctgcatctgga

SEQ ID NO: 5884 - DNA, 22 bp, synthetic construct
  misc_feature 1..22: note = chemically synthesized
  source 1..22: mol_type = other DNA
gctgcatctggacaccctgcct

SEQ ID NO: 5885 - DNA, 22 bp, synthetic construct
  misc_feature 1..22: note = chemically synthesized
  source 1..22: mol_type = other DNA
ctgcatctggacaccctgcctc

SEQ ID NO: 5886 - DNA, 22 bp, synthetic construct
  misc_feature 1..22: note = chemically synthesized
  source 1..22: mol_type = other DNA
catctggacaccctgcctcagg

SEQ ID NO: 5887 - DNA, 22 bp, synthetic construct
  misc_feature 1..22: note = chemically synthesized
  source 1..22: mol_type = other DNA
gacaccctgcctcaggccctca

SEQ ID NO: 5888 - DNA, 22 bp, synthetic construct
  misc_feature 1..22: note = chemically synthesized
  source 1..22: mol_type = other DNA
cctcaggccctcatctccactg

SEQ ID NO: 5889 - DNA, 22 bp, synthetic construct
  misc_feature 1..22: note = chemically synthesized
  source 1..22: mol_type = other DNA
aggccctcatctccactggtca

SEQ ID NO: 5890 - DNA, 22 bp, synthetic construct
  misc_feature 1..22: note = chemically synthesized
  source 1..22: mol_type = other DNA
atctccactggtcagcaggtga

SEQ ID NO: 5891 - DNA, 22 bp, synthetic construct
  misc_feature 1..22: note = chemically synthesized
  source 1..22: mol_type = other DNA
cactggtcagcaggtgaccttt

SEQ ID NO: 5892 - DNA, 22 bp, synthetic construct
  misc_feature 1..22: note = chemically synthesized
  source 1..22: mol_type = other DNA
gtcagcaggtgacctttgccca

SEQ ID NO: 5893 - DNA, 22 bp, synthetic construct
  misc_feature 1..22: note = chemically synthesized
  source 1..22: mol_type = other DNA
tgcccagcgccctgggtcctca

SEQ ID NO: 5894 - DNA, 22 bp, synthetic construct
  misc_feature 1..22: note = chemically synthesized
  source 1..22: mol_type = other DNA
gcccagcgccctgggtcctcag

SEQ ID NO: 5895 - DNA, 22 bp, synthetic construct
  misc_feature 1..22: note = chemically synthesized
  source 1..22: mol_type = other DNA
cccagcgccctgggtcctcagt

SEQ ID NO: 5896 - DNA, 22 bp, synthetic construct
  misc_feature 1..22: note = chemically synthesized
  source 1..22: mol_type = other DNA
ggtcctcagtgcctgctgccct

SEQ ID NO: 5897 - DNA, 22 bp, synthetic construct
  misc_feature 1..22: note = chemically synthesized
  source 1..22: mol_type = other DNA
agtgcctgctgccctggagatg

SEQ ID NO: 5898 - DNA, 22 bp, synthetic construct
  misc_feature 1..22: note = chemically synthesized
  source 1..22: mol_type = other DNA
ctgccctggagatgatataaaa

SEQ ID NO: 5899 - DNA, 22 bp, synthetic construct
  misc_feature 1..22: note = chemically synthesized
  source 1..22: mol_type = other DNA
ccctggagatgatataaaacag

SEQ ID NO: 5900 - DNA, 22 bp, synthetic construct
  misc_feature 1..22: note = chemically synthesized
  source 1..22: mol_type = other DNA
gagatgatataaaacaggtcag

SEQ ID NO: 5901 - DNA, 22 bp, synthetic construct
  misc_feature 1..22: note = chemically synthesized
  source 1..22: mol_type = other DNA
ctgcctgtctgctcagttcatc

SEQ ID NO: 5902 - DNA, 22 bp, synthetic construct
  misc_feature 1..22: note = chemically synthesized
  source 1..22: mol_type = other DNA
cctgtctgctcagttcatccct

SEQ ID NO: 5903 - DNA, 22 bp, synthetic construct
  misc_feature 1..22: note = chemically synthesized
  source 1..22: mol_type = other DNA
tctgctcagttcatccctagag

SEQ ID NO: 5904 - DNA, 22 bp, synthetic construct
  misc_feature 1..22: note = chemically synthesized
  source 1..22: mol_type = other DNA
ctcagttcatccctagaggcag

SEQ ID NO: 5905 - DNA, 22 bp, synthetic construct
  misc_feature 1..22: note = chemically synthesized
  source 1..22: mol_type = other DNA
agttcatccctagaggcagctg

SEQ ID NO: 5906 - DNA, 22 bp, synthetic construct
  misc_feature 1..22: note = chemically synthesized
  source 1..22: mol_type = other DNA
atccctagaggcagctgctcca

SEQ ID NO: 5907 - DNA, 22 bp, synthetic construct
  misc_feature 1..22: note = chemically synthesized
  source 1..22: mol_type = other DNA
gaggcagctgctccaggtaatg

SEQ ID NO: 5908 - DNA, 22 bp, synthetic construct
  misc_feature 1..22: note = chemically synthesized
  source 1..22: mol_type = other DNA
ctccaggtaatgccctctgggg

SEQ ID NO: 5909 - DNA, 22 bp, synthetic construct
  misc_feature 1..22: note = chemically synthesized
  source 1..22: mol_type = other DNA
caggtaatgccctctggggagg

SEQ ID NO: 5910 - DNA, 22 bp, synthetic construct
  misc_feature 1..22: note = chemically synthesized
  source 1..22: mol_type = other DNA
tggggaggggaaagaggagggg

SEQ ID NO: 5911 - DNA, 22 bp, synthetic construct
  misc_feature 1..22: note = chemically synthesized
  source 1..22: mol_type = other DNA
gggaggggaaagaggaggggag

SEQ ID NO: 5912 - DNA, 22 bp, synthetic construct
  misc_feature 1..22: note = chemically synthesized
  source 1..22: mol_type = other DNA
cctgcccagcccagccagcaag

SEQ ID NO: 5913 - DNA, 22 bp, synthetic construct
  misc_feature 1..22: note = chemically synthesized
  source 1..22: mol_type = other DNA
cccagcccagccagcaagcctg

SEQ ID NO: 5914 - DNA, 22 bp, synthetic construct
  misc_feature 1..22: note = chemically synthesized
  source 1..22: mol_type = other DNA
gagaagcacttgctagagctaa

SEQ ID NO: 5915 - DNA, 22 bp, synthetic construct
  misc_feature 1..22: note = chemically synthesized
  source 1..22: mol_type = other DNA
gctagagctaaggaagcctcgg

SEQ ID NO: 5916 - DNA, 22 bp, synthetic construct
  misc_feature 1..22: note = chemically synthesized
  source 1..22: mol_type = other DNA
ctagagctaaggaagcctcgga

SEQ ID NO: 5917 - DNA, 22 bp, synthetic construct
  misc_feature 1..22: note = chemically synthesized
  source 1..22: mol_type = other DNA
gagctaaggaagcctcggagct

SEQ ID NO: 5918 - DNA, 22 bp, synthetic construct
  misc_feature 1..22: note = chemically synthesized
  source 1..22: mol_type = other DNA
aggaagcctcggagctggacgg

SEQ ID NO: 5919 - DNA, 22 bp, synthetic construct
  misc_feature 1..22: note = chemically synthesized
  source 1..22: mol_type = other DNA
ggagctggacgggtgcccccca

SEQ ID NO: 5920 - DNA, 22 bp, synthetic construct
  misc_feature 1..22: note = chemically synthesized
  source 1..22: mol_type = other DNA
gacgggtgccccccacccctca

SEQ ID NO: 5921 - DNA, 22 bp, synthetic construct
  misc_feature 1..22: note = chemically synthesized
  source 1..22: mol_type = other DNA
atcataacctgaagaacatgga

SEQ ID NO: 5922 - DNA, 22 bp, synthetic construct
  misc_feature 1..22: note = chemically synthesized
  source 1..22: mol_type = other DNA
aagaacatggaggcccgggagg

SEQ ID NO: 5923 - DNA, 22 bp, synthetic construct
  misc_feature 1..22: note = chemically synthesized
  source 1..22: mol_type = other DNA
gcccaaagctacacagggggtg

SEQ ID NO: 5924 - DNA, 22 bp, synthetic construct
  misc_feature 1..22: note = chemically synthesized
  source 1..22: mol_type = other DNA
cccaaagctacacagggggtgg

SEQ ID NO: 5925 - DNA, 22 bp, synthetic construct
  misc_feature 1..22: note = chemically synthesized
  source 1..22: mol_type = other DNA
cacagggggtggggctggaagt

SEQ ID NO: 5926 - DNA, 22 bp, synthetic construct
  misc_feature 1..22: note = chemically synthesized
  source 1..22: mol_type = other DNA
gaagtggctccaagtgcaggtt

SEQ ID NO: 5927 - DNA, 22 bp, synthetic construct
  misc_feature 1..22: note = chemically synthesized
  source 1..22: mol_type = other DNA
caagtgcaggttcccccctcat

SEQ ID NO: 5928 - DNA, 22 bp, synthetic construct
  misc_feature 1..22: note = chemically synthesized
  source 1..22: mol_type = other DNA
ccccctcattcttcaggcttag

SEQ ID NO: 5929 - DNA, 22 bp, synthetic construct
  misc_feature 1..22: note = chemically synthesized
  source 1..22: mol_type = other DNA
attcttcaggcttagggctgga

SEQ ID NO: 5930 - DNA, 22 bp, synthetic construct
  misc_feature 1..22: note = chemically synthesized
  source 1..22: mol_type = other DNA
ttcaggcttagggctggaggaa

SEQ ID NO: 5931 - DNA, 22 bp, synthetic construct
  misc_feature 1..22: note = chemically synthesized
  source 1..22: mol_type = other DNA
caggcttagggctggaggaagc

SEQ ID NO: 5932 - DNA, 22 bp, synthetic construct
  misc_feature 1..22: note = chemically synthesized
  source 1..22: mol_type = other DNA
aggcttagggctggaggaagcc

SEQ ID NO: 5933 - DNA, 22 bp, synthetic construct
  misc_feature 1..22: note = chemically synthesized
  source 1..22: mol_type = other DNA
agggctggaggaagccttagac

SEQ ID NO: 5934 - DNA, 22 bp, synthetic construct
  misc_feature 1..22: note = chemically synthesized
  source 1..22: mol_type = other DNA
gggctggaggaagccttagaca

SEQ ID NO: 5935 - DNA, 22 bp, synthetic construct
  misc_feature 1..22: note = chemically synthesized
  source 1..22: mol_type = other DNA
gaggaagccttagacagcccag

SEQ ID NO: 5936 - DNA, 22 bp, synthetic construct
  misc_feature 1..22: note = chemically synthesized
  source 1..22: mol_type = other DNA
agacagcccagtcctaccccag

SEQ ID NO: 5937 - DNA, 22 bp, synthetic construct
  misc_feature 1..22: note = chemically synthesized
  source 1..22: mol_type = other DNA
gacagcccagtcctaccccaga

SEQ ID NO: 5938 - DNA, 22 bp, synthetic construct
  misc_feature 1..22: note = chemically synthesized
  source 1..22: mol_type = other DNA
ccccagacagggaaactgaggc

SEQ ID NO: 5939 - DNA, 22 bp, synthetic construct
  misc_feature 1..22: note = chemically synthesized
  source 1..22: mol_type = other DNA
aggcctggagagggccagaaat

SEQ ID NO: 5940 - DNA, 22 bp, synthetic construct
  misc_feature 1..22: note = chemically synthesized
  source 1..22: mol_type = other DNA
gagagggccagaaatcacccaa

SEQ ID NO: 5941 - DNA, 22 bp, synthetic construct
  misc_feature 1..22: note = chemically synthesized
  source 1..22: mol_type = other DNA
gctggactggacggagatcagt

SEQ ID NO: 5942 - DNA, 22 bp, synthetic construct
  misc_feature 1..22: note = chemically synthesized
  source 1..22: mol_type = other DNA
gactggacggagatcagtccag

SEQ ID NO: 5943 - DNA, 22 bp, synthetic construct
  misc_feature 1..22: note = chemically synthesized
  source 1..22: mol_type = other DNA
gacggagatcagtccagaccgc

SEQ ID NO: 5944 - DNA, 22 bp, synthetic construct
  misc_feature 1..22: note = chemically synthesized
  source 1..22: mol_type = other DNA
gatgttcagtctggtgggtttt

SEQ ID NO: 5945 - DNA, 22 bp, synthetic construct
  misc_feature 1..22: note = chemically synthesized
  source 1..22: mol_type = other DNA
atgttcagtctggtgggttttc

SEQ ID NO: 5946 - DNA, 22 bp, synthetic construct
  misc_feature 1..22: note = chemically synthesized
  source 1..22: mol_type = other DNA
agtctggtgggttttctgctcc

SEQ ID NO: 5947 - DNA, 22 bp, synthetic construct
  misc_feature 1..22: note = chemically synthesized
  source 1..22: mol_type = other DNA
gtgggttttctgctccatccca

SEQ ID NO: 5948 - DNA, 22 bp, synthetic construct
  misc_feature 1..22: note = chemically synthesized
  source 1..22: mol_type = other DNA
tctgctccatcccacccacctc

SEQ ID NO: 5949 - DNA, 22 bp, synthetic construct
  misc_feature 1..22: note = chemically synthesized
  source 1..22: mol_type = other DNA
ctgctccatcccacccacctcc

SEQ ID NO: 5950 - DNA, 22 bp, synthetic construct
  misc_feature 1..22: note = chemically synthesized
  source 1..22: mol_type = other DNA
tgctccatcccacccacctccc

SEQ ID NO: 5951 - DNA, 22 bp, synthetic construct
  misc_feature 1..22: note = chemically synthesized
  source 1..22: mol_type = other DNA
ctccatcccacccacctccctt

SEQ ID NO: 5952 - DNA, 22 bp, synthetic construct
  misc_feature 1..22: note = chemically synthesized
  source 1..22: mol_type = other DNA
catcccacccacctccctttgg

SEQ ID NO: 5953 - DNA, 22 bp, synthetic construct
  misc_feature 1..22: note = chemically synthesized
  source 1..22: mol_type = other DNA
cctttgggcctcgatccctcgc

SEQ ID NO: 5954 - DNA, 22 bp, synthetic construct
  misc_feature 1..22: note = chemically synthesized
  source 1..22: mol_type = other DNA
tgggcctcgatccctcgcccct

SEQ ID NO: 5955 - DNA, 22 bp, synthetic construct
  misc_feature 1..22: note = chemically synthesized
  source 1..22: mol_type = other DNA
gggcctcgatccctcgcccctc

SEQ ID NO: 5956 - DNA, 22 bp, synthetic construct
  misc_feature 1..22: note = chemically synthesized
  source 1..22: mol_type = other DNA
ggcctcgatccctcgcccctca

SEQ ID NO: 5957 - DNA, 22 bp, synthetic construct
  misc_feature 1..22: note = chemically synthesized
  source 1..22: mol_type = other DNA
gatccctcgcccctcaccagtc

SEQ ID NO: 5958 - DNA, 22 bp, synthetic construct
  misc_feature 1..22: note = chemically synthesized
  source 1..22: mol_type = other DNA
gcccctcaccagtcccccttct

SEQ ID NO: 5959 - DNA, 22 bp, synthetic construct
  misc_feature 1..22: note = chemically synthesized
  source 1..22: mol_type = other DNA
accagtcccccttctgagagcc

SEQ ID NO: 5960 - DNA, 22 bp, synthetic construct
  misc_feature 1..22: note = chemically synthesized
  source 1..22: mol_type = other DNA
ctgagagcccgtattagcaggg

SEQ ID NO: 5961 - DNA, 22 bp, synthetic construct
  misc_feature 1..22: note = chemically synthesized
  source 1..22: mol_type = other DNA
tgagagcccgtattagcaggga

SEQ ID NO: 5962 - DNA, 22 bp, synthetic construct
  misc_feature 1..22: note = chemically synthesized
  source 1..22: mol_type = other DNA
agagcccgtattagcagggagc

SEQ ID NO: 5963 - DNA, 22 bp, synthetic construct
  misc_feature 1..22: note = chemically synthesized
  source 1..22: mol_type = other DNA
gcagggagccggcccctactcc

SEQ ID NO: 5964 - DNA, 22 bp, synthetic construct
  misc_feature 1..22: note = chemically synthesized
  source 1..22: mol_type = other DNA
ctccttctggcagacccagcta

SEQ ID NO: 5965 - DNA, 22 bp, synthetic construct
  misc_feature 1..22: note = chemically synthesized
  source 1..22: mol_type = other DNA
cttctggcagacccagctaagg

SEQ ID NO: 5966 - DNA, 22 bp, synthetic construct
  misc_feature 1..22: note = chemically synthesized
  source 1..22: mol_type = other DNA
ctggcagacccagctaaggttc

SEQ ID NO: 5967 - DNA, 22 bp, synthetic construct
  misc_feature 1..22: note = chemically synthesized
  source 1..22: mol_type = other DNA
tggcagacccagctaaggttct

SEQ ID NO: 5968 - DNA, 22 bp, synthetic construct
  misc_feature 1..22: note = chemically synthesized
  source 1..22: mol_type = other DNA
gcagacccagctaaggttctac

SEQ ID NO: 5969 - DNA, 22 bp, synthetic construct
  misc_feature 1..22: note = chemically synthesized
  source 1..22: mol_type = other DNA
aggttctaccttaggggccacg

SEQ ID NO: 5970 - DNA, 22 bp, synthetic construct
  misc_feature 1..22: note = chemically synthesized
  source 1..22: mol_type = other DNA
taccttaggggccacgccacct

SEQ ID NO: 5971 - DNA, 22 bp, synthetic construct
  misc_feature 1..22: note = chemically synthesized
  source 1..22: mol_type = other DNA
ccttaggggccacgccacctcc

SEQ ID NO: 5972 - DNA, 22 bp, synthetic construct
  misc_feature 1..22: note = chemically synthesized
  source 1..22: mol_type = other DNA
aggggccacgccacctccccag

SEQ ID NO: 5973 - DNA, 22 bp, synthetic construct
  misc_feature 1..22: note = chemically synthesized
  source 1..22: mol_type = other DNA
ggggccacgccacctccccagg

SEQ ID NO: 5974 - DNA, 22 bp, synthetic construct
  misc_feature 1..22: note = chemically synthesized
  source 1..22: mol_type = other DNA
cccagggaggggtccagaggca

SEQ ID NO: 5975 - DNA, 22 bp, synthetic construct
  misc_feature 1..22: note = chemically synthesized
  source 1..22: mol_type = other DNA
gggtgcccctcacaggacactt

SEQ ID NO: 5976 - DNA, 22 bp, synthetic construct
  misc_feature 1..22: note = chemically synthesized
  source 1..22: mol_type = other DNA
acaggacacttccttgcaggaa

SEQ ID NO: 5977 - DNA, 22 bp, synthetic construct
  misc_feature 1..22: note = chemically synthesized
  source 1..22: mol_type = other DNA
ccttgcaggaacagaggtgcca

SEQ ID NO: 5978 - DNA, 22 bp, synthetic construct
  misc_feature 1..22: note = chemically synthesized
  source 1..22: mol_type = other DNA
cttgcaggaacagaggtgccat

SEQ ID NO: 5979 - DNA, 22 bp, synthetic construct
  misc_feature 1..22: note = chemically synthesized
  source 1..22: mol_type = other DNA
gcaggaacagaggtgccatgca

SEQ ID NO: 5980 - DNA, 22 bp, synthetic construct
  misc_feature 1..22: note = chemically synthesized
  source 1..22: mol_type = other DNA
caggaacagaggtgccatgcag

SEQ ID NO: 5981 - DNA, 22 bp, synthetic construct
  misc_feature 1..22: note = chemically synthesized
  source 1..22: mol_type = other DNA
cttgttgttgccctcctggcgc

SEQ ID NO: 5982 - DNA, 22 bp, synthetic construct
  misc_feature 1..22: note = chemically synthesized
  source 1..22: mol_type = other DNA
gttgttgccctcctggcgctcc

SEQ ID NO: 5983 - DNA, 22 bp, synthetic construct
  misc_feature 1..22: note = chemically synthesized
  source 1..22: mol_type = other DNA
ttgttgccctcctggcgctcct

SEQ ID NO: 5984 - DNA, 22 bp, synthetic construct
  misc_feature 1..22: note = chemically synthesized
  source 1..22: mol_type = other DNA
ttgccctcctggcgctcctggc

SEQ ID NO: 5985 - DNA, 22 bp, synthetic construct
  misc_feature 1..22: note = chemically synthesized
  source 1..22: mol_type = other DNA
ccctcctggcgctcctggcctc

SEQ ID NO: 5986 - DNA, 22 bp, synthetic construct
  misc_feature 1..22: note = chemically synthesized
  source 1..22: mol_type = other DNA
ctggcgctcctggcctctgccc

SEQ ID NO: 5987 - DNA, 22 bp, synthetic construct
  misc_feature 1..22: note = chemically synthesized
  source 1..22: mol_type = other DNA
gcgctcctggcctctgcccgta

SEQ ID NO: 5988 - DNA, 22 bp, synthetic construct
  misc_feature 1..22: note = chemically synthesized
  source 1..22: mol_type = other DNA
ctggcctctgcccgtaagcact

SEQ ID NO: 5989 - DNA, 22 bp, synthetic construct
  misc_feature 1..22: note = chemically synthesized
  source 1..22: mol_type = other DNA
gcctctgcccgtaagcacttgg

SEQ ID NO: 5990 - DNA, 22 bp, synthetic construct
  misc_feature 1..22: note = chemically synthesized
  source 1..22: mol_type = other DNA
tgcccgtaagcacttggtggga

SEQ ID NO: 5991 - DNA, 22 bp, synthetic construct
  misc_feature 1..22: note = chemically synthesized
  source 1..22: mol_type = other DNA
cccgtaagcacttggtgggact

SEQ ID NO: 5992 - DNA, 22 bp, synthetic construct
  misc_feature 1..22: note = chemically synthesized
  source 1..22: mol_type = other DNA
ggtgggactgggctgggggcag

SEQ ID NO: 5993 - DNA, 22 bp, synthetic construct
  misc_feature 1..22: note = chemically synthesized
  source 1..22: mol_type = other DNA
gtgggactgggctgggggcagg

SEQ ID NO: 5994 - DNA, 22 bp, synthetic construct
  misc_feature 1..22: note = chemically synthesized
  source 1..22: mol_type = other DNA
cccccagcccagtcccaccaag

SEQ ID NO: 5995 - DNA, 22 bp, synthetic construct
  misc_feature 1..22: note = chemically synthesized
  source 1..22: mol_type = other DNA
acgggcagaggccaggagcgcc

SEQ ID NO: 5996 - DNA, 22 bp, synthetic construct
  misc_feature 1..22: note = chemically synthesized
  source 1..22: mol_type = other DNA
cgggcagaggccaggagcgcca

SEQ ID NO: 5997 - DNA, 22 bp, synthetic construct
  misc_feature 1..22: note = chemically synthesized
  source 1..22: mol_type = other DNA
catggcacctctgttcctgcaa

SEQ ID NO: 5998 - DNA, 22 bp, synthetic construct
  misc_feature 1..22: note = chemically synthesized
  source 1..22: mol_type = other DNA
tgttcctgcaaggaagtgtcct

SEQ ID NO: 5999 - DNA, 22 bp, synthetic construct
  misc_feature 1..22: note = chemically synthesized
  source 1..22: mol_type = other DNA
ttcctgcaaggaagtgtcctgt

SEQ ID NO: 6000 - DNA, 22 bp, synthetic construct
  misc_feature 1..22: note = chemically synthesized
  source 1..22: mol_type = other DNA
ctgcaaggaagtgtcctgtgag

SEQ ID NO: 6001 - DNA, 22 bp, synthetic construct
  misc_feature 1..22: note = chemically synthesized
  source 1..22: mol_type = other DNA
caaggaagtgtcctgtgagggg

SEQ ID NO: 6002 - DNA, 22 bp, synthetic construct
  misc_feature 1..22: note = chemically synthesized
  source 1..22: mol_type = other DNA
tgaggggcaccccaggtcccca

SEQ ID NO: 6003 - DNA, 22 bp, synthetic construct
  misc_feature 1..22: note = chemically synthesized
  source 1..22: mol_type = other DNA
tggacccctccctggggaggtg

SEQ ID NO: 6004 - DNA, 22 bp, synthetic construct
  misc_feature 1..22: note = chemically synthesized
  source 1..22: mol_type = other DNA
gacccctccctggggaggtggc

SEQ ID NO: 6005 - DNA, 22 bp, synthetic construct
  misc_feature 1..22: note = chemically synthesized
  source 1..22: mol_type = other DNA
cctggggaggtggcgtggcccc

SEQ ID NO: 6006 - DNA, 22 bp, synthetic construct
  misc_feature 1..22: note = chemically synthesized
  source 1..22: mol_type = other DNA
gggaggtggcgtggcccctaag

SEQ ID NO: 6007 - DNA, 22 bp, synthetic construct
  misc_feature 1..22: note = chemically synthesized
  source 1..22: mol_type = other DNA
aggtagaaccttagctgggtct

SEQ ID NO: 6008 - DNA, 22 bp, synthetic construct
  misc_feature 1..22: note = chemically synthesized
  source 1..22: mol_type = other DNA
agctgggtctgccagaaggagt

SEQ ID NO: 6009 - DNA, 22 bp, synthetic construct
  misc_feature 1..22: note = chemically synthesized
  source 1..22: mol_type = other DNA
gctgggtctgccagaaggagta

SEQ ID NO: 6010 - DNA, 22 bp, synthetic construct
  misc_feature 1..22: note = chemically synthesized
  source 1..22: mol_type = other DNA
ggtctgccagaaggagtagggg

SEQ ID NO: 6011 - DNA, 22 bp, synthetic construct
  misc_feature 1..22: note = chemically synthesized
  source 1..22: mol_type = other DNA
ccagaaggagtaggggccggct

SEQ ID NO: 6012 - DNA, 22 bp, synthetic construct
  misc_feature 1..22: note = chemically synthesized
  source 1..22: mol_type = other DNA
cctgctaatacgggctctcaga

SEQ ID NO: 6013 - DNA, 22 bp, synthetic construct
  misc_feature 1..22: note = chemically synthesized
  source 1..22: mol_type = other DNA
ctaatacgggctctcagaaggg

SEQ ID NO: 6014 - DNA, 22 bp, synthetic construct
  misc_feature 1..22: note = chemically synthesized
  source 1..22: mol_type = other DNA
atacgggctctcagaaggggga

SEQ ID NO: 6015 - DNA, 22 bp, synthetic construct
  misc_feature 1..22: note = chemically synthesized
  source 1..22: mol_type = other DNA
tcagaagggggactggtgaggg

SEQ ID NO: 6016 - DNA, 22 bp, synthetic construct
  misc_feature 1..22: note = chemically synthesized
  source 1..22: mol_type = other DNA
agaagggggactggtgaggggc

SEQ ID NO: 6017 - DNA, 22 bp, synthetic construct
  misc_feature 1..22: note = chemically synthesized
  source 1..22: mol_type = other DNA
gtgaggggcgagggatcgaggc

SEQ ID NO: 6018 - DNA, 22 bp, synthetic construct
  misc_feature 1..22: note = chemically synthesized
  source 1..22: mol_type = other DNA
aacatcaaggcacctgcggtct

SEQ ID NO: 6019 - DNA, 22 bp, synthetic construct
  misc_feature 1..22: note = chemically synthesized
  source 1..22: mol_type = other DNA
cggtctggactgatctccgtcc

SEQ ID NO: 6020 - DNA, 22 bp, synthetic construct
  misc_feature 1..22: note = chemically synthesized
  source 1..22: mol_type = other DNA
gactgatctccgtccagtccag

SEQ ID NO: 6021 - DNA, 22 bp, synthetic construct
  misc_feature 1..22: note = chemically synthesized
  source 1..22: mol_type = other DNA
atctccgtccagtccagccaac

SEQ ID NO: 6022 - DNA, 22 bp, synthetic construct
  misc_feature 1..22: note = chemically synthesized
  source 1..22: mol_type = other DNA
cgtccagtccagccaacatgct

SEQ ID NO: 6023 - DNA, 22 bp, synthetic construct
  misc_feature 1..22: note = chemically synthesized
  source 1..22: mol_type = other DNA
tgtgtctttgggtgatttctgg

SEQ ID NO: 6024 - DNA, 22 bp, synthetic construct
  misc_feature 1..22: note = chemically synthesized
  source 1..22: mol_type = other DNA
tgggtgatttctggccctctcc

SEQ ID NO: 6025 - DNA, 22 bp, synthetic construct
  misc_feature 1..22: note = chemically synthesized
  source 1..22: mol_type = other DNA
gggtgatttctggccctctcca

SEQ ID NO: 6026 - DNA, 22 bp, synthetic construct
  misc_feature 1..22: note = chemically synthesized
  source 1..22: mol_type = other DNA
ggtgatttctggccctctccag

SEQ ID NO: 6027 - DNA, 22 bp, synthetic construct
  misc_feature 1..22: note = chemically synthesized
  source 1..22: mol_type = other DNA
ctggccctctccaggcctcagt

SEQ ID NO: 6028 - DNA, 22 bp, synthetic construct
  misc_feature 1..22: note = chemically synthesized
  source 1..22: mol_type = other DNA
tggccctctccaggcctcagtt

SEQ ID NO: 6029 - DNA, 22 bp, synthetic construct
  misc_feature 1..22: note = chemically synthesized
  source 1..22: mol_type = other DNA
gccctctccaggcctcagtttc

SEQ ID NO: 6030 - DNA, 22 bp, synthetic construct
  misc_feature 1..22: note = chemically synthesized
  source 1..22: mol_type = other DNA
tccaggcctcagtttccctgtc

SEQ ID NO: 6031 - DNA, 22 bp, synthetic construct
  misc_feature 1..22: note = chemically synthesized
  source 1..22: mol_type = other DNA
caggcctcagtttccctgtctg

SEQ ID NO: 6032 - DNA, 22 bp, synthetic construct
  misc_feature 1..22: note = chemically synthesized
  source 1..22: mol_type = other DNA
agtttccctgtctggggtagga

SEQ ID NO: 6033 - DNA, 22 bp, synthetic construct
  misc_feature 1..22: note = chemically synthesized
  source 1..22: mol_type = other DNA
ccctgtctggggtaggactggg

SEQ ID NO: 6034 - DNA, 22 bp, synthetic construct
  misc_feature 1..22: note = chemically synthesized
  source 1..22: mol_type = other DNA
cctgtctggggtaggactgggc

SEQ ID NO: 6035 - DNA, 22 bp, synthetic construct
  misc_feature 1..22: note = chemically synthesized
  source 1..22: mol_type = other DNA
tctggggtaggactgggctgtc

SEQ ID NO: 6036 - DNA, 22 bp, synthetic construct
  misc_feature 1..22: note = chemically synthesized
  source 1..22: mol_type = other DNA
gggtaggactgggctgtctaag

SEQ ID NO: 6037 - DNA, 22 bp, synthetic construct
  misc_feature 1..22: note = chemically synthesized
  source 1..22: mol_type = other DNA
ggctgtctaaggcttcctccag

SEQ ID NO: 6038 - DNA, 22 bp, synthetic construct
  misc_feature 1..22: note = chemically synthesized
  source 1..22: mol_type = other DNA
tctaaggcttcctccagcccta

SEQ ID NO: 6039 - DNA, 22 bp, synthetic construct
  misc_feature 1..22: note = chemically synthesized
  source 1..22: mol_type = other DNA
aggcttcctccagccctaagcc

SEQ ID NO: 6040 - DNA, 22 bp, synthetic construct
  misc_feature 1..22: note = chemically synthesized
  source 1..22: mol_type = other DNA
cctccagccctaagcctgaaga

SEQ ID NO: 6041 - DNA, 22 bp, synthetic construct
  misc_feature 1..22: note = chemically synthesized
  source 1..22: mol_type = other DNA
ctccagccctaagcctgaagaa

SEQ ID NO: 6042 - DNA, 22 bp, synthetic construct
  misc_feature 1..22: note = chemically synthesized
  source 1..22: mol_type = other DNA
cagccctaagcctgaagaatga

SEQ ID NO: 6043 - DNA, 22 bp, synthetic construct
  misc_feature 1..22: note = chemically synthesized
  source 1..22: mol_type = other DNA
agcctgaagaatgaggggggaa

SEQ ID NO: 6044 - DNA, 22 bp, synthetic construct
  misc_feature 1..22: note = chemically synthesized
  source 1..22: mol_type = other DNA
aagaatgaggggggaacctgca

SEQ ID NO: 6045 - DNA, 22 bp, synthetic construct
  misc_feature 1..22: note = chemically synthesized
  source 1..22: mol_type = other DNA
cacttggagccacttccagccc

SEQ ID NO: 6046 - DNA, 22 bp, synthetic construct
  misc_feature 1..22: note = chemically synthesized
  source 1..22: mol_type = other DNA
ggagccacttccagccccaccc

SEQ ID NO: 6047 - DNA, 22 bp, synthetic construct
  misc_feature 1..22: note = chemically synthesized
  source 1..22: mol_type = other DNA
gagccacttccagccccacccc

SEQ ID NO: 6048 - DNA, 22 bp, synthetic construct
  misc_feature 1..22: note = chemically synthesized
  source 1..22: mol_type = other DNA
ccagccccaccccctgtgtagc

SEQ ID NO: 6049 - DNA, 22 bp, synthetic construct
  misc_feature 1..22: note = chemically synthesized
  source 1..22: mol_type = other DNA
cagccccaccccctgtgtagct

SEQ ID NO: 6050 - DNA, 22 bp, synthetic construct
  misc_feature 1..22: note = chemically synthesized
  source 1..22: mol_type = other DNA
tgtagctttgggcaagtgacac

SEQ ID NO: 6051 - DNA, 22 bp, synthetic construct
  misc_feature 1..22: note = chemically synthesized
  source 1..22: mol_type = other DNA
tgggcaagtgacacccctcccg

SEQ ID NO: 6052 - DNA, 22 bp, synthetic construct
  misc_feature 1..22: note = chemically synthesized
  source 1..22: mol_type = other DNA
gggcaagtgacacccctcccgg

SEQ ID NO: 6053 - DNA, 22 bp, synthetic construct
  misc_feature 1..22: note = chemically synthesized
  source 1..22: mol_type = other DNA
ggcaagtgacacccctcccggg

SEQ ID NO: 6054 - DNA, 22 bp, synthetic construct
  misc_feature 1..22: note = chemically synthesized
  source 1..22: mol_type = other DNA
ccgggcctccatgttcttcagg

SEQ ID NO: 6055 - DNA, 22 bp, synthetic construct
  misc_feature 1..22: note = chemically synthesized
  source 1..22: mol_type = other DNA
catgttcttcaggttatgatga

SEQ ID NO: 6056 - DNA, 22 bp, synthetic construct
  misc_feature 1..22: note = chemically synthesized
  source 1..22: mol_type = other DNA
ttcaggttatgatgaggggtgg

SEQ ID NO: 6057 - DNA, 22 bp, synthetic construct
  misc_feature 1..22: note = chemically synthesized
  source 1..22: mol_type = other DNA
caggttatgatgaggggtgggg

SEQ ID NO: 6058 - DNA, 22 bp, synthetic construct
  misc_feature 1..22: note = chemically synthesized
  source 1..22: mol_type = other DNA
aggttatgatgaggggtggggg

SEQ ID NO: 6059 - DNA, 22 bp, synthetic construct
  misc_feature 1..22: note = chemically synthesized
  source 1..22: mol_type = other DNA
tgatgaggggtggggggcaccc

SEQ ID NO: 6060 - DNA, 22 bp, synthetic construct
  misc_feature 1..22: note = chemically synthesized
  source 1..22: mol_type = other DNA
cgaggcttccttagctctagca

SEQ ID NO: 6061 - DNA, 22 bp, synthetic construct
  misc_feature 1..22: note = chemically synthesized
  source 1..22: mol_type = other DNA
ccttagctctagcaagtgcttc

SEQ ID NO: 6062 - DNA, 22 bp, synthetic construct
  misc_feature 1..22: note = chemically synthesized
  source 1..22: mol_type = other DNA
cttagctctagcaagtgcttct

SEQ ID NO: 6063 - DNA, 22 bp, synthetic construct
  misc_feature 1..22: note = chemically synthesized
  source 1..22: mol_type = other DNA
agctctagcaagtgcttctcca

SEQ ID NO: 6064 - DNA, 22 bp, synthetic construct
  misc_feature 1..22: note = chemically synthesized
  source 1..22: mol_type = other DNA
gctctagcaagtgcttctccag

SEQ ID NO: 6065 - DNA, 22 bp, synthetic construct
  misc_feature 1..22: note = chemically synthesized
  source 1..22: mol_type = other DNA
tagcaagtgcttctccaggctt

SEQ ID NO: 6066 - DNA, 22 bp, synthetic construct
  misc_feature 1..22: note = chemically synthesized
  source 1..22: mol_type = other DNA
gcaagtgcttctccaggcttgc

SEQ ID NO: 6067 - DNA, 22 bp, synthetic construct
  misc_feature 1..22: note = chemically synthesized
  source 1..22: mol_type = other DNA
ctccaggcttgctggctgggct

SEQ ID NO: 6068 - DNA, 22 bp, synthetic construct
  misc_feature 1..22: note = chemically synthesized
  source 1..22: mol_type = other DNA
tccaggcttgctggctgggctg

SEQ ID NO: 6069 - DNA, 22 bp, synthetic construct
  misc_feature 1..22: note = chemically synthesized
  source 1..22: mol_type = other DNA
caggcttgctggctgggctggg

SEQ ID NO: 6070 - DNA, 22 bp, synthetic construct
  misc_feature 1..22: note = chemically synthesized
  source 1..22: mol_type = other DNA
gctggctgggctgggcagggag

SEQ ID NO: 6071 - DNA, 22 bp, synthetic construct
  misc_feature 1..22: note = chemically synthesized
  source 1..22: mol_type = other DNA
ctggctgggctgggcagggagc

SEQ ID NO: 6072 - DNA, 22 bp, synthetic construct
  misc_feature 1..22: note = chemically synthesized
  source 1..22: mol_type = other DNA
gctgggctgggcagggagctcc

SEQ ID NO: 6073 - DNA, 22 bp, synthetic construct
  misc_feature 1..22: note = chemically synthesized
  source 1..22: mol_type = other DNA
ggctgggcagggagctcctctt

SEQ ID NO: 6074 - DNA, 22 bp, synthetic construct
  misc_feature 1..22: note = chemically synthesized
  source 1..22: mol_type = other DNA
ggcagggagctcctcttgcccc

SEQ ID NO: 6075 - DNA, 22 bp, synthetic construct
  misc_feature 1..22: note = chemically synthesized
  source 1..22: mol_type = other DNA
ctcttgcccctcttcatcctcc

SEQ ID NO: 6076 - DNA, 22 bp, synthetic construct
  misc_feature 1..22: note = chemically synthesized
  source 1..22: mol_type = other DNA
ttgcccctcttcatcctcctcc

SEQ ID NO: 6077 - DNA, 22 bp, synthetic construct
  misc_feature 1..22: note = chemically synthesized
  source 1..22: mol_type = other DNA
gcccctcttcatcctcctcccc

SEQ ID NO: 6078 - DNA, 22 bp, synthetic construct
  misc_feature 1..22: note = chemically synthesized
  source 1..22: mol_type = other DNA
cccctcttcatcctcctcccct

SEQ ID NO: 6079 - DNA, 22 bp, synthetic construct
  misc_feature 1..22: note = chemically synthesized
  source 1..22: mol_type = other DNA
ttcatcctcctcccctcctctt

SEQ ID NO: 6080 - DNA, 22 bp, synthetic construct
  misc_feature 1..22: note = chemically synthesized
  source 1..22: mol_type = other DNA
catcctcctcccctcctctttc

SEQ ID NO: 6081 - DNA, 22 bp, synthetic construct
  misc_feature 1..22: note = chemically synthesized
  source 1..22: mol_type = other DNA
atcctcctcccctcctctttcc

SEQ ID NO: 6082 - DNA, 22 bp, synthetic construct
  misc_feature 1..22: note = chemically synthesized
  source 1..22: mol_type = other DNA
ctcccctcctctttcccctccc

SEQ ID NO: 6083 - DNA, 22 bp, synthetic construct
  misc_feature 1..22: note = chemically synthesized
  source 1..22: mol_type = other DNA
ccctcctctttcccctccccag

SEQ ID NO: 6084 - DNA, 22 bp, synthetic construct
  misc_feature 1..22: note = chemically synthesized
  source 1..22: mol_type = other DNA
ctctttcccctccccagagggc

SEQ ID NO: 6085 - DNA, 22 bp, synthetic construct
  misc_feature 1..22: note = chemically synthesized
  source 1..22: mol_type = other DNA
tttcccctccccagagggcatt

SEQ ID NO: 6086 - DNA, 22 bp, synthetic construct
  misc_feature 1..22: note = chemically synthesized
  source 1..22: mol_type = other DNA
tcccctccccagagggcattac

SEQ ID NO: 6087 - DNA, 22 bp, synthetic construct
  misc_feature 1..22: note = chemically synthesized
  source 1..22: mol_type = other DNA
cccctccccagagggcattacc

SEQ ID NO: 6088 - DNA, 22 bp, synthetic construct
  misc_feature 1..22: note = chemically synthesized
  source 1..22: mol_type = other DNA
ccctccccagagggcattacct

SEQ ID NO: 6089 - DNA, 22 bp, synthetic construct
  misc_feature 1..22: note = chemically synthesized
  source 1..22: mol_type = other DNA
cccagagggcattacctggagc

SEQ ID NO: 6090 - DNA, 22 bp, synthetic construct
  misc_feature 1..22: note = chemically synthesized
  source 1..22: mol_type = other DNA
cctggagcagctgcctctaggg

SEQ ID NO: 6091 - DNA, 22 bp, synthetic construct
  misc_feature 1..22: note = chemically synthesized
  source 1..22: mol_type = other DNA
gagcagctgcctctagggatga

SEQ ID NO: 6092 - DNA, 22 bp, synthetic construct
  misc_feature 1..22: note = chemically synthesized
  source 1..22: mol_type = other DNA
cctctagggatgaactgagcag

SEQ ID NO: 6093 - DNA, 22 bp, synthetic construct
  misc_feature 1..22: note = chemically synthesized
  source 1..22: mol_type = other DNA
tagggatgaactgagcagacag

SEQ ID NO: 6094 - DNA, 22 bp, synthetic construct
  misc_feature 1..22: note = chemically synthesized
  source 1..22: mol_type = other DNA
gggatgaactgagcagacaggc

SEQ ID NO: 6095 - DNA, 22 bp, synthetic construct
  misc_feature 1..22: note = chemically synthesized
  source 1..22: mol_type = other DNA
agcagacaggcaggagggttct

SEQ ID NO: 6096 - DNA, 22 bp, synthetic construct
  misc_feature 1..22: note = chemically synthesized
  source 1..22: mol_type = other DNA
tgacctgttttatatcatctcc

SEQ ID NO: 6097 - DNA, 22 bp, synthetic construct
  misc_feature 1..22: note = chemically synthesized
  source 1..22: mol_type = other DNA
acctgttttatatcatctccag

SEQ ID NO: 6098 - DNA, 22 bp, synthetic construct
  misc_feature 1..22: note = chemically synthesized
  source 1..22: mol_type = other DNA
ttttatatcatctccagggcag

SEQ ID NO: 6099 - DNA, 22 bp, synthetic construct
  misc_feature 1..22: note = chemically synthesized
  source 1..22: mol_type = other DNA
tatatcatctccagggcagcag

SEQ ID NO: 6100 - DNA, 22 bp, synthetic construct
  misc_feature 1..22: note = chemically synthesized
  source 1..22: mol_type = other DNA
atatcatctccagggcagcagg

SEQ ID NO: 6101 - DNA, 22 bp, synthetic construct
  misc_feature 1..22: note = chemically synthesized
  source 1..22: mol_type = other DNA
tatcatctccagggcagcaggc

SEQ ID NO: 6102 - DNA, 22 bp, synthetic construct
  misc_feature 1..22: note = chemically synthesized
  source 1..22: mol_type = other DNA
cagggcagcaggcactgaggac

SEQ ID NO: 6103 - DNA, 22 bp, synthetic construct
  misc_feature 1..22: note = chemically synthesized
  source 1..22: mol_type = other DNA
aggacccagggcgctgggcaaa

SEQ ID NO: 6104 - DNA, 22 bp, synthetic construct
  misc_feature 1..22: note = chemically synthesized
  source 1..22: mol_type = other DNA
ggcaaaggtcacctgctgacca

SEQ ID NO: 6105 - DNA, 22 bp, synthetic construct
  misc_feature 1..22: note = chemically synthesized
  source 1..22: mol_type = other DNA
ctgaccagtggagatgagggcc

SEQ ID NO: 6106 - DNA, 22 bp, synthetic construct
  misc_feature 1..22: note = chemically synthesized
  source 1..22: mol_type = other DNA
accagtggagatgagggcctga

SEQ ID NO: 6107 - DNA, 22 bp, synthetic construct
  misc_feature 1..22: note = chemically synthesized
  source 1..22: mol_type = other DNA
aggcagggtgtccagatgcagc

SEQ ID NO: 6108 - DNA, 22 bp, synthetic construct
  misc_feature 1..22: note = chemically synthesized
  source 1..22: mol_type = other DNA
ggaaatccctaggagactgagt

SEQ ID NO: 6109 - DNA, 20 bp, synthetic construct
  misc_feature 1..20: note = chemically synthesized
  source 1..20: mol_type = other DNA
taccccttgcccatccctgc

SEQ ID NO: 6110 - DNA, 20 bp, synthetic construct
  misc_feature 1..20: note = chemically synthesized
  source 1..20: mol_type = other DNA
ggcccccgtgaccctcactt

SEQ ID NO: 6111 - DNA, 20 bp, synthetic construct
  misc_feature 1..20: note = chemically synthesized
  source 1..20: mol_type = other DNA
gcccccgtgaccctcacttt

SEQ ID NO: 6112 - DNA, 20 bp, synthetic construct
  misc_feature 1..20: note = chemically synthesized
  source 1..20: mol_type = other DNA
gtgaccctcactttgggacc

SEQ ID NO: 6113 - DNA, 20 bp, synthetic construct
  misc_feature 1..20: note = chemically synthesized
  source 1..20: mol_type = other DNA
cactttgggacccagtcaca

SEQ ID NO: 6114 - DNA, 20 bp, synthetic construct
  misc_feature 1..20: note = chemically synthesized
  source 1..20: mol_type = other DNA
ccagtcacacagatgaccac

SEQ ID NO: 6115 - DNA, 20 bp, synthetic construct
  misc_feature 1..20: note = chemically synthesized
  source 1..20: mol_type = other DNA
gtcacacagatgaccaccag

SEQ ID NO: 6116 - DNA, 20 bp, synthetic construct
  misc_feature 1..20: note = chemically synthesized
  source 1..20: mol_type = other DNA
acacagatgaccaccagcag

SEQ ID NO: 6117 - DNA, 20 bp, synthetic construct
  misc_feature 1..20: note = chemically synthesized
  source 1..20: mol_type = other DNA
cacagatgaccaccagcagc

SEQ ID NO: 6118 - DNA, 20 bp, synthetic construct
  misc_feature 1..20: note = chemically synthesized
  source 1..20: mol_type = other DNA
ccaccagcagcaggatgttg

SEQ ID NO: 6119 - DNA, 20 bp, synthetic construct
  misc_feature 1..20: note = chemically synthesized
  source 1..20: mol_type = other DNA
agcagcaggatgttgaagct

SEQ ID NO: 6120 - DNA, 20 bp, synthetic construct
  misc_feature 1..20: note = chemically synthesized
  source 1..20: mol_type = other DNA
gcagcaggatgttgaagctc

SEQ ID NO: 6121 - DNA, 20 bp, synthetic construct
  misc_feature 1..20: note = chemically synthesized
  source 1..20: mol_type = other DNA
cagcaggatgttgaagctca

SEQ ID NO: 6122 - DNA, 20 bp, synthetic construct
  misc_feature 1..20: note = chemically synthesized
  source 1..20: mol_type = other DNA
aggatgttgaagctcagggc

SEQ ID NO: 6123 - DNA, 20 bp, synthetic construct
  misc_feature 1..20: note = chemically synthesized
  source 1..20: mol_type = other DNA
atgttgaagctcagggcaag

SEQ ID NO: 6124 - DNA, 20 bp, synthetic construct
  misc_feature 1..20: note = chemically synthesized
  source 1..20: mol_type = other DNA
agctcagggcaagcagactg

SEQ ID NO: 6125 - DNA, 20 bp, synthetic construct
  misc_feature 1..20: note = chemically synthesized
  source 1..20: mol_type = other DNA
tcagggcaagcagactgaag

SEQ ID NO: 6126 - DNA, 20 bp, synthetic construct
  misc_feature 1..20: note = chemically synthesized
  source 1..20: mol_type = other DNA
aagcagactgaagcagacca

SEQ ID NO: 6127 - DNA, 20 bp, synthetic construct
  misc_feature 1..20: note = chemically synthesized
  source 1..20: mol_type = other DNA
gcagactgaagcagaccatg

SEQ ID NO: 6128 - DNA, 20 bp, synthetic construct
  misc_feature 1..20: note = chemically synthesized
  source 1..20: mol_type = other DNA
gactgaagcagaccatggag

SEQ ID NO: 6129 - DNA, 20 bp, synthetic construct
  misc_feature 1..20: note = chemically synthesized
  source 1..20: mol_type = other DNA
ctgaagcagaccatggagca

SEQ ID NO: 6130 - DNA, 20 bp, synthetic construct
  misc_feature 1..20: note = chemically synthesized
  source 1..20: mol_type = other DNA
atggagcagagacgctgtgc

SEQ ID NO: 6131 - DNA, 20 bp, synthetic construct
  misc_feature 1..20: note = chemically synthesized
  source 1..20: mol_type = other DNA
tggagcagagacgctgtgcc

SEQ ID NO: 6132 - DNA, 20 bp, synthetic construct
  misc_feature 1..20: note = chemically synthesized
  source 1..20: mol_type = other DNA
ggagcagagacgctgtgcca

SEQ ID NO: 6133 - DNA, 20 bp, synthetic construct
  misc_feature 1..20: note = chemically synthesized
  source 1..20: mol_type = other DNA
gagcagagacgctgtgccag

SEQ ID NO: 6134 - DNA, 20 bp, synthetic construct
  misc_feature 1..20: note = chemically synthesized
  source 1..20: mol_type = other DNA
agagacgctgtgccaggggc

SEQ ID NO: 6135 - DNA, 20 bp, synthetic construct
  misc_feature 1..20: note = chemically synthesized
  source 1..20: mol_type = other DNA
gagacgctgtgccaggggct

SEQ ID NO: 6136 - DNA, 20 bp, synthetic construct
  misc_feature 1..20: note = chemically synthesized
  source 1..20: mol_type = other DNA
acgctgtgccaggggctggg

SEQ ID NO: 6137 - DNA, 20 bp, synthetic construct
  misc_feature 1..20: note = chemically synthesized
  source 1..20: mol_type = other DNA
cgctgtgccaggggctgggc

SEQ ID NO: 6138 - DNA, 20 bp, synthetic construct
  misc_feature 1..20: note = chemically synthesized
  source 1..20: mol_type = other DNA
ctgtgccaggggctgggcag

SEQ ID NO: 6139 - DNA, 20 bp, synthetic construct
  misc_feature 1..20: note = chemically synthesized
  source 1..20: mol_type = other DNA
tgtgccaggggctgggcagg

SEQ ID NO: 6140 - DNA, 20 bp, synthetic construct
  misc_feature 1..20: note = chemically synthesized
  source 1..20: mol_type = other DNA
gccaggggctgggcaggagg

SEQ ID NO: 6141 - DNA, 20 bp, synthetic construct
  misc_feature 1..20: note = chemically synthesized
  source 1..20: mol_type = other DNA
ctgggcaggaggtggccctg

SEQ ID NO: 6142 - DNA, 20 bp, synthetic construct
  misc_feature 1..20: note = chemically synthesized
  source 1..20: mol_type = other DNA
tgggcaggaggtggccctgt

SEQ ID NO: 6143 - DNA, 20 bp, synthetic construct
  misc_feature 1..20: note = chemically synthesized
  source 1..20: mol_type = other DNA
ggcaggaggtggccctgtgg

SEQ ID NO: 6144 - DNA, 20 bp, synthetic construct
  misc_feature 1..20: note = chemically synthesized
  source 1..20: mol_type = other DNA
caggaggtggccctgtggga

SEQ ID NO: 6145 - DNA, 20 bp, synthetic construct
  misc_feature 1..20: note = chemically synthesized
  source 1..20: mol_type = other DNA
aggaggtggccctgtgggag

SEQ ID NO: 6146 - DNA, 20 bp, synthetic construct
  misc_feature 1..20: note = chemically synthesized
  source 1..20: mol_type = other DNA
ggaggtggccctgtgggaga

SEQ ID NO: 6147 - DNA, 20 bp, synthetic construct
  misc_feature 1..20: note = chemically synthesized
  source 1..20: mol_type = other DNA
gaggtggccctgtgggagag

SEQ ID NO: 6148 - DNA, 20 bp, synthetic construct
  misc_feature 1..20: note = chemically synthesized
  source 1..20: mol_type = other DNA
gccctgtgggagaggggcat

SEQ ID NO: 6149 - DNA, 20 bp, synthetic construct
  misc_feature 1..20: note = chemically synthesized
  source 1..20: mol_type = other DNA
ccctgtgggagaggggcatc

SEQ ID NO: 6150 - DNA, 20 bp, synthetic construct
  misc_feature 1..20: note = chemically synthesized
  source 1..20: mol_type = other DNA
ctgtgggagaggggcatcag

SEQ ID NO: 6151 - DNA, 20 bp, synthetic construct
  misc_feature 1..20: note = chemically synthesized
  source 1..20: mol_type = other DNA
gggagaggggcatcaggagc

SEQ ID NO: 6152 - DNA, 20 bp, synthetic construct
  misc_feature 1..20: note = chemically synthesized
  source 1..20: mol_type = other DNA
agaggggcatcaggagccgg

SEQ ID NO: 6153 - DNA, 20 bp, synthetic construct
  misc_feature 1..20: note = chemically synthesized
  source 1..20: mol_type = other DNA
ggcatcaggagccggcagcc

SEQ ID NO: 6154 - DNA, 20 bp, synthetic construct
  misc_feature 1..20: note = chemically synthesized
  source 1..20: mol_type = other DNA
gcatcaggagccggcagcct

SEQ ID NO: 6155 - DNA, 20 bp, synthetic construct
  misc_feature 1..20: note = chemically synthesized
  source 1..20: mol_type = other DNA
aggagccggcagcctgggtg

SEQ ID NO: 6156 - DNA, 20 bp, synthetic construct
  misc_feature 1..20: note = chemically synthesized
  source 1..20: mol_type = other DNA
ggagccggcagcctgggtgt

SEQ ID NO: 6157 - DNA, 20 bp, synthetic construct
  misc_feature 1..20: note = chemically synthesized
  source 1..20: mol_type = other DNA
gagccggcagcctgggtgtg

SEQ ID NO: 6158 - DNA, 20 bp, synthetic construct
  misc_feature 1..20: note = chemically synthesized
  source 1..20: mol_type = other DNA
gccggcagcctgggtgtggg

SEQ ID NO: 6159 - DNA, 20 bp, synthetic construct
  misc_feature 1..20: note = chemically synthesized
  source 1..20: mol_type = other DNA
gcagcctgggtgtggggagc

SEQ ID NO: 6160 - DNA, 20 bp, synthetic construct
  misc_feature 1..20: note = chemically synthesized
  source 1..20: mol_type = other DNA
agcctgggtgtggggagccg

SEQ ID NO: 6161 - DNA, 20 bp, synthetic construct
  misc_feature 1..20: note = chemically synthesized
  source 1..20: mol_type = other DNA
gcctgggtgtggggagccgg

SEQ ID NO: 6162 - DNA, 20 bp, synthetic construct
  misc_feature 1..20: note = chemically synthesized
  source 1..20: mol_type = other DNA
cctgggtgtggggagccgga

SEQ ID NO: 6163 - DNA, 20 bp, synthetic construct
  misc_feature 1..20: note = chemically synthesized
  source 1..20: mol_type = other DNA
gtgtggggagccggagggta

SEQ ID NO: 6164 - DNA, 20 bp, synthetic construct
  misc_feature 1..20: note = chemically synthesized
  source 1..20: mol_type = other DNA
ggggagccggagggtaaaga

SEQ ID NO: 6165 - DNA, 20 bp, synthetic construct
  misc_feature 1..20: note = chemically synthesized
  source 1..20: mol_type = other DNA
gggagccggagggtaaagac

SEQ ID NO: 6166 - DNA, 20 bp, synthetic construct
  misc_feature 1..20: note = chemically synthesized
  source 1..20: mol_type = other DNA
ggagccggagggtaaagaca

SEQ ID NO: 6167 - DNA, 20 bp, synthetic construct
  misc_feature 1..20: note = chemically synthesized
  source 1..20: mol_type = other DNA
agggtaaagacagggcaccg

SEQ ID NO: 6168 - DNA, 20 bp, synthetic construct
  misc_feature 1..20: note = chemically synthesized
  source 1..20: mol_type = other DNA
aagacagggcaccgaagcct

SEQ ID NO: 6169 - DNA, 20 bp, synthetic construct
  misc_feature 1..20: note = chemically synthesized
  source 1..20: mol_type = other DNA
agacagggcaccgaagcctg

SEQ ID NO: 6170 - DNA, 20 bp, synthetic construct
  misc_feature 1..20: note = chemically synthesized
  source 1..20: mol_type = other DNA
acagggcaccgaagcctgag

SEQ ID NO: 6171 - DNA, 20 bp, synthetic construct
  misc_feature 1..20: note = chemically synthesized
  source 1..20: mol_type = other DNA
cagggcaccgaagcctgagg

SEQ ID NO: 6172 - DNA, 20 bp, synthetic construct
  misc_feature 1..20: note = chemically synthesized
  source 1..20: mol_type = other DNA
aagcctgaggaggcataacc

SEQ ID NO: 6173 - DNA, 20 bp, synthetic construct
  misc_feature 1..20: note = chemically synthesized
  source 1..20: mol_type = other DNA
agcctgaggaggcataacct

SEQ ID NO: 6174 - DNA, 20 bp, synthetic construct
  misc_feature 1..20: note = chemically synthesized
  source 1..20: mol_type = other DNA
ctgaggaggcataacctggg

SEQ ID NO: 6175 - DNA, 20 bp, synthetic construct
  misc_feature 1..20: note = chemically synthesized
  source 1..20: mol_type = other DNA
tgaggaggcataacctgggc

SEQ ID NO: 6176 - DNA, 20 bp, synthetic construct
  misc_feature 1..20: note = chemically synthesized
  source 1..20: mol_type = other DNA
gaggaggcataacctgggcg

SEQ ID NO: 6177 - DNA, 20 bp, synthetic construct
  misc_feature 1..20: note = chemically synthesized
  source 1..20: mol_type = other DNA
aggaggcataacctgggcgg

SEQ ID NO: 6178 - DNA, 20 bp, synthetic construct
  misc_feature 1..20: note = chemically synthesized
  source 1..20: mol_type = other DNA
ggaggcataacctgggcggg

SEQ ID NO: 6179 - DNA, 20 bp, synthetic construct
  misc_feature 1..20: note = chemically synthesized
  source 1..20: mol_type = other DNA
cataacctgggcggggggat

SEQ ID NO: 6180 - DNA, 20 bp, synthetic construct
  misc_feature 1..20: note = chemically synthesized
  source 1..20: mol_type = other DNA
acctgggcggggggattggt

SEQ ID NO: 6181 - DNA, 20 bp, synthetic construct
  misc_feature 1..20: note = chemically synthesized
  source 1..20: mol_type = other DNA
cctgggcggggggattggtt

SEQ ID NO: 6182 - DNA, 20 bp, synthetic construct
  misc_feature 1..20: note = chemically synthesized
  source 1..20: mol_type = other DNA
ctgggcggggggattggttg

SEQ ID NO: 6183 - DNA, 20 bp, synthetic construct
  misc_feature 1..20: note = chemically synthesized
  source 1..20: mol_type = other DNA
ggggggattggttggggcca

SEQ ID NO: 6184 - DNA, 20 bp, synthetic construct
  misc_feature 1..20: note = chemically synthesized
  source 1..20: mol_type = other DNA
gggggattggttggggccat

SEQ ID NO: 6185 - DNA, 20 bp, synthetic construct
  misc_feature 1..20: note = chemically synthesized
  source 1..20: mol_type = other DNA
ggggattggttggggccatg

SEQ ID NO: 6186 - DNA, 20 bp, synthetic construct
  misc_feature 1..20: note = chemically synthesized
  source 1..20: mol_type = other DNA
gggattggttggggccatgg

SEQ ID NO: 6187 - DNA, 20 bp, synthetic construct
  misc_feature 1..20: note = chemically synthesized
  source 1..20: mol_type = other DNA
ggattggttggggccatggg

SEQ ID NO: 6188 - DNA, 20 bp, synthetic construct
  misc_feature 1..20: note = chemically synthesized
  source 1..20: mol_type = other DNA
gattggttggggccatgggg

SEQ ID NO: 6189 - DNA, 20 bp, synthetic construct
  misc_feature 1..20: note = chemically synthesized
  source 1..20: mol_type = other DNA
attggttggggccatggggg

SEQ ID NO: 6190 - DNA, 20 bp, synthetic construct
  misc_feature 1..20: note = chemically synthesized
  source 1..20: mol_type = other DNA
ttggttggggccatgggggg

SEQ ID NO: 6191 - DNA, 20 bp, synthetic construct
  misc_feature 1..20: note = chemically synthesized
  source 1..20: mol_type = other DNA
gccatgggggggggtcatca

SEQ ID NO: 6192 - DNA, 20 bp, synthetic construct
  misc_feature 1..20: note = chemically synthesized
  source 1..20: mol_type = other DNA
ccatgggggggggtcatcat

SEQ ID NO: 6193 - DNA, 20 bp, synthetic construct
  misc_feature 1..20: note = chemically synthesized
  source 1..20: mol_type = other DNA
gtcatcataggctttgaccc

SEQ ID NO: 6194 - DNA, 20 bp, synthetic construct
  misc_feature 1..20: note = chemically synthesized
  source 1..20: mol_type = other DNA
aggctttgaccccagcattt

SEQ ID NO: 6195 - DNA, 20 bp, synthetic construct
  misc_feature 1..20: note = chemically synthesized
  source 1..20: mol_type = other DNA
catgtataaatatacacacg

SEQ ID NO: 6196 - DNA, 20 bp, synthetic construct
  misc_feature 1..20: note = chemically synthesized
  source 1..20: mol_type = other DNA
atatacacacgcagctaatc

SEQ ID NO: 6197 - DNA, 20 bp, synthetic construct
  misc_feature 1..20: note = chemically synthesized
  source 1..20: mol_type = other DNA
acacacccatgcacacgact

SEQ ID NO: 6198 - DNA, 20 bp, synthetic construct
  misc_feature 1..20: note = chemically synthesized
  source 1..20: mol_type = other DNA
cacacccatgcacacgactc

SEQ ID NO: 6199 - DNA, 20 bp, synthetic construct
  misc_feature 1..20: note = chemically synthesized
  source 1..20: mol_type = other DNA
acgactcaggatattcacat

SEQ ID NO: 6200 - DNA, 20 bp, synthetic construct
  misc_feature 1..20: note = chemically synthesized
  source 1..20: mol_type = other DNA
attcacatcagctgtgtgca

SEQ ID NO: 6201 - DNA, 20 bp, synthetic construct
  misc_feature 1..20: note = chemically synthesized
  source 1..20: mol_type = other DNA
catcagctgtgtgcaaagcc

SEQ ID NO: 6202 - DNA, 20 bp, synthetic construct
  misc_feature 1..20: note = chemically synthesized
  source 1..20: mol_type = other DNA
tgtgtgcaaagcccggatcc

SEQ ID NO: 6203 - DNA, 20 bp, synthetic construct
  misc_feature 1..20: note = chemically synthesized
  source 1..20: mol_type = other DNA
tgtgcaaagcccggatcctg

SEQ ID NO: 6204 - DNA, 20 bp, synthetic construct
  misc_feature 1..20: note = chemically synthesized
  source 1..20: mol_type = other DNA
caaagcccggatcctggagc

SEQ ID NO: 6205 - DNA, 20 bp, synthetic construct
  misc_feature 1..20: note = chemically synthesized
  source 1..20: mol_type = other DNA
aaagcccggatcctggagct

SEQ ID NO: 6206 - DNA, 20 bp, synthetic construct
  misc_feature 1..20: note = chemically synthesized
  source 1..20: mol_type = other DNA
aagcccggatcctggagctg

SEQ ID NO: 6207 - DNA, 20 bp, synthetic construct
  misc_feature 1..20: note = chemically synthesized
  source 1..20: mol_type = other DNA
agcccggatcctggagctgg

SEQ ID NO: 6208 - DNA, 20 bp, synthetic construct
  misc_feature 1..20: note = chemically synthesized
  source 1..20: mol_type = other DNA
ggatcctggagctgggggac

SEQ ID NO: 6209 - DNA, 20 bp, synthetic construct
  misc_feature 1..20: note = chemically synthesized
  source 1..20: mol_type = other DNA
gatcctggagctgggggact

SEQ ID NO: 6210 - DNA, 20 bp, synthetic construct
  misc_feature 1..20: note = chemically synthesized
  source 1..20: mol_type = other DNA
tcctggagctgggggactgg

SEQ ID NO: 6211 - DNA, 20 bp, synthetic construct
  misc_feature 1..20: note = chemically synthesized
  source 1..20: mol_type = other DNA
ctgggggactgggagacgca

SEQ ID NO: 6212 - DNA, 20 bp, synthetic construct
  misc_feature 1..20: note = chemically synthesized
  source 1..20: mol_type = other DNA
tgggggactgggagacgcac

SEQ ID NO: 6213 - DNA, 20 bp, synthetic construct
  misc_feature 1..20: note = chemically synthesized
  source 1..20: mol_type = other DNA
gggggactgggagacgcaca

SEQ ID NO: 6214 - DNA, 20 bp, synthetic construct
  misc_feature 1..20: note = chemically synthesized
  source 1..20: mol_type = other DNA
ggggactgggagacgcacag

SEQ ID NO: 6215 - DNA, 20 bp, synthetic construct
  misc_feature 1..20: note = chemically synthesized
  source 1..20: mol_type = other DNA
gggactgggagacgcacagg

SEQ ID NO: 6216 - DNA, 20 bp, synthetic construct
  misc_feature 1..20: note = chemically synthesized
  source 1..20: mol_type = other DNA
actgggagacgcacaggggg

SEQ ID NO: 6217 - DNA, 20 bp, synthetic construct
  misc_feature 1..20: note = chemically synthesized
  source 1..20: mol_type = other DNA
ctgggagacgcacagggggc

SEQ ID NO: 6218 - DNA, 20 bp, synthetic construct
  misc_feature 1..20: note = chemically synthesized
  source 1..20: mol_type = other DNA
tgggagacgcacagggggcg

SEQ ID NO: 6219 - DNA, 20 bp, synthetic construct
  misc_feature 1..20: note = chemically synthesized
  source 1..20: mol_type = other DNA
gggagacgcacagggggcgg

SEQ ID NO: 6220 - DNA, 20 bp, synthetic construct
  misc_feature 1..20: note = chemically synthesized
  source 1..20: mol_type = other DNA
ggagacgcacagggggcggg

SEQ ID NO: 6221 - DNA, 20 bp, synthetic construct
  misc_feature 1..20: note = chemically synthesized
  source 1..20: mol_type = other DNA
gagacgcacagggggcgggg

SEQ ID NO: 6222 - DNA, 20 bp, synthetic construct
  misc_feature 1..20: note = chemically synthesized
  source 1..20: mol_type = other DNA
acgcacagggggcggggggg

SEQ ID NO: 6223 - DNA, 20 bp, synthetic construct
  misc_feature 1..20: note = chemically synthesized
  source 1..20: mol_type = other DNA
agggggcgggggggcagacc

SEQ ID NO: 6224 - DNA, 20 bp, synthetic construct
  misc_feature 1..20: note = chemically synthesized
  source 1..20: mol_type = other DNA
ggggcagacccggccctgcc

SEQ ID NO: 6225 - DNA, 20 bp, synthetic construct
  misc_feature 1..20: note = chemically synthesized
  source 1..20: mol_type = other DNA
gggcagacccggccctgcct

SEQ ID NO: 6226 - DNA, 20 bp, synthetic construct
  misc_feature 1..20: note = chemically synthesized
  source 1..20: mol_type = other DNA
cctgcctaggcacacatcct

SEQ ID NO: 6227 - DNA, 20 bp, synthetic construct
  misc_feature 1..20: note = chemically synthesized
  source 1..20: mol_type = other DNA
gcctaggcacacatcctgag

SEQ ID NO: 6228 - DNA, 20 bp, synthetic construct
  misc_feature 1..20: note = chemically synthesized
  source 1..20: mol_type = other DNA
cctaggcacacatcctgaga

SEQ ID NO: 6229 - DNA, 20 bp, synthetic construct
  misc_feature 1..20: note = chemically synthesized
  source 1..20: mol_type = other DNA
ctaggcacacatcctgagaa

SEQ ID NO: 6230 - DNA, 20 bp, synthetic construct
  misc_feature 1..20: note = chemically synthesized
  source 1..20: mol_type = other DNA
taggcacacatcctgagaag

SEQ ID NO: 6231 - DNA, 20 bp, synthetic construct
  misc_feature 1..20: note = chemically synthesized
  source 1..20: mol_type = other DNA
aggcacacatcctgagaagg

SEQ ID NO: 6232 - DNA, 20 bp, synthetic construct
  misc_feature 1..20: note = chemically synthesized
  source 1..20: mol_type = other DNA
tgagaagggggatctgtgaa

SEQ ID NO: 6233 - DNA, 20 bp, synthetic construct
  misc_feature 1..20: note = chemically synthesized
  source 1..20: mol_type = other DNA
tgaatggttttcctcccatc

SEQ ID NO: 6234 - DNA, 20 bp, synthetic construct
  misc_feature 1..20: note = chemically synthesized
  source 1..20: mol_type = other DNA
tggttttcctcccatccagc

SEQ ID NO: 6235 - DNA, 20 bp, synthetic construct
  misc_feature 1..20: note = chemically synthesized
  source 1..20: mol_type = other DNA
ttttcctcccatccagccag

SEQ ID NO: 6236 - DNA, 20 bp, synthetic construct
  misc_feature 1..20: note = chemically synthesized
  source 1..20: mol_type = other DNA
tcctcccatccagccagtgg

SEQ ID NO: 6237 - DNA, 20 bp, synthetic construct
  misc_feature 1..20: note = chemically synthesized
  source 1..20: mol_type = other DNA
ctcccatccagccagtggca

SEQ ID NO: 6238 - DNA, 20 bp, synthetic construct
  misc_feature 1..20: note = chemically synthesized
  source 1..20: mol_type = other DNA
tcccatccagccagtggcag

SEQ ID NO: 6239 - DNA, 20 bp, synthetic construct
  misc_feature 1..20: note = chemically synthesized
  source 1..20: mol_type = other DNA
cagccagtggcagaggcctc

SEQ ID NO: 6240 - DNA, 20 bp, synthetic construct
  misc_feature 1..20: note = chemically synthesized
  source 1..20: mol_type = other DNA
cagaggcctccagatcacct

SEQ ID NO: 6241 - DNA, 20 bp, synthetic construct
  misc_feature 1..20: note = chemically synthesized
  source 1..20: mol_type = other DNA
agaggcctccagatcacctc

SEQ ID NO: 6242 - DNA, 20 bp, synthetic construct
  misc_feature 1..20: note = chemically synthesized
  source 1..20: mol_type = other DNA
ctccagatcacctcgggcct

SEQ ID NO: 6243 - DNA, 20 bp, synthetic construct
  misc_feature 1..20: note = chemically synthesized
  source 1..20: mol_type = other DNA
atcacctcgggccttagtct

SEQ ID NO: 6244 - DNA, 20 bp, synthetic construct
  misc_feature 1..20: note = chemically synthesized
  source 1..20: mol_type = other DNA
gccttagtctcagctcttct

SEQ ID NO: 6245 - DNA, 20 bp, synthetic construct
  misc_feature 1..20: note = chemically synthesized
  source 1..20: mol_type = other DNA
ccttagtctcagctcttcta

SEQ ID NO: 6246 - DNA, 20 bp, synthetic construct
  misc_feature 1..20: note = chemically synthesized
  source 1..20: mol_type = other DNA
ttctaaggctcctgtcccct

SEQ ID NO: 6247 - DNA, 20 bp, synthetic construct
  misc_feature 1..20: note = chemically synthesized
  source 1..20: mol_type = other DNA
aggctcctgtcccctcagat

SEQ ID NO: 6248 - DNA, 20 bp, synthetic construct
  misc_feature 1..20: note = chemically synthesized
  source 1..20: mol_type = other DNA
gctcctgtcccctcagattg

SEQ ID NO: 6249 - DNA, 20 bp, synthetic construct
  misc_feature 1..20: note = chemically synthesized
  source 1..20: mol_type = other DNA
tcccctcagattggagactc

SEQ ID NO: 6250 - DNA, 20 bp, synthetic construct
  misc_feature 1..20: note = chemically synthesized
  source 1..20: mol_type = other DNA
cctcagattggagactccag

SEQ ID NO: 6251 - DNA, 20 bp, synthetic construct
  misc_feature 1..20: note = chemically synthesized
  source 1..20: mol_type = other DNA
agattggagactccagaagc

SEQ ID NO: 6252 - DNA, 20 bp, synthetic construct
  misc_feature 1..20: note = chemically synthesized
  source 1..20: mol_type = other DNA
gattggagactccagaagct

SEQ ID NO: 6253 - DNA, 20 bp, synthetic construct
  misc_feature 1..20: note = chemically synthesized
  source 1..20: mol_type = other DNA
gttcttcctaaaatccatac

SEQ ID NO: 6254 - DNA, 20 bp, synthetic construct
  misc_feature 1..20: note = chemically synthesized
  source 1..20: mol_type = other DNA
tcctaaaatccatactggaa

SEQ ID NO: 6255 - DNA, 20 bp, synthetic construct
  misc_feature 1..20: note = chemically synthesized
  source 1..20: mol_type = other DNA
tcccctgccaaaattccatt

SEQ ID NO: 6256 - DNA, 20 bp, synthetic construct
  misc_feature 1..20: note = chemically synthesized
  source 1..20: mol_type = other DNA
tccattgagatccttaaatc

SEQ ID NO: 6257 - DNA, 20 bp, synthetic construct
  misc_feature 1..20: note = chemically synthesized
  source 1..20: mol_type = other DNA
ccattgagatccttaaatct

SEQ ID NO: 6258 - DNA, 20 bp, synthetic construct
  misc_feature 1..20: note = chemically synthesized
  source 1..20: mol_type = other DNA
aaatctgggtcattccacca

SEQ ID NO: 6259 - DNA, 20 bp, synthetic construct
  misc_feature 1..20: note = chemically synthesized
  source 1..20: mol_type = other DNA
tccaccatagcccactctcc

SEQ ID NO: 6260 - DNA, 20 bp, synthetic construct
  misc_feature 1..20: note = chemically synthesized
  source 1..20: mol_type = other DNA
actctccaagcacaaccctc

SEQ ID NO: 6261 - DNA, 20 bp, synthetic construct
  misc_feature 1..20: note = chemically synthesized
  source 1..20: mol_type = other DNA
ctctccaagcacaaccctcc

SEQ ID NO: 6262 - DNA, 20 bp, synthetic construct
  misc_feature 1..20: note = chemically synthesized
  source 1..20: mol_type = other DNA
gtcctcatcccccaccacgc

SEQ ID NO: 6263 - DNA, 20 bp, synthetic construct
  misc_feature 1..20: note = chemically synthesized
  source 1..20: mol_type = other DNA
tcctcatcccccaccacgca

SEQ ID NO: 6264 - DNA, 20 bp, synthetic construct
  misc_feature 1..20: note = chemically synthesized
  source 1..20: mol_type = other DNA
accacgcaaggcctcctccc

SEQ ID NO: 6265 - DNA, 20 bp, synthetic construct
  misc_feature 1..20: note = chemically synthesized
  source 1..20: mol_type = other DNA
gccctttgccctcgcttccc

SEQ ID NO: 6266 - DNA, 20 bp, synthetic construct
  misc_feature 1..20: note = chemically synthesized
  source 1..20: mol_type = other DNA
cacactaaatttgctcccct

SEQ ID NO: 6267 - DNA, 20 bp, synthetic construct
  misc_feature 1..20: note = chemically synthesized
  source 1..20: mol_type = other DNA
aaatttgctcccctcagccc

SEQ ID NO: 6268 - DNA, 20 bp, synthetic construct
  misc_feature 1..20: note = chemically synthesized
  source 1..20: mol_type = other DNA
aatttgctcccctcagcccg

SEQ ID NO: 6269 - DNA, 20 bp, synthetic construct
  misc_feature 1..20: note = chemically synthesized
  source 1..20: mol_type = other DNA
ctcagcccgaggtcatctca

SEQ ID NO: 6270 - DNA, 20 bp, synthetic construct
  misc_feature 1..20: note = chemically synthesized
  source 1..20: mol_type = other DNA
tcagcccgaggtcatctcac

SEQ ID NO: 6271 - DNA, 20 bp, synthetic construct
  misc_feature 1..20: note = chemically synthesized
  source 1..20: mol_type = other DNA
ttgatccatctgcaccctga

SEQ ID NO: 6272 - DNA, 20 bp, synthetic construct
  misc_feature 1..20: note = chemically synthesized
  source 1..20: mol_type = other DNA
cacccacgtcttcctgcaca

SEQ ID NO: 6273 - DNA, 20 bp, synthetic construct
  misc_feature 1..20: note = chemically synthesized
  source 1..20: mol_type = other DNA
cccacgtcttcctgcacaca

SEQ ID NO: 6274 - DNA, 20 bp, synthetic construct
  misc_feature 1..20: note = chemically synthesized
  source 1..20: mol_type = other DNA
cgtcttcctgcacacagagc

SEQ ID NO: 6275 - DNA, 20 bp, synthetic construct
  misc_feature 1..20: note = chemically synthesized
  source 1..20: mol_type = other DNA
gtcttcctgcacacagagct

SEQ ID NO: 6276 - DNA, 20 bp, synthetic construct
  misc_feature 1..20: note = chemically synthesized
  source 1..20: mol_type = other DNA
ggctccctctctgctgcctc

SEQ ID NO: 6277 - DNA, 20 bp, synthetic construct
  misc_feature 1..20: note = chemically synthesized
  source 1..20: mol_type = other DNA
ctctctgctgcctccagacc

SEQ ID NO: 6278 - DNA, 20 bp, synthetic construct
  misc_feature 1..20: note = chemically synthesized
  source 1..20: mol_type = other DNA
ctctgctgcctccagaccca

SEQ ID NO: 6279 - DNA, 20 bp, synthetic construct
  misc_feature 1..20: note = chemically synthesized
  source 1..20: mol_type = other DNA
tgctgcctccagacccagag

SEQ ID NO: 6280 - DNA, 20 bp, synthetic construct
  misc_feature 1..20: note = chemically synthesized
  source 1..20: mol_type = other DNA
ctccagacccagagcagctc

SEQ ID NO: 6281 - DNA, 20 bp, synthetic construct
  misc_feature 1..20: note = chemically synthesized
  source 1..20: mol_type = other DNA
cagagcagctccagttgtcc

SEQ ID NO: 6282 - DNA, 20 bp, synthetic construct
  misc_feature 1..20: note = chemically synthesized
  source 1..20: mol_type = other DNA
gctccagttgtcccagccct

SEQ ID NO: 6283 - DNA, 20 bp, synthetic construct
  misc_feature 1..20: note = chemically synthesized
  source 1..20: mol_type = other DNA
gccctgagctcctctctttg

SEQ ID NO: 6284 - DNA, 20 bp, synthetic construct
  misc_feature 1..20: note = chemically synthesized
  source 1..20: mol_type = other DNA
ttgcagcatccacctgcaaa

SEQ ID NO: 6285 - DNA, 20 bp, synthetic construct
  misc_feature 1..20: note = chemically synthesized
  source 1..20: mol_type = other DNA
cctgcaaacagaacaccttc

SEQ ID NO: 6286 - DNA, 20 bp, synthetic construct
  misc_feature 1..20: note = chemically synthesized
  source 1..20: mol_type = other DNA
ctgcaaacagaacaccttct

SEQ ID NO: 6287 - DNA, 20 bp, synthetic construct
  misc_feature 1..20: note = chemically synthesized
  source 1..20: mol_type = other DNA
acagaacaccttctaggcct

SEQ ID NO: 6288 - DNA, 20 bp, synthetic construct
  misc_feature 1..20: note = chemically synthesized
  source 1..20: mol_type = other DNA
ggccttggaccctgactctg

SEQ ID NO: 6289 - DNA, 20 bp, synthetic construct
  misc_feature 1..20: note = chemically synthesized
  source 1..20: mol_type = other DNA
attcctatcaccccccgacc

SEQ ID NO: 6290 - DNA, 20 bp, synthetic construct
  misc_feature 1..20: note = chemically synthesized
  source 1..20: mol_type = other DNA
cctatcaccccccgacccag

SEQ ID NO: 6291 - DNA, 20 bp, synthetic construct
  misc_feature 1..20: note = chemically synthesized
  source 1..20: mol_type = other DNA
ctatcaccccccgacccagc

SEQ ID NO: 6292 - DNA, 20 bp, synthetic construct
  misc_feature 1..20: note = chemically synthesized
  source 1..20: mol_type = other DNA
gacccagcaggaccacatcc

SEQ ID NO: 6293 - DNA, 20 bp, synthetic construct
  misc_feature 1..20: note = chemically synthesized
  source 1..20: mol_type = other DNA
acccagcaggaccacatcct

SEQ ID NO: 6294 - DNA, 20 bp, synthetic construct
  misc_feature 1..20: note = chemically synthesized
  source 1..20: mol_type = other DNA
cccagcaggaccacatcctg

SEQ ID NO: 6295 - DNA, 20 bp, synthetic construct
  misc_feature 1..20: note = chemically synthesized
  source 1..20: mol_type = other DNA
cagcaggaccacatcctggg

SEQ ID NO: 6296 - DNA, 20 bp, synthetic construct
  misc_feature 1..20: note = chemically synthesized
  source 1..20: mol_type = other DNA
agcaggaccacatcctgggg

SEQ ID NO: 6297 - DNA, 20 bp, synthetic construct
  misc_feature 1..20: note = chemically synthesized
  source 1..20: mol_type = other DNA
gaccacatcctggggaggct

SEQ ID NO: 6298 - DNA, 20 bp, synthetic construct
  misc_feature 1..20: note = chemically synthesized
  source 1..20: mol_type = other DNA
acatcctggggaggctcagt

SEQ ID NO: 6299 - DNA, 20 bp, synthetic construct
  misc_feature 1..20: note = chemically synthesized
  source 1..20: mol_type = other DNA
catcctggggaggctcagtc

SEQ ID NO: 6300 - DNA, 20 bp, synthetic construct
  misc_feature 1..20: note = chemically synthesized
  source 1..20: mol_type = other DNA
atcctggggaggctcagtca

SEQ ID NO: 6301 - DNA, 20 bp, synthetic construct
  misc_feature 1..20: note = chemically synthesized
  source 1..20: mol_type = other DNA
tcctggggaggctcagtcag

SEQ ID NO: 6302 - DNA, 20 bp, synthetic construct
  misc_feature 1..20: note = chemically synthesized
  source 1..20: mol_type = other DNA
gggaggctcagtcaggggcc

SEQ ID NO: 6303 - DNA, 20 bp, synthetic construct
  misc_feature 1..20: note = chemically synthesized
  source 1..20: mol_type = other DNA
gggcccagaatcttcctccc

SEQ ID NO: 6304 - DNA, 20 bp, synthetic construct
  misc_feature 1..20: note = chemically synthesized
  source 1..20: mol_type = other DNA
ggcccagaatcttcctcccc

SEQ ID NO: 6305 - DNA, 20 bp, synthetic construct
  misc_feature 1..20: note = chemically synthesized
  source 1..20: mol_type = other DNA
tcacttcctgccactgtcct

SEQ ID NO: 6306 - DNA, 20 bp, synthetic construct
  misc_feature 1..20: note = chemically synthesized
  source 1..20: mol_type = other DNA
ttcctgccactgtcctgagt

SEQ ID NO: 6307 - DNA, 20 bp, synthetic construct
  misc_feature 1..20: note = chemically synthesized
  source 1..20: mol_type = other DNA
gagtcagacactgcccctgt

SEQ ID NO: 6308 - DNA, 20 bp, synthetic construct
  misc_feature 1..20: note = chemically synthesized
  source 1..20: mol_type = other DNA
actcttcatctttttcacac

SEQ ID NO: 6309 - DNA, 20 bp, synthetic construct
  misc_feature 1..20: note = chemically synthesized
  source 1..20: mol_type = other DNA
gacttccaccttccccactg

SEQ ID NO: 6310 - DNA, 20 bp, synthetic construct
  misc_feature 1..20: note = chemically synthesized
  source 1..20: mol_type = other DNA
ttccccactgcagccacact

SEQ ID NO: 6311 - DNA, 20 bp, synthetic construct
  misc_feature 1..20: note = chemically synthesized
  source 1..20: mol_type = other DNA
tccccactgcagccacactc

SEQ ID NO: 6312 - DNA, 20 bp, synthetic construct
  misc_feature 1..20: note = chemically synthesized
  source 1..20: mol_type = other DNA
actcaggaccccatttgacc

SEQ ID NO: 6313 - DNA, 20 bp, synthetic construct
  misc_feature 1..20: note = chemically synthesized
  source 1..20: mol_type = other DNA
ctcaggaccccatttgaccc

SEQ ID NO: 6314 - DNA, 20 bp, synthetic construct
  misc_feature 1..20: note = chemically synthesized
  source 1..20: mol_type = other DNA
tcaggaccccatttgaccca

SEQ ID NO: 6315 - DNA, 20 bp, synthetic construct
  misc_feature 1..20: note = chemically synthesized
  source 1..20: mol_type = other DNA
aggaccccatttgacccagg

SEQ ID NO: 6316 - DNA, 20 bp, synthetic construct
  misc_feature 1..20: note = chemically synthesized
  source 1..20: mol_type = other DNA
ggaccccatttgacccaggg

SEQ ID NO: 6317 - DNA, 20 bp, synthetic construct
  misc_feature 1..20: note = chemically synthesized
  source 1..20: mol_type = other DNA
ccactgcccactcccgctct

SEQ ID NO: 6318 - DNA, 20 bp, synthetic construct
  misc_feature 1..20: note = chemically synthesized
  source 1..20: mol_type = other DNA
gcccactcccgctctgagca

SEQ ID NO: 6319 - DNA, 20 bp, synthetic construct
  misc_feature 1..20: note = chemically synthesized
  source 1..20: mol_type = other DNA
ctgcccccaccccttcctcc

SEQ ID NO: 6320 - DNA, 20 bp, synthetic construct
  misc_feature 1..20: note = chemically synthesized
  source 1..20: mol_type = other DNA
tgcccccaccccttcctcca

SEQ ID NO: 6321 - DNA, 20 bp, synthetic construct
  misc_feature 1..20: note = chemically synthesized
  source 1..20: mol_type = other DNA
cctttgcattcctctccatc

SEQ ID NO: 6322 - DNA, 20 bp, synthetic construct
  misc_feature 1..20: note = chemically synthesized
  source 1..20: mol_type = other DNA
ttgcattcctctccatccag

SEQ ID NO: 6323 - DNA, 20 bp, synthetic construct
  misc_feature 1..20: note = chemically synthesized
  source 1..20: mol_type = other DNA
ccagaagcgctccatgacca

SEQ ID NO: 6324 - DNA, 20 bp, synthetic construct
  misc_feature 1..20: note = chemically synthesized
  source 1..20: mol_type = other DNA
tgaccacggtgttccccacc

SEQ ID NO: 6325 - DNA, 20 bp, synthetic construct
  misc_feature 1..20: note = chemically synthesized
  source 1..20: mol_type = other DNA
cacggtgttccccaccaagc

SEQ ID NO: 6326 - DNA, 20 bp, synthetic construct
  misc_feature 1..20: note = chemically synthesized
  source 1..20: mol_type = other DNA
cccaccaagctggccctcca

SEQ ID NO: 6327 - DNA, 20 bp, synthetic construct
  misc_feature 1..20: note = chemically synthesized
  source 1..20: mol_type = other DNA
caagctggccctccatggct

SEQ ID NO: 6328 - DNA, 20 bp, synthetic construct
  misc_feature 1..20: note = chemically synthesized
  source 1..20: mol_type = other DNA
gagtccctgactgctgtctt

SEQ ID NO: 6329 - DNA, 20 bp, synthetic construct
  misc_feature 1..20: note = chemically synthesized
  source 1..20: mol_type = other DNA
tgtcttcagcaccctccact

SEQ ID NO: 6330 - DNA, 20 bp, synthetic construct
  misc_feature 1..20: note = chemically synthesized
  source 1..20: mol_type = other DNA
tcttcagcaccctccactca

SEQ ID NO: 6331 - DNA, 20 bp, synthetic construct
  misc_feature 1..20: note = chemically synthesized
  source 1..20: mol_type = other DNA
cttcagcaccctccactcag

SEQ ID NO: 6332 - DNA, 20 bp, synthetic construct
  misc_feature 1..20: note = chemically synthesized
  source 1..20: mol_type = other DNA
ttcagcaccctccactcaga

SEQ ID NO: 6333 - DNA, 20 bp, synthetic construct
  misc_feature 1..20: note = chemically synthesized
  source 1..20: mol_type = other DNA
gagggtcctgtcctgcttcc

SEQ ID NO: 6334 - DNA, 20 bp, synthetic construct
  misc_feature 1..20: note = chemically synthesized
  source 1..20: mol_type = other DNA
gacttatcaactcccaatgc

SEQ ID NO: 6335 - DNA, 20 bp, synthetic construct
  misc_feature 1..20: note = chemically synthesized
  source 1..20: mol_type = other DNA
acttatcaactcccaatgct

SEQ ID NO: 6336 - DNA, 20 bp, synthetic construct
  misc_feature 1..20: note = chemically synthesized
  source 1..20: mol_type = other DNA
atcaactcccaatgctgggt

SEQ ID NO: 6337 - DNA, 20 bp, synthetic construct
  misc_feature 1..20: note = chemically synthesized
  source 1..20: mol_type = other DNA
ctcccaatgctgggtcagcc

SEQ ID NO: 6338 - DNA, 20 bp, synthetic construct
  misc_feature 1..20: note = chemically synthesized
  source 1..20: mol_type = other DNA
ctgtatatccaccctgaaac

SEQ ID NO: 6339 - DNA, 20 bp, synthetic construct
  misc_feature 1..20: note = chemically synthesized
  source 1..20: mol_type = other DNA
ccctgaaaccagactgccca

SEQ ID NO: 6340 - DNA, 20 bp, synthetic construct
  misc_feature 1..20: note = chemically synthesized
  source 1..20: mol_type = other DNA
cctgaaaccagactgcccac

SEQ ID NO: 6341 - DNA, 20 bp, synthetic construct
  misc_feature 1..20: note = chemically synthesized
  source 1..20: mol_type = other DNA
ctgaaaccagactgcccaca

SEQ ID NO: 6342 - DNA, 20 bp, synthetic construct
  misc_feature 1..20: note = chemically synthesized
  source 1..20: mol_type = other DNA
aaaccagactgcccacaggg

SEQ ID NO: 6343 - DNA, 20 bp, synthetic construct
  misc_feature 1..20: note = chemically synthesized
  source 1..20: mol_type = other DNA
agactgcccacagggtagcc

SEQ ID NO: 6344 - DNA, 20 bp, synthetic construct
  misc_feature 1..20: note = chemically synthesized
  source 1..20: mol_type = other DNA
gggtagcccagctgtgcctc

SEQ ID NO: 6345 - DNA, 20 bp, synthetic construct
  misc_feature 1..20: note = chemically synthesized
  source 1..20: mol_type = other DNA
ggtagcccagctgtgcctcc

SEQ ID NO: 6346 - DNA, 20 bp, synthetic construct
  misc_feature 1..20: note = chemically synthesized
  source 1..20: mol_type = other DNA
agcccagctgtgcctccagg

SEQ ID NO: 6347 - DNA, 20 bp, synthetic construct
  misc_feature 1..20: note = chemically synthesized
  source 1..20: mol_type = other DNA
ctgtgcctccaggtagctct

SEQ ID NO: 6348 - DNA, 20 bp, synthetic construct
  misc_feature 1..20: note = chemically synthesized
  source 1..20: mol_type = other DNA
gtagctctgagatcatgcac

SEQ ID NO: 6349 - DNA, 20 bp, synthetic construct
  misc_feature 1..20: note = chemically synthesized
  source 1..20: mol_type = other DNA
ccattttctcgtgtgtaaaa

SEQ ID NO: 6350 - DNA, 20 bp, synthetic construct
  misc_feature 1..20: note = chemically synthesized
  source 1..20: mol_type = other DNA
attttctcgtgtgtaaaatg

SEQ ID NO: 6351 - DNA, 20 bp, synthetic construct
  misc_feature 1..20: note = chemically synthesized
  source 1..20: mol_type = other DNA
cgtgtgtaaaatggagatca

SEQ ID NO: 6352 - DNA, 20 bp, synthetic construct
  misc_feature 1..20: note = chemically synthesized
  source 1..20: mol_type = other DNA
taaaatggagatcacagtcg

SEQ ID NO: 6353 - DNA, 20 bp, synthetic construct
  misc_feature 1..20: note = chemically synthesized
  source 1..20: mol_type = other DNA
cacagtcgtagctacccgat

SEQ ID NO: 6354 - DNA, 20 bp, synthetic construct
  misc_feature 1..20: note = chemically synthesized
  source 1..20: mol_type = other DNA
agctacccgattggattgct

SEQ ID NO: 6355 - DNA, 20 bp, synthetic construct
  misc_feature 1..20: note = chemically synthesized
  source 1..20: mol_type = other DNA
gattggattgctcggataat

SEQ ID NO: 6356 - DNA, 20 bp, synthetic construct
  misc_feature 1..20: note = chemically synthesized
  source 1..20: mol_type = other DNA
gattgctcggataattagat

SEQ ID NO: 6357 - DNA, 20 bp, synthetic construct
  misc_feature 1..20: note = chemically synthesized
  source 1..20: mol_type = other DNA
aaaatatgtaatgtgcttct

SEQ ID NO: 6358 - DNA, 20 bp, synthetic construct
  misc_feature 1..20: note = chemically synthesized
  source 1..20: mol_type = other DNA
aaatatgtaatgtgcttctt

SEQ ID NO: 6359 - DNA, 20 bp, synthetic construct
  misc_feature 1..20: note = chemically synthesized
  source 1..20: mol_type = other DNA
gtaatgtgcttcttaggcaa

SEQ ID NO: 6360 - DNA, 20 bp, synthetic construct
  misc_feature 1..20: note = chemically synthesized
  source 1..20: mol_type = other DNA
aggcaaaagtttgaacataa

SEQ ID NO: 6361 - DNA, 20 bp, synthetic construct
  misc_feature 1..20: note = chemically synthesized
  source 1..20: mol_type = other DNA
aaaagtttgaacataaaaga

SEQ ID NO: 6362 - DNA, 20 bp, synthetic construct
  misc_feature 1..20: note = chemically synthesized
  source 1..20: mol_type = other DNA
aaagtttgaacataaaagac

SEQ ID NO: 6363 - DNA, 20 bp, synthetic construct
  misc_feature 1..20: note = chemically synthesized
  source 1..20: mol_type = other DNA
aagtttgaacataaaagaca

SEQ ID NO: 6364 - DNA, 20 bp, synthetic construct
  misc_feature 1..20: note = chemically synthesized
  source 1..20: mol_type = other DNA
ataaaagacagggtctgccc

SEQ ID NO: 6365 - DNA, 20 bp, synthetic construct
  misc_feature 1..20: note = chemically synthesized
  source 1..20: mol_type = other DNA
aagacagggtctgcccaaga

SEQ ID NO: 6366 - DNA, 20 bp, synthetic construct
  misc_feature 1..20: note = chemically synthesized
  source 1..20: mol_type = other DNA
agacagggtctgcccaagat

SEQ ID NO: 6367 - DNA, 20 bp, synthetic construct
  misc_feature 1..20: note = chemically synthesized
  source 1..20: mol_type = other DNA
cagggtctgcccaagatggg

SEQ ID NO: 6368 - DNA, 20 bp, synthetic construct
  misc_feature 1..20: note = chemically synthesized
  source 1..20: mol_type = other DNA
gggtctgcccaagatgggaa

SEQ ID NO: 6369 - DNA, 20 bp, synthetic construct
  misc_feature 1..20: note = chemically synthesized
  source 1..20: mol_type = other DNA
gggaagagttcttctctccc

SEQ ID NO: 6370 - DNA, 20 bp, synthetic construct
  misc_feature 1..20: note = chemically synthesized
  source 1..20: mol_type = other DNA
agaaacaatcaaaacaaaaa

SEQ ID NO: 6371 - DNA, 20 bp, synthetic construct
  misc_feature 1..20: note = chemically synthesized
  source 1..20: mol_type = other DNA
aaaacaaaaacagacaacta

SEQ ID NO: 6372 - DNA, 20 bp, synthetic construct
  misc_feature 1..20: note = chemically synthesized
  source 1..20: mol_type = other DNA
aaacagacaactatagaaca

SEQ ID NO: 6373 - DNA, 20 bp, synthetic construct
  misc_feature 1..20: note = chemically synthesized
  source 1..20: mol_type = other DNA
cagacaactatagaacatgg

SEQ ID NO: 6374 - DNA, 20 bp, synthetic construct
  misc_feature 1..20: note = chemically synthesized
  source 1..20: mol_type = other DNA
tatagaacatggcagctttc

SEQ ID NO: 6375 - DNA, 20 bp, synthetic construct
  misc_feature 1..20: note = chemically synthesized
  source 1..20: mol_type = other DNA
catggcagctttcaagactc

SEQ ID NO: 6376 - DNA, 20 bp, synthetic construct
  misc_feature 1..20: note = chemically synthesized
  source 1..20: mol_type = other DNA
gctttcaagactctggacat

SEQ ID NO: 6377 - DNA, 20 bp, synthetic construct
  misc_feature 1..20: note = chemically synthesized
  source 1..20: mol_type = other DNA
ctttcaagactctggacatc

SEQ ID NO: 6378 - DNA, 20 bp, synthetic construct
  misc_feature 1..20: note = chemically synthesized
  source 1..20: mol_type = other DNA
caagactctggacatcaggc

SEQ ID NO: 6379 - DNA, 20 bp, synthetic construct
  misc_feature 1..20: note = chemically synthesized
  source 1..20: mol_type = other DNA
aagactctggacatcaggca

SEQ ID NO: 6380 - DNA, 20 bp, synthetic construct
  misc_feature 1..20: note = chemically synthesized
  source 1..20: mol_type = other DNA
gactctggacatcaggcaag

SEQ ID NO: 6381 - DNA, 20 bp, synthetic construct
  misc_feature 1..20: note = chemically synthesized
  source 1..20: mol_type = other DNA
actctggacatcaggcaagg

SEQ ID NO: 6382 - DNA, 20 bp, synthetic construct
  misc_feature 1..20: note = chemically synthesized
  source 1..20: mol_type = other DNA
tctggacatcaggcaaggag

SEQ ID NO: 6383 - DNA, 20 bp, synthetic construct
  misc_feature 1..20: note = chemically synthesized
  source 1..20: mol_type = other DNA
acatcaggcaaggaggagta

SEQ ID NO: 6384 - DNA, 20 bp, synthetic construct
  misc_feature 1..20: note = chemically synthesized
  source 1..20: mol_type = other DNA
aaggaggagtaaagatccct

SEQ ID NO: 6385 - DNA, 20 bp, synthetic construct
  misc_feature 1..20: note = chemically synthesized
  source 1..20: mol_type = other DNA
aggaggagtaaagatccctg

SEQ ID NO: 6386 - DNA, 20 bp, synthetic construct
  misc_feature 1..20: note = chemically synthesized
  source 1..20: mol_type = other DNA
ggaggagtaaagatccctga

SEQ ID NO: 6387 - DNA, 20 bp, synthetic construct
  misc_feature 1..20: note = chemically synthesized
  source 1..20: mol_type = other DNA
agtaaagatccctgagggat

SEQ ID NO: 6388 - DNA, 20 bp, synthetic construct
  misc_feature 1..20: note = chemically synthesized
  source 1..20: mol_type = other DNA
aaagatccctgagggataag

SEQ ID NO: 6389 - DNA, 20 bp, synthetic construct
  misc_feature 1..20: note = chemically synthesized
  source 1..20: mol_type = other DNA
gagggataagaagcaaacaa

SEQ ID NO: 6390 - DNA, 20 bp, synthetic construct
  misc_feature 1..20: note = chemically synthesized
  source 1..20: mol_type = other DNA
agggataagaagcaaacaac

SEQ ID NO: 6391 - DNA, 20 bp, synthetic construct
  misc_feature 1..20: note = chemically synthesized
  source 1..20: mol_type = other DNA
caggaaccctccgatcaccc

SEQ ID NO: 6392 - DNA, 20 bp, synthetic construct
  misc_feature 1..20: note = chemically synthesized
  source 1..20: mol_type = other DNA
gatcaccccagcttactgtt

SEQ ID NO: 6393 - DNA, 20 bp, synthetic construct
  misc_feature 1..20: note = chemically synthesized
  source 1..20: mol_type = other DNA
tcaccccagcttactgtttg

SEQ ID NO: 6394 - DNA, 20 bp, synthetic construct
  misc_feature 1..20: note = chemically synthesized
  source 1..20: mol_type = other DNA
accccagcttactgtttgga

SEQ ID NO: 6395 - DNA, 20 bp, synthetic construct
  misc_feature 1..20: note = chemically synthesized
  source 1..20: mol_type = other DNA
cccagcttactgtttggaga

SEQ ID NO: 6396 - DNA, 20 bp, synthetic construct
  misc_feature 1..20: note = chemically synthesized
  source 1..20: mol_type = other DNA
tactgtttggagagagtctg

SEQ ID NO: 6397 - DNA, 20 bp, synthetic construct
  misc_feature 1..20: note = chemically synthesized
  source 1..20: mol_type = other DNA
actgtttggagagagtctgc

SEQ ID NO: 6398 - DNA, 20 bp, synthetic construct
  misc_feature 1..20: note = chemically synthesized
  source 1..20: mol_type = other DNA
tggagagagtctgcaggtta

SEQ ID NO: 6399 - DNA, 20 bp, synthetic construct
  misc_feature 1..20: note = chemically synthesized
  source 1..20: mol_type = other DNA
ggagagagtctgcaggttac

SEQ ID NO: 6400 - DNA, 20 bp, synthetic construct
  misc_feature 1..20: note = chemically synthesized
  source 1..20: mol_type = other DNA
agagtctgcaggttacaggc

SEQ ID NO: 6401 - DNA, 20 bp, synthetic construct
  misc_feature 1..20: note = chemically synthesized
  source 1..20: mol_type = other DNA
gagtctgcaggttacaggcc

SEQ ID NO: 6402 - DNA, 20 bp, synthetic construct
  misc_feature 1..20: note = chemically synthesized
  source 1..20: mol_type = other DNA
ctgcaggttacaggccagga

SEQ ID NO: 6403 - DNA, 20 bp, synthetic construct
  misc_feature 1..20: note = chemically synthesized
  source 1..20: mol_type = other DNA
tgcaggttacaggccaggaa

SEQ ID NO: 6404 - DNA, 20 bp, synthetic construct
  misc_feature 1..20: note = chemically synthesized
  source 1..20: mol_type = other DNA
gcaggttacaggccaggaaa

SEQ ID NO: 6405 - DNA, 20 bp, synthetic construct
  misc_feature 1..20: note = chemically synthesized
  source 1..20: mol_type = other DNA
ggttacaggccaggaaaggg

SEQ ID NO: 6406 - DNA, 20 bp, synthetic construct
  misc_feature 1..20: note = chemically synthesized
  source 1..20: mol_type = other DNA
caggccaggaaagggaagtc

SEQ ID NO: 6407 - DNA, 20 bp, synthetic construct
  misc_feature 1..20: note = chemically synthesized
  source 1..20: mol_type = other DNA
aggccaggaaagggaagtcc

SEQ ID NO: 6408 - DNA, 20 bp, synthetic construct
  misc_feature 1..20: note = chemically synthesized
  source 1..20: mol_type = other DNA
ccaggaaagggaagtccagg

SEQ ID NO: 6409 - DNA, 20 bp, synthetic construct
  misc_feature 1..20: note = chemically synthesized
  source 1..20: mol_type = other DNA
aggaaagggaagtccaggca

SEQ ID NO: 6410 - DNA, 20 bp, synthetic construct
  misc_feature 1..20: note = chemically synthesized
  source 1..20: mol_type = other DNA
gggaagtccaggcagagccc

SEQ ID NO: 6411 - DNA, 20 bp, synthetic construct
  misc_feature 1..20: note = chemically synthesized
  source 1..20: mol_type = other DNA
gaagtccaggcagagcccaa

SEQ ID NO: 6412 - DNA, 20 bp, synthetic construct
  misc_feature 1..20: note = chemically synthesized
  source 1..20: mol_type = other DNA
cccaagagactccccacgtt

SEQ ID NO: 6413 - DNA, 20 bp, synthetic construct
  misc_feature 1..20: note = chemically synthesized
  source 1..20: mol_type = other DNA
ccaagagactccccacgttg

SEQ ID NO: 6414 - DNA, 20 bp, synthetic construct
  misc_feature 1..20: note = chemically synthesized
  source 1..20: mol_type = other DNA
aagagactccccacgttgag

SEQ ID NO: 6415 - DNA, 20 bp, synthetic construct
  misc_feature 1..20: note = chemically synthesized
  source 1..20: mol_type = other DNA
gactccccacgttgaggaga

SEQ ID NO: 6416 - DNA, 20 bp, synthetic construct
  misc_feature 1..20: note = chemically synthesized
  source 1..20: mol_type = other DNA
ctccccacgttgaggagatg

SEQ ID NO: 6417 - DNA, 20 bp, synthetic construct
  misc_feature 1..20: note = chemically synthesized
  source 1..20: mol_type = other DNA
cacgttgaggagatggagct

SEQ ID NO: 6418 - DNA, 20 bp, synthetic construct
  misc_feature 1..20: note = chemically synthesized
  source 1..20: mol_type = other DNA
cgttgaggagatggagctga

SEQ ID NO: 6419 - DNA, 20 bp, synthetic construct
  misc_feature 1..20: note = chemically synthesized
  source 1..20: mol_type = other DNA
ggagatggagctgagagtcc

SEQ ID NO: 6420 - DNA, 20 bp, synthetic construct
  misc_feature 1..20: note = chemically synthesized
  source 1..20: mol_type = other DNA
gagatggagctgagagtccg

SEQ ID NO: 6421 - DNA, 20 bp, synthetic construct
  misc_feature 1..20: note = chemically synthesized
  source 1..20: mol_type = other DNA
gatggagctgagagtccgag

SEQ ID NO: 6422 - DNA, 20 bp, synthetic construct
  misc_feature 1..20: note = chemically synthesized
  source 1..20: mol_type = other DNA
ccgaggagaccaaaacaatt

SEQ ID NO: 6423 - DNA, 20 bp, synthetic construct
  misc_feature 1..20: note = chemically synthesized
  source 1..20: mol_type = other DNA
gaggagaccaaaacaattaa

SEQ ID NO: 6424 - DNA, 20 bp, synthetic construct
  misc_feature 1..20: note = chemically synthesized
  source 1..20: mol_type = other DNA
caaacgatcaaactgactct

SEQ ID NO: 6425 - DNA, 20 bp, synthetic construct
  misc_feature 1..20: note = chemically synthesized
  source 1..20: mol_type = other DNA
taagttgcttaactgcatcc

SEQ ID NO: 6426 - DNA, 20 bp, synthetic construct
  misc_feature 1..20: note = chemically synthesized
  source 1..20: mol_type = other DNA
agttgcttaactgcatcccg

SEQ ID NO: 6427 - DNA, 20 bp, synthetic construct
  misc_feature 1..20: note = chemically synthesized
  source 1..20: mol_type = other DNA
cttaactgcatcccggagca

SEQ ID NO: 6428 - DNA, 20 bp, synthetic construct
  misc_feature 1..20: note = chemically synthesized
  source 1..20: mol_type = other DNA
tgcatcccggagcaaagctc

SEQ ID NO: 6429 - DNA, 20 bp, synthetic construct
  misc_feature 1..20: note = chemically synthesized
  source 1..20: mol_type = other DNA
gagcaaagctcaagaacatt

SEQ ID NO: 6430 - DNA, 20 bp, synthetic construct
  misc_feature 1..20: note = chemically synthesized
  source 1..20: mol_type = other DNA
gcaaagctcaagaacattta

SEQ ID NO: 6431 - DNA, 20 bp, synthetic construct
  misc_feature 1..20: note = chemically synthesized
  source 1..20: mol_type = other DNA
caaagctcaagaacatttag

SEQ ID NO: 6432 - DNA, 20 bp, synthetic construct
  misc_feature 1..20: note = chemically synthesized
  source 1..20: mol_type = other DNA
tagaggaatacaaaaatatc

SEQ ID NO: 6433 - DNA, 20 bp, synthetic construct
  misc_feature 1..20: note = chemically synthesized
  source 1..20: mol_type = other DNA
aaaaatatccagcacccaac

SEQ ID NO: 6434 - DNA, 20 bp, synthetic construct
  misc_feature 1..20: note = chemically synthesized
  source 1..20: mol_type = other DNA
aaaatatccagcacccaaca

SEQ ID NO: 6435 - DNA, 20 bp, synthetic construct
  misc_feature 1..20: note = chemically synthesized
  source 1..20: mol_type = other DNA
aaggtgaaattgacaatgtc

SEQ ID NO: 6436 - DNA, 20 bp, synthetic construct
  misc_feature 1..20: note = chemically synthesized
  source 1..20: mol_type = other DNA
gtgaaattgacaatgtctgg

SEQ ID NO: 6437 - DNA, 20 bp, synthetic construct
  misc_feature 1..20: note = chemically synthesized
  source 1..20: mol_type = other DNA
caatgtctggcagccaatca

SEQ ID NO: 6438 - DNA, 20 bp, synthetic construct
  misc_feature 1..20: note = chemically synthesized
  source 1..20: mol_type = other DNA
ggcagccaatcaaagattac

SEQ ID NO: 6439 - DNA, 20 bp, synthetic construct
  misc_feature 1..20: note = chemically synthesized
  source 1..20: mol_type = other DNA
gcagccaatcaaagattaca

SEQ ID NO: 6440 - DNA, 20 bp, synthetic construct
  misc_feature 1..20: note = chemically synthesized
  source 1..20: mol_type = other DNA
ttacaaggcatgcaatgaaa

SEQ ID NO: 6441 - DNA, 20 bp, synthetic construct
  misc_feature 1..20: note = chemically synthesized
  source 1..20: mol_type = other DNA
tacaaggcatgcaatgaaac

SEQ ID NO: 6442 - DNA, 20 bp, synthetic construct
  misc_feature 1..20: note = chemically synthesized
  source 1..20: mol_type = other DNA
gggaaaacacaatgcataac

SEQ ID NO: 6443 - DNA, 20 bp, synthetic construct
  misc_feature 1..20: note = chemically synthesized
  source 1..20: mol_type = other DNA
ggaaaacacaatgcataacg

SEQ ID NO: 6444 - DNA, 20 bp, synthetic construct
  misc_feature 1..20: note = chemically synthesized
  source 1..20: mol_type = other DNA
aaaacacaatgcataacgag

SEQ ID NO: 6445 - DNA, 20 bp, synthetic construct
  misc_feature 1..20: note = chemically synthesized
  source 1..20: mol_type = other DNA
aaacacaatgcataacgagg

SEQ ID NO: 6446 - DNA, 20 bp, synthetic construct
  misc_feature 1..20: note = chemically synthesized
  source 1..20: mol_type = other DNA
aggaggttcataaatatcaa

SEQ ID NO: 6447 - DNA, 20 bp, synthetic construct
  misc_feature 1..20: note = chemically synthesized
  source 1..20: mol_type = other DNA
gaggttcataaatatcaaaa

SEQ ID NO: 6448 - DNA, 20 bp, synthetic construct
  misc_feature 1..20: note = chemically synthesized
  source 1..20: mol_type = other DNA
cataaatatcaaaagagatc

SEQ ID NO: 6449 - DNA, 20 bp, synthetic construct
  misc_feature 1..20: note = chemically synthesized
  source 1..20: mol_type = other DNA
aaagagatccagaactgaca

SEQ ID NO: 6450 - DNA, 20 bp, synthetic construct
  misc_feature 1..20: note = chemically synthesized
  source 1..20: mol_type = other DNA
tccagaactgacacggatgc

SEQ ID NO: 6451 - DNA, 20 bp, synthetic construct
  misc_feature 1..20: note = chemically synthesized
  source 1..20: mol_type = other DNA
actgacacggatgctagaat

SEQ ID NO: 6452 - DNA, 20 bp, synthetic construct
  misc_feature 1..20: note = chemically synthesized
  source 1..20: mol_type = other DNA
gacacggatgctagaattag

SEQ ID NO: 6453 - DNA, 20 bp, synthetic construct
  misc_feature 1..20: note = chemically synthesized
  source 1..20: mol_type = other DNA
acacggatgctagaattagc

SEQ ID NO: 6454 - DNA, 20 bp, synthetic construct
  misc_feature 1..20: note = chemically synthesized
  source 1..20: mol_type = other DNA
ggatgctagaattagcaggc

SEQ ID NO: 6455 - DNA, 20 bp, synthetic construct
  misc_feature 1..20: note = chemically synthesized
  source 1..20: mol_type = other DNA
gatgctagaattagcaggca

SEQ ID NO: 6456 - DNA, 20 bp, synthetic construct
  misc_feature 1..20: note = chemically synthesized
  source 1..20: mol_type = other DNA
ctagaattagcaggcaagga

SEQ ID NO: 6457 - DNA, 20 bp, synthetic construct
  misc_feature 1..20: note = chemically synthesized
  source 1..20: mol_type = other DNA
agcaggcaaggatggtaaaa

SEQ ID NO: 6458 - DNA, 20 bp, synthetic construct
  misc_feature 1..20: note = chemically synthesized
  source 1..20: mol_type = other DNA
ggatggtaaaacagatatta

SEQ ID NO: 6459 - DNA, 20 bp, synthetic construct
  misc_feature 1..20: note = chemically synthesized
  source 1..20: mol_type = other DNA
cccattatgttcaaaaaatt

SEQ ID NO: 6460 - DNA, 20 bp, synthetic construct
  misc_feature 1..20: note = chemically synthesized
  source 1..20: mol_type = other DNA
attatgttcaaaaaattaag

SEQ ID NO: 6461 - DNA, 20 bp, synthetic construct
  misc_feature 1..20: note = chemically synthesized
  source 1..20: mol_type = other DNA
caaaaaattaagtagaattg

SEQ ID NO: 6462 - DNA, 20 bp, synthetic construct
  misc_feature 1..20: note = chemically synthesized
  source 1..20: mol_type = other DNA
aaaaattaagtagaattgtg

SEQ ID NO: 6463 - DNA, 20 bp, synthetic construct
  misc_feature 1..20: note = chemically synthesized
  source 1..20: mol_type = other DNA
aaaattaagtagaattgtgg

SEQ ID NO: 6464 - DNA, 20 bp, synthetic construct
  misc_feature 1..20: note = chemically synthesized
  source 1..20: mol_type = other DNA
tagaattgtggaggatattt

SEQ ID NO: 6465 - DNA, 20 bp, synthetic construct
  misc_feature 1..20: note = chemically synthesized
  source 1..20: mol_type = other DNA
gaattgtggaggatatttaa

SEQ ID NO: 6466 - DNA, 20 bp, synthetic construct
  misc_feature 1..20: note = chemically synthesized
  source 1..20: mol_type = other DNA
ggaggatatttaagagtccc

SEQ ID NO: 6467 - DNA, 20 bp, synthetic construct
  misc_feature 1..20: note = chemically synthesized
  source 1..20: mol_type = other DNA
gaggatatttaagagtcccc

SEQ ID NO: 6468 - DNA, 20 bp, synthetic construct
  misc_feature 1..20: note = chemically synthesized
  source 1..20: mol_type = other DNA
agagtccccaggtgaacttc

SEQ ID NO: 6469 - DNA, 20 bp, synthetic construct
  misc_feature 1..20: note = chemically synthesized
  source 1..20: mol_type = other DNA
agtccccaggtgaacttcta

SEQ ID NO: 6470 - DNA, 20 bp, synthetic construct
  misc_feature 1..20: note = chemically synthesized
  source 1..20: mol_type = other DNA
tctgaaatgaaaaaacacac

SEQ ID NO: 6471 - DNA, 20 bp, synthetic construct
  misc_feature 1..20: note = chemically synthesized
  source 1..20: mol_type = other DNA
aaatgaaaaaacacactggc

SEQ ID NO: 6472 - DNA, 20 bp, synthetic construct
  misc_feature 1..20: note = chemically synthesized
  source 1..20: mol_type = other DNA
aatgaaaaaacacactggcc

SEQ ID NO: 6473 - DNA, 20 bp, synthetic construct
  misc_feature 1..20: note = chemically synthesized
  source 1..20: mol_type = other DNA
aacacactggccaggcgccg

SEQ ID NO: 6474 - DNA, 20 bp, synthetic construct
  misc_feature 1..20: note = chemically synthesized
  source 1..20: mol_type = other DNA
caggcgccgtggctcacgcc

SEQ ID NO: 6475 - DNA, 20 bp, synthetic construct
  misc_feature 1..20: note = chemically synthesized
  source 1..20: mol_type = other DNA
gtggctcacgcctggaatcc

SEQ ID NO: 6476 - DNA, 20 bp, synthetic construct
  misc_feature 1..20: note = chemically synthesized
  source 1..20: mol_type = other DNA
cgcctggaatcccagcactg

SEQ ID NO: 6477 - DNA, 20 bp, synthetic construct
  misc_feature 1..20: note = chemically synthesized
  source 1..20: mol_type = other DNA
gcctggaatcccagcactgt

SEQ ID NO: 6478 - DNA, 20 bp, synthetic construct
  misc_feature 1..20: note = chemically synthesized
  source 1..20: mol_type = other DNA
ctggaatcccagcactgtgg

SEQ ID NO: 6479 - DNA, 20 bp, synthetic construct
  misc_feature 1..20: note = chemically synthesized
  source 1..20: mol_type = other DNA
tggaatcccagcactgtggg

SEQ ID NO: 6480 - DNA, 20 bp, synthetic construct
  misc_feature 1..20: note = chemically synthesized
  source 1..20: mol_type = other DNA
tcccagcactgtgggaggcc

SEQ ID NO: 6481 - DNA, 20 bp, synthetic construct
  misc_feature 1..20: note = chemically synthesized
  source 1..20: mol_type = other DNA
cccagcactgtgggaggcca

SEQ ID NO: 6482 - DNA, 20 bp, synthetic construct
  misc_feature 1..20: note = chemically synthesized
  source 1..20: mol_type = other DNA
agcactgtgggaggccaagg

SEQ ID NO: 6483 - DNA, 20 bp, synthetic construct
  misc_feature 1..20: note = chemically synthesized
  source 1..20: mol_type = other DNA
gcactgtgggaggccaaggc

SEQ ID NO: 6484 - DNA, 20 bp, synthetic construct
  misc_feature 1..20: note = chemically synthesized
  source 1..20: mol_type = other DNA
ctgtgggaggccaaggcggg

SEQ ID NO: 6485 - DNA, 20 bp, synthetic construct
  misc_feature 1..20: note = chemically synthesized
  source 1..20: mol_type = other DNA
ggccaaggcgggcagatcat

SEQ ID NO: 6486 - DNA, 20 bp, synthetic construct
  misc_feature 1..20: note = chemically synthesized
  source 1..20: mol_type = other DNA
gccaaggcgggcagatcatg

SEQ ID NO: 6487 - DNA, 20 bp, synthetic construct
  misc_feature 1..20: note = chemically synthesized
  source 1..20: mol_type = other DNA
aggcgggcagatcatgaggt

SEQ ID NO: 6488 - DNA, 20 bp, synthetic construct
  misc_feature 1..20: note = chemically synthesized
  source 1..20: mol_type = other DNA
ggcgggcagatcatgaggtc

SEQ ID NO: 6489 - DNA, 20 bp, synthetic construct
  misc_feature 1..20: note = chemically synthesized
  source 1..20: mol_type = other DNA
cgggcagatcatgaggtcag

SEQ ID NO: 6490 - DNA, 20 bp, synthetic construct
  misc_feature 1..20: note = chemically synthesized
  source 1..20: mol_type = other DNA
tcaggagatcgacaccatcc

SEQ ID NO: 6491 - DNA, 20 bp, synthetic construct
  misc_feature 1..20: note = chemically synthesized
  source 1..20: mol_type = other DNA
cgacaccatcctggctaaca

SEQ ID NO: 6492 - DNA, 20 bp, synthetic construct
  misc_feature 1..20: note = chemically synthesized
  source 1..20: mol_type = other DNA
ctactaaaaatacaaaaaat

SEQ ID NO: 6493 - DNA, 20 bp, synthetic construct
  misc_feature 1..20: note = chemically synthesized
  source 1..20: mol_type = other DNA
taaaaatacaaaaaattagc

SEQ ID NO: 6494 - DNA, 20 bp, synthetic construct
  misc_feature 1..20: note = chemically synthesized
  source 1..20: mol_type = other DNA
tacaaaaaattagccagacg

SEQ ID NO: 6495 - DNA, 20 bp, synthetic construct
  misc_feature 1..20: note = chemically synthesized
  source 1..20: mol_type = other DNA
aaaaaattagccagacgtgg

SEQ ID NO: 6496 - DNA, 20 bp, synthetic construct
  misc_feature 1..20: note = chemically synthesized
  source 1..20: mol_type = other DNA
aaattagccagacgtggtgg

SEQ ID NO: 6497 - DNA, 20 bp, synthetic construct
  misc_feature 1..20: note = chemically synthesized
  source 1..20: mol_type = other DNA
aattagccagacgtggtggc

SEQ ID NO: 6498 - DNA, 20 bp, synthetic construct
  misc_feature 1..20: note = chemically synthesized
  source 1..20: mol_type = other DNA
gacgtggtggcaggcgcctg

SEQ ID NO: 6499 - DNA, 20 bp, synthetic construct
  misc_feature 1..20: note = chemically synthesized
  source 1..20: mol_type = other DNA
gtggcaggcgcctgtagtcc

SEQ ID NO: 6500 - DNA, 20 bp, synthetic construct
  misc_feature 1..20: note = chemically synthesized
  source 1..20: mol_type = other DNA
cgcctgtagtcccagctact

SEQ ID NO: 6501 - DNA, 20 bp, synthetic construct
  misc_feature 1..20: note = chemically synthesized
  source 1..20: mol_type = other DNA
gcctgtagtcccagctactc

SEQ ID NO: 6502 - DNA, 20 bp, synthetic construct
  misc_feature 1..20: note = chemically synthesized
  source 1..20: mol_type = other DNA
ctgtagtcccagctactcgg

SEQ ID NO: 6503 - DNA, 20 bp, synthetic construct
  misc_feature 1..20: note = chemically synthesized
  source 1..20: mol_type = other DNA
tgtagtcccagctactcggg

SEQ ID NO: 6504 - DNA, 20 bp, synthetic construct
  misc_feature 1..20: note = chemically synthesized
  source 1..20: mol_type = other DNA
tcccagctactcgggaggct

SEQ ID NO: 6505 - DNA, 20 bp, synthetic construct
  misc_feature 1..20: note = chemically synthesized
  source 1..20: mol_type = other DNA
cccagctactcgggaggctg

SEQ ID NO: 6506 - DNA, 20 bp, synthetic construct
  misc_feature 1..20: note = chemically synthesized
  source 1..20: mol_type = other DNA
agctactcgggaggctgagg

SEQ ID NO: 6507 - DNA, 20 bp, synthetic construct
  misc_feature 1..20: note = chemically synthesized
  source 1..20: mol_type = other DNA
gctactcgggaggctgaggc

SEQ ID NO: 6508 - DNA, 20 bp, synthetic construct
  misc_feature 1..20: note = chemically synthesized
  source 1..20: mol_type = other DNA
tactcgggaggctgaggcag

SEQ ID NO: 6509 - DNA, 20 bp, synthetic construct
  misc_feature 1..20: note = chemically synthesized
  source 1..20: mol_type = other DNA
gggaggctgaggcaggagaa

SEQ ID NO: 6510 - DNA, 20 bp, synthetic construct
  misc_feature 1..20: note = chemically synthesized
  source 1..20: mol_type = other DNA
gcaggagaatggcatgaacc

SEQ ID NO: 6511 - DNA, 20 bp, synthetic construct
  misc_feature 1..20: note = chemically synthesized
  source 1..20: mol_type = other DNA
caggagaatggcatgaaccc

SEQ ID NO: 6512 - DNA, 20 bp, synthetic construct
  misc_feature 1..20: note = chemically synthesized
  source 1..20: mol_type = other DNA
ggagaatggcatgaacccgg

SEQ ID NO: 6513 - DNA, 20 bp, synthetic construct
  misc_feature 1..20: note = chemically synthesized
  source 1..20: mol_type = other DNA
gagaatggcatgaacccggg

SEQ ID NO: 6514 - DNA, 20 bp, synthetic construct
  misc_feature 1..20: note = chemically synthesized
  source 1..20: mol_type = other DNA
aatggcatgaacccgggagg

SEQ ID NO: 6515 - DNA, 20 bp, synthetic construct
  misc_feature 1..20: note = chemically synthesized
  source 1..20: mol_type = other DNA
tggcatgaacccgggaggca

SEQ ID NO: 6516 - DNA, 20 bp, synthetic construct
  misc_feature 1..20: note = chemically synthesized
  source 1..20: mol_type = other DNA
aacccgggaggcagagcttg

SEQ ID NO: 6517 - DNA, 20 bp, synthetic construct
  misc_feature 1..20: note = chemically synthesized
  source 1..20: mol_type = other DNA
cgggaggcagagcttgcagt

SEQ ID NO: 6518 - DNA, 20 bp, synthetic construct
  misc_feature 1..20: note = chemically synthesized
  source 1..20: mol_type = other DNA
ggcagagcttgcagtgagcc

SEQ ID NO: 6519 - DNA, 20 bp, synthetic construct
  misc_feature 1..20: note = chemically synthesized
  source 1..20: mol_type = other DNA
aagatcgcgccactgcactc

SEQ ID NO: 6520 - DNA, 20 bp, synthetic construct
  misc_feature 1..20: note = chemically synthesized
  source 1..20: mol_type = other DNA
cgcgccactgcactccggcc

SEQ ID NO: 6521 - DNA, 20 bp, synthetic construct
  misc_feature 1..20: note = chemically synthesized
  source 1..20: mol_type = other DNA
gcgccactgcactccggcct

SEQ ID NO: 6522 - DNA, 20 bp, synthetic construct
  misc_feature 1..20: note = chemically synthesized
  source 1..20: mol_type = other DNA
ctgcactccggcctgggcaa

SEQ ID NO: 6523 - DNA, 20 bp, synthetic construct
  misc_feature 1..20: note = chemically synthesized
  source 1..20: mol_type = other DNA
gcactccggcctgggcaaca

SEQ ID NO: 6524 - DNA, 20 bp, synthetic construct
  misc_feature 1..20: note = chemically synthesized
  source 1..20: mol_type = other DNA
tccggcctgggcaacagagc

SEQ ID NO: 6525 - DNA, 20 bp, synthetic construct
  misc_feature 1..20: note = chemically synthesized
  source 1..20: mol_type = other DNA
ccgcctccaaaaaaaaaaaa

SEQ ID NO: 6526 - DNA, 20 bp, synthetic construct
  misc_feature 1..20: note = chemically synthesized
  source 1..20: mol_type = other DNA
tccaaaaaaaaaaaaaagaa

SEQ ID NO: 6527 - DNA, 20 bp, synthetic construct
  misc_feature 1..20: note = chemically synthesized
  source 1..20: mol_type = other DNA
aaaaaaaaaaaaagaaaaga

SEQ ID NO: 6528 - DNA, 20 bp, synthetic construct
  misc_feature 1..20: note = chemically synthesized
  source 1..20: mol_type = other DNA
aaaaaaaagaaaagaaagaa

SEQ ID NO: 6529 - DNA, 20 bp, synthetic construct
  misc_feature 1..20: note = chemically synthesized
  source 1..20: mol_type = other DNA
aaagaaaagaaaaaacacac

SEQ ID NO: 6530 - DNA, 20 bp, synthetic construct
  misc_feature 1..20: note = chemically synthesized
  source 1..20: mol_type = other DNA
aaaagaaaaaacacactgga

SEQ ID NO: 6531 - DNA, 20 bp, synthetic construct
  misc_feature 1..20: note = chemically synthesized
  source 1..20: mol_type = other DNA
aacacactggatggaaataa

SEQ ID NO: 6532 - DNA, 20 bp, synthetic construct
  misc_feature 1..20: note = chemically synthesized
  source 1..20: mol_type = other DNA
acactggatggaaataatgg

SEQ ID NO: 6533 - DNA, 20 bp, synthetic construct
  misc_feature 1..20: note = chemically synthesized
  source 1..20: mol_type = other DNA
ggatggaaataatggaagat

SEQ ID NO: 6534 - DNA, 20 bp, synthetic construct
  misc_feature 1..20: note = chemically synthesized
  source 1..20: mol_type = other DNA
atggaagatgagaaatgcgt

SEQ ID NO: 6535 - DNA, 20 bp, synthetic construct
  misc_feature 1..20: note = chemically synthesized
  source 1..20: mol_type = other DNA
agaaatgcgtaagaaaaatt

SEQ ID NO: 6536 - DNA, 20 bp, synthetic construct
  misc_feature 1..20: note = chemically synthesized
  source 1..20: mol_type = other DNA
gaaatgcgtaagaaaaattt

SEQ ID NO: 6537 - DNA, 20 bp, synthetic construct
  misc_feature 1..20: note = chemically synthesized
  source 1..20: mol_type = other DNA
aaatgcgtaagaaaaattta

SEQ ID NO: 6538 - DNA, 20 bp, synthetic construct
  misc_feature 1..20: note = chemically synthesized
  source 1..20: mol_type = other DNA
gcgtaagaaaaatttagggc

SEQ ID NO: 6539 - DNA, 20 bp, synthetic construct
  misc_feature 1..20: note = chemically synthesized
  source 1..20: mol_type = other DNA
cgtaagaaaaatttagggcc

SEQ ID NO: 6540 - DNA, 20 bp, synthetic construct
  misc_feature 1..20: note = chemically synthesized
  source 1..20: mol_type = other DNA
aaatttagggccaggcactg

SEQ ID NO: 6541 - DNA, 20 bp, synthetic construct
  misc_feature 1..20: note = chemically synthesized
  source 1..20: mol_type = other DNA
gtggatcacatctgtaatcc

SEQ ID NO: 6542 - DNA, 20 bp, synthetic construct
  misc_feature 1..20: note = chemically synthesized
  source 1..20: mol_type = other DNA
catctgtaatcccagcactt

SEQ ID NO: 6543 - DNA, 20 bp, synthetic construct
  misc_feature 1..20: note = chemically synthesized
  source 1..20: mol_type = other DNA
atctgtaatcccagcacttt

SEQ ID NO: 6544 - DNA, 20 bp, synthetic construct
  misc_feature 1..20: note = chemically synthesized
  source 1..20: mol_type = other DNA
ctgtaatcccagcactttgg

SEQ ID NO: 6545 - DNA, 20 bp, synthetic construct
  misc_feature 1..20: note = chemically synthesized
  source 1..20: mol_type = other DNA
tgtaatcccagcactttggg

SEQ ID NO: 6546 - DNA, 20 bp, synthetic construct
  misc_feature 1..20: note = chemically synthesized
  source 1..20: mol_type = other DNA
agcactttgggaggtcgaca

SEQ ID NO: 6547 - DNA, 20 bp, synthetic construct
  misc_feature 1..20: note = chemically synthesized
  source 1..20: mol_type = other DNA
gcactttgggaggtcgacac

SEQ ID NO: 6548 - DNA, 20 bp, synthetic construct
  misc_feature 1..20: note = chemically synthesized
  source 1..20: mol_type = other DNA
cactttgggaggtcgacacg

SEQ ID NO: 6549 - DNA, 20 bp, synthetic construct
  misc_feature 1..20: note = chemically synthesized
  source 1..20: mol_type = other DNA
actttgggaggtcgacacgg

SEQ ID NO: 6550 - DNA, 20 bp, synthetic construct
  misc_feature 1..20: note = chemically synthesized
  source 1..20: mol_type = other DNA
ctttgggaggtcgacacggg

SEQ ID NO: 6551 - DNA, 20 bp, synthetic construct
  misc_feature 1..20: note = chemically synthesized
  source 1..20: mol_type = other DNA
cgacacggggggaatcactt

SEQ ID NO: 6552 - DNA, 20 bp, synthetic construct
  misc_feature 1..20: note = chemically synthesized
  source 1..20: mol_type = other DNA
cggggggaatcacttgagcc

SEQ ID NO: 6553 - DNA, 20 bp, synthetic construct
  misc_feature 1..20: note = chemically synthesized
  source 1..20: mol_type = other DNA
ggggggaatcacttgagccc

SEQ ID NO: 6554 - DNA, 20 bp, synthetic construct
  misc_feature 1..20: note = chemically synthesized
  source 1..20: mol_type = other DNA
ggggaatcacttgagcccag

SEQ ID NO: 6555 - DNA, 20 bp, synthetic construct
  misc_feature 1..20: note = chemically synthesized
  source 1..20: mol_type = other DNA
tcacttgagcccaggagctc

SEQ ID NO: 6556 - DNA, 20 bp, synthetic construct
  misc_feature 1..20: note = chemically synthesized
  source 1..20: mol_type = other DNA
tgagcccaggagctcaagac

SEQ ID NO: 6557 - DNA, 20 bp, synthetic construct
  misc_feature 1..20: note = chemically synthesized
  source 1..20: mol_type = other DNA
ccaggagctcaagactagtc

SEQ ID NO: 6558 - DNA, 20 bp, synthetic construct
  misc_feature 1..20: note = chemically synthesized
  source 1..20: mol_type = other DNA
caggagctcaagactagtct

SEQ ID NO: 6559 - DNA, 20 bp, synthetic construct
  misc_feature 1..20: note = chemically synthesized
  source 1..20: mol_type = other DNA
gagctcaagactagtctggg

SEQ ID NO: 6560 - DNA, 20 bp, synthetic construct
  misc_feature 1..20: note = chemically synthesized
  source 1..20: mol_type = other DNA
caagactagtctgggcagca

SEQ ID NO: 6561 - DNA, 20 bp, synthetic construct
  misc_feature 1..20: note = chemically synthesized
  source 1..20: mol_type = other DNA
catggcaaaacccctctaca

SEQ ID NO: 6562 - DNA, 20 bp, synthetic construct
  misc_feature 1..20: note = chemically synthesized
  source 1..20: mol_type = other DNA
tacaaaaaaaaatttttaat

SEQ ID NO: 6563 - DNA, 20 bp, synthetic construct
  misc_feature 1..20: note = chemically synthesized
  source 1..20: mol_type = other DNA
aaaaaaaatttttaattagc

SEQ ID NO: 6564 - DNA, 20 bp, synthetic construct
  misc_feature 1..20: note = chemically synthesized
  source 1..20: mol_type = other DNA
aaaaaaatttttaattagcc

SEQ ID NO: 6565 - DNA, 20 bp, synthetic construct
  misc_feature 1..20: note = chemically synthesized
  source 1..20: mol_type = other DNA
aatttttaattagccaggtg

SEQ ID NO: 6566 - DNA, 20 bp, synthetic construct
  misc_feature 1..20: note = chemically synthesized
  source 1..20: mol_type = other DNA
ggtgtggtgccacatgccta

SEQ ID NO: 6567 - DNA, 20 bp, synthetic construct
  misc_feature 1..20: note = chemically synthesized
  source 1..20: mol_type = other DNA
gtgccacatgcctatagtcc

SEQ ID NO: 6568 - DNA, 20 bp, synthetic construct
  misc_feature 1..20: note = chemically synthesized
  source 1..20: mol_type = other DNA
tgcctatagtcccagctacc

SEQ ID NO: 6569 - DNA, 20 bp, synthetic construct
  misc_feature 1..20: note = chemically synthesized
  source 1..20: mol_type = other DNA
gcctatagtcccagctacct

SEQ ID NO: 6570 - DNA, 20 bp, synthetic construct
  misc_feature 1..20: note = chemically synthesized
  source 1..20: mol_type = other DNA
ctatagtcccagctacctgg

SEQ ID NO: 6571 - DNA, 20 bp, synthetic construct
  misc_feature 1..20: note = chemically synthesized
  source 1..20: mol_type = other DNA
tatagtcccagctacctggg

SEQ ID NO: 6572 - DNA, 20 bp, synthetic construct
  misc_feature 1..20: note = chemically synthesized
  source 1..20: mol_type = other DNA
cccagctacctgggaggctg

SEQ ID NO: 6573 - DNA, 20 bp, synthetic construct
  misc_feature 1..20: note = chemically synthesized
  source 1..20: mol_type = other DNA
agctacctgggaggctgaag

SEQ ID NO: 6574 - DNA, 20 bp, synthetic construct
  misc_feature 1..20: note = chemically synthesized
  source 1..20: mol_type = other DNA
tacctgggaggctgaagtgg

SEQ ID NO: 6575 - DNA, 20 bp, synthetic construct
  misc_feature 1..20: note = chemically synthesized
  source 1..20: mol_type = other DNA
acctgggaggctgaagtgga

SEQ ID NO: 6576 - DNA, 20 bp, synthetic construct
  misc_feature 1..20: note = chemically synthesized
  source 1..20: mol_type = other DNA
ctgaagtggaaggatcgcct

SEQ ID NO: 6577 - DNA, 20 bp, synthetic construct
  misc_feature 1..20: note = chemically synthesized
  source 1..20: mol_type = other DNA
gtggaaggatcgcctgagcc

SEQ ID NO: 6578 - DNA, 20 bp, synthetic construct
  misc_feature 1..20: note = chemically synthesized
  source 1..20: mol_type = other DNA
tggaaggatcgcctgagccc

SEQ ID NO: 6579 - DNA, 20 bp, synthetic construct
  misc_feature 1..20: note = chemically synthesized
  source 1..20: mol_type = other DNA
gaaggatcgcctgagcccag

SEQ ID NO: 6580 - DNA, 20 bp, synthetic construct
  misc_feature 1..20: note = chemically synthesized
  source 1..20: mol_type = other DNA
aaggatcgcctgagcccagg

SEQ ID NO: 6581 - DNA, 20 bp, synthetic construct
  misc_feature 1..20: note = chemically synthesized
  source 1..20: mol_type = other DNA
gatcgcctgagcccaggagg

SEQ ID NO: 6582 - DNA, 20 bp, synthetic construct
  misc_feature 1..20: note = chemically synthesized
  source 1..20: mol_type = other DNA
tcgcctgagcccaggaggtg

SEQ ID NO: 6583 - DNA, 20 bp, synthetic construct
  misc_feature 1..20: note = chemically synthesized
  source 1..20: mol_type = other DNA
cgcctgagcccaggaggtgg

SEQ ID NO: 6584 - DNA, 20 bp, synthetic construct
  misc_feature 1..20: note = chemically synthesized
  source 1..20: mol_type = other DNA
agcccaggaggtggaggcca

SEQ ID NO: 6585 - DNA, 20 bp, synthetic construct
  misc_feature 1..20: note = chemically synthesized
  source 1..20: mol_type = other DNA
caggaggtggaggccacagt

SEQ ID NO: 6586 - DNA, 20 bp, synthetic construct
  misc_feature 1..20: note = chemically synthesized
  source 1..20: mol_type = other DNA
aggccacagtgagttgtgac

SEQ ID NO: 6587 - DNA, 20 bp, synthetic construct
  misc_feature 1..20: note = chemically synthesized
  source 1..20: mol_type = other DNA
tgtgacaagctactgcattc

SEQ ID NO: 6588 - DNA, 20 bp, synthetic construct
  misc_feature 1..20: note = chemically synthesized
  source 1..20: mol_type = other DNA
caagctactgcattccagcc

SEQ ID NO: 6589 - DNA, 20 bp, synthetic construct
  misc_feature 1..20: note = chemically synthesized
  source 1..20: mol_type = other DNA
aagctactgcattccagcct

SEQ ID NO: 6590 - DNA, 20 bp, synthetic construct
  misc_feature 1..20: note = chemically synthesized
  source 1..20: mol_type = other DNA
ctgcattccagcctgggcaa

SEQ ID NO: 6591 - DNA, 20 bp, synthetic construct
  misc_feature 1..20: note = chemically synthesized
  source 1..20: mol_type = other DNA
gcattccagcctgggcaaca

SEQ ID NO: 6592 - DNA, 20 bp, synthetic construct
  misc_feature 1..20: note = chemically synthesized
  source 1..20: mol_type = other DNA
tccagcctgggcaacagagt

SEQ ID NO: 6593 - DNA, 20 bp, synthetic construct
  misc_feature 1..20: note = chemically synthesized
  source 1..20: mol_type = other DNA
cctgggcaacagagtgagat

SEQ ID NO: 6594 - DNA, 20 bp, synthetic construct
  misc_feature 1..20: note = chemically synthesized
  source 1..20: mol_type = other DNA
tgggcaacagagtgagatga

SEQ ID NO: 6595 - DNA, 20 bp, synthetic construct
  misc_feature 1..20: note = chemically synthesized
  source 1..20: mol_type = other DNA
ggcaacagagtgagatgaga

SEQ ID NO: 6596 - DNA, 20 bp, synthetic construct
  misc_feature 1..20: note = chemically synthesized
  source 1..20: mol_type = other DNA
caacagagtgagatgagaga

SEQ ID NO: 6597 - DNA, 20 bp, synthetic construct
  misc_feature 1..20: note = chemically synthesized
  source 1..20: mol_type = other DNA
acagagtgagatgagagaga

SEQ ID NO: 6598 - DNA, 20 bp, synthetic construct
  misc_feature 1..20: note = chemically synthesized
  source 1..20: mol_type = other DNA
agagtgagatgagagagaga

SEQ ID NO: 6599 - DNA, 20 bp, synthetic construct
  misc_feature 1..20: note = chemically synthesized
  source 1..20: mol_type = other DNA
gagtgagatgagagagagag

SEQ ID NO: 6600 - DNA, 20 bp, synthetic construct
  misc_feature 1..20: note = chemically synthesized
  source 1..20: mol_type = other DNA
agtgagatgagagagagaga

SEQ ID NO: 6601 - DNA, 20 bp, synthetic construct
  misc_feature 1..20: note = chemically synthesized
  source 1..20: mol_type = other DNA
gtgagatgagagagagagag

SEQ ID NO: 6602 - DNA, 20 bp, synthetic construct
  misc_feature 1..20: note = chemically synthesized
  source 1..20: mol_type = other DNA
gagatgagagagagagaggg

SEQ ID NO: 6603 - DNA, 20 bp, synthetic construct
  misc_feature 1..20: note = chemically synthesized
  source 1..20: mol_type = other DNA
agatgagagagagagagggg

SEQ ID NO: 6604 - DNA, 20 bp, synthetic construct
  misc_feature 1..20: note = chemically synthesized
  source 1..20: mol_type = other DNA
gatgagagagagagagggga

SEQ ID NO: 6605 - DNA, 20 bp, synthetic construct
  misc_feature 1..20: note = chemically synthesized
  source 1..20: mol_type = other DNA
atgagagagagagaggggag

SEQ ID NO: 6606 - DNA, 20 bp, synthetic construct
  misc_feature 1..20: note = chemically synthesized
  source 1..20: mol_type = other DNA
agagagagagaggggagggg

SEQ ID NO: 6607 - DNA, 20 bp, synthetic construct
  misc_feature 1..20: note = chemically synthesized
  source 1..20: mol_type = other DNA
agagagaggggaggggaagc

SEQ ID NO: 6608 - DNA, 20 bp, synthetic construct
  misc_feature 1..20: note = chemically synthesized
  source 1..20: mol_type = other DNA
gagagaggggaggggaagcg

SEQ ID NO: 6609 - DNA, 20 bp, synthetic construct
  misc_feature 1..20: note = chemically synthesized
  source 1..20: mol_type = other DNA
agagaggggaggggaagcga

SEQ ID NO: 6610 - DNA, 20 bp, synthetic construct
  misc_feature 1..20: note = chemically synthesized
  source 1..20: mol_type = other DNA
gaggggaggggaagcgaggg

SEQ ID NO: 6611 - DNA, 20 bp, synthetic construct
  misc_feature 1..20: note = chemically synthesized
  source 1..20: mol_type = other DNA
aggggaggggaagcgaggga

SEQ ID NO: 6612 - DNA, 20 bp, synthetic construct
  misc_feature 1..20: note = chemically synthesized
  source 1..20: mol_type = other DNA
gaggggaagcgagggaagga

SEQ ID NO: 6613 - DNA, 20 bp, synthetic construct
  misc_feature 1..20: note = chemically synthesized
  source 1..20: mol_type = other DNA
aggggaagcgagggaaggaa

SEQ ID NO: 6614 - DNA, 20 bp, synthetic construct
  misc_feature 1..20: note = chemically synthesized
  source 1..20: mol_type = other DNA
gggaagcgagggaaggaaag

SEQ ID NO: 6615 - DNA, 20 bp, synthetic construct
  misc_feature 1..20: note = chemically synthesized
  source 1..20: mol_type = other DNA
ggaagcgagggaaggaaagg

SEQ ID NO: 6616 - DNA, 20 bp, synthetic construct
  misc_feature 1..20: note = chemically synthesized
  source 1..20: mol_type = other DNA
gaagcgagggaaggaaagga

SEQ ID NO: 6617 - DNA, 20 bp, synthetic construct
  misc_feature 1..20: note = chemically synthesized
  source 1..20: mol_type = other DNA
aagcgagggaaggaaaggag

SEQ ID NO: 6618 - DNA, 20 bp, synthetic construct
  misc_feature 1..20: note = chemically synthesized
  source 1..20: mol_type = other DNA
gcgagggaaggaaaggaggg

SEQ ID NO: 6619 - DNA, 20 bp, synthetic construct
  misc_feature 1..20: note = chemically synthesized
  source 1..20: mol_type = other DNA
cgagggaaggaaaggagggg

SEQ ID NO: 6620 - DNA, 20 bp, synthetic construct
  misc_feature 1..20: note = chemically synthesized
  source 1..20: mol_type = other DNA
gagggaaggaaaggagggga

SEQ ID NO: 6621 - DNA, 20 bp, synthetic construct
  misc_feature 1..20: note = chemically synthesized
  source 1..20: mol_type = other DNA
agggaaggaaaggaggggag

SEQ ID NO: 6622 - DNA, 20 bp, synthetic construct
  misc_feature 1..20: note = chemically synthesized
  source 1..20: mol_type = other DNA
ggaaggaaaggaggggaggg

SEQ ID NO: 6623 - DNA, 20 bp, synthetic construct
  misc_feature 1..20: note = chemically synthesized
  source 1..20: mol_type = other DNA
gaaggaaaggaggggagggg

SEQ ID NO: 6624 - DNA, 20 bp, synthetic construct
  misc_feature 1..20: note = chemically synthesized
  source 1..20: mol_type = other DNA
aaggaaaggaggggagggga

SEQ ID NO: 6625 - DNA, 20 bp, synthetic construct
  misc_feature 1..20: note = chemically synthesized
  source 1..20: mol_type = other DNA
aggaaaggaggggaggggag

SEQ ID NO: 6626 - DNA, 20 bp, synthetic construct
  misc_feature 1..20: note = chemically synthesized
  source 1..20: mol_type = other DNA
ggaaaggaggggaggggagg

SEQ ID NO: 6627 - DNA, 20 bp, synthetic construct
  misc_feature 1..20: note = chemically synthesized
  source 1..20: mol_type = other DNA
aaaggaggggaggggagggg

SEQ ID NO: 6628 - DNA, 20 bp, synthetic construct
  misc_feature 1..20: note = chemically synthesized
  source 1..20: mol_type = other DNA
aaggaggggaggggaggggg

SEQ ID NO: 6629 - DNA, 20 bp, synthetic construct
  misc_feature 1..20: note = chemically synthesized
  source 1..20: mol_type = other DNA
aggaggggaggggaggggga

SEQ ID NO: 6630 - DNA, 20 bp, synthetic construct
  misc_feature 1..20: note = chemically synthesized
  source 1..20: mol_type = other DNA
ggaggggaggggagggggag

SEQ ID NO: 6631 - DNA, 20 bp, synthetic construct
  misc_feature 1..20: note = chemically synthesized
  source 1..20: mol_type = other DNA
ggggaggggagggggagggg

SEQ ID NO: 6632 - DNA, 20 bp, synthetic construct
  misc_feature 1..20: note = chemically synthesized
  source 1..20: mol_type = other DNA
gggaggggagggggagggga

SEQ ID NO: 6633 - DNA, 20 bp, synthetic construct
  misc_feature 1..20: note = chemically synthesized
  source 1..20: mol_type = other DNA
ggaggggagggggaggggaa

SEQ ID NO: 6634 - DNA, 20 bp, synthetic construct
  misc_feature 1..20: note = chemically synthesized
  source 1..20: mol_type = other DNA
gaggggagggggaggggaag

SEQ ID NO: 6635 - DNA, 20 bp, synthetic construct
  misc_feature 1..20: note = chemically synthesized
  source 1..20: mol_type = other DNA
ggaggggaaggggaaaattt

SEQ ID NO: 6636 - DNA, 20 bp, synthetic construct
  misc_feature 1..20: note = chemically synthesized
  source 1..20: mol_type = other DNA
attttagttaacttaatgaa

SEQ ID NO: 6637 - DNA, 20 bp, synthetic construct
  misc_feature 1..20: note = chemically synthesized
  source 1..20: mol_type = other DNA
aactctataaaatgaaacac

SEQ ID NO: 6638 - DNA, 20 bp, synthetic construct
  misc_feature 1..20: note = chemically synthesized
  source 1..20: mol_type = other DNA
actctataaaatgaaacact

SEQ ID NO: 6639 - DNA, 20 bp, synthetic construct
  misc_feature 1..20: note = chemically synthesized
  source 1..20: mol_type = other DNA
tctataaaatgaaacactgg

SEQ ID NO: 6640 - DNA, 20 bp, synthetic construct
  misc_feature 1..20: note = chemically synthesized
  source 1..20: mol_type = other DNA
aatgaaacactgggagaaaa

SEQ ID NO: 6641 - DNA, 20 bp, synthetic construct
  misc_feature 1..20: note = chemically synthesized
  source 1..20: mol_type = other DNA
gagaaaaaagaattaaaaaa

SEQ ID NO: 6642 - DNA, 20 bp, synthetic construct
  misc_feature 1..20: note = chemically synthesized
  source 1..20: mol_type = other DNA
aaaaagaattaaaaaatgga

SEQ ID NO: 6643 - DNA, 20 bp, synthetic construct
  misc_feature 1..20: note = chemically synthesized
  source 1..20: mol_type = other DNA
aaagaattaaaaaatggaaa

SEQ ID NO: 6644 - DNA, 20 bp, synthetic construct
  misc_feature 1..20: note = chemically synthesized
  source 1..20: mol_type = other DNA
ttaaaaaatggaaagagaat

SEQ ID NO: 6645 - DNA, 20 bp, synthetic construct
  misc_feature 1..20: note = chemically synthesized
  source 1..20: mol_type = other DNA
aaaatggaaagagaatgagt

SEQ ID NO: 6646 - DNA, 20 bp, synthetic construct
  misc_feature 1..20: note = chemically synthesized
  source 1..20: mol_type = other DNA
gaaagagaatgagtgagctg

SEQ ID NO: 6647 - DNA, 20 bp, synthetic construct
  misc_feature 1..20: note = chemically synthesized
  source 1..20: mol_type = other DNA
aaagagaatgagtgagctgt

SEQ ID NO: 6648 - DNA, 20 bp, synthetic construct
  misc_feature 1..20: note = chemically synthesized
  source 1..20: mol_type = other DNA
tgcataattgaaatctttaa

SEQ ID NO: 6649 - DNA, 20 bp, synthetic construct
  misc_feature 1..20: note = chemically synthesized
  source 1..20: mol_type = other DNA
attgaaatctttaaaagaaa

SEQ ID NO: 6650 - DNA, 20 bp, synthetic construct
  misc_feature 1..20: note = chemically synthesized
  source 1..20: mol_type = other DNA
ttgaaatctttaaaagaaaa

SEQ ID NO: 6651 - DNA, 20 bp, synthetic construct
  misc_feature 1..20: note = chemically synthesized
  source 1..20: mol_type = other DNA
tgaaatctttaaaagaaaaa

SEQ ID NO: 6652 - DNA, 20 bp, synthetic construct
  misc_feature 1..20: note = chemically synthesized
  source 1..20: mol_type = other DNA
gaaatctttaaaagaaaaag

SEQ ID NO: 6653 - DNA, 20 bp, synthetic construct
  misc_feature 1..20: note = chemically synthesized
  source 1..20: mol_type = other DNA
aaatctttaaaagaaaaagg

SEQ ID NO: 6654 - DNA, 20 bp, synthetic construct
  misc_feature 1..20: note = chemically synthesized
  source 1..20: mol_type = other DNA
tctttaaaagaaaaaggggg

SEQ ID NO: 6655 - DNA, 20 bp, synthetic construct
  misc_feature 1..20: note = chemically synthesized
  source 1..20: mol_type = other DNA
ttaaaagaaaaagggggtag

SEQ ID NO: 6656 - DNA, 20 bp, synthetic construct
  misc_feature 1..20: note = chemically synthesized
  source 1..20: mol_type = other DNA
gggggtagcagaaaaaaatc

SEQ ID NO: 6657 - DNA, 20 bp, synthetic construct
  misc_feature 1..20: note = chemically synthesized
  source 1..20: mol_type = other DNA
gcagaaaaaaatcaagtgct

SEQ ID NO: 6658 - DNA, 20 bp, synthetic construct
  misc_feature 1..20: note = chemically synthesized
  source 1..20: mol_type = other DNA
aaaaaatcaagtgctgagac

SEQ ID NO: 6659 - DNA, 20 bp, synthetic construct
  misc_feature 1..20: note = chemically synthesized
  source 1..20: mol_type = other DNA
aaatcaagtgctgagacaag

SEQ ID NO: 6660 - DNA, 20 bp, synthetic construct
  misc_feature 1..20: note = chemically synthesized
  source 1..20: mol_type = other DNA
tcaagtgctgagacaagtgg

SEQ ID NO: 6661 - DNA, 20 bp, synthetic construct
  misc_feature 1..20: note = chemically synthesized
  source 1..20: mol_type = other DNA
gtgctgagacaagtggaaga

SEQ ID NO: 6662 - DNA, 20 bp, synthetic construct
  misc_feature 1..20: note = chemically synthesized
  source 1..20: mol_type = other DNA
tgctgagacaagtggaagat

SEQ ID NO: 6663 - DNA, 20 bp, synthetic construct
  misc_feature 1..20: note = chemically synthesized
  source 1..20: mol_type = other DNA
gacaagtggaagatgggccc

SEQ ID NO: 6664 - DNA, 20 bp, synthetic construct
  misc_feature 1..20: note = chemically synthesized
  source 1..20: mol_type = other DNA
agtggaagatgggccccggt

SEQ ID NO: 6665 - DNA, 20 bp, synthetic construct
  misc_feature 1..20: note = chemically synthesized
  source 1..20: mol_type = other DNA
ggaagatgggccccggtgag

SEQ ID NO: 6666 - DNA, 20 bp, synthetic construct
  misc_feature 1..20: note = chemically synthesized
  source 1..20: mol_type = other DNA
ggccccggtgagcagctgat

SEQ ID NO: 6667 - DNA, 20 bp, synthetic construct
  misc_feature 1..20: note = chemically synthesized
  source 1..20: mol_type = other DNA
ggtgagcagctgatcagtgt

SEQ ID NO: 6668 - DNA, 20 bp, synthetic construct
  misc_feature 1..20: note = chemically synthesized
  source 1..20: mol_type = other DNA
ctcccatgatgacgttcccc

SEQ ID NO: 6669 - DNA, 20 bp, synthetic construct
  misc_feature 1..20: note = chemically synthesized
  source 1..20: mol_type = other DNA
ttcccccagcccccaccacc

SEQ ID NO: 6670 - DNA, 20 bp, synthetic construct
  misc_feature 1..20: note = chemically synthesized
  source 1..20: mol_type = other DNA
tcccccagcccccaccaccc

SEQ ID NO: 6671 - DNA, 20 bp, synthetic construct
  misc_feature 1..20: note = chemically synthesized
  source 1..20: mol_type = other DNA
gcccccaccacccgggctgc

SEQ ID NO: 6672 - DNA, 20 bp, synthetic construct
  misc_feature 1..20: note = chemically synthesized
  source 1..20: mol_type = other DNA
ccccaccacccgggctgctg

SEQ ID NO: 6673 - DNA, 20 bp, synthetic construct
  misc_feature 1..20: note = chemically synthesized
  source 1..20: mol_type = other DNA
cccaccacccgggctgctgg

SEQ ID NO: 6674 - DNA, 20 bp, synthetic construct
  misc_feature 1..20: note = chemically synthesized
  source 1..20: mol_type = other DNA
ccaccacccgggctgctgga

SEQ ID NO: 6675 - DNA, 20 bp, synthetic construct
  misc_feature 1..20: note = chemically synthesized
  source 1..20: mol_type = other DNA
cgggctgctggagggaaatg

SEQ ID NO: 6676 - DNA, 20 bp, synthetic construct
  misc_feature 1..20: note = chemically synthesized
  source 1..20: mol_type = other DNA
gtgactttgctacatccctt

SEQ ID NO: 6677 - DNA, 20 bp, synthetic construct
  misc_feature 1..20: note = chemically synthesized
  source 1..20: mol_type = other DNA
ctttgctacatcccttcaga

SEQ ID NO: 6678 - DNA, 20 bp, synthetic construct
  misc_feature 1..20: note = chemically synthesized
  source 1..20: mol_type = other DNA
cccttcagacggtccctcac

SEQ ID NO: 6679 - DNA, 20 bp, synthetic construct
  misc_feature 1..20: note = chemically synthesized
  source 1..20: mol_type = other DNA
ggtccctcactggtgtccct

SEQ ID NO: 6680 - DNA, 20 bp, synthetic construct
  misc_feature 1..20: note = chemically synthesized
  source 1..20: mol_type = other DNA
gtccctcagcccattcgcgt

SEQ ID NO: 6681 - DNA, 20 bp, synthetic construct
  misc_feature 1..20: note = chemically synthesized
  source 1..20: mol_type = other DNA
gctcactctcccattaattt

SEQ ID NO: 6682 - DNA, 20 bp, synthetic construct
  misc_feature 1..20: note = chemically synthesized
  source 1..20: mol_type = other DNA
cccattaatttcagaaatcc

SEQ ID NO: 6683 - DNA, 20 bp, synthetic construct
  misc_feature 1..20: note = chemically synthesized
  source 1..20: mol_type = other DNA
agaaatcctggcctctctcc

SEQ ID NO: 6684 - DNA, 20 bp, synthetic construct
  misc_feature 1..20: note = chemically synthesized
  source 1..20: mol_type = other DNA
actctaaattctgtcaccct

SEQ ID NO: 6685 - DNA, 20 bp, synthetic construct
  misc_feature 1..20: note = chemically synthesized
  source 1..20: mol_type = other DNA
ctaaattctgtcaccctcag

SEQ ID NO: 6686 - DNA, 20 bp, synthetic construct
  misc_feature 1..20: note = chemically synthesized
  source 1..20: mol_type = other DNA
tctgtcaccctcagaagatt

SEQ ID NO: 6687 - DNA, 20 bp, synthetic construct
  misc_feature 1..20: note = chemically synthesized
  source 1..20: mol_type = other DNA
gtcaccctcagaagattcag

SEQ ID NO: 6688 - DNA, 20 bp, synthetic construct
  misc_feature 1..20: note = chemically synthesized
  source 1..20: mol_type = other DNA
cagcatcccgtattctctct

SEQ ID NO: 6689 - DNA, 20 bp, synthetic construct
  misc_feature 1..20: note = chemically synthesized
  source 1..20: mol_type = other DNA
tctgagtgttcactatgtac

SEQ ID NO: 6690 - DNA, 20 bp, synthetic construct
  misc_feature 1..20: note = chemically synthesized
  source 1..20: mol_type = other DNA
ctgagtgttcactatgtacc

SEQ ID NO: 6691 - DNA, 20 bp, synthetic construct
  misc_feature 1..20: note = chemically synthesized
  source 1..20: mol_type = other DNA
actatgtaccgggtgccgtg

SEQ ID NO: 6692 - DNA, 20 bp, synthetic construct
  misc_feature 1..20: note = chemically synthesized
  source 1..20: mol_type = other DNA
ctatgtaccgggtgccgtgt

SEQ ID NO: 6693 - DNA, 20 bp, synthetic construct
  misc_feature 1..20: note = chemically synthesized
  source 1..20: mol_type = other DNA
accgggtgccgtgtgggcac

SEQ ID NO: 6694 - DNA, 20 bp, synthetic construct
  misc_feature 1..20: note = chemically synthesized
  source 1..20: mol_type = other DNA
cgggtgccgtgtgggcactg

SEQ ID NO: 6695 - DNA, 20 bp, synthetic construct
  misc_feature 1..20: note = chemically synthesized
  source 1..20: mol_type = other DNA
ccgtgtgggcactggagttg

SEQ ID NO: 6696 - DNA, 20 bp, synthetic construct
  misc_feature 1..20: note = chemically synthesized
  source 1..20: mol_type = other DNA
gtgtgggcactggagttgca

SEQ ID NO: 6697 - DNA, 20 bp, synthetic construct
  misc_feature 1..20: note = chemically synthesized
  source 1..20: mol_type = other DNA
tgtgggcactggagttgcag

SEQ ID NO: 6698 - DNA, 20 bp, synthetic construct
  misc_feature 1..20: note = chemically synthesized
  source 1..20: mol_type = other DNA
tgggcactggagttgcagag

SEQ ID NO: 6699 - DNA, 20 bp, synthetic construct
  misc_feature 1..20: note = chemically synthesized
  source 1..20: mol_type = other DNA
ggcactggagttgcagagga

SEQ ID NO: 6700 - DNA, 20 bp, synthetic construct
  misc_feature 1..20: note = chemically synthesized
  source 1..20: mol_type = other DNA
ctggagttgcagaggagagt

SEQ ID NO: 6701 - DNA, 20 bp, synthetic construct
  misc_feature 1..20: note = chemically synthesized
  source 1..20: mol_type = other DNA
tggagttgcagaggagagtg

SEQ ID NO: 6702 - DNA, 20 bp, synthetic construct
  misc_feature 1..20: note = chemically synthesized
  source 1..20: mol_type = other DNA
agttgcagaggagagtgagg

SEQ ID NO: 6703 - DNA, 20 bp, synthetic construct
  misc_feature 1..20: note = chemically synthesized
  source 1..20: mol_type = other DNA
gcagaggagagtgaggcgga

SEQ ID NO: 6704 - DNA, 20 bp, synthetic construct
  misc_feature 1..20: note = chemically synthesized
  source 1..20: mol_type = other DNA
cagaggagagtgaggcggac

SEQ ID NO: 6705 - DNA, 20 bp, synthetic construct
  misc_feature 1..20: note = chemically synthesized
  source 1..20: mol_type = other DNA
agaggagagtgaggcggaca

SEQ ID NO: 6706 - DNA, 20 bp, synthetic construct
  misc_feature 1..20: note = chemically synthesized
  source 1..20: mol_type = other DNA
gcggacagggcctctgcctg

SEQ ID NO: 6707 - DNA, 20 bp, synthetic construct
  misc_feature 1..20: note = chemically synthesized
  source 1..20: mol_type = other DNA
cggacagggcctctgcctgt

SEQ ID NO: 6708 - DNA, 20 bp, synthetic construct
  misc_feature 1..20: note = chemically synthesized
  source 1..20: mol_type = other DNA
ggacagggcctctgcctgtg

SEQ ID NO: 6709 - DNA, 20 bp, synthetic construct
  misc_feature 1..20: note = chemically synthesized
  source 1..20: mol_type = other DNA
ctgcctgtggggacaccgcc

SEQ ID NO: 6710 - DNA, 20 bp, synthetic construct
  misc_feature 1..20: note = chemically synthesized
  source 1..20: mol_type = other DNA
cctgtggggacaccgcctgg

SEQ ID NO: 6711 - DNA, 20 bp, synthetic construct
  misc_feature 1..20: note = chemically synthesized
  source 1..20: mol_type = other DNA
ctgtggggacaccgcctggt

SEQ ID NO: 6712 - DNA, 20 bp, synthetic construct
  misc_feature 1..20: note = chemically synthesized
  source 1..20: mol_type = other DNA
tggggacaccgcctggtggg

SEQ ID NO: 6713 - DNA, 20 bp, synthetic construct
  misc_feature 1..20: note = chemically synthesized
  source 1..20: mol_type = other DNA
acaccgcctggtgggaagtc

SEQ ID NO: 6714 - DNA, 20 bp, synthetic construct
  misc_feature 1..20: note = chemically synthesized
  source 1..20: mol_type = other DNA
cgcctggtgggaagtccagc

SEQ ID NO: 6715 - DNA, 20 bp, synthetic construct
  misc_feature 1..20: note = chemically synthesized
  source 1..20: mol_type = other DNA
gaagtccagccagcccccta

SEQ ID NO: 6716 - DNA, 20 bp, synthetic construct
  misc_feature 1..20: note = chemically synthesized
  source 1..20: mol_type = other DNA
agtccagccagccccctaca

SEQ ID NO: 6717 - DNA, 20 bp, synthetic construct
  misc_feature 1..20: note = chemically synthesized
  source 1..20: mol_type = other DNA
tccagccagccccctacaga

SEQ ID NO: 6718 - DNA, 20 bp, synthetic construct
  misc_feature 1..20: note = chemically synthesized
  source 1..20: mol_type = other DNA
cagccagccccctacagaga

SEQ ID NO: 6719 - DNA, 20 bp, synthetic construct
  misc_feature 1..20: note = chemically synthesized
  source 1..20: mol_type = other DNA
agccagccccctacagagag

SEQ ID NO: 6720 - DNA, 20 bp, synthetic construct
  misc_feature 1..20: note = chemically synthesized
  source 1..20: mol_type = other DNA
ccagccccctacagagagag

SEQ ID NO: 6721 - DNA, 20 bp, synthetic construct
  misc_feature 1..20: note = chemically synthesized
  source 1..20: mol_type = other DNA
acagagagaggagatgctac

SEQ ID NO: 6722 - DNA, 20 bp, synthetic construct
  misc_feature 1..20: note = chemically synthesized
  source 1..20: mol_type = other DNA
gagatgctactggtgttcct

SEQ ID NO: 6723 - DNA, 20 bp, synthetic construct
  misc_feature 1..20: note = chemically synthesized
  source 1..20: mol_type = other DNA
atgctactggtgttcctgag

SEQ ID NO: 6724 - DNA, 20 bp, synthetic construct
  misc_feature 1..20: note = chemically synthesized
  source 1..20: mol_type = other DNA
tggtgttcctgagtggtcct

SEQ ID NO: 6725 - DNA, 20 bp, synthetic construct
  misc_feature 1..20: note = chemically synthesized
  source 1..20: mol_type = other DNA
ggtgttcctgagtggtcctc

SEQ ID NO: 6726 - DNA, 20 bp, synthetic construct
  misc_feature 1..20: note = chemically synthesized
  source 1..20: mol_type = other DNA
tgttcctgagtggtcctcgg

SEQ ID NO: 6727 - DNA, 20 bp, synthetic construct
  misc_feature 1..20: note = chemically synthesized
  source 1..20: mol_type = other DNA
gttcctgagtggtcctcggg

SEQ ID NO: 6728 - DNA, 20 bp, synthetic construct
  misc_feature 1..20: note = chemically synthesized
  source 1..20: mol_type = other DNA
ttcctgagtggtcctcggga

SEQ ID NO: 6729 - DNA, 20 bp, synthetic construct
  misc_feature 1..20: note = chemically synthesized
  source 1..20: mol_type = other DNA
gtcccctgccctgccctgcc

SEQ ID NO: 6730 - DNA, 20 bp, synthetic construct
  misc_feature 1..20: note = chemically synthesized
  source 1..20: mol_type = other DNA
tgccctgccctgcccagcac

SEQ ID NO: 6731 - DNA, 20 bp, synthetic construct
  misc_feature 1..20: note = chemically synthesized
  source 1..20: mol_type = other DNA
gcccagcaccggccctccct

SEQ ID NO: 6732 - DNA, 20 bp, synthetic construct
  misc_feature 1..20: note = chemically synthesized
  source 1..20: mol_type = other DNA
agcaccggccctccctcggt

SEQ ID NO: 6733 - DNA, 20 bp, synthetic construct
  misc_feature 1..20: note = chemically synthesized
  source 1..20: mol_type = other DNA
ccggccctccctcggttggc

SEQ ID NO: 6734 - DNA, 20 bp, synthetic construct
  misc_feature 1..20: note = chemically synthesized
  source 1..20: mol_type = other DNA
ctccctcggttggccagcct

SEQ ID NO: 6735 - DNA, 20 bp, synthetic construct
  misc_feature 1..20: note = chemically synthesized
  source 1..20: mol_type = other DNA
tccctcggttggccagcctc

SEQ ID NO: 6736 - DNA, 20 bp, synthetic construct
  misc_feature 1..20: note = chemically synthesized
  source 1..20: mol_type = other DNA
ggttggccagcctcaggaat

SEQ ID NO: 6737 - DNA, 20 bp, synthetic construct
  misc_feature 1..20: note = chemically synthesized
  source 1..20: mol_type = other DNA
gttggccagcctcaggaatg

SEQ ID NO: 6738 - DNA, 20 bp, synthetic construct
  misc_feature 1..20: note = chemically synthesized
  source 1..20: mol_type = other DNA
tggccagcctcaggaatgag

SEQ ID NO: 6739 - DNA, 20 bp, synthetic construct
  misc_feature 1..20: note = chemically synthesized
  source 1..20: mol_type = other DNA
gaatgaggagtccctcattc

SEQ ID NO: 6740 - DNA, 20 bp, synthetic construct
  misc_feature 1..20: note = chemically synthesized
  source 1..20: mol_type = other DNA
aggagtccctcattccagcc

SEQ ID NO: 6741 - DNA, 20 bp, synthetic construct
  misc_feature 1..20: note = chemically synthesized
  source 1..20: mol_type = other DNA
agctaaccaatccccttcct

SEQ ID NO: 6742 - DNA, 20 bp, synthetic construct
  misc_feature 1..20: note = chemically synthesized
  source 1..20: mol_type = other DNA
caatccccttcctaagctcc

SEQ ID NO: 6743 - DNA, 20 bp, synthetic construct
  misc_feature 1..20: note = chemically synthesized
  source 1..20: mol_type = other DNA
ccctgctcctcctgcctcca

SEQ ID NO: 6744 - DNA, 20 bp, synthetic construct
  misc_feature 1..20: note = chemically synthesized
  source 1..20: mol_type = other DNA
cctcctgcctccatggaacc

SEQ ID NO: 6745 - DNA, 20 bp, synthetic construct
  misc_feature 1..20: note = chemically synthesized
  source 1..20: mol_type = other DNA
atggaacccggctccaccac

SEQ ID NO: 6746 - DNA, 20 bp, synthetic construct
  misc_feature 1..20: note = chemically synthesized
  source 1..20: mol_type = other DNA
acctgacactcctccattcc

SEQ ID NO: 6747 - DNA, 20 bp, synthetic construct
  misc_feature 1..20: note = chemically synthesized
  source 1..20: mol_type = other DNA
ctggctcttgcccttctgcc

SEQ ID NO: 6748 - DNA, 20 bp, synthetic construct
  misc_feature 1..20: note = chemically synthesized
  source 1..20: mol_type = other DNA
cccttctgcctagcactgct

SEQ ID NO: 6749 - DNA, 20 bp, synthetic construct
  misc_feature 1..20: note = chemically synthesized
  source 1..20: mol_type = other DNA
accttaaaatcttttcccac

SEQ ID NO: 6750 - DNA, 20 bp, synthetic construct
  misc_feature 1..20: note = chemically synthesized
  source 1..20: mol_type = other DNA
aaaatcttttcccaccagcc

SEQ ID NO: 6751 - DNA, 20 bp, synthetic construct
  misc_feature 1..20: note = chemically synthesized
  source 1..20: mol_type = other DNA
aaatcttttcccaccagcct

SEQ ID NO: 6752 - DNA, 20 bp, synthetic construct
  misc_feature 1..20: note = chemically synthesized
  source 1..20: mol_type = other DNA
tcccaccagcctgggcaaca

SEQ ID NO: 6753 - DNA, 20 bp, synthetic construct
  misc_feature 1..20: note = chemically synthesized
  source 1..20: mol_type = other DNA
accagcctgggcaacatagc

SEQ ID NO: 6754 - DNA, 20 bp, synthetic construct
  misc_feature 1..20: note = chemically synthesized
  source 1..20: mol_type = other DNA
aaaaattttttttaatttgc

SEQ ID NO: 6755 - DNA, 20 bp, synthetic construct
  misc_feature 1..20: note = chemically synthesized
  source 1..20: mol_type = other DNA
aaaattttttttaatttgcc

SEQ ID NO: 6756 - DNA, 20 bp, synthetic construct
  misc_feature 1..20: note = chemically synthesized
  source 1..20: mol_type = other DNA
tttttttaatttgccaggca

SEQ ID NO: 6757 - DNA, 20 bp, synthetic construct
  misc_feature 1..20: note = chemically synthesized
  source 1..20: mol_type = other DNA
ttttaatttgccaggcacag

SEQ ID NO: 6758 - DNA, 20 bp, synthetic construct
  misc_feature 1..20: note = chemically synthesized
  source 1..20: mol_type = other DNA
gcacagtggtgcacacctgt

SEQ ID NO: 6759 - DNA, 20 bp, synthetic construct
  misc_feature 1..20: note = chemically synthesized
  source 1..20: mol_type = other DNA
acctgtaagtcctaactact

SEQ ID NO: 6760 - DNA, 20 bp, synthetic construct
  misc_feature 1..20: note = chemically synthesized
  source 1..20: mol_type = other DNA
cctgtaagtcctaactactt

SEQ ID NO: 6761 - DNA, 20 bp, synthetic construct
  misc_feature 1..20: note = chemically synthesized
  source 1..20: mol_type = other DNA
tgtaagtcctaactacttgg

SEQ ID NO: 6762 - DNA, 20 bp, synthetic construct
  misc_feature 1..20: note = chemically synthesized
  source 1..20: mol_type = other DNA
gtaagtcctaactacttggg

SEQ ID NO: 6763 - DNA, 20 bp, synthetic construct
  misc_feature 1..20: note = chemically synthesized
  source 1..20: mol_type = other DNA
tcctaactacttgggaggct

SEQ ID NO: 6764 - DNA, 20 bp, synthetic construct
  misc_feature 1..20: note = chemically synthesized
  source 1..20: mol_type = other DNA
cctaactacttgggaggctg

SEQ ID NO: 6765 - DNA, 20 bp, synthetic construct
  misc_feature 1..20: note = chemically synthesized
  source 1..20: mol_type = other DNA
aactacttgggaggctgagg

SEQ ID NO: 6766 - DNA, 20 bp, synthetic construct
  misc_feature 1..20: note = chemically synthesized
  source 1..20: mol_type = other DNA
actacttgggaggctgaggt

SEQ ID NO: 6767 - DNA, 20 bp, synthetic construct
  misc_feature 1..20: note = chemically synthesized
  source 1..20: mol_type = other DNA
tacttgggaggctgaggtgg

SEQ ID NO: 6768 - DNA, 20 bp, synthetic construct
  misc_feature 1..20: note = chemically synthesized
  source 1..20: mol_type = other DNA
acttgggaggctgaggtggg

SEQ ID NO: 6769 - DNA, 20 bp, synthetic construct
  misc_feature 1..20: note = chemically synthesized
  source 1..20: mol_type = other DNA
gggaggctgaggtgggagga

SEQ ID NO: 6770 - DNA, 20 bp, synthetic construct
  misc_feature 1..20: note = chemically synthesized
  source 1..20: mol_type = other DNA
ctgaggtgggaggatggctt

SEQ ID NO: 6771 - DNA, 20 bp, synthetic construct
  misc_feature 1..20: note = chemically synthesized
  source 1..20: mol_type = other DNA
gtgggaggatggcttgagcc

SEQ ID NO: 6772 - DNA, 20 bp, synthetic construct
  misc_feature 1..20: note = chemically synthesized
  source 1..20: mol_type = other DNA
tgggaggatggcttgagccc

SEQ ID NO: 6773 - DNA, 20 bp, synthetic construct
  misc_feature 1..20: note = chemically synthesized
  source 1..20: mol_type = other DNA
ggaggatggcttgagcccag

SEQ ID NO: 6774 - DNA, 20 bp, synthetic construct
  misc_feature 1..20: note = chemically synthesized
  source 1..20: mol_type = other DNA
tggcttgagcccaggagttc

SEQ ID NO: 6775 - DNA, 20 bp, synthetic construct
  misc_feature 1..20: note = chemically synthesized
  source 1..20: mol_type = other DNA
ggcttgagcccaggagttcg

SEQ ID NO: 6776 - DNA, 20 bp, synthetic construct
  misc_feature 1..20: note = chemically synthesized
  source 1..20: mol_type = other DNA
agcccaggagttcgaggttg

SEQ ID NO: 6777 - DNA, 20 bp, synthetic construct
  misc_feature 1..20: note = chemically synthesized
  source 1..20: mol_type = other DNA
caggagttcgaggttgcagt

SEQ ID NO: 6778 - DNA, 20 bp, synthetic construct
  misc_feature 1..20: note = chemically synthesized
  source 1..20: mol_type = other DNA
tctctaaaaaaaaaatgtcc

SEQ ID NO: 6779 - DNA, 20 bp, synthetic construct
  misc_feature 1..20: note = chemically synthesized
  source 1..20: mol_type = other DNA
aaaaaaatgtccaagatact

SEQ ID NO: 6780 - DNA, 20 bp, synthetic construct
  misc_feature 1..20: note = chemically synthesized
  source 1..20: mol_type = other DNA
aaaaaatgtccaagatactt

SEQ ID NO: 6781 - DNA, 20 bp, synthetic construct
  misc_feature 1..20: note = chemically synthesized
  source 1..20: mol_type = other DNA
tccaagatacttaggtcctt

SEQ ID NO: 6782 - DNA, 20 bp, synthetic construct
  misc_feature 1..20: note = chemically synthesized
  source 1..20: mol_type = other DNA
gatacttaggtccttcagtc

SEQ ID NO: 6783 - DNA, 20 bp, synthetic construct
  misc_feature 1..20: note = chemically synthesized
  source 1..20: mol_type = other DNA
ccttcagtcaagatttatta

SEQ ID NO: 6784 - DNA, 20 bp, synthetic construct
  misc_feature 1..20: note = chemically synthesized
  source 1..20: mol_type = other DNA
tcagtcaagatttattacag

SEQ ID NO: 6785 - DNA, 20 bp, synthetic construct
  misc_feature 1..20: note = chemically synthesized
  source 1..20: mol_type = other DNA
cagtcaagatttattacaga

SEQ ID NO: 6786 - DNA, 20 bp, synthetic construct
  misc_feature 1..20: note = chemically synthesized
  source 1..20: mol_type = other DNA
agatttattacagaaggatc

SEQ ID NO: 6787 - DNA, 20 bp, synthetic construct
  misc_feature 1..20: note = chemically synthesized
  source 1..20: mol_type = other DNA
gatttattacagaaggatcc

SEQ ID NO: 6788 - DNA, 20 bp, synthetic construct
  misc_feature 1..20: note = chemically synthesized
  source 1..20: mol_type = other DNA
atttattacagaaggatcca

SEQ ID NO: 6789 - DNA, 20 bp, synthetic construct
  misc_feature 1..20: note = chemically synthesized
  source 1..20: mol_type = other DNA
tattacagaaggatccaggg

SEQ ID NO: 6790 - DNA, 20 bp, synthetic construct
  misc_feature 1..20: note = chemically synthesized
  source 1..20: mol_type = other DNA
attacagaaggatccaggga

SEQ ID NO: 6791 - DNA, 20 bp, synthetic construct
  misc_feature 1..20: note = chemically synthesized
  source 1..20: mol_type = other DNA
ttacagaaggatccagggaa

SEQ ID NO: 6792 - DNA, 20 bp, synthetic construct
  misc_feature 1..20: note = chemically synthesized
  source 1..20: mol_type = other DNA
aaggatccagggaagggtct

SEQ ID NO: 6793 - DNA, 20 bp, synthetic construct
  misc_feature 1..20: note = chemically synthesized
  source 1..20: mol_type = other DNA
aggatccagggaagggtctt

SEQ ID NO: 6794 - DNA, 20 bp, synthetic construct
  misc_feature 1..20: note = chemically synthesized
  source 1..20: mol_type = other DNA
gatccagggaagggtcttgg

SEQ ID NO: 6795 - DNA, 20 bp, synthetic construct
  misc_feature 1..20: note = chemically synthesized
  source 1..20: mol_type = other DNA
agggaagggtcttgggagat

SEQ ID NO: 6796 - DNA, 20 bp, synthetic construct
  misc_feature 1..20: note = chemically synthesized
  source 1..20: mol_type = other DNA
ggaagggtcttgggagatga

SEQ ID NO: 6797 - DNA, 20 bp, synthetic construct
  misc_feature 1..20: note = chemically synthesized
  source 1..20: mol_type = other DNA
gaagggtcttgggagatgag

SEQ ID NO: 6798 - DNA, 20 bp, synthetic construct
  misc_feature 1..20: note = chemically synthesized
  source 1..20: mol_type = other DNA
agggtcttgggagatgagag

SEQ ID NO: 6799 - DNA, 20 bp, synthetic construct
  misc_feature 1..20: note = chemically synthesized
  source 1..20: mol_type = other DNA
gtcttgggagatgagaggag

SEQ ID NO: 6800 - DNA, 20 bp, synthetic construct
  misc_feature 1..20: note = chemically synthesized
  source 1..20: mol_type = other DNA
tcttgggagatgagaggagc

SEQ ID NO: 6801 - DNA, 20 bp, synthetic construct
  misc_feature 1..20: note = chemically synthesized
  source 1..20: mol_type = other DNA
cttgggagatgagaggagca

SEQ ID NO: 6802 - DNA, 20 bp, synthetic construct
  misc_feature 1..20: note = chemically synthesized
  source 1..20: mol_type = other DNA
tgagaggagcagggatcttc

SEQ ID NO: 6803 - DNA, 20 bp, synthetic construct
  misc_feature 1..20: note = chemically synthesized
  source 1..20: mol_type = other DNA
gagaggagcagggatcttcc

SEQ ID NO: 6804 - DNA, 20 bp, synthetic construct
  misc_feature 1..20: note = chemically synthesized
  source 1..20: mol_type = other DNA
cacaacatacacacatgcac

SEQ ID NO: 6805 - DNA, 20 bp, synthetic construct
  misc_feature 1..20: note = chemically synthesized
  source 1..20: mol_type = other DNA
cacaacatacactcacacac

SEQ ID NO: 6806 - DNA, 20 bp, synthetic construct
  misc_feature 1..20: note = chemically synthesized
  source 1..20: mol_type = other DNA
cattcactcacacacacaca

SEQ ID NO: 6807 - DNA, 20 bp, synthetic construct
  misc_feature 1..20: note = chemically synthesized
  source 1..20: mol_type = other DNA
ttcactcacacacacacaca

SEQ ID NO: 6808 - DNA, 20 bp, synthetic construct
  misc_feature 1..20: note = chemically synthesized
  source 1..20: mol_type = other DNA
cacacacacacacagagtcc

SEQ ID NO: 6809 - DNA, 20 bp, synthetic construct
  misc_feature 1..20: note = chemically synthesized
  source 1..20: mol_type = other DNA
atacgtgcacacgcacatac

SEQ ID NO: 6810 - DNA, 20 bp, synthetic construct
  misc_feature 1..20: note = chemically synthesized
  source 1..20: mol_type = other DNA
tacgtgcacacgcacatacg

SEQ ID NO: 6811 - DNA, 20 bp, synthetic construct
  misc_feature 1..20: note = chemically synthesized
  source 1..20: mol_type = other DNA
atacgaggcacatgtgttct

SEQ ID NO: 6812 - DNA, 20 bp, synthetic construct
  misc_feature 1..20: note = chemically synthesized
  source 1..20: mol_type = other DNA
tacgaggcacatgtgttctt

SEQ ID NO: 6813 - DNA, 20 bp, synthetic construct
  misc_feature 1..20: note = chemically synthesized
  source 1..20: mol_type = other DNA
aggcacatgtgttcttgggt

SEQ ID NO: 6814 - DNA, 20 bp, synthetic construct
  misc_feature 1..20: note = chemically synthesized
  source 1..20: mol_type = other DNA
ggcacatgtgttcttgggtt

SEQ ID NO: 6815 - DNA, 20 bp, synthetic construct
  misc_feature 1..20: note = chemically synthesized
  source 1..20: mol_type = other DNA
cacatgtgttcttgggttgg

SEQ ID NO: 6816 - DNA, 20 bp, synthetic construct
  misc_feature 1..20: note = chemically synthesized
  source 1..20: mol_type = other DNA
acatgtgttcttgggttggg

SEQ ID NO: 6817 - DNA, 20 bp, synthetic construct
  misc_feature 1..20: note = chemically synthesized
  source 1..20: mol_type = other DNA
atgtgttcttgggttgggag

SEQ ID NO: 6818 - DNA, 20 bp, synthetic construct
  misc_feature 1..20: note = chemically synthesized
  source 1..20: mol_type = other DNA
tgttcttgggttgggaggag

SEQ ID NO: 6819 - DNA, 20 bp, synthetic construct
  misc_feature 1..20: note = chemically synthesized
  source 1..20: mol_type = other DNA
gttcttgggttgggaggaga

SEQ ID NO: 6820 - DNA, 20 bp, synthetic construct
  misc_feature 1..20: note = chemically synthesized
  source 1..20: mol_type = other DNA
ttcttgggttgggaggagaa

SEQ ID NO: 6821 - DNA, 20 bp, synthetic construct
  misc_feature 1..20: note = chemically synthesized
  source 1..20: mol_type = other DNA
ttgggttgggaggagaaggg

SEQ ID NO: 6822 - DNA, 20 bp, synthetic construct
  misc_feature 1..20: note = chemically synthesized
  source 1..20: mol_type = other DNA
tgggttgggaggagaagggc

SEQ ID NO: 6823 - DNA, 20 bp, synthetic construct
  misc_feature 1..20: note = chemically synthesized
  source 1..20: mol_type = other DNA
gttgggaggagaagggcagg

SEQ ID NO: 6824 - DNA, 20 bp, synthetic construct
  misc_feature 1..20: note = chemically synthesized
  source 1..20: mol_type = other DNA
aagggcaggcagttatcttc

SEQ ID NO: 6825 - DNA, 20 bp, synthetic construct
  misc_feature 1..20: note = chemically synthesized
  source 1..20: mol_type = other DNA
tccagatctccccacacctc

SEQ ID NO: 6826 - DNA, 20 bp, synthetic construct
  misc_feature 1..20: note = chemically synthesized
  source 1..20: mol_type = other DNA
cctctggcacatgcctttcc

SEQ ID NO: 6827 - DNA, 20 bp, synthetic construct
  misc_feature 1..20: note = chemically synthesized
  source 1..20: mol_type = other DNA
ctctggcacatgcctttcct

SEQ ID NO: 6828 - DNA, 20 bp, synthetic construct
  misc_feature 1..20: note = chemically synthesized
  source 1..20: mol_type = other DNA
tctggcacatgcctttcctg

SEQ ID NO: 6829 - DNA, 20 bp, synthetic construct
  misc_feature 1..20: note = chemically synthesized
  source 1..20: mol_type = other DNA
acatgcctttcctggggtcc

SEQ ID NO: 6830 - DNA, 20 bp, synthetic construct
  misc_feature 1..20: note = chemically synthesized
  source 1..20: mol_type = other DNA
catgcctttcctggggtcct

SEQ ID NO: 6831 - DNA, 20 bp, synthetic construct
  misc_feature 1..20: note = chemically synthesized
  source 1..20: mol_type = other DNA
atgcctttcctggggtcctg

SEQ ID NO: 6832 - DNA, 20 bp, synthetic construct
  misc_feature 1..20: note = chemically synthesized
  source 1..20: mol_type = other DNA
cctttcctggggtcctgggg

SEQ ID NO: 6833 - DNA, 20 bp, synthetic construct
  misc_feature 1..20: note = chemically synthesized
  source 1..20: mol_type = other DNA
tcctggggtcctggggtaga

SEQ ID NO: 6834 - DNA, 20 bp, synthetic construct
  misc_feature 1..20: note = chemically synthesized
  source 1..20: mol_type = other DNA
cctggggtcctggggtagac

SEQ ID NO: 6835 - DNA, 20 bp, synthetic construct
  misc_feature 1..20: note = chemically synthesized
  source 1..20: mol_type = other DNA
ggggtcctggggtagacagg

SEQ ID NO: 6836 - DNA, 20 bp, synthetic construct
  misc_feature 1..20: note = chemically synthesized
  source 1..20: mol_type = other DNA
gggtcctggggtagacagga

SEQ ID NO: 6837 - DNA, 20 bp, synthetic construct
  misc_feature 1..20: note = chemically synthesized
  source 1..20: mol_type = other DNA
cctggggtagacaggaaggt

SEQ ID NO: 6838 - DNA, 20 bp, synthetic construct
  misc_feature 1..20: note = chemically synthesized
  source 1..20: mol_type = other DNA
ctggggtagacaggaaggtg

SEQ ID NO: 6839 - DNA, 20 bp, synthetic construct
  misc_feature 1..20: note = chemically synthesized
  source 1..20: mol_type = other DNA
ggtagacaggaaggtgaggt

SEQ ID NO: 6840 - DNA, 20 bp, synthetic construct
  misc_feature 1..20: note = chemically synthesized
  source 1..20: mol_type = other DNA
gtagacaggaaggtgaggtg

SEQ ID NO: 6841 - DNA, 20 bp, synthetic construct
  misc_feature 1..20: note = chemically synthesized
  source 1..20: mol_type = other DNA
tagacaggaaggtgaggtga

SEQ ID NO: 6842 - DNA, 20 bp, synthetic construct
  misc_feature 1..20: note = chemically synthesized
  source 1..20: mol_type = other DNA
ggaaggtgaggtgagggaac

SEQ ID NO: 6843 - DNA, 20 bp, synthetic construct
  misc_feature 1..20: note = chemically synthesized
  source 1..20: mol_type = other DNA
aggtgaggtgagggaacaag

SEQ ID NO: 6844 - DNA, 20 bp, synthetic construct
  misc_feature 1..20: note = chemically synthesized
  source 1..20: mol_type = other DNA
ggtgaggtgagggaacaagc

SEQ ID NO: 6845 - DNA, 20 bp, synthetic construct
  misc_feature 1..20: note = chemically synthesized
  source 1..20: mol_type = other DNA
gtgaggtgagggaacaagcg

SEQ ID NO: 6846 - DNA, 20 bp, synthetic construct
  misc_feature 1..20: note = chemically synthesized
  source 1..20: mol_type = other DNA
tgaggtgagggaacaagcgg

SEQ ID NO: 6847 - DNA, 20 bp, synthetic construct
  misc_feature 1..20: note = chemically synthesized
  source 1..20: mol_type = other DNA
gagggaacaagcgggggtgt

SEQ ID NO: 6848 - DNA, 20 bp, synthetic construct
  misc_feature 1..20: note = chemically synthesized
  source 1..20: mol_type = other DNA
agggaacaagcgggggtgtc

SEQ ID NO: 6849 - DNA, 20 bp, synthetic construct
  misc_feature 1..20: note = chemically synthesized
  source 1..20: mol_type = other DNA
cgggggtgtcgggccctcct

SEQ ID NO: 6850 - DNA, 20 bp, synthetic construct
  misc_feature 1..20: note = chemically synthesized
  source 1..20: mol_type = other DNA
ccctcctcagtccctgttca

SEQ ID NO: 6851 - DNA, 20 bp, synthetic construct
  misc_feature 1..20: note = chemically synthesized
  source 1..20: mol_type = other DNA
ctcctcagtccctgttcaca

SEQ ID NO: 6852 - DNA, 20 bp, synthetic construct
  misc_feature 1..20: note = chemically synthesized
  source 1..20: mol_type = other DNA
ctcagtccctgttcacagag

SEQ ID NO: 6853 - DNA, 20 bp, synthetic construct
  misc_feature 1..20: note = chemically synthesized
  source 1..20: mol_type = other DNA
tcagtccctgttcacagagt

SEQ ID NO: 6854 - DNA, 20 bp, synthetic construct
  misc_feature 1..20: note = chemically synthesized
  source 1..20: mol_type = other DNA
ccctgttcacagagtgggtg

SEQ ID NO: 6855 - DNA, 20 bp, synthetic construct
  misc_feature 1..20: note = chemically synthesized
  source 1..20: mol_type = other DNA
tgttcacagagtgggtgcgg

SEQ ID NO: 6856 - DNA, 20 bp, synthetic construct
  misc_feature 1..20: note = chemically synthesized
  source 1..20: mol_type = other DNA
ttcacagagtgggtgcggca

SEQ ID NO: 6857 - DNA, 20 bp, synthetic construct
  misc_feature 1..20: note = chemically synthesized
  source 1..20: mol_type = other DNA
tgggtgcggcagagacctca

SEQ ID NO: 6858 - DNA, 20 bp, synthetic construct
  misc_feature 1..20: note = chemically synthesized
  source 1..20: mol_type = other DNA
gggtgcggcagagacctcaa

SEQ ID NO: 6859 - DNA, 20 bp, synthetic construct
  misc_feature 1..20: note = chemically synthesized
  source 1..20: mol_type = other DNA
ggtgcggcagagacctcaaa

SEQ ID NO: 6860 - DNA, 20 bp, synthetic construct
  misc_feature 1..20: note = chemically synthesized
  source 1..20: mol_type = other DNA
cggcagagacctcaaaggga

SEQ ID NO: 6861 - DNA, 20 bp, synthetic construct
  misc_feature 1..20: note = chemically synthesized
  source 1..20: mol_type = other DNA
gcagagacctcaaagggaca

SEQ ID NO: 6862 - DNA, 20 bp, synthetic construct
  misc_feature 1..20: note = chemically synthesized
  source 1..20: mol_type = other DNA
caaagggacagagcaatcat

SEQ ID NO: 6863 - DNA, 20 bp, synthetic construct
  misc_feature 1..20: note = chemically synthesized
  source 1..20: mol_type = other DNA
ggacagagcaatcatgagct

SEQ ID NO: 6864 - DNA, 20 bp, synthetic construct
  misc_feature 1..20: note = chemically synthesized
  source 1..20: mol_type = other DNA
agagcaatcatgagctgaga

SEQ ID NO: 6865 - DNA, 20 bp, synthetic construct
  misc_feature 1..20: note = chemically synthesized
  source 1..20: mol_type = other DNA
agcaatcatgagctgagaca

SEQ ID NO: 6866 - DNA, 20 bp, synthetic construct
  misc_feature 1..20: note = chemically synthesized
  source 1..20: mol_type = other DNA
gcaatcatgagctgagacag

SEQ ID NO: 6867 - DNA, 20 bp, synthetic construct
  misc_feature 1..20: note = chemically synthesized
  source 1..20: mol_type = other DNA
caatcatgagctgagacaga

SEQ ID NO: 6868 - DNA, 20 bp, synthetic construct
  misc_feature 1..20: note = chemically synthesized
  source 1..20: mol_type = other DNA
aatcatgagctgagacagag

SEQ ID NO: 6869 - DNA, 20 bp, synthetic construct
  misc_feature 1..20: note = chemically synthesized
  source 1..20: mol_type = other DNA
atcatgagctgagacagagg

SEQ ID NO: 6870 - DNA, 20 bp, synthetic construct
  misc_feature 1..20: note = chemically synthesized
  source 1..20: mol_type = other DNA
catgagctgagacagagggg

SEQ ID NO: 6871 - DNA, 20 bp, synthetic construct
  misc_feature 1..20: note = chemically synthesized
  source 1..20: mol_type = other DNA
gctgagacagagggggagca

SEQ ID NO: 6872 - DNA, 20 bp, synthetic construct
  misc_feature 1..20: note = chemically synthesized
  source 1..20: mol_type = other DNA
acagagggggagcaaagccg

SEQ ID NO: 6873 - DNA, 20 bp, synthetic construct
  misc_feature 1..20: note = chemically synthesized
  source 1..20: mol_type = other DNA
gcacacttgcctttcaaaaa

SEQ ID NO: 6874 - DNA, 20 bp, synthetic construct
  misc_feature 1..20: note = chemically synthesized
  source 1..20: mol_type = other DNA
caaaaatggatttcctctcc

SEQ ID NO: 6875 - DNA, 20 bp, synthetic construct
  misc_feature 1..20: note = chemically synthesized
  source 1..20: mol_type = other DNA
aaaaatggatttcctctcct

SEQ ID NO: 6876 - DNA, 20 bp, synthetic construct
  misc_feature 1..20: note = chemically synthesized
  source 1..20: mol_type = other DNA
ggatttcctctcctgggatt

SEQ ID NO: 6877 - DNA, 20 bp, synthetic construct
  misc_feature 1..20: note = chemically synthesized
  source 1..20: mol_type = other DNA
tctcctgggattcagcctgc

SEQ ID NO: 6878 - DNA, 20 bp, synthetic construct
  misc_feature 1..20: note = chemically synthesized
  source 1..20: mol_type = other DNA
ggattcagcctgcgagtgcc

SEQ ID NO: 6879 - DNA, 20 bp, synthetic construct
  misc_feature 1..20: note = chemically synthesized
  source 1..20: mol_type = other DNA
tgcctggcccctcaccttga

SEQ ID NO: 6880 - DNA, 20 bp, synthetic construct
  misc_feature 1..20: note = chemically synthesized
  source 1..20: mol_type = other DNA
tggcccctcaccttgatgga

SEQ ID NO: 6881 - DNA, 20 bp, synthetic construct
  misc_feature 1..20: note = chemically synthesized
  source 1..20: mol_type = other DNA
ggcccctcaccttgatggaa

SEQ ID NO: 6882 - DNA, 20 bp, synthetic construct
  misc_feature 1..20: note = chemically synthesized
  source 1..20: mol_type = other DNA
cctcaccttgatggaaagga

SEQ ID NO: 6883 - DNA, 20 bp, synthetic construct
  misc_feature 1..20: note = chemically synthesized
  source 1..20: mol_type = other DNA
aaggatggtcattttcctcc

SEQ ID NO: 6884 - DNA, 20 bp, synthetic construct
  misc_feature 1..20: note = chemically synthesized
  source 1..20: mol_type = other DNA
tggtcattttcctccgagct

SEQ ID NO: 6885 - DNA, 20 bp, synthetic construct
  misc_feature 1..20: note = chemically synthesized
  source 1..20: mol_type = other DNA
tttcctccgagctcagctgc

SEQ ID NO: 6886 - DNA, 20 bp, synthetic construct
  misc_feature 1..20: note = chemically synthesized
  source 1..20: mol_type = other DNA
tcagctgctggatatcttga

SEQ ID NO: 6887 - DNA, 20 bp, synthetic construct
  misc_feature 1..20: note = chemically synthesized
  source 1..20: mol_type = other DNA
ctggatatcttgaaagtcct

SEQ ID NO: 6888 - DNA, 20 bp, synthetic construct
  misc_feature 1..20: note = chemically synthesized
  source 1..20: mol_type = other DNA
ttgaaagtccttggccatga

SEQ ID NO: 6889 - DNA, 20 bp, synthetic construct
  misc_feature 1..20: note = chemically synthesized
  source 1..20: mol_type = other DNA
tgaaagtccttggccatgat

SEQ ID NO: 6890 - DNA, 20 bp, synthetic construct
  misc_feature 1..20: note = chemically synthesized
  source 1..20: mol_type = other DNA
gaaagtccttggccatgatg

SEQ ID NO: 6891 - DNA, 20 bp, synthetic construct
  misc_feature 1..20: note = chemically synthesized
  source 1..20: mol_type = other DNA
tccttggccatgatggggcc

SEQ ID NO: 6892 - DNA, 20 bp, synthetic construct
  misc_feature 1..20: note = chemically synthesized
  source 1..20: mol_type = other DNA
ccttggccatgatggggccc

SEQ ID NO: 6893 - DNA, 20 bp, synthetic construct
  misc_feature 1..20: note = chemically synthesized
  source 1..20: mol_type = other DNA
ggccatgatggggcccgggc

SEQ ID NO: 6894 - DNA, 20 bp, synthetic construct
  misc_feature 1..20: note = chemically synthesized
  source 1..20: mol_type = other DNA
ccatgatggggcccgggctg

SEQ ID NO: 6895 - DNA, 20 bp, synthetic construct
  misc_feature 1..20: note = chemically synthesized
  source 1..20: mol_type = other DNA
gatggggcccgggctggagc

SEQ ID NO: 6896 - DNA, 20 bp, synthetic construct
  misc_feature 1..20: note = chemically synthesized
  source 1..20: mol_type = other DNA
tggggcccgggctggagctg

SEQ ID NO: 6897 - DNA, 20 bp, synthetic construct
  misc_feature 1..20: note = chemically synthesized
  source 1..20: mol_type = other DNA
gcccgggctggagctggagc

SEQ ID NO: 6898 - DNA, 20 bp, synthetic construct
  misc_feature 1..20: note = chemically synthesized
  source 1..20: mol_type = other DNA
ccgggctggagctggagctg

SEQ ID NO: 6899 - DNA, 20 bp, synthetic construct
  misc_feature 1..20: note = chemically synthesized
  source 1..20: mol_type = other DNA
gctggagctggagctggagc

SEQ ID NO: 6900 - DNA, 20 bp, synthetic construct
  misc_feature 1..20: note = chemically synthesized
  source 1..20: mol_type = other DNA
ctggagctggagctggagct

SEQ ID NO: 6901 - DNA, 20 bp, synthetic construct
  misc_feature 1..20: note = chemically synthesized
  source 1..20: mol_type = other DNA
agctggagctggagctgggc

SEQ ID NO: 6902 - DNA, 20 bp, synthetic construct
  misc_feature 1..20: note = chemically synthesized
  source 1..20: mol_type = other DNA
gctggagctggagctgggct

SEQ ID NO: 6903 - DNA, 20 bp, synthetic construct
  misc_feature 1..20: note = chemically synthesized
  source 1..20: mol_type = other DNA
gagctggagctgggctgggc

SEQ ID NO: 6904 - DNA, 20 bp, synthetic construct
  misc_feature 1..20: note = chemically synthesized
  source 1..20: mol_type = other DNA
agctggagctgggctgggct

SEQ ID NO: 6905 - DNA, 20 bp, synthetic construct
  misc_feature 1..20: note = chemically synthesized
  source 1..20: mol_type = other DNA
gagctgggctgggctgggct

SEQ ID NO: 6906 - DNA, 20 bp, synthetic construct
  misc_feature 1..20: note = chemically synthesized
  source 1..20: mol_type = other DNA
agctgggctgggctgggctg

SEQ ID NO: 6907 - DNA, 20 bp, synthetic construct
  misc_feature 1..20: note = chemically synthesized
  source 1..20: mol_type = other DNA
ggctgggctgaggttgctct

SEQ ID NO: 6908 - DNA, 20 bp, synthetic construct
  misc_feature 1..20: note = chemically synthesized
  source 1..20: mol_type = other DNA
gctgggctgaggttgctctg

SEQ ID NO: 6909 - DNA, 20 bp, synthetic construct
  misc_feature 1..20: note = chemically synthesized
  source 1..20: mol_type = other DNA
ctgggctgaggttgctctga

SEQ ID NO: 6910 - DNA, 20 bp, synthetic construct
  misc_feature 1..20: note = chemically synthesized
  source 1..20: mol_type = other DNA
gctgaggttgctctgagggc

SEQ ID NO: 6911 - DNA, 20 bp, synthetic construct
  misc_feature 1..20: note = chemically synthesized
  source 1..20: mol_type = other DNA
ctgaggttgctctgagggct

SEQ ID NO: 6912 - DNA, 20 bp, synthetic construct
  misc_feature 1..20: note = chemically synthesized
  source 1..20: mol_type = other DNA
tgaggttgctctgagggctg

SEQ ID NO: 6913 - DNA, 20 bp, synthetic construct
  misc_feature 1..20: note = chemically synthesized
  source 1..20: mol_type = other DNA
gttgctctgagggctggggc

SEQ ID NO: 6914 - DNA, 20 bp, synthetic construct
  misc_feature 1..20: note = chemically synthesized
  source 1..20: mol_type = other DNA
ttgctctgagggctggggct

SEQ ID NO: 6915 - DNA, 20 bp, synthetic construct
  misc_feature 1..20: note = chemically synthesized
  source 1..20: mol_type = other DNA
tgctctgagggctggggctg

SEQ ID NO: 6916 - DNA, 20 bp, synthetic construct
  misc_feature 1..20: note = chemically synthesized
  source 1..20: mol_type = other DNA
tctgagggctggggctgggg

SEQ ID NO: 6917 - DNA, 20 bp, synthetic construct
  misc_feature 1..20: note = chemically synthesized
  source 1..20: mol_type = other DNA
tgagggctggggctggggca

SEQ ID NO: 6918 - DNA, 20 bp, synthetic construct
  misc_feature 1..20: note = chemically synthesized
  source 1..20: mol_type = other DNA
gagggctggggctggggcag

SEQ ID NO: 6919 - DNA, 20 bp, synthetic construct
  misc_feature 1..20: note = chemically synthesized
  source 1..20: mol_type = other DNA
ctggggctggggcagaggtg

SEQ ID NO: 6920 - DNA, 20 bp, synthetic construct
  misc_feature 1..20: note = chemically synthesized
  source 1..20: mol_type = other DNA
ggcagaggtgcagattcacg

SEQ ID NO: 6921 - DNA, 20 bp, synthetic construct
  misc_feature 1..20: note = chemically synthesized
  source 1..20: mol_type = other DNA
cagaggtgcagattcacgtg

SEQ ID NO: 6922 - DNA, 20 bp, synthetic construct
  misc_feature 1..20: note = chemically synthesized
  source 1..20: mol_type = other DNA
agaggtgcagattcacgtgg

SEQ ID NO: 6923 - DNA, 20 bp, synthetic construct
  misc_feature 1..20: note = chemically synthesized
  source 1..20: mol_type = other DNA
cagattcacgtggaggttga

SEQ ID NO: 6924 - DNA, 20 bp, synthetic construct
  misc_feature 1..20: note = chemically synthesized
  source 1..20: mol_type = other DNA
attcacgtggaggttgatgg

SEQ ID NO: 6925 - DNA, 20 bp, synthetic construct
  misc_feature 1..20: note = chemically synthesized
  source 1..20: mol_type = other DNA
ttcacgtggaggttgatggt

SEQ ID NO: 6926 - DNA, 20 bp, synthetic construct
  misc_feature 1..20: note = chemically synthesized
  source 1..20: mol_type = other DNA
cgtggaggttgatggtggga

SEQ ID NO: 6927 - DNA, 20 bp, synthetic construct
  misc_feature 1..20: note = chemically synthesized
  source 1..20: mol_type = other DNA
gttgatggtgggatggaacg

SEQ ID NO: 6928 - DNA, 20 bp, synthetic construct
  misc_feature 1..20: note = chemically synthesized
  source 1..20: mol_type = other DNA
ttgatggtgggatggaacgc

SEQ ID NO: 6929 - DNA, 20 bp, synthetic construct
  misc_feature 1..20: note = chemically synthesized
  source 1..20: mol_type = other DNA
tgatggtgggatggaacgca

SEQ ID NO: 6930 - DNA, 20 bp, synthetic construct
  misc_feature 1..20: note = chemically synthesized
  source 1..20: mol_type = other DNA
ggtgggatggaacgcagggt

SEQ ID NO: 6931 - DNA, 20 bp, synthetic construct
  misc_feature 1..20: note = chemically synthesized
  source 1..20: mol_type = other DNA
tgggatggaacgcagggtcg

SEQ ID NO: 6932 - DNA, 20 bp, synthetic construct
  misc_feature 1..20: note = chemically synthesized
  source 1..20: mol_type = other DNA
gggatggaacgcagggtcgg

SEQ ID NO: 6933 - DNA, 20 bp, synthetic construct
  misc_feature 1..20: note = chemically synthesized
  source 1..20: mol_type = other DNA
ggatggaacgcagggtcgga

SEQ ID NO: 6934 - DNA, 20 bp, synthetic construct
  misc_feature 1..20: note = chemically synthesized
  source 1..20: mol_type = other DNA
gatggaacgcagggtcggag

SEQ ID NO: 6935 - DNA, 20 bp, synthetic construct
  misc_feature 1..20: note = chemically synthesized
  source 1..20: mol_type = other DNA
aacgcagggtcggaggggtt

SEQ ID NO: 6936 - DNA, 20 bp, synthetic construct
  misc_feature 1..20: note = chemically synthesized
  source 1..20: mol_type = other DNA
acgcagggtcggaggggttc

SEQ ID NO: 6937 - DNA, 20 bp, synthetic construct
  misc_feature 1..20: note = chemically synthesized
  source 1..20: mol_type = other DNA
cgcagggtcggaggggttcg

SEQ ID NO: 6938 - DNA, 20 bp, synthetic construct
  misc_feature 1..20: note = chemically synthesized
  source 1..20: mol_type = other DNA
agggtcggaggggttcgggg

SEQ ID NO: 6939 - DNA, 20 bp, synthetic construct
  misc_feature 1..20: note = chemically synthesized
  source 1..20: mol_type = other DNA
gtcggaggggttcggggtgg

SEQ ID NO: 6940 - DNA, 20 bp, synthetic construct
  misc_feature 1..20: note = chemically synthesized
  source 1..20: mol_type = other DNA
aggggttcggggtggtggcc

SEQ ID NO: 6941 - DNA, 20 bp, synthetic construct
  misc_feature 1..20: note = chemically synthesized
  source 1..20: mol_type = other DNA
ggggttcggggtggtggcct

SEQ ID NO: 6942 - DNA, 20 bp, synthetic construct
  misc_feature 1..20: note = chemically synthesized
  source 1..20: mol_type = other DNA
gttcggggtggtggcctggg

SEQ ID NO: 6943 - DNA, 20 bp, synthetic construct
  misc_feature 1..20: note = chemically synthesized
  source 1..20: mol_type = other DNA
ttcggggtggtggcctgggt

SEQ ID NO: 6944 - DNA, 20 bp, synthetic construct
  misc_feature 1..20: note = chemically synthesized
  source 1..20: mol_type = other DNA
tggtggcctgggtaggatct

SEQ ID NO: 6945 - DNA, 20 bp, synthetic construct
  misc_feature 1..20: note = chemically synthesized
  source 1..20: mol_type = other DNA
ggtggcctgggtaggatctg

SEQ ID NO: 6946 - DNA, 20 bp, synthetic construct
  misc_feature 1..20: note = chemically synthesized
  source 1..20: mol_type = other DNA
gcctgggtaggatctgaggt

SEQ ID NO: 6947 - DNA, 20 bp, synthetic construct
  misc_feature 1..20: note = chemically synthesized
  source 1..20: mol_type = other DNA
tgccaacctcagatcctacc

SEQ ID NO: 6948 - DNA, 20 bp, synthetic construct
  misc_feature 1..20: note = chemically synthesized
  source 1..20: mol_type = other DNA
gccaacctcagatcctaccc

SEQ ID NO: 6949 - DNA, 20 bp, synthetic construct
  misc_feature 1..20: note = chemically synthesized
  source 1..20: mol_type = other DNA
gtgaatctgcacctctgccc

SEQ ID NO: 6950 - DNA, 20 bp, synthetic construct
  misc_feature 1..20: note = chemically synthesized
  source 1..20: mol_type = other DNA
ctgcacctctgccccagccc

SEQ ID NO: 6951 - DNA, 20 bp, synthetic construct
  misc_feature 1..20: note = chemically synthesized
  source 1..20: mol_type = other DNA
tctgccccagccccagccct

SEQ ID NO: 6952 - DNA, 20 bp, synthetic construct
  misc_feature 1..20: note = chemically synthesized
  source 1..20: mol_type = other DNA
tgccccagccccagccctca

SEQ ID NO: 6953 - DNA, 20 bp, synthetic construct
  misc_feature 1..20: note = chemically synthesized
  source 1..20: mol_type = other DNA
cccagccctcagagcaacct

SEQ ID NO: 6954 - DNA, 20 bp, synthetic construct
  misc_feature 1..20: note = chemically synthesized
  source 1..20: mol_type = other DNA
ccctcagagcaacctcagcc

SEQ ID NO: 6955 - DNA, 20 bp, synthetic construct
  misc_feature 1..20: note = chemically synthesized
  source 1..20: mol_type = other DNA
agagcaacctcagcccagcc

SEQ ID NO: 6956 - DNA, 20 bp, synthetic construct
  misc_feature 1..20: note = chemically synthesized
  source 1..20: mol_type = other DNA
aacctcagcccagcccagcc

SEQ ID NO: 6957 - DNA, 20 bp, synthetic construct
  misc_feature 1..20: note = chemically synthesized
  source 1..20: mol_type = other DNA
agcccagcccagcccagctc

SEQ ID NO: 6958 - DNA, 20 bp, synthetic construct
  misc_feature 1..20: note = chemically synthesized
  source 1..20: mol_type = other DNA
gcccagcccagctccagctc

SEQ ID NO: 6959 - DNA, 20 bp, synthetic construct
  misc_feature 1..20: note = chemically synthesized
  source 1..20: mol_type = other DNA
cccagctccagctccagctc

SEQ ID NO: 6960 - DNA, 20 bp, synthetic construct
  misc_feature 1..20: note = chemically synthesized
  source 1..20: mol_type = other DNA
ctccagctccagctccagcc

SEQ ID NO: 6961 - DNA, 20 bp, synthetic construct
  misc_feature 1..20: note = chemically synthesized
  source 1..20: mol_type = other DNA
tccagctccagctccagccc

SEQ ID NO: 6962 - DNA, 20 bp, synthetic construct
  misc_feature 1..20: note = chemically synthesized
  source 1..20: mol_type = other DNA
ctccagcccgggccccatca

SEQ ID NO: 6963 - DNA, 20 bp, synthetic construct
  misc_feature 1..20: note = chemically synthesized
  source 1..20: mol_type = other DNA
gcccgggccccatcatggcc

SEQ ID NO: 6964 - DNA, 20 bp, synthetic construct
  misc_feature 1..20: note = chemically synthesized
  source 1..20: mol_type = other DNA
cccgggccccatcatggcca

SEQ ID NO: 6965 - DNA, 20 bp, synthetic construct
  misc_feature 1..20: note = chemically synthesized
  source 1..20: mol_type = other DNA
catcatggccaaggactttc

SEQ ID NO: 6966 - DNA, 20 bp, synthetic construct
  misc_feature 1..20: note = chemically synthesized
  source 1..20: mol_type = other DNA
ccaaggactttcaagatatc

SEQ ID NO: 6967 - DNA, 20 bp, synthetic construct
  misc_feature 1..20: note = chemically synthesized
  source 1..20: mol_type = other DNA
aggactttcaagatatccag

SEQ ID NO: 6968 - DNA, 20 bp, synthetic construct
  misc_feature 1..20: note = chemically synthesized
  source 1..20: mol_type = other DNA
tttcaagatatccagcagct

SEQ ID NO: 6969 - DNA, 20 bp, synthetic construct
  misc_feature 1..20: note = chemically synthesized
  source 1..20: mol_type = other DNA
agatatccagcagctgagct

SEQ ID NO: 6970 - DNA, 20 bp, synthetic construct
  misc_feature 1..20: note = chemically synthesized
  source 1..20: mol_type = other DNA
atatccagcagctgagctcg

SEQ ID NO: 6971 - DNA, 20 bp, synthetic construct
  misc_feature 1..20: note = chemically synthesized
  source 1..20: mol_type = other DNA
tatccagcagctgagctcgg

SEQ ID NO: 6972 - DNA, 20 bp, synthetic construct
  misc_feature 1..20: note = chemically synthesized
  source 1..20: mol_type = other DNA
aaatgaccatcctttccatc

SEQ ID NO: 6973 - DNA, 20 bp, synthetic construct
  misc_feature 1..20: note = chemically synthesized
  source 1..20: mol_type = other DNA
aatgaccatcctttccatca

SEQ ID NO: 6974 - DNA, 20 bp, synthetic construct
  misc_feature 1..20: note = chemically synthesized
  source 1..20: mol_type = other DNA
accatcctttccatcaaggt

SEQ ID NO: 6975 - DNA, 20 bp, synthetic construct
  misc_feature 1..20: note = chemically synthesized
  source 1..20: mol_type = other DNA
ccatcctttccatcaaggtg

SEQ ID NO: 6976 - DNA, 20 bp, synthetic construct
  misc_feature 1..20: note = chemically synthesized
  source 1..20: mol_type = other DNA
catcctttccatcaaggtga

SEQ ID NO: 6977 - DNA, 20 bp, synthetic construct
  misc_feature 1..20: note = chemically synthesized
  source 1..20: mol_type = other DNA
atcctttccatcaaggtgag

SEQ ID NO: 6978 - DNA, 20 bp, synthetic construct
  misc_feature 1..20: note = chemically synthesized
  source 1..20: mol_type = other DNA
tttccatcaaggtgaggggc

SEQ ID NO: 6979 - DNA, 20 bp, synthetic construct
  misc_feature 1..20: note = chemically synthesized
  source 1..20: mol_type = other DNA
ttccatcaaggtgaggggcc

SEQ ID NO: 6980 - DNA, 20 bp, synthetic construct
  misc_feature 1..20: note = chemically synthesized
  source 1..20: mol_type = other DNA
ggtgaggggccaggcactcg

SEQ ID NO: 6981 - DNA, 20 bp, synthetic construct
  misc_feature 1..20: note = chemically synthesized
  source 1..20: mol_type = other DNA
gtgaggggccaggcactcgc

SEQ ID NO: 6982 - DNA, 20 bp, synthetic construct
  misc_feature 1..20: note = chemically synthesized
  source 1..20: mol_type = other DNA
ggcactcgcaggctgaatcc

SEQ ID NO: 6983 - DNA, 20 bp, synthetic construct
  misc_feature 1..20: note = chemically synthesized
  source 1..20: mol_type = other DNA
gcactcgcaggctgaatccc

SEQ ID NO: 6984 - DNA, 20 bp, synthetic construct
  misc_feature 1..20: note = chemically synthesized
  source 1..20: mol_type = other DNA
actcgcaggctgaatcccag

SEQ ID NO: 6985 - DNA, 20 bp, synthetic construct
  misc_feature 1..20: note = chemically synthesized
  source 1..20: mol_type = other DNA
tcgcaggctgaatcccagga

SEQ ID NO: 6986 - DNA, 20 bp, synthetic construct
  misc_feature 1..20: note = chemically synthesized
  source 1..20: mol_type = other DNA
cgcaggctgaatcccaggag

SEQ ID NO: 6987 - DNA, 20 bp, synthetic construct
  misc_feature 1..20: note = chemically synthesized
  source 1..20: mol_type = other DNA
gagaggaaatccatttttga

SEQ ID NO: 6988 - DNA, 20 bp, synthetic construct
  misc_feature 1..20: note = chemically synthesized
  source 1..20: mol_type = other DNA
agaggaaatccatttttgaa

SEQ ID NO: 6989 - DNA, 20 bp, synthetic construct
  misc_feature 1..20: note = chemically synthesized
  source 1..20: mol_type = other DNA
gaaatccatttttgaaaggc

SEQ ID NO: 6990 - DNA, 20 bp, synthetic construct
  misc_feature 1..20: note = chemically synthesized
  source 1..20: mol_type = other DNA
atttttgaaaggcaagtgtg

SEQ ID NO: 6991 - DNA, 20 bp, synthetic construct
  misc_feature 1..20: note = chemically synthesized
  source 1..20: mol_type = other DNA
aggcaagtgtgcagtttctg

SEQ ID NO: 6992 - DNA, 20 bp, synthetic construct
  misc_feature 1..20: note = chemically synthesized
  source 1..20: mol_type = other DNA
gctttgctccccctctgtct

SEQ ID NO: 6993 - DNA, 20 bp, synthetic construct
  misc_feature 1..20: note = chemically synthesized
  source 1..20: mol_type = other DNA
catgattgctctgtcccttt

SEQ ID NO: 6994 - DNA, 20 bp, synthetic construct
  misc_feature 1..20: note = chemically synthesized
  source 1..20: mol_type = other DNA
atgattgctctgtccctttg

SEQ ID NO: 6995 - DNA, 20 bp, synthetic construct
  misc_feature 1..20: note = chemically synthesized
  source 1..20: mol_type = other DNA
tgccgcacccactctgtgaa

SEQ ID NO: 6996 - DNA, 20 bp, synthetic construct
  misc_feature 1..20: note = chemically synthesized
  source 1..20: mol_type = other DNA
gccgcacccactctgtgaac

SEQ ID NO: 6997 - DNA, 20 bp, synthetic construct
  misc_feature 1..20: note = chemically synthesized
  source 1..20: mol_type = other DNA
ccgcacccactctgtgaaca

SEQ ID NO: 6998 - DNA, 20 bp, synthetic construct
  misc_feature 1..20: note = chemically synthesized
  source 1..20: mol_type = other DNA
ccactctgtgaacagggact

SEQ ID NO: 6999 - DNA, 20 bp, synthetic construct
  misc_feature 1..20: note = chemically synthesized
  source 1..20: mol_type = other DNA
cactctgtgaacagggactg

SEQ ID NO: 7000 - DNA, 20 bp, synthetic construct
  misc_feature 1..20: note = chemically synthesized
  source 1..20: mol_type = other DNA
ctctgtgaacagggactgag

SEQ ID NO: 7001 - DNA, 20 bp, synthetic construct
  misc_feature 1..20: note = chemically synthesized
  source 1..20: mol_type = other DNA
tctgtgaacagggactgagg

SEQ ID NO: 7002 - DNA, 20 bp, synthetic construct
  misc_feature 1..20: note = chemically synthesized
  source 1..20: mol_type = other DNA
ctgtgaacagggactgagga

SEQ ID NO: 7003 - DNA, 20 bp, synthetic construct
  misc_feature 1..20: note = chemically synthesized
  source 1..20: mol_type = other DNA
cctcaccttcctgtctaccc

SEQ ID NO: 7004 - DNA, 20 bp, synthetic construct
  misc_feature 1..20: note = chemically synthesized
  source 1..20: mol_type = other DNA
ctcaccttcctgtctacccc

SEQ ID NO: 7005 - DNA, 20 bp, synthetic construct
  misc_feature 1..20: note = chemically synthesized
  source 1..20: mol_type = other DNA
tcctgtctaccccaggaccc

SEQ ID NO: 7006 - DNA, 20 bp, synthetic construct
  misc_feature 1..20: note = chemically synthesized
  source 1..20: mol_type = other DNA
cctgtctaccccaggacccc

SEQ ID NO: 7007 - DNA, 20 bp, synthetic construct
  misc_feature 1..20: note = chemically synthesized
  source 1..20: mol_type = other DNA
tctaccccaggaccccagga

SEQ ID NO: 7008 - DNA, 20 bp, synthetic construct
  misc_feature 1..20: note = chemically synthesized
  source 1..20: mol_type = other DNA
ctaccccaggaccccaggaa

SEQ ID NO: 7009 - DNA, 20 bp, synthetic construct
  misc_feature 1..20: note = chemically synthesized
  source 1..20: mol_type = other DNA
accccaggaaaggcatgtgc

SEQ ID NO: 7010 - DNA, 20 bp, synthetic construct
  misc_feature 1..20: note = chemically synthesized
  source 1..20: mol_type = other DNA
cccaggaaaggcatgtgcca

SEQ ID NO: 7011 - DNA, 20 bp, synthetic construct
  misc_feature 1..20: note = chemically synthesized
  source 1..20: mol_type = other DNA
ccaggaaaggcatgtgccag

SEQ ID NO: 7012 - DNA, 20 bp, synthetic construct
  misc_feature 1..20: note = chemically synthesized
  source 1..20: mol_type = other DNA
aaaggcatgtgccagaggtg

SEQ ID NO: 7013 - DNA, 20 bp, synthetic construct
  misc_feature 1..20: note = chemically synthesized
  source 1..20: mol_type = other DNA
aaggcatgtgccagaggtgt

SEQ ID NO: 7014 - DNA, 20 bp, synthetic construct
  misc_feature 1..20: note = chemically synthesized
  source 1..20: mol_type = other DNA
aggcatgtgccagaggtgtg

SEQ ID NO: 7015 - DNA, 20 bp, synthetic construct
  misc_feature 1..20: note = chemically synthesized
  source 1..20: mol_type = other DNA
gcatgtgccagaggtgtggg

SEQ ID NO: 7016 - DNA, 20 bp, synthetic construct
  misc_feature 1..20: note = chemically synthesized
  source 1..20: mol_type = other DNA
gccagaggtgtggggagatc

SEQ ID NO: 7017 - DNA, 20 bp, synthetic construct
  misc_feature 1..20: note = chemically synthesized
  source 1..20: mol_type = other DNA
agaggtgtggggagatctgg

SEQ ID NO: 7018 - DNA, 20 bp, synthetic construct
  misc_feature 1..20: note = chemically synthesized
  source 1..20: mol_type = other DNA
tgcccttctcctcccaaccc

SEQ ID NO: 7019 - DNA, 20 bp, synthetic construct
  misc_feature 1..20: note = chemically synthesized
  source 1..20: mol_type = other DNA
gtgtgcacgtatgtgcatat

SEQ ID NO: 7020 - DNA, 20 bp, synthetic construct
  misc_feature 1..20: note = chemically synthesized
  source 1..20: mol_type = other DNA
tgtgcacgtatgtgcatatg

SEQ ID NO: 7021 - DNA, 20 bp, synthetic construct
  misc_feature 1..20: note = chemically synthesized
  source 1..20: mol_type = other DNA
gtatgtgcatatgaggaatg

SEQ ID NO: 7022 - DNA, 20 bp, synthetic construct
  misc_feature 1..20: note = chemically synthesized
  source 1..20: mol_type = other DNA
gcatatgaggaatgcagatt

SEQ ID NO: 7023 - DNA, 20 bp, synthetic construct
  misc_feature 1..20: note = chemically synthesized
  source 1..20: mol_type = other DNA
atgaggaatgcagattcagc

SEQ ID NO: 7024 - DNA, 20 bp, synthetic construct
  misc_feature 1..20: note = chemically synthesized
  source 1..20: mol_type = other DNA
tgaggaatgcagattcagct

SEQ ID NO: 7025 - DNA, 20 bp, synthetic construct
  misc_feature 1..20: note = chemically synthesized
  source 1..20: mol_type = other DNA
gggactctgtgtgtgtgtgt

SEQ ID NO: 7026 - DNA, 20 bp, synthetic construct
  misc_feature 1..20: note = chemically synthesized
  source 1..20: mol_type = other DNA
gtgtgtgtgtatatgtgcgc

SEQ ID NO: 7027 - DNA, 20 bp, synthetic construct
  misc_feature 1..20: note = chemically synthesized
  source 1..20: mol_type = other DNA
gtgtgtgtatatgtgcgcga

SEQ ID NO: 7028 - DNA, 20 bp, synthetic construct
  misc_feature 1..20: note = chemically synthesized
  source 1..20: mol_type = other DNA
tgtgtgtatgtcgtgtatgt

SEQ ID NO: 7029 - DNA, 20 bp, synthetic construct
  misc_feature 1..20: note = chemically synthesized
  source 1..20: mol_type = other DNA
tgtgtatgtcgtgtatgtga

SEQ ID NO: 7030 - DNA, 20 bp, synthetic construct
  misc_feature 1..20: note = chemically synthesized
  source 1..20: mol_type = other DNA
gtgtatgtcgtgtatgtgag

SEQ ID NO: 7031 - DNA, 20 bp, synthetic construct
  misc_feature 1..20: note = chemically synthesized
  source 1..20: mol_type = other DNA
tgtatgtcgtgtatgtgaga

SEQ ID NO: 7032 - DNA, 20 bp, synthetic construct
  misc_feature 1..20: note = chemically synthesized
  source 1..20: mol_type = other DNA
tgagagggtatgttgtgtgt

SEQ ID NO: 7033 - DNA, 20 bp, synthetic construct
  misc_feature 1..20: note = chemically synthesized
  source 1..20: mol_type = other DNA
agagggtatgttgtgtgtga

SEQ ID NO: 7034 - DNA, 20 bp, synthetic construct
  misc_feature 1..20: note = chemically synthesized
  source 1..20: mol_type = other DNA
gttgtgtgtgtatgttgtgt

SEQ ID NO: 7035 - DNA, 20 bp, synthetic construct
  misc_feature 1..20: note = chemically synthesized
  source 1..20: mol_type = other DNA
gttgtgtgtatcttgtgtgt

SEQ ID NO: 7036 - DNA, 20 bp, synthetic construct
  misc_feature 1..20: note = chemically synthesized
  source 1..20: mol_type = other DNA
tgcatgtgtgtatgttgtgc

SEQ ID NO: 7037 - DNA, 20 bp, synthetic construct
  misc_feature 1..20: note = chemically synthesized
  source 1..20: mol_type = other DNA
cgagtgtatgttgtgtatgt

SEQ ID NO: 7038 - DNA, 20 bp, synthetic construct
  misc_feature 1..20: note = chemically synthesized
  source 1..20: mol_type = other DNA
tgtgtatgtatgttgtgtat

SEQ ID NO: 7039 - DNA, 20 bp, synthetic construct
  misc_feature 1..20: note = chemically synthesized
  source 1..20: mol_type = other DNA
gttgtgtgtgtgtattgtgt

SEQ ID NO: 7040 - DNA, 20 bp, synthetic construct
  misc_feature 1..20: note = chemically synthesized
  source 1..20: mol_type = other DNA
tgtatgtttgtgtgttgtgt

SEQ ID NO: 7041 - DNA, 20 bp, synthetic construct
  misc_feature 1..20: note = chemically synthesized
  source 1..20: mol_type = other DNA
tgcgtgtgtgtatgttgtgc

SEQ ID NO: 7042 - DNA, 20 bp, synthetic construct
  misc_feature 1..20: note = chemically synthesized
  source 1..20: mol_type = other DNA
gtgttgtgtgtgtatgttgt

SEQ ID NO: 7043 - DNA, 20 bp, synthetic construct
  misc_feature 1..20: note = chemically synthesized
  source 1..20: mol_type = other DNA
gttatgtatgttgtgtgtgt

SEQ ID NO: 7044 - DNA, 20 bp, synthetic construct
  misc_feature 1..20: note = chemically synthesized
  source 1..20: mol_type = other DNA
tgtgtgtgagtgtgttgcgt

SEQ ID NO: 7045 - DNA, 20 bp, synthetic construct
  misc_feature 1..20: note = chemically synthesized
  source 1..20: mol_type = other DNA
tgttgcgtgagtgtgtgtgt

SEQ ID NO: 7046 - DNA, 20 bp, synthetic construct
  misc_feature 1..20: note = chemically synthesized
  source 1..20: mol_type = other DNA
tgtgtgtgtgtgtgtgtgtg

SEQ ID NO: 7047 - DNA, 20 bp, synthetic construct
  misc_feature 1..20: note = chemically synthesized
  source 1..20: mol_type = other DNA
tgtgtgtgtgtgtgtgtgta

SEQ ID NO: 7048 - DNA, 20 bp, synthetic construct
  misc_feature 1..20: note = chemically synthesized
  source 1..20: mol_type = other DNA
gtgtgtgtgtgtgtgtgtag

SEQ ID NO: 7049 - DNA, 20 bp, synthetic construct
  misc_feature 1..20: note = chemically synthesized
  source 1..20: mol_type = other DNA
tgtgtgtgtgtgtgtagagg

SEQ ID NO: 7050 - DNA, 20 bp, synthetic construct
  misc_feature 1..20: note = chemically synthesized
  source 1..20: mol_type = other DNA
gtgtgtgtgtgtgtagaggt

SEQ ID NO: 7051 - DNA, 20 bp, synthetic construct
  misc_feature 1..20: note = chemically synthesized
  source 1..20: mol_type = other DNA
tgtgtgtgtgtgtagaggtg

SEQ ID NO: 7052 - DNA, 20 bp, synthetic construct
  misc_feature 1..20: note = chemically synthesized
  source 1..20: mol_type = other DNA
tgtgtgtgtagaggtggggt

SEQ ID NO: 7053 - DNA, 20 bp, synthetic construct
  misc_feature 1..20: note = chemically synthesized
  source 1..20: mol_type = other DNA
tgtgtagaggtggggtgagt

SEQ ID NO: 7054 - DNA, 20 bp, synthetic construct
  misc_feature 1..20: note = chemically synthesized
  source 1..20: mol_type = other DNA
gtgtagaggtggggtgagtt

SEQ ID NO: 7055 - DNA, 20 bp, synthetic construct
  misc_feature 1..20: note = chemically synthesized
  source 1..20: mol_type = other DNA
agaggtggggtgagttggga

SEQ ID NO: 7056 - DNA, 20 bp, synthetic construct
  misc_feature 1..20: note = chemically synthesized
  source 1..20: mol_type = other DNA
gaggtggggtgagttgggat

SEQ ID NO: 7057 - DNA, 20 bp, synthetic construct
  misc_feature 1..20: note = chemically synthesized
  source 1..20: mol_type = other DNA
gtggggtgagttgggatggg

SEQ ID NO: 7058 - DNA, 20 bp, synthetic construct
  misc_feature 1..20: note = chemically synthesized
  source 1..20: mol_type = other DNA
tggggtgagttgggatgggt

SEQ ID NO: 7059 - DNA, 20 bp, synthetic construct
  misc_feature 1..20: note = chemically synthesized
  source 1..20: mol_type = other DNA
ggggtgagttgggatgggtg

SEQ ID NO: 7060 - DNA, 20 bp, synthetic construct
  misc_feature 1..20: note = chemically synthesized
  source 1..20: mol_type = other DNA
gggtgagttgggatgggtgg

SEQ ID NO: 7061 - DNA, 20 bp, synthetic construct
  misc_feature 1..20: note = chemically synthesized
  source 1..20: mol_type = other DNA
ttgggatgggtgggggacgt

SEQ ID NO: 7062 - DNA, 20 bp, synthetic construct
  misc_feature 1..20: note = chemically synthesized
  source 1..20: mol_type = other DNA
atgggtgggggacgtgagca

SEQ ID NO: 7063 - DNA, 20 bp, synthetic construct
  misc_feature 1..20: note = chemically synthesized
  source 1..20: mol_type = other DNA
gggtgggggacgtgagcaca

SEQ ID NO: 7064 - DNA, 20 bp, synthetic construct
  misc_feature 1..20: note = chemically synthesized
  source 1..20: mol_type = other DNA
gtgggggacgtgagcacaga

SEQ ID NO: 7065 - DNA, 20 bp, synthetic construct
  misc_feature 1..20: note = chemically synthesized
  source 1..20: mol_type = other DNA
acgtgagcacagagagatcc

SEQ ID NO: 7066 - DNA, 20 bp, synthetic construct
  misc_feature 1..20: note = chemically synthesized
  source 1..20: mol_type = other DNA
tgagcacagagagatcctgg

SEQ ID NO: 7067 - DNA, 20 bp, synthetic construct
  misc_feature 1..20: note = chemically synthesized
  source 1..20: mol_type = other DNA
ccctgctcctctcatctccc

SEQ ID NO: 7068 - DNA, 20 bp, synthetic construct
  misc_feature 1..20: note = chemically synthesized
  source 1..20: mol_type = other DNA
catctcccaagacccttccc

SEQ ID NO: 7069 - DNA, 20 bp, synthetic construct
  misc_feature 1..20: note = chemically synthesized
  source 1..20: mol_type = other DNA
tctgtaataaatcttgactg

SEQ ID NO: 7070 - DNA, 20 bp, synthetic construct
  misc_feature 1..20: note = chemically synthesized
  source 1..20: mol_type = other DNA
ctgtaataaatcttgactga

SEQ ID NO: 7071 - DNA, 20 bp, synthetic construct
  misc_feature 1..20: note = chemically synthesized
  source 1..20: mol_type = other DNA
aaatcttgactgaaggacct

SEQ ID NO: 7072 - DNA, 20 bp, synthetic construct
  misc_feature 1..20: note = chemically synthesized
  source 1..20: mol_type = other DNA
actgaaggacctaagtatct

SEQ ID NO: 7073 - DNA, 20 bp, synthetic construct
  misc_feature 1..20: note = chemically synthesized
  source 1..20: mol_type = other DNA
tatcttggacattttttttt

SEQ ID NO: 7074 - DNA, 20 bp, synthetic construct
  misc_feature 1..20: note = chemically synthesized
  source 1..20: mol_type = other DNA
tcttggacatttttttttta

SEQ ID NO: 7075 - DNA, 20 bp, synthetic construct
  misc_feature 1..20: note = chemically synthesized
  source 1..20: mol_type = other DNA
ggacattttttttttagaga

SEQ ID NO: 7076 - DNA, 20 bp, synthetic construct
  misc_feature 1..20: note = chemically synthesized
  source 1..20: mol_type = other DNA
gacattttttttttagagac

SEQ ID NO: 7077 - DNA, 20 bp, synthetic construct
  misc_feature 1..20: note = chemically synthesized
  source 1..20: mol_type = other DNA
cattttttttttagagacag

SEQ ID NO: 7078 - DNA, 20 bp, synthetic construct
  misc_feature 1..20: note = chemically synthesized
  source 1..20: mol_type = other DNA
tttttttagagacaggagtg

SEQ ID NO: 7079 - DNA, 20 bp, synthetic construct
  misc_feature 1..20: note = chemically synthesized
  source 1..20: mol_type = other DNA
ttttagagacaggagtgtag

SEQ ID NO: 7080 - DNA, 20 bp, synthetic construct
  misc_feature 1..20: note = chemically synthesized
  source 1..20: mol_type = other DNA
tagagacaggagtgtagtgg

SEQ ID NO: 7081 - DNA, 20 bp, synthetic construct
  misc_feature 1..20: note = chemically synthesized
  source 1..20: mol_type = other DNA
agagacaggagtgtagtggc

SEQ ID NO: 7082 - DNA, 20 bp, synthetic construct
  misc_feature 1..20: note = chemically synthesized
  source 1..20: mol_type = other DNA
ggagtgtagtggcaggatca

SEQ ID NO: 7083 - DNA, 20 bp, synthetic construct
  misc_feature 1..20: note = chemically synthesized
  source 1..20: mol_type = other DNA
tcactgcaacctcgaactcc

SEQ ID NO: 7084 - DNA, 20 bp, synthetic construct
  misc_feature 1..20: note = chemically synthesized
  source 1..20: mol_type = other DNA
cactgcaacctcgaactcct

SEQ ID NO: 7085 - DNA, 20 bp, synthetic construct
  misc_feature 1..20: note = chemically synthesized
  source 1..20: mol_type = other DNA
aacctcgaactcctgggctc

SEQ ID NO: 7086 - DNA, 20 bp, synthetic construct
  misc_feature 1..20: note = chemically synthesized
  source 1..20: mol_type = other DNA
ctcaagccatcctcccacct

SEQ ID NO: 7087 - DNA, 20 bp, synthetic construct
  misc_feature 1..20: note = chemically synthesized
  source 1..20: mol_type = other DNA
tcctcccacctcagcctccc

SEQ ID NO: 7088 - DNA, 20 bp, synthetic construct
  misc_feature 1..20: note = chemically synthesized
  source 1..20: mol_type = other DNA
tcccacctcagcctcccaag

SEQ ID NO: 7089 - DNA, 20 bp, synthetic construct
  misc_feature 1..20: note = chemically synthesized
  source 1..20: mol_type = other DNA
acctcagcctcccaagtagt

SEQ ID NO: 7090 - DNA, 20 bp, synthetic construct
  misc_feature 1..20: note = chemically synthesized
  source 1..20: mol_type = other DNA
cctcagcctcccaagtagtt

SEQ ID NO: 7091 - DNA, 20 bp, synthetic construct
  misc_feature 1..20: note = chemically synthesized
  source 1..20: mol_type = other DNA
tcccaagtagttaggactta

SEQ ID NO: 7092 - DNA, 20 bp, synthetic construct
  misc_feature 1..20: note = chemically synthesized
  source 1..20: mol_type = other DNA
cccaagtagttaggacttac

SEQ ID NO: 7093 - DNA, 20 bp, synthetic construct
  misc_feature 1..20: note = chemically synthesized
  source 1..20: mol_type = other DNA
caggtgtgcaccactgtgcc

SEQ ID NO: 7094 - DNA, 20 bp, synthetic construct
  misc_feature 1..20: note = chemically synthesized
  source 1..20: mol_type = other DNA
gcaaattaaaaaaaattttt

SEQ ID NO: 7095 - DNA, 20 bp, synthetic construct
  misc_feature 1..20: note = chemically synthesized
  source 1..20: mol_type = other DNA
aaattaaaaaaaatttttta

SEQ ID NO: 7096 - DNA, 20 bp, synthetic construct
  misc_feature 1..20: note = chemically synthesized
  source 1..20: mol_type = other DNA
aaaaaaattttttagagaaa

SEQ ID NO: 7097 - DNA, 20 bp, synthetic construct
  misc_feature 1..20: note = chemically synthesized
  source 1..20: mol_type = other DNA
aaaaaattttttagagaaat

SEQ ID NO: 7098 - DNA, 20 bp, synthetic construct
  misc_feature 1..20: note = chemically synthesized
  source 1..20: mol_type = other DNA
aaaaattttttagagaaatg

SEQ ID NO: 7099 - DNA, 20 bp, synthetic construct
  misc_feature 1..20: note = chemically synthesized
  source 1..20: mol_type = other DNA
tggggtcttgctatgttgcc

SEQ ID NO: 7100 - DNA, 20 bp, synthetic construct
  misc_feature 1..20: note = chemically synthesized
  source 1..20: mol_type = other DNA
ggggtcttgctatgttgccc

SEQ ID NO: 7101 - DNA, 20 bp, synthetic construct
  misc_feature 1..20: note = chemically synthesized
  source 1..20: mol_type = other DNA
tcttgctatgttgcccaggc

SEQ ID NO: 7102 - DNA, 20 bp, synthetic construct
  misc_feature 1..20: note = chemically synthesized
  source 1..20: mol_type = other DNA
tgctatgttgcccaggctgg

SEQ ID NO: 7103 - DNA, 20 bp, synthetic construct
  misc_feature 1..20: note = chemically synthesized
  source 1..20: mol_type = other DNA
gctatgttgcccaggctggt

SEQ ID NO: 7104 - DNA, 20 bp, synthetic construct
  misc_feature 1..20: note = chemically synthesized
  source 1..20: mol_type = other DNA
gttgcccaggctggtgggaa

SEQ ID NO: 7105 - DNA, 20 bp, synthetic construct
  misc_feature 1..20: note = chemically synthesized
  source 1..20: mol_type = other DNA
ggctggtgggaaaagatttt

SEQ ID NO: 7106 - DNA, 20 bp, synthetic construct
  misc_feature 1..20: note = chemically synthesized
  source 1..20: mol_type = other DNA
gctggtgggaaaagatttta

SEQ ID NO: 7107 - DNA, 20 bp, synthetic construct
  misc_feature 1..20: note = chemically synthesized
  source 1..20: mol_type = other DNA
gtgggaaaagattttaaggt

SEQ ID NO: 7108 - DNA, 20 bp, synthetic construct
  misc_feature 1..20: note = chemically synthesized
  source 1..20: mol_type = other DNA
gggaaaagattttaaggtga

SEQ ID NO: 7109 - DNA, 20 bp, synthetic construct
  misc_feature 1..20: note = chemically synthesized
  source 1..20: mol_type = other DNA
gaaaagattttaaggtgaga

SEQ ID NO: 7110 - DNA, 20 bp, synthetic construct
  misc_feature 1..20: note = chemically synthesized
  source 1..20: mol_type = other DNA
ttttaaggtgagagagatct

SEQ ID NO: 7111 - DNA, 20 bp, synthetic construct
  misc_feature 1..20: note = chemically synthesized
  source 1..20: mol_type = other DNA
taaggtgagagagatctgag

SEQ ID NO: 7112 - DNA, 20 bp, synthetic construct
  misc_feature 1..20: note = chemically synthesized
  source 1..20: mol_type = other DNA
gagagagatctgagcagtgc

SEQ ID NO: 7113 - DNA, 20 bp, synthetic construct
  misc_feature 1..20: note = chemically synthesized
  source 1..20: mol_type = other DNA
agagagatctgagcagtgct

SEQ ID NO: 7114 - DNA, 20 bp, synthetic construct
  misc_feature 1..20: note = chemically synthesized
  source 1..20: mol_type = other DNA
gagatctgagcagtgctagg

SEQ ID NO: 7115 - DNA, 20 bp, synthetic construct
  misc_feature 1..20: note = chemically synthesized
  source 1..20: mol_type = other DNA
atctgagcagtgctaggcag

SEQ ID NO: 7116 - DNA, 20 bp, synthetic construct
  misc_feature 1..20: note = chemically synthesized
  source 1..20: mol_type = other DNA
tctgagcagtgctaggcaga

SEQ ID NO: 7117 - DNA, 20 bp, synthetic construct
  misc_feature 1..20: note = chemically synthesized
  source 1..20: mol_type = other DNA
ctgagcagtgctaggcagaa

SEQ ID NO: 7118 - DNA, 20 bp, synthetic construct
  misc_feature 1..20: note = chemically synthesized
  source 1..20: mol_type = other DNA
gcagtgctaggcagaagggc

SEQ ID NO: 7119 - DNA, 20 bp, synthetic construct
  misc_feature 1..20: note = chemically synthesized
  source 1..20: mol_type = other DNA
agtgctaggcagaagggcaa

SEQ ID NO: 7120 - DNA, 20 bp, synthetic construct
  misc_feature 1..20: note = chemically synthesized
  source 1..20: mol_type = other DNA
ctaggcagaagggcaagagc

SEQ ID NO: 7121 - DNA, 20 bp, synthetic construct
  misc_feature 1..20: note = chemically synthesized
  source 1..20: mol_type = other DNA
taggcagaagggcaagagcc

SEQ ID NO: 7122 - DNA, 20 bp, synthetic construct
  misc_feature 1..20: note = chemically synthesized
  source 1..20: mol_type = other DNA
agaagggcaagagccaggaa

SEQ ID NO: 7123 - DNA, 20 bp, synthetic construct
  misc_feature 1..20: note = chemically synthesized
  source 1..20: mol_type = other DNA
aagggcaagagccaggaatg

SEQ ID NO: 7124 - DNA, 20 bp, synthetic construct
  misc_feature 1..20: note = chemically synthesized
  source 1..20: mol_type = other DNA
agggcaagagccaggaatgg

SEQ ID NO: 7125 - DNA, 20 bp, synthetic construct
  misc_feature 1..20: note = chemically synthesized
  source 1..20: mol_type = other DNA
ggcaagagccaggaatggag

SEQ ID NO: 7126 - DNA, 20 bp, synthetic construct
  misc_feature 1..20: note = chemically synthesized
  source 1..20: mol_type = other DNA
agccaggaatggaggagtgt

SEQ ID NO: 7127 - DNA, 20 bp, synthetic construct
  misc_feature 1..20: note = chemically synthesized
  source 1..20: mol_type = other DNA
gccaggaatggaggagtgtc

SEQ ID NO: 7128 - DNA, 20 bp, synthetic construct
  misc_feature 1..20: note = chemically synthesized
  source 1..20: mol_type = other DNA
atggaggagtgtcaggtgtg

SEQ ID NO: 7129 - DNA, 20 bp, synthetic construct
  misc_feature 1..20: note = chemically synthesized
  source 1..20: mol_type = other DNA
tggaggagtgtcaggtgtgt

SEQ ID NO: 7130 - DNA, 20 bp, synthetic construct
  misc_feature 1..20: note = chemically synthesized
  source 1..20: mol_type = other DNA
agtgtcaggtgtgtgggtgc

SEQ ID NO: 7131 - DNA, 20 bp, synthetic construct
  misc_feature 1..20: note = chemically synthesized
  source 1..20: mol_type = other DNA
gtcaggtgtgtgggtgctgg

SEQ ID NO: 7132 - DNA, 20 bp, synthetic construct
  misc_feature 1..20: note = chemically synthesized
  source 1..20: mol_type = other DNA
aggtgtgtgggtgctggtgg

SEQ ID NO: 7133 - DNA, 20 bp, synthetic construct
  misc_feature 1..20: note = chemically synthesized
  source 1..20: mol_type = other DNA
gtgtgtgggtgctggtggtg

SEQ ID NO: 7134 - DNA, 20 bp, synthetic construct
  misc_feature 1..20: note = chemically synthesized
  source 1..20: mol_type = other DNA
gtgggtgctggtggtggagc

SEQ ID NO: 7135 - DNA, 20 bp, synthetic construct
  misc_feature 1..20: note = chemically synthesized
  source 1..20: mol_type = other DNA
tgggtgctggtggtggagcc

SEQ ID NO: 7136 - DNA, 20 bp, synthetic construct
  misc_feature 1..20: note = chemically synthesized
  source 1..20: mol_type = other DNA
ggtggtggagccgggttcca

SEQ ID NO: 7137 - DNA, 20 bp, synthetic construct
  misc_feature 1..20: note = chemically synthesized
  source 1..20: mol_type = other DNA
tggtggagccgggttccatg

SEQ ID NO: 7138 - DNA, 20 bp, synthetic construct
  misc_feature 1..20: note = chemically synthesized
  source 1..20: mol_type = other DNA
ggtggagccgggttccatgg

SEQ ID NO: 7139 - DNA, 20 bp, synthetic construct
  misc_feature 1..20: note = chemically synthesized
  source 1..20: mol_type = other DNA
ggagccgggttccatggagg

SEQ ID NO: 7140 - DNA, 20 bp, synthetic construct
  misc_feature 1..20: note = chemically synthesized
  source 1..20: mol_type = other DNA
gagccgggttccatggaggc

SEQ ID NO: 7141 - DNA, 20 bp, synthetic construct
  misc_feature 1..20: note = chemically synthesized
  source 1..20: mol_type = other DNA
gccgggttccatggaggcag

SEQ ID NO: 7142 - DNA, 20 bp, synthetic construct
  misc_feature 1..20: note = chemically synthesized
  source 1..20: mol_type = other DNA
ccgggttccatggaggcagg

SEQ ID NO: 7143 - DNA, 20 bp, synthetic construct
  misc_feature 1..20: note = chemically synthesized
  source 1..20: mol_type = other DNA
gggttccatggaggcaggag

SEQ ID NO: 7144 - DNA, 20 bp, synthetic construct
  misc_feature 1..20: note = chemically synthesized
  source 1..20: mol_type = other DNA
ttccatggaggcaggaggag

SEQ ID NO: 7145 - DNA, 20 bp, synthetic construct
  misc_feature 1..20: note = chemically synthesized
  source 1..20: mol_type = other DNA
tccatggaggcaggaggagc

SEQ ID NO: 7146 - DNA, 20 bp, synthetic construct
  misc_feature 1..20: note = chemically synthesized
  source 1..20: mol_type = other DNA
ccatggaggcaggaggagca

SEQ ID NO: 7147 - DNA, 20 bp, synthetic construct
  misc_feature 1..20: note = chemically synthesized
  source 1..20: mol_type = other DNA
catggaggcaggaggagcag

SEQ ID NO: 7148 - DNA, 20 bp, synthetic construct
  misc_feature 1..20: note = chemically synthesized
  source 1..20: mol_type = other DNA
aggcaggaggagcaggggct

SEQ ID NO: 7149 - DNA, 20 bp, synthetic construct
  misc_feature 1..20: note = chemically synthesized
  source 1..20: mol_type = other DNA
gcaggaggagcaggggcttg

SEQ ID NO: 7150 - DNA, 20 bp, synthetic construct
  misc_feature 1..20: note = chemically synthesized
  source 1..20: mol_type = other DNA
aggagcaggggcttggagct

SEQ ID NO: 7151 - DNA, 20 bp, synthetic construct
  misc_feature 1..20: note = chemically synthesized
  source 1..20: mol_type = other DNA
ggagcaggggcttggagctt

SEQ ID NO: 7152 - DNA, 20 bp, synthetic construct
  misc_feature 1..20: note = chemically synthesized
  source 1..20: mol_type = other DNA
gcaggggcttggagcttagg

SEQ ID NO: 7153 - DNA, 20 bp, synthetic construct
  misc_feature 1..20: note = chemically synthesized
  source 1..20: mol_type = other DNA
caggggcttggagcttagga

SEQ ID NO: 7154 - DNA, 20 bp, synthetic construct
  misc_feature 1..20: note = chemically synthesized
  source 1..20: mol_type = other DNA
aggggcttggagcttaggaa

SEQ ID NO: 7155 - DNA, 20 bp, synthetic construct
  misc_feature 1..20: note = chemically synthesized
  source 1..20: mol_type = other DNA
ggggcttggagcttaggaag

SEQ ID NO: 7156 - DNA, 20 bp, synthetic construct
  misc_feature 1..20: note = chemically synthesized
  source 1..20: mol_type = other DNA
ttggagcttaggaaggggat

SEQ ID NO: 7157 - DNA, 20 bp, synthetic construct
  misc_feature 1..20: note = chemically synthesized
  source 1..20: mol_type = other DNA
agcttaggaaggggattggt

SEQ ID NO: 7158 - DNA, 20 bp, synthetic construct
  misc_feature 1..20: note = chemically synthesized
  source 1..20: mol_type = other DNA
taggaaggggattggttagc

SEQ ID NO: 7159 - DNA, 20 bp, synthetic construct
  misc_feature 1..20: note = chemically synthesized
  source 1..20: mol_type = other DNA
aggaaggggattggttagct

SEQ ID NO: 7160 - DNA, 20 bp, synthetic construct
  misc_feature 1..20: note = chemically synthesized
  source 1..20: mol_type = other DNA
aggggattggttagctgggc

SEQ ID NO: 7161 - DNA, 20 bp, synthetic construct
  misc_feature 1..20: note = chemically synthesized
  source 1..20: mol_type = other DNA
ttggttagctgggctggaat

SEQ ID NO: 7162 - DNA, 20 bp, synthetic construct
  misc_feature 1..20: note = chemically synthesized
  source 1..20: mol_type = other DNA
tggttagctgggctggaatg

SEQ ID NO: 7163 - DNA, 20 bp, synthetic construct
  misc_feature 1..20: note = chemically synthesized
  source 1..20: mol_type = other DNA
ggttagctgggctggaatga

SEQ ID NO: 7164 - DNA, 20 bp, synthetic construct
  misc_feature 1..20: note = chemically synthesized
  source 1..20: mol_type = other DNA
atgagggactcctcattcct

SEQ ID NO: 7165 - DNA, 20 bp, synthetic construct
  misc_feature 1..20: note = chemically synthesized
  source 1..20: mol_type = other DNA
tgagggactcctcattcctg

SEQ ID NO: 7166 - DNA, 20 bp, synthetic construct
  misc_feature 1..20: note = chemically synthesized
  source 1..20: mol_type = other DNA
ggactcctcattcctgaggc

SEQ ID NO: 7167 - DNA, 20 bp, synthetic construct
  misc_feature 1..20: note = chemically synthesized
  source 1..20: mol_type = other DNA
attcctgaggctggccaacc

SEQ ID NO: 7168 - DNA, 20 bp, synthetic construct
  misc_feature 1..20: note = chemically synthesized
  source 1..20: mol_type = other DNA
ttcctgaggctggccaaccg

SEQ ID NO: 7169 - DNA, 20 bp, synthetic construct
  misc_feature 1..20: note = chemically synthesized
  source 1..20: mol_type = other DNA
tcctgaggctggccaaccga

SEQ ID NO: 7170 - DNA, 20 bp, synthetic construct
  misc_feature 1..20: note = chemically synthesized
  source 1..20: mol_type = other DNA
ctgaggctggccaaccgagg

SEQ ID NO: 7171 - DNA, 20 bp, synthetic construct
  misc_feature 1..20: note = chemically synthesized
  source 1..20: mol_type = other DNA
tgaggctggccaaccgaggg

SEQ ID NO: 7172 - DNA, 20 bp, synthetic construct
  misc_feature 1..20: note = chemically synthesized
  source 1..20: mol_type = other DNA
gaggctggccaaccgaggga

SEQ ID NO: 7173 - DNA, 20 bp, synthetic construct
  misc_feature 1..20: note = chemically synthesized
  source 1..20: mol_type = other DNA
ctggccaaccgagggagggc

SEQ ID NO: 7174 - DNA, 20 bp, synthetic construct
  misc_feature 1..20: note = chemically synthesized
  source 1..20: mol_type = other DNA
aaccgagggagggccggtgc

SEQ ID NO: 7175 - DNA, 20 bp, synthetic construct
  misc_feature 1..20: note = chemically synthesized
  source 1..20: mol_type = other DNA
accgagggagggccggtgct

SEQ ID NO: 7176 - DNA, 20 bp, synthetic construct
  misc_feature 1..20: note = chemically synthesized
  source 1..20: mol_type = other DNA
gagggagggccggtgctggg

SEQ ID NO: 7177 - DNA, 20 bp, synthetic construct
  misc_feature 1..20: note = chemically synthesized
  source 1..20: mol_type = other DNA
agggagggccggtgctgggc

SEQ ID NO: 7178 - DNA, 20 bp, synthetic construct
  misc_feature 1..20: note = chemically synthesized
  source 1..20: mol_type = other DNA
gggagggccggtgctgggca

SEQ ID NO: 7179 - DNA, 20 bp, synthetic construct
  misc_feature 1..20: note = chemically synthesized
  source 1..20: mol_type = other DNA
agggccggtgctgggcaggg

SEQ ID NO: 7180 - DNA, 20 bp, synthetic construct
  misc_feature 1..20: note = chemically synthesized
  source 1..20: mol_type = other DNA
gggccggtgctgggcagggc

SEQ ID NO: 7181 - DNA, 20 bp, synthetic construct
  misc_feature 1..20: note = chemically synthesized
  source 1..20: mol_type = other DNA
ggccggtgctgggcagggca

SEQ ID NO: 7182 - DNA, 20 bp, synthetic construct
  misc_feature 1..20: note = chemically synthesized
  source 1..20: mol_type = other DNA
cggtgctgggcagggcaggg

SEQ ID NO: 7183 - DNA, 20 bp, synthetic construct
  misc_feature 1..20: note = chemically synthesized
  source 1..20: mol_type = other DNA
ggtgctgggcagggcagggc

SEQ ID NO: 7184 - DNA, 20 bp, synthetic construct
  misc_feature 1..20: note = chemically synthesized
  source 1..20: mol_type = other DNA
gtgctgggcagggcagggca

SEQ ID NO: 7185 - DNA, 20 bp, synthetic construct
  misc_feature 1..20: note = chemically synthesized
  source 1..20: mol_type = other DNA
tgctgggcagggcagggcag

SEQ ID NO: 7186 - DNA, 20 bp, synthetic construct
  misc_feature 1..20: note = chemically synthesized
  source 1..20: mol_type = other DNA
gggcagggcagggcagggga

SEQ ID NO: 7187 - DNA, 20 bp, synthetic construct
  misc_feature 1..20: note = chemically synthesized
  source 1..20: mol_type = other DNA
ggcagggcagggcaggggac

SEQ ID NO: 7188 - DNA, 20 bp, synthetic construct
  misc_feature 1..20: note = chemically synthesized
  source 1..20: mol_type = other DNA
cagggcagggcaggggacag

SEQ ID NO: 7189 - DNA, 20 bp, synthetic construct
  misc_feature 1..20: note = chemically synthesized
  source 1..20: mol_type = other DNA
agggcagggcaggggacagg

SEQ ID NO: 7190 - DNA, 20 bp, synthetic construct
  misc_feature 1..20: note = chemically synthesized
  source 1..20: mol_type = other DNA
gggcagggcaggggacagga

SEQ ID NO: 7191 - DNA, 20 bp, synthetic construct
  misc_feature 1..20: note = chemically synthesized
  source 1..20: mol_type = other DNA
agggcaggggacaggaggga

SEQ ID NO: 7192 - DNA, 20 bp, synthetic construct
  misc_feature 1..20: note = chemically synthesized
  source 1..20: mol_type = other DNA
gggcaggggacaggagggat

SEQ ID NO: 7193 - DNA, 20 bp, synthetic construct
  misc_feature 1..20: note = chemically synthesized
  source 1..20: mol_type = other DNA
gcaggggacaggagggatag

SEQ ID NO: 7194 - DNA, 20 bp, synthetic construct
  misc_feature 1..20: note = chemically synthesized
  source 1..20: mol_type = other DNA
caggggacaggagggatagg

SEQ ID NO: 7195 - DNA, 20 bp, synthetic construct
  misc_feature 1..20: note = chemically synthesized
  source 1..20: mol_type = other DNA
agggataggaggtccctccc

SEQ ID NO: 7196 - DNA, 20 bp, synthetic construct
  misc_feature 1..20: note = chemically synthesized
  source 1..20: mol_type = other DNA
gggataggaggtccctcccg

SEQ ID NO: 7197 - DNA, 20 bp, synthetic construct
  misc_feature 1..20: note = chemically synthesized
  source 1..20: mol_type = other DNA
ggtccctcccgaggaccact

SEQ ID NO: 7198 - DNA, 20 bp, synthetic construct
  misc_feature 1..20: note = chemically synthesized
  source 1..20: mol_type = other DNA
gtccctcccgaggaccactc

SEQ ID NO: 7199 - DNA, 20 bp, synthetic construct
  misc_feature 1..20: note = chemically synthesized
  source 1..20: mol_type = other DNA
cgaggaccactcaggaacac

SEQ ID NO: 7200 - DNA, 20 bp, synthetic construct
  misc_feature 1..20: note = chemically synthesized
  source 1..20: mol_type = other DNA
ggaccactcaggaacaccag

SEQ ID NO: 7201 - DNA, 20 bp, synthetic construct
  misc_feature 1..20: note = chemically synthesized
  source 1..20: mol_type = other DNA
agtagcatctcctctctctg

SEQ ID NO: 7202 - DNA, 20 bp, synthetic construct
  misc_feature 1..20: note = chemically synthesized
  source 1..20: mol_type = other DNA
gtagcatctcctctctctgt

SEQ ID NO: 7203 - DNA, 20 bp, synthetic construct
  misc_feature 1..20: note = chemically synthesized
  source 1..20: mol_type = other DNA
tagcatctcctctctctgta

SEQ ID NO: 7204 - DNA, 20 bp, synthetic construct
  misc_feature 1..20: note = chemically synthesized
  source 1..20: mol_type = other DNA
agcatctcctctctctgtag

SEQ ID NO: 7205 - DNA, 20 bp, synthetic construct
  misc_feature 1..20: note = chemically synthesized
  source 1..20: mol_type = other DNA
gcatctcctctctctgtagg

SEQ ID NO: 7206 - DNA, 20 bp, synthetic construct
  misc_feature 1..20: note = chemically synthesized
  source 1..20: mol_type = other DNA
ctcctctctctgtagggggc

SEQ ID NO: 7207 - DNA, 20 bp, synthetic construct
  misc_feature 1..20: note = chemically synthesized
  source 1..20: mol_type = other DNA
tctctctgtagggggctggc

SEQ ID NO: 7208 - DNA, 20 bp, synthetic construct
  misc_feature 1..20: note = chemically synthesized
  source 1..20: mol_type = other DNA
gggctggctggacttcccac

SEQ ID NO: 7209 - DNA, 20 bp, synthetic construct
  misc_feature 1..20: note = chemically synthesized
  source 1..20: mol_type = other DNA
ggctggctggacttcccacc

SEQ ID NO: 7210 - DNA, 20 bp, synthetic construct
  misc_feature 1..20: note = chemically synthesized
  source 1..20: mol_type = other DNA
tggctggacttcccaccagg

SEQ ID NO: 7211 - DNA, 20 bp, synthetic construct
  misc_feature 1..20: note = chemically synthesized
  source 1..20: mol_type = other DNA
cccaccaggcggtgtcccca

SEQ ID NO: 7212 - DNA, 20 bp, synthetic construct
  misc_feature 1..20: note = chemically synthesized
  source 1..20: mol_type = other DNA
ccaccaggcggtgtccccac

SEQ ID NO: 7213 - DNA, 20 bp, synthetic construct
  misc_feature 1..20: note = chemically synthesized
  source 1..20: mol_type = other DNA
ccaggcggtgtccccacagg

SEQ ID NO: 7214 - DNA, 20 bp, synthetic construct
  misc_feature 1..20: note = chemically synthesized
  source 1..20: mol_type = other DNA
aggcggtgtccccacaggca

SEQ ID NO: 7215 - DNA, 20 bp, synthetic construct
  misc_feature 1..20: note = chemically synthesized
  source 1..20: mol_type = other DNA
ggcggtgtccccacaggcag

SEQ ID NO: 7216 - DNA, 20 bp, synthetic construct
  misc_feature 1..20: note = chemically synthesized
  source 1..20: mol_type = other DNA
ctcactctcctctgcaactc

SEQ ID NO: 7217 - DNA, 20 bp, synthetic construct
  misc_feature 1..20: note = chemically synthesized
  source 1..20: mol_type = other DNA
ctgcaactccagtgcccaca

SEQ ID NO: 7218 - DNA, 20 bp, synthetic construct
  misc_feature 1..20: note = chemically synthesized
  source 1..20: mol_type = other DNA
tccagtgcccacacggcacc

SEQ ID NO: 7219 - DNA, 20 bp, synthetic construct
  misc_feature 1..20: note = chemically synthesized
  source 1..20: mol_type = other DNA
cccacacggcacccggtaca

SEQ ID NO: 7220 - DNA, 20 bp, synthetic construct
  misc_feature 1..20: note = chemically synthesized
  source 1..20: mol_type = other DNA
cccggtacatagtgaacact

SEQ ID NO: 7221 - DNA, 20 bp, synthetic construct
  misc_feature 1..20: note = chemically synthesized
  source 1..20: mol_type = other DNA
cggtacatagtgaacactca

SEQ ID NO: 7222 - DNA, 20 bp, synthetic construct
  misc_feature 1..20: note = chemically synthesized
  source 1..20: mol_type = other DNA
gtacatagtgaacactcaga

SEQ ID NO: 7223 - DNA, 20 bp, synthetic construct
  misc_feature 1..20: note = chemically synthesized
  source 1..20: mol_type = other DNA
gtgaacactcagagagaata

SEQ ID NO: 7224 - DNA, 20 bp, synthetic construct
  misc_feature 1..20: note = chemically synthesized
  source 1..20: mol_type = other DNA
tgaacactcagagagaatac

SEQ ID NO: 7225 - DNA, 20 bp, synthetic construct
  misc_feature 1..20: note = chemically synthesized
  source 1..20: mol_type = other DNA
gggatgctgctgaatcttct

SEQ ID NO: 7226 - DNA, 20 bp, synthetic construct
  misc_feature 1..20: note = chemically synthesized
  source 1..20: mol_type = other DNA
ggatgctgctgaatcttctg

SEQ ID NO: 7227 - DNA, 20 bp, synthetic construct
  misc_feature 1..20: note = chemically synthesized
  source 1..20: mol_type = other DNA
gatgctgctgaatcttctga

SEQ ID NO: 7228 - DNA, 20 bp, synthetic construct
  misc_feature 1..20: note = chemically synthesized
  source 1..20: mol_type = other DNA
gctgaatcttctgagggtga

SEQ ID NO: 7229 - DNA, 20 bp, synthetic construct
  misc_feature 1..20: note = chemically synthesized
  source 1..20: mol_type = other DNA
cttctgagggtgacagaatt

SEQ ID NO: 7230 - DNA, 20 bp, synthetic construct
  misc_feature 1..20: note = chemically synthesized
  source 1..20: mol_type = other DNA
tctgagggtgacagaattta

SEQ ID NO: 7231 - DNA, 20 bp, synthetic construct
  misc_feature 1..20: note = chemically synthesized
  source 1..20: mol_type = other DNA
ggtgacagaatttagagttt

SEQ ID NO: 7232 - DNA, 20 bp, synthetic construct
  misc_feature 1..20: note = chemically synthesized
  source 1..20: mol_type = other DNA
gacagaatttagagtttgag

SEQ ID NO: 7233 - DNA, 20 bp, synthetic construct
  misc_feature 1..20: note = chemically synthesized
  source 1..20: mol_type = other DNA
acagaatttagagtttgagc

SEQ ID NO: 7234 - DNA, 20 bp, synthetic construct
  misc_feature 1..20: note = chemically synthesized
  source 1..20: mol_type = other DNA
agaatttagagtttgagcag

SEQ ID NO: 7235 - DNA, 20 bp, synthetic construct
  misc_feature 1..20: note = chemically synthesized
  source 1..20: mol_type = other DNA
gaatttagagtttgagcagg

SEQ ID NO: 7236 - DNA, 20 bp, synthetic construct
  misc_feature 1..20: note = chemically synthesized
  source 1..20: mol_type = other DNA
tagagtttgagcaggaggct

SEQ ID NO: 7237 - DNA, 20 bp, synthetic construct
  misc_feature 1..20: note = chemically synthesized
  source 1..20: mol_type = other DNA
gagtttgagcaggaggcttg

SEQ ID NO: 7238 - DNA, 20 bp, synthetic construct
  misc_feature 1..20: note = chemically synthesized
  source 1..20: mol_type = other DNA
gtttgagcaggaggcttgga

SEQ ID NO: 7239 - DNA, 20 bp, synthetic construct
  misc_feature 1..20: note = chemically synthesized
  source 1..20: mol_type = other DNA
ttgagcaggaggcttggaga

SEQ ID NO: 7240 - DNA, 20 bp, synthetic construct
  misc_feature 1..20: note = chemically synthesized
  source 1..20: mol_type = other DNA
tgagcaggaggcttggagag

SEQ ID NO: 7241 - DNA, 20 bp, synthetic construct
  misc_feature 1..20: note = chemically synthesized
  source 1..20: mol_type = other DNA
caggaggcttggagagaggc

SEQ ID NO: 7242 - DNA, 20 bp, synthetic construct
  misc_feature 1..20: note = chemically synthesized
  source 1..20: mol_type = other DNA
aggaggcttggagagaggcc

SEQ ID NO: 7243 - DNA, 20 bp, synthetic construct
  misc_feature 1..20: note = chemically synthesized
  source 1..20: mol_type = other DNA
gccaggatttctgaaattaa

SEQ ID NO: 7244 - DNA, 20 bp, synthetic construct
  misc_feature 1..20: note = chemically synthesized
  source 1..20: mol_type = other DNA
ccaggatttctgaaattaat

SEQ ID NO: 7245 - DNA, 20 bp, synthetic construct
  misc_feature 1..20: note = chemically synthesized
  source 1..20: mol_type = other DNA
aggatttctgaaattaatgg

SEQ ID NO: 7246 - DNA, 20 bp, synthetic construct
  misc_feature 1..20: note = chemically synthesized
  source 1..20: mol_type = other DNA
gatttctgaaattaatggga

SEQ ID NO: 7247 - DNA, 20 bp, synthetic construct
  misc_feature 1..20: note = chemically synthesized
  source 1..20: mol_type = other DNA
tctgaaattaatgggagagt

SEQ ID NO: 7248 - DNA, 20 bp, synthetic construct
  misc_feature 1..20: note = chemically synthesized
  source 1..20: mol_type = other DNA
ggagagtgagctcacgcgaa

SEQ ID NO: 7249 - DNA, 20 bp, synthetic construct
  misc_feature 1..20: note = chemically synthesized
  source 1..20: mol_type = other DNA
gagagtgagctcacgcgaat

SEQ ID NO: 7250 - DNA, 20 bp, synthetic construct
  misc_feature 1..20: note = chemically synthesized
  source 1..20: mol_type = other DNA
tgagctcacgcgaatgggct

SEQ ID NO: 7251 - DNA, 20 bp, synthetic construct
  misc_feature 1..20: note = chemically synthesized
  source 1..20: mol_type = other DNA
gagctcacgcgaatgggctg

SEQ ID NO: 7252 - DNA, 20 bp, synthetic construct
  misc_feature 1..20: note = chemically synthesized
  source 1..20: mol_type = other DNA
agctcacgcgaatgggctga

SEQ ID NO: 7253 - DNA, 20 bp, synthetic construct
  misc_feature 1..20: note = chemically synthesized
  source 1..20: mol_type = other DNA
gcgaatgggctgagggacac

SEQ ID NO: 7254 - DNA, 20 bp, synthetic construct
  misc_feature 1..20: note = chemically synthesized
  source 1..20: mol_type = other DNA
atgggctgagggacaccagt

SEQ ID NO: 7255 - DNA, 20 bp, synthetic construct
  misc_feature 1..20: note = chemically synthesized
  source 1..20: mol_type = other DNA
tgggctgagggacaccagtg

SEQ ID NO: 7256 - DNA, 20 bp, synthetic construct
  misc_feature 1..20: note = chemically synthesized
  source 1..20: mol_type = other DNA
gggctgagggacaccagtga

SEQ ID NO: 7257 - DNA, 20 bp, synthetic construct
  misc_feature 1..20: note = chemically synthesized
  source 1..20: mol_type = other DNA
caccagtgagggaccgtctg

SEQ ID NO: 7258 - DNA, 20 bp, synthetic construct
  misc_feature 1..20: note = chemically synthesized
  source 1..20: mol_type = other DNA
accagtgagggaccgtctga

SEQ ID NO: 7259 - DNA, 20 bp, synthetic construct
  misc_feature 1..20: note = chemically synthesized
  source 1..20: mol_type = other DNA
ccagtgagggaccgtctgaa

SEQ ID NO: 7260 - DNA, 20 bp, synthetic construct
  misc_feature 1..20: note = chemically synthesized
  source 1..20: mol_type = other DNA
agggaccgtctgaagggatg

SEQ ID NO: 7261 - DNA, 20 bp, synthetic construct
  misc_feature 1..20: note = chemically synthesized
  source 1..20: mol_type = other DNA
ccgtctgaagggatgtagca

SEQ ID NO: 7262 - DNA, 20 bp, synthetic construct
  misc_feature 1..20: note = chemically synthesized
  source 1..20: mol_type = other DNA
aaagtcaccgcatttccctc

SEQ ID NO: 7263 - DNA, 20 bp, synthetic construct
  misc_feature 1..20: note = chemically synthesized
  source 1..20: mol_type = other DNA
gtcaccgcatttccctccag

SEQ ID NO: 7264 - DNA, 20 bp, synthetic construct
  misc_feature 1..20: note = chemically synthesized
  source 1..20: mol_type = other DNA
cgcatttccctccagcagcc

SEQ ID NO: 7265 - DNA, 20 bp, synthetic construct
  misc_feature 1..20: note = chemically synthesized
  source 1..20: mol_type = other DNA
gcatttccctccagcagccc

SEQ ID NO: 7266 - DNA, 20 bp, synthetic construct
  misc_feature 1..20: note = chemically synthesized
  source 1..20: mol_type = other DNA
tttccctccagcagcccggg

SEQ ID NO: 7267 - DNA, 20 bp, synthetic construct
  misc_feature 1..20: note = chemically synthesized
  source 1..20: mol_type = other DNA
ccctccagcagcccgggtgg

SEQ ID NO: 7268 - DNA, 20 bp, synthetic construct
  misc_feature 1..20: note = chemically synthesized
  source 1..20: mol_type = other DNA
cctccagcagcccgggtggt

SEQ ID NO: 7269 - DNA, 20 bp, synthetic construct
  misc_feature 1..20: note = chemically synthesized
  source 1..20: mol_type = other DNA
ctccagcagcccgggtggtg

SEQ ID NO: 7270 - DNA, 20 bp, synthetic construct
  misc_feature 1..20: note = chemically synthesized
  source 1..20: mol_type = other DNA
tccagcagcccgggtggtgg

SEQ ID NO: 7271 - DNA, 20 bp, synthetic construct
  misc_feature 1..20: note = chemically synthesized
  source 1..20: mol_type = other DNA
gcagcccgggtggtgggggc

SEQ ID NO: 7272 - DNA, 20 bp, synthetic construct
  misc_feature 1..20: note = chemically synthesized
  source 1..20: mol_type = other DNA
cagcccgggtggtgggggct

SEQ ID NO: 7273 - DNA, 20 bp, synthetic construct
  misc_feature 1..20: note = chemically synthesized
  source 1..20: mol_type = other DNA
agcccgggtggtgggggctg

SEQ ID NO: 7274 - DNA, 20 bp, synthetic construct
  misc_feature 1..20: note = chemically synthesized
  source 1..20: mol_type = other DNA
gcccgggtggtgggggctgg

SEQ ID NO: 7275 - DNA, 20 bp, synthetic construct
  misc_feature 1..20: note = chemically synthesized
  source 1..20: mol_type = other DNA
gggctgggggaacgtcatca

SEQ ID NO: 7276 - DNA, 20 bp, synthetic construct
  misc_feature 1..20: note = chemically synthesized
  source 1..20: mol_type = other DNA
ggctgggggaacgtcatcat

SEQ ID NO: 7277 - DNA, 20 bp, synthetic construct
  misc_feature 1..20: note = chemically synthesized
  source 1..20: mol_type = other DNA
ctgggggaacgtcatcatgg

SEQ ID NO: 7278 - DNA, 20 bp, synthetic construct
  misc_feature 1..20: note = chemically synthesized
  source 1..20: mol_type = other DNA
tcatgggagctgacactgat

SEQ ID NO: 7279 - DNA, 20 bp, synthetic construct
  misc_feature 1..20: note = chemically synthesized
  source 1..20: mol_type = other DNA
gacactgatcagctgctcac

SEQ ID NO: 7280 - DNA, 20 bp, synthetic construct
  misc_feature 1..20: note = chemically synthesized
  source 1..20: mol_type = other DNA
acactgatcagctgctcacc

SEQ ID NO: 7281 - DNA, 20 bp, synthetic construct
  misc_feature 1..20: note = chemically synthesized
  source 1..20: mol_type = other DNA
cactgatcagctgctcaccg

SEQ ID NO: 7282 - DNA, 20 bp, synthetic construct
  misc_feature 1..20: note = chemically synthesized
  source 1..20: mol_type = other DNA
ggcccatcttccacttgtct

SEQ ID NO: 7283 - DNA, 20 bp, synthetic construct
  misc_feature 1..20: note = chemically synthesized
  source 1..20: mol_type = other DNA
gctaccccctttttctttta

SEQ ID NO: 7284 - DNA, 20 bp, synthetic construct
  misc_feature 1..20: note = chemically synthesized
  source 1..20: mol_type = other DNA
atttcaattatgcatgtatt

SEQ ID NO: 7285 - DNA, 20 bp, synthetic construct
  misc_feature 1..20: note = chemically synthesized
  source 1..20: mol_type = other DNA
tttcaattatgcatgtatta

SEQ ID NO: 7286 - DNA, 20 bp, synthetic construct
  misc_feature 1..20: note = chemically synthesized
  source 1..20: mol_type = other DNA
ttcaattatgcatgtattaa

SEQ ID NO: 7287 - DNA, 20 bp, synthetic construct
  misc_feature 1..20: note = chemically synthesized
  source 1..20: mol_type = other DNA
tgcatgtattaagggtccca

SEQ ID NO: 7288 - DNA, 20 bp, synthetic construct
  misc_feature 1..20: note = chemically synthesized
  source 1..20: mol_type = other DNA
tttttaattcttttttctcc

SEQ ID NO: 7289 - DNA, 20 bp, synthetic construct
  misc_feature 1..20: note = chemically synthesized
  source 1..20: mol_type = other DNA
tctcccagtgtttcatttta

SEQ ID NO: 7290 - DNA, 20 bp, synthetic construct
  misc_feature 1..20: note = chemically synthesized
  source 1..20: mol_type = other DNA
tcccagtgtttcattttata

SEQ ID NO: 7291 - DNA, 20 bp, synthetic construct
  misc_feature 1..20: note = chemically synthesized
  source 1..20: mol_type = other DNA
tagagttattgctgttcatt

SEQ ID NO: 7292 - DNA, 20 bp, synthetic construct
  misc_feature 1..20: note = chemically synthesized
  source 1..20: mol_type = other DNA
tctcatctcactctgttgcc

SEQ ID NO: 7293 - DNA, 20 bp, synthetic construct
  misc_feature 1..20: note = chemically synthesized
  source 1..20: mol_type = other DNA
ctcatctcactctgttgccc

SEQ ID NO: 7294 - DNA, 20 bp, synthetic construct
  misc_feature 1..20: note = chemically synthesized
  source 1..20: mol_type = other DNA
tctcactctgttgcccaggc

SEQ ID NO: 7295 - DNA, 20 bp, synthetic construct
  misc_feature 1..20: note = chemically synthesized
  source 1..20: mol_type = other DNA
ctgttgcccaggctggaatg

SEQ ID NO: 7296 - DNA, 20 bp, synthetic construct
  misc_feature 1..20: note = chemically synthesized
  source 1..20: mol_type = other DNA
ttgcccaggctggaatgcag

SEQ ID NO: 7297 - DNA, 20 bp, synthetic construct
  misc_feature 1..20: note = chemically synthesized
  source 1..20: mol_type = other DNA
tagcttgtcacaactcactg

SEQ ID NO: 7298 - DNA, 20 bp, synthetic construct
  misc_feature 1..20: note = chemically synthesized
  source 1..20: mol_type = other DNA
tcactgtggcctccacctcc

SEQ ID NO: 7299 - DNA, 20 bp, synthetic construct
  misc_feature 1..20: note = chemically synthesized
  source 1..20: mol_type = other DNA
cactgtggcctccacctcct

SEQ ID NO: 7300 - DNA, 20 bp, synthetic construct
  misc_feature 1..20: note = chemically synthesized
  source 1..20: mol_type = other DNA
tggcctccacctcctgggct

SEQ ID NO: 7301 - DNA, 20 bp, synthetic construct
  misc_feature 1..20: note = chemically synthesized
  source 1..20: mol_type = other DNA
ggcctccacctcctgggctc

SEQ ID NO: 7302 - DNA, 20 bp, synthetic construct
  misc_feature 1..20: note = chemically synthesized
  source 1..20: mol_type = other DNA
ctcaggcgatccttccactt

SEQ ID NO: 7303 - DNA, 20 bp, synthetic construct
  misc_feature 1..20: note = chemically synthesized
  source 1..20: mol_type = other DNA
atccttccacttcagcctcc

SEQ ID NO: 7304 - DNA, 20 bp, synthetic construct
  misc_feature 1..20: note = chemically synthesized
  source 1..20: mol_type = other DNA
tccttccacttcagcctccc

SEQ ID NO: 7305 - DNA, 20 bp, synthetic construct
  misc_feature 1..20: note = chemically synthesized
  source 1..20: mol_type = other DNA
ttccacttcagcctcccagg

SEQ ID NO: 7306 - DNA, 20 bp, synthetic construct
  misc_feature 1..20: note = chemically synthesized
  source 1..20: mol_type = other DNA
acttcagcctcccaggtagc

SEQ ID NO: 7307 - DNA, 20 bp, synthetic construct
  misc_feature 1..20: note = chemically synthesized
  source 1..20: mol_type = other DNA
cttcagcctcccaggtagct

SEQ ID NO: 7308 - DNA, 20 bp, synthetic construct
  misc_feature 1..20: note = chemically synthesized
  source 1..20: mol_type = other DNA
ctcccaggtagctgggacta

SEQ ID NO: 7309 - DNA, 20 bp, synthetic construct
  misc_feature 1..20: note = chemically synthesized
  source 1..20: mol_type = other DNA
tcccaggtagctgggactat

SEQ ID NO: 7310 - DNA, 20 bp, synthetic construct
  misc_feature 1..20: note = chemically synthesized
  source 1..20: mol_type = other DNA
tagctgggactataggcatg

SEQ ID NO: 7311 - DNA, 20 bp, synthetic construct
  misc_feature 1..20: note = chemically synthesized
  source 1..20: mol_type = other DNA
taggcatgtggcaccacacc

SEQ ID NO: 7312 - DNA, 20 bp, synthetic construct
  misc_feature 1..20: note = chemically synthesized
  source 1..20: mol_type = other DNA
taattaaaaatttttttttg

SEQ ID NO: 7313 - DNA, 20 bp, synthetic construct
  misc_feature 1..20: note = chemically synthesized
  source 1..20: mol_type = other DNA
attaaaaatttttttttgta

SEQ ID NO: 7314 - DNA, 20 bp, synthetic construct
  misc_feature 1..20: note = chemically synthesized
  source 1..20: mol_type = other DNA
aaaatttttttttgtagaga

SEQ ID NO: 7315 - DNA, 20 bp, synthetic construct
  misc_feature 1..20: note = chemically synthesized
  source 1..20: mol_type = other DNA
gtagagacggttttgccatg

SEQ ID NO: 7316 - DNA, 20 bp, synthetic construct
  misc_feature 1..20: note = chemically synthesized
  source 1..20: mol_type = other DNA
agagacggttttgccatgta

SEQ ID NO: 7317 - DNA, 20 bp, synthetic construct
  misc_feature 1..20: note = chemically synthesized
  source 1..20: mol_type = other DNA
gagacggttttgccatgtag

SEQ ID NO: 7318 - DNA, 20 bp, synthetic construct
  misc_feature 1..20: note = chemically synthesized
  source 1..20: mol_type = other DNA
agacggttttgccatgtaga

SEQ ID NO: 7319 - DNA, 20 bp, synthetic construct
  misc_feature 1..20: note = chemically synthesized
  source 1..20: mol_type = other DNA
gacggttttgccatgtagag

SEQ ID NO: 7320 - DNA, 20 bp, synthetic construct
  misc_feature 1..20: note = chemically synthesized
  source 1..20: mol_type = other DNA
aggggttttgccatgctgcc

SEQ ID NO: 7321 - DNA, 20 bp, synthetic construct
  misc_feature 1..20: note = chemically synthesized
  source 1..20: mol_type = other DNA
ttttgccatgctgcccagac

SEQ ID NO: 7322 - DNA, 20 bp, synthetic construct
  misc_feature 1..20: note = chemically synthesized
  source 1..20: mol_type = other DNA
atgctgcccagactagtctt

SEQ ID NO: 7323 - DNA, 20 bp, synthetic construct
  misc_feature 1..20: note = chemically synthesized
  source 1..20: mol_type = other DNA
ccagactagtcttgagctcc

SEQ ID NO: 7324 - DNA, 20 bp, synthetic construct
  misc_feature 1..20: note = chemically synthesized
  source 1..20: mol_type = other DNA
cagactagtcttgagctcct

SEQ ID NO: 7325 - DNA, 20 bp, synthetic construct
  misc_feature 1..20: note = chemically synthesized
  source 1..20: mol_type = other DNA
agtcttgagctcctgggctc

SEQ ID NO: 7326 - DNA, 20 bp, synthetic construct
  misc_feature 1..20: note = chemically synthesized
  source 1..20: mol_type = other DNA
ccccccgtgtcgacctccca

SEQ ID NO: 7327 - DNA, 20 bp, synthetic construct
  misc_feature 1..20: note = chemically synthesized
  source 1..20: mol_type = other DNA
gtgtcgacctcccaaagtgc

SEQ ID NO: 7328 - DNA, 20 bp, synthetic construct
  misc_feature 1..20: note = chemically synthesized
  source 1..20: mol_type = other DNA
tgtcgacctcccaaagtgct

SEQ ID NO: 7329 - DNA, 20 bp, synthetic construct
  misc_feature 1..20: note = chemically synthesized
  source 1..20: mol_type = other DNA
ctcccaaagtgctgggatta

SEQ ID NO: 7330 - DNA, 20 bp, synthetic construct
  misc_feature 1..20: note = chemically synthesized
  source 1..20: mol_type = other DNA
gggattacagatgtgatcca

SEQ ID NO: 7331 - DNA, 20 bp, synthetic construct
  misc_feature 1..20: note = chemically synthesized
  source 1..20: mol_type = other DNA
cagatgtgatccacagtgcc

SEQ ID NO: 7332 - DNA, 20 bp, synthetic construct
  misc_feature 1..20: note = chemically synthesized
  source 1..20: mol_type = other DNA
catcttccattatttccatc

SEQ ID NO: 7333 - DNA, 20 bp, synthetic construct
  misc_feature 1..20: note = chemically synthesized
  source 1..20: mol_type = other DNA
tcttttcttttttttttttt

SEQ ID NO: 7334 - DNA, 20 bp, synthetic construct
  misc_feature 1..20: note = chemically synthesized
  source 1..20: mol_type = other DNA
ttttcttttttttttttttg

SEQ ID NO: 7335 - DNA, 20 bp, synthetic construct
  misc_feature 1..20: note = chemically synthesized
  source 1..20: mol_type = other DNA
tttcttttttttttttttgg

SEQ ID NO: 7336 - DNA, 20 bp, synthetic construct
  misc_feature 1..20: note = chemically synthesized
  source 1..20: mol_type = other DNA
cttttttttttttttggagg

SEQ ID NO: 7337 - DNA, 20 bp, synthetic construct
  misc_feature 1..20: note = chemically synthesized
  source 1..20: mol_type = other DNA
tttttttttttttggaggcg

SEQ ID NO: 7338 - DNA, 20 bp, synthetic construct
  misc_feature 1..20: note = chemically synthesized
  source 1..20: mol_type = other DNA
cggagtctcgctctgttgcc

SEQ ID NO: 7339 - DNA, 20 bp, synthetic construct
  misc_feature 1..20: note = chemically synthesized
  source 1..20: mol_type = other DNA
ggagtctcgctctgttgccc

SEQ ID NO: 7340 - DNA, 20 bp, synthetic construct
  misc_feature 1..20: note = chemically synthesized
  source 1..20: mol_type = other DNA
tctcgctctgttgcccaggc

SEQ ID NO: 7341 - DNA, 20 bp, synthetic construct
  misc_feature 1..20: note = chemically synthesized
  source 1..20: mol_type = other DNA
tcgctctgttgcccaggccg

SEQ ID NO: 7342 - DNA, 20 bp, synthetic construct
  misc_feature 1..20: note = chemically synthesized
  source 1..20: mol_type = other DNA
ctgttgcccaggccggagtg

SEQ ID NO: 7343 - DNA, 20 bp, synthetic construct
  misc_feature 1..20: note = chemically synthesized
  source 1..20: mol_type = other DNA
ttgcccaggccggagtgcag

SEQ ID NO: 7344 - DNA, 20 bp, synthetic construct
  misc_feature 1..20: note = chemically synthesized
  source 1..20: mol_type = other DNA
ggagtgcagtggcgcgatct

SEQ ID NO: 7345 - DNA, 20 bp, synthetic construct
  misc_feature 1..20: note = chemically synthesized
  source 1..20: mol_type = other DNA
gcgcgatcttggctcactgc

SEQ ID NO: 7346 - DNA, 20 bp, synthetic construct
  misc_feature 1..20: note = chemically synthesized
  source 1..20: mol_type = other DNA
tcactgcaagctctgcctcc

SEQ ID NO: 7347 - DNA, 20 bp, synthetic construct
  misc_feature 1..20: note = chemically synthesized
  source 1..20: mol_type = other DNA
cactgcaagctctgcctccc

SEQ ID NO: 7348 - DNA, 20 bp, synthetic construct
  misc_feature 1..20: note = chemically synthesized
  source 1..20: mol_type = other DNA
ttcatgccattctcctgcct

SEQ ID NO: 7349 - DNA, 20 bp, synthetic construct
  misc_feature 1..20: note = chemically synthesized
  source 1..20: mol_type = other DNA
ttctcctgcctcagcctccc

SEQ ID NO: 7350 - DNA, 20 bp, synthetic construct
  misc_feature 1..20: note = chemically synthesized
  source 1..20: mol_type = other DNA
tcctgcctcagcctcccgag

SEQ ID NO: 7351 - DNA, 20 bp, synthetic construct
  misc_feature 1..20: note = chemically synthesized
  source 1..20: mol_type = other DNA
gcctcagcctcccgagtagc

SEQ ID NO: 7352 - DNA, 20 bp, synthetic construct
  misc_feature 1..20: note = chemically synthesized
  source 1..20: mol_type = other DNA
cctcagcctcccgagtagct

SEQ ID NO: 7353 - DNA, 20 bp, synthetic construct
  misc_feature 1..20: note = chemically synthesized
  source 1..20: mol_type = other DNA
ctcccgagtagctgggacta

SEQ ID NO: 7354 - DNA, 20 bp, synthetic construct
  misc_feature 1..20: note = chemically synthesized
  source 1..20: mol_type = other DNA
tcccgagtagctgggactac

SEQ ID NO: 7355 - DNA, 20 bp, synthetic construct
  misc_feature 1..20: note = chemically synthesized
  source 1..20: mol_type = other DNA
caggcgcctgccaccacgtc

SEQ ID NO: 7356 - DNA, 20 bp, synthetic construct
  misc_feature 1..20: note = chemically synthesized
  source 1..20: mol_type = other DNA
tggctaattttttgtatttt

SEQ ID NO: 7357 - DNA, 20 bp, synthetic construct
  misc_feature 1..20: note = chemically synthesized
  source 1..20: mol_type = other DNA
ctaattttttgtatttttag

SEQ ID NO: 7358 - DNA, 20 bp, synthetic construct
  misc_feature 1..20: note = chemically synthesized
  source 1..20: mol_type = other DNA
aattttttgtatttttagta

SEQ ID NO: 7359 - DNA, 20 bp, synthetic construct
  misc_feature 1..20: note = chemically synthesized
  source 1..20: mol_type = other DNA
ttttgtatttttagtagaga

SEQ ID NO: 7360 - DNA, 20 bp, synthetic construct
  misc_feature 1..20: note = chemically synthesized
  source 1..20: mol_type = other DNA
tttgtatttttagtagagat

SEQ ID NO: 7361 - DNA, 20 bp, synthetic construct
  misc_feature 1..20: note = chemically synthesized
  source 1..20: mol_type = other DNA
ttgtatttttagtagagatg

SEQ ID NO: 7362 - DNA, 20 bp, synthetic construct
  misc_feature 1..20: note = chemically synthesized
  source 1..20: mol_type = other DNA
gagatggggtttcaccatgt

SEQ ID NO: 7363 - DNA, 20 bp, synthetic construct
  misc_feature 1..20: note = chemically synthesized
  source 1..20: mol_type = other DNA
tggggtttcaccatgttagc

SEQ ID NO: 7364 - DNA, 20 bp, synthetic construct
  misc_feature 1..20: note = chemically synthesized
  source 1..20: mol_type = other DNA
ggggtttcaccatgttagcc

SEQ ID NO: 7365 - DNA, 20 bp, synthetic construct
  misc_feature 1..20: note = chemically synthesized
  source 1..20: mol_type = other DNA
tttcaccatgttagccagga

SEQ ID NO: 7366 - DNA, 20 bp, synthetic construct
  misc_feature 1..20: note = chemically synthesized
  source 1..20: mol_type = other DNA
acctcatgatctgcccgcct

SEQ ID NO: 7367 - DNA, 20 bp, synthetic construct
  misc_feature 1..20: note = chemically synthesized
  source 1..20: mol_type = other DNA
ctgcccgccttggcctccca

SEQ ID NO: 7368 - DNA, 20 bp, synthetic construct
  misc_feature 1..20: note = chemically synthesized
  source 1..20: mol_type = other DNA
gccttggcctcccacagtgc

SEQ ID NO: 7369 - DNA, 20 bp, synthetic construct
  misc_feature 1..20: note = chemically synthesized
  source 1..20: mol_type = other DNA
ccttggcctcccacagtgct

SEQ ID NO: 7370 - DNA, 20 bp, synthetic construct
  misc_feature 1..20: note = chemically synthesized
  source 1..20: mol_type = other DNA
ctcccacagtgctgggattc

SEQ ID NO: 7371 - DNA, 20 bp, synthetic construct
  misc_feature 1..20: note = chemically synthesized
  source 1..20: mol_type = other DNA
tcccacagtgctgggattcc

SEQ ID NO: 7372 - DNA, 20 bp, synthetic construct
  misc_feature 1..20: note = chemically synthesized
  source 1..20: mol_type = other DNA
agtgctgggattccaggcgt

SEQ ID NO: 7373 - DNA, 20 bp, synthetic construct
  misc_feature 1..20: note = chemically synthesized
  source 1..20: mol_type = other DNA
gggattccaggcgtgagcca

SEQ ID NO: 7374 - DNA, 20 bp, synthetic construct
  misc_feature 1..20: note = chemically synthesized
  source 1..20: mol_type = other DNA
caggcgtgagccacggcgcc

SEQ ID NO: 7375 - DNA, 20 bp, synthetic construct
  misc_feature 1..20: note = chemically synthesized
  source 1..20: mol_type = other DNA
cgtgagccacggcgcctggc

SEQ ID NO: 7376 - DNA, 20 bp, synthetic construct
  misc_feature 1..20: note = chemically synthesized
  source 1..20: mol_type = other DNA
gccagtgtgttttttcattt

SEQ ID NO: 7377 - DNA, 20 bp, synthetic construct
  misc_feature 1..20: note = chemically synthesized
  source 1..20: mol_type = other DNA
ttttttcatttcagacattg

SEQ ID NO: 7378 - DNA, 20 bp, synthetic construct
  misc_feature 1..20: note = chemically synthesized
  source 1..20: mol_type = other DNA
gacattgtagtttttatctc

SEQ ID NO: 7379 - DNA, 20 bp, synthetic construct
  misc_feature 1..20: note = chemically synthesized
  source 1..20: mol_type = other DNA
attgtagtttttatctctag

SEQ ID NO: 7380 - DNA, 20 bp, synthetic construct
  misc_feature 1..20: note = chemically synthesized
  source 1..20: mol_type = other DNA
tttatctctagaagttcacc

SEQ ID NO: 7381 - DNA, 20 bp, synthetic construct
  misc_feature 1..20: note = chemically synthesized
  source 1..20: mol_type = other DNA
ttatctctagaagttcacct

SEQ ID NO: 7382 - DNA, 20 bp, synthetic construct
  misc_feature 1..20: note = chemically synthesized
  source 1..20: mol_type = other DNA
tatctctagaagttcacctg

SEQ ID NO: 7383 - DNA, 20 bp, synthetic construct
  misc_feature 1..20: note = chemically synthesized
  source 1..20: mol_type = other DNA
acttaattttttgaacataa

SEQ ID NO: 7384 - DNA, 20 bp, synthetic construct
  misc_feature 1..20: note = chemically synthesized
  source 1..20: mol_type = other DNA
cttaattttttgaacataat

SEQ ID NO: 7385 - DNA, 20 bp, synthetic construct
  misc_feature 1..20: note = chemically synthesized
  source 1..20: mol_type = other DNA
tttttgaacataatgggata

SEQ ID NO: 7386 - DNA, 20 bp, synthetic construct
  misc_feature 1..20: note = chemically synthesized
  source 1..20: mol_type = other DNA
ccatccttgcctgctaattc

SEQ ID NO: 7387 - DNA, 20 bp, synthetic construct
  misc_feature 1..20: note = chemically synthesized
  source 1..20: mol_type = other DNA
gctaattctagcatccgtgt

SEQ ID NO: 7388 - DNA, 20 bp, synthetic construct
  misc_feature 1..20: note = chemically synthesized
  source 1..20: mol_type = other DNA
tctagcatccgtgtcagttc

SEQ ID NO: 7389 - DNA, 20 bp, synthetic construct
  misc_feature 1..20: note = chemically synthesized
  source 1..20: mol_type = other DNA
catgccttgtaatctttgat

SEQ ID NO: 7390 - DNA, 20 bp, synthetic construct
  misc_feature 1..20: note = chemically synthesized
  source 1..20: mol_type = other DNA
tgtaatctttgattggctgc

SEQ ID NO: 7391 - DNA, 20 bp, synthetic construct
  misc_feature 1..20: note = chemically synthesized
  source 1..20: mol_type = other DNA
cattgtcaatttcaccttgt

SEQ ID NO: 7392 - DNA, 20 bp, synthetic construct
  misc_feature 1..20: note = chemically synthesized
  source 1..20: mol_type = other DNA
attgtcaatttcaccttgtt

SEQ ID NO: 7393 - DNA, 20 bp, synthetic construct
  misc_feature 1..20: note = chemically synthesized
  source 1..20: mol_type = other DNA
aatttcaccttgttgggtgc

SEQ ID NO: 7394 - DNA, 20 bp, synthetic construct
  misc_feature 1..20: note = chemically synthesized
  source 1..20: mol_type = other DNA
gtattcctctaaatgttctt

SEQ ID NO: 7395 - DNA, 20 bp, synthetic construct
  misc_feature 1..20: note = chemically synthesized
  source 1..20: mol_type = other DNA
aatgttcttgagctttgctc

SEQ ID NO: 7396 - DNA, 20 bp, synthetic construct
  misc_feature 1..20: note = chemically synthesized
  source 1..20: mol_type = other DNA
atgttcttgagctttgctcc

SEQ ID NO: 7397 - DNA, 20 bp, synthetic construct
  misc_feature 1..20: note = chemically synthesized
  source 1..20: mol_type = other DNA
ttgagctttgctccgggatg

SEQ ID NO: 7398 - DNA, 20 bp, synthetic construct
  misc_feature 1..20: note = chemically synthesized
  source 1..20: mol_type = other DNA
ctttgctccgggatgcagtt

SEQ ID NO: 7399 - DNA, 20 bp, synthetic construct
  misc_feature 1..20: note = chemically synthesized
  source 1..20: mol_type = other DNA
cgggatgcagttaagcaact

SEQ ID NO: 7400 - DNA, 20 bp, synthetic construct
  misc_feature 1..20: note = chemically synthesized
  source 1..20: mol_type = other DNA
ggatgcagttaagcaactta

SEQ ID NO: 7401 - DNA, 20 bp, synthetic construct
  misc_feature 1..20: note = chemically synthesized
  source 1..20: mol_type = other DNA
gcagttaagcaacttagagt

SEQ ID NO: 7402 - DNA, 20 bp, synthetic construct
  misc_feature 1..20: note = chemically synthesized
  source 1..20: mol_type = other DNA
gtttgaactcttaattgttt

SEQ ID NO: 7403 - DNA, 20 bp, synthetic construct
  misc_feature 1..20: note = chemically synthesized
  source 1..20: mol_type = other DNA
cttaattgttttggtctcct

SEQ ID NO: 7404 - DNA, 20 bp, synthetic construct
  misc_feature 1..20: note = chemically synthesized
  source 1..20: mol_type = other DNA
ttttggtctcctcggactct

SEQ ID NO: 7405 - DNA, 20 bp, synthetic construct
  misc_feature 1..20: note = chemically synthesized
  source 1..20: mol_type = other DNA
tcagctccatctcctcaacg

SEQ ID NO: 7406 - DNA, 20 bp, synthetic construct
  misc_feature 1..20: note = chemically synthesized
  source 1..20: mol_type = other DNA
cagctccatctcctcaacgt

SEQ ID NO: 7407 - DNA, 20 bp, synthetic construct
  misc_feature 1..20: note = chemically synthesized
  source 1..20: mol_type = other DNA
agctccatctcctcaacgtg

SEQ ID NO: 7408 - DNA, 20 bp, synthetic construct
  misc_feature 1..20: note = chemically synthesized
  source 1..20: mol_type = other DNA
ctccatctcctcaacgtggg

SEQ ID NO: 7409 - DNA, 20 bp, synthetic construct
  misc_feature 1..20: note = chemically synthesized
  source 1..20: mol_type = other DNA
cctcaacgtggggagtctct

SEQ ID NO: 7410 - DNA, 20 bp, synthetic construct
  misc_feature 1..20: note = chemically synthesized
  source 1..20: mol_type = other DNA
ctcaacgtggggagtctctt

SEQ ID NO: 7411 - DNA, 20 bp, synthetic construct
  misc_feature 1..20: note = chemically synthesized
  source 1..20: mol_type = other DNA
ggagtctcttgggctctgcc

SEQ ID NO: 7412 - DNA, 20 bp, synthetic construct
  misc_feature 1..20: note = chemically synthesized
  source 1..20: mol_type = other DNA
ctgcctggacttccctttcc

SEQ ID NO: 7413 - DNA, 20 bp, synthetic construct
  misc_feature 1..20: note = chemically synthesized
  source 1..20: mol_type = other DNA
ctttcctggcctgtaacctg

SEQ ID NO: 7414 - DNA, 20 bp, synthetic construct
  misc_feature 1..20: note = chemically synthesized
  source 1..20: mol_type = other DNA
acctgcagactctctccaaa

SEQ ID NO: 7415 - DNA, 20 bp, synthetic construct
  misc_feature 1..20: note = chemically synthesized
  source 1..20: mol_type = other DNA
gcagactctctccaaacagt

SEQ ID NO: 7416 - DNA, 20 bp, synthetic construct
  misc_feature 1..20: note = chemically synthesized
  source 1..20: mol_type = other DNA
actctctccaaacagtaagc

SEQ ID NO: 7417 - DNA, 20 bp, synthetic construct
  misc_feature 1..20: note = chemically synthesized
  source 1..20: mol_type = other DNA
ctctctccaaacagtaagct

SEQ ID NO: 7418 - DNA, 20 bp, synthetic construct
  misc_feature 1..20: note = chemically synthesized
  source 1..20: mol_type = other DNA
tctctccaaacagtaagctg

SEQ ID NO: 7419 - DNA, 20 bp, synthetic construct
  misc_feature 1..20: note = chemically synthesized
  source 1..20: mol_type = other DNA
aaacagtaagctggggtgat

SEQ ID NO: 7420 - DNA, 20 bp, synthetic construct
  misc_feature 1..20: note = chemically synthesized
  source 1..20: mol_type = other DNA
acagtaagctggggtgatcg

SEQ ID NO: 7421 - DNA, 20 bp, synthetic construct
  misc_feature 1..20: note = chemically synthesized
  source 1..20: mol_type = other DNA
cagtaagctggggtgatcgg

SEQ ID NO: 7422 - DNA, 20 bp, synthetic construct
  misc_feature 1..20: note = chemically synthesized
  source 1..20: mol_type = other DNA
agtaagctggggtgatcgga

SEQ ID NO: 7423 - DNA, 20 bp, synthetic construct
  misc_feature 1..20: note = chemically synthesized
  source 1..20: mol_type = other DNA
gttgtttgcttcttatccct

SEQ ID NO: 7424 - DNA, 20 bp, synthetic construct
  misc_feature 1..20: note = chemically synthesized
  source 1..20: mol_type = other DNA
ttgtttgcttcttatccctc

SEQ ID NO: 7425 - DNA, 20 bp, synthetic construct
  misc_feature 1..20: note = chemically synthesized
  source 1..20: mol_type = other DNA
tgtttgcttcttatccctca

SEQ ID NO: 7426 - DNA, 20 bp, synthetic construct
  misc_feature 1..20: note = chemically synthesized
  source 1..20: mol_type = other DNA
actcctccttgcctgatgtc

SEQ ID NO: 7427 - DNA, 20 bp, synthetic construct
  misc_feature 1..20: note = chemically synthesized
  source 1..20: mol_type = other DNA
tcctccttgcctgatgtcca

SEQ ID NO: 7428 - DNA, 20 bp, synthetic construct
  misc_feature 1..20: note = chemically synthesized
  source 1..20: mol_type = other DNA
cctgatgtccagagtcttga

SEQ ID NO: 7429 - DNA, 20 bp, synthetic construct
  misc_feature 1..20: note = chemically synthesized
  source 1..20: mol_type = other DNA
ttgaaagctgccatgttcta

SEQ ID NO: 7430 - DNA, 20 bp, synthetic construct
  misc_feature 1..20: note = chemically synthesized
  source 1..20: mol_type = other DNA
gtttttgttttgattgtttc

SEQ ID NO: 7431 - DNA, 20 bp, synthetic construct
  misc_feature 1..20: note = chemically synthesized
  source 1..20: mol_type = other DNA
tttttgttttgattgtttct

SEQ ID NO: 7432 - DNA, 20 bp, synthetic construct
  misc_feature 1..20: note = chemically synthesized
  source 1..20: mol_type = other DNA
ttttgttttgattgtttctg

SEQ ID NO: 7433 - DNA, 20 bp, synthetic construct
  misc_feature 1..20: note = chemically synthesized
  source 1..20: mol_type = other DNA
ttgttttgattgtttctggg

SEQ ID NO: 7434 - DNA, 20 bp, synthetic construct
  misc_feature 1..20: note = chemically synthesized
  source 1..20: mol_type = other DNA
gttttgattgtttctgggga

SEQ ID NO: 7435 - DNA, 20 bp, synthetic construct
  misc_feature 1..20: note = chemically synthesized
  source 1..20: mol_type = other DNA
ttgattgtttctggggagag

SEQ ID NO: 7436 - DNA, 20 bp, synthetic construct
  misc_feature 1..20: note = chemically synthesized
  source 1..20: mol_type = other DNA
gagaagaactcttcccatct

SEQ ID NO: 7437 - DNA, 20 bp, synthetic construct
  misc_feature 1..20: note = chemically synthesized
  source 1..20: mol_type = other DNA
agaagaactcttcccatctt

SEQ ID NO: 7438 - DNA, 20 bp, synthetic construct
  misc_feature 1..20: note = chemically synthesized
  source 1..20: mol_type = other DNA
agaactcttcccatcttggg

SEQ ID NO: 7439 - DNA, 20 bp, synthetic construct
  misc_feature 1..20: note = chemically synthesized
  source 1..20: mol_type = other DNA
ttatgttcaaacttttgcct

SEQ ID NO: 7440 - DNA, 20 bp, synthetic construct
  misc_feature 1..20: note = chemically synthesized
  source 1..20: mol_type = other DNA
tgttcaaacttttgcctaag

SEQ ID NO: 7441 - DNA, 20 bp, synthetic construct
  misc_feature 1..20: note = chemically synthesized
  source 1..20: mol_type = other DNA
tttaactcatctaattatcc

SEQ ID NO: 7442 - DNA, 20 bp, synthetic construct
  misc_feature 1..20: note = chemically synthesized
  source 1..20: mol_type = other DNA
aattatccgagcaatccaat

SEQ ID NO: 7443 - DNA, 20 bp, synthetic construct
  misc_feature 1..20: note = chemically synthesized
  source 1..20: mol_type = other DNA
attatccgagcaatccaatc

SEQ ID NO: 7444 - DNA, 20 bp, synthetic construct
  misc_feature 1..20: note = chemically synthesized
  source 1..20: mol_type = other DNA
atccgagcaatccaatcggg

SEQ ID NO: 7445 - DNA, 20 bp, synthetic construct
  misc_feature 1..20: note = chemically synthesized
  source 1..20: mol_type = other DNA
gtgatctccattttacacac

SEQ ID NO: 7446 - DNA, 20 bp, synthetic construct
  misc_feature 1..20: note = chemically synthesized
  source 1..20: mol_type = other DNA
ccattttacacacgagaaaa

SEQ ID NO: 7447 - DNA, 20 bp, synthetic construct
  misc_feature 1..20: note = chemically synthesized
  source 1..20: mol_type = other DNA
ttttacacacgagaaaatgg

SEQ ID NO: 7448 - DNA, 20 bp, synthetic construct
  misc_feature 1..20: note = chemically synthesized
  source 1..20: mol_type = other DNA
cacacgagaaaatggaagca

SEQ ID NO: 7449 - DNA, 20 bp, synthetic construct
  misc_feature 1..20: note = chemically synthesized
  source 1..20: mol_type = other DNA
cacgagaaaatggaagcatg

SEQ ID NO: 7450 - DNA, 20 bp, synthetic construct
  misc_feature 1..20: note = chemically synthesized
  source 1..20: mol_type = other DNA
agcatggagaaattgaatgc

SEQ ID NO: 7451 - DNA, 20 bp, synthetic construct
  misc_feature 1..20: note = chemically synthesized
  source 1..20: mol_type = other DNA
tgaatgctggtgcatgatct

SEQ ID NO: 7452 - DNA, 20 bp, synthetic construct
  misc_feature 1..20: note = chemically synthesized
  source 1..20: mol_type = other DNA
aatgctggtgcatgatctca

SEQ ID NO: 7453 - DNA, 20 bp, synthetic construct
  misc_feature 1..20: note = chemically synthesized
  source 1..20: mol_type = other DNA
tgcatgatctcagagctacc

SEQ ID NO: 7454 - DNA, 20 bp, synthetic construct
  misc_feature 1..20: note = chemically synthesized
  source 1..20: mol_type = other DNA
catgatctcagagctacctg

SEQ ID NO: 7455 - DNA, 20 bp, synthetic construct
  misc_feature 1..20: note = chemically synthesized
  source 1..20: mol_type = other DNA
atgatctcagagctacctgg

SEQ ID NO: 7456 - DNA, 20 bp, synthetic construct
  misc_feature 1..20: note = chemically synthesized
  source 1..20: mol_type = other DNA
ctcagagctacctggaggca

SEQ ID NO: 7457 - DNA, 20 bp, synthetic construct
  misc_feature 1..20: note = chemically synthesized
  source 1..20: mol_type = other DNA
gagctacctggaggcacagc

SEQ ID NO: 7458 - DNA, 20 bp, synthetic construct
  misc_feature 1..20: note = chemically synthesized
  source 1..20: mol_type = other DNA
agctacctggaggcacagct

SEQ ID NO: 7459 - DNA, 20 bp, synthetic construct
  misc_feature 1..20: note = chemically synthesized
  source 1..20: mol_type = other DNA
ggcacagctgggctaccctg

SEQ ID NO: 7460 - DNA, 20 bp, synthetic construct
  misc_feature 1..20: note = chemically synthesized
  source 1..20: mol_type = other DNA
gcacagctgggctaccctgt

SEQ ID NO: 7461 - DNA, 20 bp, synthetic construct
  misc_feature 1..20: note = chemically synthesized
  source 1..20: mol_type = other DNA
cagctgggctaccctgtggg

SEQ ID NO: 7462 - DNA, 20 bp, synthetic construct
  misc_feature 1..20: note = chemically synthesized
  source 1..20: mol_type = other DNA
gggctaccctgtgggcagtc

SEQ ID NO: 7463 - DNA, 20 bp, synthetic construct
  misc_feature 1..20: note = chemically synthesized
  source 1..20: mol_type = other DNA
ccctgtgggcagtctggttt

SEQ ID NO: 7464 - DNA, 20 bp, synthetic construct
  misc_feature 1..20: note = chemically synthesized
  source 1..20: mol_type = other DNA
cctgtgggcagtctggtttc

SEQ ID NO: 7465 - DNA, 20 bp, synthetic construct
  misc_feature 1..20: note = chemically synthesized
  source 1..20: mol_type = other DNA
ctgtgggcagtctggtttca

SEQ ID NO: 7466 - DNA, 20 bp, synthetic construct
  misc_feature 1..20: note = chemically synthesized
  source 1..20: mol_type = other DNA
tgggcagtctggtttcaggg

SEQ ID NO: 7467 - DNA, 20 bp, synthetic construct
  misc_feature 1..20: note = chemically synthesized
  source 1..20: mol_type = other DNA
ctggtttcagggtggatata

SEQ ID NO: 7468 - DNA, 20 bp, synthetic construct
  misc_feature 1..20: note = chemically synthesized
  source 1..20: mol_type = other DNA
tggatatacagacacgttgc

SEQ ID NO: 7469 - DNA, 20 bp, synthetic construct
  misc_feature 1..20: note = chemically synthesized
  source 1..20: mol_type = other DNA
ggatatacagacacgttgct

SEQ ID NO: 7470 - DNA, 20 bp, synthetic construct
  misc_feature 1..20: note = chemically synthesized
  source 1..20: mol_type = other DNA
gacacgttgctgggctgacc

SEQ ID NO: 7471 - DNA, 20 bp, synthetic construct
  misc_feature 1..20: note = chemically synthesized
  source 1..20: mol_type = other DNA
ttgctgggctgacccagcat

SEQ ID NO: 7472 - DNA, 20 bp, synthetic construct
  misc_feature 1..20: note = chemically synthesized
  source 1..20: mol_type = other DNA
tgctgggctgacccagcatt

SEQ ID NO: 7473 - DNA, 20 bp, synthetic construct
  misc_feature 1..20: note = chemically synthesized
  source 1..20: mol_type = other DNA
ctgggctgacccagcattgg

SEQ ID NO: 7474 - DNA, 20 bp, synthetic construct
  misc_feature 1..20: note = chemically synthesized
  source 1..20: mol_type = other DNA
acccagcattgggagttgat

SEQ ID NO: 7475 - DNA, 20 bp, synthetic construct
  misc_feature 1..20: note = chemically synthesized
  source 1..20: mol_type = other DNA
agcattgggagttgataagt

SEQ ID NO: 7476 - DNA, 20 bp, synthetic construct
  misc_feature 1..20: note = chemically synthesized
  source 1..20: mol_type = other DNA
tgggagttgataagtcggac

SEQ ID NO: 7477 - DNA, 20 bp, synthetic construct
  misc_feature 1..20: note = chemically synthesized
  source 1..20: mol_type = other DNA
gggagttgataagtcggact

SEQ ID NO: 7478 - DNA, 20 bp, synthetic construct
  misc_feature 1..20: note = chemically synthesized
  source 1..20: mol_type = other DNA
agttgataagtcggactggg

SEQ ID NO: 7479 - DNA, 20 bp, synthetic construct
  misc_feature 1..20: note = chemically synthesized
  source 1..20: mol_type = other DNA
tgataagtcggactgggaag

SEQ ID NO: 7480 - DNA, 20 bp, synthetic construct
  misc_feature 1..20: note = chemically synthesized
  source 1..20: mol_type = other DNA
gataagtcggactgggaagc

SEQ ID NO: 7481 - DNA, 20 bp, synthetic construct
  misc_feature 1..20: note = chemically synthesized
  source 1..20: mol_type = other DNA
agtcggactgggaagcagga

SEQ ID NO: 7482 - DNA, 20 bp, synthetic construct
  misc_feature 1..20: note = chemically synthesized
  source 1..20: mol_type = other DNA
gtcggactgggaagcaggac

SEQ ID NO: 7483 - DNA, 20 bp, synthetic construct
  misc_feature 1..20: note = chemically synthesized
  source 1..20: mol_type = other DNA
gaagcaggacaggaccctct

SEQ ID NO: 7484 - DNA, 20 bp, synthetic construct
  misc_feature 1..20: note = chemically synthesized
  source 1..20: mol_type = other DNA
gcaggacaggaccctctgag

SEQ ID NO: 7485 - DNA, 20 bp, synthetic construct
  misc_feature 1..20: note = chemically synthesized
  source 1..20: mol_type = other DNA
aggacaggaccctctgagtg

SEQ ID NO: 7486 - DNA, 20 bp, synthetic construct
  misc_feature 1..20: note = chemically synthesized
  source 1..20: mol_type = other DNA
ggacaggaccctctgagtgg

SEQ ID NO: 7487 - DNA, 20 bp, synthetic construct
  misc_feature 1..20: note = chemically synthesized
  source 1..20: mol_type = other DNA
gacaggaccctctgagtgga

SEQ ID NO: 7488 - DNA, 20 bp, synthetic construct
  misc_feature 1..20: note = chemically synthesized
  source 1..20: mol_type = other DNA
cctctgagtggagggtgctg

SEQ ID NO: 7489 - DNA, 20 bp, synthetic construct
  misc_feature 1..20: note = chemically synthesized
  source 1..20: mol_type = other DNA
tgagtggagggtgctgaaga

SEQ ID NO: 7490 - DNA, 20 bp, synthetic construct
  misc_feature 1..20: note = chemically synthesized
  source 1..20: mol_type = other DNA
gtggagggtgctgaagacag

SEQ ID NO: 7491 - DNA, 20 bp, synthetic construct
  misc_feature 1..20: note = chemically synthesized
  source 1..20: mol_type = other DNA
agggtgctgaagacagcagt

SEQ ID NO: 7492 - DNA, 20 bp, synthetic construct
  misc_feature 1..20: note = chemically synthesized
  source 1..20: mol_type = other DNA
gggtgctgaagacagcagtc

SEQ ID NO: 7493 - DNA, 20 bp, synthetic construct
  misc_feature 1..20: note = chemically synthesized
  source 1..20: mol_type = other DNA
ggtgctgaagacagcagtca

SEQ ID NO: 7494 - DNA, 20 bp, synthetic construct
  misc_feature 1..20: note = chemically synthesized
  source 1..20: mol_type = other DNA
gaagacagcagtcagggact

SEQ ID NO: 7495 - DNA, 20 bp, synthetic construct
  misc_feature 1..20: note = chemically synthesized
  source 1..20: mol_type = other DNA
agcagtcagggactcagcca

SEQ ID NO: 7496 - DNA, 20 bp, synthetic construct
  misc_feature 1..20: note = chemically synthesized
  source 1..20: mol_type = other DNA
cagtcagggactcagccatg

SEQ ID NO: 7497 - DNA, 20 bp, synthetic construct
  misc_feature 1..20: note = chemically synthesized
  source 1..20: mol_type = other DNA
agtcagggactcagccatgg

SEQ ID NO: 7498 - DNA, 20 bp, synthetic construct
  misc_feature 1..20: note = chemically synthesized
  source 1..20: mol_type = other DNA
gtcagggactcagccatgga

SEQ ID NO: 7499 - DNA, 20 bp, synthetic construct
  misc_feature 1..20: note = chemically synthesized
  source 1..20: mol_type = other DNA
gggactcagccatggagggc

SEQ ID NO: 7500 - DNA, 20 bp, synthetic construct
  misc_feature 1..20: note = chemically synthesized
  source 1..20: mol_type = other DNA
tcagccatggagggccagct

SEQ ID NO: 7501 - DNA, 20 bp, synthetic construct
  misc_feature 1..20: note = chemically synthesized
  source 1..20: mol_type = other DNA
gccatggagggccagcttgg

SEQ ID NO: 7502 - DNA, 20 bp, synthetic construct
  misc_feature 1..20: note = chemically synthesized
  source 1..20: mol_type = other DNA
ccatggagggccagcttggt

SEQ ID NO: 7503 - DNA, 20 bp, synthetic construct
  misc_feature 1..20: note = chemically synthesized
  source 1..20: mol_type = other DNA
catggagggccagcttggtg

SEQ ID NO: 7504 - DNA, 20 bp, synthetic construct
  misc_feature 1..20: note = chemically synthesized
  source 1..20: mol_type = other DNA
cagcttggtggggaacaccg

SEQ ID NO: 7505 - DNA, 20 bp, synthetic construct
  misc_feature 1..20: note = chemically synthesized
  source 1..20: mol_type = other DNA
ggtggggaacaccgtggtca

SEQ ID NO: 7506 - DNA, 20 bp, synthetic construct
  misc_feature 1..20: note = chemically synthesized
  source 1..20: mol_type = other DNA
tggggaacaccgtggtcatg

SEQ ID NO: 7507 - DNA, 20 bp, synthetic construct
  misc_feature 1..20: note = chemically synthesized
  source 1..20: mol_type = other DNA
ccgtggtcatggagcgcttc

SEQ ID NO: 7508 - DNA, 20 bp, synthetic construct
  misc_feature 1..20: note = chemically synthesized
  source 1..20: mol_type = other DNA
ggtcatggagcgcttctgga

SEQ ID NO: 7509 - DNA, 20 bp, synthetic construct
  misc_feature 1..20: note = chemically synthesized
  source 1..20: mol_type = other DNA
tcatggagcgcttctggatg

SEQ ID NO: 7510 - DNA, 20 bp, synthetic construct
  misc_feature 1..20: note = chemically synthesized
  source 1..20: mol_type = other DNA
atggagcgcttctggatgga

SEQ ID NO: 7511 - DNA, 20 bp, synthetic construct
  misc_feature 1..20: note = chemically synthesized
  source 1..20: mol_type = other DNA
tggagcgcttctggatggag

SEQ ID NO: 7512 - DNA, 20 bp, synthetic construct
  misc_feature 1..20: note = chemically synthesized
  source 1..20: mol_type = other DNA
tctggatggagaggaatgca

SEQ ID NO: 7513 - DNA, 20 bp, synthetic construct
  misc_feature 1..20: note = chemically synthesized
  source 1..20: mol_type = other DNA
ctggatggagaggaatgcaa

SEQ ID NO: 7514 - DNA, 20 bp, synthetic construct
  misc_feature 1..20: note = chemically synthesized
  source 1..20: mol_type = other DNA
ggagaggaatgcaaaggcct

SEQ ID NO: 7515 - DNA, 20 bp, synthetic construct
  misc_feature 1..20: note = chemically synthesized
  source 1..20: mol_type = other DNA
agaggaatgcaaaggccttg

SEQ ID NO: 7516 - DNA, 20 bp, synthetic construct
  misc_feature 1..20: note = chemically synthesized
  source 1..20: mol_type = other DNA
gaggaatgcaaaggccttgg

SEQ ID NO: 7517 - DNA, 20 bp, synthetic construct
  misc_feature 1..20: note = chemically synthesized
  source 1..20: mol_type = other DNA
gaatgcaaaggccttggagg

SEQ ID NO: 7518 - DNA, 20 bp, synthetic construct
  misc_feature 1..20: note = chemically synthesized
  source 1..20: mol_type = other DNA
aatgcaaaggccttggagga

SEQ ID NO: 7519 - DNA, 20 bp, synthetic construct
  misc_feature 1..20: note = chemically synthesized
  source 1..20: mol_type = other DNA
atgcaaaggccttggaggaa

SEQ ID NO: 7520 - DNA, 20 bp, synthetic construct
  misc_feature 1..20: note = chemically synthesized
  source 1..20: mol_type = other DNA
tgcaaaggccttggaggaag

SEQ ID NO: 7521 - DNA, 20 bp, synthetic construct
  misc_feature 1..20: note = chemically synthesized
  source 1..20: mol_type = other DNA
aaaggccttggaggaagggg

SEQ ID NO: 7522 - DNA, 20 bp, synthetic construct
  misc_feature 1..20: note = chemically synthesized
  source 1..20: mol_type = other DNA
aaggccttggaggaaggggt

SEQ ID NO: 7523 - DNA, 20 bp, synthetic construct
  misc_feature 1..20: note = chemically synthesized
  source 1..20: mol_type = other DNA
aggccttggaggaaggggtg

SEQ ID NO: 7524 - DNA, 20 bp, synthetic construct
  misc_feature 1..20: note = chemically synthesized
  source 1..20: mol_type = other DNA
ggccttggaggaaggggtgg

SEQ ID NO: 7525 - DNA, 20 bp, synthetic construct
  misc_feature 1..20: note = chemically synthesized
  source 1..20: mol_type = other DNA
cttggaggaaggggtggggg

SEQ ID NO: 7526 - DNA, 20 bp, synthetic construct
  misc_feature 1..20: note = chemically synthesized
  source 1..20: mol_type = other DNA
gaggaaggggtgggggcagt

SEQ ID NO: 7527 - DNA, 20 bp, synthetic construct
  misc_feature 1..20: note = chemically synthesized
  source 1..20: mol_type = other DNA
ggaaggggtgggggcagtga

SEQ ID NO: 7528 - DNA, 20 bp, synthetic construct
  misc_feature 1..20: note = chemically synthesized
  source 1..20: mol_type = other DNA
gaaggggtgggggcagtgag

SEQ ID NO: 7529 - DNA, 20 bp, synthetic construct
  misc_feature 1..20: note = chemically synthesized
  source 1..20: mol_type = other DNA
aaggggtgggggcagtgaga

SEQ ID NO: 7530 - DNA, 20 bp, synthetic construct
  misc_feature 1..20: note = chemically synthesized
  source 1..20: mol_type = other DNA
ggggtgggggcagtgagagg

SEQ ID NO: 7531 - DNA, 20 bp, synthetic construct
  misc_feature 1..20: note = chemically synthesized
  source 1..20: mol_type = other DNA
gggtgggggcagtgagaggg

SEQ ID NO: 7532 - DNA, 20 bp, synthetic construct
  misc_feature 1..20: note = chemically synthesized
  source 1..20: mol_type = other DNA
ggtgggggcagtgagaggga

SEQ ID NO: 7533 - DNA, 20 bp, synthetic construct
  misc_feature 1..20: note = chemically synthesized
  source 1..20: mol_type = other DNA
gggggcagtgagagggaggg

SEQ ID NO: 7534 - DNA, 20 bp, synthetic construct
  misc_feature 1..20: note = chemically synthesized
  source 1..20: mol_type = other DNA
ggggcagtgagagggagggt

SEQ ID NO: 7535 - DNA, 20 bp, synthetic construct
  misc_feature 1..20: note = chemically synthesized
  source 1..20: mol_type = other DNA
gggcagtgagagggagggtg

SEQ ID NO: 7536 - DNA, 20 bp, synthetic construct
  misc_feature 1..20: note = chemically synthesized
  source 1..20: mol_type = other DNA
agggagggtggggctgtgct

SEQ ID NO: 7537 - DNA, 20 bp, synthetic construct
  misc_feature 1..20: note = chemically synthesized
  source 1..20: mol_type = other DNA
ggagggtggggctgtgctca

SEQ ID NO: 7538 - DNA, 20 bp, synthetic construct
  misc_feature 1..20: note = chemically synthesized
  source 1..20: mol_type = other DNA
gggtggggctgtgctcagag

SEQ ID NO: 7539 - DNA, 20 bp, synthetic construct
  misc_feature 1..20: note = chemically synthesized
  source 1..20: mol_type = other DNA
ggtggggctgtgctcagagc

SEQ ID NO: 7540 - DNA, 20 bp, synthetic construct
  misc_feature 1..20: note = chemically synthesized
  source 1..20: mol_type = other DNA
tggggctgtgctcagagcgg

SEQ ID NO: 7541 - DNA, 20 bp, synthetic construct
  misc_feature 1..20: note = chemically synthesized
  source 1..20: mol_type = other DNA
ggctgtgctcagagcgggag

SEQ ID NO: 7542 - DNA, 20 bp, synthetic construct
  misc_feature 1..20: note = chemically synthesized
  source 1..20: mol_type = other DNA
gctgtgctcagagcgggagt

SEQ ID NO: 7543 - DNA, 20 bp, synthetic construct
  misc_feature 1..20: note = chemically synthesized
  source 1..20: mol_type = other DNA
gtgctcagagcgggagtggg

SEQ ID NO: 7544 - DNA, 20 bp, synthetic construct
  misc_feature 1..20: note = chemically synthesized
  source 1..20: mol_type = other DNA
ctcagagcgggagtgggcag

SEQ ID NO: 7545 - DNA, 20 bp, synthetic construct
  misc_feature 1..20: note = chemically synthesized
  source 1..20: mol_type = other DNA
cagagcgggagtgggcagtg

SEQ ID NO: 7546 - DNA, 20 bp, synthetic construct
  misc_feature 1..20: note = chemically synthesized
  source 1..20: mol_type = other DNA
agagcgggagtgggcagtgg

SEQ ID NO: 7547 - DNA, 20 bp, synthetic construct
  misc_feature 1..20: note = chemically synthesized
  source 1..20: mol_type = other DNA
ggagtgggcagtggaggtgt

SEQ ID NO: 7548 - DNA, 20 bp, synthetic construct
  misc_feature 1..20: note = chemically synthesized
  source 1..20: mol_type = other DNA
agtgggcagtggaggtgtca

SEQ ID NO: 7549 - DNA, 20 bp, synthetic construct
  misc_feature 1..20: note = chemically synthesized
  source 1..20: mol_type = other DNA
gtgggcagtggaggtgtcag

SEQ ID NO: 7550 - DNA, 20 bp, synthetic construct
  misc_feature 1..20: note = chemically synthesized
  source 1..20: mol_type = other DNA
ggaggtgtcagaggcctccc

SEQ ID NO: 7551 - DNA, 20 bp, synthetic construct
  misc_feature 1..20: note = chemically synthesized
  source 1..20: mol_type = other DNA
gaggtgtcagaggcctccct

SEQ ID NO: 7552 - DNA, 20 bp, synthetic construct
  misc_feature 1..20: note = chemically synthesized
  source 1..20: mol_type = other DNA
agaggcctccctgggtcaaa

SEQ ID NO: 7553 - DNA, 20 bp, synthetic construct
  misc_feature 1..20: note = chemically synthesized
  source 1..20: mol_type = other DNA
gaggcctccctgggtcaaat

SEQ ID NO: 7554 - DNA, 20 bp, synthetic construct
  misc_feature 1..20: note = chemically synthesized
  source 1..20: mol_type = other DNA
aggcctccctgggtcaaatg

SEQ ID NO: 7555 - DNA, 20 bp, synthetic construct
  misc_feature 1..20: note = chemically synthesized
  source 1..20: mol_type = other DNA
cctgggtcaaatggggtcct

SEQ ID NO: 7556 - DNA, 20 bp, synthetic construct
  misc_feature 1..20: note = chemically synthesized
  source 1..20: mol_type = other DNA
gtcaaatggggtcctgagtg

SEQ ID NO: 7557 - DNA, 20 bp, synthetic construct
  misc_feature 1..20: note = chemically synthesized
  source 1..20: mol_type = other DNA
tggggtcctgagtgtggctg

SEQ ID NO: 7558 - DNA, 20 bp, synthetic construct
  misc_feature 1..20: note = chemically synthesized
  source 1..20: mol_type = other DNA
ggtcctgagtgtggctgcag

SEQ ID NO: 7559 - DNA, 20 bp, synthetic construct
  misc_feature 1..20: note = chemically synthesized
  source 1..20: mol_type = other DNA
gtcctgagtgtggctgcagt

SEQ ID NO: 7560 - DNA, 20 bp, synthetic construct
  misc_feature 1..20: note = chemically synthesized
  source 1..20: mol_type = other DNA
tcctgagtgtggctgcagtg

SEQ ID NO: 7561 - DNA, 20 bp, synthetic construct
  misc_feature 1..20: note = chemically synthesized
  source 1..20: mol_type = other DNA
tgagtgtggctgcagtgggg

SEQ ID NO: 7562 - DNA, 20 bp, synthetic construct
  misc_feature 1..20: note = chemically synthesized
  source 1..20: mol_type = other DNA
gagtgtggctgcagtgggga

SEQ ID NO: 7563 - DNA, 20 bp, synthetic construct
  misc_feature 1..20: note = chemically synthesized
  source 1..20: mol_type = other DNA
tgtggctgcagtggggaagg

SEQ ID NO: 7564 - DNA, 20 bp, synthetic construct
  misc_feature 1..20: note = chemically synthesized
  source 1..20: mol_type = other DNA
ggctgcagtggggaaggtgg

SEQ ID NO: 7565 - DNA, 20 bp, synthetic construct
  misc_feature 1..20: note = chemically synthesized
  source 1..20: mol_type = other DNA
gtggggaaggtggaagtcac

SEQ ID NO: 7566 - DNA, 20 bp, synthetic construct
  misc_feature 1..20: note = chemically synthesized
  source 1..20: mol_type = other DNA
tggaagtcactggtgtgaaa

SEQ ID NO: 7567 - DNA, 20 bp, synthetic construct
  misc_feature 1..20: note = chemically synthesized
  source 1..20: mol_type = other DNA
tcactggtgtgaaaaagatg

SEQ ID NO: 7568 - DNA, 20 bp, synthetic construct
  misc_feature 1..20: note = chemically synthesized
  source 1..20: mol_type = other DNA
actggtgtgaaaaagatgaa

SEQ ID NO: 7569 - DNA, 20 bp, synthetic construct
  misc_feature 1..20: note = chemically synthesized
  source 1..20: mol_type = other DNA
gtgaaaaagatgaagagtta

SEQ ID NO: 7570 - DNA, 20 bp, synthetic construct
  misc_feature 1..20: note = chemically synthesized
  source 1..20: mol_type = other DNA
aaaagatgaagagttatgga

SEQ ID NO: 7571 - DNA, 20 bp, synthetic construct
  misc_feature 1..20: note = chemically synthesized
  source 1..20: mol_type = other DNA
gagttatggacagtcactta

SEQ ID NO: 7572 - DNA, 20 bp, synthetic construct
  misc_feature 1..20: note = chemically synthesized
  source 1..20: mol_type = other DNA
agttatggacagtcacttac

SEQ ID NO: 7573 - DNA, 20 bp, synthetic construct
  misc_feature 1..20: note = chemically synthesized
  source 1..20: mol_type = other DNA
gttatggacagtcacttaca

SEQ ID NO: 7574 - DNA, 20 bp, synthetic construct
  misc_feature 1..20: note = chemically synthesized
  source 1..20: mol_type = other DNA
ttatggacagtcacttacag

SEQ ID NO: 7575 - DNA, 20 bp, synthetic construct
  misc_feature 1..20: note = chemically synthesized
  source 1..20: mol_type = other DNA
tggacagtcacttacagggg

SEQ ID NO: 7576 - DNA, 20 bp, synthetic construct
  misc_feature 1..20: note = chemically synthesized
  source 1..20: mol_type = other DNA
tacaggggcagtgtctgact

SEQ ID NO: 7577 - DNA, 20 bp, synthetic construct
  misc_feature 1..20: note = chemically synthesized
  source 1..20: mol_type = other DNA
acaggggcagtgtctgactc

SEQ ID NO: 7578 - DNA, 20 bp, synthetic construct
  misc_feature 1..20: note = chemically synthesized
  source 1..20: mol_type = other DNA
gggcagtgtctgactcagga

SEQ ID NO: 7579 - DNA, 20 bp, synthetic construct
  misc_feature 1..20: note = chemically synthesized
  source 1..20: mol_type = other DNA
cagtgtctgactcaggacag

SEQ ID NO: 7580 - DNA, 20 bp, synthetic construct
  misc_feature 1..20: note = chemically synthesized
  source 1..20: mol_type = other DNA
tgtctgactcaggacagtgg

SEQ ID NO: 7581 - DNA, 20 bp, synthetic construct
  misc_feature 1..20: note = chemically synthesized
  source 1..20: mol_type = other DNA
gtctgactcaggacagtggc

SEQ ID NO: 7582 - DNA, 20 bp, synthetic construct
  misc_feature 1..20: note = chemically synthesized
  source 1..20: mol_type = other DNA
tgactcaggacagtggcagg

SEQ ID NO: 7583 - DNA, 20 bp, synthetic construct
  misc_feature 1..20: note = chemically synthesized
  source 1..20: mol_type = other DNA
gacagtggcaggaagtgacc

SEQ ID NO: 7584 - DNA, 20 bp, synthetic construct
  misc_feature 1..20: note = chemically synthesized
  source 1..20: mol_type = other DNA
acagtggcaggaagtgacct

SEQ ID NO: 7585 - DNA, 20 bp, synthetic construct
  misc_feature 1..20: note = chemically synthesized
  source 1..20: mol_type = other DNA
cagtggcaggaagtgacctg

SEQ ID NO: 7586 - DNA, 20 bp, synthetic construct
  misc_feature 1..20: note = chemically synthesized
  source 1..20: mol_type = other DNA
gtggcaggaagtgacctggg

SEQ ID NO: 7587 - DNA, 20 bp, synthetic construct
  misc_feature 1..20: note = chemically synthesized
  source 1..20: mol_type = other DNA
tggcaggaagtgacctgggg

SEQ ID NO: 7588 - DNA, 20 bp, synthetic construct
  misc_feature 1..20: note = chemically synthesized
  source 1..20: mol_type = other DNA
caggaagtgacctggggagg

SEQ ID NO: 7589 - DNA, 20 bp, synthetic construct
  misc_feature 1..20: note = chemically synthesized
  source 1..20: mol_type = other DNA
tgacctggggaggaagattc

SEQ ID NO: 7590 - DNA, 20 bp, synthetic construct
  misc_feature 1..20: note = chemically synthesized
  source 1..20: mol_type = other DNA
gacctggggaggaagattct

SEQ ID NO: 7591 - DNA, 20 bp, synthetic construct
  misc_feature 1..20: note = chemically synthesized
  source 1..20: mol_type = other DNA
aagattctgggcccctgact

SEQ ID NO: 7592 - DNA, 20 bp, synthetic construct
  misc_feature 1..20: note = chemically synthesized
  source 1..20: mol_type = other DNA
ggcccctgactgagcctccc

SEQ ID NO: 7593 - DNA, 20 bp, synthetic construct
  misc_feature 1..20: note = chemically synthesized
  source 1..20: mol_type = other DNA
gcccctgactgagcctcccc

SEQ ID NO: 7594 - DNA, 20 bp, synthetic construct
  misc_feature 1..20: note = chemically synthesized
  source 1..20: mol_type = other DNA
gactgagcctccccaggatg

SEQ ID NO: 7595 - DNA, 20 bp, synthetic construct
  misc_feature 1..20: note = chemically synthesized
  source 1..20: mol_type = other DNA
tccccaggatgtggtcctgc

SEQ ID NO: 7596 - DNA, 20 bp, synthetic construct
  misc_feature 1..20: note = chemically synthesized
  source 1..20: mol_type = other DNA
ccccaggatgtggtcctgct

SEQ ID NO: 7597 - DNA, 20 bp, synthetic construct
  misc_feature 1..20: note = chemically synthesized
  source 1..20: mol_type = other DNA
aggatgtggtcctgctgggt

SEQ ID NO: 7598 - DNA, 20 bp, synthetic construct
  misc_feature 1..20: note = chemically synthesized
  source 1..20: mol_type = other DNA
ggatgtggtcctgctgggtc

SEQ ID NO: 7599 - DNA, 20 bp, synthetic construct
  misc_feature 1..20: note = chemically synthesized
  source 1..20: mol_type = other DNA
gatgtggtcctgctgggtcg

SEQ ID NO: 7600 - DNA, 20 bp, synthetic construct
  misc_feature 1..20: note = chemically synthesized
  source 1..20: mol_type = other DNA
atgtggtcctgctgggtcgg

SEQ ID NO: 7601 - DNA, 20 bp, synthetic construct
  misc_feature 1..20: note = chemically synthesized
  source 1..20: mol_type = other DNA
tgtggtcctgctgggtcggg

SEQ ID NO: 7602 - DNA, 20 bp, synthetic construct
  misc_feature 1..20: note = chemically synthesized
  source 1..20: mol_type = other DNA
cctgctgggtcggggggtga

SEQ ID NO: 7603 - DNA, 20 bp, synthetic construct
  misc_feature 1..20: note = chemically synthesized
  source 1..20: mol_type = other DNA
ctgctgggtcggggggtgat

SEQ ID NO: 7604 - DNA, 20 bp, synthetic construct
  misc_feature 1..20: note = chemically synthesized
  source 1..20: mol_type = other DNA
ggtcggggggtgataggaat

SEQ ID NO: 7605 - DNA, 20 bp, synthetic construct
  misc_feature 1..20: note = chemically synthesized
  source 1..20: mol_type = other DNA
cggggggtgataggaatgag

SEQ ID NO: 7606 - DNA, 20 bp, synthetic construct
  misc_feature 1..20: note = chemically synthesized
  source 1..20: mol_type = other DNA
ggtgataggaatgagaagac

SEQ ID NO: 7607 - DNA, 20 bp, synthetic construct
  misc_feature 1..20: note = chemically synthesized
  source 1..20: mol_type = other DNA
gtgataggaatgagaagaca

SEQ ID NO: 7608 - DNA, 20 bp, synthetic construct
  misc_feature 1..20: note = chemically synthesized
  source 1..20: mol_type = other DNA
ataggaatgagaagacaagg

SEQ ID NO: 7609 - DNA, 20 bp, synthetic construct
  misc_feature 1..20: note = chemically synthesized
  source 1..20: mol_type = other DNA
tgagaagacaaggaagtcca

SEQ ID NO: 7610 - DNA, 20 bp, synthetic construct
  misc_feature 1..20: note = chemically synthesized
  source 1..20: mol_type = other DNA
agaagacaaggaagtccaca

SEQ ID NO: 7611 - DNA, 20 bp, synthetic construct
  misc_feature 1..20: note = chemically synthesized
  source 1..20: mol_type = other DNA
gacaaggaagtccacagagt

SEQ ID NO: 7612 - DNA, 20 bp, synthetic construct
  misc_feature 1..20: note = chemically synthesized
  source 1..20: mol_type = other DNA
acaaggaagtccacagagtc

SEQ ID NO: 7613 - DNA, 20 bp, synthetic construct
  misc_feature 1..20: note = chemically synthesized
  source 1..20: mol_type = other DNA
caaggaagtccacagagtca

SEQ ID NO: 7614 - DNA, 20 bp, synthetic construct
  misc_feature 1..20: note = chemically synthesized
  source 1..20: mol_type = other DNA
agtccacagagtcagggtcc

SEQ ID NO: 7615 - DNA, 20 bp, synthetic construct
  misc_feature 1..20: note = chemically synthesized
  source 1..20: mol_type = other DNA
gtccacagagtcagggtcca

SEQ ID NO: 7616 - DNA, 20 bp, synthetic construct
  misc_feature 1..20: note = chemically synthesized
  source 1..20: mol_type = other DNA
cagagtcagggtccaaggcc

SEQ ID NO: 7617 - DNA, 20 bp, synthetic construct
  misc_feature 1..20: note = chemically synthesized
  source 1..20: mol_type = other DNA
agtcagggtccaaggcctag

SEQ ID NO: 7618 - DNA, 20 bp, synthetic construct
  misc_feature 1..20: note = chemically synthesized
  source 1..20: mol_type = other DNA
gtcagggtccaaggcctaga

SEQ ID NO: 7619 - DNA, 20 bp, synthetic construct
  misc_feature 1..20: note = chemically synthesized
  source 1..20: mol_type = other DNA
cctagaaggtgttctgtttg

SEQ ID NO: 7620 - DNA, 20 bp, synthetic construct
  misc_feature 1..20: note = chemically synthesized
  source 1..20: mol_type = other DNA
ctagaaggtgttctgtttgc

SEQ ID NO: 7621 - DNA, 20 bp, synthetic construct
  misc_feature 1..20: note = chemically synthesized
  source 1..20: mol_type = other DNA
gaaggtgttctgtttgcagg

SEQ ID NO: 7622 - DNA, 20 bp, synthetic construct
  misc_feature 1..20: note = chemically synthesized
  source 1..20: mol_type = other DNA
gtttgcaggtggatgctgca

SEQ ID NO: 7623 - DNA, 20 bp, synthetic construct
  misc_feature 1..20: note = chemically synthesized
  source 1..20: mol_type = other DNA
ttgcaggtggatgctgcaaa

SEQ ID NO: 7624 - DNA, 20 bp, synthetic construct
  misc_feature 1..20: note = chemically synthesized
  source 1..20: mol_type = other DNA
gcaggtggatgctgcaaaga

SEQ ID NO: 7625 - DNA, 20 bp, synthetic construct
  misc_feature 1..20: note = chemically synthesized
  source 1..20: mol_type = other DNA
caggtggatgctgcaaagag

SEQ ID NO: 7626 - DNA, 20 bp, synthetic construct
  misc_feature 1..20: note = chemically synthesized
  source 1..20: mol_type = other DNA
ggtggatgctgcaaagagag

SEQ ID NO: 7627 - DNA, 20 bp, synthetic construct
  misc_feature 1..20: note = chemically synthesized
  source 1..20: mol_type = other DNA
atgctgcaaagagaggagct

SEQ ID NO: 7628 - DNA, 20 bp, synthetic construct
  misc_feature 1..20: note = chemically synthesized
  source 1..20: mol_type = other DNA
tgctgcaaagagaggagctc

SEQ ID NO: 7629 - DNA, 20 bp, synthetic construct
  misc_feature 1..20: note = chemically synthesized
  source 1..20: mol_type = other DNA
gctgcaaagagaggagctca

SEQ ID NO: 7630 - DNA, 20 bp, synthetic construct
  misc_feature 1..20: note = chemically synthesized
  source 1..20: mol_type = other DNA
caaagagaggagctcagggc

SEQ ID NO: 7631 - DNA, 20 bp, synthetic construct
  misc_feature 1..20: note = chemically synthesized
  source 1..20: mol_type = other DNA
aaagagaggagctcagggct

SEQ ID NO: 7632 - DNA, 20 bp, synthetic construct
  misc_feature 1..20: note = chemically synthesized
  source 1..20: mol_type = other DNA
gagctcagggctgggacaac

SEQ ID NO: 7633 - DNA, 20 bp, synthetic construct
  misc_feature 1..20: note = chemically synthesized
  source 1..20: mol_type = other DNA
gctcagggctgggacaactg

SEQ ID NO: 7634 - DNA, 20 bp, synthetic construct
  misc_feature 1..20: note = chemically synthesized
  source 1..20: mol_type = other DNA
tgggacaactggagctgctc

SEQ ID NO: 7635 - DNA, 20 bp, synthetic construct
  misc_feature 1..20: note = chemically synthesized
  source 1..20: mol_type = other DNA
gggacaactggagctgctct

SEQ ID NO: 7636 - DNA, 20 bp, synthetic construct
  misc_feature 1..20: note = chemically synthesized
  source 1..20: mol_type = other DNA
aactggagctgctctgggtc

SEQ ID NO: 7637 - DNA, 20 bp, synthetic construct
  misc_feature 1..20: note = chemically synthesized
  source 1..20: mol_type = other DNA
ctggagctgctctgggtctg

SEQ ID NO: 7638 - DNA, 20 bp, synthetic construct
  misc_feature 1..20: note = chemically synthesized
  source 1..20: mol_type = other DNA
tggagctgctctgggtctgg

SEQ ID NO: 7639 - DNA, 20 bp, synthetic construct
  misc_feature 1..20: note = chemically synthesized
  source 1..20: mol_type = other DNA
agctgctctgggtctggagg

SEQ ID NO: 7640 - DNA, 20 bp, synthetic construct
  misc_feature 1..20: note = chemically synthesized
  source 1..20: mol_type = other DNA
tgctctgggtctggaggcag

SEQ ID NO: 7641 - DNA, 20 bp, synthetic construct
  misc_feature 1..20: note = chemically synthesized
  source 1..20: mol_type = other DNA
ctctgggtctggaggcagca

SEQ ID NO: 7642 - DNA, 20 bp, synthetic construct
  misc_feature 1..20: note = chemically synthesized
  source 1..20: mol_type = other DNA
ctgggtctggaggcagcaga

SEQ ID NO: 7643 - DNA, 20 bp, synthetic construct
  misc_feature 1..20: note = chemically synthesized
  source 1..20: mol_type = other DNA
tgggtctggaggcagcagag

SEQ ID NO: 7644 - DNA, 20 bp, synthetic construct
  misc_feature 1..20: note = chemically synthesized
  source 1..20: mol_type = other DNA
gggtctggaggcagcagaga

SEQ ID NO: 7645 - DNA, 20 bp, synthetic construct
  misc_feature 1..20: note = chemically synthesized
  source 1..20: mol_type = other DNA
gtctggaggcagcagagagg

SEQ ID NO: 7646 - DNA, 20 bp, synthetic construct
  misc_feature 1..20: note = chemically synthesized
  source 1..20: mol_type = other DNA
gaggcagcagagagggagcc

SEQ ID NO: 7647 - DNA, 20 bp, synthetic construct
  misc_feature 1..20: note = chemically synthesized
  source 1..20: mol_type = other DNA
agggagcccagctctgtgtg

SEQ ID NO: 7648 - DNA, 20 bp, synthetic construct
  misc_feature 1..20: note = chemically synthesized
  source 1..20: mol_type = other DNA
gggagcccagctctgtgtgc

SEQ ID NO: 7649 - DNA, 20 bp, synthetic construct
  misc_feature 1..20: note = chemically synthesized
  source 1..20: mol_type = other DNA
agcccagctctgtgtgcagg

SEQ ID NO: 7650 - DNA, 20 bp, synthetic construct
  misc_feature 1..20: note = chemically synthesized
  source 1..20: mol_type = other DNA
gctctgtgtgcaggaagacg

SEQ ID NO: 7651 - DNA, 20 bp, synthetic construct
  misc_feature 1..20: note = chemically synthesized
  source 1..20: mol_type = other DNA
ctctgtgtgcaggaagacgt

SEQ ID NO: 7652 - DNA, 20 bp, synthetic construct
  misc_feature 1..20: note = chemically synthesized
  source 1..20: mol_type = other DNA
gcaggaagacgtgggtgtgt

SEQ ID NO: 7653 - DNA, 20 bp, synthetic construct
  misc_feature 1..20: note = chemically synthesized
  source 1..20: mol_type = other DNA
ggtgtgtgagtgtacgtgtg

SEQ ID NO: 7654 - DNA, 20 bp, synthetic construct
  misc_feature 1..20: note = chemically synthesized
  source 1..20: mol_type = other DNA
gtgtgtgagtgtacgtgtgt

SEQ ID NO: 7655 - DNA, 20 bp, synthetic construct
  misc_feature 1..20: note = chemically synthesized
  source 1..20: mol_type = other DNA
gtgtacgtgtgtgggtgtgt

SEQ ID NO: 7656 - DNA, 20 bp, synthetic construct
  misc_feature 1..20: note = chemically synthesized
  source 1..20: mol_type = other DNA
tgtacgtgtgtgggtgtgtc

SEQ ID NO: 7657 - DNA, 20 bp, synthetic construct
  misc_feature 1..20: note = chemically synthesized
  source 1..20: mol_type = other DNA
gtgtgtcaggtgtgtgtgtg

SEQ ID NO: 7658 - DNA, 20 bp, synthetic construct
  misc_feature 1..20: note = chemically synthesized
  source 1..20: mol_type = other DNA
tgtgtcaggtgtgtgtgtgt

SEQ ID NO: 7659 - DNA, 20 bp, synthetic construct
  misc_feature 1..20: note = chemically synthesized
  source 1..20: mol_type = other DNA
tgtcaggtgtgtgtgtgtgg

SEQ ID NO: 7660 - DNA, 20 bp, synthetic construct
  misc_feature 1..20: note = chemically synthesized
  source 1..20: mol_type = other DNA
gtcaggtgtgtgtgtgtggg

SEQ ID NO: 7661 - DNA, 20 bp, synthetic construct
  misc_feature 1..20: note = chemically synthesized
  source 1..20: mol_type = other DNA
tcaggtgtgtgtgtgtggga

SEQ ID NO: 7662 - DNA, 20 bp, synthetic construct
  misc_feature 1..20: note = chemically synthesized
  source 1..20: mol_type = other DNA
aggtgtgtgtgtgtgggagg

SEQ ID NO: 7663 - DNA, 20 bp, synthetic construct
  misc_feature 1..20: note = chemically synthesized
  source 1..20: mol_type = other DNA
gggagtatgaatgtgtgcat

SEQ ID NO: 7664 - DNA, 20 bp, synthetic construct
  misc_feature 1..20: note = chemically synthesized
  source 1..20: mol_type = other DNA
tagcatgcatatgcacatgt

SEQ ID NO: 7665 - DNA, 20 bp, synthetic construct
  misc_feature 1..20: note = chemically synthesized
  source 1..20: mol_type = other DNA
gcatgcatatgcacatgtga

SEQ ID NO: 7666 - DNA, 20 bp, synthetic construct
  misc_feature 1..20: note = chemically synthesized
  source 1..20: mol_type = other DNA
tgcatatgcacatgtgagag

SEQ ID NO: 7667 - DNA, 20 bp, synthetic construct
  misc_feature 1..20: note = chemically synthesized
  source 1..20: mol_type = other DNA
gcatatgcacatgtgagagt

SEQ ID NO: 7668 - DNA, 20 bp, synthetic construct
  misc_feature 1..20: note = chemically synthesized
  source 1..20: mol_type = other DNA
tgcacatgtgagagtgggta

SEQ ID NO: 7669 - DNA, 20 bp, synthetic construct
  misc_feature 1..20: note = chemically synthesized
  source 1..20: mol_type = other DNA
acatgtgagagtgggtacag

SEQ ID NO: 7670 - DNA, 20 bp, synthetic construct
  misc_feature 1..20: note = chemically synthesized
  source 1..20: mol_type = other DNA
atgtgagagtgggtacagca

SEQ ID NO: 7671 - DNA, 20 bp, synthetic construct
  misc_feature 1..20: note = chemically synthesized
  source 1..20: mol_type = other DNA
agagtgggtacagcagagcg

SEQ ID NO: 7672 - DNA, 20 bp, synthetic construct
  misc_feature 1..20: note = chemically synthesized
  source 1..20: mol_type = other DNA
gtacagcagagcgtggtcat

SEQ ID NO: 7673 - DNA, 20 bp, synthetic construct
  misc_feature 1..20: note = chemically synthesized
  source 1..20: mol_type = other DNA
gtgtgcaaatgtgtgttttt

SEQ ID NO: 7674 - DNA, 20 bp, synthetic construct
  misc_feature 1..20: note = chemically synthesized
  source 1..20: mol_type = other DNA
caaatgtgtgtttttgagtg

SEQ ID NO: 7675 - DNA, 20 bp, synthetic construct
  misc_feature 1..20: note = chemically synthesized
  source 1..20: mol_type = other DNA
tgtgtgtttttgagtgaagt

SEQ ID NO: 7676 - DNA, 20 bp, synthetic construct
  misc_feature 1..20: note = chemically synthesized
  source 1..20: mol_type = other DNA
gagtgaagtgagcaatgtgt

SEQ ID NO: 7677 - DNA, 20 bp, synthetic construct
  misc_feature 1..20: note = chemically synthesized
  source 1..20: mol_type = other DNA
tgagcaatgtgtgagtgtgt

SEQ ID NO: 7678 - DNA, 20 bp, synthetic construct
  misc_feature 1..20: note = chemically synthesized
  source 1..20: mol_type = other DNA
gtgagtgtgtgagtgtgtgt

SEQ ID NO: 7679 - DNA, 20 bp, synthetic construct
  misc_feature 1..20: note = chemically synthesized
  source 1..20: mol_type = other DNA
gtgagtgtgtgtgagtttgt

SEQ ID NO: 7680 - DNA, 20 bp, synthetic construct
  misc_feature 1..20: note = chemically synthesized
  source 1..20: mol_type = other DNA
tgagtgtgtgtgagtttgtg

SEQ ID NO: 7681 - DNA, 20 bp, synthetic construct
  misc_feature 1..20: note = chemically synthesized
  source 1..20: mol_type = other DNA
gagtgtgtgtgagtttgtga

SEQ ID NO: 7682 - DNA, 20 bp, synthetic construct
  misc_feature 1..20: note = chemically synthesized
  source 1..20: mol_type = other DNA
gggcatgtgaatgtgtgtgt

SEQ ID NO: 7683 - DNA, 20 bp, synthetic construct
  misc_feature 1..20: note = chemically synthesized
  source 1..20: mol_type = other DNA
aatgtgtgtgtcagtgctgt

SEQ ID NO: 7684 - DNA, 20 bp, synthetic construct
  misc_feature 1..20: note = chemically synthesized
  source 1..20: mol_type = other DNA
atgtgtgtgtcagtgctgtc

SEQ ID NO: 7685 - DNA, 20 bp, synthetic construct
  misc_feature 1..20: note = chemically synthesized
  source 1..20: mol_type = other DNA
tgtgtgtgtcagtgctgtca

SEQ ID NO: 7686 - DNA, 20 bp, synthetic construct
  misc_feature 1..20: note = chemically synthesized
  source 1..20: mol_type = other DNA
gtgtcagtgctgtcagggtg

SEQ ID NO: 7687 - DNA, 20 bp, synthetic construct
  misc_feature 1..20: note = chemically synthesized
  source 1..20: mol_type = other DNA
cagtgctgtcagggtgcaga

SEQ ID NO: 7688 - DNA, 20 bp, synthetic construct
  misc_feature 1..20: note = chemically synthesized
  source 1..20: mol_type = other DNA
tgtcagggtgcagatggatc

SEQ ID NO: 7689 - DNA, 20 bp, synthetic construct
  misc_feature 1..20: note = chemically synthesized
  source 1..20: mol_type = other DNA
gtcagggtgcagatggatca

SEQ ID NO: 7690 - DNA, 20 bp, synthetic construct
  misc_feature 1..20: note = chemically synthesized
  source 1..20: mol_type = other DNA
tcagggtgcagatggatcaa

SEQ ID NO: 7691 - DNA, 20 bp, synthetic construct
  misc_feature 1..20: note = chemically synthesized
  source 1..20: mol_type = other DNA
cagggtgcagatggatcaag

SEQ ID NO: 7692 - DNA, 20 bp, synthetic construct
  misc_feature 1..20: note = chemically synthesized
  source 1..20: mol_type = other DNA
ggtgcagatggatcaagggg

SEQ ID NO: 7693 - DNA, 20 bp, synthetic construct
  misc_feature 1..20: note = chemically synthesized
  source 1..20: mol_type = other DNA
gtgcagatggatcaaggggc

SEQ ID NO: 7694 - DNA, 20 bp, synthetic construct
  misc_feature 1..20: note = chemically synthesized
  source 1..20: mol_type = other DNA
gcagatggatcaaggggcag

SEQ ID NO: 7695 - DNA, 20 bp, synthetic construct
  misc_feature 1..20: note = chemically synthesized
  source 1..20: mol_type = other DNA
agatggatcaaggggcagga

SEQ ID NO: 7696 - DNA, 20 bp, synthetic construct
  misc_feature 1..20: note = chemically synthesized
  source 1..20: mol_type = other DNA
gatggatcaaggggcaggag

SEQ ID NO: 7697 - DNA, 20 bp, synthetic construct
  misc_feature 1..20: note = chemically synthesized
  source 1..20: mol_type = other DNA
ggggcaggagaggtacctgt

SEQ ID NO: 7698 - DNA, 20 bp, synthetic construct
  misc_feature 1..20: note = chemically synthesized
  source 1..20: mol_type = other DNA
aggtacctgtgagatgacct

SEQ ID NO: 7699 - DNA, 20 bp, synthetic construct
  misc_feature 1..20: note = chemically synthesized
  source 1..20: mol_type = other DNA
ggtacctgtgagatgacctc

SEQ ID NO: 7700 - DNA, 20 bp, synthetic construct
  misc_feature 1..20: note = chemically synthesized
  source 1..20: mol_type = other DNA
ctgtgagatgacctcgggct

SEQ ID NO: 7701 - DNA, 20 bp, synthetic construct
  misc_feature 1..20: note = chemically synthesized
  source 1..20: mol_type = other DNA
tgtgagatgacctcgggctg

SEQ ID NO: 7702 - DNA, 20 bp, synthetic construct
  misc_feature 1..20: note = chemically synthesized
  source 1..20: mol_type = other DNA
gtgagatgacctcgggctga

SEQ ID NO: 7703 - DNA, 20 bp, synthetic construct
  misc_feature 1..20: note = chemically synthesized
  source 1..20: mol_type = other DNA
tgagatgacctcgggctgag

SEQ ID NO: 7704 - DNA, 20 bp, synthetic construct
  misc_feature 1..20: note = chemically synthesized
  source 1..20: mol_type = other DNA
agatgacctcgggctgaggg

SEQ ID NO: 7705 - DNA, 20 bp, synthetic construct
  misc_feature 1..20: note = chemically synthesized
  source 1..20: mol_type = other DNA
cgggctgaggggagcaaatt

SEQ ID NO: 7706 - DNA, 20 bp, synthetic construct
  misc_feature 1..20: note = chemically synthesized
  source 1..20: mol_type = other DNA
tgaggggagcaaatttagtg

SEQ ID NO: 7707 - DNA, 20 bp, synthetic construct
  misc_feature 1..20: note = chemically synthesized
  source 1..20: mol_type = other DNA
gagcaaatttagtgtggaac

SEQ ID NO: 7708 - DNA, 20 bp, synthetic construct
  misc_feature 1..20: note = chemically synthesized
  source 1..20: mol_type = other DNA
agcaaatttagtgtggaacg

SEQ ID NO: 7709 - DNA, 20 bp, synthetic construct
  misc_feature 1..20: note = chemically synthesized
  source 1..20: mol_type = other DNA
ttagtgtggaacgaggtttc

SEQ ID NO: 7710 - DNA, 20 bp, synthetic construct
  misc_feature 1..20: note = chemically synthesized
  source 1..20: mol_type = other DNA
tagtgtggaacgaggtttct

SEQ ID NO: 7711 - DNA, 20 bp, synthetic construct
  misc_feature 1..20: note = chemically synthesized
  source 1..20: mol_type = other DNA
agtgtggaacgaggtttcta

SEQ ID NO: 7712 - DNA, 20 bp, synthetic construct
  misc_feature 1..20: note = chemically synthesized
  source 1..20: mol_type = other DNA
gtggaacgaggtttctaggg

SEQ ID NO: 7713 - DNA, 20 bp, synthetic construct
  misc_feature 1..20: note = chemically synthesized
  source 1..20: mol_type = other DNA
aacgaggtttctagggaagc

SEQ ID NO: 7714 - DNA, 20 bp, synthetic construct
  misc_feature 1..20: note = chemically synthesized
  source 1..20: mol_type = other DNA
acgaggtttctagggaagcg

SEQ ID NO: 7715 - DNA, 20 bp, synthetic construct
  misc_feature 1..20: note = chemically synthesized
  source 1..20: mol_type = other DNA
cgaggtttctagggaagcga

SEQ ID NO: 7716 - DNA, 20 bp, synthetic construct
  misc_feature 1..20: note = chemically synthesized
  source 1..20: mol_type = other DNA
tttctagggaagcgagggca

SEQ ID NO: 7717 - DNA, 20 bp, synthetic construct
  misc_feature 1..20: note = chemically synthesized
  source 1..20: mol_type = other DNA
ttctagggaagcgagggcaa

SEQ ID NO: 7718 - DNA, 20 bp, synthetic construct
  misc_feature 1..20: note = chemically synthesized
  source 1..20: mol_type = other DNA
tctagggaagcgagggcaaa

SEQ ID NO: 7719 - DNA, 20 bp, synthetic construct
  misc_feature 1..20: note = chemically synthesized
  source 1..20: mol_type = other DNA
gaagcgagggcaaagggcgc

SEQ ID NO: 7720 - DNA, 20 bp, synthetic construct
  misc_feature 1..20: note = chemically synthesized
  source 1..20: mol_type = other DNA
aagcgagggcaaagggcgct

SEQ ID NO: 7721 - DNA, 20 bp, synthetic construct
  misc_feature 1..20: note = chemically synthesized
  source 1..20: mol_type = other DNA
agcgagggcaaagggcgctg

SEQ ID NO: 7722 - DNA, 20 bp, synthetic construct
  misc_feature 1..20: note = chemically synthesized
  source 1..20: mol_type = other DNA
cgagggcaaagggcgctggg

SEQ ID NO: 7723 - DNA, 20 bp, synthetic construct
  misc_feature 1..20: note = chemically synthesized
  source 1..20: mol_type = other DNA
gagggcaaagggcgctgggg

SEQ ID NO: 7724 - DNA, 20 bp, synthetic construct
  misc_feature 1..20: note = chemically synthesized
  source 1..20: mol_type = other DNA
gggcaaagggcgctggggag

SEQ ID NO: 7725 - DNA, 20 bp, synthetic construct
  misc_feature 1..20: note = chemically synthesized
  source 1..20: mol_type = other DNA
ggcaaagggcgctggggagg

SEQ ID NO: 7726 - DNA, 20 bp, synthetic construct
  misc_feature 1..20: note = chemically synthesized
  source 1..20: mol_type = other DNA
gctggggaggaggccttgcg

SEQ ID NO: 7727 - DNA, 20 bp, synthetic construct
  misc_feature 1..20: note = chemically synthesized
  source 1..20: mol_type = other DNA
ggggaggaggccttgcgtgg

SEQ ID NO: 7728 - DNA, 20 bp, synthetic construct
  misc_feature 1..20: note = chemically synthesized
  source 1..20: mol_type = other DNA
gggaggaggccttgcgtggt

SEQ ID NO: 7729 - DNA, 20 bp, synthetic construct
  misc_feature 1..20: note = chemically synthesized
  source 1..20: mol_type = other DNA
ggaggaggccttgcgtggtg

SEQ ID NO: 7730 - DNA, 20 bp, synthetic construct
  misc_feature 1..20: note = chemically synthesized
  source 1..20: mol_type = other DNA
gaggaggccttgcgtggtgg

SEQ ID NO: 7731 - DNA, 20 bp, synthetic construct
  misc_feature 1..20: note = chemically synthesized
  source 1..20: mol_type = other DNA
ggccttgcgtggtgggggat

SEQ ID NO: 7732 - DNA, 20 bp, synthetic construct
  misc_feature 1..20: note = chemically synthesized
  source 1..20: mol_type = other DNA
gccttgcgtggtgggggatg

SEQ ID NO: 7733 - DNA, 20 bp, synthetic construct
  misc_feature 1..20: note = chemically synthesized
  source 1..20: mol_type = other DNA
gtggtgggggatgaggacaa

SEQ ID NO: 7734 - DNA, 20 bp, synthetic construct
  misc_feature 1..20: note = chemically synthesized
  source 1..20: mol_type = other DNA
tggtgggggatgaggacaac

SEQ ID NO: 7735 - DNA, 20 bp, synthetic construct
  misc_feature 1..20: note = chemically synthesized
  source 1..20: mol_type = other DNA
tgggggatgaggacaacagg

SEQ ID NO: 7736 - DNA, 20 bp, synthetic construct
  misc_feature 1..20: note = chemically synthesized
  source 1..20: mol_type = other DNA
gggggatgaggacaacaggt

SEQ ID NO: 7737 - DNA, 20 bp, synthetic construct
  misc_feature 1..20: note = chemically synthesized
  source 1..20: mol_type = other DNA
tgaggacaacaggtgggacc

SEQ ID NO: 7738 - DNA, 20 bp, synthetic construct
  misc_feature 1..20: note = chemically synthesized
  source 1..20: mol_type = other DNA
aggacaacaggtgggacctg

SEQ ID NO: 7739 - DNA, 20 bp, synthetic construct
  misc_feature 1..20: note = chemically synthesized
  source 1..20: mol_type = other DNA
ggacaacaggtgggacctgg

SEQ ID NO: 7740 - DNA, 20 bp, synthetic construct
  misc_feature 1..20: note = chemically synthesized
  source 1..20: mol_type = other DNA
gacaacaggtgggacctgga

SEQ ID NO: 7741 - DNA, 20 bp, synthetic construct
  misc_feature 1..20: note = chemically synthesized
  source 1..20: mol_type = other DNA
gggacctggagggttgtgct

SEQ ID NO: 7742 - DNA, 20 bp, synthetic construct
  misc_feature 1..20: note = chemically synthesized
  source 1..20: mol_type = other DNA
gacctggagggttgtgcttg

SEQ ID NO: 7743 - DNA, 20 bp, synthetic construct
  misc_feature 1..20: note = chemically synthesized
  source 1..20: mol_type = other DNA
cctggagggttgtgcttgga

SEQ ID NO: 7744 - DNA, 20 bp, synthetic construct
  misc_feature 1..20: note = chemically synthesized
  source 1..20: mol_type = other DNA
ggagggttgtgcttggagag

SEQ ID NO: 7745 - DNA, 20 bp, synthetic construct
  misc_feature 1..20: note = chemically synthesized
  source 1..20: mol_type = other DNA
gagggttgtgcttggagagt

SEQ ID NO: 7746 - DNA, 20 bp, synthetic construct
  misc_feature 1..20: note = chemically synthesized
  source 1..20: mol_type = other DNA
tgtgcttggagagtgggcta

SEQ ID NO: 7747 - DNA, 20 bp, synthetic construct
  misc_feature 1..20: note = chemically synthesized
  source 1..20: mol_type = other DNA
gcttggagagtgggctatgg

SEQ ID NO: 7748 - DNA, 20 bp, synthetic construct
  misc_feature 1..20: note = chemically synthesized
  source 1..20: mol_type = other DNA
tgggctatggtggaatgacc

SEQ ID NO: 7749 - DNA, 20 bp, synthetic construct
  misc_feature 1..20: note = chemically synthesized
  source 1..20: mol_type = other DNA
tggtggaatgacccagattt

SEQ ID NO: 7750 - DNA, 20 bp, synthetic construct
  misc_feature 1..20: note = chemically synthesized
  source 1..20: mol_type = other DNA
ggtggaatgacccagattta

SEQ ID NO: 7751 - DNA, 20 bp, synthetic construct
  misc_feature 1..20: note = chemically synthesized
  source 1..20: mol_type = other DNA
cccagatttaaggatctcaa

SEQ ID NO: 7752 - DNA, 20 bp, synthetic construct
  misc_feature 1..20: note = chemically synthesized
  source 1..20: mol_type = other DNA
taaggatctcaatggaattt

SEQ ID NO: 7753 - DNA, 20 bp, synthetic construct
  misc_feature 1..20: note = chemically synthesized
  source 1..20: mol_type = other DNA
ggatctcaatggaattttgg

SEQ ID NO: 7754 - DNA, 20 bp, synthetic construct
  misc_feature 1..20: note = chemically synthesized
  source 1..20: mol_type = other DNA
gatctcaatggaattttggc

SEQ ID NO: 7755 - DNA, 20 bp, synthetic construct
  misc_feature 1..20: note = chemically synthesized
  source 1..20: mol_type = other DNA
atctcaatggaattttggca

SEQ ID NO: 7756 - DNA, 20 bp, synthetic construct
  misc_feature 1..20: note = chemically synthesized
  source 1..20: mol_type = other DNA
tctcaatggaattttggcag

SEQ ID NO: 7757 - DNA, 20 bp, synthetic construct
  misc_feature 1..20: note = chemically synthesized
  source 1..20: mol_type = other DNA
tcaatggaattttggcaggg

SEQ ID NO: 7758 - DNA, 20 bp, synthetic construct
  misc_feature 1..20: note = chemically synthesized
  source 1..20: mol_type = other DNA
caatggaattttggcagggg

SEQ ID NO: 7759 - DNA, 20 bp, synthetic construct
  misc_feature 1..20: note = chemically synthesized
  source 1..20: mol_type = other DNA
aatggaattttggcagggga

SEQ ID NO: 7760 - DNA, 20 bp, synthetic construct
  misc_feature 1..20: note = chemically synthesized
  source 1..20: mol_type = other DNA
tggcaggggagggactgttc

SEQ ID NO: 7761 - DNA, 20 bp, synthetic construct
  misc_feature 1..20: note = chemically synthesized
  source 1..20: mol_type = other DNA
ggggagggactgttccagta

SEQ ID NO: 7762 - DNA, 20 bp, synthetic construct
  misc_feature 1..20: note = chemically synthesized
  source 1..20: mol_type = other DNA
gactgttccagtatggattt

SEQ ID NO: 7763 - DNA, 20 bp, synthetic construct
  misc_feature 1..20: note = chemically synthesized
  source 1..20: mol_type = other DNA
actgttccagtatggatttt

SEQ ID NO: 7764 - DNA, 20 bp, synthetic construct
  misc_feature 1..20: note = chemically synthesized
  source 1..20: mol_type = other DNA
gttccagtatggattttagg

SEQ ID NO: 7765 - DNA, 20 bp, synthetic construct
  misc_feature 1..20: note = chemically synthesized
  source 1..20: mol_type = other DNA
tatggattttaggaagaaca

SEQ ID NO: 7766 - DNA, 20 bp, synthetic construct
  misc_feature 1..20: note = chemically synthesized
  source 1..20: mol_type = other DNA
atggattttaggaagaacac

SEQ ID NO: 7767 - DNA, 20 bp, synthetic construct
  misc_feature 1..20: note = chemically synthesized
  source 1..20: mol_type = other DNA
tggattttaggaagaacaca

SEQ ID NO: 7768 - DNA, 20 bp, synthetic construct
  misc_feature 1..20: note = chemically synthesized
  source 1..20: mol_type = other DNA
tttaggaagaacacagggcc

SEQ ID NO: 7769 - DNA, 20 bp, synthetic construct
  misc_feature 1..20: note = chemically synthesized
  source 1..20: mol_type = other DNA
agaacacagggcccagcttc

SEQ ID NO: 7770 - DNA, 20 bp, synthetic construct
  misc_feature 1..20: note = chemically synthesized
  source 1..20: mol_type = other DNA
aacacagggcccagcttctg

SEQ ID NO: 7771 - DNA, 20 bp, synthetic construct
  misc_feature 1..20: note = chemically synthesized
  source 1..20: mol_type = other DNA
gcttctggagtctccaatct

SEQ ID NO: 7772 - DNA, 20 bp, synthetic construct
  misc_feature 1..20: note = chemically synthesized
  source 1..20: mol_type = other DNA
cttctggagtctccaatctg

SEQ ID NO: 7773 - DNA, 20 bp, synthetic construct
  misc_feature 1..20: note = chemically synthesized
  source 1..20: mol_type = other DNA
ttctggagtctccaatctga

SEQ ID NO: 7774 - DNA, 20 bp, synthetic construct
  misc_feature 1..20: note = chemically synthesized
  source 1..20: mol_type = other DNA
tctggagtctccaatctgag

SEQ ID NO: 7775 - DNA, 20 bp, synthetic construct
  misc_feature 1..20: note = chemically synthesized
  source 1..20: mol_type = other DNA
gagtctccaatctgagggga

SEQ ID NO: 7776 - DNA, 20 bp, synthetic construct
  misc_feature 1..20: note = chemically synthesized
  source 1..20: mol_type = other DNA
agtctccaatctgaggggac

SEQ ID NO: 7777 - DNA, 20 bp, synthetic construct
  misc_feature 1..20: note = chemically synthesized
  source 1..20: mol_type = other DNA
tctccaatctgaggggacag

SEQ ID NO: 7778 - DNA, 20 bp, synthetic construct
  misc_feature 1..20: note = chemically synthesized
  source 1..20: mol_type = other DNA
atctgaggggacaggagcct

SEQ ID NO: 7779 - DNA, 20 bp, synthetic construct
  misc_feature 1..20: note = chemically synthesized
  source 1..20: mol_type = other DNA
tgaggggacaggagccttag

SEQ ID NO: 7780 - DNA, 20 bp, synthetic construct
  misc_feature 1..20: note = chemically synthesized
  source 1..20: mol_type = other DNA
aggggacaggagccttagaa

SEQ ID NO: 7781 - DNA, 20 bp, synthetic construct
  misc_feature 1..20: note = chemically synthesized
  source 1..20: mol_type = other DNA
acaggagccttagaagagct

SEQ ID NO: 7782 - DNA, 20 bp, synthetic construct
  misc_feature 1..20: note = chemically synthesized
  source 1..20: mol_type = other DNA
gccttagaagagctgagact

SEQ ID NO: 7783 - DNA, 20 bp, synthetic construct
  misc_feature 1..20: note = chemically synthesized
  source 1..20: mol_type = other DNA
ccttagaagagctgagacta

SEQ ID NO: 7784 - DNA, 20 bp, synthetic construct
  misc_feature 1..20: note = chemically synthesized
  source 1..20: mol_type = other DNA
aagagctgagactaaggccc

SEQ ID NO: 7785 - DNA, 20 bp, synthetic construct
  misc_feature 1..20: note = chemically synthesized
  source 1..20: mol_type = other DNA
agagctgagactaaggcccg

SEQ ID NO: 7786 - DNA, 20 bp, synthetic construct
  misc_feature 1..20: note = chemically synthesized
  source 1..20: mol_type = other DNA
gactaaggcccgaggtgatc

SEQ ID NO: 7787 - DNA, 20 bp, synthetic construct
  misc_feature 1..20: note = chemically synthesized
  source 1..20: mol_type = other DNA
ctaaggcccgaggtgatctg

SEQ ID NO: 7788 - DNA, 20 bp, synthetic construct
  misc_feature 1..20: note = chemically synthesized
  source 1..20: mol_type = other DNA
taaggcccgaggtgatctgg

SEQ ID NO: 7789 - DNA, 20 bp, synthetic construct
  misc_feature 1..20: note = chemically synthesized
  source 1..20: mol_type = other DNA
gatctggaggcctctgccac

SEQ ID NO: 7790 - DNA, 20 bp, synthetic construct
  misc_feature 1..20: note = chemically synthesized
  source 1..20: mol_type = other DNA
tggaggcctctgccactggc

SEQ ID NO: 7791 - DNA, 20 bp, synthetic construct
  misc_feature 1..20: note = chemically synthesized
  source 1..20: mol_type = other DNA
ggcctctgccactggctgga

SEQ ID NO: 7792 - DNA, 20 bp, synthetic construct
  misc_feature 1..20: note = chemically synthesized
  source 1..20: mol_type = other DNA
gcctctgccactggctggat

SEQ ID NO: 7793 - DNA, 20 bp, synthetic construct
  misc_feature 1..20: note = chemically synthesized
  source 1..20: mol_type = other DNA
ctctgccactggctggatgg

SEQ ID NO: 7794 - DNA, 20 bp, synthetic construct
  misc_feature 1..20: note = chemically synthesized
  source 1..20: mol_type = other DNA
tctgccactggctggatggg

SEQ ID NO: 7795 - DNA, 20 bp, synthetic construct
  misc_feature 1..20: note = chemically synthesized
  source 1..20: mol_type = other DNA
gatgggaggaaaaccattca

SEQ ID NO: 7796 - DNA, 20 bp, synthetic construct
  misc_feature 1..20: note = chemically synthesized
  source 1..20: mol_type = other DNA
cattcacagatcccccttct

SEQ ID NO: 7797 - DNA, 20 bp, synthetic construct
  misc_feature 1..20: note = chemically synthesized
  source 1..20: mol_type = other DNA
attcacagatcccccttctc

SEQ ID NO: 7798 - DNA, 20 bp, synthetic construct
  misc_feature 1..20: note = chemically synthesized
  source 1..20: mol_type = other DNA
cccttctcaggatgtgtgcc

SEQ ID NO: 7799 - DNA, 20 bp, synthetic construct
  misc_feature 1..20: note = chemically synthesized
  source 1..20: mol_type = other DNA
ccttctcaggatgtgtgcct

SEQ ID NO: 7800 - DNA, 20 bp, synthetic construct
  misc_feature 1..20: note = chemically synthesized
  source 1..20: mol_type = other DNA
tctcaggatgtgtgcctagg

SEQ ID NO: 7801 - DNA, 20 bp, synthetic construct
  misc_feature 1..20: note = chemically synthesized
  source 1..20: mol_type = other DNA
ctcaggatgtgtgcctaggc

SEQ ID NO: 7802 - DNA, 20 bp, synthetic construct
  misc_feature 1..20: note = chemically synthesized
  source 1..20: mol_type = other DNA
tcaggatgtgtgcctaggca

SEQ ID NO: 7803 - DNA, 20 bp, synthetic construct
  misc_feature 1..20: note = chemically synthesized
  source 1..20: mol_type = other DNA
gatgtgtgcctaggcagggc

SEQ ID NO: 7804 - DNA, 20 bp, synthetic construct
  misc_feature 1..20: note = chemically synthesized
  source 1..20: mol_type = other DNA
atgtgtgcctaggcagggcc

SEQ ID NO: 7805 - DNA, 20 bp, synthetic construct
  misc_feature 1..20: note = chemically synthesized
  source 1..20: mol_type = other DNA
cccgccccctgtgcgtctcc

SEQ ID NO: 7806 - DNA, 20 bp, synthetic construct
  misc_feature 1..20: note = chemically synthesized
  source 1..20: mol_type = other DNA
ctgtgcgtctcccagtcccc

SEQ ID NO: 7807 - DNA, 20 bp, synthetic construct
  misc_feature 1..20: note = chemically synthesized
  source 1..20: mol_type = other DNA
gtctcccagtcccccagctc

SEQ ID NO: 7808 - DNA, 20 bp, synthetic construct
  misc_feature 1..20: note = chemically synthesized
  source 1..20: mol_type = other DNA
tctcccagtcccccagctcc

SEQ ID NO: 7809 - DNA, 20 bp, synthetic construct
  misc_feature 1..20: note = chemically synthesized
  source 1..20: mol_type = other DNA
agtcccccagctccaggatc

SEQ ID NO: 7810 - DNA, 20 bp, synthetic construct
  misc_feature 1..20: note = chemically synthesized
  source 1..20: mol_type = other DNA
gtcccccagctccaggatcc

SEQ ID NO: 7811 - DNA, 20 bp, synthetic construct
  misc_feature 1..20: note = chemically synthesized
  source 1..20: mol_type = other DNA
caggatccgggctttgcaca

SEQ ID NO: 7812 - DNA, 20 bp, synthetic construct
  misc_feature 1..20: note = chemically synthesized
  source 1..20: mol_type = other DNA
acagctgatgtgaatatcct

SEQ ID NO: 7813 - DNA, 20 bp, synthetic construct
  misc_feature 1..20: note = chemically synthesized
  source 1..20: mol_type = other DNA
aatatcctgagtcgtgtgca

SEQ ID NO: 7814 - DNA, 20 bp, synthetic construct
  misc_feature 1..20: note = chemically synthesized
  source 1..20: mol_type = other DNA
atatcctgagtcgtgtgcat

SEQ ID NO: 7815 - DNA, 20 bp, synthetic construct
  misc_feature 1..20: note = chemically synthesized
  source 1..20: mol_type = other DNA
gtgcatgggtgtgtgtgcac

SEQ ID NO: 7816 - DNA, 20 bp, synthetic construct
  misc_feature 1..20: note = chemically synthesized
  source 1..20: mol_type = other DNA
tgggtgtgtgtgcaccagat

SEQ ID NO: 7817 - DNA, 20 bp, synthetic construct
  misc_feature 1..20: note = chemically synthesized
  source 1..20: mol_type = other DNA
tgcgtgtgtatatttataca

SEQ ID NO: 7818 - DNA, 20 bp, synthetic construct
  misc_feature 1..20: note = chemically synthesized
  source 1..20: mol_type = other DNA
tatatttatacatggtaata

SEQ ID NO: 7819 - DNA, 20 bp, synthetic construct
  misc_feature 1..20: note = chemically synthesized
  source 1..20: mol_type = other DNA
atatttatacatggtaatat

SEQ ID NO: 7820 - DNA, 20 bp, synthetic construct
  misc_feature 1..20: note = chemically synthesized
  source 1..20: mol_type = other DNA
atacatggtaatatgggtgc

SEQ ID NO: 7821 - DNA, 20 bp, synthetic construct
  misc_feature 1..20: note = chemically synthesized
  source 1..20: mol_type = other DNA
taatatgggtgcgagtgtgt

SEQ ID NO: 7822 - DNA, 20 bp, synthetic construct
  misc_feature 1..20: note = chemically synthesized
  source 1..20: mol_type = other DNA
atatgggtgcgagtgtgtaa

SEQ ID NO: 7823 - DNA, 20 bp, synthetic construct
  misc_feature 1..20: note = chemically synthesized
  source 1..20: mol_type = other DNA
tgtgtgtaatgctcaaatgc

SEQ ID NO: 7824 - DNA, 20 bp, synthetic construct
  misc_feature 1..20: note = chemically synthesized
  source 1..20: mol_type = other DNA
gtgtgtaatgctcaaatgct

SEQ ID NO: 7825 - DNA, 20 bp, synthetic construct
  misc_feature 1..20: note = chemically synthesized
  source 1..20: mol_type = other DNA
tgtgtaatgctcaaatgctg

SEQ ID NO: 7826 - DNA, 20 bp, synthetic construct
  misc_feature 1..20: note = chemically synthesized
  source 1..20: mol_type = other DNA
atgctcaaatgctggggtca

SEQ ID NO: 7827 - DNA, 20 bp, synthetic construct
  misc_feature 1..20: note = chemically synthesized
  source 1..20: mol_type = other DNA
cctatgatgaccccccccca

SEQ ID NO: 7828 - DNA, 20 bp, synthetic construct
  misc_feature 1..20: note = chemically synthesized
  source 1..20: mol_type = other DNA
ccccaaccaatccccccgcc

SEQ ID NO: 7829 - DNA, 20 bp, synthetic construct
  misc_feature 1..20: note = chemically synthesized
  source 1..20: mol_type = other DNA
cccaaccaatccccccgccc

SEQ ID NO: 7830 - DNA, 20 bp, synthetic construct
  misc_feature 1..20: note = chemically synthesized
  source 1..20: mol_type = other DNA
ccgcccaggttatgcctcct

SEQ ID NO: 7831 - DNA, 20 bp, synthetic construct
  misc_feature 1..20: note = chemically synthesized
  source 1..20: mol_type = other DNA
cgcccaggttatgcctcctc

SEQ ID NO: 7832 - DNA, 20 bp, synthetic construct
  misc_feature 1..20: note = chemically synthesized
  source 1..20: mol_type = other DNA
ggttatgcctcctcaggctt

SEQ ID NO: 7833 - DNA, 20 bp, synthetic construct
  misc_feature 1..20: note = chemically synthesized
  source 1..20: mol_type = other DNA
ggtgccctgtctttaccctc

SEQ ID NO: 7834 - DNA, 20 bp, synthetic construct
  misc_feature 1..20: note = chemically synthesized
  source 1..20: mol_type = other DNA
accctccggctccccacacc

SEQ ID NO: 7835 - DNA, 20 bp, synthetic construct
  misc_feature 1..20: note = chemically synthesized
  source 1..20: mol_type = other DNA
ccctccggctccccacaccc

SEQ ID NO: 7836 - DNA, 20 bp, synthetic construct
  misc_feature 1..20: note = chemically synthesized
  source 1..20: mol_type = other DNA
gctccccacacccaggctgc

SEQ ID NO: 7837 - DNA, 20 bp, synthetic construct
  misc_feature 1..20: note = chemically synthesized
  source 1..20: mol_type = other DNA
ctcctgatgcccctctccca

SEQ ID NO: 7838 - DNA, 20 bp, synthetic construct
  misc_feature 1..20: note = chemically synthesized
  source 1..20: mol_type = other DNA
tcctgatgcccctctcccac

SEQ ID NO: 7839 - DNA, 20 bp, synthetic construct
  misc_feature 1..20: note = chemically synthesized
  source 1..20: mol_type = other DNA
cctgatgcccctctcccaca

SEQ ID NO: 7840 - DNA, 20 bp, synthetic construct
  misc_feature 1..20: note = chemically synthesized
  source 1..20: mol_type = other DNA
ccacagggccacctcctgcc

SEQ ID NO: 7841 - DNA, 20 bp, synthetic construct
  misc_feature 1..20: note = chemically synthesized
  source 1..20: mol_type = other DNA
gccacctcctgcccagcccc

SEQ ID NO: 7842 - DNA, 20 bp, synthetic construct
  misc_feature 1..20: note = chemically synthesized
  source 1..20: mol_type = other DNA
ctcctgcccagcccctggca

SEQ ID NO: 7843 - DNA, 20 bp, synthetic construct
  misc_feature 1..20: note = chemically synthesized
  source 1..20: mol_type = other DNA
ggcacagcgtctctgctcca

SEQ ID NO: 7844 - DNA, 20 bp, synthetic construct
  misc_feature 1..20: note = chemically synthesized
  source 1..20: mol_type = other DNA
ctctgctccatggtctgctt

SEQ ID NO: 7845 - DNA, 20 bp, synthetic construct
  misc_feature 1..20: note = chemically synthesized
  source 1..20: mol_type = other DNA
tgcttcagtctgcttgccct

SEQ ID NO: 7846 - DNA, 20 bp, synthetic construct
  misc_feature 1..20: note = chemically synthesized
  source 1..20: mol_type = other DNA
gagcttcaacatcctgctgc

SEQ ID NO: 7847 - DNA, 20 bp, synthetic construct
  misc_feature 1..20: note = chemically synthesized
  source 1..20: mol_type = other DNA
cttcaacatcctgctgctgg

SEQ ID NO: 7848 - DNA, 20 bp, synthetic construct
  misc_feature 1..20: note = chemically synthesized
  source 1..20: mol_type = other DNA
ctggtggtcatctgtgtgac

SEQ ID NO: 7849 - DNA, 20 bp, synthetic construct
  misc_feature 1..20: note = chemically synthesized
  source 1..20: mol_type = other DNA
tggtggtcatctgtgtgact

SEQ ID NO: 7850 - DNA, 20 bp, synthetic construct
  misc_feature 1..20: note = chemically synthesized
  source 1..20: mol_type = other DNA
atctgtgtgactgggtccca

SEQ ID NO: 7851 - DNA, 20 bp, synthetic construct
  misc_feature 1..20: note = chemically synthesized
  source 1..20: mol_type = other DNA
gtgtgactgggtcccaaagt

SEQ ID NO: 7852 - DNA, 20 bp, synthetic construct
  misc_feature 1..20: note = chemically synthesized
  source 1..20: mol_type = other DNA
tgtgactgggtcccaaagtg

SEQ ID NO: 7853 - DNA, 20 bp, synthetic construct
  misc_feature 1..20: note = chemically synthesized
  source 1..20: mol_type = other DNA
gtgactgggtcccaaagtga

SEQ ID NO: 7854 - DNA, 20 bp, synthetic construct
  misc_feature 1..20: note = chemically synthesized
  source 1..20: mol_type = other DNA
gggtcccaaagtgagggtca

SEQ ID NO: 7855 - DNA, 20 bp, synthetic construct
  misc_feature 1..20: note = chemically synthesized
  source 1..20: mol_type = other DNA
ggtcccaaagtgagggtcac

SEQ ID NO: 7856 - DNA, 20 bp, synthetic construct
  misc_feature 1..20: note = chemically synthesized
  source 1..20: mol_type = other DNA
gtcccaaagtgagggtcacg

SEQ ID NO: 7857 - DNA, 20 bp, synthetic construct
  misc_feature 1..20: note = chemically synthesized
  source 1..20: mol_type = other DNA
tcccaaagtgagggtcacgg

SEQ ID NO: 7858 - DNA, 20 bp, synthetic construct
  misc_feature 1..20: note = chemically synthesized
  source 1..20: mol_type = other DNA
aaagtgagggtcacgggggc

SEQ ID NO: 7859 - DNA, 20 bp, synthetic construct
  misc_feature 1..20: note = chemically synthesized
  source 1..20: mol_type = other DNA
gtgagggtcacgggggccag

SEQ ID NO: 7860 - DNA, 20 bp, synthetic construct
  misc_feature 1..20: note = chemically synthesized
  source 1..20: mol_type = other DNA
tgagggtcacgggggccagc

SEQ ID NO: 7861 - DNA, 20 bp, synthetic construct
  misc_feature 1..20: note = chemically synthesized
  source 1..20: mol_type = other DNA
gagggtcacgggggccagca

SEQ ID NO: 7862 - DNA, 20 bp, synthetic construct
  misc_feature 1..20: note = chemically synthesized
  source 1..20: mol_type = other DNA
gtcacgggggccagcaggga

SEQ ID NO: 7863 - DNA, 20 bp, synthetic construct
  misc_feature 1..20: note = chemically synthesized
  source 1..20: mol_type = other DNA
tcacgggggccagcagggat

SEQ ID NO: 7864 - DNA, 20 bp, synthetic construct
  misc_feature 1..20: note = chemically synthesized
  source 1..20: mol_type = other DNA
gggggccagcagggatgggc

SEQ ID NO: 7865 - DNA, 20 bp, synthetic construct
  misc_feature 1..20: note = chemically synthesized
  source 1..20: mol_type = other DNA
ggggccagcagggatgggca

SEQ ID NO: 7866 - DNA, 20 bp, synthetic construct
  misc_feature 1..20: note = chemically synthesized
  source 1..20: mol_type = other DNA
gggccagcagggatgggcaa

SEQ ID NO: 7867 - DNA, 20 bp, synthetic construct
  misc_feature 1..20: note = chemically synthesized
  source 1..20: mol_type = other DNA
ggccagcagggatgggcaag

SEQ ID NO: 7868 - DNA, 20 bp, synthetic construct
  misc_feature 1..20: note = chemically synthesized
  source 1..20: mol_type = other DNA
cagcagggatgggcaagggg

SEQ ID NO: 7869 - DNA, 20 bp, synthetic construct
  misc_feature 1..20: note = chemically synthesized
  source 1..20: mol_type = other DNA
agcagggatgggcaaggggt

SEQ ID NO: 7870 - DNA, 20 bp, synthetic construct
  misc_feature 1..20: note = chemically synthesized
  source 1..20: mol_type = other DNA
gcagggatgggcaaggggta

SEQ ID NO: 7871 - DNA, 20 bp, synthetic construct
  misc_feature 1..20: note = chemically synthesized
  source 1..20: mol_type = other DNA
ggatgggcaaggggtaggga

SEQ ID NO: 7872 - DNA, 20 bp, synthetic construct
  misc_feature 1..20: note = chemically synthesized
  source 1..20: mol_type = other DNA
atgggcaaggggtagggaaa

SEQ ID NO: 7873 - DNA, 20 bp, synthetic construct
  misc_feature 1..20: note = chemically synthesized
  source 1..20: mol_type = other DNA
aaggggtagggaaagagaca

SEQ ID NO: 7874 - DNA, 20 bp, synthetic construct
  misc_feature 1..20: note = chemically synthesized
  source 1..20: mol_type = other DNA
aggggtagggaaagagacat

SEQ ID NO: 7875 - DNA, 20 bp, synthetic construct
  misc_feature 1..20: note = chemically synthesized
  source 1..20: mol_type = other DNA
ggtagggaaagagacatggg

SEQ ID NO: 7876 - DNA, 20 bp, synthetic construct
  misc_feature 1..20: note = chemically synthesized
  source 1..20: mol_type = other DNA
agggaaagagacatgggcag

SEQ ID NO: 7877 - DNA, 20 bp, synthetic construct
  misc_feature 1..20: note = chemically synthesized
  source 1..20: mol_type = other DNA
acacagatgaccaccagcag

SEQ ID NO: 7878 - DNA, 20 bp, synthetic construct
  misc_feature 1..20: note = chemically synthesized
  source 1..20: mol_type = other DNA
gggcatcaggagccggcagc

SEQ ID NO: 7879 - DNA, 20 bp, synthetic construct
  misc_feature 1..20: note = chemically synthesized
  source 1..20: mol_type = other DNA
agcctgggtgtggggagccg

SEQ ID NO: 7880 - DNA, 20 bp, synthetic construct
  misc_feature 1..20: note = chemically synthesized
  source 1..20: mol_type = other DNA
aggaggcataacctgggcgg

SEQ ID NO: 7881 - DNA, 20 bp, synthetic construct
  misc_feature 1..20: note = chemically synthesized
  source 1..20: mol_type = other DNA
gattggttggggccatgggg

SEQ ID NO: 7882 - DNA, 20 bp, synthetic construct
  misc_feature 1..20: note = chemically synthesized
  source 1..20: mol_type = other DNA
acacacccatgcacacgact

SEQ ID NO: 7883 - DNA, 20 bp, synthetic construct
  misc_feature 1..20: note = chemically synthesized
  source 1..20: mol_type = other DNA
acatcagctgtgtgcaaagc

SEQ ID NO: 7884 - DNA, 20 bp, synthetic construct
  misc_feature 1..20: note = chemically synthesized
  source 1..20: mol_type = other DNA
taggcacacatcctgagaag

SEQ ID NO: 7885 - DNA, 20 bp, synthetic construct
  misc_feature 1..20: note = chemically synthesized
  source 1..20: mol_type = other DNA
catcctgagaagggggatct

SEQ ID NO: 7886 - DNA, 20 bp, synthetic construct
  misc_feature 1..20: note = chemically synthesized
  source 1..20: mol_type = other DNA
ttccattgagatccttaaat

SEQ ID NO: 7887 - DNA, 20 bp, synthetic construct
  misc_feature 1..20: note = chemically synthesized
  source 1..20: mol_type = other DNA
gggaggctcagtcaggggcc

SEQ ID NO: 7888 - DNA, 20 bp, synthetic construct
  misc_feature 1..20: note = chemically synthesized
  source 1..20: mol_type = other DNA
ggtcacttcctgccactgtc

SEQ ID NO: 7889 - DNA, 20 bp, synthetic construct
  misc_feature 1..20: note = chemically synthesized
  source 1..20: mol_type = other DNA
accaagctggccctccatgg

SEQ ID NO: 7890 - DNA, 20 bp, synthetic construct
  misc_feature 1..20: note = chemically synthesized
  source 1..20: mol_type = other DNA
tcttcagcaccctccactca

SEQ ID NO: 7891 - DNA, 20 bp, synthetic construct
  misc_feature 1..20: note = chemically synthesized
  source 1..20: mol_type = other DNA
cgacttatcaactcccaatg

SEQ ID NO: 7892 - DNA, 20 bp, synthetic construct
  misc_feature 1..20: note = chemically synthesized
  source 1..20: mol_type = other DNA
ccctgaaaccagactgccca

SEQ ID NO: 7893 - DNA, 20 bp, synthetic construct
  misc_feature 1..20: note = chemically synthesized
  source 1..20: mol_type = other DNA
tcacagtcgtagctacccga

SEQ ID NO: 7894 - DNA, 20 bp, synthetic construct
  misc_feature 1..20: note = chemically synthesized
  source 1..20: mol_type = other DNA
tagctacccgattggattgc

SEQ ID NO: 7895 - DNA, 20 bp, synthetic construct
  misc_feature 1..20: note = chemically synthesized
  source 1..20: mol_type = other DNA
tggattgctcggataattag

SEQ ID NO: 7896 - DNA, 20 bp, synthetic construct
  misc_feature 1..20: note = chemically synthesized
  source 1..20: mol_type = other DNA
aaaagtttgaacataaaaga

SEQ ID NO: 7897 - DNA, 20 bp, synthetic construct
  misc_feature 1..20: note = chemically synthesized
  source 1..20: mol_type = other DNA
cagggtctgcccaagatggg

SEQ ID NO: 7898 - DNA, 20 bp, synthetic construct
  misc_feature 1..20: note = chemically synthesized
  source 1..20: mol_type = other DNA
actctggacatcaggcaagg

SEQ ID NO: 7899 - DNA, 20 bp, synthetic construct
  misc_feature 1..20: note = chemically synthesized
  source 1..20: mol_type = other DNA
aggaggagtaaagatccctg

SEQ ID NO: 7900 - DNA, 20 bp, synthetic construct
  misc_feature 1..20: note = chemically synthesized
  source 1..20: mol_type = other DNA
accccagcttactgtttgga

SEQ ID NO: 7901 - DNA, 20 bp, synthetic construct
  misc_feature 1..20: note = chemically synthesized
  source 1..20: mol_type = other DNA
cacgttgaggagatggagct

SEQ ID NO: 7902 - DNA, 20 bp, synthetic construct
  misc_feature 1..20: note = chemically synthesized
  source 1..20: mol_type = other DNA
ccgaggagaccaaaacaatt

SEQ ID NO: 7903 - DNA, 20 bp, synthetic construct
  misc_feature 1..20: note = chemically synthesized
  source 1..20: mol_type = other DNA
caaagctcaagaacatttag

SEQ ID NO: 7904 - DNA, 20 bp, synthetic construct
  misc_feature 1..20: note = chemically synthesized
  source 1..20: mol_type = other DNA
aaaagagatccagaactgac

SEQ ID NO: 7905 - DNA, 20 bp, synthetic construct
  misc_feature 1..20: note = chemically synthesized
  source 1..20: mol_type = other DNA
tccagaactgacacggatgc

SEQ ID NO: 7906 - DNA, 20 bp, synthetic construct
  misc_feature 1..20: note = chemically synthesized
  source 1..20: mol_type = other DNA
ggatgctagaattagcaggc

SEQ ID NO: 7907 - DNA, 20 bp, synthetic construct
  misc_feature 1..20: note = chemically synthesized
  source 1..20: mol_type = other DNA
attatgttcaaaaaattaag

SEQ ID NO: 7908 - DNA, 20 bp, synthetic construct
  misc_feature 1..20: note = chemically synthesized
  source 1..20: mol_type = other DNA
aaaaattaagtagaattgtg

SEQ ID NO: 7909 - DNA, 20 bp, synthetic construct
  misc_feature 1..20: note = chemically synthesized
  source 1..20: mol_type = other DNA
tagaattgtggaggatattt

SEQ ID NO: 7910 - DNA, 20 bp, synthetic construct
  misc_feature 1..20: note = chemically synthesized
  source 1..20: mol_type = other DNA
caggcgccgtggctcacgcc

SEQ ID NO: 7911 - DNA, 20 bp, synthetic construct
  misc_feature 1..20: note = chemically synthesized
  source 1..20: mol_type = other DNA
tactcgggaggctgaggcag

SEQ ID NO: 7912 - DNA, 20 bp, synthetic construct
  misc_feature 1..20: note = chemically synthesized
  source 1..20: mol_type = other DNA
gaaagaaaagaaaaaacaca

SEQ ID NO: 7913 - DNA, 20 bp, synthetic construct
  misc_feature 1..20: note = chemically synthesized
  source 1..20: mol_type = other DNA
aaaatttagggccaggcact

SEQ ID NO: 7914 - DNA, 20 bp, synthetic construct
  misc_feature 1..20: note = chemically synthesized
  source 1..20: mol_type = other DNA
ctttgggaggtcgacacggg

SEQ ID NO: 7915 - DNA, 20 bp, synthetic construct
  misc_feature 1..20: note = chemically synthesized
  source 1..20: mol_type = other DNA
tacctgggaggctgaagtgg

SEQ ID NO: 7916 - DNA, 20 bp, synthetic construct
  misc_feature 1..20: note = chemically synthesized
  source 1..20: mol_type = other DNA
cccaggaggtggaggccaca

SEQ ID NO: 7917 - DNA, 20 bp, synthetic construct
  misc_feature 1..20: note = chemically synthesized
  source 1..20: mol_type = other DNA
ctgcattccagcctgggcaa

SEQ ID NO: 7918 - DNA, 20 bp, synthetic construct
  misc_feature 1..20: note = chemically synthesized
  source 1..20: mol_type = other DNA
aatgaaacactgggagaaaa

SEQ ID NO: 7919 - DNA, 20 bp, synthetic construct
  misc_feature 1..20: note = chemically synthesized
  source 1..20: mol_type = other DNA
aaagaattaaaaaatggaaa

SEQ ID NO: 7920 - DNA, 20 bp, synthetic construct
  misc_feature 1..20: note = chemically synthesized
  source 1..20: mol_type = other DNA
aattaaaaaatggaaagaga

SEQ ID NO: 7921 - DNA, 20 bp, synthetic construct
  misc_feature 1..20: note = chemically synthesized
  source 1..20: mol_type = other DNA
tgaaatctttaaaagaaaaa

SEQ ID NO: 7922 - DNA, 20 bp, synthetic construct
  misc_feature 1..20: note = chemically synthesized
  source 1..20: mol_type = other DNA
agcagcatcccgtattctct

SEQ ID NO: 7923 - DNA, 20 bp, synthetic construct
  misc_feature 1..20: note = chemically synthesized
  source 1..20: mol_type = other DNA
ctctgagtgttcactatgta

SEQ ID NO: 7924 - DNA, 20 bp, synthetic construct
  misc_feature 1..20: note = chemically synthesized
  source 1..20: mol_type = other DNA
accgggtgccgtgtgggcac

SEQ ID NO: 7925 - DNA, 20 bp, synthetic construct
  misc_feature 1..20: note = chemically synthesized
  source 1..20: mol_type = other DNA
tgggcactggagttgcagag

SEQ ID NO: 7926 - DNA, 20 bp, synthetic construct
  misc_feature 1..20: note = chemically synthesized
  source 1..20: mol_type = other DNA
aggagatgctactggtgttc

SEQ ID NO: 7927 - DNA, 20 bp, synthetic construct
  misc_feature 1..20: note = chemically synthesized
  source 1..20: mol_type = other DNA
tccctcggttggccagcctc

SEQ ID NO: 7928 - DNA, 20 bp, synthetic construct
  misc_feature 1..20: note = chemically synthesized
  source 1..20: mol_type = other DNA
gttggccagcctcaggaatg

SEQ ID NO: 7929 - DNA, 20 bp, synthetic construct
  misc_feature 1..20: note = chemically synthesized
  source 1..20: mol_type = other DNA
tacttgggaggctgaggtgg

SEQ ID NO: 7930 - DNA, 20 bp, synthetic construct
  misc_feature 1..20: note = chemically synthesized
  source 1..20: mol_type = other DNA
tgggaggatggcttgagccc

SEQ ID NO: 7931 - DNA, 20 bp, synthetic construct
  misc_feature 1..20: note = chemically synthesized
  source 1..20: mol_type = other DNA
tcagtcaagatttattacag

SEQ ID NO: 7932 - DNA, 20 bp, synthetic construct
  misc_feature 1..20: note = chemically synthesized
  source 1..20: mol_type = other DNA
tattacagaaggatccaggg

SEQ ID NO: 7933 - DNA, 20 bp, synthetic construct
  misc_feature 1..20: note = chemically synthesized
  source 1..20: mol_type = other DNA
tcttgggagatgagaggagc

SEQ ID NO: 7934 - DNA, 20 bp, synthetic construct
  misc_feature 1..20: note = chemically synthesized
  source 1..20: mol_type = other DNA
tgagaggagcagggatcttc

SEQ ID NO: 7935 - DNA, 20 bp, synthetic construct
  misc_feature 1..20: note = chemically synthesized
  source 1..20: mol_type = other DNA
cattcactcacacacacaca

SEQ ID NO: 7936 - DNA, 20 bp, synthetic construct
  misc_feature 1..20: note = chemically synthesized
  source 1..20: mol_type = other DNA
acacacacacagagtcccag

SEQ ID NO: 7937 - DNA, 20 bp, synthetic construct
  misc_feature 1..20: note = chemically synthesized
  source 1..20: mol_type = other DNA
catacgaggcacatgtgttc

SEQ ID NO: 7938 - DNA, 20 bp, synthetic construct
  misc_feature 1..20: note = chemically synthesized
  source 1..20: mol_type = other DNA
cctctggcacatgcctttcc

SEQ ID NO: 7939 - DNA, 20 bp, synthetic construct
  misc_feature 1..20: note = chemically synthesized
  source 1..20: mol_type = other DNA
acatgcctttcctggggtcc

SEQ ID NO: 7940 - DNA, 20 bp, synthetic construct
  misc_feature 1..20: note = chemically synthesized
  source 1..20: mol_type = other DNA
ggtgaggtgagggaacaagc

SEQ ID NO: 7941 - DNA, 20 bp, synthetic construct
  misc_feature 1..20: note = chemically synthesized
  source 1..20: mol_type = other DNA
ccctcctcagtccctgttca

SEQ ID NO: 7942 - DNA, 20 bp, synthetic construct
  misc_feature 1..20: note = chemically synthesized
  source 1..20: mol_type = other DNA
cctcagtccctgttcacaga

SEQ ID NO: 7943 - DNA, 20 bp, synthetic construct
  misc_feature 1..20: note = chemically synthesized
  source 1..20: mol_type = other DNA
tgcacacttgcctttcaaaa

SEQ ID NO: 7944 - DNA, 20 bp, synthetic construct
  misc_feature 1..20: note = chemically synthesized
  source 1..20: mol_type = other DNA
caaaaatggatttcctctcc

SEQ ID NO: 7945 - DNA, 20 bp, synthetic construct
  misc_feature 1..20: note = chemically synthesized
  source 1..20: mol_type = other DNA
cctctcctgggattcagcct

SEQ ID NO: 7946 - DNA, 20 bp, synthetic construct
  misc_feature 1..20: note = chemically synthesized
  source 1..20: mol_type = other DNA
tggcccctcaccttgatgga

SEQ ID NO: 7947 - DNA, 20 bp, synthetic construct
  misc_feature 1..20: note = chemically synthesized
  source 1..20: mol_type = other DNA
ttttcctccgagctcagctg

SEQ ID NO: 7948 - DNA, 20 bp, synthetic construct
  misc_feature 1..20: note = chemically synthesized
  source 1..20: mol_type = other DNA
attcacgtggaggttgatgg

SEQ ID NO: 7949 - DNA, 20 bp, synthetic construct
  misc_feature 1..20: note = chemically synthesized
  source 1..20: mol_type = other DNA
gttgatggtgggatggaacg

SEQ ID NO: 7950 - DNA, 20 bp, synthetic construct
  misc_feature 1..20: note = chemically synthesized
  source 1..20: mol_type = other DNA
gggatggaacgcagggtcgg

SEQ ID NO: 7951 - DNA, 20 bp, synthetic construct
  misc_feature 1..20: note = chemically synthesized
  source 1..20: mol_type = other DNA
aacgcagggtcggaggggtt

SEQ ID NO: 7952 - DNA, 20 bp, synthetic construct
  misc_feature 1..20: note = chemically synthesized
  source 1..20: mol_type = other DNA
gaggggttcggggtggtggc

SEQ ID NO: 7953 - DNA, 20 bp, synthetic construct
  misc_feature 1..20: note = chemically synthesized
  source 1..20: mol_type = other DNA
gttcggggtggtggcctggg

SEQ ID NO: 7954 - DNA, 20 bp, synthetic construct
  misc_feature 1..20: note = chemically synthesized
  source 1..20: mol_type = other DNA
atcccaccatcaacctccac

SEQ ID NO: 7955 - DNA, 20 bp, synthetic construct
  misc_feature 1..20: note = chemically synthesized
  source 1..20: mol_type = other DNA
aggggccaggcactcgcagg

SEQ ID NO: 7956 - DNA, 20 bp, synthetic construct
  misc_feature 1..20: note = chemically synthesized
  source 1..20: mol_type = other DNA
tgtgcacgtatgtgcatatg

SEQ ID NO: 7957 - DNA, 20 bp, synthetic construct
  misc_feature 1..20: note = chemically synthesized
  source 1..20: mol_type = other DNA
ctgggactctgtgtgtgtgt

SEQ ID NO: 7958 - DNA, 20 bp, synthetic construct
  misc_feature 1..20: note = chemically synthesized
  source 1..20: mol_type = other DNA
gactctgtgtgtgtgtgtga

SEQ ID NO: 7959 - DNA, 20 bp, synthetic construct
  misc_feature 1..20: note = chemically synthesized
  source 1..20: mol_type = other DNA
tgtgtatgtcgtgtatgtga

SEQ ID NO: 7960 - DNA, 20 bp, synthetic construct
  misc_feature 1..20: note = chemically synthesized
  source 1..20: mol_type = other DNA
tgagagggtatgttgtgtgt

SEQ ID NO: 7961 - DNA, 20 bp, synthetic construct
  misc_feature 1..20: note = chemically synthesized
  source 1..20: mol_type = other DNA
gtgttgtgtgtgtatgttgt

SEQ ID NO: 7962 - DNA, 20 bp, synthetic construct
  misc_feature 1..20: note = chemically synthesized
  source 1..20: mol_type = other DNA
atgttgtgtgtatcttgtgt

SEQ ID NO: 7963 - DNA, 20 bp, synthetic construct
  misc_feature 1..20: note = chemically synthesized
  source 1..20: mol_type = other DNA
tgtgcatgtgtgtatgttgt

SEQ ID NO: 7964 - DNA, 20 bp, synthetic construct
  misc_feature 1..20: note = chemically synthesized
  source 1..20: mol_type = other DNA
tgcgagtgtatgttgtgtat

SEQ ID NO: 7965 - DNA, 20 bp, synthetic construct
  misc_feature 1..20: note = chemically synthesized
  source 1..20: mol_type = other DNA
tgtgtgtatgtatgttgtgt

SEQ ID NO: 7966 - DNA, 20 bp, synthetic construct
  misc_feature 1..20: note = chemically synthesized
  source 1..20: mol_type = other DNA
gtgttgtgtgtgtgtattgt

SEQ ID NO: 7967 - DNA, 20 bp, synthetic construct
  misc_feature 1..20: note = chemically synthesized
  source 1..20: mol_type = other DNA
tatgtatgtttgtgtgttgt

SEQ ID NO: 7968 - DNA, 20 bp, synthetic construct
  misc_feature 1..20: note = chemically synthesized
  source 1..20: mol_type = other DNA
tgtgcgtgtgtgtatgttgt

SEQ ID NO: 7969 - DNA, 20 bp, synthetic construct
  misc_feature 1..20: note = chemically synthesized
  source 1..20: mol_type = other DNA
gtgtgttgtgtgtgtatgtt

SEQ ID NO: 7970 - DNA, 20 bp, synthetic construct
  misc_feature 1..20: note = chemically synthesized
  source 1..20: mol_type = other DNA
gtgttatgtatgttgtgtgt

SEQ ID NO: 7971 - DNA, 20 bp, synthetic construct
  misc_feature 1..20: note = chemically synthesized
  source 1..20: mol_type = other DNA
tgtgtgtgtgagtgtgttgc

SEQ ID NO: 7972 - DNA, 20 bp, synthetic construct
  misc_feature 1..20: note = chemically synthesized
  source 1..20: mol_type = other DNA
tgtgtgtgtgtgtgtagagg

SEQ ID NO: 7973 - DNA, 20 bp, synthetic construct
  misc_feature 1..20: note = chemically synthesized
  source 1..20: mol_type = other DNA
tgtgtgtgtgtagaggtggg

SEQ ID NO: 7974 - DNA, 20 bp, synthetic construct
  misc_feature 1..20: note = chemically synthesized
  source 1..20: mol_type = other DNA
tgtgtagaggtggggtgagt

SEQ ID NO: 7975 - DNA, 20 bp, synthetic construct
  misc_feature 1..20: note = chemically synthesized
  source 1..20: mol_type = other DNA
tagaggtggggtgagttggg

SEQ ID NO: 7976 - DNA, 20 bp, synthetic construct
  misc_feature 1..20: note = chemically synthesized
  source 1..20: mol_type = other DNA
tcatctcccaagacccttcc

SEQ ID NO: 7977 - DNA, 20 bp, synthetic construct
  misc_feature 1..20: note = chemically synthesized
  source 1..20: mol_type = other DNA
gacattttttttttagagac

SEQ ID NO: 7978 - DNA, 20 bp, synthetic construct
  misc_feature 1..20: note = chemically synthesized
  source 1..20: mol_type = other DNA
tagagacaggagtgtagtgg

SEQ ID NO: 7979 - DNA, 20 bp, synthetic construct
  misc_feature 1..20: note = chemically synthesized
  source 1..20: mol_type = other DNA
aaaaaaattttttagagaaa

SEQ ID NO: 7980 - DNA, 20 bp, synthetic construct
  misc_feature 1..20: note = chemically synthesized
  source 1..20: mol_type = other DNA
taggcagaagggcaagagcc

SEQ ID NO: 7981 - DNA, 20 bp, synthetic construct
  misc_feature 1..20: note = chemically synthesized
  source 1..20: mol_type = other DNA
agggcaagagccaggaatgg

SEQ ID NO: 7982 - DNA, 20 bp, synthetic construct
  misc_feature 1..20: note = chemically synthesized
  source 1..20: mol_type = other DNA
aatggaggagtgtcaggtgt

SEQ ID NO: 7983 - DNA, 20 bp, synthetic construct
  misc_feature 1..20: note = chemically synthesized
  source 1..20: mol_type = other DNA
tgtgggtgctggtggtggag

SEQ ID NO: 7984 - DNA, 20 bp, synthetic construct
  misc_feature 1..20: note = chemically synthesized
  source 1..20: mol_type = other DNA
aggggcttggagcttaggaa

SEQ ID NO: 7985 - DNA, 20 bp, synthetic construct
  misc_feature 1..20: note = chemically synthesized
  source 1..20: mol_type = other DNA
aggggattggttagctgggc

SEQ ID NO: 7986 - DNA, 20 bp, synthetic construct
  misc_feature 1..20: note = chemically synthesized
  source 1..20: mol_type = other DNA
agggcagggcaggggacagg

SEQ ID NO: 7987 - DNA, 20 bp, synthetic construct
  misc_feature 1..20: note = chemically synthesized
  source 1..20: mol_type = other DNA
gtacatagtgaacactcaga

SEQ ID NO: 7988 - DNA, 20 bp, synthetic construct
  misc_feature 1..20: note = chemically synthesized
  source 1..20: mol_type = other DNA
gtgaacactcagagagaata

SEQ ID NO: 7989 - DNA, 20 bp, synthetic construct
  misc_feature 1..20: note = chemically synthesized
  source 1..20: mol_type = other DNA
agagagaatacgggatgctg

SEQ ID NO: 7990 - DNA, 20 bp, synthetic construct
  misc_feature 1..20: note = chemically synthesized
  source 1..20: mol_type = other DNA
gggatgctgctgaatcttct

SEQ ID NO: 7991 - DNA, 20 bp, synthetic construct
  misc_feature 1..20: note = chemically synthesized
  source 1..20: mol_type = other DNA
gctgaatcttctgagggtga

SEQ ID NO: 7992 - DNA, 20 bp, synthetic construct
  misc_feature 1..20: note = chemically synthesized
  source 1..20: mol_type = other DNA
cttctgagggtgacagaatt

SEQ ID NO: 7993 - DNA, 20 bp, synthetic construct
  misc_feature 1..20: note = chemically synthesized
  source 1..20: mol_type = other DNA
caggaggcttggagagaggc

SEQ ID NO: 7994 - DNA, 20 bp, synthetic construct
  misc_feature 1..20: note = chemically synthesized
  source 1..20: mol_type = other DNA
aggatttctgaaattaatgg

SEQ ID NO: 7995 - DNA, 20 bp, synthetic construct
  misc_feature 1..20: note = chemically synthesized
  source 1..20: mol_type = other DNA
taatgggagagtgagctcac

SEQ ID NO: 7996 - DNA, 20 bp, synthetic construct
  misc_feature 1..20: note = chemically synthesized
  source 1..20: mol_type = other DNA
accagtgagggaccgtctga

SEQ ID NO: 7997 - DNA, 20 bp, synthetic construct
  misc_feature 1..20: note = chemically synthesized
  source 1..20: mol_type = other DNA
ccgcatttccctccagcagc

SEQ ID NO: 7998 - DNA, 20 bp, synthetic construct
  misc_feature 1..20: note = chemically synthesized
  source 1..20: mol_type = other DNA
atttcaattatgcatgtatt

SEQ ID NO: 7999 - DNA, 20 bp, synthetic construct
  misc_feature 1..20: note = chemically synthesized
  source 1..20: mol_type = other DNA
tctcccagtgtttcatttta

SEQ ID NO: 8000 - DNA, 20 bp, synthetic construct
  misc_feature 1..20: note = chemically synthesized
  source 1..20: mol_type = other DNA
tctcactctgttgcccaggc

SEQ ID NO: 8001 - DNA, 20 bp, synthetic construct
  misc_feature 1..20: note = chemically synthesized
  source 1..20: mol_type = other DNA
gagacggttttgccatgtag

SEQ ID NO: 8002 - DNA, 20 bp, synthetic construct
  misc_feature 1..20: note = chemically synthesized
  source 1..20: mol_type = other DNA
gtgtcgacctcccaaagtgc

SEQ ID NO: 8003 - DNA, 20 bp, synthetic construct
  misc_feature 1..20: note = chemically synthesized
  source 1..20: mol_type = other DNA
cttttttttttttttggagg

SEQ ID NO: 8004 - DNA, 20 bp, synthetic construct
  misc_feature 1..20: note = chemically synthesized
  source 1..20: mol_type = other DNA
tctcgctctgttgcccaggc

SEQ ID NO: 8005 - DNA, 20 bp, synthetic construct
  misc_feature 1..20: note = chemically synthesized
  source 1..20: mol_type = other DNA
ctcactgcaagctctgcctc

SEQ ID NO: 8006 - DNA, 20 bp, synthetic construct
  misc_feature 1..20: note = chemically synthesized
  source 1..20: mol_type = other DNA
cattctcctgcctcagcctc

SEQ ID NO: 8007 - DNA, 20 bp, synthetic construct
  misc_feature 1..20: note = chemically synthesized
  source 1..20: mol_type = other DNA
ttttgtatttttagtagaga

SEQ ID NO: 8008 - DNA, 20 bp, synthetic construct
  misc_feature 1..20: note = chemically synthesized
  source 1..20: mol_type = other DNA
tggggtttcaccatgttagc

SEQ ID NO: 8009 - DNA, 20 bp, synthetic construct
  misc_feature 1..20: note = chemically synthesized
  source 1..20: mol_type = other DNA
gccttggcctcccacagtgc

SEQ ID NO: 8010 - DNA, 20 bp, synthetic construct
  misc_feature 1..20: note = chemically synthesized
  source 1..20: mol_type = other DNA
acttaattttttgaacataa

SEQ ID NO: 8011 - DNA, 20 bp, synthetic construct
  misc_feature 1..20: note = chemically synthesized
  source 1..20: mol_type = other DNA
ttctagcatccgtgtcagtt

SEQ ID NO: 8012 - DNA, 20 bp, synthetic construct
  misc_feature 1..20: note = chemically synthesized
  source 1..20: mol_type = other DNA
acattgtcaatttcaccttg

SEQ ID NO: 8013 - DNA, 20 bp, synthetic construct
  misc_feature 1..20: note = chemically synthesized
  source 1..20: mol_type = other DNA
caatttcaccttgttgggtg

SEQ ID NO: 8014 - DNA, 20 bp, synthetic construct
  misc_feature 1..20: note = chemically synthesized
  source 1..20: mol_type = other DNA
aatgttcttgagctttgctc

SEQ ID NO: 8015 - DNA, 20 bp, synthetic construct
  misc_feature 1..20: note = chemically synthesized
  source 1..20: mol_type = other DNA
cgggatgcagttaagcaact

SEQ ID NO: 8016 - DNA, 20 bp, synthetic construct
  misc_feature 1..20: note = chemically synthesized
  source 1..20: mol_type = other DNA
agctccatctcctcaacgtg

SEQ ID NO: 8017 - DNA, 20 bp, synthetic construct
  misc_feature 1..20: note = chemically synthesized
  source 1..20: mol_type = other DNA
actctctccaaacagtaagc

SEQ ID NO: 8018 - DNA, 20 bp, synthetic construct
  misc_feature 1..20: note = chemically synthesized
  source 1..20: mol_type = other DNA
acagtaagctggggtgatcg

SEQ ID NO: 8019 - DNA, 20 bp, synthetic construct
  misc_feature 1..20: note = chemically synthesized
  source 1..20: mol_type = other DNA
ttgtttgcttcttatccctc

SEQ ID NO: 8020 - DNA, 20 bp, synthetic construct
  misc_feature 1..20: note = chemically synthesized
  source 1..20: mol_type = other DNA
actcctccttgcctgatgtc

SEQ ID NO: 8021 - DNA, 20 bp, synthetic construct
  misc_feature 1..20: note = chemically synthesized
  source 1..20: mol_type = other DNA
taattatccgagcaatccaa

SEQ ID NO: 8022 - DNA, 20 bp, synthetic construct
  misc_feature 1..20: note = chemically synthesized
  source 1..20: mol_type = other DNA
aaaatggaagcatggagaaa

SEQ ID NO: 8023 - DNA, 20 bp, synthetic construct
  misc_feature 1..20: note = chemically synthesized
  source 1..20: mol_type = other DNA
ccctgtgggcagtctggttt

SEQ ID NO: 8024 - DNA, 20 bp, synthetic construct
  misc_feature 1..20: note = chemically synthesized
  source 1..20: mol_type = other DNA
gtgggcagtctggtttcagg

SEQ ID NO: 8025 - DNA, 20 bp, synthetic construct
  misc_feature 1..20: note = chemically synthesized
  source 1..20: mol_type = other DNA
tgctgggctgacccagcatt

SEQ ID NO: 8026 - DNA, 20 bp, synthetic construct
  misc_feature 1..20: note = chemically synthesized
  source 1..20: mol_type = other DNA
gggaagcaggacaggaccct

SEQ ID NO: 8027 - DNA, 20 bp, synthetic construct
  misc_feature 1..20: note = chemically synthesized
  source 1..20: mol_type = other DNA
aggacaggaccctctgagtg

SEQ ID NO: 8028 - DNA, 20 bp, synthetic construct
  misc_feature 1..20: note = chemically synthesized
  source 1..20: mol_type = other DNA
accgtggtcatggagcgctt

SEQ ID NO: 8029 - DNA, 20 bp, synthetic construct
  misc_feature 1..20: note = chemically synthesized
  source 1..20: mol_type = other DNA
tggagcgcttctggatggag

SEQ ID NO: 8030 - DNA, 20 bp, synthetic construct
  misc_feature 1..20: note = chemically synthesized
  source 1..20: mol_type = other DNA
aatgcaaaggccttggagga

SEQ ID NO: 8031 - DNA, 20 bp, synthetic construct
  misc_feature 1..20: note = chemically synthesized
  source 1..20: mol_type = other DNA
ggggtgggggcagtgagagg

SEQ ID NO: 8032 - DNA, 20 bp, synthetic construct
  misc_feature 1..20: note = chemically synthesized
  source 1..20: mol_type = other DNA
ggtggggctgtgctcagagc

SEQ ID NO: 8033 - DNA, 20 bp, synthetic construct
  misc_feature 1..20: note = chemically synthesized
  source 1..20: mol_type = other DNA
tggaggtgtcagaggcctcc

SEQ ID NO: 8034 - DNA, 20 bp, synthetic construct
  misc_feature 1..20: note = chemically synthesized
  source 1..20: mol_type = other DNA
agaggcctccctgggtcaaa

SEQ ID NO: 8035 - DNA, 20 bp, synthetic construct
  misc_feature 1..20: note = chemically synthesized
  source 1..20: mol_type = other DNA
tccctgggtcaaatggggtc

SEQ ID NO: 8036 - DNA, 20 bp, synthetic construct
  misc_feature 1..20: note = chemically synthesized
  source 1..20: mol_type = other DNA
tcactggtgtgaaaaagatg

SEQ ID NO: 8037 - DNA, 20 bp, synthetic construct
  misc_feature 1..20: note = chemically synthesized
  source 1..20: mol_type = other DNA
ggcccctgactgagcctccc

SEQ ID NO: 8038 - DNA, 20 bp, synthetic construct
  misc_feature 1..20: note = chemically synthesized
  source 1..20: mol_type = other DNA
ctccccaggatgtggtcctg

SEQ ID NO: 8039 - DNA, 20 bp, synthetic construct
  misc_feature 1..20: note = chemically synthesized
  source 1..20: mol_type = other DNA
gatgtggtcctgctgggtcg

SEQ ID NO: 8040 - DNA, 20 bp, synthetic construct
  misc_feature 1..20: note = chemically synthesized
  source 1..20: mol_type = other DNA
ctgctgggtcggggggtgat

SEQ ID NO: 8041 - DNA, 20 bp, synthetic construct
  misc_feature 1..20: note = chemically synthesized
  source 1..20: mol_type = other DNA
tgagaagacaaggaagtcca

SEQ ID NO: 8042 - DNA, 20 bp, synthetic construct
  misc_feature 1..20: note = chemically synthesized
  source 1..20: mol_type = other DNA
gacaaggaagtccacagagt

SEQ ID NO: 8043 - DNA, 20 bp, synthetic construct
  misc_feature 1..20: note = chemically synthesized
  source 1..20: mol_type = other DNA
agaaggtgttctgtttgcag

SEQ ID NO: 8044 - DNA, 20 bp, synthetic construct
  misc_feature 1..20: note = chemically synthesized
  source 1..20: mol_type = other DNA
ctgggacaactggagctgct

SEQ ID NO: 8045 - DNA, 20 bp, synthetic construct
  misc_feature 1..20: note = chemically synthesized
  source 1..20: mol_type = other DNA
agctctgtgtgcaggaagac

SEQ ID NO: 8046 - DNA, 20 bp, synthetic construct
  misc_feature 1..20: note = chemically synthesized
  source 1..20: mol_type = other DNA
gtgcaggaagacgtgggtgt

SEQ ID NO: 8047 - DNA, 20 bp, synthetic construct
  misc_feature 1..20: note = chemically synthesized
  source 1..20: mol_type = other DNA
gggtgtgtgagtgtacgtgt

SEQ ID NO: 8048 - DNA, 20 bp, synthetic construct
  misc_feature 1..20: note = chemically synthesized
  source 1..20: mol_type = other DNA
tcaggtgtgtgtgtgtggga

SEQ ID NO: 8049 - DNA, 20 bp, synthetic construct
  misc_feature 1..20: note = chemically synthesized
  source 1..20: mol_type = other DNA
gtgtgtgtgtgggagggagt

SEQ ID NO: 8050 - DNA, 20 bp, synthetic construct
  misc_feature 1..20: note = chemically synthesized
  source 1..20: mol_type = other DNA
tagcatgcatatgcacatgt

SEQ ID NO: 8051 - DNA, 20 bp, synthetic construct
  misc_feature 1..20: note = chemically synthesized
  source 1..20: mol_type = other DNA
atgcatatgcacatgtgaga

SEQ ID NO: 8052 - DNA, 20 bp, synthetic construct
  misc_feature 1..20: note = chemically synthesized
  source 1..20: mol_type = other DNA
gggtacagcagagcgtggtc

SEQ ID NO: 8053 - DNA, 20 bp, synthetic construct
  misc_feature 1..20: note = chemically synthesized
  source 1..20: mol_type = other DNA
gtgtgtgcaaatgtgtgttt

SEQ ID NO: 8054 - DNA, 20 bp, synthetic construct
  misc_feature 1..20: note = chemically synthesized
  source 1..20: mol_type = other DNA
ttgagtgaagtgagcaatgt

SEQ ID NO: 8055 - DNA, 20 bp, synthetic construct
  misc_feature 1..20: note = chemically synthesized
  source 1..20: mol_type = other DNA
agtgagcaatgtgtgagtgt

SEQ ID NO: 8056 - DNA, 20 bp, synthetic construct
  misc_feature 1..20: note = chemically synthesized
  source 1..20: mol_type = other DNA
gtgtgagtgtgtgagtgtgt

SEQ ID NO: 8057 - DNA, 20 bp, synthetic construct
  misc_feature 1..20: note = chemically synthesized
  source 1..20: mol_type = other DNA
gtgtgagtttgtgagggcat

SEQ ID NO: 8058 - DNA, 20 bp, synthetic construct
  misc_feature 1..20: note = chemically synthesized
  source 1..20: mol_type = other DNA
aatgtgtgtgtcagtgctgt

SEQ ID NO: 8059 - DNA, 20 bp, synthetic construct
  misc_feature 1..20: note = chemically synthesized
  source 1..20: mol_type = other DNA
tcagtgctgtcagggtgcag

SEQ ID NO: 8060 - DNA, 20 bp, synthetic construct
  misc_feature 1..20: note = chemically synthesized
  source 1..20: mol_type = other DNA
ggaggaggccttgcgtggtg

SEQ ID NO: 8061 - DNA, 20 bp, synthetic construct
  misc_feature 1..20: note = chemically synthesized
  source 1..20: mol_type = other DNA
aggacaacaggtgggacctg

SEQ ID NO: 8062 - DNA, 20 bp, synthetic construct
  misc_feature 1..20: note = chemically synthesized
  source 1..20: mol_type = other DNA
gacctggagggttgtgcttg

SEQ ID NO: 8063 - DNA, 20 bp, synthetic construct
  misc_feature 1..20: note = chemically synthesized
  source 1..20: mol_type = other DNA
gcttggagagtgggctatgg

SEQ ID NO: 8064 - DNA, 20 bp, synthetic construct
  misc_feature 1..20: note = chemically synthesized
  source 1..20: mol_type = other DNA
tggtggaatgacccagattt

SEQ ID NO: 8065 - DNA, 20 bp, synthetic construct
  misc_feature 1..20: note = chemically synthesized
  source 1..20: mol_type = other DNA
cccagatttaaggatctcaa

SEQ ID NO: 8066 - DNA, 20 bp, synthetic construct
  misc_feature 1..20: note = chemically synthesized
  source 1..20: mol_type = other DNA
aggggagggactgttccagt

SEQ ID NO: 8067 - DNA, 20 bp, synthetic construct
  misc_feature 1..20: note = chemically synthesized
  source 1..20: mol_type = other DNA
agaacacagggcccagcttc

SEQ ID NO: 8068 - DNA, 20 bp, synthetic construct
  misc_feature 1..20: note = chemically synthesized
  source 1..20: mol_type = other DNA
ctggaggcctctgccactgg

SEQ ID NO: 8069 - DNA, 20 bp, synthetic construct
  misc_feature 1..20: note = chemically synthesized
  source 1..20: mol_type = other DNA
cattcacagatcccccttct

SEQ ID NO: 8070 - DNA, 20 bp, synthetic construct
  misc_feature 1..20: note = chemically synthesized
  source 1..20: mol_type = other DNA
ggatgtgtgcctaggcaggg

SEQ ID NO: 8071 - DNA, 20 bp, synthetic construct
  misc_feature 1..20: note = chemically synthesized
  source 1..20: mol_type = other DNA
gtctcccagtcccccagctc

SEQ ID NO: 8072 - DNA, 20 bp, synthetic construct
  misc_feature 1..20: note = chemically synthesized
  source 1..20: mol_type = other DNA
gggctttgcacacagctgat

SEQ ID NO: 8073 - DNA, 20 bp, synthetic construct
  misc_feature 1..20: note = chemically synthesized
  source 1..20: mol_type = other DNA
acacagctgatgtgaatatc

SEQ ID NO: 8074 - DNA, 20 bp, synthetic construct
  misc_feature 1..20: note = chemically synthesized
  source 1..20: mol_type = other DNA
gaatatcctgagtcgtgtgc

SEQ ID NO: 8075 - DNA, 20 bp, synthetic construct
  misc_feature 1..20: note = chemically synthesized
  source 1..20: mol_type = other DNA
gtatatttatacatggtaat

SEQ ID NO: 8076 - DNA, 20 bp, synthetic construct
  misc_feature 1..20: note = chemically synthesized
  source 1..20: mol_type = other DNA
ttatacatggtaatatgggt

SEQ ID NO: 8077 - DNA, 20 bp, synthetic construct
  misc_feature 1..20: note = chemically synthesized
  source 1..20: mol_type = other DNA
taatatgggtgcgagtgtgt

SEQ ID NO: 8078 - DNA, 20 bp, synthetic construct
  misc_feature 1..20: note = chemically synthesized
  source 1..20: mol_type = other DNA
tgtgtgtaatgctcaaatgc

SEQ ID NO: 8079 - DNA, 20 bp, synthetic construct
  misc_feature 1..20: note = chemically synthesized
  source 1..20: mol_type = other DNA
gctggtggtcatctgtgtga

SEQ ID NO: 8080 - DNA, 20 bp, synthetic construct
  misc_feature 1..20: note = chemically synthesized
  source 1..20: mol_type = other DNA
gtgtgactgggtcccaaagt

SEQ ID NO: 8081 - DNA, 20 bp, synthetic construct
  misc_feature 1..20: note = chemically synthesized
  source 1..20: mol_type = other DNA
tgagggtcacgggggccagc

SEQ ID NO: 8082 - DNA, 20 bp, synthetic construct
  misc_feature 1..20: note = chemically synthesized
  source 1..20: mol_type = other DNA
ggggccagcagggatgggca

SEQ ID NO: 8083 - DNA, 20 bp, synthetic construct
  misc_feature 1..20: note = chemically synthesized
  source 1..20: mol_type = other DNA
cgccctttgccctcgcttcc

SEQ ID NO: 8084 - DNA, 20 bp, synthetic construct
  misc_feature 1..20: note = chemically synthesized
  source 1..20: mol_type = other DNA
ggggaggctcagtcaggggc

SEQ ID NO: 8085 - DNA, 20 bp, synthetic construct
  misc_feature 1..20: note = chemically synthesized
  source 1..20: mol_type = other DNA
tgggaagagttcttctctcc

SEQ ID NO: 8086 - DNA, 20 bp, synthetic construct
  misc_feature 1..20: note = chemically synthesized
  source 1..20: mol_type = other DNA
atccagaactgacacggatg

SEQ ID NO: 8087 - DNA, 20 bp, synthetic construct
  misc_feature 1..20: note = chemically synthesized
  source 1..20: mol_type = other DNA
cattatgttcaaaaaattaa

SEQ ID NO: 8088 - DNA, 20 bp, synthetic construct
  misc_feature 1..20: note = chemically synthesized
  source 1..20: mol_type = other DNA
ctactcgggaggctgaggca

SEQ ID NO: 8089 - DNA, 20 bp, synthetic construct
  misc_feature 1..20: note = chemically synthesized
  source 1..20: mol_type = other DNA
tccgcctccaaaaaaaaaaa

SEQ ID NO: 8090 - DNA, 20 bp, synthetic construct
  misc_feature 1..20: note = chemically synthesized
  source 1..20: mol_type = other DNA
ctccaaaaaaaaaaaaaaga

SEQ ID NO: 8091 - DNA, 20 bp, synthetic construct
  misc_feature 1..20: note = chemically synthesized
  source 1..20: mol_type = other DNA
aaaaaaaaaaaaaagaaaag

SEQ ID NO: 8092 - DNA, 20 bp, synthetic construct
  misc_feature 1..20: note = chemically synthesized
  source 1..20: mol_type = other DNA
aaaaaaaaagaaaagaaaga

SEQ ID NO: 8093 - DNA, 20 bp, synthetic construct
  misc_feature 1..20: note = chemically synthesized
  source 1..20: mol_type = other DNA
tggatggaaataatggaaga

SEQ ID NO: 8094 - DNA, 20 bp, synthetic construct
  misc_feature 1..20: note = chemically synthesized
  source 1..20: mol_type = other DNA
aatggaagatgagaaatgcg

SEQ ID NO: 8095 - DNA, 20 bp, synthetic construct
  misc_feature 1..20: note = chemically synthesized
  source 1..20: mol_type = other DNA
ctctataaaatgaaacactg

SEQ ID NO: 8096 - DNA, 20 bp, synthetic construct
  misc_feature 1..20: note = chemically synthesized
  source 1..20: mol_type = other DNA
aaatgaaacactgggagaaa

SEQ ID NO: 8097 - DNA, 20 bp, synthetic construct
  misc_feature 1..20: note = chemically synthesized
  source 1..20: mol_type = other DNA
aaaagaattaaaaaatggaa

SEQ ID NO: 8098 - DNA, 20 bp, synthetic construct
  misc_feature 1..20: note = chemically synthesized
  source 1..20: mol_type = other DNA
atgcataattgaaatcttta

SEQ ID NO: 8099 - DNA, 20 bp, synthetic construct
  misc_feature 1..20: note = chemically synthesized
  source 1..20: mol_type = other DNA
tttaaaagaaaaagggggta

SEQ ID NO: 8100 - DNA, 20 bp, synthetic construct
  misc_feature 1..20: note = chemically synthesized
  source 1..20: mol_type = other DNA
agctcactctcccattaatt

SEQ ID NO: 8101 - DNA, 20 bp, synthetic construct
  misc_feature 1..20: note = chemically synthesized
  source 1..20: mol_type = other DNA
gacagagggggagcaaagcc

SEQ ID NO: 8102 - DNA, 20 bp, synthetic construct
  misc_feature 1..20: note = chemically synthesized
  source 1..20: mol_type = other DNA
caaattaaaaaaaatttttt

SEQ ID NO: 8103 - DNA, 20 bp, synthetic construct
  misc_feature 1..20: note = chemically synthesized
  source 1..20: mol_type = other DNA
ggtacatagtgaacactcag

SEQ ID NO: 8104 - DNA, 20 bp, synthetic construct
  misc_feature 1..20: note = chemically synthesized
  source 1..20: mol_type = other DNA
tgctgaatcttctgagggtg

SEQ ID NO: 8105 - DNA, 20 bp, synthetic construct
  misc_feature 1..20: note = chemically synthesized
  source 1..20: mol_type = other DNA
tgtgatctccattttacaca

SEQ ID NO: 8106 - DNA, 20 bp, synthetic construct
  misc_feature 1..20: note = chemically synthesized
  source 1..20: mol_type = other DNA
acacgagaaaatggaagcat

SEQ ID NO: 8107 - DNA, 20 bp, synthetic construct
  misc_feature 1..20: note = chemically synthesized
  source 1..20: mol_type = other DNA
acacattgctcacttcactc

SEQ ID NO: 8108 - DNA, 20 bp, synthetic construct
  misc_feature 1..20: note = chemically synthesized
  source 1..20: mol_type = other DNA
cttctctccccagaaacaat

SEQ ID NO: 8109 - DNA, 20 bp, synthetic construct
  misc_feature 1..20: note = chemically synthesized
  source 1..20: mol_type = other DNA
tccccagaaacaatcaaaac

SEQ ID NO: 8110 - DNA, 20 bp, synthetic construct
  misc_feature 1..20: note = chemically synthesized
  source 1..20: mol_type = other DNA
agctgagagtccgaggagac

SEQ ID NO: 8111 - DNA, 20 bp, synthetic construct
  misc_feature 1..20: note = chemically synthesized
  source 1..20: mol_type = other DNA
caaggcatgcaatgaaacgg

SEQ ID NO: 8112 - DNA, 20 bp, synthetic construct
  misc_feature 1..20: note = chemically synthesized
  source 1..20: mol_type = other DNA
gaattagcaggcaaggatgg

SEQ ID NO: 8113 - DNA, 20 bp, synthetic construct
  misc_feature 1..20: note = chemically synthesized
  source 1..20: mol_type = other DNA
ccaggtgaacttctagagat

SEQ ID NO: 8114 - DNA, 20 bp, synthetic construct
  misc_feature 1..20: note = chemically synthesized
  source 1..20: mol_type = other DNA
aactacaatgtctgaaatga

SEQ ID NO: 8115 - DNA, 20 bp, synthetic construct
  misc_feature 1..20: note = chemically synthesized
  source 1..20: mol_type = other DNA
aaaagaaaagaaagaaaaga

SEQ ID NO: 8116 - DNA, 20 bp, synthetic construct
  misc_feature 1..20: note = chemically synthesized
  source 1..20: mol_type = other DNA
gactagtctgggcagcatgg

SEQ ID NO: 8117 - DNA, 20 bp, synthetic construct
  misc_feature 1..20: note = chemically synthesized
  source 1..20: mol_type = other DNA
ggcaaaacccctctacatgg

SEQ ID NO: 8118 - DNA, 20 bp, synthetic construct
  misc_feature 1..20: note = chemically synthesized
  source 1..20: mol_type = other DNA
tgccactggctggatgggag

SEQ ID NO: 8119 - DNA, 20 bp, synthetic construct
  misc_feature 1..20: note = chemically synthesized
  source 1..20: mol_type = other DNA
gaggaggcataacctgggcg

SEQ ID NO: 8120 - DNA, 20 bp, synthetic construct
  misc_feature 1..20: note = chemically synthesized
  source 1..20: mol_type = other DNA
ggccatgggggggggtcatc

SEQ ID NO: 8121 - DNA, 20 bp, synthetic construct
  misc_feature 1..20: note = chemically synthesized
  source 1..20: mol_type = other DNA
cctgagaagggggatctgtg

SEQ ID NO: 8122 - DNA, 20 bp, synthetic construct
  misc_feature 1..20: note = chemically synthesized
  source 1..20: mol_type = other DNA
tcttctaaggctcctgtccc

SEQ ID NO: 8123 - DNA, 20 bp, synthetic construct
  misc_feature 1..20: note = chemically synthesized
  source 1..20: mol_type = other DNA
tcctccccagcgccctttgc

SEQ ID NO: 8124 - DNA, 20 bp, synthetic construct
  misc_feature 1..20: note = chemically synthesized
  source 1..20: mol_type = other DNA
cctccactcagagggtcctg

SEQ ID NO: 8125 - DNA, 20 bp, synthetic construct
  misc_feature 1..20: note = chemically synthesized
  source 1..20: mol_type = other DNA
tgcaccagcattcaatttct

SEQ ID NO: 8126 - DNA, 20 bp, synthetic construct
  misc_feature 1..20: note = chemically synthesized
  source 1..20: mol_type = other DNA
tggagatcacagtcgtagct

SEQ ID NO: 8127 - DNA, 20 bp, synthetic construct
  misc_feature 1..20: note = chemically synthesized
  source 1..20: mol_type = other DNA
atcacagtcgtagctacccg

SEQ ID NO: 8128 - DNA, 20 bp, synthetic construct
  misc_feature 1..20: note = chemically synthesized
  source 1..20: mol_type = other DNA
tagatgagttaaaatatgta

SEQ ID NO: 8129 - DNA, 20 bp, synthetic construct
  misc_feature 1..20: note = chemically synthesized
  source 1..20: mol_type = other DNA
atgtaatgtgcttcttaggc

SEQ ID NO: 8130 - DNA, 20 bp, synthetic construct
  misc_feature 1..20: note = chemically synthesized
  source 1..20: mol_type = other DNA
aacagacaactatagaacat

SEQ ID NO: 8131 - DNA, 20 bp, synthetic construct
  misc_feature 1..20: note = chemically synthesized
  source 1..20: mol_type = other DNA
aacaggaaccctccgatcac

SEQ ID NO: 8132 - DNA, 20 bp, synthetic construct
  misc_feature 1..20: note = chemically synthesized
  source 1..20: mol_type = other DNA
accctccgatcaccccagct

SEQ ID NO: 8133 - DNA, 20 bp, synthetic construct
  misc_feature 1..20: note = chemically synthesized
  source 1..20: mol_type = other DNA
aaacgatcaaactgactcta

SEQ ID NO: 8134 - DNA, 20 bp, synthetic construct
  misc_feature 1..20: note = chemically synthesized
  source 1..20: mol_type = other DNA
gacaatgtctggcagccaat

SEQ ID NO: 8135 - DNA, 20 bp, synthetic construct
  misc_feature 1..20: note = chemically synthesized
  source 1..20: mol_type = other DNA
aatggcatgaacccgggagg

SEQ ID NO: 8136 - DNA, 20 bp, synthetic construct
  misc_feature 1..20: note = chemically synthesized
  source 1..20: mol_type = other DNA
ctctaaattctgtcaccctc

SEQ ID NO: 8137 - DNA, 20 bp, synthetic construct
  misc_feature 1..20: note = chemically synthesized
  source 1..20: mol_type = other DNA
ttgggaggctgaggtgggag

SEQ ID NO: 8138 - DNA, 20 bp, synthetic construct
  misc_feature 1..20: note = chemically synthesized
  source 1..20: mol_type = other DNA
aagatacttaggtccttcag

SEQ ID NO: 8139 - DNA, 20 bp, synthetic construct
  misc_feature 1..20: note = chemically synthesized
  source 1..20: mol_type = other DNA
ctgcacacttgcctttcaaa

SEQ ID NO: 8140 - DNA, 20 bp, synthetic construct
  misc_feature 1..20: note = chemically synthesized
  source 1..20: mol_type = other DNA
tcaaaaatggatttcctctc

SEQ ID NO: 8141 - DNA, 20 bp, synthetic construct
  misc_feature 1..20: note = chemically synthesized
  source 1..20: mol_type = other DNA
ggctggggctggggcagagg

SEQ ID NO: 8142 - DNA, 20 bp, synthetic construct
  misc_feature 1..20: note = chemically synthesized
  source 1..20: mol_type = other DNA
ccatttttgaaaggcaagtg

SEQ ID NO: 8143 - DNA, 20 bp, synthetic construct
  misc_feature 1..20: note = chemically synthesized
  source 1..20: mol_type = other DNA
aaaggcaagtgtgcagtttc

SEQ ID NO: 8144 - DNA, 20 bp, synthetic construct
  misc_feature 1..20: note = chemically synthesized
  source 1..20: mol_type = other DNA
tgctccccctctgtctcagc

SEQ ID NO: 8145 - DNA, 20 bp, synthetic construct
  misc_feature 1..20: note = chemically synthesized
  source 1..20: mol_type = other DNA
gactgaggagggcccgacac

SEQ ID NO: 8146 - DNA, 20 bp, synthetic construct
  misc_feature 1..20: note = chemically synthesized
  source 1..20: mol_type = other DNA
acgtatgtgcatatgaggaa

SEQ ID NO: 8147 - DNA, 20 bp, synthetic construct
  misc_feature 1..20: note = chemically synthesized
  source 1..20: mol_type = other DNA
tgtgtattgtgtgagtgtat

SEQ ID NO: 8148 - DNA, 20 bp, synthetic construct
  misc_feature 1..20: note = chemically synthesized
  source 1..20: mol_type = other DNA
gtgtgtgtgttagtgtgtgt

SEQ ID NO: 8149 - DNA, 20 bp, synthetic construct
  misc_feature 1..20: note = chemically synthesized
  source 1..20: mol_type = other DNA
atgttgcccaggctggtggg

SEQ ID NO: 8150 - DNA, 20 bp, synthetic construct
  misc_feature 1..20: note = chemically synthesized
  source 1..20: mol_type = other DNA
tccatggaggcaggaggagc

SEQ ID NO: 8151 - DNA, 20 bp, synthetic construct
  misc_feature 1..20: note = chemically synthesized
  source 1..20: mol_type = other DNA
aggcaggaggagcaggggct

SEQ ID NO: 8152 - DNA, 20 bp, synthetic construct
  misc_feature 1..20: note = chemically synthesized
  source 1..20: mol_type = other DNA
caggggcttggagcttagga

SEQ ID NO: 8153 - DNA, 20 bp, synthetic construct
  misc_feature 1..20: note = chemically synthesized
  source 1..20: mol_type = other DNA
cttctgagggtgacagaatt

SEQ ID NO: 8154 - DNA, 20 bp, synthetic construct
  misc_feature 1..20: note = chemically synthesized
  source 1..20: mol_type = other DNA
cagaatttagagtttgagca

SEQ ID NO: 8155 - DNA, 20 bp, synthetic construct
  misc_feature 1..20: note = chemically synthesized
  source 1..20: mol_type = other DNA
gcaggaggcttggagagagg

SEQ ID NO: 8156 - DNA, 20 bp, synthetic construct
  misc_feature 1..20: note = chemically synthesized
  source 1..20: mol_type = other DNA
catcttccacttgtctcagc

SEQ ID NO: 8157 - DNA, 20 bp, synthetic construct
  misc_feature 1..20: note = chemically synthesized
  source 1..20: mol_type = other DNA
ctgctaccccctttttcttt

SEQ ID NO: 8158 - DNA, 20 bp, synthetic construct
  misc_feature 1..20: note = chemically synthesized
  source 1..20: mol_type = other DNA
tttttaattcttttttctcc

SEQ ID NO: 8159 - DNA, 20 bp, synthetic construct
  misc_feature 1..20: note = chemically synthesized
  source 1..20: mol_type = other DNA
cccctcccctcctttccttc

SEQ ID NO: 8160 - DNA, 20 bp, synthetic construct
  misc_feature 1..20: note = chemically synthesized
  source 1..20: mol_type = other DNA
tgttgcccaggctggaatgc

SEQ ID NO: 8161 - DNA, 20 bp, synthetic construct
  misc_feature 1..20: note = chemically synthesized
  source 1..20: mol_type = other DNA
taaaaatttttttttgtaga

SEQ ID NO: 8162 - DNA, 20 bp, synthetic construct
  misc_feature 1..20: note = chemically synthesized
  source 1..20: mol_type = other DNA
gagacggttttgccatgtag

SEQ ID NO: 8163 - DNA, 20 bp, synthetic construct
  misc_feature 1..20: note = chemically synthesized
  source 1..20: mol_type = other DNA
agtcttgagctcctgggctc

SEQ ID NO: 8164 - DNA, 20 bp, synthetic construct
  misc_feature 1..20: note = chemically synthesized
  source 1..20: mol_type = other DNA
cgtgtcgacctcccaaagtg

SEQ ID NO: 8165 - DNA, 20 bp, synthetic construct
  misc_feature 1..20: note = chemically synthesized
  source 1..20: mol_type = other DNA
tcttccattatttccatcca

SEQ ID NO: 8166 - DNA, 20 bp, synthetic construct
  misc_feature 1..20: note = chemically synthesized
  source 1..20: mol_type = other DNA
ttttgtatttttagtagaga

SEQ ID NO: 8167 - DNA, 20 bp, synthetic construct
  misc_feature 1..20: note = chemically synthesized
  source 1..20: mol_type = other DNA
cgccttggcctcccacagtg

SEQ ID NO: 8168 - DNA, 20 bp, synthetic construct
  misc_feature 1..20: note = chemically synthesized
  source 1..20: mol_type = other DNA
tgagccacggcgcctggcca

SEQ ID NO: 8169 - DNA, 20 bp, synthetic construct
  misc_feature 1..20: note = chemically synthesized
  source 1..20: mol_type = other DNA
tgttttttcatttcagacat

SEQ ID NO: 8170 - DNA, 20 bp, synthetic construct
  misc_feature 1..20: note = chemically synthesized
  source 1..20: mol_type = other DNA
taatgggatatggctataat

SEQ ID NO: 8171 - DNA, 20 bp, synthetic construct
  misc_feature 1..20: note = chemically synthesized
  source 1..20: mol_type = other DNA
atgaacctcctcgttatgca

SEQ ID NO: 8172 - DNA, 20 bp, synthetic construct
  misc_feature 1..20: note = chemically synthesized
  source 1..20: mol_type = other DNA
cctcgttatgcattgtgttt

SEQ ID NO: 8173 - DNA, 20 bp, synthetic construct
  misc_feature 1..20: note = chemically synthesized
  source 1..20: mol_type = other DNA
ttcattgcatgccttgtaat

SEQ ID NO: 8174 - DNA, 20 bp, synthetic construct
  misc_feature 1..20: note = chemically synthesized
  source 1..20: mol_type = other DNA
ttgtattcctctaaatgttc

SEQ ID NO: 8175 - DNA, 20 bp, synthetic construct
  misc_feature 1..20: note = chemically synthesized
  source 1..20: mol_type = other DNA
atgcagttaagcaacttaga

SEQ ID NO: 8176 - DNA, 20 bp, synthetic construct
  misc_feature 1..20: note = chemically synthesized
  source 1..20: mol_type = other DNA
aagcaacttagagtcagttt

SEQ ID NO: 8177 - DNA, 20 bp, synthetic construct
  misc_feature 1..20: note = chemically synthesized
  source 1..20: mol_type = other DNA
gtttgatcgtttgaactctt

SEQ ID NO: 8178 - DNA, 20 bp, synthetic construct
  misc_feature 1..20: note = chemically synthesized
  source 1..20: mol_type = other DNA
tggggtgatcggagggttcc

SEQ ID NO: 8179 - DNA, 20 bp, synthetic construct
  misc_feature 1..20: note = chemically synthesized
  source 1..20: mol_type = other DNA
gtgatcggagggttcctgtt

SEQ ID NO: 8180 - DNA, 20 bp, synthetic construct
  misc_feature 1..20: note = chemically synthesized
  source 1..20: mol_type = other DNA
agctgccatgttctatagtt

SEQ ID NO: 8181 - DNA, 20 bp, synthetic construct
  misc_feature 1..20: note = chemically synthesized
  source 1..20: mol_type = other DNA
catgttctatagttgtctgt

SEQ ID NO: 8182 - DNA, 20 bp, synthetic construct
  misc_feature 1..20: note = chemically synthesized
  source 1..20: mol_type = other DNA
tctatagttgtctgtttttg

SEQ ID NO: 8183 - DNA, 20 bp, synthetic construct
  misc_feature 1..20: note = chemically synthesized
  source 1..20: mol_type = other DNA
tagttgtctgtttttgtttt

SEQ ID NO: 8184 - DNA, 20 bp, synthetic construct
  misc_feature 1..20: note = chemically synthesized
  source 1..20: mol_type = other DNA
ctgggctaccctgtgggcag

SEQ ID NO: 8185 - DNA, 20 bp, synthetic construct
  misc_feature 1..20: note = chemically synthesized
  source 1..20: mol_type = other DNA
cagggactcagccatggagg

SEQ ID NO: 8186 - DNA, 20 bp, synthetic construct
  misc_feature 1..20: note = chemically synthesized
  source 1..20: mol_type = other DNA
tggggaacaccgtggtcatg

SEQ ID NO: 8187 - DNA, 20 bp, synthetic construct
  misc_feature 1..20: note = chemically synthesized
  source 1..20: mol_type = other DNA
ggcaggaagtgacctgggga

SEQ ID NO: 8188 - DNA, 20 bp, synthetic construct
  misc_feature 1..20: note = chemically synthesized
  source 1..20: mol_type = other DNA
ggtccaaggcctagaaggtg

SEQ ID NO: 8189 - DNA, 20 bp, synthetic construct
  misc_feature 1..20: note = chemically synthesized
  source 1..20: mol_type = other DNA
ggtcatgagtgtgtgcaaat

SEQ ID NO: 8190 - DNA, 20 bp, synthetic construct
  misc_feature 1..20: note = chemically synthesized
  source 1..20: mol_type = other DNA
gtgtgagtgtgtgagtgtgt

SEQ ID NO: 8191 - DNA, 20 bp, synthetic construct
  misc_feature 1..20: note = chemically synthesized
  source 1..20: mol_type = other DNA
ggagcaaatttagtgtggaa

SEQ ID NO: 8192 - DNA, 20 bp, synthetic construct
  misc_feature 1..20: note = chemically synthesized
  source 1..20: mol_type = other DNA
aacaggtgggacctggaggg

SEQ ID NO: 8193 - DNA, 20 bp, synthetic construct
  misc_feature 1..20: note = chemically synthesized
  source 1..20: mol_type = other DNA
agtgggctatggtggaatga

SEQ ID NO: 8194 - DNA, 20 bp, synthetic construct
  misc_feature 1..20: note = chemically synthesized
  source 1..20: mol_type = other DNA
caggggagggactgttccag

SEQ ID NO: 8195 - DNA, 20 bp, synthetic construct
  misc_feature 1..20: note = chemically synthesized
  source 1..20: mol_type = other DNA
attttaggaagaacacaggg

SEQ ID NO: 8196 - DNA, 20 bp, synthetic construct
  misc_feature 1..20: note = chemically synthesized
  source 1..20: mol_type = other DNA
cagtcccccagctccaggat

SEQ ID NO: 8197 - DNA, 20 bp, synthetic construct
  misc_feature 1..20: note = chemically synthesized
  source 1..20: mol_type = other DNA
gtgtgcatgggtgtgtgtgc

SEQ ID NO: 8198 - DNA, 20 bp, synthetic construct
  misc_feature 1..20: note = chemically synthesized
  source 1..20: mol_type = other DNA
cccgcccaggttatgcctcc

SEQ ID NO: 8199 - DNA, 20 bp, synthetic construct
  misc_feature 1..20: note = chemically synthesized
  source 1..20: mol_type = other DNA
cacagcgtctctgctccatg

SEQ ID NO: 8200 - DNA, 20 bp, synthetic construct
  misc_feature 1..20: note = chemically synthesized
  source 1..20: mol_type = other DNA
ctgctccatggtctgcttca

SEQ ID NO: 8201 - DNA, 20 bp, synthetic construct
  misc_feature 1..20: note = chemically synthesized
  source 1..20: mol_type = other DNA
tctgcttcagtctgcttgcc

SEQ ID NO: 8202 - DNA, 22 bp, synthetic construct
  misc_feature 1..22: note = chemically synthesized
  source 1..22: mol_type = other DNA
cccatgtctctttccctacccc

SEQ ID NO: 8203 - DNA, 22 bp, synthetic construct
  misc_feature 1..22: note = chemically synthesized
  source 1..22: mol_type = other DNA
tttccctaccccttgcccatcc

SEQ ID NO: 8204 - DNA, 22 bp, synthetic construct
  misc_feature 1..22: note = chemically synthesized
  source 1..22: mol_type = other DNA
tccctaccccttgcccatccct

SEQ ID NO: 8205 - DNA, 22 bp, synthetic construct
  misc_feature 1..22: note = chemically synthesized
  source 1..22: mol_type = other DNA
ccctaccccttgcccatccctg

SEQ ID NO: 8206 - DNA, 22 bp, synthetic construct
  misc_feature 1..22: note = chemically synthesized
  source 1..22: mol_type = other DNA
cctaccccttgcccatccctgc

SEQ ID NO: 8207 - DNA, 22 bp, synthetic construct
  misc_feature 1..22: note = chemically synthesized
  source 1..22: mol_type = other DNA
ccccttgcccatccctgctggc

SEQ ID NO: 8208 - DNA, 22 bp, synthetic construct
  misc_feature 1..22: note = chemically synthesized
  source 1..22: mol_type = other DNA
gcccatccctgctggcccccgt

SEQ ID NO: 8209 - DNA, 22 bp, synthetic construct
  misc_feature 1..22: note = chemically synthesized
  source 1..22: mol_type = other DNA
cccatccctgctggcccccgtg

SEQ ID NO: 8210 - DNA, 22 bp, synthetic construct
  misc_feature 1..22: note = chemically synthesized
  source 1..22: mol_type = other DNA
ctggcccccgtgaccctcactt

SEQ ID NO: 8211 - DNA, 22 bp, synthetic construct
  misc_feature 1..22: note = chemically synthesized
  source 1..22: mol_type = other DNA
gcccccgtgaccctcactttgg

SEQ ID NO: 8212 - DNA, 22 bp, synthetic construct
  misc_feature 1..22: note = chemically synthesized
  source 1..22: mol_type = other DNA
actttgggacccagtcacacag

SEQ ID NO: 8213 - DNA, 22 bp, synthetic construct
  misc_feature 1..22: note = chemically synthesized
  source 1..22: mol_type = other DNA
tgggacccagtcacacagatga

SEQ ID NO: 8214 - DNA, 22 bp, synthetic construct
  misc_feature 1..22: note = chemically synthesized
  source 1..22: mol_type = other DNA
gggacccagtcacacagatgac

SEQ ID NO: 8215 - DNA, 22 bp, synthetic construct
  misc_feature 1..22: note = chemically synthesized
  source 1..22: mol_type = other DNA
ggacccagtcacacagatgacc

SEQ ID NO: 8216 - DNA, 22 bp, synthetic construct
  misc_feature 1..22: note = chemically synthesized
  source 1..22: mol_type = other DNA
aagctcagggcaagcagactga

SEQ ID NO: 8217 - DNA, 22 bp, synthetic construct
  misc_feature 1..22: note = chemically synthesized
  source 1..22: mol_type = other DNA
agggcaagcagactgaagcaga

SEQ ID NO: 8218 - DNA, 22 bp, synthetic construct
  misc_feature 1..22: note = chemically synthesized
  source 1..22: mol_type = other DNA
aagcagaccatggagcagagac

SEQ ID NO: 8219 - DNA, 22 bp, synthetic construct
  misc_feature 1..22: note = chemically synthesized
  source 1..22: mol_type = other DNA
tgccaggggctgggcaggaggt

SEQ ID NO: 8220 - DNA, 22 bp, synthetic construct
  misc_feature 1..22: note = chemically synthesized
  source 1..22: mol_type = other DNA
ggcaggaggtggccctgtggga

SEQ ID NO: 8221 - DNA, 22 bp, synthetic construct
  misc_feature 1..22: note = chemically synthesized
  source 1..22: mol_type = other DNA
tgggagaggggcatcaggagcc

SEQ ID NO: 8222 - DNA, 22 bp, synthetic construct
  misc_feature 1..22: note = chemically synthesized
  source 1..22: mol_type = other DNA
ggtgtggggagccggagggtaa

SEQ ID NO: 8223 - DNA, 22 bp, synthetic construct
  misc_feature 1..22: note = chemically synthesized
  source 1..22: mol_type = other DNA
aggaggcataacctgggcgggg

SEQ ID NO: 8224 - DNA, 22 bp, synthetic construct
  misc_feature 1..22: note = chemically synthesized
  source 1..22: mol_type = other DNA
ggcggggggattggttggggcc

SEQ ID NO: 8225 - DNA, 22 bp, synthetic construct
  misc_feature 1..22: note = chemically synthesized
  source 1..22: mol_type = other DNA
gttggggccatgggggggggtc

SEQ ID NO: 8226 - DNA, 22 bp, synthetic construct
  misc_feature 1..22: note = chemically synthesized
  source 1..22: mol_type = other DNA
gggccatgggggggggtcatca

SEQ ID NO: 8227 - DNA, 22 bp, synthetic construct
  misc_feature 1..22: note = chemically synthesized
  source 1..22: mol_type = other DNA
tgaccccagcatttgagcatta

SEQ ID NO: 8228 - DNA, 22 bp, synthetic construct
  misc_feature 1..22: note = chemically synthesized
  source 1..22: mol_type = other DNA
gaccccagcatttgagcattac

SEQ ID NO: 8229 - DNA, 22 bp, synthetic construct
  misc_feature 1..22: note = chemically synthesized
  source 1..22: mol_type = other DNA
accccagcatttgagcattaca

SEQ ID NO: 8230 - DNA, 22 bp, synthetic construct
  misc_feature 1..22: note = chemically synthesized
  source 1..22: mol_type = other DNA
gagcattacacacacactctta

SEQ ID NO: 8231 - DNA, 22 bp, synthetic construct
  misc_feature 1..22: note = chemically synthesized
  source 1..22: mol_type = other DNA
agcattacacacacactcttac

SEQ ID NO: 8232 - DNA, 22 bp, synthetic construct
  misc_feature 1..22: note = chemically synthesized
  source 1..22: mol_type = other DNA
cacacacactcttacacactcg

SEQ ID NO: 8233 - DNA, 22 bp, synthetic construct
  misc_feature 1..22: note = chemically synthesized
  source 1..22: mol_type = other DNA
ttacacactcgcacccatatta

SEQ ID NO: 8234 - DNA, 22 bp, synthetic construct
  misc_feature 1..22: note = chemically synthesized
  source 1..22: mol_type = other DNA
acacactcgcacccatattacc

SEQ ID NO: 8235 - DNA, 22 bp, synthetic construct
  misc_feature 1..22: note = chemically synthesized
  source 1..22: mol_type = other DNA
cacactcgcacccatattacca

SEQ ID NO: 8236 - DNA, 22 bp, synthetic construct
  misc_feature 1..22: note = chemically synthesized
  source 1..22: mol_type = other DNA
gcacccatattaccatgtataa

SEQ ID NO: 8237 - DNA, 22 bp, synthetic construct
  misc_feature 1..22: note = chemically synthesized
  source 1..22: mol_type = other DNA
ccatgtataaatatacacacgc

SEQ ID NO: 8238 - DNA, 22 bp, synthetic construct
  misc_feature 1..22: note = chemically synthesized
  source 1..22: mol_type = other DNA
atctggtgcacacacacccatg

SEQ ID NO: 8239 - DNA, 22 bp, synthetic construct
  misc_feature 1..22: note = chemically synthesized
  source 1..22: mol_type = other DNA
gtgcacacacacccatgcacac

SEQ ID NO: 8240 - DNA, 22 bp, synthetic construct
  misc_feature 1..22: note = chemically synthesized
  source 1..22: mol_type = other DNA
aggatattcacatcagctgtgt

SEQ ID NO: 8241 - DNA, 22 bp, synthetic construct
  misc_feature 1..22: note = chemically synthesized
  source 1..22: mol_type = other DNA
acatcagctgtgtgcaaagccc

SEQ ID NO: 8242 - DNA, 22 bp, synthetic construct
  misc_feature 1..22: note = chemically synthesized
  source 1..22: mol_type = other DNA
tgtgcaaagcccggatcctgga

SEQ ID NO: 8243 - DNA, 22 bp, synthetic construct
  misc_feature 1..22: note = chemically synthesized
  source 1..22: mol_type = other DNA
gagctgggggactgggagacgc

SEQ ID NO: 8244 - DNA, 22 bp, synthetic construct
  misc_feature 1..22: note = chemically synthesized
  source 1..22: mol_type = other DNA
ggggactgggagacgcacaggg

SEQ ID NO: 8245 - DNA, 22 bp, synthetic construct
  misc_feature 1..22: note = chemically synthesized
  source 1..22: mol_type = other DNA
ggagacgcacagggggcggggg

SEQ ID NO: 8246 - DNA, 22 bp, synthetic construct
  misc_feature 1..22: note = chemically synthesized
  source 1..22: mol_type = other DNA
cctaggcacacatcctgagaag

SEQ ID NO: 8247 - DNA, 22 bp, synthetic construct
  misc_feature 1..22: note = chemically synthesized
  source 1..22: mol_type = other DNA
ggcacacatcctgagaaggggg

SEQ ID NO: 8248 - DNA, 22 bp, synthetic construct
  misc_feature 1..22: note = chemically synthesized
  source 1..22: mol_type = other DNA
agaagggggatctgtgaatggt

SEQ ID NO: 8249 - DNA, 22 bp, synthetic construct
  misc_feature 1..22: note = chemically synthesized
  source 1..22: mol_type = other DNA
tgaatggttttcctcccatcca

SEQ ID NO: 8250 - DNA, 22 bp, synthetic construct
  misc_feature 1..22: note = chemically synthesized
  source 1..22: mol_type = other DNA
tcctcccatccagccagtggca

SEQ ID NO: 8251 - DNA, 22 bp, synthetic construct
  misc_feature 1..22: note = chemically synthesized
  source 1..22: mol_type = other DNA
cctcccatccagccagtggcag

SEQ ID NO: 8252 - DNA, 22 bp, synthetic construct
  misc_feature 1..22: note = chemically synthesized
  source 1..22: mol_type = other DNA
ctcccatccagccagtggcaga

SEQ ID NO: 8253 - DNA, 22 bp, synthetic construct
  misc_feature 1..22: note = chemically synthesized
  source 1..22: mol_type = other DNA
ccatccagccagtggcagaggc

SEQ ID NO: 8254 - DNA, 22 bp, synthetic construct
  misc_feature 1..22: note = chemically synthesized
  source 1..22: mol_type = other DNA
cagatcacctcgggccttagtc

SEQ ID NO: 8255 - DNA, 22 bp, synthetic construct
  misc_feature 1..22: note = chemically synthesized
  source 1..22: mol_type = other DNA
gggccttagtctcagctcttct

SEQ ID NO: 8256 - DNA, 22 bp, synthetic construct
  misc_feature 1..22: note = chemically synthesized
  source 1..22: mol_type = other DNA
agtctcagctcttctaaggctc

SEQ ID NO: 8257 - DNA, 22 bp, synthetic construct
  misc_feature 1..22: note = chemically synthesized
  source 1..22: mol_type = other DNA
gtctcagctcttctaaggctcc

SEQ ID NO: 8258 - DNA, 22 bp, synthetic construct
  misc_feature 1..22: note = chemically synthesized
  source 1..22: mol_type = other DNA
agctcttctaaggctcctgtcc

SEQ ID NO: 8259 - DNA, 22 bp, synthetic construct
  misc_feature 1..22: note = chemically synthesized
  source 1..22: mol_type = other DNA
ttctaaggctcctgtcccctca

SEQ ID NO: 8260 - DNA, 22 bp, synthetic construct
  misc_feature 1..22: note = chemically synthesized
  source 1..22: mol_type = other DNA
ctaaggctcctgtcccctcaga

SEQ ID NO: 8261 - DNA, 22 bp, synthetic construct
  misc_feature 1..22: note = chemically synthesized
  source 1..22: mol_type = other DNA
taaggctcctgtcccctcagat

SEQ ID NO: 8262 - DNA, 22 bp, synthetic construct
  misc_feature 1..22: note = chemically synthesized
  source 1..22: mol_type = other DNA
aggctcctgtcccctcagattg

SEQ ID NO: 8263 - DNA, 22 bp, synthetic construct
  misc_feature 1..22: note = chemically synthesized
  source 1..22: mol_type = other DNA
ctgtcccctcagattggagact

SEQ ID NO: 8264 - DNA, 22 bp, synthetic construct
  misc_feature 1..22: note = chemically synthesized
  source 1..22: mol_type = other DNA
tcccctcagattggagactcca

SEQ ID NO: 8265 - DNA, 22 bp, synthetic construct
  misc_feature 1..22: note = chemically synthesized
  source 1..22: mol_type = other DNA
agattggagactccagaagctg

SEQ ID NO: 8266 - DNA, 22 bp, synthetic construct
  misc_feature 1..22: note = chemically synthesized
  source 1..22: mol_type = other DNA
gagactccagaagctgggccct

SEQ ID NO: 8267 - DNA, 22 bp, synthetic construct
  misc_feature 1..22: note = chemically synthesized
  source 1..22: mol_type = other DNA
cagaagctgggccctgtgttct

SEQ ID NO: 8268 - DNA, 22 bp, synthetic construct
  misc_feature 1..22: note = chemically synthesized
  source 1..22: mol_type = other DNA
ggccctgtgttcttcctaaaat

SEQ ID NO: 8269 - DNA, 22 bp, synthetic construct
  misc_feature 1..22: note = chemically synthesized
  source 1..22: mol_type = other DNA
tgttcttcctaaaatccatact

SEQ ID NO: 8270 - DNA, 22 bp, synthetic construct
  misc_feature 1..22: note = chemically synthesized
  source 1..22: mol_type = other DNA
ttcctaaaatccatactggaac

SEQ ID NO: 8271 - DNA, 22 bp, synthetic construct
  misc_feature 1..22: note = chemically synthesized
  source 1..22: mol_type = other DNA
cctaaaatccatactggaacag

SEQ ID NO: 8272 - DNA, 22 bp, synthetic construct
  misc_feature 1..22: note = chemically synthesized
  source 1..22: mol_type = other DNA
ctaaaatccatactggaacagt

SEQ ID NO: 8273 - DNA, 22 bp, synthetic construct
  misc_feature 1..22: note = chemically synthesized
  source 1..22: mol_type = other DNA
aaatccatactggaacagtccc

SEQ ID NO: 8274 - DNA, 22 bp, synthetic construct
  misc_feature 1..22: note = chemically synthesized
  source 1..22: mol_type = other DNA
gaacagtccctcccctgccaaa

SEQ ID NO: 8275 - DNA, 22 bp, synthetic construct
  misc_feature 1..22: note = chemically synthesized
  source 1..22: mol_type = other DNA
ccctgccaaaattccattgaga

SEQ ID NO: 8276 - DNA, 22 bp, synthetic construct
  misc_feature 1..22: note = chemically synthesized
  source 1..22: mol_type = other DNA
ccaaaattccattgagatcctt

SEQ ID NO: 8277 - DNA, 22 bp, synthetic construct
  misc_feature 1..22: note = chemically synthesized
  source 1..22: mol_type = other DNA
cattgagatccttaaatctggg

SEQ ID NO: 8278 - DNA, 22 bp, synthetic construct
  misc_feature 1..22: note = chemically synthesized
  source 1..22: mol_type = other DNA
agatccttaaatctgggtcatt

SEQ ID NO: 8279 - DNA, 22 bp, synthetic construct
  misc_feature 1..22: note = chemically synthesized
  source 1..22: mol_type = other DNA
aaatctgggtcattccaccata

SEQ ID NO: 8280 - DNA, 22 bp, synthetic construct
  misc_feature 1..22: note = chemically synthesized
  source 1..22: mol_type = other DNA
aatctgggtcattccaccatag

SEQ ID NO: 8281 - DNA, 22 bp, synthetic construct
  misc_feature 1..22: note = chemically synthesized
  source 1..22: mol_type = other DNA
ggtcattccaccatagcccact

SEQ ID NO: 8282 - DNA, 22 bp, synthetic construct
  misc_feature 1..22: note = chemically synthesized
  source 1..22: mol_type = other DNA
caccatagcccactctccaagc

SEQ ID NO: 8283 - DNA, 22 bp, synthetic construct
  misc_feature 1..22: note = chemically synthesized
  source 1..22: mol_type = other DNA
tccaagcacaaccctccaggtc

SEQ ID NO: 8284 - DNA, 22 bp, synthetic construct
  misc_feature 1..22: note = chemically synthesized
  source 1..22: mol_type = other DNA
caagcacaaccctccaggtccc

SEQ ID NO: 8285 - DNA, 22 bp, synthetic construct
  misc_feature 1..22: note = chemically synthesized
  source 1..22: mol_type = other DNA
caggtcccacctgttgtcctca

SEQ ID NO: 8286 - DNA, 22 bp, synthetic construct
  misc_feature 1..22: note = chemically synthesized
  source 1..22: mol_type = other DNA
ttgtcctcatcccccaccacgc

SEQ ID NO: 8287 - DNA, 22 bp, synthetic construct
  misc_feature 1..22: note = chemically synthesized
  source 1..22: mol_type = other DNA
tcctcatcccccaccacgcaag

SEQ ID NO: 8288 - DNA, 22 bp, synthetic construct
  misc_feature 1..22: note = chemically synthesized
  source 1..22: mol_type = other DNA
atcccccaccacgcaaggcctc

SEQ ID NO: 8289 - DNA, 22 bp, synthetic construct
  misc_feature 1..22: note = chemically synthesized
  source 1..22: mol_type = other DNA
ctccccagcgccctttgccctc

SEQ ID NO: 8290 - DNA, 22 bp, synthetic construct
  misc_feature 1..22: note = chemically synthesized
  source 1..22: mol_type = other DNA
cccagcgccctttgccctcgct

SEQ ID NO: 8291 - DNA, 22 bp, synthetic construct
  misc_feature 1..22: note = chemically synthesized
  source 1..22: mol_type = other DNA
tgccctcgcttccctagaaacc

SEQ ID NO: 8292 - DNA, 22 bp, synthetic construct
  misc_feature 1..22: note = chemically synthesized
  source 1..22: mol_type = other DNA
gccctcgcttccctagaaacct

SEQ ID NO: 8293 - DNA, 22 bp, synthetic construct
  misc_feature 1..22: note = chemically synthesized
  source 1..22: mol_type = other DNA
ccctcgcttccctagaaacctc

SEQ ID NO: 8294 - DNA, 22 bp, synthetic construct
  misc_feature 1..22: note = chemically synthesized
  source 1..22: mol_type = other DNA
gcttccctagaaacctcgttcc

SEQ ID NO: 8295 - DNA, 22 bp, synthetic construct
  misc_feature 1..22: note = chemically synthesized
  source 1..22: mol_type = other DNA
ccctagaaacctcgttccacac

SEQ ID NO: 8296 - DNA, 22 bp, synthetic construct
  misc_feature 1..22: note = chemically synthesized
  source 1..22: mol_type = other DNA
cctagaaacctcgttccacact

SEQ ID NO: 8297 - DNA, 22 bp, synthetic construct
  misc_feature 1..22: note = chemically synthesized
  source 1..22: mol_type = other DNA
gaaacctcgttccacactaaat

SEQ ID NO: 8298 - DNA, 22 bp, synthetic construct
  misc_feature 1..22: note = chemically synthesized
  source 1..22: mol_type = other DNA
gttccacactaaatttgctccc

SEQ ID NO: 8299 - DNA, 22 bp, synthetic construct
  misc_feature 1..22: note = chemically synthesized
  source 1..22: mol_type = other DNA
cacactaaatttgctcccctca

SEQ ID NO: 8300 - DNA, 22 bp, synthetic construct
  misc_feature 1..22: note = chemically synthesized
  source 1..22: mol_type = other DNA
aatttgctcccctcagcccgag

SEQ ID NO: 8301 - DNA, 22 bp, synthetic construct
  misc_feature 1..22: note = chemically synthesized
  source 1..22: mol_type = other DNA
gctcccctcagcccgaggtcat

SEQ ID NO: 8302 - DNA, 22 bp, synthetic construct
  misc_feature 1..22: note = chemically synthesized
  source 1..22: mol_type = other DNA
ctcccctcagcccgaggtcatc

SEQ ID NO: 8303 - DNA, 22 bp, synthetic construct
  misc_feature 1..22: note = chemically synthesized
  source 1..22: mol_type = other DNA
ccctcagcccgaggtcatctca

SEQ ID NO: 8304 - DNA, 22 bp, synthetic construct
  misc_feature 1..22: note = chemically synthesized
  source 1..22: mol_type = other DNA
agcccgaggtcatctcacaggt

SEQ ID NO: 8305 - DNA, 22 bp, synthetic construct
  misc_feature 1..22: note = chemically synthesized
  source 1..22: mol_type = other DNA
acaggtacctctcctgcccctt

SEQ ID NO: 8306 - DNA, 22 bp, synthetic construct
  misc_feature 1..22: note = chemically synthesized
  source 1..22: mol_type = other DNA
tcctgccccttgatccatctgc

SEQ ID NO: 8307 - DNA, 22 bp, synthetic construct
  misc_feature 1..22: note = chemically synthesized
  source 1..22: mol_type = other DNA
ctgccccttgatccatctgcac

SEQ ID NO: 8308 - DNA, 22 bp, synthetic construct
  misc_feature 1..22: note = chemically synthesized
  source 1..22: mol_type = other DNA
ccccttgatccatctgcaccct

SEQ ID NO: 8309 - DNA, 22 bp, synthetic construct
  misc_feature 1..22: note = chemically synthesized
  source 1..22: mol_type = other DNA
gatccatctgcaccctgacagc

SEQ ID NO: 8310 - DNA, 22 bp, synthetic construct
  misc_feature 1..22: note = chemically synthesized
  source 1..22: mol_type = other DNA
atccatctgcaccctgacagca

SEQ ID NO: 8311 - DNA, 22 bp, synthetic construct
  misc_feature 1..22: note = chemically synthesized
  source 1..22: mol_type = other DNA
caccctgacagcactgacacac

SEQ ID NO: 8312 - DNA, 22 bp, synthetic construct
  misc_feature 1..22: note = chemically synthesized
  source 1..22: mol_type = other DNA
acagcactgacacacacattca

SEQ ID NO: 8313 - DNA, 22 bp, synthetic construct
  misc_feature 1..22: note = chemically synthesized
  source 1..22: mol_type = other DNA
acacacacattcacatgccctc

SEQ ID NO: 8314 - DNA, 22 bp, synthetic construct
  misc_feature 1..22: note = chemically synthesized
  source 1..22: mol_type = other DNA
acatgccctcacaaactcacac

SEQ ID NO: 8315 - DNA, 22 bp, synthetic construct
  misc_feature 1..22: note = chemically synthesized
  source 1..22: mol_type = other DNA
acaaactcacacacactcacac

SEQ ID NO: 8316 - DNA, 22 bp, synthetic construct
  misc_feature 1..22: note = chemically synthesized
  source 1..22: mol_type = other DNA
acacacactcacacactcacac

SEQ ID NO: 8317 - DNA, 22 bp, synthetic construct
  misc_feature 1..22: note = chemically synthesized
  source 1..22: mol_type = other DNA
acacactcacacattgctcact

SEQ ID NO: 8318 - DNA, 22 bp, synthetic construct
  misc_feature 1..22: note = chemically synthesized
  source 1..22: mol_type = other DNA
acacattgctcacttcactcaa

SEQ ID NO: 8319 - DNA, 22 bp, synthetic construct
  misc_feature 1..22: note = chemically synthesized
  source 1..22: mol_type = other DNA
ctcacttcactcaaaaacacac

SEQ ID NO: 8320 - DNA, 22 bp, synthetic construct
  misc_feature 1..22: note = chemically synthesized
  source 1..22: mol_type = other DNA
acttcactcaaaaacacacatt

SEQ ID NO: 8321 - DNA, 22 bp, synthetic construct
  misc_feature 1..22: note = chemically synthesized
  source 1..22: mol_type = other DNA
cactcaaaaacacacatttgca

SEQ ID NO: 8322 - DNA, 22 bp, synthetic construct
  misc_feature 1..22: note = chemically synthesized
  source 1..22: mol_type = other DNA
actcaaaaacacacatttgcac

SEQ ID NO: 8323 - DNA, 22 bp, synthetic construct
  misc_feature 1..22: note = chemically synthesized
  source 1..22: mol_type = other DNA
aaaaacacacatttgcacacac

SEQ ID NO: 8324 - DNA, 22 bp, synthetic construct
  misc_feature 1..22: note = chemically synthesized
  source 1..22: mol_type = other DNA
gcacacactcatgaccacgctc

SEQ ID NO: 8325 - DNA, 22 bp, synthetic construct
  misc_feature 1..22: note = chemically synthesized
  source 1..22: mol_type = other DNA
cacacactcatgaccacgctct

SEQ ID NO: 8326 - DNA, 22 bp, synthetic construct
  misc_feature 1..22: note = chemically synthesized
  source 1..22: mol_type = other DNA
atgaccacgctctgctgtaccc

SEQ ID NO: 8327 - DNA, 22 bp, synthetic construct
  misc_feature 1..22: note = chemically synthesized
  source 1..22: mol_type = other DNA
tgctgtacccactctcacatgt

SEQ ID NO: 8328 - DNA, 22 bp, synthetic construct
  misc_feature 1..22: note = chemically synthesized
  source 1..22: mol_type = other DNA
ctgtacccactctcacatgtgc

SEQ ID NO: 8329 - DNA, 22 bp, synthetic construct
  misc_feature 1..22: note = chemically synthesized
  source 1..22: mol_type = other DNA
tacccactctcacatgtgcata

SEQ ID NO: 8330 - DNA, 22 bp, synthetic construct
  misc_feature 1..22: note = chemically synthesized
  source 1..22: mol_type = other DNA
tcacatgtgcatatgcatgcta

SEQ ID NO: 8331 - DNA, 22 bp, synthetic construct
  misc_feature 1..22: note = chemically synthesized
  source 1..22: mol_type = other DNA
acatgtgcatatgcatgctaat

SEQ ID NO: 8332 - DNA, 22 bp, synthetic construct
  misc_feature 1..22: note = chemically synthesized
  source 1..22: mol_type = other DNA
atgcacacattcatactccctc

SEQ ID NO: 8333 - DNA, 22 bp, synthetic construct
  misc_feature 1..22: note = chemically synthesized
  source 1..22: mol_type = other DNA
atactccctcccacacacacac

SEQ ID NO: 8334 - DNA, 22 bp, synthetic construct
  misc_feature 1..22: note = chemically synthesized
  source 1..22: mol_type = other DNA
cctcccacacacacacacctga

SEQ ID NO: 8335 - DNA, 22 bp, synthetic construct
  misc_feature 1..22: note = chemically synthesized
  source 1..22: mol_type = other DNA
ccacacacacacacctgacaca

SEQ ID NO: 8336 - DNA, 22 bp, synthetic construct
  misc_feature 1..22: note = chemically synthesized
  source 1..22: mol_type = other DNA
acacacccacacacgtacactc

SEQ ID NO: 8337 - DNA, 22 bp, synthetic construct
  misc_feature 1..22: note = chemically synthesized
  source 1..22: mol_type = other DNA
acacacccacgtcttcctgcac

SEQ ID NO: 8338 - DNA, 22 bp, synthetic construct
  misc_feature 1..22: note = chemically synthesized
  source 1..22: mol_type = other DNA
cctgcacacagagctgggctcc

SEQ ID NO: 8339 - DNA, 22 bp, synthetic construct
  misc_feature 1..22: note = chemically synthesized
  source 1..22: mol_type = other DNA
ctgcacacagagctgggctccc

SEQ ID NO: 8340 - DNA, 22 bp, synthetic construct
  misc_feature 1..22: note = chemically synthesized
  source 1..22: mol_type = other DNA
cacacagagctgggctccctct

SEQ ID NO: 8341 - DNA, 22 bp, synthetic construct
  misc_feature 1..22: note = chemically synthesized
  source 1..22: mol_type = other DNA
ggctccctctctgctgcctcca

SEQ ID NO: 8342 - DNA, 22 bp, synthetic construct
  misc_feature 1..22: note = chemically synthesized
  source 1..22: mol_type = other DNA
cctctctgctgcctccagaccc

SEQ ID NO: 8343 - DNA, 22 bp, synthetic construct
  misc_feature 1..22: note = chemically synthesized
  source 1..22: mol_type = other DNA
tctgctgcctccagacccagag

SEQ ID NO: 8344 - DNA, 22 bp, synthetic construct
  misc_feature 1..22: note = chemically synthesized
  source 1..22: mol_type = other DNA
tgctgcctccagacccagagca

SEQ ID NO: 8345 - DNA, 22 bp, synthetic construct
  misc_feature 1..22: note = chemically synthesized
  source 1..22: mol_type = other DNA
ctgcctccagacccagagcagc

SEQ ID NO: 8346 - DNA, 22 bp, synthetic construct
  misc_feature 1..22: note = chemically synthesized
  source 1..22: mol_type = other DNA
cctccagacccagagcagctcc

SEQ ID NO: 8347 - DNA, 22 bp, synthetic construct
  misc_feature 1..22: note = chemically synthesized
  source 1..22: mol_type = other DNA
cagacccagagcagctccagtt

SEQ ID NO: 8348 - DNA, 22 bp, synthetic construct
  misc_feature 1..22: note = chemically synthesized
  source 1..22: mol_type = other DNA
cagttgtcccagccctgagctc

SEQ ID NO: 8349 - DNA, 22 bp, synthetic construct
  misc_feature 1..22: note = chemically synthesized
  source 1..22: mol_type = other DNA
tcccagccctgagctcctctct

SEQ ID NO: 8350 - DNA, 22 bp, synthetic construct
  misc_feature 1..22: note = chemically synthesized
  source 1..22: mol_type = other DNA
agctcctctctttgcagcatcc

SEQ ID NO: 8351 - DNA, 22 bp, synthetic construct
  misc_feature 1..22: note = chemically synthesized
  source 1..22: mol_type = other DNA
ctctctttgcagcatccacctg

SEQ ID NO: 8352 - DNA, 22 bp, synthetic construct
  misc_feature 1..22: note = chemically synthesized
  source 1..22: mol_type = other DNA
tctttgcagcatccacctgcaa

SEQ ID NO: 8353 - DNA, 22 bp, synthetic construct
  misc_feature 1..22: note = chemically synthesized
  source 1..22: mol_type = other DNA
tttgcagcatccacctgcaaac

SEQ ID NO: 8354 - DNA, 22 bp, synthetic construct
  misc_feature 1..22: note = chemically synthesized
  source 1..22: mol_type = other DNA
tgcagcatccacctgcaaacag

SEQ ID NO: 8355 - DNA, 22 bp, synthetic construct
  misc_feature 1..22: note = chemically synthesized
  source 1..22: mol_type = other DNA
gcagcatccacctgcaaacaga

SEQ ID NO: 8356 - DNA, 22 bp, synthetic construct
  misc_feature 1..22: note = chemically synthesized
  source 1..22: mol_type = other DNA
cagcatccacctgcaaacagaa

SEQ ID NO: 8357 - DNA, 22 bp, synthetic construct
  misc_feature 1..22: note = chemically synthesized
  source 1..22: mol_type = other DNA
caaacagaacaccttctaggcc

SEQ ID NO: 8358 - DNA, 22 bp, synthetic construct
  misc_feature 1..22: note = chemically synthesized
  source 1..22: mol_type = other DNA
ctaggccttggaccctgactct

SEQ ID NO: 8359 - DNA, 22 bp, synthetic construct
  misc_feature 1..22: note = chemically synthesized
  source 1..22: mol_type = other DNA
taggccttggaccctgactctg

SEQ ID NO: 8360 - DNA, 22 bp, synthetic construct
  misc_feature 1..22: note = chemically synthesized
  source 1..22: mol_type = other DNA
ggccttggaccctgactctgtg

SEQ ID NO: 8361 - DNA, 22 bp, synthetic construct
  misc_feature 1..22: note = chemically synthesized
  source 1..22: mol_type = other DNA
ggaccctgactctgtggacttc

SEQ ID NO: 8362 - DNA, 22 bp, synthetic construct
  misc_feature 1..22: note = chemically synthesized
  source 1..22: mol_type = other DNA
gaccctgactctgtggacttcc

SEQ ID NO: 8363 - DNA, 22 bp, synthetic construct
  misc_feature 1..22: note = chemically synthesized
  source 1..22: mol_type = other DNA
actctgtggacttccttgtctt

SEQ ID NO: 8364 - DNA, 22 bp, synthetic construct
  misc_feature 1..22: note = chemically synthesized
  source 1..22: mol_type = other DNA
tgtggacttccttgtcttctca

SEQ ID NO: 8365 - DNA, 22 bp, synthetic construct
  misc_feature 1..22: note = chemically synthesized
  source 1..22: mol_type = other DNA
tggacttccttgtcttctcatt

SEQ ID NO: 8366 - DNA, 22 bp, synthetic construct
  misc_feature 1..22: note = chemically synthesized
  source 1..22: mol_type = other DNA
ccttgtcttctcattcctatca

SEQ ID NO: 8367 - DNA, 22 bp, synthetic construct
  misc_feature 1..22: note = chemically synthesized
  source 1..22: mol_type = other DNA
cttgtcttctcattcctatcac

SEQ ID NO: 8368 - DNA, 22 bp, synthetic construct
  misc_feature 1..22: note = chemically synthesized
  source 1..22: mol_type = other DNA
gtcttctcattcctatcacccc

SEQ ID NO: 8369 - DNA, 22 bp, synthetic construct
  misc_feature 1..22: note = chemically synthesized
  source 1..22: mol_type = other DNA
tcttctcattcctatcaccccc

SEQ ID NO: 8370 - DNA, 22 bp, synthetic construct
  misc_feature 1..22: note = chemically synthesized
  source 1..22: mol_type = other DNA
ctcattcctatcaccccccgac

SEQ ID NO: 8371 - DNA, 22 bp, synthetic construct
  misc_feature 1..22: note = chemically synthesized
  source 1..22: mol_type = other DNA
tcattcctatcaccccccgacc

SEQ ID NO: 8372 - DNA, 22 bp, synthetic construct
  misc_feature 1..22: note = chemically synthesized
  source 1..22: mol_type = other DNA
attcctatcaccccccgaccca

SEQ ID NO: 8373 - DNA, 22 bp, synthetic construct
  misc_feature 1..22: note = chemically synthesized
  source 1..22: mol_type = other DNA
ctatcaccccccgacccagcag

SEQ ID NO: 8374 - DNA, 22 bp, synthetic construct
  misc_feature 1..22: note = chemically synthesized
  source 1..22: mol_type = other DNA
tcaccccccgacccagcaggac

SEQ ID NO: 8375 - DNA, 22 bp, synthetic construct
  misc_feature 1..22: note = chemically synthesized
  source 1..22: mol_type = other DNA
gggaggctcagtcaggggccca

SEQ ID NO: 8376 - DNA, 22 bp, synthetic construct
  misc_feature 1..22: note = chemically synthesized
  source 1..22: mol_type = other DNA
agtcaggggcccagaatcttcc

SEQ ID NO: 8377 - DNA, 22 bp, synthetic construct
  misc_feature 1..22: note = chemically synthesized
  source 1..22: mol_type = other DNA
cctccccaggtcacttcctgcc

SEQ ID NO: 8378 - DNA, 22 bp, synthetic construct
  misc_feature 1..22: note = chemically synthesized
  source 1..22: mol_type = other DNA
ctccccaggtcacttcctgcca

SEQ ID NO: 8379 - DNA, 22 bp, synthetic construct
  misc_feature 1..22: note = chemically synthesized
  source 1..22: mol_type = other DNA
cccaggtcacttcctgccactg

SEQ ID NO: 8380 - DNA, 22 bp, synthetic construct
  misc_feature 1..22: note = chemically synthesized
  source 1..22: mol_type = other DNA
cctgccactgtcctgagtcaga

SEQ ID NO: 8381 - DNA, 22 bp, synthetic construct
  misc_feature 1..22: note = chemically synthesized
  source 1..22: mol_type = other DNA
ctgccactgtcctgagtcagac

SEQ ID NO: 8382 - DNA, 22 bp, synthetic construct
  misc_feature 1..22: note = chemically synthesized
  source 1..22: mol_type = other DNA
ccactgtcctgagtcagacact

SEQ ID NO: 8383 - DNA, 22 bp, synthetic construct
  misc_feature 1..22: note = chemically synthesized
  source 1..22: mol_type = other DNA
tcctgagtcagacactgcccct

SEQ ID NO: 8384 - DNA, 22 bp, synthetic construct
  misc_feature 1..22: note = chemically synthesized
  source 1..22: mol_type = other DNA
agtcagacactgcccctgtaag

SEQ ID NO: 8385 - DNA, 22 bp, synthetic construct
  misc_feature 1..22: note = chemically synthesized
  source 1..22: mol_type = other DNA
cccctgtaagtgactgtccata

SEQ ID NO: 8386 - DNA, 22 bp, synthetic construct
  misc_feature 1..22: note = chemically synthesized
  source 1..22: mol_type = other DNA
taagtgactgtccataactctt

SEQ ID NO: 8387 - DNA, 22 bp, synthetic construct
  misc_feature 1..22: note = chemically synthesized
  source 1..22: mol_type = other DNA
tccataactcttcatctttttc

SEQ ID NO: 8388 - DNA, 22 bp, synthetic construct
  misc_feature 1..22: note = chemically synthesized
  source 1..22: mol_type = other DNA
ttcatctttttcacaccagtga

SEQ ID NO: 8389 - DNA, 22 bp, synthetic construct
  misc_feature 1..22: note = chemically synthesized
  source 1..22: mol_type = other DNA
catctttttcacaccagtgact

SEQ ID NO: 8390 - DNA, 22 bp, synthetic construct
  misc_feature 1..22: note = chemically synthesized
  source 1..22: mol_type = other DNA
atctttttcacaccagtgactt

SEQ ID NO: 8391 - DNA, 22 bp, synthetic construct
  misc_feature 1..22: note = chemically synthesized
  source 1..22: mol_type = other DNA
tttcacaccagtgacttccacc

SEQ ID NO: 8392 - DNA, 22 bp, synthetic construct
  misc_feature 1..22: note = chemically synthesized
  source 1..22: mol_type = other DNA
ttcacaccagtgacttccacct

SEQ ID NO: 8393 - DNA, 22 bp, synthetic construct
  misc_feature 1..22: note = chemically synthesized
  source 1..22: mol_type = other DNA
tcacaccagtgacttccacctt

SEQ ID NO: 8394 - DNA, 22 bp, synthetic construct
  misc_feature 1..22: note = chemically synthesized
  source 1..22: mol_type = other DNA
cacaccagtgacttccaccttc

SEQ ID NO: 8395 - DNA, 22 bp, synthetic construct
  misc_feature 1..22: note = chemically synthesized
  source 1..22: mol_type = other DNA
acaccagtgacttccaccttcc

SEQ ID NO: 8396 - DNA, 22 bp, synthetic construct
  misc_feature 1..22: note = chemically synthesized
  source 1..22: mol_type = other DNA
ccaccttccccactgcagccac

SEQ ID NO: 8397 - DNA, 22 bp, synthetic construct
  misc_feature 1..22: note = chemically synthesized
  source 1..22: mol_type = other DNA
caccttccccactgcagccaca

SEQ ID NO: 8398 - DNA, 22 bp, synthetic construct
  misc_feature 1..22: note = chemically synthesized
  source 1..22: mol_type = other DNA
ccccactgcagccacactcagg

SEQ ID NO: 8399 - DNA, 22 bp, synthetic construct
  misc_feature 1..22: note = chemically synthesized
  source 1..22: mol_type = other DNA
cccactgcagccacactcagga

SEQ ID NO: 8400 - DNA, 22 bp, synthetic construct
  misc_feature 1..22: note = chemically synthesized
  source 1..22: mol_type = other DNA
cagccacactcaggaccccatt

SEQ ID NO: 8401 - DNA, 22 bp, synthetic construct
  misc_feature 1..22: note = chemically synthesized
  source 1..22: mol_type = other DNA
aggaccccatttgacccaggga

SEQ ID NO: 8402 - DNA, 22 bp, synthetic construct
  misc_feature 1..22: note = chemically synthesized
  source 1..22: mol_type = other DNA
gacccagggaggcctctgacac

SEQ ID NO: 8403 - DNA, 22 bp, synthetic construct
  misc_feature 1..22: note = chemically synthesized
  source 1..22: mol_type = other DNA
acccagggaggcctctgacacc

SEQ ID NO: 8404 - DNA, 22 bp, synthetic construct
  misc_feature 1..22: note = chemically synthesized
  source 1..22: mol_type = other DNA
tgacacctccactgcccactcc

SEQ ID NO: 8405 - DNA, 22 bp, synthetic construct
  misc_feature 1..22: note = chemically synthesized
  source 1..22: mol_type = other DNA
acacctccactgcccactcccg

SEQ ID NO: 8406 - DNA, 22 bp, synthetic construct
  misc_feature 1..22: note = chemically synthesized
  source 1..22: mol_type = other DNA
cactgcccactcccgctctgag

SEQ ID NO: 8407 - DNA, 22 bp, synthetic construct
  misc_feature 1..22: note = chemically synthesized
  source 1..22: mol_type = other DNA
cccactcccgctctgagcacag

SEQ ID NO: 8408 - DNA, 22 bp, synthetic construct
  misc_feature 1..22: note = chemically synthesized
  source 1..22: mol_type = other DNA
ccgctctgagcacagccccacc

SEQ ID NO: 8409 - DNA, 22 bp, synthetic construct
  misc_feature 1..22: note = chemically synthesized
  source 1..22: mol_type = other DNA
tgagcacagccccaccctccct

SEQ ID NO: 8410 - DNA, 22 bp, synthetic construct
  misc_feature 1..22: note = chemically synthesized
  source 1..22: mol_type = other DNA
agcacagccccaccctccctct

SEQ ID NO: 8411 - DNA, 22 bp, synthetic construct
  misc_feature 1..22: note = chemically synthesized
  source 1..22: mol_type = other DNA
cctctcactgcccccacccctt

SEQ ID NO: 8412 - DNA, 22 bp, synthetic construct
  misc_feature 1..22: note = chemically synthesized
  source 1..22: mol_type = other DNA
tcactgcccccaccccttcctc

SEQ ID NO: 8413 - DNA, 22 bp, synthetic construct
  misc_feature 1..22: note = chemically synthesized
  source 1..22: mol_type = other DNA
actgcccccaccccttcctcca

SEQ ID NO: 8414 - DNA, 22 bp, synthetic construct
  misc_feature 1..22: note = chemically synthesized
  source 1..22: mol_type = other DNA
cccccaccccttcctccaaggc

SEQ ID NO: 8415 - DNA, 22 bp, synthetic construct
  misc_feature 1..22: note = chemically synthesized
  source 1..22: mol_type = other DNA
cctccaaggcctttgcattcct

SEQ ID NO: 8416 - DNA, 22 bp, synthetic construct
  misc_feature 1..22: note = chemically synthesized
  source 1..22: mol_type = other DNA
ctccaaggcctttgcattcctc

SEQ ID NO: 8417 - DNA, 22 bp, synthetic construct
  misc_feature 1..22: note = chemically synthesized
  source 1..22: mol_type = other DNA
caaggcctttgcattcctctcc

SEQ ID NO: 8418 - DNA, 22 bp, synthetic construct
  misc_feature 1..22: note = chemically synthesized
  source 1..22: mol_type = other DNA
tgcattcctctccatccagaag

SEQ ID NO: 8419 - DNA, 22 bp, synthetic construct
  misc_feature 1..22: note = chemically synthesized
  source 1..22: mol_type = other DNA
gcattcctctccatccagaagc

SEQ ID NO: 8420 - DNA, 22 bp, synthetic construct
  misc_feature 1..22: note = chemically synthesized
  source 1..22: mol_type = other DNA
cattcctctccatccagaagcg

SEQ ID NO: 8421 - DNA, 22 bp, synthetic construct
  misc_feature 1..22: note = chemically synthesized
  source 1..22: mol_type = other DNA
ctctccatccagaagcgctcca

SEQ ID NO: 8422 - DNA, 22 bp, synthetic construct
  misc_feature 1..22: note = chemically synthesized
  source 1..22: mol_type = other DNA
tccatccagaagcgctccatga

SEQ ID NO: 8423 - DNA, 22 bp, synthetic construct
  misc_feature 1..22: note = chemically synthesized
  source 1..22: mol_type = other DNA
catccagaagcgctccatgacc

SEQ ID NO: 8424 - DNA, 22 bp, synthetic construct
  misc_feature 1..22: note = chemically synthesized
  source 1..22: mol_type = other DNA
catgaccacggtgttccccacc

SEQ ID NO: 8425 - DNA, 22 bp, synthetic construct
  misc_feature 1..22: note = chemically synthesized
  source 1..22: mol_type = other DNA
cccaccaagctggccctccatg

SEQ ID NO: 8426 - DNA, 22 bp, synthetic construct
  misc_feature 1..22: note = chemically synthesized
  source 1..22: mol_type = other DNA
gccctccatggctgagtccctg

SEQ ID NO: 8427 - DNA, 22 bp, synthetic construct
  misc_feature 1..22: note = chemically synthesized
  source 1..22: mol_type = other DNA
catggctgagtccctgactgct

SEQ ID NO: 8428 - DNA, 22 bp, synthetic construct
  misc_feature 1..22: note = chemically synthesized
  source 1..22: mol_type = other DNA
agtccctgactgctgtcttcag

SEQ ID NO: 8429 - DNA, 22 bp, synthetic construct
  misc_feature 1..22: note = chemically synthesized
  source 1..22: mol_type = other DNA
actgctgtcttcagcaccctcc

SEQ ID NO: 8430 - DNA, 22 bp, synthetic construct
  misc_feature 1..22: note = chemically synthesized
  source 1..22: mol_type = other DNA
ctgtcttcagcaccctccactc

SEQ ID NO: 8431 - DNA, 22 bp, synthetic construct
  misc_feature 1..22: note = chemically synthesized
  source 1..22: mol_type = other DNA
tcttcagcaccctccactcaga

SEQ ID NO: 8432 - DNA, 22 bp, synthetic construct
  misc_feature 1..22: note = chemically synthesized
  source 1..22: mol_type = other DNA
cagcaccctccactcagagggt

SEQ ID NO: 8433 - DNA, 22 bp, synthetic construct
  misc_feature 1..22: note = chemically synthesized
  source 1..22: mol_type = other DNA
agcaccctccactcagagggtc

SEQ ID NO: 8434 - DNA, 22 bp, synthetic construct
  misc_feature 1..22: note = chemically synthesized
  source 1..22: mol_type = other DNA
cactcagagggtcctgtcctgc

SEQ ID NO: 8435 - DNA, 22 bp, synthetic construct
  misc_feature 1..22: note = chemically synthesized
  source 1..22: mol_type = other DNA
agagggtcctgtcctgcttccc

SEQ ID NO: 8436 - DNA, 22 bp, synthetic construct
  misc_feature 1..22: note = chemically synthesized
  source 1..22: mol_type = other DNA
tcctgcttcccagtccgactta

SEQ ID NO: 8437 - DNA, 22 bp, synthetic construct
  misc_feature 1..22: note = chemically synthesized
  source 1..22: mol_type = other DNA
cttcccagtccgacttatcaac

SEQ ID NO: 8438 - DNA, 22 bp, synthetic construct
  misc_feature 1..22: note = chemically synthesized
  source 1..22: mol_type = other DNA
cccagtccgacttatcaactcc

SEQ ID NO: 8439 - DNA, 22 bp, synthetic construct
  misc_feature 1..22: note = chemically synthesized
  source 1..22: mol_type = other DNA
ccagtccgacttatcaactccc

SEQ ID NO: 8440 - DNA, 22 bp, synthetic construct
  misc_feature 1..22: note = chemically synthesized
  source 1..22: mol_type = other DNA
atcaactcccaatgctgggtca

SEQ ID NO: 8441 - DNA, 22 bp, synthetic construct
  misc_feature 1..22: note = chemically synthesized
  source 1..22: mol_type = other DNA
tcaactcccaatgctgggtcag

SEQ ID NO: 8442 - DNA, 22 bp, synthetic construct
  misc_feature 1..22: note = chemically synthesized
  source 1..22: mol_type = other DNA
ccaatgctgggtcagcccagca

SEQ ID NO: 8443 - DNA, 22 bp, synthetic construct
  misc_feature 1..22: note = chemically synthesized
  source 1..22: mol_type = other DNA
ggtcagcccagcaacgtgtctg

SEQ ID NO: 8444 - DNA, 22 bp, synthetic construct
  misc_feature 1..22: note = chemically synthesized
  source 1..22: mol_type = other DNA
tatatccaccctgaaaccagac

SEQ ID NO: 8445 - DNA, 22 bp, synthetic construct
  misc_feature 1..22: note = chemically synthesized
  source 1..22: mol_type = other DNA
aaaccagactgcccacagggta

SEQ ID NO: 8446 - DNA, 22 bp, synthetic construct
  misc_feature 1..22: note = chemically synthesized
  source 1..22: mol_type = other DNA
cccacagggtagcccagctgtg

SEQ ID NO: 8447 - DNA, 22 bp, synthetic construct
  misc_feature 1..22: note = chemically synthesized
  source 1..22: mol_type = other DNA
tgcctccaggtagctctgagat

SEQ ID NO: 8448 - DNA, 22 bp, synthetic construct
  misc_feature 1..22: note = chemically synthesized
  source 1..22: mol_type = other DNA
caggtagctctgagatcatgca

SEQ ID NO: 8449 - DNA, 22 bp, synthetic construct
  misc_feature 1..22: note = chemically synthesized
  source 1..22: mol_type = other DNA
tgagatcatgcaccagcattca

SEQ ID NO: 8450 - DNA, 22 bp, synthetic construct
  misc_feature 1..22: note = chemically synthesized
  source 1..22: mol_type = other DNA
agatcatgcaccagcattcaat

SEQ ID NO: 8451 - DNA, 22 bp, synthetic construct
  misc_feature 1..22: note = chemically synthesized
  source 1..22: mol_type = other DNA
aatttctccatgcttccatttt

SEQ ID NO: 8452 - DNA, 22 bp, synthetic construct
  misc_feature 1..22: note = chemically synthesized
  source 1..22: mol_type = other DNA
ctccatgcttccattttctcgt

SEQ ID NO: 8453 - DNA, 22 bp, synthetic construct
  misc_feature 1..22: note = chemically synthesized
  source 1..22: mol_type = other DNA
tccatgcttccattttctcgtg

SEQ ID NO: 8454 - DNA, 22 bp, synthetic construct
  misc_feature 1..22: note = chemically synthesized
  source 1..22: mol_type = other DNA
catgcttccattttctcgtgtg

SEQ ID NO: 8455 - DNA, 22 bp, synthetic construct
  misc_feature 1..22: note = chemically synthesized
  source 1..22: mol_type = other DNA
ccattttctcgtgtgtaaaatg

SEQ ID NO: 8456 - DNA, 22 bp, synthetic construct
  misc_feature 1..22: note = chemically synthesized
  source 1..22: mol_type = other DNA
cattttctcgtgtgtaaaatgg

SEQ ID NO: 8457 - DNA, 22 bp, synthetic construct
  misc_feature 1..22: note = chemically synthesized
  source 1..22: mol_type = other DNA
tctcgtgtgtaaaatggagatc

SEQ ID NO: 8458 - DNA, 22 bp, synthetic construct
  misc_feature 1..22: note = chemically synthesized
  source 1..22: mol_type = other DNA
ctcgtgtgtaaaatggagatca

SEQ ID NO: 8459 - DNA, 22 bp, synthetic construct
  misc_feature 1..22: note = chemically synthesized
  source 1..22: mol_type = other DNA
tcgtgtgtaaaatggagatcac

SEQ ID NO: 8460 - DNA, 22 bp, synthetic construct
  misc_feature 1..22: note = chemically synthesized
  source 1..22: mol_type = other DNA
gtgtgtaaaatggagatcacag

SEQ ID NO: 8461 - DNA, 22 bp, synthetic construct
  misc_feature 1..22: note = chemically synthesized
  source 1..22: mol_type = other DNA
cccgattggattgctcggataa

SEQ ID NO: 8462 - DNA, 22 bp, synthetic construct
  misc_feature 1..22: note = chemically synthesized
  source 1..22: mol_type = other DNA
gattgctcggataattagatga

SEQ ID NO: 8463 - DNA, 22 bp, synthetic construct
  misc_feature 1..22: note = chemically synthesized
  source 1..22: mol_type = other DNA
ctcggataattagatgagttaa

SEQ ID NO: 8464 - DNA, 22 bp, synthetic construct
  misc_feature 1..22: note = chemically synthesized
  source 1..22: mol_type = other DNA
ggataattagatgagttaaaat

SEQ ID NO: 8465 - DNA, 22 bp, synthetic construct
  misc_feature 1..22: note = chemically synthesized
  source 1..22: mol_type = other DNA
gatgagttaaaatatgtaatgt

SEQ ID NO: 8466 - DNA, 22 bp, synthetic construct
  misc_feature 1..22: note = chemically synthesized
  source 1..22: mol_type = other DNA
aaatatgtaatgtgcttcttag

SEQ ID NO: 8467 - DNA, 22 bp, synthetic construct
  misc_feature 1..22: note = chemically synthesized
  source 1..22: mol_type = other DNA
cttaggcaaaagtttgaacata

SEQ ID NO: 8468 - DNA, 22 bp, synthetic construct
  misc_feature 1..22: note = chemically synthesized
  source 1..22: mol_type = other DNA
ttaggcaaaagtttgaacataa

SEQ ID NO: 8469 - DNA, 22 bp, synthetic construct
  misc_feature 1..22: note = chemically synthesized
  source 1..22: mol_type = other DNA
aggcaaaagtttgaacataaaa

SEQ ID NO: 8470 - DNA, 22 bp, synthetic construct
  misc_feature 1..22: note = chemically synthesized
  source 1..22: mol_type = other DNA
ggcaaaagtttgaacataaaag

SEQ ID NO: 8471 - DNA, 22 bp, synthetic construct
  misc_feature 1..22: note = chemically synthesized
  source 1..22: mol_type = other DNA
gaacataaaagacagggtctgc

SEQ ID NO: 8472 - DNA, 22 bp, synthetic construct
  misc_feature 1..22: note = chemically synthesized
  source 1..22: mol_type = other DNA
aacataaaagacagggtctgcc

SEQ ID NO: 8473 - DNA, 22 bp, synthetic construct
  misc_feature 1..22: note = chemically synthesized
  source 1..22: mol_type = other DNA
cccaagatgggaagagttcttc

SEQ ID NO: 8474 - DNA, 22 bp, synthetic construct
  misc_feature 1..22: note = chemically synthesized
  source 1..22: mol_type = other DNA
ttctctccccagaaacaatcaa

SEQ ID NO: 8475 - DNA, 22 bp, synthetic construct
  misc_feature 1..22: note = chemically synthesized
  source 1..22: mol_type = other DNA
ctctccccagaaacaatcaaaa

SEQ ID NO: 8476 - DNA, 22 bp, synthetic construct
  misc_feature 1..22: note = chemically synthesized
  source 1..22: mol_type = other DNA
tctccccagaaacaatcaaaac

SEQ ID NO: 8477 - DNA, 22 bp, synthetic construct
  misc_feature 1..22: note = chemically synthesized
  source 1..22: mol_type = other DNA
tccccagaaacaatcaaaacaa

SEQ ID NO: 8478 - DNA, 22 bp, synthetic construct
  misc_feature 1..22: note = chemically synthesized
  source 1..22: mol_type = other DNA
cccagaaacaatcaaaacaaaa

SEQ ID NO: 8479 - DNA, 22 bp, synthetic construct
  misc_feature 1..22: note = chemically synthesized
  source 1..22: mol_type = other DNA
tagaacatggcagctttcaaga

SEQ ID NO: 8480 - DNA, 22 bp, synthetic construct
  misc_feature 1..22: note = chemically synthesized
  source 1..22: mol_type = other DNA
tcaagactctggacatcaggca

SEQ ID NO: 8481 - DNA, 22 bp, synthetic construct
  misc_feature 1..22: note = chemically synthesized
  source 1..22: mol_type = other DNA
caagactctggacatcaggcaa

SEQ ID NO: 8482 - DNA, 22 bp, synthetic construct
  misc_feature 1..22: note = chemically synthesized
  source 1..22: mol_type = other DNA
aagactctggacatcaggcaag

SEQ ID NO: 8483 - DNA, 22 bp, synthetic construct
  misc_feature 1..22: note = chemically synthesized
  source 1..22: mol_type = other DNA
tggacatcaggcaaggaggagt

SEQ ID NO: 8484 - DNA, 22 bp, synthetic construct
  misc_feature 1..22: note = chemically synthesized
  source 1..22: mol_type = other DNA
gacatcaggcaaggaggagtaa

SEQ ID NO: 8485 - DNA, 22 bp, synthetic construct
  misc_feature 1..22: note = chemically synthesized
  source 1..22: mol_type = other DNA
agggataagaagcaaacaacag

SEQ ID NO: 8486 - DNA, 22 bp, synthetic construct
  misc_feature 1..22: note = chemically synthesized
  source 1..22: mol_type = other DNA
cgatcaccccagcttactgttt

SEQ ID NO: 8487 - DNA, 22 bp, synthetic construct
  misc_feature 1..22: note = chemically synthesized
  source 1..22: mol_type = other DNA
actgtttggagagagtctgcag

SEQ ID NO: 8488 - DNA, 22 bp, synthetic construct
  misc_feature 1..22: note = chemically synthesized
  source 1..22: mol_type = other DNA
ctgtttggagagagtctgcagg

SEQ ID NO: 8489 - DNA, 22 bp, synthetic construct
  misc_feature 1..22: note = chemically synthesized
  source 1..22: mol_type = other DNA
tttggagagagtctgcaggtta

SEQ ID NO: 8490 - DNA, 22 bp, synthetic construct
  misc_feature 1..22: note = chemically synthesized
  source 1..22: mol_type = other DNA
ggagagagtctgcaggttacag

SEQ ID NO: 8491 - DNA, 22 bp, synthetic construct
  misc_feature 1..22: note = chemically synthesized
  source 1..22: mol_type = other DNA
gagagagtctgcaggttacagg

SEQ ID NO: 8492 - DNA, 22 bp, synthetic construct
  misc_feature 1..22: note = chemically synthesized
  source 1..22: mol_type = other DNA
caggttacaggccaggaaaggg

SEQ ID NO: 8493 - DNA, 22 bp, synthetic construct
  misc_feature 1..22: note = chemically synthesized
  source 1..22: mol_type = other DNA
caggccaggaaagggaagtcca

SEQ ID NO: 8494 - DNA, 22 bp, synthetic construct
  misc_feature 1..22: note = chemically synthesized
  source 1..22: mol_type = other DNA
cccacgttgaggagatggagct

SEQ ID NO: 8495 - DNA, 22 bp, synthetic construct
  misc_feature 1..22: note = chemically synthesized
  source 1..22: mol_type = other DNA
aggagatggagctgagagtccg

SEQ ID NO: 8496 - DNA, 22 bp, synthetic construct
  misc_feature 1..22: note = chemically synthesized
  source 1..22: mol_type = other DNA
agagtccgaggagaccaaaaca

SEQ ID NO: 8497 - DNA, 22 bp, synthetic construct
  misc_feature 1..22: note = chemically synthesized
  source 1..22: mol_type = other DNA
agagttcaaacgatcaaactga

SEQ ID NO: 8498 - DNA, 22 bp, synthetic construct
  misc_feature 1..22: note = chemically synthesized
  source 1..22: mol_type = other DNA
aaacgatcaaactgactctaag

SEQ ID NO: 8499 - DNA, 22 bp, synthetic construct
  misc_feature 1..22: note = chemically synthesized
  source 1..22: mol_type = other DNA
actctaagttgcttaactgcat

SEQ ID NO: 8500 - DNA, 22 bp, synthetic construct
  misc_feature 1..22: note = chemically synthesized
  source 1..22: mol_type = other DNA
taagttgcttaactgcatcccg

SEQ ID NO: 8501 - DNA, 22 bp, synthetic construct
  misc_feature 1..22: note = chemically synthesized
  source 1..22: mol_type = other DNA
agttgcttaactgcatcccgga

SEQ ID NO: 8502 - DNA, 22 bp, synthetic construct
  misc_feature 1..22: note = chemically synthesized
  source 1..22: mol_type = other DNA
cttaactgcatcccggagcaaa

SEQ ID NO: 8503 - DNA, 22 bp, synthetic construct
  misc_feature 1..22: note = chemically synthesized
  source 1..22: mol_type = other DNA
aactgcatcccggagcaaagct

SEQ ID NO: 8504 - DNA, 22 bp, synthetic construct
  misc_feature 1..22: note = chemically synthesized
  source 1..22: mol_type = other DNA
actgcatcccggagcaaagctc

SEQ ID NO: 8505 - DNA, 22 bp, synthetic construct
  misc_feature 1..22: note = chemically synthesized
  source 1..22: mol_type = other DNA
catcccggagcaaagctcaaga

SEQ ID NO: 8506 - DNA, 22 bp, synthetic construct
  misc_feature 1..22: note = chemically synthesized
  source 1..22: mol_type = other DNA
aagaacatttagaggaatacaa

SEQ ID NO: 8507 - DNA, 22 bp, synthetic construct
  misc_feature 1..22: note = chemically synthesized
  source 1..22: mol_type = other DNA
agaggaatacaaaaatatccag

SEQ ID NO: 8508 - DNA, 22 bp, synthetic construct
  misc_feature 1..22: note = chemically synthesized
  source 1..22: mol_type = other DNA
gaggaatacaaaaatatccagc

SEQ ID NO: 8509 - DNA, 22 bp, synthetic construct
  misc_feature 1..22: note = chemically synthesized
  source 1..22: mol_type = other DNA
acaatgtctggcagccaatcaa

SEQ ID NO: 8510 - DNA, 22 bp, synthetic construct
  misc_feature 1..22: note = chemically synthesized
  source 1..22: mol_type = other DNA
gcagccaatcaaagattacaag

SEQ ID NO: 8511 - DNA, 22 bp, synthetic construct
  misc_feature 1..22: note = chemically synthesized
  source 1..22: mol_type = other DNA
caaggcatgcaatgaaacggga

SEQ ID NO: 8512 - DNA, 22 bp, synthetic construct
  misc_feature 1..22: note = chemically synthesized
  source 1..22: mol_type = other DNA
ataaatatcaaaagagatccag

SEQ ID NO: 8513 - DNA, 22 bp, synthetic construct
  misc_feature 1..22: note = chemically synthesized
  source 1..22: mol_type = other DNA
acacggatgctagaattagcag

SEQ ID NO: 8514 - DNA, 22 bp, synthetic construct
  misc_feature 1..22: note = chemically synthesized
  source 1..22: mol_type = other DNA
gaattagcaggcaaggatggta

SEQ ID NO: 8515 - DNA, 22 bp, synthetic construct
  misc_feature 1..22: note = chemically synthesized
  source 1..22: mol_type = other DNA
gcaggcaaggatggtaaaacag

SEQ ID NO: 8516 - DNA, 22 bp, synthetic construct
  misc_feature 1..22: note = chemically synthesized
  source 1..22: mol_type = other DNA
tagccatatcccattatgttca

SEQ ID NO: 8517 - DNA, 22 bp, synthetic construct
  misc_feature 1..22: note = chemically synthesized
  source 1..22: mol_type = other DNA
tgttcaaaaaattaagtagaat

SEQ ID NO: 8518 - DNA, 22 bp, synthetic construct
  misc_feature 1..22: note = chemically synthesized
  source 1..22: mol_type = other DNA
aaaaaattaagtagaattgtgg

SEQ ID NO: 8519 - DNA, 22 bp, synthetic construct
  misc_feature 1..22: note = chemically synthesized
  source 1..22: mol_type = other DNA
agtagaattgtggaggatattt

SEQ ID NO: 8520 - DNA, 22 bp, synthetic construct
  misc_feature 1..22: note = chemically synthesized
  source 1..22: mol_type = other DNA
tggaggatatttaagagtcccc

SEQ ID NO: 8521 - DNA, 22 bp, synthetic construct
  misc_feature 1..22: note = chemically synthesized
  source 1..22: mol_type = other DNA
aagagtccccaggtgaacttct

SEQ ID NO: 8522 - DNA, 22 bp, synthetic construct
  misc_feature 1..22: note = chemically synthesized
  source 1..22: mol_type = other DNA
agagtccccaggtgaacttcta

SEQ ID NO: 8523 - DNA, 22 bp, synthetic construct
  misc_feature 1..22: note = chemically synthesized
  source 1..22: mol_type = other DNA
ctagagataaaaactacaatgt

SEQ ID NO: 8524 - DNA, 22 bp, synthetic construct
  misc_feature 1..22: note = chemically synthesized
  source 1..22: mol_type = other DNA
tagagataaaaactacaatgtc

SEQ ID NO: 8525 - DNA, 22 bp, synthetic construct
  misc_feature 1..22: note = chemically synthesized
  source 1..22: mol_type = other DNA
gagataaaaactacaatgtctg

SEQ ID NO: 8526 - DNA, 22 bp, synthetic construct
  misc_feature 1..22: note = chemically synthesized
  source 1..22: mol_type = other DNA
caatgtctgaaatgaaaaaaca

SEQ ID NO: 8527 - DNA, 22 bp, synthetic construct
  misc_feature 1..22: note = chemically synthesized
  source 1..22: mol_type = other DNA
aaatgaaaaaacacactggcca

SEQ ID NO: 8528 - DNA, 22 bp, synthetic construct
  misc_feature 1..22: note = chemically synthesized
  source 1..22: mol_type = other DNA
gccaggcgccgtggctcacgcc

SEQ ID NO: 8529 - DNA, 22 bp, synthetic construct
  misc_feature 1..22: note = chemically synthesized
  source 1..22: mol_type = other DNA
acgcctggaatcccagcactgt

SEQ ID NO: 8530 - DNA, 22 bp, synthetic construct
  misc_feature 1..22: note = chemically synthesized
  source 1..22: mol_type = other DNA
gaatcccagcactgtgggaggc

SEQ ID NO: 8531 - DNA, 22 bp, synthetic construct
  misc_feature 1..22: note = chemically synthesized
  source 1..22: mol_type = other DNA
tgggaggccaaggcgggcagat

SEQ ID NO: 8532 - DNA, 22 bp, synthetic construct
  misc_feature 1..22: note = chemically synthesized
  source 1..22: mol_type = other DNA
gctaacatggtgaaaccccatc

SEQ ID NO: 8533 - DNA, 22 bp, synthetic construct
  misc_feature 1..22: note = chemically synthesized
  source 1..22: mol_type = other DNA
acatggtgaaaccccatctcta

SEQ ID NO: 8534 - DNA, 22 bp, synthetic construct
  misc_feature 1..22: note = chemically synthesized
  source 1..22: mol_type = other DNA
tactaaaaatacaaaaaattag

SEQ ID NO: 8535 - DNA, 22 bp, synthetic construct
  misc_feature 1..22: note = chemically synthesized
  source 1..22: mol_type = other DNA
ctaaaaatacaaaaaattagcc

SEQ ID NO: 8536 - DNA, 22 bp, synthetic construct
  misc_feature 1..22: note = chemically synthesized
  source 1..22: mol_type = other DNA
aaaatacaaaaaattagccaga

SEQ ID NO: 8537 - DNA, 22 bp, synthetic construct
  misc_feature 1..22: note = chemically synthesized
  source 1..22: mol_type = other DNA
gccagacgtggtggcaggcgcc

SEQ ID NO: 8538 - DNA, 22 bp, synthetic construct
  misc_feature 1..22: note = chemically synthesized
  source 1..22: mol_type = other DNA
tagtcccagctactcgggaggc

SEQ ID NO: 8539 - DNA, 22 bp, synthetic construct
  misc_feature 1..22: note = chemically synthesized
  source 1..22: mol_type = other DNA
ctcgggaggctgaggcaggaga

SEQ ID NO: 8540 - DNA, 22 bp, synthetic construct
  misc_feature 1..22: note = chemically synthesized
  source 1..22: mol_type = other DNA
gggaggctgaggcaggagaatg

SEQ ID NO: 8541 - DNA, 22 bp, synthetic construct
  misc_feature 1..22: note = chemically synthesized
  source 1..22: mol_type = other DNA
aggcaggagaatggcatgaacc

SEQ ID NO: 8542 - DNA, 22 bp, synthetic construct
  misc_feature 1..22: note = chemically synthesized
  source 1..22: mol_type = other DNA
gcagtgagccaagatcgcgcca

SEQ ID NO: 8543 - DNA, 22 bp, synthetic construct
  misc_feature 1..22: note = chemically synthesized
  source 1..22: mol_type = other DNA
cagtgagccaagatcgcgccac

SEQ ID NO: 8544 - DNA, 22 bp, synthetic construct
  misc_feature 1..22: note = chemically synthesized
  source 1..22: mol_type = other DNA
cactccggcctgggcaacagag

SEQ ID NO: 8545 - DNA, 22 bp, synthetic construct
  misc_feature 1..22: note = chemically synthesized
  source 1..22: mol_type = other DNA
cggcctgggcaacagagcgaga

SEQ ID NO: 8546 - DNA, 22 bp, synthetic construct
  misc_feature 1..22: note = chemically synthesized
  source 1..22: mol_type = other DNA
ggcaacagagcgagactccgcc

SEQ ID NO: 8547 - DNA, 22 bp, synthetic construct
  misc_feature 1..22: note = chemically synthesized
  source 1..22: mol_type = other DNA
cgcctccaaaaaaaaaaaaaag

SEQ ID NO: 8548 - DNA, 22 bp, synthetic construct
  misc_feature 1..22: note = chemically synthesized
  source 1..22: mol_type = other DNA
caaaaaaaaaaaaaagaaaaga

SEQ ID NO: 8549 - DNA, 22 bp, synthetic construct
  misc_feature 1..22: note = chemically synthesized
  source 1..22: mol_type = other DNA
gatggaaataatggaagatgag

SEQ ID NO: 8550 - DNA, 22 bp, synthetic construct
  misc_feature 1..22: note = chemically synthesized
  source 1..22: mol_type = other DNA
agggccaggcactgtggatcac

SEQ ID NO: 8551 - DNA, 22 bp, synthetic construct
  misc_feature 1..22: note = chemically synthesized
  source 1..22: mol_type = other DNA
gggccaggcactgtggatcaca

SEQ ID NO: 8552 - DNA, 22 bp, synthetic construct
  misc_feature 1..22: note = chemically synthesized
  source 1..22: mol_type = other DNA
tggatcacatctgtaatcccag

SEQ ID NO: 8553 - DNA, 22 bp, synthetic construct
  misc_feature 1..22: note = chemically synthesized
  source 1..22: mol_type = other DNA
taatcccagcactttgggaggt

SEQ ID NO: 8554 - DNA, 22 bp, synthetic construct
  misc_feature 1..22: note = chemically synthesized
  source 1..22: mol_type = other DNA
tgggaggtcgacacggggggaa

SEQ ID NO: 8555 - DNA, 22 bp, synthetic construct
  misc_feature 1..22: note = chemically synthesized
  source 1..22: mol_type = other DNA
gggaggtcgacacggggggaat

SEQ ID NO: 8556 - DNA, 22 bp, synthetic construct
  misc_feature 1..22: note = chemically synthesized
  source 1..22: mol_type = other DNA
ggaggtcgacacggggggaatc

SEQ ID NO: 8557 - DNA, 22 bp, synthetic construct
  misc_feature 1..22: note = chemically synthesized
  source 1..22: mol_type = other DNA
gagcccaggagctcaagactag

SEQ ID NO: 8558 - DNA, 22 bp, synthetic construct
  misc_feature 1..22: note = chemically synthesized
  source 1..22: mol_type = other DNA
agcccaggagctcaagactagt

SEQ ID NO: 8559 - DNA, 22 bp, synthetic construct
  misc_feature 1..22: note = chemically synthesized
  source 1..22: mol_type = other DNA
aagactagtctgggcagcatgg

SEQ ID NO: 8560 - DNA, 22 bp, synthetic construct
  misc_feature 1..22: note = chemically synthesized
  source 1..22: mol_type = other DNA
gtctgggcagcatggcaaaacc

SEQ ID NO: 8561 - DNA, 22 bp, synthetic construct
  misc_feature 1..22: note = chemically synthesized
  source 1..22: mol_type = other DNA
ggcagcatggcaaaacccctct

SEQ ID NO: 8562 - DNA, 22 bp, synthetic construct
  misc_feature 1..22: note = chemically synthesized
  source 1..22: mol_type = other DNA
tacatggcaaaaccgtctctac

SEQ ID NO: 8563 - DNA, 22 bp, synthetic construct
  misc_feature 1..22: note = chemically synthesized
  source 1..22: mol_type = other DNA
catggcaaaaccgtctctacaa

SEQ ID NO: 8564 - DNA, 22 bp, synthetic construct
  misc_feature 1..22: note = chemically synthesized
  source 1..22: mol_type = other DNA
tacaaaaaaaaatttttaatta

SEQ ID NO: 8565 - DNA, 22 bp, synthetic construct
  misc_feature 1..22: note = chemically synthesized
  source 1..22: mol_type = other DNA
caaaaaaaaatttttaattagc

SEQ ID NO: 8566 - DNA, 22 bp, synthetic construct
  misc_feature 1..22: note = chemically synthesized
  source 1..22: mol_type = other DNA
ttaattagccaggtgtggtgcc

SEQ ID NO: 8567 - DNA, 22 bp, synthetic construct
  misc_feature 1..22: note = chemically synthesized
  source 1..22: mol_type = other DNA
taattagccaggtgtggtgcca

SEQ ID NO: 8568 - DNA, 22 bp, synthetic construct
  misc_feature 1..22: note = chemically synthesized
  source 1..22: mol_type = other DNA
aattagccaggtgtggtgccac

SEQ ID NO: 8569 - DNA, 22 bp, synthetic construct
  misc_feature 1..22: note = chemically synthesized
  source 1..22: mol_type = other DNA
attagccaggtgtggtgccaca

SEQ ID NO: 8570 - DNA, 22 bp, synthetic construct
  misc_feature 1..22: note = chemically synthesized
  source 1..22: mol_type = other DNA
gccaggtgtggtgccacatgcc

SEQ ID NO: 8571 - DNA, 22 bp, synthetic construct
  misc_feature 1..22: note = chemically synthesized
  source 1..22: mol_type = other DNA
tagtcccagctacctgggaggc

SEQ ID NO: 8572 - DNA, 22 bp, synthetic construct
  misc_feature 1..22: note = chemically synthesized
  source 1..22: mol_type = other DNA
cctgggaggctgaagtggaagg

SEQ ID NO: 8573 - DNA, 22 bp, synthetic construct
  misc_feature 1..22: note = chemically synthesized
  source 1..22: mol_type = other DNA
ggaggctgaagtggaaggatcg

SEQ ID NO: 8574 - DNA, 22 bp, synthetic construct
  misc_feature 1..22: note = chemically synthesized
  source 1..22: mol_type = other DNA
aagtggaaggatcgcctgagcc

SEQ ID NO: 8575 - DNA, 22 bp, synthetic construct
  misc_feature 1..22: note = chemically synthesized
  source 1..22: mol_type = other DNA
agcccaggaggtggaggccaca

SEQ ID NO: 8576 - DNA, 22 bp, synthetic construct
  misc_feature 1..22: note = chemically synthesized
  source 1..22: mol_type = other DNA
tgacaagctactgcattccagc

SEQ ID NO: 8577 - DNA, 22 bp, synthetic construct
  misc_feature 1..22: note = chemically synthesized
  source 1..22: mol_type = other DNA
ctgcattccagcctgggcaaca

SEQ ID NO: 8578 - DNA, 22 bp, synthetic construct
  misc_feature 1..22: note = chemically synthesized
  source 1..22: mol_type = other DNA
cattccagcctgggcaacagag

SEQ ID NO: 8579 - DNA, 22 bp, synthetic construct
  misc_feature 1..22: note = chemically synthesized
  source 1..22: mol_type = other DNA
cagcctgggcaacagagtgaga

SEQ ID NO: 8580 - DNA, 22 bp, synthetic construct
  misc_feature 1..22: note = chemically synthesized
  source 1..22: mol_type = other DNA
ggcaacagagtgagatgagaga

SEQ ID NO: 8581 - DNA, 22 bp, synthetic construct
  misc_feature 1..22: note = chemically synthesized
  source 1..22: mol_type = other DNA
tagttaacttaatgaacagcaa

SEQ ID NO: 8582 - DNA, 22 bp, synthetic construct
  misc_feature 1..22: note = chemically synthesized
  source 1..22: mol_type = other DNA
agttaacttaatgaacagcaat

SEQ ID NO: 8583 - DNA, 22 bp, synthetic construct
  misc_feature 1..22: note = chemically synthesized
  source 1..22: mol_type = other DNA
gttaacttaatgaacagcaata

SEQ ID NO: 8584 - DNA, 22 bp, synthetic construct
  misc_feature 1..22: note = chemically synthesized
  source 1..22: mol_type = other DNA
acttaatgaacagcaataactc

SEQ ID NO: 8585 - DNA, 22 bp, synthetic construct
  misc_feature 1..22: note = chemically synthesized
  source 1..22: mol_type = other DNA
aatgaacagcaataactctata

SEQ ID NO: 8586 - DNA, 22 bp, synthetic construct
  misc_feature 1..22: note = chemically synthesized
  source 1..22: mol_type = other DNA
atgaacagcaataactctataa

SEQ ID NO: 8587 - DNA, 22 bp, synthetic construct
  misc_feature 1..22: note = chemically synthesized
  source 1..22: mol_type = other DNA
tataaaatgaaacactgggaga

SEQ ID NO: 8588 - DNA, 22 bp, synthetic construct
  misc_feature 1..22: note = chemically synthesized
  source 1..22: mol_type = other DNA
taaaatgaaacactgggagaaa

SEQ ID NO: 8589 - DNA, 22 bp, synthetic construct
  misc_feature 1..22: note = chemically synthesized
  source 1..22: mol_type = other DNA
ggagaaaaaagaattaaaaaat

SEQ ID NO: 8590 - DNA, 22 bp, synthetic construct
  misc_feature 1..22: note = chemically synthesized
  source 1..22: mol_type = other DNA
aaaaatggaaagagaatgagtg

SEQ ID NO: 8591 - DNA, 22 bp, synthetic construct
  misc_feature 1..22: note = chemically synthesized
  source 1..22: mol_type = other DNA
tgggacccttaatacatgcata

SEQ ID NO: 8592 - DNA, 22 bp, synthetic construct
  misc_feature 1..22: note = chemically synthesized
  source 1..22: mol_type = other DNA
aatacatgcataattgaaatct

SEQ ID NO: 8593 - DNA, 22 bp, synthetic construct
  misc_feature 1..22: note = chemically synthesized
  source 1..22: mol_type = other DNA
atacatgcataattgaaatctt

SEQ ID NO: 8594 - DNA, 22 bp, synthetic construct
  misc_feature 1..22: note = chemically synthesized
  source 1..22: mol_type = other DNA
aaatctttaaaagaaaaagggg

SEQ ID NO: 8595 - DNA, 22 bp, synthetic construct
  misc_feature 1..22: note = chemically synthesized
  source 1..22: mol_type = other DNA
taaaagaaaaagggggtagcag

SEQ ID NO: 8596 - DNA, 22 bp, synthetic construct
  misc_feature 1..22: note = chemically synthesized
  source 1..22: mol_type = other DNA
aaaagaaaaagggggtagcaga

SEQ ID NO: 8597 - DNA, 22 bp, synthetic construct
  misc_feature 1..22: note = chemically synthesized
  source 1..22: mol_type = other DNA
aaagaaaaagggggtagcagaa

SEQ ID NO: 8598 - DNA, 22 bp, synthetic construct
  misc_feature 1..22: note = chemically synthesized
  source 1..22: mol_type = other DNA
agacaagtggaagatgggcccc

SEQ ID NO: 8599 - DNA, 22 bp, synthetic construct
  misc_feature 1..22: note = chemically synthesized
  source 1..22: mol_type = other DNA
atcagtgtcagctcccatgatg

SEQ ID NO: 8600 - DNA, 22 bp, synthetic construct
  misc_feature 1..22: note = chemically synthesized
  source 1..22: mol_type = other DNA
ccatgatgacgttcccccagcc

SEQ ID NO: 8601 - DNA, 22 bp, synthetic construct
  misc_feature 1..22: note = chemically synthesized
  source 1..22: mol_type = other DNA
ccccagcccccaccacccgggc

SEQ ID NO: 8602 - DNA, 22 bp, synthetic construct
  misc_feature 1..22: note = chemically synthesized
  source 1..22: mol_type = other DNA
ctggagggaaatgcggtgactt

SEQ ID NO: 8603 - DNA, 22 bp, synthetic construct
  misc_feature 1..22: note = chemically synthesized
  source 1..22: mol_type = other DNA
gagggaaatgcggtgactttgc

SEQ ID NO: 8604 - DNA, 22 bp, synthetic construct
  misc_feature 1..22: note = chemically synthesized
  source 1..22: mol_type = other DNA
tgctacatcccttcagacggtc

SEQ ID NO: 8605 - DNA, 22 bp, synthetic construct
  misc_feature 1..22: note = chemically synthesized
  source 1..22: mol_type = other DNA
gctacatcccttcagacggtcc

SEQ ID NO: 8606 - DNA, 22 bp, synthetic construct
  misc_feature 1..22: note = chemically synthesized
  source 1..22: mol_type = other DNA
ctacatcccttcagacggtccc

SEQ ID NO: 8607 - DNA, 22 bp, synthetic construct
  misc_feature 1..22: note = chemically synthesized
  source 1..22: mol_type = other DNA
catcccttcagacggtccctca

SEQ ID NO: 8608 - DNA, 22 bp, synthetic construct
  misc_feature 1..22: note = chemically synthesized
  source 1..22: mol_type = other DNA
cagacggtccctcactggtgtc

SEQ ID NO: 8609 - DNA, 22 bp, synthetic construct
  misc_feature 1..22: note = chemically synthesized
  source 1..22: mol_type = other DNA
agacggtccctcactggtgtcc

SEQ ID NO: 8610 - DNA, 22 bp, synthetic construct
  misc_feature 1..22: note = chemically synthesized
  source 1..22: mol_type = other DNA
actggtgtccctcagcccattc

SEQ ID NO: 8611 - DNA, 22 bp, synthetic construct
  misc_feature 1..22: note = chemically synthesized
  source 1..22: mol_type = other DNA
gtgtccctcagcccattcgcgt

SEQ ID NO: 8612 - DNA, 22 bp, synthetic construct
  misc_feature 1..22: note = chemically synthesized
  source 1..22: mol_type = other DNA
agcccattcgcgtgagctcact

SEQ ID NO: 8613 - DNA, 22 bp, synthetic construct
  misc_feature 1..22: note = chemically synthesized
  source 1..22: mol_type = other DNA
gcgtgagctcactctcccatta

SEQ ID NO: 8614 - DNA, 22 bp, synthetic construct
  misc_feature 1..22: note = chemically synthesized
  source 1..22: mol_type = other DNA
actctcccattaatttcagaaa

SEQ ID NO: 8615 - DNA, 22 bp, synthetic construct
  misc_feature 1..22: note = chemically synthesized
  source 1..22: mol_type = other DNA
tcccattaatttcagaaatcct

SEQ ID NO: 8616 - DNA, 22 bp, synthetic construct
  misc_feature 1..22: note = chemically synthesized
  source 1..22: mol_type = other DNA
ccattaatttcagaaatcctgg

SEQ ID NO: 8617 - DNA, 22 bp, synthetic construct
  misc_feature 1..22: note = chemically synthesized
  source 1..22: mol_type = other DNA
atttcagaaatcctggcctctc

SEQ ID NO: 8618 - DNA, 22 bp, synthetic construct
  misc_feature 1..22: note = chemically synthesized
  source 1..22: mol_type = other DNA
cagaaatcctggcctctctcca

SEQ ID NO: 8619 - DNA, 22 bp, synthetic construct
  misc_feature 1..22: note = chemically synthesized
  source 1..22: mol_type = other DNA
agaaatcctggcctctctccaa

SEQ ID NO: 8620 - DNA, 22 bp, synthetic construct
  misc_feature 1..22: note = chemically synthesized
  source 1..22: mol_type = other DNA
gcctctctccaagcctcctgct

SEQ ID NO: 8621 - DNA, 22 bp, synthetic construct
  misc_feature 1..22: note = chemically synthesized
  source 1..22: mol_type = other DNA
tctccaagcctcctgctcaaac

SEQ ID NO: 8622 - DNA, 22 bp, synthetic construct
  misc_feature 1..22: note = chemically synthesized
  source 1..22: mol_type = other DNA
tccaagcctcctgctcaaactc

SEQ ID NO: 8623 - DNA, 22 bp, synthetic construct
  misc_feature 1..22: note = chemically synthesized
  source 1..22: mol_type = other DNA
caagcctcctgctcaaactcta

SEQ ID NO: 8624 - DNA, 22 bp, synthetic construct
  misc_feature 1..22: note = chemically synthesized
  source 1..22: mol_type = other DNA
ctgctcaaactctaaattctgt

SEQ ID NO: 8625 - DNA, 22 bp, synthetic construct
  misc_feature 1..22: note = chemically synthesized
  source 1..22: mol_type = other DNA
ctcaaactctaaattctgtcac

SEQ ID NO: 8626 - DNA, 22 bp, synthetic construct
  misc_feature 1..22: note = chemically synthesized
  source 1..22: mol_type = other DNA
aaactctaaattctgtcaccct

SEQ ID NO: 8627 - DNA, 22 bp, synthetic construct
  misc_feature 1..22: note = chemically synthesized
  source 1..22: mol_type = other DNA
taaattctgtcaccctcagaag

SEQ ID NO: 8628 - DNA, 22 bp, synthetic construct
  misc_feature 1..22: note = chemically synthesized
  source 1..22: mol_type = other DNA
aattctgtcaccctcagaagat

SEQ ID NO: 8629 - DNA, 22 bp, synthetic construct
  misc_feature 1..22: note = chemically synthesized
  source 1..22: mol_type = other DNA
tgtcaccctcagaagattcagc

SEQ ID NO: 8630 - DNA, 22 bp, synthetic construct
  misc_feature 1..22: note = chemically synthesized
  source 1..22: mol_type = other DNA
tcaccctcagaagattcagcag

SEQ ID NO: 8631 - DNA, 22 bp, synthetic construct
  misc_feature 1..22: note = chemically synthesized
  source 1..22: mol_type = other DNA
agaagattcagcagcatcccgt

SEQ ID NO: 8632 - DNA, 22 bp, synthetic construct
  misc_feature 1..22: note = chemically synthesized
  source 1..22: mol_type = other DNA
agcagcatcccgtattctctct

SEQ ID NO: 8633 - DNA, 22 bp, synthetic construct
  misc_feature 1..22: note = chemically synthesized
  source 1..22: mol_type = other DNA
tctctgagtgttcactatgtac

SEQ ID NO: 8634 - DNA, 22 bp, synthetic construct
  misc_feature 1..22: note = chemically synthesized
  source 1..22: mol_type = other DNA
tctgagtgttcactatgtaccg

SEQ ID NO: 8635 - DNA, 22 bp, synthetic construct
  misc_feature 1..22: note = chemically synthesized
  source 1..22: mol_type = other DNA
tgagtgttcactatgtaccggg

SEQ ID NO: 8636 - DNA, 22 bp, synthetic construct
  misc_feature 1..22: note = chemically synthesized
  source 1..22: mol_type = other DNA
agtgttcactatgtaccgggtg

SEQ ID NO: 8637 - DNA, 22 bp, synthetic construct
  misc_feature 1..22: note = chemically synthesized
  source 1..22: mol_type = other DNA
actatgtaccgggtgccgtgtg

SEQ ID NO: 8638 - DNA, 22 bp, synthetic construct
  misc_feature 1..22: note = chemically synthesized
  source 1..22: mol_type = other DNA
tgtaccgggtgccgtgtgggca

SEQ ID NO: 8639 - DNA, 22 bp, synthetic construct
  misc_feature 1..22: note = chemically synthesized
  source 1..22: mol_type = other DNA
gagttgcagaggagagtgaggc

SEQ ID NO: 8640 - DNA, 22 bp, synthetic construct
  misc_feature 1..22: note = chemically synthesized
  source 1..22: mol_type = other DNA
cagaggagagtgaggcggacag

SEQ ID NO: 8641 - DNA, 22 bp, synthetic construct
  misc_feature 1..22: note = chemically synthesized
  source 1..22: mol_type = other DNA
tgcctgtggggacaccgcctgg

SEQ ID NO: 8642 - DNA, 22 bp, synthetic construct
  misc_feature 1..22: note = chemically synthesized
  source 1..22: mol_type = other DNA
cctgtggggacaccgcctggtg

SEQ ID NO: 8643 - DNA, 22 bp, synthetic construct
  misc_feature 1..22: note = chemically synthesized
  source 1..22: mol_type = other DNA
tggggacaccgcctggtgggaa

SEQ ID NO: 8644 - DNA, 22 bp, synthetic construct
  misc_feature 1..22: note = chemically synthesized
  source 1..22: mol_type = other DNA
gtgggaagtccagccagccccc

SEQ ID NO: 8645 - DNA, 22 bp, synthetic construct
  misc_feature 1..22: note = chemically synthesized
  source 1..22: mol_type = other DNA
cagagagaggagatgctactgg

SEQ ID NO: 8646 - DNA, 22 bp, synthetic construct
  misc_feature 1..22: note = chemically synthesized
  source 1..22: mol_type = other DNA
ctggtgttcctgagtggtcctc

SEQ ID NO: 8647 - DNA, 22 bp, synthetic construct
  misc_feature 1..22: note = chemically synthesized
  source 1..22: mol_type = other DNA
gtgttcctgagtggtcctcggg

SEQ ID NO: 8648 - DNA, 22 bp, synthetic construct
  misc_feature 1..22: note = chemically synthesized
  source 1..22: mol_type = other DNA
ctgagtggtcctcgggagggac

SEQ ID NO: 8649 - DNA, 22 bp, synthetic construct
  misc_feature 1..22: note = chemically synthesized
  source 1..22: mol_type = other DNA
agtggtcctcgggagggacctc

SEQ ID NO: 8650 - DNA, 22 bp, synthetic construct
  misc_feature 1..22: note = chemically synthesized
  source 1..22: mol_type = other DNA
gggagggacctcctatccctcc

SEQ ID NO: 8651 - DNA, 22 bp, synthetic construct
  misc_feature 1..22: note = chemically synthesized
  source 1..22: mol_type = other DNA
ctatccctcctgtcccctgccc

SEQ ID NO: 8652 - DNA, 22 bp, synthetic construct
  misc_feature 1..22: note = chemically synthesized
  source 1..22: mol_type = other DNA
tccctcctgtcccctgccctgc

SEQ ID NO: 8653 - DNA, 22 bp, synthetic construct
  misc_feature 1..22: note = chemically synthesized
  source 1..22: mol_type = other DNA
ctgtcccctgccctgccctgcc

SEQ ID NO: 8654 - DNA, 22 bp, synthetic construct
  misc_feature 1..22: note = chemically synthesized
  source 1..22: mol_type = other DNA
tcccctgccctgccctgcccag

SEQ ID NO: 8655 - DNA, 22 bp, synthetic construct
  misc_feature 1..22: note = chemically synthesized
  source 1..22: mol_type = other DNA
ccctgccctgcccagcaccggc

SEQ ID NO: 8656 - DNA, 22 bp, synthetic construct
  misc_feature 1..22: note = chemically synthesized
  source 1..22: mol_type = other DNA
ccctgcccagcaccggccctcc

SEQ ID NO: 8657 - DNA, 22 bp, synthetic construct
  misc_feature 1..22: note = chemically synthesized
  source 1..22: mol_type = other DNA
cccagcaccggccctccctcgg

SEQ ID NO: 8658 - DNA, 22 bp, synthetic construct
  misc_feature 1..22: note = chemically synthesized
  source 1..22: mol_type = other DNA
cctcggttggccagcctcagga

SEQ ID NO: 8659 - DNA, 22 bp, synthetic construct
  misc_feature 1..22: note = chemically synthesized
  source 1..22: mol_type = other DNA
ggttggccagcctcaggaatga

SEQ ID NO: 8660 - DNA, 22 bp, synthetic construct
  misc_feature 1..22: note = chemically synthesized
  source 1..22: mol_type = other DNA
gccagcctcaggaatgaggagt

SEQ ID NO: 8661 - DNA, 22 bp, synthetic construct
  misc_feature 1..22: note = chemically synthesized
  source 1..22: mol_type = other DNA
aggaatgaggagtccctcattc

SEQ ID NO: 8662 - DNA, 22 bp, synthetic construct
  misc_feature 1..22: note = chemically synthesized
  source 1..22: mol_type = other DNA
attccagcccagctaaccaatc

SEQ ID NO: 8663 - DNA, 22 bp, synthetic construct
  misc_feature 1..22: note = chemically synthesized
  source 1..22: mol_type = other DNA
cagcccagctaaccaatcccct

SEQ ID NO: 8664 - DNA, 22 bp, synthetic construct
  misc_feature 1..22: note = chemically synthesized
  source 1..22: mol_type = other DNA
accaatccccttcctaagctcc

SEQ ID NO: 8665 - DNA, 22 bp, synthetic construct
  misc_feature 1..22: note = chemically synthesized
  source 1..22: mol_type = other DNA
cctaagctccaagcccctgctc

SEQ ID NO: 8666 - DNA, 22 bp, synthetic construct
  misc_feature 1..22: note = chemically synthesized
  source 1..22: mol_type = other DNA
ctaagctccaagcccctgctcc

SEQ ID NO: 8667 - DNA, 22 bp, synthetic construct
  misc_feature 1..22: note = chemically synthesized
  source 1..22: mol_type = other DNA
agctccaagcccctgctcctcc

SEQ ID NO: 8668 - DNA, 22 bp, synthetic construct
  misc_feature 1..22: note = chemically synthesized
  source 1..22: mol_type = other DNA
caagcccctgctcctcctgcct

SEQ ID NO: 8669 - DNA, 22 bp, synthetic construct
  misc_feature 1..22: note = chemically synthesized
  source 1..22: mol_type = other DNA
ctcctcctgcctccatggaacc

SEQ ID NO: 8670 - DNA, 22 bp, synthetic construct
  misc_feature 1..22: note = chemically synthesized
  source 1..22: mol_type = other DNA
ctcctgcctccatggaacccgg

SEQ ID NO: 8671 - DNA, 22 bp, synthetic construct
  misc_feature 1..22: note = chemically synthesized
  source 1..22: mol_type = other DNA
ctgcctccatggaacccggctc

SEQ ID NO: 8672 - DNA, 22 bp, synthetic construct
  misc_feature 1..22: note = chemically synthesized
  source 1..22: mol_type = other DNA
cctccatggaacccggctccac

SEQ ID NO: 8673 - DNA, 22 bp, synthetic construct
  misc_feature 1..22: note = chemically synthesized
  source 1..22: mol_type = other DNA
catggaacccggctccaccacc

SEQ ID NO: 8674 - DNA, 22 bp, synthetic construct
  misc_feature 1..22: note = chemically synthesized
  source 1..22: mol_type = other DNA
caccaccagcacccacacacct

SEQ ID NO: 8675 - DNA, 22 bp, synthetic construct
  misc_feature 1..22: note = chemically synthesized
  source 1..22: mol_type = other DNA
acactcctccattcctggctct

SEQ ID NO: 8676 - DNA, 22 bp, synthetic construct
  misc_feature 1..22: note = chemically synthesized
  source 1..22: mol_type = other DNA
ctccattcctggctcttgccct

SEQ ID NO: 8677 - DNA, 22 bp, synthetic construct
  misc_feature 1..22: note = chemically synthesized
  source 1..22: mol_type = other DNA
cattcctggctcttgcccttct

SEQ ID NO: 8678 - DNA, 22 bp, synthetic construct
  misc_feature 1..22: note = chemically synthesized
  source 1..22: mol_type = other DNA
ctggctcttgcccttctgccta

SEQ ID NO: 8679 - DNA, 22 bp, synthetic construct
  misc_feature 1..22: note = chemically synthesized
  source 1..22: mol_type = other DNA
gctcttgcccttctgcctagca

SEQ ID NO: 8680 - DNA, 22 bp, synthetic construct
  misc_feature 1..22: note = chemically synthesized
  source 1..22: mol_type = other DNA
ttgcccttctgcctagcactgc

SEQ ID NO: 8681 - DNA, 22 bp, synthetic construct
  misc_feature 1..22: note = chemically synthesized
  source 1..22: mol_type = other DNA
gcccttctgcctagcactgctc

SEQ ID NO: 8682 - DNA, 22 bp, synthetic construct
  misc_feature 1..22: note = chemically synthesized
  source 1..22: mol_type = other DNA
cccttctgcctagcactgctca

SEQ ID NO: 8683 - DNA, 22 bp, synthetic construct
  misc_feature 1..22: note = chemically synthesized
  source 1..22: mol_type = other DNA
ctgcctagcactgctcagatct

SEQ ID NO: 8684 - DNA, 22 bp, synthetic construct
  misc_feature 1..22: note = chemically synthesized
  source 1..22: mol_type = other DNA
tgcctagcactgctcagatctc

SEQ ID NO: 8685 - DNA, 22 bp, synthetic construct
  misc_feature 1..22: note = chemically synthesized
  source 1..22: mol_type = other DNA
cctagcactgctcagatctctc

SEQ ID NO: 8686 - DNA, 22 bp, synthetic construct
  misc_feature 1..22: note = chemically synthesized
  source 1..22: mol_type = other DNA
gcactgctcagatctctctcac

SEQ ID NO: 8687 - DNA, 22 bp, synthetic construct
  misc_feature 1..22: note = chemically synthesized
  source 1..22: mol_type = other DNA
ctcagatctctctcaccttaaa

SEQ ID NO: 8688 - DNA, 22 bp, synthetic construct
  misc_feature 1..22: note = chemically synthesized
  source 1..22: mol_type = other DNA
agatctctctcaccttaaaatc

SEQ ID NO: 8689 - DNA, 22 bp, synthetic construct
  misc_feature 1..22: note = chemically synthesized
  source 1..22: mol_type = other DNA
tctcaccttaaaatcttttccc

SEQ ID NO: 8690 - DNA, 22 bp, synthetic construct
  misc_feature 1..22: note = chemically synthesized
  source 1..22: mol_type = other DNA
tcaccttaaaatcttttcccac

SEQ ID NO: 8691 - DNA, 22 bp, synthetic construct
  misc_feature 1..22: note = chemically synthesized
  source 1..22: mol_type = other DNA
accttaaaatcttttcccacca

SEQ ID NO: 8692 - DNA, 22 bp, synthetic construct
  misc_feature 1..22: note = chemically synthesized
  source 1..22: mol_type = other DNA
aaaatcttttcccaccagcctg

SEQ ID NO: 8693 - DNA, 22 bp, synthetic construct
  misc_feature 1..22: note = chemically synthesized
  source 1..22: mol_type = other DNA
aaatcttttcccaccagcctgg

SEQ ID NO: 8694 - DNA, 22 bp, synthetic construct
  misc_feature 1..22: note = chemically synthesized
  source 1..22: mol_type = other DNA
ttcccaccagcctgggcaacat

SEQ ID NO: 8695 - DNA, 22 bp, synthetic construct
  misc_feature 1..22: note = chemically synthesized
  source 1..22: mol_type = other DNA
tcccaccagcctgggcaacata

SEQ ID NO: 8696 - DNA, 22 bp, synthetic construct
  misc_feature 1..22: note = chemically synthesized
  source 1..22: mol_type = other DNA
cccaccagcctgggcaacatag

SEQ ID NO: 8697 - DNA, 22 bp, synthetic construct
  misc_feature 1..22: note = chemically synthesized
  source 1..22: mol_type = other DNA
ccaccagcctgggcaacatagc

SEQ ID NO: 8698 - DNA, 22 bp, synthetic construct
  misc_feature 1..22: note = chemically synthesized
  source 1..22: mol_type = other DNA
ggcaacatagcaagaccccatt

SEQ ID NO: 8699 - DNA, 22 bp, synthetic construct
  misc_feature 1..22: note = chemically synthesized
  source 1..22: mol_type = other DNA
ctctaaaaaattttttttaatt

SEQ ID NO: 8700 - DNA, 22 bp, synthetic construct
  misc_feature 1..22: note = chemically synthesized
  source 1..22: mol_type = other DNA
tctaaaaaattttttttaattt

SEQ ID NO: 8701 - DNA, 22 bp, synthetic construct
  misc_feature 1..22: note = chemically synthesized
  source 1..22: mol_type = other DNA
taaaaaattttttttaatttgc

SEQ ID NO: 8702 - DNA, 22 bp, synthetic construct
  misc_feature 1..22: note = chemically synthesized
  source 1..22: mol_type = other DNA
aaaaattttttttaatttgcca

SEQ ID NO: 8703 - DNA, 22 bp, synthetic construct
  misc_feature 1..22: note = chemically synthesized
  source 1..22: mol_type = other DNA
tttttaatttgccaggcacagt

SEQ ID NO: 8704 - DNA, 22 bp, synthetic construct
  misc_feature 1..22: note = chemically synthesized
  source 1..22: mol_type = other DNA
ttttaatttgccaggcacagtg

SEQ ID NO: 8705 - DNA, 22 bp, synthetic construct
  misc_feature 1..22: note = chemically synthesized
  source 1..22: mol_type = other DNA
tttaatttgccaggcacagtgg

SEQ ID NO: 8706 - DNA, 22 bp, synthetic construct
  misc_feature 1..22: note = chemically synthesized
  source 1..22: mol_type = other DNA
ttaatttgccaggcacagtggt

SEQ ID NO: 8707 - DNA, 22 bp, synthetic construct
  misc_feature 1..22: note = chemically synthesized
  source 1..22: mol_type = other DNA
taatttgccaggcacagtggtg

SEQ ID NO: 8708 - DNA, 22 bp, synthetic construct
  misc_feature 1..22: note = chemically synthesized
  source 1..22: mol_type = other DNA
aatttgccaggcacagtggtgc

SEQ ID NO: 8709 - DNA, 22 bp, synthetic construct
  misc_feature 1..22: note = chemically synthesized
  source 1..22: mol_type = other DNA
atttgccaggcacagtggtgca

SEQ ID NO: 8710 - DNA, 22 bp, synthetic construct
  misc_feature 1..22: note = chemically synthesized
  source 1..22: mol_type = other DNA
gccaggcacagtggtgcacacc

SEQ ID NO: 8711 - DNA, 22 bp, synthetic construct
  misc_feature 1..22: note = chemically synthesized
  source 1..22: mol_type = other DNA
ccaggcacagtggtgcacacct

SEQ ID NO: 8712 - DNA, 22 bp, synthetic construct
  misc_feature 1..22: note = chemically synthesized
  source 1..22: mol_type = other DNA
taagtcctaactacttgggagg

SEQ ID NO: 8713 - DNA, 22 bp, synthetic construct
  misc_feature 1..22: note = chemically synthesized
  source 1..22: mol_type = other DNA
actacttgggaggctgaggtgg

SEQ ID NO: 8714 - DNA, 22 bp, synthetic construct
  misc_feature 1..22: note = chemically synthesized
  source 1..22: mol_type = other DNA
cttgggaggctgaggtgggagg

SEQ ID NO: 8715 - DNA, 22 bp, synthetic construct
  misc_feature 1..22: note = chemically synthesized
  source 1..22: mol_type = other DNA
gggaggctgaggtgggaggatg

SEQ ID NO: 8716 - DNA, 22 bp, synthetic construct
  misc_feature 1..22: note = chemically synthesized
  source 1..22: mol_type = other DNA
ggaggctgaggtgggaggatgg

SEQ ID NO: 8717 - DNA, 22 bp, synthetic construct
  misc_feature 1..22: note = chemically synthesized
  source 1..22: mol_type = other DNA
aggtgggaggatggcttgagcc

SEQ ID NO: 8718 - DNA, 22 bp, synthetic construct
  misc_feature 1..22: note = chemically synthesized
  source 1..22: mol_type = other DNA
gagcccaggagttcgaggttgc

SEQ ID NO: 8719 - DNA, 22 bp, synthetic construct
  misc_feature 1..22: note = chemically synthesized
  source 1..22: mol_type = other DNA
agcccaggagttcgaggttgca

SEQ ID NO: 8720 - DNA, 22 bp, synthetic construct
  misc_feature 1..22: note = chemically synthesized
  source 1..22: mol_type = other DNA
gaggttgcagtgagctatgatc

SEQ ID NO: 8721 - DNA, 22 bp, synthetic construct
  misc_feature 1..22: note = chemically synthesized
  source 1..22: mol_type = other DNA
cagtgagctatgatcctgccac

SEQ ID NO: 8722 - DNA, 22 bp, synthetic construct
  misc_feature 1..22: note = chemically synthesized
  source 1..22: mol_type = other DNA
tgatcctgccactacactcctg

SEQ ID NO: 8723 - DNA, 22 bp, synthetic construct
  misc_feature 1..22: note = chemically synthesized
  source 1..22: mol_type = other DNA
ccactacactcctgtctctaaa

SEQ ID NO: 8724 - DNA, 22 bp, synthetic construct
  misc_feature 1..22: note = chemically synthesized
  source 1..22: mol_type = other DNA
cactcctgtctctaaaaaaaaa

SEQ ID NO: 8725 - DNA, 22 bp, synthetic construct
  misc_feature 1..22: note = chemically synthesized
  source 1..22: mol_type = other DNA
ctgtctctaaaaaaaaaatgtc

SEQ ID NO: 8726 - DNA, 22 bp, synthetic construct
  misc_feature 1..22: note = chemically synthesized
  source 1..22: mol_type = other DNA
tctctaaaaaaaaaatgtccaa

SEQ ID NO: 8727 - DNA, 22 bp, synthetic construct
  misc_feature 1..22: note = chemically synthesized
  source 1..22: mol_type = other DNA
taaaaaaaaaatgtccaagata

SEQ ID NO: 8728 - DNA, 22 bp, synthetic construct
  misc_feature 1..22: note = chemically synthesized
  source 1..22: mol_type = other DNA
aaaaaaaaatgtccaagatact

SEQ ID NO: 8729 - DNA, 22 bp, synthetic construct
  misc_feature 1..22: note = chemically synthesized
  source 1..22: mol_type = other DNA
aggtccttcagtcaagatttat

SEQ ID NO: 8730 - DNA, 22 bp, synthetic construct
  misc_feature 1..22: note = chemically synthesized
  source 1..22: mol_type = other DNA
ggtccttcagtcaagatttatt

SEQ ID NO: 8731 - DNA, 22 bp, synthetic construct
  misc_feature 1..22: note = chemically synthesized
  source 1..22: mol_type = other DNA
cagtcaagatttattacagaag

SEQ ID NO: 8732 - DNA, 22 bp, synthetic construct
  misc_feature 1..22: note = chemically synthesized
  source 1..22: mol_type = other DNA
agtcaagatttattacagaagg

SEQ ID NO: 8733 - DNA, 22 bp, synthetic construct
  misc_feature 1..22: note = chemically synthesized
  source 1..22: mol_type = other DNA
attacagaaggatccagggaag

SEQ ID NO: 8734 - DNA, 22 bp, synthetic construct
  misc_feature 1..22: note = chemically synthesized
  source 1..22: mol_type = other DNA
ttacagaaggatccagggaagg

SEQ ID NO: 8735 - DNA, 22 bp, synthetic construct
  misc_feature 1..22: note = chemically synthesized
  source 1..22: mol_type = other DNA
cagaaggatccagggaagggtc

SEQ ID NO: 8736 - DNA, 22 bp, synthetic construct
  misc_feature 1..22: note = chemically synthesized
  source 1..22: mol_type = other DNA
gggagatgagaggagcagggat

SEQ ID NO: 8737 - DNA, 22 bp, synthetic construct
  misc_feature 1..22: note = chemically synthesized
  source 1..22: mol_type = other DNA
ggagatgagaggagcagggatc

SEQ ID NO: 8738 - DNA, 22 bp, synthetic construct
  misc_feature 1..22: note = chemically synthesized
  source 1..22: mol_type = other DNA
ccaggatctctctgtgctcacg

SEQ ID NO: 8739 - DNA, 22 bp, synthetic construct
  misc_feature 1..22: note = chemically synthesized
  source 1..22: mol_type = other DNA
caggatctctctgtgctcacgt

SEQ ID NO: 8740 - DNA, 22 bp, synthetic construct
  misc_feature 1..22: note = chemically synthesized
  source 1..22: mol_type = other DNA
tctgtgctcacgtcccccaccc

SEQ ID NO: 8741 - DNA, 22 bp, synthetic construct
  misc_feature 1..22: note = chemically synthesized
  source 1..22: mol_type = other DNA
tgtgctcacgtcccccacccat

SEQ ID NO: 8742 - DNA, 22 bp, synthetic construct
  misc_feature 1..22: note = chemically synthesized
  source 1..22: mol_type = other DNA
tgctcacgtcccccacccatcc

SEQ ID NO: 8743 - DNA, 22 bp, synthetic construct
  misc_feature 1..22: note = chemically synthesized
  source 1..22: mol_type = other DNA
acgtcccccacccatcccaact

SEQ ID NO: 8744 - DNA, 22 bp, synthetic construct
  misc_feature 1..22: note = chemically synthesized
  source 1..22: mol_type = other DNA
accccacctctacacacacaca

SEQ ID NO: 8745 - DNA, 22 bp, synthetic construct
  misc_feature 1..22: note = chemically synthesized
  source 1..22: mol_type = other DNA
tacacacacacacacacacaca

SEQ ID NO: 8746 - DNA, 22 bp, synthetic construct
  misc_feature 1..22: note = chemically synthesized
  source 1..22: mol_type = other DNA
cacacacacacacacacacata

SEQ ID NO: 8747 - DNA, 22 bp, synthetic construct
  misc_feature 1..22: note = chemically synthesized
  source 1..22: mol_type = other DNA
acacacacactcacgcaacaca

SEQ ID NO: 8748 - DNA, 22 bp, synthetic construct
  misc_feature 1..22: note = chemically synthesized
  source 1..22: mol_type = other DNA
acgcaacacactcacacacaca

SEQ ID NO: 8749 - DNA, 22 bp, synthetic construct
  misc_feature 1..22: note = chemically synthesized
  source 1..22: mol_type = other DNA
acacacacaacatacataacac

SEQ ID NO: 8750 - DNA, 22 bp, synthetic construct
  misc_feature 1..22: note = chemically synthesized
  source 1..22: mol_type = other DNA
acaacatacacacacaacacac

SEQ ID NO: 8751 - DNA, 22 bp, synthetic construct
  misc_feature 1..22: note = chemically synthesized
  source 1..22: mol_type = other DNA
gcacaacatacacacacgcaca

SEQ ID NO: 8752 - DNA, 22 bp, synthetic construct
  misc_feature 1..22: note = chemically synthesized
  source 1..22: mol_type = other DNA
acacaacacacaaacatacata

SEQ ID NO: 8753 - DNA, 22 bp, synthetic construct
  misc_feature 1..22: note = chemically synthesized
  source 1..22: mol_type = other DNA
acacaatacacacacacaacac

SEQ ID NO: 8754 - DNA, 22 bp, synthetic construct
  misc_feature 1..22: note = chemically synthesized
  source 1..22: mol_type = other DNA
atacacaacatacatacacaca

SEQ ID NO: 8755 - DNA, 22 bp, synthetic construct
  misc_feature 1..22: note = chemically synthesized
  source 1..22: mol_type = other DNA
acatacacaacatacactcgca

SEQ ID NO: 8756 - DNA, 22 bp, synthetic construct
  misc_feature 1..22: note = chemically synthesized
  source 1..22: mol_type = other DNA
gcacaacatacacacatgcaca

SEQ ID NO: 8757 - DNA, 22 bp, synthetic construct
  misc_feature 1..22: note = chemically synthesized
  source 1..22: mol_type = other DNA
acacacaagatacacacaacat

SEQ ID NO: 8758 - DNA, 22 bp, synthetic construct
  misc_feature 1..22: note = chemically synthesized
  source 1..22: mol_type = other DNA
acacaacatacacacacaacac

SEQ ID NO: 8759 - DNA, 22 bp, synthetic construct
  misc_feature 1..22: note = chemically synthesized
  source 1..22: mol_type = other DNA
tcacacacaacataccctctca

SEQ ID NO: 8760 - DNA, 22 bp, synthetic construct
  misc_feature 1..22: note = chemically synthesized
  source 1..22: mol_type = other DNA
acacacaacataccctctcaca

SEQ ID NO: 8761 - DNA, 22 bp, synthetic construct
  misc_feature 1..22: note = chemically synthesized
  source 1..22: mol_type = other DNA
tcacatacacgacatacacaca

SEQ ID NO: 8762 - DNA, 22 bp, synthetic construct
  misc_feature 1..22: note = chemically synthesized
  source 1..22: mol_type = other DNA
acatacacgacatacacacaca

SEQ ID NO: 8763 - DNA, 22 bp, synthetic construct
  misc_feature 1..22: note = chemically synthesized
  source 1..22: mol_type = other DNA
tcgcgcacatatacacacacac

SEQ ID NO: 8764 - DNA, 22 bp, synthetic construct
  misc_feature 1..22: note = chemically synthesized
  source 1..22: mol_type = other DNA
gcgcacatatacacacacacaa

SEQ ID NO: 8765 - DNA, 22 bp, synthetic construct
  misc_feature 1..22: note = chemically synthesized
  source 1..22: mol_type = other DNA
actcacacacacacacagagtc

SEQ ID NO: 8766 - DNA, 22 bp, synthetic construct
  misc_feature 1..22: note = chemically synthesized
  source 1..22: mol_type = other DNA
acacacacacacagagtcccag

SEQ ID NO: 8767 - DNA, 22 bp, synthetic construct
  misc_feature 1..22: note = chemically synthesized
  source 1..22: mol_type = other DNA
aatctgcattcctcatatgcac

SEQ ID NO: 8768 - DNA, 22 bp, synthetic construct
  misc_feature 1..22: note = chemically synthesized
  source 1..22: mol_type = other DNA
cattcctcatatgcacatacgt

SEQ ID NO: 8769 - DNA, 22 bp, synthetic construct
  misc_feature 1..22: note = chemically synthesized
  source 1..22: mol_type = other DNA
ctcatatgcacatacgtgcaca

SEQ ID NO: 8770 - DNA, 22 bp, synthetic construct
  misc_feature 1..22: note = chemically synthesized
  source 1..22: mol_type = other DNA
atatgcacatacgtgcacacgc

SEQ ID NO: 8771 - DNA, 22 bp, synthetic construct
  misc_feature 1..22: note = chemically synthesized
  source 1..22: mol_type = other DNA
ttgggttgggaggagaagggca

SEQ ID NO: 8772 - DNA, 22 bp, synthetic construct
  misc_feature 1..22: note = chemically synthesized
  source 1..22: mol_type = other DNA
gggttgggaggagaagggcagg

SEQ ID NO: 8773 - DNA, 22 bp, synthetic construct
  misc_feature 1..22: note = chemically synthesized
  source 1..22: mol_type = other DNA
ggttgggaggagaagggcaggc

SEQ ID NO: 8774 - DNA, 22 bp, synthetic construct
  misc_feature 1..22: note = chemically synthesized
  source 1..22: mol_type = other DNA
ggaggagaagggcaggcagtta

SEQ ID NO: 8775 - DNA, 22 bp, synthetic construct
  misc_feature 1..22: note = chemically synthesized
  source 1..22: mol_type = other DNA
tcttccagatctccccacacct

SEQ ID NO: 8776 - DNA, 22 bp, synthetic construct
  misc_feature 1..22: note = chemically synthesized
  source 1..22: mol_type = other DNA
ccagatctccccacacctctgg

SEQ ID NO: 8777 - DNA, 22 bp, synthetic construct
  misc_feature 1..22: note = chemically synthesized
  source 1..22: mol_type = other DNA
cagatctccccacacctctggc

SEQ ID NO: 8778 - DNA, 22 bp, synthetic construct
  misc_feature 1..22: note = chemically synthesized
  source 1..22: mol_type = other DNA
cccacacctctggcacatgcct

SEQ ID NO: 8779 - DNA, 22 bp, synthetic construct
  misc_feature 1..22: note = chemically synthesized
  source 1..22: mol_type = other DNA
tggcacatgcctttcctggggt

SEQ ID NO: 8780 - DNA, 22 bp, synthetic construct
  misc_feature 1..22: note = chemically synthesized
  source 1..22: mol_type = other DNA
gcacatgcctttcctggggtcc

SEQ ID NO: 8781 - DNA, 22 bp, synthetic construct
  misc_feature 1..22: note = chemically synthesized
  source 1..22: mol_type = other DNA
tcctggggtcctggggtagaca

SEQ ID NO: 8782 - DNA, 22 bp, synthetic construct
  misc_feature 1..22: note = chemically synthesized
  source 1..22: mol_type = other DNA
cctggggtcctggggtagacag

SEQ ID NO: 8783 - DNA, 22 bp, synthetic construct
  misc_feature 1..22: note = chemically synthesized
  source 1..22: mol_type = other DNA
ctggggtcctggggtagacagg

SEQ ID NO: 8784 - DNA, 22 bp, synthetic construct
  misc_feature 1..22: note = chemically synthesized
  source 1..22: mol_type = other DNA
gggtcctggggtagacaggaag

SEQ ID NO: 8785 - DNA, 22 bp, synthetic construct
  misc_feature 1..22: note = chemically synthesized
  source 1..22: mol_type = other DNA
gggtagacaggaaggtgaggtg

SEQ ID NO: 8786 - DNA, 22 bp, synthetic construct
  misc_feature 1..22: note = chemically synthesized
  source 1..22: mol_type = other DNA
ctcagtccctgttcacagagtg

SEQ ID NO: 8787 - DNA, 22 bp, synthetic construct
  misc_feature 1..22: note = chemically synthesized
  source 1..22: mol_type = other DNA
agtccctgttcacagagtgggt

SEQ ID NO: 8788 - DNA, 22 bp, synthetic construct
  misc_feature 1..22: note = chemically synthesized
  source 1..22: mol_type = other DNA
ttcacagagtgggtgcggcaga

SEQ ID NO: 8789 - DNA, 22 bp, synthetic construct
  misc_feature 1..22: note = chemically synthesized
  source 1..22: mol_type = other DNA
acagagtgggtgcggcagagac

SEQ ID NO: 8790 - DNA, 22 bp, synthetic construct
  misc_feature 1..22: note = chemically synthesized
  source 1..22: mol_type = other DNA
aaagggacagagcaatcatgag

SEQ ID NO: 8791 - DNA, 22 bp, synthetic construct
  misc_feature 1..22: note = chemically synthesized
  source 1..22: mol_type = other DNA
agacagagggggagcaaagccg

SEQ ID NO: 8792 - DNA, 22 bp, synthetic construct
  misc_feature 1..22: note = chemically synthesized
  source 1..22: mol_type = other DNA
cacacttgcctttcaaaaatgg

SEQ ID NO: 8793 - DNA, 22 bp, synthetic construct
  misc_feature 1..22: note = chemically synthesized
  source 1..22: mol_type = other DNA
gcctttcaaaaatggatttcct

SEQ ID NO: 8794 - DNA, 22 bp, synthetic construct
  misc_feature 1..22: note = chemically synthesized
  source 1..22: mol_type = other DNA
cctttcaaaaatggatttcctc

SEQ ID NO: 8795 - DNA, 22 bp, synthetic construct
  misc_feature 1..22: note = chemically synthesized
  source 1..22: mol_type = other DNA
tcaaaaatggatttcctctcct

SEQ ID NO: 8796 - DNA, 22 bp, synthetic construct
  misc_feature 1..22: note = chemically synthesized
  source 1..22: mol_type = other DNA
caaaaatggatttcctctcctg

SEQ ID NO: 8797 - DNA, 22 bp, synthetic construct
  misc_feature 1..22: note = chemically synthesized
  source 1..22: mol_type = other DNA
aaaaatggatttcctctcctgg

SEQ ID NO: 8798 - DNA, 22 bp, synthetic construct
  misc_feature 1..22: note = chemically synthesized
  source 1..22: mol_type = other DNA
cctctcctgggattcagcctgc

SEQ ID NO: 8799 - DNA, 22 bp, synthetic construct
  misc_feature 1..22: note = chemically synthesized
  source 1..22: mol_type = other DNA
ctctcctgggattcagcctgcg

SEQ ID NO: 8800 - DNA, 22 bp, synthetic construct
  misc_feature 1..22: note = chemically synthesized
  source 1..22: mol_type = other DNA
tcctgggattcagcctgcgagt

SEQ ID NO: 8801 - DNA, 22 bp, synthetic construct
  misc_feature 1..22: note = chemically synthesized
  source 1..22: mol_type = other DNA
ctgggattcagcctgcgagtgc

SEQ ID NO: 8802 - DNA, 22 bp, synthetic construct
  misc_feature 1..22: note = chemically synthesized
  source 1..22: mol_type = other DNA
ggattcagcctgcgagtgcctg

SEQ ID NO: 8803 - DNA, 22 bp, synthetic construct
  misc_feature 1..22: note = chemically synthesized
  source 1..22: mol_type = other DNA
agcctgcgagtgcctggcccct

SEQ ID NO: 8804 - DNA, 22 bp, synthetic construct
  misc_feature 1..22: note = chemically synthesized
  source 1..22: mol_type = other DNA
cgagtgcctggcccctcacctt

SEQ ID NO: 8805 - DNA, 22 bp, synthetic construct
  misc_feature 1..22: note = chemically synthesized
  source 1..22: mol_type = other DNA
gcccctcaccttgatggaaagg

SEQ ID NO: 8806 - DNA, 22 bp, synthetic construct
  misc_feature 1..22: note = chemically synthesized
  source 1..22: mol_type = other DNA
accttgatggaaaggatggtca

SEQ ID NO: 8807 - DNA, 22 bp, synthetic construct
  misc_feature 1..22: note = chemically synthesized
  source 1..22: mol_type = other DNA
gatggaaaggatggtcattttc

SEQ ID NO: 8808 - DNA, 22 bp, synthetic construct
  misc_feature 1..22: note = chemically synthesized
  source 1..22: mol_type = other DNA
atggaaaggatggtcattttcc

SEQ ID NO: 8809 - DNA, 22 bp, synthetic construct
  misc_feature 1..22: note = chemically synthesized
  source 1..22: mol_type = other DNA
tcctccgagctcagctgctgga

SEQ ID NO: 8810 - DNA, 22 bp, synthetic construct
  misc_feature 1..22: note = chemically synthesized
  source 1..22: mol_type = other DNA
cctccgagctcagctgctggat

SEQ ID NO: 8811 - DNA, 22 bp, synthetic construct
  misc_feature 1..22: note = chemically synthesized
  source 1..22: mol_type = other DNA
ctccgagctcagctgctggata

SEQ ID NO: 8812 - DNA, 22 bp, synthetic construct
  misc_feature 1..22: note = chemically synthesized
  source 1..22: mol_type = other DNA
cgagctcagctgctggatatct

SEQ ID NO: 8813 - DNA, 22 bp, synthetic construct
  misc_feature 1..22: note = chemically synthesized
  source 1..22: mol_type = other DNA
agctgctggatatcttgaaagt

SEQ ID NO: 8814 - DNA, 22 bp, synthetic construct
  misc_feature 1..22: note = chemically synthesized
  source 1..22: mol_type = other DNA
ctggatatcttgaaagtccttg

SEQ ID NO: 8815 - DNA, 22 bp, synthetic construct
  misc_feature 1..22: note = chemically synthesized
  source 1..22: mol_type = other DNA
gatatcttgaaagtccttggcc

SEQ ID NO: 8816 - DNA, 22 bp, synthetic construct
  misc_feature 1..22: note = chemically synthesized
  source 1..22: mol_type = other DNA
gaaagtccttggccatgatggg

SEQ ID NO: 8817 - DNA, 22 bp, synthetic construct
  misc_feature 1..22: note = chemically synthesized
  source 1..22: mol_type = other DNA
aaagtccttggccatgatgggg

SEQ ID NO: 8818 - DNA, 22 bp, synthetic construct
  misc_feature 1..22: note = chemically synthesized
  source 1..22: mol_type = other DNA
ggccatgatggggcccgggctg

SEQ ID NO: 8819 - DNA, 22 bp, synthetic construct
  misc_feature 1..22: note = chemically synthesized
  source 1..22: mol_type = other DNA
gccatgatggggcccgggctgg

SEQ ID NO: 8820 - DNA, 22 bp, synthetic construct
  misc_feature 1..22: note = chemically synthesized
  source 1..22: mol_type = other DNA
gagctggagctggagctgggct

SEQ ID NO: 8821 - DNA, 22 bp, synthetic construct
  misc_feature 1..22: note = chemically synthesized
  source 1..22: mol_type = other DNA
gagctggagctgggctgggctg

SEQ ID NO: 8822 - DNA, 22 bp, synthetic construct
  misc_feature 1..22: note = chemically synthesized
  source 1..22: mol_type = other DNA
gagctgggctgggctgggctga

SEQ ID NO: 8823 - DNA, 22 bp, synthetic construct
  misc_feature 1..22: note = chemically synthesized
  source 1..22: mol_type = other DNA
ggctgggctgggctgaggttgc

SEQ ID NO: 8824 - DNA, 22 bp, synthetic construct
  misc_feature 1..22: note = chemically synthesized
  source 1..22: mol_type = other DNA
ggctgggctgaggttgctctga

SEQ ID NO: 8825 - DNA, 22 bp, synthetic construct
  misc_feature 1..22: note = chemically synthesized
  source 1..22: mol_type = other DNA
ggctgaggttgctctgagggct

SEQ ID NO: 8826 - DNA, 22 bp, synthetic construct
  misc_feature 1..22: note = chemically synthesized
  source 1..22: mol_type = other DNA
aggttgctctgagggctggggc

SEQ ID NO: 8827 - DNA, 22 bp, synthetic construct
  misc_feature 1..22: note = chemically synthesized
  source 1..22: mol_type = other DNA
ctctgagggctggggctggggc

SEQ ID NO: 8828 - DNA, 22 bp, synthetic construct
  misc_feature 1..22: note = chemically synthesized
  source 1..22: mol_type = other DNA
tgagggctggggctggggcaga

SEQ ID NO: 8829 - DNA, 22 bp, synthetic construct
  misc_feature 1..22: note = chemically synthesized
  source 1..22: mol_type = other DNA
agggctggggctggggcagagg

SEQ ID NO: 8830 - DNA, 22 bp, synthetic construct
  misc_feature 1..22: note = chemically synthesized
  source 1..22: mol_type = other DNA
gggctggggcagaggtgcagat

SEQ ID NO: 8831 - DNA, 22 bp, synthetic construct
  misc_feature 1..22: note = chemically synthesized
  source 1..22: mol_type = other DNA
gggcagaggtgcagattcacgt

SEQ ID NO: 8832 - DNA, 22 bp, synthetic construct
  misc_feature 1..22: note = chemically synthesized
  source 1..22: mol_type = other DNA
acgtggaggttgatggtgggat

SEQ ID NO: 8833 - DNA, 22 bp, synthetic construct
  misc_feature 1..22: note = chemically synthesized
  source 1..22: mol_type = other DNA
atggtgggatggaacgcagggt

SEQ ID NO: 8834 - DNA, 22 bp, synthetic construct
  misc_feature 1..22: note = chemically synthesized
  source 1..22: mol_type = other DNA
ggggtggtggcctgggtaggat

SEQ ID NO: 8835 - DNA, 22 bp, synthetic construct
  misc_feature 1..22: note = chemically synthesized
  source 1..22: mol_type = other DNA
agatcctacccaggccaccacc

SEQ ID NO: 8836 - DNA, 22 bp, synthetic construct
  misc_feature 1..22: note = chemically synthesized
  source 1..22: mol_type = other DNA
cccaggccaccaccccgaaccc

SEQ ID NO: 8837 - DNA, 22 bp, synthetic construct
  misc_feature 1..22: note = chemically synthesized
  source 1..22: mol_type = other DNA
cgaccctgcgttccatcccacc

SEQ ID NO: 8838 - DNA, 22 bp, synthetic construct
  misc_feature 1..22: note = chemically synthesized
  source 1..22: mol_type = other DNA
cgttccatcccaccatcaacct

SEQ ID NO: 8839 - DNA, 22 bp, synthetic construct
  misc_feature 1..22: note = chemically synthesized
  source 1..22: mol_type = other DNA
catcccaccatcaacctccacg

SEQ ID NO: 8840 - DNA, 22 bp, synthetic construct
  misc_feature 1..22: note = chemically synthesized
  source 1..22: mol_type = other DNA
cacgtgaatctgcacctctgcc

SEQ ID NO: 8841 - DNA, 22 bp, synthetic construct
  misc_feature 1..22: note = chemically synthesized
  source 1..22: mol_type = other DNA
cacctctgccccagccccagcc

SEQ ID NO: 8842 - DNA, 22 bp, synthetic construct
  misc_feature 1..22: note = chemically synthesized
  source 1..22: mol_type = other DNA
tgccccagccccagccctcaga

SEQ ID NO: 8843 - DNA, 22 bp, synthetic construct
  misc_feature 1..22: note = chemically synthesized
  source 1..22: mol_type = other DNA
ccccagccccagccctcagagc

SEQ ID NO: 8844 - DNA, 22 bp, synthetic construct
  misc_feature 1..22: note = chemically synthesized
  source 1..22: mol_type = other DNA
agagcaacctcagcccagccca

SEQ ID NO: 8845 - DNA, 22 bp, synthetic construct
  misc_feature 1..22: note = chemically synthesized
  source 1..22: mol_type = other DNA
agcccagcccagcccagctcca

SEQ ID NO: 8846 - DNA, 22 bp, synthetic construct
  misc_feature 1..22: note = chemically synthesized
  source 1..22: mol_type = other DNA
cagctccagctccagcccgggc

SEQ ID NO: 8847 - DNA, 22 bp, synthetic construct
  misc_feature 1..22: note = chemically synthesized
  source 1..22: mol_type = other DNA
cagctccagcccgggccccatc

SEQ ID NO: 8848 - DNA, 22 bp, synthetic construct
  misc_feature 1..22: note = chemically synthesized
  source 1..22: mol_type = other DNA
cagcccgggccccatcatggcc

SEQ ID NO: 8849 - DNA, 22 bp, synthetic construct
  misc_feature 1..22: note = chemically synthesized
  source 1..22: mol_type = other DNA
tcaagatatccagcagctgagc

SEQ ID NO: 8850 - DNA, 22 bp, synthetic construct
  misc_feature 1..22: note = chemically synthesized
  source 1..22: mol_type = other DNA
caagatatccagcagctgagct

SEQ ID NO: 8851 - DNA, 22 bp, synthetic construct
  misc_feature 1..22: note = chemically synthesized
  source 1..22: mol_type = other DNA
aagatatccagcagctgagctc

SEQ ID NO: 8852 - DNA, 22 bp, synthetic construct
  misc_feature 1..22: note = chemically synthesized
  source 1..22: mol_type = other DNA
agctcggaggaaaatgaccatc

SEQ ID NO: 8853 - DNA, 22 bp, synthetic construct
  misc_feature 1..22: note = chemically synthesized
  source 1..22: mol_type = other DNA
ggaggaaaatgaccatcctttc

SEQ ID NO: 8854 - DNA, 22 bp, synthetic construct
  misc_feature 1..22: note = chemically synthesized
  source 1..22: mol_type = other DNA
tccatcaaggtgaggggccagg

SEQ ID NO: 8855 - DNA, 22 bp, synthetic construct
  misc_feature 1..22: note = chemically synthesized
  source 1..22: mol_type = other DNA
ccatcaaggtgaggggccaggc

SEQ ID NO: 8856 - DNA, 22 bp, synthetic construct
  misc_feature 1..22: note = chemically synthesized
  source 1..22: mol_type = other DNA
catcaaggtgaggggccaggca

SEQ ID NO: 8857 - DNA, 22 bp, synthetic construct
  misc_feature 1..22: note = chemically synthesized
  source 1..22: mol_type = other DNA
gcaggctgaatcccaggagagg

SEQ ID NO: 8858 - DNA, 22 bp, synthetic construct
  misc_feature 1..22: note = chemically synthesized
  source 1..22: mol_type = other DNA
aatcccaggagaggaaatccat

SEQ ID NO: 8859 - DNA, 22 bp, synthetic construct
  misc_feature 1..22: note = chemically synthesized
  source 1..22: mol_type = other DNA
ttgaaaggcaagtgtgcagttt

SEQ ID NO: 8860 - DNA, 22 bp, synthetic construct
  misc_feature 1..22: note = chemically synthesized
  source 1..22: mol_type = other DNA
tgaaaggcaagtgtgcagtttc

SEQ ID NO: 8861 - DNA, 22 bp, synthetic construct
  misc_feature 1..22: note = chemically synthesized
  source 1..22: mol_type = other DNA
gaaaggcaagtgtgcagtttct

SEQ ID NO: 8862 - DNA, 22 bp, synthetic construct
  misc_feature 1..22: note = chemically synthesized
  source 1..22: mol_type = other DNA
aaaggcaagtgtgcagtttctg

SEQ ID NO: 8863 - DNA, 22 bp, synthetic construct
  misc_feature 1..22: note = chemically synthesized
  source 1..22: mol_type = other DNA
ctgcggctttgctccccctctg

SEQ ID NO: 8864 - DNA, 22 bp, synthetic construct
  misc_feature 1..22: note = chemically synthesized
  source 1..22: mol_type = other DNA
tgcggctttgctccccctctgt

SEQ ID NO: 8865 - DNA, 22 bp, synthetic construct
  misc_feature 1..22: note = chemically synthesized
  source 1..22: mol_type = other DNA
cggctttgctccccctctgtct

SEQ ID NO: 8866 - DNA, 22 bp, synthetic construct
  misc_feature 1..22: note = chemically synthesized
  source 1..22: mol_type = other DNA
tgctccccctctgtctcagctc

SEQ ID NO: 8867 - DNA, 22 bp, synthetic construct
  misc_feature 1..22: note = chemically synthesized
  source 1..22: mol_type = other DNA
gctccccctctgtctcagctca

SEQ ID NO: 8868 - DNA, 22 bp, synthetic construct
  misc_feature 1..22: note = chemically synthesized
  source 1..22: mol_type = other DNA
ctccccctctgtctcagctcat

SEQ ID NO: 8869 - DNA, 22 bp, synthetic construct
  misc_feature 1..22: note = chemically synthesized
  source 1..22: mol_type = other DNA
cccctctgtctcagctcatgat

SEQ ID NO: 8870 - DNA, 22 bp, synthetic construct
  misc_feature 1..22: note = chemically synthesized
  source 1..22: mol_type = other DNA
tgtctcagctcatgattgctct

SEQ ID NO: 8871 - DNA, 22 bp, synthetic construct
  misc_feature 1..22: note = chemically synthesized
  source 1..22: mol_type = other DNA
tctcagctcatgattgctctgt

SEQ ID NO: 8872 - DNA, 22 bp, synthetic construct
  misc_feature 1..22: note = chemically synthesized
  source 1..22: mol_type = other DNA
agctcatgattgctctgtccct

SEQ ID NO: 8873 - DNA, 22 bp, synthetic construct
  misc_feature 1..22: note = chemically synthesized
  source 1..22: mol_type = other DNA
atgattgctctgtccctttgag

SEQ ID NO: 8874 - DNA, 22 bp, synthetic construct
  misc_feature 1..22: note = chemically synthesized
  source 1..22: mol_type = other DNA
ctctgtccctttgaggtctctg

SEQ ID NO: 8875 - DNA, 22 bp, synthetic construct
  misc_feature 1..22: note = chemically synthesized
  source 1..22: mol_type = other DNA
tgtccctttgaggtctctgccg

SEQ ID NO: 8876 - DNA, 22 bp, synthetic construct
  misc_feature 1..22: note = chemically synthesized
  source 1..22: mol_type = other DNA
tccctttgaggtctctgccgca

SEQ ID NO: 8877 - DNA, 22 bp, synthetic construct
  misc_feature 1..22: note = chemically synthesized
  source 1..22: mol_type = other DNA
tgaggtctctgccgcacccact

SEQ ID NO: 8878 - DNA, 22 bp, synthetic construct
  misc_feature 1..22: note = chemically synthesized
  source 1..22: mol_type = other DNA
gaggtctctgccgcacccactc

SEQ ID NO: 8879 - DNA, 22 bp, synthetic construct
  misc_feature 1..22: note = chemically synthesized
  source 1..22: mol_type = other DNA
aggtctctgccgcacccactct

SEQ ID NO: 8880 - DNA, 22 bp, synthetic construct
  misc_feature 1..22: note = chemically synthesized
  source 1..22: mol_type = other DNA
tgccgcacccactctgtgaaca

SEQ ID NO: 8881 - DNA, 22 bp, synthetic construct
  misc_feature 1..22: note = chemically synthesized
  source 1..22: mol_type = other DNA
ccgcacccactctgtgaacagg

SEQ ID NO: 8882 - DNA, 22 bp, synthetic construct
  misc_feature 1..22: note = chemically synthesized
  source 1..22: mol_type = other DNA
tgtgaacagggactgaggaggg

SEQ ID NO: 8883 - DNA, 22 bp, synthetic construct
  misc_feature 1..22: note = chemically synthesized
  source 1..22: mol_type = other DNA
tgaacagggactgaggagggcc

SEQ ID NO: 8884 - DNA, 22 bp, synthetic construct
  misc_feature 1..22: note = chemically synthesized
  source 1..22: mol_type = other DNA
aggagggcccgacacccccgct

SEQ ID NO: 8885 - DNA, 22 bp, synthetic construct
  misc_feature 1..22: note = chemically synthesized
  source 1..22: mol_type = other DNA
gttccctcacctcaccttcctg

SEQ ID NO: 8886 - DNA, 22 bp, synthetic construct
  misc_feature 1..22: note = chemically synthesized
  source 1..22: mol_type = other DNA
ttccctcacctcaccttcctgt

SEQ ID NO: 8887 - DNA, 22 bp, synthetic construct
  misc_feature 1..22: note = chemically synthesized
  source 1..22: mol_type = other DNA
cctcacctcaccttcctgtcta

SEQ ID NO: 8888 - DNA, 22 bp, synthetic construct
  misc_feature 1..22: note = chemically synthesized
  source 1..22: mol_type = other DNA
acctcaccttcctgtctacccc

SEQ ID NO: 8889 - DNA, 22 bp, synthetic construct
  misc_feature 1..22: note = chemically synthesized
  source 1..22: mol_type = other DNA
accttcctgtctaccccaggac

SEQ ID NO: 8890 - DNA, 22 bp, synthetic construct
  misc_feature 1..22: note = chemically synthesized
  source 1..22: mol_type = other DNA
cctgtctaccccaggaccccag

SEQ ID NO: 8891 - DNA, 22 bp, synthetic construct
  misc_feature 1..22: note = chemically synthesized
  source 1..22: mol_type = other DNA
ctgtctaccccaggaccccagg

SEQ ID NO: 8892 - DNA, 22 bp, synthetic construct
  misc_feature 1..22: note = chemically synthesized
  source 1..22: mol_type = other DNA
tctaccccaggaccccaggaaa

SEQ ID NO: 8893 - DNA, 22 bp, synthetic construct
  misc_feature 1..22: note = chemically synthesized
  source 1..22: mol_type = other DNA
ccccaggaccccaggaaaggca

SEQ ID NO: 8894 - DNA, 22 bp, synthetic construct
  misc_feature 1..22: note = chemically synthesized
  source 1..22: mol_type = other DNA
gaagataactgcctgcccttct

SEQ ID NO: 8895 - DNA, 22 bp, synthetic construct
  misc_feature 1..22: note = chemically synthesized
  source 1..22: mol_type = other DNA
cctgcccttctcctcccaaccc

SEQ ID NO: 8896 - DNA, 22 bp, synthetic construct
  misc_feature 1..22: note = chemically synthesized
  source 1..22: mol_type = other DNA
cccttctcctcccaacccaaga

SEQ ID NO: 8897 - DNA, 22 bp, synthetic construct
  misc_feature 1..22: note = chemically synthesized
  source 1..22: mol_type = other DNA
ctcctcccaacccaagaacaca

SEQ ID NO: 8898 - DNA, 22 bp, synthetic construct
  misc_feature 1..22: note = chemically synthesized
  source 1..22: mol_type = other DNA
tcctcccaacccaagaacacat

SEQ ID NO: 8899 - DNA, 22 bp, synthetic construct
  misc_feature 1..22: note = chemically synthesized
  source 1..22: mol_type = other DNA
ctcccaacccaagaacacatgt

SEQ ID NO: 8900 - DNA, 22 bp, synthetic construct
  misc_feature 1..22: note = chemically synthesized
  source 1..22: mol_type = other DNA
ccaacccaagaacacatgtgcc

SEQ ID NO: 8901 - DNA, 22 bp, synthetic construct
  misc_feature 1..22: note = chemically synthesized
  source 1..22: mol_type = other DNA
gtatgtgcgtgtgcacgtatgt

SEQ ID NO: 8902 - DNA, 22 bp, synthetic construct
  misc_feature 1..22: note = chemically synthesized
  source 1..22: mol_type = other DNA
agctgggactctgtgtgtgtgt

SEQ ID NO: 8903 - DNA, 22 bp, synthetic construct
  misc_feature 1..22: note = chemically synthesized
  source 1..22: mol_type = other DNA
ggactctgtgtgtgtgtgtgag

SEQ ID NO: 8904 - DNA, 22 bp, synthetic construct
  misc_feature 1..22: note = chemically synthesized
  source 1..22: mol_type = other DNA
tgtgtgtgtgtgtgagtgaatg

SEQ ID NO: 8905 - DNA, 22 bp, synthetic construct
  misc_feature 1..22: note = chemically synthesized
  source 1..22: mol_type = other DNA
tgtgtgtgtgtgagtgaatgtt

SEQ ID NO: 8906 - DNA, 22 bp, synthetic construct
  misc_feature 1..22: note = chemically synthesized
  source 1..22: mol_type = other DNA
tgtgtgtgtatatgtgcgcgag

SEQ ID NO: 8907 - DNA, 22 bp, synthetic construct
  misc_feature 1..22: note = chemically synthesized
  source 1..22: mol_type = other DNA
tgtgtgtgtatgtcgtgtatgt

SEQ ID NO: 8908 - DNA, 22 bp, synthetic construct
  misc_feature 1..22: note = chemically synthesized
  source 1..22: mol_type = other DNA
tgtgtgagagtgtgttgtgtgt

SEQ ID NO: 8909 - DNA, 22 bp, synthetic construct
  misc_feature 1..22: note = chemically synthesized
  source 1..22: mol_type = other DNA
tgtgtgtatgttgtgtgagtat

SEQ ID NO: 8910 - DNA, 22 bp, synthetic construct
  misc_feature 1..22: note = chemically synthesized
  source 1..22: mol_type = other DNA
tgtgagtatatgttgtgtgtat

SEQ ID NO: 8911 - DNA, 22 bp, synthetic construct
  misc_feature 1..22: note = chemically synthesized
  source 1..22: mol_type = other DNA
tgtgtatcttgtgtgtgagtgt

SEQ ID NO: 8912 - DNA, 22 bp, synthetic construct
  misc_feature 1..22: note = chemically synthesized
  source 1..22: mol_type = other DNA
gtgtgtgagtgtatgttgtgtg

SEQ ID NO: 8913 - DNA, 22 bp, synthetic construct
  misc_feature 1..22: note = chemically synthesized
  source 1..22: mol_type = other DNA
tgtgtgagtgtatgttgtgtgt

SEQ ID NO: 8914 - DNA, 22 bp, synthetic construct
  misc_feature 1..22: note = chemically synthesized
  source 1..22: mol_type = other DNA
tgtgttgtgtgtgtatcttgtg

SEQ ID NO: 8915 - DNA, 22 bp, synthetic construct
  misc_feature 1..22: note = chemically synthesized
  source 1..22: mol_type = other DNA
tgtgtgtatcttgtgcatgtgt

SEQ ID NO: 8916 - DNA, 22 bp, synthetic construct
  misc_feature 1..22: note = chemically synthesized
  source 1..22: mol_type = other DNA
gtgcatgtgtgtatgttgtgcg

SEQ ID NO: 8917 - DNA, 22 bp, synthetic construct
  misc_feature 1..22: note = chemically synthesized
  source 1..22: mol_type = other DNA
tgcatgtgtgtatgttgtgcga

SEQ ID NO: 8918 - DNA, 22 bp, synthetic construct
  misc_feature 1..22: note = chemically synthesized
  source 1..22: mol_type = other DNA
tgcgagtgtatgttgtgtatgt

SEQ ID NO: 8919 - DNA, 22 bp, synthetic construct
  misc_feature 1..22: note = chemically synthesized
  source 1..22: mol_type = other DNA
tgtatgtgagtgtgtgtatgtt

SEQ ID NO: 8920 - DNA, 22 bp, synthetic construct
  misc_feature 1..22: note = chemically synthesized
  source 1..22: mol_type = other DNA
tgtgtatgttgtgtgtatgtat

SEQ ID NO: 8921 - DNA, 22 bp, synthetic construct
  misc_feature 1..22: note = chemically synthesized
  source 1..22: mol_type = other DNA
tgtgtatgtatgttgtgtatga

SEQ ID NO: 8922 - DNA, 22 bp, synthetic construct
  misc_feature 1..22: note = chemically synthesized
  source 1..22: mol_type = other DNA
tgtatgagtgtgtgtatgttgt

SEQ ID NO: 8923 - DNA, 22 bp, synthetic construct
  misc_feature 1..22: note = chemically synthesized
  source 1..22: mol_type = other DNA
tgtgtgtgtacgttgtgtatgt

SEQ ID NO: 8924 - DNA, 22 bp, synthetic construct
  misc_feature 1..22: note = chemically synthesized
  source 1..22: mol_type = other DNA
tgtatgttgtgtgtgtgttgtg

SEQ ID NO: 8925 - DNA, 22 bp, synthetic construct
  misc_feature 1..22: note = chemically synthesized
  source 1..22: mol_type = other DNA
tgtgtgtgttgtgtgtgtgtat

SEQ ID NO: 8926 - DNA, 22 bp, synthetic construct
  misc_feature 1..22: note = chemically synthesized
  source 1..22: mol_type = other DNA
tgtgtgtgtattgtgtgagtgt

SEQ ID NO: 8927 - DNA, 22 bp, synthetic construct
  misc_feature 1..22: note = chemically synthesized
  source 1..22: mol_type = other DNA
tgtgagtgtatgtatgtttgtg

SEQ ID NO: 8928 - DNA, 22 bp, synthetic construct
  misc_feature 1..22: note = chemically synthesized
  source 1..22: mol_type = other DNA
gtgtgttgtgtgagtgttgtgt

SEQ ID NO: 8929 - DNA, 22 bp, synthetic construct
  misc_feature 1..22: note = chemically synthesized
  source 1..22: mol_type = other DNA
tgtgttgtgtgagtgttgtgta

SEQ ID NO: 8930 - DNA, 22 bp, synthetic construct
  misc_feature 1..22: note = chemically synthesized
  source 1..22: mol_type = other DNA
tgtgagtgttgtgtatgttgtg

SEQ ID NO: 8931 - DNA, 22 bp, synthetic construct
  misc_feature 1..22: note = chemically synthesized
  source 1..22: mol_type = other DNA
tgtatgttgtgcgtgtgtgtat

SEQ ID NO: 8932 - DNA, 22 bp, synthetic construct
  misc_feature 1..22: note = chemically synthesized
  source 1..22: mol_type = other DNA
tgcgtgtgtgtatgttgtgcga

SEQ ID NO: 8933 - DNA, 22 bp, synthetic construct
  misc_feature 1..22: note = chemically synthesized
  source 1..22: mol_type = other DNA
tgcgagtgtgtgtgttgtgtgt

SEQ ID NO: 8934 - DNA, 22 bp, synthetic construct
  misc_feature 1..22: note = chemically synthesized
  source 1..22: mol_type = other DNA
tgtgtgtatgttgtgagtgtgt

SEQ ID NO: 8935 - DNA, 22 bp, synthetic construct
  misc_feature 1..22: note = chemically synthesized
  source 1..22: mol_type = other DNA
tgagtgtgttatgtatgttgtg

SEQ ID NO: 8936 - DNA, 22 bp, synthetic construct
  misc_feature 1..22: note = chemically synthesized
  source 1..22: mol_type = other DNA
tgtatgttgtgtgtgtgagtgt

SEQ ID NO: 8937 - DNA, 22 bp, synthetic construct
  misc_feature 1..22: note = chemically synthesized
  source 1..22: mol_type = other DNA
tgtgtgtgagtgtgttgcgtga

SEQ ID NO: 8938 - DNA, 22 bp, synthetic construct
  misc_feature 1..22: note = chemically synthesized
  source 1..22: mol_type = other DNA
cgtgagtgtgtgtgttagtgtg

SEQ ID NO: 8939 - DNA, 22 bp, synthetic construct
  misc_feature 1..22: note = chemically synthesized
  source 1..22: mol_type = other DNA
gtgtgtgtatgtgattgtatgt

SEQ ID NO: 8940 - DNA, 22 bp, synthetic construct
  misc_feature 1..22: note = chemically synthesized
  source 1..22: mol_type = other DNA
tatgtgtgtgtgtgtgtgtgtg

SEQ ID NO: 8941 - DNA, 22 bp, synthetic construct
  misc_feature 1..22: note = chemically synthesized
  source 1..22: mol_type = other DNA
ggatgggtgggggacgtgagca

SEQ ID NO: 8942 - DNA, 22 bp, synthetic construct
  misc_feature 1..22: note = chemically synthesized
  source 1..22: mol_type = other DNA
gaagatccctgctcctctcatc

SEQ ID NO: 8943 - DNA, 22 bp, synthetic construct
  misc_feature 1..22: note = chemically synthesized
  source 1..22: mol_type = other DNA
ctcctctcatctcccaagaccc

SEQ ID NO: 8944 - DNA, 22 bp, synthetic construct
  misc_feature 1..22: note = chemically synthesized
  source 1..22: mol_type = other DNA
ctctcatctcccaagacccttc

SEQ ID NO: 8945 - DNA, 22 bp, synthetic construct
  misc_feature 1..22: note = chemically synthesized
  source 1..22: mol_type = other DNA
tcatctcccaagacccttccct

SEQ ID NO: 8946 - DNA, 22 bp, synthetic construct
  misc_feature 1..22: note = chemically synthesized
  source 1..22: mol_type = other DNA
atctcccaagacccttccctgg

SEQ ID NO: 8947 - DNA, 22 bp, synthetic construct
  misc_feature 1..22: note = chemically synthesized
  source 1..22: mol_type = other DNA
ccaagacccttccctggatcct

SEQ ID NO: 8948 - DNA, 22 bp, synthetic construct
  misc_feature 1..22: note = chemically synthesized
  source 1..22: mol_type = other DNA
ccctggatccttctgtaataaa

SEQ ID NO: 8949 - DNA, 22 bp, synthetic construct
  misc_feature 1..22: note = chemically synthesized
  source 1..22: mol_type = other DNA
cctggatccttctgtaataaat

SEQ ID NO: 8950 - DNA, 22 bp, synthetic construct
  misc_feature 1..22: note = chemically synthesized
  source 1..22: mol_type = other DNA
gatccttctgtaataaatcttg

SEQ ID NO: 8951 - DNA, 22 bp, synthetic construct
  misc_feature 1..22: note = chemically synthesized
  source 1..22: mol_type = other DNA
ctgtaataaatcttgactgaag

SEQ ID NO: 8952 - DNA, 22 bp, synthetic construct
  misc_feature 1..22: note = chemically synthesized
  source 1..22: mol_type = other DNA
tgtaataaatcttgactgaagg

SEQ ID NO: 8953 - DNA, 22 bp, synthetic construct
  misc_feature 1..22: note = chemically synthesized
  source 1..22: mol_type = other DNA
taataaatcttgactgaaggac

SEQ ID NO: 8954 - DNA, 22 bp, synthetic construct
  misc_feature 1..22: note = chemically synthesized
  source 1..22: mol_type = other DNA
gactgaaggacctaagtatctt

SEQ ID NO: 8955 - DNA, 22 bp, synthetic construct
  misc_feature 1..22: note = chemically synthesized
  source 1..22: mol_type = other DNA
actgaaggacctaagtatcttg

SEQ ID NO: 8956 - DNA, 22 bp, synthetic construct
  misc_feature 1..22: note = chemically synthesized
  source 1..22: mol_type = other DNA
aaggacctaagtatcttggaca

SEQ ID NO: 8957 - DNA, 22 bp, synthetic construct
  misc_feature 1..22: note = chemically synthesized
  source 1..22: mol_type = other DNA
agtatcttggacattttttttt

SEQ ID NO: 8958 - DNA, 22 bp, synthetic construct
  misc_feature 1..22: note = chemically synthesized
  source 1..22: mol_type = other DNA
ggacattttttttttagagaca

SEQ ID NO: 8959 - DNA, 22 bp, synthetic construct
  misc_feature 1..22: note = chemically synthesized
  source 1..22: mol_type = other DNA
gacattttttttttagagacag

SEQ ID NO: 8960 - DNA, 22 bp, synthetic construct
  misc_feature 1..22: note = chemically synthesized
  source 1..22: mol_type = other DNA
tttttttagagacaggagtgta

SEQ ID NO: 8961 - DNA, 22 bp, synthetic construct
  misc_feature 1..22: note = chemically synthesized
  source 1..22: mol_type = other DNA
ttttttagagacaggagtgtag

SEQ ID NO: 8962 - DNA, 22 bp, synthetic construct
  misc_feature 1..22: note = chemically synthesized
  source 1..22: mol_type = other DNA
tttttagagacaggagtgtagt

SEQ ID NO: 8963 - DNA, 22 bp, synthetic construct
  misc_feature 1..22: note = chemically synthesized
  source 1..22: mol_type = other DNA
ttttagagacaggagtgtagtg

SEQ ID NO: 8964 - DNA, 22 bp, synthetic construct
  misc_feature 1..22: note = chemically synthesized
  source 1..22: mol_type = other DNA
tttagagacaggagtgtagtgg

SEQ ID NO: 8965 - DNA, 22 bp, synthetic construct
  misc_feature 1..22: note = chemically synthesized
  source 1..22: mol_type = other DNA
ttagagacaggagtgtagtggc

SEQ ID NO: 8966 - DNA, 22 bp, synthetic construct
  misc_feature 1..22: note = chemically synthesized
  source 1..22: mol_type = other DNA
tagagacaggagtgtagtggca

SEQ ID NO: 8967 - DNA, 22 bp, synthetic construct
  misc_feature 1..22: note = chemically synthesized
  source 1..22: mol_type = other DNA
agagacaggagtgtagtggcag

SEQ ID NO: 8968 - DNA, 22 bp, synthetic construct
  misc_feature 1..22: note = chemically synthesized
  source 1..22: mol_type = other DNA
gagacaggagtgtagtggcagg

SEQ ID NO: 8969 - DNA, 22 bp, synthetic construct
  misc_feature 1..22: note = chemically synthesized
  source 1..22: mol_type = other DNA
actgcaacctcgaactcctggg

SEQ ID NO: 8970 - DNA, 22 bp, synthetic construct
  misc_feature 1..22: note = chemically synthesized
  source 1..22: mol_type = other DNA
caacctcgaactcctgggctca

SEQ ID NO: 8971 - DNA, 22 bp, synthetic construct
  misc_feature 1..22: note = chemically synthesized
  source 1..22: mol_type = other DNA
gaactcctgggctcaagccatc

SEQ ID NO: 8972 - DNA, 22 bp, synthetic construct
  misc_feature 1..22: note = chemically synthesized
  source 1..22: mol_type = other DNA
ctgggctcaagccatcctccca

SEQ ID NO: 8973 - DNA, 22 bp, synthetic construct
  misc_feature 1..22: note = chemically synthesized
  source 1..22: mol_type = other DNA
ggctcaagccatcctcccacct

SEQ ID NO: 8974 - DNA, 22 bp, synthetic construct
  misc_feature 1..22: note = chemically synthesized
  source 1..22: mol_type = other DNA
aagccatcctcccacctcagcc

SEQ ID NO: 8975 - DNA, 22 bp, synthetic construct
  misc_feature 1..22: note = chemically synthesized
  source 1..22: mol_type = other DNA
ccacctcagcctcccaagtagt

SEQ ID NO: 8976 - DNA, 22 bp, synthetic construct
  misc_feature 1..22: note = chemically synthesized
  source 1..22: mol_type = other DNA
agcctcccaagtagttaggact

SEQ ID NO: 8977 - DNA, 22 bp, synthetic construct
  misc_feature 1..22: note = chemically synthesized
  source 1..22: mol_type = other DNA
ccaagtagttaggacttacagg

SEQ ID NO: 8978 - DNA, 22 bp, synthetic construct
  misc_feature 1..22: note = chemically synthesized
  source 1..22: mol_type = other DNA
ggacttacaggtgtgcaccact

SEQ ID NO: 8979 - DNA, 22 bp, synthetic construct
  misc_feature 1..22: note = chemically synthesized
  source 1..22: mol_type = other DNA
acaggtgtgcaccactgtgcct

SEQ ID NO: 8980 - DNA, 22 bp, synthetic construct
  misc_feature 1..22: note = chemically synthesized
  source 1..22: mol_type = other DNA
caggtgtgcaccactgtgcctg

SEQ ID NO: 8981 - DNA, 22 bp, synthetic construct
  misc_feature 1..22: note = chemically synthesized
  source 1..22: mol_type = other DNA
tgcctggcaaattaaaaaaaat

SEQ ID NO: 8982 - DNA, 22 bp, synthetic construct
  misc_feature 1..22: note = chemically synthesized
  source 1..22: mol_type = other DNA
gcaaattaaaaaaaatttttta

SEQ ID NO: 8983 - DNA, 22 bp, synthetic construct
  misc_feature 1..22: note = chemically synthesized
  source 1..22: mol_type = other DNA
aaaaaaattttttagagaaatg

SEQ ID NO: 8984 - DNA, 22 bp, synthetic construct
  misc_feature 1..22: note = chemically synthesized
  source 1..22: mol_type = other DNA
tttagagaaatggggtcttgct

SEQ ID NO: 8985 - DNA, 22 bp, synthetic construct
  misc_feature 1..22: note = chemically synthesized
  source 1..22: mol_type = other DNA
ttagagaaatggggtcttgcta

SEQ ID NO: 8986 - DNA, 22 bp, synthetic construct
  misc_feature 1..22: note = chemically synthesized
  source 1..22: mol_type = other DNA
tagagaaatggggtcttgctat

SEQ ID NO: 8987 - DNA, 22 bp, synthetic construct
  misc_feature 1..22: note = chemically synthesized
  source 1..22: mol_type = other DNA
agagaaatggggtcttgctatg

SEQ ID NO: 8988 - DNA, 22 bp, synthetic construct
  misc_feature 1..22: note = chemically synthesized
  source 1..22: mol_type = other DNA
gagaaatggggtcttgctatgt

SEQ ID NO: 8989 - DNA, 22 bp, synthetic construct
  misc_feature 1..22: note = chemically synthesized
  source 1..22: mol_type = other DNA
gctatgttgcccaggctggtgg

SEQ ID NO: 8990 - DNA, 22 bp, synthetic construct
  misc_feature 1..22: note = chemically synthesized
  source 1..22: mol_type = other DNA
ctatgttgcccaggctggtggg

SEQ ID NO: 8991 - DNA, 22 bp, synthetic construct
  misc_feature 1..22: note = chemically synthesized
  source 1..22: mol_type = other DNA
tgttgcccaggctggtgggaaa

SEQ ID NO: 8992 - DNA, 22 bp, synthetic construct
  misc_feature 1..22: note = chemically synthesized
  source 1..22: mol_type = other DNA
cccaggctggtgggaaaagatt

SEQ ID NO: 8993 - DNA, 22 bp, synthetic construct
  misc_feature 1..22: note = chemically synthesized
  source 1..22: mol_type = other DNA
gtgggaaaagattttaaggtga

SEQ ID NO: 8994 - DNA, 22 bp, synthetic construct
  misc_feature 1..22: note = chemically synthesized
  source 1..22: mol_type = other DNA
taaggtgagagagatctgagca

SEQ ID NO: 8995 - DNA, 22 bp, synthetic construct
  misc_feature 1..22: note = chemically synthesized
  source 1..22: mol_type = other DNA
aaggtgagagagatctgagcag

SEQ ID NO: 8996 - DNA, 22 bp, synthetic construct
  misc_feature 1..22: note = chemically synthesized
  source 1..22: mol_type = other DNA
aggtgagagagatctgagcagt

SEQ ID NO: 8997 - DNA, 22 bp, synthetic construct
  misc_feature 1..22: note = chemically synthesized
  source 1..22: mol_type = other DNA
agcagtgctaggcagaagggca

SEQ ID NO: 8998 - DNA, 22 bp, synthetic construct
  misc_feature 1..22: note = chemically synthesized
  source 1..22: mol_type = other DNA
ggcagaagggcaagagccagga

SEQ ID NO: 8999 - DNA, 22 bp, synthetic construct
  misc_feature 1..22: note = chemically synthesized
  source 1..22: mol_type = other DNA
gtggtggagccgggttccatgg

SEQ ID NO: 9000 - DNA, 22 bp, synthetic construct
  misc_feature 1..22: note = chemically synthesized
  source 1..22: mol_type = other DNA
catggaggcaggaggagcaggg

SEQ ID NO: 9001 - DNA, 22 bp, synthetic construct
  misc_feature 1..22: note = chemically synthesized
  source 1..22: mol_type = other DNA
ggagcttaggaaggggattggt

SEQ ID NO: 9002 - DNA, 22 bp, synthetic construct
  misc_feature 1..22: note = chemically synthesized
  source 1..22: mol_type = other DNA
gagcttaggaaggggattggtt

SEQ ID NO: 9003 - DNA, 22 bp, synthetic construct
  misc_feature 1..22: note = chemically synthesized
  source 1..22: mol_type = other DNA
aggaaggggattggttagctgg

SEQ ID NO: 9004 - DNA, 22 bp, synthetic construct
  misc_feature 1..22: note = chemically synthesized
  source 1..22: mol_type = other DNA
ggaaggggattggttagctggg

SEQ ID NO: 9005 - DNA, 22 bp, synthetic construct
  misc_feature 1..22: note = chemically synthesized
  source 1..22: mol_type = other DNA
gttagctgggctggaatgaggg

SEQ ID NO: 9006 - DNA, 22 bp, synthetic construct
  misc_feature 1..22: note = chemically synthesized
  source 1..22: mol_type = other DNA
gctgggctggaatgagggactc

SEQ ID NO: 9007 - DNA, 22 bp, synthetic construct
  misc_feature 1..22: note = chemically synthesized
  source 1..22: mol_type = other DNA
ggctggaatgagggactcctca

SEQ ID NO: 9008 - DNA, 22 bp, synthetic construct
  misc_feature 1..22: note = chemically synthesized
  source 1..22: mol_type = other DNA
gaatgagggactcctcattcct

SEQ ID NO: 9009 - DNA, 22 bp, synthetic construct
  misc_feature 1..22: note = chemically synthesized
  source 1..22: mol_type = other DNA
ctcattcctgaggctggccaac

SEQ ID NO: 9010 - DNA, 22 bp, synthetic construct
  misc_feature 1..22: note = chemically synthesized
  source 1..22: mol_type = other DNA
attcctgaggctggccaaccga

SEQ ID NO: 9011 - DNA, 22 bp, synthetic construct
  misc_feature 1..22: note = chemically synthesized
  source 1..22: mol_type = other DNA
ctgaggctggccaaccgaggga

SEQ ID NO: 9012 - DNA, 22 bp, synthetic construct
  misc_feature 1..22: note = chemically synthesized
  source 1..22: mol_type = other DNA
aggctggccaaccgagggaggg

SEQ ID NO: 9013 - DNA, 22 bp, synthetic construct
  misc_feature 1..22: note = chemically synthesized
  source 1..22: mol_type = other DNA
gccaaccgagggagggccggtg

SEQ ID NO: 9014 - DNA, 22 bp, synthetic construct
  misc_feature 1..22: note = chemically synthesized
  source 1..22: mol_type = other DNA
ggcagggcagggcaggggacag

SEQ ID NO: 9015 - DNA, 22 bp, synthetic construct
  misc_feature 1..22: note = chemically synthesized
  source 1..22: mol_type = other DNA
ccgaggaccactcaggaacacc

SEQ ID NO: 9016 - DNA, 22 bp, synthetic construct
  misc_feature 1..22: note = chemically synthesized
  source 1..22: mol_type = other DNA
aggaacaccagtagcatctcct

SEQ ID NO: 9017 - DNA, 22 bp, synthetic construct
  misc_feature 1..22: note = chemically synthesized
  source 1..22: mol_type = other DNA
ctctctctgtagggggctggct

SEQ ID NO: 9018 - DNA, 22 bp, synthetic construct
  misc_feature 1..22: note = chemically synthesized
  source 1..22: mol_type = other DNA
tctctgtagggggctggctgga

SEQ ID NO: 9019 - DNA, 22 bp, synthetic construct
  misc_feature 1..22: note = chemically synthesized
  source 1..22: mol_type = other DNA
tctgtagggggctggctggact

SEQ ID NO: 9020 - DNA, 22 bp, synthetic construct
  misc_feature 1..22: note = chemically synthesized
  source 1..22: mol_type = other DNA
tgtagggggctggctggacttc

SEQ ID NO: 9021 - DNA, 22 bp, synthetic construct
  misc_feature 1..22: note = chemically synthesized
  source 1..22: mol_type = other DNA
tagggggctggctggacttccc

SEQ ID NO: 9022 - DNA, 22 bp, synthetic construct
  misc_feature 1..22: note = chemically synthesized
  source 1..22: mol_type = other DNA
gctggacttcccaccaggcggt

SEQ ID NO: 9023 - DNA, 22 bp, synthetic construct
  misc_feature 1..22: note = chemically synthesized
  source 1..22: mol_type = other DNA
gacttcccaccaggcggtgtcc

SEQ ID NO: 9024 - DNA, 22 bp, synthetic construct
  misc_feature 1..22: note = chemically synthesized
  source 1..22: mol_type = other DNA
cccaccaggcggtgtccccaca

SEQ ID NO: 9025 - DNA, 22 bp, synthetic construct
  misc_feature 1..22: note = chemically synthesized
  source 1..22: mol_type = other DNA
ccaccaggcggtgtccccacag

SEQ ID NO: 9026 - DNA, 22 bp, synthetic construct
  misc_feature 1..22: note = chemically synthesized
  source 1..22: mol_type = other DNA
tccgcctcactctcctctgcaa

SEQ ID NO: 9027 - DNA, 22 bp, synthetic construct
  misc_feature 1..22: note = chemically synthesized
  source 1..22: mol_type = other DNA
actctcctctgcaactccagtg

SEQ ID NO: 9028 - DNA, 22 bp, synthetic construct
  misc_feature 1..22: note = chemically synthesized
  source 1..22: mol_type = other DNA
tcctctgcaactccagtgccca

SEQ ID NO: 9029 - DNA, 22 bp, synthetic construct
  misc_feature 1..22: note = chemically synthesized
  source 1..22: mol_type = other DNA
ctctgcaactccagtgcccaca

SEQ ID NO: 9030 - DNA, 22 bp, synthetic construct
  misc_feature 1..22: note = chemically synthesized
  source 1..22: mol_type = other DNA
tgcaactccagtgcccacacgg

SEQ ID NO: 9031 - DNA, 22 bp, synthetic construct
  misc_feature 1..22: note = chemically synthesized
  source 1..22: mol_type = other DNA
caactccagtgcccacacggca

SEQ ID NO: 9032 - DNA, 22 bp, synthetic construct
  misc_feature 1..22: note = chemically synthesized
  source 1..22: mol_type = other DNA
cagtgcccacacggcacccggt

SEQ ID NO: 9033 - DNA, 22 bp, synthetic construct
  misc_feature 1..22: note = chemically synthesized
  source 1..22: mol_type = other DNA
agagagaatacgggatgctgct

SEQ ID NO: 9034 - DNA, 22 bp, synthetic construct
  misc_feature 1..22: note = chemically synthesized
  source 1..22: mol_type = other DNA
ctgaatcttctgagggtgacag

SEQ ID NO: 9035 - DNA, 22 bp, synthetic construct
  misc_feature 1..22: note = chemically synthesized
  source 1..22: mol_type = other DNA
aatcttctgagggtgacagaat

SEQ ID NO: 9036 - DNA, 22 bp, synthetic construct
  misc_feature 1..22: note = chemically synthesized
  source 1..22: mol_type = other DNA
ctgagggtgacagaatttagag

SEQ ID NO: 9037 - DNA, 22 bp, synthetic construct
  misc_feature 1..22: note = chemically synthesized
  source 1..22: mol_type = other DNA
tgagggtgacagaatttagagt

SEQ ID NO: 9038 - DNA, 22 bp, synthetic construct
  misc_feature 1..22: note = chemically synthesized
  source 1..22: mol_type = other DNA
agggtgacagaatttagagttt

SEQ ID NO: 9039 - DNA, 22 bp, synthetic construct
  misc_feature 1..22: note = chemically synthesized
  source 1..22: mol_type = other DNA
agagtttgagcaggaggcttgg

SEQ ID NO: 9040 - DNA, 22 bp, synthetic construct
  misc_feature 1..22: note = chemically synthesized
  source 1..22: mol_type = other DNA
gagtttgagcaggaggcttgga

SEQ ID NO: 9041 - DNA, 22 bp, synthetic construct
  misc_feature 1..22: note = chemically synthesized
  source 1..22: mol_type = other DNA
gagcaggaggcttggagagagg

SEQ ID NO: 9042 - DNA, 22 bp, synthetic construct
  misc_feature 1..22: note = chemically synthesized
  source 1..22: mol_type = other DNA
agcaggaggcttggagagaggc

SEQ ID NO: 9043 - DNA, 22 bp, synthetic construct
  misc_feature 1..22: note = chemically synthesized
  source 1..22: mol_type = other DNA
ggagagaggccaggatttctga

SEQ ID NO: 9044 - DNA, 22 bp, synthetic construct
  misc_feature 1..22: note = chemically synthesized
  source 1..22: mol_type = other DNA
gagagaggccaggatttctgaa

SEQ ID NO: 9045 - DNA, 22 bp, synthetic construct
  misc_feature 1..22: note = chemically synthesized
  source 1..22: mol_type = other DNA
ctgaaattaatgggagagtgag

SEQ ID NO: 9046 - DNA, 22 bp, synthetic construct
  misc_feature 1..22: note = chemically synthesized
  source 1..22: mol_type = other DNA
tgaaattaatgggagagtgagc

SEQ ID NO: 9047 - DNA, 22 bp, synthetic construct
  misc_feature 1..22: note = chemically synthesized
  source 1..22: mol_type = other DNA
aaattaatgggagagtgagctc

SEQ ID NO: 9048 - DNA, 22 bp, synthetic construct
  misc_feature 1..22: note = chemically synthesized
  source 1..22: mol_type = other DNA
atgggagagtgagctcacgcga

SEQ ID NO: 9049 - DNA, 22 bp, synthetic construct
  misc_feature 1..22: note = chemically synthesized
  source 1..22: mol_type = other DNA
acgcgaatgggctgagggacac

SEQ ID NO: 9050 - DNA, 22 bp, synthetic construct
  misc_feature 1..22: note = chemically synthesized
  source 1..22: mol_type = other DNA
agggacaccagtgagggaccgt

SEQ ID NO: 9051 - DNA, 22 bp, synthetic construct
  misc_feature 1..22: note = chemically synthesized
  source 1..22: mol_type = other DNA
aagggatgtagcaaagtcaccg

SEQ ID NO: 9052 - DNA, 22 bp, synthetic construct
  misc_feature 1..22: note = chemically synthesized
  source 1..22: mol_type = other DNA
ccctccagcagcccgggtggtg

SEQ ID NO: 9053 - DNA, 22 bp, synthetic construct
  misc_feature 1..22: note = chemically synthesized
  source 1..22: mol_type = other DNA
cctccagcagcccgggtggtgg

SEQ ID NO: 9054 - DNA, 22 bp, synthetic construct
  misc_feature 1..22: note = chemically synthesized
  source 1..22: mol_type = other DNA
cagcagcccgggtggtgggggc

SEQ ID NO: 9055 - DNA, 22 bp, synthetic construct
  misc_feature 1..22: note = chemically synthesized
  source 1..22: mol_type = other DNA
ggggaacgtcatcatgggagct

SEQ ID NO: 9056 - DNA, 22 bp, synthetic construct
  misc_feature 1..22: note = chemically synthesized
  source 1..22: mol_type = other DNA
acactgatcagctgctcaccgg

SEQ ID NO: 9057 - DNA, 22 bp, synthetic construct
  misc_feature 1..22: note = chemically synthesized
  source 1..22: mol_type = other DNA
atcagctgctcaccggggccca

SEQ ID NO: 9058 - DNA, 22 bp, synthetic construct
  misc_feature 1..22: note = chemically synthesized
  source 1..22: mol_type = other DNA
ctcaccggggcccatcttccac

SEQ ID NO: 9059 - DNA, 22 bp, synthetic construct
  misc_feature 1..22: note = chemically synthesized
  source 1..22: mol_type = other DNA
accggggcccatcttccacttg

SEQ ID NO: 9060 - DNA, 22 bp, synthetic construct
  misc_feature 1..22: note = chemically synthesized
  source 1..22: mol_type = other DNA
ccacttgtctcagcacttgatt

SEQ ID NO: 9061 - DNA, 22 bp, synthetic construct
  misc_feature 1..22: note = chemically synthesized
  source 1..22: mol_type = other DNA
cacttgtctcagcacttgattt

SEQ ID NO: 9062 - DNA, 22 bp, synthetic construct
  misc_feature 1..22: note = chemically synthesized
  source 1..22: mol_type = other DNA
gtctcagcacttgatttttttc

SEQ ID NO: 9063 - DNA, 22 bp, synthetic construct
  misc_feature 1..22: note = chemically synthesized
  source 1..22: mol_type = other DNA
tctcagcacttgatttttttct

SEQ ID NO: 9064 - DNA, 22 bp, synthetic construct
  misc_feature 1..22: note = chemically synthesized
  source 1..22: mol_type = other DNA
agcacttgatttttttctgcta

SEQ ID NO: 9065 - DNA, 22 bp, synthetic construct
  misc_feature 1..22: note = chemically synthesized
  source 1..22: mol_type = other DNA
gatttttttctgctaccccctt

SEQ ID NO: 9066 - DNA, 22 bp, synthetic construct
  misc_feature 1..22: note = chemically synthesized
  source 1..22: mol_type = other DNA
atttttttctgctacccccttt

SEQ ID NO: 9067 - DNA, 22 bp, synthetic construct
  misc_feature 1..22: note = chemically synthesized
  source 1..22: mol_type = other DNA
ttttctgctaccccctttttct

SEQ ID NO: 9068 - DNA, 22 bp, synthetic construct
  misc_feature 1..22: note = chemically synthesized
  source 1..22: mol_type = other DNA
tttctgctaccccctttttctt

SEQ ID NO: 9069 - DNA, 22 bp, synthetic construct
  misc_feature 1..22: note = chemically synthesized
  source 1..22: mol_type = other DNA
ttctgctaccccctttttcttt

SEQ ID NO: 9070 - DNA, 22 bp, synthetic construct
  misc_feature 1..22: note = chemically synthesized
  source 1..22: mol_type = other DNA
tctgctaccccctttttctttt

SEQ ID NO: 9071 - DNA, 22 bp, synthetic construct
  misc_feature 1..22: note = chemically synthesized
  source 1..22: mol_type = other DNA
ctgctaccccctttttctttta

SEQ ID NO: 9072 - DNA, 22 bp, synthetic construct
  misc_feature 1..22: note = chemically synthesized
  source 1..22: mol_type = other DNA
tgctaccccctttttcttttaa

SEQ ID NO: 9073 - DNA, 22 bp, synthetic construct
  misc_feature 1..22: note = chemically synthesized
  source 1..22: mol_type = other DNA
ctaccccctttttcttttaaag

SEQ ID NO: 9074 - DNA, 22 bp, synthetic construct
  misc_feature 1..22: note = chemically synthesized
  source 1..22: mol_type = other DNA
ccccctttttcttttaaagatt

SEQ ID NO: 9075 - DNA, 22 bp, synthetic construct
  misc_feature 1..22: note = chemically synthesized
  source 1..22: mol_type = other DNA
tttcttttaaagatttcaatta

SEQ ID NO: 9076 - DNA, 22 bp, synthetic construct
  misc_feature 1..22: note = chemically synthesized
  source 1..22: mol_type = other DNA
ttcttttaaagatttcaattat

SEQ ID NO: 9077 - DNA, 22 bp, synthetic construct
  misc_feature 1..22: note = chemically synthesized
  source 1..22: mol_type = other DNA
tcttttaaagatttcaattatg

SEQ ID NO: 9078 - DNA, 22 bp, synthetic construct
  misc_feature 1..22: note = chemically synthesized
  source 1..22: mol_type = other DNA
cttttaaagatttcaattatgc

SEQ ID NO: 9079 - DNA, 22 bp, synthetic construct
  misc_feature 1..22: note = chemically synthesized
  source 1..22: mol_type = other DNA
ttttaaagatttcaattatgca

SEQ ID NO: 9080 - DNA, 22 bp, synthetic construct
  misc_feature 1..22: note = chemically synthesized
  source 1..22: mol_type = other DNA
ttaaagatttcaattatgcatg

SEQ ID NO: 9081 - DNA, 22 bp, synthetic construct
  misc_feature 1..22: note = chemically synthesized
  source 1..22: mol_type = other DNA
taaagatttcaattatgcatgt

SEQ ID NO: 9082 - DNA, 22 bp, synthetic construct
  misc_feature 1..22: note = chemically synthesized
  source 1..22: mol_type = other DNA
aaagatttcaattatgcatgta

SEQ ID NO: 9083 - DNA, 22 bp, synthetic construct
  misc_feature 1..22: note = chemically synthesized
  source 1..22: mol_type = other DNA
aagatttcaattatgcatgtat

SEQ ID NO: 9084 - DNA, 22 bp, synthetic construct
  misc_feature 1..22: note = chemically synthesized
  source 1..22: mol_type = other DNA
caattatgcatgtattaagggt

SEQ ID NO: 9085 - DNA, 22 bp, synthetic construct
  misc_feature 1..22: note = chemically synthesized
  source 1..22: mol_type = other DNA
aattatgcatgtattaagggtc

SEQ ID NO: 9086 - DNA, 22 bp, synthetic construct
  misc_feature 1..22: note = chemically synthesized
  source 1..22: mol_type = other DNA
tgcatgtattaagggtcccaca

SEQ ID NO: 9087 - DNA, 22 bp, synthetic construct
  misc_feature 1..22: note = chemically synthesized
  source 1..22: mol_type = other DNA
agggtcccacagctcactcatt

SEQ ID NO: 9088 - DNA, 22 bp, synthetic construct
  misc_feature 1..22: note = chemically synthesized
  source 1..22: mol_type = other DNA
actcattctctttccatttttt

SEQ ID NO: 9089 - DNA, 22 bp, synthetic construct
  misc_feature 1..22: note = chemically synthesized
  source 1..22: mol_type = other DNA
attctctttccattttttaatt

SEQ ID NO: 9090 - DNA, 22 bp, synthetic construct
  misc_feature 1..22: note = chemically synthesized
  source 1..22: mol_type = other DNA
tctttccattttttaattcttt

SEQ ID NO: 9091 - DNA, 22 bp, synthetic construct
  misc_feature 1..22: note = chemically synthesized
  source 1..22: mol_type = other DNA
tttccattttttaattcttttt

SEQ ID NO: 9092 - DNA, 22 bp, synthetic construct
  misc_feature 1..22: note = chemically synthesized
  source 1..22: mol_type = other DNA
tccattttttaattcttttttc

SEQ ID NO: 9093 - DNA, 22 bp, synthetic construct
  misc_feature 1..22: note = chemically synthesized
  source 1..22: mol_type = other DNA
ccattttttaattcttttttct

SEQ ID NO: 9094 - DNA, 22 bp, synthetic construct
  misc_feature 1..22: note = chemically synthesized
  source 1..22: mol_type = other DNA
cattttttaattcttttttctc

SEQ ID NO: 9095 - DNA, 22 bp, synthetic construct
  misc_feature 1..22: note = chemically synthesized
  source 1..22: mol_type = other DNA
tttaattcttttttctcccagt

SEQ ID NO: 9096 - DNA, 22 bp, synthetic construct
  misc_feature 1..22: note = chemically synthesized
  source 1..22: mol_type = other DNA
ttaattcttttttctcccagtg

SEQ ID NO: 9097 - DNA, 22 bp, synthetic construct
  misc_feature 1..22: note = chemically synthesized
  source 1..22: mol_type = other DNA
taattcttttttctcccagtgt

SEQ ID NO: 9098 - DNA, 22 bp, synthetic construct
  misc_feature 1..22: note = chemically synthesized
  source 1..22: mol_type = other DNA
aattcttttttctcccagtgtt

SEQ ID NO: 9099 - DNA, 22 bp, synthetic construct
  misc_feature 1..22: note = chemically synthesized
  source 1..22: mol_type = other DNA
attcttttttctcccagtgttt

SEQ ID NO: 9100 - DNA, 22 bp, synthetic construct
  misc_feature 1..22: note = chemically synthesized
  source 1..22: mol_type = other DNA
ttttttctcccagtgtttcatt

SEQ ID NO: 9101 - DNA, 22 bp, synthetic construct
  misc_feature 1..22: note = chemically synthesized
  source 1..22: mol_type = other DNA
ttttctcccagtgtttcatttt

SEQ ID NO: 9102 - DNA, 22 bp, synthetic construct
  misc_feature 1..22: note = chemically synthesized
  source 1..22: mol_type = other DNA
tttctcccagtgtttcatttta

SEQ ID NO: 9103 - DNA, 22 bp, synthetic construct
  misc_feature 1..22: note = chemically synthesized
  source 1..22: mol_type = other DNA
ttctcccagtgtttcattttat

SEQ ID NO: 9104 - DNA, 22 bp, synthetic construct
  misc_feature 1..22: note = chemically synthesized
  source 1..22: mol_type = other DNA
tctcccagtgtttcattttata

SEQ ID NO: 9105 - DNA, 22 bp, synthetic construct
  misc_feature 1..22: note = chemically synthesized
  source 1..22: mol_type = other DNA
ctcccagtgtttcattttatag

SEQ ID NO: 9106 - DNA, 22 bp, synthetic construct
  misc_feature 1..22: note = chemically synthesized
  source 1..22: mol_type = other DNA
tcccagtgtttcattttataga

SEQ ID NO: 9107 - DNA, 22 bp, synthetic construct
  misc_feature 1..22: note = chemically synthesized
  source 1..22: mol_type = other DNA
ccagtgtttcattttatagagt

SEQ ID NO: 9108 - DNA, 22 bp, synthetic construct
  misc_feature 1..22: note = chemically synthesized
  source 1..22: mol_type = other DNA
cattttatagagttattgctgt

SEQ ID NO: 9109 - DNA, 22 bp, synthetic construct
  misc_feature 1..22: note = chemically synthesized
  source 1..22: mol_type = other DNA
attttatagagttattgctgtt

SEQ ID NO: 9110 - DNA, 22 bp, synthetic construct
  misc_feature 1..22: note = chemically synthesized
  source 1..22: mol_type = other DNA
tatagagttattgctgttcatt

SEQ ID NO: 9111 - DNA, 22 bp, synthetic construct
  misc_feature 1..22: note = chemically synthesized
  source 1..22: mol_type = other DNA
atagagttattgctgttcatta

SEQ ID NO: 9112 - DNA, 22 bp, synthetic construct
  misc_feature 1..22: note = chemically synthesized
  source 1..22: mol_type = other DNA
tagagttattgctgttcattaa

SEQ ID NO: 9113 - DNA, 22 bp, synthetic construct
  misc_feature 1..22: note = chemically synthesized
  source 1..22: mol_type = other DNA
ttgctgttcattaagttaacta

SEQ ID NO: 9114 - DNA, 22 bp, synthetic construct
  misc_feature 1..22: note = chemically synthesized
  source 1..22: mol_type = other DNA
ctgttcattaagttaactaaaa

SEQ ID NO: 9115 - DNA, 22 bp, synthetic construct
  misc_feature 1..22: note = chemically synthesized
  source 1..22: mol_type = other DNA
ttcattaagttaactaaaattt

SEQ ID NO: 9116 - DNA, 22 bp, synthetic construct
  misc_feature 1..22: note = chemically synthesized
  source 1..22: mol_type = other DNA
attaagttaactaaaattttcc

SEQ ID NO: 9117 - DNA, 22 bp, synthetic construct
  misc_feature 1..22: note = chemically synthesized
  source 1..22: mol_type = other DNA
agttaactaaaattttcccctt

SEQ ID NO: 9118 - DNA, 22 bp, synthetic construct
  misc_feature 1..22: note = chemically synthesized
  source 1..22: mol_type = other DNA
actaaaattttccccttcccct

SEQ ID NO: 9119 - DNA, 22 bp, synthetic construct
  misc_feature 1..22: note = chemically synthesized
  source 1..22: mol_type = other DNA
aaattttccccttcccctcccc

SEQ ID NO: 9120 - DNA, 22 bp, synthetic construct
  misc_feature 1..22: note = chemically synthesized
  source 1..22: mol_type = other DNA
tccccttcccctccccctcccc

SEQ ID NO: 9121 - DNA, 22 bp, synthetic construct
  misc_feature 1..22: note = chemically synthesized
  source 1..22: mol_type = other DNA
ccccttcccctccccctcccct

SEQ ID NO: 9122 - DNA, 22 bp, synthetic construct
  misc_feature 1..22: note = chemically synthesized
  source 1..22: mol_type = other DNA
cccttcccctccccctcccctc

SEQ ID NO: 9123 - DNA, 22 bp, synthetic construct
  misc_feature 1..22: note = chemically synthesized
  source 1..22: mol_type = other DNA
cccctccccctcccctcccctc

SEQ ID NO: 9124 - DNA, 22 bp, synthetic construct
  misc_feature 1..22: note = chemically synthesized
  source 1..22: mol_type = other DNA
ccctccccctcccctcccctcc

SEQ ID NO: 9125 - DNA, 22 bp, synthetic construct
  misc_feature 1..22: note = chemically synthesized
  source 1..22: mol_type = other DNA
cccctcccctcccctcctttcc

SEQ ID NO: 9126 - DNA, 22 bp, synthetic construct
  misc_feature 1..22: note = chemically synthesized
  source 1..22: mol_type = other DNA
ccctcccctcctttccttccct

SEQ ID NO: 9127 - DNA, 22 bp, synthetic construct
  misc_feature 1..22: note = chemically synthesized
  source 1..22: mol_type = other DNA
ccctcctttccttccctcgctt

SEQ ID NO: 9128 - DNA, 22 bp, synthetic construct
  misc_feature 1..22: note = chemically synthesized
  source 1..22: mol_type = other DNA
ctttccttccctcgcttcccct

SEQ ID NO: 9129 - DNA, 22 bp, synthetic construct
  misc_feature 1..22: note = chemically synthesized
  source 1..22: mol_type = other DNA
tccttccctcgcttcccctccc

SEQ ID NO: 9130 - DNA, 22 bp, synthetic construct
  misc_feature 1..22: note = chemically synthesized
  source 1..22: mol_type = other DNA
ccttccctcgcttcccctcccc

SEQ ID NO: 9131 - DNA, 22 bp, synthetic construct
  misc_feature 1..22: note = chemically synthesized
  source 1..22: mol_type = other DNA
cttccctcgcttcccctcccct

SEQ ID NO: 9132 - DNA, 22 bp, synthetic construct
  misc_feature 1..22: note = chemically synthesized
  source 1..22: mol_type = other DNA
ccctcgcttcccctcccctctc

SEQ ID NO: 9133 - DNA, 22 bp, synthetic construct
  misc_feature 1..22: note = chemically synthesized
  source 1..22: mol_type = other DNA
cctcgcttcccctcccctctct

SEQ ID NO: 9134 - DNA, 22 bp, synthetic construct
  misc_feature 1..22: note = chemically synthesized
  source 1..22: mol_type = other DNA
gcttcccctcccctctctctct

SEQ ID NO: 9135 - DNA, 22 bp, synthetic construct
  misc_feature 1..22: note = chemically synthesized
  source 1..22: mol_type = other DNA
cccctcccctctctctctctca

SEQ ID NO: 9136 - DNA, 22 bp, synthetic construct
  misc_feature 1..22: note = chemically synthesized
  source 1..22: mol_type = other DNA
ccctcccctctctctctctcat

SEQ ID NO: 9137 - DNA, 22 bp, synthetic construct
  misc_feature 1..22: note = chemically synthesized
  source 1..22: mol_type = other DNA
ccctctctctctctcatctcac

SEQ ID NO: 9138 - DNA, 22 bp, synthetic construct
  misc_feature 1..22: note = chemically synthesized
  source 1..22: mol_type = other DNA
tctctctctcatctcactctgt

SEQ ID NO: 9139 - DNA, 22 bp, synthetic construct
  misc_feature 1..22: note = chemically synthesized
  source 1..22: mol_type = other DNA
tctctctcatctcactctgttg

SEQ ID NO: 9140 - DNA, 22 bp, synthetic construct
  misc_feature 1..22: note = chemically synthesized
  source 1..22: mol_type = other DNA
tctctcatctcactctgttgcc

SEQ ID NO: 9141 - DNA, 22 bp, synthetic construct
  misc_feature 1..22: note = chemically synthesized
  source 1..22: mol_type = other DNA
tctcatctcactctgttgccca

SEQ ID NO: 9142 - DNA, 22 bp, synthetic construct
  misc_feature 1..22: note = chemically synthesized
  source 1..22: mol_type = other DNA
tcatctcactctgttgcccagg

SEQ ID NO: 9143 - DNA, 22 bp, synthetic construct
  misc_feature 1..22: note = chemically synthesized
  source 1..22: mol_type = other DNA
atctcactctgttgcccaggct

SEQ ID NO: 9144 - DNA, 22 bp, synthetic construct
  misc_feature 1..22: note = chemically synthesized
  source 1..22: mol_type = other DNA
actctgttgcccaggctggaat

SEQ ID NO: 9145 - DNA, 22 bp, synthetic construct
  misc_feature 1..22: note = chemically synthesized
  source 1..22: mol_type = other DNA
tgttgcccaggctggaatgcag

SEQ ID NO: 9146 - DNA, 22 bp, synthetic construct
  misc_feature 1..22: note = chemically synthesized
  source 1..22: mol_type = other DNA
ttgcccaggctggaatgcagta

SEQ ID NO: 9147 - DNA, 22 bp, synthetic construct
  misc_feature 1..22: note = chemically synthesized
  source 1..22: mol_type = other DNA
cccaggctggaatgcagtagct

SEQ ID NO: 9148 - DNA, 22 bp, synthetic construct
  misc_feature 1..22: note = chemically synthesized
  source 1..22: mol_type = other DNA
gaatgcagtagcttgtcacaac

SEQ ID NO: 9149 - DNA, 22 bp, synthetic construct
  misc_feature 1..22: note = chemically synthesized
  source 1..22: mol_type = other DNA
gtcacaactcactgtggcctcc

SEQ ID NO: 9150 - DNA, 22 bp, synthetic construct
  misc_feature 1..22: note = chemically synthesized
  source 1..22: mol_type = other DNA
tcacaactcactgtggcctcca

SEQ ID NO: 9151 - DNA, 22 bp, synthetic construct
  misc_feature 1..22: note = chemically synthesized
  source 1..22: mol_type = other DNA
actgtggcctccacctcctggg

SEQ ID NO: 9152 - DNA, 22 bp, synthetic construct
  misc_feature 1..22: note = chemically synthesized
  source 1..22: mol_type = other DNA
tggcctccacctcctgggctca

SEQ ID NO: 9153 - DNA, 22 bp, synthetic construct
  misc_feature 1..22: note = chemically synthesized
  source 1..22: mol_type = other DNA
cacctcctgggctcaggcgatc

SEQ ID NO: 9154 - DNA, 22 bp, synthetic construct
  misc_feature 1..22: note = chemically synthesized
  source 1..22: mol_type = other DNA
ctgggctcaggcgatccttcca

SEQ ID NO: 9155 - DNA, 22 bp, synthetic construct
  misc_feature 1..22: note = chemically synthesized
  source 1..22: mol_type = other DNA
ggctcaggcgatccttccactt

SEQ ID NO: 9156 - DNA, 22 bp, synthetic construct
  misc_feature 1..22: note = chemically synthesized
  source 1..22: mol_type = other DNA
aggcgatccttccacttcagcc

SEQ ID NO: 9157 - DNA, 22 bp, synthetic construct
  misc_feature 1..22: note = chemically synthesized
  source 1..22: mol_type = other DNA
ccacttcagcctcccaggtagc

SEQ ID NO: 9158 - DNA, 22 bp, synthetic construct
  misc_feature 1..22: note = chemically synthesized
  source 1..22: mol_type = other DNA
cacttcagcctcccaggtagct

SEQ ID NO: 9159 - DNA, 22 bp, synthetic construct
  misc_feature 1..22: note = chemically synthesized
  source 1..22: mol_type = other DNA
cagcctcccaggtagctgggac

SEQ ID NO: 9160 - DNA, 22 bp, synthetic construct
  misc_feature 1..22: note = chemically synthesized
  source 1..22: mol_type = other DNA
agcctcccaggtagctgggact

SEQ ID NO: 9161 - DNA, 22 bp, synthetic construct
  misc_feature 1..22: note = chemically synthesized
  source 1..22: mol_type = other DNA
ccaggtagctgggactataggc

SEQ ID NO: 9162 - DNA, 22 bp, synthetic construct
  misc_feature 1..22: note = chemically synthesized
  source 1..22: mol_type = other DNA
ggactataggcatgtggcacca

SEQ ID NO: 9163 - DNA, 22 bp, synthetic construct
  misc_feature 1..22: note = chemically synthesized
  source 1..22: mol_type = other DNA
taggcatgtggcaccacacctg

SEQ ID NO: 9164 - DNA, 22 bp, synthetic construct
  misc_feature 1..22: note = chemically synthesized
  source 1..22: mol_type = other DNA
gctaattaaaaatttttttttg

SEQ ID NO: 9165 - DNA, 22 bp, synthetic construct
  misc_feature 1..22: note = chemically synthesized
  source 1..22: mol_type = other DNA
attaaaaatttttttttgtaga

SEQ ID NO: 9166 - DNA, 22 bp, synthetic construct
  misc_feature 1..22: note = chemically synthesized
  source 1..22: mol_type = other DNA
aaaatttttttttgtagagacg

SEQ ID NO: 9167 - DNA, 22 bp, synthetic construct
  misc_feature 1..22: note = chemically synthesized
  source 1..22: mol_type = other DNA
ttttttgtagagacggttttgc

SEQ ID NO: 9168 - DNA, 22 bp, synthetic construct
  misc_feature 1..22: note = chemically synthesized
  source 1..22: mol_type = other DNA
tttttgtagagacggttttgcc

SEQ ID NO: 9169 - DNA, 22 bp, synthetic construct
  misc_feature 1..22: note = chemically synthesized
  source 1..22: mol_type = other DNA
ttttgtagagacggttttgcca

SEQ ID NO: 9170 - DNA, 22 bp, synthetic construct
  misc_feature 1..22: note = chemically synthesized
  source 1..22: mol_type = other DNA
tttgtagagacggttttgccat

SEQ ID NO: 9171 - DNA, 22 bp, synthetic construct
  misc_feature 1..22: note = chemically synthesized
  source 1..22: mol_type = other DNA
ttgtagagacggttttgccatg

SEQ ID NO: 9172 - DNA, 22 bp, synthetic construct
  misc_feature 1..22: note = chemically synthesized
  source 1..22: mol_type = other DNA
tgtagagacggttttgccatgt

SEQ ID NO: 9173 - DNA, 22 bp, synthetic construct
  misc_feature 1..22: note = chemically synthesized
  source 1..22: mol_type = other DNA
gtagagacggttttgccatgta

SEQ ID NO: 9174 - DNA, 22 bp, synthetic construct
  misc_feature 1..22: note = chemically synthesized
  source 1..22: mol_type = other DNA
tagagacggttttgccatgtag

SEQ ID NO: 9175 - DNA, 22 bp, synthetic construct
  misc_feature 1..22: note = chemically synthesized
  source 1..22: mol_type = other DNA
tgccatgtagaggggttttgcc

SEQ ID NO: 9176 - DNA, 22 bp, synthetic construct
  misc_feature 1..22: note = chemically synthesized
  source 1..22: mol_type = other DNA
gccatgtagaggggttttgcca

SEQ ID NO: 9177 - DNA, 22 bp, synthetic construct
  misc_feature 1..22: note = chemically synthesized
  source 1..22: mol_type = other DNA
ccatgtagaggggttttgccat

SEQ ID NO: 9178 - DNA, 22 bp, synthetic construct
  misc_feature 1..22: note = chemically synthesized
  source 1..22: mol_type = other DNA
tgccatgctgcccagactagtc

SEQ ID NO: 9179 - DNA, 22 bp, synthetic construct
  misc_feature 1..22: note = chemically synthesized
  source 1..22: mol_type = other DNA
gccatgctgcccagactagtct

SEQ ID NO: 9180 - DNA, 22 bp, synthetic construct
  misc_feature 1..22: note = chemically synthesized
  source 1..22: mol_type = other DNA
ccatgctgcccagactagtctt

SEQ ID NO: 9181 - DNA, 22 bp, synthetic construct
  misc_feature 1..22: note = chemically synthesized
  source 1..22: mol_type = other DNA
cccagactagtcttgagctcct

SEQ ID NO: 9182 - DNA, 22 bp, synthetic construct
  misc_feature 1..22: note = chemically synthesized
  source 1..22: mol_type = other DNA
gtcttgagctcctgggctcaag

SEQ ID NO: 9183 - DNA, 22 bp, synthetic construct
  misc_feature 1..22: note = chemically synthesized
  source 1..22: mol_type = other DNA
gagctcctgggctcaagtgatt

SEQ ID NO: 9184 - DNA, 22 bp, synthetic construct
  misc_feature 1..22: note = chemically synthesized
  source 1..22: mol_type = other DNA
agctcctgggctcaagtgattc

SEQ ID NO: 9185 - DNA, 22 bp, synthetic construct
  misc_feature 1..22: note = chemically synthesized
  source 1..22: mol_type = other DNA
ctgggctcaagtgattcccccc

SEQ ID NO: 9186 - DNA, 22 bp, synthetic construct
  misc_feature 1..22: note = chemically synthesized
  source 1..22: mol_type = other DNA
ggctcaagtgattccccccgtg

SEQ ID NO: 9187 - DNA, 22 bp, synthetic construct
  misc_feature 1..22: note = chemically synthesized
  source 1..22: mol_type = other DNA
aagtgattccccccgtgtcgac

SEQ ID NO: 9188 - DNA, 22 bp, synthetic construct
  misc_feature 1..22: note = chemically synthesized
  source 1..22: mol_type = other DNA
cccccgtgtcgacctcccaaag

SEQ ID NO: 9189 - DNA, 22 bp, synthetic construct
  misc_feature 1..22: note = chemically synthesized
  source 1..22: mol_type = other DNA
ccaaagtgctgggattacagat

SEQ ID NO: 9190 - DNA, 22 bp, synthetic construct
  misc_feature 1..22: note = chemically synthesized
  source 1..22: mol_type = other DNA
ggattacagatgtgatccacag

SEQ ID NO: 9191 - DNA, 22 bp, synthetic construct
  misc_feature 1..22: note = chemically synthesized
  source 1..22: mol_type = other DNA
cagatgtgatccacagtgcctg

SEQ ID NO: 9192 - DNA, 22 bp, synthetic construct
  misc_feature 1..22: note = chemically synthesized
  source 1..22: mol_type = other DNA
gccctaaatttttcttacgcat

SEQ ID NO: 9193 - DNA, 22 bp, synthetic construct
  misc_feature 1..22: note = chemically synthesized
  source 1..22: mol_type = other DNA
aatttttcttacgcatttctca

SEQ ID NO: 9194 - DNA, 22 bp, synthetic construct
  misc_feature 1..22: note = chemically synthesized
  source 1..22: mol_type = other DNA
ttcttacgcatttctcatcttc

SEQ ID NO: 9195 - DNA, 22 bp, synthetic construct
  misc_feature 1..22: note = chemically synthesized
  source 1..22: mol_type = other DNA
tcttacgcatttctcatcttcc

SEQ ID NO: 9196 - DNA, 22 bp, synthetic construct
  misc_feature 1..22: note = chemically synthesized
  source 1..22: mol_type = other DNA
cttacgcatttctcatcttcca

SEQ ID NO: 9197 - DNA, 22 bp, synthetic construct
  misc_feature 1..22: note = chemically synthesized
  source 1..22: mol_type = other DNA
ttacgcatttctcatcttccat

SEQ ID NO: 9198 - DNA, 22 bp, synthetic construct
  misc_feature 1..22: note = chemically synthesized
  source 1..22: mol_type = other DNA
acgcatttctcatcttccatta

SEQ ID NO: 9199 - DNA, 22 bp, synthetic construct
  misc_feature 1..22: note = chemically synthesized
  source 1..22: mol_type = other DNA
cgcatttctcatcttccattat

SEQ ID NO: 9200 - DNA, 22 bp, synthetic construct
  misc_feature 1..22: note = chemically synthesized
  source 1..22: mol_type = other DNA
ctcatcttccattatttccatc

SEQ ID NO: 9201 - DNA, 22 bp, synthetic construct
  misc_feature 1..22: note = chemically synthesized
  source 1..22: mol_type = other DNA
tcatcttccattatttccatcc

SEQ ID NO: 9202 - DNA, 22 bp, synthetic construct
  misc_feature 1..22: note = chemically synthesized
  source 1..22: mol_type = other DNA
atcttccattatttccatccag

SEQ ID NO: 9203 - DNA, 22 bp, synthetic construct
  misc_feature 1..22: note = chemically synthesized
  source 1..22: mol_type = other DNA
ccattatttccatccagtgtgt

SEQ ID NO: 9204 - DNA, 22 bp, synthetic construct
  misc_feature 1..22: note = chemically synthesized
  source 1..22: mol_type = other DNA
cattatttccatccagtgtgtt

SEQ ID NO: 9205 - DNA, 22 bp, synthetic construct
  misc_feature 1..22: note = chemically synthesized
  source 1..22: mol_type = other DNA
tttccatccagtgtgttttttc

SEQ ID NO: 9206 - DNA, 22 bp, synthetic construct
  misc_feature 1..22: note = chemically synthesized
  source 1..22: mol_type = other DNA
ccatccagtgtgttttttcttt

SEQ ID NO: 9207 - DNA, 22 bp, synthetic construct
  misc_feature 1..22: note = chemically synthesized
  source 1..22: mol_type = other DNA
catccagtgtgttttttctttt

SEQ ID NO: 9208 - DNA, 22 bp, synthetic construct
  misc_feature 1..22: note = chemically synthesized
  source 1..22: mol_type = other DNA
tttcttttctttcttttctttt

SEQ ID NO: 9209 - DNA, 22 bp, synthetic construct
  misc_feature 1..22: note = chemically synthesized
  source 1..22: mol_type = other DNA
ttcttttctttcttttcttttt

SEQ ID NO: 9210 - DNA, 22 bp, synthetic construct
  misc_feature 1..22: note = chemically synthesized
  source 1..22: mol_type = other DNA
tcttttctttcttttctttttt

SEQ ID NO: 9211 - DNA, 22 bp, synthetic construct
  misc_feature 1..22: note = chemically synthesized
  source 1..22: mol_type = other DNA
cttttctttcttttcttttttt

SEQ ID NO: 9212 - DNA, 22 bp, synthetic construct
  misc_feature 1..22: note = chemically synthesized
  source 1..22: mol_type = other DNA
ttttctttcttttctttttttt

SEQ ID NO: 9213 - DNA, 22 bp, synthetic construct
  misc_feature 1..22: note = chemically synthesized
  source 1..22: mol_type = other DNA
ttctttcttttctttttttttt

SEQ ID NO: 9214 - DNA, 22 bp, synthetic construct
  misc_feature 1..22: note = chemically synthesized
  source 1..22: mol_type = other DNA
tctttcttttcttttttttttt

SEQ ID NO: 9215 - DNA, 22 bp, synthetic construct
  misc_feature 1..22: note = chemically synthesized
  source 1..22: mol_type = other DNA
ctttcttttctttttttttttt

SEQ ID NO: 9216 - DNA, 22 bp, synthetic construct
  misc_feature 1..22: note = chemically synthesized
  source 1..22: mol_type = other DNA
tttcttttcttttttttttttt

SEQ ID NO: 9217 - DNA, 22 bp, synthetic construct
  misc_feature 1..22: note = chemically synthesized
  source 1..22: mol_type = other DNA
tcttttcttttttttttttttg

SEQ ID NO: 9218 - DNA, 22 bp, synthetic construct
  misc_feature 1..22: note = chemically synthesized
  source 1..22: mol_type = other DNA
cttttcttttttttttttttgg

SEQ ID NO: 9219 - DNA, 22 bp, synthetic construct
  misc_feature 1..22: note = chemically synthesized
  source 1..22: mol_type = other DNA
ttttcttttttttttttttgga

SEQ ID NO: 9220 - DNA, 22 bp, synthetic construct
  misc_feature 1..22: note = chemically synthesized
  source 1..22: mol_type = other DNA
ttcttttttttttttttggagg

SEQ ID NO: 9221 - DNA, 22 bp, synthetic construct
  misc_feature 1..22: note = chemically synthesized
  source 1..22: mol_type = other DNA
tcttttttttttttttggaggc

SEQ ID NO: 9222 - DNA, 22 bp, synthetic construct
  misc_feature 1..22: note = chemically synthesized
  source 1..22: mol_type = other DNA
cttttttttttttttggaggcg

SEQ ID NO: 9223 - DNA, 22 bp, synthetic construct
  misc_feature 1..22: note = chemically synthesized
  source 1..22: mol_type = other DNA
ttttttttttttttggaggcgg

SEQ ID NO: 9224 - DNA, 22 bp, synthetic construct
  misc_feature 1..22: note = chemically synthesized
  source 1..22: mol_type = other DNA
ttttttttttttggaggcggag

SEQ ID NO: 9225 - DNA, 22 bp, synthetic construct
  misc_feature 1..22: note = chemically synthesized
  source 1..22: mol_type = other DNA
tttttttttttggaggcggagt

SEQ ID NO: 9226 - DNA, 22 bp, synthetic construct
  misc_feature 1..22: note = chemically synthesized
  source 1..22: mol_type = other DNA
ttttttttttggaggcggagtc

SEQ ID NO: 9227 - DNA, 22 bp, synthetic construct
  misc_feature 1..22: note = chemically synthesized
  source 1..22: mol_type = other DNA
tttttttttggaggcggagtct

SEQ ID NO: 9228 - DNA, 22 bp, synthetic construct
  misc_feature 1..22: note = chemically synthesized
  source 1..22: mol_type = other DNA
ttttttttggaggcggagtctc

SEQ ID NO: 9229 - DNA, 22 bp, synthetic construct
  misc_feature 1..22: note = chemically synthesized
  source 1..22: mol_type = other DNA
tttttttggaggcggagtctcg

SEQ ID NO: 9230 - DNA, 22 bp, synthetic construct
  misc_feature 1..22: note = chemically synthesized
  source 1..22: mol_type = other DNA
ttttttggaggcggagtctcgc

SEQ ID NO: 9231 - DNA, 22 bp, synthetic construct
  misc_feature 1..22: note = chemically synthesized
  source 1..22: mol_type = other DNA
tttttggaggcggagtctcgct

SEQ ID NO: 9232 - DNA, 22 bp, synthetic construct
  misc_feature 1..22: note = chemically synthesized
  source 1..22: mol_type = other DNA
ttttggaggcggagtctcgctc

SEQ ID NO: 9233 - DNA, 22 bp, synthetic construct
  misc_feature 1..22: note = chemically synthesized
  source 1..22: mol_type = other DNA
tttggaggcggagtctcgctct

SEQ ID NO: 9234 - DNA, 22 bp, synthetic construct
  misc_feature 1..22: note = chemically synthesized
  source 1..22: mol_type = other DNA
ttggaggcggagtctcgctctg

SEQ ID NO: 9235 - DNA, 22 bp, synthetic construct
  misc_feature 1..22: note = chemically synthesized
  source 1..22: mol_type = other DNA
tggaggcggagtctcgctctgt

SEQ ID NO: 9236 - DNA, 22 bp, synthetic construct
  misc_feature 1..22: note = chemically synthesized
  source 1..22: mol_type = other DNA
ggaggcggagtctcgctctgtt

SEQ ID NO: 9237 - DNA, 22 bp, synthetic construct
  misc_feature 1..22: note = chemically synthesized
  source 1..22: mol_type = other DNA
gaggcggagtctcgctctgttg

SEQ ID NO: 9238 - DNA, 22 bp, synthetic construct
  misc_feature 1..22: note = chemically synthesized
  source 1..22: mol_type = other DNA
gctctgttgcccaggccggagt

SEQ ID NO: 9239 - DNA, 22 bp, synthetic construct
  misc_feature 1..22: note = chemically synthesized
  source 1..22: mol_type = other DNA
tgttgcccaggccggagtgcag

SEQ ID NO: 9240 - DNA, 22 bp, synthetic construct
  misc_feature 1..22: note = chemically synthesized
  source 1..22: mol_type = other DNA
ttgcccaggccggagtgcagtg

SEQ ID NO: 9241 - DNA, 22 bp, synthetic construct
  misc_feature 1..22: note = chemically synthesized
  source 1..22: mol_type = other DNA
cccaggccggagtgcagtggcg

SEQ ID NO: 9242 - DNA, 22 bp, synthetic construct
  misc_feature 1..22: note = chemically synthesized
  source 1..22: mol_type = other DNA
ggctcactgcaagctctgcctc

SEQ ID NO: 9243 - DNA, 22 bp, synthetic construct
  misc_feature 1..22: note = chemically synthesized
  source 1..22: mol_type = other DNA
gctcactgcaagctctgcctcc

SEQ ID NO: 9244 - DNA, 22 bp, synthetic construct
  misc_feature 1..22: note = chemically synthesized
  source 1..22: mol_type = other DNA
actgcaagctctgcctcccggg

SEQ ID NO: 9245 - DNA, 22 bp, synthetic construct
  misc_feature 1..22: note = chemically synthesized
  source 1..22: mol_type = other DNA
caagctctgcctcccgggttca

SEQ ID NO: 9246 - DNA, 22 bp, synthetic construct
  misc_feature 1..22: note = chemically synthesized
  source 1..22: mol_type = other DNA
tgcctcccgggttcatgccatt

SEQ ID NO: 9247 - DNA, 22 bp, synthetic construct
  misc_feature 1..22: note = chemically synthesized
  source 1..22: mol_type = other DNA
cctcccgggttcatgccattct

SEQ ID NO: 9248 - DNA, 22 bp, synthetic construct
  misc_feature 1..22: note = chemically synthesized
  source 1..22: mol_type = other DNA
ccgggttcatgccattctcctg

SEQ ID NO: 9249 - DNA, 22 bp, synthetic construct
  misc_feature 1..22: note = chemically synthesized
  source 1..22: mol_type = other DNA
atgccattctcctgcctcagcc

SEQ ID NO: 9250 - DNA, 22 bp, synthetic construct
  misc_feature 1..22: note = chemically synthesized
  source 1..22: mol_type = other DNA
tcctgcctcagcctcccgagta

SEQ ID NO: 9251 - DNA, 22 bp, synthetic construct
  misc_feature 1..22: note = chemically synthesized
  source 1..22: mol_type = other DNA
ctgcctcagcctcccgagtagc

SEQ ID NO: 9252 - DNA, 22 bp, synthetic construct
  misc_feature 1..22: note = chemically synthesized
  source 1..22: mol_type = other DNA
cctcagcctcccgagtagctgg

SEQ ID NO: 9253 - DNA, 22 bp, synthetic construct
  misc_feature 1..22: note = chemically synthesized
  source 1..22: mol_type = other DNA
agcctcccgagtagctgggact

SEQ ID NO: 9254 - DNA, 22 bp, synthetic construct
  misc_feature 1..22: note = chemically synthesized
  source 1..22: mol_type = other DNA
ccgagtagctgggactacaggc

SEQ ID NO: 9255 - DNA, 22 bp, synthetic construct
  misc_feature 1..22: note = chemically synthesized
  source 1..22: mol_type = other DNA
ggactacaggcgcctgccacca

SEQ ID NO: 9256 - DNA, 22 bp, synthetic construct
  misc_feature 1..22: note = chemically synthesized
  source 1..22: mol_type = other DNA
caggcgcctgccaccacgtctg

SEQ ID NO: 9257 - DNA, 22 bp, synthetic construct
  misc_feature 1..22: note = chemically synthesized
  source 1..22: mol_type = other DNA
ccaccacgtctggctaattttt

SEQ ID NO: 9258 - DNA, 22 bp, synthetic construct
  misc_feature 1..22: note = chemically synthesized
  source 1..22: mol_type = other DNA
gctaattttttgtatttttagt

SEQ ID NO: 9259 - DNA, 22 bp, synthetic construct
  misc_feature 1..22: note = chemically synthesized
  source 1..22: mol_type = other DNA
attttttgtatttttagtagag

SEQ ID NO: 9260 - DNA, 22 bp, synthetic construct
  misc_feature 1..22: note = chemically synthesized
  source 1..22: mol_type = other DNA
tttgtatttttagtagagatgg

SEQ ID NO: 9261 - DNA, 22 bp, synthetic construct
  misc_feature 1..22: note = chemically synthesized
  source 1..22: mol_type = other DNA
ttgtatttttagtagagatggg

SEQ ID NO: 9262 - DNA, 22 bp, synthetic construct
  misc_feature 1..22: note = chemically synthesized
  source 1..22: mol_type = other DNA
tgtatttttagtagagatgggg

SEQ ID NO: 9263 - DNA, 22 bp, synthetic construct
  misc_feature 1..22: note = chemically synthesized
  source 1..22: mol_type = other DNA
gtatttttagtagagatggggt

SEQ ID NO: 9264 - DNA, 22 bp, synthetic construct
  misc_feature 1..22: note = chemically synthesized
  source 1..22: mol_type = other DNA
tatttttagtagagatggggtt

SEQ ID NO: 9265 - DNA, 22 bp, synthetic construct
  misc_feature 1..22: note = chemically synthesized
  source 1..22: mol_type = other DNA
ttagtagagatggggtttcacc

SEQ ID NO: 9266 - DNA, 22 bp, synthetic construct
  misc_feature 1..22: note = chemically synthesized
  source 1..22: mol_type = other DNA
tagtagagatggggtttcacca

SEQ ID NO: 9267 - DNA, 22 bp, synthetic construct
  misc_feature 1..22: note = chemically synthesized
  source 1..22: mol_type = other DNA
agtagagatggggtttcaccat

SEQ ID NO: 9268 - DNA, 22 bp, synthetic construct
  misc_feature 1..22: note = chemically synthesized
  source 1..22: mol_type = other DNA
gtagagatggggtttcaccatg

SEQ ID NO: 9269 - DNA, 22 bp, synthetic construct
  misc_feature 1..22: note = chemically synthesized
  source 1..22: mol_type = other DNA
caccatgttagccaggatggtg

SEQ ID NO: 9270 - DNA, 22 bp, synthetic construct
  misc_feature 1..22: note = chemically synthesized
  source 1..22: mol_type = other DNA
accatgttagccaggatggtgt

SEQ ID NO: 9271 - DNA, 22 bp, synthetic construct
  misc_feature 1..22: note = chemically synthesized
  source 1..22: mol_type = other DNA
gccaggatggtgtcgatctcct

SEQ ID NO: 9272 - DNA, 22 bp, synthetic construct
  misc_feature 1..22: note = chemically synthesized
  source 1..22: mol_type = other DNA
ctgacctcatgatctgcccgcc

SEQ ID NO: 9273 - DNA, 22 bp, synthetic construct
  misc_feature 1..22: note = chemically synthesized
  source 1..22: mol_type = other DNA
acctcatgatctgcccgccttg

SEQ ID NO: 9274 - DNA, 22 bp, synthetic construct
  misc_feature 1..22: note = chemically synthesized
  source 1..22: mol_type = other DNA
atgatctgcccgccttggcctc

SEQ ID NO: 9275 - DNA, 22 bp, synthetic construct
  misc_feature 1..22: note = chemically synthesized
  source 1..22: mol_type = other DNA
cccgccttggcctcccacagtg

SEQ ID NO: 9276 - DNA, 22 bp, synthetic construct
  misc_feature 1..22: note = chemically synthesized
  source 1..22: mol_type = other DNA
ggcctcccacagtgctgggatt

SEQ ID NO: 9277 - DNA, 22 bp, synthetic construct
  misc_feature 1..22: note = chemically synthesized
  source 1..22: mol_type = other DNA
gcctcccacagtgctgggattc

SEQ ID NO: 9278 - DNA, 22 bp, synthetic construct
  misc_feature 1..22: note = chemically synthesized
  source 1..22: mol_type = other DNA
ccacagtgctgggattccaggc

SEQ ID NO: 9279 - DNA, 22 bp, synthetic construct
  misc_feature 1..22: note = chemically synthesized
  source 1..22: mol_type = other DNA
ggattccaggcgtgagccacgg

SEQ ID NO: 9280 - DNA, 22 bp, synthetic construct
  misc_feature 1..22: note = chemically synthesized
  source 1..22: mol_type = other DNA
caggcgtgagccacggcgcctg

SEQ ID NO: 9281 - DNA, 22 bp, synthetic construct
  misc_feature 1..22: note = chemically synthesized
  source 1..22: mol_type = other DNA
gccagtgtgttttttcatttca

SEQ ID NO: 9282 - DNA, 22 bp, synthetic construct
  misc_feature 1..22: note = chemically synthesized
  source 1..22: mol_type = other DNA
tttcatttcagacattgtagtt

SEQ ID NO: 9283 - DNA, 22 bp, synthetic construct
  misc_feature 1..22: note = chemically synthesized
  source 1..22: mol_type = other DNA
ttcatttcagacattgtagttt

SEQ ID NO: 9284 - DNA, 22 bp, synthetic construct
  misc_feature 1..22: note = chemically synthesized
  source 1..22: mol_type = other DNA
tcatttcagacattgtagtttt

SEQ ID NO: 9285 - DNA, 22 bp, synthetic construct
  misc_feature 1..22: note = chemically synthesized
  source 1..22: mol_type = other DNA
catttcagacattgtagttttt

SEQ ID NO: 9286 - DNA, 22 bp, synthetic construct
  misc_feature 1..22: note = chemically synthesized
  source 1..22: mol_type = other DNA
atttcagacattgtagttttta

SEQ ID NO: 9287 - DNA, 22 bp, synthetic construct
  misc_feature 1..22: note = chemically synthesized
  source 1..22: mol_type = other DNA
cagacattgtagtttttatctc

SEQ ID NO: 9288 - DNA, 22 bp, synthetic construct
  misc_feature 1..22: note = chemically synthesized
  source 1..22: mol_type = other DNA
agacattgtagtttttatctct

SEQ ID NO: 9289 - DNA, 22 bp, synthetic construct
  misc_feature 1..22: note = chemically synthesized
  source 1..22: mol_type = other DNA
tagtttttatctctagaagttc

SEQ ID NO: 9290 - DNA, 22 bp, synthetic construct
  misc_feature 1..22: note = chemically synthesized
  source 1..22: mol_type = other DNA
ttatctctagaagttcacctgg

SEQ ID NO: 9291 - DNA, 22 bp, synthetic construct
  misc_feature 1..22: note = chemically synthesized
  source 1..22: mol_type = other DNA
tatctctagaagttcacctggg

SEQ ID NO: 9292 - DNA, 22 bp, synthetic construct
  misc_feature 1..22: note = chemically synthesized
  source 1..22: mol_type = other DNA
atctctagaagttcacctgggg

SEQ ID NO: 9293 - DNA, 22 bp, synthetic construct
  misc_feature 1..22: note = chemically synthesized
  source 1..22: mol_type = other DNA
tctctagaagttcacctgggga

SEQ ID NO: 9294 - DNA, 22 bp, synthetic construct
  misc_feature 1..22: note = chemically synthesized
  source 1..22: mol_type = other DNA
tagaagttcacctggggactct

SEQ ID NO: 9295 - DNA, 22 bp, synthetic construct
  misc_feature 1..22: note = chemically synthesized
  source 1..22: mol_type = other DNA
gaagttcacctggggactctta

SEQ ID NO: 9296 - DNA, 22 bp, synthetic construct
  misc_feature 1..22: note = chemically synthesized
  source 1..22: mol_type = other DNA
acctggggactcttaaatatcc

SEQ ID NO: 9297 - DNA, 22 bp, synthetic construct
  misc_feature 1..22: note = chemically synthesized
  source 1..22: mol_type = other DNA
gggactcttaaatatcctccac

SEQ ID NO: 9298 - DNA, 22 bp, synthetic construct
  misc_feature 1..22: note = chemically synthesized
  source 1..22: mol_type = other DNA
ttaaatatcctccacaattcta

SEQ ID NO: 9299 - DNA, 22 bp, synthetic construct
  misc_feature 1..22: note = chemically synthesized
  source 1..22: mol_type = other DNA
aaatatcctccacaattctact

SEQ ID NO: 9300 - DNA, 22 bp, synthetic construct
  misc_feature 1..22: note = chemically synthesized
  source 1..22: mol_type = other DNA
aatatcctccacaattctactt

SEQ ID NO: 9301 - DNA, 22 bp, synthetic construct
  misc_feature 1..22: note = chemically synthesized
  source 1..22: mol_type = other DNA
cacaattctacttaattttttg

SEQ ID NO: 9302 - DNA, 22 bp, synthetic construct
  misc_feature 1..22: note = chemically synthesized
  source 1..22: mol_type = other DNA
tacttaattttttgaacataat

SEQ ID NO: 9303 - DNA, 22 bp, synthetic construct
  misc_feature 1..22: note = chemically synthesized
  source 1..22: mol_type = other DNA
cttaattttttgaacataatgg

SEQ ID NO: 9304 - DNA, 22 bp, synthetic construct
  misc_feature 1..22: note = chemically synthesized
  source 1..22: mol_type = other DNA
aattttttgaacataatgggat

SEQ ID NO: 9305 - DNA, 22 bp, synthetic construct
  misc_feature 1..22: note = chemically synthesized
  source 1..22: mol_type = other DNA
attttttgaacataatgggata

SEQ ID NO: 9306 - DNA, 22 bp, synthetic construct
  misc_feature 1..22: note = chemically synthesized
  source 1..22: mol_type = other DNA
tttgaacataatgggatatggc

SEQ ID NO: 9307 - DNA, 22 bp, synthetic construct
  misc_feature 1..22: note = chemically synthesized
  source 1..22: mol_type = other DNA
ttgaacataatgggatatggct

SEQ ID NO: 9308 - DNA, 22 bp, synthetic construct
  misc_feature 1..22: note = chemically synthesized
  source 1..22: mol_type = other DNA
tgaacataatgggatatggcta

SEQ ID NO: 9309 - DNA, 22 bp, synthetic construct
  misc_feature 1..22: note = chemically synthesized
  source 1..22: mol_type = other DNA
gaacataatgggatatggctat

SEQ ID NO: 9310 - DNA, 22 bp, synthetic construct
  misc_feature 1..22: note = chemically synthesized
  source 1..22: mol_type = other DNA
aacataatgggatatggctata

SEQ ID NO: 9311 - DNA, 22 bp, synthetic construct
  misc_feature 1..22: note = chemically synthesized
  source 1..22: mol_type = other DNA
taatatctgttttaccatcctt

SEQ ID NO: 9312 - DNA, 22 bp, synthetic construct
  misc_feature 1..22: note = chemically synthesized
  source 1..22: mol_type = other DNA
ttttaccatccttgcctgctaa

SEQ ID NO: 9313 - DNA, 22 bp, synthetic construct
  misc_feature 1..22: note = chemically synthesized
  source 1..22: mol_type = other DNA
taccatccttgcctgctaattc

SEQ ID NO: 9314 - DNA, 22 bp, synthetic construct
  misc_feature 1..22: note = chemically synthesized
  source 1..22: mol_type = other DNA
accatccttgcctgctaattct

SEQ ID NO: 9315 - DNA, 22 bp, synthetic construct
  misc_feature 1..22: note = chemically synthesized
  source 1..22: mol_type = other DNA
ccatccttgcctgctaattcta

SEQ ID NO: 9316 - DNA, 22 bp, synthetic construct
  misc_feature 1..22: note = chemically synthesized
  source 1..22: mol_type = other DNA
gcctgctaattctagcatccgt

SEQ ID NO: 9317 - DNA, 22 bp, synthetic construct
  misc_feature 1..22: note = chemically synthesized
  source 1..22: mol_type = other DNA
cctgctaattctagcatccgtg

SEQ ID NO: 9318 - DNA, 22 bp, synthetic construct
  misc_feature 1..22: note = chemically synthesized
  source 1..22: mol_type = other DNA
ctaattctagcatccgtgtcag

SEQ ID NO: 9319 - DNA, 22 bp, synthetic construct
  misc_feature 1..22: note = chemically synthesized
  source 1..22: mol_type = other DNA
attctagcatccgtgtcagttc

SEQ ID NO: 9320 - DNA, 22 bp, synthetic construct
  misc_feature 1..22: note = chemically synthesized
  source 1..22: mol_type = other DNA
tagcatccgtgtcagttctgga

SEQ ID NO: 9321 - DNA, 22 bp, synthetic construct
  misc_feature 1..22: note = chemically synthesized
  source 1..22: mol_type = other DNA
gcatccgtgtcagttctggatc

SEQ ID NO: 9322 - DNA, 22 bp, synthetic construct
  misc_feature 1..22: note = chemically synthesized
  source 1..22: mol_type = other DNA
tggatctcttttgatatttatg

SEQ ID NO: 9323 - DNA, 22 bp, synthetic construct
  misc_feature 1..22: note = chemically synthesized
  source 1..22: mol_type = other DNA
gatctcttttgatatttatgaa

SEQ ID NO: 9324 - DNA, 22 bp, synthetic construct
  misc_feature 1..22: note = chemically synthesized
  source 1..22: mol_type = other DNA
ttttgatatttatgaacctcct

SEQ ID NO: 9325 - DNA, 22 bp, synthetic construct
  misc_feature 1..22: note = chemically synthesized
  source 1..22: mol_type = other DNA
ttgatatttatgaacctcctcg

SEQ ID NO: 9326 - DNA, 22 bp, synthetic construct
  misc_feature 1..22: note = chemically synthesized
  source 1..22: mol_type = other DNA
tgatatttatgaacctcctcgt

SEQ ID NO: 9327 - DNA, 22 bp, synthetic construct
  misc_feature 1..22: note = chemically synthesized
  source 1..22: mol_type = other DNA
gatatttatgaacctcctcgtt

SEQ ID NO: 9328 - DNA, 22 bp, synthetic construct
  misc_feature 1..22: note = chemically synthesized
  source 1..22: mol_type = other DNA
atatttatgaacctcctcgtta

SEQ ID NO: 9329 - DNA, 22 bp, synthetic construct
  misc_feature 1..22: note = chemically synthesized
  source 1..22: mol_type = other DNA
atgaacctcctcgttatgcatt

SEQ ID NO: 9330 - DNA, 22 bp, synthetic construct
  misc_feature 1..22: note = chemically synthesized
  source 1..22: mol_type = other DNA
tgaacctcctcgttatgcattg

SEQ ID NO: 9331 - DNA, 22 bp, synthetic construct
  misc_feature 1..22: note = chemically synthesized
  source 1..22: mol_type = other DNA
ctcgttatgcattgtgttttcc

SEQ ID NO: 9332 - DNA, 22 bp, synthetic construct
  misc_feature 1..22: note = chemically synthesized
  source 1..22: mol_type = other DNA
gttatgcattgtgttttcccgt

SEQ ID NO: 9333 - DNA, 22 bp, synthetic construct
  misc_feature 1..22: note = chemically synthesized
  source 1..22: mol_type = other DNA
tgcattgtgttttcccgtttca

SEQ ID NO: 9334 - DNA, 22 bp, synthetic construct
  misc_feature 1..22: note = chemically synthesized
  source 1..22: mol_type = other DNA
tgttttcccgtttcattgcatg

SEQ ID NO: 9335 - DNA, 22 bp, synthetic construct
  misc_feature 1..22: note = chemically synthesized
  source 1..22: mol_type = other DNA
tcccgtttcattgcatgccttg

SEQ ID NO: 9336 - DNA, 22 bp, synthetic construct
  misc_feature 1..22: note = chemically synthesized
  source 1..22: mol_type = other DNA
cccgtttcattgcatgccttgt

SEQ ID NO: 9337 - DNA, 22 bp, synthetic construct
  misc_feature 1..22: note = chemically synthesized
  source 1..22: mol_type = other DNA
ccgtttcattgcatgccttgta

SEQ ID NO: 9338 - DNA, 22 bp, synthetic construct
  misc_feature 1..22: note = chemically synthesized
  source 1..22: mol_type = other DNA
cattgcatgccttgtaatcttt

SEQ ID NO: 9339 - DNA, 22 bp, synthetic construct
  misc_feature 1..22: note = chemically synthesized
  source 1..22: mol_type = other DNA
attgcatgccttgtaatctttg

SEQ ID NO: 9340 - DNA, 22 bp, synthetic construct
  misc_feature 1..22: note = chemically synthesized
  source 1..22: mol_type = other DNA
catgccttgtaatctttgattg

SEQ ID NO: 9341 - DNA, 22 bp, synthetic construct
  misc_feature 1..22: note = chemically synthesized
  source 1..22: mol_type = other DNA
gtaatctttgattggctgccag

SEQ ID NO: 9342 - DNA, 22 bp, synthetic construct
  misc_feature 1..22: note = chemically synthesized
  source 1..22: mol_type = other DNA
taatctttgattggctgccaga

SEQ ID NO: 9343 - DNA, 22 bp, synthetic construct
  misc_feature 1..22: note = chemically synthesized
  source 1..22: mol_type = other DNA
tgattggctgccagacattgtc

SEQ ID NO: 9344 - DNA, 22 bp, synthetic construct
  misc_feature 1..22: note = chemically synthesized
  source 1..22: mol_type = other DNA
gattggctgccagacattgtca

SEQ ID NO: 9345 - DNA, 22 bp, synthetic construct
  misc_feature 1..22: note = chemically synthesized
  source 1..22: mol_type = other DNA
attggctgccagacattgtcaa

SEQ ID NO: 9346 - DNA, 22 bp, synthetic construct
  misc_feature 1..22: note = chemically synthesized
  source 1..22: mol_type = other DNA
gctgccagacattgtcaatttc

SEQ ID NO: 9347 - DNA, 22 bp, synthetic construct
  misc_feature 1..22: note = chemically synthesized
  source 1..22: mol_type = other DNA
ccagacattgtcaatttcacct

SEQ ID NO: 9348 - DNA, 22 bp, synthetic construct
  misc_feature 1..22: note = chemically synthesized
  source 1..22: mol_type = other DNA
tcaatttcaccttgttgggtgc

SEQ ID NO: 9349 - DNA, 22 bp, synthetic construct
  misc_feature 1..22: note = chemically synthesized
  source 1..22: mol_type = other DNA
caccttgttgggtgctggatat

SEQ ID NO: 9350 - DNA, 22 bp, synthetic construct
  misc_feature 1..22: note = chemically synthesized
  source 1..22: mol_type = other DNA
accttgttgggtgctggatatt

SEQ ID NO: 9351 - DNA, 22 bp, synthetic construct
  misc_feature 1..22: note = chemically synthesized
  source 1..22: mol_type = other DNA
gttgggtgctggatatttttgt

SEQ ID NO: 9352 - DNA, 22 bp, synthetic construct
  misc_feature 1..22: note = chemically synthesized
  source 1..22: mol_type = other DNA
ttgggtgctggatatttttgta

SEQ ID NO: 9353 - DNA, 22 bp, synthetic construct
  misc_feature 1..22: note = chemically synthesized
  source 1..22: mol_type = other DNA
ggtgctggatatttttgtattc

SEQ ID NO: 9354 - DNA, 22 bp, synthetic construct
  misc_feature 1..22: note = chemically synthesized
  source 1..22: mol_type = other DNA
gatatttttgtattcctctaaa

SEQ ID NO: 9355 - DNA, 22 bp, synthetic construct
  misc_feature 1..22: note = chemically synthesized
  source 1..22: mol_type = other DNA
ttgtattcctctaaatgttctt

SEQ ID NO: 9356 - DNA, 22 bp, synthetic construct
  misc_feature 1..22: note = chemically synthesized
  source 1..22: mol_type = other DNA
tgtattcctctaaatgttcttg

SEQ ID NO: 9357 - DNA, 22 bp, synthetic construct
  misc_feature 1..22: note = chemically synthesized
  source 1..22: mol_type = other DNA
gtattcctctaaatgttcttga

SEQ ID NO: 9358 - DNA, 22 bp, synthetic construct
  misc_feature 1..22: note = chemically synthesized
  source 1..22: mol_type = other DNA
tattcctctaaatgttcttgag

SEQ ID NO: 9359 - DNA, 22 bp, synthetic construct
  misc_feature 1..22: note = chemically synthesized
  source 1..22: mol_type = other DNA
ctctaaatgttcttgagctttg

SEQ ID NO: 9360 - DNA, 22 bp, synthetic construct
  misc_feature 1..22: note = chemically synthesized
  source 1..22: mol_type = other DNA
taaatgttcttgagctttgctc

SEQ ID NO: 9361 - DNA, 22 bp, synthetic construct
  misc_feature 1..22: note = chemically synthesized
  source 1..22: mol_type = other DNA
aatgttcttgagctttgctccg

SEQ ID NO: 9362 - DNA, 22 bp, synthetic construct
  misc_feature 1..22: note = chemically synthesized
  source 1..22: mol_type = other DNA
ttgagctttgctccgggatgca

SEQ ID NO: 9363 - DNA, 22 bp, synthetic construct
  misc_feature 1..22: note = chemically synthesized
  source 1..22: mol_type = other DNA
gagctttgctccgggatgcagt

SEQ ID NO: 9364 - DNA, 22 bp, synthetic construct
  misc_feature 1..22: note = chemically synthesized
  source 1..22: mol_type = other DNA
agctttgctccgggatgcagtt

SEQ ID NO: 9365 - DNA, 22 bp, synthetic construct
  misc_feature 1..22: note = chemically synthesized
  source 1..22: mol_type = other DNA
tgctccgggatgcagttaagca

SEQ ID NO: 9366 - DNA, 22 bp, synthetic construct
  misc_feature 1..22: note = chemically synthesized
  source 1..22: mol_type = other DNA
gctccgggatgcagttaagcaa

SEQ ID NO: 9367 - DNA, 22 bp, synthetic construct
  misc_feature 1..22: note = chemically synthesized
  source 1..22: mol_type = other DNA
ctccgggatgcagttaagcaac

SEQ ID NO: 9368 - DNA, 22 bp, synthetic construct
  misc_feature 1..22: note = chemically synthesized
  source 1..22: mol_type = other DNA
cgggatgcagttaagcaactta

SEQ ID NO: 9369 - DNA, 22 bp, synthetic construct
  misc_feature 1..22: note = chemically synthesized
  source 1..22: mol_type = other DNA
agcaacttagagtcagtttgat

SEQ ID NO: 9370 - DNA, 22 bp, synthetic construct
  misc_feature 1..22: note = chemically synthesized
  source 1..22: mol_type = other DNA
agagtcagtttgatcgtttgaa

SEQ ID NO: 9371 - DNA, 22 bp, synthetic construct
  misc_feature 1..22: note = chemically synthesized
  source 1..22: mol_type = other DNA
gagtcagtttgatcgtttgaac

SEQ ID NO: 9372 - DNA, 22 bp, synthetic construct
  misc_feature 1..22: note = chemically synthesized
  source 1..22: mol_type = other DNA
gatcgtttgaactcttaattgt

SEQ ID NO: 9373 - DNA, 22 bp, synthetic construct
  misc_feature 1..22: note = chemically synthesized
  source 1..22: mol_type = other DNA
atcgtttgaactcttaattgtt

SEQ ID NO: 9374 - DNA, 22 bp, synthetic construct
  misc_feature 1..22: note = chemically synthesized
  source 1..22: mol_type = other DNA
gaactcttaattgttttggtct

SEQ ID NO: 9375 - DNA, 22 bp, synthetic construct
  misc_feature 1..22: note = chemically synthesized
  source 1..22: mol_type = other DNA
aactcttaattgttttggtctc

SEQ ID NO: 9376 - DNA, 22 bp, synthetic construct
  misc_feature 1..22: note = chemically synthesized
  source 1..22: mol_type = other DNA
ttaattgttttggtctcctcgg

SEQ ID NO: 9377 - DNA, 22 bp, synthetic construct
  misc_feature 1..22: note = chemically synthesized
  source 1..22: mol_type = other DNA
aattgttttggtctcctcggac

SEQ ID NO: 9378 - DNA, 22 bp, synthetic construct
  misc_feature 1..22: note = chemically synthesized
  source 1..22: mol_type = other DNA
attgttttggtctcctcggact

SEQ ID NO: 9379 - DNA, 22 bp, synthetic construct
  misc_feature 1..22: note = chemically synthesized
  source 1..22: mol_type = other DNA
ttttggtctcctcggactctca

SEQ ID NO: 9380 - DNA, 22 bp, synthetic construct
  misc_feature 1..22: note = chemically synthesized
  source 1..22: mol_type = other DNA
tggtctcctcggactctcagct

SEQ ID NO: 9381 - DNA, 22 bp, synthetic construct
  misc_feature 1..22: note = chemically synthesized
  source 1..22: mol_type = other DNA
ggtctcctcggactctcagctc

SEQ ID NO: 9382 - DNA, 22 bp, synthetic construct
  misc_feature 1..22: note = chemically synthesized
  source 1..22: mol_type = other DNA
gtctcctcggactctcagctcc

SEQ ID NO: 9383 - DNA, 22 bp, synthetic construct
  misc_feature 1..22: note = chemically synthesized
  source 1..22: mol_type = other DNA
ctcggactctcagctccatctc

SEQ ID NO: 9384 - DNA, 22 bp, synthetic construct
  misc_feature 1..22: note = chemically synthesized
  source 1..22: mol_type = other DNA
ggactctcagctccatctcctc

SEQ ID NO: 9385 - DNA, 22 bp, synthetic construct
  misc_feature 1..22: note = chemically synthesized
  source 1..22: mol_type = other DNA
tcagctccatctcctcaacgtg

SEQ ID NO: 9386 - DNA, 22 bp, synthetic construct
  misc_feature 1..22: note = chemically synthesized
  source 1..22: mol_type = other DNA
agctccatctcctcaacgtggg

SEQ ID NO: 9387 - DNA, 22 bp, synthetic construct
  misc_feature 1..22: note = chemically synthesized
  source 1..22: mol_type = other DNA
catctcctcaacgtggggagtc

SEQ ID NO: 9388 - DNA, 22 bp, synthetic construct
  misc_feature 1..22: note = chemically synthesized
  source 1..22: mol_type = other DNA
ctcaacgtggggagtctcttgg

SEQ ID NO: 9389 - DNA, 22 bp, synthetic construct
  misc_feature 1..22: note = chemically synthesized
  source 1..22: mol_type = other DNA
aacgtggggagtctcttgggct

SEQ ID NO: 9390 - DNA, 22 bp, synthetic construct
  misc_feature 1..22: note = chemically synthesized
  source 1..22: mol_type = other DNA
ttgggctctgcctggacttccc

SEQ ID NO: 9391 - DNA, 22 bp, synthetic construct
  misc_feature 1..22: note = chemically synthesized
  source 1..22: mol_type = other DNA
gggctctgcctggacttccctt

SEQ ID NO: 9392 - DNA, 22 bp, synthetic construct
  misc_feature 1..22: note = chemically synthesized
  source 1..22: mol_type = other DNA
ggctctgcctggacttcccttt

SEQ ID NO: 9393 - DNA, 22 bp, synthetic construct
  misc_feature 1..22: note = chemically synthesized
  source 1..22: mol_type = other DNA
tgcctggacttccctttcctgg

SEQ ID NO: 9394 - DNA, 22 bp, synthetic construct
  misc_feature 1..22: note = chemically synthesized
  source 1..22: mol_type = other DNA
cctggacttccctttcctggcc

SEQ ID NO: 9395 - DNA, 22 bp, synthetic construct
  misc_feature 1..22: note = chemically synthesized
  source 1..22: mol_type = other DNA
gacttccctttcctggcctgta

SEQ ID NO: 9396 - DNA, 22 bp, synthetic construct
  misc_feature 1..22: note = chemically synthesized
  source 1..22: mol_type = other DNA
ccctttcctggcctgtaacctg

SEQ ID NO: 9397 - DNA, 22 bp, synthetic construct
  misc_feature 1..22: note = chemically synthesized
  source 1..22: mol_type = other DNA
cctttcctggcctgtaacctgc

SEQ ID NO: 9398 - DNA, 22 bp, synthetic construct
  misc_feature 1..22: note = chemically synthesized
  source 1..22: mol_type = other DNA
tcctggcctgtaacctgcagac

SEQ ID NO: 9399 - DNA, 22 bp, synthetic construct
  misc_feature 1..22: note = chemically synthesized
  source 1..22: mol_type = other DNA
cctggcctgtaacctgcagact

SEQ ID NO: 9400 - DNA, 22 bp, synthetic construct
  misc_feature 1..22: note = chemically synthesized
  source 1..22: mol_type = other DNA
ctggcctgtaacctgcagactc

SEQ ID NO: 9401 - DNA, 22 bp, synthetic construct
  misc_feature 1..22: note = chemically synthesized
  source 1..22: mol_type = other DNA
gcctgtaacctgcagactctct

SEQ ID NO: 9402 - DNA, 22 bp, synthetic construct
  misc_feature 1..22: note = chemically synthesized
  source 1..22: mol_type = other DNA
taacctgcagactctctccaaa

SEQ ID NO: 9403 - DNA, 22 bp, synthetic construct
  misc_feature 1..22: note = chemically synthesized
  source 1..22: mol_type = other DNA
cagactctctccaaacagtaag

SEQ ID NO: 9404 - DNA, 22 bp, synthetic construct
  misc_feature 1..22: note = chemically synthesized
  source 1..22: mol_type = other DNA
tctccaaacagtaagctggggt

SEQ ID NO: 9405 - DNA, 22 bp, synthetic construct
  misc_feature 1..22: note = chemically synthesized
  source 1..22: mol_type = other DNA
tccaaacagtaagctggggtga

SEQ ID NO: 9406 - DNA, 22 bp, synthetic construct
  misc_feature 1..22: note = chemically synthesized
  source 1..22: mol_type = other DNA
caaacagtaagctggggtgatc

SEQ ID NO: 9407 - DNA, 22 bp, synthetic construct
  misc_feature 1..22: note = chemically synthesized
  source 1..22: mol_type = other DNA
gggtgatcggagggttcctgtt

SEQ ID NO: 9408 - DNA, 22 bp, synthetic construct
  misc_feature 1..22: note = chemically synthesized
  source 1..22: mol_type = other DNA
ctgttgtttgcttcttatccct

SEQ ID NO: 9409 - DNA, 22 bp, synthetic construct
  misc_feature 1..22: note = chemically synthesized
  source 1..22: mol_type = other DNA
ttgtttgcttcttatccctcag

SEQ ID NO: 9410 - DNA, 22 bp, synthetic construct
  misc_feature 1..22: note = chemically synthesized
  source 1..22: mol_type = other DNA
tttgcttcttatccctcaggga

SEQ ID NO: 9411 - DNA, 22 bp, synthetic construct
  misc_feature 1..22: note = chemically synthesized
  source 1..22: mol_type = other DNA
gcttcttatccctcagggatct

SEQ ID NO: 9412 - DNA, 22 bp, synthetic construct
  misc_feature 1..22: note = chemically synthesized
  source 1..22: mol_type = other DNA
cttcttatccctcagggatctt

SEQ ID NO: 9413 - DNA, 22 bp, synthetic construct
  misc_feature 1..22: note = chemically synthesized
  source 1..22: mol_type = other DNA
cttatccctcagggatctttac

SEQ ID NO: 9414 - DNA, 22 bp, synthetic construct
  misc_feature 1..22: note = chemically synthesized
  source 1..22: mol_type = other DNA
ttatccctcagggatctttact

SEQ ID NO: 9415 - DNA, 22 bp, synthetic construct
  misc_feature 1..22: note = chemically synthesized
  source 1..22: mol_type = other DNA
atccctcagggatctttactcc

SEQ ID NO: 9416 - DNA, 22 bp, synthetic construct
  misc_feature 1..22: note = chemically synthesized
  source 1..22: mol_type = other DNA
tccctcagggatctttactcct

SEQ ID NO: 9417 - DNA, 22 bp, synthetic construct
  misc_feature 1..22: note = chemically synthesized
  source 1..22: mol_type = other DNA
agggatctttactcctccttgc

SEQ ID NO: 9418 - DNA, 22 bp, synthetic construct
  misc_feature 1..22: note = chemically synthesized
  source 1..22: mol_type = other DNA
tactcctccttgcctgatgtcc

SEQ ID NO: 9419 - DNA, 22 bp, synthetic construct
  misc_feature 1..22: note = chemically synthesized
  source 1..22: mol_type = other DNA
actcctccttgcctgatgtcca

SEQ ID NO: 9420 - DNA, 22 bp, synthetic construct
  misc_feature 1..22: note = chemically synthesized
  source 1..22: mol_type = other DNA
ctcctccttgcctgatgtccag

SEQ ID NO: 9421 - DNA, 22 bp, synthetic construct
  misc_feature 1..22: note = chemically synthesized
  source 1..22: mol_type = other DNA
ctccttgcctgatgtccagagt

SEQ ID NO: 9422 - DNA, 22 bp, synthetic construct
  misc_feature 1..22: note = chemically synthesized
  source 1..22: mol_type = other DNA
cttgcctgatgtccagagtctt

SEQ ID NO: 9423 - DNA, 22 bp, synthetic construct
  misc_feature 1..22: note = chemically synthesized
  source 1..22: mol_type = other DNA
gcctgatgtccagagtcttgaa

SEQ ID NO: 9424 - DNA, 22 bp, synthetic construct
  misc_feature 1..22: note = chemically synthesized
  source 1..22: mol_type = other DNA
cctgatgtccagagtcttgaaa

SEQ ID NO: 9425 - DNA, 22 bp, synthetic construct
  misc_feature 1..22: note = chemically synthesized
  source 1..22: mol_type = other DNA
atgtccagagtcttgaaagctg

SEQ ID NO: 9426 - DNA, 22 bp, synthetic construct
  misc_feature 1..22: note = chemically synthesized
  source 1..22: mol_type = other DNA
gaaagctgccatgttctatagt

SEQ ID NO: 9427 - DNA, 22 bp, synthetic construct
  misc_feature 1..22: note = chemically synthesized
  source 1..22: mol_type = other DNA
aaagctgccatgttctatagtt

SEQ ID NO: 9428 - DNA, 22 bp, synthetic construct
  misc_feature 1..22: note = chemically synthesized
  source 1..22: mol_type = other DNA
ccatgttctatagttgtctgtt

SEQ ID NO: 9429 - DNA, 22 bp, synthetic construct
  misc_feature 1..22: note = chemically synthesized
  source 1..22: mol_type = other DNA
tatagttgtctgtttttgtttt

SEQ ID NO: 9430 - DNA, 22 bp, synthetic construct
  misc_feature 1..22: note = chemically synthesized
  source 1..22: mol_type = other DNA
tagttgtctgtttttgttttga

SEQ ID NO: 9431 - DNA, 22 bp, synthetic construct
  misc_feature 1..22: note = chemically synthesized
  source 1..22: mol_type = other DNA
tctgtttttgttttgattgttt

SEQ ID NO: 9432 - DNA, 22 bp, synthetic construct
  misc_feature 1..22: note = chemically synthesized
  source 1..22: mol_type = other DNA
tttttgttttgattgtttctgg

SEQ ID NO: 9433 - DNA, 22 bp, synthetic construct
  misc_feature 1..22: note = chemically synthesized
  source 1..22: mol_type = other DNA
ttgttttgattgtttctgggga

SEQ ID NO: 9434 - DNA, 22 bp, synthetic construct
  misc_feature 1..22: note = chemically synthesized
  source 1..22: mol_type = other DNA
tgttttgattgtttctggggag

SEQ ID NO: 9435 - DNA, 22 bp, synthetic construct
  misc_feature 1..22: note = chemically synthesized
  source 1..22: mol_type = other DNA
gttttgattgtttctggggaga

SEQ ID NO: 9436 - DNA, 22 bp, synthetic construct
  misc_feature 1..22: note = chemically synthesized
  source 1..22: mol_type = other DNA
ttttgattgtttctggggagag

SEQ ID NO: 9437 - DNA, 22 bp, synthetic construct
  misc_feature 1..22: note = chemically synthesized
  source 1..22: mol_type = other DNA
tgattgtttctggggagagaag

SEQ ID NO: 9438 - DNA, 22 bp, synthetic construct
  misc_feature 1..22: note = chemically synthesized
  source 1..22: mol_type = other DNA
gattgtttctggggagagaaga

SEQ ID NO: 9439 - DNA, 22 bp, synthetic construct
  misc_feature 1..22: note = chemically synthesized
  source 1..22: mol_type = other DNA
attgtttctggggagagaagaa

SEQ ID NO: 9440 - DNA, 22 bp, synthetic construct
  misc_feature 1..22: note = chemically synthesized
  source 1..22: mol_type = other DNA
tttctggggagagaagaactct

SEQ ID NO: 9441 - DNA, 22 bp, synthetic construct
  misc_feature 1..22: note = chemically synthesized
  source 1..22: mol_type = other DNA
ctggggagagaagaactcttcc

SEQ ID NO: 9442 - DNA, 22 bp, synthetic construct
  misc_feature 1..22: note = chemically synthesized
  source 1..22: mol_type = other DNA
tggggagagaagaactcttccc

SEQ ID NO: 9443 - DNA, 22 bp, synthetic construct
  misc_feature 1..22: note = chemically synthesized
  source 1..22: mol_type = other DNA
gggagagaagaactcttcccat

SEQ ID NO: 9444 - DNA, 22 bp, synthetic construct
  misc_feature 1..22: note = chemically synthesized
  source 1..22: mol_type = other DNA
ttcccatcttgggcagaccctg

SEQ ID NO: 9445 - DNA, 22 bp, synthetic construct
  misc_feature 1..22: note = chemically synthesized
  source 1..22: mol_type = other DNA
cccatcttgggcagaccctgtc

SEQ ID NO: 9446 - DNA, 22 bp, synthetic construct
  misc_feature 1..22: note = chemically synthesized
  source 1..22: mol_type = other DNA
ccatcttgggcagaccctgtct

SEQ ID NO: 9447 - DNA, 22 bp, synthetic construct
  misc_feature 1..22: note = chemically synthesized
  source 1..22: mol_type = other DNA
gggcagaccctgtcttttatgt

SEQ ID NO: 9448 - DNA, 22 bp, synthetic construct
  misc_feature 1..22: note = chemically synthesized
  source 1..22: mol_type = other DNA
ggcagaccctgtcttttatgtt

SEQ ID NO: 9449 - DNA, 22 bp, synthetic construct
  misc_feature 1..22: note = chemically synthesized
  source 1..22: mol_type = other DNA
tcttttatgttcaaacttttgc

SEQ ID NO: 9450 - DNA, 22 bp, synthetic construct
  misc_feature 1..22: note = chemically synthesized
  source 1..22: mol_type = other DNA
ttatgttcaaacttttgcctaa

SEQ ID NO: 9451 - DNA, 22 bp, synthetic construct
  misc_feature 1..22: note = chemically synthesized
  source 1..22: mol_type = other DNA
tatgttcaaacttttgcctaag

SEQ ID NO: 9452 - DNA, 22 bp, synthetic construct
  misc_feature 1..22: note = chemically synthesized
  source 1..22: mol_type = other DNA
atgttcaaacttttgcctaaga

SEQ ID NO: 9453 - DNA, 22 bp, synthetic construct
  misc_feature 1..22: note = chemically synthesized
  source 1..22: mol_type = other DNA
tgttcaaacttttgcctaagaa

SEQ ID NO: 9454 - DNA, 22 bp, synthetic construct
  misc_feature 1..22: note = chemically synthesized
  source 1..22: mol_type = other DNA
aaacttttgcctaagaagcaca

SEQ ID NO: 9455 - DNA, 22 bp, synthetic construct
  misc_feature 1..22: note = chemically synthesized
  source 1..22: mol_type = other DNA
ttgcctaagaagcacattacat

SEQ ID NO: 9456 - DNA, 22 bp, synthetic construct
  misc_feature 1..22: note = chemically synthesized
  source 1..22: mol_type = other DNA
tgcctaagaagcacattacata

SEQ ID NO: 9457 - DNA, 22 bp, synthetic construct
  misc_feature 1..22: note = chemically synthesized
  source 1..22: mol_type = other DNA
gcctaagaagcacattacatat

SEQ ID NO: 9458 - DNA, 22 bp, synthetic construct
  misc_feature 1..22: note = chemically synthesized
  source 1..22: mol_type = other DNA
cctaagaagcacattacatatt

SEQ ID NO: 9459 - DNA, 22 bp, synthetic construct
  misc_feature 1..22: note = chemically synthesized
  source 1..22: mol_type = other DNA
agaagcacattacatattttaa

SEQ ID NO: 9460 - DNA, 22 bp, synthetic construct
  misc_feature 1..22: note = chemically synthesized
  source 1..22: mol_type = other DNA
catattttaactcatctaatta

SEQ ID NO: 9461 - DNA, 22 bp, synthetic construct
  misc_feature 1..22: note = chemically synthesized
  source 1..22: mol_type = other DNA
taactcatctaattatccgagc

SEQ ID NO: 9462 - DNA, 22 bp, synthetic construct
  misc_feature 1..22: note = chemically synthesized
  source 1..22: mol_type = other DNA
aactcatctaattatccgagca

SEQ ID NO: 9463 - DNA, 22 bp, synthetic construct
  misc_feature 1..22: note = chemically synthesized
  source 1..22: mol_type = other DNA
actcatctaattatccgagcaa

SEQ ID NO: 9464 - DNA, 22 bp, synthetic construct
  misc_feature 1..22: note = chemically synthesized
  source 1..22: mol_type = other DNA
atctaattatccgagcaatcca

SEQ ID NO: 9465 - DNA, 22 bp, synthetic construct
  misc_feature 1..22: note = chemically synthesized
  source 1..22: mol_type = other DNA
attatccgagcaatccaatcgg

SEQ ID NO: 9466 - DNA, 22 bp, synthetic construct
  misc_feature 1..22: note = chemically synthesized
  source 1..22: mol_type = other DNA
tccgagcaatccaatcgggtag

SEQ ID NO: 9467 - DNA, 22 bp, synthetic construct
  misc_feature 1..22: note = chemically synthesized
  source 1..22: mol_type = other DNA
cgactgtgatctccattttaca

SEQ ID NO: 9468 - DNA, 22 bp, synthetic construct
  misc_feature 1..22: note = chemically synthesized
  source 1..22: mol_type = other DNA
tgatctccattttacacacgag

SEQ ID NO: 9469 - DNA, 22 bp, synthetic construct
  misc_feature 1..22: note = chemically synthesized
  source 1..22: mol_type = other DNA
cattttacacacgagaaaatgg

SEQ ID NO: 9470 - DNA, 22 bp, synthetic construct
  misc_feature 1..22: note = chemically synthesized
  source 1..22: mol_type = other DNA
tacacacgagaaaatggaagca

SEQ ID NO: 9471 - DNA, 22 bp, synthetic construct
  misc_feature 1..22: note = chemically synthesized
  source 1..22: mol_type = other DNA
acacacgagaaaatggaagcat

SEQ ID NO: 9472 - DNA, 22 bp, synthetic construct
  misc_feature 1..22: note = chemically synthesized
  source 1..22: mol_type = other DNA
cacacgagaaaatggaagcatg

SEQ ID NO: 9473 - DNA, 22 bp, synthetic construct
  misc_feature 1..22: note = chemically synthesized
  source 1..22: mol_type = other DNA
aatgctggtgcatgatctcaga

SEQ ID NO: 9474 - DNA, 22 bp, synthetic construct
  misc_feature 1..22: note = chemically synthesized
  source 1..22: mol_type = other DNA
gtgcatgatctcagagctacct

SEQ ID NO: 9475 - DNA, 22 bp, synthetic construct
  misc_feature 1..22: note = chemically synthesized
  source 1..22: mol_type = other DNA
agagctacctggaggcacagct

SEQ ID NO: 9476 - DNA, 22 bp, synthetic construct
  misc_feature 1..22: note = chemically synthesized
  source 1..22: mol_type = other DNA
cctggaggcacagctgggctac

SEQ ID NO: 9477 - DNA, 22 bp, synthetic construct
  misc_feature 1..22: note = chemically synthesized
  source 1..22: mol_type = other DNA
gaggcacagctgggctaccctg

SEQ ID NO: 9478 - DNA, 22 bp, synthetic construct
  misc_feature 1..22: note = chemically synthesized
  source 1..22: mol_type = other DNA
ggctaccctgtgggcagtctgg

SEQ ID NO: 9479 - DNA, 22 bp, synthetic construct
  misc_feature 1..22: note = chemically synthesized
  source 1..22: mol_type = other DNA
ccctgtgggcagtctggtttca

SEQ ID NO: 9480 - DNA, 22 bp, synthetic construct
  misc_feature 1..22: note = chemically synthesized
  source 1..22: mol_type = other DNA
tgggcagtctggtttcagggtg

SEQ ID NO: 9481 - DNA, 22 bp, synthetic construct
  misc_feature 1..22: note = chemically synthesized
  source 1..22: mol_type = other DNA
gtttcagggtggatatacagac

SEQ ID NO: 9482 - DNA, 22 bp, synthetic construct
  misc_feature 1..22: note = chemically synthesized
  source 1..22: mol_type = other DNA
cagggtggatatacagacacgt

SEQ ID NO: 9483 - DNA, 22 bp, synthetic construct
  misc_feature 1..22: note = chemically synthesized
  source 1..22: mol_type = other DNA
agggtggatatacagacacgtt

SEQ ID NO: 9484 - DNA, 22 bp, synthetic construct
  misc_feature 1..22: note = chemically synthesized
  source 1..22: mol_type = other DNA
ctgggctgacccagcattggga

SEQ ID NO: 9485 - DNA, 22 bp, synthetic construct
  misc_feature 1..22: note = chemically synthesized
  source 1..22: mol_type = other DNA
ggctgacccagcattgggagtt

SEQ ID NO: 9486 - DNA, 22 bp, synthetic construct
  misc_feature 1..22: note = chemically synthesized
  source 1..22: mol_type = other DNA
acccagcattgggagttgataa

SEQ ID NO: 9487 - DNA, 22 bp, synthetic construct
  misc_feature 1..22: note = chemically synthesized
  source 1..22: mol_type = other DNA
ggagttgataagtcggactggg

SEQ ID NO: 9488 - DNA, 22 bp, synthetic construct
  misc_feature 1..22: note = chemically synthesized
  source 1..22: mol_type = other DNA
ataagtcggactgggaagcagg

SEQ ID NO: 9489 - DNA, 22 bp, synthetic construct
  misc_feature 1..22: note = chemically synthesized
  source 1..22: mol_type = other DNA
ggaagcaggacaggaccctctg

SEQ ID NO: 9490 - DNA, 22 bp, synthetic construct
  misc_feature 1..22: note = chemically synthesized
  source 1..22: mol_type = other DNA
tgagtggagggtgctgaagaca

SEQ ID NO: 9491 - DNA, 22 bp, synthetic construct
  misc_feature 1..22: note = chemically synthesized
  source 1..22: mol_type = other DNA
agtggagggtgctgaagacagc

SEQ ID NO: 9492 - DNA, 22 bp, synthetic construct
  misc_feature 1..22: note = chemically synthesized
  source 1..22: mol_type = other DNA
aagacagcagtcagggactcag

SEQ ID NO: 9493 - DNA, 22 bp, synthetic construct
  misc_feature 1..22: note = chemically synthesized
  source 1..22: mol_type = other DNA
agccatggagggccagcttggt

SEQ ID NO: 9494 - DNA, 22 bp, synthetic construct
  misc_feature 1..22: note = chemically synthesized
  source 1..22: mol_type = other DNA
ggtggggaacaccgtggtcatg

SEQ ID NO: 9495 - DNA, 22 bp, synthetic construct
  misc_feature 1..22: note = chemically synthesized
  source 1..22: mol_type = other DNA
gtggggaacaccgtggtcatgg

SEQ ID NO: 9496 - DNA, 22 bp, synthetic construct
  misc_feature 1..22: note = chemically synthesized
  source 1..22: mol_type = other DNA
ctggatggagaggaatgcaaag

SEQ ID NO: 9497 - DNA, 22 bp, synthetic construct
  misc_feature 1..22: note = chemically synthesized
  source 1..22: mol_type = other DNA
tggatggagaggaatgcaaagg

SEQ ID NO: 9498 - DNA, 22 bp, synthetic construct
  misc_feature 1..22: note = chemically synthesized
  source 1..22: mol_type = other DNA
gatggagaggaatgcaaaggcc

SEQ ID NO: 9499 - DNA, 22 bp, synthetic construct
  misc_feature 1..22: note = chemically synthesized
  source 1..22: mol_type = other DNA
ggaggaaggggtgggggcagtg

SEQ ID NO: 9500 - DNA, 22 bp, synthetic construct
  misc_feature 1..22: note = chemically synthesized
  source 1..22: mol_type = other DNA
gaggaaggggtgggggcagtga

SEQ ID NO: 9501 - DNA, 22 bp, synthetic construct
  misc_feature 1..22: note = chemically synthesized
  source 1..22: mol_type = other DNA
tgctcagagcgggagtgggcag

SEQ ID NO: 9502 - DNA, 22 bp, synthetic construct
  misc_feature 1..22: note = chemically synthesized
  source 1..22: mol_type = other DNA
agagcgggagtgggcagtggag

SEQ ID NO: 9503 - DNA, 22 bp, synthetic construct
  misc_feature 1..22: note = chemically synthesized
  source 1..22: mol_type = other DNA
cctgggtcaaatggggtcctga

SEQ ID NO: 9504 - DNA, 22 bp, synthetic construct
  misc_feature 1..22: note = chemically synthesized
  source 1..22: mol_type = other DNA
ggtcaaatggggtcctgagtgt

SEQ ID NO: 9505 - DNA, 22 bp, synthetic construct
  misc_feature 1..22: note = chemically synthesized
  source 1..22: mol_type = other DNA
agtgtggctgcagtggggaagg

SEQ ID NO: 9506 - DNA, 22 bp, synthetic construct
  misc_feature 1..22: note = chemically synthesized
  source 1..22: mol_type = other DNA
cagtggggaaggtggaagtcac

SEQ ID NO: 9507 - DNA, 22 bp, synthetic construct
  misc_feature 1..22: note = chemically synthesized
  source 1..22: mol_type = other DNA
gtgtgaaaaagatgaagagtta

SEQ ID NO: 9508 - DNA, 22 bp, synthetic construct
  misc_feature 1..22: note = chemically synthesized
  source 1..22: mol_type = other DNA
tggacagtcacttacaggggca

SEQ ID NO: 9509 - DNA, 22 bp, synthetic construct
  misc_feature 1..22: note = chemically synthesized
  source 1..22: mol_type = other DNA
acaggggcagtgtctgactcag

SEQ ID NO: 9510 - DNA, 22 bp, synthetic construct
  misc_feature 1..22: note = chemically synthesized
  source 1..22: mol_type = other DNA
caggggcagtgtctgactcagg

SEQ ID NO: 9511 - DNA, 22 bp, synthetic construct
  misc_feature 1..22: note = chemically synthesized
  source 1..22: mol_type = other DNA
actcaggacagtggcaggaagt

SEQ ID NO: 9512 - DNA, 22 bp, synthetic construct
  misc_feature 1..22: note = chemically synthesized
  source 1..22: mol_type = other DNA
aggacagtggcaggaagtgacc

SEQ ID NO: 9513 - DNA, 22 bp, synthetic construct
  misc_feature 1..22: note = chemically synthesized
  source 1..22: mol_type = other DNA
gggaggaagattctgggcccct

SEQ ID NO: 9514 - DNA, 22 bp, synthetic construct
  misc_feature 1..22: note = chemically synthesized
  source 1..22: mol_type = other DNA
tgggcccctgactgagcctccc

SEQ ID NO: 9515 - DNA, 22 bp, synthetic construct
  misc_feature 1..22: note = chemically synthesized
  source 1..22: mol_type = other DNA
ggcccctgactgagcctcccca

SEQ ID NO: 9516 - DNA, 22 bp, synthetic construct
  misc_feature 1..22: note = chemically synthesized
  source 1..22: mol_type = other DNA
actgagcctccccaggatgtgg

SEQ ID NO: 9517 - DNA, 22 bp, synthetic construct
  misc_feature 1..22: note = chemically synthesized
  source 1..22: mol_type = other DNA
agcctccccaggatgtggtcct

SEQ ID NO: 9518 - DNA, 22 bp, synthetic construct
  misc_feature 1..22: note = chemically synthesized
  source 1..22: mol_type = other DNA
cccaggatgtggtcctgctggg

SEQ ID NO: 9519 - DNA, 22 bp, synthetic construct
  misc_feature 1..22: note = chemically synthesized
  source 1..22: mol_type = other DNA
ctgggtcggggggtgataggaa

SEQ ID NO: 9520 - DNA, 22 bp, synthetic construct
  misc_feature 1..22: note = chemically synthesized
  source 1..22: mol_type = other DNA
ggtcggggggtgataggaatga

SEQ ID NO: 9521 - DNA, 22 bp, synthetic construct
  misc_feature 1..22: note = chemically synthesized
  source 1..22: mol_type = other DNA
gaaggtgttctgtttgcaggtg

SEQ ID NO: 9522 - DNA, 22 bp, synthetic construct
  misc_feature 1..22: note = chemically synthesized
  source 1..22: mol_type = other DNA
tgtttgcaggtggatgctgcaa

SEQ ID NO: 9523 - DNA, 22 bp, synthetic construct
  misc_feature 1..22: note = chemically synthesized
  source 1..22: mol_type = other DNA
tttgcaggtggatgctgcaaag

SEQ ID NO: 9524 - DNA, 22 bp, synthetic construct
  misc_feature 1..22: note = chemically synthesized
  source 1..22: mol_type = other DNA
gcaggtggatgctgcaaagaga

SEQ ID NO: 9525 - DNA, 22 bp, synthetic construct
  misc_feature 1..22: note = chemically synthesized
  source 1..22: mol_type = other DNA
caggtggatgctgcaaagagag

SEQ ID NO: 9526 - DNA, 22 bp, synthetic construct
  misc_feature 1..22: note = chemically synthesized
  source 1..22: mol_type = other DNA
caaagagaggagctcagggctg

SEQ ID NO: 9527 - DNA, 22 bp, synthetic construct
  misc_feature 1..22: note = chemically synthesized
  source 1..22: mol_type = other DNA
agggctgggacaactggagctg

SEQ ID NO: 9528 - DNA, 22 bp, synthetic construct
  misc_feature 1..22: note = chemically synthesized
  source 1..22: mol_type = other DNA
ggacaactggagctgctctggg

SEQ ID NO: 9529 - DNA, 22 bp, synthetic construct
  misc_feature 1..22: note = chemically synthesized
  source 1..22: mol_type = other DNA
gagctgctctgggtctggaggc

SEQ ID NO: 9530 - DNA, 22 bp, synthetic construct
  misc_feature 1..22: note = chemically synthesized
  source 1..22: mol_type = other DNA
ctctgggtctggaggcagcaga

SEQ ID NO: 9531 - DNA, 22 bp, synthetic construct
  misc_feature 1..22: note = chemically synthesized
  source 1..22: mol_type = other DNA
tgggtctggaggcagcagagag

SEQ ID NO: 9532 - DNA, 22 bp, synthetic construct
  misc_feature 1..22: note = chemically synthesized
  source 1..22: mol_type = other DNA
ggtctggaggcagcagagaggg

SEQ ID NO: 9533 - DNA, 22 bp, synthetic construct
  misc_feature 1..22: note = chemically synthesized
  source 1..22: mol_type = other DNA
gaggcagcagagagggagccca

SEQ ID NO: 9534 - DNA, 22 bp, synthetic construct
  misc_feature 1..22: note = chemically synthesized
  source 1..22: mol_type = other DNA
tgtgtgcaggaagacgtgggtg

SEQ ID NO: 9535 - DNA, 22 bp, synthetic construct
  misc_feature 1..22: note = chemically synthesized
  source 1..22: mol_type = other DNA
tgtgcaggaagacgtgggtgtg

SEQ ID NO: 9536 - DNA, 22 bp, synthetic construct
  misc_feature 1..22: note = chemically synthesized
  source 1..22: mol_type = other DNA
gcatgcatatgcacatgtgaga

SEQ ID NO: 9537 - DNA, 22 bp, synthetic construct
  misc_feature 1..22: note = chemically synthesized
  source 1..22: mol_type = other DNA
ttgagtgaagtgagcaatgtgt

SEQ ID NO: 9538 - DNA, 22 bp, synthetic construct
  misc_feature 1..22: note = chemically synthesized
  source 1..22: mol_type = other DNA
tgagtgaagtgagcaatgtgtg

SEQ ID NO: 9539 - DNA, 22 bp, synthetic construct
  misc_feature 1..22: note = chemically synthesized
  source 1..22: mol_type = other DNA
gagtgaagtgagcaatgtgtga

SEQ ID NO: 9540 - DNA, 22 bp, synthetic construct
  misc_feature 1..22: note = chemically synthesized
  source 1..22: mol_type = other DNA
agtgaagtgagcaatgtgtgag

SEQ ID NO: 9541 - DNA, 22 bp, synthetic construct
  misc_feature 1..22: note = chemically synthesized
  source 1..22: mol_type = other DNA
gtgagggcatgtgaatgtgtgt

SEQ ID NO: 9542 - DNA, 22 bp, synthetic construct
  misc_feature 1..22: note = chemically synthesized
  source 1..22: mol_type = other DNA
tgagggcatgtgaatgtgtgtg

SEQ ID NO: 9543 - DNA, 22 bp, synthetic construct
  misc_feature 1..22: note = chemically synthesized
  source 1..22: mol_type = other DNA
tcagggtgcagatggatcaagg

SEQ ID NO: 9544 - DNA, 22 bp, synthetic construct
  misc_feature 1..22: note = chemically synthesized
  source 1..22: mol_type = other DNA
tgagatgacctcgggctgaggg

SEQ ID NO: 9545 - DNA, 22 bp, synthetic construct
  misc_feature 1..22: note = chemically synthesized
  source 1..22: mol_type = other DNA
gggctgaggggagcaaatttag

SEQ ID NO: 9546 - DNA, 22 bp, synthetic construct
  misc_feature 1..22: note = chemically synthesized
  source 1..22: mol_type = other DNA
aggggagcaaatttagtgtgga

SEQ ID NO: 9547 - DNA, 22 bp, synthetic construct
  misc_feature 1..22: note = chemically synthesized
  source 1..22: mol_type = other DNA
agtgtggaacgaggtttctagg

SEQ ID NO: 9548 - DNA, 22 bp, synthetic construct
  misc_feature 1..22: note = chemically synthesized
  source 1..22: mol_type = other DNA
gtgtggaacgaggtttctaggg

SEQ ID NO: 9549 - DNA, 22 bp, synthetic construct
  misc_feature 1..22: note = chemically synthesized
  source 1..22: mol_type = other DNA
ctagggaagcgagggcaaaggg

SEQ ID NO: 9550 - DNA, 22 bp, synthetic construct
  misc_feature 1..22: note = chemically synthesized
  source 1..22: mol_type = other DNA
tagggaagcgagggcaaagggc

SEQ ID NO: 9551 - DNA, 22 bp, synthetic construct
  misc_feature 1..22: note = chemically synthesized
  source 1..22: mol_type = other DNA
gggaagcgagggcaaagggcgc

SEQ ID NO: 9552 - DNA, 22 bp, synthetic construct
  misc_feature 1..22: note = chemically synthesized
  source 1..22: mol_type = other DNA
gggaggaggccttgcgtggtgg

SEQ ID NO: 9553 - DNA, 22 bp, synthetic construct
  misc_feature 1..22: note = chemically synthesized
  source 1..22: mol_type = other DNA
gcgtggtgggggatgaggacaa

SEQ ID NO: 9554 - DNA, 22 bp, synthetic construct
  misc_feature 1..22: note = chemically synthesized
  source 1..22: mol_type = other DNA
cgtggtgggggatgaggacaac

SEQ ID NO: 9555 - DNA, 22 bp, synthetic construct
  misc_feature 1..22: note = chemically synthesized
  source 1..22: mol_type = other DNA
gagggttgtgcttggagagtgg

SEQ ID NO: 9556 - DNA, 22 bp, synthetic construct
  misc_feature 1..22: note = chemically synthesized
  source 1..22: mol_type = other DNA
tgcttggagagtgggctatggt

SEQ ID NO: 9557 - DNA, 22 bp, synthetic construct
  misc_feature 1..22: note = chemically synthesized
  source 1..22: mol_type = other DNA
ggagagtgggctatggtggaat

SEQ ID NO: 9558 - DNA, 22 bp, synthetic construct
  misc_feature 1..22: note = chemically synthesized
  source 1..22: mol_type = other DNA
gagagtgggctatggtggaatg

SEQ ID NO: 9559 - DNA, 22 bp, synthetic construct
  misc_feature 1..22: note = chemically synthesized
  source 1..22: mol_type = other DNA
tggtggaatgacccagatttaa

SEQ ID NO: 9560 - DNA, 22 bp, synthetic construct
  misc_feature 1..22: note = chemically synthesized
  source 1..22: mol_type = other DNA
aaggatctcaatggaattttgg

SEQ ID NO: 9561 - DNA, 22 bp, synthetic construct
  misc_feature 1..22: note = chemically synthesized
  source 1..22: mol_type = other DNA
aggatctcaatggaattttggc

SEQ ID NO: 9562 - DNA, 22 bp, synthetic construct
  misc_feature 1..22: note = chemically synthesized
  source 1..22: mol_type = other DNA
aatggaattttggcaggggagg

SEQ ID NO: 9563 - DNA, 22 bp, synthetic construct
  misc_feature 1..22: note = chemically synthesized
  source 1..22: mol_type = other DNA
tggcaggggagggactgttcca

SEQ ID NO: 9564 - DNA, 22 bp, synthetic construct
  misc_feature 1..22: note = chemically synthesized
  source 1..22: mol_type = other DNA
ggcaggggagggactgttccag

SEQ ID NO: 9565 - DNA, 22 bp, synthetic construct
  misc_feature 1..22: note = chemically synthesized
  source 1..22: mol_type = other DNA
gcaggggagggactgttccagt

SEQ ID NO: 9566 - DNA, 22 bp, synthetic construct
  misc_feature 1..22: note = chemically synthesized
  source 1..22: mol_type = other DNA
ttccagtatggattttaggaag

SEQ ID NO: 9567 - DNA, 22 bp, synthetic construct
  misc_feature 1..22: note = chemically synthesized
  source 1..22: mol_type = other DNA
cagtatggattttaggaagaac

SEQ ID NO: 9568 - DNA, 22 bp, synthetic construct
  misc_feature 1..22: note = chemically synthesized
  source 1..22: mol_type = other DNA
taggaagaacacagggcccagc

SEQ ID NO: 9569 - DNA, 22 bp, synthetic construct
  misc_feature 1..22: note = chemically synthesized
  source 1..22: mol_type = other DNA
aggaagaacacagggcccagct

SEQ ID NO: 9570 - DNA, 22 bp, synthetic construct
  misc_feature 1..22: note = chemically synthesized
  source 1..22: mol_type = other DNA
ggaagaacacagggcccagctt

SEQ ID NO: 9571 - DNA, 22 bp, synthetic construct
  misc_feature 1..22: note = chemically synthesized
  source 1..22: mol_type = other DNA
ctggagtctccaatctgagggg

SEQ ID NO: 9572 - DNA, 22 bp, synthetic construct
  misc_feature 1..22: note = chemically synthesized
  source 1..22: mol_type = other DNA
tggagtctccaatctgagggga

SEQ ID NO: 9573 - DNA, 22 bp, synthetic construct
  misc_feature 1..22: note = chemically synthesized
  source 1..22: mol_type = other DNA
gagtctccaatctgaggggaca

SEQ ID NO: 9574 - DNA, 22 bp, synthetic construct
  misc_feature 1..22: note = chemically synthesized
  source 1..22: mol_type = other DNA
caatctgaggggacaggagcct

SEQ ID NO: 9575 - DNA, 22 bp, synthetic construct
  misc_feature 1..22: note = chemically synthesized
  source 1..22: mol_type = other DNA
aggggacaggagccttagaaga

SEQ ID NO: 9576 - DNA, 22 bp, synthetic construct
  misc_feature 1..22: note = chemically synthesized
  source 1..22: mol_type = other DNA
agaagagctgagactaaggccc

SEQ ID NO: 9577 - DNA, 22 bp, synthetic construct
  misc_feature 1..22: note = chemically synthesized
  source 1..22: mol_type = other DNA
gaagagctgagactaaggcccg

SEQ ID NO: 9578 - DNA, 22 bp, synthetic construct
  misc_feature 1..22: note = chemically synthesized
  source 1..22: mol_type = other DNA
agactaaggcccgaggtgatct

SEQ ID NO: 9579 - DNA, 22 bp, synthetic construct
  misc_feature 1..22: note = chemically synthesized
  source 1..22: mol_type = other DNA
aggcccgaggtgatctggaggc

SEQ ID NO: 9580 - DNA, 22 bp, synthetic construct
  misc_feature 1..22: note = chemically synthesized
  source 1..22: mol_type = other DNA
gaggcctctgccactggctgga

SEQ ID NO: 9581 - DNA, 22 bp, synthetic construct
  misc_feature 1..22: note = chemically synthesized
  source 1..22: mol_type = other DNA
tgccactggctggatgggagga

SEQ ID NO: 9582 - DNA, 22 bp, synthetic construct
  misc_feature 1..22: note = chemically synthesized
  source 1..22: mol_type = other DNA
ccactggctggatgggaggaaa

SEQ ID NO: 9583 - DNA, 22 bp, synthetic construct
  misc_feature 1..22: note = chemically synthesized
  source 1..22: mol_type = other DNA
gctggatgggaggaaaaccatt

SEQ ID NO: 9584 - DNA, 22 bp, synthetic construct
  misc_feature 1..22: note = chemically synthesized
  source 1..22: mol_type = other DNA
gatgggaggaaaaccattcaca

SEQ ID NO: 9585 - DNA, 22 bp, synthetic construct
  misc_feature 1..22: note = chemically synthesized
  source 1..22: mol_type = other DNA
acagatcccccttctcaggatg

SEQ ID NO: 9586 - DNA, 22 bp, synthetic construct
  misc_feature 1..22: note = chemically synthesized
  source 1..22: mol_type = other DNA
ctcaggatgtgtgcctaggcag

SEQ ID NO: 9587 - DNA, 22 bp, synthetic construct
  misc_feature 1..22: note = chemically synthesized
  source 1..22: mol_type = other DNA
tcaggatgtgtgcctaggcagg

SEQ ID NO: 9588 - DNA, 22 bp, synthetic construct
  misc_feature 1..22: note = chemically synthesized
  source 1..22: mol_type = other DNA
aggatgtgtgcctaggcagggc

SEQ ID NO: 9589 - DNA, 22 bp, synthetic construct
  misc_feature 1..22: note = chemically synthesized
  source 1..22: mol_type = other DNA
ggcagggccgggtctgcccccc

SEQ ID NO: 9590 - DNA, 22 bp, synthetic construct
  misc_feature 1..22: note = chemically synthesized
  source 1..22: mol_type = other DNA
cccccccgccccctgtgcgtct

SEQ ID NO: 9591 - DNA, 22 bp, synthetic construct
  misc_feature 1..22: note = chemically synthesized
  source 1..22: mol_type = other DNA
tgcgtctcccagtcccccagct

SEQ ID NO: 9592 - DNA, 22 bp, synthetic construct
  misc_feature 1..22: note = chemically synthesized
  source 1..22: mol_type = other DNA
ccagtcccccagctccaggatc

SEQ ID NO: 9593 - DNA, 22 bp, synthetic construct
  misc_feature 1..22: note = chemically synthesized
  source 1..22: mol_type = other DNA
caggatccgggctttgcacaca

SEQ ID NO: 9594 - DNA, 22 bp, synthetic construct
  misc_feature 1..22: note = chemically synthesized
  source 1..22: mol_type = other DNA
tgcacacagctgatgtgaatat

SEQ ID NO: 9595 - DNA, 22 bp, synthetic construct
  misc_feature 1..22: note = chemically synthesized
  source 1..22: mol_type = other DNA
gcacacagctgatgtgaatatc

SEQ ID NO: 9596 - DNA, 22 bp, synthetic construct
  misc_feature 1..22: note = chemically synthesized
  source 1..22: mol_type = other DNA
cacacagctgatgtgaatatcc

SEQ ID NO: 9597 - DNA, 22 bp, synthetic construct
  misc_feature 1..22: note = chemically synthesized
  source 1..22: mol_type = other DNA
atgtgaatatcctgagtcgtgt

SEQ ID NO: 9598 - DNA, 22 bp, synthetic construct
  misc_feature 1..22: note = chemically synthesized
  source 1..22: mol_type = other DNA
agtcgtgtgcatgggtgtgtgt

SEQ ID NO: 9599 - DNA, 22 bp, synthetic construct
  misc_feature 1..22: note = chemically synthesized
  source 1..22: mol_type = other DNA
gctgcgtgtgtatatttataca

SEQ ID NO: 9600 - DNA, 22 bp, synthetic construct
  misc_feature 1..22: note = chemically synthesized
  source 1..22: mol_type = other DNA
cgtgtgtatatttatacatggt

SEQ ID NO: 9601 - DNA, 22 bp, synthetic construct
  misc_feature 1..22: note = chemically synthesized
  source 1..22: mol_type = other DNA
atacatggtaatatgggtgcga

SEQ ID NO: 9602 - DNA, 22 bp, synthetic construct
  misc_feature 1..22: note = chemically synthesized
  source 1..22: mol_type = other DNA
tacatggtaatatgggtgcgag

SEQ ID NO: 9603 - DNA, 22 bp, synthetic construct
  misc_feature 1..22: note = chemically synthesized
  source 1..22: mol_type = other DNA
aaatgctggggtcaaagcctat

SEQ ID NO: 9604 - DNA, 22 bp, synthetic construct
  misc_feature 1..22: note = chemically synthesized
  source 1..22: mol_type = other DNA
gggtcaaagcctatgatgaccc

SEQ ID NO: 9605 - DNA, 22 bp, synthetic construct
  misc_feature 1..22: note = chemically synthesized
  source 1..22: mol_type = other DNA
tgatgacccccccccatggccc

SEQ ID NO: 9606 - DNA, 22 bp, synthetic construct
  misc_feature 1..22: note = chemically synthesized
  source 1..22: mol_type = other DNA
tgcctcctcaggcttcggtgcc

SEQ ID NO: 9607 - DNA, 22 bp, synthetic construct
  misc_feature 1..22: note = chemically synthesized
  source 1..22: mol_type = other DNA
ctcaggcttcggtgccctgtct

SEQ ID NO: 9608 - DNA, 22 bp, synthetic construct
  misc_feature 1..22: note = chemically synthesized
  source 1..22: mol_type = other DNA
aggcttcggtgccctgtcttta

SEQ ID NO: 9609 - DNA, 22 bp, synthetic construct
  misc_feature 1..22: note = chemically synthesized
  source 1..22: mol_type = other DNA
cggtgccctgtctttaccctcc

SEQ ID NO: 9610 - DNA, 22 bp, synthetic construct
  misc_feature 1..22: note = chemically synthesized
  source 1..22: mol_type = other DNA
ggtgccctgtctttaccctccg

SEQ ID NO: 9611 - DNA, 22 bp, synthetic construct
  misc_feature 1..22: note = chemically synthesized
  source 1..22: mol_type = other DNA
tctttaccctccggctccccac

SEQ ID NO: 9612 - DNA, 22 bp, synthetic construct
  misc_feature 1..22: note = chemically synthesized
  source 1..22: mol_type = other DNA
taccctccggctccccacaccc

SEQ ID NO: 9613 - DNA, 22 bp, synthetic construct
  misc_feature 1..22: note = chemically synthesized
  source 1..22: mol_type = other DNA
accctccggctccccacaccca

SEQ ID NO: 9614 - DNA, 22 bp, synthetic construct
  misc_feature 1..22: note = chemically synthesized
  source 1..22: mol_type = other DNA
ccctccggctccccacacccag

SEQ ID NO: 9615 - DNA, 22 bp, synthetic construct
  misc_feature 1..22: note = chemically synthesized
  source 1..22: mol_type = other DNA
cggctccccacacccaggctgc

SEQ ID NO: 9616 - DNA, 22 bp, synthetic construct
  misc_feature 1..22: note = chemically synthesized
  source 1..22: mol_type = other DNA
cccacacccaggctgccggctc

SEQ ID NO: 9617 - DNA, 22 bp, synthetic construct
  misc_feature 1..22: note = chemically synthesized
  source 1..22: mol_type = other DNA
ccggctcctgatgcccctctcc

SEQ ID NO: 9618 - DNA, 22 bp, synthetic construct
  misc_feature 1..22: note = chemically synthesized
  source 1..22: mol_type = other DNA
ctgatgcccctctcccacaggg

SEQ ID NO: 9619 - DNA, 22 bp, synthetic construct
  misc_feature 1..22: note = chemically synthesized
  source 1..22: mol_type = other DNA
atgcccctctcccacagggcca

SEQ ID NO: 9620 - DNA, 22 bp, synthetic construct
  misc_feature 1..22: note = chemically synthesized
  source 1..22: mol_type = other DNA
tcccacagggccacctcctgcc

SEQ ID NO: 9621 - DNA, 22 bp, synthetic construct
  misc_feature 1..22: note = chemically synthesized
  source 1..22: mol_type = other DNA
ccacagggccacctcctgccca

SEQ ID NO: 9622 - DNA, 22 bp, synthetic construct
  misc_feature 1..22: note = chemically synthesized
  source 1..22: mol_type = other DNA
ctgcccagcccctggcacagcg

SEQ ID NO: 9623 - DNA, 22 bp, synthetic construct
  misc_feature 1..22: note = chemically synthesized
  source 1..22: mol_type = other DNA
cccagcccctggcacagcgtct

SEQ ID NO: 9624 - DNA, 22 bp, synthetic construct
  misc_feature 1..22: note = chemically synthesized
  source 1..22: mol_type = other DNA
gcacagcgtctctgctccatgg

SEQ ID NO: 9625 - DNA, 22 bp, synthetic construct
  misc_feature 1..22: note = chemically synthesized
  source 1..22: mol_type = other DNA
tgctccatggtctgcttcagtc

SEQ ID NO: 9626 - DNA, 22 bp, synthetic construct
  misc_feature 1..22: note = chemically synthesized
  source 1..22: mol_type = other DNA
ctccatggtctgcttcagtctg

SEQ ID NO: 9627 - DNA, 22 bp, synthetic construct
  misc_feature 1..22: note = chemically synthesized
  source 1..22: mol_type = other DNA
catggtctgcttcagtctgctt

SEQ ID NO: 9628 - DNA, 22 bp, synthetic construct
  misc_feature 1..22: note = chemically synthesized
  source 1..22: mol_type = other DNA
cttcagtctgcttgccctgagc

SEQ ID NO: 9629 - DNA, 22 bp, synthetic construct
  misc_feature 1..22: note = chemically synthesized
  source 1..22: mol_type = other DNA
cagtctgcttgccctgagcttc

SEQ ID NO: 9630 - DNA, 22 bp, synthetic construct
  misc_feature 1..22: note = chemically synthesized
  source 1..22: mol_type = other DNA
agtctgcttgccctgagcttca

SEQ ID NO: 9631 - DNA, 22 bp, synthetic construct
  misc_feature 1..22: note = chemically synthesized
  source 1..22: mol_type = other DNA
cttgccctgagcttcaacatcc

SEQ ID NO: 9632 - DNA, 22 bp, synthetic construct
  misc_feature 1..22: note = chemically synthesized
  source 1..22: mol_type = other DNA
gccctgagcttcaacatcctgc

SEQ ID NO: 9633 - DNA, 22 bp, synthetic construct
  misc_feature 1..22: note = chemically synthesized
  source 1..22: mol_type = other DNA
ccctgagcttcaacatcctgct

SEQ ID NO: 9634 - DNA, 22 bp, synthetic construct
  misc_feature 1..22: note = chemically synthesized
  source 1..22: mol_type = other DNA
agcttcaacatcctgctgctgg

SEQ ID NO: 9635 - DNA, 22 bp, synthetic construct
  misc_feature 1..22: note = chemically synthesized
  source 1..22: mol_type = other DNA
caacatcctgctgctggtggtc

SEQ ID NO: 9636 - DNA, 22 bp, synthetic construct
  misc_feature 1..22: note = chemically synthesized
  source 1..22: mol_type = other DNA
aacatcctgctgctggtggtca

SEQ ID NO: 9637 - DNA, 22 bp, synthetic construct
  misc_feature 1..22: note = chemically synthesized
  source 1..22: mol_type = other DNA
ctgctggtggtcatctgtgtga

SEQ ID NO: 9638 - DNA, 22 bp, synthetic construct
  misc_feature 1..22: note = chemically synthesized
  source 1..22: mol_type = other DNA
ctggtggtcatctgtgtgactg

SEQ ID NO: 9639 - DNA, 22 bp, synthetic construct
  misc_feature 1..22: note = chemically synthesized
  source 1..22: mol_type = other DNA
gtggtcatctgtgtgactgggt

SEQ ID NO: 9640 - DNA, 22 bp, synthetic construct
  misc_feature 1..22: note = chemically synthesized
  source 1..22: mol_type = other DNA
tgtgactgggtcccaaagtgag

SEQ ID NO: 9641 - DNA, 22 bp, synthetic construct
  misc_feature 1..22: note = chemically synthesized
  source 1..22: mol_type = other DNA
ggtcccaaagtgagggtcacgg

SEQ ID NO: 9642 - DNA, 20 bp, synthetic construct
  misc_feature 1..20: note = chemically synthesized
  source 1..20: mol_type = other DNA
cttcagatagattatatctg

SEQ ID NO: 9643 - DNA, 20 bp, synthetic construct
  misc_feature 1..20: note = chemically synthesized
  source 1..20: mol_type = other DNA
gatagattatatctggagtg

SEQ ID NO: 9644 - DNA, 20 bp, synthetic construct
  misc_feature 1..20: note = chemically synthesized
  source 1..20: mol_type = other DNA
aatcctgccacctatgtatc

SEQ ID NO: 9645 - DNA, 20 bp, synthetic construct
  misc_feature 1..20: note = chemically synthesized
  source 1..20: mol_type = other DNA
tgccacctatgtatctggca

SEQ ID NO: 9646 - DNA, 20 bp, synthetic construct
  misc_feature 1..20: note = chemically synthesized
  source 1..20: mol_type = other DNA
ctatgtatctggcatagtgt

SEQ ID NO: 9647 - DNA, 20 bp, synthetic construct
  misc_feature 1..20: note = chemically synthesized
  source 1..20: mol_type = other DNA
gagtcctcataaatgcttac

SEQ ID NO: 9648 - DNA, 20 bp, synthetic construct
  misc_feature 1..20: note = chemically synthesized
  source 1..20: mol_type = other DNA
cataaatgcttactggtttg

SEQ ID NO: 9649 - DNA, 20 bp, synthetic construct
  misc_feature 1..20: note = chemically synthesized
  source 1..20: mol_type = other DNA
ataaatgcttactggtttga

SEQ ID NO: 9650 - DNA, 20 bp, synthetic construct
  misc_feature 1..20: note = chemically synthesized
  source 1..20: mol_type = other DNA
taaatgcttactggtttgaa

SEQ ID NO: 9651 - DNA, 20 bp, synthetic construct
  misc_feature 1..20: note = chemically synthesized
  source 1..20: mol_type = other DNA
tggtttgaagggcaacaaaa

SEQ ID NO: 9652 - DNA, 20 bp, synthetic construct
  misc_feature 1..20: note = chemically synthesized
  source 1..20: mol_type = other DNA
aagggcaacaaaatagtgaa

SEQ ID NO: 9653 - DNA, 20 bp, synthetic construct
  misc_feature 1..20: note = chemically synthesized
  source 1..20: mol_type = other DNA
gggcaacaaaatagtgaaca

SEQ ID NO: 9654 - DNA, 20 bp, synthetic construct
  misc_feature 1..20: note = chemically synthesized
  source 1..20: mol_type = other DNA
acagagtgaaaatccccact

SEQ ID NO: 9655 - DNA, 20 bp, synthetic construct
  misc_feature 1..20: note = chemically synthesized
  source 1..20: mol_type = other DNA
gaaaatccccactaagatcc

SEQ ID NO: 9656 - DNA, 20 bp, synthetic construct
  misc_feature 1..20: note = chemically synthesized
  source 1..20: mol_type = other DNA
aaaatccccactaagatcct

SEQ ID NO: 9657 - DNA, 20 bp, synthetic construct
  misc_feature 1..20: note = chemically synthesized
  source 1..20: mol_type = other DNA
ccccactaagatcctgggtc

SEQ ID NO: 9658 - DNA, 20 bp, synthetic construct
  misc_feature 1..20: note = chemically synthesized
  source 1..20: mol_type = other DNA
taagatcctgggtccagaaa

SEQ ID NO: 9659 - DNA, 20 bp, synthetic construct
  misc_feature 1..20: note = chemically synthesized
  source 1..20: mol_type = other DNA
atcctgggtccagaaaaaga

SEQ ID NO: 9660 - DNA, 20 bp, synthetic construct
  misc_feature 1..20: note = chemically synthesized
  source 1..20: mol_type = other DNA
tcctgggtccagaaaaagat

SEQ ID NO: 9661 - DNA, 20 bp, synthetic construct
  misc_feature 1..20: note = chemically synthesized
  source 1..20: mol_type = other DNA
aaaaagatgggaaacctgtt

SEQ ID NO: 9662 - DNA, 20 bp, synthetic construct
  misc_feature 1..20: note = chemically synthesized
  source 1..20: mol_type = other DNA
aacctgtttagctcacccgt

SEQ ID NO: 9663 - DNA, 20 bp, synthetic construct
  misc_feature 1..20: note = chemically synthesized
  source 1..20: mol_type = other DNA
ttagctcacccgtgagccca

SEQ ID NO: 9664 - DNA, 20 bp, synthetic construct
  misc_feature 1..20: note = chemically synthesized
  source 1..20: mol_type = other DNA
agcccatagttaaaactctt

SEQ ID NO: 9665 - DNA, 20 bp, synthetic construct
  misc_feature 1..20: note = chemically synthesized
  source 1..20: mol_type = other DNA
agttaaaactctttagacaa

SEQ ID NO: 9666 - DNA, 20 bp, synthetic construct
  misc_feature 1..20: note = chemically synthesized
  source 1..20: mol_type = other DNA
gttaaaactctttagacaac

SEQ ID NO: 9667 - DNA, 20 bp, synthetic construct
  misc_feature 1..20: note = chemically synthesized
  source 1..20: mol_type = other DNA
caacaggttgtttccgttta

SEQ ID NO: 9668 - DNA, 20 bp, synthetic construct
  misc_feature 1..20: note = chemically synthesized
  source 1..20: mol_type = other DNA
acaggttgtttccgtttaca

SEQ ID NO: 9669 - DNA, 20 bp, synthetic construct
  misc_feature 1..20: note = chemically synthesized
  source 1..20: mol_type = other DNA
tttacagagaacaataatat

SEQ ID NO: 9670 - DNA, 20 bp, synthetic construct
  misc_feature 1..20: note = chemically synthesized
  source 1..20: mol_type = other DNA
ttacagagaacaataatatt

SEQ ID NO: 9671 - DNA, 20 bp, synthetic construct
  misc_feature 1..20: note = chemically synthesized
  source 1..20: mol_type = other DNA
cagagaacaataatattggg

SEQ ID NO: 9672 - DNA, 20 bp, synthetic construct
  misc_feature 1..20: note = chemically synthesized
  source 1..20: mol_type = other DNA
gaacaataatattgggtggt

SEQ ID NO: 9673 - DNA, 20 bp, synthetic construct
  misc_feature 1..20: note = chemically synthesized
  source 1..20: mol_type = other DNA
ttgggtggtgagcatctgtg

SEQ ID NO: 9674 - DNA, 20 bp, synthetic construct
  misc_feature 1..20: note = chemically synthesized
  source 1..20: mol_type = other DNA
tgggtggtgagcatctgtgt

SEQ ID NO: 9675 - DNA, 20 bp, synthetic construct
  misc_feature 1..20: note = chemically synthesized
  source 1..20: mol_type = other DNA
gggtggtgagcatctgtgtg

SEQ ID NO: 9676 - DNA, 20 bp, synthetic construct
  misc_feature 1..20: note = chemically synthesized
  source 1..20: mol_type = other DNA
ggtggtgagcatctgtgtgg

SEQ ID NO: 9677 - DNA, 20 bp, synthetic construct
  misc_feature 1..20: note = chemically synthesized
  source 1..20: mol_type = other DNA
gtgagcatctgtgtgggggt

SEQ ID NO: 9678 - DNA, 20 bp, synthetic construct
  misc_feature 1..20: note = chemically synthesized
  source 1..20: mol_type = other DNA
tgagcatctgtgtgggggtt

SEQ ID NO: 9679 - DNA, 20 bp, synthetic construct
  misc_feature 1..20: note = chemically synthesized
  source 1..20: mol_type = other DNA
gagcatctgtgtgggggttg

SEQ ID NO: 9680 - DNA, 20 bp, synthetic construct
  misc_feature 1..20: note = chemically synthesized
  source 1..20: mol_type = other DNA
catctgtgtgggggttgggg

SEQ ID NO: 9681 - DNA, 20 bp, synthetic construct
  misc_feature 1..20: note = chemically synthesized
  source 1..20: mol_type = other DNA
atctgtgtgggggttggggt

SEQ ID NO: 9682 - DNA, 20 bp, synthetic construct
  misc_feature 1..20: note = chemically synthesized
  source 1..20: mol_type = other DNA
gtgtgggggttggggtggga

SEQ ID NO: 9683 - DNA, 20 bp, synthetic construct
  misc_feature 1..20: note = chemically synthesized
  source 1..20: mol_type = other DNA
tgtgggggttggggtgggat

SEQ ID NO: 9684 - DNA, 20 bp, synthetic construct
  misc_feature 1..20: note = chemically synthesized
  source 1..20: mol_type = other DNA
gtgggggttggggtgggata

SEQ ID NO: 9685 - DNA, 20 bp, synthetic construct
  misc_feature 1..20: note = chemically synthesized
  source 1..20: mol_type = other DNA
tgggggttggggtgggatag

SEQ ID NO: 9686 - DNA, 20 bp, synthetic construct
  misc_feature 1..20: note = chemically synthesized
  source 1..20: mol_type = other DNA
ttggggtgggataggggata

SEQ ID NO: 9687 - DNA, 20 bp, synthetic construct
  misc_feature 1..20: note = chemically synthesized
  source 1..20: mol_type = other DNA
tggggtgggataggggatac

SEQ ID NO: 9688 - DNA, 20 bp, synthetic construct
  misc_feature 1..20: note = chemically synthesized
  source 1..20: mol_type = other DNA
ggggtgggataggggatacg

SEQ ID NO: 9689 - DNA, 20 bp, synthetic construct
  misc_feature 1..20: note = chemically synthesized
  source 1..20: mol_type = other DNA
ggtgggataggggatacggg

SEQ ID NO: 9690 - DNA, 20 bp, synthetic construct
  misc_feature 1..20: note = chemically synthesized
  source 1..20: mol_type = other DNA
tgggataggggatacgggga

SEQ ID NO: 9691 - DNA, 20 bp, synthetic construct
  misc_feature 1..20: note = chemically synthesized
  source 1..20: mol_type = other DNA
gataggggatacggggagag

SEQ ID NO: 9692 - DNA, 20 bp, synthetic construct
  misc_feature 1..20: note = chemically synthesized
  source 1..20: mol_type = other DNA
taggggatacggggagagtg

SEQ ID NO: 9693 - DNA, 20 bp, synthetic construct
  misc_feature 1..20: note = chemically synthesized
  source 1..20: mol_type = other DNA
atacggggagagtggagaaa

SEQ ID NO: 9694 - DNA, 20 bp, synthetic construct
  misc_feature 1..20: note = chemically synthesized
  source 1..20: mol_type = other DNA
tacggggagagtggagaaaa

SEQ ID NO: 9695 - DNA, 20 bp, synthetic construct
  misc_feature 1..20: note = chemically synthesized
  source 1..20: mol_type = other DNA
acggggagagtggagaaaaa

SEQ ID NO: 9696 - DNA, 20 bp, synthetic construct
  misc_feature 1..20: note = chemically synthesized
  source 1..20: mol_type = other DNA
cggggagagtggagaaaaag

SEQ ID NO: 9697 - DNA, 20 bp, synthetic construct
  misc_feature 1..20: note = chemically synthesized
  source 1..20: mol_type = other DNA
gagtggagaaaaaggggaca

SEQ ID NO: 9698 - DNA, 20 bp, synthetic construct
  misc_feature 1..20: note = chemically synthesized
  source 1..20: mol_type = other DNA
agtggagaaaaaggggacac

SEQ ID NO: 9699 - DNA, 20 bp, synthetic construct
  misc_feature 1..20: note = chemically synthesized
  source 1..20: mol_type = other DNA
gtggagaaaaaggggacaca

SEQ ID NO: 9700 - DNA, 20 bp, synthetic construct
  misc_feature 1..20: note = chemically synthesized
  source 1..20: mol_type = other DNA
ggggacacagggttaatgtg

SEQ ID NO: 9701 - DNA, 20 bp, synthetic construct
  misc_feature 1..20: note = chemically synthesized
  source 1..20: mol_type = other DNA
cacagggttaatgtgaagtc

SEQ ID NO: 9702 - DNA, 20 bp, synthetic construct
  misc_feature 1..20: note = chemically synthesized
  source 1..20: mol_type = other DNA
acagggttaatgtgaagtcc

SEQ ID NO: 9703 - DNA, 20 bp, synthetic construct
  misc_feature 1..20: note = chemically synthesized
  source 1..20: mol_type = other DNA
aggatccccctctacattta

SEQ ID NO: 9704 - DNA, 20 bp, synthetic construct
  misc_feature 1..20: note = chemically synthesized
  source 1..20: mol_type = other DNA
tccccctctacatttaaagt

SEQ ID NO: 9705 - DNA, 20 bp, synthetic construct
  misc_feature 1..20: note = chemically synthesized
  source 1..20: mol_type = other DNA
tctacatttaaagttggttt

SEQ ID NO: 9706 - DNA, 20 bp, synthetic construct
  misc_feature 1..20: note = chemically synthesized
  source 1..20: mol_type = other DNA
catttaaagttggtttaagt

SEQ ID NO: 9707 - DNA, 20 bp, synthetic construct
  misc_feature 1..20: note = chemically synthesized
  source 1..20: mol_type = other DNA
tttaagttggctttaattaa

SEQ ID NO: 9708 - DNA, 20 bp, synthetic construct
  misc_feature 1..20: note = chemically synthesized
  source 1..20: mol_type = other DNA
tttaattaatagcaactctt

SEQ ID NO: 9709 - DNA, 20 bp, synthetic construct
  misc_feature 1..20: note = chemically synthesized
  source 1..20: mol_type = other DNA
atagcaactcttaagataat

SEQ ID NO: 9710 - DNA, 20 bp, synthetic construct
  misc_feature 1..20: note = chemically synthesized
  source 1..20: mol_type = other DNA
tcagaattttcttaaccttt

SEQ ID NO: 9711 - DNA, 20 bp, synthetic construct
  misc_feature 1..20: note = chemically synthesized
  source 1..20: mol_type = other DNA
cttttagccttactgttgaa

SEQ ID NO: 9712 - DNA, 20 bp, synthetic construct
  misc_feature 1..20: note = chemically synthesized
  source 1..20: mol_type = other DNA
tgtacaaatcatttgcttct

SEQ ID NO: 9713 - DNA, 20 bp, synthetic construct
  misc_feature 1..20: note = chemically synthesized
  source 1..20: mol_type = other DNA
caaatcatttgcttcttgga

SEQ ID NO: 9714 - DNA, 20 bp, synthetic construct
  misc_feature 1..20: note = chemically synthesized
  source 1..20: mol_type = other DNA
taatttcttttactaaaatg

SEQ ID NO: 9715 - DNA, 20 bp, synthetic construct
  misc_feature 1..20: note = chemically synthesized
  source 1..20: mol_type = other DNA
aatttcttttactaaaatgt

SEQ ID NO: 9716 - DNA, 20 bp, synthetic construct
  misc_feature 1..20: note = chemically synthesized
  source 1..20: mol_type = other DNA
ctaaaatgtgggcttttgac

SEQ ID NO: 9717 - DNA, 20 bp, synthetic construct
  misc_feature 1..20: note = chemically synthesized
  source 1..20: mol_type = other DNA
gatgaatgtaaatgttcttc

SEQ ID NO: 9718 - DNA, 20 bp, synthetic construct
  misc_feature 1..20: note = chemically synthesized
  source 1..20: mol_type = other DNA
ttattctttatattttctaa

SEQ ID NO: 9719 - DNA, 20 bp, synthetic construct
  misc_feature 1..20: note = chemically synthesized
  source 1..20: mol_type = other DNA
attttctaacagattctgtg

SEQ ID NO: 9720 - DNA, 20 bp, synthetic construct
  misc_feature 1..20: note = chemically synthesized
  source 1..20: mol_type = other DNA
ttctaacagattctgtgtag

SEQ ID NO: 9721 - DNA, 20 bp, synthetic construct
  misc_feature 1..20: note = chemically synthesized
  source 1..20: mol_type = other DNA
tctaacagattctgtgtagt

SEQ ID NO: 9722 - DNA, 20 bp, synthetic construct
  misc_feature 1..20: note = chemically synthesized
  source 1..20: mol_type = other DNA
cagattctgtgtagtgggat

SEQ ID NO: 9723 - DNA, 20 bp, synthetic construct
  misc_feature 1..20: note = chemically synthesized
  source 1..20: mol_type = other DNA
attctgtgtagtgggatgag

SEQ ID NO: 9724 - DNA, 20 bp, synthetic construct
  misc_feature 1..20: note = chemically synthesized
  source 1..20: mol_type = other DNA
tctgtgtagtgggatgagca

SEQ ID NO: 9725 - DNA, 20 bp, synthetic construct
  misc_feature 1..20: note = chemically synthesized
  source 1..20: mol_type = other DNA
agaacaaaaacaaaataatc

SEQ ID NO: 9726 - DNA, 20 bp, synthetic construct
  misc_feature 1..20: note = chemically synthesized
  source 1..20: mol_type = other DNA
caaaaacaaaataatccagt

SEQ ID NO: 9727 - DNA, 20 bp, synthetic construct
  misc_feature 1..20: note = chemically synthesized
  source 1..20: mol_type = other DNA
acaaaataatccagtgagaa

SEQ ID NO: 9728 - DNA, 20 bp, synthetic construct
  misc_feature 1..20: note = chemically synthesized
  source 1..20: mol_type = other DNA
aaagcccgtaaataaacctt

SEQ ID NO: 9729 - DNA, 20 bp, synthetic construct
  misc_feature 1..20: note = chemically synthesized
  source 1..20: mol_type = other DNA
ccgtaaataaaccttcagac

SEQ ID NO: 9730 - DNA, 20 bp, synthetic construct
  misc_feature 1..20: note = chemically synthesized
  source 1..20: mol_type = other DNA
gtaaataaaccttcagacca

SEQ ID NO: 9731 - DNA, 20 bp, synthetic construct
  misc_feature 1..20: note = chemically synthesized
  source 1..20: mol_type = other DNA
cagaccagagatctattctc

SEQ ID NO: 9732 - DNA, 20 bp, synthetic construct
  misc_feature 1..20: note = chemically synthesized
  source 1..20: mol_type = other DNA
tctattctctagcttatttt

SEQ ID NO: 9733 - DNA, 20 bp, synthetic construct
  misc_feature 1..20: note = chemically synthesized
  source 1..20: mol_type = other DNA
tattttaagctcaacttaaa

SEQ ID NO: 9734 - DNA, 20 bp, synthetic construct
  misc_feature 1..20: note = chemically synthesized
  source 1..20: mol_type = other DNA
tttaagctcaacttaaaaag

SEQ ID NO: 9735 - DNA, 20 bp, synthetic construct
  misc_feature 1..20: note = chemically synthesized
  source 1..20: mol_type = other DNA
ttaactccaccctccttcaa

SEQ ID NO: 9736 - DNA, 20 bp, synthetic construct
  misc_feature 1..20: note = chemically synthesized
  source 1..20: mol_type = other DNA
ccaccctccttcaaaagaaa

SEQ ID NO: 9737 - DNA, 20 bp, synthetic construct
  misc_feature 1..20: note = chemically synthesized
  source 1..20: mol_type = other DNA
gtctatatgattgatttgca

SEQ ID NO: 9738 - DNA, 20 bp, synthetic construct
  misc_feature 1..20: note = chemically synthesized
  source 1..20: mol_type = other DNA
attgatttgcacagctcatc

SEQ ID NO: 9739 - DNA, 20 bp, synthetic construct
  misc_feature 1..20: note = chemically synthesized
  source 1..20: mol_type = other DNA
atttgcacagctcatctggc

SEQ ID NO: 9740 - DNA, 20 bp, synthetic construct
  misc_feature 1..20: note = chemically synthesized
  source 1..20: mol_type = other DNA
tgcacagctcatctggccag

SEQ ID NO: 9741 - DNA, 20 bp, synthetic construct
  misc_feature 1..20: note = chemically synthesized
  source 1..20: mol_type = other DNA
cacagctcatctggccagaa

SEQ ID NO: 9742 - DNA, 20 bp, synthetic construct
  misc_feature 1..20: note = chemically synthesized
  source 1..20: mol_type = other DNA
ctcatctggccagaagagct

SEQ ID NO: 9743 - DNA, 20 bp, synthetic construct
  misc_feature 1..20: note = chemically synthesized
  source 1..20: mol_type = other DNA
tgagacatccgttcccctac

SEQ ID NO: 9744 - DNA, 20 bp, synthetic construct
  misc_feature 1..20: note = chemically synthesized
  source 1..20: mol_type = other DNA
gagagtttcttgtaggggaa

SEQ ID NO: 9745 - DNA, 20 bp, synthetic construct
  misc_feature 1..20: note = chemically synthesized
  source 1..20: mol_type = other DNA
ttgtaggggaacggatgtct

SEQ ID NO: 9746 - DNA, 20 bp, synthetic construct
  misc_feature 1..20: note = chemically synthesized
  source 1..20: mol_type = other DNA
aacggatgtctcagctcttc

SEQ ID NO: 9747 - DNA, 20 bp, synthetic construct
  misc_feature 1..20: note = chemically synthesized
  source 1..20: mol_type = other DNA
gatgtctcagctcttctggc

SEQ ID NO: 9748 - DNA, 20 bp, synthetic construct
  misc_feature 1..20: note = chemically synthesized
  source 1..20: mol_type = other DNA
ctcagctcttctggccagat

SEQ ID NO: 9749 - DNA, 20 bp, synthetic construct
  misc_feature 1..20: note = chemically synthesized
  source 1..20: mol_type = other DNA
agctgtgcaaatcaatcata

SEQ ID NO: 9750 - DNA, 20 bp, synthetic construct
  misc_feature 1..20: note = chemically synthesized
  source 1..20: mol_type = other DNA
gtgcaaatcaatcatataga

SEQ ID NO: 9751 - DNA, 20 bp, synthetic construct
  misc_feature 1..20: note = chemically synthesized
  source 1..20: mol_type = other DNA
caatcatatagacagtataa

SEQ ID NO: 9752 - DNA, 20 bp, synthetic construct
  misc_feature 1..20: note = chemically synthesized
  source 1..20: mol_type = other DNA
tcatatagacagtataaaag

SEQ ID NO: 9753 - DNA, 20 bp, synthetic construct
  misc_feature 1..20: note = chemically synthesized
  source 1..20: mol_type = other DNA
catatagacagtataaaagt

SEQ ID NO: 9754 - DNA, 20 bp, synthetic construct
  misc_feature 1..20: note = chemically synthesized
  source 1..20: mol_type = other DNA
aggaaatgctgtttcttttg

SEQ ID NO: 9755 - DNA, 20 bp, synthetic construct
  misc_feature 1..20: note = chemically synthesized
  source 1..20: mol_type = other DNA
ggaaatgctgtttcttttga

SEQ ID NO: 9756 - DNA, 20 bp, synthetic construct
  misc_feature 1..20: note = chemically synthesized
  source 1..20: mol_type = other DNA
aaatgctgtttcttttgaag

SEQ ID NO: 9757 - DNA, 20 bp, synthetic construct
  misc_feature 1..20: note = chemically synthesized
  source 1..20: mol_type = other DNA
aatgctgtttcttttgaagg

SEQ ID NO: 9758 - DNA, 20 bp, synthetic construct
  misc_feature 1..20: note = chemically synthesized
  source 1..20: mol_type = other DNA
atgctgtttcttttgaagga

SEQ ID NO: 9759 - DNA, 20 bp, synthetic construct
  misc_feature 1..20: note = chemically synthesized
  source 1..20: mol_type = other DNA
ctgtttcttttgaaggaggg

SEQ ID NO: 9760 - DNA, 20 bp, synthetic construct
  misc_feature 1..20: note = chemically synthesized
  source 1..20: mol_type = other DNA
gtttcttttgaaggagggtg

SEQ ID NO: 9761 - DNA, 20 bp, synthetic construct
  misc_feature 1..20: note = chemically synthesized
  source 1..20: mol_type = other DNA
gagggtggagttaaatcatt

SEQ ID NO: 9762 - DNA, 20 bp, synthetic construct
  misc_feature 1..20: note = chemically synthesized
  source 1..20: mol_type = other DNA
ttaaatcattaagtgtattg

SEQ ID NO: 9763 - DNA, 20 bp, synthetic construct
  misc_feature 1..20: note = chemically synthesized
  source 1..20: mol_type = other DNA
taaatcattaagtgtattga

SEQ ID NO: 9764 - DNA, 20 bp, synthetic construct
  misc_feature 1..20: note = chemically synthesized
  source 1..20: mol_type = other DNA
ttaagtgtattgaaggcgaa

SEQ ID NO: 9765 - DNA, 20 bp, synthetic construct
  misc_feature 1..20: note = chemically synthesized
  source 1..20: mol_type = other DNA
gtattgaaggcgaaaagaat

SEQ ID NO: 9766 - DNA, 20 bp, synthetic construct
  misc_feature 1..20: note = chemically synthesized
  source 1..20: mol_type = other DNA
attgaaggcgaaaagaatca

SEQ ID NO: 9767 - DNA, 20 bp, synthetic construct
  misc_feature 1..20: note = chemically synthesized
  source 1..20: mol_type = other DNA
aggcgaaaagaatcagagaa

SEQ ID NO: 9768 - DNA, 20 bp, synthetic construct
  misc_feature 1..20: note = chemically synthesized
  source 1..20: mol_type = other DNA
agagaacagttcttcttttt

SEQ ID NO: 9769 - DNA, 20 bp, synthetic construct
  misc_feature 1..20: note = chemically synthesized
  source 1..20: mol_type = other DNA
acagttcttctttttaagtt

SEQ ID NO: 9770 - DNA, 20 bp, synthetic construct
  misc_feature 1..20: note = chemically synthesized
  source 1..20: mol_type = other DNA
ttttaagttgagcttaaaat

SEQ ID NO: 9771 - DNA, 20 bp, synthetic construct
  misc_feature 1..20: note = chemically synthesized
  source 1..20: mol_type = other DNA
aagttgagcttaaaataagc

SEQ ID NO: 9772 - DNA, 20 bp, synthetic construct
  misc_feature 1..20: note = chemically synthesized
  source 1..20: mol_type = other DNA
gttgagcttaaaataagcta

SEQ ID NO: 9773 - DNA, 20 bp, synthetic construct
  misc_feature 1..20: note = chemically synthesized
  source 1..20: mol_type = other DNA
gcttaaaataagctagagaa

SEQ ID NO: 9774 - DNA, 20 bp, synthetic construct
  misc_feature 1..20: note = chemically synthesized
  source 1..20: mol_type = other DNA
taagctagagaatagatctc

SEQ ID NO: 9775 - DNA, 20 bp, synthetic construct
  misc_feature 1..20: note = chemically synthesized
  source 1..20: mol_type = other DNA
gagaatagatctctggtctg

SEQ ID NO: 9776 - DNA, 20 bp, synthetic construct
  misc_feature 1..20: note = chemically synthesized
  source 1..20: mol_type = other DNA
agaatagatctctggtctga

SEQ ID NO: 9777 - DNA, 20 bp, synthetic construct
  misc_feature 1..20: note = chemically synthesized
  source 1..20: mol_type = other DNA
ctggtctgaaggtttattta

SEQ ID NO: 9778 - DNA, 20 bp, synthetic construct
  misc_feature 1..20: note = chemically synthesized
  source 1..20: mol_type = other DNA
tggtctgaaggtttatttac

SEQ ID NO: 9779 - DNA, 20 bp, synthetic construct
  misc_feature 1..20: note = chemically synthesized
  source 1..20: mol_type = other DNA
tatttacgggcttttctcac

SEQ ID NO: 9780 - DNA, 20 bp, synthetic construct
  misc_feature 1..20: note = chemically synthesized
  source 1..20: mol_type = other DNA
tctctgctcatcccactaca

SEQ ID NO: 9781 - DNA, 20 bp, synthetic construct
  misc_feature 1..20: note = chemically synthesized
  source 1..20: mol_type = other DNA
tcccactacacagaatctgt

SEQ ID NO: 9782 - DNA, 20 bp, synthetic construct
  misc_feature 1..20: note = chemically synthesized
  source 1..20: mol_type = other DNA
agaatctgttagaaaatata

SEQ ID NO: 9783 - DNA, 20 bp, synthetic construct
  misc_feature 1..20: note = chemically synthesized
  source 1..20: mol_type = other DNA
gttagaaaatataaagaata

SEQ ID NO: 9784 - DNA, 20 bp, synthetic construct
  misc_feature 1..20: note = chemically synthesized
  source 1..20: mol_type = other DNA
ttagaaaatataaagaataa

SEQ ID NO: 9785 - DNA, 20 bp, synthetic construct
  misc_feature 1..20: note = chemically synthesized
  source 1..20: mol_type = other DNA
atataaagaataaaggatat

SEQ ID NO: 9786 - DNA, 20 bp, synthetic construct
  misc_feature 1..20: note = chemically synthesized
  source 1..20: mol_type = other DNA
ataaagaataaaggatatca

SEQ ID NO: 9787 - DNA, 20 bp, synthetic construct
  misc_feature 1..20: note = chemically synthesized
  source 1..20: mol_type = other DNA
agaataaaggatatcagagc

SEQ ID NO: 9788 - DNA, 20 bp, synthetic construct
  misc_feature 1..20: note = chemically synthesized
  source 1..20: mol_type = other DNA
ataaaggatatcagagctag

SEQ ID NO: 9789 - DNA, 20 bp, synthetic construct
  misc_feature 1..20: note = chemically synthesized
  source 1..20: mol_type = other DNA
gaagaacatttacattcatc

SEQ ID NO: 9790 - DNA, 20 bp, synthetic construct
  misc_feature 1..20: note = chemically synthesized
  source 1..20: mol_type = other DNA
atttacattcatctagtcaa

SEQ ID NO: 9791 - DNA, 20 bp, synthetic construct
  misc_feature 1..20: note = chemically synthesized
  source 1..20: mol_type = other DNA
ctagtcaaaagcccacattt

SEQ ID NO: 9792 - DNA, 20 bp, synthetic construct
  misc_feature 1..20: note = chemically synthesized
  source 1..20: mol_type = other DNA
aaaagcccacattttagtaa

SEQ ID NO: 9793 - DNA, 20 bp, synthetic construct
  misc_feature 1..20: note = chemically synthesized
  source 1..20: mol_type = other DNA
agtaaaagaaattactatcc

SEQ ID NO: 9794 - DNA, 20 bp, synthetic construct
  misc_feature 1..20: note = chemically synthesized
  source 1..20: mol_type = other DNA
aaaagaaattactatccaag

SEQ ID NO: 9795 - DNA, 20 bp, synthetic construct
  misc_feature 1..20: note = chemically synthesized
  source 1..20: mol_type = other DNA
aagaagcaaatgatttgtac

SEQ ID NO: 9796 - DNA, 20 bp, synthetic construct
  misc_feature 1..20: note = chemically synthesized
  source 1..20: mol_type = other DNA
aaatgatttgtacaagatca

SEQ ID NO: 9797 - DNA, 20 bp, synthetic construct
  misc_feature 1..20: note = chemically synthesized
  source 1..20: mol_type = other DNA
aatgatttgtacaagatcac

SEQ ID NO: 9798 - DNA, 20 bp, synthetic construct
  misc_feature 1..20: note = chemically synthesized
  source 1..20: mol_type = other DNA
atgatttgtacaagatcaca

SEQ ID NO: 9799 - DNA, 20 bp, synthetic construct
  misc_feature 1..20: note = chemically synthesized
  source 1..20: mol_type = other DNA
aagatcacagggcttttcaa

SEQ ID NO: 9800 - DNA, 20 bp, synthetic construct
  misc_feature 1..20: note = chemically synthesized
  source 1..20: mol_type = other DNA
tcacagggcttttcaacagt

SEQ ID NO: 9801 - DNA, 20 bp, synthetic construct
  misc_feature 1..20: note = chemically synthesized
  source 1..20: mol_type = other DNA
cacagggcttttcaacagta

SEQ ID NO: 9802 - DNA, 20 bp, synthetic construct
  misc_feature 1..20: note = chemically synthesized
  source 1..20: mol_type = other DNA
cttttcaacagtaaggctaa

SEQ ID NO: 9803 - DNA, 20 bp, synthetic construct
  misc_feature 1..20: note = chemically synthesized
  source 1..20: mol_type = other DNA
ttttcaacagtaaggctaaa

SEQ ID NO: 9804 - DNA, 20 bp, synthetic construct
  misc_feature 1..20: note = chemically synthesized
  source 1..20: mol_type = other DNA
aacagtaaggctaaaaggtt

SEQ ID NO: 9805 - DNA, 20 bp, synthetic construct
  misc_feature 1..20: note = chemically synthesized
  source 1..20: mol_type = other DNA
aagaaaattctgattatctt

SEQ ID NO: 9806 - DNA, 20 bp, synthetic construct
  misc_feature 1..20: note = chemically synthesized
  source 1..20: mol_type = other DNA
gaaaattctgattatcttaa

SEQ ID NO: 9807 - DNA, 20 bp, synthetic construct
  misc_feature 1..20: note = chemically synthesized
  source 1..20: mol_type = other DNA
ttaagagttgctattaatta

SEQ ID NO: 9808 - DNA, 20 bp, synthetic construct
  misc_feature 1..20: note = chemically synthesized
  source 1..20: mol_type = other DNA
acttaaaccaactttaaatg

SEQ ID NO: 9809 - DNA, 20 bp, synthetic construct
  misc_feature 1..20: note = chemically synthesized
  source 1..20: mol_type = other DNA
ttaaaccaactttaaatgta

SEQ ID NO: 9810 - DNA, 20 bp, synthetic construct
  misc_feature 1..20: note = chemically synthesized
  source 1..20: mol_type = other DNA
taaaccaactttaaatgtag

SEQ ID NO: 9811 - DNA, 20 bp, synthetic construct
  misc_feature 1..20: note = chemically synthesized
  source 1..20: mol_type = other DNA
aaaccaactttaaatgtaga

SEQ ID NO: 9812 - DNA, 20 bp, synthetic construct
  misc_feature 1..20: note = chemically synthesized
  source 1..20: mol_type = other DNA
aaccaactttaaatgtagag

SEQ ID NO: 9813 - DNA, 20 bp, synthetic construct
  misc_feature 1..20: note = chemically synthesized
  source 1..20: mol_type = other DNA
accaactttaaatgtagagg

SEQ ID NO: 9814 - DNA, 20 bp, synthetic construct
  misc_feature 1..20: note = chemically synthesized
  source 1..20: mol_type = other DNA
ttaaatgtagagggggatcc

SEQ ID NO: 9815 - DNA, 20 bp, synthetic construct
  misc_feature 1..20: note = chemically synthesized
  source 1..20: mol_type = other DNA
atcccaccccaacccccaca

SEQ ID NO: 9816 - DNA, 20 bp, synthetic construct
  misc_feature 1..20: note = chemically synthesized
  source 1..20: mol_type = other DNA
atattattgttctctgtaaa

SEQ ID NO: 9817 - DNA, 20 bp, synthetic construct
  misc_feature 1..20: note = chemically synthesized
  source 1..20: mol_type = other DNA
cggaaacaacctgttgtcta

SEQ ID NO: 9818 - DNA, 20 bp, synthetic construct
  misc_feature 1..20: note = chemically synthesized
  source 1..20: mol_type = other DNA
gaaacaacctgttgtctaaa

SEQ ID NO: 9819 - DNA, 20 bp, synthetic construct
  misc_feature 1..20: note = chemically synthesized
  source 1..20: mol_type = other DNA
tgtctaaagagttttaacta

SEQ ID NO: 9820 - DNA, 20 bp, synthetic construct
  misc_feature 1..20: note = chemically synthesized
  source 1..20: mol_type = other DNA
gtctaaagagttttaactat

SEQ ID NO: 9821 - DNA, 20 bp, synthetic construct
  misc_feature 1..20: note = chemically synthesized
  source 1..20: mol_type = other DNA
gagttttaactatgggctca

SEQ ID NO: 9822 - DNA, 20 bp, synthetic construct
  misc_feature 1..20: note = chemically synthesized
  source 1..20: mol_type = other DNA
agttttaactatgggctcac

SEQ ID NO: 9823 - DNA, 20 bp, synthetic construct
  misc_feature 1..20: note = chemically synthesized
  source 1..20: mol_type = other DNA
ttaactatgggctcacgggt

SEQ ID NO: 9824 - DNA, 20 bp, synthetic construct
  misc_feature 1..20: note = chemically synthesized
  source 1..20: mol_type = other DNA
gggctcacgggtgagctaaa

SEQ ID NO: 9825 - DNA, 20 bp, synthetic construct
  misc_feature 1..20: note = chemically synthesized
  source 1..20: mol_type = other DNA
ggctcacgggtgagctaaac

SEQ ID NO: 9826 - DNA, 20 bp, synthetic construct
  misc_feature 1..20: note = chemically synthesized
  source 1..20: mol_type = other DNA
acaggtttcccatctttttc

SEQ ID NO: 9827 - DNA, 20 bp, synthetic construct
  misc_feature 1..20: note = chemically synthesized
  source 1..20: mol_type = other DNA
ttcccatctttttctggacc

SEQ ID NO: 9828 - DNA, 20 bp, synthetic construct
  misc_feature 1..20: note = chemically synthesized
  source 1..20: mol_type = other DNA
tcccatctttttctggaccc

SEQ ID NO: 9829 - DNA, 20 bp, synthetic construct
  misc_feature 1..20: note = chemically synthesized
  source 1..20: mol_type = other DNA
tttttctggacccaggatct

SEQ ID NO: 9830 - DNA, 20 bp, synthetic construct
  misc_feature 1..20: note = chemically synthesized
  source 1..20: mol_type = other DNA
ttctggacccaggatcttag

SEQ ID NO: 9831 - DNA, 20 bp, synthetic construct
  misc_feature 1..20: note = chemically synthesized
  source 1..20: mol_type = other DNA
tctggacccaggatcttagt

SEQ ID NO: 9832 - DNA, 20 bp, synthetic construct
  misc_feature 1..20: note = chemically synthesized
  source 1..20: mol_type = other DNA
ctggacccaggatcttagtg

SEQ ID NO: 9833 - DNA, 20 bp, synthetic construct
  misc_feature 1..20: note = chemically synthesized
  source 1..20: mol_type = other DNA
tattttgttgcccttcaaac

SEQ ID NO: 9834 - DNA, 20 bp, synthetic construct
  misc_feature 1..20: note = chemically synthesized
  source 1..20: mol_type = other DNA
ttgttgcccttcaaaccagt

SEQ ID NO: 9835 - DNA, 20 bp, synthetic construct
  misc_feature 1..20: note = chemically synthesized
  source 1..20: mol_type = other DNA
tcaaaccagtaagcatttat

SEQ ID NO: 9836 - DNA, 20 bp, synthetic construct
  misc_feature 1..20: note = chemically synthesized
  source 1..20: mol_type = other DNA
caaaccagtaagcatttatg

SEQ ID NO: 9837 - DNA, 20 bp, synthetic construct
  misc_feature 1..20: note = chemically synthesized
  source 1..20: mol_type = other DNA
tatgaggactcacactatgc

SEQ ID NO: 9838 - DNA, 20 bp, synthetic construct
  misc_feature 1..20: note = chemically synthesized
  source 1..20: mol_type = other DNA
ctcacactatgccagataca

SEQ ID NO: 9839 - DNA, 20 bp, synthetic construct
  misc_feature 1..20: note = chemically synthesized
  source 1..20: mol_type = other DNA
tcacactatgccagatacat

SEQ ID NO: 9840 - DNA, 20 bp, synthetic construct
  misc_feature 1..20: note = chemically synthesized
  source 1..20: mol_type = other DNA
cactatgccagatacatagg

SEQ ID NO: 9841 - DNA, 20 bp, synthetic construct
  misc_feature 1..20: note = chemically synthesized
  source 1..20: mol_type = other DNA
tatgccagatacataggtgg

SEQ ID NO: 9842 - DNA, 20 bp, synthetic construct
  misc_feature 1..20: note = chemically synthesized
  source 1..20: mol_type = other DNA
atgccagatacataggtggc

SEQ ID NO: 9843 - DNA, 20 bp, synthetic construct
  misc_feature 1..20: note = chemically synthesized
  source 1..20: mol_type = other DNA
ggtggcaggattcttcactc

SEQ ID NO: 9844 - DNA, 20 bp, synthetic construct
  misc_feature 1..20: note = chemically synthesized
  source 1..20: mol_type = other DNA
ctccagatataatctatctg

SEQ ID NO: 9845 - DNA, 20 bp, synthetic construct
  misc_feature 1..20: note = chemically synthesized
  source 1..20: mol_type = other DNA
gatagattatatctggagtg

SEQ ID NO: 9846 - DNA, 20 bp, synthetic construct
  misc_feature 1..20: note = chemically synthesized
  source 1..20: mol_type = other DNA
acctatgtatctggcatagt

SEQ ID NO: 9847 - DNA, 20 bp, synthetic construct
  misc_feature 1..20: note = chemically synthesized
  source 1..20: mol_type = other DNA
aagggcaacaaaatagtgaa

SEQ ID NO: 9848 - DNA, 20 bp, synthetic construct
  misc_feature 1..20: note = chemically synthesized
  source 1..20: mol_type = other DNA
tgaaaatccccactaagatc

SEQ ID NO: 9849 - DNA, 20 bp, synthetic construct
  misc_feature 1..20: note = chemically synthesized
  source 1..20: mol_type = other DNA
gtttacagagaacaataata

SEQ ID NO: 9850 - DNA, 20 bp, synthetic construct
  misc_feature 1..20: note = chemically synthesized
  source 1..20: mol_type = other DNA
tgggtggtgagcatctgtgt

SEQ ID NO: 9851 - DNA, 20 bp, synthetic construct
  misc_feature 1..20: note = chemically synthesized
  source 1..20: mol_type = other DNA
gtgagcatctgtgtgggggt

SEQ ID NO: 9852 - DNA, 20 bp, synthetic construct
  misc_feature 1..20: note = chemically synthesized
  source 1..20: mol_type = other DNA
catctgtgtgggggttgggg

SEQ ID NO: 9853 - DNA, 20 bp, synthetic construct
  misc_feature 1..20: note = chemically synthesized
  source 1..20: mol_type = other DNA
gtgggggttggggtgggata

SEQ ID NO: 9854 - DNA, 20 bp, synthetic construct
  misc_feature 1..20: note = chemically synthesized
  source 1..20: mol_type = other DNA
ggtgggataggggatacggg

SEQ ID NO: 9855 - DNA, 20 bp, synthetic construct
  misc_feature 1..20: note = chemically synthesized
  source 1..20: mol_type = other DNA
gagtggagaaaaaggggaca

SEQ ID NO: 9856 - DNA, 20 bp, synthetic construct
  misc_feature 1..20: note = chemically synthesized
  source 1..20: mol_type = other DNA
cacagggttaatgtgaagtc

SEQ ID NO: 9857 - DNA, 20 bp, synthetic construct
  misc_feature 1..20: note = chemically synthesized
  source 1..20: mol_type = other DNA
atagcaactcttaagataat

SEQ ID NO: 9858 - DNA, 20 bp, synthetic construct
  misc_feature 1..20: note = chemically synthesized
  source 1..20: mol_type = other DNA
ttgtacaaatcatttgcttc

SEQ ID NO: 9859 - DNA, 20 bp, synthetic construct
  misc_feature 1..20: note = chemically synthesized
  source 1..20: mol_type = other DNA
aaatgtgggcttttgactag

SEQ ID NO: 9860 - DNA, 20 bp, synthetic construct
  misc_feature 1..20: note = chemically synthesized
  source 1..20: mol_type = other DNA
ttctaacagattctgtgtag

SEQ ID NO: 9861 - DNA, 20 bp, synthetic construct
  misc_feature 1..20: note = chemically synthesized
  source 1..20: mol_type = other DNA
ggagagtttcttgtagggga

SEQ ID NO: 9862 - DNA, 20 bp, synthetic construct
  misc_feature 1..20: note = chemically synthesized
  source 1..20: mol_type = other DNA
aaatgctgtttcttttgaag

SEQ ID NO: 9863 - DNA, 20 bp, synthetic construct
  misc_feature 1..20: note = chemically synthesized
  source 1..20: mol_type = other DNA
ctgtttcttttgaaggaggg

SEQ ID NO: 9864 - DNA, 20 bp, synthetic construct
  misc_feature 1..20: note = chemically synthesized
  source 1..20: mol_type = other DNA
ttaagtgtattgaaggcgaa

SEQ ID NO: 9865 - DNA, 20 bp, synthetic construct
  misc_feature 1..20: note = chemically synthesized
  source 1..20: mol_type = other DNA
gttgagcttaaaataagcta

SEQ ID NO: 9866 - DNA, 20 bp, synthetic construct
  misc_feature 1..20: note = chemically synthesized
  source 1..20: mol_type = other DNA
ttatttacgggcttttctca

SEQ ID NO: 9867 - DNA, 20 bp, synthetic construct
  misc_feature 1..20: note = chemically synthesized
  source 1..20: mol_type = other DNA
tctctgctcatcccactaca

SEQ ID NO: 9868 - DNA, 20 bp, synthetic construct
  misc_feature 1..20: note = chemically synthesized
  source 1..20: mol_type = other DNA
agaatctgttagaaaatata

SEQ ID NO: 9869 - DNA, 20 bp, synthetic construct
  misc_feature 1..20: note = chemically synthesized
  source 1..20: mol_type = other DNA
gttagaaaatataaagaata

SEQ ID NO: 9870 - DNA, 20 bp, synthetic construct
  misc_feature 1..20: note = chemically synthesized
  source 1..20: mol_type = other DNA
aagaaaattctgattatctt

SEQ ID NO: 9871 - DNA, 20 bp, synthetic construct
  misc_feature 1..20: note = chemically synthesized
  source 1..20: mol_type = other DNA
aaccaactttaaatgtagag

SEQ ID NO: 9872 - DNA, 20 bp, synthetic construct
  misc_feature 1..20: note = chemically synthesized
  source 1..20: mol_type = other DNA
cggaaacaacctgttgtcta

SEQ ID NO: 9873 - DNA, 20 bp, synthetic construct
  misc_feature 1..20: note = chemically synthesized
  source 1..20: mol_type = other DNA
agagttttaactatgggctc

SEQ ID NO: 9874 - DNA, 20 bp, synthetic construct
  misc_feature 1..20: note = chemically synthesized
  source 1..20: mol_type = other DNA
ttcccatctttttctggacc

SEQ ID NO: 9875 - DNA, 20 bp, synthetic construct
  misc_feature 1..20: note = chemically synthesized
  source 1..20: mol_type = other DNA
tctggacccaggatcttagt

SEQ ID NO: 9876 - DNA, 20 bp, synthetic construct
  misc_feature 1..20: note = chemically synthesized
  source 1..20: mol_type = other DNA
tatgccagatacataggtgg

SEQ ID NO: 9877 - DNA, 20 bp, synthetic construct
  misc_feature 1..20: note = chemically synthesized
  source 1..20: mol_type = other DNA
agatagattatatctggagt

SEQ ID NO: 9878 - DNA, 20 bp, synthetic construct
  misc_feature 1..20: note = chemically synthesized
  source 1..20: mol_type = other DNA
tccccactaagatcctgggt

SEQ ID NO: 9879 - DNA, 20 bp, synthetic construct
  misc_feature 1..20: note = chemically synthesized
  source 1..20: mol_type = other DNA
ataggggatacggggagagt

SEQ ID NO: 9880 - DNA, 20 bp, synthetic construct
  misc_feature 1..20: note = chemically synthesized
  source 1..20: mol_type = other DNA
aatagcaactcttaagataa

SEQ ID NO: 9881 - DNA, 20 bp, synthetic construct
  misc_feature 1..20: note = chemically synthesized
  source 1..20: mol_type = other DNA
acaaaaacaaaataatccag

SEQ ID NO: 9882 - DNA, 20 bp, synthetic construct
  misc_feature 1..20: note = chemically synthesized
  source 1..20: mol_type = other DNA
tttaactccaccctccttca

SEQ ID NO: 9883 - DNA, 20 bp, synthetic construct
  misc_feature 1..20: note = chemically synthesized
  source 1..20: mol_type = other DNA
ctgagacatccgttccccta

SEQ ID NO: 9884 - DNA, 20 bp, synthetic construct
  misc_feature 1..20: note = chemically synthesized
  source 1..20: mol_type = other DNA
attaagtgtattgaaggcga

SEQ ID NO: 9885 - DNA, 20 bp, synthetic construct
  misc_feature 1..20: note = chemically synthesized
  source 1..20: mol_type = other DNA
agttgagcttaaaataagct

SEQ ID NO: 9886 - DNA, 20 bp, synthetic construct
  misc_feature 1..20: note = chemically synthesized
  source 1..20: mol_type = other DNA
ttctctgctcatcccactac

SEQ ID NO: 9887 - DNA, 20 bp, synthetic construct
  misc_feature 1..20: note = chemically synthesized
  source 1..20: mol_type = other DNA
atcccactacacagaatctg

SEQ ID NO: 9888 - DNA, 20 bp, synthetic construct
  misc_feature 1..20: note = chemically synthesized
  source 1..20: mol_type = other DNA
cagaatctgttagaaaatat

SEQ ID NO: 9889 - DNA, 20 bp, synthetic construct
  misc_feature 1..20: note = chemically synthesized
  source 1..20: mol_type = other DNA
caaaagcccacattttagta

SEQ ID NO: 9890 - DNA, 20 bp, synthetic construct
  misc_feature 1..20: note = chemically synthesized
  source 1..20: mol_type = other DNA
caacagtaaggctaaaaggt

SEQ ID NO: 9891 - DNA, 20 bp, synthetic construct
  misc_feature 1..20: note = chemically synthesized
  source 1..20: mol_type = other DNA
ctcacccgtgagcccatagt

SEQ ID NO: 9892 - DNA, 20 bp, synthetic construct
  misc_feature 1..20: note = chemically synthesized
  source 1..20: mol_type = other DNA
tagtgggatgagcagagaac

SEQ ID NO: 9893 - DNA, 20 bp, synthetic construct
  misc_feature 1..20: note = chemically synthesized
  source 1..20: mol_type = other DNA
ggcatagtgtgagtcctcat

SEQ ID NO: 9894 - DNA, 20 bp, synthetic construct
  misc_feature 1..20: note = chemically synthesized
  source 1..20: mol_type = other DNA
gtgagtcctcataaatgctt

SEQ ID NO: 9895 - DNA, 20 bp, synthetic construct
  misc_feature 1..20: note = chemically synthesized
  source 1..20: mol_type = other DNA
ggtccagaaaaagatgggaa

SEQ ID NO: 9896 - DNA, 20 bp, synthetic construct
  misc_feature 1..20: note = chemically synthesized
  source 1..20: mol_type = other DNA
ttaaaactctttagacaaca

SEQ ID NO: 9897 - DNA, 20 bp, synthetic construct
  misc_feature 1..20: note = chemically synthesized
  source 1..20: mol_type = other DNA
ctctttagacaacaggttgt

SEQ ID NO: 9898 - DNA, 20 bp, synthetic construct
  misc_feature 1..20: note = chemically synthesized
  source 1..20: mol_type = other DNA
gatccccctctacatttaaa

SEQ ID NO: 9899 - DNA, 20 bp, synthetic construct
  misc_feature 1..20: note = chemically synthesized
  source 1..20: mol_type = other DNA
tacatttaaagttggtttaa

SEQ ID NO: 9900 - DNA, 20 bp, synthetic construct
  misc_feature 1..20: note = chemically synthesized
  source 1..20: mol_type = other DNA
cctgtgatcttgtacaaatc

SEQ ID NO: 9901 - DNA, 20 bp, synthetic construct
  misc_feature 1..20: note = chemically synthesized
  source 1..20: mol_type = other DNA
gtaatttcttttactaaaat

SEQ ID NO: 9902 - DNA, 20 bp, synthetic construct
  misc_feature 1..20: note = chemically synthesized
  source 1..20: mol_type = other DNA
ctttattctttatattttct

SEQ ID NO: 9903 - DNA, 20 bp, synthetic construct
  misc_feature 1..20: note = chemically synthesized
  source 1..20: mol_type = other DNA
ttcagaccagagatctattc

SEQ ID NO: 9904 - DNA, 20 bp, synthetic construct
  misc_feature 1..20: note = chemically synthesized
  source 1..20: mol_type = other DNA
acttaaaaagaagaactgtt

SEQ ID NO: 9905 - DNA, 20 bp, synthetic construct
  misc_feature 1..20: note = chemically synthesized
  source 1..20: mol_type = other DNA
cttttcgccttcaatacact

SEQ ID NO: 9906 - DNA, 20 bp, synthetic construct
  misc_feature 1..20: note = chemically synthesized
  source 1..20: mol_type = other DNA
ttcctacttttatactgtct

SEQ ID NO: 9907 - DNA, 20 bp, synthetic construct
  misc_feature 1..20: note = chemically synthesized
  source 1..20: mol_type = other DNA
tacttttatactgtctatat

SEQ ID NO: 9908 - DNA, 20 bp, synthetic construct
  misc_feature 1..20: note = chemically synthesized
  source 1..20: mol_type = other DNA
gacagtataaaagtaggaaa

SEQ ID NO: 9909 - DNA, 20 bp, synthetic construct
  misc_feature 1..20: note = chemically synthesized
  source 1..20: mol_type = other DNA
gaacagttcttctttttaag

SEQ ID NO: 9910 - DNA, 20 bp, synthetic construct
  misc_feature 1..20: note = chemically synthesized
  source 1..20: mol_type = other DNA
agagaatagatctctggtct

SEQ ID NO: 9911 - DNA, 20 bp, synthetic construct
  misc_feature 1..20: note = chemically synthesized
  source 1..20: mol_type = other DNA
tctggtctgaaggtttattt

SEQ ID NO: 9912 - DNA, 20 bp, synthetic construct
  misc_feature 1..20: note = chemically synthesized
  source 1..20: mol_type = other DNA
tttatttacgggcttttctc

SEQ ID NO: 9913 - DNA, 20 bp, synthetic construct
  misc_feature 1..20: note = chemically synthesized
  source 1..20: mol_type = other DNA
gggcttttctcactggatta

SEQ ID NO: 9914 - DNA, 20 bp, synthetic construct
  misc_feature 1..20: note = chemically synthesized
  source 1..20: mol_type = other DNA
gaaattactatccaagaagc

SEQ ID NO: 9915 - DNA, 20 bp, synthetic construct
  misc_feature 1..20: note = chemically synthesized
  source 1..20: mol_type = other DNA
aaatgatttgtacaagatca

SEQ ID NO: 9916 - DNA, 20 bp, synthetic construct
  misc_feature 1..20: note = chemically synthesized
  source 1..20: mol_type = other DNA
aggctaaaaggttaagaaaa

SEQ ID NO: 9917 - DNA, 20 bp, synthetic construct
  misc_feature 1..20: note = chemically synthesized
  source 1..20: mol_type = other DNA
cggaaacaacctgttgtcta

SEQ ID NO: 9918 - DNA, 20 bp, synthetic construct
  misc_feature 1..20: note = chemically synthesized
  source 1..20: mol_type = other DNA
tgggctcacgggtgagctaa

SEQ ID NO: 9919 - DNA, 20 bp, synthetic construct
  misc_feature 1..20: note = chemically synthesized
  source 1..20: mol_type = other DNA
ttctggacccaggatcttag

SEQ ID NO: 9920 - DNA, 20 bp, synthetic construct
  misc_feature 1..20: note = chemically synthesized
  source 1..20: mol_type = other DNA
ctatgccagatacataggtg

SEQ ID NO: 9921 - DNA, 22 bp, synthetic construct
  misc_feature 1..22: note = chemically synthesized
  source 1..22: mol_type = other DNA
cagatagattatatctggagtg

SEQ ID NO: 9922 - DNA, 22 bp, synthetic construct
  misc_feature 1..22: note = chemically synthesized
  source 1..22: mol_type = other DNA
agatagattatatctggagtga

SEQ ID NO: 9923 - DNA, 22 bp, synthetic construct
  misc_feature 1..22: note = chemically synthesized
  source 1..22: mol_type = other DNA
tatctggagtgaagaatcctgc

SEQ ID NO: 9924 - DNA, 22 bp, synthetic construct
  misc_feature 1..22: note = chemically synthesized
  source 1..22: mol_type = other DNA
gagtgaagaatcctgccaccta

SEQ ID NO: 9925 - DNA, 22 bp, synthetic construct
  misc_feature 1..22: note = chemically synthesized
  source 1..22: mol_type = other DNA
ccacctatgtatctggcatagt

SEQ ID NO: 9926 - DNA, 22 bp, synthetic construct
  misc_feature 1..22: note = chemically synthesized
  source 1..22: mol_type = other DNA
tgtatctggcatagtgtgagtc

SEQ ID NO: 9927 - DNA, 22 bp, synthetic construct
  misc_feature 1..22: note = chemically synthesized
  source 1..22: mol_type = other DNA
gcatagtgtgagtcctcataaa

SEQ ID NO: 9928 - DNA, 22 bp, synthetic construct
  misc_feature 1..22: note = chemically synthesized
  source 1..22: mol_type = other DNA
ataaatgcttactggtttgaag

SEQ ID NO: 9929 - DNA, 22 bp, synthetic construct
  misc_feature 1..22: note = chemically synthesized
  source 1..22: mol_type = other DNA
actggtttgaagggcaacaaaa

SEQ ID NO: 9930 - DNA, 22 bp, synthetic construct
  misc_feature 1..22: note = chemically synthesized
  source 1..22: mol_type = other DNA
ctggtttgaagggcaacaaaat

SEQ ID NO: 9931 - DNA, 22 bp, synthetic construct
  misc_feature 1..22: note = chemically synthesized
  source 1..22: mol_type = other DNA
gtttgaagggcaacaaaatagt

SEQ ID NO: 9932 - DNA, 22 bp, synthetic construct
  misc_feature 1..22: note = chemically synthesized
  source 1..22: mol_type = other DNA
gaagggcaacaaaatagtgaac

SEQ ID NO: 9933 - DNA, 22 bp, synthetic construct
  misc_feature 1..22: note = chemically synthesized
  source 1..22: mol_type = other DNA
aagggcaacaaaatagtgaaca

SEQ ID NO: 9934 - DNA, 22 bp, synthetic construct
  misc_feature 1..22: note = chemically synthesized
  source 1..22: mol_type = other DNA
agatcctgggtccagaaaaaga

SEQ ID NO: 9935 - DNA, 22 bp, synthetic construct
  misc_feature 1..22: note = chemically synthesized
  source 1..22: mol_type = other DNA
ggtccagaaaaagatgggaaac

SEQ ID NO: 9936 - DNA, 22 bp, synthetic construct
  misc_feature 1..22: note = chemically synthesized
  source 1..22: mol_type = other DNA
tttagctcacccgtgagcccat

SEQ ID NO: 9937 - DNA, 22 bp, synthetic construct
  misc_feature 1..22: note = chemically synthesized
  source 1..22: mol_type = other DNA
agctcacccgtgagcccatagt

SEQ ID NO: 9938 - DNA, 22 bp, synthetic construct
  misc_feature 1..22: note = chemically synthesized
  source 1..22: mol_type = other DNA
gctcacccgtgagcccatagtt

SEQ ID NO: 9939 - DNA, 22 bp, synthetic construct
  misc_feature 1..22: note = chemically synthesized
  source 1..22: mol_type = other DNA
acccgtgagcccatagttaaaa

SEQ ID NO: 9940 - DNA, 22 bp, synthetic construct
  misc_feature 1..22: note = chemically synthesized
  source 1..22: mol_type = other DNA
aaactctttagacaacaggttg

SEQ ID NO: 9941 - DNA, 22 bp, synthetic construct
  misc_feature 1..22: note = chemically synthesized
  source 1..22: mol_type = other DNA
tttagacaacaggttgtttccg

SEQ ID NO: 9942 - DNA, 22 bp, synthetic construct
  misc_feature 1..22: note = chemically synthesized
  source 1..22: mol_type = other DNA
tagacaacaggttgtttccgtt

SEQ ID NO: 9943 - DNA, 22 bp, synthetic construct
  misc_feature 1..22: note = chemically synthesized
  source 1..22: mol_type = other DNA
agacaacaggttgtttccgttt

SEQ ID NO: 9944 - DNA, 22 bp, synthetic construct
  misc_feature 1..22: note = chemically synthesized
  source 1..22: mol_type = other DNA
gacaacaggttgtttccgttta

SEQ ID NO: 9945 - DNA, 22 bp, synthetic construct
  misc_feature 1..22: note = chemically synthesized
  source 1..22: mol_type = other DNA
tttccgtttacagagaacaata

SEQ ID NO: 9946 - DNA, 22 bp, synthetic construct
  misc_feature 1..22: note = chemically synthesized
  source 1..22: mol_type = other DNA
ccgtttacagagaacaataata

SEQ ID NO: 9947 - DNA, 22 bp, synthetic construct
  misc_feature 1..22: note = chemically synthesized
  source 1..22: mol_type = other DNA
cgtttacagagaacaataatat

SEQ ID NO: 9948 - DNA, 22 bp, synthetic construct
  misc_feature 1..22: note = chemically synthesized
  source 1..22: mol_type = other DNA
acagagaacaataatattgggt

SEQ ID NO: 9949 - DNA, 22 bp, synthetic construct
  misc_feature 1..22: note = chemically synthesized
  source 1..22: mol_type = other DNA
cagagaacaataatattgggtg

SEQ ID NO: 9950 - DNA, 22 bp, synthetic construct
  misc_feature 1..22: note = chemically synthesized
  source 1..22: mol_type = other DNA
ggtggtgagcatctgtgtgggg

SEQ ID NO: 9951 - DNA, 22 bp, synthetic construct
  misc_feature 1..22: note = chemically synthesized
  source 1..22: mol_type = other DNA
tgtgggggttggggtgggatag

SEQ ID NO: 9952 - DNA, 22 bp, synthetic construct
  misc_feature 1..22: note = chemically synthesized
  source 1..22: mol_type = other DNA
gggtgggataggggatacgggg

SEQ ID NO: 9953 - DNA, 22 bp, synthetic construct
  misc_feature 1..22: note = chemically synthesized
  source 1..22: mol_type = other DNA
atgtgaagtccaggatccccct

SEQ ID NO: 9954 - DNA, 22 bp, synthetic construct
  misc_feature 1..22: note = chemically synthesized
  source 1..22: mol_type = other DNA
tacatttaaagttggtttaagt

SEQ ID NO: 9955 - DNA, 22 bp, synthetic construct
  misc_feature 1..22: note = chemically synthesized
  source 1..22: mol_type = other DNA
catttaaagttggtttaagttg

SEQ ID NO: 9956 - DNA, 22 bp, synthetic construct
  misc_feature 1..22: note = chemically synthesized
  source 1..22: mol_type = other DNA
aaagttggtttaagttggcttt

SEQ ID NO: 9957 - DNA, 22 bp, synthetic construct
  misc_feature 1..22: note = chemically synthesized
  source 1..22: mol_type = other DNA
aagttggtttaagttggcttta

SEQ ID NO: 9958 - DNA, 22 bp, synthetic construct
  misc_feature 1..22: note = chemically synthesized
  source 1..22: mol_type = other DNA
gtttaagttggctttaattaat

SEQ ID NO: 9959 - DNA, 22 bp, synthetic construct
  misc_feature 1..22: note = chemically synthesized
  source 1..22: mol_type = other DNA
aagttggctttaattaatagca

SEQ ID NO: 9960 - DNA, 22 bp, synthetic construct
  misc_feature 1..22: note = chemically synthesized
  source 1..22: mol_type = other DNA
agttggctttaattaatagcaa

SEQ ID NO: 9961 - DNA, 22 bp, synthetic construct
  misc_feature 1..22: note = chemically synthesized
  source 1..22: mol_type = other DNA
gctttaattaatagcaactctt

SEQ ID NO: 9962 - DNA, 22 bp, synthetic construct
  misc_feature 1..22: note = chemically synthesized
  source 1..22: mol_type = other DNA
taattaatagcaactcttaaga

SEQ ID NO: 9963 - DNA, 22 bp, synthetic construct
  misc_feature 1..22: note = chemically synthesized
  source 1..22: mol_type = other DNA
aattaatagcaactcttaagat

SEQ ID NO: 9964 - DNA, 22 bp, synthetic construct
  misc_feature 1..22: note = chemically synthesized
  source 1..22: mol_type = other DNA
attaatagcaactcttaagata

SEQ ID NO: 9965 - DNA, 22 bp, synthetic construct
  misc_feature 1..22: note = chemically synthesized
  source 1..22: mol_type = other DNA
atagcaactcttaagataatca

SEQ ID NO: 9966 - DNA, 22 bp, synthetic construct
  misc_feature 1..22: note = chemically synthesized
  source 1..22: mol_type = other DNA
ttaagataatcagaattttctt

SEQ ID NO: 9967 - DNA, 22 bp, synthetic construct
  misc_feature 1..22: note = chemically synthesized
  source 1..22: mol_type = other DNA
aagataatcagaattttcttaa

SEQ ID NO: 9968 - DNA, 22 bp, synthetic construct
  misc_feature 1..22: note = chemically synthesized
  source 1..22: mol_type = other DNA
agataatcagaattttcttaac

SEQ ID NO: 9969 - DNA, 22 bp, synthetic construct
  misc_feature 1..22: note = chemically synthesized
  source 1..22: mol_type = other DNA
tcttaaccttttagccttactg

SEQ ID NO: 9970 - DNA, 22 bp, synthetic construct
  misc_feature 1..22: note = chemically synthesized
  source 1..22: mol_type = other DNA
cttaaccttttagccttactgt

SEQ ID NO: 9971 - DNA, 22 bp, synthetic construct
  misc_feature 1..22: note = chemically synthesized
  source 1..22: mol_type = other DNA
ttaaccttttagccttactgtt

SEQ ID NO: 9972 - DNA, 22 bp, synthetic construct
  misc_feature 1..22: note = chemically synthesized
  source 1..22: mol_type = other DNA
aaccttttagccttactgttga

SEQ ID NO: 9973 - DNA, 22 bp, synthetic construct
  misc_feature 1..22: note = chemically synthesized
  source 1..22: mol_type = other DNA
accttttagccttactgttgaa

SEQ ID NO: 9974 - DNA, 22 bp, synthetic construct
  misc_feature 1..22: note = chemically synthesized
  source 1..22: mol_type = other DNA
ttagccttactgttgaaaagcc

SEQ ID NO: 9975 - DNA, 22 bp, synthetic construct
  misc_feature 1..22: note = chemically synthesized
  source 1..22: mol_type = other DNA
tagccttactgttgaaaagccc

SEQ ID NO: 9976 - DNA, 22 bp, synthetic construct
  misc_feature 1..22: note = chemically synthesized
  source 1..22: mol_type = other DNA
agccttactgttgaaaagccct

SEQ ID NO: 9977 - DNA, 22 bp, synthetic construct
  misc_feature 1..22: note = chemically synthesized
  source 1..22: mol_type = other DNA
gccttactgttgaaaagccctg

SEQ ID NO: 9978 - DNA, 22 bp, synthetic construct
  misc_feature 1..22: note = chemically synthesized
  source 1..22: mol_type = other DNA
actgttgaaaagccctgtgatc

SEQ ID NO: 9979 - DNA, 22 bp, synthetic construct
  misc_feature 1..22: note = chemically synthesized
  source 1..22: mol_type = other DNA
ctgttgaaaagccctgtgatct

SEQ ID NO: 9980 - DNA, 22 bp, synthetic construct
  misc_feature 1..22: note = chemically synthesized
  source 1..22: mol_type = other DNA
ttgaaaagccctgtgatcttgt

SEQ ID NO: 9981 - DNA, 22 bp, synthetic construct
  misc_feature 1..22: note = chemically synthesized
  source 1..22: mol_type = other DNA
aaaagccctgtgatcttgtaca

SEQ ID NO: 9982 - DNA, 22 bp, synthetic construct
  misc_feature 1..22: note = chemically synthesized
  source 1..22: mol_type = other DNA
tgatcttgtacaaatcatttgc

SEQ ID NO: 9983 - DNA, 22 bp, synthetic construct
  misc_feature 1..22: note = chemically synthesized
  source 1..22: mol_type = other DNA
gtacaaatcatttgcttcttgg

SEQ ID NO: 9984 - DNA, 22 bp, synthetic construct
  misc_feature 1..22: note = chemically synthesized
  source 1..22: mol_type = other DNA
tacaaatcatttgcttcttgga

SEQ ID NO: 9985 - DNA, 22 bp, synthetic construct
  misc_feature 1..22: note = chemically synthesized
  source 1..22: mol_type = other DNA
gcttcttggatagtaatttctt

SEQ ID NO: 9986 - DNA, 22 bp, synthetic construct
  misc_feature 1..22: note = chemically synthesized
  source 1..22: mol_type = other DNA
cttcttggatagtaatttcttt

SEQ ID NO: 9987 - DNA, 22 bp, synthetic construct
  misc_feature 1..22: note = chemically synthesized
  source 1..22: mol_type = other DNA
cttggatagtaatttcttttac

SEQ ID NO: 9988 - DNA, 22 bp, synthetic construct
  misc_feature 1..22: note = chemically synthesized
  source 1..22: mol_type = other DNA
ttggatagtaatttcttttact

SEQ ID NO: 9989 - DNA, 22 bp, synthetic construct
  misc_feature 1..22: note = chemically synthesized
  source 1..22: mol_type = other DNA
ggatagtaatttcttttactaa

SEQ ID NO: 9990 - DNA, 22 bp, synthetic construct
  misc_feature 1..22: note = chemically synthesized
  source 1..22: mol_type = other DNA
gatagtaatttcttttactaaa

SEQ ID NO: 9991 - DNA, 22 bp, synthetic construct
  misc_feature 1..22: note = chemically synthesized
  source 1..22: mol_type = other DNA
cttttactaaaatgtgggcttt

SEQ ID NO: 9992 - DNA, 22 bp, synthetic construct
  misc_feature 1..22: note = chemically synthesized
  source 1..22: mol_type = other DNA
ttttactaaaatgtgggctttt

SEQ ID NO: 9993 - DNA, 22 bp, synthetic construct
  misc_feature 1..22: note = chemically synthesized
  source 1..22: mol_type = other DNA
ttactaaaatgtgggcttttga

SEQ ID NO: 9994 - DNA, 22 bp, synthetic construct
  misc_feature 1..22: note = chemically synthesized
  source 1..22: mol_type = other DNA
tactaaaatgtgggcttttgac

SEQ ID NO: 9995 - DNA, 22 bp, synthetic construct
  misc_feature 1..22: note = chemically synthesized
  source 1..22: mol_type = other DNA
actaaaatgtgggcttttgact

SEQ ID NO: 9996 - DNA, 22 bp, synthetic construct
  misc_feature 1..22: note = chemically synthesized
  source 1..22: mol_type = other DNA
ctaaaatgtgggcttttgacta

SEQ ID NO: 9997 - DNA, 22 bp, synthetic construct
  misc_feature 1..22: note = chemically synthesized
  source 1..22: mol_type = other DNA
aaatgtgggcttttgactagat

SEQ ID NO: 9998 - DNA, 22 bp, synthetic construct
  misc_feature 1..22: note = chemically synthesized
  source 1..22: mol_type = other DNA
ttgactagatgaatgtaaatgt

SEQ ID NO: 9999 - DNA, 22 bp, synthetic construct
  misc_feature 1..22: note = chemically synthesized
  source 1..22: mol_type = other DNA
tgactagatgaatgtaaatgtt

SEQ ID NO: 10000 - DNA, 22 bp, synthetic construct
  misc_feature 1..22: note = chemically synthesized
  source 1..22: mol_type = other DNA
gactagatgaatgtaaatgttc

SEQ ID NO: 10001 - DNA, 22 bp, synthetic construct
  misc_feature 1..22: note = chemically synthesized
  source 1..22: mol_type = other DNA
actagatgaatgtaaatgttct

SEQ ID NO: 10002 - DNA, 22 bp, synthetic construct
  misc_feature 1..22: note = chemically synthesized
  source 1..22: mol_type = other DNA
gatgaatgtaaatgttcttcta

SEQ ID NO: 10003 - DNA, 22 bp, synthetic construct
  misc_feature 1..22: note = chemically synthesized
  source 1..22: mol_type = other DNA
ttctagctctgatatcctttat

SEQ ID NO: 10004 - DNA, 22 bp, synthetic construct
  misc_feature 1..22: note = chemically synthesized
  source 1..22: mol_type = other DNA
ctagctctgatatcctttattc

SEQ ID NO: 10005 - DNA, 22 bp, synthetic construct
  misc_feature 1..22: note = chemically synthesized
  source 1..22: mol_type = other DNA
tagctctgatatcctttattct

SEQ ID NO: 10006 - DNA, 22 bp, synthetic construct
  misc_feature 1..22: note = chemically synthesized
  source 1..22: mol_type = other DNA
gctctgatatcctttattcttt

SEQ ID NO: 10007 - DNA, 22 bp, synthetic construct
  misc_feature 1..22: note = chemically synthesized
  source 1..22: mol_type = other DNA
tgatatcctttattctttatat

SEQ ID NO: 10008 - DNA, 22 bp, synthetic construct
  misc_feature 1..22: note = chemically synthesized
  source 1..22: mol_type = other DNA
atatcctttattctttatattt

SEQ ID NO: 10009 - DNA, 22 bp, synthetic construct
  misc_feature 1..22: note = chemically synthesized
  source 1..22: mol_type = other DNA
tattctttatattttctaacag

SEQ ID NO: 10010 - DNA, 22 bp, synthetic construct
  misc_feature 1..22: note = chemically synthesized
  source 1..22: mol_type = other DNA
attctttatattttctaacaga

SEQ ID NO: 10011 - DNA, 22 bp, synthetic construct
  misc_feature 1..22: note = chemically synthesized
  source 1..22: mol_type = other DNA
ttctttatattttctaacagat

SEQ ID NO: 10012 - DNA, 22 bp, synthetic construct
  misc_feature 1..22: note = chemically synthesized
  source 1..22: mol_type = other DNA
tttatattttctaacagattct

SEQ ID NO: 10013 - DNA, 22 bp, synthetic construct
  misc_feature 1..22: note = chemically synthesized
  source 1..22: mol_type = other DNA
tatattttctaacagattctgt

SEQ ID NO: 10014 - DNA, 22 bp, synthetic construct
  misc_feature 1..22: note = chemically synthesized
  source 1..22: mol_type = other DNA
atattttctaacagattctgtg

SEQ ID NO: 10015 - DNA, 22 bp, synthetic construct
  misc_feature 1..22: note = chemically synthesized
  source 1..22: mol_type = other DNA
tattttctaacagattctgtgt

SEQ ID NO: 10016 - DNA, 22 bp, synthetic construct
  misc_feature 1..22: note = chemically synthesized
  source 1..22: mol_type = other DNA
tctaacagattctgtgtagtgg

SEQ ID NO: 10017 - DNA, 22 bp, synthetic construct
  misc_feature 1..22: note = chemically synthesized
  source 1..22: mol_type = other DNA
ctaacagattctgtgtagtggg

SEQ ID NO: 10018 - DNA, 22 bp, synthetic construct
  misc_feature 1..22: note = chemically synthesized
  source 1..22: mol_type = other DNA
taacagattctgtgtagtggga

SEQ ID NO: 10019 - DNA, 22 bp, synthetic construct
  misc_feature 1..22: note = chemically synthesized
  source 1..22: mol_type = other DNA
acagattctgtgtagtgggatg

SEQ ID NO: 10020 - DNA, 22 bp, synthetic construct
  misc_feature 1..22: note = chemically synthesized
  source 1..22: mol_type = other DNA
tgtgtagtgggatgagcagaga

SEQ ID NO: 10021 - DNA, 22 bp, synthetic construct
  misc_feature 1..22: note = chemically synthesized
  source 1..22: mol_type = other DNA
tgtagtgggatgagcagagaac

SEQ ID NO: 10022 - DNA, 22 bp, synthetic construct
  misc_feature 1..22: note = chemically synthesized
  source 1..22: mol_type = other DNA
cagaccagagatctattctcta

SEQ ID NO: 10023 - DNA, 22 bp, synthetic construct
  misc_feature 1..22: note = chemically synthesized
  source 1..22: mol_type = other DNA
agaccagagatctattctctag

SEQ ID NO: 10024 - DNA, 22 bp, synthetic construct
  misc_feature 1..22: note = chemically synthesized
  source 1..22: mol_type = other DNA
ttctctagcttattttaagctc

SEQ ID NO: 10025 - DNA, 22 bp, synthetic construct
  misc_feature 1..22: note = chemically synthesized
  source 1..22: mol_type = other DNA
tctagcttattttaagctcaac

SEQ ID NO: 10026 - DNA, 22 bp, synthetic construct
  misc_feature 1..22: note = chemically synthesized
  source 1..22: mol_type = other DNA
tagcttattttaagctcaactt

SEQ ID NO: 10027 - DNA, 22 bp, synthetic construct
  misc_feature 1..22: note = chemically synthesized
  source 1..22: mol_type = other DNA
gcttattttaagctcaacttaa

SEQ ID NO: 10028 - DNA, 22 bp, synthetic construct
  misc_feature 1..22: note = chemically synthesized
  source 1..22: mol_type = other DNA
attttaagctcaacttaaaaag

SEQ ID NO: 10029 - DNA, 22 bp, synthetic construct
  misc_feature 1..22: note = chemically synthesized
  source 1..22: mol_type = other DNA
ttttaagctcaacttaaaaaga

SEQ ID NO: 10030 - DNA, 22 bp, synthetic construct
  misc_feature 1..22: note = chemically synthesized
  source 1..22: mol_type = other DNA
taagctcaacttaaaaagaaga

SEQ ID NO: 10031 - DNA, 22 bp, synthetic construct
  misc_feature 1..22: note = chemically synthesized
  source 1..22: mol_type = other DNA
aagctcaacttaaaaagaagaa

SEQ ID NO: 10032 - DNA, 22 bp, synthetic construct
  misc_feature 1..22: note = chemically synthesized
  source 1..22: mol_type = other DNA
agctcaacttaaaaagaagaac

SEQ ID NO: 10033 - DNA, 22 bp, synthetic construct
  misc_feature 1..22: note = chemically synthesized
  source 1..22: mol_type = other DNA
aacttaaaaagaagaactgttc

SEQ ID NO: 10034 - DNA, 22 bp, synthetic construct
  misc_feature 1..22: note = chemically synthesized
  source 1..22: mol_type = other DNA
aaaaagaagaactgttctctga

SEQ ID NO: 10035 - DNA, 22 bp, synthetic construct
  misc_feature 1..22: note = chemically synthesized
  source 1..22: mol_type = other DNA
aaaagaagaactgttctctgat

SEQ ID NO: 10036 - DNA, 22 bp, synthetic construct
  misc_feature 1..22: note = chemically synthesized
  source 1..22: mol_type = other DNA
ttctctgattcttttcgccttc

SEQ ID NO: 10037 - DNA, 22 bp, synthetic construct
  misc_feature 1..22: note = chemically synthesized
  source 1..22: mol_type = other DNA
tctgattcttttcgccttcaat

SEQ ID NO: 10038 - DNA, 22 bp, synthetic construct
  misc_feature 1..22: note = chemically synthesized
  source 1..22: mol_type = other DNA
tgattcttttcgccttcaatac

SEQ ID NO: 10039 - DNA, 22 bp, synthetic construct
  misc_feature 1..22: note = chemically synthesized
  source 1..22: mol_type = other DNA
attcttttcgccttcaatacac

SEQ ID NO: 10040 - DNA, 22 bp, synthetic construct
  misc_feature 1..22: note = chemically synthesized
  source 1..22: mol_type = other DNA
ttttcgccttcaatacacttaa

SEQ ID NO: 10041 - DNA, 22 bp, synthetic construct
  misc_feature 1..22: note = chemically synthesized
  source 1..22: mol_type = other DNA
ttcgccttcaatacacttaatg

SEQ ID NO: 10042 - DNA, 22 bp, synthetic construct
  misc_feature 1..22: note = chemically synthesized
  source 1..22: mol_type = other DNA
tcgccttcaatacacttaatga

SEQ ID NO: 10043 - DNA, 22 bp, synthetic construct
  misc_feature 1..22: note = chemically synthesized
  source 1..22: mol_type = other DNA
cgccttcaatacacttaatgat

SEQ ID NO: 10044 - DNA, 22 bp, synthetic construct
  misc_feature 1..22: note = chemically synthesized
  source 1..22: mol_type = other DNA
gccttcaatacacttaatgatt

SEQ ID NO: 10045 - DNA, 22 bp, synthetic construct
  misc_feature 1..22: note = chemically synthesized
  source 1..22: mol_type = other DNA
caatacacttaatgatttaact

SEQ ID NO: 10046 - DNA, 22 bp, synthetic construct
  misc_feature 1..22: note = chemically synthesized
  source 1..22: mol_type = other DNA
aatacacttaatgatttaactc

SEQ ID NO: 10047 - DNA, 22 bp, synthetic construct
  misc_feature 1..22: note = chemically synthesized
  source 1..22: mol_type = other DNA
aatgatttaactccaccctcct

SEQ ID NO: 10048 - DNA, 22 bp, synthetic construct
  misc_feature 1..22: note = chemically synthesized
  source 1..22: mol_type = other DNA
atgatttaactccaccctcctt

SEQ ID NO: 10049 - DNA, 22 bp, synthetic construct
  misc_feature 1..22: note = chemically synthesized
  source 1..22: mol_type = other DNA
aactccaccctccttcaaaaga

SEQ ID NO: 10050 - DNA, 22 bp, synthetic construct
  misc_feature 1..22: note = chemically synthesized
  source 1..22: mol_type = other DNA
actccaccctccttcaaaagaa

SEQ ID NO: 10051 - DNA, 22 bp, synthetic construct
  misc_feature 1..22: note = chemically synthesized
  source 1..22: mol_type = other DNA
caccctccttcaaaagaaacag

SEQ ID NO: 10052 - DNA, 22 bp, synthetic construct
  misc_feature 1..22: note = chemically synthesized
  source 1..22: mol_type = other DNA
cttcaaaagaaacagcatttcc

SEQ ID NO: 10053 - DNA, 22 bp, synthetic construct
  misc_feature 1..22: note = chemically synthesized
  source 1..22: mol_type = other DNA
caaaagaaacagcatttcctac

SEQ ID NO: 10054 - DNA, 22 bp, synthetic construct
  misc_feature 1..22: note = chemically synthesized
  source 1..22: mol_type = other DNA
aaaagaaacagcatttcctact

SEQ ID NO: 10055 - DNA, 22 bp, synthetic construct
  misc_feature 1..22: note = chemically synthesized
  source 1..22: mol_type = other DNA
cctacttttatactgtctatat

SEQ ID NO: 10056 - DNA, 22 bp, synthetic construct
  misc_feature 1..22: note = chemically synthesized
  source 1..22: mol_type = other DNA
ctacttttatactgtctatatg

SEQ ID NO: 10057 - DNA, 22 bp, synthetic construct
  misc_feature 1..22: note = chemically synthesized
  source 1..22: mol_type = other DNA
cttttatactgtctatatgatt

SEQ ID NO: 10058 - DNA, 22 bp, synthetic construct
  misc_feature 1..22: note = chemically synthesized
  source 1..22: mol_type = other DNA
ttatactgtctatatgattgat

SEQ ID NO: 10059 - DNA, 22 bp, synthetic construct
  misc_feature 1..22: note = chemically synthesized
  source 1..22: mol_type = other DNA
tatactgtctatatgattgatt

SEQ ID NO: 10060 - DNA, 22 bp, synthetic construct
  misc_feature 1..22: note = chemically synthesized
  source 1..22: mol_type = other DNA
atactgtctatatgattgattt

SEQ ID NO: 10061 - DNA, 22 bp, synthetic construct
  misc_feature 1..22: note = chemically synthesized
  source 1..22: mol_type = other DNA
tactgtctatatgattgatttg

SEQ ID NO: 10062 - DNA, 22 bp, synthetic construct
  misc_feature 1..22: note = chemically synthesized
  source 1..22: mol_type = other DNA
tctatatgattgatttgcacag

SEQ ID NO: 10063 - DNA, 22 bp, synthetic construct
  misc_feature 1..22: note = chemically synthesized
  source 1..22: mol_type = other DNA
tatgattgatttgcacagctca

SEQ ID NO: 10064 - DNA, 22 bp, synthetic construct
  misc_feature 1..22: note = chemically synthesized
  source 1..22: mol_type = other DNA
atttgcacagctcatctggcca

SEQ ID NO: 10065 - DNA, 22 bp, synthetic construct
  misc_feature 1..22: note = chemically synthesized
  source 1..22: mol_type = other DNA
gcacagctcatctggccagaag

SEQ ID NO: 10066 - DNA, 22 bp, synthetic construct
  misc_feature 1..22: note = chemically synthesized
  source 1..22: mol_type = other DNA
cacagctcatctggccagaaga

SEQ ID NO: 10067 - DNA, 22 bp, synthetic construct
  misc_feature 1..22: note = chemically synthesized
  source 1..22: mol_type = other DNA
atctggccagaagagctgagac

SEQ ID NO: 10068 - DNA, 22 bp, synthetic construct
  misc_feature 1..22: note = chemically synthesized
  source 1..22: mol_type = other DNA
gccagaagagctgagacatccg

SEQ ID NO: 10069 - DNA, 22 bp, synthetic construct
  misc_feature 1..22: note = chemically synthesized
  source 1..22: mol_type = other DNA
agacatccgttcccctacaaga

SEQ ID NO: 10070 - DNA, 22 bp, synthetic construct
  misc_feature 1..22: note = chemically synthesized
  source 1..22: mol_type = other DNA
cttgtaggggaacggatgtctc

SEQ ID NO: 10071 - DNA, 22 bp, synthetic construct
  misc_feature 1..22: note = chemically synthesized
  source 1..22: mol_type = other DNA
ttgtaggggaacggatgtctca

SEQ ID NO: 10072 - DNA, 22 bp, synthetic construct
  misc_feature 1..22: note = chemically synthesized
  source 1..22: mol_type = other DNA
gtaggggaacggatgtctcagc

SEQ ID NO: 10073 - DNA, 22 bp, synthetic construct
  misc_feature 1..22: note = chemically synthesized
  source 1..22: mol_type = other DNA
taggggaacggatgtctcagct

SEQ ID NO: 10074 - DNA, 22 bp, synthetic construct
  misc_feature 1..22: note = chemically synthesized
  source 1..22: mol_type = other DNA
agctcttctggccagatgagct

SEQ ID NO: 10075 - DNA, 22 bp, synthetic construct
  misc_feature 1..22: note = chemically synthesized
  source 1..22: mol_type = other DNA
ttctggccagatgagctgtgca

SEQ ID NO: 10076 - DNA, 22 bp, synthetic construct
  misc_feature 1..22: note = chemically synthesized
  source 1..22: mol_type = other DNA
ctggccagatgagctgtgcaaa

SEQ ID NO: 10077 - DNA, 22 bp, synthetic construct
  misc_feature 1..22: note = chemically synthesized
  source 1..22: mol_type = other DNA
tggccagatgagctgtgcaaat

SEQ ID NO: 10078 - DNA, 22 bp, synthetic construct
  misc_feature 1..22: note = chemically synthesized
  source 1..22: mol_type = other DNA
gccagatgagctgtgcaaatca

SEQ ID NO: 10079 - DNA, 22 bp, synthetic construct
  misc_feature 1..22: note = chemically synthesized
  source 1..22: mol_type = other DNA
tgcaaatcaatcatatagacag

SEQ ID NO: 10080 - DNA, 22 bp, synthetic construct
  misc_feature 1..22: note = chemically synthesized
  source 1..22: mol_type = other DNA
tttcttttgaaggagggtggag

SEQ ID NO: 10081 - DNA, 22 bp, synthetic construct
  misc_feature 1..22: note = chemically synthesized
  source 1..22: mol_type = other DNA
cttttgaaggagggtggagtta

SEQ ID NO: 10082 - DNA, 22 bp, synthetic construct
  misc_feature 1..22: note = chemically synthesized
  source 1..22: mol_type = other DNA
ttttgaaggagggtggagttaa

SEQ ID NO: 10083 - DNA, 22 bp, synthetic construct
  misc_feature 1..22: note = chemically synthesized
  source 1..22: mol_type = other DNA
ttgaaggagggtggagttaaat

SEQ ID NO: 10084 - DNA, 22 bp, synthetic construct
  misc_feature 1..22: note = chemically synthesized
  source 1..22: mol_type = other DNA
tgaaggagggtggagttaaatc

SEQ ID NO: 10085 - DNA, 22 bp, synthetic construct
  misc_feature 1..22: note = chemically synthesized
  source 1..22: mol_type = other DNA
gaaggagggtggagttaaatca

SEQ ID NO: 10086 - DNA, 22 bp, synthetic construct
  misc_feature 1..22: note = chemically synthesized
  source 1..22: mol_type = other DNA
aaggagggtggagttaaatcat

SEQ ID NO: 10087 - DNA, 22 bp, synthetic construct
  misc_feature 1..22: note = chemically synthesized
  source 1..22: mol_type = other DNA
aatcattaagtgtattgaaggc

SEQ ID NO: 10088 - DNA, 22 bp, synthetic construct
  misc_feature 1..22: note = chemically synthesized
  source 1..22: mol_type = other DNA
agtgtattgaaggcgaaaagaa

SEQ ID NO: 10089 - DNA, 22 bp, synthetic construct
  misc_feature 1..22: note = chemically synthesized
  source 1..22: mol_type = other DNA
aaggcgaaaagaatcagagaac

SEQ ID NO: 10090 - DNA, 22 bp, synthetic construct
  misc_feature 1..22: note = chemically synthesized
  source 1..22: mol_type = other DNA
ttctttttaagttgagcttaaa

SEQ ID NO: 10091 - DNA, 22 bp, synthetic construct
  misc_feature 1..22: note = chemically synthesized
  source 1..22: mol_type = other DNA
ctttttaagttgagcttaaaat

SEQ ID NO: 10092 - DNA, 22 bp, synthetic construct
  misc_feature 1..22: note = chemically synthesized
  source 1..22: mol_type = other DNA
tttttaagttgagcttaaaata

SEQ ID NO: 10093 - DNA, 22 bp, synthetic construct
  misc_feature 1..22: note = chemically synthesized
  source 1..22: mol_type = other DNA
tttaagttgagcttaaaataag

SEQ ID NO: 10094 - DNA, 22 bp, synthetic construct
  misc_feature 1..22: note = chemically synthesized
  source 1..22: mol_type = other DNA
ttaagttgagcttaaaataagc

SEQ ID NO: 10095 - DNA, 22 bp, synthetic construct
  misc_feature 1..22: note = chemically synthesized
  source 1..22: mol_type = other DNA
taagttgagcttaaaataagct

SEQ ID NO: 10096 - DNA, 22 bp, synthetic construct
  misc_feature 1..22: note = chemically synthesized
  source 1..22: mol_type = other DNA
aagttgagcttaaaataagcta

SEQ ID NO: 10097 - DNA, 22 bp, synthetic construct
  misc_feature 1..22: note = chemically synthesized
  source 1..22: mol_type = other DNA
agttgagcttaaaataagctag

SEQ ID NO: 10098 - DNA, 22 bp, synthetic construct
  misc_feature 1..22: note = chemically synthesized
  source 1..22: mol_type = other DNA
agcttaaaataagctagagaat

SEQ ID NO: 10099 - DNA, 22 bp, synthetic construct
  misc_feature 1..22: note = chemically synthesized
  source 1..22: mol_type = other DNA
aaaataagctagagaatagatc

SEQ ID NO: 10100 - DNA, 22 bp, synthetic construct
  misc_feature 1..22: note = chemically synthesized
  source 1..22: mol_type = other DNA
aaataagctagagaatagatct

SEQ ID NO: 10101 - DNA, 22 bp, synthetic construct
  misc_feature 1..22: note = chemically synthesized
  source 1..22: mol_type = other DNA
gagaatagatctctggtctgaa

SEQ ID NO: 10102 - DNA, 22 bp, synthetic construct
  misc_feature 1..22: note = chemically synthesized
  source 1..22: mol_type = other DNA
tggtctgaaggtttatttacgg

SEQ ID NO: 10103 - DNA, 22 bp, synthetic construct
  misc_feature 1..22: note = chemically synthesized
  source 1..22: mol_type = other DNA
gtctgaaggtttatttacgggc

SEQ ID NO: 10104 - DNA, 22 bp, synthetic construct
  misc_feature 1..22: note = chemically synthesized
  source 1..22: mol_type = other DNA
aaggtttatttacgggcttttc

SEQ ID NO: 10105 - DNA, 22 bp, synthetic construct
  misc_feature 1..22: note = chemically synthesized
  source 1..22: mol_type = other DNA
atttacgggcttttctcactgg

SEQ ID NO: 10106 - DNA, 22 bp, synthetic construct
  misc_feature 1..22: note = chemically synthesized
  source 1..22: mol_type = other DNA
tttacgggcttttctcactgga

SEQ ID NO: 10107 - DNA, 22 bp, synthetic construct
  misc_feature 1..22: note = chemically synthesized
  source 1..22: mol_type = other DNA
acgggcttttctcactggatta

SEQ ID NO: 10108 - DNA, 22 bp, synthetic construct
  misc_feature 1..22: note = chemically synthesized
  source 1..22: mol_type = other DNA
cgggcttttctcactggattat

SEQ ID NO: 10109 - DNA, 22 bp, synthetic construct
  misc_feature 1..22: note = chemically synthesized
  source 1..22: mol_type = other DNA
ttctcactggattattttgttt

SEQ ID NO: 10110 - DNA, 22 bp, synthetic construct
  misc_feature 1..22: note = chemically synthesized
  source 1..22: mol_type = other DNA
tctcactggattattttgtttt

SEQ ID NO: 10111 - DNA, 22 bp, synthetic construct
  misc_feature 1..22: note = chemically synthesized
  source 1..22: mol_type = other DNA
ctcactggattattttgttttt

SEQ ID NO: 10112 - DNA, 22 bp, synthetic construct
  misc_feature 1..22: note = chemically synthesized
  source 1..22: mol_type = other DNA
tcactggattattttgtttttg

SEQ ID NO: 10113 - DNA, 22 bp, synthetic construct
  misc_feature 1..22: note = chemically synthesized
  source 1..22: mol_type = other DNA
actggattattttgtttttgtt

SEQ ID NO: 10114 - DNA, 22 bp, synthetic construct
  misc_feature 1..22: note = chemically synthesized
  source 1..22: mol_type = other DNA
gattattttgtttttgttctct

SEQ ID NO: 10115 - DNA, 22 bp, synthetic construct
  misc_feature 1..22: note = chemically synthesized
  source 1..22: mol_type = other DNA
ttttgtttttgttctctgctca

SEQ ID NO: 10116 - DNA, 22 bp, synthetic construct
  misc_feature 1..22: note = chemically synthesized
  source 1..22: mol_type = other DNA
tgtttttgttctctgctcatcc

SEQ ID NO: 10117 - DNA, 22 bp, synthetic construct
  misc_feature 1..22: note = chemically synthesized
  source 1..22: mol_type = other DNA
gtttttgttctctgctcatccc

SEQ ID NO: 10118 - DNA, 22 bp, synthetic construct
  misc_feature 1..22: note = chemically synthesized
  source 1..22: mol_type = other DNA
tttttgttctctgctcatccca

SEQ ID NO: 10119 - DNA, 22 bp, synthetic construct
  misc_feature 1..22: note = chemically synthesized
  source 1..22: mol_type = other DNA
ttgttctctgctcatcccacta

SEQ ID NO: 10120 - DNA, 22 bp, synthetic construct
  misc_feature 1..22: note = chemically synthesized
  source 1..22: mol_type = other DNA
tgttctctgctcatcccactac

SEQ ID NO: 10121 - DNA, 22 bp, synthetic construct
  misc_feature 1..22: note = chemically synthesized
  source 1..22: mol_type = other DNA
gttctctgctcatcccactaca

SEQ ID NO: 10122 - DNA, 22 bp, synthetic construct
  misc_feature 1..22: note = chemically synthesized
  source 1..22: mol_type = other DNA
ttctctgctcatcccactacac

SEQ ID NO: 10123 - DNA, 22 bp, synthetic construct
  misc_feature 1..22: note = chemically synthesized
  source 1..22: mol_type = other DNA
tctgctcatcccactacacaga

SEQ ID NO: 10124 - DNA, 22 bp, synthetic construct
  misc_feature 1..22: note = chemically synthesized
  source 1..22: mol_type = other DNA
tgctcatcccactacacagaat

SEQ ID NO: 10125 - DNA, 22 bp, synthetic construct
  misc_feature 1..22: note = chemically synthesized
  source 1..22: mol_type = other DNA
ctcatcccactacacagaatct

SEQ ID NO: 10126 - DNA, 22 bp, synthetic construct
  misc_feature 1..22: note = chemically synthesized
  source 1..22: mol_type = other DNA
atcccactacacagaatctgtt

SEQ ID NO: 10127 - DNA, 22 bp, synthetic construct
  misc_feature 1..22: note = chemically synthesized
  source 1..22: mol_type = other DNA
cacagaatctgttagaaaatat

SEQ ID NO: 10128 - DNA, 22 bp, synthetic construct
  misc_feature 1..22: note = chemically synthesized
  source 1..22: mol_type = other DNA
ttagaaaatataaagaataaag

SEQ ID NO: 10129 - DNA, 22 bp, synthetic construct
  misc_feature 1..22: note = chemically synthesized
  source 1..22: mol_type = other DNA
gaaaatataaagaataaaggat

SEQ ID NO: 10130 - DNA, 22 bp, synthetic construct
  misc_feature 1..22: note = chemically synthesized
  source 1..22: mol_type = other DNA
gaagaacatttacattcatcta

SEQ ID NO: 10131 - DNA, 22 bp, synthetic construct
  misc_feature 1..22: note = chemically synthesized
  source 1..22: mol_type = other DNA
acattcatctagtcaaaagccc

SEQ ID NO: 10132 - DNA, 22 bp, synthetic construct
  misc_feature 1..22: note = chemically synthesized
  source 1..22: mol_type = other DNA
cattcatctagtcaaaagccca

SEQ ID NO: 10133 - DNA, 22 bp, synthetic construct
  misc_feature 1..22: note = chemically synthesized
  source 1..22: mol_type = other DNA
atctagtcaaaagcccacattt

SEQ ID NO: 10134 - DNA, 22 bp, synthetic construct
  misc_feature 1..22: note = chemically synthesized
  source 1..22: mol_type = other DNA
gtcaaaagcccacattttagta

SEQ ID NO: 10135 - DNA, 22 bp, synthetic construct
  misc_feature 1..22: note = chemically synthesized
  source 1..22: mol_type = other DNA
tagtaaaagaaattactatcca

SEQ ID NO: 10136 - DNA, 22 bp, synthetic construct
  misc_feature 1..22: note = chemically synthesized
  source 1..22: mol_type = other DNA
agtaaaagaaattactatccaa

SEQ ID NO: 10137 - DNA, 22 bp, synthetic construct
  misc_feature 1..22: note = chemically synthesized
  source 1..22: mol_type = other DNA
gtaaaagaaattactatccaag

SEQ ID NO: 10138 - DNA, 22 bp, synthetic construct
  misc_feature 1..22: note = chemically synthesized
  source 1..22: mol_type = other DNA
ctatccaagaagcaaatgattt

SEQ ID NO: 10139 - DNA, 22 bp, synthetic construct
  misc_feature 1..22: note = chemically synthesized
  source 1..22: mol_type = other DNA
tccaagaagcaaatgatttgta

SEQ ID NO: 10140 - DNA, 22 bp, synthetic construct
  misc_feature 1..22: note = chemically synthesized
  source 1..22: mol_type = other DNA
gtacaagatcacagggcttttc

SEQ ID NO: 10141 - DNA, 22 bp, synthetic construct
  misc_feature 1..22: note = chemically synthesized
  source 1..22: mol_type = other DNA
tacaagatcacagggcttttca

SEQ ID NO: 10142 - DNA, 22 bp, synthetic construct
  misc_feature 1..22: note = chemically synthesized
  source 1..22: mol_type = other DNA
ttcaacagtaaggctaaaaggt

SEQ ID NO: 10143 - DNA, 22 bp, synthetic construct
  misc_feature 1..22: note = chemically synthesized
  source 1..22: mol_type = other DNA
tcaacagtaaggctaaaaggtt

SEQ ID NO: 10144 - DNA, 22 bp, synthetic construct
  misc_feature 1..22: note = chemically synthesized
  source 1..22: mol_type = other DNA
caacagtaaggctaaaaggtta

SEQ ID NO: 10145 - DNA, 22 bp, synthetic construct
  misc_feature 1..22: note = chemically synthesized
  source 1..22: mol_type = other DNA
aacagtaaggctaaaaggttaa

SEQ ID NO: 10146 - DNA, 22 bp, synthetic construct
  misc_feature 1..22: note = chemically synthesized
  source 1..22: mol_type = other DNA
aaaggttaagaaaattctgatt

SEQ ID NO: 10147 - DNA, 22 bp, synthetic construct
  misc_feature 1..22: note = chemically synthesized
  source 1..22: mol_type = other DNA
agaaaattctgattatcttaag

SEQ ID NO: 10148 - DNA, 22 bp, synthetic construct
  misc_feature 1..22: note = chemically synthesized
  source 1..22: mol_type = other DNA
tgattatcttaagagttgctat

SEQ ID NO: 10149 - DNA, 22 bp, synthetic construct
  misc_feature 1..22: note = chemically synthesized
  source 1..22: mol_type = other DNA
attatcttaagagttgctatta

SEQ ID NO: 10150 - DNA, 22 bp, synthetic construct
  misc_feature 1..22: note = chemically synthesized
  source 1..22: mol_type = other DNA
tcttaagagttgctattaatta

SEQ ID NO: 10151 - DNA, 22 bp, synthetic construct
  misc_feature 1..22: note = chemically synthesized
  source 1..22: mol_type = other DNA
aagagttgctattaattaaagc

SEQ ID NO: 10152 - DNA, 22 bp, synthetic construct
  misc_feature 1..22: note = chemically synthesized
  source 1..22: mol_type = other DNA
agagttgctattaattaaagcc

SEQ ID NO: 10153 - DNA, 22 bp, synthetic construct
  misc_feature 1..22: note = chemically synthesized
  source 1..22: mol_type = other DNA
ctattaattaaagccaacttaa

SEQ ID NO: 10154 - DNA, 22 bp, synthetic construct
  misc_feature 1..22: note = chemically synthesized
  source 1..22: mol_type = other DNA
ttaattaaagccaacttaaacc

SEQ ID NO: 10155 - DNA, 22 bp, synthetic construct
  misc_feature 1..22: note = chemically synthesized
  source 1..22: mol_type = other DNA
attaaagccaacttaaaccaac

SEQ ID NO: 10156 - DNA, 22 bp, synthetic construct
  misc_feature 1..22: note = chemically synthesized
  source 1..22: mol_type = other DNA
aagccaacttaaaccaacttta

SEQ ID NO: 10157 - DNA, 22 bp, synthetic construct
  misc_feature 1..22: note = chemically synthesized
  source 1..22: mol_type = other DNA
aaaccaactttaaatgtagagg

SEQ ID NO: 10158 - DNA, 22 bp, synthetic construct
  misc_feature 1..22: note = chemically synthesized
  source 1..22: mol_type = other DNA
aaccaactttaaatgtagaggg

SEQ ID NO: 10159 - DNA, 22 bp, synthetic construct
  misc_feature 1..22: note = chemically synthesized
  source 1..22: mol_type = other DNA
taaatgtagagggggatcctgg

SEQ ID NO: 10160 - DNA, 22 bp, synthetic construct
  misc_feature 1..22: note = chemically synthesized
  source 1..22: mol_type = other DNA
aaatgtagagggggatcctgga

SEQ ID NO: 10161 - DNA, 22 bp, synthetic construct
  misc_feature 1..22: note = chemically synthesized
  source 1..22: mol_type = other DNA
aatgtagagggggatcctggac

SEQ ID NO: 10162 - DNA, 22 bp, synthetic construct
  misc_feature 1..22: note = chemically synthesized
  source 1..22: mol_type = other DNA
gacttcacattaaccctgtgtc

SEQ ID NO: 10163 - DNA, 22 bp, synthetic construct
  misc_feature 1..22: note = chemically synthesized
  source 1..22: mol_type = other DNA
cacattaaccctgtgtcccctt

SEQ ID NO: 10164 - DNA, 22 bp, synthetic construct
  misc_feature 1..22: note = chemically synthesized
  source 1..22: mol_type = other DNA
acattaaccctgtgtccccttt

SEQ ID NO: 10165 - DNA, 22 bp, synthetic construct
  misc_feature 1..22: note = chemically synthesized
  source 1..22: mol_type = other DNA
accctgtgtcccctttttctcc

SEQ ID NO: 10166 - DNA, 22 bp, synthetic construct
  misc_feature 1..22: note = chemically synthesized
  source 1..22: mol_type = other DNA
tgtcccctttttctccactctc

SEQ ID NO: 10167 - DNA, 22 bp, synthetic construct
  misc_feature 1..22: note = chemically synthesized
  source 1..22: mol_type = other DNA
tttctccactctccccgtatcc

SEQ ID NO: 10168 - DNA, 22 bp, synthetic construct
  misc_feature 1..22: note = chemically synthesized
  source 1..22: mol_type = other DNA
ttctccactctccccgtatccc

SEQ ID NO: 10169 - DNA, 22 bp, synthetic construct
  misc_feature 1..22: note = chemically synthesized
  source 1..22: mol_type = other DNA
tctccactctccccgtatcccc

SEQ ID NO: 10170 - DNA, 22 bp, synthetic construct
  misc_feature 1..22: note = chemically synthesized
  source 1..22: mol_type = other DNA
ctccactctccccgtatcccct

SEQ ID NO: 10171 - DNA, 22 bp, synthetic construct
  misc_feature 1..22: note = chemically synthesized
  source 1..22: mol_type = other DNA
tccactctccccgtatccccta

SEQ ID NO: 10172 - DNA, 22 bp, synthetic construct
  misc_feature 1..22: note = chemically synthesized
  source 1..22: mol_type = other DNA
cactctccccgtatcccctatc

SEQ ID NO: 10173 - DNA, 22 bp, synthetic construct
  misc_feature 1..22: note = chemically synthesized
  source 1..22: mol_type = other DNA
tccccgtatcccctatcccacc

SEQ ID NO: 10174 - DNA, 22 bp, synthetic construct
  misc_feature 1..22: note = chemically synthesized
  source 1..22: mol_type = other DNA
cccgtatcccctatcccacccc

SEQ ID NO: 10175 - DNA, 22 bp, synthetic construct
  misc_feature 1..22: note = chemically synthesized
  source 1..22: mol_type = other DNA
tcccaccccaacccccacacag

SEQ ID NO: 10176 - DNA, 22 bp, synthetic construct
  misc_feature 1..22: note = chemically synthesized
  source 1..22: mol_type = other DNA
accacccaatattattgttctc

SEQ ID NO: 10177 - DNA, 22 bp, synthetic construct
  misc_feature 1..22: note = chemically synthesized
  source 1..22: mol_type = other DNA
ttgttctctgtaaacggaaaca

SEQ ID NO: 10178 - DNA, 22 bp, synthetic construct
  misc_feature 1..22: note = chemically synthesized
  source 1..22: mol_type = other DNA
ttctctgtaaacggaaacaacc

SEQ ID NO: 10179 - DNA, 22 bp, synthetic construct
  misc_feature 1..22: note = chemically synthesized
  source 1..22: mol_type = other DNA
tctgtaaacggaaacaacctgt

SEQ ID NO: 10180 - DNA, 22 bp, synthetic construct
  misc_feature 1..22: note = chemically synthesized
  source 1..22: mol_type = other DNA
tgtaaacggaaacaacctgttg

SEQ ID NO: 10181 - DNA, 22 bp, synthetic construct
  misc_feature 1..22: note = chemically synthesized
  source 1..22: mol_type = other DNA
taaacggaaacaacctgttgtc

SEQ ID NO: 10182 - DNA, 22 bp, synthetic construct
  misc_feature 1..22: note = chemically synthesized
  source 1..22: mol_type = other DNA
ttgtctaaagagttttaactat

SEQ ID NO: 10183 - DNA, 22 bp, synthetic construct
  misc_feature 1..22: note = chemically synthesized
  source 1..22: mol_type = other DNA
tctaaagagttttaactatggg

SEQ ID NO: 10184 - DNA, 22 bp, synthetic construct
  misc_feature 1..22: note = chemically synthesized
  source 1..22: mol_type = other DNA
aagagttttaactatgggctca

SEQ ID NO: 10185 - DNA, 22 bp, synthetic construct
  misc_feature 1..22: note = chemically synthesized
  source 1..22: mol_type = other DNA
taactatgggctcacgggtgag

SEQ ID NO: 10186 - DNA, 22 bp, synthetic construct
  misc_feature 1..22: note = chemically synthesized
  source 1..22: mol_type = other DNA
aactatgggctcacgggtgagc

SEQ ID NO: 10187 - DNA, 22 bp, synthetic construct
  misc_feature 1..22: note = chemically synthesized
  source 1..22: mol_type = other DNA
actatgggctcacgggtgagct

SEQ ID NO: 10188 - DNA, 22 bp, synthetic construct
  misc_feature 1..22: note = chemically synthesized
  source 1..22: mol_type = other DNA
tgggctcacgggtgagctaaac

SEQ ID NO: 10189 - DNA, 22 bp, synthetic construct
  misc_feature 1..22: note = chemically synthesized
  source 1..22: mol_type = other DNA
acgggtgagctaaacaggtttc

SEQ ID NO: 10190 - DNA, 22 bp, synthetic construct
  misc_feature 1..22: note = chemically synthesized
  source 1..22: mol_type = other DNA
aacaggtttcccatctttttct

SEQ ID NO: 10191 - DNA, 22 bp, synthetic construct
  misc_feature 1..22: note = chemically synthesized
  source 1..22: mol_type = other DNA
cccatctttttctggacccagg

SEQ ID NO: 10192 - DNA, 22 bp, synthetic construct
  misc_feature 1..22: note = chemically synthesized
  source 1..22: mol_type = other DNA
ccatctttttctggacccagga

SEQ ID NO: 10193 - DNA, 22 bp, synthetic construct
  misc_feature 1..22: note = chemically synthesized
  source 1..22: mol_type = other DNA
tttctggacccaggatcttagt

SEQ ID NO: 10194 - DNA, 22 bp, synthetic construct
  misc_feature 1..22: note = chemically synthesized
  source 1..22: mol_type = other DNA
ttctggacccaggatcttagtg

SEQ ID NO: 10195 - DNA, 22 bp, synthetic construct
  misc_feature 1..22: note = chemically synthesized
  source 1..22: mol_type = other DNA
tctggacccaggatcttagtgg

SEQ ID NO: 10196 - DNA, 22 bp, synthetic construct
  misc_feature 1..22: note = chemically synthesized
  source 1..22: mol_type = other DNA
ctggacccaggatcttagtggg

SEQ ID NO: 10197 - DNA, 22 bp, synthetic construct
  misc_feature 1..22: note = chemically synthesized
  source 1..22: mol_type = other DNA
tggacccaggatcttagtgggg

SEQ ID NO: 10198 - DNA, 22 bp, synthetic construct
  misc_feature 1..22: note = chemically synthesized
  source 1..22: mol_type = other DNA
gacccaggatcttagtggggat

SEQ ID NO: 10199 - DNA, 22 bp, synthetic construct
  misc_feature 1..22: note = chemically synthesized
  source 1..22: mol_type = other DNA
agtggggattttcactctgttc

SEQ ID NO: 10200 - DNA, 22 bp, synthetic construct
  misc_feature 1..22: note = chemically synthesized
  source 1..22: mol_type = other DNA
gtggggattttcactctgttca

SEQ ID NO: 10201 - DNA, 22 bp, synthetic construct
  misc_feature 1..22: note = chemically synthesized
  source 1..22: mol_type = other DNA
tcactctgttcactattttgtt

SEQ ID NO: 10202 - DNA, 22 bp, synthetic construct
  misc_feature 1..22: note = chemically synthesized
  source 1..22: mol_type = other DNA
cactctgttcactattttgttg

SEQ ID NO: 10203 - DNA, 22 bp, synthetic construct
  misc_feature 1..22: note = chemically synthesized
  source 1..22: mol_type = other DNA
actctgttcactattttgttgc

SEQ ID NO: 10204 - DNA, 22 bp, synthetic construct
  misc_feature 1..22: note = chemically synthesized
  source 1..22: mol_type = other DNA
tgttcactattttgttgccctt

SEQ ID NO: 10205 - DNA, 22 bp, synthetic construct
  misc_feature 1..22: note = chemically synthesized
  source 1..22: mol_type = other DNA
ttcactattttgttgcccttca

SEQ ID NO: 10206 - DNA, 22 bp, synthetic construct
  misc_feature 1..22: note = chemically synthesized
  source 1..22: mol_type = other DNA
actattttgttgcccttcaaac

SEQ ID NO: 10207 - DNA, 22 bp, synthetic construct
  misc_feature 1..22: note = chemically synthesized
  source 1..22: mol_type = other DNA
ttttgttgcccttcaaaccagt

SEQ ID NO: 10208 - DNA, 22 bp, synthetic construct
  misc_feature 1..22: note = chemically synthesized
  source 1..22: mol_type = other DNA
tgttgcccttcaaaccagtaag

SEQ ID NO: 10209 - DNA, 22 bp, synthetic construct
  misc_feature 1..22: note = chemically synthesized
  source 1..22: mol_type = other DNA
gttgcccttcaaaccagtaagc

SEQ ID NO: 10210 - DNA, 22 bp, synthetic construct
  misc_feature 1..22: note = chemically synthesized
  source 1..22: mol_type = other DNA
ttgcccttcaaaccagtaagca

SEQ ID NO: 10211 - DNA, 22 bp, synthetic construct
  misc_feature 1..22: note = chemically synthesized
  source 1..22: mol_type = other DNA
cccttcaaaccagtaagcattt

SEQ ID NO: 10212 - DNA, 22 bp, synthetic construct
  misc_feature 1..22: note = chemically synthesized
  source 1..22: mol_type = other DNA
caaaccagtaagcatttatgag

SEQ ID NO: 10213 - DNA, 22 bp, synthetic construct
  misc_feature 1..22: note = chemically synthesized
  source 1..22: mol_type = other DNA
aaaccagtaagcatttatgagg

SEQ ID NO: 10214 - DNA, 22 bp, synthetic construct
  misc_feature 1..22: note = chemically synthesized
  source 1..22: mol_type = other DNA
atgaggactcacactatgccag

SEQ ID NO: 10215 - DNA, 22 bp, synthetic construct
  misc_feature 1..22: note = chemically synthesized
  source 1..22: mol_type = other DNA
tgaggactcacactatgccaga

SEQ ID NO: 10216 - DNA, 22 bp, synthetic construct
  misc_feature 1..22: note = chemically synthesized
  source 1..22: mol_type = other DNA
acactatgccagatacataggt

SEQ ID NO: 10217 - DNA, 22 bp, synthetic construct
  misc_feature 1..22: note = chemically synthesized
  source 1..22: mol_type = other DNA
tgccagatacataggtggcagg

SEQ ID NO: 10218 - DNA, 22 bp, synthetic construct
  misc_feature 1..22: note = chemically synthesized
  source 1..22: mol_type = other DNA
ttcactccagatataatctatc

SEQ ID NO: 10219 - DNA, 22 bp, synthetic construct
  misc_feature 1..22: note = chemically synthesized
  source 1..22: mol_type = other DNA
cactccagatataatctatctg

SEQ ID NO: 10220 - DNA, 22 bp, synthetic construct
  misc_feature 1..22: note = chemically synthesized
  source 1..22: mol_type = other DNA
actccagatataatctatctga

SEQ ID NO: 10221 - DNA, 20 bp, synthetic construct
  misc_feature 1..20: note = chemically synthesized
  source 1..20: mol_type = other DNA
actttcacaatctgctagca

SEQ ID NO: 10222 - DNA, 20 bp, synthetic construct
  misc_feature 1..20: note = chemically synthesized
  source 1..20: mol_type = other DNA
ctttcacaatctgctagcaa

SEQ ID NO: 10223 - DNA, 20 bp, synthetic construct
  misc_feature 1..20: note = chemically synthesized
  source 1..20: mol_type = other DNA
atctgctagcaaaggttatg

SEQ ID NO: 10224 - DNA, 20 bp, synthetic construct
  misc_feature 1..20: note = chemically synthesized
  source 1..20: mol_type = other DNA
gcagcgcgtgaacatgatca

SEQ ID NO: 10225 - DNA, 20 bp, synthetic construct
  misc_feature 1..20: note = chemically synthesized
  source 1..20: mol_type = other DNA
gcgcgtgaacatgatcatgg

SEQ ID NO: 10226 - DNA, 20 bp, synthetic construct
  misc_feature 1..20: note = chemically synthesized
  source 1..20: mol_type = other DNA
catgatcatggcagaatcac

SEQ ID NO: 10227 - DNA, 20 bp, synthetic construct
  misc_feature 1..20: note = chemically synthesized
  source 1..20: mol_type = other DNA
atgatcatggcagaatcacc

SEQ ID NO: 10228 - DNA, 20 bp, synthetic construct
  misc_feature 1..20: note = chemically synthesized
  source 1..20: mol_type = other DNA
cctcatcaccatctgccttt

SEQ ID NO: 10229 - DNA, 20 bp, synthetic construct
  misc_feature 1..20: note = chemically synthesized
  source 1..20: mol_type = other DNA
ctcatcaccatctgcctttt

SEQ ID NO: 10230 - DNA, 20 bp, synthetic construct
  misc_feature 1..20: note = chemically synthesized
  source 1..20: mol_type = other DNA
tgccttttaggatatctact

SEQ ID NO: 10231 - DNA, 20 bp, synthetic construct
  misc_feature 1..20: note = chemically synthesized
  source 1..20: mol_type = other DNA
tctactcagtgctgaatgta

SEQ ID NO: 10232 - DNA, 20 bp, synthetic construct
  misc_feature 1..20: note = chemically synthesized
  source 1..20: mol_type = other DNA
ctactcagtgctgaatgtac

SEQ ID NO: 10233 - DNA, 20 bp, synthetic construct
  misc_feature 1..20: note = chemically synthesized
  source 1..20: mol_type = other DNA
ttccttttttaaaatacatt

SEQ ID NO: 10234 - DNA, 20 bp, synthetic construct
  misc_feature 1..20: note = chemically synthesized
  source 1..20: mol_type = other DNA
cattgagtatgcttgccttt

SEQ ID NO: 10235 - DNA, 20 bp, synthetic construct
  misc_feature 1..20: note = chemically synthesized
  source 1..20: mol_type = other DNA
gtatgcttgccttttagata

SEQ ID NO: 10236 - DNA, 20 bp, synthetic construct
  misc_feature 1..20: note = chemically synthesized
  source 1..20: mol_type = other DNA
attttgattacatgatttga

SEQ ID NO: 10237 - DNA, 20 bp, synthetic construct
  misc_feature 1..20: note = chemically synthesized
  source 1..20: mol_type = other DNA
atgatttgacagcaatattg

SEQ ID NO: 10238 - DNA, 20 bp, synthetic construct
  misc_feature 1..20: note = chemically synthesized
  source 1..20: mol_type = other DNA
gatttgacagcaatattgaa

SEQ ID NO: 10239 - DNA, 20 bp, synthetic construct
  misc_feature 1..20: note = chemically synthesized
  source 1..20: mol_type = other DNA
agcaatattgaagagtctaa

SEQ ID NO: 10240 - DNA, 20 bp, synthetic construct
  misc_feature 1..20: note = chemically synthesized
  source 1..20: mol_type = other DNA
atattgaagagtctaacagc

SEQ ID NO: 10241 - DNA, 20 bp, synthetic construct
  misc_feature 1..20: note = chemically synthesized
  source 1..20: mol_type = other DNA
agagtctaacagccagcacg

SEQ ID NO: 10242 - DNA, 20 bp, synthetic construct
  misc_feature 1..20: note = chemically synthesized
  source 1..20: mol_type = other DNA
gagtctaacagccagcacgc

SEQ ID NO: 10243 - DNA, 20 bp, synthetic construct
  misc_feature 1..20: note = chemically synthesized
  source 1..20: mol_type = other DNA
ctaacagccagcacgcaggt

SEQ ID NO: 10244 - DNA, 20 bp, synthetic construct
  misc_feature 1..20: note = chemically synthesized
  source 1..20: mol_type = other DNA
cagccagcacgcaggttggt

SEQ ID NO: 10245 - DNA, 20 bp, synthetic construct
  misc_feature 1..20: note = chemically synthesized
  source 1..20: mol_type = other DNA
gcacgcaggttggtaagtac

SEQ ID NO: 10246 - DNA, 20 bp, synthetic construct
  misc_feature 1..20: note = chemically synthesized
  source 1..20: mol_type = other DNA
ggtaagtactggttctttgt

SEQ ID NO: 10247 - DNA, 20 bp, synthetic construct
  misc_feature 1..20: note = chemically synthesized
  source 1..20: mol_type = other DNA
agtactggttctttgttagc

SEQ ID NO: 10248 - DNA, 20 bp, synthetic construct
  misc_feature 1..20: note = chemically synthesized
  source 1..20: mol_type = other DNA
gtactggttctttgttagct

SEQ ID NO: 10249 - DNA, 20 bp, synthetic construct
  misc_feature 1..20: note = chemically synthesized
  source 1..20: mol_type = other DNA
tcttcatttttaaaactaaa

SEQ ID NO: 10250 - DNA, 20 bp, synthetic construct
  misc_feature 1..20: note = chemically synthesized
  source 1..20: mol_type = other DNA
tatgtttaataaacactgtt

SEQ ID NO: 10251 - DNA, 20 bp, synthetic construct
  misc_feature 1..20: note = chemically synthesized
  source 1..20: mol_type = other DNA
acactgttcagttcatgatt

SEQ ID NO: 10252 - DNA, 20 bp, synthetic construct
  misc_feature 1..20: note = chemically synthesized
  source 1..20: mol_type = other DNA
tttggtcatgtaattcctgt

SEQ ID NO: 10253 - DNA, 20 bp, synthetic construct
  misc_feature 1..20: note = chemically synthesized
  source 1..20: mol_type = other DNA
ttagaaaacattcatctcct

SEQ ID NO: 10254 - DNA, 20 bp, synthetic construct
  misc_feature 1..20: note = chemically synthesized
  source 1..20: mol_type = other DNA
ccttggtttaaaaaaattaa

SEQ ID NO: 10255 - DNA, 20 bp, synthetic construct
  misc_feature 1..20: note = chemically synthesized
  source 1..20: mol_type = other DNA
tggtttaaaaaaattaaaag

SEQ ID NO: 10256 - DNA, 20 bp, synthetic construct
  misc_feature 1..20: note = chemically synthesized
  source 1..20: mol_type = other DNA
ggtttaaaaaaattaaaagt

SEQ ID NO: 10257 - DNA, 20 bp, synthetic construct
  misc_feature 1..20: note = chemically synthesized
  source 1..20: mol_type = other DNA
aaattaaaagtgggaaaaca

SEQ ID NO: 10258 - DNA, 20 bp, synthetic construct
  misc_feature 1..20: note = chemically synthesized
  source 1..20: mol_type = other DNA
aaagtgggaaaacaaagaaa

SEQ ID NO: 10259 - DNA, 20 bp, synthetic construct
  misc_feature 1..20: note = chemically synthesized
  source 1..20: mol_type = other DNA
gtgggaaaacaaagaaatag

SEQ ID NO: 10260 - DNA, 20 bp, synthetic construct
  misc_feature 1..20: note = chemically synthesized
  source 1..20: mol_type = other DNA
aacaaagaaatagcagaata

SEQ ID NO: 10261 - DNA, 20 bp, synthetic construct
  misc_feature 1..20: note = chemically synthesized
  source 1..20: mol_type = other DNA
ataaccacattatttttgtt

SEQ ID NO: 10262 - DNA, 20 bp, synthetic construct
  misc_feature 1..20: note = chemically synthesized
  source 1..20: mol_type = other DNA
ttaccactttgaaatcaaaa

SEQ ID NO: 10263 - DNA, 20 bp, synthetic construct
  misc_feature 1..20: note = chemically synthesized
  source 1..20: mol_type = other DNA
taccactttgaaatcaaaat

SEQ ID NO: 10264 - DNA, 20 bp, synthetic construct
  misc_feature 1..20: note = chemically synthesized
  source 1..20: mol_type = other DNA
gaaatcaaaatgggaaacaa

SEQ ID NO: 10265 - DNA, 20 bp, synthetic construct
  misc_feature 1..20: note = chemically synthesized
  source 1..20: mol_type = other DNA
ggaaacaaaagcacaaacaa

SEQ ID NO: 10266 - DNA, 20 bp, synthetic construct
  misc_feature 1..20: note = chemically synthesized
  source 1..20: mol_type = other DNA
aatggccttatttacacaaa

SEQ ID NO: 10267 - DNA, 20 bp, synthetic construct
  misc_feature 1..20: note = chemically synthesized
  source 1..20: mol_type = other DNA
tacacaaaaagtctgatttt

SEQ ID NO: 10268 - DNA, 20 bp, synthetic construct
  misc_feature 1..20: note = chemically synthesized
  source 1..20: mol_type = other DNA
tttaagatatatgacatttc

SEQ ID NO: 10269 - DNA, 20 bp, synthetic construct
  misc_feature 1..20: note = chemically synthesized
  source 1..20: mol_type = other DNA
ttaagatatatgacatttca

SEQ ID NO: 10270 - DNA, 20 bp, synthetic construct
  misc_feature 1..20: note = chemically synthesized
  source 1..20: mol_type = other DNA
tatatgacatttcaaggttt

SEQ ID NO: 10271 - DNA, 20 bp, synthetic construct
  misc_feature 1..20: note = chemically synthesized
  source 1..20: mol_type = other DNA
atgacatttcaaggtttcag

SEQ ID NO: 10272 - DNA, 20 bp, synthetic construct
  misc_feature 1..20: note = chemically synthesized
  source 1..20: mol_type = other DNA
aggtttcagaagtatgtaat

SEQ ID NO: 10273 - DNA, 20 bp, synthetic construct
  misc_feature 1..20: note = chemically synthesized
  source 1..20: mol_type = other DNA
ggtttcagaagtatgtaatg

SEQ ID NO: 10274 - DNA, 20 bp, synthetic construct
  misc_feature 1..20: note = chemically synthesized
  source 1..20: mol_type = other DNA
aattatatatcttcaattta

SEQ ID NO: 10275 - DNA, 20 bp, synthetic construct
  misc_feature 1..20: note = chemically synthesized
  source 1..20: mol_type = other DNA
atatcttcaatttaaagttt

SEQ ID NO: 10276 - DNA, 20 bp, synthetic construct
  misc_feature 1..20: note = chemically synthesized
  source 1..20: mol_type = other DNA
aaagttttagttaaaacata

SEQ ID NO: 10277 - DNA, 20 bp, synthetic construct
  misc_feature 1..20: note = chemically synthesized
  source 1..20: mol_type = other DNA
cataaagattaacctttcat

SEQ ID NO: 10278 - DNA, 20 bp, synthetic construct
  misc_feature 1..20: note = chemically synthesized
  source 1..20: mol_type = other DNA
aagattaacctttcattagc

SEQ ID NO: 10279 - DNA, 20 bp, synthetic construct
  misc_feature 1..20: note = chemically synthesized
  source 1..20: mol_type = other DNA
acctttcattagcaagctgt

SEQ ID NO: 10280 - DNA, 20 bp, synthetic construct
  misc_feature 1..20: note = chemically synthesized
  source 1..20: mol_type = other DNA
caagctgttagttatcacca

SEQ ID NO: 10281 - DNA, 20 bp, synthetic construct
  misc_feature 1..20: note = chemically synthesized
  source 1..20: mol_type = other DNA
gttatcaccaaagcttttca

SEQ ID NO: 10282 - DNA, 20 bp, synthetic construct
  misc_feature 1..20: note = chemically synthesized
  source 1..20: mol_type = other DNA
caccaaagcttttcatggat

SEQ ID NO: 10283 - DNA, 20 bp, synthetic construct
  misc_feature 1..20: note = chemically synthesized
  source 1..20: mol_type = other DNA
accaaagcttttcatggatt

SEQ ID NO: 10284 - DNA, 20 bp, synthetic construct
  misc_feature 1..20: note = chemically synthesized
  source 1..20: mol_type = other DNA
tgtctctatgtcaaacatct

SEQ ID NO: 10285 - DNA, 20 bp, synthetic construct
  misc_feature 1..20: note = chemically synthesized
  source 1..20: mol_type = other DNA
tctctatgtcaaacatcttg

SEQ ID NO: 10286 - DNA, 20 bp, synthetic construct
  misc_feature 1..20: note = chemically synthesized
  source 1..20: mol_type = other DNA
aacatcttggagttgatatt

SEQ ID NO: 10287 - DNA, 20 bp, synthetic construct
  misc_feature 1..20: note = chemically synthesized
  source 1..20: mol_type = other DNA
acatcttggagttgatattt

SEQ ID NO: 10288 - DNA, 20 bp, synthetic construct
  misc_feature 1..20: note = chemically synthesized
  source 1..20: mol_type = other DNA
catcttggagttgatatttg

SEQ ID NO: 10289 - DNA, 20 bp, synthetic construct
  misc_feature 1..20: note = chemically synthesized
  source 1..20: mol_type = other DNA
atttggggaaacacaatact

SEQ ID NO: 10290 - DNA, 20 bp, synthetic construct
  misc_feature 1..20: note = chemically synthesized
  source 1..20: mol_type = other DNA
gggaaacacaatactcagtt

SEQ ID NO: 10291 - DNA, 20 bp, synthetic construct
  misc_feature 1..20: note = chemically synthesized
  source 1..20: mol_type = other DNA
caatactcagttgagttccc

SEQ ID NO: 10292 - DNA, 20 bp, synthetic construct
  misc_feature 1..20: note = chemically synthesized
  source 1..20: mol_type = other DNA
aatactcagttgagttccct

SEQ ID NO: 10293 - DNA, 20 bp, synthetic construct
  misc_feature 1..20: note = chemically synthesized
  source 1..20: mol_type = other DNA
atactcagttgagttcccta

SEQ ID NO: 10294 - DNA, 20 bp, synthetic construct
  misc_feature 1..20: note = chemically synthesized
  source 1..20: mol_type = other DNA
tactcagttgagttccctag

SEQ ID NO: 10295 - DNA, 20 bp, synthetic construct
  misc_feature 1..20: note = chemically synthesized
  source 1..20: mol_type = other DNA
ctcagttgagttccctaggg

SEQ ID NO: 10296 - DNA, 20 bp, synthetic construct
  misc_feature 1..20: note = chemically synthesized
  source 1..20: mol_type = other DNA
ttgagttccctaggggagaa

SEQ ID NO: 10297 - DNA, 20 bp, synthetic construct
  misc_feature 1..20: note = chemically synthesized
  source 1..20: mol_type = other DNA
gttccctaggggagaaaagc

SEQ ID NO: 10298 - DNA, 20 bp, synthetic construct
  misc_feature 1..20: note = chemically synthesized
  source 1..20: mol_type = other DNA
taggggagaaaagcaagctt

SEQ ID NO: 10299 - DNA, 20 bp, synthetic construct
  misc_feature 1..20: note = chemically synthesized
  source 1..20: mol_type = other DNA
caagcttaagaattgacata

SEQ ID NO: 10300 - DNA, 20 bp, synthetic construct
  misc_feature 1..20: note = chemically synthesized
  source 1..20: mol_type = other DNA
agcttaagaattgacataaa

SEQ ID NO: 10301 - DNA, 20 bp, synthetic construct
  misc_feature 1..20: note = chemically synthesized
  source 1..20: mol_type = other DNA
ttaagaattgacataaagag

SEQ ID NO: 10302 - DNA, 20 bp, synthetic construct
  misc_feature 1..20: note = chemically synthesized
  source 1..20: mol_type = other DNA
taagaattgacataaagagt

SEQ ID NO: 10303 - DNA, 20 bp, synthetic construct
  misc_feature 1..20: note = chemically synthesized
  source 1..20: mol_type = other DNA
gaattgacataaagagtagg

SEQ ID NO: 10304 - DNA, 20 bp, synthetic construct
  misc_feature 1..20: note = chemically synthesized
  source 1..20: mol_type = other DNA
tgacataaagagtaggaagt

SEQ ID NO: 10305 - DNA, 20 bp, synthetic construct
  misc_feature 1..20: note = chemically synthesized
  source 1..20: mol_type = other DNA
actttgttttttcacaacta

SEQ ID NO: 10306 - DNA, 20 bp, synthetic construct
  misc_feature 1..20: note = chemically synthesized
  source 1..20: mol_type = other DNA
cagtgactttatgtatttcc

SEQ ID NO: 10307 - DNA, 20 bp, synthetic construct
  misc_feature 1..20: note = chemically synthesized
  source 1..20: mol_type = other DNA
gtgactttatgtatttccca

SEQ ID NO: 10308 - DNA, 20 bp, synthetic construct
  misc_feature 1..20: note = chemically synthesized
  source 1..20: mol_type = other DNA
tgactttatgtatttcccag

SEQ ID NO: 10309 - DNA, 20 bp, synthetic construct
  misc_feature 1..20: note = chemically synthesized
  source 1..20: mol_type = other DNA
ctttatgtatttcccagagg

SEQ ID NO: 10310 - DNA, 20 bp, synthetic construct
  misc_feature 1..20: note = chemically synthesized
  source 1..20: mol_type = other DNA
tttatgtatttcccagagga

SEQ ID NO: 10311 - DNA, 20 bp, synthetic construct
  misc_feature 1..20: note = chemically synthesized
  source 1..20: mol_type = other DNA
atttcccagaggaaggcata

SEQ ID NO: 10312 - DNA, 20 bp, synthetic construct
  misc_feature 1..20: note = chemically synthesized
  source 1..20: mol_type = other DNA
tttcccagaggaaggcatac

SEQ ID NO: 10313 - DNA, 20 bp, synthetic construct
  misc_feature 1..20: note = chemically synthesized
  source 1..20: mol_type = other DNA
ttcccagaggaaggcataca

SEQ ID NO: 10314 - DNA, 20 bp, synthetic construct
  misc_feature 1..20: note = chemically synthesized
  source 1..20: mol_type = other DNA
ccagaggaaggcatacaggg

SEQ ID NO: 10315 - DNA, 20 bp, synthetic construct
  misc_feature 1..20: note = chemically synthesized
  source 1..20: mol_type = other DNA
agggaagaaattatcccatt

SEQ ID NO: 10316 - DNA, 20 bp, synthetic construct
  misc_feature 1..20: note = chemically synthesized
  source 1..20: mol_type = other DNA
aattatcccatttggacaaa

SEQ ID NO: 10317 - DNA, 20 bp, synthetic construct
  misc_feature 1..20: note = chemically synthesized
  source 1..20: mol_type = other DNA
ggacaaacagcatgttctca

SEQ ID NO: 10318 - DNA, 20 bp, synthetic construct
  misc_feature 1..20: note = chemically synthesized
  source 1..20: mol_type = other DNA
gacaaacagcatgttctcac

SEQ ID NO: 10319 - DNA, 20 bp, synthetic construct
  misc_feature 1..20: note = chemically synthesized
  source 1..20: mol_type = other DNA
aaacagcatgttctcacagg

SEQ ID NO: 10320 - DNA, 20 bp, synthetic construct
  misc_feature 1..20: note = chemically synthesized
  source 1..20: mol_type = other DNA
acacttacttgtcaactttc

SEQ ID NO: 10321 - DNA, 20 bp, synthetic construct
  misc_feature 1..20: note = chemically synthesized
  source 1..20: mol_type = other DNA
caactttctagaatcaaatc

SEQ ID NO: 10322 - DNA, 20 bp, synthetic construct
  misc_feature 1..20: note = chemically synthesized
  source 1..20: mol_type = other DNA
ctttctagaatcaaatctag

SEQ ID NO: 10323 - DNA, 20 bp, synthetic construct
  misc_feature 1..20: note = chemically synthesized
  source 1..20: mol_type = other DNA
gaatcaaatctagtagctga

SEQ ID NO: 10324 - DNA, 20 bp, synthetic construct
  misc_feature 1..20: note = chemically synthesized
  source 1..20: mol_type = other DNA
aatctagtagctgacagtac

SEQ ID NO: 10325 - DNA, 20 bp, synthetic construct
  misc_feature 1..20: note = chemically synthesized
  source 1..20: mol_type = other DNA
atctagtagctgacagtacc

SEQ ID NO: 10326 - DNA, 20 bp, synthetic construct
  misc_feature 1..20: note = chemically synthesized
  source 1..20: mol_type = other DNA
gtagctgacagtaccaggat

SEQ ID NO: 10327 - DNA, 20 bp, synthetic construct
  misc_feature 1..20: note = chemically synthesized
  source 1..20: mol_type = other DNA
tagctgacagtaccaggatc

SEQ ID NO: 10328 - DNA, 20 bp, synthetic construct
  misc_feature 1..20: note = chemically synthesized
  source 1..20: mol_type = other DNA
agctgacagtaccaggatca

SEQ ID NO: 10329 - DNA, 20 bp, synthetic construct
  misc_feature 1..20: note = chemically synthesized
  source 1..20: mol_type = other DNA
gctgacagtaccaggatcag

SEQ ID NO: 10330 - DNA, 20 bp, synthetic construct
  misc_feature 1..20: note = chemically synthesized
  source 1..20: mol_type = other DNA
ggatcaggggtgccaaccct

SEQ ID NO: 10331 - DNA, 20 bp, synthetic construct
  misc_feature 1..20: note = chemically synthesized
  source 1..20: mol_type = other DNA
gtgccaaccctaagcacccc

SEQ ID NO: 10332 - DNA, 20 bp, synthetic construct
  misc_feature 1..20: note = chemically synthesized
  source 1..20: mol_type = other DNA
caaccctaagcacccccaga

SEQ ID NO: 10333 - DNA, 20 bp, synthetic construct
  misc_feature 1..20: note = chemically synthesized
  source 1..20: mol_type = other DNA
agcacccccagaaagctgac

SEQ ID NO: 10334 - DNA, 20 bp, synthetic construct
  misc_feature 1..20: note = chemically synthesized
  source 1..20: mol_type = other DNA
cagaaagctgactggccctg

SEQ ID NO: 10335 - DNA, 20 bp, synthetic construct
  misc_feature 1..20: note = chemically synthesized
  source 1..20: mol_type = other DNA
tggccctgtggttcccactc

SEQ ID NO: 10336 - DNA, 20 bp, synthetic construct
  misc_feature 1..20: note = chemically synthesized
  source 1..20: mol_type = other DNA
tcccactccagacatgatgt

SEQ ID NO: 10337 - DNA, 20 bp, synthetic construct
  misc_feature 1..20: note = chemically synthesized
  source 1..20: mol_type = other DNA
catgatgtcagctgtgaaat

SEQ ID NO: 10338 - DNA, 20 bp, synthetic construct
  misc_feature 1..20: note = chemically synthesized
  source 1..20: mol_type = other DNA
aataacgataaaaaaaaata

SEQ ID NO: 10339 - DNA, 20 bp, synthetic construct
  misc_feature 1..20: note = chemically synthesized
  source 1..20: mol_type = other DNA
taacgataaaaaaaaataca

SEQ ID NO: 10340 - DNA, 20 bp, synthetic construct
  misc_feature 1..20: note = chemically synthesized
  source 1..20: mol_type = other DNA
aacgataaaaaaaaatacag

SEQ ID NO: 10341 - DNA, 20 bp, synthetic construct
  misc_feature 1..20: note = chemically synthesized
  source 1..20: mol_type = other DNA
aaaaaatacagaggttaaac

SEQ ID NO: 10342 - DNA, 20 bp, synthetic construct
  misc_feature 1..20: note = chemically synthesized
  source 1..20: mol_type = other DNA
atacagaggttaaactagca

SEQ ID NO: 10343 - DNA, 20 bp, synthetic construct
  misc_feature 1..20: note = chemically synthesized
  source 1..20: mol_type = other DNA
agaggttaaactagcaaagt

SEQ ID NO: 10344 - DNA, 20 bp, synthetic construct
  misc_feature 1..20: note = chemically synthesized
  source 1..20: mol_type = other DNA
ttaaactagcaaagtgagta

SEQ ID NO: 10345 - DNA, 20 bp, synthetic construct
  misc_feature 1..20: note = chemically synthesized
  source 1..20: mol_type = other DNA
ctagcaaagtgagtaaagtc

SEQ ID NO: 10346 - DNA, 20 bp, synthetic construct
  misc_feature 1..20: note = chemically synthesized
  source 1..20: mol_type = other DNA
tagcaaagtgagtaaagtca

SEQ ID NO: 10347 - DNA, 20 bp, synthetic construct
  misc_feature 1..20: note = chemically synthesized
  source 1..20: mol_type = other DNA
agcaaagtgagtaaagtcaa

SEQ ID NO: 10348 - DNA, 20 bp, synthetic construct
  misc_feature 1..20: note = chemically synthesized
  source 1..20: mol_type = other DNA
gtgagtaaagtcaagggata

SEQ ID NO: 10349 - DNA, 20 bp, synthetic construct
  misc_feature 1..20: note = chemically synthesized
  source 1..20: mol_type = other DNA
aagggataaagaaaatttgt

SEQ ID NO: 10350 - DNA, 20 bp, synthetic construct
  misc_feature 1..20: note = chemically synthesized
  source 1..20: mol_type = other DNA
aatttgttggaaaactcaca

SEQ ID NO: 10351 - DNA, 20 bp, synthetic construct
  misc_feature 1..20: note = chemically synthesized
  source 1..20: mol_type = other DNA
ttgttggaaaactcacaaag

SEQ ID NO: 10352 - DNA, 20 bp, synthetic construct
  misc_feature 1..20: note = chemically synthesized
  source 1..20: mol_type = other DNA
tgttggaaaactcacaaagc

SEQ ID NO: 10353 - DNA, 20 bp, synthetic construct
  misc_feature 1..20: note = chemically synthesized
  source 1..20: mol_type = other DNA
aactcacaaagcaggacata

SEQ ID NO: 10354 - DNA, 20 bp, synthetic construct
  misc_feature 1..20: note = chemically synthesized
  source 1..20: mol_type = other DNA
cacaaagcaggacataaagc

SEQ ID NO: 10355 - DNA, 20 bp, synthetic construct
  misc_feature 1..20: note = chemically synthesized
  source 1..20: mol_type = other DNA
acaaagcaggacataaagca

SEQ ID NO: 10356 - DNA, 20 bp, synthetic construct
  misc_feature 1..20: note = chemically synthesized
  source 1..20: mol_type = other DNA
aggacataaagcaaggccat

SEQ ID NO: 10357 - DNA, 20 bp, synthetic construct
  misc_feature 1..20: note = chemically synthesized
  source 1..20: mol_type = other DNA
ggccattagatatatctcat

SEQ ID NO: 10358 - DNA, 20 bp, synthetic construct
  misc_feature 1..20: note = chemically synthesized
  source 1..20: mol_type = other DNA
tatctcattagtgtgacatc

SEQ ID NO: 10359 - DNA, 20 bp, synthetic construct
  misc_feature 1..20: note = chemically synthesized
  source 1..20: mol_type = other DNA
atctcattagtgtgacatct

SEQ ID NO: 10360 - DNA, 20 bp, synthetic construct
  misc_feature 1..20: note = chemically synthesized
  source 1..20: mol_type = other DNA
ctcattagtgtgacatctgg

SEQ ID NO: 10361 - DNA, 20 bp, synthetic construct
  misc_feature 1..20: note = chemically synthesized
  source 1..20: mol_type = other DNA
tcattagtgtgacatctggg

SEQ ID NO: 10362 - DNA, 20 bp, synthetic construct
  misc_feature 1..20: note = chemically synthesized
  source 1..20: mol_type = other DNA
gtgtgacatctgggaggaca

SEQ ID NO: 10363 - DNA, 20 bp, synthetic construct
  misc_feature 1..20: note = chemically synthesized
  source 1..20: mol_type = other DNA
ccaaaccctttcttctatat

SEQ ID NO: 10364 - DNA, 20 bp, synthetic construct
  misc_feature 1..20: note = chemically synthesized
  source 1..20: mol_type = other DNA
aaccctttcttctatataag

SEQ ID NO: 10365 - DNA, 20 bp, synthetic construct
  misc_feature 1..20: note = chemically synthesized
  source 1..20: mol_type = other DNA
ctttcttctatataagtggt

SEQ ID NO: 10366 - DNA, 20 bp, synthetic construct
  misc_feature 1..20: note = chemically synthesized
  source 1..20: mol_type = other DNA
atataagtggtgagatgatg

SEQ ID NO: 10367 - DNA, 20 bp, synthetic construct
  misc_feature 1..20: note = chemically synthesized
  source 1..20: mol_type = other DNA
tataagtggtgagatgatga

SEQ ID NO: 10368 - DNA, 20 bp, synthetic construct
  misc_feature 1..20: note = chemically synthesized
  source 1..20: mol_type = other DNA
ggtgagatgatgaaggttgt

SEQ ID NO: 10369 - DNA, 20 bp, synthetic construct
  misc_feature 1..20: note = chemically synthesized
  source 1..20: mol_type = other DNA
tgagatgatgaaggttgtaa

SEQ ID NO: 10370 - DNA, 20 bp, synthetic construct
  misc_feature 1..20: note = chemically synthesized
  source 1..20: mol_type = other DNA
gagatgatgaaggttgtaag

SEQ ID NO: 10371 - DNA, 20 bp, synthetic construct
  misc_feature 1..20: note = chemically synthesized
  source 1..20: mol_type = other DNA
agatgatgaaggttgtaaga

SEQ ID NO: 10372 - DNA, 20 bp, synthetic construct
  misc_feature 1..20: note = chemically synthesized
  source 1..20: mol_type = other DNA
agagggcttctgcccccttg

SEQ ID NO: 10373 - DNA, 20 bp, synthetic construct
  misc_feature 1..20: note = chemically synthesized
  source 1..20: mol_type = other DNA
ttctgcccccttgaagactt

SEQ ID NO: 10374 - DNA, 20 bp, synthetic construct
  misc_feature 1..20: note = chemically synthesized
  source 1..20: mol_type = other DNA
cccttgaagacttcagatgc

SEQ ID NO: 10375 - DNA, 20 bp, synthetic construct
  misc_feature 1..20: note = chemically synthesized
  source 1..20: mol_type = other DNA
ccttgaagacttcagatgct

SEQ ID NO: 10376 - DNA, 20 bp, synthetic construct
  misc_feature 1..20: note = chemically synthesized
  source 1..20: mol_type = other DNA
cttgaagacttcagatgctg

SEQ ID NO: 10377 - DNA, 20 bp, synthetic construct
  misc_feature 1..20: note = chemically synthesized
  source 1..20: mol_type = other DNA
aagacttcagatgctgggga

SEQ ID NO: 10378 - DNA, 20 bp, synthetic construct
  misc_feature 1..20: note = chemically synthesized
  source 1..20: mol_type = other DNA
agacttcagatgctggggaa

SEQ ID NO: 10379 - DNA, 20 bp, synthetic construct
  misc_feature 1..20: note = chemically synthesized
  source 1..20: mol_type = other DNA
ttcagatgctggggaaagga

SEQ ID NO: 10380 - DNA, 20 bp, synthetic construct
  misc_feature 1..20: note = chemically synthesized
  source 1..20: mol_type = other DNA
atgctggggaaaggatagat

SEQ ID NO: 10381 - DNA, 20 bp, synthetic construct
  misc_feature 1..20: note = chemically synthesized
  source 1..20: mol_type = other DNA
gggaaaggatagataagaat

SEQ ID NO: 10382 - DNA, 20 bp, synthetic construct
  misc_feature 1..20: note = chemically synthesized
  source 1..20: mol_type = other DNA
ggaaaggatagataagaata

SEQ ID NO: 10383 - DNA, 20 bp, synthetic construct
  misc_feature 1..20: note = chemically synthesized
  source 1..20: mol_type = other DNA
agataagaataaggatgaac

SEQ ID NO: 10384 - DNA, 20 bp, synthetic construct
  misc_feature 1..20: note = chemically synthesized
  source 1..20: mol_type = other DNA
gataagaataaggatgaacc

SEQ ID NO: 10385 - DNA, 20 bp, synthetic construct
  misc_feature 1..20: note = chemically synthesized
  source 1..20: mol_type = other DNA
ataaggatgaaccaggcttt

SEQ ID NO: 10386 - DNA, 20 bp, synthetic construct
  misc_feature 1..20: note = chemically synthesized
  source 1..20: mol_type = other DNA
aaggatgaaccaggcttttg

SEQ ID NO: 10387 - DNA, 20 bp, synthetic construct
  misc_feature 1..20: note = chemically synthesized
  source 1..20: mol_type = other DNA
tgaaccaggcttttggagcc

SEQ ID NO: 10388 - DNA, 20 bp, synthetic construct
  misc_feature 1..20: note = chemically synthesized
  source 1..20: mol_type = other DNA
gaaccaggcttttggagcct

SEQ ID NO: 10389 - DNA, 20 bp, synthetic construct
  misc_feature 1..20: note = chemically synthesized
  source 1..20: mol_type = other DNA
ggagcctgggaaataatgac

SEQ ID NO: 10390 - DNA, 20 bp, synthetic construct
  misc_feature 1..20: note = chemically synthesized
  source 1..20: mol_type = other DNA
aatgactagcgataaacctg

SEQ ID NO: 10391 - DNA, 20 bp, synthetic construct
  misc_feature 1..20: note = chemically synthesized
  source 1..20: mol_type = other DNA
atgactagcgataaacctga

SEQ ID NO: 10392 - DNA, 20 bp, synthetic construct
  misc_feature 1..20: note = chemically synthesized
  source 1..20: mol_type = other DNA
tgactagcgataaacctgaa

SEQ ID NO: 10393 - DNA, 20 bp, synthetic construct
  misc_feature 1..20: note = chemically synthesized
  source 1..20: mol_type = other DNA
ctagcgataaacctgaaggg

SEQ ID NO: 10394 - DNA, 20 bp, synthetic construct
  misc_feature 1..20: note = chemically synthesized
  source 1..20: mol_type = other DNA
gataaacctgaagggaagtt

SEQ ID NO: 10395 - DNA, 20 bp, synthetic construct
  misc_feature 1..20: note = chemically synthesized
  source 1..20: mol_type = other DNA
gaagttaagtatacgatccc

SEQ ID NO: 10396 - DNA, 20 bp, synthetic construct
  misc_feature 1..20: note = chemically synthesized
  source 1..20: mol_type = other DNA
tacgatccccagataatact

SEQ ID NO: 10397 - DNA, 20 bp, synthetic construct
  misc_feature 1..20: note = chemically synthesized
  source 1..20: mol_type = other DNA
acgatccccagataatacta

SEQ ID NO: 10398 - DNA, 20 bp, synthetic construct
  misc_feature 1..20: note = chemically synthesized
  source 1..20: mol_type = other DNA
gatccccagataatactaag

SEQ ID NO: 10399 - DNA, 20 bp, synthetic construct
  misc_feature 1..20: note = chemically synthesized
  source 1..20: mol_type = other DNA
cccagataatactaaggaga

SEQ ID NO: 10400 - DNA, 20 bp, synthetic construct
  misc_feature 1..20: note = chemically synthesized
  source 1..20: mol_type = other DNA
ccagataatactaaggagaa

SEQ ID NO: 10401 - DNA, 20 bp, synthetic construct
  misc_feature 1..20: note = chemically synthesized
  source 1..20: mol_type = other DNA
agaaaggcaatgtgattctg

SEQ ID NO: 10402 - DNA, 20 bp, synthetic construct
  misc_feature 1..20: note = chemically synthesized
  source 1..20: mol_type = other DNA
atgtgattctgcagccattg

SEQ ID NO: 10403 - DNA, 20 bp, synthetic construct
  misc_feature 1..20: note = chemically synthesized
  source 1..20: mol_type = other DNA
gattctgcagccattgtagc

SEQ ID NO: 10404 - DNA, 20 bp, synthetic construct
  misc_feature 1..20: note = chemically synthesized
  source 1..20: mol_type = other DNA
ttctgcagccattgtagcca

SEQ ID NO: 10405 - DNA, 20 bp, synthetic construct
  misc_feature 1..20: note = chemically synthesized
  source 1..20: mol_type = other DNA
ccattgtagccagagataat

SEQ ID NO: 10406 - DNA, 20 bp, synthetic construct
  misc_feature 1..20: note = chemically synthesized
  source 1..20: mol_type = other DNA
gccagagataataagccctt

SEQ ID NO: 10407 - DNA, 20 bp, synthetic construct
  misc_feature 1..20: note = chemically synthesized
  source 1..20: mol_type = other DNA
ccagagataataagcccttg

SEQ ID NO: 10408 - DNA, 20 bp, synthetic construct
  misc_feature 1..20: note = chemically synthesized
  source 1..20: mol_type = other DNA
gagataataagcccttgagg

SEQ ID NO: 10409 - DNA, 20 bp, synthetic construct
  misc_feature 1..20: note = chemically synthesized
  source 1..20: mol_type = other DNA
agataataagcccttgagga

SEQ ID NO: 10410 - DNA, 20 bp, synthetic construct
  misc_feature 1..20: note = chemically synthesized
  source 1..20: mol_type = other DNA
gataataagcccttgaggaa

SEQ ID NO: 10411 - DNA, 20 bp, synthetic construct
  misc_feature 1..20: note = chemically synthesized
  source 1..20: mol_type = other DNA
ataataagcccttgaggaag

SEQ ID NO: 10412 - DNA, 20 bp, synthetic construct
  misc_feature 1..20: note = chemically synthesized
  source 1..20: mol_type = other DNA
taagcccttgaggaaggggc

SEQ ID NO: 10413 - DNA, 20 bp, synthetic construct
  misc_feature 1..20: note = chemically synthesized
  source 1..20: mol_type = other DNA
aagcccttgaggaaggggcc

SEQ ID NO: 10414 - DNA, 20 bp, synthetic construct
  misc_feature 1..20: note = chemically synthesized
  source 1..20: mol_type = other DNA
agcccttgaggaaggggcca

SEQ ID NO: 10415 - DNA, 20 bp, synthetic construct
  misc_feature 1..20: note = chemically synthesized
  source 1..20: mol_type = other DNA
gcccttgaggaaggggccag

SEQ ID NO: 10416 - DNA, 20 bp, synthetic construct
  misc_feature 1..20: note = chemically synthesized
  source 1..20: mol_type = other DNA
ggggccaggggaatttttct

SEQ ID NO: 10417 - DNA, 20 bp, synthetic construct
  misc_feature 1..20: note = chemically synthesized
  source 1..20: mol_type = other DNA
gggccaggggaatttttcta

SEQ ID NO: 10418 - DNA, 20 bp, synthetic construct
  misc_feature 1..20: note = chemically synthesized
  source 1..20: mol_type = other DNA
caggggaatttttctaagga

SEQ ID NO: 10419 - DNA, 20 bp, synthetic construct
  misc_feature 1..20: note = chemically synthesized
  source 1..20: mol_type = other DNA
ggaatttttctaaggataga

SEQ ID NO: 10420 - DNA, 20 bp, synthetic construct
  misc_feature 1..20: note = chemically synthesized
  source 1..20: mol_type = other DNA
aaggatagacagtattaatg

SEQ ID NO: 10421 - DNA, 20 bp, synthetic construct
  misc_feature 1..20: note = chemically synthesized
  source 1..20: mol_type = other DNA
ttctgctattaaactctcat

SEQ ID NO: 10422 - DNA, 20 bp, synthetic construct
  misc_feature 1..20: note = chemically synthesized
  source 1..20: mol_type = other DNA
aaactctcattggcttctaa

SEQ ID NO: 10423 - DNA, 20 bp, synthetic construct
  misc_feature 1..20: note = chemically synthesized
  source 1..20: mol_type = other DNA
aactctcattggcttctaaa

SEQ ID NO: 10424 - DNA, 20 bp, synthetic construct
  misc_feature 1..20: note = chemically synthesized
  source 1..20: mol_type = other DNA
ctctcattggcttctaaaag

SEQ ID NO: 10425 - DNA, 20 bp, synthetic construct
  misc_feature 1..20: note = chemically synthesized
  source 1..20: mol_type = other DNA
ttggcttctaaaaggagttt

SEQ ID NO: 10426 - DNA, 20 bp, synthetic construct
  misc_feature 1..20: note = chemically synthesized
  source 1..20: mol_type = other DNA
cttctaaaaggagtttcggt

SEQ ID NO: 10427 - DNA, 20 bp, synthetic construct
  misc_feature 1..20: note = chemically synthesized
  source 1..20: mol_type = other DNA
gtttcggtgagtgatttgct

SEQ ID NO: 10428 - DNA, 20 bp, synthetic construct
  misc_feature 1..20: note = chemically synthesized
  source 1..20: mol_type = other DNA
gctgagatgttgcattttca

SEQ ID NO: 10429 - DNA, 20 bp, synthetic construct
  misc_feature 1..20: note = chemically synthesized
  source 1..20: mol_type = other DNA
attttcatggctgctgcctt

SEQ ID NO: 10430 - DNA, 20 bp, synthetic construct
  misc_feature 1..20: note = chemically synthesized
  source 1..20: mol_type = other DNA
ttttcatggctgctgccttt

SEQ ID NO: 10431 - DNA, 20 bp, synthetic construct
  misc_feature 1..20: note = chemically synthesized
  source 1..20: mol_type = other DNA
gcctttaggtattattgcaa

SEQ ID NO: 10432 - DNA, 20 bp, synthetic construct
  misc_feature 1..20: note = chemically synthesized
  source 1..20: mol_type = other DNA
taggtattattgcaacagtt

SEQ ID NO: 10433 - DNA, 20 bp, synthetic construct
  misc_feature 1..20: note = chemically synthesized
  source 1..20: mol_type = other DNA
ttggaattttgaaattaaaa

SEQ ID NO: 10434 - DNA, 20 bp, synthetic construct
  misc_feature 1..20: note = chemically synthesized
  source 1..20: mol_type = other DNA
ttaaaacagttctgtaaaac

SEQ ID NO: 10435 - DNA, 20 bp, synthetic construct
  misc_feature 1..20: note = chemically synthesized
  source 1..20: mol_type = other DNA
acagttctgtaaaaccagtt

SEQ ID NO: 10436 - DNA, 20 bp, synthetic construct
  misc_feature 1..20: note = chemically synthesized
  source 1..20: mol_type = other DNA
aaaaccagtttagttttgta

SEQ ID NO: 10437 - DNA, 20 bp, synthetic construct
  misc_feature 1..20: note = chemically synthesized
  source 1..20: mol_type = other DNA
tttgtaaagtgtatgcatca

SEQ ID NO: 10438 - DNA, 20 bp, synthetic construct
  misc_feature 1..20: note = chemically synthesized
  source 1..20: mol_type = other DNA
catcaaagatgtccttcatt

SEQ ID NO: 10439 - DNA, 20 bp, synthetic construct
  misc_feature 1..20: note = chemically synthesized
  source 1..20: mol_type = other DNA
tccttcattcagacattact

SEQ ID NO: 10440 - DNA, 20 bp, synthetic construct
  misc_feature 1..20: note = chemically synthesized
  source 1..20: mol_type = other DNA
acattactgagttacaacta

SEQ ID NO: 10441 - DNA, 20 bp, synthetic construct
  misc_feature 1..20: note = chemically synthesized
  source 1..20: mol_type = other DNA
ctgagttacaactatggtgc

SEQ ID NO: 10442 - DNA, 20 bp, synthetic construct
  misc_feature 1..20: note = chemically synthesized
  source 1..20: mol_type = other DNA
tgagttacaactatggtgcc

SEQ ID NO: 10443 - DNA, 20 bp, synthetic construct
  misc_feature 1..20: note = chemically synthesized
  source 1..20: mol_type = other DNA
tatggtgccaggtactgtgt

SEQ ID NO: 10444 - DNA, 20 bp, synthetic construct
  misc_feature 1..20: note = chemically synthesized
  source 1..20: mol_type = other DNA
atggtgccaggtactgtgtc

SEQ ID NO: 10445 - DNA, 20 bp, synthetic construct
  misc_feature 1..20: note = chemically synthesized
  source 1..20: mol_type = other DNA
tggtgccaggtactgtgtca

SEQ ID NO: 10446 - DNA, 20 bp, synthetic construct
  misc_feature 1..20: note = chemically synthesized
  source 1..20: mol_type = other DNA
caggtactgtgtcagggtac

SEQ ID NO: 10447 - DNA, 20 bp, synthetic construct
  misc_feature 1..20: note = chemically synthesized
  source 1..20: mol_type = other DNA
aggtactgtgtcagggtact

SEQ ID NO: 10448 - DNA, 20 bp, synthetic construct
  misc_feature 1..20: note = chemically synthesized
  source 1..20: mol_type = other DNA
ggtactgtgtcagggtacta

SEQ ID NO: 10449 - DNA, 20 bp, synthetic construct
  misc_feature 1..20: note = chemically synthesized
  source 1..20: mol_type = other DNA
gtactgtgtcagggtactag

SEQ ID NO: 10450 - DNA, 20 bp, synthetic construct
  misc_feature 1..20: note = chemically synthesized
  source 1..20: mol_type = other DNA
gtgtcagggtactaggggta

SEQ ID NO: 10451 - DNA, 20 bp, synthetic construct
  misc_feature 1..20: note = chemically synthesized
  source 1..20: mol_type = other DNA
tgtcagggtactaggggtat

SEQ ID NO: 10452 - DNA, 20 bp, synthetic construct
  misc_feature 1..20: note = chemically synthesized
  source 1..20: mol_type = other DNA
gtcagggtactaggggtatg

SEQ ID NO: 10453 - DNA, 20 bp, synthetic construct
  misc_feature 1..20: note = chemically synthesized
  source 1..20: mol_type = other DNA
ctaggggtatggggataaac

SEQ ID NO: 10454 - DNA, 20 bp, synthetic construct
  misc_feature 1..20: note = chemically synthesized
  source 1..20: mol_type = other DNA
cagactccctctttgatcta

SEQ ID NO: 10455 - DNA, 20 bp, synthetic construct
  misc_feature 1..20: note = chemically synthesized
  source 1..20: mol_type = other DNA
actccctctttgatctaaag

SEQ ID NO: 10456 - DNA, 20 bp, synthetic construct
  misc_feature 1..20: note = chemically synthesized
  source 1..20: mol_type = other DNA
tctttgatctaaagcagcat

SEQ ID NO: 10457 - DNA, 20 bp, synthetic construct
  misc_feature 1..20: note = chemically synthesized
  source 1..20: mol_type = other DNA
ctttgatctaaagcagcatg

SEQ ID NO: 10458 - DNA, 20 bp, synthetic construct
  misc_feature 1..20: note = chemically synthesized
  source 1..20: mol_type = other DNA
gatctaaagcagcatgaggc

SEQ ID NO: 10459 - DNA, 20 bp, synthetic construct
  misc_feature 1..20: note = chemically synthesized
  source 1..20: mol_type = other DNA
atctaaagcagcatgaggcc

SEQ ID NO: 10460 - DNA, 20 bp, synthetic construct
  misc_feature 1..20: note = chemically synthesized
  source 1..20: mol_type = other DNA
aaagcagcatgaggccaggt

SEQ ID NO: 10461 - DNA, 20 bp, synthetic construct
  misc_feature 1..20: note = chemically synthesized
  source 1..20: mol_type = other DNA
agcagcatgaggccaggtga

SEQ ID NO: 10462 - DNA, 20 bp, synthetic construct
  misc_feature 1..20: note = chemically synthesized
  source 1..20: mol_type = other DNA
gcagcatgaggccaggtgag

SEQ ID NO: 10463 - DNA, 20 bp, synthetic construct
  misc_feature 1..20: note = chemically synthesized
  source 1..20: mol_type = other DNA
taatgtgataaaatgtgcac

SEQ ID NO: 10464 - DNA, 20 bp, synthetic construct
  misc_feature 1..20: note = chemically synthesized
  source 1..20: mol_type = other DNA
aatgtgataaaatgtgcact

SEQ ID NO: 10465 - DNA, 20 bp, synthetic construct
  misc_feature 1..20: note = chemically synthesized
  source 1..20: mol_type = other DNA
taaaatgtgcactaggtact

SEQ ID NO: 10466 - DNA, 20 bp, synthetic construct
  misc_feature 1..20: note = chemically synthesized
  source 1..20: mol_type = other DNA
aaaatgtgcactaggtacta

SEQ ID NO: 10467 - DNA, 20 bp, synthetic construct
  misc_feature 1..20: note = chemically synthesized
  source 1..20: mol_type = other DNA
aaatgtgcactaggtactaa

SEQ ID NO: 10468 - DNA, 20 bp, synthetic construct
  misc_feature 1..20: note = chemically synthesized
  source 1..20: mol_type = other DNA
cactaggtactaagggatca

SEQ ID NO: 10469 - DNA, 20 bp, synthetic construct
  misc_feature 1..20: note = chemically synthesized
  source 1..20: mol_type = other DNA
ctaggtactaagggatcata

SEQ ID NO: 10470 - DNA, 20 bp, synthetic construct
  misc_feature 1..20: note = chemically synthesized
  source 1..20: mol_type = other DNA
gtactaagggatcatagaga

SEQ ID NO: 10471 - DNA, 20 bp, synthetic construct
  misc_feature 1..20: note = chemically synthesized
  source 1..20: mol_type = other DNA
tactaagggatcatagagaa

SEQ ID NO: 10472 - DNA, 20 bp, synthetic construct
  misc_feature 1..20: note = chemically synthesized
  source 1..20: mol_type = other DNA
agagaaaggaacacattaaa

SEQ ID NO: 10473 - DNA, 20 bp, synthetic construct
  misc_feature 1..20: note = chemically synthesized
  source 1..20: mol_type = other DNA
gagaaaggaacacattaaat

SEQ ID NO: 10474 - DNA, 20 bp, synthetic construct
  misc_feature 1..20: note = chemically synthesized
  source 1..20: mol_type = other DNA
agaaaggaacacattaaatg

SEQ ID NO: 10475 - DNA, 20 bp, synthetic construct
  misc_feature 1..20: note = chemically synthesized
  source 1..20: mol_type = other DNA
ttaaatggggaaacaattga

SEQ ID NO: 10476 - DNA, 20 bp, synthetic construct
  misc_feature 1..20: note = chemically synthesized
  source 1..20: mol_type = other DNA
aaatggggaaacaattgata

SEQ ID NO: 10477 - DNA, 20 bp, synthetic construct
  misc_feature 1..20: note = chemically synthesized
  source 1..20: mol_type = other DNA
atggggaaacaattgataga

SEQ ID NO: 10478 - DNA, 20 bp, synthetic construct
  misc_feature 1..20: note = chemically synthesized
  source 1..20: mol_type = other DNA
ggggaaacaattgatagaga

SEQ ID NO: 10479 - DNA, 20 bp, synthetic construct
  misc_feature 1..20: note = chemically synthesized
  source 1..20: mol_type = other DNA
agagagagaatattttcatc

SEQ ID NO: 10480 - DNA, 20 bp, synthetic construct
  misc_feature 1..20: note = chemically synthesized
  source 1..20: mol_type = other DNA
gagagagaatattttcatct

SEQ ID NO: 10481 - DNA, 20 bp, synthetic construct
  misc_feature 1..20: note = chemically synthesized
  source 1..20: mol_type = other DNA
tattttcatctgggtcttaa

SEQ ID NO: 10482 - DNA, 20 bp, synthetic construct
  misc_feature 1..20: note = chemically synthesized
  source 1..20: mol_type = other DNA
tcatctgggtcttaaaagat

SEQ ID NO: 10483 - DNA, 20 bp, synthetic construct
  misc_feature 1..20: note = chemically synthesized
  source 1..20: mol_type = other DNA
tctgggtcttaaaagatgag

SEQ ID NO: 10484 - DNA, 20 bp, synthetic construct
  misc_feature 1..20: note = chemically synthesized
  source 1..20: mol_type = other DNA
ctgggtcttaaaagatgagt

SEQ ID NO: 10485 - DNA, 20 bp, synthetic construct
  misc_feature 1..20: note = chemically synthesized
  source 1..20: mol_type = other DNA
tctctttaaatgtctgatat

SEQ ID NO: 10486 - DNA, 20 bp, synthetic construct
  misc_feature 1..20: note = chemically synthesized
  source 1..20: mol_type = other DNA
ctctttaaatgtctgatata

SEQ ID NO: 10487 - DNA, 20 bp, synthetic construct
  misc_feature 1..20: note = chemically synthesized
  source 1..20: mol_type = other DNA
tctttaaatgtctgatataa

SEQ ID NO: 10488 - DNA, 20 bp, synthetic construct
  misc_feature 1..20: note = chemically synthesized
  source 1..20: mol_type = other DNA
atataagggcattttatgca

SEQ ID NO: 10489 - DNA, 20 bp, synthetic construct
  misc_feature 1..20: note = chemically synthesized
  source 1..20: mol_type = other DNA
ataagggcattttatgcaaa

SEQ ID NO: 10490 - DNA, 20 bp, synthetic construct
  misc_feature 1..20: note = chemically synthesized
  source 1..20: mol_type = other DNA
taagggcattttatgcaaag

SEQ ID NO: 10491 - DNA, 20 bp, synthetic construct
  misc_feature 1..20: note = chemically synthesized
  source 1..20: mol_type = other DNA
caaagaggatcactcgtgca

SEQ ID NO: 10492 - DNA, 20 bp, synthetic construct
  misc_feature 1..20: note = chemically synthesized
  source 1..20: mol_type = other DNA
ggatcactcgtgcaaagact

SEQ ID NO: 10493 - DNA, 20 bp, synthetic construct
  misc_feature 1..20: note = chemically synthesized
  source 1..20: mol_type = other DNA
gtgcaaagactcagatttgc

SEQ ID NO: 10494 - DNA, 20 bp, synthetic construct
  misc_feature 1..20: note = chemically synthesized
  source 1..20: mol_type = other DNA
actcagatttgcaagaacgt

SEQ ID NO: 10495 - DNA, 20 bp, synthetic construct
  misc_feature 1..20: note = chemically synthesized
  source 1..20: mol_type = other DNA
ctcagatttgcaagaacgtg

SEQ ID NO: 10496 - DNA, 20 bp, synthetic construct
  misc_feature 1..20: note = chemically synthesized
  source 1..20: mol_type = other DNA
tgcaagaacgtgaggtattt

SEQ ID NO: 10497 - DNA, 20 bp, synthetic construct
  misc_feature 1..20: note = chemically synthesized
  source 1..20: mol_type = other DNA
gcaagaacgtgaggtatttc

SEQ ID NO: 10498 - DNA, 20 bp, synthetic construct
  misc_feature 1..20: note = chemically synthesized
  source 1..20: mol_type = other DNA
aagaacgtgaggtatttcag

SEQ ID NO: 10499 - DNA, 20 bp, synthetic construct
  misc_feature 1..20: note = chemically synthesized
  source 1..20: mol_type = other DNA
ggtatttcaggagttttgta

SEQ ID NO: 10500 - DNA, 20 bp, synthetic construct
  misc_feature 1..20: note = chemically synthesized
  source 1..20: mol_type = other DNA
gagttttgtatggttccata

SEQ ID NO: 10501 - DNA, 20 bp, synthetic construct
  misc_feature 1..20: note = chemically synthesized
  source 1..20: mol_type = other DNA
ggttccatatggactatgac

SEQ ID NO: 10502 - DNA, 20 bp, synthetic construct
  misc_feature 1..20: note = chemically synthesized
  source 1..20: mol_type = other DNA
ccatatggactatgacaagt

SEQ ID NO: 10503 - DNA, 20 bp, synthetic construct
  misc_feature 1..20: note = chemically synthesized
  source 1..20: mol_type = other DNA
atggactatgacaagtgaga

SEQ ID NO: 10504 - DNA, 20 bp, synthetic construct
  misc_feature 1..20: note = chemically synthesized
  source 1..20: mol_type = other DNA
tggactatgacaagtgagac

SEQ ID NO: 10505 - DNA, 20 bp, synthetic construct
  misc_feature 1..20: note = chemically synthesized
  source 1..20: mol_type = other DNA
gacaagtgagacaggtaaac

SEQ ID NO: 10506 - DNA, 20 bp, synthetic construct
  misc_feature 1..20: note = chemically synthesized
  source 1..20: mol_type = other DNA
acaagtgagacaggtaaact

SEQ ID NO: 10507 - DNA, 20 bp, synthetic construct
  misc_feature 1..20: note = chemically synthesized
  source 1..20: mol_type = other DNA
agtgagacaggtaaactagg

SEQ ID NO: 10508 - DNA, 20 bp, synthetic construct
  misc_feature 1..20: note = chemically synthesized
  source 1..20: mol_type = other DNA
tgagacaggtaaactaggca

SEQ ID NO: 10509 - DNA, 20 bp, synthetic construct
  misc_feature 1..20: note = chemically synthesized
  source 1..20: mol_type = other DNA
acaggtaaactaggcagagc

SEQ ID NO: 10510 - DNA, 20 bp, synthetic construct
  misc_feature 1..20: note = chemically synthesized
  source 1..20: mol_type = other DNA
aactaggcagagctggtcat

SEQ ID NO: 10511 - DNA, 20 bp, synthetic construct
  misc_feature 1..20: note = chemically synthesized
  source 1..20: mol_type = other DNA
gagctggtcatcagataatg

SEQ ID NO: 10512 - DNA, 20 bp, synthetic construct
  misc_feature 1..20: note = chemically synthesized
  source 1..20: mol_type = other DNA
gataatgaagtcattaacct

SEQ ID NO: 10513 - DNA, 20 bp, synthetic construct
  misc_feature 1..20: note = chemically synthesized
  source 1..20: mol_type = other DNA
ataatgaagtcattaaccta

SEQ ID NO: 10514 - DNA, 20 bp, synthetic construct
  misc_feature 1..20: note = chemically synthesized
  source 1..20: mol_type = other DNA
aatgaagtcattaacctaag

SEQ ID NO: 10515 - DNA, 20 bp, synthetic construct
  misc_feature 1..20: note = chemically synthesized
  source 1..20: mol_type = other DNA
agtcattaacctaaggagat

SEQ ID NO: 10516 - DNA, 20 bp, synthetic construct
  misc_feature 1..20: note = chemically synthesized
  source 1..20: mol_type = other DNA
ttggacaataaaatgcaata

SEQ ID NO: 10517 - DNA, 20 bp, synthetic construct
  misc_feature 1..20: note = chemically synthesized
  source 1..20: mol_type = other DNA
ggacaataaaatgcaatatg

SEQ ID NO: 10518 - DNA, 20 bp, synthetic construct
  misc_feature 1..20: note = chemically synthesized
  source 1..20: mol_type = other DNA
gacaataaaatgcaatatgg

SEQ ID NO: 10519 - DNA, 20 bp, synthetic construct
  misc_feature 1..20: note = chemically synthesized
  source 1..20: mol_type = other DNA
aatgcaatatggaggtatcg

SEQ ID NO: 10520 - DNA, 20 bp, synthetic construct
  misc_feature 1..20: note = chemically synthesized
  source 1..20: mol_type = other DNA
aggtatcgaagtataaacat

SEQ ID NO: 10521 - DNA, 20 bp, synthetic construct
  misc_feature 1..20: note = chemically synthesized
  source 1..20: mol_type = other DNA
ggtatcgaagtataaacata

SEQ ID NO: 10522 - DNA, 20 bp, synthetic construct
  misc_feature 1..20: note = chemically synthesized
  source 1..20: mol_type = other DNA
tatcgaagtataaacataag

SEQ ID NO: 10523 - DNA, 20 bp, synthetic construct
  misc_feature 1..20: note = chemically synthesized
  source 1..20: mol_type = other DNA
aacataaggagtaccactga

SEQ ID NO: 10524 - DNA, 20 bp, synthetic construct
  misc_feature 1..20: note = chemically synthesized
  source 1..20: mol_type = other DNA
agtaccactgatggctgatt

SEQ ID NO: 10525 - DNA, 20 bp, synthetic construct
  misc_feature 1..20: note = chemically synthesized
  source 1..20: mol_type = other DNA
gtaccactgatggctgattt

SEQ ID NO: 10526 - DNA, 20 bp, synthetic construct
  misc_feature 1..20: note = chemically synthesized
  source 1..20: mol_type = other DNA
gatggctgatttaggatgcc

SEQ ID NO: 10527 - DNA, 20 bp, synthetic construct
  misc_feature 1..20: note = chemically synthesized
  source 1..20: mol_type = other DNA
ctgatttaggatgcccagtc

SEQ ID NO: 10528 - DNA, 20 bp, synthetic construct
  misc_feature 1..20: note = chemically synthesized
  source 1..20: mol_type = other DNA
gcaacacgctaatgaaatga

SEQ ID NO: 10529 - DNA, 20 bp, synthetic construct
  misc_feature 1..20: note = chemically synthesized
  source 1..20: mol_type = other DNA
acacgctaatgaaatgatag

SEQ ID NO: 10530 - DNA, 20 bp, synthetic construct
  misc_feature 1..20: note = chemically synthesized
  source 1..20: mol_type = other DNA
cacgctaatgaaatgatagt

SEQ ID NO: 10531 - DNA, 20 bp, synthetic construct
  misc_feature 1..20: note = chemically synthesized
  source 1..20: mol_type = other DNA
acgctaatgaaatgatagtg

SEQ ID NO: 10532 - DNA, 20 bp, synthetic construct
  misc_feature 1..20: note = chemically synthesized
  source 1..20: mol_type = other DNA
cgctaatgaaatgatagtgg

SEQ ID NO: 10533 - DNA, 20 bp, synthetic construct
  misc_feature 1..20: note = chemically synthesized
  source 1..20: mol_type = other DNA
ctaatgaaatgatagtgggg

SEQ ID NO: 10534 - DNA, 20 bp, synthetic construct
  misc_feature 1..20: note = chemically synthesized
  source 1..20: mol_type = other DNA
taatgaaatgatagtggggg

SEQ ID NO: 10535 - DNA, 20 bp, synthetic construct
  misc_feature 1..20: note = chemically synthesized
  source 1..20: mol_type = other DNA
aatgaaatgatagtggggga

SEQ ID NO: 10536 - DNA, 20 bp, synthetic construct
  misc_feature 1..20: note = chemically synthesized
  source 1..20: mol_type = other DNA
atgaaatgatagtgggggag

SEQ ID NO: 10537 - DNA, 20 bp, synthetic construct
  misc_feature 1..20: note = chemically synthesized
  source 1..20: mol_type = other DNA
tgaaatgatagtgggggagg

SEQ ID NO: 10538 - DNA, 20 bp, synthetic construct
  misc_feature 1..20: note = chemically synthesized
  source 1..20: mol_type = other DNA
gtgggggagggggccgtacc

SEQ ID NO: 10539 - DNA, 20 bp, synthetic construct
  misc_feature 1..20: note = chemically synthesized
  source 1..20: mol_type = other DNA
ggagggggccgtaccaagac

SEQ ID NO: 10540 - DNA, 20 bp, synthetic construct
  misc_feature 1..20: note = chemically synthesized
  source 1..20: mol_type = other DNA
gagggggccgtaccaagact

SEQ ID NO: 10541 - DNA, 20 bp, synthetic construct
  misc_feature 1..20: note = chemically synthesized
  source 1..20: mol_type = other DNA
gggggccgtaccaagactag

SEQ ID NO: 10542 - DNA, 20 bp, synthetic construct
  misc_feature 1..20: note = chemically synthesized
  source 1..20: mol_type = other DNA
gggccgtaccaagactagga

SEQ ID NO: 10543 - DNA, 20 bp, synthetic construct
  misc_feature 1..20: note = chemically synthesized
  source 1..20: mol_type = other DNA
gccgtaccaagactaggaga

SEQ ID NO: 10544 - DNA, 20 bp, synthetic construct
  misc_feature 1..20: note = chemically synthesized
  source 1..20: mol_type = other DNA
gtaccaagactaggagagag

SEQ ID NO: 10545 - DNA, 20 bp, synthetic construct
  misc_feature 1..20: note = chemically synthesized
  source 1..20: mol_type = other DNA
gactaggagagagcagtcct

SEQ ID NO: 10546 - DNA, 20 bp, synthetic construct
  misc_feature 1..20: note = chemically synthesized
  source 1..20: mol_type = other DNA
gagactattgcaattatctg

SEQ ID NO: 10547 - DNA, 20 bp, synthetic construct
  misc_feature 1..20: note = chemically synthesized
  source 1..20: mol_type = other DNA
agactattgcaattatctgc

SEQ ID NO: 10548 - DNA, 20 bp, synthetic construct
  misc_feature 1..20: note = chemically synthesized
  source 1..20: mol_type = other DNA
actattgcaattatctgcgg

SEQ ID NO: 10549 - DNA, 20 bp, synthetic construct
  misc_feature 1..20: note = chemically synthesized
  source 1..20: mol_type = other DNA
aattatctgcgggagacata

SEQ ID NO: 10550 - DNA, 20 bp, synthetic construct
  misc_feature 1..20: note = chemically synthesized
  source 1..20: mol_type = other DNA
attatctgcgggagacataa

SEQ ID NO: 10551 - DNA, 20 bp, synthetic construct
  misc_feature 1..20: note = chemically synthesized
  source 1..20: mol_type = other DNA
tctgcgggagacataaaggc

SEQ ID NO: 10552 - DNA, 20 bp, synthetic construct
  misc_feature 1..20: note = chemically synthesized
  source 1..20: mol_type = other DNA
cataaaggctagaacctgaa

SEQ ID NO: 10553 - DNA, 20 bp, synthetic construct
  misc_feature 1..20: note = chemically synthesized
  source 1..20: mol_type = other DNA
aaaggctagaacctgaacag

SEQ ID NO: 10554 - DNA, 20 bp, synthetic construct
  misc_feature 1..20: note = chemically synthesized
  source 1..20: mol_type = other DNA
ggctagaacctgaacagtag

SEQ ID NO: 10555 - DNA, 20 bp, synthetic construct
  misc_feature 1..20: note = chemically synthesized
  source 1..20: mol_type = other DNA
gaacagtagcagtacaaaaa

SEQ ID NO: 10556 - DNA, 20 bp, synthetic construct
  misc_feature 1..20: note = chemically synthesized
  source 1..20: mol_type = other DNA
acagtagcagtacaaaaaaa

SEQ ID NO: 10557 - DNA, 20 bp, synthetic construct
  misc_feature 1..20: note = chemically synthesized
  source 1..20: mol_type = other DNA
cagtagcagtacaaaaaaag

SEQ ID NO: 10558 - DNA, 20 bp, synthetic construct
  misc_feature 1..20: note = chemically synthesized
  source 1..20: mol_type = other DNA
agtagcagtacaaaaaaaga

SEQ ID NO: 10559 - DNA, 20 bp, synthetic construct
  misc_feature 1..20: note = chemically synthesized
  source 1..20: mol_type = other DNA
gtagcagtacaaaaaaagag

SEQ ID NO: 10560 - DNA, 20 bp, synthetic construct
  misc_feature 1..20: note = chemically synthesized
  source 1..20: mol_type = other DNA
agcagtacaaaaaaagaggg

SEQ ID NO: 10561 - DNA, 20 bp, synthetic construct
  misc_feature 1..20: note = chemically synthesized
  source 1..20: mol_type = other DNA
aggggagttcaaatgatatt

SEQ ID NO: 10562 - DNA, 20 bp, synthetic construct
  misc_feature 1..20: note = chemically synthesized
  source 1..20: mol_type = other DNA
ggggagttcaaatgatatta

SEQ ID NO: 10563 - DNA, 20 bp, synthetic construct
  misc_feature 1..20: note = chemically synthesized
  source 1..20: mol_type = other DNA
gagttcaaatgatattaagg

SEQ ID NO: 10564 - DNA, 20 bp, synthetic construct
  misc_feature 1..20: note = chemically synthesized
  source 1..20: mol_type = other DNA
ttcaaatgatattaaggaag

SEQ ID NO: 10565 - DNA, 20 bp, synthetic construct
  misc_feature 1..20: note = chemically synthesized
  source 1..20: mol_type = other DNA
aaatgatattaaggaagtag

SEQ ID NO: 10566 - DNA, 20 bp, synthetic construct
  misc_feature 1..20: note = chemically synthesized
  source 1..20: mol_type = other DNA
tgatattaaggaagtagaag

SEQ ID NO: 10567 - DNA, 20 bp, synthetic construct
  misc_feature 1..20: note = chemically synthesized
  source 1..20: mol_type = other DNA
agtggtatgacttaaccatc

SEQ ID NO: 10568 - DNA, 20 bp, synthetic construct
  misc_feature 1..20: note = chemically synthesized
  source 1..20: mol_type = other DNA
gtggtatgacttaaccatct

SEQ ID NO: 10569 - DNA, 20 bp, synthetic construct
  misc_feature 1..20: note = chemically synthesized
  source 1..20: mol_type = other DNA
atgacttaaccatctgggta

SEQ ID NO: 10570 - DNA, 20 bp, synthetic construct
  misc_feature 1..20: note = chemically synthesized
  source 1..20: mol_type = other DNA
acttaaccatctgggtatgg

SEQ ID NO: 10571 - DNA, 20 bp, synthetic construct
  misc_feature 1..20: note = chemically synthesized
  source 1..20: mol_type = other DNA
cttaaccatctgggtatgga

SEQ ID NO: 10572 - DNA, 20 bp, synthetic construct
  misc_feature 1..20: note = chemically synthesized
  source 1..20: mol_type = other DNA
ttaaccatctgggtatggaa

SEQ ID NO: 10573 - DNA, 20 bp, synthetic construct
  misc_feature 1..20: note = chemically synthesized
  source 1..20: mol_type = other DNA
taaccatctgggtatggaag

SEQ ID NO: 10574 - DNA, 20 bp, synthetic construct
  misc_feature 1..20: note = chemically synthesized
  source 1..20: mol_type = other DNA
tctgggtatggaaggggaaa

SEQ ID NO: 10575 - DNA, 20 bp, synthetic construct
  misc_feature 1..20: note = chemically synthesized
  source 1..20: mol_type = other DNA
ggtatggaaggggaaatggc

SEQ ID NO: 10576 - DNA, 20 bp, synthetic construct
  misc_feature 1..20: note = chemically synthesized
  source 1..20: mol_type = other DNA
tatggaaggggaaatggcta

SEQ ID NO: 10577 - DNA, 20 bp, synthetic construct
  misc_feature 1..20: note = chemically synthesized
  source 1..20: mol_type = other DNA
aggggaaatggctagagtct

SEQ ID NO: 10578 - DNA, 20 bp, synthetic construct
  misc_feature 1..20: note = chemically synthesized
  source 1..20: mol_type = other DNA
ggggaaatggctagagtctt

SEQ ID NO: 10579 - DNA, 20 bp, synthetic construct
  misc_feature 1..20: note = chemically synthesized
  source 1..20: mol_type = other DNA
gggaaatggctagagtcttg

SEQ ID NO: 10580 - DNA, 20 bp, synthetic construct
  misc_feature 1..20: note = chemically synthesized
  source 1..20: mol_type = other DNA
ctttgtgtttgatgtgatta

SEQ ID NO: 10581 - DNA, 20 bp, synthetic construct
  misc_feature 1..20: note = chemically synthesized
  source 1..20: mol_type = other DNA
tttgatgtgattatggacca

SEQ ID NO: 10582 - DNA, 20 bp, synthetic construct
  misc_feature 1..20: note = chemically synthesized
  source 1..20: mol_type = other DNA
tggaccacagaataatgtct

SEQ ID NO: 10583 - DNA, 20 bp, synthetic construct
  misc_feature 1..20: note = chemically synthesized
  source 1..20: mol_type = other DNA
gaccacagaataatgtctaa

SEQ ID NO: 10584 - DNA, 20 bp, synthetic construct
  misc_feature 1..20: note = chemically synthesized
  source 1..20: mol_type = other DNA
agaataatgtctaagagaac

SEQ ID NO: 10585 - DNA, 20 bp, synthetic construct
  misc_feature 1..20: note = chemically synthesized
  source 1..20: mol_type = other DNA
gtctaagagaactggctctt

SEQ ID NO: 10586 - DNA, 20 bp, synthetic construct
  misc_feature 1..20: note = chemically synthesized
  source 1..20: mol_type = other DNA
tggctctttagtctgactgc

SEQ ID NO: 10587 - DNA, 20 bp, synthetic construct
  misc_feature 1..20: note = chemically synthesized
  source 1..20: mol_type = other DNA
gctctttagtctgactgcca

SEQ ID NO: 10588 - DNA, 20 bp, synthetic construct
  misc_feature 1..20: note = chemically synthesized
  source 1..20: mol_type = other DNA
agtctgaatcctgaatgttt

SEQ ID NO: 10589 - DNA, 20 bp, synthetic construct
  misc_feature 1..20: note = chemically synthesized
  source 1..20: mol_type = other DNA
aatgttttagtatgttacct

SEQ ID NO: 10590 - DNA, 20 bp, synthetic construct
  misc_feature 1..20: note = chemically synthesized
  source 1..20: mol_type = other DNA
atgttttagtatgttacctt

SEQ ID NO: 10591 - DNA, 20 bp, synthetic construct
  misc_feature 1..20: note = chemically synthesized
  source 1..20: mol_type = other DNA
ttagtatgttaccttgggca

SEQ ID NO: 10592 - DNA, 20 bp, synthetic construct
  misc_feature 1..20: note = chemically synthesized
  source 1..20: mol_type = other DNA
gttaccttgggcaaagccct

SEQ ID NO: 10593 - DNA, 20 bp, synthetic construct
  misc_feature 1..20: note = chemically synthesized
  source 1..20: mol_type = other DNA
tcttcctcattcataaaaat

SEQ ID NO: 10594 - DNA, 20 bp, synthetic construct
  misc_feature 1..20: note = chemically synthesized
  source 1..20: mol_type = other DNA
cattcataaaaataagatga

SEQ ID NO: 10595 - DNA, 20 bp, synthetic construct
  misc_feature 1..20: note = chemically synthesized
  source 1..20: mol_type = other DNA
agatgacagtgcctatctcg

SEQ ID NO: 10596 - DNA, 20 bp, synthetic construct
  misc_feature 1..20: note = chemically synthesized
  source 1..20: mol_type = other DNA
gatgacagtgcctatctcgt

SEQ ID NO: 10597 - DNA, 20 bp, synthetic construct
  misc_feature 1..20: note = chemically synthesized
  source 1..20: mol_type = other DNA
ctatctcgtgggacttttgt

SEQ ID NO: 10598 - DNA, 20 bp, synthetic construct
  misc_feature 1..20: note = chemically synthesized
  source 1..20: mol_type = other DNA
tatctcgtgggacttttgtg

SEQ ID NO: 10599 - DNA, 20 bp, synthetic construct
  misc_feature 1..20: note = chemically synthesized
  source 1..20: mol_type = other DNA
gtgggacttttgtgaggatg

SEQ ID NO: 10600 - DNA, 20 bp, synthetic construct
  misc_feature 1..20: note = chemically synthesized
  source 1..20: mol_type = other DNA
gacttttgtgaggatgaagt

SEQ ID NO: 10601 - DNA, 20 bp, synthetic construct
  misc_feature 1..20: note = chemically synthesized
  source 1..20: mol_type = other DNA
gtgaggatgaagtgagataa

SEQ ID NO: 10602 - DNA, 20 bp, synthetic construct
  misc_feature 1..20: note = chemically synthesized
  source 1..20: mol_type = other DNA
gaagtgagataatggatgca

SEQ ID NO: 10603 - DNA, 20 bp, synthetic construct
  misc_feature 1..20: note = chemically synthesized
  source 1..20: mol_type = other DNA
ataatggatgcaaagttact

SEQ ID NO: 10604 - DNA, 20 bp, synthetic construct
  misc_feature 1..20: note = chemically synthesized
  source 1..20: mol_type = other DNA
ggatgcaaagttactgagca

SEQ ID NO: 10605 - DNA, 20 bp, synthetic construct
  misc_feature 1..20: note = chemically synthesized
  source 1..20: mol_type = other DNA
actgagcacagtgtccaaca

SEQ ID NO: 10606 - DNA, 20 bp, synthetic construct
  misc_feature 1..20: note = chemically synthesized
  source 1..20: mol_type = other DNA
gagcacagtgtccaacacag

SEQ ID NO: 10607 - DNA, 20 bp, synthetic construct
  misc_feature 1..20: note = chemically synthesized
  source 1..20: mol_type = other DNA
cacagtgtccaacacagcag

SEQ ID NO: 10608 - DNA, 20 bp, synthetic construct
  misc_feature 1..20: note = chemically synthesized
  source 1..20: mol_type = other DNA
cagaagcattacatatacat

SEQ ID NO: 10609 - DNA, 20 bp, synthetic construct
  misc_feature 1..20: note = chemically synthesized
  source 1..20: mol_type = other DNA
acatatacattagctattac

SEQ ID NO: 10610 - DNA, 20 bp, synthetic construct
  misc_feature 1..20: note = chemically synthesized
  source 1..20: mol_type = other DNA
actggctacattatgatata

SEQ ID NO: 10611 - DNA, 20 bp, synthetic construct
  misc_feature 1..20: note = chemically synthesized
  source 1..20: mol_type = other DNA
gctacattatgatatacagt

SEQ ID NO: 10612 - DNA, 20 bp, synthetic construct
  misc_feature 1..20: note = chemically synthesized
  source 1..20: mol_type = other DNA
ctacattatgatatacagtt

SEQ ID NO: 10613 - DNA, 20 bp, synthetic construct
  misc_feature 1..20: note = chemically synthesized
  source 1..20: mol_type = other DNA
tacattatgatatacagtta

SEQ ID NO: 10614 - DNA, 20 bp, synthetic construct
  misc_feature 1..20: note = chemically synthesized
  source 1..20: mol_type = other DNA
cattatgatatacagttagg

SEQ ID NO: 10615 - DNA, 20 bp, synthetic construct
  misc_feature 1..20: note = chemically synthesized
  source 1..20: mol_type = other DNA
atgatatacagttagggagt

SEQ ID NO: 10616 - DNA, 20 bp, synthetic construct
  misc_feature 1..20: note = chemically synthesized
  source 1..20: mol_type = other DNA
tatacagttagggagttgga

SEQ ID NO: 10617 - DNA, 20 bp, synthetic construct
  misc_feature 1..20: note = chemically synthesized
  source 1..20: mol_type = other DNA
tggaaagataatctgaaatt

SEQ ID NO: 10618 - DNA, 20 bp, synthetic construct
  misc_feature 1..20: note = chemically synthesized
  source 1..20: mol_type = other DNA
ggaaagataatctgaaattc

SEQ ID NO: 10619 - DNA, 20 bp, synthetic construct
  misc_feature 1..20: note = chemically synthesized
  source 1..20: mol_type = other DNA
aaagataatctgaaattcag

SEQ ID NO: 10620 - DNA, 20 bp, synthetic construct
  misc_feature 1..20: note = chemically synthesized
  source 1..20: mol_type = other DNA
tcaggagacgtatctgacta

SEQ ID NO: 10621 - DNA, 20 bp, synthetic construct
  misc_feature 1..20: note = chemically synthesized
  source 1..20: mol_type = other DNA
caggagacgtatctgactat

SEQ ID NO: 10622 - DNA, 20 bp, synthetic construct
  misc_feature 1..20: note = chemically synthesized
  source 1..20: mol_type = other DNA
agacgtatctgactataggt

SEQ ID NO: 10623 - DNA, 20 bp, synthetic construct
  misc_feature 1..20: note = chemically synthesized
  source 1..20: mol_type = other DNA
tctgactataggtgagtatt

SEQ ID NO: 10624 - DNA, 20 bp, synthetic construct
  misc_feature 1..20: note = chemically synthesized
  source 1..20: mol_type = other DNA
ggaactcattgttctgtaaa

SEQ ID NO: 10625 - DNA, 20 bp, synthetic construct
  misc_feature 1..20: note = chemically synthesized
  source 1..20: mol_type = other DNA
actcattgttctgtaaacag

SEQ ID NO: 10626 - DNA, 20 bp, synthetic construct
  misc_feature 1..20: note = chemically synthesized
  source 1..20: mol_type = other DNA
tgttctgtaaacagtagtta

SEQ ID NO: 10627 - DNA, 20 bp, synthetic construct
  misc_feature 1..20: note = chemically synthesized
  source 1..20: mol_type = other DNA
agtagttacagccacgtgtg

SEQ ID NO: 10628 - DNA, 20 bp, synthetic construct
  misc_feature 1..20: note = chemically synthesized
  source 1..20: mol_type = other DNA
gtagttacagccacgtgtgt

SEQ ID NO: 10629 - DNA, 20 bp, synthetic construct
  misc_feature 1..20: note = chemically synthesized
  source 1..20: mol_type = other DNA
cagccacgtgtgtgggcatc

SEQ ID NO: 10630 - DNA, 20 bp, synthetic construct
  misc_feature 1..20: note = chemically synthesized
  source 1..20: mol_type = other DNA
gccacgtgtgtgggcatctg

SEQ ID NO: 10631 - DNA, 20 bp, synthetic construct
  misc_feature 1..20: note = chemically synthesized
  source 1..20: mol_type = other DNA
cacgtgtgtgggcatctgga

SEQ ID NO: 10632 - DNA, 20 bp, synthetic construct
  misc_feature 1..20: note = chemically synthesized
  source 1..20: mol_type = other DNA
tgtgtgggcatctggagagt

SEQ ID NO: 10633 - DNA, 20 bp, synthetic construct
  misc_feature 1..20: note = chemically synthesized
  source 1..20: mol_type = other DNA
gggcatctggagagtgagca

SEQ ID NO: 10634 - DNA, 20 bp, synthetic construct
  misc_feature 1..20: note = chemically synthesized
  source 1..20: mol_type = other DNA
agcatggatattgtgatacc

SEQ ID NO: 10635 - DNA, 20 bp, synthetic construct
  misc_feature 1..20: note = chemically synthesized
  source 1..20: mol_type = other DNA
ggatattgtgatacctagta

SEQ ID NO: 10636 - DNA, 20 bp, synthetic construct
  misc_feature 1..20: note = chemically synthesized
  source 1..20: mol_type = other DNA
gtgatacctagtacagtgcc

SEQ ID NO: 10637 - DNA, 20 bp, synthetic construct
  misc_feature 1..20: note = chemically synthesized
  source 1..20: mol_type = other DNA
atacctagtacagtgcctgg

SEQ ID NO: 10638 - DNA, 20 bp, synthetic construct
  misc_feature 1..20: note = chemically synthesized
  source 1..20: mol_type = other DNA
cctagtacagtgcctggcag

SEQ ID NO: 10639 - DNA, 20 bp, synthetic construct
  misc_feature 1..20: note = chemically synthesized
  source 1..20: mol_type = other DNA
agtacagtgcctggcagtag

SEQ ID NO: 10640 - DNA, 20 bp, synthetic construct
  misc_feature 1..20: note = chemically synthesized
  source 1..20: mol_type = other DNA
ggcagtagtggttgtatgct

SEQ ID NO: 10641 - DNA, 20 bp, synthetic construct
  misc_feature 1..20: note = chemically synthesized
  source 1..20: mol_type = other DNA
tgctcagtaaattttgttga

SEQ ID NO: 10642 - DNA, 20 bp, synthetic construct
  misc_feature 1..20: note = chemically synthesized
  source 1..20: mol_type = other DNA
gctcagtaaattttgttgac

SEQ ID NO: 10643 - DNA, 20 bp, synthetic construct
  misc_feature 1..20: note = chemically synthesized
  source 1..20: mol_type = other DNA
ctcagtaaattttgttgaca

SEQ ID NO: 10644 - DNA, 20 bp, synthetic construct
  misc_feature 1..20: note = chemically synthesized
  source 1..20: mol_type = other DNA
gtaaattttgttgacagggt

SEQ ID NO: 10645 - DNA, 20 bp, synthetic construct
  misc_feature 1..20: note = chemically synthesized
  source 1..20: mol_type = other DNA
taaattttgttgacagggtc

SEQ ID NO: 10646 - DNA, 20 bp, synthetic construct
  misc_feature 1..20: note = chemically synthesized
  source 1..20: mol_type = other DNA
aaattttgttgacagggtca

SEQ ID NO: 10647 - DNA, 20 bp, synthetic construct
  misc_feature 1..20: note = chemically synthesized
  source 1..20: mol_type = other DNA
tttgttgacagggtcagggc

SEQ ID NO: 10648 - DNA, 20 bp, synthetic construct
  misc_feature 1..20: note = chemically synthesized
  source 1..20: mol_type = other DNA
tgacagggtcagggccggac

SEQ ID NO: 10649 - DNA, 20 bp, synthetic construct
  misc_feature 1..20: note = chemically synthesized
  source 1..20: mol_type = other DNA
gtcagggccggactagactg

SEQ ID NO: 10650 - DNA, 20 bp, synthetic construct
  misc_feature 1..20: note = chemically synthesized
  source 1..20: mol_type = other DNA
gggccggactagactgtggt

SEQ ID NO: 10651 - DNA, 20 bp, synthetic construct
  misc_feature 1..20: note = chemically synthesized
  source 1..20: mol_type = other DNA
cggactagactgtggtaagc

SEQ ID NO: 10652 - DNA, 20 bp, synthetic construct
  misc_feature 1..20: note = chemically synthesized
  source 1..20: mol_type = other DNA
ggactagactgtggtaagca

SEQ ID NO: 10653 - DNA, 20 bp, synthetic construct
  misc_feature 1..20: note = chemically synthesized
  source 1..20: mol_type = other DNA
actgtggtaagcaaggcctg

SEQ ID NO: 10654 - DNA, 20 bp, synthetic construct
  misc_feature 1..20: note = chemically synthesized
  source 1..20: mol_type = other DNA
ctgtggtaagcaaggcctgt

SEQ ID NO: 10655 - DNA, 20 bp, synthetic construct
  misc_feature 1..20: note = chemically synthesized
  source 1..20: mol_type = other DNA
tgtggtaagcaaggcctgta

SEQ ID NO: 10656 - DNA, 20 bp, synthetic construct
  misc_feature 1..20: note = chemically synthesized
  source 1..20: mol_type = other DNA
taaatatacttgtatgcccc

SEQ ID NO: 10657 - DNA, 20 bp, synthetic construct
  misc_feature 1..20: note = chemically synthesized
  source 1..20: mol_type = other DNA
atatacttgtatgccccgag

SEQ ID NO: 10658 - DNA, 20 bp, synthetic construct
  misc_feature 1..20: note = chemically synthesized
  source 1..20: mol_type = other DNA
acttgtatgccccgagaagt

SEQ ID NO: 10659 - DNA, 20 bp, synthetic construct
  misc_feature 1..20: note = chemically synthesized
  source 1..20: mol_type = other DNA
cttgtatgccccgagaagtg

SEQ ID NO: 10660 - DNA, 20 bp, synthetic construct
  misc_feature 1..20: note = chemically synthesized
  source 1..20: mol_type = other DNA
tgtgccctacatgccttgtt

SEQ ID NO: 10661 - DNA, 20 bp, synthetic construct
  misc_feature 1..20: note = chemically synthesized
  source 1..20: mol_type = other DNA
tgtttggttcactcttgtcc

SEQ ID NO: 10662 - DNA, 20 bp, synthetic construct
  misc_feature 1..20: note = chemically synthesized
  source 1..20: mol_type = other DNA
gttcactcttgtcccagccc

SEQ ID NO: 10663 - DNA, 20 bp, synthetic construct
  misc_feature 1..20: note = chemically synthesized
  source 1..20: mol_type = other DNA
actcttgtcccagccctagc

SEQ ID NO: 10664 - DNA, 20 bp, synthetic construct
  misc_feature 1..20: note = chemically synthesized
  source 1..20: mol_type = other DNA
cagccctagcaagtatatat

SEQ ID NO: 10665 - DNA, 20 bp, synthetic construct
  misc_feature 1..20: note = chemically synthesized
  source 1..20: mol_type = other DNA
agccctagcaagtatatata

SEQ ID NO: 10666 - DNA, 20 bp, synthetic construct
  misc_feature 1..20: note = chemically synthesized
  source 1..20: mol_type = other DNA
caagtatatataaggtgaaa

SEQ ID NO: 10667 - DNA, 20 bp, synthetic construct
  misc_feature 1..20: note = chemically synthesized
  source 1..20: mol_type = other DNA
aagtatatataaggtgaaaa

SEQ ID NO: 10668 - DNA, 20 bp, synthetic construct
  misc_feature 1..20: note = chemically synthesized
  source 1..20: mol_type = other DNA
atataaggtgaaaaaggaaa

SEQ ID NO: 10669 - DNA, 20 bp, synthetic construct
  misc_feature 1..20: note = chemically synthesized
  source 1..20: mol_type = other DNA
aggtgaaaaaggaaaaagct

SEQ ID NO: 10670 - DNA, 20 bp, synthetic construct
  misc_feature 1..20: note = chemically synthesized
  source 1..20: mol_type = other DNA
ggtgaaaaaggaaaaagctg

SEQ ID NO: 10671 - DNA, 20 bp, synthetic construct
  misc_feature 1..20: note = chemically synthesized
  source 1..20: mol_type = other DNA
aaaaaggaaaaagctgaggc

SEQ ID NO: 10672 - DNA, 20 bp, synthetic construct
  misc_feature 1..20: note = chemically synthesized
  source 1..20: mol_type = other DNA
aaaggaaaaagctgaggctg

SEQ ID NO: 10673 - DNA, 20 bp, synthetic construct
  misc_feature 1..20: note = chemically synthesized
  source 1..20: mol_type = other DNA
aaaaagctgaggctggagcc

SEQ ID NO: 10674 - DNA, 20 bp, synthetic construct
  misc_feature 1..20: note = chemically synthesized
  source 1..20: mol_type = other DNA
aaaagctgaggctggagcct

SEQ ID NO: 10675 - DNA, 20 bp, synthetic construct
  misc_feature 1..20: note = chemically synthesized
  source 1..20: mol_type = other DNA
aagctgaggctggagcctgg

SEQ ID NO: 10676 - DNA, 20 bp, synthetic construct
  misc_feature 1..20: note = chemically synthesized
  source 1..20: mol_type = other DNA
gctggagcctgggagaaccc

SEQ ID NO: 10677 - DNA, 20 bp, synthetic construct
  misc_feature 1..20: note = chemically synthesized
  source 1..20: mol_type = other DNA
tgggagaaccctggacattt

SEQ ID NO: 10678 - DNA, 20 bp, synthetic construct
  misc_feature 1..20: note = chemically synthesized
  source 1..20: mol_type = other DNA
gggagaaccctggacattta

SEQ ID NO: 10679 - DNA, 20 bp, synthetic construct
  misc_feature 1..20: note = chemically synthesized
  source 1..20: mol_type = other DNA
ggagaaccctggacatttaa

SEQ ID NO: 10680 - DNA, 20 bp, synthetic construct
  misc_feature 1..20: note = chemically synthesized
  source 1..20: mol_type = other DNA
ccctggacatttaagggcca

SEQ ID NO: 10681 - DNA, 20 bp, synthetic construct
  misc_feature 1..20: note = chemically synthesized
  source 1..20: mol_type = other DNA
ctggacatttaagggccatg

SEQ ID NO: 10682 - DNA, 20 bp, synthetic construct
  misc_feature 1..20: note = chemically synthesized
  source 1..20: mol_type = other DNA
ggacatttaagggccatgga

SEQ ID NO: 10683 - DNA, 20 bp, synthetic construct
  misc_feature 1..20: note = chemically synthesized
  source 1..20: mol_type = other DNA
gacatttaagggccatggag

SEQ ID NO: 10684 - DNA, 20 bp, synthetic construct
  misc_feature 1..20: note = chemically synthesized
  source 1..20: mol_type = other DNA
ttaagggccatggagaggaa

SEQ ID NO: 10685 - DNA, 20 bp, synthetic construct
  misc_feature 1..20: note = chemically synthesized
  source 1..20: mol_type = other DNA
taagggccatggagaggaac

SEQ ID NO: 10686 - DNA, 20 bp, synthetic construct
  misc_feature 1..20: note = chemically synthesized
  source 1..20: mol_type = other DNA
agggccatggagaggaacag

SEQ ID NO: 10687 - DNA, 20 bp, synthetic construct
  misc_feature 1..20: note = chemically synthesized
  source 1..20: mol_type = other DNA
gaacaggagttaatcaattc

SEQ ID NO: 10688 - DNA, 20 bp, synthetic construct
  misc_feature 1..20: note = chemically synthesized
  source 1..20: mol_type = other DNA
gagttaatcaattcaagtgc

SEQ ID NO: 10689 - DNA, 20 bp, synthetic construct
  misc_feature 1..20: note = chemically synthesized
  source 1..20: mol_type = other DNA
taatcaattcaagtgctgga

SEQ ID NO: 10690 - DNA, 20 bp, synthetic construct
  misc_feature 1..20: note = chemically synthesized
  source 1..20: mol_type = other DNA
ttcaagtgctggatggataa

SEQ ID NO: 10691 - DNA, 20 bp, synthetic construct
  misc_feature 1..20: note = chemically synthesized
  source 1..20: mol_type = other DNA
tcaagtgctggatggataac

SEQ ID NO: 10692 - DNA, 20 bp, synthetic construct
  misc_feature 1..20: note = chemically synthesized
  source 1..20: mol_type = other DNA
aagtgctggatggataacag

SEQ ID NO: 10693 - DNA, 20 bp, synthetic construct
  misc_feature 1..20: note = chemically synthesized
  source 1..20: mol_type = other DNA
gctggatggataacaggagt

SEQ ID NO: 10694 - DNA, 20 bp, synthetic construct
  misc_feature 1..20: note = chemically synthesized
  source 1..20: mol_type = other DNA
tggatggataacaggagtta

SEQ ID NO: 10695 - DNA, 20 bp, synthetic construct
  misc_feature 1..20: note = chemically synthesized
  source 1..20: mol_type = other DNA
ggataacaggagttagagca

SEQ ID NO: 10696 - DNA, 20 bp, synthetic construct
  misc_feature 1..20: note = chemically synthesized
  source 1..20: mol_type = other DNA
taacaggagttagagcaaag

SEQ ID NO: 10697 - DNA, 20 bp, synthetic construct
  misc_feature 1..20: note = chemically synthesized
  source 1..20: mol_type = other DNA
aacaggagttagagcaaagc

SEQ ID NO: 10698 - DNA, 20 bp, synthetic construct
  misc_feature 1..20: note = chemically synthesized
  source 1..20: mol_type = other DNA
acaggagttagagcaaagcg

SEQ ID NO: 10699 - DNA, 20 bp, synthetic construct
  misc_feature 1..20: note = chemically synthesized
  source 1..20: mol_type = other DNA
gttagagcaaagcggggaac

SEQ ID NO: 10700 - DNA, 20 bp, synthetic construct
  misc_feature 1..20: note = chemically synthesized
  source 1..20: mol_type = other DNA
agcaaagcggggaaccagaa

SEQ ID NO: 10701 - DNA, 20 bp, synthetic construct
  misc_feature 1..20: note = chemically synthesized
  source 1..20: mol_type = other DNA
caaagcggggaaccagaata

SEQ ID NO: 10702 - DNA, 20 bp, synthetic construct
  misc_feature 1..20: note = chemically synthesized
  source 1..20: mol_type = other DNA
aatagagtgattattataaa

SEQ ID NO: 10703 - DNA, 20 bp, synthetic construct
  misc_feature 1..20: note = chemically synthesized
  source 1..20: mol_type = other DNA
tagagtgattattataaaaa

SEQ ID NO: 10704 - DNA, 20 bp, synthetic construct
  misc_feature 1..20: note = chemically synthesized
  source 1..20: mol_type = other DNA
tataaaaagagtttcctaaa

SEQ ID NO: 10705 - DNA, 20 bp, synthetic construct
  misc_feature 1..20: note = chemically synthesized
  source 1..20: mol_type = other DNA
ataaaaagagtttcctaaaa

SEQ ID NO: 10706 - DNA, 20 bp, synthetic construct
  misc_feature 1..20: note = chemically synthesized
  source 1..20: mol_type = other DNA
taaaaagagtttcctaaaaa

SEQ ID NO: 10707 - DNA, 20 bp, synthetic construct
  misc_feature 1..20: note = chemically synthesized
  source 1..20: mol_type = other DNA
aaaagagtttcctaaaaagg

SEQ ID NO: 10708 - DNA, 20 bp, synthetic construct
  misc_feature 1..20: note = chemically synthesized
  source 1..20: mol_type = other DNA
aagagtttcctaaaaaggga

SEQ ID NO: 10709 - DNA, 20 bp, synthetic construct
  misc_feature 1..20: note = chemically synthesized
  source 1..20: mol_type = other DNA
aaaagggagagatcaacaat

SEQ ID NO: 10710 - DNA, 20 bp, synthetic construct
  misc_feature 1..20: note = chemically synthesized
  source 1..20: mol_type = other DNA
atcaacaattagaaattatt

SEQ ID NO: 10711 - DNA, 20 bp, synthetic construct
  misc_feature 1..20: note = chemically synthesized
  source 1..20: mol_type = other DNA
caacaattagaaattattta

SEQ ID NO: 10712 - DNA, 20 bp, synthetic construct
  misc_feature 1..20: note = chemically synthesized
  source 1..20: mol_type = other DNA
caattagaaattatttagag

SEQ ID NO: 10713 - DNA, 20 bp, synthetic construct
  misc_feature 1..20: note = chemically synthesized
  source 1..20: mol_type = other DNA
tagaaattatttagagcagc

SEQ ID NO: 10714 - DNA, 20 bp, synthetic construct
  misc_feature 1..20: note = chemically synthesized
  source 1..20: mol_type = other DNA
ataaactcaaaattattctt

SEQ ID NO: 10715 - DNA, 20 bp, synthetic construct
  misc_feature 1..20: note = chemically synthesized
  source 1..20: mol_type = other DNA
taaactcaaaattattcttt

SEQ ID NO: 10716 - DNA, 20 bp, synthetic construct
  misc_feature 1..20: note = chemically synthesized
  source 1..20: mol_type = other DNA
gtcattcctgattgtgacaa

SEQ ID NO: 10717 - DNA, 20 bp, synthetic construct
  misc_feature 1..20: note = chemically synthesized
  source 1..20: mol_type = other DNA
ttcattatataaatgtgatt

SEQ ID NO: 10718 - DNA, 20 bp, synthetic construct
  misc_feature 1..20: note = chemically synthesized
  source 1..20: mol_type = other DNA
tcattatataaatgtgatta

SEQ ID NO: 10719 - DNA, 20 bp, synthetic construct
  misc_feature 1..20: note = chemically synthesized
  source 1..20: mol_type = other DNA
ttatataaatgtgattaagg

SEQ ID NO: 10720 - DNA, 20 bp, synthetic construct
  misc_feature 1..20: note = chemically synthesized
  source 1..20: mol_type = other DNA
tatataaatgtgattaagga

SEQ ID NO: 10721 - DNA, 20 bp, synthetic construct
  misc_feature 1..20: note = chemically synthesized
  source 1..20: mol_type = other DNA
aaatgtgattaaggaaggaa

SEQ ID NO: 10722 - DNA, 20 bp, synthetic construct
  misc_feature 1..20: note = chemically synthesized
  source 1..20: mol_type = other DNA
atgtgattaaggaaggaaaa

SEQ ID NO: 10723 - DNA, 20 bp, synthetic construct
  misc_feature 1..20: note = chemically synthesized
  source 1..20: mol_type = other DNA
aaggaaggaaaagagctaca

SEQ ID NO: 10724 - DNA, 20 bp, synthetic construct
  misc_feature 1..20: note = chemically synthesized
  source 1..20: mol_type = other DNA
gaaggaaaagagctacacag

SEQ ID NO: 10725 - DNA, 20 bp, synthetic construct
  misc_feature 1..20: note = chemically synthesized
  source 1..20: mol_type = other DNA
gagctacacagaagttatta

SEQ ID NO: 10726 - DNA, 20 bp, synthetic construct
  misc_feature 1..20: note = chemically synthesized
  source 1..20: mol_type = other DNA
gctacacagaagttattaaa

SEQ ID NO: 10727 - DNA, 20 bp, synthetic construct
  misc_feature 1..20: note = chemically synthesized
  source 1..20: mol_type = other DNA
cagaagttattaaagagcta

SEQ ID NO: 10728 - DNA, 20 bp, synthetic construct
  misc_feature 1..20: note = chemically synthesized
  source 1..20: mol_type = other DNA
gaagttattaaagagctaaa

SEQ ID NO: 10729 - DNA, 20 bp, synthetic construct
  misc_feature 1..20: note = chemically synthesized
  source 1..20: mol_type = other DNA
ttaaagagctaaagagaatt

SEQ ID NO: 10730 - DNA, 20 bp, synthetic construct
  misc_feature 1..20: note = chemically synthesized
  source 1..20: mol_type = other DNA
gagaattgagaaatttaaaa

SEQ ID NO: 10731 - DNA, 20 bp, synthetic construct
  misc_feature 1..20: note = chemically synthesized
  source 1..20: mol_type = other DNA
aattgagaaatttaaaacag

SEQ ID NO: 10732 - DNA, 20 bp, synthetic construct
  misc_feature 1..20: note = chemically synthesized
  source 1..20: mol_type = other DNA
gagaaatttaaaacagaaga

SEQ ID NO: 10733 - DNA, 20 bp, synthetic construct
  misc_feature 1..20: note = chemically synthesized
  source 1..20: mol_type = other DNA
aaatttaaaacagaagaaag

SEQ ID NO: 10734 - DNA, 20 bp, synthetic construct
  misc_feature 1..20: note = chemically synthesized
  source 1..20: mol_type = other DNA
aatttaaaacagaagaaagt

SEQ ID NO: 10735 - DNA, 20 bp, synthetic construct
  misc_feature 1..20: note = chemically synthesized
  source 1..20: mol_type = other DNA
atttaaaacagaagaaagta

SEQ ID NO: 10736 - DNA, 20 bp, synthetic construct
  misc_feature 1..20: note = chemically synthesized
  source 1..20: mol_type = other DNA
agaaagtagggccaacatga

SEQ ID NO: 10737 - DNA, 20 bp, synthetic construct
  misc_feature 1..20: note = chemically synthesized
  source 1..20: mol_type = other DNA
gaaagtagggccaacatgaa

SEQ ID NO: 10738 - DNA, 20 bp, synthetic construct
  misc_feature 1..20: note = chemically synthesized
  source 1..20: mol_type = other DNA
aagtagggccaacatgaaag

SEQ ID NO: 10739 - DNA, 20 bp, synthetic construct
  misc_feature 1..20: note = chemically synthesized
  source 1..20: mol_type = other DNA
tagggccaacatgaaaggag

SEQ ID NO: 10740 - DNA, 20 bp, synthetic construct
  misc_feature 1..20: note = chemically synthesized
  source 1..20: mol_type = other DNA
agggccaacatgaaaggagt

SEQ ID NO: 10741 - DNA, 20 bp, synthetic construct
  misc_feature 1..20: note = chemically synthesized
  source 1..20: mol_type = other DNA
gggccaacatgaaaggagta

SEQ ID NO: 10742 - DNA, 20 bp, synthetic construct
  misc_feature 1..20: note = chemically synthesized
  source 1..20: mol_type = other DNA
gccaacatgaaaggagtagg

SEQ ID NO: 10743 - DNA, 20 bp, synthetic construct
  misc_feature 1..20: note = chemically synthesized
  source 1..20: mol_type = other DNA
atgaaaggagtagggagaaa

SEQ ID NO: 10744 - DNA, 20 bp, synthetic construct
  misc_feature 1..20: note = chemically synthesized
  source 1..20: mol_type = other DNA
gaaaggagtagggagaaaaa

SEQ ID NO: 10745 - DNA, 20 bp, synthetic construct
  misc_feature 1..20: note = chemically synthesized
  source 1..20: mol_type = other DNA
tagggagaaaaagagataac

SEQ ID NO: 10746 - DNA, 20 bp, synthetic construct
  misc_feature 1..20: note = chemically synthesized
  source 1..20: mol_type = other DNA
ctgatcctgccaacacctgt

SEQ ID NO: 10747 - DNA, 20 bp, synthetic construct
  misc_feature 1..20: note = chemically synthesized
  source 1..20: mol_type = other DNA
tcctgccaacacctgtgaga

SEQ ID NO: 10748 - DNA, 20 bp, synthetic construct
  misc_feature 1..20: note = chemically synthesized
  source 1..20: mol_type = other DNA
aacctaatttacatttgaca

SEQ ID NO: 10749 - DNA, 20 bp, synthetic construct
  misc_feature 1..20: note = chemically synthesized
  source 1..20: mol_type = other DNA
aatttacatttgacaaagtt

SEQ ID NO: 10750 - DNA, 20 bp, synthetic construct
  misc_feature 1..20: note = chemically synthesized
  source 1..20: mol_type = other DNA
atttacatttgacaaagtta

SEQ ID NO: 10751 - DNA, 20 bp, synthetic construct
  misc_feature 1..20: note = chemically synthesized
  source 1..20: mol_type = other DNA
catttgacaaagttaaggtt

SEQ ID NO: 10752 - DNA, 20 bp, synthetic construct
  misc_feature 1..20: note = chemically synthesized
  source 1..20: mol_type = other DNA
tttgacaaagttaaggttca

SEQ ID NO: 10753 - DNA, 20 bp, synthetic construct
  misc_feature 1..20: note = chemically synthesized
  source 1..20: mol_type = other DNA
agagcttgtgtgacttgtcc

SEQ ID NO: 10754 - DNA, 20 bp, synthetic construct
  misc_feature 1..20: note = chemically synthesized
  source 1..20: mol_type = other DNA
gagcttgtgtgacttgtcca

SEQ ID NO: 10755 - DNA, 20 bp, synthetic construct
  misc_feature 1..20: note = chemically synthesized
  source 1..20: mol_type = other DNA
gtgtgacttgtccaaggtca

SEQ ID NO: 10756 - DNA, 20 bp, synthetic construct
  misc_feature 1..20: note = chemically synthesized
  source 1..20: mol_type = other DNA
tgtgacttgtccaaggtcac

SEQ ID NO: 10757 - DNA, 20 bp, synthetic construct
  misc_feature 1..20: note = chemically synthesized
  source 1..20: mol_type = other DNA
cttgtccaaggtcacaggtc

SEQ ID NO: 10758 - DNA, 20 bp, synthetic construct
  misc_feature 1..20: note = chemically synthesized
  source 1..20: mol_type = other DNA
tgtccaaggtcacaggtcta

SEQ ID NO: 10759 - DNA, 20 bp, synthetic construct
  misc_feature 1..20: note = chemically synthesized
  source 1..20: mol_type = other DNA
gtccaaggtcacaggtctag

SEQ ID NO: 10760 - DNA, 20 bp, synthetic construct
  misc_feature 1..20: note = chemically synthesized
  source 1..20: mol_type = other DNA
ccaaggtcacaggtctagag

SEQ ID NO: 10761 - DNA, 20 bp, synthetic construct
  misc_feature 1..20: note = chemically synthesized
  source 1..20: mol_type = other DNA
caaggtcacaggtctagagg

SEQ ID NO: 10762 - DNA, 20 bp, synthetic construct
  misc_feature 1..20: note = chemically synthesized
  source 1..20: mol_type = other DNA
ggtcacaggtctagaggagg

SEQ ID NO: 10763 - DNA, 20 bp, synthetic construct
  misc_feature 1..20: note = chemically synthesized
  source 1..20: mol_type = other DNA
ttctgtctgatctgattcta

SEQ ID NO: 10764 - DNA, 20 bp, synthetic construct
  misc_feature 1..20: note = chemically synthesized
  source 1..20: mol_type = other DNA
tttcactcaaccacactgta

SEQ ID NO: 10765 - DNA, 20 bp, synthetic construct
  misc_feature 1..20: note = chemically synthesized
  source 1..20: mol_type = other DNA
actcaaccacactgtacagt

SEQ ID NO: 10766 - DNA, 20 bp, synthetic construct
  misc_feature 1..20: note = chemically synthesized
  source 1..20: mol_type = other DNA
gtacagtcagctctccttgt

SEQ ID NO: 10767 - DNA, 20 bp, synthetic construct
  misc_feature 1..20: note = chemically synthesized
  source 1..20: mol_type = other DNA
agctctccttgtgagttcca

SEQ ID NO: 10768 - DNA, 20 bp, synthetic construct
  misc_feature 1..20: note = chemically synthesized
  source 1..20: mol_type = other DNA
ccttgtgagttccacagcca

SEQ ID NO: 10769 - DNA, 20 bp, synthetic construct
  misc_feature 1..20: note = chemically synthesized
  source 1..20: mol_type = other DNA
gccacagattcaattaactg

SEQ ID NO: 10770 - DNA, 20 bp, synthetic construct
  misc_feature 1..20: note = chemically synthesized
  source 1..20: mol_type = other DNA
actgcagatcaaaaatattc

SEQ ID NO: 10771 - DNA, 20 bp, synthetic construct
  misc_feature 1..20: note = chemically synthesized
  source 1..20: mol_type = other DNA
aaaaatattcaagaaaaaaa

SEQ ID NO: 10772 - DNA, 20 bp, synthetic construct
  misc_feature 1..20: note = chemically synthesized
  source 1..20: mol_type = other DNA
atattcaagaaaaaaatgga

SEQ ID NO: 10773 - DNA, 20 bp, synthetic construct
  misc_feature 1..20: note = chemically synthesized
  source 1..20: mol_type = other DNA
gcatctctactgaacatgta

SEQ ID NO: 10774 - DNA, 20 bp, synthetic construct
  misc_feature 1..20: note = chemically synthesized
  source 1..20: mol_type = other DNA
tcattattccctaaacaata

SEQ ID NO: 10775 - DNA, 20 bp, synthetic construct
  misc_feature 1..20: note = chemically synthesized
  source 1..20: mol_type = other DNA
cagcataacaactatttaca

SEQ ID NO: 10776 - DNA, 20 bp, synthetic construct
  misc_feature 1..20: note = chemically synthesized
  source 1..20: mol_type = other DNA
acatagcatttacattgtat

SEQ ID NO: 10777 - DNA, 20 bp, synthetic construct
  misc_feature 1..20: note = chemically synthesized
  source 1..20: mol_type = other DNA
tttacattgtattagctatt

SEQ ID NO: 10778 - DNA, 20 bp, synthetic construct
  misc_feature 1..20: note = chemically synthesized
  source 1..20: mol_type = other DNA
tacattgtattagctattaa

SEQ ID NO: 10779 - DNA, 20 bp, synthetic construct
  misc_feature 1..20: note = chemically synthesized
  source 1..20: mol_type = other DNA
attagctattaagagaaacc

SEQ ID NO: 10780 - DNA, 20 bp, synthetic construct
  misc_feature 1..20: note = chemically synthesized
  source 1..20: mol_type = other DNA
tagctattaagagaaaccta

SEQ ID NO: 10781 - DNA, 20 bp, synthetic construct
  misc_feature 1..20: note = chemically synthesized
  source 1..20: mol_type = other DNA
agaaacctagagatgattta

SEQ ID NO: 10782 - DNA, 20 bp, synthetic construct
  misc_feature 1..20: note = chemically synthesized
  source 1..20: mol_type = other DNA
tagagatgatttaaagtaca

SEQ ID NO: 10783 - DNA, 20 bp, synthetic construct
  misc_feature 1..20: note = chemically synthesized
  source 1..20: mol_type = other DNA
agagatgatttaaagtacaa

SEQ ID NO: 10784 - DNA, 20 bp, synthetic construct
  misc_feature 1..20: note = chemically synthesized
  source 1..20: mol_type = other DNA
agatgatttaaagtacaaag

SEQ ID NO: 10785 - DNA, 20 bp, synthetic construct
  misc_feature 1..20: note = chemically synthesized
  source 1..20: mol_type = other DNA
gatgatttaaagtacaaagg

SEQ ID NO: 10786 - DNA, 20 bp, synthetic construct
  misc_feature 1..20: note = chemically synthesized
  source 1..20: mol_type = other DNA
agtacaaaggaggatgtgtt

SEQ ID NO: 10787 - DNA, 20 bp, synthetic construct
  misc_feature 1..20: note = chemically synthesized
  source 1..20: mol_type = other DNA
gtacaaaggaggatgtgttt

SEQ ID NO: 10788 - DNA, 20 bp, synthetic construct
  misc_feature 1..20: note = chemically synthesized
  source 1..20: mol_type = other DNA
gtgtttaggttatatgcaaa

SEQ ID NO: 10789 - DNA, 20 bp, synthetic construct
  misc_feature 1..20: note = chemically synthesized
  source 1..20: mol_type = other DNA
ttaggttatatgcaaatagt

SEQ ID NO: 10790 - DNA, 20 bp, synthetic construct
  misc_feature 1..20: note = chemically synthesized
  source 1..20: mol_type = other DNA
atagtaagccatttttatat

SEQ ID NO: 10791 - DNA, 20 bp, synthetic construct
  misc_feature 1..20: note = chemically synthesized
  source 1..20: mol_type = other DNA
agtaagccatttttatatcg

SEQ ID NO: 10792 - DNA, 20 bp, synthetic construct
  misc_feature 1..20: note = chemically synthesized
  source 1..20: mol_type = other DNA
catttttatatcggagactt

SEQ ID NO: 10793 - DNA, 20 bp, synthetic construct
  misc_feature 1..20: note = chemically synthesized
  source 1..20: mol_type = other DNA
atcggagacttgagcatcca

SEQ ID NO: 10794 - DNA, 20 bp, synthetic construct
  misc_feature 1..20: note = chemically synthesized
  source 1..20: mol_type = other DNA
tccacagatcttgatatttg

SEQ ID NO: 10795 - DNA, 20 bp, synthetic construct
  misc_feature 1..20: note = chemically synthesized
  source 1..20: mol_type = other DNA
ccacagatcttgatatttgc

SEQ ID NO: 10796 - DNA, 20 bp, synthetic construct
  misc_feature 1..20: note = chemically synthesized
  source 1..20: mol_type = other DNA
cacagatcttgatatttgca

SEQ ID NO: 10797 - DNA, 20 bp, synthetic construct
  misc_feature 1..20: note = chemically synthesized
  source 1..20: mol_type = other DNA
acagatcttgatatttgcag

SEQ ID NO: 10798 - DNA, 20 bp, synthetic construct
  misc_feature 1..20: note = chemically synthesized
  source 1..20: mol_type = other DNA
cagatcttgatatttgcagg

SEQ ID NO: 10799 - DNA, 20 bp, synthetic construct
  misc_feature 1..20: note = chemically synthesized
  source 1..20: mol_type = other DNA
gtcttgccaccaattttcca

SEQ ID NO: 10800 - DNA, 20 bp, synthetic construct
  misc_feature 1..20: note = chemically synthesized
  source 1..20: mol_type = other DNA
accaattttccatggatact

SEQ ID NO: 10801 - DNA, 20 bp, synthetic construct
  misc_feature 1..20: note = chemically synthesized
  source 1..20: mol_type = other DNA
ccaattttccatggatactg

SEQ ID NO: 10802 - DNA, 20 bp, synthetic construct
  misc_feature 1..20: note = chemically synthesized
  source 1..20: mol_type = other DNA
tactgaggaacgactgtaaa

SEQ ID NO: 10803 - DNA, 20 bp, synthetic construct
  misc_feature 1..20: note = chemically synthesized
  source 1..20: mol_type = other DNA
ggaacgactgtaaatggatg

SEQ ID NO: 10804 - DNA, 20 bp, synthetic construct
  misc_feature 1..20: note = chemically synthesized
  source 1..20: mol_type = other DNA
gaacgactgtaaatggatgc

SEQ ID NO: 10805 - DNA, 20 bp, synthetic construct
  misc_feature 1..20: note = chemically synthesized
  source 1..20: mol_type = other DNA
actgtaaatggatgcaggca

SEQ ID NO: 10806 - DNA, 20 bp, synthetic construct
  misc_feature 1..20: note = chemically synthesized
  source 1..20: mol_type = other DNA
atgcaggcatggatgctatt

SEQ ID NO: 10807 - DNA, 20 bp, synthetic construct
  misc_feature 1..20: note = chemically synthesized
  source 1..20: mol_type = other DNA
tgcaggcatggatgctattt

SEQ ID NO: 10808 - DNA, 20 bp, synthetic construct
  misc_feature 1..20: note = chemically synthesized
  source 1..20: mol_type = other DNA
caggcatggatgctatttag

SEQ ID NO: 10809 - DNA, 20 bp, synthetic construct
  misc_feature 1..20: note = chemically synthesized
  source 1..20: mol_type = other DNA
ggatgctatttaggagtgtc

SEQ ID NO: 10810 - DNA, 20 bp, synthetic construct
  misc_feature 1..20: note = chemically synthesized
  source 1..20: mol_type = other DNA
gatgctatttaggagtgtcc

SEQ ID NO: 10811 - DNA, 20 bp, synthetic construct
  misc_feature 1..20: note = chemically synthesized
  source 1..20: mol_type = other DNA
atgctatttaggagtgtcca

SEQ ID NO: 10812 - DNA, 20 bp, synthetic construct
  misc_feature 1..20: note = chemically synthesized
  source 1..20: mol_type = other DNA
atttaggagtgtccagggcc

SEQ ID NO: 10813 - DNA, 20 bp, synthetic construct
  misc_feature 1..20: note = chemically synthesized
  source 1..20: mol_type = other DNA
gtgtccagggccaagtaaat

SEQ ID NO: 10814 - DNA, 20 bp, synthetic construct
  misc_feature 1..20: note = chemically synthesized
  source 1..20: mol_type = other DNA
ggccaagtaaatgagttgct

SEQ ID NO: 10815 - DNA, 20 bp, synthetic construct
  misc_feature 1..20: note = chemically synthesized
  source 1..20: mol_type = other DNA
caagtaaatgagttgctgag

SEQ ID NO: 10816 - DNA, 20 bp, synthetic construct
  misc_feature 1..20: note = chemically synthesized
  source 1..20: mol_type = other DNA
agtaaatgagttgctgagca

SEQ ID NO: 10817 - DNA, 20 bp, synthetic construct
  misc_feature 1..20: note = chemically synthesized
  source 1..20: mol_type = other DNA
taaatgagttgctgagcaga

SEQ ID NO: 10818 - DNA, 20 bp, synthetic construct
  misc_feature 1..20: note = chemically synthesized
  source 1..20: mol_type = other DNA
aaatgagttgctgagcagag

SEQ ID NO: 10819 - DNA, 20 bp, synthetic construct
  misc_feature 1..20: note = chemically synthesized
  source 1..20: mol_type = other DNA
tgagttgctgagcagagagg

SEQ ID NO: 10820 - DNA, 20 bp, synthetic construct
  misc_feature 1..20: note = chemically synthesized
  source 1..20: mol_type = other DNA
gagttgctgagcagagaggt

SEQ ID NO: 10821 - DNA, 20 bp, synthetic construct
  misc_feature 1..20: note = chemically synthesized
  source 1..20: mol_type = other DNA
ttgctgagcagagaggtggg

SEQ ID NO: 10822 - DNA, 20 bp, synthetic construct
  misc_feature 1..20: note = chemically synthesized
  source 1..20: mol_type = other DNA
gctgagcagagaggtgggtg

SEQ ID NO: 10823 - DNA, 20 bp, synthetic construct
  misc_feature 1..20: note = chemically synthesized
  source 1..20: mol_type = other DNA
ctgagcagagaggtgggtgg

SEQ ID NO: 10824 - DNA, 20 bp, synthetic construct
  misc_feature 1..20: note = chemically synthesized
  source 1..20: mol_type = other DNA
gagaggtgggtggaggctgt

SEQ ID NO: 10825 - DNA, 20 bp, synthetic construct
  misc_feature 1..20: note = chemically synthesized
  source 1..20: mol_type = other DNA
agaggtgggtggaggctgtg

SEQ ID NO: 10826 - DNA, 20 bp, synthetic construct
  misc_feature 1..20: note = chemically synthesized
  source 1..20: mol_type = other DNA
ggctgtgaggcatcaatatg

SEQ ID NO: 10827 - DNA, 20 bp, synthetic construct
  misc_feature 1..20: note = chemically synthesized
  source 1..20: mol_type = other DNA
tgtgaggcatcaatatgtgg

SEQ ID NO: 10828 - DNA, 20 bp, synthetic construct
  misc_feature 1..20: note = chemically synthesized
  source 1..20: mol_type = other DNA
ggtggcatccatctgcattt

SEQ ID NO: 10829 - DNA, 20 bp, synthetic construct
  misc_feature 1..20: note = chemically synthesized
  source 1..20: mol_type = other DNA
ttggtgatttttttccttca

SEQ ID NO: 10830 - DNA, 20 bp, synthetic construct
  misc_feature 1..20: note = chemically synthesized
  source 1..20: mol_type = other DNA
tttttttccttcacagtcct

SEQ ID NO: 10831 - DNA, 20 bp, synthetic construct
  misc_feature 1..20: note = chemically synthesized
  source 1..20: mol_type = other DNA
cttcacagtcctcggctgtc

SEQ ID NO: 10832 - DNA, 20 bp, synthetic construct
  misc_feature 1..20: note = chemically synthesized
  source 1..20: mol_type = other DNA
ttcacagtcctcggctgtct

SEQ ID NO: 10833 - DNA, 20 bp, synthetic construct
  misc_feature 1..20: note = chemically synthesized
  source 1..20: mol_type = other DNA
acagtcctcggctgtctggg

SEQ ID NO: 10834 - DNA, 20 bp, synthetic construct
  misc_feature 1..20: note = chemically synthesized
  source 1..20: mol_type = other DNA
agtcctcggctgtctgggaa

SEQ ID NO: 10835 - DNA, 20 bp, synthetic construct
  misc_feature 1..20: note = chemically synthesized
  source 1..20: mol_type = other DNA
cctcggctgtctgggaagag

SEQ ID NO: 10836 - DNA, 20 bp, synthetic construct
  misc_feature 1..20: note = chemically synthesized
  source 1..20: mol_type = other DNA
ctcggctgtctgggaagaga

SEQ ID NO: 10837 - DNA, 20 bp, synthetic construct
  misc_feature 1..20: note = chemically synthesized
  source 1..20: mol_type = other DNA
tgtctgggaagagaaggatg

SEQ ID NO: 10838 - DNA, 20 bp, synthetic construct
  misc_feature 1..20: note = chemically synthesized
  source 1..20: mol_type = other DNA
gtctgggaagagaaggatga

SEQ ID NO: 10839 - DNA, 20 bp, synthetic construct
  misc_feature 1..20: note = chemically synthesized
  source 1..20: mol_type = other DNA
tgggaagagaaggatgaagg

SEQ ID NO: 10840 - DNA, 20 bp, synthetic construct
  misc_feature 1..20: note = chemically synthesized
  source 1..20: mol_type = other DNA
aagagaaggatgaaggcaga

SEQ ID NO: 10841 - DNA, 20 bp, synthetic construct
  misc_feature 1..20: note = chemically synthesized
  source 1..20: mol_type = other DNA
ggcagatggctgctccaatt

SEQ ID NO: 10842 - DNA, 20 bp, synthetic construct
  misc_feature 1..20: note = chemically synthesized
  source 1..20: mol_type = other DNA
gcagatggctgctccaattt

SEQ ID NO: 10843 - DNA, 20 bp, synthetic construct
  misc_feature 1..20: note = chemically synthesized
  source 1..20: mol_type = other DNA
cagatggctgctccaattta

SEQ ID NO: 10844 - DNA, 20 bp, synthetic construct
  misc_feature 1..20: note = chemically synthesized
  source 1..20: mol_type = other DNA
agatggctgctccaatttag

SEQ ID NO: 10845 - DNA, 20 bp, synthetic construct
  misc_feature 1..20: note = chemically synthesized
  source 1..20: mol_type = other DNA
ggctgctccaatttaggggc

SEQ ID NO: 10846 - DNA, 20 bp, synthetic construct
  misc_feature 1..20: note = chemically synthesized
  source 1..20: mol_type = other DNA
gctgctccaatttaggggct

SEQ ID NO: 10847 - DNA, 20 bp, synthetic construct
  misc_feature 1..20: note = chemically synthesized
  source 1..20: mol_type = other DNA
caatttaggggctaggattg

SEQ ID NO: 10848 - DNA, 20 bp, synthetic construct
  misc_feature 1..20: note = chemically synthesized
  source 1..20: mol_type = other DNA
aatttaggggctaggattgc

SEQ ID NO: 10849 - DNA, 20 bp, synthetic construct
  misc_feature 1..20: note = chemically synthesized
  source 1..20: mol_type = other DNA
atttaggggctaggattgca

SEQ ID NO: 10850 - DNA, 20 bp, synthetic construct
  misc_feature 1..20: note = chemically synthesized
  source 1..20: mol_type = other DNA
taggggctaggattgcaggg

SEQ ID NO: 10851 - DNA, 20 bp, synthetic construct
  misc_feature 1..20: note = chemically synthesized
  source 1..20: mol_type = other DNA
aggggctaggattgcagggt

SEQ ID NO: 10852 - DNA, 20 bp, synthetic construct
  misc_feature 1..20: note = chemically synthesized
  source 1..20: mol_type = other DNA
ctaggattgcagggtgggca

SEQ ID NO: 10853 - DNA, 20 bp, synthetic construct
  misc_feature 1..20: note = chemically synthesized
  source 1..20: mol_type = other DNA
gtgggcacagcattgcaaac

SEQ ID NO: 10854 - DNA, 20 bp, synthetic construct
  misc_feature 1..20: note = chemically synthesized
  source 1..20: mol_type = other DNA
cacagcattgcaaacgagtg

SEQ ID NO: 10855 - DNA, 20 bp, synthetic construct
  misc_feature 1..20: note = chemically synthesized
  source 1..20: mol_type = other DNA
acagcattgcaaacgagtga

SEQ ID NO: 10856 - DNA, 20 bp, synthetic construct
  misc_feature 1..20: note = chemically synthesized
  source 1..20: mol_type = other DNA
gcaaacgagtgaaggaaatt

SEQ ID NO: 10857 - DNA, 20 bp, synthetic construct
  misc_feature 1..20: note = chemically synthesized
  source 1..20: mol_type = other DNA
gtgaaggaaattgagaaata

SEQ ID NO: 10858 - DNA, 20 bp, synthetic construct
  misc_feature 1..20: note = chemically synthesized
  source 1..20: mol_type = other DNA
attgagaaatatggccaatg

SEQ ID NO: 10859 - DNA, 20 bp, synthetic construct
  misc_feature 1..20: note = chemically synthesized
  source 1..20: mol_type = other DNA
tgagaaatatggccaatgaa

SEQ ID NO: 10860 - DNA, 20 bp, synthetic construct
  misc_feature 1..20: note = chemically synthesized
  source 1..20: mol_type = other DNA
atatggccaatgaagagttg

SEQ ID NO: 10861 - DNA, 20 bp, synthetic construct
  misc_feature 1..20: note = chemically synthesized
  source 1..20: mol_type = other DNA
atggccaatgaagagttgaa

SEQ ID NO: 10862 - DNA, 20 bp, synthetic construct
  misc_feature 1..20: note = chemically synthesized
  source 1..20: mol_type = other DNA
ggccaatgaagagttgaaga

SEQ ID NO: 10863 - DNA, 20 bp, synthetic construct
  misc_feature 1..20: note = chemically synthesized
  source 1..20: mol_type = other DNA
gccaatgaagagttgaagag

SEQ ID NO: 10864 - DNA, 20 bp, synthetic construct
  misc_feature 1..20: note = chemically synthesized
  source 1..20: mol_type = other DNA
tgaagagttgaagagaggcc

SEQ ID NO: 10865 - DNA, 20 bp, synthetic construct
  misc_feature 1..20: note = chemically synthesized
  source 1..20: mol_type = other DNA
agttgaagagaggcctggca

SEQ ID NO: 10866 - DNA, 20 bp, synthetic construct
  misc_feature 1..20: note = chemically synthesized
  source 1..20: mol_type = other DNA
tgaagagaggcctggcatgg

SEQ ID NO: 10867 - DNA, 20 bp, synthetic construct
  misc_feature 1..20: note = chemically synthesized
  source 1..20: mol_type = other DNA
gtggctcacacctataatcc

SEQ ID NO: 10868 - DNA, 20 bp, synthetic construct
  misc_feature 1..20: note = chemically synthesized
  source 1..20: mol_type = other DNA
acctataatcccagcacttt

SEQ ID NO: 10869 - DNA, 20 bp, synthetic construct
  misc_feature 1..20: note = chemically synthesized
  source 1..20: mol_type = other DNA
ctataatcccagcactttca

SEQ ID NO: 10870 - DNA, 20 bp, synthetic construct
  misc_feature 1..20: note = chemically synthesized
  source 1..20: mol_type = other DNA
tataatcccagcactttcag

SEQ ID NO: 10871 - DNA, 20 bp, synthetic construct
  misc_feature 1..20: note = chemically synthesized
  source 1..20: mol_type = other DNA
tcccagcactttcagaggcc

SEQ ID NO: 10872 - DNA, 20 bp, synthetic construct
  misc_feature 1..20: note = chemically synthesized
  source 1..20: mol_type = other DNA
cccagcactttcagaggccc

SEQ ID NO: 10873 - DNA, 20 bp, synthetic construct
  misc_feature 1..20: note = chemically synthesized
  source 1..20: mol_type = other DNA
agcactttcagaggcccagg

SEQ ID NO: 10874 - DNA, 20 bp, synthetic construct
  misc_feature 1..20: note = chemically synthesized
  source 1..20: mol_type = other DNA
gcactttcagaggcccaggc

SEQ ID NO: 10875 - DNA, 20 bp, synthetic construct
  misc_feature 1..20: note = chemically synthesized
  source 1..20: mol_type = other DNA
ctttcagaggcccaggcagg

SEQ ID NO: 10876 - DNA, 20 bp, synthetic construct
  misc_feature 1..20: note = chemically synthesized
  source 1..20: mol_type = other DNA
cccaggcaggcagatcactt

SEQ ID NO: 10877 - DNA, 20 bp, synthetic construct
  misc_feature 1..20: note = chemically synthesized
  source 1..20: mol_type = other DNA
ccaggcaggcagatcacttg

SEQ ID NO: 10878 - DNA, 20 bp, synthetic construct
  misc_feature 1..20: note = chemically synthesized
  source 1..20: mol_type = other DNA
gcaggcagatcacttgaggt

SEQ ID NO: 10879 - DNA, 20 bp, synthetic construct
  misc_feature 1..20: note = chemically synthesized
  source 1..20: mol_type = other DNA
caggcagatcacttgaggtc

SEQ ID NO: 10880 - DNA, 20 bp, synthetic construct
  misc_feature 1..20: note = chemically synthesized
  source 1..20: mol_type = other DNA
ggcagatcacttgaggtcag

SEQ ID NO: 10881 - DNA, 20 bp, synthetic construct
  misc_feature 1..20: note = chemically synthesized
  source 1..20: mol_type = other DNA
tgaggtcaggagttcgacac

SEQ ID NO: 10882 - DNA, 20 bp, synthetic construct
  misc_feature 1..20: note = chemically synthesized
  source 1..20: mol_type = other DNA
tcaggagttcgacaccagcc

SEQ ID NO: 10883 - DNA, 20 bp, synthetic construct
  misc_feature 1..20: note = chemically synthesized
  source 1..20: mol_type = other DNA
tcgacaccagcctggccaac

SEQ ID NO: 10884 - DNA, 20 bp, synthetic construct
  misc_feature 1..20: note = chemically synthesized
  source 1..20: mol_type = other DNA
cgacaccagcctggccaaca

SEQ ID NO: 10885 - DNA, 20 bp, synthetic construct
  misc_feature 1..20: note = chemically synthesized
  source 1..20: mol_type = other DNA
gcctggccaacaaggtgaaa

SEQ ID NO: 10886 - DNA, 20 bp, synthetic construct
  misc_feature 1..20: note = chemically synthesized
  source 1..20: mol_type = other DNA
aaggtgaaatggtgaaaccc

SEQ ID NO: 10887 - DNA, 20 bp, synthetic construct
  misc_feature 1..20: note = chemically synthesized
  source 1..20: mol_type = other DNA
tttactaaaaatacaaaaat

SEQ ID NO: 10888 - DNA, 20 bp, synthetic construct
  misc_feature 1..20: note = chemically synthesized
  source 1..20: mol_type = other DNA
ctaaaaatacaaaaattagc

SEQ ID NO: 10889 - DNA, 20 bp, synthetic construct
  misc_feature 1..20: note = chemically synthesized
  source 1..20: mol_type = other DNA
taaaaatacaaaaattagct

SEQ ID NO: 10890 - DNA, 20 bp, synthetic construct
  misc_feature 1..20: note = chemically synthesized
  source 1..20: mol_type = other DNA
atacaaaaattagctgggca

SEQ ID NO: 10891 - DNA, 20 bp, synthetic construct
  misc_feature 1..20: note = chemically synthesized
  source 1..20: mol_type = other DNA
caaaaattagctgggcatgg

SEQ ID NO: 10892 - DNA, 20 bp, synthetic construct
  misc_feature 1..20: note = chemically synthesized
  source 1..20: mol_type = other DNA
aaattagctgggcatggtgg

SEQ ID NO: 10893 - DNA, 20 bp, synthetic construct
  misc_feature 1..20: note = chemically synthesized
  source 1..20: mol_type = other DNA
aattagctgggcatggtggc

SEQ ID NO: 10894 - DNA, 20 bp, synthetic construct
  misc_feature 1..20: note = chemically synthesized
  source 1..20: mol_type = other DNA
gtggcgggtgcctgtaatcc

SEQ ID NO: 10895 - DNA, 20 bp, synthetic construct
  misc_feature 1..20: note = chemically synthesized
  source 1..20: mol_type = other DNA
tgcctgtaatcccagctact

SEQ ID NO: 10896 - DNA, 20 bp, synthetic construct
  misc_feature 1..20: note = chemically synthesized
  source 1..20: mol_type = other DNA
gcctgtaatcccagctactt

SEQ ID NO: 10897 - DNA, 20 bp, synthetic construct
  misc_feature 1..20: note = chemically synthesized
  source 1..20: mol_type = other DNA
ctgtaatcccagctacttgg

SEQ ID NO: 10898 - DNA, 20 bp, synthetic construct
  misc_feature 1..20: note = chemically synthesized
  source 1..20: mol_type = other DNA
tgtaatcccagctacttggg

SEQ ID NO: 10899 - DNA, 20 bp, synthetic construct
  misc_feature 1..20: note = chemically synthesized
  source 1..20: mol_type = other DNA
tcccagctacttgggaggct

SEQ ID NO: 10900 - DNA, 20 bp, synthetic construct
  misc_feature 1..20: note = chemically synthesized
  source 1..20: mol_type = other DNA
cccagctacttgggaggctg

SEQ ID NO: 10901 - DNA, 20 bp, synthetic construct
  misc_feature 1..20: note = chemically synthesized
  source 1..20: mol_type = other DNA
agctacttgggaggctgagg

SEQ ID NO: 10902 - DNA, 20 bp, synthetic construct
  misc_feature 1..20: note = chemically synthesized
  source 1..20: mol_type = other DNA
gctacttgggaggctgaggc

SEQ ID NO: 10903 - DNA, 20 bp, synthetic construct
  misc_feature 1..20: note = chemically synthesized
  source 1..20: mol_type = other DNA
tacttgggaggctgaggcag

SEQ ID NO: 10904 - DNA, 20 bp, synthetic construct
  misc_feature 1..20: note = chemically synthesized
  source 1..20: mol_type = other DNA
gggaggctgaggcaggagaa

SEQ ID NO: 10905 - DNA, 20 bp, synthetic construct
  misc_feature 1..20: note = chemically synthesized
  source 1..20: mol_type = other DNA
gcaggagaatagcttgaacc

SEQ ID NO: 10906 - DNA, 20 bp, synthetic construct
  misc_feature 1..20: note = chemically synthesized
  source 1..20: mol_type = other DNA
caggagaatagcttgaacct

SEQ ID NO: 10907 - DNA, 20 bp, synthetic construct
  misc_feature 1..20: note = chemically synthesized
  source 1..20: mol_type = other DNA
ggagaatagcttgaacctgg

SEQ ID NO: 10908 - DNA, 20 bp, synthetic construct
  misc_feature 1..20: note = chemically synthesized
  source 1..20: mol_type = other DNA
aatagcttgaacctgggaga

SEQ ID NO: 10909 - DNA, 20 bp, synthetic construct
  misc_feature 1..20: note = chemically synthesized
  source 1..20: mol_type = other DNA
tagcttgaacctgggagatg

SEQ ID NO: 10910 - DNA, 20 bp, synthetic construct
  misc_feature 1..20: note = chemically synthesized
  source 1..20: mol_type = other DNA
agcttgaacctgggagatgg

SEQ ID NO: 10911 - DNA, 20 bp, synthetic construct
  misc_feature 1..20: note = chemically synthesized
  source 1..20: mol_type = other DNA
aacctgggagatggaggttg

SEQ ID NO: 10912 - DNA, 20 bp, synthetic construct
  misc_feature 1..20: note = chemically synthesized
  source 1..20: mol_type = other DNA
tgggagatggaggttgcagt

SEQ ID NO: 10913 - DNA, 20 bp, synthetic construct
  misc_feature 1..20: note = chemically synthesized
  source 1..20: mol_type = other DNA
gatggaggttgcagtgagct

SEQ ID NO: 10914 - DNA, 20 bp, synthetic construct
  misc_feature 1..20: note = chemically synthesized
  source 1..20: mol_type = other DNA
gagatcgcaccactgcactc

SEQ ID NO: 10915 - DNA, 20 bp, synthetic construct
  misc_feature 1..20: note = chemically synthesized
  source 1..20: mol_type = other DNA
cgcaccactgcactccagcc

SEQ ID NO: 10916 - DNA, 20 bp, synthetic construct
  misc_feature 1..20: note = chemically synthesized
  source 1..20: mol_type = other DNA
gcaccactgcactccagcct

SEQ ID NO: 10917 - DNA, 20 bp, synthetic construct
  misc_feature 1..20: note = chemically synthesized
  source 1..20: mol_type = other DNA
ctgcactccagcctgggcga

SEQ ID NO: 10918 - DNA, 20 bp, synthetic construct
  misc_feature 1..20: note = chemically synthesized
  source 1..20: mol_type = other DNA
gcactccagcctgggcgaca

SEQ ID NO: 10919 - DNA, 20 bp, synthetic construct
  misc_feature 1..20: note = chemically synthesized
  source 1..20: mol_type = other DNA
tccagcctgggcgacagagc

SEQ ID NO: 10920 - DNA, 20 bp, synthetic construct
  misc_feature 1..20: note = chemically synthesized
  source 1..20: mol_type = other DNA
caagactctgtcaaaaaaaa

SEQ ID NO: 10921 - DNA, 20 bp, synthetic construct
  misc_feature 1..20: note = chemically synthesized
  source 1..20: mol_type = other DNA
agactctgtcaaaaaaaaaa

SEQ ID NO: 10922 - DNA, 20 bp, synthetic construct
  misc_feature 1..20: note = chemically synthesized
  source 1..20: mol_type = other DNA
tgtcaaaaaaaaaagagttg

SEQ ID NO: 10923 - DNA, 20 bp, synthetic construct
  misc_feature 1..20: note = chemically synthesized
  source 1..20: mol_type = other DNA
tcaaaaaaaaaagagttgaa

SEQ ID NO: 10924 - DNA, 20 bp, synthetic construct
  misc_feature 1..20: note = chemically synthesized
  source 1..20: mol_type = other DNA
aaaaaagagttgaagagaaa

SEQ ID NO: 10925 - DNA, 20 bp, synthetic construct
  misc_feature 1..20: note = chemically synthesized
  source 1..20: mol_type = other DNA
agagttgaagagaaaaagtc

SEQ ID NO: 10926 - DNA, 20 bp, synthetic construct
  misc_feature 1..20: note = chemically synthesized
  source 1..20: mol_type = other DNA
gagttgaagagaaaaagtct

SEQ ID NO: 10927 - DNA, 20 bp, synthetic construct
  misc_feature 1..20: note = chemically synthesized
  source 1..20: mol_type = other DNA
aaaagtctaggctaaattca

SEQ ID NO: 10928 - DNA, 20 bp, synthetic construct
  misc_feature 1..20: note = chemically synthesized
  source 1..20: mol_type = other DNA
aggctaaattcaaagaaaaa

SEQ ID NO: 10929 - DNA, 20 bp, synthetic construct
  misc_feature 1..20: note = chemically synthesized
  source 1..20: mol_type = other DNA
taaattcaaagaaaaaaagt

SEQ ID NO: 10930 - DNA, 20 bp, synthetic construct
  misc_feature 1..20: note = chemically synthesized
  source 1..20: mol_type = other DNA
aagaaaaaaagtgagcccaa

SEQ ID NO: 10931 - DNA, 20 bp, synthetic construct
  misc_feature 1..20: note = chemically synthesized
  source 1..20: mol_type = other DNA
agaaaaaaagtgagcccaaa

SEQ ID NO: 10932 - DNA, 20 bp, synthetic construct
  misc_feature 1..20: note = chemically synthesized
  source 1..20: mol_type = other DNA
gtgagcccaaaaggaacttg

SEQ ID NO: 10933 - DNA, 20 bp, synthetic construct
  misc_feature 1..20: note = chemically synthesized
  source 1..20: mol_type = other DNA
gagcccaaaaggaacttgca

SEQ ID NO: 10934 - DNA, 20 bp, synthetic construct
  misc_feature 1..20: note = chemically synthesized
  source 1..20: mol_type = other DNA
ccaaaaggaacttgcagagc

SEQ ID NO: 10935 - DNA, 20 bp, synthetic construct
  misc_feature 1..20: note = chemically synthesized
  source 1..20: mol_type = other DNA
caaaaggaacttgcagagca

SEQ ID NO: 10936 - DNA, 20 bp, synthetic construct
  misc_feature 1..20: note = chemically synthesized
  source 1..20: mol_type = other DNA
aaaaggaacttgcagagcaa

SEQ ID NO: 10937 - DNA, 20 bp, synthetic construct
  misc_feature 1..20: note = chemically synthesized
  source 1..20: mol_type = other DNA
gaacttgcagagcaagggaa

SEQ ID NO: 10938 - DNA, 20 bp, synthetic construct
  misc_feature 1..20: note = chemically synthesized
  source 1..20: mol_type = other DNA
cttgcagagcaagggaaaag

SEQ ID NO: 10939 - DNA, 20 bp, synthetic construct
  misc_feature 1..20: note = chemically synthesized
  source 1..20: mol_type = other DNA
ttgcagagcaagggaaaagc

SEQ ID NO: 10940 - DNA, 20 bp, synthetic construct
  misc_feature 1..20: note = chemically synthesized
  source 1..20: mol_type = other DNA
tgcagagcaagggaaaagca

SEQ ID NO: 10941 - DNA, 20 bp, synthetic construct
  misc_feature 1..20: note = chemically synthesized
  source 1..20: mol_type = other DNA
aagggaaaagcagggatgtc

SEQ ID NO: 10942 - DNA, 20 bp, synthetic construct
  misc_feature 1..20: note = chemically synthesized
  source 1..20: mol_type = other DNA
agggaaaagcagggatgtca

SEQ ID NO: 10943 - DNA, 20 bp, synthetic construct
  misc_feature 1..20: note = chemically synthesized
  source 1..20: mol_type = other DNA
gggaaaagcagggatgtcaa

SEQ ID NO: 10944 - DNA, 20 bp, synthetic construct
  misc_feature 1..20: note = chemically synthesized
  source 1..20: mol_type = other DNA
aagcagggatgtcaagggac

SEQ ID NO: 10945 - DNA, 20 bp, synthetic construct
  misc_feature 1..20: note = chemically synthesized
  source 1..20: mol_type = other DNA
agggactagaacactccata

SEQ ID NO: 10946 - DNA, 20 bp, synthetic construct
  misc_feature 1..20: note = chemically synthesized
  source 1..20: mol_type = other DNA
agaacactccataaagtgaa

SEQ ID NO: 10947 - DNA, 20 bp, synthetic construct
  misc_feature 1..20: note = chemically synthesized
  source 1..20: mol_type = other DNA
tgaacagctgcaatgaaaat

SEQ ID NO: 10948 - DNA, 20 bp, synthetic construct
  misc_feature 1..20: note = chemically synthesized
  source 1..20: mol_type = other DNA
gaacagctgcaatgaaaata

SEQ ID NO: 10949 - DNA, 20 bp, synthetic construct
  misc_feature 1..20: note = chemically synthesized
  source 1..20: mol_type = other DNA
aacagctgcaatgaaaataa

SEQ ID NO: 10950 - DNA, 20 bp, synthetic construct
  misc_feature 1..20: note = chemically synthesized
  source 1..20: mol_type = other DNA
agctgcaatgaaaataaggg

SEQ ID NO: 10951 - DNA, 20 bp, synthetic construct
  misc_feature 1..20: note = chemically synthesized
  source 1..20: mol_type = other DNA
gcaatgaaaataagggaaga

SEQ ID NO: 10952 - DNA, 20 bp, synthetic construct
  misc_feature 1..20: note = chemically synthesized
  source 1..20: mol_type = other DNA
gaaaataagggaagaaagtt

SEQ ID NO: 10953 - DNA, 20 bp, synthetic construct
  misc_feature 1..20: note = chemically synthesized
  source 1..20: mol_type = other DNA
ctttcctttctcttcctttt

SEQ ID NO: 10954 - DNA, 20 bp, synthetic construct
  misc_feature 1..20: note = chemically synthesized
  source 1..20: mol_type = other DNA
ttcctttctcttcctttttg

SEQ ID NO: 10955 - DNA, 20 bp, synthetic construct
  misc_feature 1..20: note = chemically synthesized
  source 1..20: mol_type = other DNA
tcttcctttttggagttaat

SEQ ID NO: 10956 - DNA, 20 bp, synthetic construct
  misc_feature 1..20: note = chemically synthesized
  source 1..20: mol_type = other DNA
cttcctttttggagttaatc

SEQ ID NO: 10957 - DNA, 20 bp, synthetic construct
  misc_feature 1..20: note = chemically synthesized
  source 1..20: mol_type = other DNA
cctttttggagttaatcagg

SEQ ID NO: 10958 - DNA, 20 bp, synthetic construct
  misc_feature 1..20: note = chemically synthesized
  source 1..20: mol_type = other DNA
ttttggagttaatcaggaag

SEQ ID NO: 10959 - DNA, 20 bp, synthetic construct
  misc_feature 1..20: note = chemically synthesized
  source 1..20: mol_type = other DNA
ggaagtagtcccaaataccc

SEQ ID NO: 10960 - DNA, 20 bp, synthetic construct
  misc_feature 1..20: note = chemically synthesized
  source 1..20: mol_type = other DNA
gtagtcccaaataccccaga

SEQ ID NO: 10961 - DNA, 20 bp, synthetic construct
  misc_feature 1..20: note = chemically synthesized
  source 1..20: mol_type = other DNA
ccccagaaagttcatcttat

SEQ ID NO: 10962 - DNA, 20 bp, synthetic construct
  misc_feature 1..20: note = chemically synthesized
  source 1..20: mol_type = other DNA
aagttcatcttataagccct

SEQ ID NO: 10963 - DNA, 20 bp, synthetic construct
  misc_feature 1..20: note = chemically synthesized
  source 1..20: mol_type = other DNA
tataagcccttggtcctctt

SEQ ID NO: 10964 - DNA, 20 bp, synthetic construct
  misc_feature 1..20: note = chemically synthesized
  source 1..20: mol_type = other DNA
agcccttggtcctcttgaga

SEQ ID NO: 10965 - DNA, 20 bp, synthetic construct
  misc_feature 1..20: note = chemically synthesized
  source 1..20: mol_type = other DNA
tggtcctcttgagatggtat

SEQ ID NO: 10966 - DNA, 20 bp, synthetic construct
  misc_feature 1..20: note = chemically synthesized
  source 1..20: mol_type = other DNA
gatggtatcagatatattgc

SEQ ID NO: 10967 - DNA, 20 bp, synthetic construct
  misc_feature 1..20: note = chemically synthesized
  source 1..20: mol_type = other DNA
gatatattgctagacccttg

SEQ ID NO: 10968 - DNA, 20 bp, synthetic construct
  misc_feature 1..20: note = chemically synthesized
  source 1..20: mol_type = other DNA
tattgctagacccttgaaga

SEQ ID NO: 10969 - DNA, 20 bp, synthetic construct
  misc_feature 1..20: note = chemically synthesized
  source 1..20: mol_type = other DNA
attgctagacccttgaagaa

SEQ ID NO: 10970 - DNA, 20 bp, synthetic construct
  misc_feature 1..20: note = chemically synthesized
  source 1..20: mol_type = other DNA
cttgaagaaaggaacaactc

SEQ ID NO: 10971 - DNA, 20 bp, synthetic construct
  misc_feature 1..20: note = chemically synthesized
  source 1..20: mol_type = other DNA
ttgaagaaaggaacaactcc

SEQ ID NO: 10972 - DNA, 20 bp, synthetic construct
  misc_feature 1..20: note = chemically synthesized
  source 1..20: mol_type = other DNA
acaactccaggcaacttctt

SEQ ID NO: 10973 - DNA, 20 bp, synthetic construct
  misc_feature 1..20: note = chemically synthesized
  source 1..20: mol_type = other DNA
caaacacatgtgtgtgtata

SEQ ID NO: 10974 - DNA, 20 bp, synthetic construct
  misc_feature 1..20: note = chemically synthesized
  source 1..20: mol_type = other DNA
agccatgcattccttaacaa

SEQ ID NO: 10975 - DNA, 20 bp, synthetic construct
  misc_feature 1..20: note = chemically synthesized
  source 1..20: mol_type = other DNA
gccatgcattccttaacaat

SEQ ID NO: 10976 - DNA, 20 bp, synthetic construct
  misc_feature 1..20: note = chemically synthesized
  source 1..20: mol_type = other DNA
ccatgcattccttaacaatg

SEQ ID NO: 10977 - DNA, 20 bp, synthetic construct
  misc_feature 1..20: note = chemically synthesized
  source 1..20: mol_type = other DNA
taacaatggggatatattct

SEQ ID NO: 10978 - DNA, 20 bp, synthetic construct
  misc_feature 1..20: note = chemically synthesized
  source 1..20: mol_type = other DNA
attctgagaaatgtgtcatt

SEQ ID NO: 10979 - DNA, 20 bp, synthetic construct
  misc_feature 1..20: note = chemically synthesized
  source 1..20: mol_type = other DNA
tcatcattgtgcgaacataa

SEQ ID NO: 10980 - DNA, 20 bp, synthetic construct
  misc_feature 1..20: note = chemically synthesized
  source 1..20: mol_type = other DNA
atcattgtgcgaacataata

SEQ ID NO: 10981 - DNA, 20 bp, synthetic construct
  misc_feature 1..20: note = chemically synthesized
  source 1..20: mol_type = other DNA
tgtacttacctaaacctaaa

SEQ ID NO: 10982 - DNA, 20 bp, synthetic construct
  misc_feature 1..20: note = chemically synthesized
  source 1..20: mol_type = other DNA
ttacctaaacctaaatggta

SEQ ID NO: 10983 - DNA, 20 bp, synthetic construct
  misc_feature 1..20: note = chemically synthesized
  source 1..20: mol_type = other DNA
ggtatagcttactacatacc

SEQ ID NO: 10984 - DNA, 20 bp, synthetic construct
  misc_feature 1..20: note = chemically synthesized
  source 1..20: mol_type = other DNA
gtatagcttactacatacct

SEQ ID NO: 10985 - DNA, 20 bp, synthetic construct
  misc_feature 1..20: note = chemically synthesized
  source 1..20: mol_type = other DNA
atacctaggttgtattgatg

SEQ ID NO: 10986 - DNA, 20 bp, synthetic construct
  misc_feature 1..20: note = chemically synthesized
  source 1..20: mol_type = other DNA
ttgatgtggcctattgctcc

SEQ ID NO: 10987 - DNA, 20 bp, synthetic construct
  misc_feature 1..20: note = chemically synthesized
  source 1..20: mol_type = other DNA
tgatgtggcctattgctcct

SEQ ID NO: 10988 - DNA, 20 bp, synthetic construct
  misc_feature 1..20: note = chemically synthesized
  source 1..20: mol_type = other DNA
gcctattgctcctaggctcc

SEQ ID NO: 10989 - DNA, 20 bp, synthetic construct
  misc_feature 1..20: note = chemically synthesized
  source 1..20: mol_type = other DNA
cctattgctcctaggctcct

SEQ ID NO: 10990 - DNA, 20 bp, synthetic construct
  misc_feature 1..20: note = chemically synthesized
  source 1..20: mol_type = other DNA
tcctgggctgcaaacctgta

SEQ ID NO: 10991 - DNA, 20 bp, synthetic construct
  misc_feature 1..20: note = chemically synthesized
  source 1..20: mol_type = other DNA
tgtgactgtactgaacactg

SEQ ID NO: 10992 - DNA, 20 bp, synthetic construct
  misc_feature 1..20: note = chemically synthesized
  source 1..20: mol_type = other DNA
gtgactgtactgaacactgt

SEQ ID NO: 10993 - DNA, 20 bp, synthetic construct
  misc_feature 1..20: note = chemically synthesized
  source 1..20: mol_type = other DNA
gtactgaacactgtaggcaa

SEQ ID NO: 10994 - DNA, 20 bp, synthetic construct
  misc_feature 1..20: note = chemically synthesized
  source 1..20: mol_type = other DNA
aacactgtaggcaatggtaa

SEQ ID NO: 10995 - DNA, 20 bp, synthetic construct
  misc_feature 1..20: note = chemically synthesized
  source 1..20: mol_type = other DNA
actgtaggcaatggtaacag

SEQ ID NO: 10996 - DNA, 20 bp, synthetic construct
  misc_feature 1..20: note = chemically synthesized
  source 1..20: mol_type = other DNA
ggtatttgtgtatctaaaca

SEQ ID NO: 10997 - DNA, 20 bp, synthetic construct
  misc_feature 1..20: note = chemically synthesized
  source 1..20: mol_type = other DNA
ttgtgtatctaaacatagaa

SEQ ID NO: 10998 - DNA, 20 bp, synthetic construct
  misc_feature 1..20: note = chemically synthesized
  source 1..20: mol_type = other DNA
tgtgtatctaaacatagaaa

SEQ ID NO: 10999 - DNA, 20 bp, synthetic construct
  misc_feature 1..20: note = chemically synthesized
  source 1..20: mol_type = other DNA
atctaaacatagaaaaggta

SEQ ID NO: 11000 - DNA, 20 bp, synthetic construct
  misc_feature 1..20: note = chemically synthesized
  source 1..20: mol_type = other DNA
gaaaaggtacagtgaaaata

SEQ ID NO: 11001 - DNA, 20 bp, synthetic construct
  misc_feature 1..20: note = chemically synthesized
  source 1..20: mol_type = other DNA
aatacagtattataacctta

SEQ ID NO: 11002 - DNA, 20 bp, synthetic construct
  misc_feature 1..20: note = chemically synthesized
  source 1..20: mol_type = other DNA
atacagtattataaccttat

SEQ ID NO: 11003 - DNA, 20 bp, synthetic construct
  misc_feature 1..20: note = chemically synthesized
  source 1..20: mol_type = other DNA
gggaccactgtcgtataatg

SEQ ID NO: 11004 - DNA, 20 bp, synthetic construct
  misc_feature 1..20: note = chemically synthesized
  source 1..20: mol_type = other DNA
ttgaccaaaatgtcattgtg

SEQ ID NO: 11005 - DNA, 20 bp, synthetic construct
  misc_feature 1..20: note = chemically synthesized
  source 1..20: mol_type = other DNA
tatatgtacacacacacaca

SEQ ID NO: 11006 - DNA, 20 bp, synthetic construct
  misc_feature 1..20: note = chemically synthesized
  source 1..20: mol_type = other DNA
tatgtacacacacacacata

SEQ ID NO: 11007 - DNA, 20 bp, synthetic construct
  misc_feature 1..20: note = chemically synthesized
  source 1..20: mol_type = other DNA
tgtacacacacacacataga

SEQ ID NO: 11008 - DNA, 20 bp, synthetic construct
  misc_feature 1..20: note = chemically synthesized
  source 1..20: mol_type = other DNA
tacacacacacacatagaga

SEQ ID NO: 11009 - DNA, 20 bp, synthetic construct
  misc_feature 1..20: note = chemically synthesized
  source 1..20: mol_type = other DNA
cacacacacacatagagaga

SEQ ID NO: 11010 - DNA, 20 bp, synthetic construct
  misc_feature 1..20: note = chemically synthesized
  source 1..20: mol_type = other DNA
cacacacacatagagagaga

SEQ ID NO: 11011 - DNA, 20 bp, synthetic construct
  misc_feature 1..20: note = chemically synthesized
  source 1..20: mol_type = other DNA
cacacacatagagagagaga

SEQ ID NO: 11012 - DNA, 20 bp, synthetic construct
  misc_feature 1..20: note = chemically synthesized
  source 1..20: mol_type = other DNA
cacacatagagagagagaga

SEQ ID NO: 11013 - DNA, 20 bp, synthetic construct
  misc_feature 1..20: note = chemically synthesized
  source 1..20: mol_type = other DNA
acacatagagagagagagag

SEQ ID NO: 11014 - DNA, 20 bp, synthetic construct
  misc_feature 1..20: note = chemically synthesized
  source 1..20: mol_type = other DNA
acatagagagagagagagag

SEQ ID NO: 11015 - DNA, 20 bp, synthetic construct
  misc_feature 1..20: note = chemically synthesized
  source 1..20: mol_type = other DNA
atagagagagagagagagga

SEQ ID NO: 11016 - DNA, 20 bp, synthetic construct
  misc_feature 1..20: note = chemically synthesized
  source 1..20: mol_type = other DNA
tagagagagagagagaggag

SEQ ID NO: 11017 - DNA, 20 bp, synthetic construct
  misc_feature 1..20: note = chemically synthesized
  source 1..20: mol_type = other DNA
gagagagagagagaggagag

SEQ ID NO: 11018 - DNA, 20 bp, synthetic construct
  misc_feature 1..20: note = chemically synthesized
  source 1..20: mol_type = other DNA
gagagagagagaggagagga

SEQ ID NO: 11019 - DNA, 20 bp, synthetic construct
  misc_feature 1..20: note = chemically synthesized
  source 1..20: mol_type = other DNA
agagagagagaggagaggag

SEQ ID NO: 11020 - DNA, 20 bp, synthetic construct
  misc_feature 1..20: note = chemically synthesized
  source 1..20: mol_type = other DNA
gagagagaggagaggagagg

SEQ ID NO: 11021 - DNA, 20 bp, synthetic construct
  misc_feature 1..20: note = chemically synthesized
  source 1..20: mol_type = other DNA
agagagaggagaggagagga

SEQ ID NO: 11022 - DNA, 20 bp, synthetic construct
  misc_feature 1..20: note = chemically synthesized
  source 1..20: mol_type = other DNA
agagaggagaggagaggaag

SEQ ID NO: 11023 - DNA, 20 bp, synthetic construct
  misc_feature 1..20: note = chemically synthesized
  source 1..20: mol_type = other DNA
gagaggagaggagaggaagg

SEQ ID NO: 11024 - DNA, 20 bp, synthetic construct
  misc_feature 1..20: note = chemically synthesized
  source 1..20: mol_type = other DNA
agaggagaggagaggaagga

SEQ ID NO: 11025 - DNA, 20 bp, synthetic construct
  misc_feature 1..20: note = chemically synthesized
  source 1..20: mol_type = other DNA
aggagaggagaggaaggagg

SEQ ID NO: 11026 - DNA, 20 bp, synthetic construct
  misc_feature 1..20: note = chemically synthesized
  source 1..20: mol_type = other DNA
ggagaggagaggaaggaggg

SEQ ID NO: 11027 - DNA, 20 bp, synthetic construct
  misc_feature 1..20: note = chemically synthesized
  source 1..20: mol_type = other DNA
gagaggagaggaaggaggga

SEQ ID NO: 11028 - DNA, 20 bp, synthetic construct
  misc_feature 1..20: note = chemically synthesized
  source 1..20: mol_type = other DNA
aggagaggaaggagggaggg

SEQ ID NO: 11029 - DNA, 20 bp, synthetic construct
  misc_feature 1..20: note = chemically synthesized
  source 1..20: mol_type = other DNA
ggagaggaaggagggaggga

SEQ ID NO: 11030 - DNA, 20 bp, synthetic construct
  misc_feature 1..20: note = chemically synthesized
  source 1..20: mol_type = other DNA
agaggaaggagggagggaag

SEQ ID NO: 11031 - DNA, 20 bp, synthetic construct
  misc_feature 1..20: note = chemically synthesized
  source 1..20: mol_type = other DNA
agggaaggagaaatatgatt

SEQ ID NO: 11032 - DNA, 20 bp, synthetic construct
  misc_feature 1..20: note = chemically synthesized
  source 1..20: mol_type = other DNA
aaggagaaatatgattcaga

SEQ ID NO: 11033 - DNA, 20 bp, synthetic construct
  misc_feature 1..20: note = chemically synthesized
  source 1..20: mol_type = other DNA
ggagaaatatgattcagata

SEQ ID NO: 11034 - DNA, 20 bp, synthetic construct
  misc_feature 1..20: note = chemically synthesized
  source 1..20: mol_type = other DNA
agatagagacatctatcctc

SEQ ID NO: 11035 - DNA, 20 bp, synthetic construct
  misc_feature 1..20: note = chemically synthesized
  source 1..20: mol_type = other DNA
atagagacatctatcctcca

SEQ ID NO: 11036 - DNA, 20 bp, synthetic construct
  misc_feature 1..20: note = chemically synthesized
  source 1..20: mol_type = other DNA
gacatctatcctccagagtt

SEQ ID NO: 11037 - DNA, 20 bp, synthetic construct
  misc_feature 1..20: note = chemically synthesized
  source 1..20: mol_type = other DNA
acatctatcctccagagttc

SEQ ID NO: 11038 - DNA, 20 bp, synthetic construct
  misc_feature 1..20: note = chemically synthesized
  source 1..20: mol_type = other DNA
atctatcctccagagttcag

SEQ ID NO: 11039 - DNA, 20 bp, synthetic construct
  misc_feature 1..20: note = chemically synthesized
  source 1..20: mol_type = other DNA
agagttcaggagtgtctctt

SEQ ID NO: 11040 - DNA, 20 bp, synthetic construct
  misc_feature 1..20: note = chemically synthesized
  source 1..20: mol_type = other DNA
tcaggagtgtctcttcagac

SEQ ID NO: 11041 - DNA, 20 bp, synthetic construct
  misc_feature 1..20: note = chemically synthesized
  source 1..20: mol_type = other DNA
caggagtgtctcttcagact

SEQ ID NO: 11042 - DNA, 20 bp, synthetic construct
  misc_feature 1..20: note = chemically synthesized
  source 1..20: mol_type = other DNA
gagtgtctcttcagactagg

SEQ ID NO: 11043 - DNA, 20 bp, synthetic construct
  misc_feature 1..20: note = chemically synthesized
  source 1..20: mol_type = other DNA
ctcttcagactaggtagatg

SEQ ID NO: 11044 - DNA, 20 bp, synthetic construct
  misc_feature 1..20: note = chemically synthesized
  source 1..20: mol_type = other DNA
aaaaaacatatcctgaattc

SEQ ID NO: 11045 - DNA, 20 bp, synthetic construct
  misc_feature 1..20: note = chemically synthesized
  source 1..20: mol_type = other DNA
aaaacatatcctgaattcta

SEQ ID NO: 11046 - DNA, 20 bp, synthetic construct
  misc_feature 1..20: note = chemically synthesized
  source 1..20: mol_type = other DNA
aacatatcctgaattctaga

SEQ ID NO: 11047 - DNA, 20 bp, synthetic construct
  misc_feature 1..20: note = chemically synthesized
  source 1..20: mol_type = other DNA
cctataacacttgccaacca

SEQ ID NO: 11048 - DNA, 20 bp, synthetic construct
  misc_feature 1..20: note = chemically synthesized
  source 1..20: mol_type = other DNA
ctataacacttgccaaccaa

SEQ ID NO: 11049 - DNA, 20 bp, synthetic construct
  misc_feature 1..20: note = chemically synthesized
  source 1..20: mol_type = other DNA
attgcttttttaaattaatg

SEQ ID NO: 11050 - DNA, 20 bp, synthetic construct
  misc_feature 1..20: note = chemically synthesized
  source 1..20: mol_type = other DNA
agtgatttttctttaacatc

SEQ ID NO: 11051 - DNA, 20 bp, synthetic construct
  misc_feature 1..20: note = chemically synthesized
  source 1..20: mol_type = other DNA
ttttctttaacatctagtga

SEQ ID NO: 11052 - DNA, 20 bp, synthetic construct
  misc_feature 1..20: note = chemically synthesized
  source 1..20: mol_type = other DNA
taacatctagtgacagacac

SEQ ID NO: 11053 - DNA, 20 bp, synthetic construct
  misc_feature 1..20: note = chemically synthesized
  source 1..20: mol_type = other DNA
aacatctagtgacagacact

SEQ ID NO: 11054 - DNA, 20 bp, synthetic construct
  misc_feature 1..20: note = chemically synthesized
  source 1..20: mol_type = other DNA
acatctagtgacagacactg

SEQ ID NO: 11055 - DNA, 20 bp, synthetic construct
  misc_feature 1..20: note = chemically synthesized
  source 1..20: mol_type = other DNA
agacactggggtcacatttg

SEQ ID NO: 11056 - DNA, 20 bp, synthetic construct
  misc_feature 1..20: note = chemically synthesized
  source 1..20: mol_type = other DNA
actggggtcacatttgcagc

SEQ ID NO: 11057 - DNA, 20 bp, synthetic construct
  misc_feature 1..20: note = chemically synthesized
  source 1..20: mol_type = other DNA
atttgcagctggaccataat

SEQ ID NO: 11058 - DNA, 20 bp, synthetic construct
  misc_feature 1..20: note = chemically synthesized
  source 1..20: mol_type = other DNA
tttgcagctggaccataatt

SEQ ID NO: 11059 - DNA, 20 bp, synthetic construct
  misc_feature 1..20: note = chemically synthesized
  source 1..20: mol_type = other DNA
ataattaggcttctgttctt

SEQ ID NO: 11060 - DNA, 20 bp, synthetic construct
  misc_feature 1..20: note = chemically synthesized
  source 1..20: mol_type = other DNA
taattaggcttctgttcttc

SEQ ID NO: 11061 - DNA, 20 bp, synthetic construct
  misc_feature 1..20: note = chemically synthesized
  source 1..20: mol_type = other DNA
attaggcttctgttcttcag

SEQ ID NO: 11062 - DNA, 20 bp, synthetic construct
  misc_feature 1..20: note = chemically synthesized
  source 1..20: mol_type = other DNA
cttcaggagacatttgttca

SEQ ID NO: 11063 - DNA, 20 bp, synthetic construct
  misc_feature 1..20: note = chemically synthesized
  source 1..20: mol_type = other DNA
gacatttgttcaaagtcatt

SEQ ID NO: 11064 - DNA, 20 bp, synthetic construct
  misc_feature 1..20: note = chemically synthesized
  source 1..20: mol_type = other DNA
acatttgttcaaagtcattt

SEQ ID NO: 11065 - DNA, 20 bp, synthetic construct
  misc_feature 1..20: note = chemically synthesized
  source 1..20: mol_type = other DNA
gggcaaccatattctgaaaa

SEQ ID NO: 11066 - DNA, 20 bp, synthetic construct
  misc_feature 1..20: note = chemically synthesized
  source 1..20: mol_type = other DNA
accatattctgaaaacagcc

SEQ ID NO: 11067 - DNA, 20 bp, synthetic construct
  misc_feature 1..20: note = chemically synthesized
  source 1..20: mol_type = other DNA
tattctgaaaacagcccagc

SEQ ID NO: 11068 - DNA, 20 bp, synthetic construct
  misc_feature 1..20: note = chemically synthesized
  source 1..20: mol_type = other DNA
attctgaaaacagcccagcc

SEQ ID NO: 11069 - DNA, 20 bp, synthetic construct
  misc_feature 1..20: note = chemically synthesized
  source 1..20: mol_type = other DNA
ttctgaaaacagcccagcca

SEQ ID NO: 11070 - DNA, 20 bp, synthetic construct
  misc_feature 1..20: note = chemically synthesized
  source 1..20: mol_type = other DNA
aaacagcccagccagggtga

SEQ ID NO: 11071 - DNA, 20 bp, synthetic construct
  misc_feature 1..20: note = chemically synthesized
  source 1..20: mol_type = other DNA
gggtgatggatcactttgca

SEQ ID NO: 11072 - DNA, 20 bp, synthetic construct
  misc_feature 1..20: note = chemically synthesized
  source 1..20: mol_type = other DNA
actttgcaaagatcctcaat

SEQ ID NO: 11073 - DNA, 20 bp, synthetic construct
  misc_feature 1..20: note = chemically synthesized
  source 1..20: mol_type = other DNA
atcctcaatgagctattttc

SEQ ID NO: 11074 - DNA, 20 bp, synthetic construct
  misc_feature 1..20: note = chemically synthesized
  source 1..20: mol_type = other DNA
gctattttcaagtgatgaca

SEQ ID NO: 11075 - DNA, 20 bp, synthetic construct
  misc_feature 1..20: note = chemically synthesized
  source 1..20: mol_type = other DNA
tcaagtgatgacaaagtgtg

SEQ ID NO: 11076 - DNA, 20 bp, synthetic construct
  misc_feature 1..20: note = chemically synthesized
  source 1..20: mol_type = other DNA
gtgaagttaaccgctcattt

SEQ ID NO: 11077 - DNA, 20 bp, synthetic construct
  misc_feature 1..20: note = chemically synthesized
  source 1..20: mol_type = other DNA
agaactttctttttcatcca

SEQ ID NO: 11078 - DNA, 20 bp, synthetic construct
  misc_feature 1..20: note = chemically synthesized
  source 1..20: mol_type = other DNA
aaagtaaattcaaatatgat

SEQ ID NO: 11079 - DNA, 20 bp, synthetic construct
  misc_feature 1..20: note = chemically synthesized
  source 1..20: mol_type = other DNA
gaaatctgaccttttattac

SEQ ID NO: 11080 - DNA, 20 bp, synthetic construct
  misc_feature 1..20: note = chemically synthesized
  source 1..20: mol_type = other DNA
actggaattctcttgactaa

SEQ ID NO: 11081 - DNA, 20 bp, synthetic construct
  misc_feature 1..20: note = chemically synthesized
  source 1..20: mol_type = other DNA
cctaaatctccatgtgtata

SEQ ID NO: 11082 - DNA, 20 bp, synthetic construct
  misc_feature 1..20: note = chemically synthesized
  source 1..20: mol_type = other DNA
tccatgtgtatacagtactg

SEQ ID NO: 11083 - DNA, 20 bp, synthetic construct
  misc_feature 1..20: note = chemically synthesized
  source 1..20: mol_type = other DNA
ccatgtgtatacagtactgt

SEQ ID NO: 11084 - DNA, 20 bp, synthetic construct
  misc_feature 1..20: note = chemically synthesized
  source 1..20: mol_type = other DNA
acagtactgtgggaacatca

SEQ ID NO: 11085 - DNA, 20 bp, synthetic construct
  misc_feature 1..20: note = chemically synthesized
  source 1..20: mol_type = other DNA
tgtgggaacatcacagattt

SEQ ID NO: 11086 - DNA, 20 bp, synthetic construct
  misc_feature 1..20: note = chemically synthesized
  source 1..20: mol_type = other DNA
gattttggctccatgcccta

SEQ ID NO: 11087 - DNA, 20 bp, synthetic construct
  misc_feature 1..20: note = chemically synthesized
  source 1..20: mol_type = other DNA
ttttggctccatgccctaaa

SEQ ID NO: 11088 - DNA, 20 bp, synthetic construct
  misc_feature 1..20: note = chemically synthesized
  source 1..20: mol_type = other DNA
tccatgccctaaagagaaat

SEQ ID NO: 11089 - DNA, 20 bp, synthetic construct
  misc_feature 1..20: note = chemically synthesized
  source 1..20: mol_type = other DNA
cctaaagagaaattggcttt

SEQ ID NO: 11090 - DNA, 20 bp, synthetic construct
  misc_feature 1..20: note = chemically synthesized
  source 1..20: mol_type = other DNA
aaattggctttcagattatt

SEQ ID NO: 11091 - DNA, 20 bp, synthetic construct
  misc_feature 1..20: note = chemically synthesized
  source 1..20: mol_type = other DNA
gattatttggattaaaaaca

SEQ ID NO: 11092 - DNA, 20 bp, synthetic construct
  misc_feature 1..20: note = chemically synthesized
  source 1..20: mol_type = other DNA
ttaaaaacaaagactttctt

SEQ ID NO: 11093 - DNA, 20 bp, synthetic construct
  misc_feature 1..20: note = chemically synthesized
  source 1..20: mol_type = other DNA
aaaaacaaagactttcttaa

SEQ ID NO: 11094 - DNA, 20 bp, synthetic construct
  misc_feature 1..20: note = chemically synthesized
  source 1..20: mol_type = other DNA
tttcttttttgctaaaacta

SEQ ID NO: 11095 - DNA, 20 bp, synthetic construct
  misc_feature 1..20: note = chemically synthesized
  source 1..20: mol_type = other DNA
agaattattcttttacattt

SEQ ID NO: 11096 - DNA, 20 bp, synthetic construct
  misc_feature 1..20: note = chemically synthesized
  source 1..20: mol_type = other DNA
acgccaacaaaattctgaat

SEQ ID NO: 11097 - DNA, 20 bp, synthetic construct
  misc_feature 1..20: note = chemically synthesized
  source 1..20: mol_type = other DNA
acaaaattctgaatcggcca

SEQ ID NO: 11098 - DNA, 20 bp, synthetic construct
  misc_feature 1..20: note = chemically synthesized
  source 1..20: mol_type = other DNA
aaaattctgaatcggccaaa

SEQ ID NO: 11099 - DNA, 20 bp, synthetic construct
  misc_feature 1..20: note = chemically synthesized
  source 1..20: mol_type = other DNA
aaattctgaatcggccaaag

SEQ ID NO: 11100 - DNA, 20 bp, synthetic construct
  misc_feature 1..20: note = chemically synthesized
  source 1..20: mol_type = other DNA
tcggccaaagaggtataatt

SEQ ID NO: 11101 - DNA, 20 bp, synthetic construct
  misc_feature 1..20: note = chemically synthesized
  source 1..20: mol_type = other DNA
cggccaaagaggtataattc

SEQ ID NO: 11102 - DNA, 20 bp, synthetic construct
  misc_feature 1..20: note = chemically synthesized
  source 1..20: mol_type = other DNA
gaggtataattcaggtaaat

SEQ ID NO: 11103 - DNA, 20 bp, synthetic construct
  misc_feature 1..20: note = chemically synthesized
  source 1..20: mol_type = other DNA
gtataattcaggtaaattgg

SEQ ID NO: 11104 - DNA, 20 bp, synthetic construct
  misc_feature 1..20: note = chemically synthesized
  source 1..20: mol_type = other DNA
ataattcaggtaaattggaa

SEQ ID NO: 11105 - DNA, 20 bp, synthetic construct
  misc_feature 1..20: note = chemically synthesized
  source 1..20: mol_type = other DNA
taaattggaagagtttgttc

SEQ ID NO: 11106 - DNA, 20 bp, synthetic construct
  misc_feature 1..20: note = chemically synthesized
  source 1..20: mol_type = other DNA
aaattggaagagtttgttca

SEQ ID NO: 11107 - DNA, 20 bp, synthetic construct
  misc_feature 1..20: note = chemically synthesized
  source 1..20: mol_type = other DNA
aattggaagagtttgttcaa

SEQ ID NO: 11108 - DNA, 20 bp, synthetic construct
  misc_feature 1..20: note = chemically synthesized
  source 1..20: mol_type = other DNA
agtttgttcaagggaacctt

SEQ ID NO: 11109 - DNA, 20 bp, synthetic construct
  misc_feature 1..20: note = chemically synthesized
  source 1..20: mol_type = other DNA
tttgttcaagggaaccttga

SEQ ID NO: 11110 - DNA, 20 bp, synthetic construct
  misc_feature 1..20: note = chemically synthesized
  source 1..20: mol_type = other DNA
tgttcaagggaaccttgaga

SEQ ID NO: 11111 - DNA, 20 bp, synthetic construct
  misc_feature 1..20: note = chemically synthesized
  source 1..20: mol_type = other DNA
gaaccttgagagagaatgta

SEQ ID NO: 11112 - DNA, 20 bp, synthetic construct
  misc_feature 1..20: note = chemically synthesized
  source 1..20: mol_type = other DNA
ccttgagagagaatgtatgg

SEQ ID NO: 11113 - DNA, 20 bp, synthetic construct
  misc_feature 1..20: note = chemically synthesized
  source 1..20: mol_type = other DNA
agagagaatgtatggaagaa

SEQ ID NO: 11114 - DNA, 20 bp, synthetic construct
  misc_feature 1..20: note = chemically synthesized
  source 1..20: mol_type = other DNA
gaatgtatggaagaaaagtg

SEQ ID NO: 11115 - DNA, 20 bp, synthetic construct
  misc_feature 1..20: note = chemically synthesized
  source 1..20: mol_type = other DNA
ggaagaaaagtgtagttttg

SEQ ID NO: 11116 - DNA, 20 bp, synthetic construct
  misc_feature 1..20: note = chemically synthesized
  source 1..20: mol_type = other DNA
agaaaagtgtagttttgaag

SEQ ID NO: 11117 - DNA, 20 bp, synthetic construct
  misc_feature 1..20: note = chemically synthesized
  source 1..20: mol_type = other DNA
gtgtagttttgaagaagcac

SEQ ID NO: 11118 - DNA, 20 bp, synthetic construct
  misc_feature 1..20: note = chemically synthesized
  source 1..20: mol_type = other DNA
tagttttgaagaagcacgag

SEQ ID NO: 11119 - DNA, 20 bp, synthetic construct
  misc_feature 1..20: note = chemically synthesized
  source 1..20: mol_type = other DNA
gaagtttttgaaaacactga

SEQ ID NO: 11120 - DNA, 20 bp, synthetic construct
  misc_feature 1..20: note = chemically synthesized
  source 1..20: mol_type = other DNA
tcttccatacattctctctc

SEQ ID NO: 11121 - DNA, 20 bp, synthetic construct
  misc_feature 1..20: note = chemically synthesized
  source 1..20: mol_type = other DNA
cttccatacattctctctca

SEQ ID NO: 11122 - DNA, 20 bp, synthetic construct
  misc_feature 1..20: note = chemically synthesized
  source 1..20: mol_type = other DNA
ttacctgaattatacctctt

SEQ ID NO: 11123 - DNA, 20 bp, synthetic construct
  misc_feature 1..20: note = chemically synthesized
  source 1..20: mol_type = other DNA
ttatacctctttggccgatt

SEQ ID NO: 11124 - DNA, 20 bp, synthetic construct
  misc_feature 1..20: note = chemically synthesized
  source 1..20: mol_type = other DNA
tggccgattcagaattttgt

SEQ ID NO: 11125 - DNA, 20 bp, synthetic construct
  misc_feature 1..20: note = chemically synthesized
  source 1..20: mol_type = other DNA
ttgttggcgttttcatgatc

SEQ ID NO: 11126 - DNA, 20 bp, synthetic construct
  misc_feature 1..20: note = chemically synthesized
  source 1..20: mol_type = other DNA
caagaaaaactgaaatgtaa

SEQ ID NO: 11127 - DNA, 20 bp, synthetic construct
  misc_feature 1..20: note = chemically synthesized
  source 1..20: mol_type = other DNA
aatgtaaaagaataattctt

SEQ ID NO: 11128 - DNA, 20 bp, synthetic construct
  misc_feature 1..20: note = chemically synthesized
  source 1..20: mol_type = other DNA
aaagaataattctttagttt

SEQ ID NO: 11129 - DNA, 20 bp, synthetic construct
  misc_feature 1..20: note = chemically synthesized
  source 1..20: mol_type = other DNA
attctttagttttagcaaaa

SEQ ID NO: 11130 - DNA, 20 bp, synthetic construct
  misc_feature 1..20: note = chemically synthesized
  source 1..20: mol_type = other DNA
atgaaaattttacatctctt

SEQ ID NO: 11131 - DNA, 20 bp, synthetic construct
  misc_feature 1..20: note = chemically synthesized
  source 1..20: mol_type = other DNA
aaattttacatctcttaaga

SEQ ID NO: 11132 - DNA, 20 bp, synthetic construct
  misc_feature 1..20: note = chemically synthesized
  source 1..20: mol_type = other DNA
ttttaatccaaataatctga

SEQ ID NO: 11133 - DNA, 20 bp, synthetic construct
  misc_feature 1..20: note = chemically synthesized
  source 1..20: mol_type = other DNA
tctgaaagccaatttctctt

SEQ ID NO: 11134 - DNA, 20 bp, synthetic construct
  misc_feature 1..20: note = chemically synthesized
  source 1..20: mol_type = other DNA
ctgaaagccaatttctcttt

SEQ ID NO: 11135 - DNA, 20 bp, synthetic construct
  misc_feature 1..20: note = chemically synthesized
  source 1..20: mol_type = other DNA
tgaaagccaatttctcttta

SEQ ID NO: 11136 - DNA, 20 bp, synthetic construct
  misc_feature 1..20: note = chemically synthesized
  source 1..20: mol_type = other DNA
gccaatttctctttagggca

SEQ ID NO: 11137 - DNA, 20 bp, synthetic construct
  misc_feature 1..20: note = chemically synthesized
  source 1..20: mol_type = other DNA
caatttctctttagggcatg

SEQ ID NO: 11138 - DNA, 20 bp, synthetic construct
  misc_feature 1..20: note = chemically synthesized
  source 1..20: mol_type = other DNA
caaaatctgtgatgttccca

SEQ ID NO: 11139 - DNA, 20 bp, synthetic construct
  misc_feature 1..20: note = chemically synthesized
  source 1..20: mol_type = other DNA
cccacagtactgtatacaca

SEQ ID NO: 11140 - DNA, 20 bp, synthetic construct
  misc_feature 1..20: note = chemically synthesized
  source 1..20: mol_type = other DNA
cacagtactgtatacacatg

SEQ ID NO: 11141 - DNA, 20 bp, synthetic construct
  misc_feature 1..20: note = chemically synthesized
  source 1..20: mol_type = other DNA
actgtatacacatggagatt

SEQ ID NO: 11142 - DNA, 20 bp, synthetic construct
  misc_feature 1..20: note = chemically synthesized
  source 1..20: mol_type = other DNA
ctgtatacacatggagattt

SEQ ID NO: 11143 - DNA, 20 bp, synthetic construct
  misc_feature 1..20: note = chemically synthesized
  source 1..20: mol_type = other DNA
ttaaaattcaattttacttt

SEQ ID NO: 11144 - DNA, 20 bp, synthetic construct
  misc_feature 1..20: note = chemically synthesized
  source 1..20: mol_type = other DNA
attcaattttacttttagtc

SEQ ID NO: 11145 - DNA, 20 bp, synthetic construct
  misc_feature 1..20: note = chemically synthesized
  source 1..20: mol_type = other DNA
tcaattttacttttagtcaa

SEQ ID NO: 11146 - DNA, 20 bp, synthetic construct
  misc_feature 1..20: note = chemically synthesized
  source 1..20: mol_type = other DNA
acttttagtcaagagaattc

SEQ ID NO: 11147 - DNA, 20 bp, synthetic construct
  misc_feature 1..20: note = chemically synthesized
  source 1..20: mol_type = other DNA
caagagaattccagtaataa

SEQ ID NO: 11148 - DNA, 20 bp, synthetic construct
  misc_feature 1..20: note = chemically synthesized
  source 1..20: mol_type = other DNA
aagagaattccagtaataaa

SEQ ID NO: 11149 - DNA, 20 bp, synthetic construct
  misc_feature 1..20: note = chemically synthesized
  source 1..20: mol_type = other DNA
gaattccagtaataaaaggt

SEQ ID NO: 11150 - DNA, 20 bp, synthetic construct
  misc_feature 1..20: note = chemically synthesized
  source 1..20: mol_type = other DNA
aatcatatttgaatttactt

SEQ ID NO: 11151 - DNA, 20 bp, synthetic construct
  misc_feature 1..20: note = chemically synthesized
  source 1..20: mol_type = other DNA
tgaatttactttggatgaaa

SEQ ID NO: 11152 - DNA, 20 bp, synthetic construct
  misc_feature 1..20: note = chemically synthesized
  source 1..20: mol_type = other DNA
tttactttggatgaaaaaga

SEQ ID NO: 11153 - DNA, 20 bp, synthetic construct
  misc_feature 1..20: note = chemically synthesized
  source 1..20: mol_type = other DNA
gaaaaagaaagttctcaaat

SEQ ID NO: 11154 - DNA, 20 bp, synthetic construct
  misc_feature 1..20: note = chemically synthesized
  source 1..20: mol_type = other DNA
aaagaaagttctcaaatgag

SEQ ID NO: 11155 - DNA, 20 bp, synthetic construct
  misc_feature 1..20: note = chemically synthesized
  source 1..20: mol_type = other DNA
actttgtcatcacttgaaaa

SEQ ID NO: 11156 - DNA, 20 bp, synthetic construct
  misc_feature 1..20: note = chemically synthesized
  source 1..20: mol_type = other DNA
tcacttgaaaatagctcatt

SEQ ID NO: 11157 - DNA, 20 bp, synthetic construct
  misc_feature 1..20: note = chemically synthesized
  source 1..20: mol_type = other DNA
cacttgaaaatagctcattg

SEQ ID NO: 11158 - DNA, 20 bp, synthetic construct
  misc_feature 1..20: note = chemically synthesized
  source 1..20: mol_type = other DNA
gctcattgaggatctttgca

SEQ ID NO: 11159 - DNA, 20 bp, synthetic construct
  misc_feature 1..20: note = chemically synthesized
  source 1..20: mol_type = other DNA
tgcaaagtgatccatcaccc

SEQ ID NO: 11160 - DNA, 20 bp, synthetic construct
  misc_feature 1..20: note = chemically synthesized
  source 1..20: mol_type = other DNA
aagtgatccatcaccctggc

SEQ ID NO: 11161 - DNA, 20 bp, synthetic construct
  misc_feature 1..20: note = chemically synthesized
  source 1..20: mol_type = other DNA
agtgatccatcaccctggct

SEQ ID NO: 11162 - DNA, 20 bp, synthetic construct
  misc_feature 1..20: note = chemically synthesized
  source 1..20: mol_type = other DNA
caccctggctgggctgtttt

SEQ ID NO: 11163 - DNA, 20 bp, synthetic construct
  misc_feature 1..20: note = chemically synthesized
  source 1..20: mol_type = other DNA
gctgggctgttttcagaata

SEQ ID NO: 11164 - DNA, 20 bp, synthetic construct
  misc_feature 1..20: note = chemically synthesized
  source 1..20: mol_type = other DNA
ctttgaacaaatgtctcctg

SEQ ID NO: 11165 - DNA, 20 bp, synthetic construct
  misc_feature 1..20: note = chemically synthesized
  source 1..20: mol_type = other DNA
aacaaatgtctcctgaagaa

SEQ ID NO: 11166 - DNA, 20 bp, synthetic construct
  misc_feature 1..20: note = chemically synthesized
  source 1..20: mol_type = other DNA
aaatgtctcctgaagaacag

SEQ ID NO: 11167 - DNA, 20 bp, synthetic construct
  misc_feature 1..20: note = chemically synthesized
  source 1..20: mol_type = other DNA
gaagaacagaagcctaatta

SEQ ID NO: 11168 - DNA, 20 bp, synthetic construct
  misc_feature 1..20: note = chemically synthesized
  source 1..20: mol_type = other DNA
acagaagcctaattatggtc

SEQ ID NO: 11169 - DNA, 20 bp, synthetic construct
  misc_feature 1..20: note = chemically synthesized
  source 1..20: mol_type = other DNA
tccagctgcaaatgtgaccc

SEQ ID NO: 11170 - DNA, 20 bp, synthetic construct
  misc_feature 1..20: note = chemically synthesized
  source 1..20: mol_type = other DNA
gtgaccccagtgtctgtcac

SEQ ID NO: 11171 - DNA, 20 bp, synthetic construct
  misc_feature 1..20: note = chemically synthesized
  source 1..20: mol_type = other DNA
gtgtctgtcactagatgtta

SEQ ID NO: 11172 - DNA, 20 bp, synthetic construct
  misc_feature 1..20: note = chemically synthesized
  source 1..20: mol_type = other DNA
atcactgcattaatttaaaa

SEQ ID NO: 11173 - DNA, 20 bp, synthetic construct
  misc_feature 1..20: note = chemically synthesized
  source 1..20: mol_type = other DNA
ttaatttaaaaaagcaattt

SEQ ID NO: 11174 - DNA, 20 bp, synthetic construct
  misc_feature 1..20: note = chemically synthesized
  source 1..20: mol_type = other DNA
aaaaagcaatttcagatcaa

SEQ ID NO: 11175 - DNA, 20 bp, synthetic construct
  misc_feature 1..20: note = chemically synthesized
  source 1..20: mol_type = other DNA
tttcagatcaacagcacctt

SEQ ID NO: 11176 - DNA, 20 bp, synthetic construct
  misc_feature 1..20: note = chemically synthesized
  source 1..20: mol_type = other DNA
agatcaacagcacctttggt

SEQ ID NO: 11177 - DNA, 20 bp, synthetic construct
  misc_feature 1..20: note = chemically synthesized
  source 1..20: mol_type = other DNA
caacagcacctttggttggc

SEQ ID NO: 11178 - DNA, 20 bp, synthetic construct
  misc_feature 1..20: note = chemically synthesized
  source 1..20: mol_type = other DNA
cctttggttggcaagtgtta

SEQ ID NO: 11179 - DNA, 20 bp, synthetic construct
  misc_feature 1..20: note = chemically synthesized
  source 1..20: mol_type = other DNA
ctttggttggcaagtgttat

SEQ ID NO: 11180 - DNA, 20 bp, synthetic construct
  misc_feature 1..20: note = chemically synthesized
  source 1..20: mol_type = other DNA
ggcaagtgttataggaattg

SEQ ID NO: 11181 - DNA, 20 bp, synthetic construct
  misc_feature 1..20: note = chemically synthesized
  source 1..20: mol_type = other DNA
tataggaattgcagtgattt

SEQ ID NO: 11182 - DNA, 20 bp, synthetic construct
  misc_feature 1..20: note = chemically synthesized
  source 1..20: mol_type = other DNA
cagtgatttaagcatctctc

SEQ ID NO: 11183 - DNA, 20 bp, synthetic construct
  misc_feature 1..20: note = chemically synthesized
  source 1..20: mol_type = other DNA
ttaagcatctctctagaatt

SEQ ID NO: 11184 - DNA, 20 bp, synthetic construct
  misc_feature 1..20: note = chemically synthesized
  source 1..20: mol_type = other DNA
taagcatctctctagaattc

SEQ ID NO: 11185 - DNA, 20 bp, synthetic construct
  misc_feature 1..20: note = chemically synthesized
  source 1..20: mol_type = other DNA
attcaggatatgtttttttt

SEQ ID NO: 11186 - DNA, 20 bp, synthetic construct
  misc_feature 1..20: note = chemically synthesized
  source 1..20: mol_type = other DNA
ttttttaagctacatctacc

SEQ ID NO: 11187 - DNA, 20 bp, synthetic construct
  misc_feature 1..20: note = chemically synthesized
  source 1..20: mol_type = other DNA
agctacatctacctagtctg

SEQ ID NO: 11188 - DNA, 20 bp, synthetic construct
  misc_feature 1..20: note = chemically synthesized
  source 1..20: mol_type = other DNA
ctacatctacctagtctgaa

SEQ ID NO: 11189 - DNA, 20 bp, synthetic construct
  misc_feature 1..20: note = chemically synthesized
  source 1..20: mol_type = other DNA
gaagagacactcctgaactc

SEQ ID NO: 11190 - DNA, 20 bp, synthetic construct
  misc_feature 1..20: note = chemically synthesized
  source 1..20: mol_type = other DNA
agagacactcctgaactctg

SEQ ID NO: 11191 - DNA, 20 bp, synthetic construct
  misc_feature 1..20: note = chemically synthesized
  source 1..20: mol_type = other DNA
gagacactcctgaactctgg

SEQ ID NO: 11192 - DNA, 20 bp, synthetic construct
  misc_feature 1..20: note = chemically synthesized
  source 1..20: mol_type = other DNA
cactcctgaactctggagga

SEQ ID NO: 11193 - DNA, 20 bp, synthetic construct
  misc_feature 1..20: note = chemically synthesized
  source 1..20: mol_type = other DNA
tatcatatatatatatatat

SEQ ID NO: 11194 - DNA, 20 bp, synthetic construct
  misc_feature 1..20: note = chemically synthesized
  source 1..20: mol_type = other DNA
tttgctgcacaatgacattt

SEQ ID NO: 11195 - DNA, 20 bp, synthetic construct
  misc_feature 1..20: note = chemically synthesized
  source 1..20: mol_type = other DNA
aatgacattttggtcaatga

SEQ ID NO: 11196 - DNA, 20 bp, synthetic construct
  misc_feature 1..20: note = chemically synthesized
  source 1..20: mol_type = other DNA
tgatggaccacattatacga

SEQ ID NO: 11197 - DNA, 20 bp, synthetic construct
  misc_feature 1..20: note = chemically synthesized
  source 1..20: mol_type = other DNA
tggaccacattatacgacag

SEQ ID NO: 11198 - DNA, 20 bp, synthetic construct
  misc_feature 1..20: note = chemically synthesized
  source 1..20: mol_type = other DNA
ttatacgacagtggtcccat

SEQ ID NO: 11199 - DNA, 20 bp, synthetic construct
  misc_feature 1..20: note = chemically synthesized
  source 1..20: mol_type = other DNA
tatacgacagtggtcccata

SEQ ID NO: 11200 - DNA, 20 bp, synthetic construct
  misc_feature 1..20: note = chemically synthesized
  source 1..20: mol_type = other DNA
cactgtaccttttctatgtt

SEQ ID NO: 11201 - DNA, 20 bp, synthetic construct
  misc_feature 1..20: note = chemically synthesized
  source 1..20: mol_type = other DNA
accactgttaccattgccta

SEQ ID NO: 11202 - DNA, 20 bp, synthetic construct
  misc_feature 1..20: note = chemically synthesized
  source 1..20: mol_type = other DNA
ttaccattgcctacagtgtt

SEQ ID NO: 11203 - DNA, 20 bp, synthetic construct
  misc_feature 1..20: note = chemically synthesized
  source 1..20: mol_type = other DNA
attgcctacagtgttcagta

SEQ ID NO: 11204 - DNA, 20 bp, synthetic construct
  misc_feature 1..20: note = chemically synthesized
  source 1..20: mol_type = other DNA
cagtacagtcacatgctgta

SEQ ID NO: 11205 - DNA, 20 bp, synthetic construct
  misc_feature 1..20: note = chemically synthesized
  source 1..20: mol_type = other DNA
agtacagtcacatgctgtac

SEQ ID NO: 11206 - DNA, 20 bp, synthetic construct
  misc_feature 1..20: note = chemically synthesized
  source 1..20: mol_type = other DNA
tcacatgctgtacaggtttg

SEQ ID NO: 11207 - DNA, 20 bp, synthetic construct
  misc_feature 1..20: note = chemically synthesized
  source 1..20: mol_type = other DNA
tgctgtacaggtttgcagcc

SEQ ID NO: 11208 - DNA, 20 bp, synthetic construct
  misc_feature 1..20: note = chemically synthesized
  source 1..20: mol_type = other DNA
gctgtacaggtttgcagccc

SEQ ID NO: 11209 - DNA, 20 bp, synthetic construct
  misc_feature 1..20: note = chemically synthesized
  source 1..20: mol_type = other DNA
tgtacaggtttgcagcccag

SEQ ID NO: 11210 - DNA, 20 bp, synthetic construct
  misc_feature 1..20: note = chemically synthesized
  source 1..20: mol_type = other DNA
aggtttgcagcccaggagcc

SEQ ID NO: 11211 - DNA, 20 bp, synthetic construct
  misc_feature 1..20: note = chemically synthesized
  source 1..20: mol_type = other DNA
ggtttgcagcccaggagcct

SEQ ID NO: 11212 - DNA, 20 bp, synthetic construct
  misc_feature 1..20: note = chemically synthesized
  source 1..20: mol_type = other DNA
tttgcagcccaggagcctag

SEQ ID NO: 11213 - DNA, 20 bp, synthetic construct
  misc_feature 1..20: note = chemically synthesized
  source 1..20: mol_type = other DNA
gcccaggagcctaggagcaa

SEQ ID NO: 11214 - DNA, 20 bp, synthetic construct
  misc_feature 1..20: note = chemically synthesized
  source 1..20: mol_type = other DNA
cccaggagcctaggagcaat

SEQ ID NO: 11215 - DNA, 20 bp, synthetic construct
  misc_feature 1..20: note = chemically synthesized
  source 1..20: mol_type = other DNA
taggccacatcaatacaacc

SEQ ID NO: 11216 - DNA, 20 bp, synthetic construct
  misc_feature 1..20: note = chemically synthesized
  source 1..20: mol_type = other DNA
aggccacatcaatacaacct

SEQ ID NO: 11217 - DNA, 20 bp, synthetic construct
  misc_feature 1..20: note = chemically synthesized
  source 1..20: mol_type = other DNA
atcaatacaacctaggtatg

SEQ ID NO: 11218 - DNA, 20 bp, synthetic construct
  misc_feature 1..20: note = chemically synthesized
  source 1..20: mol_type = other DNA
atacaacctaggtatgtagt

SEQ ID NO: 11219 - DNA, 20 bp, synthetic construct
  misc_feature 1..20: note = chemically synthesized
  source 1..20: mol_type = other DNA
atgtagtaagctataccatt

SEQ ID NO: 11220 - DNA, 20 bp, synthetic construct
  misc_feature 1..20: note = chemically synthesized
  source 1..20: mol_type = other DNA
tgtagtaagctataccattt

SEQ ID NO: 11221 - DNA, 20 bp, synthetic construct
  misc_feature 1..20: note = chemically synthesized
  source 1..20: mol_type = other DNA
taagctataccatttaggtt

SEQ ID NO: 11222 - DNA, 20 bp, synthetic construct
  misc_feature 1..20: note = chemically synthesized
  source 1..20: mol_type = other DNA
aagctataccatttaggttt

SEQ ID NO: 11223 - DNA, 20 bp, synthetic construct
  misc_feature 1..20: note = chemically synthesized
  source 1..20: mol_type = other DNA
tataccatttaggtttaggt

SEQ ID NO: 11224 - DNA, 20 bp, synthetic construct
  misc_feature 1..20: note = chemically synthesized
  source 1..20: mol_type = other DNA
ttgcttaatgacacatttct

SEQ ID NO: 11225 - DNA, 20 bp, synthetic construct
  misc_feature 1..20: note = chemically synthesized
  source 1..20: mol_type = other DNA
cagaatatatccccattgtt

SEQ ID NO: 11226 - DNA, 20 bp, synthetic construct
  misc_feature 1..20: note = chemically synthesized
  source 1..20: mol_type = other DNA
agaatatatccccattgtta

SEQ ID NO: 11227 - DNA, 20 bp, synthetic construct
  misc_feature 1..20: note = chemically synthesized
  source 1..20: mol_type = other DNA
ccccattgttaaggaatgca

SEQ ID NO: 11228 - DNA, 20 bp, synthetic construct
  misc_feature 1..20: note = chemically synthesized
  source 1..20: mol_type = other DNA
tgtatgtataaaattaataa

SEQ ID NO: 11229 - DNA, 20 bp, synthetic construct
  misc_feature 1..20: note = chemically synthesized
  source 1..20: mol_type = other DNA
gtatgtataaaattaataac

SEQ ID NO: 11230 - DNA, 20 bp, synthetic construct
  misc_feature 1..20: note = chemically synthesized
  source 1..20: mol_type = other DNA
tatgtataaaattaataaca

SEQ ID NO: 11231 - DNA, 20 bp, synthetic construct
  misc_feature 1..20: note = chemically synthesized
  source 1..20: mol_type = other DNA
aaaattaataacagggactc

SEQ ID NO: 11232 - DNA, 20 bp, synthetic construct
  misc_feature 1..20: note = chemically synthesized
  source 1..20: mol_type = other DNA
attaataacagggactcaag

SEQ ID NO: 11233 - DNA, 20 bp, synthetic construct
  misc_feature 1..20: note = chemically synthesized
  source 1..20: mol_type = other DNA
cagggactcaagaagttgcc

SEQ ID NO: 11234 - DNA, 20 bp, synthetic construct
  misc_feature 1..20: note = chemically synthesized
  source 1..20: mol_type = other DNA
gggactcaagaagttgcctg

SEQ ID NO: 11235 - DNA, 20 bp, synthetic construct
  misc_feature 1..20: note = chemically synthesized
  source 1..20: mol_type = other DNA
ctggagttgttcctttcttc

SEQ ID NO: 11236 - DNA, 20 bp, synthetic construct
  misc_feature 1..20: note = chemically synthesized
  source 1..20: mol_type = other DNA
tggagttgttcctttcttca

SEQ ID NO: 11237 - DNA, 20 bp, synthetic construct
  misc_feature 1..20: note = chemically synthesized
  source 1..20: mol_type = other DNA
ggagttgttcctttcttcaa

SEQ ID NO: 11238 - DNA, 20 bp, synthetic construct
  misc_feature 1..20: note = chemically synthesized
  source 1..20: mol_type = other DNA
tgttcctttcttcaagggtc

SEQ ID NO: 11239 - DNA, 20 bp, synthetic construct
  misc_feature 1..20: note = chemically synthesized
  source 1..20: mol_type = other DNA
aatatatctgataccatctc

SEQ ID NO: 11240 - DNA, 20 bp, synthetic construct
  misc_feature 1..20: note = chemically synthesized
  source 1..20: mol_type = other DNA
tatatctgataccatctcaa

SEQ ID NO: 11241 - DNA, 20 bp, synthetic construct
  misc_feature 1..20: note = chemically synthesized
  source 1..20: mol_type = other DNA
atatctgataccatctcaag

SEQ ID NO: 11242 - DNA, 20 bp, synthetic construct
  misc_feature 1..20: note = chemically synthesized
  source 1..20: mol_type = other DNA
gataccatctcaagaggacc

SEQ ID NO: 11243 - DNA, 20 bp, synthetic construct
  misc_feature 1..20: note = chemically synthesized
  source 1..20: mol_type = other DNA
ataccatctcaagaggacca

SEQ ID NO: 11244 - DNA, 20 bp, synthetic construct
  misc_feature 1..20: note = chemically synthesized
  source 1..20: mol_type = other DNA
taccatctcaagaggaccaa

SEQ ID NO: 11245 - DNA, 20 bp, synthetic construct
  misc_feature 1..20: note = chemically synthesized
  source 1..20: mol_type = other DNA
caagaggaccaagggcttat

SEQ ID NO: 11246 - DNA, 20 bp, synthetic construct
  misc_feature 1..20: note = chemically synthesized
  source 1..20: mol_type = other DNA
ggcttataagatgaactttc

SEQ ID NO: 11247 - DNA, 20 bp, synthetic construct
  misc_feature 1..20: note = chemically synthesized
  source 1..20: mol_type = other DNA
gcttataagatgaactttct

SEQ ID NO: 11248 - DNA, 20 bp, synthetic construct
  misc_feature 1..20: note = chemically synthesized
  source 1..20: mol_type = other DNA
cttataagatgaactttctg

SEQ ID NO: 11249 - DNA, 20 bp, synthetic construct
  misc_feature 1..20: note = chemically synthesized
  source 1..20: mol_type = other DNA
gatgaactttctggggtatt

SEQ ID NO: 11250 - DNA, 20 bp, synthetic construct
  misc_feature 1..20: note = chemically synthesized
  source 1..20: mol_type = other DNA
atgaactttctggggtattt

SEQ ID NO: 11251 - DNA, 20 bp, synthetic construct
  misc_feature 1..20: note = chemically synthesized
  source 1..20: mol_type = other DNA
acttcctgattaactccaaa

SEQ ID NO: 11252 - DNA, 20 bp, synthetic construct
  misc_feature 1..20: note = chemically synthesized
  source 1..20: mol_type = other DNA
cttcctgattaactccaaaa

SEQ ID NO: 11253 - DNA, 20 bp, synthetic construct
  misc_feature 1..20: note = chemically synthesized
  source 1..20: mol_type = other DNA
cctgattaactccaaaaagg

SEQ ID NO: 11254 - DNA, 20 bp, synthetic construct
  misc_feature 1..20: note = chemically synthesized
  source 1..20: mol_type = other DNA
tgattaactccaaaaaggaa

SEQ ID NO: 11255 - DNA, 20 bp, synthetic construct
  misc_feature 1..20: note = chemically synthesized
  source 1..20: mol_type = other DNA
taactccaaaaaggaagaga

SEQ ID NO: 11256 - DNA, 20 bp, synthetic construct
  misc_feature 1..20: note = chemically synthesized
  source 1..20: mol_type = other DNA
aactccaaaaaggaagagaa

SEQ ID NO: 11257 - DNA, 20 bp, synthetic construct
  misc_feature 1..20: note = chemically synthesized
  source 1..20: mol_type = other DNA
ccaaaaaggaagagaaagga

SEQ ID NO: 11258 - DNA, 20 bp, synthetic construct
  misc_feature 1..20: note = chemically synthesized
  source 1..20: mol_type = other DNA
ggaagagaaaggaaagtaaa

SEQ ID NO: 11259 - DNA, 20 bp, synthetic construct
  misc_feature 1..20: note = chemically synthesized
  source 1..20: mol_type = other DNA
gaagagaaaggaaagtaaaa

SEQ ID NO: 11260 - DNA, 20 bp, synthetic construct
  misc_feature 1..20: note = chemically synthesized
  source 1..20: mol_type = other DNA
agaaaggaaagtaaaaagga

SEQ ID NO: 11261 - DNA, 20 bp, synthetic construct
  misc_feature 1..20: note = chemically synthesized
  source 1..20: mol_type = other DNA
gaaaggaaagtaaaaaggaa

SEQ ID NO: 11262 - DNA, 20 bp, synthetic construct
  misc_feature 1..20: note = chemically synthesized
  source 1..20: mol_type = other DNA
ggaaagtaaaaaggaaagga

SEQ ID NO: 11263 - DNA, 20 bp, synthetic construct
  misc_feature 1..20: note = chemically synthesized
  source 1..20: mol_type = other DNA
taaaaaggaaaggaaagaaa

SEQ ID NO: 11264 - DNA, 20 bp, synthetic construct
  misc_feature 1..20: note = chemically synthesized
  source 1..20: mol_type = other DNA
aaaaggaaaggaaagaaacg

SEQ ID NO: 11265 - DNA, 20 bp, synthetic construct
  misc_feature 1..20: note = chemically synthesized
  source 1..20: mol_type = other DNA
ttcttcccttattttcattg

SEQ ID NO: 11266 - DNA, 20 bp, synthetic construct
  misc_feature 1..20: note = chemically synthesized
  source 1..20: mol_type = other DNA
cattgcagctgttcacttta

SEQ ID NO: 11267 - DNA, 20 bp, synthetic construct
  misc_feature 1..20: note = chemically synthesized
  source 1..20: mol_type = other DNA
ttgcagctgttcactttatg

SEQ ID NO: 11268 - DNA, 20 bp, synthetic construct
  misc_feature 1..20: note = chemically synthesized
  source 1..20: mol_type = other DNA
gttcactttatggagtgttc

SEQ ID NO: 11269 - DNA, 20 bp, synthetic construct
  misc_feature 1..20: note = chemically synthesized
  source 1..20: mol_type = other DNA
ctgcttttcccttgctctgc

SEQ ID NO: 11270 - DNA, 20 bp, synthetic construct
  misc_feature 1..20: note = chemically synthesized
  source 1..20: mol_type = other DNA
cttgctctgcaagttccttt

SEQ ID NO: 11271 - DNA, 20 bp, synthetic construct
  misc_feature 1..20: note = chemically synthesized
  source 1..20: mol_type = other DNA
ttgctctgcaagttcctttt

SEQ ID NO: 11272 - DNA, 20 bp, synthetic construct
  misc_feature 1..20: note = chemically synthesized
  source 1..20: mol_type = other DNA
tcactttttttctttgaatt

SEQ ID NO: 11273 - DNA, 20 bp, synthetic construct
  misc_feature 1..20: note = chemically synthesized
  source 1..20: mol_type = other DNA
ttttttctttgaatttagcc

SEQ ID NO: 11274 - DNA, 20 bp, synthetic construct
  misc_feature 1..20: note = chemically synthesized
  source 1..20: mol_type = other DNA
ttcaactcttttttttttga

SEQ ID NO: 11275 - DNA, 20 bp, synthetic construct
  misc_feature 1..20: note = chemically synthesized
  source 1..20: mol_type = other DNA
caactcttttttttttgaca

SEQ ID NO: 11276 - DNA, 20 bp, synthetic construct
  misc_feature 1..20: note = chemically synthesized
  source 1..20: mol_type = other DNA
cagagtcttgctctgtcgcc

SEQ ID NO: 11277 - DNA, 20 bp, synthetic construct
  misc_feature 1..20: note = chemically synthesized
  source 1..20: mol_type = other DNA
agagtcttgctctgtcgccc

SEQ ID NO: 11278 - DNA, 20 bp, synthetic construct
  misc_feature 1..20: note = chemically synthesized
  source 1..20: mol_type = other DNA
tcttgctctgtcgcccaggc

SEQ ID NO: 11279 - DNA, 20 bp, synthetic construct
  misc_feature 1..20: note = chemically synthesized
  source 1..20: mol_type = other DNA
ttgctctgtcgcccaggctg

SEQ ID NO: 11280 - DNA, 20 bp, synthetic construct
  misc_feature 1..20: note = chemically synthesized
  source 1..20: mol_type = other DNA
ctgtcgcccaggctggagtg

SEQ ID NO: 11281 - DNA, 20 bp, synthetic construct
  misc_feature 1..20: note = chemically synthesized
  source 1..20: mol_type = other DNA
tcgcccaggctggagtgcag

SEQ ID NO: 11282 - DNA, 20 bp, synthetic construct
  misc_feature 1..20: note = chemically synthesized
  source 1..20: mol_type = other DNA
ggagtgcagtggtgcgatct

SEQ ID NO: 11283 - DNA, 20 bp, synthetic construct
  misc_feature 1..20: note = chemically synthesized
  source 1..20: mol_type = other DNA
tcactgcaacctccatctcc

SEQ ID NO: 11284 - DNA, 20 bp, synthetic construct
  misc_feature 1..20: note = chemically synthesized
  source 1..20: mol_type = other DNA
cactgcaacctccatctccc

SEQ ID NO: 11285 - DNA, 20 bp, synthetic construct
  misc_feature 1..20: note = chemically synthesized
  source 1..20: mol_type = other DNA
aacctccatctcccaggttc

SEQ ID NO: 11286 - DNA, 20 bp, synthetic construct
  misc_feature 1..20: note = chemically synthesized
  source 1..20: mol_type = other DNA
ttcaagctattctcctgcct

SEQ ID NO: 11287 - DNA, 20 bp, synthetic construct
  misc_feature 1..20: note = chemically synthesized
  source 1..20: mol_type = other DNA
ttctcctgcctcagcctccc

SEQ ID NO: 11288 - DNA, 20 bp, synthetic construct
  misc_feature 1..20: note = chemically synthesized
  source 1..20: mol_type = other DNA
tcctgcctcagcctcccaag

SEQ ID NO: 11289 - DNA, 20 bp, synthetic construct
  misc_feature 1..20: note = chemically synthesized
  source 1..20: mol_type = other DNA
gcctcagcctcccaagtagc

SEQ ID NO: 11290 - DNA, 20 bp, synthetic construct
  misc_feature 1..20: note = chemically synthesized
  source 1..20: mol_type = other DNA
cctcagcctcccaagtagct

SEQ ID NO: 11291 - DNA, 20 bp, synthetic construct
  misc_feature 1..20: note = chemically synthesized
  source 1..20: mol_type = other DNA
ctcccaagtagctgggatta

SEQ ID NO: 11292 - DNA, 20 bp, synthetic construct
  misc_feature 1..20: note = chemically synthesized
  source 1..20: mol_type = other DNA
tcccaagtagctgggattac

SEQ ID NO: 11293 - DNA, 20 bp, synthetic construct
  misc_feature 1..20: note = chemically synthesized
  source 1..20: mol_type = other DNA
caggcacccgccaccatgcc

SEQ ID NO: 11294 - DNA, 20 bp, synthetic construct
  misc_feature 1..20: note = chemically synthesized
  source 1..20: mol_type = other DNA
ccagctaatttttgtatttt

SEQ ID NO: 11295 - DNA, 20 bp, synthetic construct
  misc_feature 1..20: note = chemically synthesized
  source 1..20: mol_type = other DNA
taatttttgtatttttagta

SEQ ID NO: 11296 - DNA, 20 bp, synthetic construct
  misc_feature 1..20: note = chemically synthesized
  source 1..20: mol_type = other DNA
ttttgtatttttagtaaagc

SEQ ID NO: 11297 - DNA, 20 bp, synthetic construct
  misc_feature 1..20: note = chemically synthesized
  source 1..20: mol_type = other DNA
tttgtatttttagtaaagcc

SEQ ID NO: 11298 - DNA, 20 bp, synthetic construct
  misc_feature 1..20: note = chemically synthesized
  source 1..20: mol_type = other DNA
ttgtatttttagtaaagccg

SEQ ID NO: 11299 - DNA, 20 bp, synthetic construct
  misc_feature 1..20: note = chemically synthesized
  source 1..20: mol_type = other DNA
gtttcaccatttcaccttgt

SEQ ID NO: 11300 - DNA, 20 bp, synthetic construct
  misc_feature 1..20: note = chemically synthesized
  source 1..20: mol_type = other DNA
caccatttcaccttgttggc

SEQ ID NO: 11301 - DNA, 20 bp, synthetic construct
  misc_feature 1..20: note = chemically synthesized
  source 1..20: mol_type = other DNA
accatttcaccttgttggcc

SEQ ID NO: 11302 - DNA, 20 bp, synthetic construct
  misc_feature 1..20: note = chemically synthesized
  source 1..20: mol_type = other DNA
tttcaccttgttggccaggc

SEQ ID NO: 11303 - DNA, 20 bp, synthetic construct
  misc_feature 1..20: note = chemically synthesized
  source 1..20: mol_type = other DNA
ggtgtcgaactcctgacctc

SEQ ID NO: 11304 - DNA, 20 bp, synthetic construct
  misc_feature 1..20: note = chemically synthesized
  source 1..20: mol_type = other DNA
cctcaagtgatctgcctgcc

SEQ ID NO: 11305 - DNA, 20 bp, synthetic construct
  misc_feature 1..20: note = chemically synthesized
  source 1..20: mol_type = other DNA
ctcaagtgatctgcctgcct

SEQ ID NO: 11306 - DNA, 20 bp, synthetic construct
  misc_feature 1..20: note = chemically synthesized
  source 1..20: mol_type = other DNA
ctgcctgcctgggcctctga

SEQ ID NO: 11307 - DNA, 20 bp, synthetic construct
  misc_feature 1..20: note = chemically synthesized
  source 1..20: mol_type = other DNA
gcctgggcctctgaaagtgc

SEQ ID NO: 11308 - DNA, 20 bp, synthetic construct
  misc_feature 1..20: note = chemically synthesized
  source 1..20: mol_type = other DNA
cctgggcctctgaaagtgct

SEQ ID NO: 11309 - DNA, 20 bp, synthetic construct
  misc_feature 1..20: note = chemically synthesized
  source 1..20: mol_type = other DNA
ctctgaaagtgctgggatta

SEQ ID NO: 11310 - DNA, 20 bp, synthetic construct
  misc_feature 1..20: note = chemically synthesized
  source 1..20: mol_type = other DNA
tctgaaagtgctgggattat

SEQ ID NO: 11311 - DNA, 20 bp, synthetic construct
  misc_feature 1..20: note = chemically synthesized
  source 1..20: mol_type = other DNA
agtgctgggattataggtgt

SEQ ID NO: 11312 - DNA, 20 bp, synthetic construct
  misc_feature 1..20: note = chemically synthesized
  source 1..20: mol_type = other DNA
ataggtgtgagccaccatgc

SEQ ID NO: 11313 - DNA, 20 bp, synthetic construct
  misc_feature 1..20: note = chemically synthesized
  source 1..20: mol_type = other DNA
taggtgtgagccaccatgcc

SEQ ID NO: 11314 - DNA, 20 bp, synthetic construct
  misc_feature 1..20: note = chemically synthesized
  source 1..20: mol_type = other DNA
gcctctcttcaactcttcat

SEQ ID NO: 11315 - DNA, 20 bp, synthetic construct
  misc_feature 1..20: note = chemically synthesized
  source 1..20: mol_type = other DNA
ctgtgcccaccctgcaatcc

SEQ ID NO: 11316 - DNA, 20 bp, synthetic construct
  misc_feature 1..20: note = chemically synthesized
  source 1..20: mol_type = other DNA
tgcaatcctagcccctaaat

SEQ ID NO: 11317 - DNA, 20 bp, synthetic construct
  misc_feature 1..20: note = chemically synthesized
  source 1..20: mol_type = other DNA
caatcctagcccctaaattg

SEQ ID NO: 11318 - DNA, 20 bp, synthetic construct
  misc_feature 1..20: note = chemically synthesized
  source 1..20: mol_type = other DNA
tcctagcccctaaattggag

SEQ ID NO: 11319 - DNA, 20 bp, synthetic construct
  misc_feature 1..20: note = chemically synthesized
  source 1..20: mol_type = other DNA
tgccttcatccttctcttcc

SEQ ID NO: 11320 - DNA, 20 bp, synthetic construct
  misc_feature 1..20: note = chemically synthesized
  source 1..20: mol_type = other DNA
ttcatccttctcttcccaga

SEQ ID NO: 11321 - DNA, 20 bp, synthetic construct
  misc_feature 1..20: note = chemically synthesized
  source 1..20: mol_type = other DNA
ccttctcttcccagacagcc

SEQ ID NO: 11322 - DNA, 20 bp, synthetic construct
  misc_feature 1..20: note = chemically synthesized
  source 1..20: mol_type = other DNA
cttctcttcccagacagccg

SEQ ID NO: 11323 - DNA, 20 bp, synthetic construct
  misc_feature 1..20: note = chemically synthesized
  source 1..20: mol_type = other DNA
ccagacagccgaggactgtg

SEQ ID NO: 11324 - DNA, 20 bp, synthetic construct
  misc_feature 1..20: note = chemically synthesized
  source 1..20: mol_type = other DNA
cagacagccgaggactgtga

SEQ ID NO: 11325 - DNA, 20 bp, synthetic construct
  misc_feature 1..20: note = chemically synthesized
  source 1..20: mol_type = other DNA
ggaaaaaaatcaccaaaatg

SEQ ID NO: 11326 - DNA, 20 bp, synthetic construct
  misc_feature 1..20: note = chemically synthesized
  source 1..20: mol_type = other DNA
aaaaatcaccaaaatgcaga

SEQ ID NO: 11327 - DNA, 20 bp, synthetic construct
  misc_feature 1..20: note = chemically synthesized
  source 1..20: mol_type = other DNA
caccacatattgatgcctca

SEQ ID NO: 11328 - DNA, 20 bp, synthetic construct
  misc_feature 1..20: note = chemically synthesized
  source 1..20: mol_type = other DNA
cctccacccacctctctgct

SEQ ID NO: 11329 - DNA, 20 bp, synthetic construct
  misc_feature 1..20: note = chemically synthesized
  source 1..20: mol_type = other DNA
tgctcagcaactcatttact

SEQ ID NO: 11330 - DNA, 20 bp, synthetic construct
  misc_feature 1..20: note = chemically synthesized
  source 1..20: mol_type = other DNA
gcaactcatttacttggccc

SEQ ID NO: 11331 - DNA, 20 bp, synthetic construct
  misc_feature 1..20: note = chemically synthesized
  source 1..20: mol_type = other DNA
tggccctggacactcctaaa

SEQ ID NO: 11332 - DNA, 20 bp, synthetic construct
  misc_feature 1..20: note = chemically synthesized
  source 1..20: mol_type = other DNA
tccatgcctgcatccattta

SEQ ID NO: 11333 - DNA, 20 bp, synthetic construct
  misc_feature 1..20: note = chemically synthesized
  source 1..20: mol_type = other DNA
atccatttacagtcgttcct

SEQ ID NO: 11334 - DNA, 20 bp, synthetic construct
  misc_feature 1..20: note = chemically synthesized
  source 1..20: mol_type = other DNA
cagtcgttcctcagtatcca

SEQ ID NO: 11335 - DNA, 20 bp, synthetic construct
  misc_feature 1..20: note = chemically synthesized
  source 1..20: mol_type = other DNA
cctcagtatccatggaaaat

SEQ ID NO: 11336 - DNA, 20 bp, synthetic construct
  misc_feature 1..20: note = chemically synthesized
  source 1..20: mol_type = other DNA
cagtatccatggaaaattgg

SEQ ID NO: 11337 - DNA, 20 bp, synthetic construct
  misc_feature 1..20: note = chemically synthesized
  source 1..20: mol_type = other DNA
atccatggaaaattggtggc

SEQ ID NO: 11338 - DNA, 20 bp, synthetic construct
  misc_feature 1..20: note = chemically synthesized
  source 1..20: mol_type = other DNA
caagaccccctgcaaatatc

SEQ ID NO: 11339 - DNA, 20 bp, synthetic construct
  misc_feature 1..20: note = chemically synthesized
  source 1..20: mol_type = other DNA
cctgcaaatatcaagatctg

SEQ ID NO: 11340 - DNA, 20 bp, synthetic construct
  misc_feature 1..20: note = chemically synthesized
  source 1..20: mol_type = other DNA
atcaagatctgtggatgctc

SEQ ID NO: 11341 - DNA, 20 bp, synthetic construct
  misc_feature 1..20: note = chemically synthesized
  source 1..20: mol_type = other DNA
tcaagtctccgatataaaaa

SEQ ID NO: 11342 - DNA, 20 bp, synthetic construct
  misc_feature 1..20: note = chemically synthesized
  source 1..20: mol_type = other DNA
tttgtactttaaatcatctc

SEQ ID NO: 11343 - DNA, 20 bp, synthetic construct
  misc_feature 1..20: note = chemically synthesized
  source 1..20: mol_type = other DNA
ttgtactttaaatcatctct

SEQ ID NO: 11344 - DNA, 20 bp, synthetic construct
  misc_feature 1..20: note = chemically synthesized
  source 1..20: mol_type = other DNA
catctctaggtttctcttaa

SEQ ID NO: 11345 - DNA, 20 bp, synthetic construct
  misc_feature 1..20: note = chemically synthesized
  source 1..20: mol_type = other DNA
caatgtaaatgctatgtaaa

SEQ ID NO: 11346 - DNA, 20 bp, synthetic construct
  misc_feature 1..20: note = chemically synthesized
  source 1..20: mol_type = other DNA
agttgttatgctgtattgtt

SEQ ID NO: 11347 - DNA, 20 bp, synthetic construct
  misc_feature 1..20: note = chemically synthesized
  source 1..20: mol_type = other DNA
gttgttatgctgtattgttt

SEQ ID NO: 11348 - DNA, 20 bp, synthetic construct
  misc_feature 1..20: note = chemically synthesized
  source 1..20: mol_type = other DNA
ttgttatgctgtattgttta

SEQ ID NO: 11349 - DNA, 20 bp, synthetic construct
  misc_feature 1..20: note = chemically synthesized
  source 1..20: mol_type = other DNA
tattgtttagggaataatga

SEQ ID NO: 11350 - DNA, 20 bp, synthetic construct
  misc_feature 1..20: note = chemically synthesized
  source 1..20: mol_type = other DNA
tagggaataatgaaagataa

SEQ ID NO: 11351 - DNA, 20 bp, synthetic construct
  misc_feature 1..20: note = chemically synthesized
  source 1..20: mol_type = other DNA
gggaataatgaaagataaaa

SEQ ID NO: 11352 - DNA, 20 bp, synthetic construct
  misc_feature 1..20: note = chemically synthesized
  source 1..20: mol_type = other DNA
taaaagagtctgtacatgtt

SEQ ID NO: 11353 - DNA, 20 bp, synthetic construct
  misc_feature 1..20: note = chemically synthesized
  source 1..20: mol_type = other DNA
aagagtctgtacatgttcag

SEQ ID NO: 11354 - DNA, 20 bp, synthetic construct
  misc_feature 1..20: note = chemically synthesized
  source 1..20: mol_type = other DNA
gagtctgtacatgttcagta

SEQ ID NO: 11355 - DNA, 20 bp, synthetic construct
  misc_feature 1..20: note = chemically synthesized
  source 1..20: mol_type = other DNA
tcttgaatatttttgatctg

SEQ ID NO: 11356 - DNA, 20 bp, synthetic construct
  misc_feature 1..20: note = chemically synthesized
  source 1..20: mol_type = other DNA
tctgcagttaattgaatctg

SEQ ID NO: 11357 - DNA, 20 bp, synthetic construct
  misc_feature 1..20: note = chemically synthesized
  source 1..20: mol_type = other DNA
gttaattgaatctgtggctg

SEQ ID NO: 11358 - DNA, 20 bp, synthetic construct
  misc_feature 1..20: note = chemically synthesized
  source 1..20: mol_type = other DNA
tctgtggctgtggaactcac

SEQ ID NO: 11359 - DNA, 20 bp, synthetic construct
  misc_feature 1..20: note = chemically synthesized
  source 1..20: mol_type = other DNA
ctgtggctgtggaactcaca

SEQ ID NO: 11360 - DNA, 20 bp, synthetic construct
  misc_feature 1..20: note = chemically synthesized
  source 1..20: mol_type = other DNA
gtggctgtggaactcacaag

SEQ ID NO: 11361 - DNA, 20 bp, synthetic construct
  misc_feature 1..20: note = chemically synthesized
  source 1..20: mol_type = other DNA
ggctgtggaactcacaagga

SEQ ID NO: 11362 - DNA, 20 bp, synthetic construct
  misc_feature 1..20: note = chemically synthesized
  source 1..20: mol_type = other DNA
cacaaggagagctgactgta

SEQ ID NO: 11363 - DNA, 20 bp, synthetic construct
  misc_feature 1..20: note = chemically synthesized
  source 1..20: mol_type = other DNA
ggagagctgactgtacagtg

SEQ ID NO: 11364 - DNA, 20 bp, synthetic construct
  misc_feature 1..20: note = chemically synthesized
  source 1..20: mol_type = other DNA
gctgactgtacagtgtggtt

SEQ ID NO: 11365 - DNA, 20 bp, synthetic construct
  misc_feature 1..20: note = chemically synthesized
  source 1..20: mol_type = other DNA
agtgtggttgagtgaaaaaa

SEQ ID NO: 11366 - DNA, 20 bp, synthetic construct
  misc_feature 1..20: note = chemically synthesized
  source 1..20: mol_type = other DNA
ttgagtgaaaaaacagactt

SEQ ID NO: 11367 - DNA, 20 bp, synthetic construct
  misc_feature 1..20: note = chemically synthesized
  source 1..20: mol_type = other DNA
gaaaaaacagactttagaat

SEQ ID NO: 11368 - DNA, 20 bp, synthetic construct
  misc_feature 1..20: note = chemically synthesized
  source 1..20: mol_type = other DNA
aacagactttagaatcagat

SEQ ID NO: 11369 - DNA, 20 bp, synthetic construct
  misc_feature 1..20: note = chemically synthesized
  source 1..20: mol_type = other DNA
gactttagaatcagatcaga

SEQ ID NO: 11370 - DNA, 20 bp, synthetic construct
  misc_feature 1..20: note = chemically synthesized
  source 1..20: mol_type = other DNA
agaatcagatcagacagaaa

SEQ ID NO: 11371 - DNA, 20 bp, synthetic construct
  misc_feature 1..20: note = chemically synthesized
  source 1..20: mol_type = other DNA
gaatcagatcagacagaaat

SEQ ID NO: 11372 - DNA, 20 bp, synthetic construct
  misc_feature 1..20: note = chemically synthesized
  source 1..20: mol_type = other DNA
gacagaaataggtttgaatc

SEQ ID NO: 11373 - DNA, 20 bp, synthetic construct
  misc_feature 1..20: note = chemically synthesized
  source 1..20: mol_type = other DNA
aatcaagtatctgcctcctc

SEQ ID NO: 11374 - DNA, 20 bp, synthetic construct
  misc_feature 1..20: note = chemically synthesized
  source 1..20: mol_type = other DNA
ctcctctagacctgtgacct

SEQ ID NO: 11375 - DNA, 20 bp, synthetic construct
  misc_feature 1..20: note = chemically synthesized
  source 1..20: mol_type = other DNA
ctagacctgtgaccttggac

SEQ ID NO: 11376 - DNA, 20 bp, synthetic construct
  misc_feature 1..20: note = chemically synthesized
  source 1..20: mol_type = other DNA
tgaccttggacaagtcacac

SEQ ID NO: 11377 - DNA, 20 bp, synthetic construct
  misc_feature 1..20: note = chemically synthesized
  source 1..20: mol_type = other DNA
taactttgtcaaatgtaaat

SEQ ID NO: 11378 - DNA, 20 bp, synthetic construct
  misc_feature 1..20: note = chemically synthesized
  source 1..20: mol_type = other DNA
aactttgtcaaatgtaaatt

SEQ ID NO: 11379 - DNA, 20 bp, synthetic construct
  misc_feature 1..20: note = chemically synthesized
  source 1..20: mol_type = other DNA
caaatgtaaattaggtttaa

SEQ ID NO: 11380 - DNA, 20 bp, synthetic construct
  misc_feature 1..20: note = chemically synthesized
  source 1..20: mol_type = other DNA
atgtaaattaggtttaacag

SEQ ID NO: 11381 - DNA, 20 bp, synthetic construct
  misc_feature 1..20: note = chemically synthesized
  source 1..20: mol_type = other DNA
aggtttaacagtagtataat

SEQ ID NO: 11382 - DNA, 20 bp, synthetic construct
  misc_feature 1..20: note = chemically synthesized
  source 1..20: mol_type = other DNA
taataagaatatctatctca

SEQ ID NO: 11383 - DNA, 20 bp, synthetic construct
  misc_feature 1..20: note = chemically synthesized
  source 1..20: mol_type = other DNA
aataagaatatctatctcac

SEQ ID NO: 11384 - DNA, 20 bp, synthetic construct
  misc_feature 1..20: note = chemically synthesized
  source 1..20: mol_type = other DNA
aatatctatctcacaggtgt

SEQ ID NO: 11385 - DNA, 20 bp, synthetic construct
  misc_feature 1..20: note = chemically synthesized
  source 1..20: mol_type = other DNA
atctatctcacaggtgttgg

SEQ ID NO: 11386 - DNA, 20 bp, synthetic construct
  misc_feature 1..20: note = chemically synthesized
  source 1..20: mol_type = other DNA
tctatctcacaggtgttggc

SEQ ID NO: 11387 - DNA, 20 bp, synthetic construct
  misc_feature 1..20: note = chemically synthesized
  source 1..20: mol_type = other DNA
ctcacaggtgttggcaggat

SEQ ID NO: 11388 - DNA, 20 bp, synthetic construct
  misc_feature 1..20: note = chemically synthesized
  source 1..20: mol_type = other DNA
caggtgttggcaggatcagt

SEQ ID NO: 11389 - DNA, 20 bp, synthetic construct
  misc_feature 1..20: note = chemically synthesized
  source 1..20: mol_type = other DNA
ggatcagtgagacaatatgc

SEQ ID NO: 11390 - DNA, 20 bp, synthetic construct
  misc_feature 1..20: note = chemically synthesized
  source 1..20: mol_type = other DNA
tctccctactcctttcatgt

SEQ ID NO: 11391 - DNA, 20 bp, synthetic construct
  misc_feature 1..20: note = chemically synthesized
  source 1..20: mol_type = other DNA
ttaaatttctcaattctctt

SEQ ID NO: 11392 - DNA, 20 bp, synthetic construct
  misc_feature 1..20: note = chemically synthesized
  source 1..20: mol_type = other DNA
gctctttaataacttctgtg

SEQ ID NO: 11393 - DNA, 20 bp, synthetic construct
  misc_feature 1..20: note = chemically synthesized
  source 1..20: mol_type = other DNA
gaaatgactattgtcacaat

SEQ ID NO: 11394 - DNA, 20 bp, synthetic construct
  misc_feature 1..20: note = chemically synthesized
  source 1..20: mol_type = other DNA
aaatgactattgtcacaatc

SEQ ID NO: 11395 - DNA, 20 bp, synthetic construct
  misc_feature 1..20: note = chemically synthesized
  source 1..20: mol_type = other DNA
tcacaatcaggaatgaccta

SEQ ID NO: 11396 - DNA, 20 bp, synthetic construct
  misc_feature 1..20: note = chemically synthesized
  source 1..20: mol_type = other DNA
atgacctaaagaataatttt

SEQ ID NO: 11397 - DNA, 20 bp, synthetic construct
  misc_feature 1..20: note = chemically synthesized
  source 1..20: mol_type = other DNA
ttttgagtttatgtatttac

SEQ ID NO: 11398 - DNA, 20 bp, synthetic construct
  misc_feature 1..20: note = chemically synthesized
  source 1..20: mol_type = other DNA
attgttgatctctccctttt

SEQ ID NO: 11399 - DNA, 20 bp, synthetic construct
  misc_feature 1..20: note = chemically synthesized
  source 1..20: mol_type = other DNA
ttgttgatctctcccttttt

SEQ ID NO: 11400 - DNA, 20 bp, synthetic construct
  misc_feature 1..20: note = chemically synthesized
  source 1..20: mol_type = other DNA
ttataataatcactctattc

SEQ ID NO: 11401 - DNA, 20 bp, synthetic construct
  misc_feature 1..20: note = chemically synthesized
  source 1..20: mol_type = other DNA
tctaactcctgttatccatc

SEQ ID NO: 11402 - DNA, 20 bp, synthetic construct
  misc_feature 1..20: note = chemically synthesized
  source 1..20: mol_type = other DNA
ttaactcctgttcctctcca

SEQ ID NO: 11403 - DNA, 20 bp, synthetic construct
  misc_feature 1..20: note = chemically synthesized
  source 1..20: mol_type = other DNA
ctccatggcccttaaatgtc

SEQ ID NO: 11404 - DNA, 20 bp, synthetic construct
  misc_feature 1..20: note = chemically synthesized
  source 1..20: mol_type = other DNA
tccatggcccttaaatgtcc

SEQ ID NO: 11405 - DNA, 20 bp, synthetic construct
  misc_feature 1..20: note = chemically synthesized
  source 1..20: mol_type = other DNA
ccatggcccttaaatgtcca

SEQ ID NO: 11406 - DNA, 20 bp, synthetic construct
  misc_feature 1..20: note = chemically synthesized
  source 1..20: mol_type = other DNA
ttaaatgtccagggttctcc

SEQ ID NO: 11407 - DNA, 20 bp, synthetic construct
  misc_feature 1..20: note = chemically synthesized
  source 1..20: mol_type = other DNA
taaatgtccagggttctccc

SEQ ID NO: 11408 - DNA, 20 bp, synthetic construct
  misc_feature 1..20: note = chemically synthesized
  source 1..20: mol_type = other DNA
tccagggttctcccaggctc

SEQ ID NO: 11409 - DNA, 20 bp, synthetic construct
  misc_feature 1..20: note = chemically synthesized
  source 1..20: mol_type = other DNA
gttctcccaggctccagcct

SEQ ID NO: 11410 - DNA, 20 bp, synthetic construct
  misc_feature 1..20: note = chemically synthesized
  source 1..20: mol_type = other DNA
ttcaccttatatatacttgc

SEQ ID NO: 11411 - DNA, 20 bp, synthetic construct
  misc_feature 1..20: note = chemically synthesized
  source 1..20: mol_type = other DNA
tcaccttatatatacttgct

SEQ ID NO: 11412 - DNA, 20 bp, synthetic construct
  misc_feature 1..20: note = chemically synthesized
  source 1..20: mol_type = other DNA
caccttatatatacttgcta

SEQ ID NO: 11413 - DNA, 20 bp, synthetic construct
  misc_feature 1..20: note = chemically synthesized
  source 1..20: mol_type = other DNA
ttatatatacttgctagggc

SEQ ID NO: 11414 - DNA, 20 bp, synthetic construct
  misc_feature 1..20: note = chemically synthesized
  source 1..20: mol_type = other DNA
tatatatacttgctagggct

SEQ ID NO: 11415 - DNA, 20 bp, synthetic construct
  misc_feature 1..20: note = chemically synthesized
  source 1..20: mol_type = other DNA
atacttgctagggctgggac

SEQ ID NO: 11416 - DNA, 20 bp, synthetic construct
  misc_feature 1..20: note = chemically synthesized
  source 1..20: mol_type = other DNA
acttgctagggctgggacaa

SEQ ID NO: 11417 - DNA, 20 bp, synthetic construct
  misc_feature 1..20: note = chemically synthesized
  source 1..20: mol_type = other DNA
gggacaagagtgaaccaaac

SEQ ID NO: 11418 - DNA, 20 bp, synthetic construct
  misc_feature 1..20: note = chemically synthesized
  source 1..20: mol_type = other DNA
ggacaagagtgaaccaaaca

SEQ ID NO: 11419 - DNA, 20 bp, synthetic construct
  misc_feature 1..20: note = chemically synthesized
  source 1..20: mol_type = other DNA
agtgaaccaaacaaggcatg

SEQ ID NO: 11420 - DNA, 20 bp, synthetic construct
  misc_feature 1..20: note = chemically synthesized
  source 1..20: mol_type = other DNA
gtgaaccaaacaaggcatgt

SEQ ID NO: 11421 - DNA, 20 bp, synthetic construct
  misc_feature 1..20: note = chemically synthesized
  source 1..20: mol_type = other DNA
tgaaccaaacaaggcatgta

SEQ ID NO: 11422 - DNA, 20 bp, synthetic construct
  misc_feature 1..20: note = chemically synthesized
  source 1..20: mol_type = other DNA
gcatgtagggcacaatattt

SEQ ID NO: 11423 - DNA, 20 bp, synthetic construct
  misc_feature 1..20: note = chemically synthesized
  source 1..20: mol_type = other DNA
atgtagggcacaatatttaa

SEQ ID NO: 11424 - DNA, 20 bp, synthetic construct
  misc_feature 1..20: note = chemically synthesized
  source 1..20: mol_type = other DNA
tgtagggcacaatatttaag

SEQ ID NO: 11425 - DNA, 20 bp, synthetic construct
  misc_feature 1..20: note = chemically synthesized
  source 1..20: mol_type = other DNA
tttaagaggtcctcacttct

SEQ ID NO: 11426 - DNA, 20 bp, synthetic construct
  misc_feature 1..20: note = chemically synthesized
  source 1..20: mol_type = other DNA
ttaagaggtcctcacttctc

SEQ ID NO: 11427 - DNA, 20 bp, synthetic construct
  misc_feature 1..20: note = chemically synthesized
  source 1..20: mol_type = other DNA
taagaggtcctcacttctcg

SEQ ID NO: 11428 - DNA, 20 bp, synthetic construct
  misc_feature 1..20: note = chemically synthesized
  source 1..20: mol_type = other DNA
cctcacttctcggggcatac

SEQ ID NO: 11429 - DNA, 20 bp, synthetic construct
  misc_feature 1..20: note = chemically synthesized
  source 1..20: mol_type = other DNA
acaagtatatttatgcccta

SEQ ID NO: 11430 - DNA, 20 bp, synthetic construct
  misc_feature 1..20: note = chemically synthesized
  source 1..20: mol_type = other DNA
caagtatatttatgccctac

SEQ ID NO: 11431 - DNA, 20 bp, synthetic construct
  misc_feature 1..20: note = chemically synthesized
  source 1..20: mol_type = other DNA
cctacaggccttgcttacca

SEQ ID NO: 11432 - DNA, 20 bp, synthetic construct
  misc_feature 1..20: note = chemically synthesized
  source 1..20: mol_type = other DNA
aggccttgcttaccacagtc

SEQ ID NO: 11433 - DNA, 20 bp, synthetic construct
  misc_feature 1..20: note = chemically synthesized
  source 1..20: mol_type = other DNA
ttgcttaccacagtctagtc

SEQ ID NO: 11434 - DNA, 20 bp, synthetic construct
  misc_feature 1..20: note = chemically synthesized
  source 1..20: mol_type = other DNA
ccctgtcaacaaaatttact

SEQ ID NO: 11435 - DNA, 20 bp, synthetic construct
  misc_feature 1..20: note = chemically synthesized
  source 1..20: mol_type = other DNA
gagcatacaaccactactgc

SEQ ID NO: 11436 - DNA, 20 bp, synthetic construct
  misc_feature 1..20: note = chemically synthesized
  source 1..20: mol_type = other DNA
agcatacaaccactactgcc

SEQ ID NO: 11437 - DNA, 20 bp, synthetic construct
  misc_feature 1..20: note = chemically synthesized
  source 1..20: mol_type = other DNA
actactgccaggcactgtac

SEQ ID NO: 11438 - DNA, 20 bp, synthetic construct
  misc_feature 1..20: note = chemically synthesized
  source 1..20: mol_type = other DNA
ctactgccaggcactgtact

SEQ ID NO: 11439 - DNA, 20 bp, synthetic construct
  misc_feature 1..20: note = chemically synthesized
  source 1..20: mol_type = other DNA
caatatccatgctcactctc

SEQ ID NO: 11440 - DNA, 20 bp, synthetic construct
  misc_feature 1..20: note = chemically synthesized
  source 1..20: mol_type = other DNA
tctccagatgcccacacacg

SEQ ID NO: 11441 - DNA, 20 bp, synthetic construct
  misc_feature 1..20: note = chemically synthesized
  source 1..20: mol_type = other DNA
gtggctgtaactactgttta

SEQ ID NO: 11442 - DNA, 20 bp, synthetic construct
  misc_feature 1..20: note = chemically synthesized
  source 1..20: mol_type = other DNA
actactgtttacagaacaat

SEQ ID NO: 11443 - DNA, 20 bp, synthetic construct
  misc_feature 1..20: note = chemically synthesized
  source 1..20: mol_type = other DNA
gagttccaaatactcaccta

SEQ ID NO: 11444 - DNA, 20 bp, synthetic construct
  misc_feature 1..20: note = chemically synthesized
  source 1..20: mol_type = other DNA
tccaaatactcacctatagt

SEQ ID NO: 11445 - DNA, 20 bp, synthetic construct
  misc_feature 1..20: note = chemically synthesized
  source 1..20: mol_type = other DNA
cagatacgtctcctgaattt

SEQ ID NO: 11446 - DNA, 20 bp, synthetic construct
  misc_feature 1..20: note = chemically synthesized
  source 1..20: mol_type = other DNA
cctaactgtatatcataatg

SEQ ID NO: 11447 - DNA, 20 bp, synthetic construct
  misc_feature 1..20: note = chemically synthesized
  source 1..20: mol_type = other DNA
actgtatatcataatgtagc

SEQ ID NO: 11448 - DNA, 20 bp, synthetic construct
  misc_feature 1..20: note = chemically synthesized
  source 1..20: mol_type = other DNA
tatcataatgtagccagtaa

SEQ ID NO: 11449 - DNA, 20 bp, synthetic construct
  misc_feature 1..20: note = chemically synthesized
  source 1..20: mol_type = other DNA
atgtaatgcttctgctgtgt

SEQ ID NO: 11450 - DNA, 20 bp, synthetic construct
  misc_feature 1..20: note = chemically synthesized
  source 1..20: mol_type = other DNA
gctgtgttggacactgtgct

SEQ ID NO: 11451 - DNA, 20 bp, synthetic construct
  misc_feature 1..20: note = chemically synthesized
  source 1..20: mol_type = other DNA
atctcacttcatcctcacaa

SEQ ID NO: 11452 - DNA, 20 bp, synthetic construct
  misc_feature 1..20: note = chemically synthesized
  source 1..20: mol_type = other DNA
catcctcacaaaagtcccac

SEQ ID NO: 11453 - DNA, 20 bp, synthetic construct
  misc_feature 1..20: note = chemically synthesized
  source 1..20: mol_type = other DNA
ctcacaaaagtcccacgaga

SEQ ID NO: 11454 - DNA, 20 bp, synthetic construct
  misc_feature 1..20: note = chemically synthesized
  source 1..20: mol_type = other DNA
tcacaaaagtcccacgagat

SEQ ID NO: 11455 - DNA, 20 bp, synthetic construct
  misc_feature 1..20: note = chemically synthesized
  source 1..20: mol_type = other DNA
gtcatcttatttttatgaat

SEQ ID NO: 11456 - DNA, 20 bp, synthetic construct
  misc_feature 1..20: note = chemically synthesized
  source 1..20: mol_type = other DNA
tcatcttatttttatgaatg

SEQ ID NO: 11457 - DNA, 20 bp, synthetic construct
  misc_feature 1..20: note = chemically synthesized
  source 1..20: mol_type = other DNA
tcttatttttatgaatgagg

SEQ ID NO: 11458 - DNA, 20 bp, synthetic construct
  misc_feature 1..20: note = chemically synthesized
  source 1..20: mol_type = other DNA
atttttatgaatgaggaaga

SEQ ID NO: 11459 - DNA, 20 bp, synthetic construct
  misc_feature 1..20: note = chemically synthesized
  source 1..20: mol_type = other DNA
gaatgaggaagatagattca

SEQ ID NO: 11460 - DNA, 20 bp, synthetic construct
  misc_feature 1..20: note = chemically synthesized
  source 1..20: mol_type = other DNA
atgaggaagatagattcata

SEQ ID NO: 11461 - DNA, 20 bp, synthetic construct
  misc_feature 1..20: note = chemically synthesized
  source 1..20: mol_type = other DNA
tgaggaagatagattcatag

SEQ ID NO: 11462 - DNA, 20 bp, synthetic construct
  misc_feature 1..20: note = chemically synthesized
  source 1..20: mol_type = other DNA
aagatagattcatagaggct

SEQ ID NO: 11463 - DNA, 20 bp, synthetic construct
  misc_feature 1..20: note = chemically synthesized
  source 1..20: mol_type = other DNA
agatagattcatagaggcta

SEQ ID NO: 11464 - DNA, 20 bp, synthetic construct
  misc_feature 1..20: note = chemically synthesized
  source 1..20: mol_type = other DNA
gatagattcatagaggctaa

SEQ ID NO: 11465 - DNA, 20 bp, synthetic construct
  misc_feature 1..20: note = chemically synthesized
  source 1..20: mol_type = other DNA
agaggctaagggctttgccc

SEQ ID NO: 11466 - DNA, 20 bp, synthetic construct
  misc_feature 1..20: note = chemically synthesized
  source 1..20: mol_type = other DNA
gaggctaagggctttgccca

SEQ ID NO: 11467 - DNA, 20 bp, synthetic construct
  misc_feature 1..20: note = chemically synthesized
  source 1..20: mol_type = other DNA
aggtaacatactaaaacatt

SEQ ID NO: 11468 - DNA, 20 bp, synthetic construct
  misc_feature 1..20: note = chemically synthesized
  source 1..20: mol_type = other DNA
ggtaacatactaaaacattc

SEQ ID NO: 11469 - DNA, 20 bp, synthetic construct
  misc_feature 1..20: note = chemically synthesized
  source 1..20: mol_type = other DNA
atactaaaacattcaggatt

SEQ ID NO: 11470 - DNA, 20 bp, synthetic construct
  misc_feature 1..20: note = chemically synthesized
  source 1..20: mol_type = other DNA
aacattcaggattcagactc

SEQ ID NO: 11471 - DNA, 20 bp, synthetic construct
  misc_feature 1..20: note = chemically synthesized
  source 1..20: mol_type = other DNA
attcaggattcagactctgg

SEQ ID NO: 11472 - DNA, 20 bp, synthetic construct
  misc_feature 1..20: note = chemically synthesized
  source 1..20: mol_type = other DNA
aggattcagactctggcagt

SEQ ID NO: 11473 - DNA, 20 bp, synthetic construct
  misc_feature 1..20: note = chemically synthesized
  source 1..20: mol_type = other DNA
agactctggcagtcagacta

SEQ ID NO: 11474 - DNA, 20 bp, synthetic construct
  misc_feature 1..20: note = chemically synthesized
  source 1..20: mol_type = other DNA
actctggcagtcagactaaa

SEQ ID NO: 11475 - DNA, 20 bp, synthetic construct
  misc_feature 1..20: note = chemically synthesized
  source 1..20: mol_type = other DNA
tggcagtcagactaaagagc

SEQ ID NO: 11476 - DNA, 20 bp, synthetic construct
  misc_feature 1..20: note = chemically synthesized
  source 1..20: mol_type = other DNA
gactaaagagccagttctct

SEQ ID NO: 11477 - DNA, 20 bp, synthetic construct
  misc_feature 1..20: note = chemically synthesized
  source 1..20: mol_type = other DNA
ttctcttagacattattctg

SEQ ID NO: 11478 - DNA, 20 bp, synthetic construct
  misc_feature 1..20: note = chemically synthesized
  source 1..20: mol_type = other DNA
ccataatcacatcaaacaca

SEQ ID NO: 11479 - DNA, 20 bp, synthetic construct
  misc_feature 1..20: note = chemically synthesized
  source 1..20: mol_type = other DNA
acatcaaacacaaagtcccc

SEQ ID NO: 11480 - DNA, 20 bp, synthetic construct
  misc_feature 1..20: note = chemically synthesized
  source 1..20: mol_type = other DNA
acacaaagtccccaagactc

SEQ ID NO: 11481 - DNA, 20 bp, synthetic construct
  misc_feature 1..20: note = chemically synthesized
  source 1..20: mol_type = other DNA
gccatttccccttccatacc

SEQ ID NO: 11482 - DNA, 20 bp, synthetic construct
  misc_feature 1..20: note = chemically synthesized
  source 1..20: mol_type = other DNA
tttccccttccatacccaga

SEQ ID NO: 11483 - DNA, 20 bp, synthetic construct
  misc_feature 1..20: note = chemically synthesized
  source 1..20: mol_type = other DNA
ccttccatacccagatggtt

SEQ ID NO: 11484 - DNA, 20 bp, synthetic construct
  misc_feature 1..20: note = chemically synthesized
  source 1..20: mol_type = other DNA
ttttttgtactgctactgtt

SEQ ID NO: 11485 - DNA, 20 bp, synthetic construct
  misc_feature 1..20: note = chemically synthesized
  source 1..20: mol_type = other DNA
tttttgtactgctactgttc

SEQ ID NO: 11486 - DNA, 20 bp, synthetic construct
  misc_feature 1..20: note = chemically synthesized
  source 1..20: mol_type = other DNA
tactgctactgttcaggttc

SEQ ID NO: 11487 - DNA, 20 bp, synthetic construct
  misc_feature 1..20: note = chemically synthesized
  source 1..20: mol_type = other DNA
tctagcctttatgtctcccg

SEQ ID NO: 11488 - DNA, 20 bp, synthetic construct
  misc_feature 1..20: note = chemically synthesized
  source 1..20: mol_type = other DNA
tctcccgcagataattgcaa

SEQ ID NO: 11489 - DNA, 20 bp, synthetic construct
  misc_feature 1..20: note = chemically synthesized
  source 1..20: mol_type = other DNA
gcagataattgcaatagtct

SEQ ID NO: 11490 - DNA, 20 bp, synthetic construct
  misc_feature 1..20: note = chemically synthesized
  source 1..20: mol_type = other DNA
cagataattgcaatagtctc

SEQ ID NO: 11491 - DNA, 20 bp, synthetic construct
  misc_feature 1..20: note = chemically synthesized
  source 1..20: mol_type = other DNA
gtctcaggactgctctctcc

SEQ ID NO: 11492 - DNA, 20 bp, synthetic construct
  misc_feature 1..20: note = chemically synthesized
  source 1..20: mol_type = other DNA
ggactgctctctcctagtct

SEQ ID NO: 11493 - DNA, 20 bp, synthetic construct
  misc_feature 1..20: note = chemically synthesized
  source 1..20: mol_type = other DNA
gctctctcctagtcttggta

SEQ ID NO: 11494 - DNA, 20 bp, synthetic construct
  misc_feature 1..20: note = chemically synthesized
  source 1..20: mol_type = other DNA
ctcccccactatcatttcat

SEQ ID NO: 11495 - DNA, 20 bp, synthetic construct
  misc_feature 1..20: note = chemically synthesized
  source 1..20: mol_type = other DNA
tcatttcattagcgtgttgc

SEQ ID NO: 11496 - DNA, 20 bp, synthetic construct
  misc_feature 1..20: note = chemically synthesized
  source 1..20: mol_type = other DNA
tcattagcgtgttgccagac

SEQ ID NO: 11497 - DNA, 20 bp, synthetic construct
  misc_feature 1..20: note = chemically synthesized
  source 1..20: mol_type = other DNA
cattagcgtgttgccagact

SEQ ID NO: 11498 - DNA, 20 bp, synthetic construct
  misc_feature 1..20: note = chemically synthesized
  source 1..20: mol_type = other DNA
ccagactgggcatcctaaat

SEQ ID NO: 11499 - DNA, 20 bp, synthetic construct
  misc_feature 1..20: note = chemically synthesized
  source 1..20: mol_type = other DNA
gggcatcctaaatcagccat

SEQ ID NO: 11500 - DNA, 20 bp, synthetic construct
  misc_feature 1..20: note = chemically synthesized
  source 1..20: mol_type = other DNA
catcctaaatcagccatcag

SEQ ID NO: 11501 - DNA, 20 bp, synthetic construct
  misc_feature 1..20: note = chemically synthesized
  source 1..20: mol_type = other DNA
attttattgtccaatctcct

SEQ ID NO: 11502 - DNA, 20 bp, synthetic construct
  misc_feature 1..20: note = chemically synthesized
  source 1..20: mol_type = other DNA
ttttattgtccaatctcctt

SEQ ID NO: 11503 - DNA, 20 bp, synthetic construct
  misc_feature 1..20: note = chemically synthesized
  source 1..20: mol_type = other DNA
tgacttcattatctgatgac

SEQ ID NO: 11504 - DNA, 20 bp, synthetic construct
  misc_feature 1..20: note = chemically synthesized
  source 1..20: mol_type = other DNA
atctgatgaccagctctgcc

SEQ ID NO: 11505 - DNA, 20 bp, synthetic construct
  misc_feature 1..20: note = chemically synthesized
  source 1..20: mol_type = other DNA
tttacctgtctcacttgtca

SEQ ID NO: 11506 - DNA, 20 bp, synthetic construct
  misc_feature 1..20: note = chemically synthesized
  source 1..20: mol_type = other DNA
ctcacttgtcatagtccata

SEQ ID NO: 11507 - DNA, 20 bp, synthetic construct
  misc_feature 1..20: note = chemically synthesized
  source 1..20: mol_type = other DNA
cctcacgttcttgcaaatct

SEQ ID NO: 11508 - DNA, 20 bp, synthetic construct
  misc_feature 1..20: note = chemically synthesized
  source 1..20: mol_type = other DNA
gcaaatctgagtctttgcac

SEQ ID NO: 11509 - DNA, 20 bp, synthetic construct
  misc_feature 1..20: note = chemically synthesized
  source 1..20: mol_type = other DNA
tgcataaaatgcccttatat

SEQ ID NO: 11510 - DNA, 20 bp, synthetic construct
  misc_feature 1..20: note = chemically synthesized
  source 1..20: mol_type = other DNA
gcccttatatcagacattta

SEQ ID NO: 11511 - DNA, 20 bp, synthetic construct
  misc_feature 1..20: note = chemically synthesized
  source 1..20: mol_type = other DNA
ccttatatcagacatttaaa

SEQ ID NO: 11512 - DNA, 20 bp, synthetic construct
  misc_feature 1..20: note = chemically synthesized
  source 1..20: mol_type = other DNA
ttatatcagacatttaaaga

SEQ ID NO: 11513 - DNA, 20 bp, synthetic construct
  misc_feature 1..20: note = chemically synthesized
  source 1..20: mol_type = other DNA
atatcagacatttaaagaga

SEQ ID NO: 11514 - DNA, 20 bp, synthetic construct
  misc_feature 1..20: note = chemically synthesized
  source 1..20: mol_type = other DNA
agaacgcctactcatctttt

SEQ ID NO: 11515 - DNA, 20 bp, synthetic construct
  misc_feature 1..20: note = chemically synthesized
  source 1..20: mol_type = other DNA
cctactcatcttttaagacc

SEQ ID NO: 11516 - DNA, 20 bp, synthetic construct
  misc_feature 1..20: note = chemically synthesized
  source 1..20: mol_type = other DNA
ttcctttctctatgatccct

SEQ ID NO: 11517 - DNA, 20 bp, synthetic construct
  misc_feature 1..20: note = chemically synthesized
  source 1..20: mol_type = other DNA
ctctatgatcccttagtacc

SEQ ID NO: 11518 - DNA, 20 bp, synthetic construct
  misc_feature 1..20: note = chemically synthesized
  source 1..20: mol_type = other DNA
ttatattgaaacctctcacc

SEQ ID NO: 11519 - DNA, 20 bp, synthetic construct
  misc_feature 1..20: note = chemically synthesized
  source 1..20: mol_type = other DNA
cacctggcctcatgctgctt

SEQ ID NO: 11520 - DNA, 20 bp, synthetic construct
  misc_feature 1..20: note = chemically synthesized
  source 1..20: mol_type = other DNA
cctcatgctgctttagatca

SEQ ID NO: 11521 - DNA, 20 bp, synthetic construct
  misc_feature 1..20: note = chemically synthesized
  source 1..20: mol_type = other DNA
tcatgctgctttagatcaaa

SEQ ID NO: 11522 - DNA, 20 bp, synthetic construct
  misc_feature 1..20: note = chemically synthesized
  source 1..20: mol_type = other DNA
catgctgctttagatcaaag

SEQ ID NO: 11523 - DNA, 20 bp, synthetic construct
  misc_feature 1..20: note = chemically synthesized
  source 1..20: mol_type = other DNA
atgctgctttagatcaaaga

SEQ ID NO: 11524 - DNA, 20 bp, synthetic construct
  misc_feature 1..20: note = chemically synthesized
  source 1..20: mol_type = other DNA
gctgctttagatcaaagagg

SEQ ID NO: 11525 - DNA, 20 bp, synthetic construct
  misc_feature 1..20: note = chemically synthesized
  source 1..20: mol_type = other DNA
tttagatcaaagagggagtc

SEQ ID NO: 11526 - DNA, 20 bp, synthetic construct
  misc_feature 1..20: note = chemically synthesized
  source 1..20: mol_type = other DNA
ctggtttatccccatacccc

SEQ ID NO: 11527 - DNA, 20 bp, synthetic construct
  misc_feature 1..20: note = chemically synthesized
  source 1..20: mol_type = other DNA
atacccctagtaccctgaca

SEQ ID NO: 11528 - DNA, 20 bp, synthetic construct
  misc_feature 1..20: note = chemically synthesized
  source 1..20: mol_type = other DNA
tagtaccctgacacagtacc

SEQ ID NO: 11529 - DNA, 20 bp, synthetic construct
  misc_feature 1..20: note = chemically synthesized
  source 1..20: mol_type = other DNA
tgacacagtacctggcacca

SEQ ID NO: 11530 - DNA, 20 bp, synthetic construct
  misc_feature 1..20: note = chemically synthesized
  source 1..20: mol_type = other DNA
ctggcaccatagttgtaact

SEQ ID NO: 11531 - DNA, 20 bp, synthetic construct
  misc_feature 1..20: note = chemically synthesized
  source 1..20: mol_type = other DNA
aactcagtaatgtctgaatg

SEQ ID NO: 11532 - DNA, 20 bp, synthetic construct
  misc_feature 1..20: note = chemically synthesized
  source 1..20: mol_type = other DNA
actcagtaatgtctgaatga

SEQ ID NO: 11533 - DNA, 20 bp, synthetic construct
  misc_feature 1..20: note = chemically synthesized
  source 1..20: mol_type = other DNA
tacactttacaaaactaaac

SEQ ID NO: 11534 - DNA, 20 bp, synthetic construct
  misc_feature 1..20: note = chemically synthesized
  source 1..20: mol_type = other DNA
acaaaactaaactggtttta

SEQ ID NO: 11535 - DNA, 20 bp, synthetic construct
  misc_feature 1..20: note = chemically synthesized
  source 1..20: mol_type = other DNA
aactgttgcaataataccta

SEQ ID NO: 11536 - DNA, 20 bp, synthetic construct
  misc_feature 1..20: note = chemically synthesized
  source 1..20: mol_type = other DNA
actgttgcaataatacctaa

SEQ ID NO: 11537 - DNA, 20 bp, synthetic construct
  misc_feature 1..20: note = chemically synthesized
  source 1..20: mol_type = other DNA
gttgcaataatacctaaagg

SEQ ID NO: 11538 - DNA, 20 bp, synthetic construct
  misc_feature 1..20: note = chemically synthesized
  source 1..20: mol_type = other DNA
gcaataatacctaaaggcag

SEQ ID NO: 11539 - DNA, 20 bp, synthetic construct
  misc_feature 1..20: note = chemically synthesized
  source 1..20: mol_type = other DNA
gccatgaaaatgcaacatct

SEQ ID NO: 11540 - DNA, 20 bp, synthetic construct
  misc_feature 1..20: note = chemically synthesized
  source 1..20: mol_type = other DNA
tcactcaccgaaactccttt

SEQ ID NO: 11541 - DNA, 20 bp, synthetic construct
  misc_feature 1..20: note = chemically synthesized
  source 1..20: mol_type = other DNA
ctcaccgaaactccttttag

SEQ ID NO: 11542 - DNA, 20 bp, synthetic construct
  misc_feature 1..20: note = chemically synthesized
  source 1..20: mol_type = other DNA
aactccttttagaagccaat

SEQ ID NO: 11543 - DNA, 20 bp, synthetic construct
  misc_feature 1..20: note = chemically synthesized
  source 1..20: mol_type = other DNA
ctccttttagaagccaatga

SEQ ID NO: 11544 - DNA, 20 bp, synthetic construct
  misc_feature 1..20: note = chemically synthesized
  source 1..20: mol_type = other DNA
agaagccaatgagagtttaa

SEQ ID NO: 11545 - DNA, 20 bp, synthetic construct
  misc_feature 1..20: note = chemically synthesized
  source 1..20: mol_type = other DNA
agccaatgagagtttaatag

SEQ ID NO: 11546 - DNA, 20 bp, synthetic construct
  misc_feature 1..20: note = chemically synthesized
  source 1..20: mol_type = other DNA
caatgagagtttaatagcag

SEQ ID NO: 11547 - DNA, 20 bp, synthetic construct
  misc_feature 1..20: note = chemically synthesized
  source 1..20: mol_type = other DNA
atgagagtttaatagcagaa

SEQ ID NO: 11548 - DNA, 20 bp, synthetic construct
  misc_feature 1..20: note = chemically synthesized
  source 1..20: mol_type = other DNA
gagagtttaatagcagaaga

SEQ ID NO: 11549 - DNA, 20 bp, synthetic construct
  misc_feature 1..20: note = chemically synthesized
  source 1..20: mol_type = other DNA
gcattaatactgtctatcct

SEQ ID NO: 11550 - DNA, 20 bp, synthetic construct
  misc_feature 1..20: note = chemically synthesized
  source 1..20: mol_type = other DNA
tatccttagaaaaattcccc

SEQ ID NO: 11551 - DNA, 20 bp, synthetic construct
  misc_feature 1..20: note = chemically synthesized
  source 1..20: mol_type = other DNA
attcccctggccccttcctc

SEQ ID NO: 11552 - DNA, 20 bp, synthetic construct
  misc_feature 1..20: note = chemically synthesized
  source 1..20: mol_type = other DNA
ttcccctggccccttcctca

SEQ ID NO: 11553 - DNA, 20 bp, synthetic construct
  misc_feature 1..20: note = chemically synthesized
  source 1..20: mol_type = other DNA
tcccctggccccttcctcaa

SEQ ID NO: 11554 - DNA, 20 bp, synthetic construct
  misc_feature 1..20: note = chemically synthesized
  source 1..20: mol_type = other DNA
cctcaagggcttattatctc

SEQ ID NO: 11555 - DNA, 20 bp, synthetic construct
  misc_feature 1..20: note = chemically synthesized
  source 1..20: mol_type = other DNA
cttattatctctggctacaa

SEQ ID NO: 11556 - DNA, 20 bp, synthetic construct
  misc_feature 1..20: note = chemically synthesized
  source 1..20: mol_type = other DNA
atctctggctacaatggctg

SEQ ID NO: 11557 - DNA, 20 bp, synthetic construct
  misc_feature 1..20: note = chemically synthesized
  source 1..20: mol_type = other DNA
aatcacattgcctttctcct

SEQ ID NO: 11558 - DNA, 20 bp, synthetic construct
  misc_feature 1..20: note = chemically synthesized
  source 1..20: mol_type = other DNA
cctttctccttagtattatc

SEQ ID NO: 11559 - DNA, 20 bp, synthetic construct
  misc_feature 1..20: note = chemically synthesized
  source 1..20: mol_type = other DNA
ctttctccttagtattatct

SEQ ID NO: 11560 - DNA, 20 bp, synthetic construct
  misc_feature 1..20: note = chemically synthesized
  source 1..20: mol_type = other DNA
tttctccttagtattatctg

SEQ ID NO: 11561 - DNA, 20 bp, synthetic construct
  misc_feature 1..20: note = chemically synthesized
  source 1..20: mol_type = other DNA
tcgtatacttaacttccctt

SEQ ID NO: 11562 - DNA, 20 bp, synthetic construct
  misc_feature 1..20: note = chemically synthesized
  source 1..20: mol_type = other DNA
cgtatacttaacttcccttc

SEQ ID NO: 11563 - DNA, 20 bp, synthetic construct
  misc_feature 1..20: note = chemically synthesized
  source 1..20: mol_type = other DNA
cttcccttcaggtttatcgc

SEQ ID NO: 11564 - DNA, 20 bp, synthetic construct
  misc_feature 1..20: note = chemically synthesized
  source 1..20: mol_type = other DNA
tatcgctagtcattatttcc

SEQ ID NO: 11565 - DNA, 20 bp, synthetic construct
  misc_feature 1..20: note = chemically synthesized
  source 1..20: mol_type = other DNA
atcgctagtcattatttccc

SEQ ID NO: 11566 - DNA, 20 bp, synthetic construct
  misc_feature 1..20: note = chemically synthesized
  source 1..20: mol_type = other DNA
cattatttcccaggctccaa

SEQ ID NO: 11567 - DNA, 20 bp, synthetic construct
  misc_feature 1..20: note = chemically synthesized
  source 1..20: mol_type = other DNA
tttcccaggctccaaaagcc

SEQ ID NO: 11568 - DNA, 20 bp, synthetic construct
  misc_feature 1..20: note = chemically synthesized
  source 1..20: mol_type = other DNA
attcttatctatcctttccc

SEQ ID NO: 11569 - DNA, 20 bp, synthetic construct
  misc_feature 1..20: note = chemically synthesized
  source 1..20: mol_type = other DNA
tatcctttccccagcatctg

SEQ ID NO: 11570 - DNA, 20 bp, synthetic construct
  misc_feature 1..20: note = chemically synthesized
  source 1..20: mol_type = other DNA
ccccagcatctgaagtcttc

SEQ ID NO: 11571 - DNA, 20 bp, synthetic construct
  misc_feature 1..20: note = chemically synthesized
  source 1..20: mol_type = other DNA
cccagcatctgaagtcttca

SEQ ID NO: 11572 - DNA, 20 bp, synthetic construct
  misc_feature 1..20: note = chemically synthesized
  source 1..20: mol_type = other DNA
ccagcatctgaagtcttcaa

SEQ ID NO: 11573 - DNA, 20 bp, synthetic construct
  misc_feature 1..20: note = chemically synthesized
  source 1..20: mol_type = other DNA
cagcatctgaagtcttcaag

SEQ ID NO: 11574 - DNA, 20 bp, synthetic construct
  misc_feature 1..20: note = chemically synthesized
  source 1..20: mol_type = other DNA
agcatctgaagtcttcaagg

SEQ ID NO: 11575 - DNA, 20 bp, synthetic construct
  misc_feature 1..20: note = chemically synthesized
  source 1..20: mol_type = other DNA
atctgaagtcttcaaggggg

SEQ ID NO: 11576 - DNA, 20 bp, synthetic construct
  misc_feature 1..20: note = chemically synthesized
  source 1..20: mol_type = other DNA
tgaagtcttcaagggggcag

SEQ ID NO: 11577 - DNA, 20 bp, synthetic construct
  misc_feature 1..20: note = chemically synthesized
  source 1..20: mol_type = other DNA
tcatcatctcaccacttata

SEQ ID NO: 11578 - DNA, 20 bp, synthetic construct
  misc_feature 1..20: note = chemically synthesized
  source 1..20: mol_type = other DNA
tcatctcaccacttatatag

SEQ ID NO: 11579 - DNA, 20 bp, synthetic construct
  misc_feature 1..20: note = chemically synthesized
  source 1..20: mol_type = other DNA
ctcaccacttatatagaaga

SEQ ID NO: 11580 - DNA, 20 bp, synthetic construct
  misc_feature 1..20: note = chemically synthesized
  source 1..20: mol_type = other DNA
tcaccacttatatagaagaa

SEQ ID NO: 11581 - DNA, 20 bp, synthetic construct
  misc_feature 1..20: note = chemically synthesized
  source 1..20: mol_type = other DNA
caccacttatatagaagaaa

SEQ ID NO: 11582 - DNA, 20 bp, synthetic construct
  misc_feature 1..20: note = chemically synthesized
  source 1..20: mol_type = other DNA
cttatatagaagaaagggtt

SEQ ID NO: 11583 - DNA, 20 bp, synthetic construct
  misc_feature 1..20: note = chemically synthesized
  source 1..20: mol_type = other DNA
gtttggatgctttgtcctcc

SEQ ID NO: 11584 - DNA, 20 bp, synthetic construct
  misc_feature 1..20: note = chemically synthesized
  source 1..20: mol_type = other DNA
ctcccagatgtcacactaat

SEQ ID NO: 11585 - DNA, 20 bp, synthetic construct
  misc_feature 1..20: note = chemically synthesized
  source 1..20: mol_type = other DNA
cactaatgagatatatctaa

SEQ ID NO: 11586 - DNA, 20 bp, synthetic construct
  misc_feature 1..20: note = chemically synthesized
  source 1..20: mol_type = other DNA
tgctttatgtcctgctttgt

SEQ ID NO: 11587 - DNA, 20 bp, synthetic construct
  misc_feature 1..20: note = chemically synthesized
  source 1..20: mol_type = other DNA
cttgactttactcactttgc

SEQ ID NO: 11588 - DNA, 20 bp, synthetic construct
  misc_feature 1..20: note = chemically synthesized
  source 1..20: mol_type = other DNA
atttttttttatcgttattt

SEQ ID NO: 11589 - DNA, 20 bp, synthetic construct
  misc_feature 1..20: note = chemically synthesized
  source 1..20: mol_type = other DNA
ttatcgttatttcagcattt

SEQ ID NO: 11590 - DNA, 20 bp, synthetic construct
  misc_feature 1..20: note = chemically synthesized
  source 1..20: mol_type = other DNA
agcatttcagtctgatttca

SEQ ID NO: 11591 - DNA, 20 bp, synthetic construct
  misc_feature 1..20: note = chemically synthesized
  source 1..20: mol_type = other DNA
ttcacagctgacatcatgtc

SEQ ID NO: 11592 - DNA, 20 bp, synthetic construct
  misc_feature 1..20: note = chemically synthesized
  source 1..20: mol_type = other DNA
cacagctgacatcatgtctg

SEQ ID NO: 11593 - DNA, 20 bp, synthetic construct
  misc_feature 1..20: note = chemically synthesized
  source 1..20: mol_type = other DNA
agctgacatcatgtctggag

SEQ ID NO: 11594 - DNA, 20 bp, synthetic construct
  misc_feature 1..20: note = chemically synthesized
  source 1..20: mol_type = other DNA
gctgacatcatgtctggagt

SEQ ID NO: 11595 - DNA, 20 bp, synthetic construct
  misc_feature 1..20: note = chemically synthesized
  source 1..20: mol_type = other DNA
catgtctggagtgggaacca

SEQ ID NO: 11596 - DNA, 20 bp, synthetic construct
  misc_feature 1..20: note = chemically synthesized
  source 1..20: mol_type = other DNA
atgtctggagtgggaaccac

SEQ ID NO: 11597 - DNA, 20 bp, synthetic construct
  misc_feature 1..20: note = chemically synthesized
  source 1..20: mol_type = other DNA
tgtctggagtgggaaccaca

SEQ ID NO: 11598 - DNA, 20 bp, synthetic construct
  misc_feature 1..20: note = chemically synthesized
  source 1..20: mol_type = other DNA
tggagtgggaaccacagggc

SEQ ID NO: 11599 - DNA, 20 bp, synthetic construct
  misc_feature 1..20: note = chemically synthesized
  source 1..20: mol_type = other DNA
gtgggaaccacagggccagt

SEQ ID NO: 11600 - DNA, 20 bp, synthetic construct
  misc_feature 1..20: note = chemically synthesized
  source 1..20: mol_type = other DNA
cacagggccagtcagctttc

SEQ ID NO: 11601 - DNA, 20 bp, synthetic construct
  misc_feature 1..20: note = chemically synthesized
  source 1..20: mol_type = other DNA
acagggccagtcagctttct

SEQ ID NO: 11602 - DNA, 20 bp, synthetic construct
  misc_feature 1..20: note = chemically synthesized
  source 1..20: mol_type = other DNA
cagggccagtcagctttctg

SEQ ID NO: 11603 - DNA, 20 bp, synthetic construct
  misc_feature 1..20: note = chemically synthesized
  source 1..20: mol_type = other DNA
agggccagtcagctttctgg

SEQ ID NO: 11604 - DNA, 20 bp, synthetic construct
  misc_feature 1..20: note = chemically synthesized
  source 1..20: mol_type = other DNA
gtcagctttctgggggtgct

SEQ ID NO: 11605 - DNA, 20 bp, synthetic construct
  misc_feature 1..20: note = chemically synthesized
  source 1..20: mol_type = other DNA
tcagctttctgggggtgctt

SEQ ID NO: 11606 - DNA, 20 bp, synthetic construct
  misc_feature 1..20: note = chemically synthesized
  source 1..20: mol_type = other DNA
cagctttctgggggtgctta

SEQ ID NO: 11607 - DNA, 20 bp, synthetic construct
  misc_feature 1..20: note = chemically synthesized
  source 1..20: mol_type = other DNA
tttctgggggtgcttagggt

SEQ ID NO: 11608 - DNA, 20 bp, synthetic construct
  misc_feature 1..20: note = chemically synthesized
  source 1..20: mol_type = other DNA
agggttggcacccctgatcc

SEQ ID NO: 11609 - DNA, 20 bp, synthetic construct
  misc_feature 1..20: note = chemically synthesized
  source 1..20: mol_type = other DNA
acccctgatcctggtactgt

SEQ ID NO: 11610 - DNA, 20 bp, synthetic construct
  misc_feature 1..20: note = chemically synthesized
  source 1..20: mol_type = other DNA
atcctggtactgtcagctac

SEQ ID NO: 11611 - DNA, 20 bp, synthetic construct
  misc_feature 1..20: note = chemically synthesized
  source 1..20: mol_type = other DNA
tcagctactagatttgattc

SEQ ID NO: 11612 - DNA, 20 bp, synthetic construct
  misc_feature 1..20: note = chemically synthesized
  source 1..20: mol_type = other DNA
ctactagatttgattctaga

SEQ ID NO: 11613 - DNA, 20 bp, synthetic construct
  misc_feature 1..20: note = chemically synthesized
  source 1..20: mol_type = other DNA
tttgattctagaaagttgac

SEQ ID NO: 11614 - DNA, 20 bp, synthetic construct
  misc_feature 1..20: note = chemically synthesized
  source 1..20: mol_type = other DNA
attctagaaagttgacaagt

SEQ ID NO: 11615 - DNA, 20 bp, synthetic construct
  misc_feature 1..20: note = chemically synthesized
  source 1..20: mol_type = other DNA
gtgtgataaatgcttcctgt

SEQ ID NO: 11616 - DNA, 20 bp, synthetic construct
  misc_feature 1..20: note = chemically synthesized
  source 1..20: mol_type = other DNA
gaacatgctgtttgtccaaa

SEQ ID NO: 11617 - DNA, 20 bp, synthetic construct
  misc_feature 1..20: note = chemically synthesized
  source 1..20: mol_type = other DNA
aacatgctgtttgtccaaat

SEQ ID NO: 11618 - DNA, 20 bp, synthetic construct
  misc_feature 1..20: note = chemically synthesized
  source 1..20: mol_type = other DNA
cttccctgtatgccttcctc

SEQ ID NO: 11619 - DNA, 20 bp, synthetic construct
  misc_feature 1..20: note = chemically synthesized
  source 1..20: mol_type = other DNA
ttccctgtatgccttcctct

SEQ ID NO: 11620 - DNA, 20 bp, synthetic construct
  misc_feature 1..20: note = chemically synthesized
  source 1..20: mol_type = other DNA
cttcctctgggaaatacata

SEQ ID NO: 11621 - DNA, 20 bp, synthetic construct
  misc_feature 1..20: note = chemically synthesized
  source 1..20: mol_type = other DNA
ggaaatacataaagtcactg

SEQ ID NO: 11622 - DNA, 20 bp, synthetic construct
  misc_feature 1..20: note = chemically synthesized
  source 1..20: mol_type = other DNA
actgtagttgtgaaaaaaca

SEQ ID NO: 11623 - DNA, 20 bp, synthetic construct
  misc_feature 1..20: note = chemically synthesized
  source 1..20: mol_type = other DNA
caaagtgatatatgttgcat

SEQ ID NO: 11624 - DNA, 20 bp, synthetic construct
  misc_feature 1..20: note = chemically synthesized
  source 1..20: mol_type = other DNA
tactctttatgtcaattctt

SEQ ID NO: 11625 - DNA, 20 bp, synthetic construct
  misc_feature 1..20: note = chemically synthesized
  source 1..20: mol_type = other DNA
ttaagcttgcttttctcccc

SEQ ID NO: 11626 - DNA, 20 bp, synthetic construct
  misc_feature 1..20: note = chemically synthesized
  source 1..20: mol_type = other DNA
taagcttgcttttctcccct

SEQ ID NO: 11627 - DNA, 20 bp, synthetic construct
  misc_feature 1..20: note = chemically synthesized
  source 1..20: mol_type = other DNA
aagcttgcttttctccccta

SEQ ID NO: 11628 - DNA, 20 bp, synthetic construct
  misc_feature 1..20: note = chemically synthesized
  source 1..20: mol_type = other DNA
ctcccctagggaactcaact

SEQ ID NO: 11629 - DNA, 20 bp, synthetic construct
  misc_feature 1..20: note = chemically synthesized
  source 1..20: mol_type = other DNA
tttccccaaatatcaactcc

SEQ ID NO: 11630 - DNA, 20 bp, synthetic construct
  misc_feature 1..20: note = chemically synthesized
  source 1..20: mol_type = other DNA
caactccaagatgtttgaca

SEQ ID NO: 11631 - DNA, 20 bp, synthetic construct
  misc_feature 1..20: note = chemically synthesized
  source 1..20: mol_type = other DNA
actccaagatgtttgacata

SEQ ID NO: 11632 - DNA, 20 bp, synthetic construct
  misc_feature 1..20: note = chemically synthesized
  source 1..20: mol_type = other DNA
attttttcctaatccatgaa

SEQ ID NO: 11633 - DNA, 20 bp, synthetic construct
  misc_feature 1..20: note = chemically synthesized
  source 1..20: mol_type = other DNA
tcctaatccatgaaaagctt

SEQ ID NO: 11634 - DNA, 20 bp, synthetic construct
  misc_feature 1..20: note = chemically synthesized
  source 1..20: mol_type = other DNA
aaagctttggtgataactaa

SEQ ID NO: 11635 - DNA, 20 bp, synthetic construct
  misc_feature 1..20: note = chemically synthesized
  source 1..20: mol_type = other DNA
aactaacagcttgctaatga

SEQ ID NO: 11636 - DNA, 20 bp, synthetic construct
  misc_feature 1..20: note = chemically synthesized
  source 1..20: mol_type = other DNA
actaacagcttgctaatgaa

SEQ ID NO: 11637 - DNA, 20 bp, synthetic construct
  misc_feature 1..20: note = chemically synthesized
  source 1..20: mol_type = other DNA
ttaactaaaactttaaattg

SEQ ID NO: 11638 - DNA, 20 bp, synthetic construct
  misc_feature 1..20: note = chemically synthesized
  source 1..20: mol_type = other DNA
agatatataatttaaaaaat

SEQ ID NO: 11639 - DNA, 20 bp, synthetic construct
  misc_feature 1..20: note = chemically synthesized
  source 1..20: mol_type = other DNA
atatataatttaaaaaatta

SEQ ID NO: 11640 - DNA, 20 bp, synthetic construct
  misc_feature 1..20: note = chemically synthesized
  source 1..20: mol_type = other DNA
aatgtcatatatcttaaaat

SEQ ID NO: 11641 - DNA, 20 bp, synthetic construct
  misc_feature 1..20: note = chemically synthesized
  source 1..20: mol_type = other DNA
atcagactttttgtgtaaat

SEQ ID NO: 11642 - DNA, 20 bp, synthetic construct
  misc_feature 1..20: note = chemically synthesized
  source 1..20: mol_type = other DNA
tcagactttttgtgtaaata

SEQ ID NO: 11643 - DNA, 20 bp, synthetic construct
  misc_feature 1..20: note = chemically synthesized
  source 1..20: mol_type = other DNA
tgtttcccattttgatttca

SEQ ID NO: 11644 - DNA, 20 bp, synthetic construct
  misc_feature 1..20: note = chemically synthesized
  source 1..20: mol_type = other DNA
ttcccattttgatttcaaag

SEQ ID NO: 11645 - DNA, 20 bp, synthetic construct
  misc_feature 1..20: note = chemically synthesized
  source 1..20: mol_type = other DNA
cattttgatttcaaagtggt

SEQ ID NO: 11646 - DNA, 20 bp, synthetic construct
  misc_feature 1..20: note = chemically synthesized
  source 1..20: mol_type = other DNA
aagtccaaacaaaaataatg

SEQ ID NO: 11647 - DNA, 20 bp, synthetic construct
  misc_feature 1..20: note = chemically synthesized
  source 1..20: mol_type = other DNA
acttttaatttttttaaacc

SEQ ID NO: 11648 - DNA, 20 bp, synthetic construct
  misc_feature 1..20: note = chemically synthesized
  source 1..20: mol_type = other DNA
cttttaatttttttaaacca

SEQ ID NO: 11649 - DNA, 20 bp, synthetic construct
  misc_feature 1..20: note = chemically synthesized
  source 1..20: mol_type = other DNA
tttaatttttttaaaccaag

SEQ ID NO: 11650 - DNA, 20 bp, synthetic construct
  misc_feature 1..20: note = chemically synthesized
  source 1..20: mol_type = other DNA
aggagatgaatgttttctaa

SEQ ID NO: 11651 - DNA, 20 bp, synthetic construct
  misc_feature 1..20: note = chemically synthesized
  source 1..20: mol_type = other DNA
ggagatgaatgttttctaac

SEQ ID NO: 11652 - DNA, 20 bp, synthetic construct
  misc_feature 1..20: note = chemically synthesized
  source 1..20: mol_type = other DNA
tgaccaaatcatgaactgaa

SEQ ID NO: 11653 - DNA, 20 bp, synthetic construct
  misc_feature 1..20: note = chemically synthesized
  source 1..20: mol_type = other DNA
attaaacataaatgcatcat

SEQ ID NO: 11654 - DNA, 20 bp, synthetic construct
  misc_feature 1..20: note = chemically synthesized
  source 1..20: mol_type = other DNA
ataagcattgtcgatctatt

SEQ ID NO: 11655 - DNA, 20 bp, synthetic construct
  misc_feature 1..20: note = chemically synthesized
  source 1..20: mol_type = other DNA
tctatttagttttaaaaatg

SEQ ID NO: 11656 - DNA, 20 bp, synthetic construct
  misc_feature 1..20: note = chemically synthesized
  source 1..20: mol_type = other DNA
atttagttttaaaaatgaag

SEQ ID NO: 11657 - DNA, 20 bp, synthetic construct
  misc_feature 1..20: note = chemically synthesized
  source 1..20: mol_type = other DNA
tagttttaaaaatgaagaag

SEQ ID NO: 11658 - DNA, 20 bp, synthetic construct
  misc_feature 1..20: note = chemically synthesized
  source 1..20: mol_type = other DNA
aaatgaagaagaagaaaacc

SEQ ID NO: 11659 - DNA, 20 bp, synthetic construct
  misc_feature 1..20: note = chemically synthesized
  source 1..20: mol_type = other DNA
agaagaaaacctagctaaca

SEQ ID NO: 11660 - DNA, 20 bp, synthetic construct
  misc_feature 1..20: note = chemically synthesized
  source 1..20: mol_type = other DNA
aaacctagctaacaaagaac

SEQ ID NO: 11661 - DNA, 20 bp, synthetic construct
  misc_feature 1..20: note = chemically synthesized
  source 1..20: mol_type = other DNA
gtacttaccaacctgcgtgc

SEQ ID NO: 11662 - DNA, 20 bp, synthetic construct
  misc_feature 1..20: note = chemically synthesized
  source 1..20: mol_type = other DNA
ccaacctgcgtgctggctgt

SEQ ID NO: 11663 - DNA, 20 bp, synthetic construct
  misc_feature 1..20: note = chemically synthesized
  source 1..20: mol_type = other DNA
caaatcatgtaatcaaaatt

SEQ ID NO: 11664 - DNA, 20 bp, synthetic construct
  misc_feature 1..20: note = chemically synthesized
  source 1..20: mol_type = other DNA
catgtaatcaaaatttagtg

SEQ ID NO: 11665 - DNA, 20 bp, synthetic construct
  misc_feature 1..20: note = chemically synthesized
  source 1..20: mol_type = other DNA
gtaatcaaaatttagtgaag

SEQ ID NO: 11666 - DNA, 20 bp, synthetic construct
  misc_feature 1..20: note = chemically synthesized
  source 1..20: mol_type = other DNA
tcaaaatttagtgaagaaga

SEQ ID NO: 11667 - DNA, 20 bp, synthetic construct
  misc_feature 1..20: note = chemically synthesized
  source 1..20: mol_type = other DNA
tttagtgaagaagacagcat

SEQ ID NO: 11668 - DNA, 20 bp, synthetic construct
  misc_feature 1..20: note = chemically synthesized
  source 1..20: mol_type = other DNA
tcagatatttctatatctaa

SEQ ID NO: 11669 - DNA, 20 bp, synthetic construct
  misc_feature 1..20: note = chemically synthesized
  source 1..20: mol_type = other DNA
cagatatttctatatctaaa

SEQ ID NO: 11670 - DNA, 20 bp, synthetic construct
  misc_feature 1..20: note = chemically synthesized
  source 1..20: mol_type = other DNA
tatttctatatctaaaaggc

SEQ ID NO: 11671 - DNA, 20 bp, synthetic construct
  misc_feature 1..20: note = chemically synthesized
  source 1..20: mol_type = other DNA
atactcaatgtattttaaaa

SEQ ID NO: 11672 - DNA, 20 bp, synthetic construct
  misc_feature 1..20: note = chemically synthesized
  source 1..20: mol_type = other DNA
tactcaatgtattttaaaaa

SEQ ID NO: 11673 - DNA, 20 bp, synthetic construct
  misc_feature 1..20: note = chemically synthesized
  source 1..20: mol_type = other DNA
aggaaacaaacctgtacatt

SEQ ID NO: 11674 - DNA, 20 bp, synthetic construct
  misc_feature 1..20: note = chemically synthesized
  source 1..20: mol_type = other DNA
aaacctgtacattcagcact

SEQ ID NO: 11675 - DNA, 20 bp, synthetic construct
  misc_feature 1..20: note = chemically synthesized
  source 1..20: mol_type = other DNA
cctgtacattcagcactgag

SEQ ID NO: 11676 - DNA, 20 bp, synthetic construct
  misc_feature 1..20: note = chemically synthesized
  source 1..20: mol_type = other DNA
gcactgagtagatatcctaa

SEQ ID NO: 11677 - DNA, 20 bp, synthetic construct
  misc_feature 1..20: note = chemically synthesized
  source 1..20: mol_type = other DNA
cactgagtagatatcctaaa

SEQ ID NO: 11678 - DNA, 20 bp, synthetic construct
  misc_feature 1..20: note = chemically synthesized
  source 1..20: mol_type = other DNA
tgagtagatatcctaaaagg

SEQ ID NO: 11679 - DNA, 20 bp, synthetic construct
  misc_feature 1..20: note = chemically synthesized
  source 1..20: mol_type = other DNA
tagatatcctaaaaggcaga

SEQ ID NO: 11680 - DNA, 20 bp, synthetic construct
  misc_feature 1..20: note = chemically synthesized
  source 1..20: mol_type = other DNA
cctaaaaggcagatggtgat

SEQ ID NO: 11681 - DNA, 20 bp, synthetic construct
  misc_feature 1..20: note = chemically synthesized
  source 1..20: mol_type = other DNA
ctaaaaggcagatggtgatg

SEQ ID NO: 11682 - DNA, 20 bp, synthetic construct
  misc_feature 1..20: note = chemically synthesized
  source 1..20: mol_type = other DNA
aggcagatggtgatgaggcc

SEQ ID NO: 11683 - DNA, 20 bp, synthetic construct
  misc_feature 1..20: note = chemically synthesized
  source 1..20: mol_type = other DNA
acgcgctgcataacctttgc

SEQ ID NO: 11684 - DNA, 20 bp, synthetic construct
  misc_feature 1..20: note = chemically synthesized
  source 1..20: mol_type = other DNA
cgctgcataacctttgctag

SEQ ID NO: 11685 - DNA, 20 bp, synthetic construct
  misc_feature 1..20: note = chemically synthesized
  source 1..20: mol_type = other DNA
cctttgctagcagattgtga

SEQ ID NO: 11686 - DNA, 20 bp, synthetic construct
  misc_feature 1..20: note = chemically synthesized
  source 1..20: mol_type = other DNA
ttgctagcagattgtgaaag

SEQ ID NO: 11687 - DNA, 20 bp, synthetic construct
  misc_feature 1..20: note = chemically synthesized
  source 1..20: mol_type = other DNA
gcgcgtgaacatgatcatgg

SEQ ID NO: 11688 - DNA, 20 bp, synthetic construct
  misc_feature 1..20: note = chemically synthesized
  source 1..20: mol_type = other DNA
cctcatcaccatctgccttt

SEQ ID NO: 11689 - DNA, 20 bp, synthetic construct
  misc_feature 1..20: note = chemically synthesized
  source 1..20: mol_type = other DNA
tttaggatatctactcagtg

SEQ ID NO: 11690 - DNA, 20 bp, synthetic construct
  misc_feature 1..20: note = chemically synthesized
  source 1..20: mol_type = other DNA
gtttccttttttaaaataca

SEQ ID NO: 11691 - DNA, 20 bp, synthetic construct
  misc_feature 1..20: note = chemically synthesized
  source 1..20: mol_type = other DNA
atgatttgacagcaatattg

SEQ ID NO: 11692 - DNA, 20 bp, synthetic construct
  misc_feature 1..20: note = chemically synthesized
  source 1..20: mol_type = other DNA
gtgggaaaacaaagaaatag

SEQ ID NO: 11693 - DNA, 20 bp, synthetic construct
  misc_feature 1..20: note = chemically synthesized
  source 1..20: mol_type = other DNA
agttatcaccaaagcttttc

SEQ ID NO: 11694 - DNA, 20 bp, synthetic construct
  misc_feature 1..20: note = chemically synthesized
  source 1..20: mol_type = other DNA
tgtctctatgtcaaacatct

SEQ ID NO: 11695 - DNA, 20 bp, synthetic construct
  misc_feature 1..20: note = chemically synthesized
  source 1..20: mol_type = other DNA
tggggaaacacaatactcag

SEQ ID NO: 11696 - DNA, 20 bp, synthetic construct
  misc_feature 1..20: note = chemically synthesized
  source 1..20: mol_type = other DNA
taggggagaaaagcaagctt

SEQ ID NO: 11697 - DNA, 20 bp, synthetic construct
  misc_feature 1..20: note = chemically synthesized
  source 1..20: mol_type = other DNA
caagcttaagaattgacata

SEQ ID NO: 11698 - DNA, 20 bp, synthetic construct
  misc_feature 1..20: note = chemically synthesized
  source 1..20: mol_type = other DNA
acacttacttgtcaactttc

SEQ ID NO: 11699 - DNA, 20 bp, synthetic construct
  misc_feature 1..20: note = chemically synthesized
  source 1..20: mol_type = other DNA
aatctagtagctgacagtac

SEQ ID NO: 11700 - DNA, 20 bp, synthetic construct
  misc_feature 1..20: note = chemically synthesized
  source 1..20: mol_type = other DNA
tagctgacagtaccaggatc

SEQ ID NO: 11701 - DNA, 20 bp, synthetic construct
  misc_feature 1..20: note = chemically synthesized
  source 1..20: mol_type = other DNA
acagaggttaaactagcaaa

SEQ ID NO: 11702 - DNA, 20 bp, synthetic construct
  misc_feature 1..20: note = chemically synthesized
  source 1..20: mol_type = other DNA
tagcaaagtgagtaaagtca

SEQ ID NO: 11703 - DNA, 20 bp, synthetic construct
  misc_feature 1..20: note = chemically synthesized
  source 1..20: mol_type = other DNA
aagacttcagatgctgggga

SEQ ID NO: 11704 - DNA, 20 bp, synthetic construct
  misc_feature 1..20: note = chemically synthesized
  source 1..20: mol_type = other DNA
atgctggggaaaggatagat

SEQ ID NO: 11705 - DNA, 20 bp, synthetic construct
  misc_feature 1..20: note = chemically synthesized
  source 1..20: mol_type = other DNA
gggaaaggatagataagaat

SEQ ID NO: 11706 - DNA, 20 bp, synthetic construct
  misc_feature 1..20: note = chemically synthesized
  source 1..20: mol_type = other DNA
gcccttgaggaaggggccag

SEQ ID NO: 11707 - DNA, 20 bp, synthetic construct
  misc_feature 1..20: note = chemically synthesized
  source 1..20: mol_type = other DNA
ggggccaggggaatttttct

SEQ ID NO: 11708 - DNA, 20 bp, synthetic construct
  misc_feature 1..20: note = chemically synthesized
  source 1..20: mol_type = other DNA
aactctcattggcttctaaa

SEQ ID NO: 11709 - DNA, 20 bp, synthetic construct
  misc_feature 1..20: note = chemically synthesized
  source 1..20: mol_type = other DNA
ggcttctaaaaggagtttcg

SEQ ID NO: 11710 - DNA, 20 bp, synthetic construct
  misc_feature 1..20: note = chemically synthesized
  source 1..20: mol_type = other DNA
taggtattattgcaacagtt

SEQ ID NO: 11711 - DNA, 20 bp, synthetic construct
  misc_feature 1..20: note = chemically synthesized
  source 1..20: mol_type = other DNA
tgtccttcattcagacatta

SEQ ID NO: 11712 - DNA, 20 bp, synthetic construct
  misc_feature 1..20: note = chemically synthesized
  source 1..20: mol_type = other DNA
tatggtgccaggtactgtgt

SEQ ID NO: 11713 - DNA, 20 bp, synthetic construct
  misc_feature 1..20: note = chemically synthesized
  source 1..20: mol_type = other DNA
aggtactgtgtcagggtact

SEQ ID NO: 11714 - DNA, 20 bp, synthetic construct
  misc_feature 1..20: note = chemically synthesized
  source 1..20: mol_type = other DNA
tgtcagggtactaggggtat

SEQ ID NO: 11715 - DNA, 20 bp, synthetic construct
  misc_feature 1..20: note = chemically synthesized
  source 1..20: mol_type = other DNA
aaaatgtgcactaggtacta

SEQ ID NO: 11716 - DNA, 20 bp, synthetic construct
  misc_feature 1..20: note = chemically synthesized
  source 1..20: mol_type = other DNA
ggggaaacaattgatagaga

SEQ ID NO: 11717 - DNA, 20 bp, synthetic construct
  misc_feature 1..20: note = chemically synthesized
  source 1..20: mol_type = other DNA
tagagagagaatattttcat

SEQ ID NO: 11718 - DNA, 20 bp, synthetic construct
  misc_feature 1..20: note = chemically synthesized
  source 1..20: mol_type = other DNA
tttcatctgggtcttaaaag

SEQ ID NO: 11719 - DNA, 20 bp, synthetic construct
  misc_feature 1..20: note = chemically synthesized
  source 1..20: mol_type = other DNA
ataagggcattttatgcaaa

SEQ ID NO: 11720 - DNA, 20 bp, synthetic construct
  misc_feature 1..20: note = chemically synthesized
  source 1..20: mol_type = other DNA
gcaagaacgtgaggtatttc

SEQ ID NO: 11721 - DNA, 20 bp, synthetic construct
  misc_feature 1..20: note = chemically synthesized
  source 1..20: mol_type = other DNA
ggtatcgaagtataaacata

SEQ ID NO: 11722 - DNA, 20 bp, synthetic construct
  misc_feature 1..20: note = chemically synthesized
  source 1..20: mol_type = other DNA
agtaccactgatggctgatt

SEQ ID NO: 11723 - DNA, 20 bp, synthetic construct
  misc_feature 1..20: note = chemically synthesized
  source 1..20: mol_type = other DNA
gtagcagtacaaaaaaagag

SEQ ID NO: 11724 - DNA, 20 bp, synthetic construct
  misc_feature 1..20: note = chemically synthesized
  source 1..20: mol_type = other DNA
aagtggtatgacttaaccat

SEQ ID NO: 11725 - DNA, 20 bp, synthetic construct
  misc_feature 1..20: note = chemically synthesized
  source 1..20: mol_type = other DNA
ggtatggaaggggaaatggc

SEQ ID NO: 11726 - DNA, 20 bp, synthetic construct
  misc_feature 1..20: note = chemically synthesized
  source 1..20: mol_type = other DNA
tttgatgtgattatggacca

SEQ ID NO: 11727 - DNA, 20 bp, synthetic construct
  misc_feature 1..20: note = chemically synthesized
  source 1..20: mol_type = other DNA
tggctctttagtctgactgc

SEQ ID NO: 11728 - DNA, 20 bp, synthetic construct
  misc_feature 1..20: note = chemically synthesized
  source 1..20: mol_type = other DNA
tttagtctgactgccagagt

SEQ ID NO: 11729 - DNA, 20 bp, synthetic construct
  misc_feature 1..20: note = chemically synthesized
  source 1..20: mol_type = other DNA
tgactgccagagtctgaatc

SEQ ID NO: 11730 - DNA, 20 bp, synthetic construct
  misc_feature 1..20: note = chemically synthesized
  source 1..20: mol_type = other DNA
gggcaaagcccttagcctct

SEQ ID NO: 11731 - DNA, 20 bp, synthetic construct
  misc_feature 1..20: note = chemically synthesized
  source 1..20: mol_type = other DNA
ctatctcgtgggacttttgt

SEQ ID NO: 11732 - DNA, 20 bp, synthetic construct
  misc_feature 1..20: note = chemically synthesized
  source 1..20: mol_type = other DNA
tgtgaggatgaagtgagata

SEQ ID NO: 11733 - DNA, 20 bp, synthetic construct
  misc_feature 1..20: note = chemically synthesized
  source 1..20: mol_type = other DNA
tacattatgatatacagtta

SEQ ID NO: 11734 - DNA, 20 bp, synthetic construct
  misc_feature 1..20: note = chemically synthesized
  source 1..20: mol_type = other DNA
ggagacgtatctgactatag

SEQ ID NO: 11735 - DNA, 20 bp, synthetic construct
  misc_feature 1..20: note = chemically synthesized
  source 1..20: mol_type = other DNA
gccacgtgtgtgggcatctg

SEQ ID NO: 11736 - DNA, 20 bp, synthetic construct
  misc_feature 1..20: note = chemically synthesized
  source 1..20: mol_type = other DNA
tgggcatctggagagtgagc

SEQ ID NO: 11737 - DNA, 20 bp, synthetic construct
  misc_feature 1..20: note = chemically synthesized
  source 1..20: mol_type = other DNA
tgctcagtaaattttgttga

SEQ ID NO: 11738 - DNA, 20 bp, synthetic construct
  misc_feature 1..20: note = chemically synthesized
  source 1..20: mol_type = other DNA
taagggccatggagaggaac

SEQ ID NO: 11739 - DNA, 20 bp, synthetic construct
  misc_feature 1..20: note = chemically synthesized
  source 1..20: mol_type = other DNA
ggagttaatcaattcaagtg

SEQ ID NO: 11740 - DNA, 20 bp, synthetic construct
  misc_feature 1..20: note = chemically synthesized
  source 1..20: mol_type = other DNA
ttaatcaattcaagtgctgg

SEQ ID NO: 11741 - DNA, 20 bp, synthetic construct
  misc_feature 1..20: note = chemically synthesized
  source 1..20: mol_type = other DNA
tcaagtgctggatggataac

SEQ ID NO: 11742 - DNA, 20 bp, synthetic construct
  misc_feature 1..20: note = chemically synthesized
  source 1..20: mol_type = other DNA
gttagagcaaagcggggaac

SEQ ID NO: 11743 - DNA, 20 bp, synthetic construct
  misc_feature 1..20: note = chemically synthesized
  source 1..20: mol_type = other DNA
agcaaagcggggaaccagaa

SEQ ID NO: 11744 - DNA, 20 bp, synthetic construct
  misc_feature 1..20: note = chemically synthesized
  source 1..20: mol_type = other DNA
aatagagtgattattataaa

SEQ ID NO: 11745 - DNA, 20 bp, synthetic construct
  misc_feature 1..20: note = chemically synthesized
  source 1..20: mol_type = other DNA
gaagttattaaagagctaaa

SEQ ID NO: 11746 - DNA, 20 bp, synthetic construct
  misc_feature 1..20: note = chemically synthesized
  source 1..20: mol_type = other DNA
gaaagtagggccaacatgaa

SEQ ID NO: 11747 - DNA, 20 bp, synthetic construct
  misc_feature 1..20: note = chemically synthesized
  source 1..20: mol_type = other DNA
ctgtacagtcagctctcctt

SEQ ID NO: 11748 - DNA, 20 bp, synthetic construct
  misc_feature 1..20: note = chemically synthesized
  source 1..20: mol_type = other DNA
caaaaatattcaagaaaaaa

SEQ ID NO: 11749 - DNA, 20 bp, synthetic construct
  misc_feature 1..20: note = chemically synthesized
  source 1..20: mol_type = other DNA
agatgatttaaagtacaaag

SEQ ID NO: 11750 - DNA, 20 bp, synthetic construct
  misc_feature 1..20: note = chemically synthesized
  source 1..20: mol_type = other DNA
cacagatcttgatatttgca

SEQ ID NO: 11751 - DNA, 20 bp, synthetic construct
  misc_feature 1..20: note = chemically synthesized
  source 1..20: mol_type = other DNA
ggtcttgccaccaattttcc

SEQ ID NO: 11752 - DNA, 20 bp, synthetic construct
  misc_feature 1..20: note = chemically synthesized
  source 1..20: mol_type = other DNA
atactgaggaacgactgtaa

SEQ ID NO: 11753 - DNA, 20 bp, synthetic construct
  misc_feature 1..20: note = chemically synthesized
  source 1..20: mol_type = other DNA
gactgtaaatggatgcaggc

SEQ ID NO: 11754 - DNA, 20 bp, synthetic construct
  misc_feature 1..20: note = chemically synthesized
  source 1..20: mol_type = other DNA
tgcaggcatggatgctattt

SEQ ID NO: 11755 - DNA, 20 bp, synthetic construct
  misc_feature 1..20: note = chemically synthesized
  source 1..20: mol_type = other DNA
gagtgtccagggccaagtaa

SEQ ID NO: 11756 - DNA, 20 bp, synthetic construct
  misc_feature 1..20: note = chemically synthesized
  source 1..20: mol_type = other DNA
atgagttgctgagcagagag

SEQ ID NO: 11757 - DNA, 20 bp, synthetic construct
  misc_feature 1..20: note = chemically synthesized
  source 1..20: mol_type = other DNA
cctcggctgtctgggaagag

SEQ ID NO: 11758 - DNA, 20 bp, synthetic construct
  misc_feature 1..20: note = chemically synthesized
  source 1..20: mol_type = other DNA
ggctgctccaatttaggggc

SEQ ID NO: 11759 - DNA, 20 bp, synthetic construct
  misc_feature 1..20: note = chemically synthesized
  source 1..20: mol_type = other DNA
caatttaggggctaggattg

SEQ ID NO: 11760 - DNA, 20 bp, synthetic construct
  misc_feature 1..20: note = chemically synthesized
  source 1..20: mol_type = other DNA
gggtgggcacagcattgcaa

SEQ ID NO: 11761 - DNA, 20 bp, synthetic construct
  misc_feature 1..20: note = chemically synthesized
  source 1..20: mol_type = other DNA
attgagaaatatggccaatg

SEQ ID NO: 11762 - DNA, 20 bp, synthetic construct
  misc_feature 1..20: note = chemically synthesized
  source 1..20: mol_type = other DNA
caggcagatcacttgaggtc

SEQ ID NO: 11763 - DNA, 20 bp, synthetic construct
  misc_feature 1..20: note = chemically synthesized
  source 1..20: mol_type = other DNA
aaaattagctgggcatggtg

SEQ ID NO: 11764 - DNA, 20 bp, synthetic construct
  misc_feature 1..20: note = chemically synthesized
  source 1..20: mol_type = other DNA
tacttgggaggctgaggcag

SEQ ID NO: 11765 - DNA, 20 bp, synthetic construct
  misc_feature 1..20: note = chemically synthesized
  source 1..20: mol_type = other DNA
caagactctgtcaaaaaaaa

SEQ ID NO: 11766 - DNA, 20 bp, synthetic construct
  misc_feature 1..20: note = chemically synthesized
  source 1..20: mol_type = other DNA
ttgcagagcaagggaaaagc

SEQ ID NO: 11767 - DNA, 20 bp, synthetic construct
  misc_feature 1..20: note = chemically synthesized
  source 1..20: mol_type = other DNA
ctttcctttctcttcctttt

SEQ ID NO: 11768 - DNA, 20 bp, synthetic construct
  misc_feature 1..20: note = chemically synthesized
  source 1..20: mol_type = other DNA
gaacaactccaggcaacttc

SEQ ID NO: 11769 - DNA, 20 bp, synthetic construct
  misc_feature 1..20: note = chemically synthesized
  source 1..20: mol_type = other DNA
gccatgcattccttaacaat

SEQ ID NO: 11770 - DNA, 20 bp, synthetic construct
  misc_feature 1..20: note = chemically synthesized
  source 1..20: mol_type = other DNA
tcatcattgtgcgaacataa

SEQ ID NO: 11771 - DNA, 20 bp, synthetic construct
  misc_feature 1..20: note = chemically synthesized
  source 1..20: mol_type = other DNA
agatagagacatctatcctc

SEQ ID NO: 11772 - DNA, 20 bp, synthetic construct
  misc_feature 1..20: note = chemically synthesized
  source 1..20: mol_type = other DNA
acatctatcctccagagttc

SEQ ID NO: 11773 - DNA, 20 bp, synthetic construct
  misc_feature 1..20: note = chemically synthesized
  source 1..20: mol_type = other DNA
tagcttaaaaaaaacatatc

SEQ ID NO: 11774 - DNA, 20 bp, synthetic construct
  misc_feature 1..20: note = chemically synthesized
  source 1..20: mol_type = other DNA
taacatctagtgacagacac

SEQ ID NO: 11775 - DNA, 20 bp, synthetic construct
  misc_feature 1..20: note = chemically synthesized
  source 1..20: mol_type = other DNA
tattctgaaaacagcccagc

SEQ ID NO: 11776 - DNA, 20 bp, synthetic construct
  misc_feature 1..20: note = chemically synthesized
  source 1..20: mol_type = other DNA
aaaacagcccagccagggtg

SEQ ID NO: 11777 - DNA, 20 bp, synthetic construct
  misc_feature 1..20: note = chemically synthesized
  source 1..20: mol_type = other DNA
gaaatctgaccttttattac

SEQ ID NO: 11778 - DNA, 20 bp, synthetic construct
  misc_feature 1..20: note = chemically synthesized
  source 1..20: mol_type = other DNA
tctcttgactaaaagtaaaa

SEQ ID NO: 11779 - DNA, 20 bp, synthetic construct
  misc_feature 1..20: note = chemically synthesized
  source 1..20: mol_type = other DNA
gaaattggctttcagattat

SEQ ID NO: 11780 - DNA, 20 bp, synthetic construct
  misc_feature 1..20: note = chemically synthesized
  source 1..20: mol_type = other DNA
tttcttttttgctaaaacta

SEQ ID NO: 11781 - DNA, 20 bp, synthetic construct
  misc_feature 1..20: note = chemically synthesized
  source 1..20: mol_type = other DNA
atgaaaacgccaacaaaatt

SEQ ID NO: 11782 - DNA, 20 bp, synthetic construct
  misc_feature 1..20: note = chemically synthesized
  source 1..20: mol_type = other DNA
gtataattcaggtaaattgg

SEQ ID NO: 11783 - DNA, 20 bp, synthetic construct
  misc_feature 1..20: note = chemically synthesized
  source 1..20: mol_type = other DNA
tgttcaagggaaccttgaga

SEQ ID NO: 11784 - DNA, 20 bp, synthetic construct
  misc_feature 1..20: note = chemically synthesized
  source 1..20: mol_type = other DNA
aacaaactcttccaatttac

SEQ ID NO: 11785 - DNA, 20 bp, synthetic construct
  misc_feature 1..20: note = chemically synthesized
  source 1..20: mol_type = other DNA
ttatacctctttggccgatt

SEQ ID NO: 11786 - DNA, 20 bp, synthetic construct
  misc_feature 1..20: note = chemically synthesized
  source 1..20: mol_type = other DNA
caagaaaaactgaaatgtaa

SEQ ID NO: 11787 - DNA, 20 bp, synthetic construct
  misc_feature 1..20: note = chemically synthesized
  source 1..20: mol_type = other DNA
ctgtatacacatggagattt

SEQ ID NO: 11788 - DNA, 20 bp, synthetic construct
  misc_feature 1..20: note = chemically synthesized
  source 1..20: mol_type = other DNA
tcaattttacttttagtcaa

SEQ ID NO: 11789 - DNA, 20 bp, synthetic construct
  misc_feature 1..20: note = chemically synthesized
  source 1..20: mol_type = other DNA
ggtcagatttctaatcatat

SEQ ID NO: 11790 - DNA, 20 bp, synthetic construct
  misc_feature 1..20: note = chemically synthesized
  source 1..20: mol_type = other DNA
taatcatatttgaatttact

SEQ ID NO: 11791 - DNA, 20 bp, synthetic construct
  misc_feature 1..20: note = chemically synthesized
  source 1..20: mol_type = other DNA
tcacttgaaaatagctcatt

SEQ ID NO: 11792 - DNA, 20 bp, synthetic construct
  misc_feature 1..20: note = chemically synthesized
  source 1..20: mol_type = other DNA
caccctggctgggctgtttt

SEQ ID NO: 11793 - DNA, 20 bp, synthetic construct
  misc_feature 1..20: note = chemically synthesized
  source 1..20: mol_type = other DNA
ctttggttggcaagtgttat

SEQ ID NO: 11794 - DNA, 20 bp, synthetic construct
  misc_feature 1..20: note = chemically synthesized
  source 1..20: mol_type = other DNA
cagtgatttaagcatctctc

SEQ ID NO: 11795 - DNA, 20 bp, synthetic construct
  misc_feature 1..20: note = chemically synthesized
  source 1..20: mol_type = other DNA
ttaagcatctctctagaatt

SEQ ID NO: 11796 - DNA, 20 bp, synthetic construct
  misc_feature 1..20: note = chemically synthesized
  source 1..20: mol_type = other DNA
agagacactcctgaactctg

SEQ ID NO: 11797 - DNA, 20 bp, synthetic construct
  misc_feature 1..20: note = chemically synthesized
  source 1..20: mol_type = other DNA
tggaggatagatgtctctat

SEQ ID NO: 11798 - DNA, 20 bp, synthetic construct
  misc_feature 1..20: note = chemically synthesized
  source 1..20: mol_type = other DNA
ttgcttaatgacacatttct

SEQ ID NO: 11799 - DNA, 20 bp, synthetic construct
  misc_feature 1..20: note = chemically synthesized
  source 1..20: mol_type = other DNA
agaatatatccccattgtta

SEQ ID NO: 11800 - DNA, 20 bp, synthetic construct
  misc_feature 1..20: note = chemically synthesized
  source 1..20: mol_type = other DNA
cagggactcaagaagttgcc

SEQ ID NO: 11801 - DNA, 20 bp, synthetic construct
  misc_feature 1..20: note = chemically synthesized
  source 1..20: mol_type = other DNA
ctggagttgttcctttcttc

SEQ ID NO: 11802 - DNA, 20 bp, synthetic construct
  misc_feature 1..20: note = chemically synthesized
  source 1..20: mol_type = other DNA
ggcttataagatgaactttc

SEQ ID NO: 11803 - DNA, 20 bp, synthetic construct
  misc_feature 1..20: note = chemically synthesized
  source 1..20: mol_type = other DNA
cattgcagctgttcacttta

SEQ ID NO: 11804 - DNA, 20 bp, synthetic construct
  misc_feature 1..20: note = chemically synthesized
  source 1..20: mol_type = other DNA
tttgggctcactttttttct

SEQ ID NO: 11805 - DNA, 20 bp, synthetic construct
  misc_feature 1..20: note = chemically synthesized
  source 1..20: mol_type = other DNA
ttcaactcttttttttttga

SEQ ID NO: 11806 - DNA, 20 bp, synthetic construct
  misc_feature 1..20: note = chemically synthesized
  source 1..20: mol_type = other DNA
tcttgctctgtcgcccaggc

SEQ ID NO: 11807 - DNA, 20 bp, synthetic construct
  misc_feature 1..20: note = chemically synthesized
  source 1..20: mol_type = other DNA
gcctcagcctcccaagtagc

SEQ ID NO: 11808 - DNA, 20 bp, synthetic construct
  misc_feature 1..20: note = chemically synthesized
  source 1..20: mol_type = other DNA
ttttgtatttttagtaaagc

SEQ ID NO: 11809 - DNA, 20 bp, synthetic construct
  misc_feature 1..20: note = chemically synthesized
  source 1..20: mol_type = other DNA
gcctgggcctctgaaagtgc

SEQ ID NO: 11810 - DNA, 20 bp, synthetic construct
  misc_feature 1..20: note = chemically synthesized
  source 1..20: mol_type = other DNA
aaaaaatcaccaaaatgcag

SEQ ID NO: 11811 - DNA, 20 bp, synthetic construct
  misc_feature 1..20: note = chemically synthesized
  source 1..20: mol_type = other DNA
ccctgcaaatatcaagatct

SEQ ID NO: 11812 - DNA, 20 bp, synthetic construct
  misc_feature 1..20: note = chemically synthesized
  source 1..20: mol_type = other DNA
ttgttatgctgtattgttta

SEQ ID NO: 11813 - DNA, 20 bp, synthetic construct
  misc_feature 1..20: note = chemically synthesized
  source 1..20: mol_type = other DNA
tagggaataatgaaagataa

SEQ ID NO: 11814 - DNA, 20 bp, synthetic construct
  misc_feature 1..20: note = chemically synthesized
  source 1..20: mol_type = other DNA
tgcaaccatccatttttttc

SEQ ID NO: 11815 - DNA, 20 bp, synthetic construct
  misc_feature 1..20: note = chemically synthesized
  source 1..20: mol_type = other DNA
tatttttgatctgcagttaa

SEQ ID NO: 11816 - DNA, 20 bp, synthetic construct
  misc_feature 1..20: note = chemically synthesized
  source 1..20: mol_type = other DNA
gagctgactgtacagtgtgg

SEQ ID NO: 11817 - DNA, 20 bp, synthetic construct
  misc_feature 1..20: note = chemically synthesized
  source 1..20: mol_type = other DNA
ttgagtgaaaaaacagactt

SEQ ID NO: 11818 - DNA, 20 bp, synthetic construct
  misc_feature 1..20: note = chemically synthesized
  source 1..20: mol_type = other DNA
cagatcagacagaaataggt

SEQ ID NO: 11819 - DNA, 20 bp, synthetic construct
  misc_feature 1..20: note = chemically synthesized
  source 1..20: mol_type = other DNA
aggtttaacagtagtataat

SEQ ID NO: 11820 - DNA, 20 bp, synthetic construct
  misc_feature 1..20: note = chemically synthesized
  source 1..20: mol_type = other DNA
atctatctcacaggtgttgg

SEQ ID NO: 11821 - DNA, 20 bp, synthetic construct
  misc_feature 1..20: note = chemically synthesized
  source 1..20: mol_type = other DNA
aaatgactattgtcacaatc

SEQ ID NO: 11822 - DNA, 20 bp, synthetic construct
  misc_feature 1..20: note = chemically synthesized
  source 1..20: mol_type = other DNA
tcacaatcaggaatgaccta

SEQ ID NO: 11823 - DNA, 20 bp, synthetic construct
  misc_feature 1..20: note = chemically synthesized
  source 1..20: mol_type = other DNA
gaatgacctaaagaataatt

SEQ ID NO: 11824 - DNA, 20 bp, synthetic construct
  misc_feature 1..20: note = chemically synthesized
  source 1..20: mol_type = other DNA
tcctgttatccatccagcac

SEQ ID NO: 11825 - DNA, 20 bp, synthetic construct
  misc_feature 1..20: note = chemically synthesized
  source 1..20: mol_type = other DNA
ctccatggcccttaaatgtc

SEQ ID NO: 11826 - DNA, 20 bp, synthetic construct
  misc_feature 1..20: note = chemically synthesized
  source 1..20: mol_type = other DNA
atacttgctagggctgggac

SEQ ID NO: 11827 - DNA, 20 bp, synthetic construct
  misc_feature 1..20: note = chemically synthesized
  source 1..20: mol_type = other DNA
taactactgtttacagaaca

SEQ ID NO: 11828 - DNA, 20 bp, synthetic construct
  misc_feature 1..20: note = chemically synthesized
  source 1..20: mol_type = other DNA
cctatagtcagatacgtctc

SEQ ID NO: 11829 - DNA, 20 bp, synthetic construct
  misc_feature 1..20: note = chemically synthesized
  source 1..20: mol_type = other DNA
ggcactgtcatcttattttt

SEQ ID NO: 11830 - DNA, 20 bp, synthetic construct
  misc_feature 1..20: note = chemically synthesized
  source 1..20: mol_type = other DNA
aggtaacatactaaaacatt

SEQ ID NO: 11831 - DNA, 20 bp, synthetic construct
  misc_feature 1..20: note = chemically synthesized
  source 1..20: mol_type = other DNA
tacctcacgttcttgcaaat

SEQ ID NO: 11832 - DNA, 20 bp, synthetic construct
  misc_feature 1..20: note = chemically synthesized
  source 1..20: mol_type = other DNA
ttgcaaatctgagtctttgc

SEQ ID NO: 11833 - DNA, 20 bp, synthetic construct
  misc_feature 1..20: note = chemically synthesized
  source 1..20: mol_type = other DNA
atgctgctttagatcaaaga

SEQ ID NO: 11834 - DNA, 20 bp, synthetic construct
  misc_feature 1..20: note = chemically synthesized
  source 1..20: mol_type = other DNA
tagttgtaactcagtaatgt

SEQ ID NO: 11835 - DNA, 20 bp, synthetic construct
  misc_feature 1..20: note = chemically synthesized
  source 1..20: mol_type = other DNA
aactccttttagaagccaat

SEQ ID NO: 11836 - DNA, 20 bp, synthetic construct
  misc_feature 1..20: note = chemically synthesized
  source 1..20: mol_type = other DNA
atgagagtttaatagcagaa

SEQ ID NO: 11837 - DNA, 20 bp, synthetic construct
  misc_feature 1..20: note = chemically synthesized
  source 1..20: mol_type = other DNA
atctctggctacaatggctg

SEQ ID NO: 11838 - DNA, 20 bp, synthetic construct
  misc_feature 1..20: note = chemically synthesized
  source 1..20: mol_type = other DNA
ctttctccttagtattatct

SEQ ID NO: 11839 - DNA, 20 bp, synthetic construct
  misc_feature 1..20: note = chemically synthesized
  source 1..20: mol_type = other DNA
ctcaccacttatatagaaga

SEQ ID NO: 11840 - DNA, 20 bp, synthetic construct
  misc_feature 1..20: note = chemically synthesized
  source 1..20: mol_type = other DNA
acttatatagaagaaagggt

SEQ ID NO: 11841 - DNA, 20 bp, synthetic construct
  misc_feature 1..20: note = chemically synthesized
  source 1..20: mol_type = other DNA
cttgctttatgtcctgcttt

SEQ ID NO: 11842 - DNA, 20 bp, synthetic construct
  misc_feature 1..20: note = chemically synthesized
  source 1..20: mol_type = other DNA
ttcacagctgacatcatgtc

SEQ ID NO: 11843 - DNA, 20 bp, synthetic construct
  misc_feature 1..20: note = chemically synthesized
  source 1..20: mol_type = other DNA
acagggccagtcagctttct

SEQ ID NO: 11844 - DNA, 20 bp, synthetic construct
  misc_feature 1..20: note = chemically synthesized
  source 1..20: mol_type = other DNA
gtcagctttctgggggtgct

SEQ ID NO: 11845 - DNA, 20 bp, synthetic construct
  misc_feature 1..20: note = chemically synthesized
  source 1..20: mol_type = other DNA
gaacatgctgtttgtccaaa

SEQ ID NO: 11846 - DNA, 20 bp, synthetic construct
  misc_feature 1..20: note = chemically synthesized
  source 1..20: mol_type = other DNA
ttctcccctagggaactcaa

SEQ ID NO: 11847 - DNA, 20 bp, synthetic construct
  misc_feature 1..20: note = chemically synthesized
  source 1..20: mol_type = other DNA
aatttttttaaaccaaggag

SEQ ID NO: 11848 - DNA, 20 bp, synthetic construct
  misc_feature 1..20: note = chemically synthesized
  source 1..20: mol_type = other DNA
ggagatgaatgttttctaac

SEQ ID NO: 11849 - DNA, 20 bp, synthetic construct
  misc_feature 1..20: note = chemically synthesized
  source 1..20: mol_type = other DNA
acaaacctgtacattcagca

SEQ ID NO: 11850 - DNA, 20 bp, synthetic construct
  misc_feature 1..20: note = chemically synthesized
  source 1..20: mol_type = other DNA
agcgcgtgaacatgatcatg

SEQ ID NO: 11851 - DNA, 20 bp, synthetic construct
  misc_feature 1..20: note = chemically synthesized
  source 1..20: mol_type = other DNA
agtatgcttgccttttagat

SEQ ID NO: 11852 - DNA, 20 bp, synthetic construct
  misc_feature 1..20: note = chemically synthesized
  source 1..20: mol_type = other DNA
atttggtcatgtaattcctg

SEQ ID NO: 11853 - DNA, 20 bp, synthetic construct
  misc_feature 1..20: note = chemically synthesized
  source 1..20: mol_type = other DNA
aaaattaaaagtgggaaaac

SEQ ID NO: 11854 - DNA, 20 bp, synthetic construct
  misc_feature 1..20: note = chemically synthesized
  source 1..20: mol_type = other DNA
agtgggaaaacaaagaaata

SEQ ID NO: 11855 - DNA, 20 bp, synthetic construct
  misc_feature 1..20: note = chemically synthesized
  source 1..20: mol_type = other DNA
actcagttgagttccctagg

SEQ ID NO: 11856 - DNA, 20 bp, synthetic construct
  misc_feature 1..20: note = chemically synthesized
  source 1..20: mol_type = other DNA
ctaggggagaaaagcaagct

SEQ ID NO: 11857 - DNA, 20 bp, synthetic construct
  misc_feature 1..20: note = chemically synthesized
  source 1..20: mol_type = other DNA
cccagaggaaggcatacagg

SEQ ID NO: 11858 - DNA, 20 bp, synthetic construct
  misc_feature 1..20: note = chemically synthesized
  source 1..20: mol_type = other DNA
cacacttacttgtcaacttt

SEQ ID NO: 11859 - DNA, 20 bp, synthetic construct
  misc_feature 1..20: note = chemically synthesized
  source 1..20: mol_type = other DNA
ggtgccaaccctaagcaccc

SEQ ID NO: 11860 - DNA, 20 bp, synthetic construct
  misc_feature 1..20: note = chemically synthesized
  source 1..20: mol_type = other DNA
agtgagtaaagtcaagggat

SEQ ID NO: 11861 - DNA, 20 bp, synthetic construct
  misc_feature 1..20: note = chemically synthesized
  source 1..20: mol_type = other DNA
gatgctggggaaaggataga

SEQ ID NO: 11862 - DNA, 20 bp, synthetic construct
  misc_feature 1..20: note = chemically synthesized
  source 1..20: mol_type = other DNA
cgatccccagataatactaa

SEQ ID NO: 11863 - DNA, 20 bp, synthetic construct
  misc_feature 1..20: note = chemically synthesized
  source 1..20: mol_type = other DNA
actaggtactaagggatcat

SEQ ID NO: 11864 - DNA, 20 bp, synthetic construct
  misc_feature 1..20: note = chemically synthesized
  source 1..20: mol_type = other DNA
tggggaaacaattgatagag

SEQ ID NO: 11865 - DNA, 20 bp, synthetic construct
  misc_feature 1..20: note = chemically synthesized
  source 1..20: mol_type = other DNA
gtttgatgtgattatggacc

SEQ ID NO: 11866 - DNA, 20 bp, synthetic construct
  misc_feature 1..20: note = chemically synthesized
  source 1..20: mol_type = other DNA
agttagagcaaagcggggaa

SEQ ID NO: 11867 - DNA, 20 bp, synthetic construct
  misc_feature 1..20: note = chemically synthesized
  source 1..20: mol_type = other DNA
aaaaagggagagatcaacaa

SEQ ID NO: 11868 - DNA, 20 bp, synthetic construct
  misc_feature 1..20: note = chemically synthesized
  source 1..20: mol_type = other DNA
agaagttattaaagagctaa

SEQ ID NO: 11869 - DNA, 20 bp, synthetic construct
  misc_feature 1..20: note = chemically synthesized
  source 1..20: mol_type = other DNA
attaaagagctaaagagaat

SEQ ID NO: 11870 - DNA, 20 bp, synthetic construct
  misc_feature 1..20: note = chemically synthesized
  source 1..20: mol_type = other DNA
gaattgagaaatttaaaaca

SEQ ID NO: 11871 - DNA, 20 bp, synthetic construct
  misc_feature 1..20: note = chemically synthesized
  source 1..20: mol_type = other DNA
ggccaacatgaaaggagtag

SEQ ID NO: 11872 - DNA, 20 bp, synthetic construct
  misc_feature 1..20: note = chemically synthesized
  source 1..20: mol_type = other DNA
aactgcagatcaaaaatatt

SEQ ID NO: 11873 - DNA, 20 bp, synthetic construct
  misc_feature 1..20: note = chemically synthesized
  source 1..20: mol_type = other DNA
ttacattgtattagctatta

SEQ ID NO: 11874 - DNA, 20 bp, synthetic construct
  misc_feature 1..20: note = chemically synthesized
  source 1..20: mol_type = other DNA
tgcaaacgagtgaaggaaat

SEQ ID NO: 11875 - DNA, 20 bp, synthetic construct
  misc_feature 1..20: note = chemically synthesized
  source 1..20: mol_type = other DNA
ctacttgggaggctgaggca

SEQ ID NO: 11876 - DNA, 20 bp, synthetic construct
  misc_feature 1..20: note = chemically synthesized
  source 1..20: mol_type = other DNA
gtcaaaaaaaaaagagttga

SEQ ID NO: 11877 - DNA, 20 bp, synthetic construct
  misc_feature 1..20: note = chemically synthesized
  source 1..20: mol_type = other DNA
aaaaagtctaggctaaattc

SEQ ID NO: 11878 - DNA, 20 bp, synthetic construct
  misc_feature 1..20: note = chemically synthesized
  source 1..20: mol_type = other DNA
cagctgcaatgaaaataagg

SEQ ID NO: 11879 - DNA, 20 bp, synthetic construct
  misc_feature 1..20: note = chemically synthesized
  source 1..20: mol_type = other DNA
aggaagtagtcccaaatacc

SEQ ID NO: 11880 - DNA, 20 bp, synthetic construct
  misc_feature 1..20: note = chemically synthesized
  source 1..20: mol_type = other DNA
agatatattgctagaccctt

SEQ ID NO: 11881 - DNA, 20 bp, synthetic construct
  misc_feature 1..20: note = chemically synthesized
  source 1..20: mol_type = other DNA
ttaacaatggggatatattc

SEQ ID NO: 11882 - DNA, 20 bp, synthetic construct
  misc_feature 1..20: note = chemically synthesized
  source 1..20: mol_type = other DNA
tggtatttgtgtatctaaac

SEQ ID NO: 11883 - DNA, 20 bp, synthetic construct
  misc_feature 1..20: note = chemically synthesized
  source 1..20: mol_type = other DNA
gagaggaaggagggagggaa

SEQ ID NO: 11884 - DNA, 20 bp, synthetic construct
  misc_feature 1..20: note = chemically synthesized
  source 1..20: mol_type = other DNA
caaagtaaattcaaatatga

SEQ ID NO: 11885 - DNA, 20 bp, synthetic construct
  misc_feature 1..20: note = chemically synthesized
  source 1..20: mol_type = other DNA
attttggctccatgccctaa

SEQ ID NO: 11886 - DNA, 20 bp, synthetic construct
  misc_feature 1..20: note = chemically synthesized
  source 1..20: mol_type = other DNA
ttttcttttttgctaaaact

SEQ ID NO: 11887 - DNA, 20 bp, synthetic construct
  misc_feature 1..20: note = chemically synthesized
  source 1..20: mol_type = other DNA
ttgttcaagggaaccttgag

SEQ ID NO: 11888 - DNA, 20 bp, synthetic construct
  misc_feature 1..20: note = chemically synthesized
  source 1..20: mol_type = other DNA
accttgagagagaatgtatg

SEQ ID NO: 11889 - DNA, 20 bp, synthetic construct
  misc_feature 1..20: note = chemically synthesized
  source 1..20: mol_type = other DNA
attatacctctttggccgat

SEQ ID NO: 11890 - DNA, 20 bp, synthetic construct
  misc_feature 1..20: note = chemically synthesized
  source 1..20: mol_type = other DNA
tttgttggcgttttcatgat

SEQ ID NO: 11891 - DNA, 20 bp, synthetic construct
  misc_feature 1..20: note = chemically synthesized
  source 1..20: mol_type = other DNA
tcaagaaaaactgaaatgta

SEQ ID NO: 11892 - DNA, 20 bp, synthetic construct
  misc_feature 1..20: note = chemically synthesized
  source 1..20: mol_type = other DNA
aattctttagttttagcaaa

SEQ ID NO: 11893 - DNA, 20 bp, synthetic construct
  misc_feature 1..20: note = chemically synthesized
  source 1..20: mol_type = other DNA
catgaaaattttacatctct

SEQ ID NO: 11894 - DNA, 20 bp, synthetic construct
  misc_feature 1..20: note = chemically synthesized
  source 1..20: mol_type = other DNA
ttcaattttacttttagtca

SEQ ID NO: 11895 - DNA, 20 bp, synthetic construct
  misc_feature 1..20: note = chemically synthesized
  source 1..20: mol_type = other DNA
ttgaatttactttggatgaa

SEQ ID NO: 11896 - DNA, 20 bp, synthetic construct
  misc_feature 1..20: note = chemically synthesized
  source 1..20: mol_type = other DNA
tcaccctggctgggctgttt

SEQ ID NO: 11897 - DNA, 20 bp, synthetic construct
  misc_feature 1..20: note = chemically synthesized
  source 1..20: mol_type = other DNA
agtgtctgtcactagatgtt

SEQ ID NO: 11898 - DNA, 20 bp, synthetic construct
  misc_feature 1..20: note = chemically synthesized
  source 1..20: mol_type = other DNA
gcagtgatttaagcatctct

SEQ ID NO: 11899 - DNA, 20 bp, synthetic construct
  misc_feature 1..20: note = chemically synthesized
  source 1..20: mol_type = other DNA
attgcttaatgacacatttc

SEQ ID NO: 11900 - DNA, 20 bp, synthetic construct
  misc_feature 1..20: note = chemically synthesized
  source 1..20: mol_type = other DNA
ctgattaactccaaaaagga

SEQ ID NO: 11901 - DNA, 20 bp, synthetic construct
  misc_feature 1..20: note = chemically synthesized
  source 1..20: mol_type = other DNA
aggaaagtaaaaaggaaagg

SEQ ID NO: 11902 - DNA, 20 bp, synthetic construct
  misc_feature 1..20: note = chemically synthesized
  source 1..20: mol_type = other DNA
gttgagtgaaaaaacagact

SEQ ID NO: 11903 - DNA, 20 bp, synthetic construct
  misc_feature 1..20: note = chemically synthesized
  source 1..20: mol_type = other DNA
agactttagaatcagatcag

SEQ ID NO: 11904 - DNA, 20 bp, synthetic construct
  misc_feature 1..20: note = chemically synthesized
  source 1..20: mol_type = other DNA
taggtttaacagtagtataa

SEQ ID NO: 11905 - DNA, 20 bp, synthetic construct
  misc_feature 1..20: note = chemically synthesized
  source 1..20: mol_type = other DNA
gtcacaatcaggaatgacct

SEQ ID NO: 11906 - DNA, 20 bp, synthetic construct
  misc_feature 1..20: note = chemically synthesized
  source 1..20: mol_type = other DNA
tgcattaatactgtctatcc

SEQ ID NO: 11907 - DNA, 20 bp, synthetic construct
  misc_feature 1..20: note = chemically synthesized
  source 1..20: mol_type = other DNA
tatctctggctacaatggct

SEQ ID NO: 11908 - DNA, 20 bp, synthetic construct
  misc_feature 1..20: note = chemically synthesized
  source 1..20: mol_type = other DNA
atcatctcaccacttatata

SEQ ID NO: 11909 - DNA, 20 bp, synthetic construct
  misc_feature 1..20: note = chemically synthesized
  source 1..20: mol_type = other DNA
gtcagctactagatttgatt

SEQ ID NO: 11910 - DNA, 20 bp, synthetic construct
  misc_feature 1..20: note = chemically synthesized
  source 1..20: mol_type = other DNA
ttagttttaaaaatgaagaa

SEQ ID NO: 11911 - DNA, 20 bp, synthetic construct
  misc_feature 1..20: note = chemically synthesized
  source 1..20: mol_type = other DNA
gttttcttcttcttcatttt

SEQ ID NO: 11912 - DNA, 20 bp, synthetic construct
  misc_feature 1..20: note = chemically synthesized
  source 1..20: mol_type = other DNA
tggtcatgtaattcctgtta

SEQ ID NO: 11913 - DNA, 20 bp, synthetic construct
  misc_feature 1..20: note = chemically synthesized
  source 1..20: mol_type = other DNA
tttaaaaaaattaaaagtgg

SEQ ID NO: 11914 - DNA, 20 bp, synthetic construct
  misc_feature 1..20: note = chemically synthesized
  source 1..20: mol_type = other DNA
cttcaatttaaagttttagt

SEQ ID NO: 11915 - DNA, 20 bp, synthetic construct
  misc_feature 1..20: note = chemically synthesized
  source 1..20: mol_type = other DNA
gggataaagaaaatttgttg

SEQ ID NO: 11916 - DNA, 20 bp, synthetic construct
  misc_feature 1..20: note = chemically synthesized
  source 1..20: mol_type = other DNA
acagtttggaattttgaaat

SEQ ID NO: 11917 - DNA, 20 bp, synthetic construct
  misc_feature 1..20: note = chemically synthesized
  source 1..20: mol_type = other DNA
ttgaaattaaaacagttctg

SEQ ID NO: 11918 - DNA, 20 bp, synthetic construct
  misc_feature 1..20: note = chemically synthesized
  source 1..20: mol_type = other DNA
ctaaagagaattgagaaatt

SEQ ID NO: 11919 - DNA, 20 bp, synthetic construct
  misc_feature 1..20: note = chemically synthesized
  source 1..20: mol_type = other DNA
acacatatatgtatatacat

SEQ ID NO: 11920 - DNA, 20 bp, synthetic construct
  misc_feature 1..20: note = chemically synthesized
  source 1..20: mol_type = other DNA
ctaggtagatgtagcttaaa

SEQ ID NO: 11921 - DNA, 20 bp, synthetic construct
  misc_feature 1..20: note = chemically synthesized
  source 1..20: mol_type = other DNA
catttgggcaaccatattct

SEQ ID NO: 11922 - DNA, 20 bp, synthetic construct
  misc_feature 1..20: note = chemically synthesized
  source 1..20: mol_type = other DNA
gctttcagattatttggatt

SEQ ID NO: 11923 - DNA, 20 bp, synthetic construct
  misc_feature 1..20: note = chemically synthesized
  source 1..20: mol_type = other DNA
catgatgttttcttttttgc

SEQ ID NO: 11924 - DNA, 20 bp, synthetic construct
  misc_feature 1..20: note = chemically synthesized
  source 1..20: mol_type = other DNA
tttcagtttttcttgatcat

SEQ ID NO: 11925 - DNA, 20 bp, synthetic construct
  misc_feature 1..20: note = chemically synthesized
  source 1..20: mol_type = other DNA
aagaagcacgagaagttttt

SEQ ID NO: 11926 - DNA, 20 bp, synthetic construct
  misc_feature 1..20: note = chemically synthesized
  source 1..20: mol_type = other DNA
aaaaacttctcgtgcttctt

SEQ ID NO: 11927 - DNA, 20 bp, synthetic construct
  misc_feature 1..20: note = chemically synthesized
  source 1..20: mol_type = other DNA
ttggcgttttcatgatcaag

SEQ ID NO: 11928 - DNA, 20 bp, synthetic construct
  misc_feature 1..20: note = chemically synthesized
  source 1..20: mol_type = other DNA
tctttagttttagcaaaaaa

SEQ ID NO: 11929 - DNA, 20 bp, synthetic construct
  misc_feature 1..20: note = chemically synthesized
  source 1..20: mol_type = other DNA
tgtacagtgtggttgagtga

SEQ ID NO: 11930 - DNA, 20 bp, synthetic construct
  misc_feature 1..20: note = chemically synthesized
  source 1..20: mol_type = other DNA
ctttgcccaaggtaacatac

SEQ ID NO: 11931 - DNA, 20 bp, synthetic construct
  misc_feature 1..20: note = chemically synthesized
  source 1..20: mol_type = other DNA
atagtccatatggaaccata

SEQ ID NO: 11932 - DNA, 20 bp, synthetic construct
  misc_feature 1..20: note = chemically synthesized
  source 1..20: mol_type = other DNA
tctttgatgcatacacttta

SEQ ID NO: 11933 - DNA, 20 bp, synthetic construct
  misc_feature 1..20: note = chemically synthesized
  source 1..20: mol_type = other DNA
taaagtcactgtagttgtga

SEQ ID NO: 11934 - DNA, 20 bp, synthetic construct
  misc_feature 1..20: note = chemically synthesized
  source 1..20: mol_type = other DNA
gttaatctttatgttttaac

SEQ ID NO: 11935 - DNA, 20 bp, synthetic construct
  misc_feature 1..20: note = chemically synthesized
  source 1..20: mol_type = other DNA
gttttaaaaatgaagaagaa

SEQ ID NO: 11936 - DNA, 20 bp, synthetic construct
  misc_feature 1..20: note = chemically synthesized
  source 1..20: mol_type = other DNA
atctactcagtgctgaatgt

SEQ ID NO: 11937 - DNA, 20 bp, synthetic construct
  misc_feature 1..20: note = chemically synthesized
  source 1..20: mol_type = other DNA
actcagtgctgaatgtacag

SEQ ID NO: 11938 - DNA, 20 bp, synthetic construct
  misc_feature 1..20: note = chemically synthesized
  source 1..20: mol_type = other DNA
ccttttttaaaatacattga

SEQ ID NO: 11939 - DNA, 20 bp, synthetic construct
  misc_feature 1..20: note = chemically synthesized
  source 1..20: mol_type = other DNA
atgctgtcttcttcactaaa

SEQ ID NO: 11940 - DNA, 20 bp, synthetic construct
  misc_feature 1..20: note = chemically synthesized
  source 1..20: mol_type = other DNA
ttcttcactaaattttgatt

SEQ ID NO: 11941 - DNA, 20 bp, synthetic construct
  misc_feature 1..20: note = chemically synthesized
  source 1..20: mol_type = other DNA
aagtactggttctttgttag

SEQ ID NO: 11942 - DNA, 20 bp, synthetic construct
  misc_feature 1..20: note = chemically synthesized
  source 1..20: mol_type = other DNA
tttaaaactaaatagatcga

SEQ ID NO: 11943 - DNA, 20 bp, synthetic construct
  misc_feature 1..20: note = chemically synthesized
  source 1..20: mol_type = other DNA
cgacaatgcttatgatgcat

SEQ ID NO: 11944 - DNA, 20 bp, synthetic construct
  misc_feature 1..20: note = chemically synthesized
  source 1..20: mol_type = other DNA
tttaataaacactgttcagt

SEQ ID NO: 11945 - DNA, 20 bp, synthetic construct
  misc_feature 1..20: note = chemically synthesized
  source 1..20: mol_type = other DNA
tgttagaaaacattcatctc

SEQ ID NO: 11946 - DNA, 20 bp, synthetic construct
  misc_feature 1..20: note = chemically synthesized
  source 1..20: mol_type = other DNA
aaaaaaaataaccacattat

SEQ ID NO: 11947 - DNA, 20 bp, synthetic construct
  misc_feature 1..20: note = chemically synthesized
  source 1..20: mol_type = other DNA
tggccttatttacacaaaaa

SEQ ID NO: 11948 - DNA, 20 bp, synthetic construct
  misc_feature 1..20: note = chemically synthesized
  source 1..20: mol_type = other DNA
ttttaagatatatgacattt

SEQ ID NO: 11949 - DNA, 20 bp, synthetic construct
  misc_feature 1..20: note = chemically synthesized
  source 1..20: mol_type = other DNA
taaattatatatcttcaatt

SEQ ID NO: 11950 - DNA, 20 bp, synthetic construct
  misc_feature 1..20: note = chemically synthesized
  source 1..20: mol_type = other DNA
ttaaagttttagttaaaaca

SEQ ID NO: 11951 - DNA, 20 bp, synthetic construct
  misc_feature 1..20: note = chemically synthesized
  source 1..20: mol_type = other DNA
agcaagctgttagttatcac

SEQ ID NO: 11952 - DNA, 20 bp, synthetic construct
  misc_feature 1..20: note = chemically synthesized
  source 1..20: mol_type = other DNA
tagttatcaccaaagctttt

SEQ ID NO: 11953 - DNA, 20 bp, synthetic construct
  misc_feature 1..20: note = chemically synthesized
  source 1..20: mol_type = other DNA
gagttccctaggggagaaaa

SEQ ID NO: 11954 - DNA, 20 bp, synthetic construct
  misc_feature 1..20: note = chemically synthesized
  source 1..20: mol_type = other DNA
agctaatgcaacatatatca

SEQ ID NO: 11955 - DNA, 20 bp, synthetic construct
  misc_feature 1..20: note = chemically synthesized
  source 1..20: mol_type = other DNA
tgagatgatgaaggttgtaa

SEQ ID NO: 11956 - DNA, 20 bp, synthetic construct
  misc_feature 1..20: note = chemically synthesized
  source 1..20: mol_type = other DNA
tagataagaataaggatgaa

SEQ ID NO: 11957 - DNA, 20 bp, synthetic construct
  misc_feature 1..20: note = chemically synthesized
  source 1..20: mol_type = other DNA
taatactaaggagaaaggca

SEQ ID NO: 11958 - DNA, 20 bp, synthetic construct
  misc_feature 1..20: note = chemically synthesized
  source 1..20: mol_type = other DNA
tcttctgctattaaactctc

SEQ ID NO: 11959 - DNA, 20 bp, synthetic construct
  misc_feature 1..20: note = chemically synthesized
  source 1..20: mol_type = other DNA
aactctcattggcttctaaa

SEQ ID NO: 11960 - DNA, 20 bp, synthetic construct
  misc_feature 1..20: note = chemically synthesized
  source 1..20: mol_type = other DNA
cttctaaaaggagtttcggt

SEQ ID NO: 11961 - DNA, 20 bp, synthetic construct
  misc_feature 1..20: note = chemically synthesized
  source 1..20: mol_type = other DNA
ctgcctttaggtattattgc

SEQ ID NO: 11962 - DNA, 20 bp, synthetic construct
  misc_feature 1..20: note = chemically synthesized
  source 1..20: mol_type = other DNA
aattaaaacagttctgtaaa

SEQ ID NO: 11963 - DNA, 20 bp, synthetic construct
  misc_feature 1..20: note = chemically synthesized
  source 1..20: mol_type = other DNA
aaacagttctgtaaaaccag

SEQ ID NO: 11964 - DNA, 20 bp, synthetic construct
  misc_feature 1..20: note = chemically synthesized
  source 1..20: mol_type = other DNA
aagcagcatgaggccaggtg

SEQ ID NO: 11965 - DNA, 20 bp, synthetic construct
  misc_feature 1..20: note = chemically synthesized
  source 1..20: mol_type = other DNA
gaggatcactcgtgcaaaga

SEQ ID NO: 11966 - DNA, 20 bp, synthetic construct
  misc_feature 1..20: note = chemically synthesized
  source 1..20: mol_type = other DNA
gcaagaacgtgaggtatttc

SEQ ID NO: 11967 - DNA, 20 bp, synthetic construct
  misc_feature 1..20: note = chemically synthesized
  source 1..20: mol_type = other DNA
ataatgaagtcattaaccta

SEQ ID NO: 11968 - DNA, 20 bp, synthetic construct
  misc_feature 1..20: note = chemically synthesized
  source 1..20: mol_type = other DNA
acataaggagtaccactgat

SEQ ID NO: 11969 - DNA, 20 bp, synthetic construct
  misc_feature 1..20: note = chemically synthesized
  source 1..20: mol_type = other DNA
tggctagagtcttggggact

SEQ ID NO: 11970 - DNA, 20 bp, synthetic construct
  misc_feature 1..20: note = chemically synthesized
  source 1..20: mol_type = other DNA
tcttggggactttgtgtttg

SEQ ID NO: 11971 - DNA, 20 bp, synthetic construct
  misc_feature 1..20: note = chemically synthesized
  source 1..20: mol_type = other DNA
actgccagagtctgaatcct

SEQ ID NO: 11972 - DNA, 20 bp, synthetic construct
  misc_feature 1..20: note = chemically synthesized
  source 1..20: mol_type = other DNA
taaatattgtgccctacatg

SEQ ID NO: 11973 - DNA, 20 bp, synthetic construct
  misc_feature 1..20: note = chemically synthesized
  source 1..20: mol_type = other DNA
caaagcggggaaccagaata

SEQ ID NO: 11974 - DNA, 20 bp, synthetic construct
  misc_feature 1..20: note = chemically synthesized
  source 1..20: mol_type = other DNA
aatagagtgattattataaa

SEQ ID NO: 11975 - DNA, 20 bp, synthetic construct
  misc_feature 1..20: note = chemically synthesized
  source 1..20: mol_type = other DNA
aaaattattctttaggtcat

SEQ ID NO: 11976 - DNA, 20 bp, synthetic construct
  misc_feature 1..20: note = chemically synthesized
  source 1..20: mol_type = other DNA
atagtcatttcattatataa

SEQ ID NO: 11977 - DNA, 20 bp, synthetic construct
  misc_feature 1..20: note = chemically synthesized
  source 1..20: mol_type = other DNA
catttgacaaagttaaggtt

SEQ ID NO: 11978 - DNA, 20 bp, synthetic construct
  misc_feature 1..20: note = chemically synthesized
  source 1..20: mol_type = other DNA
caggtctagaggaggcagat

SEQ ID NO: 11979 - DNA, 20 bp, synthetic construct
  misc_feature 1..20: note = chemically synthesized
  source 1..20: mol_type = other DNA
ttcaaacctatttctgtctg

SEQ ID NO: 11980 - DNA, 20 bp, synthetic construct
  misc_feature 1..20: note = chemically synthesized
  source 1..20: mol_type = other DNA
ctgtctgatctgattctaaa

SEQ ID NO: 11981 - DNA, 20 bp, synthetic construct
  misc_feature 1..20: note = chemically synthesized
  source 1..20: mol_type = other DNA
ctccttgtgagttccacagc

SEQ ID NO: 11982 - DNA, 20 bp, synthetic construct
  misc_feature 1..20: note = chemically synthesized
  source 1..20: mol_type = other DNA
agctattaagagaaacctag

SEQ ID NO: 11983 - DNA, 20 bp, synthetic construct
  misc_feature 1..20: note = chemically synthesized
  source 1..20: mol_type = other DNA
gatttaaagtacaaaggagg

SEQ ID NO: 11984 - DNA, 20 bp, synthetic construct
  misc_feature 1..20: note = chemically synthesized
  source 1..20: mol_type = other DNA
ggtggcatccatctgcattt

SEQ ID NO: 11985 - DNA, 20 bp, synthetic construct
  misc_feature 1..20: note = chemically synthesized
  source 1..20: mol_type = other DNA
tggctgctccaatttagggg

SEQ ID NO: 11986 - DNA, 20 bp, synthetic construct
  misc_feature 1..20: note = chemically synthesized
  source 1..20: mol_type = other DNA
acaaggtgaaatggtgaaac

SEQ ID NO: 11987 - DNA, 20 bp, synthetic construct
  misc_feature 1..20: note = chemically synthesized
  source 1..20: mol_type = other DNA
ttgggaggctgaggcaggag

SEQ ID NO: 11988 - DNA, 20 bp, synthetic construct
  misc_feature 1..20: note = chemically synthesized
  source 1..20: mol_type = other DNA
ctgcaatgaaaataagggaa

SEQ ID NO: 11989 - DNA, 20 bp, synthetic construct
  misc_feature 1..20: note = chemically synthesized
  source 1..20: mol_type = other DNA
gggaagaaagtttagttcat

SEQ ID NO: 11990 - DNA, 20 bp, synthetic construct
  misc_feature 1..20: note = chemically synthesized
  source 1..20: mol_type = other DNA
acttacctaaacctaaatgg

SEQ ID NO: 11991 - DNA, 20 bp, synthetic construct
  misc_feature 1..20: note = chemically synthesized
  source 1..20: mol_type = other DNA
ccaaaatgtcattgtgcagc

SEQ ID NO: 11992 - DNA, 20 bp, synthetic construct
  misc_feature 1..20: note = chemically synthesized
  source 1..20: mol_type = other DNA
aaggagggagggaaggagaa

SEQ ID NO: 11993 - DNA, 20 bp, synthetic construct
  misc_feature 1..20: note = chemically synthesized
  source 1..20: mol_type = other DNA
gtctcttcagactaggtaga

SEQ ID NO: 11994 - DNA, 20 bp, synthetic construct
  misc_feature 1..20: note = chemically synthesized
  source 1..20: mol_type = other DNA
acatatcctgaattctagag

SEQ ID NO: 11995 - DNA, 20 bp, synthetic construct
  misc_feature 1..20: note = chemically synthesized
  source 1..20: mol_type = other DNA
caaaggtgctgttgatctga

SEQ ID NO: 11996 - DNA, 20 bp, synthetic construct
  misc_feature 1..20: note = chemically synthesized
  source 1..20: mol_type = other DNA
attgcttttttaaattaatg

SEQ ID NO: 11997 - DNA, 20 bp, synthetic construct
  misc_feature 1..20: note = chemically synthesized
  source 1..20: mol_type = other DNA
catttgcagctggaccataa

SEQ ID NO: 11998 - DNA, 20 bp, synthetic construct
  misc_feature 1..20: note = chemically synthesized
  source 1..20: mol_type = other DNA
ttcatccaaagtaaattcaa

SEQ ID NO: 11999 - DNA, 20 bp, synthetic construct
  misc_feature 1..20: note = chemically synthesized
  source 1..20: mol_type = other DNA
atacagtactgtgggaacat

SEQ ID NO: 12000 - DNA, 20 bp, synthetic construct
  misc_feature 1..20: note = chemically synthesized
  source 1..20: mol_type = other DNA
gctccatgccctaaagagaa

SEQ ID NO: 12001 - DNA, 20 bp, synthetic construct
  misc_feature 1..20: note = chemically synthesized
  source 1..20: mol_type = other DNA
gccctaaagagaaattggct

SEQ ID NO: 12002 - DNA, 20 bp, synthetic construct
  misc_feature 1..20: note = chemically synthesized
  source 1..20: mol_type = other DNA
agaaattggctttcagatta

SEQ ID NO: 12003 - DNA, 20 bp, synthetic construct
  misc_feature 1..20: note = chemically synthesized
  source 1..20: mol_type = other DNA
taagagatgtaaaattttca

SEQ ID NO: 12004 - DNA, 20 bp, synthetic construct
  misc_feature 1..20: note = chemically synthesized
  source 1..20: mol_type = other DNA
aaagaattattcttttacat

SEQ ID NO: 12005 - DNA, 20 bp, synthetic construct
  misc_feature 1..20: note = chemically synthesized
  source 1..20: mol_type = other DNA
gtataattcaggtaaattgg

SEQ ID NO: 12006 - DNA, 20 bp, synthetic construct
  misc_feature 1..20: note = chemically synthesized
  source 1..20: mol_type = other DNA
gagaatgtatggaagaaaag

SEQ ID NO: 12007 - DNA, 20 bp, synthetic construct
  misc_feature 1..20: note = chemically synthesized
  source 1..20: mol_type = other DNA
tgtagttttgaagaagcacg

SEQ ID NO: 12008 - DNA, 20 bp, synthetic construct
  misc_feature 1..20: note = chemically synthesized
  source 1..20: mol_type = other DNA
tcagtgttttcaaaaacttc

SEQ ID NO: 12009 - DNA, 20 bp, synthetic construct
  misc_feature 1..20: note = chemically synthesized
  source 1..20: mol_type = other DNA
tacctgaattatacctcttt

SEQ ID NO: 12010 - DNA, 20 bp, synthetic construct
  misc_feature 1..20: note = chemically synthesized
  source 1..20: mol_type = other DNA
tggccgattcagaattttgt

SEQ ID NO: 12011 - DNA, 20 bp, synthetic construct
  misc_feature 1..20: note = chemically synthesized
  source 1..20: mol_type = other DNA
gaaatgtaaaagaataattc

SEQ ID NO: 12012 - DNA, 20 bp, synthetic construct
  misc_feature 1..20: note = chemically synthesized
  source 1..20: mol_type = other DNA
tttacatctcttaagaaagt

SEQ ID NO: 12013 - DNA, 20 bp, synthetic construct
  misc_feature 1..20: note = chemically synthesized
  source 1..20: mol_type = other DNA
cccacagtactgtatacaca

SEQ ID NO: 12014 - DNA, 20 bp, synthetic construct
  misc_feature 1..20: note = chemically synthesized
  source 1..20: mol_type = other DNA
gagaattccagtaataaaag

SEQ ID NO: 12015 - DNA, 20 bp, synthetic construct
  misc_feature 1..20: note = chemically synthesized
  source 1..20: mol_type = other DNA
gtgatccatcaccctggctg

SEQ ID NO: 12016 - DNA, 20 bp, synthetic construct
  misc_feature 1..20: note = chemically synthesized
  source 1..20: mol_type = other DNA
ggcaagtgttataggaattg

SEQ ID NO: 12017 - DNA, 20 bp, synthetic construct
  misc_feature 1..20: note = chemically synthesized
  source 1..20: mol_type = other DNA
gcatctctctagaattcagg

SEQ ID NO: 12018 - DNA, 20 bp, synthetic construct
  misc_feature 1..20: note = chemically synthesized
  source 1..20: mol_type = other DNA
gtattttcactgtacctttt

SEQ ID NO: 12019 - DNA, 20 bp, synthetic construct
  misc_feature 1..20: note = chemically synthesized
  source 1..20: mol_type = other DNA
tcagtacagtcacatgctgt

SEQ ID NO: 12020 - DNA, 20 bp, synthetic construct
  misc_feature 1..20: note = chemically synthesized
  source 1..20: mol_type = other DNA
tatgtagtaagctataccat

SEQ ID NO: 12021 - DNA, 20 bp, synthetic construct
  misc_feature 1..20: note = chemically synthesized
  source 1..20: mol_type = other DNA
ttatgttcgcacaatgatga

SEQ ID NO: 12022 - DNA, 20 bp, synthetic construct
  misc_feature 1..20: note = chemically synthesized
  source 1..20: mol_type = other DNA
gcatggctgtatacacacac

SEQ ID NO: 12023 - DNA, 20 bp, synthetic construct
  misc_feature 1..20: note = chemically synthesized
  source 1..20: mol_type = other DNA
gtatacacacacatgtgttt

SEQ ID NO: 12024 - DNA, 20 bp, synthetic construct
  misc_feature 1..20: note = chemically synthesized
  source 1..20: mol_type = other DNA
gataccatctcaagaggacc

SEQ ID NO: 12025 - DNA, 20 bp, synthetic construct
  misc_feature 1..20: note = chemically synthesized
  source 1..20: mol_type = other DNA
ctggggtatttgggactact

SEQ ID NO: 12026 - DNA, 20 bp, synthetic construct
  misc_feature 1..20: note = chemically synthesized
  source 1..20: mol_type = other DNA
gtgttctagtcccttgacat

SEQ ID NO: 12027 - DNA, 20 bp, synthetic construct
  misc_feature 1..20: note = chemically synthesized
  source 1..20: mol_type = other DNA
tgcctcagcctcccaagtag

SEQ ID NO: 12028 - DNA, 20 bp, synthetic construct
  misc_feature 1..20: note = chemically synthesized
  source 1..20: mol_type = other DNA
ttttgtatttttagtaaagc

SEQ ID NO: 12029 - DNA, 20 bp, synthetic construct
  misc_feature 1..20: note = chemically synthesized
  source 1..20: mol_type = other DNA
tgcctgggcctctgaaagtg

SEQ ID NO: 12030 - DNA, 20 bp, synthetic construct
  misc_feature 1..20: note = chemically synthesized
  source 1..20: mol_type = other DNA
catatttctcaatttccttc

SEQ ID NO: 12031 - DNA, 20 bp, synthetic construct
  misc_feature 1..20: note = chemically synthesized
  source 1..20: mol_type = other DNA
gctcaagtctccgatataaa

SEQ ID NO: 12032 - DNA, 20 bp, synthetic construct
  misc_feature 1..20: note = chemically synthesized
  source 1..20: mol_type = other DNA
ctttgtactttaaatcatct

SEQ ID NO: 12033 - DNA, 20 bp, synthetic construct
  misc_feature 1..20: note = chemically synthesized
  source 1..20: mol_type = other DNA
tgtaaatagttgttatgctg

SEQ ID NO: 12034 - DNA, 20 bp, synthetic construct
  misc_feature 1..20: note = chemically synthesized
  source 1..20: mol_type = other DNA
tagaatcagatcagacagaa

SEQ ID NO: 12035 - DNA, 20 bp, synthetic construct
  misc_feature 1..20: note = chemically synthesized
  source 1..20: mol_type = other DNA
ttaactttgtcaaatgtaaa

SEQ ID NO: 12036 - DNA, 20 bp, synthetic construct
  misc_feature 1..20: note = chemically synthesized
  source 1..20: mol_type = other DNA
ttcatgttggccctactttc

SEQ ID NO: 12037 - DNA, 20 bp, synthetic construct
  misc_feature 1..20: note = chemically synthesized
  source 1..20: mol_type = other DNA
gaatgacctaaagaataatt

SEQ ID NO: 12038 - DNA, 20 bp, synthetic construct
  misc_feature 1..20: note = chemically synthesized
  source 1..20: mol_type = other DNA
ataatcactctattctggtt

SEQ ID NO: 12039 - DNA, 20 bp, synthetic construct
  misc_feature 1..20: note = chemically synthesized
  source 1..20: mol_type = other DNA
tgttatccatccagcacttg

SEQ ID NO: 12040 - DNA, 20 bp, synthetic construct
  misc_feature 1..20: note = chemically synthesized
  source 1..20: mol_type = other DNA
gggttctcccaggctccagc

SEQ ID NO: 12041 - DNA, 20 bp, synthetic construct
  misc_feature 1..20: note = chemically synthesized
  source 1..20: mol_type = other DNA
gtatatttatgccctacagg

SEQ ID NO: 12042 - DNA, 20 bp, synthetic construct
  misc_feature 1..20: note = chemically synthesized
  source 1..20: mol_type = other DNA
cccacacacgtggctgtaac

SEQ ID NO: 12043 - DNA, 20 bp, synthetic construct
  misc_feature 1..20: note = chemically synthesized
  source 1..20: mol_type = other DNA
gtcagatacgtctcctgaat

SEQ ID NO: 12044 - DNA, 20 bp, synthetic construct
  misc_feature 1..20: note = chemically synthesized
  source 1..20: mol_type = other DNA
agtaatagctaatgtatatg

SEQ ID NO: 12045 - DNA, 20 bp, synthetic construct
  misc_feature 1..20: note = chemically synthesized
  source 1..20: mol_type = other DNA
ttatttttatgaatgaggaa

SEQ ID NO: 12046 - DNA, 20 bp, synthetic construct
  misc_feature 1..20: note = chemically synthesized
  source 1..20: mol_type = other DNA
aagatagattcatagaggct

SEQ ID NO: 12047 - DNA, 20 bp, synthetic construct
  misc_feature 1..20: note = chemically synthesized
  source 1..20: mol_type = other DNA
aaggtaacatactaaaacat

SEQ ID NO: 12048 - DNA, 20 bp, synthetic construct
  misc_feature 1..20: note = chemically synthesized
  source 1..20: mol_type = other DNA
tcagccatcagtggtactcc

SEQ ID NO: 12049 - DNA, 20 bp, synthetic construct
  misc_feature 1..20: note = chemically synthesized
  source 1..20: mol_type = other DNA
ttatctgatgaccagctctg

SEQ ID NO: 12050 - DNA, 20 bp, synthetic construct
  misc_feature 1..20: note = chemically synthesized
  source 1..20: mol_type = other DNA
gaaaatattctctctctatc

SEQ ID NO: 12051 - DNA, 20 bp, synthetic construct
  misc_feature 1..20: note = chemically synthesized
  source 1..20: mol_type = other DNA
aaacctctcacctggcctca

SEQ ID NO: 12052 - DNA, 20 bp, synthetic construct
  misc_feature 1..20: note = chemically synthesized
  source 1..20: mol_type = other DNA
gctttagatcaaagagggag

SEQ ID NO: 12053 - DNA, 20 bp, synthetic construct
  misc_feature 1..20: note = chemically synthesized
  source 1..20: mol_type = other DNA
catacactttacaaaactaa

SEQ ID NO: 12054 - DNA, 20 bp, synthetic construct
  misc_feature 1..20: note = chemically synthesized
  source 1..20: mol_type = other DNA
aaactaaactggttttacag

SEQ ID NO: 12055 - DNA, 20 bp, synthetic construct
  misc_feature 1..20: note = chemically synthesized
  source 1..20: mol_type = other DNA
aactccttttagaagccaat

SEQ ID NO: 12056 - DNA, 20 bp, synthetic construct
  misc_feature 1..20: note = chemically synthesized
  source 1..20: mol_type = other DNA
attcccctggccccttcctc

SEQ ID NO: 12057 - DNA, 20 bp, synthetic construct
  misc_feature 1..20: note = chemically synthesized
  source 1..20: mol_type = other DNA
atcgtatacttaacttccct

SEQ ID NO: 12058 - DNA, 20 bp, synthetic construct
  misc_feature 1..20: note = chemically synthesized
  source 1..20: mol_type = other DNA
ctcaccacttatatagaaga

SEQ ID NO: 12059 - DNA, 20 bp, synthetic construct
  misc_feature 1..20: note = chemically synthesized
  source 1..20: mol_type = other DNA
ttatatagaagaaagggttt

SEQ ID NO: 12060 - DNA, 20 bp, synthetic construct
  misc_feature 1..20: note = chemically synthesized
  source 1..20: mol_type = other DNA
taatgagatatatctaatgg

SEQ ID NO: 12061 - DNA, 20 bp, synthetic construct
  misc_feature 1..20: note = chemically synthesized
  source 1..20: mol_type = other DNA
tctaatggccttgctttatg

SEQ ID NO: 12062 - DNA, 20 bp, synthetic construct
  misc_feature 1..20: note = chemically synthesized
  source 1..20: mol_type = other DNA
cttgctttatgtcctgcttt

SEQ ID NO: 12063 - DNA, 20 bp, synthetic construct
  misc_feature 1..20: note = chemically synthesized
  source 1..20: mol_type = other DNA
cccttgactttactcacttt

SEQ ID NO: 12064 - DNA, 20 bp, synthetic construct
  misc_feature 1..20: note = chemically synthesized
  source 1..20: mol_type = other DNA
atcgttatttcagcatttca

SEQ ID NO: 12065 - DNA, 20 bp, synthetic construct
  misc_feature 1..20: note = chemically synthesized
  source 1..20: mol_type = other DNA
gagtgggaaccacagggcca

SEQ ID NO: 12066 - DNA, 20 bp, synthetic construct
  misc_feature 1..20: note = chemically synthesized
  source 1..20: mol_type = other DNA
agggccagtcagctttctgg

SEQ ID NO: 12067 - DNA, 20 bp, synthetic construct
  misc_feature 1..20: note = chemically synthesized
  source 1..20: mol_type = other DNA
tgatcctggtactgtcagct

SEQ ID NO: 12068 - DNA, 20 bp, synthetic construct
  misc_feature 1..20: note = chemically synthesized
  source 1..20: mol_type = other DNA
ctggtactgtcagctactag

SEQ ID NO: 12069 - DNA, 20 bp, synthetic construct
  misc_feature 1..20: note = chemically synthesized
  source 1..20: mol_type = other DNA
agttgacaagtaagtgtgat

SEQ ID NO: 12070 - DNA, 20 bp, synthetic construct
  misc_feature 1..20: note = chemically synthesized
  source 1..20: mol_type = other DNA
aaatgcttcctgtgagaaca

SEQ ID NO: 12071 - DNA, 20 bp, synthetic construct
  misc_feature 1..20: note = chemically synthesized
  source 1..20: mol_type = other DNA
cctactctttatgtcaattc

SEQ ID NO: 12072 - DNA, 20 bp, synthetic construct
  misc_feature 1..20: note = chemically synthesized
  source 1..20: mol_type = other DNA
ctctttatgtcaattcttaa

SEQ ID NO: 12073 - DNA, 20 bp, synthetic construct
  misc_feature 1..20: note = chemically synthesized
  source 1..20: mol_type = other DNA
ctagggaactcaactgagta

SEQ ID NO: 12074 - DNA, 20 bp, synthetic construct
  misc_feature 1..20: note = chemically synthesized
  source 1..20: mol_type = other DNA
ttccccaaatatcaactcca

SEQ ID NO: 12075 - DNA, 20 bp, synthetic construct
  misc_feature 1..20: note = chemically synthesized
  source 1..20: mol_type = other DNA
agatgtttgacatagagaca

SEQ ID NO: 12076 - DNA, 20 bp, synthetic construct
  misc_feature 1..20: note = chemically synthesized
  source 1..20: mol_type = other DNA
tgattttttcctaatccatg

SEQ ID NO: 12077 - DNA, 20 bp, synthetic construct
  misc_feature 1..20: note = chemically synthesized
  source 1..20: mol_type = other DNA
gaaaagctttggtgataact

SEQ ID NO: 12078 - DNA, 20 bp, synthetic construct
  misc_feature 1..20: note = chemically synthesized
  source 1..20: mol_type = other DNA
tgctaatgaaaggttaatct

SEQ ID NO: 12079 - DNA, 20 bp, synthetic construct
  misc_feature 1..20: note = chemically synthesized
  source 1..20: mol_type = other DNA
actttttgtgtaaataaggc

SEQ ID NO: 12080 - DNA, 20 bp, synthetic construct
  misc_feature 1..20: note = chemically synthesized
  source 1..20: mol_type = other DNA
tgtgtaaataaggccattgt

SEQ ID NO: 12081 - DNA, 20 bp, synthetic construct
  misc_feature 1..20: note = chemically synthesized
  source 1..20: mol_type = other DNA
aataaggccattgtttgtgc

SEQ ID NO: 12082 - DNA, 20 bp, synthetic construct
  misc_feature 1..20: note = chemically synthesized
  source 1..20: mol_type = other DNA
gtttgtgcttttgtttccca

SEQ ID NO: 12083 - DNA, 20 bp, synthetic construct
  misc_feature 1..20: note = chemically synthesized
  source 1..20: mol_type = other DNA
ttcactatattctgctattt

SEQ ID NO: 12084 - DNA, 20 bp, synthetic construct
  misc_feature 1..20: note = chemically synthesized
  source 1..20: mol_type = other DNA
tttttttaaaccaaggagat

SEQ ID NO: 12085 - DNA, 20 bp, synthetic construct
  misc_feature 1..20: note = chemically synthesized
  source 1..20: mol_type = other DNA
tgaccaaatcatgaactgaa

SEQ ID NO: 12086 - DNA, 20 bp, synthetic construct
  misc_feature 1..20: note = chemically synthesized
  source 1..20: mol_type = other DNA
tcataagcattgtcgatcta

SEQ ID NO: 12087 - DNA, 20 bp, synthetic construct
  misc_feature 1..20: note = chemically synthesized
  source 1..20: mol_type = other DNA
aggcagatggtgatgaggcc

SEQ ID NO: 12088 - DNA, 20 bp, synthetic construct
  misc_feature 1..20: note = chemically synthesized
  source 1..20: mol_type = other DNA
cgcgctgcataacctttgct

SEQ ID NO: 12089 - DNA, 22 bp, synthetic construct
  misc_feature 1..22: note = chemically synthesized
  source 1..22: mol_type = other DNA
tcacaatctgctagcaaaggtt

SEQ ID NO: 12090 - DNA, 22 bp, synthetic construct
  misc_feature 1..22: note = chemically synthesized
  source 1..22: mol_type = other DNA
cacaatctgctagcaaaggtta

SEQ ID NO: 12091 - DNA, 22 bp, synthetic construct
  misc_feature 1..22: note = chemically synthesized
  source 1..22: mol_type = other DNA
acaatctgctagcaaaggttat

SEQ ID NO: 12092 - DNA, 22 bp, synthetic construct
  misc_feature 1..22: note = chemically synthesized
  source 1..22: mol_type = other DNA
ctagcaaaggttatgcagcgcg

SEQ ID NO: 12093 - DNA, 22 bp, synthetic construct
  misc_feature 1..22: note = chemically synthesized
  source 1..22: mol_type = other DNA
gcaaaggttatgcagcgcgtga

SEQ ID NO: 12094 - DNA, 22 bp, synthetic construct
  misc_feature 1..22: note = chemically synthesized
  source 1..22: mol_type = other DNA
tgcagcgcgtgaacatgatcat

SEQ ID NO: 12095 - DNA, 22 bp, synthetic construct
  misc_feature 1..22: note = chemically synthesized
  source 1..22: mol_type = other DNA
atcaccatctgccttttaggat

SEQ ID NO: 12096 - DNA, 22 bp, synthetic construct
  misc_feature 1..22: note = chemically synthesized
  source 1..22: mol_type = other DNA
ccttttaggatatctactcagt

SEQ ID NO: 12097 - DNA, 22 bp, synthetic construct
  misc_feature 1..22: note = chemically synthesized
  source 1..22: mol_type = other DNA
ttaggatatctactcagtgctg

SEQ ID NO: 12098 - DNA, 22 bp, synthetic construct
  misc_feature 1..22: note = chemically synthesized
  source 1..22: mol_type = other DNA
taggatatctactcagtgctga

SEQ ID NO: 12099 - DNA, 22 bp, synthetic construct
  misc_feature 1..22: note = chemically synthesized
  source 1..22: mol_type = other DNA
aggatatctactcagtgctgaa

SEQ ID NO: 12100 - DNA, 22 bp, synthetic construct
  misc_feature 1..22: note = chemically synthesized
  source 1..22: mol_type = other DNA
ggatatctactcagtgctgaat

SEQ ID NO: 12101 - DNA, 22 bp, synthetic construct
  misc_feature 1..22: note = chemically synthesized
  source 1..22: mol_type = other DNA
ctcagtgctgaatgtacaggtt

SEQ ID NO: 12102 - DNA, 22 bp, synthetic construct
  misc_feature 1..22: note = chemically synthesized
  source 1..22: mol_type = other DNA
agtgctgaatgtacaggtttgt

SEQ ID NO: 12103 - DNA, 22 bp, synthetic construct
  misc_feature 1..22: note = chemically synthesized
  source 1..22: mol_type = other DNA
aatgtacaggtttgtttccttt

SEQ ID NO: 12104 - DNA, 22 bp, synthetic construct
  misc_feature 1..22: note = chemically synthesized
  source 1..22: mol_type = other DNA
gtttccttttttaaaatacatt

SEQ ID NO: 12105 - DNA, 22 bp, synthetic construct
  misc_feature 1..22: note = chemically synthesized
  source 1..22: mol_type = other DNA
tttccttttttaaaatacattg

SEQ ID NO: 12106 - DNA, 22 bp, synthetic construct
  misc_feature 1..22: note = chemically synthesized
  source 1..22: mol_type = other DNA
ccttttttaaaatacattgagt

SEQ ID NO: 12107 - DNA, 22 bp, synthetic construct
  misc_feature 1..22: note = chemically synthesized
  source 1..22: mol_type = other DNA
cttttttaaaatacattgagta

SEQ ID NO: 12108 - DNA, 22 bp, synthetic construct
  misc_feature 1..22: note = chemically synthesized
  source 1..22: mol_type = other DNA
ttttaaaatacattgagtatgc

SEQ ID NO: 12109 - DNA, 22 bp, synthetic construct
  misc_feature 1..22: note = chemically synthesized
  source 1..22: mol_type = other DNA
tttaaaatacattgagtatgct

SEQ ID NO: 12110 - DNA, 22 bp, synthetic construct
  misc_feature 1..22: note = chemically synthesized
  source 1..22: mol_type = other DNA
ttaaaatacattgagtatgctt

SEQ ID NO: 12111 - DNA, 22 bp, synthetic construct
  misc_feature 1..22: note = chemically synthesized
  source 1..22: mol_type = other DNA
taaaatacattgagtatgcttg

SEQ ID NO: 12112 - DNA, 22 bp, synthetic construct
  misc_feature 1..22: note = chemically synthesized
  source 1..22: mol_type = other DNA
aaaatacattgagtatgcttgc

SEQ ID NO: 12113 - DNA, 22 bp, synthetic construct
  misc_feature 1..22: note = chemically synthesized
  source 1..22: mol_type = other DNA
aaatacattgagtatgcttgcc

SEQ ID NO: 12114 - DNA, 22 bp, synthetic construct
  misc_feature 1..22: note = chemically synthesized
  source 1..22: mol_type = other DNA
agtatgcttgccttttagatat

SEQ ID NO: 12115 - DNA, 22 bp, synthetic construct
  misc_feature 1..22: note = chemically synthesized
  source 1..22: mol_type = other DNA
gccttttagatatagaaatatc

SEQ ID NO: 12116 - DNA, 22 bp, synthetic construct
  misc_feature 1..22: note = chemically synthesized
  source 1..22: mol_type = other DNA
ccttttagatatagaaatatct

SEQ ID NO: 12117 - DNA, 22 bp, synthetic construct
  misc_feature 1..22: note = chemically synthesized
  source 1..22: mol_type = other DNA
ttagatatagaaatatctgatg

SEQ ID NO: 12118 - DNA, 22 bp, synthetic construct
  misc_feature 1..22: note = chemically synthesized
  source 1..22: mol_type = other DNA
tagatatagaaatatctgatgc

SEQ ID NO: 12119 - DNA, 22 bp, synthetic construct
  misc_feature 1..22: note = chemically synthesized
  source 1..22: mol_type = other DNA
agatatagaaatatctgatgct

SEQ ID NO: 12120 - DNA, 22 bp, synthetic construct
  misc_feature 1..22: note = chemically synthesized
  source 1..22: mol_type = other DNA
gatatagaaatatctgatgctg

SEQ ID NO: 12121 - DNA, 22 bp, synthetic construct
  misc_feature 1..22: note = chemically synthesized
  source 1..22: mol_type = other DNA
atgctgtcttcttcactaaatt

SEQ ID NO: 12122 - DNA, 22 bp, synthetic construct
  misc_feature 1..22: note = chemically synthesized
  source 1..22: mol_type = other DNA
tcttcttcactaaattttgatt

SEQ ID NO: 12123 - DNA, 22 bp, synthetic construct
  misc_feature 1..22: note = chemically synthesized
  source 1..22: mol_type = other DNA
cttcactaaattttgattacat

SEQ ID NO: 12124 - DNA, 22 bp, synthetic construct
  misc_feature 1..22: note = chemically synthesized
  source 1..22: mol_type = other DNA
ttcactaaattttgattacatg

SEQ ID NO: 12125 - DNA, 22 bp, synthetic construct
  misc_feature 1..22: note = chemically synthesized
  source 1..22: mol_type = other DNA
cactaaattttgattacatgat

SEQ ID NO: 12126 - DNA, 22 bp, synthetic construct
  misc_feature 1..22: note = chemically synthesized
  source 1..22: mol_type = other DNA
actaaattttgattacatgatt

SEQ ID NO: 12127 - DNA, 22 bp, synthetic construct
  misc_feature 1..22: note = chemically synthesized
  source 1..22: mol_type = other DNA
aattttgattacatgatttgac

SEQ ID NO: 12128 - DNA, 22 bp, synthetic construct
  misc_feature 1..22: note = chemically synthesized
  source 1..22: mol_type = other DNA
tgattacatgatttgacagcaa

SEQ ID NO: 12129 - DNA, 22 bp, synthetic construct
  misc_feature 1..22: note = chemically synthesized
  source 1..22: mol_type = other DNA
gattacatgatttgacagcaat

SEQ ID NO: 12130 - DNA, 22 bp, synthetic construct
  misc_feature 1..22: note = chemically synthesized
  source 1..22: mol_type = other DNA
attacatgatttgacagcaata

SEQ ID NO: 12131 - DNA, 22 bp, synthetic construct
  misc_feature 1..22: note = chemically synthesized
  source 1..22: mol_type = other DNA
catgatttgacagcaatattga

SEQ ID NO: 12132 - DNA, 22 bp, synthetic construct
  misc_feature 1..22: note = chemically synthesized
  source 1..22: mol_type = other DNA
gacagcaatattgaagagtcta

SEQ ID NO: 12133 - DNA, 22 bp, synthetic construct
  misc_feature 1..22: note = chemically synthesized
  source 1..22: mol_type = other DNA
acagcaatattgaagagtctaa

SEQ ID NO: 12134 - DNA, 22 bp, synthetic construct
  misc_feature 1..22: note = chemically synthesized
  source 1..22: mol_type = other DNA
aagagtctaacagccagcacgc

SEQ ID NO: 12135 - DNA, 22 bp, synthetic construct
  misc_feature 1..22: note = chemically synthesized
  source 1..22: mol_type = other DNA
acagccagcacgcaggttggta

SEQ ID NO: 12136 - DNA, 22 bp, synthetic construct
  misc_feature 1..22: note = chemically synthesized
  source 1..22: mol_type = other DNA
gtaagtactggttctttgttag

SEQ ID NO: 12137 - DNA, 22 bp, synthetic construct
  misc_feature 1..22: note = chemically synthesized
  source 1..22: mol_type = other DNA
gttctttgttagctaggttttc

SEQ ID NO: 12138 - DNA, 22 bp, synthetic construct
  misc_feature 1..22: note = chemically synthesized
  source 1..22: mol_type = other DNA
tttgttagctaggttttcttct

SEQ ID NO: 12139 - DNA, 22 bp, synthetic construct
  misc_feature 1..22: note = chemically synthesized
  source 1..22: mol_type = other DNA
tgttagctaggttttcttcttc

SEQ ID NO: 12140 - DNA, 22 bp, synthetic construct
  misc_feature 1..22: note = chemically synthesized
  source 1..22: mol_type = other DNA
gttagctaggttttcttcttct

SEQ ID NO: 12141 - DNA, 22 bp, synthetic construct
  misc_feature 1..22: note = chemically synthesized
  source 1..22: mol_type = other DNA
ttagctaggttttcttcttctt

SEQ ID NO: 12142 - DNA, 22 bp, synthetic construct
  misc_feature 1..22: note = chemically synthesized
  source 1..22: mol_type = other DNA
gctaggttttcttcttcttcat

SEQ ID NO: 12143 - DNA, 22 bp, synthetic construct
  misc_feature 1..22: note = chemically synthesized
  source 1..22: mol_type = other DNA
ggttttcttcttcttcattttt

SEQ ID NO: 12144 - DNA, 22 bp, synthetic construct
  misc_feature 1..22: note = chemically synthesized
  source 1..22: mol_type = other DNA
tcttcttcttcatttttaaaac

SEQ ID NO: 12145 - DNA, 22 bp, synthetic construct
  misc_feature 1..22: note = chemically synthesized
  source 1..22: mol_type = other DNA
cttcttcttcatttttaaaact

SEQ ID NO: 12146 - DNA, 22 bp, synthetic construct
  misc_feature 1..22: note = chemically synthesized
  source 1..22: mol_type = other DNA
ttcttcttcatttttaaaacta

SEQ ID NO: 12147 - DNA, 22 bp, synthetic construct
  misc_feature 1..22: note = chemically synthesized
  source 1..22: mol_type = other DNA
cttcttcatttttaaaactaaa

SEQ ID NO: 12148 - DNA, 22 bp, synthetic construct
  misc_feature 1..22: note = chemically synthesized
  source 1..22: mol_type = other DNA
ttcttcatttttaaaactaaat

SEQ ID NO: 12149 - DNA, 22 bp, synthetic construct
  misc_feature 1..22: note = chemically synthesized
  source 1..22: mol_type = other DNA
cttcatttttaaaactaaatag

SEQ ID NO: 12150 - DNA, 22 bp, synthetic construct
  misc_feature 1..22: note = chemically synthesized
  source 1..22: mol_type = other DNA
ttcatttttaaaactaaataga

SEQ ID NO: 12151 - DNA, 22 bp, synthetic construct
  misc_feature 1..22: note = chemically synthesized
  source 1..22: mol_type = other DNA
catttttaaaactaaatagatc

SEQ ID NO: 12152 - DNA, 22 bp, synthetic construct
  misc_feature 1..22: note = chemically synthesized
  source 1..22: mol_type = other DNA
atttttaaaactaaatagatcg

SEQ ID NO: 12153 - DNA, 22 bp, synthetic construct
  misc_feature 1..22: note = chemically synthesized
  source 1..22: mol_type = other DNA
ttaaaactaaatagatcgacaa

SEQ ID NO: 12154 - DNA, 22 bp, synthetic construct
  misc_feature 1..22: note = chemically synthesized
  source 1..22: mol_type = other DNA
taaaactaaatagatcgacaat

SEQ ID NO: 12155 - DNA, 22 bp, synthetic construct
  misc_feature 1..22: note = chemically synthesized
  source 1..22: mol_type = other DNA
aaaactaaatagatcgacaatg

SEQ ID NO: 12156 - DNA, 22 bp, synthetic construct
  misc_feature 1..22: note = chemically synthesized
  source 1..22: mol_type = other DNA
aaactaaatagatcgacaatgc

SEQ ID NO: 12157 - DNA, 22 bp, synthetic construct
  misc_feature 1..22: note = chemically synthesized
  source 1..22: mol_type = other DNA
aatagatcgacaatgcttatga

SEQ ID NO: 12158 - DNA, 22 bp, synthetic construct
  misc_feature 1..22: note = chemically synthesized
  source 1..22: mol_type = other DNA
atgatgcatttatgtttaataa

SEQ ID NO: 12159 - DNA, 22 bp, synthetic construct
  misc_feature 1..22: note = chemically synthesized
  source 1..22: mol_type = other DNA
tgatgcatttatgtttaataaa

SEQ ID NO: 12160 - DNA, 22 bp, synthetic construct
  misc_feature 1..22: note = chemically synthesized
  source 1..22: mol_type = other DNA
atgtttaataaacactgttcag

SEQ ID NO: 12161 - DNA, 22 bp, synthetic construct
  misc_feature 1..22: note = chemically synthesized
  source 1..22: mol_type = other DNA
tgtttaataaacactgttcagt

SEQ ID NO: 12162 - DNA, 22 bp, synthetic construct
  misc_feature 1..22: note = chemically synthesized
  source 1..22: mol_type = other DNA
aataaacactgttcagttcatg

SEQ ID NO: 12163 - DNA, 22 bp, synthetic construct
  misc_feature 1..22: note = chemically synthesized
  source 1..22: mol_type = other DNA
ataaacactgttcagttcatga

SEQ ID NO: 12164 - DNA, 22 bp, synthetic construct
  misc_feature 1..22: note = chemically synthesized
  source 1..22: mol_type = other DNA
ttcagttcatgatttggtcatg

SEQ ID NO: 12165 - DNA, 22 bp, synthetic construct
  misc_feature 1..22: note = chemically synthesized
  source 1..22: mol_type = other DNA
agttcatgatttggtcatgtaa

SEQ ID NO: 12166 - DNA, 22 bp, synthetic construct
  misc_feature 1..22: note = chemically synthesized
  source 1..22: mol_type = other DNA
atgatttggtcatgtaattcct

SEQ ID NO: 12167 - DNA, 22 bp, synthetic construct
  misc_feature 1..22: note = chemically synthesized
  source 1..22: mol_type = other DNA
ggtcatgtaattcctgttagaa

SEQ ID NO: 12168 - DNA, 22 bp, synthetic construct
  misc_feature 1..22: note = chemically synthesized
  source 1..22: mol_type = other DNA
gtcatgtaattcctgttagaaa

SEQ ID NO: 12169 - DNA, 22 bp, synthetic construct
  misc_feature 1..22: note = chemically synthesized
  source 1..22: mol_type = other DNA
ctgttagaaaacattcatctcc

SEQ ID NO: 12170 - DNA, 22 bp, synthetic construct
  misc_feature 1..22: note = chemically synthesized
  source 1..22: mol_type = other DNA
ttagaaaacattcatctccttg

SEQ ID NO: 12171 - DNA, 22 bp, synthetic construct
  misc_feature 1..22: note = chemically synthesized
  source 1..22: mol_type = other DNA
gaaaacattcatctccttggtt

SEQ ID NO: 12172 - DNA, 22 bp, synthetic construct
  misc_feature 1..22: note = chemically synthesized
  source 1..22: mol_type = other DNA
atctccttggtttaaaaaaatt

SEQ ID NO: 12173 - DNA, 22 bp, synthetic construct
  misc_feature 1..22: note = chemically synthesized
  source 1..22: mol_type = other DNA
cttggtttaaaaaaattaaaag

SEQ ID NO: 12174 - DNA, 22 bp, synthetic construct
  misc_feature 1..22: note = chemically synthesized
  source 1..22: mol_type = other DNA
ggtttaaaaaaattaaaagtgg

SEQ ID NO: 12175 - DNA, 22 bp, synthetic construct
  misc_feature 1..22: note = chemically synthesized
  source 1..22: mol_type = other DNA
gtttaaaaaaattaaaagtggg

SEQ ID NO: 12176 - DNA, 22 bp, synthetic construct
  misc_feature 1..22: note = chemically synthesized
  source 1..22: mol_type = other DNA
aaaaaaattaaaagtgggaaaa

SEQ ID NO: 12177 - DNA, 22 bp, synthetic construct
  misc_feature 1..22: note = chemically synthesized
  source 1..22: mol_type = other DNA
aaaaaattaaaagtgggaaaac

SEQ ID NO: 12178 - DNA, 22 bp, synthetic construct
  misc_feature 1..22: note = chemically synthesized
  source 1..22: mol_type = other DNA
aaagtgggaaaacaaagaaata

SEQ ID NO: 12179 - DNA, 22 bp, synthetic construct
  misc_feature 1..22: note = chemically synthesized
  source 1..22: mol_type = other DNA
tttttgtttggacttaccactt

SEQ ID NO: 12180 - DNA, 22 bp, synthetic construct
  misc_feature 1..22: note = chemically synthesized
  source 1..22: mol_type = other DNA
ttgtttggacttaccactttga

SEQ ID NO: 12181 - DNA, 22 bp, synthetic construct
  misc_feature 1..22: note = chemically synthesized
  source 1..22: mol_type = other DNA
tgtttggacttaccactttgaa

SEQ ID NO: 12182 - DNA, 22 bp, synthetic construct
  misc_feature 1..22: note = chemically synthesized
  source 1..22: mol_type = other DNA
gtttggacttaccactttgaaa

SEQ ID NO: 12183 - DNA, 22 bp, synthetic construct
  misc_feature 1..22: note = chemically synthesized
  source 1..22: mol_type = other DNA
tttggacttaccactttgaaat

SEQ ID NO: 12184 - DNA, 22 bp, synthetic construct
  misc_feature 1..22: note = chemically synthesized
  source 1..22: mol_type = other DNA
ggacttaccactttgaaatcaa

SEQ ID NO: 12185 - DNA, 22 bp, synthetic construct
  misc_feature 1..22: note = chemically synthesized
  source 1..22: mol_type = other DNA
gacttaccactttgaaatcaaa

SEQ ID NO: 12186 - DNA, 22 bp, synthetic construct
  misc_feature 1..22: note = chemically synthesized
  source 1..22: mol_type = other DNA
accactttgaaatcaaaatggg

SEQ ID NO: 12187 - DNA, 22 bp, synthetic construct
  misc_feature 1..22: note = chemically synthesized
  source 1..22: mol_type = other DNA
ccactttgaaatcaaaatggga

SEQ ID NO: 12188 - DNA, 22 bp, synthetic construct
  misc_feature 1..22: note = chemically synthesized
  source 1..22: mol_type = other DNA
tgaaatcaaaatgggaaacaaa

SEQ ID NO: 12189 - DNA, 22 bp, synthetic construct
  misc_feature 1..22: note = chemically synthesized
  source 1..22: mol_type = other DNA
gaaatcaaaatgggaaacaaaa

SEQ ID NO: 12190 - DNA, 22 bp, synthetic construct
  misc_feature 1..22: note = chemically synthesized
  source 1..22: mol_type = other DNA
aaatcaaaatgggaaacaaaag

SEQ ID NO: 12191 - DNA, 22 bp, synthetic construct
  misc_feature 1..22: note = chemically synthesized
  source 1..22: mol_type = other DNA
atttacacaaaaagtctgattt

SEQ ID NO: 12192 - DNA, 22 bp, synthetic construct
  misc_feature 1..22: note = chemically synthesized
  source 1..22: mol_type = other DNA
tttacacaaaaagtctgatttt

SEQ ID NO: 12193 - DNA, 22 bp, synthetic construct
  misc_feature 1..22: note = chemically synthesized
  source 1..22: mol_type = other DNA
acacaaaaagtctgattttaag

SEQ ID NO: 12194 - DNA, 22 bp, synthetic construct
  misc_feature 1..22: note = chemically synthesized
  source 1..22: mol_type = other DNA
cacaaaaagtctgattttaaga

SEQ ID NO: 12195 - DNA, 22 bp, synthetic construct
  misc_feature 1..22: note = chemically synthesized
  source 1..22: mol_type = other DNA
attttaagatatatgacatttc

SEQ ID NO: 12196 - DNA, 22 bp, synthetic construct
  misc_feature 1..22: note = chemically synthesized
  source 1..22: mol_type = other DNA
taagatatatgacatttcaagg

SEQ ID NO: 12197 - DNA, 22 bp, synthetic construct
  misc_feature 1..22: note = chemically synthesized
  source 1..22: mol_type = other DNA
aagatatatgacatttcaaggt

SEQ ID NO: 12198 - DNA, 22 bp, synthetic construct
  misc_feature 1..22: note = chemically synthesized
  source 1..22: mol_type = other DNA
agatatatgacatttcaaggtt

SEQ ID NO: 12199 - DNA, 22 bp, synthetic construct
  misc_feature 1..22: note = chemically synthesized
  source 1..22: mol_type = other DNA
caaggtttcagaagtatgtaat

SEQ ID NO: 12200 - DNA, 22 bp, synthetic construct
  misc_feature 1..22: note = chemically synthesized
  source 1..22: mol_type = other DNA
aaggtttcagaagtatgtaatg

SEQ ID NO: 12201 - DNA, 22 bp, synthetic construct
  misc_feature 1..22: note = chemically synthesized
  source 1..22: mol_type = other DNA
cagaagtatgtaatgaggtgtg

SEQ ID NO: 12202 - DNA, 22 bp, synthetic construct
  misc_feature 1..22: note = chemically synthesized
  source 1..22: mol_type = other DNA
agaagtatgtaatgaggtgtgt

SEQ ID NO: 12203 - DNA, 22 bp, synthetic construct
  misc_feature 1..22: note = chemically synthesized
  source 1..22: mol_type = other DNA
taattttttaaattatatatct

SEQ ID NO: 12204 - DNA, 22 bp, synthetic construct
  misc_feature 1..22: note = chemically synthesized
  source 1..22: mol_type = other DNA
attttttaaattatatatcttc

SEQ ID NO: 12205 - DNA, 22 bp, synthetic construct
  misc_feature 1..22: note = chemically synthesized
  source 1..22: mol_type = other DNA
tttaaattatatatcttcaatt

SEQ ID NO: 12206 - DNA, 22 bp, synthetic construct
  misc_feature 1..22: note = chemically synthesized
  source 1..22: mol_type = other DNA
ttaaattatatatcttcaattt

SEQ ID NO: 12207 - DNA, 22 bp, synthetic construct
  misc_feature 1..22: note = chemically synthesized
  source 1..22: mol_type = other DNA
taaattatatatcttcaattta

SEQ ID NO: 12208 - DNA, 22 bp, synthetic construct
  misc_feature 1..22: note = chemically synthesized
  source 1..22: mol_type = other DNA
aaattatatatcttcaatttaa

SEQ ID NO: 12209 - DNA, 22 bp, synthetic construct
  misc_feature 1..22: note = chemically synthesized
  source 1..22: mol_type = other DNA
aattatatatcttcaatttaaa

SEQ ID NO: 12210 - DNA, 22 bp, synthetic construct
  misc_feature 1..22: note = chemically synthesized
  source 1..22: mol_type = other DNA
tatatcttcaatttaaagtttt

SEQ ID NO: 12211 - DNA, 22 bp, synthetic construct
  misc_feature 1..22: note = chemically synthesized
  source 1..22: mol_type = other DNA
caatttaaagttttagttaaaa

SEQ ID NO: 12212 - DNA, 22 bp, synthetic construct
  misc_feature 1..22: note = chemically synthesized
  source 1..22: mol_type = other DNA
aatttaaagttttagttaaaac

SEQ ID NO: 12213 - DNA, 22 bp, synthetic construct
  misc_feature 1..22: note = chemically synthesized
  source 1..22: mol_type = other DNA
aaagttttagttaaaacataaa

SEQ ID NO: 12214 - DNA, 22 bp, synthetic construct
  misc_feature 1..22: note = chemically synthesized
  source 1..22: mol_type = other DNA
aagttttagttaaaacataaag

SEQ ID NO: 12215 - DNA, 22 bp, synthetic construct
  misc_feature 1..22: note = chemically synthesized
  source 1..22: mol_type = other DNA
tagttaaaacataaagattaac

SEQ ID NO: 12216 - DNA, 22 bp, synthetic construct
  misc_feature 1..22: note = chemically synthesized
  source 1..22: mol_type = other DNA
agttaaaacataaagattaacc

SEQ ID NO: 12217 - DNA, 22 bp, synthetic construct
  misc_feature 1..22: note = chemically synthesized
  source 1..22: mol_type = other DNA
gttaaaacataaagattaacct

SEQ ID NO: 12218 - DNA, 22 bp, synthetic construct
  misc_feature 1..22: note = chemically synthesized
  source 1..22: mol_type = other DNA
aaacataaagattaacctttca

SEQ ID NO: 12219 - DNA, 22 bp, synthetic construct
  misc_feature 1..22: note = chemically synthesized
  source 1..22: mol_type = other DNA
acctttcattagcaagctgtta

SEQ ID NO: 12220 - DNA, 22 bp, synthetic construct
  misc_feature 1..22: note = chemically synthesized
  source 1..22: mol_type = other DNA
tcattagcaagctgttagttat

SEQ ID NO: 12221 - DNA, 22 bp, synthetic construct
  misc_feature 1..22: note = chemically synthesized
  source 1..22: mol_type = other DNA
cattagcaagctgttagttatc

SEQ ID NO: 12222 - DNA, 22 bp, synthetic construct
  misc_feature 1..22: note = chemically synthesized
  source 1..22: mol_type = other DNA
attagcaagctgttagttatca

SEQ ID NO: 12223 - DNA, 22 bp, synthetic construct
  misc_feature 1..22: note = chemically synthesized
  source 1..22: mol_type = other DNA
gcaagctgttagttatcaccaa

SEQ ID NO: 12224 - DNA, 22 bp, synthetic construct
  misc_feature 1..22: note = chemically synthesized
  source 1..22: mol_type = other DNA
ttagttatcaccaaagcttttc

SEQ ID NO: 12225 - DNA, 22 bp, synthetic construct
  misc_feature 1..22: note = chemically synthesized
  source 1..22: mol_type = other DNA
gttatcaccaaagcttttcatg

SEQ ID NO: 12226 - DNA, 22 bp, synthetic construct
  misc_feature 1..22: note = chemically synthesized
  source 1..22: mol_type = other DNA
tcaccaaagcttttcatggatt

SEQ ID NO: 12227 - DNA, 22 bp, synthetic construct
  misc_feature 1..22: note = chemically synthesized
  source 1..22: mol_type = other DNA
ttcatggattaggaaaaaatca

SEQ ID NO: 12228 - DNA, 22 bp, synthetic construct
  misc_feature 1..22: note = chemically synthesized
  source 1..22: mol_type = other DNA
tcatggattaggaaaaaatcat

SEQ ID NO: 12229 - DNA, 22 bp, synthetic construct
  misc_feature 1..22: note = chemically synthesized
  source 1..22: mol_type = other DNA
catggattaggaaaaaatcatt

SEQ ID NO: 12230 - DNA, 22 bp, synthetic construct
  misc_feature 1..22: note = chemically synthesized
  source 1..22: mol_type = other DNA
atggattaggaaaaaatcattt

SEQ ID NO: 12231 - DNA, 22 bp, synthetic construct
  misc_feature 1..22: note = chemically synthesized
  source 1..22: mol_type = other DNA
ggaaaaaatcattttgtctcta

SEQ ID NO: 12232 - DNA, 22 bp, synthetic construct
  misc_feature 1..22: note = chemically synthesized
  source 1..22: mol_type = other DNA
tgtctctatgtcaaacatcttg

SEQ ID NO: 12233 - DNA, 22 bp, synthetic construct
  misc_feature 1..22: note = chemically synthesized
  source 1..22: mol_type = other DNA
gtctctatgtcaaacatcttgg

SEQ ID NO: 12234 - DNA, 22 bp, synthetic construct
  misc_feature 1..22: note = chemically synthesized
  source 1..22: mol_type = other DNA
tctctatgtcaaacatcttgga

SEQ ID NO: 12235 - DNA, 22 bp, synthetic construct
  misc_feature 1..22: note = chemically synthesized
  source 1..22: mol_type = other DNA
tatgtcaaacatcttggagttg

SEQ ID NO: 12236 - DNA, 22 bp, synthetic construct
  misc_feature 1..22: note = chemically synthesized
  source 1..22: mol_type = other DNA
tgtcaaacatcttggagttgat

SEQ ID NO: 12237 - DNA, 22 bp, synthetic construct
  misc_feature 1..22: note = chemically synthesized
  source 1..22: mol_type = other DNA
ggagttgatatttggggaaaca

SEQ ID NO: 12238 - DNA, 22 bp, synthetic construct
  misc_feature 1..22: note = chemically synthesized
  source 1..22: mol_type = other DNA
gagttgatatttggggaaacac

SEQ ID NO: 12239 - DNA, 22 bp, synthetic construct
  misc_feature 1..22: note = chemically synthesized
  source 1..22: mol_type = other DNA
atatttggggaaacacaatact

SEQ ID NO: 12240 - DNA, 22 bp, synthetic construct
  misc_feature 1..22: note = chemically synthesized
  source 1..22: mol_type = other DNA
ggggaaacacaatactcagttg

SEQ ID NO: 12241 - DNA, 22 bp, synthetic construct
  misc_feature 1..22: note = chemically synthesized
  source 1..22: mol_type = other DNA
gggaaacacaatactcagttga

SEQ ID NO: 12242 - DNA, 22 bp, synthetic construct
  misc_feature 1..22: note = chemically synthesized
  source 1..22: mol_type = other DNA
agttgagttccctaggggagaa

SEQ ID NO: 12243 - DNA, 22 bp, synthetic construct
  misc_feature 1..22: note = chemically synthesized
  source 1..22: mol_type = other DNA
agttccctaggggagaaaagca

SEQ ID NO: 12244 - DNA, 22 bp, synthetic construct
  misc_feature 1..22: note = chemically synthesized
  source 1..22: mol_type = other DNA
cctaggggagaaaagcaagctt

SEQ ID NO: 12245 - DNA, 22 bp, synthetic construct
  misc_feature 1..22: note = chemically synthesized
  source 1..22: mol_type = other DNA
ggggagaaaagcaagcttaaga

SEQ ID NO: 12246 - DNA, 22 bp, synthetic construct
  misc_feature 1..22: note = chemically synthesized
  source 1..22: mol_type = other DNA
aagaattgacataaagagtagg

SEQ ID NO: 12247 - DNA, 22 bp, synthetic construct
  misc_feature 1..22: note = chemically synthesized
  source 1..22: mol_type = other DNA
agaattgacataaagagtagga

SEQ ID NO: 12248 - DNA, 22 bp, synthetic construct
  misc_feature 1..22: note = chemically synthesized
  source 1..22: mol_type = other DNA
acataaagagtaggaagttagc

SEQ ID NO: 12249 - DNA, 22 bp, synthetic construct
  misc_feature 1..22: note = chemically synthesized
  source 1..22: mol_type = other DNA
gctaatgcaacatatatcactt

SEQ ID NO: 12250 - DNA, 22 bp, synthetic construct
  misc_feature 1..22: note = chemically synthesized
  source 1..22: mol_type = other DNA
atgcaacatatatcactttgtt

SEQ ID NO: 12251 - DNA, 22 bp, synthetic construct
  misc_feature 1..22: note = chemically synthesized
  source 1..22: mol_type = other DNA
tgttttttcacaactacagtga

SEQ ID NO: 12252 - DNA, 22 bp, synthetic construct
  misc_feature 1..22: note = chemically synthesized
  source 1..22: mol_type = other DNA
gttttttcacaactacagtgac

SEQ ID NO: 12253 - DNA, 22 bp, synthetic construct
  misc_feature 1..22: note = chemically synthesized
  source 1..22: mol_type = other DNA
ttttttcacaactacagtgact

SEQ ID NO: 12254 - DNA, 22 bp, synthetic construct
  misc_feature 1..22: note = chemically synthesized
  source 1..22: mol_type = other DNA
tttcacaactacagtgacttta

SEQ ID NO: 12255 - DNA, 22 bp, synthetic construct
  misc_feature 1..22: note = chemically synthesized
  source 1..22: mol_type = other DNA
ttcacaactacagtgactttat

SEQ ID NO: 12256 - DNA, 22 bp, synthetic construct
  misc_feature 1..22: note = chemically synthesized
  source 1..22: mol_type = other DNA
tcacaactacagtgactttatg

SEQ ID NO: 12257 - DNA, 22 bp, synthetic construct
  misc_feature 1..22: note = chemically synthesized
  source 1..22: mol_type = other DNA
cacaactacagtgactttatgt

SEQ ID NO: 12258 - DNA, 22 bp, synthetic construct
  misc_feature 1..22: note = chemically synthesized
  source 1..22: mol_type = other DNA
acaactacagtgactttatgta

SEQ ID NO: 12259 - DNA, 22 bp, synthetic construct
  misc_feature 1..22: note = chemically synthesized
  source 1..22: mol_type = other DNA
cagtgactttatgtatttccca

SEQ ID NO: 12260 - DNA, 22 bp, synthetic construct
  misc_feature 1..22: note = chemically synthesized
  source 1..22: mol_type = other DNA
tatgtatttcccagaggaaggc

SEQ ID NO: 12261 - DNA, 22 bp, synthetic construct
  misc_feature 1..22: note = chemically synthesized
  source 1..22: mol_type = other DNA
atgtatttcccagaggaaggca

SEQ ID NO: 12262 - DNA, 22 bp, synthetic construct
  misc_feature 1..22: note = chemically synthesized
  source 1..22: mol_type = other DNA
tgtatttcccagaggaaggcat

SEQ ID NO: 12263 - DNA, 22 bp, synthetic construct
  misc_feature 1..22: note = chemically synthesized
  source 1..22: mol_type = other DNA
cccagaggaaggcatacaggga

SEQ ID NO: 12264 - DNA, 22 bp, synthetic construct
  misc_feature 1..22: note = chemically synthesized
  source 1..22: mol_type = other DNA
ccagaggaaggcatacagggaa

SEQ ID NO: 12265 - DNA, 22 bp, synthetic construct
  misc_feature 1..22: note = chemically synthesized
  source 1..22: mol_type = other DNA
tcccatttggacaaacagcatg

SEQ ID NO: 12266 - DNA, 22 bp, synthetic construct
  misc_feature 1..22: note = chemically synthesized
  source 1..22: mol_type = other DNA
ggacaaacagcatgttctcaca

SEQ ID NO: 12267 - DNA, 22 bp, synthetic construct
  misc_feature 1..22: note = chemically synthesized
  source 1..22: mol_type = other DNA
gacaaacagcatgttctcacag

SEQ ID NO: 12268 - DNA, 22 bp, synthetic construct
  misc_feature 1..22: note = chemically synthesized
  source 1..22: mol_type = other DNA
tcacaggaagcatttatcacac

SEQ ID NO: 12269 - DNA, 22 bp, synthetic construct
  misc_feature 1..22: note = chemically synthesized
  source 1..22: mol_type = other DNA
acaggaagcatttatcacactt

SEQ ID NO: 12270 - DNA, 22 bp, synthetic construct
  misc_feature 1..22: note = chemically synthesized
  source 1..22: mol_type = other DNA
atcacacttacttgtcaacttt

SEQ ID NO: 12271 - DNA, 22 bp, synthetic construct
  misc_feature 1..22: note = chemically synthesized
  source 1..22: mol_type = other DNA
tcacacttacttgtcaactttc

SEQ ID NO: 12272 - DNA, 22 bp, synthetic construct
  misc_feature 1..22: note = chemically synthesized
  source 1..22: mol_type = other DNA
acttgtcaactttctagaatca

SEQ ID NO: 12273 - DNA, 22 bp, synthetic construct
  misc_feature 1..22: note = chemically synthesized
  source 1..22: mol_type = other DNA
cttgtcaactttctagaatcaa

SEQ ID NO: 12274 - DNA, 22 bp, synthetic construct
  misc_feature 1..22: note = chemically synthesized
  source 1..22: mol_type = other DNA
gtcaactttctagaatcaaatc

SEQ ID NO: 12275 - DNA, 22 bp, synthetic construct
  misc_feature 1..22: note = chemically synthesized
  source 1..22: mol_type = other DNA
tcaactttctagaatcaaatct

SEQ ID NO: 12276 - DNA, 22 bp, synthetic construct
  misc_feature 1..22: note = chemically synthesized
  source 1..22: mol_type = other DNA
tctagaatcaaatctagtagct

SEQ ID NO: 12277 - DNA, 22 bp, synthetic construct
  misc_feature 1..22: note = chemically synthesized
  source 1..22: mol_type = other DNA
ctagaatcaaatctagtagctg

SEQ ID NO: 12278 - DNA, 22 bp, synthetic construct
  misc_feature 1..22: note = chemically synthesized
  source 1..22: mol_type = other DNA
tagaatcaaatctagtagctga

SEQ ID NO: 12279 - DNA, 22 bp, synthetic construct
  misc_feature 1..22: note = chemically synthesized
  source 1..22: mol_type = other DNA
gaatcaaatctagtagctgaca

SEQ ID NO: 12280 - DNA, 22 bp, synthetic construct
  misc_feature 1..22: note = chemically synthesized
  source 1..22: mol_type = other DNA
gtagctgacagtaccaggatca

SEQ ID NO: 12281 - DNA, 22 bp, synthetic construct
  misc_feature 1..22: note = chemically synthesized
  source 1..22: mol_type = other DNA
acagtaccaggatcaggggtgc

SEQ ID NO: 12282 - DNA, 22 bp, synthetic construct
  misc_feature 1..22: note = chemically synthesized
  source 1..22: mol_type = other DNA
agcacccccagaaagctgactg

SEQ ID NO: 12283 - DNA, 22 bp, synthetic construct
  misc_feature 1..22: note = chemically synthesized
  source 1..22: mol_type = other DNA
actggccctgtggttcccactc

SEQ ID NO: 12284 - DNA, 22 bp, synthetic construct
  misc_feature 1..22: note = chemically synthesized
  source 1..22: mol_type = other DNA
gccctgtggttcccactccaga

SEQ ID NO: 12285 - DNA, 22 bp, synthetic construct
  misc_feature 1..22: note = chemically synthesized
  source 1..22: mol_type = other DNA
tggttcccactccagacatgat

SEQ ID NO: 12286 - DNA, 22 bp, synthetic construct
  misc_feature 1..22: note = chemically synthesized
  source 1..22: mol_type = other DNA
ccactccagacatgatgtcagc

SEQ ID NO: 12287 - DNA, 22 bp, synthetic construct
  misc_feature 1..22: note = chemically synthesized
  source 1..22: mol_type = other DNA
cagacatgatgtcagctgtgaa

SEQ ID NO: 12288 - DNA, 22 bp, synthetic construct
  misc_feature 1..22: note = chemically synthesized
  source 1..22: mol_type = other DNA
tgaaatcagactgaaatgctga

SEQ ID NO: 12289 - DNA, 22 bp, synthetic construct
  misc_feature 1..22: note = chemically synthesized
  source 1..22: mol_type = other DNA
aaatgctgaaataacgataaaa

SEQ ID NO: 12290 - DNA, 22 bp, synthetic construct
  misc_feature 1..22: note = chemically synthesized
  source 1..22: mol_type = other DNA
aaataacgataaaaaaaaatac

SEQ ID NO: 12291 - DNA, 22 bp, synthetic construct
  misc_feature 1..22: note = chemically synthesized
  source 1..22: mol_type = other DNA
aactagcaaagtgagtaaagtc

SEQ ID NO: 12292 - DNA, 22 bp, synthetic construct
  misc_feature 1..22: note = chemically synthesized
  source 1..22: mol_type = other DNA
gcaaagtgagtaaagtcaaggg

SEQ ID NO: 12293 - DNA, 22 bp, synthetic construct
  misc_feature 1..22: note = chemically synthesized
  source 1..22: mol_type = other DNA
gttggaaaactcacaaagcagg

SEQ ID NO: 12294 - DNA, 22 bp, synthetic construct
  misc_feature 1..22: note = chemically synthesized
  source 1..22: mol_type = other DNA
ttggaaaactcacaaagcagga

SEQ ID NO: 12295 - DNA, 22 bp, synthetic construct
  misc_feature 1..22: note = chemically synthesized
  source 1..22: mol_type = other DNA
gaaaactcacaaagcaggacat

SEQ ID NO: 12296 - DNA, 22 bp, synthetic construct
  misc_feature 1..22: note = chemically synthesized
  source 1..22: mol_type = other DNA
acaaagcaggacataaagcaag

SEQ ID NO: 12297 - DNA, 22 bp, synthetic construct
  misc_feature 1..22: note = chemically synthesized
  source 1..22: mol_type = other DNA
gatatatctcattagtgtgaca

SEQ ID NO: 12298 - DNA, 22 bp, synthetic construct
  misc_feature 1..22: note = chemically synthesized
  source 1..22: mol_type = other DNA
attagtgtgacatctgggagga

SEQ ID NO: 12299 - DNA, 22 bp, synthetic construct
  misc_feature 1..22: note = chemically synthesized
  source 1..22: mol_type = other DNA
gtgtgacatctgggaggacaaa

SEQ ID NO: 12300 - DNA, 22 bp, synthetic construct
  misc_feature 1..22: note = chemically synthesized
  source 1..22: mol_type = other DNA
ggaggacaaagcatccaaaccc

SEQ ID NO: 12301 - DNA, 22 bp, synthetic construct
  misc_feature 1..22: note = chemically synthesized
  source 1..22: mol_type = other DNA
tcttctatataagtggtgagat

SEQ ID NO: 12302 - DNA, 22 bp, synthetic construct
  misc_feature 1..22: note = chemically synthesized
  source 1..22: mol_type = other DNA
cttctatataagtggtgagatg

SEQ ID NO: 12303 - DNA, 22 bp, synthetic construct
  misc_feature 1..22: note = chemically synthesized
  source 1..22: mol_type = other DNA
ttctatataagtggtgagatga

SEQ ID NO: 12304 - DNA, 22 bp, synthetic construct
  misc_feature 1..22: note = chemically synthesized
  source 1..22: mol_type = other DNA
ctatataagtggtgagatgatg

SEQ ID NO: 12305 - DNA, 22 bp, synthetic construct
  misc_feature 1..22: note = chemically synthesized
  source 1..22: mol_type = other DNA
tatataagtggtgagatgatga

SEQ ID NO: 12306 - DNA, 22 bp, synthetic construct
  misc_feature 1..22: note = chemically synthesized
  source 1..22: mol_type = other DNA
tataagtggtgagatgatgaag

SEQ ID NO: 12307 - DNA, 22 bp, synthetic construct
  misc_feature 1..22: note = chemically synthesized
  source 1..22: mol_type = other DNA
taagagggcttctgcccccttg

SEQ ID NO: 12308 - DNA, 22 bp, synthetic construct
  misc_feature 1..22: note = chemically synthesized
  source 1..22: mol_type = other DNA
ctgcccccttgaagacttcaga

SEQ ID NO: 12309 - DNA, 22 bp, synthetic construct
  misc_feature 1..22: note = chemically synthesized
  source 1..22: mol_type = other DNA
tgcccccttgaagacttcagat

SEQ ID NO: 12310 - DNA, 22 bp, synthetic construct
  misc_feature 1..22: note = chemically synthesized
  source 1..22: mol_type = other DNA
cccccttgaagacttcagatgc

SEQ ID NO: 12311 - DNA, 22 bp, synthetic construct
  misc_feature 1..22: note = chemically synthesized
  source 1..22: mol_type = other DNA
gaagacttcagatgctggggaa

SEQ ID NO: 12312 - DNA, 22 bp, synthetic construct
  misc_feature 1..22: note = chemically synthesized
  source 1..22: mol_type = other DNA
aagacttcagatgctggggaaa

SEQ ID NO: 12313 - DNA, 22 bp, synthetic construct
  misc_feature 1..22: note = chemically synthesized
  source 1..22: mol_type = other DNA
cagatgctggggaaaggataga

SEQ ID NO: 12314 - DNA, 22 bp, synthetic construct
  misc_feature 1..22: note = chemically synthesized
  source 1..22: mol_type = other DNA
agatgctggggaaaggatagat

SEQ ID NO: 12315 - DNA, 22 bp, synthetic construct
  misc_feature 1..22: note = chemically synthesized
  source 1..22: mol_type = other DNA
gggaaaggatagataagaataa

SEQ ID NO: 12316 - DNA, 22 bp, synthetic construct
  misc_feature 1..22: note = chemically synthesized
  source 1..22: mol_type = other DNA
ttggagcctgggaaataatgac

SEQ ID NO: 12317 - DNA, 22 bp, synthetic construct
  misc_feature 1..22: note = chemically synthesized
  source 1..22: mol_type = other DNA
tggagcctgggaaataatgact

SEQ ID NO: 12318 - DNA, 22 bp, synthetic construct
  misc_feature 1..22: note = chemically synthesized
  source 1..22: mol_type = other DNA
ggagcctgggaaataatgacta

SEQ ID NO: 12319 - DNA, 22 bp, synthetic construct
  misc_feature 1..22: note = chemically synthesized
  source 1..22: mol_type = other DNA
gagcctgggaaataatgactag

SEQ ID NO: 12320 - DNA, 22 bp, synthetic construct
  misc_feature 1..22: note = chemically synthesized
  source 1..22: mol_type = other DNA
ggaaataatgactagcgataaa

SEQ ID NO: 12321 - DNA, 22 bp, synthetic construct
  misc_feature 1..22: note = chemically synthesized
  source 1..22: mol_type = other DNA
gcgataaacctgaagggaagtt

SEQ ID NO: 12322 - DNA, 22 bp, synthetic construct
  misc_feature 1..22: note = chemically synthesized
  source 1..22: mol_type = other DNA
aagggaagttaagtatacgatc

SEQ ID NO: 12323 - DNA, 22 bp, synthetic construct
  misc_feature 1..22: note = chemically synthesized
  source 1..22: mol_type = other DNA
agtatacgatccccagataata

SEQ ID NO: 12324 - DNA, 22 bp, synthetic construct
  misc_feature 1..22: note = chemically synthesized
  source 1..22: mol_type = other DNA
aggagaaaggcaatgtgattct

SEQ ID NO: 12325 - DNA, 22 bp, synthetic construct
  misc_feature 1..22: note = chemically synthesized
  source 1..22: mol_type = other DNA
tgcagccattgtagccagagat

SEQ ID NO: 12326 - DNA, 22 bp, synthetic construct
  misc_feature 1..22: note = chemically synthesized
  source 1..22: mol_type = other DNA
cagccattgtagccagagataa

SEQ ID NO: 12327 - DNA, 22 bp, synthetic construct
  misc_feature 1..22: note = chemically synthesized
  source 1..22: mol_type = other DNA
tagccagagataataagccctt

SEQ ID NO: 12328 - DNA, 22 bp, synthetic construct
  misc_feature 1..22: note = chemically synthesized
  source 1..22: mol_type = other DNA
gaggaaggggccaggggaattt

SEQ ID NO: 12329 - DNA, 22 bp, synthetic construct
  misc_feature 1..22: note = chemically synthesized
  source 1..22: mol_type = other DNA
aggaaggggccaggggaatttt

SEQ ID NO: 12330 - DNA, 22 bp, synthetic construct
  misc_feature 1..22: note = chemically synthesized
  source 1..22: mol_type = other DNA
ttctaaggatagacagtattaa

SEQ ID NO: 12331 - DNA, 22 bp, synthetic construct
  misc_feature 1..22: note = chemically synthesized
  source 1..22: mol_type = other DNA
tctaaggatagacagtattaat

SEQ ID NO: 12332 - DNA, 22 bp, synthetic construct
  misc_feature 1..22: note = chemically synthesized
  source 1..22: mol_type = other DNA
ctaaggatagacagtattaatg

SEQ ID NO: 12333 - DNA, 22 bp, synthetic construct
  misc_feature 1..22: note = chemically synthesized
  source 1..22: mol_type = other DNA
taaggatagacagtattaatgc

SEQ ID NO: 12334 - DNA, 22 bp, synthetic construct
  misc_feature 1..22: note = chemically synthesized
  source 1..22: mol_type = other DNA
aggatagacagtattaatgcag

SEQ ID NO: 12335 - DNA, 22 bp, synthetic construct
  misc_feature 1..22: note = chemically synthesized
  source 1..22: mol_type = other DNA
atgcagcactctcttctgctat

SEQ ID NO: 12336 - DNA, 22 bp, synthetic construct
  misc_feature 1..22: note = chemically synthesized
  source 1..22: mol_type = other DNA
tcttctgctattaaactctcat

SEQ ID NO: 12337 - DNA, 22 bp, synthetic construct
  misc_feature 1..22: note = chemically synthesized
  source 1..22: mol_type = other DNA
ttctgctattaaactctcattg

SEQ ID NO: 12338 - DNA, 22 bp, synthetic construct
  misc_feature 1..22: note = chemically synthesized
  source 1..22: mol_type = other DNA
ctgctattaaactctcattggc

SEQ ID NO: 12339 - DNA, 22 bp, synthetic construct
  misc_feature 1..22: note = chemically synthesized
  source 1..22: mol_type = other DNA
tgctattaaactctcattggct

SEQ ID NO: 12340 - DNA, 22 bp, synthetic construct
  misc_feature 1..22: note = chemically synthesized
  source 1..22: mol_type = other DNA
ctattaaactctcattggcttc

SEQ ID NO: 12341 - DNA, 22 bp, synthetic construct
  misc_feature 1..22: note = chemically synthesized
  source 1..22: mol_type = other DNA
ttaaactctcattggcttctaa

SEQ ID NO: 12342 - DNA, 22 bp, synthetic construct
  misc_feature 1..22: note = chemically synthesized
  source 1..22: mol_type = other DNA
aactctcattggcttctaaaag

SEQ ID NO: 12343 - DNA, 22 bp, synthetic construct
  misc_feature 1..22: note = chemically synthesized
  source 1..22: mol_type = other DNA
tcattggcttctaaaaggagtt

SEQ ID NO: 12344 - DNA, 22 bp, synthetic construct
  misc_feature 1..22: note = chemically synthesized
  source 1..22: mol_type = other DNA
attggcttctaaaaggagtttc

SEQ ID NO: 12345 - DNA, 22 bp, synthetic construct
  misc_feature 1..22: note = chemically synthesized
  source 1..22: mol_type = other DNA
gcttctaaaaggagtttcggtg

SEQ ID NO: 12346 - DNA, 22 bp, synthetic construct
  misc_feature 1..22: note = chemically synthesized
  source 1..22: mol_type = other DNA
ctaaaaggagtttcggtgagtg

SEQ ID NO: 12347 - DNA, 22 bp, synthetic construct
  misc_feature 1..22: note = chemically synthesized
  source 1..22: mol_type = other DNA
taaaaggagtttcggtgagtga

SEQ ID NO: 12348 - DNA, 22 bp, synthetic construct
  misc_feature 1..22: note = chemically synthesized
  source 1..22: mol_type = other DNA
aaaggagtttcggtgagtgatt

SEQ ID NO: 12349 - DNA, 22 bp, synthetic construct
  misc_feature 1..22: note = chemically synthesized
  source 1..22: mol_type = other DNA
cggtgagtgatttgctgagatg

SEQ ID NO: 12350 - DNA, 22 bp, synthetic construct
  misc_feature 1..22: note = chemically synthesized
  source 1..22: mol_type = other DNA
ggtgagtgatttgctgagatgt

SEQ ID NO: 12351 - DNA, 22 bp, synthetic construct
  misc_feature 1..22: note = chemically synthesized
  source 1..22: mol_type = other DNA
gctgagatgttgcattttcatg

SEQ ID NO: 12352 - DNA, 22 bp, synthetic construct
  misc_feature 1..22: note = chemically synthesized
  source 1..22: mol_type = other DNA
ctgagatgttgcattttcatgg

SEQ ID NO: 12353 - DNA, 22 bp, synthetic construct
  misc_feature 1..22: note = chemically synthesized
  source 1..22: mol_type = other DNA
agatgttgcattttcatggctg

SEQ ID NO: 12354 - DNA, 22 bp, synthetic construct
  misc_feature 1..22: note = chemically synthesized
  source 1..22: mol_type = other DNA
cattttcatggctgctgccttt

SEQ ID NO: 12355 - DNA, 22 bp, synthetic construct
  misc_feature 1..22: note = chemically synthesized
  source 1..22: mol_type = other DNA
tcatggctgctgcctttaggta

SEQ ID NO: 12356 - DNA, 22 bp, synthetic construct
  misc_feature 1..22: note = chemically synthesized
  source 1..22: mol_type = other DNA
catggctgctgcctttaggtat

SEQ ID NO: 12357 - DNA, 22 bp, synthetic construct
  misc_feature 1..22: note = chemically synthesized
  source 1..22: mol_type = other DNA
atggctgctgcctttaggtatt

SEQ ID NO: 12358 - DNA, 22 bp, synthetic construct
  misc_feature 1..22: note = chemically synthesized
  source 1..22: mol_type = other DNA
ctgcctttaggtattattgcaa

SEQ ID NO: 12359 - DNA, 22 bp, synthetic construct
  misc_feature 1..22: note = chemically synthesized
  source 1..22: mol_type = other DNA
cctttaggtattattgcaacag

SEQ ID NO: 12360 - DNA, 22 bp, synthetic construct
  misc_feature 1..22: note = chemically synthesized
  source 1..22: mol_type = other DNA
taggtattattgcaacagtttg

SEQ ID NO: 12361 - DNA, 22 bp, synthetic construct
  misc_feature 1..22: note = chemically synthesized
  source 1..22: mol_type = other DNA
aggtattattgcaacagtttgg

SEQ ID NO: 12362 - DNA, 22 bp, synthetic construct
  misc_feature 1..22: note = chemically synthesized
  source 1..22: mol_type = other DNA
ggtattattgcaacagtttgga

SEQ ID NO: 12363 - DNA, 22 bp, synthetic construct
  misc_feature 1..22: note = chemically synthesized
  source 1..22: mol_type = other DNA
ttgcaacagtttggaattttga

SEQ ID NO: 12364 - DNA, 22 bp, synthetic construct
  misc_feature 1..22: note = chemically synthesized
  source 1..22: mol_type = other DNA
caacagtttggaattttgaaat

SEQ ID NO: 12365 - DNA, 22 bp, synthetic construct
  misc_feature 1..22: note = chemically synthesized
  source 1..22: mol_type = other DNA
ggaattttgaaattaaaacagt

SEQ ID NO: 12366 - DNA, 22 bp, synthetic construct
  misc_feature 1..22: note = chemically synthesized
  source 1..22: mol_type = other DNA
gaattttgaaattaaaacagtt

SEQ ID NO: 12367 - DNA, 22 bp, synthetic construct
  misc_feature 1..22: note = chemically synthesized
  source 1..22: mol_type = other DNA
tgaaattaaaacagttctgtaa

SEQ ID NO: 12368 - DNA, 22 bp, synthetic construct
  misc_feature 1..22: note = chemically synthesized
  source 1..22: mol_type = other DNA
gaaattaaaacagttctgtaaa

SEQ ID NO: 12369 - DNA, 22 bp, synthetic construct
  misc_feature 1..22: note = chemically synthesized
  source 1..22: mol_type = other DNA
aaattaaaacagttctgtaaaa

SEQ ID NO: 12370 - DNA, 22 bp, synthetic construct
  misc_feature 1..22: note = chemically synthesized
  source 1..22: mol_type = other DNA
aaacagttctgtaaaaccagtt

SEQ ID NO: 12371 - DNA, 22 bp, synthetic construct
  misc_feature 1..22: note = chemically synthesized
  source 1..22: mol_type = other DNA
tgtaaaaccagtttagttttgt

SEQ ID NO: 12372 - DNA, 22 bp, synthetic construct
  misc_feature 1..22: note = chemically synthesized
  source 1..22: mol_type = other DNA
taaaaccagtttagttttgtaa

SEQ ID NO: 12373 - DNA, 22 bp, synthetic construct
  misc_feature 1..22: note = chemically synthesized
  source 1..22: mol_type = other DNA
agttttgtaaagtgtatgcatc

SEQ ID NO: 12374 - DNA, 22 bp, synthetic construct
  misc_feature 1..22: note = chemically synthesized
  source 1..22: mol_type = other DNA
gttttgtaaagtgtatgcatca

SEQ ID NO: 12375 - DNA, 22 bp, synthetic construct
  misc_feature 1..22: note = chemically synthesized
  source 1..22: mol_type = other DNA
tgtaaagtgtatgcatcaaaga

SEQ ID NO: 12376 - DNA, 22 bp, synthetic construct
  misc_feature 1..22: note = chemically synthesized
  source 1..22: mol_type = other DNA
gtaaagtgtatgcatcaaagat

SEQ ID NO: 12377 - DNA, 22 bp, synthetic construct
  misc_feature 1..22: note = chemically synthesized
  source 1..22: mol_type = other DNA
taaagtgtatgcatcaaagatg

SEQ ID NO: 12378 - DNA, 22 bp, synthetic construct
  misc_feature 1..22: note = chemically synthesized
  source 1..22: mol_type = other DNA
cattcagacattactgagttac

SEQ ID NO: 12379 - DNA, 22 bp, synthetic construct
  misc_feature 1..22: note = chemically synthesized
  source 1..22: mol_type = other DNA
attcagacattactgagttaca

SEQ ID NO: 12380 - DNA, 22 bp, synthetic construct
  misc_feature 1..22: note = chemically synthesized
  source 1..22: mol_type = other DNA
agacattactgagttacaacta

SEQ ID NO: 12381 - DNA, 22 bp, synthetic construct
  misc_feature 1..22: note = chemically synthesized
  source 1..22: mol_type = other DNA
ctgagttacaactatggtgcca

SEQ ID NO: 12382 - DNA, 22 bp, synthetic construct
  misc_feature 1..22: note = chemically synthesized
  source 1..22: mol_type = other DNA
agttacaactatggtgccaggt

SEQ ID NO: 12383 - DNA, 22 bp, synthetic construct
  misc_feature 1..22: note = chemically synthesized
  source 1..22: mol_type = other DNA
caactatggtgccaggtactgt

SEQ ID NO: 12384 - DNA, 22 bp, synthetic construct
  misc_feature 1..22: note = chemically synthesized
  source 1..22: mol_type = other DNA
tggtgccaggtactgtgtcagg

SEQ ID NO: 12385 - DNA, 22 bp, synthetic construct
  misc_feature 1..22: note = chemically synthesized
  source 1..22: mol_type = other DNA
tgtcagggtactaggggtatgg

SEQ ID NO: 12386 - DNA, 22 bp, synthetic construct
  misc_feature 1..22: note = chemically synthesized
  source 1..22: mol_type = other DNA
ggggtatggggataaaccagac

SEQ ID NO: 12387 - DNA, 22 bp, synthetic construct
  misc_feature 1..22: note = chemically synthesized
  source 1..22: mol_type = other DNA
cctctttgatctaaagcagcat

SEQ ID NO: 12388 - DNA, 22 bp, synthetic construct
  misc_feature 1..22: note = chemically synthesized
  source 1..22: mol_type = other DNA
tttgatctaaagcagcatgagg

SEQ ID NO: 12389 - DNA, 22 bp, synthetic construct
  misc_feature 1..22: note = chemically synthesized
  source 1..22: mol_type = other DNA
tgatctaaagcagcatgaggcc

SEQ ID NO: 12390 - DNA, 22 bp, synthetic construct
  misc_feature 1..22: note = chemically synthesized
  source 1..22: mol_type = other DNA
gatctaaagcagcatgaggcca

SEQ ID NO: 12391 - DNA, 22 bp, synthetic construct
  misc_feature 1..22: note = chemically synthesized
  source 1..22: mol_type = other DNA
atctaaagcagcatgaggccag

SEQ ID NO: 12392 - DNA, 22 bp, synthetic construct
  misc_feature 1..22: note = chemically synthesized
  source 1..22: mol_type = other DNA
aagcagcatgaggccaggtgag

SEQ ID NO: 12393 - DNA, 22 bp, synthetic construct
  misc_feature 1..22: note = chemically synthesized
  source 1..22: mol_type = other DNA
caatataatgtgataaaatgtg

SEQ ID NO: 12394 - DNA, 22 bp, synthetic construct
  misc_feature 1..22: note = chemically synthesized
  source 1..22: mol_type = other DNA
aatataatgtgataaaatgtgc

SEQ ID NO: 12395 - DNA, 22 bp, synthetic construct
  misc_feature 1..22: note = chemically synthesized
  source 1..22: mol_type = other DNA
ggtactaagggatcatagagaa

SEQ ID NO: 12396 - DNA, 22 bp, synthetic construct
  misc_feature 1..22: note = chemically synthesized
  source 1..22: mol_type = other DNA
agggatcatagagaaaggaaca

SEQ ID NO: 12397 - DNA, 22 bp, synthetic construct
  misc_feature 1..22: note = chemically synthesized
  source 1..22: mol_type = other DNA
aatggggaaacaattgatagag

SEQ ID NO: 12398 - DNA, 22 bp, synthetic construct
  misc_feature 1..22: note = chemically synthesized
  source 1..22: mol_type = other DNA
atagagagagaatattttcatc

SEQ ID NO: 12399 - DNA, 22 bp, synthetic construct
  misc_feature 1..22: note = chemically synthesized
  source 1..22: mol_type = other DNA
tcatctgggtcttaaaagatga

SEQ ID NO: 12400 - DNA, 22 bp, synthetic construct
  misc_feature 1..22: note = chemically synthesized
  source 1..22: mol_type = other DNA
catctgggtcttaaaagatgag

SEQ ID NO: 12401 - DNA, 22 bp, synthetic construct
  misc_feature 1..22: note = chemically synthesized
  source 1..22: mol_type = other DNA
atctgggtcttaaaagatgagt

SEQ ID NO: 12402 - DNA, 22 bp, synthetic construct
  misc_feature 1..22: note = chemically synthesized
  source 1..22: mol_type = other DNA
ggtcttaaaagatgagtaggcg

SEQ ID NO: 12403 - DNA, 22 bp, synthetic construct
  misc_feature 1..22: note = chemically synthesized
  source 1..22: mol_type = other DNA
aaaagatgagtaggcgttctct

SEQ ID NO: 12404 - DNA, 22 bp, synthetic construct
  misc_feature 1..22: note = chemically synthesized
  source 1..22: mol_type = other DNA
aaagatgagtaggcgttctctc

SEQ ID NO: 12405 - DNA, 22 bp, synthetic construct
  misc_feature 1..22: note = chemically synthesized
  source 1..22: mol_type = other DNA
tctctctttaaatgtctgatat

SEQ ID NO: 12406 - DNA, 22 bp, synthetic construct
  misc_feature 1..22: note = chemically synthesized
  source 1..22: mol_type = other DNA
tctctttaaatgtctgatataa

SEQ ID NO: 12407 - DNA, 22 bp, synthetic construct
  misc_feature 1..22: note = chemically synthesized
  source 1..22: mol_type = other DNA
tctttaaatgtctgatataagg

SEQ ID NO: 12408 - DNA, 22 bp, synthetic construct
  misc_feature 1..22: note = chemically synthesized
  source 1..22: mol_type = other DNA
tttaaatgtctgatataagggc

SEQ ID NO: 12409 - DNA, 22 bp, synthetic construct
  misc_feature 1..22: note = chemically synthesized
  source 1..22: mol_type = other DNA
taaatgtctgatataagggcat

SEQ ID NO: 12410 - DNA, 22 bp, synthetic construct
  misc_feature 1..22: note = chemically synthesized
  source 1..22: mol_type = other DNA
aaatgtctgatataagggcatt

SEQ ID NO: 12411 - DNA, 22 bp, synthetic construct
  misc_feature 1..22: note = chemically synthesized
  source 1..22: mol_type = other DNA
aatgtctgatataagggcattt

SEQ ID NO: 12412 - DNA, 22 bp, synthetic construct
  misc_feature 1..22: note = chemically synthesized
  source 1..22: mol_type = other DNA
atataagggcattttatgcaaa

SEQ ID NO: 12413 - DNA, 22 bp, synthetic construct
  misc_feature 1..22: note = chemically synthesized
  source 1..22: mol_type = other DNA
tatgcaaagaggatcactcgtg

SEQ ID NO: 12414 - DNA, 22 bp, synthetic construct
  misc_feature 1..22: note = chemically synthesized
  source 1..22: mol_type = other DNA
atgcaaagaggatcactcgtgc

SEQ ID NO: 12415 - DNA, 22 bp, synthetic construct
  misc_feature 1..22: note = chemically synthesized
  source 1..22: mol_type = other DNA
tgcaaagaggatcactcgtgca

SEQ ID NO: 12416 - DNA, 22 bp, synthetic construct
  misc_feature 1..22: note = chemically synthesized
  source 1..22: mol_type = other DNA
gtgcaaagactcagatttgcaa

SEQ ID NO: 12417 - DNA, 22 bp, synthetic construct
  misc_feature 1..22: note = chemically synthesized
  source 1..22: mol_type = other DNA
agatttgcaagaacgtgaggta

SEQ ID NO: 12418 - DNA, 22 bp, synthetic construct
  misc_feature 1..22: note = chemically synthesized
  source 1..22: mol_type = other DNA
gcaagaacgtgaggtatttcag

SEQ ID NO: 12419 - DNA, 22 bp, synthetic construct
  misc_feature 1..22: note = chemically synthesized
  source 1..22: mol_type = other DNA
caagaacgtgaggtatttcagg

SEQ ID NO: 12420 - DNA, 22 bp, synthetic construct
  misc_feature 1..22: note = chemically synthesized
  source 1..22: mol_type = other DNA
caggagttttgtatggttccat

SEQ ID NO: 12421 - DNA, 22 bp, synthetic construct
  misc_feature 1..22: note = chemically synthesized
  source 1..22: mol_type = other DNA
aggagttttgtatggttccata

SEQ ID NO: 12422 - DNA, 22 bp, synthetic construct
  misc_feature 1..22: note = chemically synthesized
  source 1..22: mol_type = other DNA
tgtatggttccatatggactat

SEQ ID NO: 12423 - DNA, 22 bp, synthetic construct
  misc_feature 1..22: note = chemically synthesized
  source 1..22: mol_type = other DNA
gtatggttccatatggactatg

SEQ ID NO: 12424 - DNA, 22 bp, synthetic construct
  misc_feature 1..22: note = chemically synthesized
  source 1..22: mol_type = other DNA
tatggttccatatggactatga

SEQ ID NO: 12425 - DNA, 22 bp, synthetic construct
  misc_feature 1..22: note = chemically synthesized
  source 1..22: mol_type = other DNA
catatggactatgacaagtgag

SEQ ID NO: 12426 - DNA, 22 bp, synthetic construct
  misc_feature 1..22: note = chemically synthesized
  source 1..22: mol_type = other DNA
tgacaagtgagacaggtaaact

SEQ ID NO: 12427 - DNA, 22 bp, synthetic construct
  misc_feature 1..22: note = chemically synthesized
  source 1..22: mol_type = other DNA
ggcagagctggtcatcagataa

SEQ ID NO: 12428 - DNA, 22 bp, synthetic construct
  misc_feature 1..22: note = chemically synthesized
  source 1..22: mol_type = other DNA
gtcatcagataatgaagtcatt

SEQ ID NO: 12429 - DNA, 22 bp, synthetic construct
  misc_feature 1..22: note = chemically synthesized
  source 1..22: mol_type = other DNA
acctaaggagattggacaataa

SEQ ID NO: 12430 - DNA, 22 bp, synthetic construct
  misc_feature 1..22: note = chemically synthesized
  source 1..22: mol_type = other DNA
aggagattggacaataaaatgc

SEQ ID NO: 12431 - DNA, 22 bp, synthetic construct
  misc_feature 1..22: note = chemically synthesized
  source 1..22: mol_type = other DNA
gacaataaaatgcaatatggag

SEQ ID NO: 12432 - DNA, 22 bp, synthetic construct
  misc_feature 1..22: note = chemically synthesized
  source 1..22: mol_type = other DNA
atggctgatttaggatgcccag

SEQ ID NO: 12433 - DNA, 22 bp, synthetic construct
  misc_feature 1..22: note = chemically synthesized
  source 1..22: mol_type = other DNA
atttaggatgcccagtctggca

SEQ ID NO: 12434 - DNA, 22 bp, synthetic construct
  misc_feature 1..22: note = chemically synthesized
  source 1..22: mol_type = other DNA
aggatgcccagtctggcaacac

SEQ ID NO: 12435 - DNA, 22 bp, synthetic construct
  misc_feature 1..22: note = chemically synthesized
  source 1..22: mol_type = other DNA
ggatgcccagtctggcaacacg

SEQ ID NO: 12436 - DNA, 22 bp, synthetic construct
  misc_feature 1..22: note = chemically synthesized
  source 1..22: mol_type = other DNA
gcaacacgctaatgaaatgata

SEQ ID NO: 12437 - DNA, 22 bp, synthetic construct
  misc_feature 1..22: note = chemically synthesized
  source 1..22: mol_type = other DNA
atgaaatgatagtgggggaggg

SEQ ID NO: 12438 - DNA, 22 bp, synthetic construct
  misc_feature 1..22: note = chemically synthesized
  source 1..22: mol_type = other DNA
ggagagagcagtcctgagacta

SEQ ID NO: 12439 - DNA, 22 bp, synthetic construct
  misc_feature 1..22: note = chemically synthesized
  source 1..22: mol_type = other DNA
agactattgcaattatctgcgg

SEQ ID NO: 12440 - DNA, 22 bp, synthetic construct
  misc_feature 1..22: note = chemically synthesized
  source 1..22: mol_type = other DNA
ttgcaattatctgcgggagaca

SEQ ID NO: 12441 - DNA, 22 bp, synthetic construct
  misc_feature 1..22: note = chemically synthesized
  source 1..22: mol_type = other DNA
caattatctgcgggagacataa

SEQ ID NO: 12442 - DNA, 22 bp, synthetic construct
  misc_feature 1..22: note = chemically synthesized
  source 1..22: mol_type = other DNA
tctgcgggagacataaaggcta

SEQ ID NO: 12443 - DNA, 22 bp, synthetic construct
  misc_feature 1..22: note = chemically synthesized
  source 1..22: mol_type = other DNA
cgggagacataaaggctagaac

SEQ ID NO: 12444 - DNA, 22 bp, synthetic construct
  misc_feature 1..22: note = chemically synthesized
  source 1..22: mol_type = other DNA
gaacctgaacagtagcagtaca

SEQ ID NO: 12445 - DNA, 22 bp, synthetic construct
  misc_feature 1..22: note = chemically synthesized
  source 1..22: mol_type = other DNA
aacagtagcagtacaaaaaaag

SEQ ID NO: 12446 - DNA, 22 bp, synthetic construct
  misc_feature 1..22: note = chemically synthesized
  source 1..22: mol_type = other DNA
aaatgatattaaggaagtagaa

SEQ ID NO: 12447 - DNA, 22 bp, synthetic construct
  misc_feature 1..22: note = chemically synthesized
  source 1..22: mol_type = other DNA
aggaagtagaagtggtatgact

SEQ ID NO: 12448 - DNA, 22 bp, synthetic construct
  misc_feature 1..22: note = chemically synthesized
  source 1..22: mol_type = other DNA
aaccatctgggtatggaagggg

SEQ ID NO: 12449 - DNA, 22 bp, synthetic construct
  misc_feature 1..22: note = chemically synthesized
  source 1..22: mol_type = other DNA
accatctgggtatggaagggga

SEQ ID NO: 12450 - DNA, 22 bp, synthetic construct
  misc_feature 1..22: note = chemically synthesized
  source 1..22: mol_type = other DNA
ggtatggaaggggaaatggcta

SEQ ID NO: 12451 - DNA, 22 bp, synthetic construct
  misc_feature 1..22: note = chemically synthesized
  source 1..22: mol_type = other DNA
gagtcttggggactttgtgttt

SEQ ID NO: 12452 - DNA, 22 bp, synthetic construct
  misc_feature 1..22: note = chemically synthesized
  source 1..22: mol_type = other DNA
ggggactttgtgtttgatgtga

SEQ ID NO: 12453 - DNA, 22 bp, synthetic construct
  misc_feature 1..22: note = chemically synthesized
  source 1..22: mol_type = other DNA
gggactttgtgtttgatgtgat

SEQ ID NO: 12454 - DNA, 22 bp, synthetic construct
  misc_feature 1..22: note = chemically synthesized
  source 1..22: mol_type = other DNA
tgtgtttgatgtgattatggac

SEQ ID NO: 12455 - DNA, 22 bp, synthetic construct
  misc_feature 1..22: note = chemically synthesized
  source 1..22: mol_type = other DNA
gtgtttgatgtgattatggacc

SEQ ID NO: 12456 - DNA, 22 bp, synthetic construct
  misc_feature 1..22: note = chemically synthesized
  source 1..22: mol_type = other DNA
tgtttgatgtgattatggacca

SEQ ID NO: 12457 - DNA, 22 bp, synthetic construct
  misc_feature 1..22: note = chemically synthesized
  source 1..22: mol_type = other DNA
gatgtgattatggaccacagaa

SEQ ID NO: 12458 - DNA, 22 bp, synthetic construct
  misc_feature 1..22: note = chemically synthesized
  source 1..22: mol_type = other DNA
atgtgattatggaccacagaat

SEQ ID NO: 12459 - DNA, 22 bp, synthetic construct
  misc_feature 1..22: note = chemically synthesized
  source 1..22: mol_type = other DNA
tggaccacagaataatgtctaa

SEQ ID NO: 12460 - DNA, 22 bp, synthetic construct
  misc_feature 1..22: note = chemically synthesized
  source 1..22: mol_type = other DNA
agagaactggctctttagtctg

SEQ ID NO: 12461 - DNA, 22 bp, synthetic construct
  misc_feature 1..22: note = chemically synthesized
  source 1..22: mol_type = other DNA
gctctttagtctgactgccaga

SEQ ID NO: 12462 - DNA, 22 bp, synthetic construct
  misc_feature 1..22: note = chemically synthesized
  source 1..22: mol_type = other DNA
tttagtctgactgccagagtct

SEQ ID NO: 12463 - DNA, 22 bp, synthetic construct
  misc_feature 1..22: note = chemically synthesized
  source 1..22: mol_type = other DNA
tagtctgactgccagagtctga

SEQ ID NO: 12464 - DNA, 22 bp, synthetic construct
  misc_feature 1..22: note = chemically synthesized
  source 1..22: mol_type = other DNA
agtctgactgccagagtctgaa

SEQ ID NO: 12465 - DNA, 22 bp, synthetic construct
  misc_feature 1..22: note = chemically synthesized
  source 1..22: mol_type = other DNA
gtctgactgccagagtctgaat

SEQ ID NO: 12466 - DNA, 22 bp, synthetic construct
  misc_feature 1..22: note = chemically synthesized
  source 1..22: mol_type = other DNA
actgccagagtctgaatcctga

SEQ ID NO: 12467 - DNA, 22 bp, synthetic construct
  misc_feature 1..22: note = chemically synthesized
  source 1..22: mol_type = other DNA
ccagagtctgaatcctgaatgt

SEQ ID NO: 12468 - DNA, 22 bp, synthetic construct
  misc_feature 1..22: note = chemically synthesized
  source 1..22: mol_type = other DNA
aatcctgaatgttttagtatgt

SEQ ID NO: 12469 - DNA, 22 bp, synthetic construct
  misc_feature 1..22: note = chemically synthesized
  source 1..22: mol_type = other DNA
aatgttttagtatgttaccttg

SEQ ID NO: 12470 - DNA, 22 bp, synthetic construct
  misc_feature 1..22: note = chemically synthesized
  source 1..22: mol_type = other DNA
tagtatgttaccttgggcaaag

SEQ ID NO: 12471 - DNA, 22 bp, synthetic construct
  misc_feature 1..22: note = chemically synthesized
  source 1..22: mol_type = other DNA
agtatgttaccttgggcaaagc

SEQ ID NO: 12472 - DNA, 22 bp, synthetic construct
  misc_feature 1..22: note = chemically synthesized
  source 1..22: mol_type = other DNA
gtatgttaccttgggcaaagcc

SEQ ID NO: 12473 - DNA, 22 bp, synthetic construct
  misc_feature 1..22: note = chemically synthesized
  source 1..22: mol_type = other DNA
ccttgggcaaagcccttagcct

SEQ ID NO: 12474 - DNA, 22 bp, synthetic construct
  misc_feature 1..22: note = chemically synthesized
  source 1..22: mol_type = other DNA
gggcaaagcccttagcctctat

SEQ ID NO: 12475 - DNA, 22 bp, synthetic construct
  misc_feature 1..22: note = chemically synthesized
  source 1..22: mol_type = other DNA
ggcaaagcccttagcctctatg

SEQ ID NO: 12476 - DNA, 22 bp, synthetic construct
  misc_feature 1..22: note = chemically synthesized
  source 1..22: mol_type = other DNA
agcctctatgaatctatcttcc

SEQ ID NO: 12477 - DNA, 22 bp, synthetic construct
  misc_feature 1..22: note = chemically synthesized
  source 1..22: mol_type = other DNA
gcctctatgaatctatcttcct

SEQ ID NO: 12478 - DNA, 22 bp, synthetic construct
  misc_feature 1..22: note = chemically synthesized
  source 1..22: mol_type = other DNA
tatgaatctatcttcctcattc

SEQ ID NO: 12479 - DNA, 22 bp, synthetic construct
  misc_feature 1..22: note = chemically synthesized
  source 1..22: mol_type = other DNA
tgaatctatcttcctcattcat

SEQ ID NO: 12480 - DNA, 22 bp, synthetic construct
  misc_feature 1..22: note = chemically synthesized
  source 1..22: mol_type = other DNA
tcttcctcattcataaaaataa

SEQ ID NO: 12481 - DNA, 22 bp, synthetic construct
  misc_feature 1..22: note = chemically synthesized
  source 1..22: mol_type = other DNA
cctcattcataaaaataagatg

SEQ ID NO: 12482 - DNA, 22 bp, synthetic construct
  misc_feature 1..22: note = chemically synthesized
  source 1..22: mol_type = other DNA
ctcattcataaaaataagatga

SEQ ID NO: 12483 - DNA, 22 bp, synthetic construct
  misc_feature 1..22: note = chemically synthesized
  source 1..22: mol_type = other DNA
attcataaaaataagatgacag

SEQ ID NO: 12484 - DNA, 22 bp, synthetic construct
  misc_feature 1..22: note = chemically synthesized
  source 1..22: mol_type = other DNA
ataaaaataagatgacagtgcc

SEQ ID NO: 12485 - DNA, 22 bp, synthetic construct
  misc_feature 1..22: note = chemically synthesized
  source 1..22: mol_type = other DNA
tctcgtgggacttttgtgagga

SEQ ID NO: 12486 - DNA, 22 bp, synthetic construct
  misc_feature 1..22: note = chemically synthesized
  source 1..22: mol_type = other DNA
gtgggacttttgtgaggatgaa

SEQ ID NO: 12487 - DNA, 22 bp, synthetic construct
  misc_feature 1..22: note = chemically synthesized
  source 1..22: mol_type = other DNA
ttgtgaggatgaagtgagataa

SEQ ID NO: 12488 - DNA, 22 bp, synthetic construct
  misc_feature 1..22: note = chemically synthesized
  source 1..22: mol_type = other DNA
tgtgaggatgaagtgagataat

SEQ ID NO: 12489 - DNA, 22 bp, synthetic construct
  misc_feature 1..22: note = chemically synthesized
  source 1..22: mol_type = other DNA
gtgaggatgaagtgagataatg

SEQ ID NO: 12490 - DNA, 22 bp, synthetic construct
  misc_feature 1..22: note = chemically synthesized
  source 1..22: mol_type = other DNA
tgaggatgaagtgagataatgg

SEQ ID NO: 12491 - DNA, 22 bp, synthetic construct
  misc_feature 1..22: note = chemically synthesized
  source 1..22: mol_type = other DNA
ctgagcacagtgtccaacacag

SEQ ID NO: 12492 - DNA, 22 bp, synthetic construct
  misc_feature 1..22: note = chemically synthesized
  source 1..22: mol_type = other DNA
agcacagtgtccaacacagcag

SEQ ID NO: 12493 - DNA, 22 bp, synthetic construct
  misc_feature 1..22: note = chemically synthesized
  source 1..22: mol_type = other DNA
catatacattagctattactgg

SEQ ID NO: 12494 - DNA, 22 bp, synthetic construct
  misc_feature 1..22: note = chemically synthesized
  source 1..22: mol_type = other DNA
gctattactggctacattatga

SEQ ID NO: 12495 - DNA, 22 bp, synthetic construct
  misc_feature 1..22: note = chemically synthesized
  source 1..22: mol_type = other DNA
ttactggctacattatgatata

SEQ ID NO: 12496 - DNA, 22 bp, synthetic construct
  misc_feature 1..22: note = chemically synthesized
  source 1..22: mol_type = other DNA
ctggctacattatgatatacag

SEQ ID NO: 12497 - DNA, 22 bp, synthetic construct
  misc_feature 1..22: note = chemically synthesized
  source 1..22: mol_type = other DNA
gctacattatgatatacagtta

SEQ ID NO: 12498 - DNA, 22 bp, synthetic construct
  misc_feature 1..22: note = chemically synthesized
  source 1..22: mol_type = other DNA
cattatgatatacagttaggga

SEQ ID NO: 12499 - DNA, 22 bp, synthetic construct
  misc_feature 1..22: note = chemically synthesized
  source 1..22: mol_type = other DNA
tgatatacagttagggagttgg

SEQ ID NO: 12500 - DNA, 22 bp, synthetic construct
  misc_feature 1..22: note = chemically synthesized
  source 1..22: mol_type = other DNA
gggagttggaaagataatctga

SEQ ID NO: 12501 - DNA, 22 bp, synthetic construct
  misc_feature 1..22: note = chemically synthesized
  source 1..22: mol_type = other DNA
gaaagataatctgaaattcagg

SEQ ID NO: 12502 - DNA, 22 bp, synthetic construct
  misc_feature 1..22: note = chemically synthesized
  source 1..22: mol_type = other DNA
aaattcaggagacgtatctgac

SEQ ID NO: 12503 - DNA, 22 bp, synthetic construct
  misc_feature 1..22: note = chemically synthesized
  source 1..22: mol_type = other DNA
aggagacgtatctgactatagg

SEQ ID NO: 12504 - DNA, 22 bp, synthetic construct
  misc_feature 1..22: note = chemically synthesized
  source 1..22: mol_type = other DNA
actataggtgagtatttggaac

SEQ ID NO: 12505 - DNA, 22 bp, synthetic construct
  misc_feature 1..22: note = chemically synthesized
  source 1..22: mol_type = other DNA
taggtgagtatttggaactcat

SEQ ID NO: 12506 - DNA, 22 bp, synthetic construct
  misc_feature 1..22: note = chemically synthesized
  source 1..22: mol_type = other DNA
ggaactcattgttctgtaaaca

SEQ ID NO: 12507 - DNA, 22 bp, synthetic construct
  misc_feature 1..22: note = chemically synthesized
  source 1..22: mol_type = other DNA
gaactcattgttctgtaaacag

SEQ ID NO: 12508 - DNA, 22 bp, synthetic construct
  misc_feature 1..22: note = chemically synthesized
  source 1..22: mol_type = other DNA
attgttctgtaaacagtagtta

SEQ ID NO: 12509 - DNA, 22 bp, synthetic construct
  misc_feature 1..22: note = chemically synthesized
  source 1..22: mol_type = other DNA
ttctgtaaacagtagttacagc

SEQ ID NO: 12510 - DNA, 22 bp, synthetic construct
  misc_feature 1..22: note = chemically synthesized
  source 1..22: mol_type = other DNA
tgtaaacagtagttacagccac

SEQ ID NO: 12511 - DNA, 22 bp, synthetic construct
  misc_feature 1..22: note = chemically synthesized
  source 1..22: mol_type = other DNA
taaacagtagttacagccacgt

SEQ ID NO: 12512 - DNA, 22 bp, synthetic construct
  misc_feature 1..22: note = chemically synthesized
  source 1..22: mol_type = other DNA
cagccacgtgtgtgggcatctg

SEQ ID NO: 12513 - DNA, 22 bp, synthetic construct
  misc_feature 1..22: note = chemically synthesized
  source 1..22: mol_type = other DNA
gagagtgagcatggatattgtg

SEQ ID NO: 12514 - DNA, 22 bp, synthetic construct
  misc_feature 1..22: note = chemically synthesized
  source 1..22: mol_type = other DNA
tgatacctagtacagtgcctgg

SEQ ID NO: 12515 - DNA, 22 bp, synthetic construct
  misc_feature 1..22: note = chemically synthesized
  source 1..22: mol_type = other DNA
gtacagtgcctggcagtagtgg

SEQ ID NO: 12516 - DNA, 22 bp, synthetic construct
  misc_feature 1..22: note = chemically synthesized
  source 1..22: mol_type = other DNA
gcagtagtggttgtatgctcag

SEQ ID NO: 12517 - DNA, 22 bp, synthetic construct
  misc_feature 1..22: note = chemically synthesized
  source 1..22: mol_type = other DNA
tatgctcagtaaattttgttga

SEQ ID NO: 12518 - DNA, 22 bp, synthetic construct
  misc_feature 1..22: note = chemically synthesized
  source 1..22: mol_type = other DNA
agtaaattttgttgacagggtc

SEQ ID NO: 12519 - DNA, 22 bp, synthetic construct
  misc_feature 1..22: note = chemically synthesized
  source 1..22: mol_type = other DNA
tgttgacagggtcagggccgga

SEQ ID NO: 12520 - DNA, 22 bp, synthetic construct
  misc_feature 1..22: note = chemically synthesized
  source 1..22: mol_type = other DNA
gttgacagggtcagggccggac

SEQ ID NO: 12521 - DNA, 22 bp, synthetic construct
  misc_feature 1..22: note = chemically synthesized
  source 1..22: mol_type = other DNA
ttgacagggtcagggccggact

SEQ ID NO: 12522 - DNA, 22 bp, synthetic construct
  misc_feature 1..22: note = chemically synthesized
  source 1..22: mol_type = other DNA
acagggtcagggccggactaga

SEQ ID NO: 12523 - DNA, 22 bp, synthetic construct
  misc_feature 1..22: note = chemically synthesized
  source 1..22: mol_type = other DNA
gactgtggtaagcaaggcctgt

SEQ ID NO: 12524 - DNA, 22 bp, synthetic construct
  misc_feature 1..22: note = chemically synthesized
  source 1..22: mol_type = other DNA
tggtaagcaaggcctgtagggc

SEQ ID NO: 12525 - DNA, 22 bp, synthetic construct
  misc_feature 1..22: note = chemically synthesized
  source 1..22: mol_type = other DNA
tagggcataaatatacttgtat

SEQ ID NO: 12526 - DNA, 22 bp, synthetic construct
  misc_feature 1..22: note = chemically synthesized
  source 1..22: mol_type = other DNA
gtatgccccgagaagtgaggac

SEQ ID NO: 12527 - DNA, 22 bp, synthetic construct
  misc_feature 1..22: note = chemically synthesized
  source 1..22: mol_type = other DNA
tatgccccgagaagtgaggacc

SEQ ID NO: 12528 - DNA, 22 bp, synthetic construct
  misc_feature 1..22: note = chemically synthesized
  source 1..22: mol_type = other DNA
ttaaatattgtgccctacatgc

SEQ ID NO: 12529 - DNA, 22 bp, synthetic construct
  misc_feature 1..22: note = chemically synthesized
  source 1..22: mol_type = other DNA
aaatattgtgccctacatgcct

SEQ ID NO: 12530 - DNA, 22 bp, synthetic construct
  misc_feature 1..22: note = chemically synthesized
  source 1..22: mol_type = other DNA
aatattgtgccctacatgcctt

SEQ ID NO: 12531 - DNA, 22 bp, synthetic construct
  misc_feature 1..22: note = chemically synthesized
  source 1..22: mol_type = other DNA
tgccctacatgccttgtttggt

SEQ ID NO: 12532 - DNA, 22 bp, synthetic construct
  misc_feature 1..22: note = chemically synthesized
  source 1..22: mol_type = other DNA
catgccttgtttggttcactct

SEQ ID NO: 12533 - DNA, 22 bp, synthetic construct
  misc_feature 1..22: note = chemically synthesized
  source 1..22: mol_type = other DNA
gtttggttcactcttgtcccag

SEQ ID NO: 12534 - DNA, 22 bp, synthetic construct
  misc_feature 1..22: note = chemically synthesized
  source 1..22: mol_type = other DNA
tttggttcactcttgtcccagc

SEQ ID NO: 12535 - DNA, 22 bp, synthetic construct
  misc_feature 1..22: note = chemically synthesized
  source 1..22: mol_type = other DNA
ggttcactcttgtcccagccct

SEQ ID NO: 12536 - DNA, 22 bp, synthetic construct
  misc_feature 1..22: note = chemically synthesized
  source 1..22: mol_type = other DNA
gttcactcttgtcccagcccta

SEQ ID NO: 12537 - DNA, 22 bp, synthetic construct
  misc_feature 1..22: note = chemically synthesized
  source 1..22: mol_type = other DNA
actcttgtcccagccctagcaa

SEQ ID NO: 12538 - DNA, 22 bp, synthetic construct
  misc_feature 1..22: note = chemically synthesized
  source 1..22: mol_type = other DNA
ttgtcccagccctagcaagtat

SEQ ID NO: 12539 - DNA, 22 bp, synthetic construct
  misc_feature 1..22: note = chemically synthesized
  source 1..22: mol_type = other DNA
gtcccagccctagcaagtatat

SEQ ID NO: 12540 - DNA, 22 bp, synthetic construct
  misc_feature 1..22: note = chemically synthesized
  source 1..22: mol_type = other DNA
tcccagccctagcaagtatata

SEQ ID NO: 12541 - DNA, 22 bp, synthetic construct
  misc_feature 1..22: note = chemically synthesized
  source 1..22: mol_type = other DNA
gcaagtatatataaggtgaaaa

SEQ ID NO: 12542 - DNA, 22 bp, synthetic construct
  misc_feature 1..22: note = chemically synthesized
  source 1..22: mol_type = other DNA
aggctggagcctgggagaaccc

SEQ ID NO: 12543 - DNA, 22 bp, synthetic construct
  misc_feature 1..22: note = chemically synthesized
  source 1..22: mol_type = other DNA
gagcctgggagaaccctggaca

SEQ ID NO: 12544 - DNA, 22 bp, synthetic construct
  misc_feature 1..22: note = chemically synthesized
  source 1..22: mol_type = other DNA
ggagaaccctggacatttaagg

SEQ ID NO: 12545 - DNA, 22 bp, synthetic construct
  misc_feature 1..22: note = chemically synthesized
  source 1..22: mol_type = other DNA
gacatttaagggccatggagag

SEQ ID NO: 12546 - DNA, 22 bp, synthetic construct
  misc_feature 1..22: note = chemically synthesized
  source 1..22: mol_type = other DNA
aagggccatggagaggaacagg

SEQ ID NO: 12547 - DNA, 22 bp, synthetic construct
  misc_feature 1..22: note = chemically synthesized
  source 1..22: mol_type = other DNA
agggccatggagaggaacagga

SEQ ID NO: 12548 - DNA, 22 bp, synthetic construct
  misc_feature 1..22: note = chemically synthesized
  source 1..22: mol_type = other DNA
atcaattcaagtgctggatgga

SEQ ID NO: 12549 - DNA, 22 bp, synthetic construct
  misc_feature 1..22: note = chemically synthesized
  source 1..22: mol_type = other DNA
aagtgctggatggataacagga

SEQ ID NO: 12550 - DNA, 22 bp, synthetic construct
  misc_feature 1..22: note = chemically synthesized
  source 1..22: mol_type = other DNA
gatggataacaggagttagagc

SEQ ID NO: 12551 - DNA, 22 bp, synthetic construct
  misc_feature 1..22: note = chemically synthesized
  source 1..22: mol_type = other DNA
gagcaaagcggggaaccagaat

SEQ ID NO: 12552 - DNA, 22 bp, synthetic construct
  misc_feature 1..22: note = chemically synthesized
  source 1..22: mol_type = other DNA
ttataaaaagagtttcctaaaa

SEQ ID NO: 12553 - DNA, 22 bp, synthetic construct
  misc_feature 1..22: note = chemically synthesized
  source 1..22: mol_type = other DNA
taaaaagagtttcctaaaaagg

SEQ ID NO: 12554 - DNA, 22 bp, synthetic construct
  misc_feature 1..22: note = chemically synthesized
  source 1..22: mol_type = other DNA
cctaaaaagggagagatcaaca

SEQ ID NO: 12555 - DNA, 22 bp, synthetic construct
  misc_feature 1..22: note = chemically synthesized
  source 1..22: mol_type = other DNA
ctaaaaagggagagatcaacaa

SEQ ID NO: 12556 - DNA, 22 bp, synthetic construct
  misc_feature 1..22: note = chemically synthesized
  source 1..22: mol_type = other DNA
aaaagggagagatcaacaatta

SEQ ID NO: 12557 - DNA, 22 bp, synthetic construct
  misc_feature 1..22: note = chemically synthesized
  source 1..22: mol_type = other DNA
gaaattatttagagcagccagt

SEQ ID NO: 12558 - DNA, 22 bp, synthetic construct
  misc_feature 1..22: note = chemically synthesized
  source 1..22: mol_type = other DNA
tttagagcagccagtaaataca

SEQ ID NO: 12559 - DNA, 22 bp, synthetic construct
  misc_feature 1..22: note = chemically synthesized
  source 1..22: mol_type = other DNA
agagcagccagtaaatacataa

SEQ ID NO: 12560 - DNA, 22 bp, synthetic construct
  misc_feature 1..22: note = chemically synthesized
  source 1..22: mol_type = other DNA
gagcagccagtaaatacataaa

SEQ ID NO: 12561 - DNA, 22 bp, synthetic construct
  misc_feature 1..22: note = chemically synthesized
  source 1..22: mol_type = other DNA
aaaattattctttaggtcattc

SEQ ID NO: 12562 - DNA, 22 bp, synthetic construct
  misc_feature 1..22: note = chemically synthesized
  source 1..22: mol_type = other DNA
ttctttaggtcattcctgattg

SEQ ID NO: 12563 - DNA, 22 bp, synthetic construct
  misc_feature 1..22: note = chemically synthesized
  source 1..22: mol_type = other DNA
tttaggtcattcctgattgtga

SEQ ID NO: 12564 - DNA, 22 bp, synthetic construct
  misc_feature 1..22: note = chemically synthesized
  source 1..22: mol_type = other DNA
taggtcattcctgattgtgaca

SEQ ID NO: 12565 - DNA, 22 bp, synthetic construct
  misc_feature 1..22: note = chemically synthesized
  source 1..22: mol_type = other DNA
aggtcattcctgattgtgacaa

SEQ ID NO: 12566 - DNA, 22 bp, synthetic construct
  misc_feature 1..22: note = chemically synthesized
  source 1..22: mol_type = other DNA
ggtcattcctgattgtgacaat

SEQ ID NO: 12567 - DNA, 22 bp, synthetic construct
  misc_feature 1..22: note = chemically synthesized
  source 1..22: mol_type = other DNA
ctgattgtgacaatagtcattt

SEQ ID NO: 12568 - DNA, 22 bp, synthetic construct
  misc_feature 1..22: note = chemically synthesized
  source 1..22: mol_type = other DNA
attgtgacaatagtcatttcat

SEQ ID NO: 12569 - DNA, 22 bp, synthetic construct
  misc_feature 1..22: note = chemically synthesized
  source 1..22: mol_type = other DNA
tgacaatagtcatttcattata

SEQ ID NO: 12570 - DNA, 22 bp, synthetic construct
  misc_feature 1..22: note = chemically synthesized
  source 1..22: mol_type = other DNA
cattatataaatgtgattaagg

SEQ ID NO: 12571 - DNA, 22 bp, synthetic construct
  misc_feature 1..22: note = chemically synthesized
  source 1..22: mol_type = other DNA
attatataaatgtgattaagga

SEQ ID NO: 12572 - DNA, 22 bp, synthetic construct
  misc_feature 1..22: note = chemically synthesized
  source 1..22: mol_type = other DNA
tataaatgtgattaaggaagga

SEQ ID NO: 12573 - DNA, 22 bp, synthetic construct
  misc_feature 1..22: note = chemically synthesized
  source 1..22: mol_type = other DNA
aggaaggaaaagagctacacag

SEQ ID NO: 12574 - DNA, 22 bp, synthetic construct
  misc_feature 1..22: note = chemically synthesized
  source 1..22: mol_type = other DNA
cacagaagttattaaagagcta

SEQ ID NO: 12575 - DNA, 22 bp, synthetic construct
  misc_feature 1..22: note = chemically synthesized
  source 1..22: mol_type = other DNA
ttaaagagctaaagagaattga

SEQ ID NO: 12576 - DNA, 22 bp, synthetic construct
  misc_feature 1..22: note = chemically synthesized
  source 1..22: mol_type = other DNA
aagagctaaagagaattgagaa

SEQ ID NO: 12577 - DNA, 22 bp, synthetic construct
  misc_feature 1..22: note = chemically synthesized
  source 1..22: mol_type = other DNA
aagagaattgagaaatttaaaa

SEQ ID NO: 12578 - DNA, 22 bp, synthetic construct
  misc_feature 1..22: note = chemically synthesized
  source 1..22: mol_type = other DNA
agaaatttaaaacagaagaaag

SEQ ID NO: 12579 - DNA, 22 bp, synthetic construct
  misc_feature 1..22: note = chemically synthesized
  source 1..22: mol_type = other DNA
aaaacagaagaaagtagggcca

SEQ ID NO: 12580 - DNA, 22 bp, synthetic construct
  misc_feature 1..22: note = chemically synthesized
  source 1..22: mol_type = other DNA
aaacagaagaaagtagggccaa

SEQ ID NO: 12581 - DNA, 22 bp, synthetic construct
  misc_feature 1..22: note = chemically synthesized
  source 1..22: mol_type = other DNA
tctcactgatcctgccaacacc

SEQ ID NO: 12582 - DNA, 22 bp, synthetic construct
  misc_feature 1..22: note = chemically synthesized
  source 1..22: mol_type = other DNA
actgatcctgccaacacctgtg

SEQ ID NO: 12583 - DNA, 22 bp, synthetic construct
  misc_feature 1..22: note = chemically synthesized
  source 1..22: mol_type = other DNA
atcctgccaacacctgtgagat

SEQ ID NO: 12584 - DNA, 22 bp, synthetic construct
  misc_feature 1..22: note = chemically synthesized
  source 1..22: mol_type = other DNA
ccaacacctgtgagatagatat

SEQ ID NO: 12585 - DNA, 22 bp, synthetic construct
  misc_feature 1..22: note = chemically synthesized
  source 1..22: mol_type = other DNA
tgagatagatattcttattata

SEQ ID NO: 12586 - DNA, 22 bp, synthetic construct
  misc_feature 1..22: note = chemically synthesized
  source 1..22: mol_type = other DNA
ttattatactactgttaaacct

SEQ ID NO: 12587 - DNA, 22 bp, synthetic construct
  misc_feature 1..22: note = chemically synthesized
  source 1..22: mol_type = other DNA
attatactactgttaaacctaa

SEQ ID NO: 12588 - DNA, 22 bp, synthetic construct
  misc_feature 1..22: note = chemically synthesized
  source 1..22: mol_type = other DNA
ttatactactgttaaacctaat

SEQ ID NO: 12589 - DNA, 22 bp, synthetic construct
  misc_feature 1..22: note = chemically synthesized
  source 1..22: mol_type = other DNA
tactactgttaaacctaattta

SEQ ID NO: 12590 - DNA, 22 bp, synthetic construct
  misc_feature 1..22: note = chemically synthesized
  source 1..22: mol_type = other DNA
ctgttaaacctaatttacattt

SEQ ID NO: 12591 - DNA, 22 bp, synthetic construct
  misc_feature 1..22: note = chemically synthesized
  source 1..22: mol_type = other DNA
ttaaacctaatttacatttgac

SEQ ID NO: 12592 - DNA, 22 bp, synthetic construct
  misc_feature 1..22: note = chemically synthesized
  source 1..22: mol_type = other DNA
aacctaatttacatttgacaaa

SEQ ID NO: 12593 - DNA, 22 bp, synthetic construct
  misc_feature 1..22: note = chemically synthesized
  source 1..22: mol_type = other DNA
atttacatttgacaaagttaag

SEQ ID NO: 12594 - DNA, 22 bp, synthetic construct
  misc_feature 1..22: note = chemically synthesized
  source 1..22: mol_type = other DNA
acatttgacaaagttaaggttc

SEQ ID NO: 12595 - DNA, 22 bp, synthetic construct
  misc_feature 1..22: note = chemically synthesized
  source 1..22: mol_type = other DNA
catttgacaaagttaaggttca

SEQ ID NO: 12596 - DNA, 22 bp, synthetic construct
  misc_feature 1..22: note = chemically synthesized
  source 1..22: mol_type = other DNA
gacaaagttaaggttcagagct

SEQ ID NO: 12597 - DNA, 22 bp, synthetic construct
  misc_feature 1..22: note = chemically synthesized
  source 1..22: mol_type = other DNA
acaaagttaaggttcagagctt

SEQ ID NO: 12598 - DNA, 22 bp, synthetic construct
  misc_feature 1..22: note = chemically synthesized
  source 1..22: mol_type = other DNA
aggttcagagcttgtgtgactt

SEQ ID NO: 12599 - DNA, 22 bp, synthetic construct
  misc_feature 1..22: note = chemically synthesized
  source 1..22: mol_type = other DNA
agagcttgtgtgacttgtccaa

SEQ ID NO: 12600 - DNA, 22 bp, synthetic construct
  misc_feature 1..22: note = chemically synthesized
  source 1..22: mol_type = other DNA
gtgtgacttgtccaaggtcaca

SEQ ID NO: 12601 - DNA, 22 bp, synthetic construct
  misc_feature 1..22: note = chemically synthesized
  source 1..22: mol_type = other DNA
tgtgacttgtccaaggtcacag

SEQ ID NO: 12602 - DNA, 22 bp, synthetic construct
  misc_feature 1..22: note = chemically synthesized
  source 1..22: mol_type = other DNA
gtccaaggtcacaggtctagag

SEQ ID NO: 12603 - DNA, 22 bp, synthetic construct
  misc_feature 1..22: note = chemically synthesized
  source 1..22: mol_type = other DNA
tccaaggtcacaggtctagagg

SEQ ID NO: 12604 - DNA, 22 bp, synthetic construct
  misc_feature 1..22: note = chemically synthesized
  source 1..22: mol_type = other DNA
gaggaggcagatacttgattca

SEQ ID NO: 12605 - DNA, 22 bp, synthetic construct
  misc_feature 1..22: note = chemically synthesized
  source 1..22: mol_type = other DNA
gattcaaacctatttctgtctg

SEQ ID NO: 12606 - DNA, 22 bp, synthetic construct
  misc_feature 1..22: note = chemically synthesized
  source 1..22: mol_type = other DNA
attcaaacctatttctgtctga

SEQ ID NO: 12607 - DNA, 22 bp, synthetic construct
  misc_feature 1..22: note = chemically synthesized
  source 1..22: mol_type = other DNA
aaacctatttctgtctgatctg

SEQ ID NO: 12608 - DNA, 22 bp, synthetic construct
  misc_feature 1..22: note = chemically synthesized
  source 1..22: mol_type = other DNA
tttctgtctgatctgattctaa

SEQ ID NO: 12609 - DNA, 22 bp, synthetic construct
  misc_feature 1..22: note = chemically synthesized
  source 1..22: mol_type = other DNA
ctgtctgatctgattctaaagt

SEQ ID NO: 12610 - DNA, 22 bp, synthetic construct
  misc_feature 1..22: note = chemically synthesized
  source 1..22: mol_type = other DNA
tgtctgatctgattctaaagtc

SEQ ID NO: 12611 - DNA, 22 bp, synthetic construct
  misc_feature 1..22: note = chemically synthesized
  source 1..22: mol_type = other DNA
tctgatctgattctaaagtctg

SEQ ID NO: 12612 - DNA, 22 bp, synthetic construct
  misc_feature 1..22: note = chemically synthesized
  source 1..22: mol_type = other DNA
atctgattctaaagtctgtttt

SEQ ID NO: 12613 - DNA, 22 bp, synthetic construct
  misc_feature 1..22: note = chemically synthesized
  source 1..22: mol_type = other DNA
attctaaagtctgttttttcac

SEQ ID NO: 12614 - DNA, 22 bp, synthetic construct
  misc_feature 1..22: note = chemically synthesized
  source 1..22: mol_type = other DNA
taaagtctgttttttcactcaa

SEQ ID NO: 12615 - DNA, 22 bp, synthetic construct
  misc_feature 1..22: note = chemically synthesized
  source 1..22: mol_type = other DNA
aagtctgttttttcactcaacc

SEQ ID NO: 12616 - DNA, 22 bp, synthetic construct
  misc_feature 1..22: note = chemically synthesized
  source 1..22: mol_type = other DNA
ttttttcactcaaccacactgt

SEQ ID NO: 12617 - DNA, 22 bp, synthetic construct
  misc_feature 1..22: note = chemically synthesized
  source 1..22: mol_type = other DNA
tttcactcaaccacactgtaca

SEQ ID NO: 12618 - DNA, 22 bp, synthetic construct
  misc_feature 1..22: note = chemically synthesized
  source 1..22: mol_type = other DNA
ttcactcaaccacactgtacag

SEQ ID NO: 12619 - DNA, 22 bp, synthetic construct
  misc_feature 1..22: note = chemically synthesized
  source 1..22: mol_type = other DNA
tcactcaaccacactgtacagt

SEQ ID NO: 12620 - DNA, 22 bp, synthetic construct
  misc_feature 1..22: note = chemically synthesized
  source 1..22: mol_type = other DNA
cactcaaccacactgtacagtc

SEQ ID NO: 12621 - DNA, 22 bp, synthetic construct
  misc_feature 1..22: note = chemically synthesized
  source 1..22: mol_type = other DNA
actcaaccacactgtacagtca

SEQ ID NO: 12622 - DNA, 22 bp, synthetic construct
  misc_feature 1..22: note = chemically synthesized
  source 1..22: mol_type = other DNA
aaccacactgtacagtcagctc

SEQ ID NO: 12623 - DNA, 22 bp, synthetic construct
  misc_feature 1..22: note = chemically synthesized
  source 1..22: mol_type = other DNA
tacagtcagctctccttgtgag

SEQ ID NO: 12624 - DNA, 22 bp, synthetic construct
  misc_feature 1..22: note = chemically synthesized
  source 1..22: mol_type = other DNA
tccttgtgagttccacagccac

SEQ ID NO: 12625 - DNA, 22 bp, synthetic construct
  misc_feature 1..22: note = chemically synthesized
  source 1..22: mol_type = other DNA
cttgtgagttccacagccacag

SEQ ID NO: 12626 - DNA, 22 bp, synthetic construct
  misc_feature 1..22: note = chemically synthesized
  source 1..22: mol_type = other DNA
gtgagttccacagccacagatt

SEQ ID NO: 12627 - DNA, 22 bp, synthetic construct
  misc_feature 1..22: note = chemically synthesized
  source 1..22: mol_type = other DNA
tgagttccacagccacagattc

SEQ ID NO: 12628 - DNA, 22 bp, synthetic construct
  misc_feature 1..22: note = chemically synthesized
  source 1..22: mol_type = other DNA
cacagccacagattcaattaac

SEQ ID NO: 12629 - DNA, 22 bp, synthetic construct
  misc_feature 1..22: note = chemically synthesized
  source 1..22: mol_type = other DNA
aattaactgcagatcaaaaata

SEQ ID NO: 12630 - DNA, 22 bp, synthetic construct
  misc_feature 1..22: note = chemically synthesized
  source 1..22: mol_type = other DNA
actgcagatcaaaaatattcaa

SEQ ID NO: 12631 - DNA, 22 bp, synthetic construct
  misc_feature 1..22: note = chemically synthesized
  source 1..22: mol_type = other DNA
cagatcaaaaatattcaagaaa

SEQ ID NO: 12632 - DNA, 22 bp, synthetic construct
  misc_feature 1..22: note = chemically synthesized
  source 1..22: mol_type = other DNA
aagaaaaaaatggatggttgca

SEQ ID NO: 12633 - DNA, 22 bp, synthetic construct
  misc_feature 1..22: note = chemically synthesized
  source 1..22: mol_type = other DNA
catctctactgaacatgtacag

SEQ ID NO: 12634 - DNA, 22 bp, synthetic construct
  misc_feature 1..22: note = chemically synthesized
  source 1..22: mol_type = other DNA
tactgaacatgtacagactctt

SEQ ID NO: 12635 - DNA, 22 bp, synthetic construct
  misc_feature 1..22: note = chemically synthesized
  source 1..22: mol_type = other DNA
ctgaacatgtacagactctttt

SEQ ID NO: 12636 - DNA, 22 bp, synthetic construct
  misc_feature 1..22: note = chemically synthesized
  source 1..22: mol_type = other DNA
aacatgtacagactcttttatc

SEQ ID NO: 12637 - DNA, 22 bp, synthetic construct
  misc_feature 1..22: note = chemically synthesized
  source 1..22: mol_type = other DNA
ttttatctttcattattcccta

SEQ ID NO: 12638 - DNA, 22 bp, synthetic construct
  misc_feature 1..22: note = chemically synthesized
  source 1..22: mol_type = other DNA
ttatctttcattattccctaaa

SEQ ID NO: 12639 - DNA, 22 bp, synthetic construct
  misc_feature 1..22: note = chemically synthesized
  source 1..22: mol_type = other DNA
tatctttcattattccctaaac

SEQ ID NO: 12640 - DNA, 22 bp, synthetic construct
  misc_feature 1..22: note = chemically synthesized
  source 1..22: mol_type = other DNA
atctttcattattccctaaaca

SEQ ID NO: 12641 - DNA, 22 bp, synthetic construct
  misc_feature 1..22: note = chemically synthesized
  source 1..22: mol_type = other DNA
tctttcattattccctaaacaa

SEQ ID NO: 12642 - DNA, 22 bp, synthetic construct
  misc_feature 1..22: note = chemically synthesized
  source 1..22: mol_type = other DNA
tcattattccctaaacaataca

SEQ ID NO: 12643 - DNA, 22 bp, synthetic construct
  misc_feature 1..22: note = chemically synthesized
  source 1..22: mol_type = other DNA
cattattccctaaacaatacag

SEQ ID NO: 12644 - DNA, 22 bp, synthetic construct
  misc_feature 1..22: note = chemically synthesized
  source 1..22: mol_type = other DNA
attattccctaaacaatacagc

SEQ ID NO: 12645 - DNA, 22 bp, synthetic construct
  misc_feature 1..22: note = chemically synthesized
  source 1..22: mol_type = other DNA
ttccctaaacaatacagcataa

SEQ ID NO: 12646 - DNA, 22 bp, synthetic construct
  misc_feature 1..22: note = chemically synthesized
  source 1..22: mol_type = other DNA
cctaaacaatacagcataacaa

SEQ ID NO: 12647 - DNA, 22 bp, synthetic construct
  misc_feature 1..22: note = chemically synthesized
  source 1..22: mol_type = other DNA
aacaatacagcataacaactat

SEQ ID NO: 12648 - DNA, 22 bp, synthetic construct
  misc_feature 1..22: note = chemically synthesized
  source 1..22: mol_type = other DNA
tttacatagcatttacattgta

SEQ ID NO: 12649 - DNA, 22 bp, synthetic construct
  misc_feature 1..22: note = chemically synthesized
  source 1..22: mol_type = other DNA
acatagcatttacattgtatta

SEQ ID NO: 12650 - DNA, 22 bp, synthetic construct
  misc_feature 1..22: note = chemically synthesized
  source 1..22: mol_type = other DNA
catagcatttacattgtattag

SEQ ID NO: 12651 - DNA, 22 bp, synthetic construct
  misc_feature 1..22: note = chemically synthesized
  source 1..22: mol_type = other DNA
acattgtattagctattaagag

SEQ ID NO: 12652 - DNA, 22 bp, synthetic construct
  misc_feature 1..22: note = chemically synthesized
  source 1..22: mol_type = other DNA
cattgtattagctattaagaga

SEQ ID NO: 12653 - DNA, 22 bp, synthetic construct
  misc_feature 1..22: note = chemically synthesized
  source 1..22: mol_type = other DNA
tattagctattaagagaaacct

SEQ ID NO: 12654 - DNA, 22 bp, synthetic construct
  misc_feature 1..22: note = chemically synthesized
  source 1..22: mol_type = other DNA
gctattaagagaaacctagaga

SEQ ID NO: 12655 - DNA, 22 bp, synthetic construct
  misc_feature 1..22: note = chemically synthesized
  source 1..22: mol_type = other DNA
ttaagagaaacctagagatgat

SEQ ID NO: 12656 - DNA, 22 bp, synthetic construct
  misc_feature 1..22: note = chemically synthesized
  source 1..22: mol_type = other DNA
agagaaacctagagatgattta

SEQ ID NO: 12657 - DNA, 22 bp, synthetic construct
  misc_feature 1..22: note = chemically synthesized
  source 1..22: mol_type = other DNA
gagatgatttaaagtacaaagg

SEQ ID NO: 12658 - DNA, 22 bp, synthetic construct
  misc_feature 1..22: note = chemically synthesized
  source 1..22: mol_type = other DNA
aaagtacaaaggaggatgtgtt

SEQ ID NO: 12659 - DNA, 22 bp, synthetic construct
  misc_feature 1..22: note = chemically synthesized
  source 1..22: mol_type = other DNA
aagtacaaaggaggatgtgttt

SEQ ID NO: 12660 - DNA, 22 bp, synthetic construct
  misc_feature 1..22: note = chemically synthesized
  source 1..22: mol_type = other DNA
aggttatatgcaaatagtaagc

SEQ ID NO: 12661 - DNA, 22 bp, synthetic construct
  misc_feature 1..22: note = chemically synthesized
  source 1..22: mol_type = other DNA
ggttatatgcaaatagtaagcc

SEQ ID NO: 12662 - DNA, 22 bp, synthetic construct
  misc_feature 1..22: note = chemically synthesized
  source 1..22: mol_type = other DNA
tatgcaaatagtaagccatttt

SEQ ID NO: 12663 - DNA, 22 bp, synthetic construct
  misc_feature 1..22: note = chemically synthesized
  source 1..22: mol_type = other DNA
ttatatcggagacttgagcatc

SEQ ID NO: 12664 - DNA, 22 bp, synthetic construct
  misc_feature 1..22: note = chemically synthesized
  source 1..22: mol_type = other DNA
tatatcggagacttgagcatcc

SEQ ID NO: 12665 - DNA, 22 bp, synthetic construct
  misc_feature 1..22: note = chemically synthesized
  source 1..22: mol_type = other DNA
atatcggagacttgagcatcca

SEQ ID NO: 12666 - DNA, 22 bp, synthetic construct
  misc_feature 1..22: note = chemically synthesized
  source 1..22: mol_type = other DNA
tatcggagacttgagcatccac

SEQ ID NO: 12667 - DNA, 22 bp, synthetic construct
  misc_feature 1..22: note = chemically synthesized
  source 1..22: mol_type = other DNA
gagcatccacagatcttgatat

SEQ ID NO: 12668 - DNA, 22 bp, synthetic construct
  misc_feature 1..22: note = chemically synthesized
  source 1..22: mol_type = other DNA
agcatccacagatcttgatatt

SEQ ID NO: 12669 - DNA, 22 bp, synthetic construct
  misc_feature 1..22: note = chemically synthesized
  source 1..22: mol_type = other DNA
gatatttgcagggggtcttgcc

SEQ ID NO: 12670 - DNA, 22 bp, synthetic construct
  misc_feature 1..22: note = chemically synthesized
  source 1..22: mol_type = other DNA
atatttgcagggggtcttgcca

SEQ ID NO: 12671 - DNA, 22 bp, synthetic construct
  misc_feature 1..22: note = chemically synthesized
  source 1..22: mol_type = other DNA
gcagggggtcttgccaccaatt

SEQ ID NO: 12672 - DNA, 22 bp, synthetic construct
  misc_feature 1..22: note = chemically synthesized
  source 1..22: mol_type = other DNA
cagggggtcttgccaccaattt

SEQ ID NO: 12673 - DNA, 22 bp, synthetic construct
  misc_feature 1..22: note = chemically synthesized
  source 1..22: mol_type = other DNA
gccaccaattttccatggatac

SEQ ID NO: 12674 - DNA, 22 bp, synthetic construct
  misc_feature 1..22: note = chemically synthesized
  source 1..22: mol_type = other DNA
ccaccaattttccatggatact

SEQ ID NO: 12675 - DNA, 22 bp, synthetic construct
  misc_feature 1..22: note = chemically synthesized
  source 1..22: mol_type = other DNA
tccatggatactgaggaacgac

SEQ ID NO: 12676 - DNA, 22 bp, synthetic construct
  misc_feature 1..22: note = chemically synthesized
  source 1..22: mol_type = other DNA
ccatggatactgaggaacgact

SEQ ID NO: 12677 - DNA, 22 bp, synthetic construct
  misc_feature 1..22: note = chemically synthesized
  source 1..22: mol_type = other DNA
catggatactgaggaacgactg

SEQ ID NO: 12678 - DNA, 22 bp, synthetic construct
  misc_feature 1..22: note = chemically synthesized
  source 1..22: mol_type = other DNA
aggaacgactgtaaatggatgc

SEQ ID NO: 12679 - DNA, 22 bp, synthetic construct
  misc_feature 1..22: note = chemically synthesized
  source 1..22: mol_type = other DNA
taaatggatgcaggcatggatg

SEQ ID NO: 12680 - DNA, 22 bp, synthetic construct
  misc_feature 1..22: note = chemically synthesized
  source 1..22: mol_type = other DNA
tttaggagtgtccagggccaag

SEQ ID NO: 12681 - DNA, 22 bp, synthetic construct
  misc_feature 1..22: note = chemically synthesized
  source 1..22: mol_type = other DNA
aggagtgtccagggccaagtaa

SEQ ID NO: 12682 - DNA, 22 bp, synthetic construct
  misc_feature 1..22: note = chemically synthesized
  source 1..22: mol_type = other DNA
ggagtgtccagggccaagtaaa

SEQ ID NO: 12683 - DNA, 22 bp, synthetic construct
  misc_feature 1..22: note = chemically synthesized
  source 1..22: mol_type = other DNA
ctgagcagagaggtgggtggag

SEQ ID NO: 12684 - DNA, 22 bp, synthetic construct
  misc_feature 1..22: note = chemically synthesized
  source 1..22: mol_type = other DNA
agcagagaggtgggtggaggct

SEQ ID NO: 12685 - DNA, 22 bp, synthetic construct
  misc_feature 1..22: note = chemically synthesized
  source 1..22: mol_type = other DNA
tgaggcatcaatatgtggtggc

SEQ ID NO: 12686 - DNA, 22 bp, synthetic construct
  misc_feature 1..22: note = chemically synthesized
  source 1..22: mol_type = other DNA
cattttggtgatttttttcctt

SEQ ID NO: 12687 - DNA, 22 bp, synthetic construct
  misc_feature 1..22: note = chemically synthesized
  source 1..22: mol_type = other DNA
tggtgatttttttccttcacag

SEQ ID NO: 12688 - DNA, 22 bp, synthetic construct
  misc_feature 1..22: note = chemically synthesized
  source 1..22: mol_type = other DNA
ggtgatttttttccttcacagt

SEQ ID NO: 12689 - DNA, 22 bp, synthetic construct
  misc_feature 1..22: note = chemically synthesized
  source 1..22: mol_type = other DNA
gtgatttttttccttcacagtc

SEQ ID NO: 12690 - DNA, 22 bp, synthetic construct
  misc_feature 1..22: note = chemically synthesized
  source 1..22: mol_type = other DNA
ttttccttcacagtcctcggct

SEQ ID NO: 12691 - DNA, 22 bp, synthetic construct
  misc_feature 1..22: note = chemically synthesized
  source 1..22: mol_type = other DNA
tttccttcacagtcctcggctg

SEQ ID NO: 12692 - DNA, 22 bp, synthetic construct
  misc_feature 1..22: note = chemically synthesized
  source 1..22: mol_type = other DNA
ttccttcacagtcctcggctgt

SEQ ID NO: 12693 - DNA, 22 bp, synthetic construct
  misc_feature 1..22: note = chemically synthesized
  source 1..22: mol_type = other DNA
tccttcacagtcctcggctgtc

SEQ ID NO: 12694 - DNA, 22 bp, synthetic construct
  misc_feature 1..22: note = chemically synthesized
  source 1..22: mol_type = other DNA
ccttcacagtcctcggctgtct

SEQ ID NO: 12695 - DNA, 22 bp, synthetic construct
  misc_feature 1..22: note = chemically synthesized
  source 1..22: mol_type = other DNA
cttcacagtcctcggctgtctg

SEQ ID NO: 12696 - DNA, 22 bp, synthetic construct
  misc_feature 1..22: note = chemically synthesized
  source 1..22: mol_type = other DNA
cacagtcctcggctgtctggga

SEQ ID NO: 12697 - DNA, 22 bp, synthetic construct
  misc_feature 1..22: note = chemically synthesized
  source 1..22: mol_type = other DNA
acagtcctcggctgtctgggaa

SEQ ID NO: 12698 - DNA, 22 bp, synthetic construct
  misc_feature 1..22: note = chemically synthesized
  source 1..22: mol_type = other DNA
ggctgtctgggaagagaaggat

SEQ ID NO: 12699 - DNA, 22 bp, synthetic construct
  misc_feature 1..22: note = chemically synthesized
  source 1..22: mol_type = other DNA
tctgggaagagaaggatgaagg

SEQ ID NO: 12700 - DNA, 22 bp, synthetic construct
  misc_feature 1..22: note = chemically synthesized
  source 1..22: mol_type = other DNA
ggaagagaaggatgaaggcaga

SEQ ID NO: 12701 - DNA, 22 bp, synthetic construct
  misc_feature 1..22: note = chemically synthesized
  source 1..22: mol_type = other DNA
ctccaatttaggggctaggatt

SEQ ID NO: 12702 - DNA, 22 bp, synthetic construct
  misc_feature 1..22: note = chemically synthesized
  source 1..22: mol_type = other DNA
caatttaggggctaggattgca

SEQ ID NO: 12703 - DNA, 22 bp, synthetic construct
  misc_feature 1..22: note = chemically synthesized
  source 1..22: mol_type = other DNA
aggggctaggattgcagggtgg

SEQ ID NO: 12704 - DNA, 22 bp, synthetic construct
  misc_feature 1..22: note = chemically synthesized
  source 1..22: mol_type = other DNA
ggggctaggattgcagggtggg

SEQ ID NO: 12705 - DNA, 22 bp, synthetic construct
  misc_feature 1..22: note = chemically synthesized
  source 1..22: mol_type = other DNA
ggattgcagggtgggcacagca

SEQ ID NO: 12706 - DNA, 22 bp, synthetic construct
  misc_feature 1..22: note = chemically synthesized
  source 1..22: mol_type = other DNA
cagggtgggcacagcattgcaa

SEQ ID NO: 12707 - DNA, 22 bp, synthetic construct
  misc_feature 1..22: note = chemically synthesized
  source 1..22: mol_type = other DNA
caaacgagtgaaggaaattgag

SEQ ID NO: 12708 - DNA, 22 bp, synthetic construct
  misc_feature 1..22: note = chemically synthesized
  source 1..22: mol_type = other DNA
agaaatatggccaatgaagagt

SEQ ID NO: 12709 - DNA, 22 bp, synthetic construct
  misc_feature 1..22: note = chemically synthesized
  source 1..22: mol_type = other DNA
aagagaggcctggcatggtggc

SEQ ID NO: 12710 - DNA, 22 bp, synthetic construct
  misc_feature 1..22: note = chemically synthesized
  source 1..22: mol_type = other DNA
gcatggtggctcacacctataa

SEQ ID NO: 12711 - DNA, 22 bp, synthetic construct
  misc_feature 1..22: note = chemically synthesized
  source 1..22: mol_type = other DNA
acacctataatcccagcacttt

SEQ ID NO: 12712 - DNA, 22 bp, synthetic construct
  misc_feature 1..22: note = chemically synthesized
  source 1..22: mol_type = other DNA
taatcccagcactttcagaggc

SEQ ID NO: 12713 - DNA, 22 bp, synthetic construct
  misc_feature 1..22: note = chemically synthesized
  source 1..22: mol_type = other DNA
tcagaggcccaggcaggcagat

SEQ ID NO: 12714 - DNA, 22 bp, synthetic construct
  misc_feature 1..22: note = chemically synthesized
  source 1..22: mol_type = other DNA
cagaggcccaggcaggcagatc

SEQ ID NO: 12715 - DNA, 22 bp, synthetic construct
  misc_feature 1..22: note = chemically synthesized
  source 1..22: mol_type = other DNA
agaggcccaggcaggcagatca

SEQ ID NO: 12716 - DNA, 22 bp, synthetic construct
  misc_feature 1..22: note = chemically synthesized
  source 1..22: mol_type = other DNA
gaggtcaggagttcgacaccag

SEQ ID NO: 12717 - DNA, 22 bp, synthetic construct
  misc_feature 1..22: note = chemically synthesized
  source 1..22: mol_type = other DNA
aggtcaggagttcgacaccagc

SEQ ID NO: 12718 - DNA, 22 bp, synthetic construct
  misc_feature 1..22: note = chemically synthesized
  source 1..22: mol_type = other DNA
gacaccagcctggccaacaagg

SEQ ID NO: 12719 - DNA, 22 bp, synthetic construct
  misc_feature 1..22: note = chemically synthesized
  source 1..22: mol_type = other DNA
gccaacaaggtgaaatggtgaa

SEQ ID NO: 12720 - DNA, 22 bp, synthetic construct
  misc_feature 1..22: note = chemically synthesized
  source 1..22: mol_type = other DNA
tactaaaaatacaaaaattagc

SEQ ID NO: 12721 - DNA, 22 bp, synthetic construct
  misc_feature 1..22: note = chemically synthesized
  source 1..22: mol_type = other DNA
actaaaaatacaaaaattagct

SEQ ID NO: 12722 - DNA, 22 bp, synthetic construct
  misc_feature 1..22: note = chemically synthesized
  source 1..22: mol_type = other DNA
ctaaaaatacaaaaattagctg

SEQ ID NO: 12723 - DNA, 22 bp, synthetic construct
  misc_feature 1..22: note = chemically synthesized
  source 1..22: mol_type = other DNA
aaaatacaaaaattagctgggc

SEQ ID NO: 12724 - DNA, 22 bp, synthetic construct
  misc_feature 1..22: note = chemically synthesized
  source 1..22: mol_type = other DNA
gctgggcatggtggcgggtgcc

SEQ ID NO: 12725 - DNA, 22 bp, synthetic construct
  misc_feature 1..22: note = chemically synthesized
  source 1..22: mol_type = other DNA
ggcatggtggcgggtgcctgta

SEQ ID NO: 12726 - DNA, 22 bp, synthetic construct
  misc_feature 1..22: note = chemically synthesized
  source 1..22: mol_type = other DNA
taatcccagctacttgggaggc

SEQ ID NO: 12727 - DNA, 22 bp, synthetic construct
  misc_feature 1..22: note = chemically synthesized
  source 1..22: mol_type = other DNA
cttgggaggctgaggcaggaga

SEQ ID NO: 12728 - DNA, 22 bp, synthetic construct
  misc_feature 1..22: note = chemically synthesized
  source 1..22: mol_type = other DNA
gggaggctgaggcaggagaata

SEQ ID NO: 12729 - DNA, 22 bp, synthetic construct
  misc_feature 1..22: note = chemically synthesized
  source 1..22: mol_type = other DNA
ggaggctgaggcaggagaatag

SEQ ID NO: 12730 - DNA, 22 bp, synthetic construct
  misc_feature 1..22: note = chemically synthesized
  source 1..22: mol_type = other DNA
aggcaggagaatagcttgaacc

SEQ ID NO: 12731 - DNA, 22 bp, synthetic construct
  misc_feature 1..22: note = chemically synthesized
  source 1..22: mol_type = other DNA
gaacctgggagatggaggttgc

SEQ ID NO: 12732 - DNA, 22 bp, synthetic construct
  misc_feature 1..22: note = chemically synthesized
  source 1..22: mol_type = other DNA
aacctgggagatggaggttgca

SEQ ID NO: 12733 - DNA, 22 bp, synthetic construct
  misc_feature 1..22: note = chemically synthesized
  source 1..22: mol_type = other DNA
ggagatggaggttgcagtgagc

SEQ ID NO: 12734 - DNA, 22 bp, synthetic construct
  misc_feature 1..22: note = chemically synthesized
  source 1..22: mol_type = other DNA
cagtgagctgagatcgcaccac

SEQ ID NO: 12735 - DNA, 22 bp, synthetic construct
  misc_feature 1..22: note = chemically synthesized
  source 1..22: mol_type = other DNA
agatcgcaccactgcactccag

SEQ ID NO: 12736 - DNA, 22 bp, synthetic construct
  misc_feature 1..22: note = chemically synthesized
  source 1..22: mol_type = other DNA
cactccagcctgggcgacagag

SEQ ID NO: 12737 - DNA, 22 bp, synthetic construct
  misc_feature 1..22: note = chemically synthesized
  source 1..22: mol_type = other DNA
cagcctgggcgacagagcaaga

SEQ ID NO: 12738 - DNA, 22 bp, synthetic construct
  misc_feature 1..22: note = chemically synthesized
  source 1..22: mol_type = other DNA
ggcgacagagcaagactctgtc

SEQ ID NO: 12739 - DNA, 22 bp, synthetic construct
  misc_feature 1..22: note = chemically synthesized
  source 1..22: mol_type = other DNA
tgtcaaaaaaaaaagagttgaa

SEQ ID NO: 12740 - DNA, 22 bp, synthetic construct
  misc_feature 1..22: note = chemically synthesized
  source 1..22: mol_type = other DNA
tcaaaaaaaaaagagttgaaga

SEQ ID NO: 12741 - DNA, 22 bp, synthetic construct
  misc_feature 1..22: note = chemically synthesized
  source 1..22: mol_type = other DNA
aagagaaaaagtctaggctaaa

SEQ ID NO: 12742 - DNA, 22 bp, synthetic construct
  misc_feature 1..22: note = chemically synthesized
  source 1..22: mol_type = other DNA
ggctaaattcaaagaaaaaaag

SEQ ID NO: 12743 - DNA, 22 bp, synthetic construct
  misc_feature 1..22: note = chemically synthesized
  source 1..22: mol_type = other DNA
aattcaaagaaaaaaagtgagc

SEQ ID NO: 12744 - DNA, 22 bp, synthetic construct
  misc_feature 1..22: note = chemically synthesized
  source 1..22: mol_type = other DNA
aaagaaaaaaagtgagcccaaa

SEQ ID NO: 12745 - DNA, 22 bp, synthetic construct
  misc_feature 1..22: note = chemically synthesized
  source 1..22: mol_type = other DNA
gcagagcaagggaaaagcaggg

SEQ ID NO: 12746 - DNA, 22 bp, synthetic construct
  misc_feature 1..22: note = chemically synthesized
  source 1..22: mol_type = other DNA
cagagcaagggaaaagcaggga

SEQ ID NO: 12747 - DNA, 22 bp, synthetic construct
  misc_feature 1..22: note = chemically synthesized
  source 1..22: mol_type = other DNA
gaacactccataaagtgaacag

SEQ ID NO: 12748 - DNA, 22 bp, synthetic construct
  misc_feature 1..22: note = chemically synthesized
  source 1..22: mol_type = other DNA
cataaagtgaacagctgcaatg

SEQ ID NO: 12749 - DNA, 22 bp, synthetic construct
  misc_feature 1..22: note = chemically synthesized
  source 1..22: mol_type = other DNA
caatgaaaataagggaagaaag

SEQ ID NO: 12750 - DNA, 22 bp, synthetic construct
  misc_feature 1..22: note = chemically synthesized
  source 1..22: mol_type = other DNA
agttcatctccgtttctttcct

SEQ ID NO: 12751 - DNA, 22 bp, synthetic construct
  misc_feature 1..22: note = chemically synthesized
  source 1..22: mol_type = other DNA
gttcatctccgtttctttcctt

SEQ ID NO: 12752 - DNA, 22 bp, synthetic construct
  misc_feature 1..22: note = chemically synthesized
  source 1..22: mol_type = other DNA
atctccgtttctttcctttcct

SEQ ID NO: 12753 - DNA, 22 bp, synthetic construct
  misc_feature 1..22: note = chemically synthesized
  source 1..22: mol_type = other DNA
cgtttctttcctttccttttta

SEQ ID NO: 12754 - DNA, 22 bp, synthetic construct
  misc_feature 1..22: note = chemically synthesized
  source 1..22: mol_type = other DNA
ctttcctttcctttttactttc

SEQ ID NO: 12755 - DNA, 22 bp, synthetic construct
  misc_feature 1..22: note = chemically synthesized
  source 1..22: mol_type = other DNA
tttcctttcctttttactttcc

SEQ ID NO: 12756 - DNA, 22 bp, synthetic construct
  misc_feature 1..22: note = chemically synthesized
  source 1..22: mol_type = other DNA
tcctttcctttttactttcctt

SEQ ID NO: 12757 - DNA, 22 bp, synthetic construct
  misc_feature 1..22: note = chemically synthesized
  source 1..22: mol_type = other DNA
cctttcctttttactttccttt

SEQ ID NO: 12758 - DNA, 22 bp, synthetic construct
  misc_feature 1..22: note = chemically synthesized
  source 1..22: mol_type = other DNA
ctttcctttttactttcctttc

SEQ ID NO: 12759 - DNA, 22 bp, synthetic construct
  misc_feature 1..22: note = chemically synthesized
  source 1..22: mol_type = other DNA
tcctttttactttcctttctct

SEQ ID NO: 12760 - DNA, 22 bp, synthetic construct
  misc_feature 1..22: note = chemically synthesized
  source 1..22: mol_type = other DNA
cctttttactttcctttctctt

SEQ ID NO: 12761 - DNA, 22 bp, synthetic construct
  misc_feature 1..22: note = chemically synthesized
  source 1..22: mol_type = other DNA
ctttttactttcctttctcttc

SEQ ID NO: 12762 - DNA, 22 bp, synthetic construct
  misc_feature 1..22: note = chemically synthesized
  source 1..22: mol_type = other DNA
tttactttcctttctcttcctt

SEQ ID NO: 12763 - DNA, 22 bp, synthetic construct
  misc_feature 1..22: note = chemically synthesized
  source 1..22: mol_type = other DNA
ttactttcctttctcttccttt

SEQ ID NO: 12764 - DNA, 22 bp, synthetic construct
  misc_feature 1..22: note = chemically synthesized
  source 1..22: mol_type = other DNA
tactttcctttctcttcctttt

SEQ ID NO: 12765 - DNA, 22 bp, synthetic construct
  misc_feature 1..22: note = chemically synthesized
  source 1..22: mol_type = other DNA
actttcctttctcttccttttt

SEQ ID NO: 12766 - DNA, 22 bp, synthetic construct
  misc_feature 1..22: note = chemically synthesized
  source 1..22: mol_type = other DNA
ctttcctttctcttcctttttg

SEQ ID NO: 12767 - DNA, 22 bp, synthetic construct
  misc_feature 1..22: note = chemically synthesized
  source 1..22: mol_type = other DNA
tcctttctcttcctttttggag

SEQ ID NO: 12768 - DNA, 22 bp, synthetic construct
  misc_feature 1..22: note = chemically synthesized
  source 1..22: mol_type = other DNA
cctttctcttcctttttggagt

SEQ ID NO: 12769 - DNA, 22 bp, synthetic construct
  misc_feature 1..22: note = chemically synthesized
  source 1..22: mol_type = other DNA
ctttctcttcctttttggagtt

SEQ ID NO: 12770 - DNA, 22 bp, synthetic construct
  misc_feature 1..22: note = chemically synthesized
  source 1..22: mol_type = other DNA
tctcttcctttttggagttaat

SEQ ID NO: 12771 - DNA, 22 bp, synthetic construct
  misc_feature 1..22: note = chemically synthesized
  source 1..22: mol_type = other DNA
ctcttcctttttggagttaatc

SEQ ID NO: 12772 - DNA, 22 bp, synthetic construct
  misc_feature 1..22: note = chemically synthesized
  source 1..22: mol_type = other DNA
tcttcctttttggagttaatca

SEQ ID NO: 12773 - DNA, 22 bp, synthetic construct
  misc_feature 1..22: note = chemically synthesized
  source 1..22: mol_type = other DNA
ttcctttttggagttaatcagg

SEQ ID NO: 12774 - DNA, 22 bp, synthetic construct
  misc_feature 1..22: note = chemically synthesized
  source 1..22: mol_type = other DNA
cctttttggagttaatcaggaa

SEQ ID NO: 12775 - DNA, 22 bp, synthetic construct
  misc_feature 1..22: note = chemically synthesized
  source 1..22: mol_type = other DNA
ctttttggagttaatcaggaag

SEQ ID NO: 12776 - DNA, 22 bp, synthetic construct
  misc_feature 1..22: note = chemically synthesized
  source 1..22: mol_type = other DNA
tttggagttaatcaggaagtag

SEQ ID NO: 12777 - DNA, 22 bp, synthetic construct
  misc_feature 1..22: note = chemically synthesized
  source 1..22: mol_type = other DNA
ttggagttaatcaggaagtagt

SEQ ID NO: 12778 - DNA, 22 bp, synthetic construct
  misc_feature 1..22: note = chemically synthesized
  source 1..22: mol_type = other DNA
tggagttaatcaggaagtagtc

SEQ ID NO: 12779 - DNA, 22 bp, synthetic construct
  misc_feature 1..22: note = chemically synthesized
  source 1..22: mol_type = other DNA
ggagttaatcaggaagtagtcc

SEQ ID NO: 12780 - DNA, 22 bp, synthetic construct
  misc_feature 1..22: note = chemically synthesized
  source 1..22: mol_type = other DNA
gagttaatcaggaagtagtccc

SEQ ID NO: 12781 - DNA, 22 bp, synthetic construct
  misc_feature 1..22: note = chemically synthesized
  source 1..22: mol_type = other DNA
atcaggaagtagtcccaaatac

SEQ ID NO: 12782 - DNA, 22 bp, synthetic construct
  misc_feature 1..22: note = chemically synthesized
  source 1..22: mol_type = other DNA
atcttataagcccttggtcctc

SEQ ID NO: 12783 - DNA, 22 bp, synthetic construct
  misc_feature 1..22: note = chemically synthesized
  source 1..22: mol_type = other DNA
ataagcccttggtcctcttgag

SEQ ID NO: 12784 - DNA, 22 bp, synthetic construct
  misc_feature 1..22: note = chemically synthesized
  source 1..22: mol_type = other DNA
taagcccttggtcctcttgaga

SEQ ID NO: 12785 - DNA, 22 bp, synthetic construct
  misc_feature 1..22: note = chemically synthesized
  source 1..22: mol_type = other DNA
ggtcctcttgagatggtatcag

SEQ ID NO: 12786 - DNA, 22 bp, synthetic construct
  misc_feature 1..22: note = chemically synthesized
  source 1..22: mol_type = other DNA
gtcctcttgagatggtatcaga

SEQ ID NO: 12787 - DNA, 22 bp, synthetic construct
  misc_feature 1..22: note = chemically synthesized
  source 1..22: mol_type = other DNA
ttgagatggtatcagatatatt

SEQ ID NO: 12788 - DNA, 22 bp, synthetic construct
  misc_feature 1..22: note = chemically synthesized
  source 1..22: mol_type = other DNA
gagatggtatcagatatattgc

SEQ ID NO: 12789 - DNA, 22 bp, synthetic construct
  misc_feature 1..22: note = chemically synthesized
  source 1..22: mol_type = other DNA
agatggtatcagatatattgct

SEQ ID NO: 12790 - DNA, 22 bp, synthetic construct
  misc_feature 1..22: note = chemically synthesized
  source 1..22: mol_type = other DNA
ctagacccttgaagaaaggaac

SEQ ID NO: 12791 - DNA, 22 bp, synthetic construct
  misc_feature 1..22: note = chemically synthesized
  source 1..22: mol_type = other DNA
gacccttgaagaaaggaacaac

SEQ ID NO: 12792 - DNA, 22 bp, synthetic construct
  misc_feature 1..22: note = chemically synthesized
  source 1..22: mol_type = other DNA
gaagaaaggaacaactccaggc

SEQ ID NO: 12793 - DNA, 22 bp, synthetic construct
  misc_feature 1..22: note = chemically synthesized
  source 1..22: mol_type = other DNA
aagaaaggaacaactccaggca

SEQ ID NO: 12794 - DNA, 22 bp, synthetic construct
  misc_feature 1..22: note = chemically synthesized
  source 1..22: mol_type = other DNA
caggcaacttcttgagtccctg

SEQ ID NO: 12795 - DNA, 22 bp, synthetic construct
  misc_feature 1..22: note = chemically synthesized
  source 1..22: mol_type = other DNA
cttgagtccctgttattaattt

SEQ ID NO: 12796 - DNA, 22 bp, synthetic construct
  misc_feature 1..22: note = chemically synthesized
  source 1..22: mol_type = other DNA
ttgagtccctgttattaatttt

SEQ ID NO: 12797 - DNA, 22 bp, synthetic construct
  misc_feature 1..22: note = chemically synthesized
  source 1..22: mol_type = other DNA
gagtccctgttattaattttat

SEQ ID NO: 12798 - DNA, 22 bp, synthetic construct
  misc_feature 1..22: note = chemically synthesized
  source 1..22: mol_type = other DNA
agtccctgttattaattttata

SEQ ID NO: 12799 - DNA, 22 bp, synthetic construct
  misc_feature 1..22: note = chemically synthesized
  source 1..22: mol_type = other DNA
ttattaattttatacatacaca

SEQ ID NO: 12800 - DNA, 22 bp, synthetic construct
  misc_feature 1..22: note = chemically synthesized
  source 1..22: mol_type = other DNA
ttaattttatacatacacacac

SEQ ID NO: 12801 - DNA, 22 bp, synthetic construct
  misc_feature 1..22: note = chemically synthesized
  source 1..22: mol_type = other DNA
attttatacatacacacacata

SEQ ID NO: 12802 - DNA, 22 bp, synthetic construct
  misc_feature 1..22: note = chemically synthesized
  source 1..22: mol_type = other DNA
tatacatacacacacatatatg

SEQ ID NO: 12803 - DNA, 22 bp, synthetic construct
  misc_feature 1..22: note = chemically synthesized
  source 1..22: mol_type = other DNA
atacatacacacacatatatgt

SEQ ID NO: 12804 - DNA, 22 bp, synthetic construct
  misc_feature 1..22: note = chemically synthesized
  source 1..22: mol_type = other DNA
tacatacacacacatatatgta

SEQ ID NO: 12805 - DNA, 22 bp, synthetic construct
  misc_feature 1..22: note = chemically synthesized
  source 1..22: mol_type = other DNA
cttaacaatggggatatattct

SEQ ID NO: 12806 - DNA, 22 bp, synthetic construct
  misc_feature 1..22: note = chemically synthesized
  source 1..22: mol_type = other DNA
aacaatggggatatattctgag

SEQ ID NO: 12807 - DNA, 22 bp, synthetic construct
  misc_feature 1..22: note = chemically synthesized
  source 1..22: mol_type = other DNA
acaatggggatatattctgaga

SEQ ID NO: 12808 - DNA, 22 bp, synthetic construct
  misc_feature 1..22: note = chemically synthesized
  source 1..22: mol_type = other DNA
tgagaaatgtgtcattaagcaa

SEQ ID NO: 12809 - DNA, 22 bp, synthetic construct
  misc_feature 1..22: note = chemically synthesized
  source 1..22: mol_type = other DNA
agaaatgtgtcattaagcaatt

SEQ ID NO: 12810 - DNA, 22 bp, synthetic construct
  misc_feature 1..22: note = chemically synthesized
  source 1..22: mol_type = other DNA
agcaatttcatcattgtgcgaa

SEQ ID NO: 12811 - DNA, 22 bp, synthetic construct
  misc_feature 1..22: note = chemically synthesized
  source 1..22: mol_type = other DNA
catcattgtgcgaacataatag

SEQ ID NO: 12812 - DNA, 22 bp, synthetic construct
  misc_feature 1..22: note = chemically synthesized
  source 1..22: mol_type = other DNA
atcattgtgcgaacataataga

SEQ ID NO: 12813 - DNA, 22 bp, synthetic construct
  misc_feature 1..22: note = chemically synthesized
  source 1..22: mol_type = other DNA
tgcgaacataatagagtgtact

SEQ ID NO: 12814 - DNA, 22 bp, synthetic construct
  misc_feature 1..22: note = chemically synthesized
  source 1..22: mol_type = other DNA
acctaaacctaaatggtatagc

SEQ ID NO: 12815 - DNA, 22 bp, synthetic construct
  misc_feature 1..22: note = chemically synthesized
  source 1..22: mol_type = other DNA
cctaaacctaaatggtatagct

SEQ ID NO: 12816 - DNA, 22 bp, synthetic construct
  misc_feature 1..22: note = chemically synthesized
  source 1..22: mol_type = other DNA
aacctaaatggtatagcttact

SEQ ID NO: 12817 - DNA, 22 bp, synthetic construct
  misc_feature 1..22: note = chemically synthesized
  source 1..22: mol_type = other DNA
aatggtatagcttactacatac

SEQ ID NO: 12818 - DNA, 22 bp, synthetic construct
  misc_feature 1..22: note = chemically synthesized
  source 1..22: mol_type = other DNA
actacatacctaggttgtattg

SEQ ID NO: 12819 - DNA, 22 bp, synthetic construct
  misc_feature 1..22: note = chemically synthesized
  source 1..22: mol_type = other DNA
ctacatacctaggttgtattga

SEQ ID NO: 12820 - DNA, 22 bp, synthetic construct
  misc_feature 1..22: note = chemically synthesized
  source 1..22: mol_type = other DNA
catacctaggttgtattgatgt

SEQ ID NO: 12821 - DNA, 22 bp, synthetic construct
  misc_feature 1..22: note = chemically synthesized
  source 1..22: mol_type = other DNA
ggttgtattgatgtggcctatt

SEQ ID NO: 12822 - DNA, 22 bp, synthetic construct
  misc_feature 1..22: note = chemically synthesized
  source 1..22: mol_type = other DNA
tattgatgtggcctattgctcc

SEQ ID NO: 12823 - DNA, 22 bp, synthetic construct
  misc_feature 1..22: note = chemically synthesized
  source 1..22: mol_type = other DNA
atgtggcctattgctcctaggc

SEQ ID NO: 12824 - DNA, 22 bp, synthetic construct
  misc_feature 1..22: note = chemically synthesized
  source 1..22: mol_type = other DNA
ttgctcctaggctcctgggctg

SEQ ID NO: 12825 - DNA, 22 bp, synthetic construct
  misc_feature 1..22: note = chemically synthesized
  source 1..22: mol_type = other DNA
ctcctaggctcctgggctgcaa

SEQ ID NO: 12826 - DNA, 22 bp, synthetic construct
  misc_feature 1..22: note = chemically synthesized
  source 1..22: mol_type = other DNA
ctaggctcctgggctgcaaacc

SEQ ID NO: 12827 - DNA, 22 bp, synthetic construct
  misc_feature 1..22: note = chemically synthesized
  source 1..22: mol_type = other DNA
ggctcctgggctgcaaacctgt

SEQ ID NO: 12828 - DNA, 22 bp, synthetic construct
  misc_feature 1..22: note = chemically synthesized
  source 1..22: mol_type = other DNA
ctgggctgcaaacctgtacagc

SEQ ID NO: 12829 - DNA, 22 bp, synthetic construct
  misc_feature 1..22: note = chemically synthesized
  source 1..22: mol_type = other DNA
ggctgcaaacctgtacagcatg

SEQ ID NO: 12830 - DNA, 22 bp, synthetic construct
  misc_feature 1..22: note = chemically synthesized
  source 1..22: mol_type = other DNA
caaacctgtacagcatgtgact

SEQ ID NO: 12831 - DNA, 22 bp, synthetic construct
  misc_feature 1..22: note = chemically synthesized
  source 1..22: mol_type = other DNA
tacagcatgtgactgtactgaa

SEQ ID NO: 12832 - DNA, 22 bp, synthetic construct
  misc_feature 1..22: note = chemically synthesized
  source 1..22: mol_type = other DNA
tactgaacactgtaggcaatgg

SEQ ID NO: 12833 - DNA, 22 bp, synthetic construct
  misc_feature 1..22: note = chemically synthesized
  source 1..22: mol_type = other DNA
aacactgtaggcaatggtaaca

SEQ ID NO: 12834 - DNA, 22 bp, synthetic construct
  misc_feature 1..22: note = chemically synthesized
  source 1..22: mol_type = other DNA
taggcaatggtaacagtggtat

SEQ ID NO: 12835 - DNA, 22 bp, synthetic construct
  misc_feature 1..22: note = chemically synthesized
  source 1..22: mol_type = other DNA
gtgtatctaaacatagaaaagg

SEQ ID NO: 12836 - DNA, 22 bp, synthetic construct
  misc_feature 1..22: note = chemically synthesized
  source 1..22: mol_type = other DNA
tgtatctaaacatagaaaaggt

SEQ ID NO: 12837 - DNA, 22 bp, synthetic construct
  misc_feature 1..22: note = chemically synthesized
  source 1..22: mol_type = other DNA
aacatagaaaaggtacagtgaa

SEQ ID NO: 12838 - DNA, 22 bp, synthetic construct
  misc_feature 1..22: note = chemically synthesized
  source 1..22: mol_type = other DNA
taaccttatgggaccactgtcg

SEQ ID NO: 12839 - DNA, 22 bp, synthetic construct
  misc_feature 1..22: note = chemically synthesized
  source 1..22: mol_type = other DNA
atgggaccactgtcgtataatg

SEQ ID NO: 12840 - DNA, 22 bp, synthetic construct
  misc_feature 1..22: note = chemically synthesized
  source 1..22: mol_type = other DNA
tgggaccactgtcgtataatgt

SEQ ID NO: 12841 - DNA, 22 bp, synthetic construct
  misc_feature 1..22: note = chemically synthesized
  source 1..22: mol_type = other DNA
tcgtataatgtggtccatcatt

SEQ ID NO: 12842 - DNA, 22 bp, synthetic construct
  misc_feature 1..22: note = chemically synthesized
  source 1..22: mol_type = other DNA
accaaaatgtcattgtgcagca

SEQ ID NO: 12843 - DNA, 22 bp, synthetic construct
  misc_feature 1..22: note = chemically synthesized
  source 1..22: mol_type = other DNA
tgcagcaaatgattatctcata

SEQ ID NO: 12844 - DNA, 22 bp, synthetic construct
  misc_feature 1..22: note = chemically synthesized
  source 1..22: mol_type = other DNA
tctcatatatatatatatatga

SEQ ID NO: 12845 - DNA, 22 bp, synthetic construct
  misc_feature 1..22: note = chemically synthesized
  source 1..22: mol_type = other DNA
atatatatatatatatgatatg

SEQ ID NO: 12846 - DNA, 22 bp, synthetic construct
  misc_feature 1..22: note = chemically synthesized
  source 1..22: mol_type = other DNA
agatagagacatctatcctcca

SEQ ID NO: 12847 - DNA, 22 bp, synthetic construct
  misc_feature 1..22: note = chemically synthesized
  source 1..22: mol_type = other DNA
tcctccagagttcaggagtgtc

SEQ ID NO: 12848 - DNA, 22 bp, synthetic construct
  misc_feature 1..22: note = chemically synthesized
  source 1..22: mol_type = other DNA
cagagttcaggagtgtctcttc

SEQ ID NO: 12849 - DNA, 22 bp, synthetic construct
  misc_feature 1..22: note = chemically synthesized
  source 1..22: mol_type = other DNA
aggagtgtctcttcagactagg

SEQ ID NO: 12850 - DNA, 22 bp, synthetic construct
  misc_feature 1..22: note = chemically synthesized
  source 1..22: mol_type = other DNA
ttcagactaggtagatgtagct

SEQ ID NO: 12851 - DNA, 22 bp, synthetic construct
  misc_feature 1..22: note = chemically synthesized
  source 1..22: mol_type = other DNA
cagactaggtagatgtagctta

SEQ ID NO: 12852 - DNA, 22 bp, synthetic construct
  misc_feature 1..22: note = chemically synthesized
  source 1..22: mol_type = other DNA
agactaggtagatgtagcttaa

SEQ ID NO: 12853 - DNA, 22 bp, synthetic construct
  misc_feature 1..22: note = chemically synthesized
  source 1..22: mol_type = other DNA
ggtagatgtagcttaaaaaaaa

SEQ ID NO: 12854 - DNA, 22 bp, synthetic construct
  misc_feature 1..22: note = chemically synthesized
  source 1..22: mol_type = other DNA
aaaaaaaacatatcctgaattc

SEQ ID NO: 12855 - DNA, 22 bp, synthetic construct
  misc_feature 1..22: note = chemically synthesized
  source 1..22: mol_type = other DNA
aaaaaaacatatcctgaattct

SEQ ID NO: 12856 - DNA, 22 bp, synthetic construct
  misc_feature 1..22: note = chemically synthesized
  source 1..22: mol_type = other DNA
aattctagagagatgcttaaat

SEQ ID NO: 12857 - DNA, 22 bp, synthetic construct
  misc_feature 1..22: note = chemically synthesized
  source 1..22: mol_type = other DNA
tagagagatgcttaaatcactg

SEQ ID NO: 12858 - DNA, 22 bp, synthetic construct
  misc_feature 1..22: note = chemically synthesized
  source 1..22: mol_type = other DNA
gagagatgcttaaatcactgca

SEQ ID NO: 12859 - DNA, 22 bp, synthetic construct
  misc_feature 1..22: note = chemically synthesized
  source 1..22: mol_type = other DNA
aaatcactgcaattcctataac

SEQ ID NO: 12860 - DNA, 22 bp, synthetic construct
  misc_feature 1..22: note = chemically synthesized
  source 1..22: mol_type = other DNA
aatcactgcaattcctataaca

SEQ ID NO: 12861 - DNA, 22 bp, synthetic construct
  misc_feature 1..22: note = chemically synthesized
  source 1..22: mol_type = other DNA
caattcctataacacttgccaa

SEQ ID NO: 12862 - DNA, 22 bp, synthetic construct
  misc_feature 1..22: note = chemically synthesized
  source 1..22: mol_type = other DNA
ctataacacttgccaaccaaag

SEQ ID NO: 12863 - DNA, 22 bp, synthetic construct
  misc_feature 1..22: note = chemically synthesized
  source 1..22: mol_type = other DNA
taacacttgccaaccaaaggtg

SEQ ID NO: 12864 - DNA, 22 bp, synthetic construct
  misc_feature 1..22: note = chemically synthesized
  source 1..22: mol_type = other DNA
gccaaccaaaggtgctgttgat

SEQ ID NO: 12865 - DNA, 22 bp, synthetic construct
  misc_feature 1..22: note = chemically synthesized
  source 1..22: mol_type = other DNA
ccaaccaaaggtgctgttgatc

SEQ ID NO: 12866 - DNA, 22 bp, synthetic construct
  misc_feature 1..22: note = chemically synthesized
  source 1..22: mol_type = other DNA
ttgatctgaaattgctttttta

SEQ ID NO: 12867 - DNA, 22 bp, synthetic construct
  misc_feature 1..22: note = chemically synthesized
  source 1..22: mol_type = other DNA
atctgaaattgcttttttaaat

SEQ ID NO: 12868 - DNA, 22 bp, synthetic construct
  misc_feature 1..22: note = chemically synthesized
  source 1..22: mol_type = other DNA
aaattgcttttttaaattaatg

SEQ ID NO: 12869 - DNA, 22 bp, synthetic construct
  misc_feature 1..22: note = chemically synthesized
  source 1..22: mol_type = other DNA
cttttttaaattaatgcagtga

SEQ ID NO: 12870 - DNA, 22 bp, synthetic construct
  misc_feature 1..22: note = chemically synthesized
  source 1..22: mol_type = other DNA
ttttaaattaatgcagtgattt

SEQ ID NO: 12871 - DNA, 22 bp, synthetic construct
  misc_feature 1..22: note = chemically synthesized
  source 1..22: mol_type = other DNA
tttaaattaatgcagtgatttt

SEQ ID NO: 12872 - DNA, 22 bp, synthetic construct
  misc_feature 1..22: note = chemically synthesized
  source 1..22: mol_type = other DNA
ttaaattaatgcagtgattttt

SEQ ID NO: 12873 - DNA, 22 bp, synthetic construct
  misc_feature 1..22: note = chemically synthesized
  source 1..22: mol_type = other DNA
taaattaatgcagtgatttttc

SEQ ID NO: 12874 - DNA, 22 bp, synthetic construct
  misc_feature 1..22: note = chemically synthesized
  source 1..22: mol_type = other DNA
aaattaatgcagtgatttttct

SEQ ID NO: 12875 - DNA, 22 bp, synthetic construct
  misc_feature 1..22: note = chemically synthesized
  source 1..22: mol_type = other DNA
aattaatgcagtgatttttctt

SEQ ID NO: 12876 - DNA, 22 bp, synthetic construct
  misc_feature 1..22: note = chemically synthesized
  source 1..22: mol_type = other DNA
atgcagtgatttttctttaaca

SEQ ID NO: 12877 - DNA, 22 bp, synthetic construct
  misc_feature 1..22: note = chemically synthesized
  source 1..22: mol_type = other DNA
ttctttaacatctagtgacaga

SEQ ID NO: 12878 - DNA, 22 bp, synthetic construct
  misc_feature 1..22: note = chemically synthesized
  source 1..22: mol_type = other DNA
tctttaacatctagtgacagac

SEQ ID NO: 12879 - DNA, 22 bp, synthetic construct
  misc_feature 1..22: note = chemically synthesized
  source 1..22: mol_type = other DNA
ctttaacatctagtgacagaca

SEQ ID NO: 12880 - DNA, 22 bp, synthetic construct
  misc_feature 1..22: note = chemically synthesized
  source 1..22: mol_type = other DNA
tttaacatctagtgacagacac

SEQ ID NO: 12881 - DNA, 22 bp, synthetic construct
  misc_feature 1..22: note = chemically synthesized
  source 1..22: mol_type = other DNA
taacatctagtgacagacactg

SEQ ID NO: 12882 - DNA, 22 bp, synthetic construct
  misc_feature 1..22: note = chemically synthesized
  source 1..22: mol_type = other DNA
aacatctagtgacagacactgg

SEQ ID NO: 12883 - DNA, 22 bp, synthetic construct
  misc_feature 1..22: note = chemically synthesized
  source 1..22: mol_type = other DNA
acatctagtgacagacactggg

SEQ ID NO: 12884 - DNA, 22 bp, synthetic construct
  misc_feature 1..22: note = chemically synthesized
  source 1..22: mol_type = other DNA
gtgacagacactggggtcacat

SEQ ID NO: 12885 - DNA, 22 bp, synthetic construct
  misc_feature 1..22: note = chemically synthesized
  source 1..22: mol_type = other DNA
gggtcacatttgcagctggacc

SEQ ID NO: 12886 - DNA, 22 bp, synthetic construct
  misc_feature 1..22: note = chemically synthesized
  source 1..22: mol_type = other DNA
gcagctggaccataattaggct

SEQ ID NO: 12887 - DNA, 22 bp, synthetic construct
  misc_feature 1..22: note = chemically synthesized
  source 1..22: mol_type = other DNA
cagctggaccataattaggctt

SEQ ID NO: 12888 - DNA, 22 bp, synthetic construct
  misc_feature 1..22: note = chemically synthesized
  source 1..22: mol_type = other DNA
gaccataattaggcttctgttc

SEQ ID NO: 12889 - DNA, 22 bp, synthetic construct
  misc_feature 1..22: note = chemically synthesized
  source 1..22: mol_type = other DNA
ggcttctgttcttcaggagaca

SEQ ID NO: 12890 - DNA, 22 bp, synthetic construct
  misc_feature 1..22: note = chemically synthesized
  source 1..22: mol_type = other DNA
ctgttcttcaggagacatttgt

SEQ ID NO: 12891 - DNA, 22 bp, synthetic construct
  misc_feature 1..22: note = chemically synthesized
  source 1..22: mol_type = other DNA
tgttcttcaggagacatttgtt

SEQ ID NO: 12892 - DNA, 22 bp, synthetic construct
  misc_feature 1..22: note = chemically synthesized
  source 1..22: mol_type = other DNA
ttcttcaggagacatttgttca

SEQ ID NO: 12893 - DNA, 22 bp, synthetic construct
  misc_feature 1..22: note = chemically synthesized
  source 1..22: mol_type = other DNA
ttcaggagacatttgttcaaag

SEQ ID NO: 12894 - DNA, 22 bp, synthetic construct
  misc_feature 1..22: note = chemically synthesized
  source 1..22: mol_type = other DNA
caggagacatttgttcaaagtc

SEQ ID NO: 12895 - DNA, 22 bp, synthetic construct
  misc_feature 1..22: note = chemically synthesized
  source 1..22: mol_type = other DNA
aggagacatttgttcaaagtca

SEQ ID NO: 12896 - DNA, 22 bp, synthetic construct
  misc_feature 1..22: note = chemically synthesized
  source 1..22: mol_type = other DNA
gttcaaagtcatttgggcaacc

SEQ ID NO: 12897 - DNA, 22 bp, synthetic construct
  misc_feature 1..22: note = chemically synthesized
  source 1..22: mol_type = other DNA
ttcaaagtcatttgggcaacca

SEQ ID NO: 12898 - DNA, 22 bp, synthetic construct
  misc_feature 1..22: note = chemically synthesized
  source 1..22: mol_type = other DNA
aaagtcatttgggcaaccatat

SEQ ID NO: 12899 - DNA, 22 bp, synthetic construct
  misc_feature 1..22: note = chemically synthesized
  source 1..22: mol_type = other DNA
gggcaaccatattctgaaaaca

SEQ ID NO: 12900 - DNA, 22 bp, synthetic construct
  misc_feature 1..22: note = chemically synthesized
  source 1..22: mol_type = other DNA
ggcaaccatattctgaaaacag

SEQ ID NO: 12901 - DNA, 22 bp, synthetic construct
  misc_feature 1..22: note = chemically synthesized
  source 1..22: mol_type = other DNA
tgaaaacagcccagccagggtg

SEQ ID NO: 12902 - DNA, 22 bp, synthetic construct
  misc_feature 1..22: note = chemically synthesized
  source 1..22: mol_type = other DNA
aaaacagcccagccagggtgat

SEQ ID NO: 12903 - DNA, 22 bp, synthetic construct
  misc_feature 1..22: note = chemically synthesized
  source 1..22: mol_type = other DNA
tgcaaagatcctcaatgagcta

SEQ ID NO: 12904 - DNA, 22 bp, synthetic construct
  misc_feature 1..22: note = chemically synthesized
  source 1..22: mol_type = other DNA
gcaaagatcctcaatgagctat

SEQ ID NO: 12905 - DNA, 22 bp, synthetic construct
  misc_feature 1..22: note = chemically synthesized
  source 1..22: mol_type = other DNA
caaagatcctcaatgagctatt

SEQ ID NO: 12906 - DNA, 22 bp, synthetic construct
  misc_feature 1..22: note = chemically synthesized
  source 1..22: mol_type = other DNA
aatgagctattttcaagtgatg

SEQ ID NO: 12907 - DNA, 22 bp, synthetic construct
  misc_feature 1..22: note = chemically synthesized
  source 1..22: mol_type = other DNA
ttttcaagtgatgacaaagtgt

SEQ ID NO: 12908 - DNA, 22 bp, synthetic construct
  misc_feature 1..22: note = chemically synthesized
  source 1..22: mol_type = other DNA
tcaagtgatgacaaagtgtgaa

SEQ ID NO: 12909 - DNA, 22 bp, synthetic construct
  misc_feature 1..22: note = chemically synthesized
  source 1..22: mol_type = other DNA
caagtgatgacaaagtgtgaag

SEQ ID NO: 12910 - DNA, 22 bp, synthetic construct
  misc_feature 1..22: note = chemically synthesized
  source 1..22: mol_type = other DNA
aagtgatgacaaagtgtgaagt

SEQ ID NO: 12911 - DNA, 22 bp, synthetic construct
  misc_feature 1..22: note = chemically synthesized
  source 1..22: mol_type = other DNA
accgctcatttgagaactttct

SEQ ID NO: 12912 - DNA, 22 bp, synthetic construct
  misc_feature 1..22: note = chemically synthesized
  source 1..22: mol_type = other DNA
atttgagaactttctttttcat

SEQ ID NO: 12913 - DNA, 22 bp, synthetic construct
  misc_feature 1..22: note = chemically synthesized
  source 1..22: mol_type = other DNA
gagaactttctttttcatccaa

SEQ ID NO: 12914 - DNA, 22 bp, synthetic construct
  misc_feature 1..22: note = chemically synthesized
  source 1..22: mol_type = other DNA
agaactttctttttcatccaaa

SEQ ID NO: 12915 - DNA, 22 bp, synthetic construct
  misc_feature 1..22: note = chemically synthesized
  source 1..22: mol_type = other DNA
tctttttcatccaaagtaaatt

SEQ ID NO: 12916 - DNA, 22 bp, synthetic construct
  misc_feature 1..22: note = chemically synthesized
  source 1..22: mol_type = other DNA
ctttttcatccaaagtaaattc

SEQ ID NO: 12917 - DNA, 22 bp, synthetic construct
  misc_feature 1..22: note = chemically synthesized
  source 1..22: mol_type = other DNA
tttttcatccaaagtaaattca

SEQ ID NO: 12918 - DNA, 22 bp, synthetic construct
  misc_feature 1..22: note = chemically synthesized
  source 1..22: mol_type = other DNA
tttcatccaaagtaaattcaaa

SEQ ID NO: 12919 - DNA, 22 bp, synthetic construct
  misc_feature 1..22: note = chemically synthesized
  source 1..22: mol_type = other DNA
ttcatccaaagtaaattcaaat

SEQ ID NO: 12920 - DNA, 22 bp, synthetic construct
  misc_feature 1..22: note = chemically synthesized
  source 1..22: mol_type = other DNA
tcatccaaagtaaattcaaata

SEQ ID NO: 12921 - DNA, 22 bp, synthetic construct
  misc_feature 1..22: note = chemically synthesized
  source 1..22: mol_type = other DNA
catccaaagtaaattcaaatat

SEQ ID NO: 12922 - DNA, 22 bp, synthetic construct
  misc_feature 1..22: note = chemically synthesized
  source 1..22: mol_type = other DNA
atccaaagtaaattcaaatatg

SEQ ID NO: 12923 - DNA, 22 bp, synthetic construct
  misc_feature 1..22: note = chemically synthesized
  source 1..22: mol_type = other DNA
aaatatgattagaaatctgacc

SEQ ID NO: 12924 - DNA, 22 bp, synthetic construct
  misc_feature 1..22: note = chemically synthesized
  source 1..22: mol_type = other DNA
gaaatctgaccttttattactg

SEQ ID NO: 12925 - DNA, 22 bp, synthetic construct
  misc_feature 1..22: note = chemically synthesized
  source 1..22: mol_type = other DNA
accttttattactggaattctc

SEQ ID NO: 12926 - DNA, 22 bp, synthetic construct
  misc_feature 1..22: note = chemically synthesized
  source 1..22: mol_type = other DNA
ttattactggaattctcttgac

SEQ ID NO: 12927 - DNA, 22 bp, synthetic construct
  misc_feature 1..22: note = chemically synthesized
  source 1..22: mol_type = other DNA
tattactggaattctcttgact

SEQ ID NO: 12928 - DNA, 22 bp, synthetic construct
  misc_feature 1..22: note = chemically synthesized
  source 1..22: mol_type = other DNA
attactggaattctcttgacta

SEQ ID NO: 12929 - DNA, 22 bp, synthetic construct
  misc_feature 1..22: note = chemically synthesized
  source 1..22: mol_type = other DNA
ttactggaattctcttgactaa

SEQ ID NO: 12930 - DNA, 22 bp, synthetic construct
  misc_feature 1..22: note = chemically synthesized
  source 1..22: mol_type = other DNA
ctggaattctcttgactaaaag

SEQ ID NO: 12931 - DNA, 22 bp, synthetic construct
  misc_feature 1..22: note = chemically synthesized
  source 1..22: mol_type = other DNA
gaattctcttgactaaaagtaa

SEQ ID NO: 12932 - DNA, 22 bp, synthetic construct
  misc_feature 1..22: note = chemically synthesized
  source 1..22: mol_type = other DNA
tcttgactaaaagtaaaattga

SEQ ID NO: 12933 - DNA, 22 bp, synthetic construct
  misc_feature 1..22: note = chemically synthesized
  source 1..22: mol_type = other DNA
ttgactaaaagtaaaattgaat

SEQ ID NO: 12934 - DNA, 22 bp, synthetic construct
  misc_feature 1..22: note = chemically synthesized
  source 1..22: mol_type = other DNA
gactaaaagtaaaattgaattt

SEQ ID NO: 12935 - DNA, 22 bp, synthetic construct
  misc_feature 1..22: note = chemically synthesized
  source 1..22: mol_type = other DNA
actaaaagtaaaattgaatttt

SEQ ID NO: 12936 - DNA, 22 bp, synthetic construct
  misc_feature 1..22: note = chemically synthesized
  source 1..22: mol_type = other DNA
aaagtaaaattgaattttaatt

SEQ ID NO: 12937 - DNA, 22 bp, synthetic construct
  misc_feature 1..22: note = chemically synthesized
  source 1..22: mol_type = other DNA
aattttaattcctaaatctcca

SEQ ID NO: 12938 - DNA, 22 bp, synthetic construct
  misc_feature 1..22: note = chemically synthesized
  source 1..22: mol_type = other DNA
taattcctaaatctccatgtgt

SEQ ID NO: 12939 - DNA, 22 bp, synthetic construct
  misc_feature 1..22: note = chemically synthesized
  source 1..22: mol_type = other DNA
aattcctaaatctccatgtgta

SEQ ID NO: 12940 - DNA, 22 bp, synthetic construct
  misc_feature 1..22: note = chemically synthesized
  source 1..22: mol_type = other DNA
attcctaaatctccatgtgtat

SEQ ID NO: 12941 - DNA, 22 bp, synthetic construct
  misc_feature 1..22: note = chemically synthesized
  source 1..22: mol_type = other DNA
ctaaatctccatgtgtatacag

SEQ ID NO: 12942 - DNA, 22 bp, synthetic construct
  misc_feature 1..22: note = chemically synthesized
  source 1..22: mol_type = other DNA
aatctccatgtgtatacagtac

SEQ ID NO: 12943 - DNA, 22 bp, synthetic construct
  misc_feature 1..22: note = chemically synthesized
  source 1..22: mol_type = other DNA
catgtgtatacagtactgtggg

SEQ ID NO: 12944 - DNA, 22 bp, synthetic construct
  misc_feature 1..22: note = chemically synthesized
  source 1..22: mol_type = other DNA
tgggaacatcacagattttggc

SEQ ID NO: 12945 - DNA, 22 bp, synthetic construct
  misc_feature 1..22: note = chemically synthesized
  source 1..22: mol_type = other DNA
tggctccatgccctaaagagaa

SEQ ID NO: 12946 - DNA, 22 bp, synthetic construct
  misc_feature 1..22: note = chemically synthesized
  source 1..22: mol_type = other DNA
ggctccatgccctaaagagaaa

SEQ ID NO: 12947 - DNA, 22 bp, synthetic construct
  misc_feature 1..22: note = chemically synthesized
  source 1..22: mol_type = other DNA
gctccatgccctaaagagaaat

SEQ ID NO: 12948 - DNA, 22 bp, synthetic construct
  misc_feature 1..22: note = chemically synthesized
  source 1..22: mol_type = other DNA
catgccctaaagagaaattggc

SEQ ID NO: 12949 - DNA, 22 bp, synthetic construct
  misc_feature 1..22: note = chemically synthesized
  source 1..22: mol_type = other DNA
aagagaaattggctttcagatt

SEQ ID NO: 12950 - DNA, 22 bp, synthetic construct
  misc_feature 1..22: note = chemically synthesized
  source 1..22: mol_type = other DNA
gctttcagattatttggattaa

SEQ ID NO: 12951 - DNA, 22 bp, synthetic construct
  misc_feature 1..22: note = chemically synthesized
  source 1..22: mol_type = other DNA
tcagattatttggattaaaaac

SEQ ID NO: 12952 - DNA, 22 bp, synthetic construct
  misc_feature 1..22: note = chemically synthesized
  source 1..22: mol_type = other DNA
cagattatttggattaaaaaca

SEQ ID NO: 12953 - DNA, 22 bp, synthetic construct
  misc_feature 1..22: note = chemically synthesized
  source 1..22: mol_type = other DNA
agattatttggattaaaaacaa

SEQ ID NO: 12954 - DNA, 22 bp, synthetic construct
  misc_feature 1..22: note = chemically synthesized
  source 1..22: mol_type = other DNA
tttggattaaaaacaaagactt

SEQ ID NO: 12955 - DNA, 22 bp, synthetic construct
  misc_feature 1..22: note = chemically synthesized
  source 1..22: mol_type = other DNA
ggattaaaaacaaagactttct

SEQ ID NO: 12956 - DNA, 22 bp, synthetic construct
  misc_feature 1..22: note = chemically synthesized
  source 1..22: mol_type = other DNA
gattaaaaacaaagactttctt

SEQ ID NO: 12957 - DNA, 22 bp, synthetic construct
  misc_feature 1..22: note = chemically synthesized
  source 1..22: mol_type = other DNA
aaaacaaagactttcttaagag

SEQ ID NO: 12958 - DNA, 22 bp, synthetic construct
  misc_feature 1..22: note = chemically synthesized
  source 1..22: mol_type = other DNA
tcttaagagatgtaaaattttc

SEQ ID NO: 12959 - DNA, 22 bp, synthetic construct
  misc_feature 1..22: note = chemically synthesized
  source 1..22: mol_type = other DNA
cttaagagatgtaaaattttca

SEQ ID NO: 12960 - DNA, 22 bp, synthetic construct
  misc_feature 1..22: note = chemically synthesized
  source 1..22: mol_type = other DNA
ttaagagatgtaaaattttcat

SEQ ID NO: 12961 - DNA, 22 bp, synthetic construct
  misc_feature 1..22: note = chemically synthesized
  source 1..22: mol_type = other DNA
aagagatgtaaaattttcatga

SEQ ID NO: 12962 - DNA, 22 bp, synthetic construct
  misc_feature 1..22: note = chemically synthesized
  source 1..22: mol_type = other DNA
agagatgtaaaattttcatgat

SEQ ID NO: 12963 - DNA, 22 bp, synthetic construct
  misc_feature 1..22: note = chemically synthesized
  source 1..22: mol_type = other DNA
tcatgatgttttcttttttgct

SEQ ID NO: 12964 - DNA, 22 bp, synthetic construct
  misc_feature 1..22: note = chemically synthesized
  source 1..22: mol_type = other DNA
catgatgttttcttttttgcta

SEQ ID NO: 12965 - DNA, 22 bp, synthetic construct
  misc_feature 1..22: note = chemically synthesized
  source 1..22: mol_type = other DNA
atgatgttttcttttttgctaa

SEQ ID NO: 12966 - DNA, 22 bp, synthetic construct
  misc_feature 1..22: note = chemically synthesized
  source 1..22: mol_type = other DNA
tcttttttgctaaaactaaaga

SEQ ID NO: 12967 - DNA, 22 bp, synthetic construct
  misc_feature 1..22: note = chemically synthesized
  source 1..22: mol_type = other DNA
cttttttgctaaaactaaagaa

SEQ ID NO: 12968 - DNA, 22 bp, synthetic construct
  misc_feature 1..22: note = chemically synthesized
  source 1..22: mol_type = other DNA
ttttttgctaaaactaaagaat

SEQ ID NO: 12969 - DNA, 22 bp, synthetic construct
  misc_feature 1..22: note = chemically synthesized
  source 1..22: mol_type = other DNA
ttttgctaaaactaaagaatta

SEQ ID NO: 12970 - DNA, 22 bp, synthetic construct
  misc_feature 1..22: note = chemically synthesized
  source 1..22: mol_type = other DNA
tttgctaaaactaaagaattat

SEQ ID NO: 12971 - DNA, 22 bp, synthetic construct
  misc_feature 1..22: note = chemically synthesized
  source 1..22: mol_type = other DNA
ttgctaaaactaaagaattatt

SEQ ID NO: 12972 - DNA, 22 bp, synthetic construct
  misc_feature 1..22: note = chemically synthesized
  source 1..22: mol_type = other DNA
tgctaaaactaaagaattattc

SEQ ID NO: 12973 - DNA, 22 bp, synthetic construct
  misc_feature 1..22: note = chemically synthesized
  source 1..22: mol_type = other DNA
gctaaaactaaagaattattct

SEQ ID NO: 12974 - DNA, 22 bp, synthetic construct
  misc_feature 1..22: note = chemically synthesized
  source 1..22: mol_type = other DNA
ctaaaactaaagaattattctt

SEQ ID NO: 12975 - DNA, 22 bp, synthetic construct
  misc_feature 1..22: note = chemically synthesized
  source 1..22: mol_type = other DNA
aaactaaagaattattctttta

SEQ ID NO: 12976 - DNA, 22 bp, synthetic construct
  misc_feature 1..22: note = chemically synthesized
  source 1..22: mol_type = other DNA
aagaattattcttttacatttc

SEQ ID NO: 12977 - DNA, 22 bp, synthetic construct
  misc_feature 1..22: note = chemically synthesized
  source 1..22: mol_type = other DNA
ttcttttacatttcagtttttc

SEQ ID NO: 12978 - DNA, 22 bp, synthetic construct
  misc_feature 1..22: note = chemically synthesized
  source 1..22: mol_type = other DNA
ttttacatttcagtttttcttg

SEQ ID NO: 12979 - DNA, 22 bp, synthetic construct
  misc_feature 1..22: note = chemically synthesized
  source 1..22: mol_type = other DNA
ttacatttcagtttttcttgat

SEQ ID NO: 12980 - DNA, 22 bp, synthetic construct
  misc_feature 1..22: note = chemically synthesized
  source 1..22: mol_type = other DNA
tacatttcagtttttcttgatc

SEQ ID NO: 12981 - DNA, 22 bp, synthetic construct
  misc_feature 1..22: note = chemically synthesized
  source 1..22: mol_type = other DNA
acatttcagtttttcttgatca

SEQ ID NO: 12982 - DNA, 22 bp, synthetic construct
  misc_feature 1..22: note = chemically synthesized
  source 1..22: mol_type = other DNA
catttcagtttttcttgatcat

SEQ ID NO: 12983 - DNA, 22 bp, synthetic construct
  misc_feature 1..22: note = chemically synthesized
  source 1..22: mol_type = other DNA
cagtttttcttgatcatgaaaa

SEQ ID NO: 12984 - DNA, 22 bp, synthetic construct
  misc_feature 1..22: note = chemically synthesized
  source 1..22: mol_type = other DNA
agtttttcttgatcatgaaaac

SEQ ID NO: 12985 - DNA, 22 bp, synthetic construct
  misc_feature 1..22: note = chemically synthesized
  source 1..22: mol_type = other DNA
ttcttgatcatgaaaacgccaa

SEQ ID NO: 12986 - DNA, 22 bp, synthetic construct
  misc_feature 1..22: note = chemically synthesized
  source 1..22: mol_type = other DNA
tcttgatcatgaaaacgccaac

SEQ ID NO: 12987 - DNA, 22 bp, synthetic construct
  misc_feature 1..22: note = chemically synthesized
  source 1..22: mol_type = other DNA
cttgatcatgaaaacgccaaca

SEQ ID NO: 12988 - DNA, 22 bp, synthetic construct
  misc_feature 1..22: note = chemically synthesized
  source 1..22: mol_type = other DNA
ttgatcatgaaaacgccaacaa

SEQ ID NO: 12989 - DNA, 22 bp, synthetic construct
  misc_feature 1..22: note = chemically synthesized
  source 1..22: mol_type = other DNA
gatcatgaaaacgccaacaaaa

SEQ ID NO: 12990 - DNA, 22 bp, synthetic construct
  misc_feature 1..22: note = chemically synthesized
  source 1..22: mol_type = other DNA
atcatgaaaacgccaacaaaat

SEQ ID NO: 12991 - DNA, 22 bp, synthetic construct
  misc_feature 1..22: note = chemically synthesized
  source 1..22: mol_type = other DNA
tgaatcggccaaagaggtataa

SEQ ID NO: 12992 - DNA, 22 bp, synthetic construct
  misc_feature 1..22: note = chemically synthesized
  source 1..22: mol_type = other DNA
aatcggccaaagaggtataatt

SEQ ID NO: 12993 - DNA, 22 bp, synthetic construct
  misc_feature 1..22: note = chemically synthesized
  source 1..22: mol_type = other DNA
aggtaaattggaagagtttgtt

SEQ ID NO: 12994 - DNA, 22 bp, synthetic construct
  misc_feature 1..22: note = chemically synthesized
  source 1..22: mol_type = other DNA
gaagagtttgttcaagggaacc

SEQ ID NO: 12995 - DNA, 22 bp, synthetic construct
  misc_feature 1..22: note = chemically synthesized
  source 1..22: mol_type = other DNA
gttcaagggaaccttgagagag

SEQ ID NO: 12996 - DNA, 22 bp, synthetic construct
  misc_feature 1..22: note = chemically synthesized
  source 1..22: mol_type = other DNA
ttcaagggaaccttgagagaga

SEQ ID NO: 12997 - DNA, 22 bp, synthetic construct
  misc_feature 1..22: note = chemically synthesized
  source 1..22: mol_type = other DNA
aagggaaccttgagagagaatg

SEQ ID NO: 12998 - DNA, 22 bp, synthetic construct
  misc_feature 1..22: note = chemically synthesized
  source 1..22: mol_type = other DNA
gagagagaatgtatggaagaaa

SEQ ID NO: 12999 - DNA, 22 bp, synthetic construct
  misc_feature 1..22: note = chemically synthesized
  source 1..22: mol_type = other DNA
agagagaatgtatggaagaaaa

SEQ ID NO: 13000 - DNA, 22 bp, synthetic construct
  misc_feature 1..22: note = chemically synthesized
  source 1..22: mol_type = other DNA
tgaagaagcacgagaagttttt

SEQ ID NO: 13001 - DNA, 22 bp, synthetic construct
  misc_feature 1..22: note = chemically synthesized
  source 1..22: mol_type = other DNA
gaagaagcacgagaagtttttg

SEQ ID NO: 13002 - DNA, 22 bp, synthetic construct
  misc_feature 1..22: note = chemically synthesized
  source 1..22: mol_type = other DNA
aagaagcacgagaagtttttga

SEQ ID NO: 13003 - DNA, 22 bp, synthetic construct
  misc_feature 1..22: note = chemically synthesized
  source 1..22: mol_type = other DNA
tttcagtgttttcaaaaacttc

SEQ ID NO: 13004 - DNA, 22 bp, synthetic construct
  misc_feature 1..22: note = chemically synthesized
  source 1..22: mol_type = other DNA
tcagtgttttcaaaaacttctc

SEQ ID NO: 13005 - DNA, 22 bp, synthetic construct
  misc_feature 1..22: note = chemically synthesized
  source 1..22: mol_type = other DNA
cagtgttttcaaaaacttctcg

SEQ ID NO: 13006 - DNA, 22 bp, synthetic construct
  misc_feature 1..22: note = chemically synthesized
  source 1..22: mol_type = other DNA
agtgttttcaaaaacttctcgt

SEQ ID NO: 13007 - DNA, 22 bp, synthetic construct
  misc_feature 1..22: note = chemically synthesized
  source 1..22: mol_type = other DNA
tcaaaaacttctcgtgcttctt

SEQ ID NO: 13008 - DNA, 22 bp, synthetic construct
  misc_feature 1..22: note = chemically synthesized
  source 1..22: mol_type = other DNA
caaaaacttctcgtgcttcttc

SEQ ID NO: 13009 - DNA, 22 bp, synthetic construct
  misc_feature 1..22: note = chemically synthesized
  source 1..22: mol_type = other DNA
aaaaacttctcgtgcttcttca

SEQ ID NO: 13010 - DNA, 22 bp, synthetic construct
  misc_feature 1..22: note = chemically synthesized
  source 1..22: mol_type = other DNA
ctcgtgcttcttcaaaactaca

SEQ ID NO: 13011 - DNA, 22 bp, synthetic construct
  misc_feature 1..22: note = chemically synthesized
  source 1..22: mol_type = other DNA
tcgtgcttcttcaaaactacac

SEQ ID NO: 13012 - DNA, 22 bp, synthetic construct
  misc_feature 1..22: note = chemically synthesized
  source 1..22: mol_type = other DNA
gtgcttcttcaaaactacactt

SEQ ID NO: 13013 - DNA, 22 bp, synthetic construct
  misc_feature 1..22: note = chemically synthesized
  source 1..22: mol_type = other DNA
cttcaaaactacacttttcttc

SEQ ID NO: 13014 - DNA, 22 bp, synthetic construct
  misc_feature 1..22: note = chemically synthesized
  source 1..22: mol_type = other DNA
ttcaaaactacacttttcttcc

SEQ ID NO: 13015 - DNA, 22 bp, synthetic construct
  misc_feature 1..22: note = chemically synthesized
  source 1..22: mol_type = other DNA
caaaactacacttttcttccat

SEQ ID NO: 13016 - DNA, 22 bp, synthetic construct
  misc_feature 1..22: note = chemically synthesized
  source 1..22: mol_type = other DNA
aaaactacacttttcttccata

SEQ ID NO: 13017 - DNA, 22 bp, synthetic construct
  misc_feature 1..22: note = chemically synthesized
  source 1..22: mol_type = other DNA
cacttttcttccatacattctc

SEQ ID NO: 13018 - DNA, 22 bp, synthetic construct
  misc_feature 1..22: note = chemically synthesized
  source 1..22: mol_type = other DNA
ttcttccatacattctctctca

SEQ ID NO: 13019 - DNA, 22 bp, synthetic construct
  misc_feature 1..22: note = chemically synthesized
  source 1..22: mol_type = other DNA
tcttccatacattctctctcaa

SEQ ID NO: 13020 - DNA, 22 bp, synthetic construct
  misc_feature 1..22: note = chemically synthesized
  source 1..22: mol_type = other DNA
cttccatacattctctctcaag

SEQ ID NO: 13021 - DNA, 22 bp, synthetic construct
  misc_feature 1..22: note = chemically synthesized
  source 1..22: mol_type = other DNA
ttccatacattctctctcaagg

SEQ ID NO: 13022 - DNA, 22 bp, synthetic construct
  misc_feature 1..22: note = chemically synthesized
  source 1..22: mol_type = other DNA
ccatacattctctctcaaggtt

SEQ ID NO: 13023 - DNA, 22 bp, synthetic construct
  misc_feature 1..22: note = chemically synthesized
  source 1..22: mol_type = other DNA
catacattctctctcaaggttc

SEQ ID NO: 13024 - DNA, 22 bp, synthetic construct
  misc_feature 1..22: note = chemically synthesized
  source 1..22: mol_type = other DNA
tctctcaaggttcccttgaaca

SEQ ID NO: 13025 - DNA, 22 bp, synthetic construct
  misc_feature 1..22: note = chemically synthesized
  source 1..22: mol_type = other DNA
tctcaaggttcccttgaacaaa

SEQ ID NO: 13026 - DNA, 22 bp, synthetic construct
  misc_feature 1..22: note = chemically synthesized
  source 1..22: mol_type = other DNA
tcaaggttcccttgaacaaact

SEQ ID NO: 13027 - DNA, 22 bp, synthetic construct
  misc_feature 1..22: note = chemically synthesized
  source 1..22: mol_type = other DNA
aaggttcccttgaacaaactct

SEQ ID NO: 13028 - DNA, 22 bp, synthetic construct
  misc_feature 1..22: note = chemically synthesized
  source 1..22: mol_type = other DNA
ccttgaacaaactcttccaatt

SEQ ID NO: 13029 - DNA, 22 bp, synthetic construct
  misc_feature 1..22: note = chemically synthesized
  source 1..22: mol_type = other DNA
gaacaaactcttccaatttacc

SEQ ID NO: 13030 - DNA, 22 bp, synthetic construct
  misc_feature 1..22: note = chemically synthesized
  source 1..22: mol_type = other DNA
aacaaactcttccaatttacct

SEQ ID NO: 13031 - DNA, 22 bp, synthetic construct
  misc_feature 1..22: note = chemically synthesized
  source 1..22: mol_type = other DNA
ttccaatttacctgaattatac

SEQ ID NO: 13032 - DNA, 22 bp, synthetic construct
  misc_feature 1..22: note = chemically synthesized
  source 1..22: mol_type = other DNA
ccaatttacctgaattatacct

SEQ ID NO: 13033 - DNA, 22 bp, synthetic construct
  misc_feature 1..22: note = chemically synthesized
  source 1..22: mol_type = other DNA
caatttacctgaattatacctc

SEQ ID NO: 13034 - DNA, 22 bp, synthetic construct
  misc_feature 1..22: note = chemically synthesized
  source 1..22: mol_type = other DNA
acctgaattatacctctttggc

SEQ ID NO: 13035 - DNA, 22 bp, synthetic construct
  misc_feature 1..22: note = chemically synthesized
  source 1..22: mol_type = other DNA
cctgaattatacctctttggcc

SEQ ID NO: 13036 - DNA, 22 bp, synthetic construct
  misc_feature 1..22: note = chemically synthesized
  source 1..22: mol_type = other DNA
aattatacctctttggccgatt

SEQ ID NO: 13037 - DNA, 22 bp, synthetic construct
  misc_feature 1..22: note = chemically synthesized
  source 1..22: mol_type = other DNA
tacctctttggccgattcagaa

SEQ ID NO: 13038 - DNA, 22 bp, synthetic construct
  misc_feature 1..22: note = chemically synthesized
  source 1..22: mol_type = other DNA
tttggccgattcagaattttgt

SEQ ID NO: 13039 - DNA, 22 bp, synthetic construct
  misc_feature 1..22: note = chemically synthesized
  source 1..22: mol_type = other DNA
tggccgattcagaattttgttg

SEQ ID NO: 13040 - DNA, 22 bp, synthetic construct
  misc_feature 1..22: note = chemically synthesized
  source 1..22: mol_type = other DNA
ggccgattcagaattttgttgg

SEQ ID NO: 13041 - DNA, 22 bp, synthetic construct
  misc_feature 1..22: note = chemically synthesized
  source 1..22: mol_type = other DNA
gccgattcagaattttgttggc

SEQ ID NO: 13042 - DNA, 22 bp, synthetic construct
  misc_feature 1..22: note = chemically synthesized
  source 1..22: mol_type = other DNA
agaattttgttggcgttttcat

SEQ ID NO: 13043 - DNA, 22 bp, synthetic construct
  misc_feature 1..22: note = chemically synthesized
  source 1..22: mol_type = other DNA
tgttggcgttttcatgatcaag

SEQ ID NO: 13044 - DNA, 22 bp, synthetic construct
  misc_feature 1..22: note = chemically synthesized
  source 1..22: mol_type = other DNA
gttggcgttttcatgatcaaga

SEQ ID NO: 13045 - DNA, 22 bp, synthetic construct
  misc_feature 1..22: note = chemically synthesized
  source 1..22: mol_type = other DNA
ttggcgttttcatgatcaagaa

SEQ ID NO: 13046 - DNA, 22 bp, synthetic construct
  misc_feature 1..22: note = chemically synthesized
  source 1..22: mol_type = other DNA
gcgttttcatgatcaagaaaaa

SEQ ID NO: 13047 - DNA, 22 bp, synthetic construct
  misc_feature 1..22: note = chemically synthesized
  source 1..22: mol_type = other DNA
tcatgatcaagaaaaactgaaa

SEQ ID NO: 13048 - DNA, 22 bp, synthetic construct
  misc_feature 1..22: note = chemically synthesized
  source 1..22: mol_type = other DNA
catgatcaagaaaaactgaaat

SEQ ID NO: 13049 - DNA, 22 bp, synthetic construct
  misc_feature 1..22: note = chemically synthesized
  source 1..22: mol_type = other DNA
atgatcaagaaaaactgaaatg

SEQ ID NO: 13050 - DNA, 22 bp, synthetic construct
  misc_feature 1..22: note = chemically synthesized
  source 1..22: mol_type = other DNA
aaatgtaaaagaataattcttt

SEQ ID NO: 13051 - DNA, 22 bp, synthetic construct
  misc_feature 1..22: note = chemically synthesized
  source 1..22: mol_type = other DNA
tttagttttagcaaaaaagaaa

SEQ ID NO: 13052 - DNA, 22 bp, synthetic construct
  misc_feature 1..22: note = chemically synthesized
  source 1..22: mol_type = other DNA
tagttttagcaaaaaagaaaac

SEQ ID NO: 13053 - DNA, 22 bp, synthetic construct
  misc_feature 1..22: note = chemically synthesized
  source 1..22: mol_type = other DNA
agttttagcaaaaaagaaaaca

SEQ ID NO: 13054 - DNA, 22 bp, synthetic construct
  misc_feature 1..22: note = chemically synthesized
  source 1..22: mol_type = other DNA
gttttagcaaaaaagaaaacat

SEQ ID NO: 13055 - DNA, 22 bp, synthetic construct
  misc_feature 1..22: note = chemically synthesized
  source 1..22: mol_type = other DNA
tagcaaaaaagaaaacatcatg

SEQ ID NO: 13056 - DNA, 22 bp, synthetic construct
  misc_feature 1..22: note = chemically synthesized
  source 1..22: mol_type = other DNA
agcaaaaaagaaaacatcatga

SEQ ID NO: 13057 - DNA, 22 bp, synthetic construct
  misc_feature 1..22: note = chemically synthesized
  source 1..22: mol_type = other DNA
gcaaaaaagaaaacatcatgaa

SEQ ID NO: 13058 - DNA, 22 bp, synthetic construct
  misc_feature 1..22: note = chemically synthesized
  source 1..22: mol_type = other DNA
tacatctcttaagaaagtcttt

SEQ ID NO: 13059 - DNA, 22 bp, synthetic construct
  misc_feature 1..22: note = chemically synthesized
  source 1..22: mol_type = other DNA
acatctcttaagaaagtctttg

SEQ ID NO: 13060 - DNA, 22 bp, synthetic construct
  misc_feature 1..22: note = chemically synthesized
  source 1..22: mol_type = other DNA
catctcttaagaaagtctttgt

SEQ ID NO: 13061 - DNA, 22 bp, synthetic construct
  misc_feature 1..22: note = chemically synthesized
  source 1..22: mol_type = other DNA
ttaagaaagtctttgtttttaa

SEQ ID NO: 13062 - DNA, 22 bp, synthetic construct
  misc_feature 1..22: note = chemically synthesized
  source 1..22: mol_type = other DNA
aagaaagtctttgtttttaatc

SEQ ID NO: 13063 - DNA, 22 bp, synthetic construct
  misc_feature 1..22: note = chemically synthesized
  source 1..22: mol_type = other DNA
agaaagtctttgtttttaatcc

SEQ ID NO: 13064 - DNA, 22 bp, synthetic construct
  misc_feature 1..22: note = chemically synthesized
  source 1..22: mol_type = other DNA
tgtttttaatccaaataatctg

SEQ ID NO: 13065 - DNA, 22 bp, synthetic construct
  misc_feature 1..22: note = chemically synthesized
  source 1..22: mol_type = other DNA
gtttttaatccaaataatctga

SEQ ID NO: 13066 - DNA, 22 bp, synthetic construct
  misc_feature 1..22: note = chemically synthesized
  source 1..22: mol_type = other DNA
tttttaatccaaataatctgaa

SEQ ID NO: 13067 - DNA, 22 bp, synthetic construct
  misc_feature 1..22: note = chemically synthesized
  source 1..22: mol_type = other DNA
ttaatccaaataatctgaaagc

SEQ ID NO: 13068 - DNA, 22 bp, synthetic construct
  misc_feature 1..22: note = chemically synthesized
  source 1..22: mol_type = other DNA
taatccaaataatctgaaagcc

SEQ ID NO: 13069 - DNA, 22 bp, synthetic construct
  misc_feature 1..22: note = chemically synthesized
  source 1..22: mol_type = other DNA
aatccaaataatctgaaagcca

SEQ ID NO: 13070 - DNA, 22 bp, synthetic construct
  misc_feature 1..22: note = chemically synthesized
  source 1..22: mol_type = other DNA
atccaaataatctgaaagccaa

SEQ ID NO: 13071 - DNA, 22 bp, synthetic construct
  misc_feature 1..22: note = chemically synthesized
  source 1..22: mol_type = other DNA
aaagccaatttctctttagggc

SEQ ID NO: 13072 - DNA, 22 bp, synthetic construct
  misc_feature 1..22: note = chemically synthesized
  source 1..22: mol_type = other DNA
ctctttagggcatggagccaaa

SEQ ID NO: 13073 - DNA, 22 bp, synthetic construct
  misc_feature 1..22: note = chemically synthesized
  source 1..22: mol_type = other DNA
tctttagggcatggagccaaaa

SEQ ID NO: 13074 - DNA, 22 bp, synthetic construct
  misc_feature 1..22: note = chemically synthesized
  source 1..22: mol_type = other DNA
tttagggcatggagccaaaatc

SEQ ID NO: 13075 - DNA, 22 bp, synthetic construct
  misc_feature 1..22: note = chemically synthesized
  source 1..22: mol_type = other DNA
tagggcatggagccaaaatctg

SEQ ID NO: 13076 - DNA, 22 bp, synthetic construct
  misc_feature 1..22: note = chemically synthesized
  source 1..22: mol_type = other DNA
agggcatggagccaaaatctgt

SEQ ID NO: 13077 - DNA, 22 bp, synthetic construct
  misc_feature 1..22: note = chemically synthesized
  source 1..22: mol_type = other DNA
gggcatggagccaaaatctgtg

SEQ ID NO: 13078 - DNA, 22 bp, synthetic construct
  misc_feature 1..22: note = chemically synthesized
  source 1..22: mol_type = other DNA
tgatgttcccacagtactgtat

SEQ ID NO: 13079 - DNA, 22 bp, synthetic construct
  misc_feature 1..22: note = chemically synthesized
  source 1..22: mol_type = other DNA
ccacagtactgtatacacatgg

SEQ ID NO: 13080 - DNA, 22 bp, synthetic construct
  misc_feature 1..22: note = chemically synthesized
  source 1..22: mol_type = other DNA
tatacacatggagatttaggaa

SEQ ID NO: 13081 - DNA, 22 bp, synthetic construct
  misc_feature 1..22: note = chemically synthesized
  source 1..22: mol_type = other DNA
aggaattaaaattcaattttac

SEQ ID NO: 13082 - DNA, 22 bp, synthetic construct
  misc_feature 1..22: note = chemically synthesized
  source 1..22: mol_type = other DNA
ggaattaaaattcaattttact

SEQ ID NO: 13083 - DNA, 22 bp, synthetic construct
  misc_feature 1..22: note = chemically synthesized
  source 1..22: mol_type = other DNA
aaattcaattttacttttagtc

SEQ ID NO: 13084 - DNA, 22 bp, synthetic construct
  misc_feature 1..22: note = chemically synthesized
  source 1..22: mol_type = other DNA
aattttacttttagtcaagaga

SEQ ID NO: 13085 - DNA, 22 bp, synthetic construct
  misc_feature 1..22: note = chemically synthesized
  source 1..22: mol_type = other DNA
tacttttagtcaagagaattcc

SEQ ID NO: 13086 - DNA, 22 bp, synthetic construct
  misc_feature 1..22: note = chemically synthesized
  source 1..22: mol_type = other DNA
acttttagtcaagagaattcca

SEQ ID NO: 13087 - DNA, 22 bp, synthetic construct
  misc_feature 1..22: note = chemically synthesized
  source 1..22: mol_type = other DNA
cttttagtcaagagaattccag

SEQ ID NO: 13088 - DNA, 22 bp, synthetic construct
  misc_feature 1..22: note = chemically synthesized
  source 1..22: mol_type = other DNA
ttagtcaagagaattccagtaa

SEQ ID NO: 13089 - DNA, 22 bp, synthetic construct
  misc_feature 1..22: note = chemically synthesized
  source 1..22: mol_type = other DNA
tagtcaagagaattccagtaat

SEQ ID NO: 13090 - DNA, 22 bp, synthetic construct
  misc_feature 1..22: note = chemically synthesized
  source 1..22: mol_type = other DNA
agtcaagagaattccagtaata

SEQ ID NO: 13091 - DNA, 22 bp, synthetic construct
  misc_feature 1..22: note = chemically synthesized
  source 1..22: mol_type = other DNA
gtcaagagaattccagtaataa

SEQ ID NO: 13092 - DNA, 22 bp, synthetic construct
  misc_feature 1..22: note = chemically synthesized
  source 1..22: mol_type = other DNA
cagtaataaaaggtcagatttc

SEQ ID NO: 13093 - DNA, 22 bp, synthetic construct
  misc_feature 1..22: note = chemically synthesized
  source 1..22: mol_type = other DNA
ctaatcatatttgaatttactt

SEQ ID NO: 13094 - DNA, 22 bp, synthetic construct
  misc_feature 1..22: note = chemically synthesized
  source 1..22: mol_type = other DNA
taatcatatttgaatttacttt

SEQ ID NO: 13095 - DNA, 22 bp, synthetic construct
  misc_feature 1..22: note = chemically synthesized
  source 1..22: mol_type = other DNA
atcatatttgaatttactttgg

SEQ ID NO: 13096 - DNA, 22 bp, synthetic construct
  misc_feature 1..22: note = chemically synthesized
  source 1..22: mol_type = other DNA
gaatttactttggatgaaaaag

SEQ ID NO: 13097 - DNA, 22 bp, synthetic construct
  misc_feature 1..22: note = chemically synthesized
  source 1..22: mol_type = other DNA
aatttactttggatgaaaaaga

SEQ ID NO: 13098 - DNA, 22 bp, synthetic construct
  misc_feature 1..22: note = chemically synthesized
  source 1..22: mol_type = other DNA
actttggatgaaaaagaaagtt

SEQ ID NO: 13099 - DNA, 22 bp, synthetic construct
  misc_feature 1..22: note = chemically synthesized
  source 1..22: mol_type = other DNA
ctttggatgaaaaagaaagttc

SEQ ID NO: 13100 - DNA, 22 bp, synthetic construct
  misc_feature 1..22: note = chemically synthesized
  source 1..22: mol_type = other DNA
tggatgaaaaagaaagttctca

SEQ ID NO: 13101 - DNA, 22 bp, synthetic construct
  misc_feature 1..22: note = chemically synthesized
  source 1..22: mol_type = other DNA
ggatgaaaaagaaagttctcaa

SEQ ID NO: 13102 - DNA, 22 bp, synthetic construct
  misc_feature 1..22: note = chemically synthesized
  source 1..22: mol_type = other DNA
gatgaaaaagaaagttctcaaa

SEQ ID NO: 13103 - DNA, 22 bp, synthetic construct
  misc_feature 1..22: note = chemically synthesized
  source 1..22: mol_type = other DNA
tcaaatgagcggttaacttcac

SEQ ID NO: 13104 - DNA, 22 bp, synthetic construct
  misc_feature 1..22: note = chemically synthesized
  source 1..22: mol_type = other DNA
aaatgagcggttaacttcacac

SEQ ID NO: 13105 - DNA, 22 bp, synthetic construct
  misc_feature 1..22: note = chemically synthesized
  source 1..22: mol_type = other DNA
acttcacactttgtcatcactt

SEQ ID NO: 13106 - DNA, 22 bp, synthetic construct
  misc_feature 1..22: note = chemically synthesized
  source 1..22: mol_type = other DNA
cacactttgtcatcacttgaaa

SEQ ID NO: 13107 - DNA, 22 bp, synthetic construct
  misc_feature 1..22: note = chemically synthesized
  source 1..22: mol_type = other DNA
acactttgtcatcacttgaaaa

SEQ ID NO: 13108 - DNA, 22 bp, synthetic construct
  misc_feature 1..22: note = chemically synthesized
  source 1..22: mol_type = other DNA
tgtcatcacttgaaaatagctc

SEQ ID NO: 13109 - DNA, 22 bp, synthetic construct
  misc_feature 1..22: note = chemically synthesized
  source 1..22: mol_type = other DNA
gtcatcacttgaaaatagctca

SEQ ID NO: 13110 - DNA, 22 bp, synthetic construct
  misc_feature 1..22: note = chemically synthesized
  source 1..22: mol_type = other DNA
tcatcacttgaaaatagctcat

SEQ ID NO: 13111 - DNA, 22 bp, synthetic construct
  misc_feature 1..22: note = chemically synthesized
  source 1..22: mol_type = other DNA
gaaaatagctcattgaggatct

SEQ ID NO: 13112 - DNA, 22 bp, synthetic construct
  misc_feature 1..22: note = chemically synthesized
  source 1..22: mol_type = other DNA
aaaatagctcattgaggatctt

SEQ ID NO: 13113 - DNA, 22 bp, synthetic construct
  misc_feature 1..22: note = chemically synthesized
  source 1..22: mol_type = other DNA
attgaggatctttgcaaagtga

SEQ ID NO: 13114 - DNA, 22 bp, synthetic construct
  misc_feature 1..22: note = chemically synthesized
  source 1..22: mol_type = other DNA
aggatctttgcaaagtgatcca

SEQ ID NO: 13115 - DNA, 22 bp, synthetic construct
  misc_feature 1..22: note = chemically synthesized
  source 1..22: mol_type = other DNA
tgcaaagtgatccatcaccctg

SEQ ID NO: 13116 - DNA, 22 bp, synthetic construct
  misc_feature 1..22: note = chemically synthesized
  source 1..22: mol_type = other DNA
gcaaagtgatccatcaccctgg

SEQ ID NO: 13117 - DNA, 22 bp, synthetic construct
  misc_feature 1..22: note = chemically synthesized
  source 1..22: mol_type = other DNA
caaagtgatccatcaccctggc

SEQ ID NO: 13118 - DNA, 22 bp, synthetic construct
  misc_feature 1..22: note = chemically synthesized
  source 1..22: mol_type = other DNA
gctgggctgttttcagaatatg

SEQ ID NO: 13119 - DNA, 22 bp, synthetic construct
  misc_feature 1..22: note = chemically synthesized
  source 1..22: mol_type = other DNA
ggctgttttcagaatatggttg

SEQ ID NO: 13120 - DNA, 22 bp, synthetic construct
  misc_feature 1..22: note = chemically synthesized
  source 1..22: mol_type = other DNA
ttttcagaatatggttgcccaa

SEQ ID NO: 13121 - DNA, 22 bp, synthetic construct
  misc_feature 1..22: note = chemically synthesized
  source 1..22: mol_type = other DNA
tcagaatatggttgcccaaatg

SEQ ID NO: 13122 - DNA, 22 bp, synthetic construct
  misc_feature 1..22: note = chemically synthesized
  source 1..22: mol_type = other DNA
cagaatatggttgcccaaatga

SEQ ID NO: 13123 - DNA, 22 bp, synthetic construct
  misc_feature 1..22: note = chemically synthesized
  source 1..22: mol_type = other DNA
agaatatggttgcccaaatgac

SEQ ID NO: 13124 - DNA, 22 bp, synthetic construct
  misc_feature 1..22: note = chemically synthesized
  source 1..22: mol_type = other DNA
cccaaatgactttgaacaaatg

SEQ ID NO: 13125 - DNA, 22 bp, synthetic construct
  misc_feature 1..22: note = chemically synthesized
  source 1..22: mol_type = other DNA
tgaacaaatgtctcctgaagaa

SEQ ID NO: 13126 - DNA, 22 bp, synthetic construct
  misc_feature 1..22: note = chemically synthesized
  source 1..22: mol_type = other DNA
gaacaaatgtctcctgaagaac

SEQ ID NO: 13127 - DNA, 22 bp, synthetic construct
  misc_feature 1..22: note = chemically synthesized
  source 1..22: mol_type = other DNA
aacaaatgtctcctgaagaaca

SEQ ID NO: 13128 - DNA, 22 bp, synthetic construct
  misc_feature 1..22: note = chemically synthesized
  source 1..22: mol_type = other DNA
ctgaagaacagaagcctaatta

SEQ ID NO: 13129 - DNA, 22 bp, synthetic construct
  misc_feature 1..22: note = chemically synthesized
  source 1..22: mol_type = other DNA
aagaacagaagcctaattatgg

SEQ ID NO: 13130 - DNA, 22 bp, synthetic construct
  misc_feature 1..22: note = chemically synthesized
  source 1..22: mol_type = other DNA
attatggtccagctgcaaatgt

SEQ ID NO: 13131 - DNA, 22 bp, synthetic construct
  misc_feature 1..22: note = chemically synthesized
  source 1..22: mol_type = other DNA
tggtccagctgcaaatgtgacc

SEQ ID NO: 13132 - DNA, 22 bp, synthetic construct
  misc_feature 1..22: note = chemically synthesized
  source 1..22: mol_type = other DNA
caaatgtgaccccagtgtctgt

SEQ ID NO: 13133 - DNA, 22 bp, synthetic construct
  misc_feature 1..22: note = chemically synthesized
  source 1..22: mol_type = other DNA
tcactagatgttaaagaaaaat

SEQ ID NO: 13134 - DNA, 22 bp, synthetic construct
  misc_feature 1..22: note = chemically synthesized
  source 1..22: mol_type = other DNA
gatgttaaagaaaaatcactgc

SEQ ID NO: 13135 - DNA, 22 bp, synthetic construct
  misc_feature 1..22: note = chemically synthesized
  source 1..22: mol_type = other DNA
aagaaaaatcactgcattaatt

SEQ ID NO: 13136 - DNA, 22 bp, synthetic construct
  misc_feature 1..22: note = chemically synthesized
  source 1..22: mol_type = other DNA
cattaatttaaaaaagcaattt

SEQ ID NO: 13137 - DNA, 22 bp, synthetic construct
  misc_feature 1..22: note = chemically synthesized
  source 1..22: mol_type = other DNA
atttaaaaaagcaatttcagat

SEQ ID NO: 13138 - DNA, 22 bp, synthetic construct
  misc_feature 1..22: note = chemically synthesized
  source 1..22: mol_type = other DNA
aaaaaagcaatttcagatcaac

SEQ ID NO: 13139 - DNA, 22 bp, synthetic construct
  misc_feature 1..22: note = chemically synthesized
  source 1..22: mol_type = other DNA
aaaaagcaatttcagatcaaca

SEQ ID NO: 13140 - DNA, 22 bp, synthetic construct
  misc_feature 1..22: note = chemically synthesized
  source 1..22: mol_type = other DNA
cagatcaacagcacctttggtt

SEQ ID NO: 13141 - DNA, 22 bp, synthetic construct
  misc_feature 1..22: note = chemically synthesized
  source 1..22: mol_type = other DNA
agatcaacagcacctttggttg

SEQ ID NO: 13142 - DNA, 22 bp, synthetic construct
  misc_feature 1..22: note = chemically synthesized
  source 1..22: mol_type = other DNA
tggttggcaagtgttataggaa

SEQ ID NO: 13143 - DNA, 22 bp, synthetic construct
  misc_feature 1..22: note = chemically synthesized
  source 1..22: mol_type = other DNA
ggttggcaagtgttataggaat

SEQ ID NO: 13144 - DNA, 22 bp, synthetic construct
  misc_feature 1..22: note = chemically synthesized
  source 1..22: mol_type = other DNA
gttggcaagtgttataggaatt

SEQ ID NO: 13145 - DNA, 22 bp, synthetic construct
  misc_feature 1..22: note = chemically synthesized
  source 1..22: mol_type = other DNA
gcaagtgttataggaattgcag

SEQ ID NO: 13146 - DNA, 22 bp, synthetic construct
  misc_feature 1..22: note = chemically synthesized
  source 1..22: mol_type = other DNA
taggaattgcagtgatttaagc

SEQ ID NO: 13147 - DNA, 22 bp, synthetic construct
  misc_feature 1..22: note = chemically synthesized
  source 1..22: mol_type = other DNA
cagtgatttaagcatctctcta

SEQ ID NO: 13148 - DNA, 22 bp, synthetic construct
  misc_feature 1..22: note = chemically synthesized
  source 1..22: mol_type = other DNA
aagcatctctctagaattcagg

SEQ ID NO: 13149 - DNA, 22 bp, synthetic construct
  misc_feature 1..22: note = chemically synthesized
  source 1..22: mol_type = other DNA
agcatctctctagaattcagga

SEQ ID NO: 13150 - DNA, 22 bp, synthetic construct
  misc_feature 1..22: note = chemically synthesized
  source 1..22: mol_type = other DNA
tctagaattcaggatatgtttt

SEQ ID NO: 13151 - DNA, 22 bp, synthetic construct
  misc_feature 1..22: note = chemically synthesized
  source 1..22: mol_type = other DNA
tagaattcaggatatgtttttt

SEQ ID NO: 13152 - DNA, 22 bp, synthetic construct
  misc_feature 1..22: note = chemically synthesized
  source 1..22: mol_type = other DNA
gaattcaggatatgtttttttt

SEQ ID NO: 13153 - DNA, 22 bp, synthetic construct
  misc_feature 1..22: note = chemically synthesized
  source 1..22: mol_type = other DNA
aggatatgttttttttaagcta

SEQ ID NO: 13154 - DNA, 22 bp, synthetic construct
  misc_feature 1..22: note = chemically synthesized
  source 1..22: mol_type = other DNA
tttttaagctacatctacctag

SEQ ID NO: 13155 - DNA, 22 bp, synthetic construct
  misc_feature 1..22: note = chemically synthesized
  source 1..22: mol_type = other DNA
ttttaagctacatctacctagt

SEQ ID NO: 13156 - DNA, 22 bp, synthetic construct
  misc_feature 1..22: note = chemically synthesized
  source 1..22: mol_type = other DNA
tttaagctacatctacctagtc

SEQ ID NO: 13157 - DNA, 22 bp, synthetic construct
  misc_feature 1..22: note = chemically synthesized
  source 1..22: mol_type = other DNA
ttaagctacatctacctagtct

SEQ ID NO: 13158 - DNA, 22 bp, synthetic construct
  misc_feature 1..22: note = chemically synthesized
  source 1..22: mol_type = other DNA
taagctacatctacctagtctg

SEQ ID NO: 13159 - DNA, 22 bp, synthetic construct
  misc_feature 1..22: note = chemically synthesized
  source 1..22: mol_type = other DNA
aagctacatctacctagtctga

SEQ ID NO: 13160 - DNA, 22 bp, synthetic construct
  misc_feature 1..22: note = chemically synthesized
  source 1..22: mol_type = other DNA
agctacatctacctagtctgaa

SEQ ID NO: 13161 - DNA, 22 bp, synthetic construct
  misc_feature 1..22: note = chemically synthesized
  source 1..22: mol_type = other DNA
catctacctagtctgaagagac

SEQ ID NO: 13162 - DNA, 22 bp, synthetic construct
  misc_feature 1..22: note = chemically synthesized
  source 1..22: mol_type = other DNA
cctagtctgaagagacactcct

SEQ ID NO: 13163 - DNA, 22 bp, synthetic construct
  misc_feature 1..22: note = chemically synthesized
  source 1..22: mol_type = other DNA
gtctgaagagacactcctgaac

SEQ ID NO: 13164 - DNA, 22 bp, synthetic construct
  misc_feature 1..22: note = chemically synthesized
  source 1..22: mol_type = other DNA
aagagacactcctgaactctgg

SEQ ID NO: 13165 - DNA, 22 bp, synthetic construct
  misc_feature 1..22: note = chemically synthesized
  source 1..22: mol_type = other DNA
ctgaactctggaggatagatgt

SEQ ID NO: 13166 - DNA, 22 bp, synthetic construct
  misc_feature 1..22: note = chemically synthesized
  source 1..22: mol_type = other DNA
aactctggaggatagatgtctc

SEQ ID NO: 13167 - DNA, 22 bp, synthetic construct
  misc_feature 1..22: note = chemically synthesized
  source 1..22: mol_type = other DNA
tggaggatagatgtctctatct

SEQ ID NO: 13168 - DNA, 22 bp, synthetic construct
  misc_feature 1..22: note = chemically synthesized
  source 1..22: mol_type = other DNA
gaggatagatgtctctatctga

SEQ ID NO: 13169 - DNA, 22 bp, synthetic construct
  misc_feature 1..22: note = chemically synthesized
  source 1..22: mol_type = other DNA
tatctgaatcatatttctcctt

SEQ ID NO: 13170 - DNA, 22 bp, synthetic construct
  misc_feature 1..22: note = chemically synthesized
  source 1..22: mol_type = other DNA
tctgaatcatatttctccttcc

SEQ ID NO: 13171 - DNA, 22 bp, synthetic construct
  misc_feature 1..22: note = chemically synthesized
  source 1..22: mol_type = other DNA
aatcatatttctccttccctcc

SEQ ID NO: 13172 - DNA, 22 bp, synthetic construct
  misc_feature 1..22: note = chemically synthesized
  source 1..22: mol_type = other DNA
ctccttccctccctccttcctc

SEQ ID NO: 13173 - DNA, 22 bp, synthetic construct
  misc_feature 1..22: note = chemically synthesized
  source 1..22: mol_type = other DNA
tccttccctccctccttcctct

SEQ ID NO: 13174 - DNA, 22 bp, synthetic construct
  misc_feature 1..22: note = chemically synthesized
  source 1..22: mol_type = other DNA
cttccctccctccttcctctcc

SEQ ID NO: 13175 - DNA, 22 bp, synthetic construct
  misc_feature 1..22: note = chemically synthesized
  source 1..22: mol_type = other DNA
ccctccctccttcctctcctct

SEQ ID NO: 13176 - DNA, 22 bp, synthetic construct
  misc_feature 1..22: note = chemically synthesized
  source 1..22: mol_type = other DNA
cctccctccttcctctcctctc

SEQ ID NO: 13177 - DNA, 22 bp, synthetic construct
  misc_feature 1..22: note = chemically synthesized
  source 1..22: mol_type = other DNA
cctccttcctctcctctcctct

SEQ ID NO: 13178 - DNA, 22 bp, synthetic construct
  misc_feature 1..22: note = chemically synthesized
  source 1..22: mol_type = other DNA
cttcctctcctctcctctctct

SEQ ID NO: 13179 - DNA, 22 bp, synthetic construct
  misc_feature 1..22: note = chemically synthesized
  source 1..22: mol_type = other DNA
cctctcctctcctctctctctc

SEQ ID NO: 13180 - DNA, 22 bp, synthetic construct
  misc_feature 1..22: note = chemically synthesized
  source 1..22: mol_type = other DNA
ctctcctctcctctctctctct

SEQ ID NO: 13181 - DNA, 22 bp, synthetic construct
  misc_feature 1..22: note = chemically synthesized
  source 1..22: mol_type = other DNA
tcctctcctctctctctctctc

SEQ ID NO: 13182 - DNA, 22 bp, synthetic construct
  misc_feature 1..22: note = chemically synthesized
  source 1..22: mol_type = other DNA
ctctcctctctctctctctcta

SEQ ID NO: 13183 - DNA, 22 bp, synthetic construct
  misc_feature 1..22: note = chemically synthesized
  source 1..22: mol_type = other DNA
tcctctctctctctctctatgt

SEQ ID NO: 13184 - DNA, 22 bp, synthetic construct
  misc_feature 1..22: note = chemically synthesized
  source 1..22: mol_type = other DNA
ctctctctctctctctatgtgt

SEQ ID NO: 13185 - DNA, 22 bp, synthetic construct
  misc_feature 1..22: note = chemically synthesized
  source 1..22: mol_type = other DNA
tctctctctctctatgtgtgtg

SEQ ID NO: 13186 - DNA, 22 bp, synthetic construct
  misc_feature 1..22: note = chemically synthesized
  source 1..22: mol_type = other DNA
tctctctctctatgtgtgtgtg

SEQ ID NO: 13187 - DNA, 22 bp, synthetic construct
  misc_feature 1..22: note = chemically synthesized
  source 1..22: mol_type = other DNA
tctctctctatgtgtgtgtgtg

SEQ ID NO: 13188 - DNA, 22 bp, synthetic construct
  misc_feature 1..22: note = chemically synthesized
  source 1..22: mol_type = other DNA
tctctctatgtgtgtgtgtgta

SEQ ID NO: 13189 - DNA, 22 bp, synthetic construct
  misc_feature 1..22: note = chemically synthesized
  source 1..22: mol_type = other DNA
tctctatgtgtgtgtgtgtaca

SEQ ID NO: 13190 - DNA, 22 bp, synthetic construct
  misc_feature 1..22: note = chemically synthesized
  source 1..22: mol_type = other DNA
tctatgtgtgtgtgtgtacata

SEQ ID NO: 13191 - DNA, 22 bp, synthetic construct
  misc_feature 1..22: note = chemically synthesized
  source 1..22: mol_type = other DNA
tatgtgtgtgtgtgtacatata

SEQ ID NO: 13192 - DNA, 22 bp, synthetic construct
  misc_feature 1..22: note = chemically synthesized
  source 1..22: mol_type = other DNA
tgtgtgtgtgtgtacatatata

SEQ ID NO: 13193 - DNA, 22 bp, synthetic construct
  misc_feature 1..22: note = chemically synthesized
  source 1..22: mol_type = other DNA
gctgcacaatgacattttggtc

SEQ ID NO: 13194 - DNA, 22 bp, synthetic construct
  misc_feature 1..22: note = chemically synthesized
  source 1..22: mol_type = other DNA
ctgcacaatgacattttggtca

SEQ ID NO: 13195 - DNA, 22 bp, synthetic construct
  misc_feature 1..22: note = chemically synthesized
  source 1..22: mol_type = other DNA
cacaatgacattttggtcaatg

SEQ ID NO: 13196 - DNA, 22 bp, synthetic construct
  misc_feature 1..22: note = chemically synthesized
  source 1..22: mol_type = other DNA
tggtcaatgatggaccacatta

SEQ ID NO: 13197 - DNA, 22 bp, synthetic construct
  misc_feature 1..22: note = chemically synthesized
  source 1..22: mol_type = other DNA
ggtcaatgatggaccacattat

SEQ ID NO: 13198 - DNA, 22 bp, synthetic construct
  misc_feature 1..22: note = chemically synthesized
  source 1..22: mol_type = other DNA
gtcaatgatggaccacattata

SEQ ID NO: 13199 - DNA, 22 bp, synthetic construct
  misc_feature 1..22: note = chemically synthesized
  source 1..22: mol_type = other DNA
tacgacagtggtcccataaggt

SEQ ID NO: 13200 - DNA, 22 bp, synthetic construct
  misc_feature 1..22: note = chemically synthesized
  source 1..22: mol_type = other DNA
taatactgtattttcactgtac

SEQ ID NO: 13201 - DNA, 22 bp, synthetic construct
  misc_feature 1..22: note = chemically synthesized
  source 1..22: mol_type = other DNA
tattttcactgtaccttttcta

SEQ ID NO: 13202 - DNA, 22 bp, synthetic construct
  misc_feature 1..22: note = chemically synthesized
  source 1..22: mol_type = other DNA
tcactgtaccttttctatgttt

SEQ ID NO: 13203 - DNA, 22 bp, synthetic construct
  misc_feature 1..22: note = chemically synthesized
  source 1..22: mol_type = other DNA
cactgtaccttttctatgttta

SEQ ID NO: 13204 - DNA, 22 bp, synthetic construct
  misc_feature 1..22: note = chemically synthesized
  source 1..22: mol_type = other DNA
actgtaccttttctatgtttag

SEQ ID NO: 13205 - DNA, 22 bp, synthetic construct
  misc_feature 1..22: note = chemically synthesized
  source 1..22: mol_type = other DNA
taccttttctatgtttagatac

SEQ ID NO: 13206 - DNA, 22 bp, synthetic construct
  misc_feature 1..22: note = chemically synthesized
  source 1..22: mol_type = other DNA
ttctatgtttagatacacaaat

SEQ ID NO: 13207 - DNA, 22 bp, synthetic construct
  misc_feature 1..22: note = chemically synthesized
  source 1..22: mol_type = other DNA
tctatgtttagatacacaaata

SEQ ID NO: 13208 - DNA, 22 bp, synthetic construct
  misc_feature 1..22: note = chemically synthesized
  source 1..22: mol_type = other DNA
ctatgtttagatacacaaatac

SEQ ID NO: 13209 - DNA, 22 bp, synthetic construct
  misc_feature 1..22: note = chemically synthesized
  source 1..22: mol_type = other DNA
tatgtttagatacacaaatacc

SEQ ID NO: 13210 - DNA, 22 bp, synthetic construct
  misc_feature 1..22: note = chemically synthesized
  source 1..22: mol_type = other DNA
tgtttagatacacaaataccac

SEQ ID NO: 13211 - DNA, 22 bp, synthetic construct
  misc_feature 1..22: note = chemically synthesized
  source 1..22: mol_type = other DNA
agatacacaaataccactgtta

SEQ ID NO: 13212 - DNA, 22 bp, synthetic construct
  misc_feature 1..22: note = chemically synthesized
  source 1..22: mol_type = other DNA
gatacacaaataccactgttac

SEQ ID NO: 13213 - DNA, 22 bp, synthetic construct
  misc_feature 1..22: note = chemically synthesized
  source 1..22: mol_type = other DNA
ttaccattgcctacagtgttca

SEQ ID NO: 13214 - DNA, 22 bp, synthetic construct
  misc_feature 1..22: note = chemically synthesized
  source 1..22: mol_type = other DNA
ccattgcctacagtgttcagta

SEQ ID NO: 13215 - DNA, 22 bp, synthetic construct
  misc_feature 1..22: note = chemically synthesized
  source 1..22: mol_type = other DNA
cctacagtgttcagtacagtca

SEQ ID NO: 13216 - DNA, 22 bp, synthetic construct
  misc_feature 1..22: note = chemically synthesized
  source 1..22: mol_type = other DNA
cagtgttcagtacagtcacatg

SEQ ID NO: 13217 - DNA, 22 bp, synthetic construct
  misc_feature 1..22: note = chemically synthesized
  source 1..22: mol_type = other DNA
agtacagtcacatgctgtacag

SEQ ID NO: 13218 - DNA, 22 bp, synthetic construct
  misc_feature 1..22: note = chemically synthesized
  source 1..22: mol_type = other DNA
tacaggtttgcagcccaggagc

SEQ ID NO: 13219 - DNA, 22 bp, synthetic construct
  misc_feature 1..22: note = chemically synthesized
  source 1..22: mol_type = other DNA
gcagcccaggagcctaggagca

SEQ ID NO: 13220 - DNA, 22 bp, synthetic construct
  misc_feature 1..22: note = chemically synthesized
  source 1..22: mol_type = other DNA
cagcccaggagcctaggagcaa

SEQ ID NO: 13221 - DNA, 22 bp, synthetic construct
  misc_feature 1..22: note = chemically synthesized
  source 1..22: mol_type = other DNA
ggagcaataggccacatcaata

SEQ ID NO: 13222 - DNA, 22 bp, synthetic construct
  misc_feature 1..22: note = chemically synthesized
  source 1..22: mol_type = other DNA
ggtatgtagtaagctataccat

SEQ ID NO: 13223 - DNA, 22 bp, synthetic construct
  misc_feature 1..22: note = chemically synthesized
  source 1..22: mol_type = other DNA
taccatttaggtttaggtaagt

SEQ ID NO: 13224 - DNA, 22 bp, synthetic construct
  misc_feature 1..22: note = chemically synthesized
  source 1..22: mol_type = other DNA
aggtttaggtaagtacactcta

SEQ ID NO: 13225 - DNA, 22 bp, synthetic construct
  misc_feature 1..22: note = chemically synthesized
  source 1..22: mol_type = other DNA
ggtttaggtaagtacactctat

SEQ ID NO: 13226 - DNA, 22 bp, synthetic construct
  misc_feature 1..22: note = chemically synthesized
  source 1..22: mol_type = other DNA
aggtaagtacactctattatgt

SEQ ID NO: 13227 - DNA, 22 bp, synthetic construct
  misc_feature 1..22: note = chemically synthesized
  source 1..22: mol_type = other DNA
ggtaagtacactctattatgtt

SEQ ID NO: 13228 - DNA, 22 bp, synthetic construct
  misc_feature 1..22: note = chemically synthesized
  source 1..22: mol_type = other DNA
tattatgttcgcacaatgatga

SEQ ID NO: 13229 - DNA, 22 bp, synthetic construct
  misc_feature 1..22: note = chemically synthesized
  source 1..22: mol_type = other DNA
ttatgttcgcacaatgatgaaa

SEQ ID NO: 13230 - DNA, 22 bp, synthetic construct
  misc_feature 1..22: note = chemically synthesized
  source 1..22: mol_type = other DNA
tgttcgcacaatgatgaaattg

SEQ ID NO: 13231 - DNA, 22 bp, synthetic construct
  misc_feature 1..22: note = chemically synthesized
  source 1..22: mol_type = other DNA
gcacaatgatgaaattgcttaa

SEQ ID NO: 13232 - DNA, 22 bp, synthetic construct
  misc_feature 1..22: note = chemically synthesized
  source 1..22: mol_type = other DNA
cttaatgacacatttctcagaa

SEQ ID NO: 13233 - DNA, 22 bp, synthetic construct
  misc_feature 1..22: note = chemically synthesized
  source 1..22: mol_type = other DNA
aatgacacatttctcagaatat

SEQ ID NO: 13234 - DNA, 22 bp, synthetic construct
  misc_feature 1..22: note = chemically synthesized
  source 1..22: mol_type = other DNA
atgacacatttctcagaatata

SEQ ID NO: 13235 - DNA, 22 bp, synthetic construct
  misc_feature 1..22: note = chemically synthesized
  source 1..22: mol_type = other DNA
ctcagaatatatccccattgtt

SEQ ID NO: 13236 - DNA, 22 bp, synthetic construct
  misc_feature 1..22: note = chemically synthesized
  source 1..22: mol_type = other DNA
tcagaatatatccccattgtta

SEQ ID NO: 13237 - DNA, 22 bp, synthetic construct
  misc_feature 1..22: note = chemically synthesized
  source 1..22: mol_type = other DNA
agaatatatccccattgttaag

SEQ ID NO: 13238 - DNA, 22 bp, synthetic construct
  misc_feature 1..22: note = chemically synthesized
  source 1..22: mol_type = other DNA
ttaaggaatgcatggctgtata

SEQ ID NO: 13239 - DNA, 22 bp, synthetic construct
  misc_feature 1..22: note = chemically synthesized
  source 1..22: mol_type = other DNA
aggaatgcatggctgtatacac

SEQ ID NO: 13240 - DNA, 22 bp, synthetic construct
  misc_feature 1..22: note = chemically synthesized
  source 1..22: mol_type = other DNA
tatacacacacatgtgtttgtg

SEQ ID NO: 13241 - DNA, 22 bp, synthetic construct
  misc_feature 1..22: note = chemically synthesized
  source 1..22: mol_type = other DNA
gtgtgttttcatgtatatacat

SEQ ID NO: 13242 - DNA, 22 bp, synthetic construct
  misc_feature 1..22: note = chemically synthesized
  source 1..22: mol_type = other DNA
tgtgttttcatgtatatacata

SEQ ID NO: 13243 - DNA, 22 bp, synthetic construct
  misc_feature 1..22: note = chemically synthesized
  source 1..22: mol_type = other DNA
tcatgtatatacatatatgtgt

SEQ ID NO: 13244 - DNA, 22 bp, synthetic construct
  misc_feature 1..22: note = chemically synthesized
  source 1..22: mol_type = other DNA
catgtatatacatatatgtgtg

SEQ ID NO: 13245 - DNA, 22 bp, synthetic construct
  misc_feature 1..22: note = chemically synthesized
  source 1..22: mol_type = other DNA
atgtatatacatatatgtgtgt

SEQ ID NO: 13246 - DNA, 22 bp, synthetic construct
  misc_feature 1..22: note = chemically synthesized
  source 1..22: mol_type = other DNA
ataacagggactcaagaagttg

SEQ ID NO: 13247 - DNA, 22 bp, synthetic construct
  misc_feature 1..22: note = chemically synthesized
  source 1..22: mol_type = other DNA
aagaagttgcctggagttgttc

SEQ ID NO: 13248 - DNA, 22 bp, synthetic construct
  misc_feature 1..22: note = chemically synthesized
  source 1..22: mol_type = other DNA
cctggagttgttcctttcttca

SEQ ID NO: 13249 - DNA, 22 bp, synthetic construct
  misc_feature 1..22: note = chemically synthesized
  source 1..22: mol_type = other DNA
gagttgttcctttcttcaaggg

SEQ ID NO: 13250 - DNA, 22 bp, synthetic construct
  misc_feature 1..22: note = chemically synthesized
  source 1..22: mol_type = other DNA
ttcctttcttcaagggtctagc

SEQ ID NO: 13251 - DNA, 22 bp, synthetic construct
  misc_feature 1..22: note = chemically synthesized
  source 1..22: mol_type = other DNA
ctttcttcaagggtctagcaat

SEQ ID NO: 13252 - DNA, 22 bp, synthetic construct
  misc_feature 1..22: note = chemically synthesized
  source 1..22: mol_type = other DNA
tcttcaagggtctagcaatata

SEQ ID NO: 13253 - DNA, 22 bp, synthetic construct
  misc_feature 1..22: note = chemically synthesized
  source 1..22: mol_type = other DNA
cttcaagggtctagcaatatat

SEQ ID NO: 13254 - DNA, 22 bp, synthetic construct
  misc_feature 1..22: note = chemically synthesized
  source 1..22: mol_type = other DNA
ttcaagggtctagcaatatatc

SEQ ID NO: 13255 - DNA, 22 bp, synthetic construct
  misc_feature 1..22: note = chemically synthesized
  source 1..22: mol_type = other DNA
caagggtctagcaatatatctg

SEQ ID NO: 13256 - DNA, 22 bp, synthetic construct
  misc_feature 1..22: note = chemically synthesized
  source 1..22: mol_type = other DNA
aagggtctagcaatatatctga

SEQ ID NO: 13257 - DNA, 22 bp, synthetic construct
  misc_feature 1..22: note = chemically synthesized
  source 1..22: mol_type = other DNA
gcaatatatctgataccatctc

SEQ ID NO: 13258 - DNA, 22 bp, synthetic construct
  misc_feature 1..22: note = chemically synthesized
  source 1..22: mol_type = other DNA
ataccatctcaagaggaccaag

SEQ ID NO: 13259 - DNA, 22 bp, synthetic construct
  misc_feature 1..22: note = chemically synthesized
  source 1..22: mol_type = other DNA
aagaggaccaagggcttataag

SEQ ID NO: 13260 - DNA, 22 bp, synthetic construct
  misc_feature 1..22: note = chemically synthesized
  source 1..22: mol_type = other DNA
ataagatgaactttctggggta

SEQ ID NO: 13261 - DNA, 22 bp, synthetic construct
  misc_feature 1..22: note = chemically synthesized
  source 1..22: mol_type = other DNA
taagatgaactttctggggtat

SEQ ID NO: 13262 - DNA, 22 bp, synthetic construct
  misc_feature 1..22: note = chemically synthesized
  source 1..22: mol_type = other DNA
tctggggtatttgggactactt

SEQ ID NO: 13263 - DNA, 22 bp, synthetic construct
  misc_feature 1..22: note = chemically synthesized
  source 1..22: mol_type = other DNA
ctggggtatttgggactacttc

SEQ ID NO: 13264 - DNA, 22 bp, synthetic construct
  misc_feature 1..22: note = chemically synthesized
  source 1..22: mol_type = other DNA
tggggtatttgggactacttcc

SEQ ID NO: 13265 - DNA, 22 bp, synthetic construct
  misc_feature 1..22: note = chemically synthesized
  source 1..22: mol_type = other DNA
gggtatttgggactacttcctg

SEQ ID NO: 13266 - DNA, 22 bp, synthetic construct
  misc_feature 1..22: note = chemically synthesized
  source 1..22: mol_type = other DNA
gggactacttcctgattaactc

SEQ ID NO: 13267 - DNA, 22 bp, synthetic construct
  misc_feature 1..22: note = chemically synthesized
  source 1..22: mol_type = other DNA
ggactacttcctgattaactcc

SEQ ID NO: 13268 - DNA, 22 bp, synthetic construct
  misc_feature 1..22: note = chemically synthesized
  source 1..22: mol_type = other DNA
cttcctgattaactccaaaaag

SEQ ID NO: 13269 - DNA, 22 bp, synthetic construct
  misc_feature 1..22: note = chemically synthesized
  source 1..22: mol_type = other DNA
cctgattaactccaaaaaggaa

SEQ ID NO: 13270 - DNA, 22 bp, synthetic construct
  misc_feature 1..22: note = chemically synthesized
  source 1..22: mol_type = other DNA
ctgattaactccaaaaaggaag

SEQ ID NO: 13271 - DNA, 22 bp, synthetic construct
  misc_feature 1..22: note = chemically synthesized
  source 1..22: mol_type = other DNA
attaactccaaaaaggaagaga

SEQ ID NO: 13272 - DNA, 22 bp, synthetic construct
  misc_feature 1..22: note = chemically synthesized
  source 1..22: mol_type = other DNA
actccaaaaaggaagagaaagg

SEQ ID NO: 13273 - DNA, 22 bp, synthetic construct
  misc_feature 1..22: note = chemically synthesized
  source 1..22: mol_type = other DNA
caaaaaggaagagaaaggaaag

SEQ ID NO: 13274 - DNA, 22 bp, synthetic construct
  misc_feature 1..22: note = chemically synthesized
  source 1..22: mol_type = other DNA
aactttcttcccttattttcat

SEQ ID NO: 13275 - DNA, 22 bp, synthetic construct
  misc_feature 1..22: note = chemically synthesized
  source 1..22: mol_type = other DNA
tcttcccttattttcattgcag

SEQ ID NO: 13276 - DNA, 22 bp, synthetic construct
  misc_feature 1..22: note = chemically synthesized
  source 1..22: mol_type = other DNA
cttcccttattttcattgcagc

SEQ ID NO: 13277 - DNA, 22 bp, synthetic construct
  misc_feature 1..22: note = chemically synthesized
  source 1..22: mol_type = other DNA
ttcccttattttcattgcagct

SEQ ID NO: 13278 - DNA, 22 bp, synthetic construct
  misc_feature 1..22: note = chemically synthesized
  source 1..22: mol_type = other DNA
cccttattttcattgcagctgt

SEQ ID NO: 13279 - DNA, 22 bp, synthetic construct
  misc_feature 1..22: note = chemically synthesized
  source 1..22: mol_type = other DNA
ccttattttcattgcagctgtt

SEQ ID NO: 13280 - DNA, 22 bp, synthetic construct
  misc_feature 1..22: note = chemically synthesized
  source 1..22: mol_type = other DNA
attttcattgcagctgttcact

SEQ ID NO: 13281 - DNA, 22 bp, synthetic construct
  misc_feature 1..22: note = chemically synthesized
  source 1..22: mol_type = other DNA
ttttcattgcagctgttcactt

SEQ ID NO: 13282 - DNA, 22 bp, synthetic construct
  misc_feature 1..22: note = chemically synthesized
  source 1..22: mol_type = other DNA
tcattgcagctgttcactttat

SEQ ID NO: 13283 - DNA, 22 bp, synthetic construct
  misc_feature 1..22: note = chemically synthesized
  source 1..22: mol_type = other DNA
cattgcagctgttcactttatg

SEQ ID NO: 13284 - DNA, 22 bp, synthetic construct
  misc_feature 1..22: note = chemically synthesized
  source 1..22: mol_type = other DNA
attgcagctgttcactttatgg

SEQ ID NO: 13285 - DNA, 22 bp, synthetic construct
  misc_feature 1..22: note = chemically synthesized
  source 1..22: mol_type = other DNA
cagctgttcactttatggagtg

SEQ ID NO: 13286 - DNA, 22 bp, synthetic construct
  misc_feature 1..22: note = chemically synthesized
  source 1..22: mol_type = other DNA
ttcactttatggagtgttctag

SEQ ID NO: 13287 - DNA, 22 bp, synthetic construct
  misc_feature 1..22: note = chemically synthesized
  source 1..22: mol_type = other DNA
actttatggagtgttctagtcc

SEQ ID NO: 13288 - DNA, 22 bp, synthetic construct
  misc_feature 1..22: note = chemically synthesized
  source 1..22: mol_type = other DNA
tatggagtgttctagtcccttg

SEQ ID NO: 13289 - DNA, 22 bp, synthetic construct
  misc_feature 1..22: note = chemically synthesized
  source 1..22: mol_type = other DNA
atggagtgttctagtcccttga

SEQ ID NO: 13290 - DNA, 22 bp, synthetic construct
  misc_feature 1..22: note = chemically synthesized
  source 1..22: mol_type = other DNA
tggagtgttctagtcccttgac

SEQ ID NO: 13291 - DNA, 22 bp, synthetic construct
  misc_feature 1..22: note = chemically synthesized
  source 1..22: mol_type = other DNA
tagtcccttgacatccctgctt

SEQ ID NO: 13292 - DNA, 22 bp, synthetic construct
  misc_feature 1..22: note = chemically synthesized
  source 1..22: mol_type = other DNA
gtcccttgacatccctgctttt

SEQ ID NO: 13293 - DNA, 22 bp, synthetic construct
  misc_feature 1..22: note = chemically synthesized
  source 1..22: mol_type = other DNA
gacatccctgcttttcccttgc

SEQ ID NO: 13294 - DNA, 22 bp, synthetic construct
  misc_feature 1..22: note = chemically synthesized
  source 1..22: mol_type = other DNA
acatccctgcttttcccttgct

SEQ ID NO: 13295 - DNA, 22 bp, synthetic construct
  misc_feature 1..22: note = chemically synthesized
  source 1..22: mol_type = other DNA
cttttcccttgctctgcaagtt

SEQ ID NO: 13296 - DNA, 22 bp, synthetic construct
  misc_feature 1..22: note = chemically synthesized
  source 1..22: mol_type = other DNA
ttcccttgctctgcaagttcct

SEQ ID NO: 13297 - DNA, 22 bp, synthetic construct
  misc_feature 1..22: note = chemically synthesized
  source 1..22: mol_type = other DNA
tcccttgctctgcaagttcctt

SEQ ID NO: 13298 - DNA, 22 bp, synthetic construct
  misc_feature 1..22: note = chemically synthesized
  source 1..22: mol_type = other DNA
cccttgctctgcaagttccttt

SEQ ID NO: 13299 - DNA, 22 bp, synthetic construct
  misc_feature 1..22: note = chemically synthesized
  source 1..22: mol_type = other DNA
ccttgctctgcaagttcctttt

SEQ ID NO: 13300 - DNA, 22 bp, synthetic construct
  misc_feature 1..22: note = chemically synthesized
  source 1..22: mol_type = other DNA
gctctgcaagttccttttgggc

SEQ ID NO: 13301 - DNA, 22 bp, synthetic construct
  misc_feature 1..22: note = chemically synthesized
  source 1..22: mol_type = other DNA
ctctgcaagttccttttgggct

SEQ ID NO: 13302 - DNA, 22 bp, synthetic construct
  misc_feature 1..22: note = chemically synthesized
  source 1..22: mol_type = other DNA
tgcaagttccttttgggctcac

SEQ ID NO: 13303 - DNA, 22 bp, synthetic construct
  misc_feature 1..22: note = chemically synthesized
  source 1..22: mol_type = other DNA
caagttccttttgggctcactt

SEQ ID NO: 13304 - DNA, 22 bp, synthetic construct
  misc_feature 1..22: note = chemically synthesized
  source 1..22: mol_type = other DNA
cttttgggctcactttttttct

SEQ ID NO: 13305 - DNA, 22 bp, synthetic construct
  misc_feature 1..22: note = chemically synthesized
  source 1..22: mol_type = other DNA
ttgggctcactttttttctttg

SEQ ID NO: 13306 - DNA, 22 bp, synthetic construct
  misc_feature 1..22: note = chemically synthesized
  source 1..22: mol_type = other DNA
tgggctcactttttttctttga

SEQ ID NO: 13307 - DNA, 22 bp, synthetic construct
  misc_feature 1..22: note = chemically synthesized
  source 1..22: mol_type = other DNA
gggctcactttttttctttgaa

SEQ ID NO: 13308 - DNA, 22 bp, synthetic construct
  misc_feature 1..22: note = chemically synthesized
  source 1..22: mol_type = other DNA
ggctcactttttttctttgaat

SEQ ID NO: 13309 - DNA, 22 bp, synthetic construct
  misc_feature 1..22: note = chemically synthesized
  source 1..22: mol_type = other DNA
actttttttctttgaatttagc

SEQ ID NO: 13310 - DNA, 22 bp, synthetic construct
  misc_feature 1..22: note = chemically synthesized
  source 1..22: mol_type = other DNA
tttttctttgaatttagcctag

SEQ ID NO: 13311 - DNA, 22 bp, synthetic construct
  misc_feature 1..22: note = chemically synthesized
  source 1..22: mol_type = other DNA
ttttctttgaatttagcctaga

SEQ ID NO: 13312 - DNA, 22 bp, synthetic construct
  misc_feature 1..22: note = chemically synthesized
  source 1..22: mol_type = other DNA
tttctttgaatttagcctagac

SEQ ID NO: 13313 - DNA, 22 bp, synthetic construct
  misc_feature 1..22: note = chemically synthesized
  source 1..22: mol_type = other DNA
ttctttgaatttagcctagact

SEQ ID NO: 13314 - DNA, 22 bp, synthetic construct
  misc_feature 1..22: note = chemically synthesized
  source 1..22: mol_type = other DNA
tctttgaatttagcctagactt

SEQ ID NO: 13315 - DNA, 22 bp, synthetic construct
  misc_feature 1..22: note = chemically synthesized
  source 1..22: mol_type = other DNA
ctttgaatttagcctagacttt

SEQ ID NO: 13316 - DNA, 22 bp, synthetic construct
  misc_feature 1..22: note = chemically synthesized
  source 1..22: mol_type = other DNA
tttgaatttagcctagactttt

SEQ ID NO: 13317 - DNA, 22 bp, synthetic construct
  misc_feature 1..22: note = chemically synthesized
  source 1..22: mol_type = other DNA
tgaatttagcctagactttttc

SEQ ID NO: 13318 - DNA, 22 bp, synthetic construct
  misc_feature 1..22: note = chemically synthesized
  source 1..22: mol_type = other DNA
gaatttagcctagactttttct

SEQ ID NO: 13319 - DNA, 22 bp, synthetic construct
  misc_feature 1..22: note = chemically synthesized
  source 1..22: mol_type = other DNA
aatttagcctagactttttctc

SEQ ID NO: 13320 - DNA, 22 bp, synthetic construct
  misc_feature 1..22: note = chemically synthesized
  source 1..22: mol_type = other DNA
agcctagactttttctcttcaa

SEQ ID NO: 13321 - DNA, 22 bp, synthetic construct
  misc_feature 1..22: note = chemically synthesized
  source 1..22: mol_type = other DNA
gcctagactttttctcttcaac

SEQ ID NO: 13322 - DNA, 22 bp, synthetic construct
  misc_feature 1..22: note = chemically synthesized
  source 1..22: mol_type = other DNA
gactttttctcttcaactcttt

SEQ ID NO: 13323 - DNA, 22 bp, synthetic construct
  misc_feature 1..22: note = chemically synthesized
  source 1..22: mol_type = other DNA
tttctcttcaactctttttttt

SEQ ID NO: 13324 - DNA, 22 bp, synthetic construct
  misc_feature 1..22: note = chemically synthesized
  source 1..22: mol_type = other DNA
ttctcttcaactcttttttttt

SEQ ID NO: 13325 - DNA, 22 bp, synthetic construct
  misc_feature 1..22: note = chemically synthesized
  source 1..22: mol_type = other DNA
tctcttcaactctttttttttt

SEQ ID NO: 13326 - DNA, 22 bp, synthetic construct
  misc_feature 1..22: note = chemically synthesized
  source 1..22: mol_type = other DNA
ctcttcaactcttttttttttg

SEQ ID NO: 13327 - DNA, 22 bp, synthetic construct
  misc_feature 1..22: note = chemically synthesized
  source 1..22: mol_type = other DNA
tcttcaactcttttttttttga

SEQ ID NO: 13328 - DNA, 22 bp, synthetic construct
  misc_feature 1..22: note = chemically synthesized
  source 1..22: mol_type = other DNA
ttcaactcttttttttttgaca

SEQ ID NO: 13329 - DNA, 22 bp, synthetic construct
  misc_feature 1..22: note = chemically synthesized
  source 1..22: mol_type = other DNA
caactcttttttttttgacaga

SEQ ID NO: 13330 - DNA, 22 bp, synthetic construct
  misc_feature 1..22: note = chemically synthesized
  source 1..22: mol_type = other DNA
aactcttttttttttgacagag

SEQ ID NO: 13331 - DNA, 22 bp, synthetic construct
  misc_feature 1..22: note = chemically synthesized
  source 1..22: mol_type = other DNA
ttttttttttgacagagtcttg

SEQ ID NO: 13332 - DNA, 22 bp, synthetic construct
  misc_feature 1..22: note = chemically synthesized
  source 1..22: mol_type = other DNA
ttttttttgacagagtcttgct

SEQ ID NO: 13333 - DNA, 22 bp, synthetic construct
  misc_feature 1..22: note = chemically synthesized
  source 1..22: mol_type = other DNA
tttttttgacagagtcttgctc

SEQ ID NO: 13334 - DNA, 22 bp, synthetic construct
  misc_feature 1..22: note = chemically synthesized
  source 1..22: mol_type = other DNA
ttttttgacagagtcttgctct

SEQ ID NO: 13335 - DNA, 22 bp, synthetic construct
  misc_feature 1..22: note = chemically synthesized
  source 1..22: mol_type = other DNA
tttttgacagagtcttgctctg

SEQ ID NO: 13336 - DNA, 22 bp, synthetic construct
  misc_feature 1..22: note = chemically synthesized
  source 1..22: mol_type = other DNA
ttttgacagagtcttgctctgt

SEQ ID NO: 13337 - DNA, 22 bp, synthetic construct
  misc_feature 1..22: note = chemically synthesized
  source 1..22: mol_type = other DNA
tttgacagagtcttgctctgtc

SEQ ID NO: 13338 - DNA, 22 bp, synthetic construct
  misc_feature 1..22: note = chemically synthesized
  source 1..22: mol_type = other DNA
ttgacagagtcttgctctgtcg

SEQ ID NO: 13339 - DNA, 22 bp, synthetic construct
  misc_feature 1..22: note = chemically synthesized
  source 1..22: mol_type = other DNA
tgacagagtcttgctctgtcgc

SEQ ID NO: 13340 - DNA, 22 bp, synthetic construct
  misc_feature 1..22: note = chemically synthesized
  source 1..22: mol_type = other DNA
gacagagtcttgctctgtcgcc

SEQ ID NO: 13341 - DNA, 22 bp, synthetic construct
  misc_feature 1..22: note = chemically synthesized
  source 1..22: mol_type = other DNA
acagagtcttgctctgtcgccc

SEQ ID NO: 13342 - DNA, 22 bp, synthetic construct
  misc_feature 1..22: note = chemically synthesized
  source 1..22: mol_type = other DNA
gctctgtcgcccaggctggagt

SEQ ID NO: 13343 - DNA, 22 bp, synthetic construct
  misc_feature 1..22: note = chemically synthesized
  source 1..22: mol_type = other DNA
ctctgtcgcccaggctggagtg

SEQ ID NO: 13344 - DNA, 22 bp, synthetic construct
  misc_feature 1..22: note = chemically synthesized
  source 1..22: mol_type = other DNA
tgtcgcccaggctggagtgcag

SEQ ID NO: 13345 - DNA, 22 bp, synthetic construct
  misc_feature 1..22: note = chemically synthesized
  source 1..22: mol_type = other DNA
tcgcccaggctggagtgcagtg

SEQ ID NO: 13346 - DNA, 22 bp, synthetic construct
  misc_feature 1..22: note = chemically synthesized
  source 1..22: mol_type = other DNA
gagtgcagtggtgcgatctcag

SEQ ID NO: 13347 - DNA, 22 bp, synthetic construct
  misc_feature 1..22: note = chemically synthesized
  source 1..22: mol_type = other DNA
agctcactgcaacctccatctc

SEQ ID NO: 13348 - DNA, 22 bp, synthetic construct
  misc_feature 1..22: note = chemically synthesized
  source 1..22: mol_type = other DNA
actgcaacctccatctcccagg

SEQ ID NO: 13349 - DNA, 22 bp, synthetic construct
  misc_feature 1..22: note = chemically synthesized
  source 1..22: mol_type = other DNA
caacctccatctcccaggttca

SEQ ID NO: 13350 - DNA, 22 bp, synthetic construct
  misc_feature 1..22: note = chemically synthesized
  source 1..22: mol_type = other DNA
catctcccaggttcaagctatt

SEQ ID NO: 13351 - DNA, 22 bp, synthetic construct
  misc_feature 1..22: note = chemically synthesized
  source 1..22: mol_type = other DNA
ccaggttcaagctattctcctg

SEQ ID NO: 13352 - DNA, 22 bp, synthetic construct
  misc_feature 1..22: note = chemically synthesized
  source 1..22: mol_type = other DNA
aagctattctcctgcctcagcc

SEQ ID NO: 13353 - DNA, 22 bp, synthetic construct
  misc_feature 1..22: note = chemically synthesized
  source 1..22: mol_type = other DNA
ttctcctgcctcagcctcccaa

SEQ ID NO: 13354 - DNA, 22 bp, synthetic construct
  misc_feature 1..22: note = chemically synthesized
  source 1..22: mol_type = other DNA
tcctgcctcagcctcccaagta

SEQ ID NO: 13355 - DNA, 22 bp, synthetic construct
  misc_feature 1..22: note = chemically synthesized
  source 1..22: mol_type = other DNA
ctgcctcagcctcccaagtagc

SEQ ID NO: 13356 - DNA, 22 bp, synthetic construct
  misc_feature 1..22: note = chemically synthesized
  source 1..22: mol_type = other DNA
cctcagcctcccaagtagctgg

SEQ ID NO: 13357 - DNA, 22 bp, synthetic construct
  misc_feature 1..22: note = chemically synthesized
  source 1..22: mol_type = other DNA
agcctcccaagtagctgggatt

SEQ ID NO: 13358 - DNA, 22 bp, synthetic construct
  misc_feature 1..22: note = chemically synthesized
  source 1..22: mol_type = other DNA
ccaagtagctgggattacaggc

SEQ ID NO: 13359 - DNA, 22 bp, synthetic construct
  misc_feature 1..22: note = chemically synthesized
  source 1..22: mol_type = other DNA
ggattacaggcacccgccacca

SEQ ID NO: 13360 - DNA, 22 bp, synthetic construct
  misc_feature 1..22: note = chemically synthesized
  source 1..22: mol_type = other DNA
caggcacccgccaccatgccca

SEQ ID NO: 13361 - DNA, 22 bp, synthetic construct
  misc_feature 1..22: note = chemically synthesized
  source 1..22: mol_type = other DNA
atttttgtatttttagtaaagc

SEQ ID NO: 13362 - DNA, 22 bp, synthetic construct
  misc_feature 1..22: note = chemically synthesized
  source 1..22: mol_type = other DNA
ttgtatttttagtaaagccggg

SEQ ID NO: 13363 - DNA, 22 bp, synthetic construct
  misc_feature 1..22: note = chemically synthesized
  source 1..22: mol_type = other DNA
tgtatttttagtaaagccgggg

SEQ ID NO: 13364 - DNA, 22 bp, synthetic construct
  misc_feature 1..22: note = chemically synthesized
  source 1..22: mol_type = other DNA
gtatttttagtaaagccggggt

SEQ ID NO: 13365 - DNA, 22 bp, synthetic construct
  misc_feature 1..22: note = chemically synthesized
  source 1..22: mol_type = other DNA
tatttttagtaaagccggggtt

SEQ ID NO: 13366 - DNA, 22 bp, synthetic construct
  misc_feature 1..22: note = chemically synthesized
  source 1..22: mol_type = other DNA
ttagtaaagccggggtttcacc

SEQ ID NO: 13367 - DNA, 22 bp, synthetic construct
  misc_feature 1..22: note = chemically synthesized
  source 1..22: mol_type = other DNA
tagtaaagccggggtttcacca

SEQ ID NO: 13368 - DNA, 22 bp, synthetic construct
  misc_feature 1..22: note = chemically synthesized
  source 1..22: mol_type = other DNA
agtaaagccggggtttcaccat

SEQ ID NO: 13369 - DNA, 22 bp, synthetic construct
  misc_feature 1..22: note = chemically synthesized
  source 1..22: mol_type = other DNA
gtaaagccggggtttcaccatt

SEQ ID NO: 13370 - DNA, 22 bp, synthetic construct
  misc_feature 1..22: note = chemically synthesized
  source 1..22: mol_type = other DNA
caccatttcaccttgttggcca

SEQ ID NO: 13371 - DNA, 22 bp, synthetic construct
  misc_feature 1..22: note = chemically synthesized
  source 1..22: mol_type = other DNA
accatttcaccttgttggccag

SEQ ID NO: 13372 - DNA, 22 bp, synthetic construct
  misc_feature 1..22: note = chemically synthesized
  source 1..22: mol_type = other DNA
caccttgttggccaggctggtg

SEQ ID NO: 13373 - DNA, 22 bp, synthetic construct
  misc_feature 1..22: note = chemically synthesized
  source 1..22: mol_type = other DNA
accttgttggccaggctggtgt

SEQ ID NO: 13374 - DNA, 22 bp, synthetic construct
  misc_feature 1..22: note = chemically synthesized
  source 1..22: mol_type = other DNA
gttggccaggctggtgtcgaac

SEQ ID NO: 13375 - DNA, 22 bp, synthetic construct
  misc_feature 1..22: note = chemically synthesized
  source 1..22: mol_type = other DNA
ttggccaggctggtgtcgaact

SEQ ID NO: 13376 - DNA, 22 bp, synthetic construct
  misc_feature 1..22: note = chemically synthesized
  source 1..22: mol_type = other DNA
gccaggctggtgtcgaactcct

SEQ ID NO: 13377 - DNA, 22 bp, synthetic construct
  misc_feature 1..22: note = chemically synthesized
  source 1..22: mol_type = other DNA
gtgtcgaactcctgacctcaag

SEQ ID NO: 13378 - DNA, 22 bp, synthetic construct
  misc_feature 1..22: note = chemically synthesized
  source 1..22: mol_type = other DNA
ctgacctcaagtgatctgcctg

SEQ ID NO: 13379 - DNA, 22 bp, synthetic construct
  misc_feature 1..22: note = chemically synthesized
  source 1..22: mol_type = other DNA
acctcaagtgatctgcctgcct

SEQ ID NO: 13380 - DNA, 22 bp, synthetic construct
  misc_feature 1..22: note = chemically synthesized
  source 1..22: mol_type = other DNA
aagtgatctgcctgcctgggcc

SEQ ID NO: 13381 - DNA, 22 bp, synthetic construct
  misc_feature 1..22: note = chemically synthesized
  source 1..22: mol_type = other DNA
cctgcctgggcctctgaaagtg

SEQ ID NO: 13382 - DNA, 22 bp, synthetic construct
  misc_feature 1..22: note = chemically synthesized
  source 1..22: mol_type = other DNA
cctgggcctctgaaagtgctgg

SEQ ID NO: 13383 - DNA, 22 bp, synthetic construct
  misc_feature 1..22: note = chemically synthesized
  source 1..22: mol_type = other DNA
ggcctctgaaagtgctgggatt

SEQ ID NO: 13384 - DNA, 22 bp, synthetic construct
  misc_feature 1..22: note = chemically synthesized
  source 1..22: mol_type = other DNA
tgaaagtgctgggattataggt

SEQ ID NO: 13385 - DNA, 22 bp, synthetic construct
  misc_feature 1..22: note = chemically synthesized
  source 1..22: mol_type = other DNA
aaagtgctgggattataggtgt

SEQ ID NO: 13386 - DNA, 22 bp, synthetic construct
  misc_feature 1..22: note = chemically synthesized
  source 1..22: mol_type = other DNA
ggattataggtgtgagccacca

SEQ ID NO: 13387 - DNA, 22 bp, synthetic construct
  misc_feature 1..22: note = chemically synthesized
  source 1..22: mol_type = other DNA
taggtgtgagccaccatgccag

SEQ ID NO: 13388 - DNA, 22 bp, synthetic construct
  misc_feature 1..22: note = chemically synthesized
  source 1..22: mol_type = other DNA
tcttcaactcttcattggccat

SEQ ID NO: 13389 - DNA, 22 bp, synthetic construct
  misc_feature 1..22: note = chemically synthesized
  source 1..22: mol_type = other DNA
ttcaactcttcattggccatat

SEQ ID NO: 13390 - DNA, 22 bp, synthetic construct
  misc_feature 1..22: note = chemically synthesized
  source 1..22: mol_type = other DNA
caactcttcattggccatattt

SEQ ID NO: 13391 - DNA, 22 bp, synthetic construct
  misc_feature 1..22: note = chemically synthesized
  source 1..22: mol_type = other DNA
aactcttcattggccatatttc

SEQ ID NO: 13392 - DNA, 22 bp, synthetic construct
  misc_feature 1..22: note = chemically synthesized
  source 1..22: mol_type = other DNA
ttcattggccatatttctcaat

SEQ ID NO: 13393 - DNA, 22 bp, synthetic construct
  misc_feature 1..22: note = chemically synthesized
  source 1..22: mol_type = other DNA
cattggccatatttctcaattt

SEQ ID NO: 13394 - DNA, 22 bp, synthetic construct
  misc_feature 1..22: note = chemically synthesized
  source 1..22: mol_type = other DNA
attggccatatttctcaatttc

SEQ ID NO: 13395 - DNA, 22 bp, synthetic construct
  misc_feature 1..22: note = chemically synthesized
  source 1..22: mol_type = other DNA
gccatatttctcaatttccttc

SEQ ID NO: 13396 - DNA, 22 bp, synthetic construct
  misc_feature 1..22: note = chemically synthesized
  source 1..22: mol_type = other DNA
ctcaatttccttcactcgtttg

SEQ ID NO: 13397 - DNA, 22 bp, synthetic construct
  misc_feature 1..22: note = chemically synthesized
  source 1..22: mol_type = other DNA
tcaatttccttcactcgtttgc

SEQ ID NO: 13398 - DNA, 22 bp, synthetic construct
  misc_feature 1..22: note = chemically synthesized
  source 1..22: mol_type = other DNA
aatttccttcactcgtttgcaa

SEQ ID NO: 13399 - DNA, 22 bp, synthetic construct
  misc_feature 1..22: note = chemically synthesized
  source 1..22: mol_type = other DNA
ccttcactcgtttgcaatgctg

SEQ ID NO: 13400 - DNA, 22 bp, synthetic construct
  misc_feature 1..22: note = chemically synthesized
  source 1..22: mol_type = other DNA
cttcactcgtttgcaatgctgt

SEQ ID NO: 13401 - DNA, 22 bp, synthetic construct
  misc_feature 1..22: note = chemically synthesized
  source 1..22: mol_type = other DNA
cactcgtttgcaatgctgtgcc

SEQ ID NO: 13402 - DNA, 22 bp, synthetic construct
  misc_feature 1..22: note = chemically synthesized
  source 1..22: mol_type = other DNA
actcgtttgcaatgctgtgccc

SEQ ID NO: 13403 - DNA, 22 bp, synthetic construct
  misc_feature 1..22: note = chemically synthesized
  source 1..22: mol_type = other DNA
gtttgcaatgctgtgcccaccc

SEQ ID NO: 13404 - DNA, 22 bp, synthetic construct
  misc_feature 1..22: note = chemically synthesized
  source 1..22: mol_type = other DNA
gcaatgctgtgcccaccctgca

SEQ ID NO: 13405 - DNA, 22 bp, synthetic construct
  misc_feature 1..22: note = chemically synthesized
  source 1..22: mol_type = other DNA
caatgctgtgcccaccctgcaa

SEQ ID NO: 13406 - DNA, 22 bp, synthetic construct
  misc_feature 1..22: note = chemically synthesized
  source 1..22: mol_type = other DNA
tgcccaccctgcaatcctagcc

SEQ ID NO: 13407 - DNA, 22 bp, synthetic construct
  misc_feature 1..22: note = chemically synthesized
  source 1..22: mol_type = other DNA
caatcctagcccctaaattgga

SEQ ID NO: 13408 - DNA, 22 bp, synthetic construct
  misc_feature 1..22: note = chemically synthesized
  source 1..22: mol_type = other DNA
gcccctaaattggagcagccat

SEQ ID NO: 13409 - DNA, 22 bp, synthetic construct
  misc_feature 1..22: note = chemically synthesized
  source 1..22: mol_type = other DNA
aattggagcagccatctgcctt

SEQ ID NO: 13410 - DNA, 22 bp, synthetic construct
  misc_feature 1..22: note = chemically synthesized
  source 1..22: mol_type = other DNA
gagcagccatctgccttcatcc

SEQ ID NO: 13411 - DNA, 22 bp, synthetic construct
  misc_feature 1..22: note = chemically synthesized
  source 1..22: mol_type = other DNA
ccttcatccttctcttcccaga

SEQ ID NO: 13412 - DNA, 22 bp, synthetic construct
  misc_feature 1..22: note = chemically synthesized
  source 1..22: mol_type = other DNA
catccttctcttcccagacagc

SEQ ID NO: 13413 - DNA, 22 bp, synthetic construct
  misc_feature 1..22: note = chemically synthesized
  source 1..22: mol_type = other DNA
atccttctcttcccagacagcc

SEQ ID NO: 13414 - DNA, 22 bp, synthetic construct
  misc_feature 1..22: note = chemically synthesized
  source 1..22: mol_type = other DNA
ctcttcccagacagccgaggac

SEQ ID NO: 13415 - DNA, 22 bp, synthetic construct
  misc_feature 1..22: note = chemically synthesized
  source 1..22: mol_type = other DNA
tcttcccagacagccgaggact

SEQ ID NO: 13416 - DNA, 22 bp, synthetic construct
  misc_feature 1..22: note = chemically synthesized
  source 1..22: mol_type = other DNA
ttcccagacagccgaggactgt

SEQ ID NO: 13417 - DNA, 22 bp, synthetic construct
  misc_feature 1..22: note = chemically synthesized
  source 1..22: mol_type = other DNA
cccagacagccgaggactgtga

SEQ ID NO: 13418 - DNA, 22 bp, synthetic construct
  misc_feature 1..22: note = chemically synthesized
  source 1..22: mol_type = other DNA
ccagacagccgaggactgtgaa

SEQ ID NO: 13419 - DNA, 22 bp, synthetic construct
  misc_feature 1..22: note = chemically synthesized
  source 1..22: mol_type = other DNA
tgaaggaaaaaaatcaccaaaa

SEQ ID NO: 13420 - DNA, 22 bp, synthetic construct
  misc_feature 1..22: note = chemically synthesized
  source 1..22: mol_type = other DNA
atgcctcacagcctccacccac

SEQ ID NO: 13421 - DNA, 22 bp, synthetic construct
  misc_feature 1..22: note = chemically synthesized
  source 1..22: mol_type = other DNA
acagcctccacccacctctctg

SEQ ID NO: 13422 - DNA, 22 bp, synthetic construct
  misc_feature 1..22: note = chemically synthesized
  source 1..22: mol_type = other DNA
cacccacctctctgctcagcaa

SEQ ID NO: 13423 - DNA, 22 bp, synthetic construct
  misc_feature 1..22: note = chemically synthesized
  source 1..22: mol_type = other DNA
tctgctcagcaactcatttact

SEQ ID NO: 13424 - DNA, 22 bp, synthetic construct
  misc_feature 1..22: note = chemically synthesized
  source 1..22: mol_type = other DNA
tgctcagcaactcatttacttg

SEQ ID NO: 13425 - DNA, 22 bp, synthetic construct
  misc_feature 1..22: note = chemically synthesized
  source 1..22: mol_type = other DNA
ctcagcaactcatttacttggc

SEQ ID NO: 13426 - DNA, 22 bp, synthetic construct
  misc_feature 1..22: note = chemically synthesized
  source 1..22: mol_type = other DNA
agcaactcatttacttggccct

SEQ ID NO: 13427 - DNA, 22 bp, synthetic construct
  misc_feature 1..22: note = chemically synthesized
  source 1..22: mol_type = other DNA
atttacttggccctggacactc

SEQ ID NO: 13428 - DNA, 22 bp, synthetic construct
  misc_feature 1..22: note = chemically synthesized
  source 1..22: mol_type = other DNA
acttggccctggacactcctaa

SEQ ID NO: 13429 - DNA, 22 bp, synthetic construct
  misc_feature 1..22: note = chemically synthesized
  source 1..22: mol_type = other DNA
cttggccctggacactcctaaa

SEQ ID NO: 13430 - DNA, 22 bp, synthetic construct
  misc_feature 1..22: note = chemically synthesized
  source 1..22: mol_type = other DNA
ggccctggacactcctaaatag

SEQ ID NO: 13431 - DNA, 22 bp, synthetic construct
  misc_feature 1..22: note = chemically synthesized
  source 1..22: mol_type = other DNA
gccctggacactcctaaatagc

SEQ ID NO: 13432 - DNA, 22 bp, synthetic construct
  misc_feature 1..22: note = chemically synthesized
  source 1..22: mol_type = other DNA
gacactcctaaatagcatccat

SEQ ID NO: 13433 - DNA, 22 bp, synthetic construct
  misc_feature 1..22: note = chemically synthesized
  source 1..22: mol_type = other DNA
ctaaatagcatccatgcctgca

SEQ ID NO: 13434 - DNA, 22 bp, synthetic construct
  misc_feature 1..22: note = chemically synthesized
  source 1..22: mol_type = other DNA
aatagcatccatgcctgcatcc

SEQ ID NO: 13435 - DNA, 22 bp, synthetic construct
  misc_feature 1..22: note = chemically synthesized
  source 1..22: mol_type = other DNA
catccatttacagtcgttcctc

SEQ ID NO: 13436 - DNA, 22 bp, synthetic construct
  misc_feature 1..22: note = chemically synthesized
  source 1..22: mol_type = other DNA
acagtcgttcctcagtatccat

SEQ ID NO: 13437 - DNA, 22 bp, synthetic construct
  misc_feature 1..22: note = chemically synthesized
  source 1..22: mol_type = other DNA
cagtcgttcctcagtatccatg

SEQ ID NO: 13438 - DNA, 22 bp, synthetic construct
  misc_feature 1..22: note = chemically synthesized
  source 1..22: mol_type = other DNA
ctcagtatccatggaaaattgg

SEQ ID NO: 13439 - DNA, 22 bp, synthetic construct
  misc_feature 1..22: note = chemically synthesized
  source 1..22: mol_type = other DNA
agtatccatggaaaattggtgg

SEQ ID NO: 13440 - DNA, 22 bp, synthetic construct
  misc_feature 1..22: note = chemically synthesized
  source 1..22: mol_type = other DNA
gtggcaagaccccctgcaaata

SEQ ID NO: 13441 - DNA, 22 bp, synthetic construct
  misc_feature 1..22: note = chemically synthesized
  source 1..22: mol_type = other DNA
caaatatcaagatctgtggatg

SEQ ID NO: 13442 - DNA, 22 bp, synthetic construct
  misc_feature 1..22: note = chemically synthesized
  source 1..22: mol_type = other DNA
tggatgctcaagtctccgatat

SEQ ID NO: 13443 - DNA, 22 bp, synthetic construct
  misc_feature 1..22: note = chemically synthesized
  source 1..22: mol_type = other DNA
aagtctccgatataaaaatggc

SEQ ID NO: 13444 - DNA, 22 bp, synthetic construct
  misc_feature 1..22: note = chemically synthesized
  source 1..22: mol_type = other DNA
cgatataaaaatggcttactat

SEQ ID NO: 13445 - DNA, 22 bp, synthetic construct
  misc_feature 1..22: note = chemically synthesized
  source 1..22: mol_type = other DNA
actatttgcatataacctaaac

SEQ ID NO: 13446 - DNA, 22 bp, synthetic construct
  misc_feature 1..22: note = chemically synthesized
  source 1..22: mol_type = other DNA
ctatttgcatataacctaaaca

SEQ ID NO: 13447 - DNA, 22 bp, synthetic construct
  misc_feature 1..22: note = chemically synthesized
  source 1..22: mol_type = other DNA
tttgcatataacctaaacacat

SEQ ID NO: 13448 - DNA, 22 bp, synthetic construct
  misc_feature 1..22: note = chemically synthesized
  source 1..22: mol_type = other DNA
gcatataacctaaacacatcct

SEQ ID NO: 13449 - DNA, 22 bp, synthetic construct
  misc_feature 1..22: note = chemically synthesized
  source 1..22: mol_type = other DNA
catataacctaaacacatcctc

SEQ ID NO: 13450 - DNA, 22 bp, synthetic construct
  misc_feature 1..22: note = chemically synthesized
  source 1..22: mol_type = other DNA
aacacatcctcctttgtacttt

SEQ ID NO: 13451 - DNA, 22 bp, synthetic construct
  misc_feature 1..22: note = chemically synthesized
  source 1..22: mol_type = other DNA
ctttgtactttaaatcatctct

SEQ ID NO: 13452 - DNA, 22 bp, synthetic construct
  misc_feature 1..22: note = chemically synthesized
  source 1..22: mol_type = other DNA
tgtactttaaatcatctctagg

SEQ ID NO: 13453 - DNA, 22 bp, synthetic construct
  misc_feature 1..22: note = chemically synthesized
  source 1..22: mol_type = other DNA
gtactttaaatcatctctaggt

SEQ ID NO: 13454 - DNA, 22 bp, synthetic construct
  misc_feature 1..22: note = chemically synthesized
  source 1..22: mol_type = other DNA
tactttaaatcatctctaggtt

SEQ ID NO: 13455 - DNA, 22 bp, synthetic construct
  misc_feature 1..22: note = chemically synthesized
  source 1..22: mol_type = other DNA
taaatcatctctaggtttctct

SEQ ID NO: 13456 - DNA, 22 bp, synthetic construct
  misc_feature 1..22: note = chemically synthesized
  source 1..22: mol_type = other DNA
aaatcatctctaggtttctctt

SEQ ID NO: 13457 - DNA, 22 bp, synthetic construct
  misc_feature 1..22: note = chemically synthesized
  source 1..22: mol_type = other DNA
aatcatctctaggtttctctta

SEQ ID NO: 13458 - DNA, 22 bp, synthetic construct
  misc_feature 1..22: note = chemically synthesized
  source 1..22: mol_type = other DNA
taggtttctcttaatagctaat

SEQ ID NO: 13459 - DNA, 22 bp, synthetic construct
  misc_feature 1..22: note = chemically synthesized
  source 1..22: mol_type = other DNA
ggtttctcttaatagctaatac

SEQ ID NO: 13460 - DNA, 22 bp, synthetic construct
  misc_feature 1..22: note = chemically synthesized
  source 1..22: mol_type = other DNA
ctcttaatagctaatacaatgt

SEQ ID NO: 13461 - DNA, 22 bp, synthetic construct
  misc_feature 1..22: note = chemically synthesized
  source 1..22: mol_type = other DNA
tcttaatagctaatacaatgta

SEQ ID NO: 13462 - DNA, 22 bp, synthetic construct
  misc_feature 1..22: note = chemically synthesized
  source 1..22: mol_type = other DNA
ttaatagctaatacaatgtaaa

SEQ ID NO: 13463 - DNA, 22 bp, synthetic construct
  misc_feature 1..22: note = chemically synthesized
  source 1..22: mol_type = other DNA
aatagctaatacaatgtaaatg

SEQ ID NO: 13464 - DNA, 22 bp, synthetic construct
  misc_feature 1..22: note = chemically synthesized
  source 1..22: mol_type = other DNA
atagctaatacaatgtaaatgc

SEQ ID NO: 13465 - DNA, 22 bp, synthetic construct
  misc_feature 1..22: note = chemically synthesized
  source 1..22: mol_type = other DNA
atacaatgtaaatgctatgtaa

SEQ ID NO: 13466 - DNA, 22 bp, synthetic construct
  misc_feature 1..22: note = chemically synthesized
  source 1..22: mol_type = other DNA
tgtaaatagttgttatgctgta

SEQ ID NO: 13467 - DNA, 22 bp, synthetic construct
  misc_feature 1..22: note = chemically synthesized
  source 1..22: mol_type = other DNA
ttatgctgtattgtttagggaa

SEQ ID NO: 13468 - DNA, 22 bp, synthetic construct
  misc_feature 1..22: note = chemically synthesized
  source 1..22: mol_type = other DNA
tgctgtattgtttagggaataa

SEQ ID NO: 13469 - DNA, 22 bp, synthetic construct
  misc_feature 1..22: note = chemically synthesized
  source 1..22: mol_type = other DNA
tattgtttagggaataatgaaa

SEQ ID NO: 13470 - DNA, 22 bp, synthetic construct
  misc_feature 1..22: note = chemically synthesized
  source 1..22: mol_type = other DNA
tttagggaataatgaaagataa

SEQ ID NO: 13471 - DNA, 22 bp, synthetic construct
  misc_feature 1..22: note = chemically synthesized
  source 1..22: mol_type = other DNA
agggaataatgaaagataaaag

SEQ ID NO: 13472 - DNA, 22 bp, synthetic construct
  misc_feature 1..22: note = chemically synthesized
  source 1..22: mol_type = other DNA
gggaataatgaaagataaaaga

SEQ ID NO: 13473 - DNA, 22 bp, synthetic construct
  misc_feature 1..22: note = chemically synthesized
  source 1..22: mol_type = other DNA
tacatgttcagtagagatgcaa

SEQ ID NO: 13474 - DNA, 22 bp, synthetic construct
  misc_feature 1..22: note = chemically synthesized
  source 1..22: mol_type = other DNA
agtagagatgcaaccatccatt

SEQ ID NO: 13475 - DNA, 22 bp, synthetic construct
  misc_feature 1..22: note = chemically synthesized
  source 1..22: mol_type = other DNA
ttttcttgaatatttttgatct

SEQ ID NO: 13476 - DNA, 22 bp, synthetic construct
  misc_feature 1..22: note = chemically synthesized
  source 1..22: mol_type = other DNA
tttcttgaatatttttgatctg

SEQ ID NO: 13477 - DNA, 22 bp, synthetic construct
  misc_feature 1..22: note = chemically synthesized
  source 1..22: mol_type = other DNA
ttcttgaatatttttgatctgc

SEQ ID NO: 13478 - DNA, 22 bp, synthetic construct
  misc_feature 1..22: note = chemically synthesized
  source 1..22: mol_type = other DNA
tcttgaatatttttgatctgca

SEQ ID NO: 13479 - DNA, 22 bp, synthetic construct
  misc_feature 1..22: note = chemically synthesized
  source 1..22: mol_type = other DNA
cttgaatatttttgatctgcag

SEQ ID NO: 13480 - DNA, 22 bp, synthetic construct
  misc_feature 1..22: note = chemically synthesized
  source 1..22: mol_type = other DNA
ttgaatatttttgatctgcagt

SEQ ID NO: 13481 - DNA, 22 bp, synthetic construct
  misc_feature 1..22: note = chemically synthesized
  source 1..22: mol_type = other DNA
gaatatttttgatctgcagtta

SEQ ID NO: 13482 - DNA, 22 bp, synthetic construct
  misc_feature 1..22: note = chemically synthesized
  source 1..22: mol_type = other DNA
aatatttttgatctgcagttaa

SEQ ID NO: 13483 - DNA, 22 bp, synthetic construct
  misc_feature 1..22: note = chemically synthesized
  source 1..22: mol_type = other DNA
ttgatctgcagttaattgaatc

SEQ ID NO: 13484 - DNA, 22 bp, synthetic construct
  misc_feature 1..22: note = chemically synthesized
  source 1..22: mol_type = other DNA
tgatctgcagttaattgaatct

SEQ ID NO: 13485 - DNA, 22 bp, synthetic construct
  misc_feature 1..22: note = chemically synthesized
  source 1..22: mol_type = other DNA
gatctgcagttaattgaatctg

SEQ ID NO: 13486 - DNA, 22 bp, synthetic construct
  misc_feature 1..22: note = chemically synthesized
  source 1..22: mol_type = other DNA
atctgcagttaattgaatctgt

SEQ ID NO: 13487 - DNA, 22 bp, synthetic construct
  misc_feature 1..22: note = chemically synthesized
  source 1..22: mol_type = other DNA
cagttaattgaatctgtggctg

SEQ ID NO: 13488 - DNA, 22 bp, synthetic construct
  misc_feature 1..22: note = chemically synthesized
  source 1..22: mol_type = other DNA
attgaatctgtggctgtggaac

SEQ ID NO: 13489 - DNA, 22 bp, synthetic construct
  misc_feature 1..22: note = chemically synthesized
  source 1..22: mol_type = other DNA
aatctgtggctgtggaactcac

SEQ ID NO: 13490 - DNA, 22 bp, synthetic construct
  misc_feature 1..22: note = chemically synthesized
  source 1..22: mol_type = other DNA
tggctgtggaactcacaaggag

SEQ ID NO: 13491 - DNA, 22 bp, synthetic construct
  misc_feature 1..22: note = chemically synthesized
  source 1..22: mol_type = other DNA
tggaactcacaaggagagctga

SEQ ID NO: 13492 - DNA, 22 bp, synthetic construct
  misc_feature 1..22: note = chemically synthesized
  source 1..22: mol_type = other DNA
acaaggagagctgactgtacag

SEQ ID NO: 13493 - DNA, 22 bp, synthetic construct
  misc_feature 1..22: note = chemically synthesized
  source 1..22: mol_type = other DNA
actgtacagtgtggttgagtga

SEQ ID NO: 13494 - DNA, 22 bp, synthetic construct
  misc_feature 1..22: note = chemically synthesized
  source 1..22: mol_type = other DNA
tacagtgtggttgagtgaaaaa

SEQ ID NO: 13495 - DNA, 22 bp, synthetic construct
  misc_feature 1..22: note = chemically synthesized
  source 1..22: mol_type = other DNA
agtgaaaaaacagactttagaa

SEQ ID NO: 13496 - DNA, 22 bp, synthetic construct
  misc_feature 1..22: note = chemically synthesized
  source 1..22: mol_type = other DNA
tagaatcagatcagacagaaat

SEQ ID NO: 13497 - DNA, 22 bp, synthetic construct
  misc_feature 1..22: note = chemically synthesized
  source 1..22: mol_type = other DNA
agaatcagatcagacagaaata

SEQ ID NO: 13498 - DNA, 22 bp, synthetic construct
  misc_feature 1..22: note = chemically synthesized
  source 1..22: mol_type = other DNA
gaatcagatcagacagaaatag

SEQ ID NO: 13499 - DNA, 22 bp, synthetic construct
  misc_feature 1..22: note = chemically synthesized
  source 1..22: mol_type = other DNA
gaatcaagtatctgcctcctct

SEQ ID NO: 13500 - DNA, 22 bp, synthetic construct
  misc_feature 1..22: note = chemically synthesized
  source 1..22: mol_type = other DNA
aatcaagtatctgcctcctcta

SEQ ID NO: 13501 - DNA, 22 bp, synthetic construct
  misc_feature 1..22: note = chemically synthesized
  source 1..22: mol_type = other DNA
cctcctctagacctgtgacctt

SEQ ID NO: 13502 - DNA, 22 bp, synthetic construct
  misc_feature 1..22: note = chemically synthesized
  source 1..22: mol_type = other DNA
ctctagacctgtgaccttggac

SEQ ID NO: 13503 - DNA, 22 bp, synthetic construct
  misc_feature 1..22: note = chemically synthesized
  source 1..22: mol_type = other DNA
tagacctgtgaccttggacaag

SEQ ID NO: 13504 - DNA, 22 bp, synthetic construct
  misc_feature 1..22: note = chemically synthesized
  source 1..22: mol_type = other DNA
gacctgtgaccttggacaagtc

SEQ ID NO: 13505 - DNA, 22 bp, synthetic construct
  misc_feature 1..22: note = chemically synthesized
  source 1..22: mol_type = other DNA
tgaccttggacaagtcacacaa

SEQ ID NO: 13506 - DNA, 22 bp, synthetic construct
  misc_feature 1..22: note = chemically synthesized
  source 1..22: mol_type = other DNA
ggacaagtcacacaagctctga

SEQ ID NO: 13507 - DNA, 22 bp, synthetic construct
  misc_feature 1..22: note = chemically synthesized
  source 1..22: mol_type = other DNA
gacaagtcacacaagctctgaa

SEQ ID NO: 13508 - DNA, 22 bp, synthetic construct
  misc_feature 1..22: note = chemically synthesized
  source 1..22: mol_type = other DNA
tgaaccttaactttgtcaaatg

SEQ ID NO: 13509 - DNA, 22 bp, synthetic construct
  misc_feature 1..22: note = chemically synthesized
  source 1..22: mol_type = other DNA
aaccttaactttgtcaaatgta

SEQ ID NO: 13510 - DNA, 22 bp, synthetic construct
  misc_feature 1..22: note = chemically synthesized
  source 1..22: mol_type = other DNA
aactttgtcaaatgtaaattag

SEQ ID NO: 13511 - DNA, 22 bp, synthetic construct
  misc_feature 1..22: note = chemically synthesized
  source 1..22: mol_type = other DNA
actttgtcaaatgtaaattagg

SEQ ID NO: 13512 - DNA, 22 bp, synthetic construct
  misc_feature 1..22: note = chemically synthesized
  source 1..22: mol_type = other DNA
tgtcaaatgtaaattaggttta

SEQ ID NO: 13513 - DNA, 22 bp, synthetic construct
  misc_feature 1..22: note = chemically synthesized
  source 1..22: mol_type = other DNA
gtcaaatgtaaattaggtttaa

SEQ ID NO: 13514 - DNA, 22 bp, synthetic construct
  misc_feature 1..22: note = chemically synthesized
  source 1..22: mol_type = other DNA
tcaaatgtaaattaggtttaac

SEQ ID NO: 13515 - DNA, 22 bp, synthetic construct
  misc_feature 1..22: note = chemically synthesized
  source 1..22: mol_type = other DNA
ggtttaacagtagtataataag

SEQ ID NO: 13516 - DNA, 22 bp, synthetic construct
  misc_feature 1..22: note = chemically synthesized
  source 1..22: mol_type = other DNA
aacagtagtataataagaatat

SEQ ID NO: 13517 - DNA, 22 bp, synthetic construct
  misc_feature 1..22: note = chemically synthesized
  source 1..22: mol_type = other DNA
acagtagtataataagaatatc

SEQ ID NO: 13518 - DNA, 22 bp, synthetic construct
  misc_feature 1..22: note = chemically synthesized
  source 1..22: mol_type = other DNA
tctcacaggtgttggcaggatc

SEQ ID NO: 13519 - DNA, 22 bp, synthetic construct
  misc_feature 1..22: note = chemically synthesized
  source 1..22: mol_type = other DNA
acaggtgttggcaggatcagtg

SEQ ID NO: 13520 - DNA, 22 bp, synthetic construct
  misc_feature 1..22: note = chemically synthesized
  source 1..22: mol_type = other DNA
gcaggatcagtgagacaatatg

SEQ ID NO: 13521 - DNA, 22 bp, synthetic construct
  misc_feature 1..22: note = chemically synthesized
  source 1..22: mol_type = other DNA
gttatctctttttctccctact

SEQ ID NO: 13522 - DNA, 22 bp, synthetic construct
  misc_feature 1..22: note = chemically synthesized
  source 1..22: mol_type = other DNA
tctctttttctccctactcctt

SEQ ID NO: 13523 - DNA, 22 bp, synthetic construct
  misc_feature 1..22: note = chemically synthesized
  source 1..22: mol_type = other DNA
tttttctccctactcctttcat

SEQ ID NO: 13524 - DNA, 22 bp, synthetic construct
  misc_feature 1..22: note = chemically synthesized
  source 1..22: mol_type = other DNA
tttctccctactcctttcatgt

SEQ ID NO: 13525 - DNA, 22 bp, synthetic construct
  misc_feature 1..22: note = chemically synthesized
  source 1..22: mol_type = other DNA
ttctccctactcctttcatgtt

SEQ ID NO: 13526 - DNA, 22 bp, synthetic construct
  misc_feature 1..22: note = chemically synthesized
  source 1..22: mol_type = other DNA
tctccctactcctttcatgttg

SEQ ID NO: 13527 - DNA, 22 bp, synthetic construct
  misc_feature 1..22: note = chemically synthesized
  source 1..22: mol_type = other DNA
ctccctactcctttcatgttgg

SEQ ID NO: 13528 - DNA, 22 bp, synthetic construct
  misc_feature 1..22: note = chemically synthesized
  source 1..22: mol_type = other DNA
tccctactcctttcatgttggc

SEQ ID NO: 13529 - DNA, 22 bp, synthetic construct
  misc_feature 1..22: note = chemically synthesized
  source 1..22: mol_type = other DNA
cctactcctttcatgttggccc

SEQ ID NO: 13530 - DNA, 22 bp, synthetic construct
  misc_feature 1..22: note = chemically synthesized
  source 1..22: mol_type = other DNA
ctcctttcatgttggccctact

SEQ ID NO: 13531 - DNA, 22 bp, synthetic construct
  misc_feature 1..22: note = chemically synthesized
  source 1..22: mol_type = other DNA
ctttcatgttggccctactttc

SEQ ID NO: 13532 - DNA, 22 bp, synthetic construct
  misc_feature 1..22: note = chemically synthesized
  source 1..22: mol_type = other DNA
tcatgttggccctactttcttc

SEQ ID NO: 13533 - DNA, 22 bp, synthetic construct
  misc_feature 1..22: note = chemically synthesized
  source 1..22: mol_type = other DNA
catgttggccctactttcttct

SEQ ID NO: 13534 - DNA, 22 bp, synthetic construct
  misc_feature 1..22: note = chemically synthesized
  source 1..22: mol_type = other DNA
atgttggccctactttcttctg

SEQ ID NO: 13535 - DNA, 22 bp, synthetic construct
  misc_feature 1..22: note = chemically synthesized
  source 1..22: mol_type = other DNA
gccctactttcttctgttttaa

SEQ ID NO: 13536 - DNA, 22 bp, synthetic construct
  misc_feature 1..22: note = chemically synthesized
  source 1..22: mol_type = other DNA
ctttcttctgttttaaatttct

SEQ ID NO: 13537 - DNA, 22 bp, synthetic construct
  misc_feature 1..22: note = chemically synthesized
  source 1..22: mol_type = other DNA
tcttctgttttaaatttctcaa

SEQ ID NO: 13538 - DNA, 22 bp, synthetic construct
  misc_feature 1..22: note = chemically synthesized
  source 1..22: mol_type = other DNA
cttctgttttaaatttctcaat

SEQ ID NO: 13539 - DNA, 22 bp, synthetic construct
  misc_feature 1..22: note = chemically synthesized
  source 1..22: mol_type = other DNA
ttctgttttaaatttctcaatt

SEQ ID NO: 13540 - DNA, 22 bp, synthetic construct
  misc_feature 1..22: note = chemically synthesized
  source 1..22: mol_type = other DNA
ctgttttaaatttctcaattct

SEQ ID NO: 13541 - DNA, 22 bp, synthetic construct
  misc_feature 1..22: note = chemically synthesized
  source 1..22: mol_type = other DNA
tgttttaaatttctcaattctc

SEQ ID NO: 13542 - DNA, 22 bp, synthetic construct
  misc_feature 1..22: note = chemically synthesized
  source 1..22: mol_type = other DNA
ttttaaatttctcaattctctt

SEQ ID NO: 13543 - DNA, 22 bp, synthetic construct
  misc_feature 1..22: note = chemically synthesized
  source 1..22: mol_type = other DNA
taaatttctcaattctctttag

SEQ ID NO: 13544 - DNA, 22 bp, synthetic construct
  misc_feature 1..22: note = chemically synthesized
  source 1..22: mol_type = other DNA
aaatttctcaattctctttagc

SEQ ID NO: 13545 - DNA, 22 bp, synthetic construct
  misc_feature 1..22: note = chemically synthesized
  source 1..22: mol_type = other DNA
aatttctcaattctctttagct

SEQ ID NO: 13546 - DNA, 22 bp, synthetic construct
  misc_feature 1..22: note = chemically synthesized
  source 1..22: mol_type = other DNA
ctcaattctctttagctcttta

SEQ ID NO: 13547 - DNA, 22 bp, synthetic construct
  misc_feature 1..22: note = chemically synthesized
  source 1..22: mol_type = other DNA
tcaattctctttagctctttaa

SEQ ID NO: 13548 - DNA, 22 bp, synthetic construct
  misc_feature 1..22: note = chemically synthesized
  source 1..22: mol_type = other DNA
aattctctttagctctttaata

SEQ ID NO: 13549 - DNA, 22 bp, synthetic construct
  misc_feature 1..22: note = chemically synthesized
  source 1..22: mol_type = other DNA
tctttagctctttaataacttc

SEQ ID NO: 13550 - DNA, 22 bp, synthetic construct
  misc_feature 1..22: note = chemically synthesized
  source 1..22: mol_type = other DNA
tttagctctttaataacttctg

SEQ ID NO: 13551 - DNA, 22 bp, synthetic construct
  misc_feature 1..22: note = chemically synthesized
  source 1..22: mol_type = other DNA
tagctctttaataacttctgtg

SEQ ID NO: 13552 - DNA, 22 bp, synthetic construct
  misc_feature 1..22: note = chemically synthesized
  source 1..22: mol_type = other DNA
agctctttaataacttctgtgt

SEQ ID NO: 13553 - DNA, 22 bp, synthetic construct
  misc_feature 1..22: note = chemically synthesized
  source 1..22: mol_type = other DNA
gctctttaataacttctgtgta

SEQ ID NO: 13554 - DNA, 22 bp, synthetic construct
  misc_feature 1..22: note = chemically synthesized
  source 1..22: mol_type = other DNA
tttaataacttctgtgtagctc

SEQ ID NO: 13555 - DNA, 22 bp, synthetic construct
  misc_feature 1..22: note = chemically synthesized
  source 1..22: mol_type = other DNA
taataacttctgtgtagctctt

SEQ ID NO: 13556 - DNA, 22 bp, synthetic construct
  misc_feature 1..22: note = chemically synthesized
  source 1..22: mol_type = other DNA
aataacttctgtgtagctcttt

SEQ ID NO: 13557 - DNA, 22 bp, synthetic construct
  misc_feature 1..22: note = chemically synthesized
  source 1..22: mol_type = other DNA
ataacttctgtgtagctctttt

SEQ ID NO: 13558 - DNA, 22 bp, synthetic construct
  misc_feature 1..22: note = chemically synthesized
  source 1..22: mol_type = other DNA
ctgtgtagctcttttccttcct

SEQ ID NO: 13559 - DNA, 22 bp, synthetic construct
  misc_feature 1..22: note = chemically synthesized
  source 1..22: mol_type = other DNA
tgtgtagctcttttccttcctt

SEQ ID NO: 13560 - DNA, 22 bp, synthetic construct
  misc_feature 1..22: note = chemically synthesized
  source 1..22: mol_type = other DNA
tgtagctcttttccttccttaa

SEQ ID NO: 13561 - DNA, 22 bp, synthetic construct
  misc_feature 1..22: note = chemically synthesized
  source 1..22: mol_type = other DNA
ttttccttccttaatcacattt

SEQ ID NO: 13562 - DNA, 22 bp, synthetic construct
  misc_feature 1..22: note = chemically synthesized
  source 1..22: mol_type = other DNA
ttccttccttaatcacatttat

SEQ ID NO: 13563 - DNA, 22 bp, synthetic construct
  misc_feature 1..22: note = chemically synthesized
  source 1..22: mol_type = other DNA
tccttccttaatcacatttata

SEQ ID NO: 13564 - DNA, 22 bp, synthetic construct
  misc_feature 1..22: note = chemically synthesized
  source 1..22: mol_type = other DNA
ccttccttaatcacatttatat

SEQ ID NO: 13565 - DNA, 22 bp, synthetic construct
  misc_feature 1..22: note = chemically synthesized
  source 1..22: mol_type = other DNA
cttccttaatcacatttatata

SEQ ID NO: 13566 - DNA, 22 bp, synthetic construct
  misc_feature 1..22: note = chemically synthesized
  source 1..22: mol_type = other DNA
ccttaatcacatttatataatg

SEQ ID NO: 13567 - DNA, 22 bp, synthetic construct
  misc_feature 1..22: note = chemically synthesized
  source 1..22: mol_type = other DNA
cttaatcacatttatataatga

SEQ ID NO: 13568 - DNA, 22 bp, synthetic construct
  misc_feature 1..22: note = chemically synthesized
  source 1..22: mol_type = other DNA
aatcacatttatataatgaaat

SEQ ID NO: 13569 - DNA, 22 bp, synthetic construct
  misc_feature 1..22: note = chemically synthesized
  source 1..22: mol_type = other DNA
atcacatttatataatgaaatg

SEQ ID NO: 13570 - DNA, 22 bp, synthetic construct
  misc_feature 1..22: note = chemically synthesized
  source 1..22: mol_type = other DNA
atataatgaaatgactattgtc

SEQ ID NO: 13571 - DNA, 22 bp, synthetic construct
  misc_feature 1..22: note = chemically synthesized
  source 1..22: mol_type = other DNA
tataatgaaatgactattgtca

SEQ ID NO: 13572 - DNA, 22 bp, synthetic construct
  misc_feature 1..22: note = chemically synthesized
  source 1..22: mol_type = other DNA
ttgtcacaatcaggaatgacct

SEQ ID NO: 13573 - DNA, 22 bp, synthetic construct
  misc_feature 1..22: note = chemically synthesized
  source 1..22: mol_type = other DNA
tcacaatcaggaatgacctaaa

SEQ ID NO: 13574 - DNA, 22 bp, synthetic construct
  misc_feature 1..22: note = chemically synthesized
  source 1..22: mol_type = other DNA
aagaataattttgagtttatgt

SEQ ID NO: 13575 - DNA, 22 bp, synthetic construct
  misc_feature 1..22: note = chemically synthesized
  source 1..22: mol_type = other DNA
tgagtttatgtatttactggct

SEQ ID NO: 13576 - DNA, 22 bp, synthetic construct
  misc_feature 1..22: note = chemically synthesized
  source 1..22: mol_type = other DNA
gagtttatgtatttactggctg

SEQ ID NO: 13577 - DNA, 22 bp, synthetic construct
  misc_feature 1..22: note = chemically synthesized
  source 1..22: mol_type = other DNA
agtttatgtatttactggctgc

SEQ ID NO: 13578 - DNA, 22 bp, synthetic construct
  misc_feature 1..22: note = chemically synthesized
  source 1..22: mol_type = other DNA
atgtatttactggctgctctaa

SEQ ID NO: 13579 - DNA, 22 bp, synthetic construct
  misc_feature 1..22: note = chemically synthesized
  source 1..22: mol_type = other DNA
tgtatttactggctgctctaaa

SEQ ID NO: 13580 - DNA, 22 bp, synthetic construct
  misc_feature 1..22: note = chemically synthesized
  source 1..22: mol_type = other DNA
actggctgctctaaataatttc

SEQ ID NO: 13581 - DNA, 22 bp, synthetic construct
  misc_feature 1..22: note = chemically synthesized
  source 1..22: mol_type = other DNA
ctggctgctctaaataatttct

SEQ ID NO: 13582 - DNA, 22 bp, synthetic construct
  misc_feature 1..22: note = chemically synthesized
  source 1..22: mol_type = other DNA
gctgctctaaataatttctaat

SEQ ID NO: 13583 - DNA, 22 bp, synthetic construct
  misc_feature 1..22: note = chemically synthesized
  source 1..22: mol_type = other DNA
ctctaaataatttctaattgtt

SEQ ID NO: 13584 - DNA, 22 bp, synthetic construct
  misc_feature 1..22: note = chemically synthesized
  source 1..22: mol_type = other DNA
taaataatttctaattgttgat

SEQ ID NO: 13585 - DNA, 22 bp, synthetic construct
  misc_feature 1..22: note = chemically synthesized
  source 1..22: mol_type = other DNA
aataatttctaattgttgatct

SEQ ID NO: 13586 - DNA, 22 bp, synthetic construct
  misc_feature 1..22: note = chemically synthesized
  source 1..22: mol_type = other DNA
ctaattgttgatctctcccttt

SEQ ID NO: 13587 - DNA, 22 bp, synthetic construct
  misc_feature 1..22: note = chemically synthesized
  source 1..22: mol_type = other DNA
taattgttgatctctccctttt

SEQ ID NO: 13588 - DNA, 22 bp, synthetic construct
  misc_feature 1..22: note = chemically synthesized
  source 1..22: mol_type = other DNA
attgttgatctctcccttttta

SEQ ID NO: 13589 - DNA, 22 bp, synthetic construct
  misc_feature 1..22: note = chemically synthesized
  source 1..22: mol_type = other DNA
ttgatctctccctttttaggaa

SEQ ID NO: 13590 - DNA, 22 bp, synthetic construct
  misc_feature 1..22: note = chemically synthesized
  source 1..22: mol_type = other DNA
atctctccctttttaggaaact

SEQ ID NO: 13591 - DNA, 22 bp, synthetic construct
  misc_feature 1..22: note = chemically synthesized
  source 1..22: mol_type = other DNA
tccctttttaggaaactctttt

SEQ ID NO: 13592 - DNA, 22 bp, synthetic construct
  misc_feature 1..22: note = chemically synthesized
  source 1..22: mol_type = other DNA
cctttttaggaaactcttttta

SEQ ID NO: 13593 - DNA, 22 bp, synthetic construct
  misc_feature 1..22: note = chemically synthesized
  source 1..22: mol_type = other DNA
tttaggaaactctttttataat

SEQ ID NO: 13594 - DNA, 22 bp, synthetic construct
  misc_feature 1..22: note = chemically synthesized
  source 1..22: mol_type = other DNA
ttaggaaactctttttataata

SEQ ID NO: 13595 - DNA, 22 bp, synthetic construct
  misc_feature 1..22: note = chemically synthesized
  source 1..22: mol_type = other DNA
taggaaactctttttataataa

SEQ ID NO: 13596 - DNA, 22 bp, synthetic construct
  misc_feature 1..22: note = chemically synthesized
  source 1..22: mol_type = other DNA
aggaaactctttttataataat

SEQ ID NO: 13597 - DNA, 22 bp, synthetic construct
  misc_feature 1..22: note = chemically synthesized
  source 1..22: mol_type = other DNA
ggaaactctttttataataatc

SEQ ID NO: 13598 - DNA, 22 bp, synthetic construct
  misc_feature 1..22: note = chemically synthesized
  source 1..22: mol_type = other DNA
tttttataataatcactctatt

SEQ ID NO: 13599 - DNA, 22 bp, synthetic construct
  misc_feature 1..22: note = chemically synthesized
  source 1..22: mol_type = other DNA
tttataataatcactctattct

SEQ ID NO: 13600 - DNA, 22 bp, synthetic construct
  misc_feature 1..22: note = chemically synthesized
  source 1..22: mol_type = other DNA
ttataataatcactctattctg

SEQ ID NO: 13601 - DNA, 22 bp, synthetic construct
  misc_feature 1..22: note = chemically synthesized
  source 1..22: mol_type = other DNA
tataataatcactctattctgg

SEQ ID NO: 13602 - DNA, 22 bp, synthetic construct
  misc_feature 1..22: note = chemically synthesized
  source 1..22: mol_type = other DNA
ataataatcactctattctggt

SEQ ID NO: 13603 - DNA, 22 bp, synthetic construct
  misc_feature 1..22: note = chemically synthesized
  source 1..22: mol_type = other DNA
taataatcactctattctggtt

SEQ ID NO: 13604 - DNA, 22 bp, synthetic construct
  misc_feature 1..22: note = chemically synthesized
  source 1..22: mol_type = other DNA
tattctggttccccgctttgct

SEQ ID NO: 13605 - DNA, 22 bp, synthetic construct
  misc_feature 1..22: note = chemically synthesized
  source 1..22: mol_type = other DNA
ttctggttccccgctttgctct

SEQ ID NO: 13606 - DNA, 22 bp, synthetic construct
  misc_feature 1..22: note = chemically synthesized
  source 1..22: mol_type = other DNA
tggttccccgctttgctctaac

SEQ ID NO: 13607 - DNA, 22 bp, synthetic construct
  misc_feature 1..22: note = chemically synthesized
  source 1..22: mol_type = other DNA
gttccccgctttgctctaactc

SEQ ID NO: 13608 - DNA, 22 bp, synthetic construct
  misc_feature 1..22: note = chemically synthesized
  source 1..22: mol_type = other DNA
cccgctttgctctaactcctgt

SEQ ID NO: 13609 - DNA, 22 bp, synthetic construct
  misc_feature 1..22: note = chemically synthesized
  source 1..22: mol_type = other DNA
tgctctaactcctgttatccat

SEQ ID NO: 13610 - DNA, 22 bp, synthetic construct
  misc_feature 1..22: note = chemically synthesized
  source 1..22: mol_type = other DNA
gctctaactcctgttatccatc

SEQ ID NO: 13611 - DNA, 22 bp, synthetic construct
  misc_feature 1..22: note = chemically synthesized
  source 1..22: mol_type = other DNA
ctctaactcctgttatccatcc

SEQ ID NO: 13612 - DNA, 22 bp, synthetic construct
  misc_feature 1..22: note = chemically synthesized
  source 1..22: mol_type = other DNA
taactcctgttatccatccagc

SEQ ID NO: 13613 - DNA, 22 bp, synthetic construct
  misc_feature 1..22: note = chemically synthesized
  source 1..22: mol_type = other DNA
actcctgttatccatccagcac

SEQ ID NO: 13614 - DNA, 22 bp, synthetic construct
  misc_feature 1..22: note = chemically synthesized
  source 1..22: mol_type = other DNA
ctgttatccatccagcacttga

SEQ ID NO: 13615 - DNA, 22 bp, synthetic construct
  misc_feature 1..22: note = chemically synthesized
  source 1..22: mol_type = other DNA
ttatccatccagcacttgaatt

SEQ ID NO: 13616 - DNA, 22 bp, synthetic construct
  misc_feature 1..22: note = chemically synthesized
  source 1..22: mol_type = other DNA
tccatccagcacttgaattgat

SEQ ID NO: 13617 - DNA, 22 bp, synthetic construct
  misc_feature 1..22: note = chemically synthesized
  source 1..22: mol_type = other DNA
gaattgattaactcctgttcct

SEQ ID NO: 13618 - DNA, 22 bp, synthetic construct
  misc_feature 1..22: note = chemically synthesized
  source 1..22: mol_type = other DNA
aattgattaactcctgttcctc

SEQ ID NO: 13619 - DNA, 22 bp, synthetic construct
  misc_feature 1..22: note = chemically synthesized
  source 1..22: mol_type = other DNA
attaactcctgttcctctccat

SEQ ID NO: 13620 - DNA, 22 bp, synthetic construct
  misc_feature 1..22: note = chemically synthesized
  source 1..22: mol_type = other DNA
actcctgttcctctccatggcc

SEQ ID NO: 13621 - DNA, 22 bp, synthetic construct
  misc_feature 1..22: note = chemically synthesized
  source 1..22: mol_type = other DNA
ctgttcctctccatggccctta

SEQ ID NO: 13622 - DNA, 22 bp, synthetic construct
  misc_feature 1..22: note = chemically synthesized
  source 1..22: mol_type = other DNA
ttcctctccatggcccttaaat

SEQ ID NO: 13623 - DNA, 22 bp, synthetic construct
  misc_feature 1..22: note = chemically synthesized
  source 1..22: mol_type = other DNA
ctctccatggcccttaaatgtc

SEQ ID NO: 13624 - DNA, 22 bp, synthetic construct
  misc_feature 1..22: note = chemically synthesized
  source 1..22: mol_type = other DNA
tccatggcccttaaatgtccag

SEQ ID NO: 13625 - DNA, 22 bp, synthetic construct
  misc_feature 1..22: note = chemically synthesized
  source 1..22: mol_type = other DNA
catggcccttaaatgtccaggg

SEQ ID NO: 13626 - DNA, 22 bp, synthetic construct
  misc_feature 1..22: note = chemically synthesized
  source 1..22: mol_type = other DNA
aaatgtccagggttctcccagg

SEQ ID NO: 13627 - DNA, 22 bp, synthetic construct
  misc_feature 1..22: note = chemically synthesized
  source 1..22: mol_type = other DNA
aatgtccagggttctcccaggc

SEQ ID NO: 13628 - DNA, 22 bp, synthetic construct
  misc_feature 1..22: note = chemically synthesized
  source 1..22: mol_type = other DNA
tcccaggctccagcctcagctt

SEQ ID NO: 13629 - DNA, 22 bp, synthetic construct
  misc_feature 1..22: note = chemically synthesized
  source 1..22: mol_type = other DNA
ccaggctccagcctcagctttt

SEQ ID NO: 13630 - DNA, 22 bp, synthetic construct
  misc_feature 1..22: note = chemically synthesized
  source 1..22: mol_type = other DNA
cagcctcagctttttccttttt

SEQ ID NO: 13631 - DNA, 22 bp, synthetic construct
  misc_feature 1..22: note = chemically synthesized
  source 1..22: mol_type = other DNA
agctttttcctttttcacctta

SEQ ID NO: 13632 - DNA, 22 bp, synthetic construct
  misc_feature 1..22: note = chemically synthesized
  source 1..22: mol_type = other DNA
tttcctttttcaccttatatat

SEQ ID NO: 13633 - DNA, 22 bp, synthetic construct
  misc_feature 1..22: note = chemically synthesized
  source 1..22: mol_type = other DNA
ttcctttttcaccttatatata

SEQ ID NO: 13634 - DNA, 22 bp, synthetic construct
  misc_feature 1..22: note = chemically synthesized
  source 1..22: mol_type = other DNA
tcctttttcaccttatatatac

SEQ ID NO: 13635 - DNA, 22 bp, synthetic construct
  misc_feature 1..22: note = chemically synthesized
  source 1..22: mol_type = other DNA
cctttttcaccttatatatact

SEQ ID NO: 13636 - DNA, 22 bp, synthetic construct
  misc_feature 1..22: note = chemically synthesized
  source 1..22: mol_type = other DNA
ctttttcaccttatatatactt

SEQ ID NO: 13637 - DNA, 22 bp, synthetic construct
  misc_feature 1..22: note = chemically synthesized
  source 1..22: mol_type = other DNA
tttcaccttatatatacttgct

SEQ ID NO: 13638 - DNA, 22 bp, synthetic construct
  misc_feature 1..22: note = chemically synthesized
  source 1..22: mol_type = other DNA
ttcaccttatatatacttgcta

SEQ ID NO: 13639 - DNA, 22 bp, synthetic construct
  misc_feature 1..22: note = chemically synthesized
  source 1..22: mol_type = other DNA
tcaccttatatatacttgctag

SEQ ID NO: 13640 - DNA, 22 bp, synthetic construct
  misc_feature 1..22: note = chemically synthesized
  source 1..22: mol_type = other DNA
caccttatatatacttgctagg

SEQ ID NO: 13641 - DNA, 22 bp, synthetic construct
  misc_feature 1..22: note = chemically synthesized
  source 1..22: mol_type = other DNA
accttatatatacttgctaggg

SEQ ID NO: 13642 - DNA, 22 bp, synthetic construct
  misc_feature 1..22: note = chemically synthesized
  source 1..22: mol_type = other DNA
atatatacttgctagggctggg

SEQ ID NO: 13643 - DNA, 22 bp, synthetic construct
  misc_feature 1..22: note = chemically synthesized
  source 1..22: mol_type = other DNA
tatatacttgctagggctggga

SEQ ID NO: 13644 - DNA, 22 bp, synthetic construct
  misc_feature 1..22: note = chemically synthesized
  source 1..22: mol_type = other DNA
gctagggctgggacaagagtga

SEQ ID NO: 13645 - DNA, 22 bp, synthetic construct
  misc_feature 1..22: note = chemically synthesized
  source 1..22: mol_type = other DNA
ctagggctgggacaagagtgaa

SEQ ID NO: 13646 - DNA, 22 bp, synthetic construct
  misc_feature 1..22: note = chemically synthesized
  source 1..22: mol_type = other DNA
gggctgggacaagagtgaacca

SEQ ID NO: 13647 - DNA, 22 bp, synthetic construct
  misc_feature 1..22: note = chemically synthesized
  source 1..22: mol_type = other DNA
ggacaagagtgaaccaaacaag

SEQ ID NO: 13648 - DNA, 22 bp, synthetic construct
  misc_feature 1..22: note = chemically synthesized
  source 1..22: mol_type = other DNA
aagaggtcctcacttctcgggg

SEQ ID NO: 13649 - DNA, 22 bp, synthetic construct
  misc_feature 1..22: note = chemically synthesized
  source 1..22: mol_type = other DNA
agaggtcctcacttctcggggc

SEQ ID NO: 13650 - DNA, 22 bp, synthetic construct
  misc_feature 1..22: note = chemically synthesized
  source 1..22: mol_type = other DNA
acttctcggggcatacaagtat

SEQ ID NO: 13651 - DNA, 22 bp, synthetic construct
  misc_feature 1..22: note = chemically synthesized
  source 1..22: mol_type = other DNA
ctcggggcatacaagtatattt

SEQ ID NO: 13652 - DNA, 22 bp, synthetic construct
  misc_feature 1..22: note = chemically synthesized
  source 1..22: mol_type = other DNA
tcggggcatacaagtatattta

SEQ ID NO: 13653 - DNA, 22 bp, synthetic construct
  misc_feature 1..22: note = chemically synthesized
  source 1..22: mol_type = other DNA
ggggcatacaagtatatttatg

SEQ ID NO: 13654 - DNA, 22 bp, synthetic construct
  misc_feature 1..22: note = chemically synthesized
  source 1..22: mol_type = other DNA
atgccctacaggccttgcttac

SEQ ID NO: 13655 - DNA, 22 bp, synthetic construct
  misc_feature 1..22: note = chemically synthesized
  source 1..22: mol_type = other DNA
tgccctacaggccttgcttacc

SEQ ID NO: 13656 - DNA, 22 bp, synthetic construct
  misc_feature 1..22: note = chemically synthesized
  source 1..22: mol_type = other DNA
caggccttgcttaccacagtct

SEQ ID NO: 13657 - DNA, 22 bp, synthetic construct
  misc_feature 1..22: note = chemically synthesized
  source 1..22: mol_type = other DNA
gcttaccacagtctagtccggc

SEQ ID NO: 13658 - DNA, 22 bp, synthetic construct
  misc_feature 1..22: note = chemically synthesized
  source 1..22: mol_type = other DNA
cttaccacagtctagtccggcc

SEQ ID NO: 13659 - DNA, 22 bp, synthetic construct
  misc_feature 1..22: note = chemically synthesized
  source 1..22: mol_type = other DNA
accacagtctagtccggccctg

SEQ ID NO: 13660 - DNA, 22 bp, synthetic construct
  misc_feature 1..22: note = chemically synthesized
  source 1..22: mol_type = other DNA
ccacagtctagtccggccctga

SEQ ID NO: 13661 - DNA, 22 bp, synthetic construct
  misc_feature 1..22: note = chemically synthesized
  source 1..22: mol_type = other DNA
gtccggccctgaccctgtcaac

SEQ ID NO: 13662 - DNA, 22 bp, synthetic construct
  misc_feature 1..22: note = chemically synthesized
  source 1..22: mol_type = other DNA
accctgtcaacaaaatttactg

SEQ ID NO: 13663 - DNA, 22 bp, synthetic construct
  misc_feature 1..22: note = chemically synthesized
  source 1..22: mol_type = other DNA
tcaacaaaatttactgagcata

SEQ ID NO: 13664 - DNA, 22 bp, synthetic construct
  misc_feature 1..22: note = chemically synthesized
  source 1..22: mol_type = other DNA
actgagcatacaaccactactg

SEQ ID NO: 13665 - DNA, 22 bp, synthetic construct
  misc_feature 1..22: note = chemically synthesized
  source 1..22: mol_type = other DNA
ctgagcatacaaccactactgc

SEQ ID NO: 13666 - DNA, 22 bp, synthetic construct
  misc_feature 1..22: note = chemically synthesized
  source 1..22: mol_type = other DNA
agcatacaaccactactgccag

SEQ ID NO: 13667 - DNA, 22 bp, synthetic construct
  misc_feature 1..22: note = chemically synthesized
  source 1..22: mol_type = other DNA
ctgccaggcactgtactaggta

SEQ ID NO: 13668 - DNA, 22 bp, synthetic construct
  misc_feature 1..22: note = chemically synthesized
  source 1..22: mol_type = other DNA
ccaggcactgtactaggtatca

SEQ ID NO: 13669 - DNA, 22 bp, synthetic construct
  misc_feature 1..22: note = chemically synthesized
  source 1..22: mol_type = other DNA
tactaggtatcacaatatccat

SEQ ID NO: 13670 - DNA, 22 bp, synthetic construct
  misc_feature 1..22: note = chemically synthesized
  source 1..22: mol_type = other DNA
ggtatcacaatatccatgctca

SEQ ID NO: 13671 - DNA, 22 bp, synthetic construct
  misc_feature 1..22: note = chemically synthesized
  source 1..22: mol_type = other DNA
actctccagatgcccacacacg

SEQ ID NO: 13672 - DNA, 22 bp, synthetic construct
  misc_feature 1..22: note = chemically synthesized
  source 1..22: mol_type = other DNA
tccagatgcccacacacgtggc

SEQ ID NO: 13673 - DNA, 22 bp, synthetic construct
  misc_feature 1..22: note = chemically synthesized
  source 1..22: mol_type = other DNA
cagatgcccacacacgtggctg

SEQ ID NO: 13674 - DNA, 22 bp, synthetic construct
  misc_feature 1..22: note = chemically synthesized
  source 1..22: mol_type = other DNA
taactactgtttacagaacaat

SEQ ID NO: 13675 - DNA, 22 bp, synthetic construct
  misc_feature 1..22: note = chemically synthesized
  source 1..22: mol_type = other DNA
ctgtttacagaacaatgagttc

SEQ ID NO: 13676 - DNA, 22 bp, synthetic construct
  misc_feature 1..22: note = chemically synthesized
  source 1..22: mol_type = other DNA
tttacagaacaatgagttccaa

SEQ ID NO: 13677 - DNA, 22 bp, synthetic construct
  misc_feature 1..22: note = chemically synthesized
  source 1..22: mol_type = other DNA
acagaacaatgagttccaaata

SEQ ID NO: 13678 - DNA, 22 bp, synthetic construct
  misc_feature 1..22: note = chemically synthesized
  source 1..22: mol_type = other DNA
cagaacaatgagttccaaatac

SEQ ID NO: 13679 - DNA, 22 bp, synthetic construct
  misc_feature 1..22: note = chemically synthesized
  source 1..22: mol_type = other DNA
caaatactcacctatagtcaga

SEQ ID NO: 13680 - DNA, 22 bp, synthetic construct
  misc_feature 1..22: note = chemically synthesized
  source 1..22: mol_type = other DNA
acctatagtcagatacgtctcc

SEQ ID NO: 13681 - DNA, 22 bp, synthetic construct
  misc_feature 1..22: note = chemically synthesized
  source 1..22: mol_type = other DNA
tagtcagatacgtctcctgaat

SEQ ID NO: 13682 - DNA, 22 bp, synthetic construct
  misc_feature 1..22: note = chemically synthesized
  source 1..22: mol_type = other DNA
ctgaatttcagattatctttcc

SEQ ID NO: 13683 - DNA, 22 bp, synthetic construct
  misc_feature 1..22: note = chemically synthesized
  source 1..22: mol_type = other DNA
aatttcagattatctttccaac

SEQ ID NO: 13684 - DNA, 22 bp, synthetic construct
  misc_feature 1..22: note = chemically synthesized
  source 1..22: mol_type = other DNA
cagattatctttccaactccct

SEQ ID NO: 13685 - DNA, 22 bp, synthetic construct
  misc_feature 1..22: note = chemically synthesized
  source 1..22: mol_type = other DNA
agattatctttccaactcccta

SEQ ID NO: 13686 - DNA, 22 bp, synthetic construct
  misc_feature 1..22: note = chemically synthesized
  source 1..22: mol_type = other DNA
tctttccaactccctaactgta

SEQ ID NO: 13687 - DNA, 22 bp, synthetic construct
  misc_feature 1..22: note = chemically synthesized
  source 1..22: mol_type = other DNA
tccaactccctaactgtatatc

SEQ ID NO: 13688 - DNA, 22 bp, synthetic construct
  misc_feature 1..22: note = chemically synthesized
  source 1..22: mol_type = other DNA
ccaactccctaactgtatatca

SEQ ID NO: 13689 - DNA, 22 bp, synthetic construct
  misc_feature 1..22: note = chemically synthesized
  source 1..22: mol_type = other DNA
caactccctaactgtatatcat

SEQ ID NO: 13690 - DNA, 22 bp, synthetic construct
  misc_feature 1..22: note = chemically synthesized
  source 1..22: mol_type = other DNA
cctaactgtatatcataatgta

SEQ ID NO: 13691 - DNA, 22 bp, synthetic construct
  misc_feature 1..22: note = chemically synthesized
  source 1..22: mol_type = other DNA
actgtatatcataatgtagcca

SEQ ID NO: 13692 - DNA, 22 bp, synthetic construct
  misc_feature 1..22: note = chemically synthesized
  source 1..22: mol_type = other DNA
tatatcataatgtagccagtaa

SEQ ID NO: 13693 - DNA, 22 bp, synthetic construct
  misc_feature 1..22: note = chemically synthesized
  source 1..22: mol_type = other DNA
atgtatatgtaatgcttctgct

SEQ ID NO: 13694 - DNA, 22 bp, synthetic construct
  misc_feature 1..22: note = chemically synthesized
  source 1..22: mol_type = other DNA
ctgctgtgttggacactgtgct

SEQ ID NO: 13695 - DNA, 22 bp, synthetic construct
  misc_feature 1..22: note = chemically synthesized
  source 1..22: mol_type = other DNA
tgctgtgttggacactgtgctc

SEQ ID NO: 13696 - DNA, 22 bp, synthetic construct
  misc_feature 1..22: note = chemically synthesized
  source 1..22: mol_type = other DNA
ctgtgttggacactgtgctcag

SEQ ID NO: 13697 - DNA, 22 bp, synthetic construct
  misc_feature 1..22: note = chemically synthesized
  source 1..22: mol_type = other DNA
tgttggacactgtgctcagtaa

SEQ ID NO: 13698 - DNA, 22 bp, synthetic construct
  misc_feature 1..22: note = chemically synthesized
  source 1..22: mol_type = other DNA
gacactgtgctcagtaactttg

SEQ ID NO: 13699 - DNA, 22 bp, synthetic construct
  misc_feature 1..22: note = chemically synthesized
  source 1..22: mol_type = other DNA
tgctcagtaactttgcatccat

SEQ ID NO: 13700 - DNA, 22 bp, synthetic construct
  misc_feature 1..22: note = chemically synthesized
  source 1..22: mol_type = other DNA
agtaactttgcatccattatct

SEQ ID NO: 13701 - DNA, 22 bp, synthetic construct
  misc_feature 1..22: note = chemically synthesized
  source 1..22: mol_type = other DNA
tgcatccattatctcacttcat

SEQ ID NO: 13702 - DNA, 22 bp, synthetic construct
  misc_feature 1..22: note = chemically synthesized
  source 1..22: mol_type = other DNA
gcatccattatctcacttcatc

SEQ ID NO: 13703 - DNA, 22 bp, synthetic construct
  misc_feature 1..22: note = chemically synthesized
  source 1..22: mol_type = other DNA
catccattatctcacttcatcc

SEQ ID NO: 13704 - DNA, 22 bp, synthetic construct
  misc_feature 1..22: note = chemically synthesized
  source 1..22: mol_type = other DNA
tctcacttcatcctcacaaaag

SEQ ID NO: 13705 - DNA, 22 bp, synthetic construct
  misc_feature 1..22: note = chemically synthesized
  source 1..22: mol_type = other DNA
acttcatcctcacaaaagtccc

SEQ ID NO: 13706 - DNA, 22 bp, synthetic construct
  misc_feature 1..22: note = chemically synthesized
  source 1..22: mol_type = other DNA
catcctcacaaaagtcccacga

SEQ ID NO: 13707 - DNA, 22 bp, synthetic construct
  misc_feature 1..22: note = chemically synthesized
  source 1..22: mol_type = other DNA
atcctcacaaaagtcccacgag

SEQ ID NO: 13708 - DNA, 22 bp, synthetic construct
  misc_feature 1..22: note = chemically synthesized
  source 1..22: mol_type = other DNA
acaaaagtcccacgagataggc

SEQ ID NO: 13709 - DNA, 22 bp, synthetic construct
  misc_feature 1..22: note = chemically synthesized
  source 1..22: mol_type = other DNA
tcatcttatttttatgaatgag

SEQ ID NO: 13710 - DNA, 22 bp, synthetic construct
  misc_feature 1..22: note = chemically synthesized
  source 1..22: mol_type = other DNA
atttttatgaatgaggaagata

SEQ ID NO: 13711 - DNA, 22 bp, synthetic construct
  misc_feature 1..22: note = chemically synthesized
  source 1..22: mol_type = other DNA
tttttatgaatgaggaagatag

SEQ ID NO: 13712 - DNA, 22 bp, synthetic construct
  misc_feature 1..22: note = chemically synthesized
  source 1..22: mol_type = other DNA
ttatgaatgaggaagatagatt

SEQ ID NO: 13713 - DNA, 22 bp, synthetic construct
  misc_feature 1..22: note = chemically synthesized
  source 1..22: mol_type = other DNA
tatgaatgaggaagatagattc

SEQ ID NO: 13714 - DNA, 22 bp, synthetic construct
  misc_feature 1..22: note = chemically synthesized
  source 1..22: mol_type = other DNA
atgaatgaggaagatagattca

SEQ ID NO: 13715 - DNA, 22 bp, synthetic construct
  misc_feature 1..22: note = chemically synthesized
  source 1..22: mol_type = other DNA
tgaatgaggaagatagattcat

SEQ ID NO: 13716 - DNA, 22 bp, synthetic construct
  misc_feature 1..22: note = chemically synthesized
  source 1..22: mol_type = other DNA
atagaggctaagggctttgccc

SEQ ID NO: 13717 - DNA, 22 bp, synthetic construct
  misc_feature 1..22: note = chemically synthesized
  source 1..22: mol_type = other DNA
agggctttgcccaaggtaacat

SEQ ID NO: 13718 - DNA, 22 bp, synthetic construct
  misc_feature 1..22: note = chemically synthesized
  source 1..22: mol_type = other DNA
tgcccaaggtaacatactaaaa

SEQ ID NO: 13719 - DNA, 22 bp, synthetic construct
  misc_feature 1..22: note = chemically synthesized
  source 1..22: mol_type = other DNA
gcccaaggtaacatactaaaac

SEQ ID NO: 13720 - DNA, 22 bp, synthetic construct
  misc_feature 1..22: note = chemically synthesized
  source 1..22: mol_type = other DNA
cccaaggtaacatactaaaaca

SEQ ID NO: 13721 - DNA, 22 bp, synthetic construct
  misc_feature 1..22: note = chemically synthesized
  source 1..22: mol_type = other DNA
aaacattcaggattcagactct

SEQ ID NO: 13722 - DNA, 22 bp, synthetic construct
  misc_feature 1..22: note = chemically synthesized
  source 1..22: mol_type = other DNA
aggattcagactctggcagtca

SEQ ID NO: 13723 - DNA, 22 bp, synthetic construct
  misc_feature 1..22: note = chemically synthesized
  source 1..22: mol_type = other DNA
agactctggcagtcagactaaa

SEQ ID NO: 13724 - DNA, 22 bp, synthetic construct
  misc_feature 1..22: note = chemically synthesized
  source 1..22: mol_type = other DNA
tggcagtcagactaaagagcca

SEQ ID NO: 13725 - DNA, 22 bp, synthetic construct
  misc_feature 1..22: note = chemically synthesized
  source 1..22: mol_type = other DNA
gcagtcagactaaagagccagt

SEQ ID NO: 13726 - DNA, 22 bp, synthetic construct
  misc_feature 1..22: note = chemically synthesized
  source 1..22: mol_type = other DNA
aagagccagttctcttagacat

SEQ ID NO: 13727 - DNA, 22 bp, synthetic construct
  misc_feature 1..22: note = chemically synthesized
  source 1..22: mol_type = other DNA
tcttagacattattctgtggtc

SEQ ID NO: 13728 - DNA, 22 bp, synthetic construct
  misc_feature 1..22: note = chemically synthesized
  source 1..22: mol_type = other DNA
ttagacattattctgtggtcca

SEQ ID NO: 13729 - DNA, 22 bp, synthetic construct
  misc_feature 1..22: note = chemically synthesized
  source 1..22: mol_type = other DNA
agacattattctgtggtccata

SEQ ID NO: 13730 - DNA, 22 bp, synthetic construct
  misc_feature 1..22: note = chemically synthesized
  source 1..22: mol_type = other DNA
gacattattctgtggtccataa

SEQ ID NO: 13731 - DNA, 22 bp, synthetic construct
  misc_feature 1..22: note = chemically synthesized
  source 1..22: mol_type = other DNA
ttctgtggtccataatcacatc

SEQ ID NO: 13732 - DNA, 22 bp, synthetic construct
  misc_feature 1..22: note = chemically synthesized
  source 1..22: mol_type = other DNA
tgtggtccataatcacatcaaa

SEQ ID NO: 13733 - DNA, 22 bp, synthetic construct
  misc_feature 1..22: note = chemically synthesized
  source 1..22: mol_type = other DNA
tggtccataatcacatcaaaca

SEQ ID NO: 13734 - DNA, 22 bp, synthetic construct
  misc_feature 1..22: note = chemically synthesized
  source 1..22: mol_type = other DNA
tagccatttccccttccatacc

SEQ ID NO: 13735 - DNA, 22 bp, synthetic construct
  misc_feature 1..22: note = chemically synthesized
  source 1..22: mol_type = other DNA
gccatttccccttccataccca

SEQ ID NO: 13736 - DNA, 22 bp, synthetic construct
  misc_feature 1..22: note = chemically synthesized
  source 1..22: mol_type = other DNA
ccccttccatacccagatggtt

SEQ ID NO: 13737 - DNA, 22 bp, synthetic construct
  misc_feature 1..22: note = chemically synthesized
  source 1..22: mol_type = other DNA
cccttccatacccagatggtta

SEQ ID NO: 13738 - DNA, 22 bp, synthetic construct
  misc_feature 1..22: note = chemically synthesized
  source 1..22: mol_type = other DNA
ccatacccagatggttaagtca

SEQ ID NO: 13739 - DNA, 22 bp, synthetic construct
  misc_feature 1..22: note = chemically synthesized
  source 1..22: mol_type = other DNA
catacccagatggttaagtcat

SEQ ID NO: 13740 - DNA, 22 bp, synthetic construct
  misc_feature 1..22: note = chemically synthesized
  source 1..22: mol_type = other DNA
agtcataccacttctacttcct

SEQ ID NO: 13741 - DNA, 22 bp, synthetic construct
  misc_feature 1..22: note = chemically synthesized
  source 1..22: mol_type = other DNA
ctacttccttaatatcatttga

SEQ ID NO: 13742 - DNA, 22 bp, synthetic construct
  misc_feature 1..22: note = chemically synthesized
  source 1..22: mol_type = other DNA
tacttccttaatatcatttgaa

SEQ ID NO: 13743 - DNA, 22 bp, synthetic construct
  misc_feature 1..22: note = chemically synthesized
  source 1..22: mol_type = other DNA
cttccttaatatcatttgaact

SEQ ID NO: 13744 - DNA, 22 bp, synthetic construct
  misc_feature 1..22: note = chemically synthesized
  source 1..22: mol_type = other DNA
ccttaatatcatttgaactccc

SEQ ID NO: 13745 - DNA, 22 bp, synthetic construct
  misc_feature 1..22: note = chemically synthesized
  source 1..22: mol_type = other DNA
cttaatatcatttgaactcccc

SEQ ID NO: 13746 - DNA, 22 bp, synthetic construct
  misc_feature 1..22: note = chemically synthesized
  source 1..22: mol_type = other DNA
aatatcatttgaactcccctct

SEQ ID NO: 13747 - DNA, 22 bp, synthetic construct
  misc_feature 1..22: note = chemically synthesized
  source 1..22: mol_type = other DNA
atatcatttgaactcccctctt

SEQ ID NO: 13748 - DNA, 22 bp, synthetic construct
  misc_feature 1..22: note = chemically synthesized
  source 1..22: mol_type = other DNA
gaactcccctctttttttgtac

SEQ ID NO: 13749 - DNA, 22 bp, synthetic construct
  misc_feature 1..22: note = chemically synthesized
  source 1..22: mol_type = other DNA
aactcccctctttttttgtact

SEQ ID NO: 13750 - DNA, 22 bp, synthetic construct
  misc_feature 1..22: note = chemically synthesized
  source 1..22: mol_type = other DNA
ccctctttttttgtactgctac

SEQ ID NO: 13751 - DNA, 22 bp, synthetic construct
  misc_feature 1..22: note = chemically synthesized
  source 1..22: mol_type = other DNA
tttttttgtactgctactgttc

SEQ ID NO: 13752 - DNA, 22 bp, synthetic construct
  misc_feature 1..22: note = chemically synthesized
  source 1..22: mol_type = other DNA
tttttgtactgctactgttcag

SEQ ID NO: 13753 - DNA, 22 bp, synthetic construct
  misc_feature 1..22: note = chemically synthesized
  source 1..22: mol_type = other DNA
ttttgtactgctactgttcagg

SEQ ID NO: 13754 - DNA, 22 bp, synthetic construct
  misc_feature 1..22: note = chemically synthesized
  source 1..22: mol_type = other DNA
tttgtactgctactgttcaggt

SEQ ID NO: 13755 - DNA, 22 bp, synthetic construct
  misc_feature 1..22: note = chemically synthesized
  source 1..22: mol_type = other DNA
ttgtactgctactgttcaggtt

SEQ ID NO: 13756 - DNA, 22 bp, synthetic construct
  misc_feature 1..22: note = chemically synthesized
  source 1..22: mol_type = other DNA
tgtactgctactgttcaggttc

SEQ ID NO: 13757 - DNA, 22 bp, synthetic construct
  misc_feature 1..22: note = chemically synthesized
  source 1..22: mol_type = other DNA
gtactgctactgttcaggttct

SEQ ID NO: 13758 - DNA, 22 bp, synthetic construct
  misc_feature 1..22: note = chemically synthesized
  source 1..22: mol_type = other DNA
tactgctactgttcaggttcta

SEQ ID NO: 13759 - DNA, 22 bp, synthetic construct
  misc_feature 1..22: note = chemically synthesized
  source 1..22: mol_type = other DNA
ctactgttcaggttctagcctt

SEQ ID NO: 13760 - DNA, 22 bp, synthetic construct
  misc_feature 1..22: note = chemically synthesized
  source 1..22: mol_type = other DNA
ctgttcaggttctagcctttat

SEQ ID NO: 13761 - DNA, 22 bp, synthetic construct
  misc_feature 1..22: note = chemically synthesized
  source 1..22: mol_type = other DNA
ttcaggttctagcctttatgtc

SEQ ID NO: 13762 - DNA, 22 bp, synthetic construct
  misc_feature 1..22: note = chemically synthesized
  source 1..22: mol_type = other DNA
aggttctagcctttatgtctcc

SEQ ID NO: 13763 - DNA, 22 bp, synthetic construct
  misc_feature 1..22: note = chemically synthesized
  source 1..22: mol_type = other DNA
tagcctttatgtctcccgcaga

SEQ ID NO: 13764 - DNA, 22 bp, synthetic construct
  misc_feature 1..22: note = chemically synthesized
  source 1..22: mol_type = other DNA
gcctttatgtctcccgcagata

SEQ ID NO: 13765 - DNA, 22 bp, synthetic construct
  misc_feature 1..22: note = chemically synthesized
  source 1..22: mol_type = other DNA
tatgtctcccgcagataattgc

SEQ ID NO: 13766 - DNA, 22 bp, synthetic construct
  misc_feature 1..22: note = chemically synthesized
  source 1..22: mol_type = other DNA
atgtctcccgcagataattgca

SEQ ID NO: 13767 - DNA, 22 bp, synthetic construct
  misc_feature 1..22: note = chemically synthesized
  source 1..22: mol_type = other DNA
tgtctcccgcagataattgcaa

SEQ ID NO: 13768 - DNA, 22 bp, synthetic construct
  misc_feature 1..22: note = chemically synthesized
  source 1..22: mol_type = other DNA
ccgcagataattgcaatagtct

SEQ ID NO: 13769 - DNA, 22 bp, synthetic construct
  misc_feature 1..22: note = chemically synthesized
  source 1..22: mol_type = other DNA
caatagtctcaggactgctctc

SEQ ID NO: 13770 - DNA, 22 bp, synthetic construct
  misc_feature 1..22: note = chemically synthesized
  source 1..22: mol_type = other DNA
aggactgctctctcctagtctt

SEQ ID NO: 13771 - DNA, 22 bp, synthetic construct
  misc_feature 1..22: note = chemically synthesized
  source 1..22: mol_type = other DNA
ctctctcctagtcttggtacgg

SEQ ID NO: 13772 - DNA, 22 bp, synthetic construct
  misc_feature 1..22: note = chemically synthesized
  source 1..22: mol_type = other DNA
tctcctagtcttggtacggccc

SEQ ID NO: 13773 - DNA, 22 bp, synthetic construct
  misc_feature 1..22: note = chemically synthesized
  source 1..22: mol_type = other DNA
tcctagtcttggtacggccccc

SEQ ID NO: 13774 - DNA, 22 bp, synthetic construct
  misc_feature 1..22: note = chemically synthesized
  source 1..22: mol_type = other DNA
ctagtcttggtacggccccctc

SEQ ID NO: 13775 - DNA, 22 bp, synthetic construct
  misc_feature 1..22: note = chemically synthesized
  source 1..22: mol_type = other DNA
gtcttggtacggccccctcccc

SEQ ID NO: 13776 - DNA, 22 bp, synthetic construct
  misc_feature 1..22: note = chemically synthesized
  source 1..22: mol_type = other DNA
ggtacggccccctcccccacta

SEQ ID NO: 13777 - DNA, 22 bp, synthetic construct
  misc_feature 1..22: note = chemically synthesized
  source 1..22: mol_type = other DNA
gtacggccccctcccccactat

SEQ ID NO: 13778 - DNA, 22 bp, synthetic construct
  misc_feature 1..22: note = chemically synthesized
  source 1..22: mol_type = other DNA
ccccactatcatttcattagcg

SEQ ID NO: 13779 - DNA, 22 bp, synthetic construct
  misc_feature 1..22: note = chemically synthesized
  source 1..22: mol_type = other DNA
tcatttcattagcgtgttgcca

SEQ ID NO: 13780 - DNA, 22 bp, synthetic construct
  misc_feature 1..22: note = chemically synthesized
  source 1..22: mol_type = other DNA
cattagcgtgttgccagactgg

SEQ ID NO: 13781 - DNA, 22 bp, synthetic construct
  misc_feature 1..22: note = chemically synthesized
  source 1..22: mol_type = other DNA
attagcgtgttgccagactggg

SEQ ID NO: 13782 - DNA, 22 bp, synthetic construct
  misc_feature 1..22: note = chemically synthesized
  source 1..22: mol_type = other DNA
gcgtgttgccagactgggcatc

SEQ ID NO: 13783 - DNA, 22 bp, synthetic construct
  misc_feature 1..22: note = chemically synthesized
  source 1..22: mol_type = other DNA
ccagactgggcatcctaaatca

SEQ ID NO: 13784 - DNA, 22 bp, synthetic construct
  misc_feature 1..22: note = chemically synthesized
  source 1..22: mol_type = other DNA
ggcatcctaaatcagccatcag

SEQ ID NO: 13785 - DNA, 22 bp, synthetic construct
  misc_feature 1..22: note = chemically synthesized
  source 1..22: mol_type = other DNA
aatcagccatcagtggtactcc

SEQ ID NO: 13786 - DNA, 22 bp, synthetic construct
  misc_feature 1..22: note = chemically synthesized
  source 1..22: mol_type = other DNA
cttatgtttatacttcgatacc

SEQ ID NO: 13787 - DNA, 22 bp, synthetic construct
  misc_feature 1..22: note = chemically synthesized
  source 1..22: mol_type = other DNA
atgtttatacttcgatacctcc

SEQ ID NO: 13788 - DNA, 22 bp, synthetic construct
  misc_feature 1..22: note = chemically synthesized
  source 1..22: mol_type = other DNA
tgtttatacttcgatacctcca

SEQ ID NO: 13789 - DNA, 22 bp, synthetic construct
  misc_feature 1..22: note = chemically synthesized
  source 1..22: mol_type = other DNA
atacttcgatacctccatattg

SEQ ID NO: 13790 - DNA, 22 bp, synthetic construct
  misc_feature 1..22: note = chemically synthesized
  source 1..22: mol_type = other DNA
tacttcgatacctccatattgc

SEQ ID NO: 13791 - DNA, 22 bp, synthetic construct
  misc_feature 1..22: note = chemically synthesized
  source 1..22: mol_type = other DNA
cgatacctccatattgcatttt

SEQ ID NO: 13792 - DNA, 22 bp, synthetic construct
  misc_feature 1..22: note = chemically synthesized
  source 1..22: mol_type = other DNA
gatacctccatattgcatttta

SEQ ID NO: 13793 - DNA, 22 bp, synthetic construct
  misc_feature 1..22: note = chemically synthesized
  source 1..22: mol_type = other DNA
catattgcattttattgtccaa

SEQ ID NO: 13794 - DNA, 22 bp, synthetic construct
  misc_feature 1..22: note = chemically synthesized
  source 1..22: mol_type = other DNA
cattttattgtccaatctcctt

SEQ ID NO: 13795 - DNA, 22 bp, synthetic construct
  misc_feature 1..22: note = chemically synthesized
  source 1..22: mol_type = other DNA
tattgtccaatctccttaggtt

SEQ ID NO: 13796 - DNA, 22 bp, synthetic construct
  misc_feature 1..22: note = chemically synthesized
  source 1..22: mol_type = other DNA
attgtccaatctccttaggtta

SEQ ID NO: 13797 - DNA, 22 bp, synthetic construct
  misc_feature 1..22: note = chemically synthesized
  source 1..22: mol_type = other DNA
ttgtccaatctccttaggttaa

SEQ ID NO: 13798 - DNA, 22 bp, synthetic construct
  misc_feature 1..22: note = chemically synthesized
  source 1..22: mol_type = other DNA
tccaatctccttaggttaatga

SEQ ID NO: 13799 - DNA, 22 bp, synthetic construct
  misc_feature 1..22: note = chemically synthesized
  source 1..22: mol_type = other DNA
cttaggttaatgacttcattat

SEQ ID NO: 13800 - DNA, 22 bp, synthetic construct
  misc_feature 1..22: note = chemically synthesized
  source 1..22: mol_type = other DNA
aggttaatgacttcattatctg

SEQ ID NO: 13801 - DNA, 22 bp, synthetic construct
  misc_feature 1..22: note = chemically synthesized
  source 1..22: mol_type = other DNA
ggttaatgacttcattatctga

SEQ ID NO: 13802 - DNA, 22 bp, synthetic construct
  misc_feature 1..22: note = chemically synthesized
  source 1..22: mol_type = other DNA
atgacttcattatctgatgacc

SEQ ID NO: 13803 - DNA, 22 bp, synthetic construct
  misc_feature 1..22: note = chemically synthesized
  source 1..22: mol_type = other DNA
cattatctgatgaccagctctg

SEQ ID NO: 13804 - DNA, 22 bp, synthetic construct
  misc_feature 1..22: note = chemically synthesized
  source 1..22: mol_type = other DNA
attatctgatgaccagctctgc

SEQ ID NO: 13805 - DNA, 22 bp, synthetic construct
  misc_feature 1..22: note = chemically synthesized
  source 1..22: mol_type = other DNA
tctgatgaccagctctgcctag

SEQ ID NO: 13806 - DNA, 22 bp, synthetic construct
  misc_feature 1..22: note = chemically synthesized
  source 1..22: mol_type = other DNA
atgaccagctctgcctagttta

SEQ ID NO: 13807 - DNA, 22 bp, synthetic construct
  misc_feature 1..22: note = chemically synthesized
  source 1..22: mol_type = other DNA
tgcctagtttacctgtctcact

SEQ ID NO: 13808 - DNA, 22 bp, synthetic construct
  misc_feature 1..22: note = chemically synthesized
  source 1..22: mol_type = other DNA
cctagtttacctgtctcacttg

SEQ ID NO: 13809 - DNA, 22 bp, synthetic construct
  misc_feature 1..22: note = chemically synthesized
  source 1..22: mol_type = other DNA
gtttacctgtctcacttgtcat

SEQ ID NO: 13810 - DNA, 22 bp, synthetic construct
  misc_feature 1..22: note = chemically synthesized
  source 1..22: mol_type = other DNA
acctgtctcacttgtcatagtc

SEQ ID NO: 13811 - DNA, 22 bp, synthetic construct
  misc_feature 1..22: note = chemically synthesized
  source 1..22: mol_type = other DNA
cctgtctcacttgtcatagtcc

SEQ ID NO: 13812 - DNA, 22 bp, synthetic construct
  misc_feature 1..22: note = chemically synthesized
  source 1..22: mol_type = other DNA
tctcacttgtcatagtccatat

SEQ ID NO: 13813 - DNA, 22 bp, synthetic construct
  misc_feature 1..22: note = chemically synthesized
  source 1..22: mol_type = other DNA
acttgtcatagtccatatggaa

SEQ ID NO: 13814 - DNA, 22 bp, synthetic construct
  misc_feature 1..22: note = chemically synthesized
  source 1..22: mol_type = other DNA
gtcatagtccatatggaaccat

SEQ ID NO: 13815 - DNA, 22 bp, synthetic construct
  misc_feature 1..22: note = chemically synthesized
  source 1..22: mol_type = other DNA
tcatagtccatatggaaccata

SEQ ID NO: 13816 - DNA, 22 bp, synthetic construct
  misc_feature 1..22: note = chemically synthesized
  source 1..22: mol_type = other DNA
ctgaaatacctcacgttcttgc

SEQ ID NO: 13817 - DNA, 22 bp, synthetic construct
  misc_feature 1..22: note = chemically synthesized
  source 1..22: mol_type = other DNA
aaatacctcacgttcttgcaaa

SEQ ID NO: 13818 - DNA, 22 bp, synthetic construct
  misc_feature 1..22: note = chemically synthesized
  source 1..22: mol_type = other DNA
acgttcttgcaaatctgagtct

SEQ ID NO: 13819 - DNA, 22 bp, synthetic construct
  misc_feature 1..22: note = chemically synthesized
  source 1..22: mol_type = other DNA
ttgcaaatctgagtctttgcac

SEQ ID NO: 13820 - DNA, 22 bp, synthetic construct
  misc_feature 1..22: note = chemically synthesized
  source 1..22: mol_type = other DNA
gcaaatctgagtctttgcacga

SEQ ID NO: 13821 - DNA, 22 bp, synthetic construct
  misc_feature 1..22: note = chemically synthesized
  source 1..22: mol_type = other DNA
caaatctgagtctttgcacgag

SEQ ID NO: 13822 - DNA, 22 bp, synthetic construct
  misc_feature 1..22: note = chemically synthesized
  source 1..22: mol_type = other DNA
agtctttgcacgagtgatcctc

SEQ ID NO: 13823 - DNA, 22 bp, synthetic construct
  misc_feature 1..22: note = chemically synthesized
  source 1..22: mol_type = other DNA
tgcacgagtgatcctctttgca

SEQ ID NO: 13824 - DNA, 22 bp, synthetic construct
  misc_feature 1..22: note = chemically synthesized
  source 1..22: mol_type = other DNA
gcacgagtgatcctctttgcat

SEQ ID NO: 13825 - DNA, 22 bp, synthetic construct
  misc_feature 1..22: note = chemically synthesized
  source 1..22: mol_type = other DNA
cacgagtgatcctctttgcata

SEQ ID NO: 13826 - DNA, 22 bp, synthetic construct
  misc_feature 1..22: note = chemically synthesized
  source 1..22: mol_type = other DNA
tttgcataaaatgcccttatat

SEQ ID NO: 13827 - DNA, 22 bp, synthetic construct
  misc_feature 1..22: note = chemically synthesized
  source 1..22: mol_type = other DNA
tgcataaaatgcccttatatca

SEQ ID NO: 13828 - DNA, 22 bp, synthetic construct
  misc_feature 1..22: note = chemically synthesized
  source 1..22: mol_type = other DNA
gcataaaatgcccttatatcag

SEQ ID NO: 13829 - DNA, 22 bp, synthetic construct
  misc_feature 1..22: note = chemically synthesized
  source 1..22: mol_type = other DNA
cataaaatgcccttatatcaga

SEQ ID NO: 13830 - DNA, 22 bp, synthetic construct
  misc_feature 1..22: note = chemically synthesized
  source 1..22: mol_type = other DNA
atatcagacatttaaagagaga

SEQ ID NO: 13831 - DNA, 22 bp, synthetic construct
  misc_feature 1..22: note = chemically synthesized
  source 1..22: mol_type = other DNA
tatcagacatttaaagagagag

SEQ ID NO: 13832 - DNA, 22 bp, synthetic construct
  misc_feature 1..22: note = chemically synthesized
  source 1..22: mol_type = other DNA
aaagagagagaacgcctactca

SEQ ID NO: 13833 - DNA, 22 bp, synthetic construct
  misc_feature 1..22: note = chemically synthesized
  source 1..22: mol_type = other DNA
aagagagagaacgcctactcat

SEQ ID NO: 13834 - DNA, 22 bp, synthetic construct
  misc_feature 1..22: note = chemically synthesized
  source 1..22: mol_type = other DNA
ctcatcttttaagacccagatg

SEQ ID NO: 13835 - DNA, 22 bp, synthetic construct
  misc_feature 1..22: note = chemically synthesized
  source 1..22: mol_type = other DNA
atcttttaagacccagatgaaa

SEQ ID NO: 13836 - DNA, 22 bp, synthetic construct
  misc_feature 1..22: note = chemically synthesized
  source 1..22: mol_type = other DNA
ttaagacccagatgaaaatatt

SEQ ID NO: 13837 - DNA, 22 bp, synthetic construct
  misc_feature 1..22: note = chemically synthesized
  source 1..22: mol_type = other DNA
taagacccagatgaaaatattc

SEQ ID NO: 13838 - DNA, 22 bp, synthetic construct
  misc_feature 1..22: note = chemically synthesized
  source 1..22: mol_type = other DNA
aagacccagatgaaaatattct

SEQ ID NO: 13839 - DNA, 22 bp, synthetic construct
  misc_feature 1..22: note = chemically synthesized
  source 1..22: mol_type = other DNA
agacccagatgaaaatattctc

SEQ ID NO: 13840 - DNA, 22 bp, synthetic construct
  misc_feature 1..22: note = chemically synthesized
  source 1..22: mol_type = other DNA
tctctctatcaattgtttcccc

SEQ ID NO: 13841 - DNA, 22 bp, synthetic construct
  misc_feature 1..22: note = chemically synthesized
  source 1..22: mol_type = other DNA
tctctatcaattgtttccccat

SEQ ID NO: 13842 - DNA, 22 bp, synthetic construct
  misc_feature 1..22: note = chemically synthesized
  source 1..22: mol_type = other DNA
tctatcaattgtttccccattt

SEQ ID NO: 13843 - DNA, 22 bp, synthetic construct
  misc_feature 1..22: note = chemically synthesized
  source 1..22: mol_type = other DNA
tatcaattgtttccccatttaa

SEQ ID NO: 13844 - DNA, 22 bp, synthetic construct
  misc_feature 1..22: note = chemically synthesized
  source 1..22: mol_type = other DNA
tcaattgtttccccatttaatg

SEQ ID NO: 13845 - DNA, 22 bp, synthetic construct
  misc_feature 1..22: note = chemically synthesized
  source 1..22: mol_type = other DNA
tttccccatttaatgtgttcct

SEQ ID NO: 13846 - DNA, 22 bp, synthetic construct
  misc_feature 1..22: note = chemically synthesized
  source 1..22: mol_type = other DNA
ccccatttaatgtgttcctttc

SEQ ID NO: 13847 - DNA, 22 bp, synthetic construct
  misc_feature 1..22: note = chemically synthesized
  source 1..22: mol_type = other DNA
cccatttaatgtgttcctttct

SEQ ID NO: 13848 - DNA, 22 bp, synthetic construct
  misc_feature 1..22: note = chemically synthesized
  source 1..22: mol_type = other DNA
aatgtgttcctttctctatgat

SEQ ID NO: 13849 - DNA, 22 bp, synthetic construct
  misc_feature 1..22: note = chemically synthesized
  source 1..22: mol_type = other DNA
atgtgttcctttctctatgatc

SEQ ID NO: 13850 - DNA, 22 bp, synthetic construct
  misc_feature 1..22: note = chemically synthesized
  source 1..22: mol_type = other DNA
ctttctctatgatcccttagta

SEQ ID NO: 13851 - DNA, 22 bp, synthetic construct
  misc_feature 1..22: note = chemically synthesized
  source 1..22: mol_type = other DNA
tctctatgatcccttagtacct

SEQ ID NO: 13852 - DNA, 22 bp, synthetic construct
  misc_feature 1..22: note = chemically synthesized
  source 1..22: mol_type = other DNA
ctctatgatcccttagtaccta

SEQ ID NO: 13853 - DNA, 22 bp, synthetic construct
  misc_feature 1..22: note = chemically synthesized
  source 1..22: mol_type = other DNA
tctatgatcccttagtacctag

SEQ ID NO: 13854 - DNA, 22 bp, synthetic construct
  misc_feature 1..22: note = chemically synthesized
  source 1..22: mol_type = other DNA
tatgatcccttagtacctagtg

SEQ ID NO: 13855 - DNA, 22 bp, synthetic construct
  misc_feature 1..22: note = chemically synthesized
  source 1..22: mol_type = other DNA
tgatcccttagtacctagtgca

SEQ ID NO: 13856 - DNA, 22 bp, synthetic construct
  misc_feature 1..22: note = chemically synthesized
  source 1..22: mol_type = other DNA
agtacctagtgcacattttatc

SEQ ID NO: 13857 - DNA, 22 bp, synthetic construct
  misc_feature 1..22: note = chemically synthesized
  source 1..22: mol_type = other DNA
gtacctagtgcacattttatca

SEQ ID NO: 13858 - DNA, 22 bp, synthetic construct
  misc_feature 1..22: note = chemically synthesized
  source 1..22: mol_type = other DNA
gtgcacattttatcacattata

SEQ ID NO: 13859 - DNA, 22 bp, synthetic construct
  misc_feature 1..22: note = chemically synthesized
  source 1..22: mol_type = other DNA
tatcacattatattgaaacctc

SEQ ID NO: 13860 - DNA, 22 bp, synthetic construct
  misc_feature 1..22: note = chemically synthesized
  source 1..22: mol_type = other DNA
atcacattatattgaaacctct

SEQ ID NO: 13861 - DNA, 22 bp, synthetic construct
  misc_feature 1..22: note = chemically synthesized
  source 1..22: mol_type = other DNA
tcacattatattgaaacctctc

SEQ ID NO: 13862 - DNA, 22 bp, synthetic construct
  misc_feature 1..22: note = chemically synthesized
  source 1..22: mol_type = other DNA
tattgaaacctctcacctggcc

SEQ ID NO: 13863 - DNA, 22 bp, synthetic construct
  misc_feature 1..22: note = chemically synthesized
  source 1..22: mol_type = other DNA
aaacctctcacctggcctcatg

SEQ ID NO: 13864 - DNA, 22 bp, synthetic construct
  misc_feature 1..22: note = chemically synthesized
  source 1..22: mol_type = other DNA
tcacctggcctcatgctgcttt

SEQ ID NO: 13865 - DNA, 22 bp, synthetic construct
  misc_feature 1..22: note = chemically synthesized
  source 1..22: mol_type = other DNA
acctggcctcatgctgctttag

SEQ ID NO: 13866 - DNA, 22 bp, synthetic construct
  misc_feature 1..22: note = chemically synthesized
  source 1..22: mol_type = other DNA
gcctcatgctgctttagatcaa

SEQ ID NO: 13867 - DNA, 22 bp, synthetic construct
  misc_feature 1..22: note = chemically synthesized
  source 1..22: mol_type = other DNA
atgctgctttagatcaaagagg

SEQ ID NO: 13868 - DNA, 22 bp, synthetic construct
  misc_feature 1..22: note = chemically synthesized
  source 1..22: mol_type = other DNA
ctttagatcaaagagggagtct

SEQ ID NO: 13869 - DNA, 22 bp, synthetic construct
  misc_feature 1..22: note = chemically synthesized
  source 1..22: mol_type = other DNA
tagatcaaagagggagtctggt

SEQ ID NO: 13870 - DNA, 22 bp, synthetic construct
  misc_feature 1..22: note = chemically synthesized
  source 1..22: mol_type = other DNA
agatcaaagagggagtctggtt

SEQ ID NO: 13871 - DNA, 22 bp, synthetic construct
  misc_feature 1..22: note = chemically synthesized
  source 1..22: mol_type = other DNA
gatcaaagagggagtctggttt

SEQ ID NO: 13872 - DNA, 22 bp, synthetic construct
  misc_feature 1..22: note = chemically synthesized
  source 1..22: mol_type = other DNA
gtttatccccatacccctagta

SEQ ID NO: 13873 - DNA, 22 bp, synthetic construct
  misc_feature 1..22: note = chemically synthesized
  source 1..22: mol_type = other DNA
atccccatacccctagtaccct

SEQ ID NO: 13874 - DNA, 22 bp, synthetic construct
  misc_feature 1..22: note = chemically synthesized
  source 1..22: mol_type = other DNA
tccccatacccctagtaccctg

SEQ ID NO: 13875 - DNA, 22 bp, synthetic construct
  misc_feature 1..22: note = chemically synthesized
  source 1..22: mol_type = other DNA
gtaccctgacacagtacctggc

SEQ ID NO: 13876 - DNA, 22 bp, synthetic construct
  misc_feature 1..22: note = chemically synthesized
  source 1..22: mol_type = other DNA
acacagtacctggcaccatagt

SEQ ID NO: 13877 - DNA, 22 bp, synthetic construct
  misc_feature 1..22: note = chemically synthesized
  source 1..22: mol_type = other DNA
gcaccatagttgtaactcagta

SEQ ID NO: 13878 - DNA, 22 bp, synthetic construct
  misc_feature 1..22: note = chemically synthesized
  source 1..22: mol_type = other DNA
taactcagtaatgtctgaatga

SEQ ID NO: 13879 - DNA, 22 bp, synthetic construct
  misc_feature 1..22: note = chemically synthesized
  source 1..22: mol_type = other DNA
agtaatgtctgaatgaaggaca

SEQ ID NO: 13880 - DNA, 22 bp, synthetic construct
  misc_feature 1..22: note = chemically synthesized
  source 1..22: mol_type = other DNA
aatgaaggacatctttgatgca

SEQ ID NO: 13881 - DNA, 22 bp, synthetic construct
  misc_feature 1..22: note = chemically synthesized
  source 1..22: mol_type = other DNA
tgatgcatacactttacaaaac

SEQ ID NO: 13882 - DNA, 22 bp, synthetic construct
  misc_feature 1..22: note = chemically synthesized
  source 1..22: mol_type = other DNA
gatgcatacactttacaaaact

SEQ ID NO: 13883 - DNA, 22 bp, synthetic construct
  misc_feature 1..22: note = chemically synthesized
  source 1..22: mol_type = other DNA
atgcatacactttacaaaacta

SEQ ID NO: 13884 - DNA, 22 bp, synthetic construct
  misc_feature 1..22: note = chemically synthesized
  source 1..22: mol_type = other DNA
tacaaaactaaactggttttac

SEQ ID NO: 13885 - DNA, 22 bp, synthetic construct
  misc_feature 1..22: note = chemically synthesized
  source 1..22: mol_type = other DNA
acaaaactaaactggttttaca

SEQ ID NO: 13886 - DNA, 22 bp, synthetic construct
  misc_feature 1..22: note = chemically synthesized
  source 1..22: mol_type = other DNA
caaaactaaactggttttacag

SEQ ID NO: 13887 - DNA, 22 bp, synthetic construct
  misc_feature 1..22: note = chemically synthesized
  source 1..22: mol_type = other DNA
aactggttttacagaactgttt

SEQ ID NO: 13888 - DNA, 22 bp, synthetic construct
  misc_feature 1..22: note = chemically synthesized
  source 1..22: mol_type = other DNA
gttttacagaactgttttaatt

SEQ ID NO: 13889 - DNA, 22 bp, synthetic construct
  misc_feature 1..22: note = chemically synthesized
  source 1..22: mol_type = other DNA
tacagaactgttttaatttcaa

SEQ ID NO: 13890 - DNA, 22 bp, synthetic construct
  misc_feature 1..22: note = chemically synthesized
  source 1..22: mol_type = other DNA
acagaactgttttaatttcaaa

SEQ ID NO: 13891 - DNA, 22 bp, synthetic construct
  misc_feature 1..22: note = chemically synthesized
  source 1..22: mol_type = other DNA
cagaactgttttaatttcaaaa

SEQ ID NO: 13892 - DNA, 22 bp, synthetic construct
  misc_feature 1..22: note = chemically synthesized
  source 1..22: mol_type = other DNA
ttttaatttcaaaattccaaac

SEQ ID NO: 13893 - DNA, 22 bp, synthetic construct
  misc_feature 1..22: note = chemically synthesized
  source 1..22: mol_type = other DNA
taatttcaaaattccaaactgt

SEQ ID NO: 13894 - DNA, 22 bp, synthetic construct
  misc_feature 1..22: note = chemically synthesized
  source 1..22: mol_type = other DNA
aatttcaaaattccaaactgtt

SEQ ID NO: 13895 - DNA, 22 bp, synthetic construct
  misc_feature 1..22: note = chemically synthesized
  source 1..22: mol_type = other DNA
atttcaaaattccaaactgttg

SEQ ID NO: 13896 - DNA, 22 bp, synthetic construct
  misc_feature 1..22: note = chemically synthesized
  source 1..22: mol_type = other DNA
caaaattccaaactgttgcaat

SEQ ID NO: 13897 - DNA, 22 bp, synthetic construct
  misc_feature 1..22: note = chemically synthesized
  source 1..22: mol_type = other DNA
aaaattccaaactgttgcaata

SEQ ID NO: 13898 - DNA, 22 bp, synthetic construct
  misc_feature 1..22: note = chemically synthesized
  source 1..22: mol_type = other DNA
caaactgttgcaataataccta

SEQ ID NO: 13899 - DNA, 22 bp, synthetic construct
  misc_feature 1..22: note = chemically synthesized
  source 1..22: mol_type = other DNA
ttgcaataatacctaaaggcag

SEQ ID NO: 13900 - DNA, 22 bp, synthetic construct
  misc_feature 1..22: note = chemically synthesized
  source 1..22: mol_type = other DNA
caataatacctaaaggcagcag

SEQ ID NO: 13901 - DNA, 22 bp, synthetic construct
  misc_feature 1..22: note = chemically synthesized
  source 1..22: mol_type = other DNA
aaggcagcagccatgaaaatgc

SEQ ID NO: 13902 - DNA, 22 bp, synthetic construct
  misc_feature 1..22: note = chemically synthesized
  source 1..22: mol_type = other DNA
agcaaatcactcaccgaaactc

SEQ ID NO: 13903 - DNA, 22 bp, synthetic construct
  misc_feature 1..22: note = chemically synthesized
  source 1..22: mol_type = other DNA
accgaaactccttttagaagcc

SEQ ID NO: 13904 - DNA, 22 bp, synthetic construct
  misc_feature 1..22: note = chemically synthesized
  source 1..22: mol_type = other DNA
cttttagaagccaatgagagtt

SEQ ID NO: 13905 - DNA, 22 bp, synthetic construct
  misc_feature 1..22: note = chemically synthesized
  source 1..22: mol_type = other DNA
ttagaagccaatgagagtttaa

SEQ ID NO: 13906 - DNA, 22 bp, synthetic construct
  misc_feature 1..22: note = chemically synthesized
  source 1..22: mol_type = other DNA
tagaagccaatgagagtttaat

SEQ ID NO: 13907 - DNA, 22 bp, synthetic construct
  misc_feature 1..22: note = chemically synthesized
  source 1..22: mol_type = other DNA
agaagccaatgagagtttaata

SEQ ID NO: 13908 - DNA, 22 bp, synthetic construct
  misc_feature 1..22: note = chemically synthesized
  source 1..22: mol_type = other DNA
gaagccaatgagagtttaatag

SEQ ID NO: 13909 - DNA, 22 bp, synthetic construct
  misc_feature 1..22: note = chemically synthesized
  source 1..22: mol_type = other DNA
aatagcagaagagagtgctgca

SEQ ID NO: 13910 - DNA, 22 bp, synthetic construct
  misc_feature 1..22: note = chemically synthesized
  source 1..22: mol_type = other DNA
atagcagaagagagtgctgcat

SEQ ID NO: 13911 - DNA, 22 bp, synthetic construct
  misc_feature 1..22: note = chemically synthesized
  source 1..22: mol_type = other DNA
cattaatactgtctatccttag

SEQ ID NO: 13912 - DNA, 22 bp, synthetic construct
  misc_feature 1..22: note = chemically synthesized
  source 1..22: mol_type = other DNA
atactgtctatccttagaaaaa

SEQ ID NO: 13913 - DNA, 22 bp, synthetic construct
  misc_feature 1..22: note = chemically synthesized
  source 1..22: mol_type = other DNA
tctatccttagaaaaattcccc

SEQ ID NO: 13914 - DNA, 22 bp, synthetic construct
  misc_feature 1..22: note = chemically synthesized
  source 1..22: mol_type = other DNA
tccttagaaaaattcccctggc

SEQ ID NO: 13915 - DNA, 22 bp, synthetic construct
  misc_feature 1..22: note = chemically synthesized
  source 1..22: mol_type = other DNA
agaaaaattcccctggcccctt

SEQ ID NO: 13916 - DNA, 22 bp, synthetic construct
  misc_feature 1..22: note = chemically synthesized
  source 1..22: mol_type = other DNA
gaaaaattcccctggccccttc

SEQ ID NO: 13917 - DNA, 22 bp, synthetic construct
  misc_feature 1..22: note = chemically synthesized
  source 1..22: mol_type = other DNA
ccctggccccttcctcaagggc

SEQ ID NO: 13918 - DNA, 22 bp, synthetic construct
  misc_feature 1..22: note = chemically synthesized
  source 1..22: mol_type = other DNA
gccccttcctcaagggcttatt

SEQ ID NO: 13919 - DNA, 22 bp, synthetic construct
  misc_feature 1..22: note = chemically synthesized
  source 1..22: mol_type = other DNA
cctcaagggcttattatctctg

SEQ ID NO: 13920 - DNA, 22 bp, synthetic construct
  misc_feature 1..22: note = chemically synthesized
  source 1..22: mol_type = other DNA
ctcaagggcttattatctctgg

SEQ ID NO: 13921 - DNA, 22 bp, synthetic construct
  misc_feature 1..22: note = chemically synthesized
  source 1..22: mol_type = other DNA
aagggcttattatctctggcta

SEQ ID NO: 13922 - DNA, 22 bp, synthetic construct
  misc_feature 1..22: note = chemically synthesized
  source 1..22: mol_type = other DNA
attatctctggctacaatggct

SEQ ID NO: 13923 - DNA, 22 bp, synthetic construct
  misc_feature 1..22: note = chemically synthesized
  source 1..22: mol_type = other DNA
ttatctctggctacaatggctg

SEQ ID NO: 13924 - DNA, 22 bp, synthetic construct
  misc_feature 1..22: note = chemically synthesized
  source 1..22: mol_type = other DNA
tctctggctacaatggctgcag

SEQ ID NO: 13925 - DNA, 22 bp, synthetic construct
  misc_feature 1..22: note = chemically synthesized
  source 1..22: mol_type = other DNA
tggctacaatggctgcagaatc

SEQ ID NO: 13926 - DNA, 22 bp, synthetic construct
  misc_feature 1..22: note = chemically synthesized
  source 1..22: mol_type = other DNA
gctacaatggctgcagaatcac

SEQ ID NO: 13927 - DNA, 22 bp, synthetic construct
  misc_feature 1..22: note = chemically synthesized
  source 1..22: mol_type = other DNA
caatggctgcagaatcacattg

SEQ ID NO: 13928 - DNA, 22 bp, synthetic construct
  misc_feature 1..22: note = chemically synthesized
  source 1..22: mol_type = other DNA
cagaatcacattgcctttctcc

SEQ ID NO: 13929 - DNA, 22 bp, synthetic construct
  misc_feature 1..22: note = chemically synthesized
  source 1..22: mol_type = other DNA
cctttctccttagtattatctg

SEQ ID NO: 13930 - DNA, 22 bp, synthetic construct
  misc_feature 1..22: note = chemically synthesized
  source 1..22: mol_type = other DNA
tctccttagtattatctgggga

SEQ ID NO: 13931 - DNA, 22 bp, synthetic construct
  misc_feature 1..22: note = chemically synthesized
  source 1..22: mol_type = other DNA
ctccttagtattatctggggat

SEQ ID NO: 13932 - DNA, 22 bp, synthetic construct
  misc_feature 1..22: note = chemically synthesized
  source 1..22: mol_type = other DNA
tccttagtattatctggggatc

SEQ ID NO: 13933 - DNA, 22 bp, synthetic construct
  misc_feature 1..22: note = chemically synthesized
  source 1..22: mol_type = other DNA
cttagtattatctggggatcgt

SEQ ID NO: 13934 - DNA, 22 bp, synthetic construct
  misc_feature 1..22: note = chemically synthesized
  source 1..22: mol_type = other DNA
agtattatctggggatcgtata

SEQ ID NO: 13935 - DNA, 22 bp, synthetic construct
  misc_feature 1..22: note = chemically synthesized
  source 1..22: mol_type = other DNA
gtattatctggggatcgtatac

SEQ ID NO: 13936 - DNA, 22 bp, synthetic construct
  misc_feature 1..22: note = chemically synthesized
  source 1..22: mol_type = other DNA
tctggggatcgtatacttaact

SEQ ID NO: 13937 - DNA, 22 bp, synthetic construct
  misc_feature 1..22: note = chemically synthesized
  source 1..22: mol_type = other DNA
gggatcgtatacttaacttccc

SEQ ID NO: 13938 - DNA, 22 bp, synthetic construct
  misc_feature 1..22: note = chemically synthesized
  source 1..22: mol_type = other DNA
aacttcccttcaggtttatcgc

SEQ ID NO: 13939 - DNA, 22 bp, synthetic construct
  misc_feature 1..22: note = chemically synthesized
  source 1..22: mol_type = other DNA
acttcccttcaggtttatcgct

SEQ ID NO: 13940 - DNA, 22 bp, synthetic construct
  misc_feature 1..22: note = chemically synthesized
  source 1..22: mol_type = other DNA
cccttcaggtttatcgctagtc

SEQ ID NO: 13941 - DNA, 22 bp, synthetic construct
  misc_feature 1..22: note = chemically synthesized
  source 1..22: mol_type = other DNA
ccttcaggtttatcgctagtca

SEQ ID NO: 13942 - DNA, 22 bp, synthetic construct
  misc_feature 1..22: note = chemically synthesized
  source 1..22: mol_type = other DNA
caggtttatcgctagtcattat

SEQ ID NO: 13943 - DNA, 22 bp, synthetic construct
  misc_feature 1..22: note = chemically synthesized
  source 1..22: mol_type = other DNA
aggtttatcgctagtcattatt

SEQ ID NO: 13944 - DNA, 22 bp, synthetic construct
  misc_feature 1..22: note = chemically synthesized
  source 1..22: mol_type = other DNA
atcgctagtcattatttcccag

SEQ ID NO: 13945 - DNA, 22 bp, synthetic construct
  misc_feature 1..22: note = chemically synthesized
  source 1..22: mol_type = other DNA
tcgctagtcattatttcccagg

SEQ ID NO: 13946 - DNA, 22 bp, synthetic construct
  misc_feature 1..22: note = chemically synthesized
  source 1..22: mol_type = other DNA
gtcattatttcccaggctccaa

SEQ ID NO: 13947 - DNA, 22 bp, synthetic construct
  misc_feature 1..22: note = chemically synthesized
  source 1..22: mol_type = other DNA
tttcccaggctccaaaagcctg

SEQ ID NO: 13948 - DNA, 22 bp, synthetic construct
  misc_feature 1..22: note = chemically synthesized
  source 1..22: mol_type = other DNA
cccaggctccaaaagcctggtt

SEQ ID NO: 13949 - DNA, 22 bp, synthetic construct
  misc_feature 1..22: note = chemically synthesized
  source 1..22: mol_type = other DNA
ccaggctccaaaagcctggttc

SEQ ID NO: 13950 - DNA, 22 bp, synthetic construct
  misc_feature 1..22: note = chemically synthesized
  source 1..22: mol_type = other DNA
caaaagcctggttcatccttat

SEQ ID NO: 13951 - DNA, 22 bp, synthetic construct
  misc_feature 1..22: note = chemically synthesized
  source 1..22: mol_type = other DNA
gttcatccttattcttatctat

SEQ ID NO: 13952 - DNA, 22 bp, synthetic construct
  misc_feature 1..22: note = chemically synthesized
  source 1..22: mol_type = other DNA
atccttattcttatctatcctt

SEQ ID NO: 13953 - DNA, 22 bp, synthetic construct
  misc_feature 1..22: note = chemically synthesized
  source 1..22: mol_type = other DNA
attcttatctatcctttcccca

SEQ ID NO: 13954 - DNA, 22 bp, synthetic construct
  misc_feature 1..22: note = chemically synthesized
  source 1..22: mol_type = other DNA
ttcttatctatcctttccccag

SEQ ID NO: 13955 - DNA, 22 bp, synthetic construct
  misc_feature 1..22: note = chemically synthesized
  source 1..22: mol_type = other DNA
ttatctatcctttccccagcat

SEQ ID NO: 13956 - DNA, 22 bp, synthetic construct
  misc_feature 1..22: note = chemically synthesized
  source 1..22: mol_type = other DNA
atctatcctttccccagcatct

SEQ ID NO: 13957 - DNA, 22 bp, synthetic construct
  misc_feature 1..22: note = chemically synthesized
  source 1..22: mol_type = other DNA
tctatcctttccccagcatctg

SEQ ID NO: 13958 - DNA, 22 bp, synthetic construct
  misc_feature 1..22: note = chemically synthesized
  source 1..22: mol_type = other DNA
tcctttccccagcatctgaagt

SEQ ID NO: 13959 - DNA, 22 bp, synthetic construct
  misc_feature 1..22: note = chemically synthesized
  source 1..22: mol_type = other DNA
tccccagcatctgaagtcttca

SEQ ID NO: 13960 - DNA, 22 bp, synthetic construct
  misc_feature 1..22: note = chemically synthesized
  source 1..22: mol_type = other DNA
ccccagcatctgaagtcttcaa

SEQ ID NO: 13961 - DNA, 22 bp, synthetic construct
  misc_feature 1..22: note = chemically synthesized
  source 1..22: mol_type = other DNA
cccagcatctgaagtcttcaag

SEQ ID NO: 13962 - DNA, 22 bp, synthetic construct
  misc_feature 1..22: note = chemically synthesized
  source 1..22: mol_type = other DNA
aagtcttcaagggggcagaagc

SEQ ID NO: 13963 - DNA, 22 bp, synthetic construct
  misc_feature 1..22: note = chemically synthesized
  source 1..22: mol_type = other DNA
caagggggcagaagccctctta

SEQ ID NO: 13964 - DNA, 22 bp, synthetic construct
  misc_feature 1..22: note = chemically synthesized
  source 1..22: mol_type = other DNA
aagggggcagaagccctcttac

SEQ ID NO: 13965 - DNA, 22 bp, synthetic construct
  misc_feature 1..22: note = chemically synthesized
  source 1..22: mol_type = other DNA
ttacaaccttcatcatctcacc

SEQ ID NO: 13966 - DNA, 22 bp, synthetic construct
  misc_feature 1..22: note = chemically synthesized
  source 1..22: mol_type = other DNA
acaaccttcatcatctcaccac

SEQ ID NO: 13967 - DNA, 22 bp, synthetic construct
  misc_feature 1..22: note = chemically synthesized
  source 1..22: mol_type = other DNA
caaccttcatcatctcaccact

SEQ ID NO: 13968 - DNA, 22 bp, synthetic construct
  misc_feature 1..22: note = chemically synthesized
  source 1..22: mol_type = other DNA
catcatctcaccacttatatag

SEQ ID NO: 13969 - DNA, 22 bp, synthetic construct
  misc_feature 1..22: note = chemically synthesized
  source 1..22: mol_type = other DNA
atcatctcaccacttatataga

SEQ ID NO: 13970 - DNA, 22 bp, synthetic construct
  misc_feature 1..22: note = chemically synthesized
  source 1..22: mol_type = other DNA
accacttatatagaagaaaggg

SEQ ID NO: 13971 - DNA, 22 bp, synthetic construct
  misc_feature 1..22: note = chemically synthesized
  source 1..22: mol_type = other DNA
atatagaagaaagggtttggat

SEQ ID NO: 13972 - DNA, 22 bp, synthetic construct
  misc_feature 1..22: note = chemically synthesized
  source 1..22: mol_type = other DNA
tatagaagaaagggtttggatg

SEQ ID NO: 13973 - DNA, 22 bp, synthetic construct
  misc_feature 1..22: note = chemically synthesized
  source 1..22: mol_type = other DNA
ggatgctttgtcctcccagatg

SEQ ID NO: 13974 - DNA, 22 bp, synthetic construct
  misc_feature 1..22: note = chemically synthesized
  source 1..22: mol_type = other DNA
gatgctttgtcctcccagatgt

SEQ ID NO: 13975 - DNA, 22 bp, synthetic construct
  misc_feature 1..22: note = chemically synthesized
  source 1..22: mol_type = other DNA
tgtcctcccagatgtcacacta

SEQ ID NO: 13976 - DNA, 22 bp, synthetic construct
  misc_feature 1..22: note = chemically synthesized
  source 1..22: mol_type = other DNA
gtcctcccagatgtcacactaa

SEQ ID NO: 13977 - DNA, 22 bp, synthetic construct
  misc_feature 1..22: note = chemically synthesized
  source 1..22: mol_type = other DNA
tcctcccagatgtcacactaat

SEQ ID NO: 13978 - DNA, 22 bp, synthetic construct
  misc_feature 1..22: note = chemically synthesized
  source 1..22: mol_type = other DNA
ccagatgtcacactaatgagat

SEQ ID NO: 13979 - DNA, 22 bp, synthetic construct
  misc_feature 1..22: note = chemically synthesized
  source 1..22: mol_type = other DNA
atgagatatatctaatggcctt

SEQ ID NO: 13980 - DNA, 22 bp, synthetic construct
  misc_feature 1..22: note = chemically synthesized
  source 1..22: mol_type = other DNA
atggccttgctttatgtcctgc

SEQ ID NO: 13981 - DNA, 22 bp, synthetic construct
  misc_feature 1..22: note = chemically synthesized
  source 1..22: mol_type = other DNA
gctttatgtcctgctttgtgag

SEQ ID NO: 13982 - DNA, 22 bp, synthetic construct
  misc_feature 1..22: note = chemically synthesized
  source 1..22: mol_type = other DNA
ctttatgtcctgctttgtgagt

SEQ ID NO: 13983 - DNA, 22 bp, synthetic construct
  misc_feature 1..22: note = chemically synthesized
  source 1..22: mol_type = other DNA
tatgtcctgctttgtgagtttt

SEQ ID NO: 13984 - DNA, 22 bp, synthetic construct
  misc_feature 1..22: note = chemically synthesized
  source 1..22: mol_type = other DNA
atgtcctgctttgtgagttttc

SEQ ID NO: 13985 - DNA, 22 bp, synthetic construct
  misc_feature 1..22: note = chemically synthesized
  source 1..22: mol_type = other DNA
tgtcctgctttgtgagttttcc

SEQ ID NO: 13986 - DNA, 22 bp, synthetic construct
  misc_feature 1..22: note = chemically synthesized
  source 1..22: mol_type = other DNA
ctttgtgagttttccaacaaat

SEQ ID NO: 13987 - DNA, 22 bp, synthetic construct
  misc_feature 1..22: note = chemically synthesized
  source 1..22: mol_type = other DNA
tgtgagttttccaacaaatttt

SEQ ID NO: 13988 - DNA, 22 bp, synthetic construct
  misc_feature 1..22: note = chemically synthesized
  source 1..22: mol_type = other DNA
gtgagttttccaacaaattttc

SEQ ID NO: 13989 - DNA, 22 bp, synthetic construct
  misc_feature 1..22: note = chemically synthesized
  source 1..22: mol_type = other DNA
tgagttttccaacaaattttct

SEQ ID NO: 13990 - DNA, 22 bp, synthetic construct
  misc_feature 1..22: note = chemically synthesized
  source 1..22: mol_type = other DNA
tccaacaaattttctttatccc

SEQ ID NO: 13991 - DNA, 22 bp, synthetic construct
  misc_feature 1..22: note = chemically synthesized
  source 1..22: mol_type = other DNA
ccaacaaattttctttatccct

SEQ ID NO: 13992 - DNA, 22 bp, synthetic construct
  misc_feature 1..22: note = chemically synthesized
  source 1..22: mol_type = other DNA
caacaaattttctttatccctt

SEQ ID NO: 13993 - DNA, 22 bp, synthetic construct
  misc_feature 1..22: note = chemically synthesized
  source 1..22: mol_type = other DNA
tctttatcccttgactttactc

SEQ ID NO: 13994 - DNA, 22 bp, synthetic construct
  misc_feature 1..22: note = chemically synthesized
  source 1..22: mol_type = other DNA
ctttatcccttgactttactca

SEQ ID NO: 13995 - DNA, 22 bp, synthetic construct
  misc_feature 1..22: note = chemically synthesized
  source 1..22: mol_type = other DNA
tttatcccttgactttactcac

SEQ ID NO: 13996 - DNA, 22 bp, synthetic construct
  misc_feature 1..22: note = chemically synthesized
  source 1..22: mol_type = other DNA
tatcccttgactttactcactt

SEQ ID NO: 13997 - DNA, 22 bp, synthetic construct
  misc_feature 1..22: note = chemically synthesized
  source 1..22: mol_type = other DNA
atcccttgactttactcacttt

SEQ ID NO: 13998 - DNA, 22 bp, synthetic construct
  misc_feature 1..22: note = chemically synthesized
  source 1..22: mol_type = other DNA
tcccttgactttactcactttg

SEQ ID NO: 13999 - DNA, 22 bp, synthetic construct
  misc_feature 1..22: note = chemically synthesized
  source 1..22: mol_type = other DNA
gactttactcactttgctagtt

SEQ ID NO: 14000 - DNA, 22 bp, synthetic construct
  misc_feature 1..22: note = chemically synthesized
  source 1..22: mol_type = other DNA
actttactcactttgctagttt

SEQ ID NO: 14001 - DNA, 22 bp, synthetic construct
  misc_feature 1..22: note = chemically synthesized
  source 1..22: mol_type = other DNA
tactcactttgctagtttaacc

SEQ ID NO: 14002 - DNA, 22 bp, synthetic construct
  misc_feature 1..22: note = chemically synthesized
  source 1..22: mol_type = other DNA
actcactttgctagtttaacct

SEQ ID NO: 14003 - DNA, 22 bp, synthetic construct
  misc_feature 1..22: note = chemically synthesized
  source 1..22: mol_type = other DNA
ctcactttgctagtttaacctc

SEQ ID NO: 14004 - DNA, 22 bp, synthetic construct
  misc_feature 1..22: note = chemically synthesized
  source 1..22: mol_type = other DNA
actttgctagtttaacctctgt

SEQ ID NO: 14005 - DNA, 22 bp, synthetic construct
  misc_feature 1..22: note = chemically synthesized
  source 1..22: mol_type = other DNA
tgctagtttaacctctgtattt

SEQ ID NO: 14006 - DNA, 22 bp, synthetic construct
  misc_feature 1..22: note = chemically synthesized
  source 1..22: mol_type = other DNA
gctagtttaacctctgtatttt

SEQ ID NO: 14007 - DNA, 22 bp, synthetic construct
  misc_feature 1..22: note = chemically synthesized
  source 1..22: mol_type = other DNA
ctagtttaacctctgtattttt

SEQ ID NO: 14008 - DNA, 22 bp, synthetic construct
  misc_feature 1..22: note = chemically synthesized
  source 1..22: mol_type = other DNA
gtttaacctctgtatttttttt

SEQ ID NO: 14009 - DNA, 22 bp, synthetic construct
  misc_feature 1..22: note = chemically synthesized
  source 1..22: mol_type = other DNA
aacctctgtatttttttttatc

SEQ ID NO: 14010 - DNA, 22 bp, synthetic construct
  misc_feature 1..22: note = chemically synthesized
  source 1..22: mol_type = other DNA
acctctgtatttttttttatcg

SEQ ID NO: 14011 - DNA, 22 bp, synthetic construct
  misc_feature 1..22: note = chemically synthesized
  source 1..22: mol_type = other DNA
tgtatttttttttatcgttatt

SEQ ID NO: 14012 - DNA, 22 bp, synthetic construct
  misc_feature 1..22: note = chemically synthesized
  source 1..22: mol_type = other DNA
tatttttttttatcgttatttc

SEQ ID NO: 14013 - DNA, 22 bp, synthetic construct
  misc_feature 1..22: note = chemically synthesized
  source 1..22: mol_type = other DNA
ttttttatcgttatttcagcat

SEQ ID NO: 14014 - DNA, 22 bp, synthetic construct
  misc_feature 1..22: note = chemically synthesized
  source 1..22: mol_type = other DNA
tttttatcgttatttcagcatt

SEQ ID NO: 14015 - DNA, 22 bp, synthetic construct
  misc_feature 1..22: note = chemically synthesized
  source 1..22: mol_type = other DNA
ttttatcgttatttcagcattt

SEQ ID NO: 14016 - DNA, 22 bp, synthetic construct
  misc_feature 1..22: note = chemically synthesized
  source 1..22: mol_type = other DNA
tttatcgttatttcagcatttc

SEQ ID NO: 14017 - DNA, 22 bp, synthetic construct
  misc_feature 1..22: note = chemically synthesized
  source 1..22: mol_type = other DNA
ttatcgttatttcagcatttca

SEQ ID NO: 14018 - DNA, 22 bp, synthetic construct
  misc_feature 1..22: note = chemically synthesized
  source 1..22: mol_type = other DNA
tatcgttatttcagcatttcag

SEQ ID NO: 14019 - DNA, 22 bp, synthetic construct
  misc_feature 1..22: note = chemically synthesized
  source 1..22: mol_type = other DNA
atcgttatttcagcatttcagt

SEQ ID NO: 14020 - DNA, 22 bp, synthetic construct
  misc_feature 1..22: note = chemically synthesized
  source 1..22: mol_type = other DNA
tcgttatttcagcatttcagtc

SEQ ID NO: 14021 - DNA, 22 bp, synthetic construct
  misc_feature 1..22: note = chemically synthesized
  source 1..22: mol_type = other DNA
tttcagcatttcagtctgattt

SEQ ID NO: 14022 - DNA, 22 bp, synthetic construct
  misc_feature 1..22: note = chemically synthesized
  source 1..22: mol_type = other DNA
cagcatttcagtctgatttcac

SEQ ID NO: 14023 - DNA, 22 bp, synthetic construct
  misc_feature 1..22: note = chemically synthesized
  source 1..22: mol_type = other DNA
agcatttcagtctgatttcaca

SEQ ID NO: 14024 - DNA, 22 bp, synthetic construct
  misc_feature 1..22: note = chemically synthesized
  source 1..22: mol_type = other DNA
cagtctgatttcacagctgaca

SEQ ID NO: 14025 - DNA, 22 bp, synthetic construct
  misc_feature 1..22: note = chemically synthesized
  source 1..22: mol_type = other DNA
agtctgatttcacagctgacat

SEQ ID NO: 14026 - DNA, 22 bp, synthetic construct
  misc_feature 1..22: note = chemically synthesized
  source 1..22: mol_type = other DNA
atttcacagctgacatcatgtc

SEQ ID NO: 14027 - DNA, 22 bp, synthetic construct
  misc_feature 1..22: note = chemically synthesized
  source 1..22: mol_type = other DNA
cacagctgacatcatgtctgga

SEQ ID NO: 14028 - DNA, 22 bp, synthetic construct
  misc_feature 1..22: note = chemically synthesized
  source 1..22: mol_type = other DNA
acagctgacatcatgtctggag

SEQ ID NO: 14029 - DNA, 22 bp, synthetic construct
  misc_feature 1..22: note = chemically synthesized
  source 1..22: mol_type = other DNA
acatcatgtctggagtgggaac

SEQ ID NO: 14030 - DNA, 22 bp, synthetic construct
  misc_feature 1..22: note = chemically synthesized
  source 1..22: mol_type = other DNA
gagtgggaaccacagggccagt

SEQ ID NO: 14031 - DNA, 22 bp, synthetic construct
  misc_feature 1..22: note = chemically synthesized
  source 1..22: mol_type = other DNA
tctgggggtgcttagggttggc

SEQ ID NO: 14032 - DNA, 22 bp, synthetic construct
  misc_feature 1..22: note = chemically synthesized
  source 1..22: mol_type = other DNA
ctgggggtgcttagggttggca

SEQ ID NO: 14033 - DNA, 22 bp, synthetic construct
  misc_feature 1..22: note = chemically synthesized
  source 1..22: mol_type = other DNA
tgggggtgcttagggttggcac

SEQ ID NO: 14034 - DNA, 22 bp, synthetic construct
  misc_feature 1..22: note = chemically synthesized
  source 1..22: mol_type = other DNA
ggggtgcttagggttggcaccc

SEQ ID NO: 14035 - DNA, 22 bp, synthetic construct
  misc_feature 1..22: note = chemically synthesized
  source 1..22: mol_type = other DNA
agggttggcacccctgatcctg

SEQ ID NO: 14036 - DNA, 22 bp, synthetic construct
  misc_feature 1..22: note = chemically synthesized
  source 1..22: mol_type = other DNA
gggttggcacccctgatcctgg

SEQ ID NO: 14037 - DNA, 22 bp, synthetic construct
  misc_feature 1..22: note = chemically synthesized
  source 1..22: mol_type = other DNA
gcacccctgatcctggtactgt

SEQ ID NO: 14038 - DNA, 22 bp, synthetic construct
  misc_feature 1..22: note = chemically synthesized
  source 1..22: mol_type = other DNA
atcctggtactgtcagctacta

SEQ ID NO: 14039 - DNA, 22 bp, synthetic construct
  misc_feature 1..22: note = chemically synthesized
  source 1..22: mol_type = other DNA
gtactgtcagctactagatttg

SEQ ID NO: 14040 - DNA, 22 bp, synthetic construct
  misc_feature 1..22: note = chemically synthesized
  source 1..22: mol_type = other DNA
tcagctactagatttgattcta

SEQ ID NO: 14041 - DNA, 22 bp, synthetic construct
  misc_feature 1..22: note = chemically synthesized
  source 1..22: mol_type = other DNA
ctagatttgattctagaaagtt

SEQ ID NO: 14042 - DNA, 22 bp, synthetic construct
  misc_feature 1..22: note = chemically synthesized
  source 1..22: mol_type = other DNA
gatttgattctagaaagttgac

SEQ ID NO: 14043 - DNA, 22 bp, synthetic construct
  misc_feature 1..22: note = chemically synthesized
  source 1..22: mol_type = other DNA
gattctagaaagttgacaagta

SEQ ID NO: 14044 - DNA, 22 bp, synthetic construct
  misc_feature 1..22: note = chemically synthesized
  source 1..22: mol_type = other DNA
attctagaaagttgacaagtaa

SEQ ID NO: 14045 - DNA, 22 bp, synthetic construct
  misc_feature 1..22: note = chemically synthesized
  source 1..22: mol_type = other DNA
tagaaagttgacaagtaagtgt

SEQ ID NO: 14046 - DNA, 22 bp, synthetic construct
  misc_feature 1..22: note = chemically synthesized
  source 1..22: mol_type = other DNA
gaaagttgacaagtaagtgtga

SEQ ID NO: 14047 - DNA, 22 bp, synthetic construct
  misc_feature 1..22: note = chemically synthesized
  source 1..22: mol_type = other DNA
acaagtaagtgtgataaatgct

SEQ ID NO: 14048 - DNA, 22 bp, synthetic construct
  misc_feature 1..22: note = chemically synthesized
  source 1..22: mol_type = other DNA
cctgtgagaacatgctgtttgt

SEQ ID NO: 14049 - DNA, 22 bp, synthetic construct
  misc_feature 1..22: note = chemically synthesized
  source 1..22: mol_type = other DNA
ctgtgagaacatgctgtttgtc

SEQ ID NO: 14050 - DNA, 22 bp, synthetic construct
  misc_feature 1..22: note = chemically synthesized
  source 1..22: mol_type = other DNA
tgagaacatgctgtttgtccaa

SEQ ID NO: 14051 - DNA, 22 bp, synthetic construct
  misc_feature 1..22: note = chemically synthesized
  source 1..22: mol_type = other DNA
tttgtccaaatgggataatttc

SEQ ID NO: 14052 - DNA, 22 bp, synthetic construct
  misc_feature 1..22: note = chemically synthesized
  source 1..22: mol_type = other DNA
gtccaaatgggataatttcttc

SEQ ID NO: 14053 - DNA, 22 bp, synthetic construct
  misc_feature 1..22: note = chemically synthesized
  source 1..22: mol_type = other DNA
tccaaatgggataatttcttcc

SEQ ID NO: 14054 - DNA, 22 bp, synthetic construct
  misc_feature 1..22: note = chemically synthesized
  source 1..22: mol_type = other DNA
cttccctgtatgccttcctctg

SEQ ID NO: 14055 - DNA, 22 bp, synthetic construct
  misc_feature 1..22: note = chemically synthesized
  source 1..22: mol_type = other DNA
ttccctgtatgccttcctctgg

SEQ ID NO: 14056 - DNA, 22 bp, synthetic construct
  misc_feature 1..22: note = chemically synthesized
  source 1..22: mol_type = other DNA
ccctgtatgccttcctctggga

SEQ ID NO: 14057 - DNA, 22 bp, synthetic construct
  misc_feature 1..22: note = chemically synthesized
  source 1..22: mol_type = other DNA
cctgtatgccttcctctgggaa

SEQ ID NO: 14058 - DNA, 22 bp, synthetic construct
  misc_feature 1..22: note = chemically synthesized
  source 1..22: mol_type = other DNA
tatgccttcctctgggaaatac

SEQ ID NO: 14059 - DNA, 22 bp, synthetic construct
  misc_feature 1..22: note = chemically synthesized
  source 1..22: mol_type = other DNA
cctctgggaaatacataaagtc

SEQ ID NO: 14060 - DNA, 22 bp, synthetic construct
  misc_feature 1..22: note = chemically synthesized
  source 1..22: mol_type = other DNA
ctctgggaaatacataaagtca

SEQ ID NO: 14061 - DNA, 22 bp, synthetic construct
  misc_feature 1..22: note = chemically synthesized
  source 1..22: mol_type = other DNA
tgggaaatacataaagtcactg

SEQ ID NO: 14062 - DNA, 22 bp, synthetic construct
  misc_feature 1..22: note = chemically synthesized
  source 1..22: mol_type = other DNA
ggaaatacataaagtcactgta

SEQ ID NO: 14063 - DNA, 22 bp, synthetic construct
  misc_feature 1..22: note = chemically synthesized
  source 1..22: mol_type = other DNA
tagttgtgaaaaaacaaagtga

SEQ ID NO: 14064 - DNA, 22 bp, synthetic construct
  misc_feature 1..22: note = chemically synthesized
  source 1..22: mol_type = other DNA
tgaaaaaacaaagtgatatatg

SEQ ID NO: 14065 - DNA, 22 bp, synthetic construct
  misc_feature 1..22: note = chemically synthesized
  source 1..22: mol_type = other DNA
cattagctaacttcctactctt

SEQ ID NO: 14066 - DNA, 22 bp, synthetic construct
  misc_feature 1..22: note = chemically synthesized
  source 1..22: mol_type = other DNA
gctaacttcctactctttatgt

SEQ ID NO: 14067 - DNA, 22 bp, synthetic construct
  misc_feature 1..22: note = chemically synthesized
  source 1..22: mol_type = other DNA
acttcctactctttatgtcaat

SEQ ID NO: 14068 - DNA, 22 bp, synthetic construct
  misc_feature 1..22: note = chemically synthesized
  source 1..22: mol_type = other DNA
cctactctttatgtcaattctt

SEQ ID NO: 14069 - DNA, 22 bp, synthetic construct
  misc_feature 1..22: note = chemically synthesized
  source 1..22: mol_type = other DNA
ctactctttatgtcaattctta

SEQ ID NO: 14070 - DNA, 22 bp, synthetic construct
  misc_feature 1..22: note = chemically synthesized
  source 1..22: mol_type = other DNA
ctctttatgtcaattcttaagc

SEQ ID NO: 14071 - DNA, 22 bp, synthetic construct
  misc_feature 1..22: note = chemically synthesized
  source 1..22: mol_type = other DNA
tttatgtcaattcttaagcttg

SEQ ID NO: 14072 - DNA, 22 bp, synthetic construct
  misc_feature 1..22: note = chemically synthesized
  source 1..22: mol_type = other DNA
tatgtcaattcttaagcttgct

SEQ ID NO: 14073 - DNA, 22 bp, synthetic construct
  misc_feature 1..22: note = chemically synthesized
  source 1..22: mol_type = other DNA
atgtcaattcttaagcttgctt

SEQ ID NO: 14074 - DNA, 22 bp, synthetic construct
  misc_feature 1..22: note = chemically synthesized
  source 1..22: mol_type = other DNA
tgtcaattcttaagcttgcttt

SEQ ID NO: 14075 - DNA, 22 bp, synthetic construct
  misc_feature 1..22: note = chemically synthesized
  source 1..22: mol_type = other DNA
ttaagcttgcttttctccccta

SEQ ID NO: 14076 - DNA, 22 bp, synthetic construct
  misc_feature 1..22: note = chemically synthesized
  source 1..22: mol_type = other DNA
aagcttgcttttctcccctagg

SEQ ID NO: 14077 - DNA, 22 bp, synthetic construct
  misc_feature 1..22: note = chemically synthesized
  source 1..22: mol_type = other DNA
agcttgcttttctcccctaggg

SEQ ID NO: 14078 - DNA, 22 bp, synthetic construct
  misc_feature 1..22: note = chemically synthesized
  source 1..22: mol_type = other DNA
gcttttctcccctagggaactc

SEQ ID NO: 14079 - DNA, 22 bp, synthetic construct
  misc_feature 1..22: note = chemically synthesized
  source 1..22: mol_type = other DNA
cttttctcccctagggaactca

SEQ ID NO: 14080 - DNA, 22 bp, synthetic construct
  misc_feature 1..22: note = chemically synthesized
  source 1..22: mol_type = other DNA
ttctcccctagggaactcaact

SEQ ID NO: 14081 - DNA, 22 bp, synthetic construct
  misc_feature 1..22: note = chemically synthesized
  source 1..22: mol_type = other DNA
tctcccctagggaactcaactg

SEQ ID NO: 14082 - DNA, 22 bp, synthetic construct
  misc_feature 1..22: note = chemically synthesized
  source 1..22: mol_type = other DNA
ctcccctagggaactcaactga

SEQ ID NO: 14083 - DNA, 22 bp, synthetic construct
  misc_feature 1..22: note = chemically synthesized
  source 1..22: mol_type = other DNA
tcccctagggaactcaactgag

SEQ ID NO: 14084 - DNA, 22 bp, synthetic construct
  misc_feature 1..22: note = chemically synthesized
  source 1..22: mol_type = other DNA
ccctagggaactcaactgagta

SEQ ID NO: 14085 - DNA, 22 bp, synthetic construct
  misc_feature 1..22: note = chemically synthesized
  source 1..22: mol_type = other DNA
gggaactcaactgagtattgtg

SEQ ID NO: 14086 - DNA, 22 bp, synthetic construct
  misc_feature 1..22: note = chemically synthesized
  source 1..22: mol_type = other DNA
aactgagtattgtgtttcccca

SEQ ID NO: 14087 - DNA, 22 bp, synthetic construct
  misc_feature 1..22: note = chemically synthesized
  source 1..22: mol_type = other DNA
agtattgtgtttccccaaatat

SEQ ID NO: 14088 - DNA, 22 bp, synthetic construct
  misc_feature 1..22: note = chemically synthesized
  source 1..22: mol_type = other DNA
tgtttccccaaatatcaactcc

SEQ ID NO: 14089 - DNA, 22 bp, synthetic construct
  misc_feature 1..22: note = chemically synthesized
  source 1..22: mol_type = other DNA
ccccaaatatcaactccaagat

SEQ ID NO: 14090 - DNA, 22 bp, synthetic construct
  misc_feature 1..22: note = chemically synthesized
  source 1..22: mol_type = other DNA
cccaaatatcaactccaagatg

SEQ ID NO: 14091 - DNA, 22 bp, synthetic construct
  misc_feature 1..22: note = chemically synthesized
  source 1..22: mol_type = other DNA
caagatgtttgacatagagaca

SEQ ID NO: 14092 - DNA, 22 bp, synthetic construct
  misc_feature 1..22: note = chemically synthesized
  source 1..22: mol_type = other DNA
gacatagagacaaaatgatttt

SEQ ID NO: 14093 - DNA, 22 bp, synthetic construct
  misc_feature 1..22: note = chemically synthesized
  source 1..22: mol_type = other DNA
acatagagacaaaatgattttt

SEQ ID NO: 14094 - DNA, 22 bp, synthetic construct
  misc_feature 1..22: note = chemically synthesized
  source 1..22: mol_type = other DNA
tttcctaatccatgaaaagctt

SEQ ID NO: 14095 - DNA, 22 bp, synthetic construct
  misc_feature 1..22: note = chemically synthesized
  source 1..22: mol_type = other DNA
ttcctaatccatgaaaagcttt

SEQ ID NO: 14096 - DNA, 22 bp, synthetic construct
  misc_feature 1..22: note = chemically synthesized
  source 1..22: mol_type = other DNA
tcctaatccatgaaaagctttg

SEQ ID NO: 14097 - DNA, 22 bp, synthetic construct
  misc_feature 1..22: note = chemically synthesized
  source 1..22: mol_type = other DNA
cctaatccatgaaaagctttgg

SEQ ID NO: 14098 - DNA, 22 bp, synthetic construct
  misc_feature 1..22: note = chemically synthesized
  source 1..22: mol_type = other DNA
ctaatccatgaaaagctttggt

SEQ ID NO: 14099 - DNA, 22 bp, synthetic construct
  misc_feature 1..22: note = chemically synthesized
  source 1..22: mol_type = other DNA
atccatgaaaagctttggtgat

SEQ ID NO: 14100 - DNA, 22 bp, synthetic construct
  misc_feature 1..22: note = chemically synthesized
  source 1..22: mol_type = other DNA
tggtgataactaacagcttgct

SEQ ID NO: 14101 - DNA, 22 bp, synthetic construct
  misc_feature 1..22: note = chemically synthesized
  source 1..22: mol_type = other DNA
ggtgataactaacagcttgcta

SEQ ID NO: 14102 - DNA, 22 bp, synthetic construct
  misc_feature 1..22: note = chemically synthesized
  source 1..22: mol_type = other DNA
gtgataactaacagcttgctaa

SEQ ID NO: 14103 - DNA, 22 bp, synthetic construct
  misc_feature 1..22: note = chemically synthesized
  source 1..22: mol_type = other DNA
acagcttgctaatgaaaggtta

SEQ ID NO: 14104 - DNA, 22 bp, synthetic construct
  misc_feature 1..22: note = chemically synthesized
  source 1..22: mol_type = other DNA
gctaatgaaaggttaatcttta

SEQ ID NO: 14105 - DNA, 22 bp, synthetic construct
  misc_feature 1..22: note = chemically synthesized
  source 1..22: mol_type = other DNA
ctaatgaaaggttaatctttat

SEQ ID NO: 14106 - DNA, 22 bp, synthetic construct
  misc_feature 1..22: note = chemically synthesized
  source 1..22: mol_type = other DNA
atgaaaggttaatctttatgtt

SEQ ID NO: 14107 - DNA, 22 bp, synthetic construct
  misc_feature 1..22: note = chemically synthesized
  source 1..22: mol_type = other DNA
atctttatgttttaactaaaac

SEQ ID NO: 14108 - DNA, 22 bp, synthetic construct
  misc_feature 1..22: note = chemically synthesized
  source 1..22: mol_type = other DNA
tatgttttaactaaaactttaa

SEQ ID NO: 14109 - DNA, 22 bp, synthetic construct
  misc_feature 1..22: note = chemically synthesized
  source 1..22: mol_type = other DNA
atgttttaactaaaactttaaa

SEQ ID NO: 14110 - DNA, 22 bp, synthetic construct
  misc_feature 1..22: note = chemically synthesized
  source 1..22: mol_type = other DNA
tgttttaactaaaactttaaat

SEQ ID NO: 14111 - DNA, 22 bp, synthetic construct
  misc_feature 1..22: note = chemically synthesized
  source 1..22: mol_type = other DNA
taactaaaactttaaattgaag

SEQ ID NO: 14112 - DNA, 22 bp, synthetic construct
  misc_feature 1..22: note = chemically synthesized
  source 1..22: mol_type = other DNA
aactaaaactttaaattgaaga

SEQ ID NO: 14113 - DNA, 22 bp, synthetic construct
  misc_feature 1..22: note = chemically synthesized
  source 1..22: mol_type = other DNA
actaaaactttaaattgaagat

SEQ ID NO: 14114 - DNA, 22 bp, synthetic construct
  misc_feature 1..22: note = chemically synthesized
  source 1..22: mol_type = other DNA
aaactttaaattgaagatatat

SEQ ID NO: 14115 - DNA, 22 bp, synthetic construct
  misc_feature 1..22: note = chemically synthesized
  source 1..22: mol_type = other DNA
taaattgaagatatataattta

SEQ ID NO: 14116 - DNA, 22 bp, synthetic construct
  misc_feature 1..22: note = chemically synthesized
  source 1..22: mol_type = other DNA
aaattgaagatatataatttaa

SEQ ID NO: 14117 - DNA, 22 bp, synthetic construct
  misc_feature 1..22: note = chemically synthesized
  source 1..22: mol_type = other DNA
aattgaagatatataatttaaa

SEQ ID NO: 14118 - DNA, 22 bp, synthetic construct
  misc_feature 1..22: note = chemically synthesized
  source 1..22: mol_type = other DNA
aagatatataatttaaaaaatt

SEQ ID NO: 14119 - DNA, 22 bp, synthetic construct
  misc_feature 1..22: note = chemically synthesized
  source 1..22: mol_type = other DNA
aaaaaattagagacacacctca

SEQ ID NO: 14120 - DNA, 22 bp, synthetic construct
  misc_feature 1..22: note = chemically synthesized
  source 1..22: mol_type = other DNA
aaaaattagagacacacctcat

SEQ ID NO: 14121 - DNA, 22 bp, synthetic construct
  misc_feature 1..22: note = chemically synthesized
  source 1..22: mol_type = other DNA
gagacacacctcattacatact

SEQ ID NO: 14122 - DNA, 22 bp, synthetic construct
  misc_feature 1..22: note = chemically synthesized
  source 1..22: mol_type = other DNA
attacatacttctgaaaccttg

SEQ ID NO: 14123 - DNA, 22 bp, synthetic construct
  misc_feature 1..22: note = chemically synthesized
  source 1..22: mol_type = other DNA
catacttctgaaaccttgaaat

SEQ ID NO: 14124 - DNA, 22 bp, synthetic construct
  misc_feature 1..22: note = chemically synthesized
  source 1..22: mol_type = other DNA
ctgaaaccttgaaatgtcatat

SEQ ID NO: 14125 - DNA, 22 bp, synthetic construct
  misc_feature 1..22: note = chemically synthesized
  source 1..22: mol_type = other DNA
tgaaaccttgaaatgtcatata

SEQ ID NO: 14126 - DNA, 22 bp, synthetic construct
  misc_feature 1..22: note = chemically synthesized
  source 1..22: mol_type = other DNA
aaaccttgaaatgtcatatatc

SEQ ID NO: 14127 - DNA, 22 bp, synthetic construct
  misc_feature 1..22: note = chemically synthesized
  source 1..22: mol_type = other DNA
gaaatgtcatatatcttaaaat

SEQ ID NO: 14128 - DNA, 22 bp, synthetic construct
  misc_feature 1..22: note = chemically synthesized
  source 1..22: mol_type = other DNA
aaatgtcatatatcttaaaatc

SEQ ID NO: 14129 - DNA, 22 bp, synthetic construct
  misc_feature 1..22: note = chemically synthesized
  source 1..22: mol_type = other DNA
aaaatcagactttttgtgtaaa

SEQ ID NO: 14130 - DNA, 22 bp, synthetic construct
  misc_feature 1..22: note = chemically synthesized
  source 1..22: mol_type = other DNA
aaatcagactttttgtgtaaat

SEQ ID NO: 14131 - DNA, 22 bp, synthetic construct
  misc_feature 1..22: note = chemically synthesized
  source 1..22: mol_type = other DNA
tttgtgtaaataaggccattgt

SEQ ID NO: 14132 - DNA, 22 bp, synthetic construct
  misc_feature 1..22: note = chemically synthesized
  source 1..22: mol_type = other DNA
ttgtgtaaataaggccattgtt

SEQ ID NO: 14133 - DNA, 22 bp, synthetic construct
  misc_feature 1..22: note = chemically synthesized
  source 1..22: mol_type = other DNA
tgtgtaaataaggccattgttt

SEQ ID NO: 14134 - DNA, 22 bp, synthetic construct
  misc_feature 1..22: note = chemically synthesized
  source 1..22: mol_type = other DNA
gtgtaaataaggccattgtttg

SEQ ID NO: 14135 - DNA, 22 bp, synthetic construct
  misc_feature 1..22: note = chemically synthesized
  source 1..22: mol_type = other DNA
tgtaaataaggccattgtttgt

SEQ ID NO: 14136 - DNA, 22 bp, synthetic construct
  misc_feature 1..22: note = chemically synthesized
  source 1..22: mol_type = other DNA
tttgtgcttttgtttcccattt

SEQ ID NO: 14137 - DNA, 22 bp, synthetic construct
  misc_feature 1..22: note = chemically synthesized
  source 1..22: mol_type = other DNA
gtgcttttgtttcccattttga

SEQ ID NO: 14138 - DNA, 22 bp, synthetic construct
  misc_feature 1..22: note = chemically synthesized
  source 1..22: mol_type = other DNA
tgcttttgtttcccattttgat

SEQ ID NO: 14139 - DNA, 22 bp, synthetic construct
  misc_feature 1..22: note = chemically synthesized
  source 1..22: mol_type = other DNA
ttgtttcccattttgatttcaa

SEQ ID NO: 14140 - DNA, 22 bp, synthetic construct
  misc_feature 1..22: note = chemically synthesized
  source 1..22: mol_type = other DNA
tgtttcccattttgatttcaaa

SEQ ID NO: 14141 - DNA, 22 bp, synthetic construct
  misc_feature 1..22: note = chemically synthesized
  source 1..22: mol_type = other DNA
gtttcccattttgatttcaaag

SEQ ID NO: 14142 - DNA, 22 bp, synthetic construct
  misc_feature 1..22: note = chemically synthesized
  source 1..22: mol_type = other DNA
tttcccattttgatttcaaagt

SEQ ID NO: 14143 - DNA, 22 bp, synthetic construct
  misc_feature 1..22: note = chemically synthesized
  source 1..22: mol_type = other DNA
cccattttgatttcaaagtggt

SEQ ID NO: 14144 - DNA, 22 bp, synthetic construct
  misc_feature 1..22: note = chemically synthesized
  source 1..22: mol_type = other DNA
ccattttgatttcaaagtggta

SEQ ID NO: 14145 - DNA, 22 bp, synthetic construct
  misc_feature 1..22: note = chemically synthesized
  source 1..22: mol_type = other DNA
tgatttcaaagtggtaagtcca

SEQ ID NO: 14146 - DNA, 22 bp, synthetic construct
  misc_feature 1..22: note = chemically synthesized
  source 1..22: mol_type = other DNA
gatttcaaagtggtaagtccaa

SEQ ID NO: 14147 - DNA, 22 bp, synthetic construct
  misc_feature 1..22: note = chemically synthesized
  source 1..22: mol_type = other DNA
atttcaaagtggtaagtccaaa

SEQ ID NO: 14148 - DNA, 22 bp, synthetic construct
  misc_feature 1..22: note = chemically synthesized
  source 1..22: mol_type = other DNA
caaagtggtaagtccaaacaaa

SEQ ID NO: 14149 - DNA, 22 bp, synthetic construct
  misc_feature 1..22: note = chemically synthesized
  source 1..22: mol_type = other DNA
aaagtggtaagtccaaacaaaa

SEQ ID NO: 14150 - DNA, 22 bp, synthetic construct
  misc_feature 1..22: note = chemically synthesized
  source 1..22: mol_type = other DNA
ttttttttcactatattctgct

SEQ ID NO: 14151 - DNA, 22 bp, synthetic construct
  misc_feature 1..22: note = chemically synthesized
  source 1..22: mol_type = other DNA
tttttcactatattctgctatt

SEQ ID NO: 14152 - DNA, 22 bp, synthetic construct
  misc_feature 1..22: note = chemically synthesized
  source 1..22: mol_type = other DNA
ttttcactatattctgctattt

SEQ ID NO: 14153 - DNA, 22 bp, synthetic construct
  misc_feature 1..22: note = chemically synthesized
  source 1..22: mol_type = other DNA
tttcactatattctgctatttc

SEQ ID NO: 14154 - DNA, 22 bp, synthetic construct
  misc_feature 1..22: note = chemically synthesized
  source 1..22: mol_type = other DNA
ttcactatattctgctatttct

SEQ ID NO: 14155 - DNA, 22 bp, synthetic construct
  misc_feature 1..22: note = chemically synthesized
  source 1..22: mol_type = other DNA
tcactatattctgctatttctt

SEQ ID NO: 14156 - DNA, 22 bp, synthetic construct
  misc_feature 1..22: note = chemically synthesized
  source 1..22: mol_type = other DNA
cactatattctgctatttcttt

SEQ ID NO: 14157 - DNA, 22 bp, synthetic construct
  misc_feature 1..22: note = chemically synthesized
  source 1..22: mol_type = other DNA
actatattctgctatttctttg

SEQ ID NO: 14158 - DNA, 22 bp, synthetic construct
  misc_feature 1..22: note = chemically synthesized
  source 1..22: mol_type = other DNA
tattctgctatttctttgtttt

SEQ ID NO: 14159 - DNA, 22 bp, synthetic construct
  misc_feature 1..22: note = chemically synthesized
  source 1..22: mol_type = other DNA
tgctatttctttgttttcccac

SEQ ID NO: 14160 - DNA, 22 bp, synthetic construct
  misc_feature 1..22: note = chemically synthesized
  source 1..22: mol_type = other DNA
ctatttctttgttttcccactt

SEQ ID NO: 14161 - DNA, 22 bp, synthetic construct
  misc_feature 1..22: note = chemically synthesized
  source 1..22: mol_type = other DNA
tttctttgttttcccactttta

SEQ ID NO: 14162 - DNA, 22 bp, synthetic construct
  misc_feature 1..22: note = chemically synthesized
  source 1..22: mol_type = other DNA
ctttgttttcccacttttaatt

SEQ ID NO: 14163 - DNA, 22 bp, synthetic construct
  misc_feature 1..22: note = chemically synthesized
  source 1..22: mol_type = other DNA
tttgttttcccacttttaattt

SEQ ID NO: 14164 - DNA, 22 bp, synthetic construct
  misc_feature 1..22: note = chemically synthesized
  source 1..22: mol_type = other DNA
tgttttcccacttttaattttt

SEQ ID NO: 14165 - DNA, 22 bp, synthetic construct
  misc_feature 1..22: note = chemically synthesized
  source 1..22: mol_type = other DNA
gttttcccacttttaatttttt

SEQ ID NO: 14166 - DNA, 22 bp, synthetic construct
  misc_feature 1..22: note = chemically synthesized
  source 1..22: mol_type = other DNA
ttttcccacttttaattttttt

SEQ ID NO: 14167 - DNA, 22 bp, synthetic construct
  misc_feature 1..22: note = chemically synthesized
  source 1..22: mol_type = other DNA
tcccacttttaatttttttaaa

SEQ ID NO: 14168 - DNA, 22 bp, synthetic construct
  misc_feature 1..22: note = chemically synthesized
  source 1..22: mol_type = other DNA
cccacttttaatttttttaaac

SEQ ID NO: 14169 - DNA, 22 bp, synthetic construct
  misc_feature 1..22: note = chemically synthesized
  source 1..22: mol_type = other DNA
ccacttttaatttttttaaacc

SEQ ID NO: 14170 - DNA, 22 bp, synthetic construct
  misc_feature 1..22: note = chemically synthesized
  source 1..22: mol_type = other DNA
ttaatttttttaaaccaaggag

SEQ ID NO: 14171 - DNA, 22 bp, synthetic construct
  misc_feature 1..22: note = chemically synthesized
  source 1..22: mol_type = other DNA
taatttttttaaaccaaggaga

SEQ ID NO: 14172 - DNA, 22 bp, synthetic construct
  misc_feature 1..22: note = chemically synthesized
  source 1..22: mol_type = other DNA
aatttttttaaaccaaggagat

SEQ ID NO: 14173 - DNA, 22 bp, synthetic construct
  misc_feature 1..22: note = chemically synthesized
  source 1..22: mol_type = other DNA
atttttttaaaccaaggagatg

SEQ ID NO: 14174 - DNA, 22 bp, synthetic construct
  misc_feature 1..22: note = chemically synthesized
  source 1..22: mol_type = other DNA
ttttaaaccaaggagatgaatg

SEQ ID NO: 14175 - DNA, 22 bp, synthetic construct
  misc_feature 1..22: note = chemically synthesized
  source 1..22: mol_type = other DNA
tttaaaccaaggagatgaatgt

SEQ ID NO: 14176 - DNA, 22 bp, synthetic construct
  misc_feature 1..22: note = chemically synthesized
  source 1..22: mol_type = other DNA
ttaaaccaaggagatgaatgtt

SEQ ID NO: 14177 - DNA, 22 bp, synthetic construct
  misc_feature 1..22: note = chemically synthesized
  source 1..22: mol_type = other DNA
taaaccaaggagatgaatgttt

SEQ ID NO: 14178 - DNA, 22 bp, synthetic construct
  misc_feature 1..22: note = chemically synthesized
  source 1..22: mol_type = other DNA
aaaccaaggagatgaatgtttt

SEQ ID NO: 14179 - DNA, 22 bp, synthetic construct
  misc_feature 1..22: note = chemically synthesized
  source 1..22: mol_type = other DNA
aaccaaggagatgaatgttttc

SEQ ID NO: 14180 - DNA, 22 bp, synthetic construct
  misc_feature 1..22: note = chemically synthesized
  source 1..22: mol_type = other DNA
tctaacaggaattacatgacca

SEQ ID NO: 14181 - DNA, 22 bp, synthetic construct
  misc_feature 1..22: note = chemically synthesized
  source 1..22: mol_type = other DNA
ctaacaggaattacatgaccaa

SEQ ID NO: 14182 - DNA, 22 bp, synthetic construct
  misc_feature 1..22: note = chemically synthesized
  source 1..22: mol_type = other DNA
taacaggaattacatgaccaaa

SEQ ID NO: 14183 - DNA, 22 bp, synthetic construct
  misc_feature 1..22: note = chemically synthesized
  source 1..22: mol_type = other DNA
acaggaattacatgaccaaatc

SEQ ID NO: 14184 - DNA, 22 bp, synthetic construct
  misc_feature 1..22: note = chemically synthesized
  source 1..22: mol_type = other DNA
catgaccaaatcatgaactgaa

SEQ ID NO: 14185 - DNA, 22 bp, synthetic construct
  misc_feature 1..22: note = chemically synthesized
  source 1..22: mol_type = other DNA
aacagtgtttattaaacataaa

SEQ ID NO: 14186 - DNA, 22 bp, synthetic construct
  misc_feature 1..22: note = chemically synthesized
  source 1..22: mol_type = other DNA
attaaacataaatgcatcataa

SEQ ID NO: 14187 - DNA, 22 bp, synthetic construct
  misc_feature 1..22: note = chemically synthesized
  source 1..22: mol_type = other DNA
ttaaacataaatgcatcataag

SEQ ID NO: 14188 - DNA, 22 bp, synthetic construct
  misc_feature 1..22: note = chemically synthesized
  source 1..22: mol_type = other DNA
aacataaatgcatcataagcat

SEQ ID NO: 14189 - DNA, 22 bp, synthetic construct
  misc_feature 1..22: note = chemically synthesized
  source 1..22: mol_type = other DNA
tcgatctatttagttttaaaaa

SEQ ID NO: 14190 - DNA, 22 bp, synthetic construct
  misc_feature 1..22: note = chemically synthesized
  source 1..22: mol_type = other DNA
tttagttttaaaaatgaagaag

SEQ ID NO: 14191 - DNA, 22 bp, synthetic construct
  misc_feature 1..22: note = chemically synthesized
  source 1..22: mol_type = other DNA
agttttaaaaatgaagaagaag

SEQ ID NO: 14192 - DNA, 22 bp, synthetic construct
  misc_feature 1..22: note = chemically synthesized
  source 1..22: mol_type = other DNA
gttttaaaaatgaagaagaaga

SEQ ID NO: 14193 - DNA, 22 bp, synthetic construct
  misc_feature 1..22: note = chemically synthesized
  source 1..22: mol_type = other DNA
taaaaatgaagaagaagaaaac

SEQ ID NO: 14194 - DNA, 22 bp, synthetic construct
  misc_feature 1..22: note = chemically synthesized
  source 1..22: mol_type = other DNA
aaaaatgaagaagaagaaaacc

SEQ ID NO: 14195 - DNA, 22 bp, synthetic construct
  misc_feature 1..22: note = chemically synthesized
  source 1..22: mol_type = other DNA
aaaatgaagaagaagaaaacct

SEQ ID NO: 14196 - DNA, 22 bp, synthetic construct
  misc_feature 1..22: note = chemically synthesized
  source 1..22: mol_type = other DNA
gctaacaaagaaccagtactta

SEQ ID NO: 14197 - DNA, 22 bp, synthetic construct
  misc_feature 1..22: note = chemically synthesized
  source 1..22: mol_type = other DNA
acaaagaaccagtacttaccaa

SEQ ID NO: 14198 - DNA, 22 bp, synthetic construct
  misc_feature 1..22: note = chemically synthesized
  source 1..22: mol_type = other DNA
accaacctgcgtgctggctgtt

SEQ ID NO: 14199 - DNA, 22 bp, synthetic construct
  misc_feature 1..22: note = chemically synthesized
  source 1..22: mol_type = other DNA
ccaacctgcgtgctggctgtta

SEQ ID NO: 14200 - DNA, 22 bp, synthetic construct
  misc_feature 1..22: note = chemically synthesized
  source 1..22: mol_type = other DNA
cgtgctggctgttagactcttc

SEQ ID NO: 14201 - DNA, 22 bp, synthetic construct
  misc_feature 1..22: note = chemically synthesized
  source 1..22: mol_type = other DNA
gctgttagactcttcaatattg

SEQ ID NO: 14202 - DNA, 22 bp, synthetic construct
  misc_feature 1..22: note = chemically synthesized
  source 1..22: mol_type = other DNA
ttagactcttcaatattgctgt

SEQ ID NO: 14203 - DNA, 22 bp, synthetic construct
  misc_feature 1..22: note = chemically synthesized
  source 1..22: mol_type = other DNA
gactcttcaatattgctgtcaa

SEQ ID NO: 14204 - DNA, 22 bp, synthetic construct
  misc_feature 1..22: note = chemically synthesized
  source 1..22: mol_type = other DNA
ttcaatattgctgtcaaatcat

SEQ ID NO: 14205 - DNA, 22 bp, synthetic construct
  misc_feature 1..22: note = chemically synthesized
  source 1..22: mol_type = other DNA
caatattgctgtcaaatcatgt

SEQ ID NO: 14206 - DNA, 22 bp, synthetic construct
  misc_feature 1..22: note = chemically synthesized
  source 1..22: mol_type = other DNA
aatattgctgtcaaatcatgta

SEQ ID NO: 14207 - DNA, 22 bp, synthetic construct
  misc_feature 1..22: note = chemically synthesized
  source 1..22: mol_type = other DNA
ctgtcaaatcatgtaatcaaaa

SEQ ID NO: 14208 - DNA, 22 bp, synthetic construct
  misc_feature 1..22: note = chemically synthesized
  source 1..22: mol_type = other DNA
tcaaatcatgtaatcaaaattt

SEQ ID NO: 14209 - DNA, 22 bp, synthetic construct
  misc_feature 1..22: note = chemically synthesized
  source 1..22: mol_type = other DNA
agtgaagaagacagcatcagat

SEQ ID NO: 14210 - DNA, 22 bp, synthetic construct
  misc_feature 1..22: note = chemically synthesized
  source 1..22: mol_type = other DNA
gtgaagaagacagcatcagata

SEQ ID NO: 14211 - DNA, 22 bp, synthetic construct
  misc_feature 1..22: note = chemically synthesized
  source 1..22: mol_type = other DNA
ctatatctaaaaggcaagcata

SEQ ID NO: 14212 - DNA, 22 bp, synthetic construct
  misc_feature 1..22: note = chemically synthesized
  source 1..22: mol_type = other DNA
tatatctaaaaggcaagcatac

SEQ ID NO: 14213 - DNA, 22 bp, synthetic construct
  misc_feature 1..22: note = chemically synthesized
  source 1..22: mol_type = other DNA
tatctaaaaggcaagcatactc

SEQ ID NO: 14214 - DNA, 22 bp, synthetic construct
  misc_feature 1..22: note = chemically synthesized
  source 1..22: mol_type = other DNA
aaaggcaagcatactcaatgta

SEQ ID NO: 14215 - DNA, 22 bp, synthetic construct
  misc_feature 1..22: note = chemically synthesized
  source 1..22: mol_type = other DNA
aatgtattttaaaaaaggaaac

SEQ ID NO: 14216 - DNA, 22 bp, synthetic construct
  misc_feature 1..22: note = chemically synthesized
  source 1..22: mol_type = other DNA
taaaaaaggaaacaaacctgta

SEQ ID NO: 14217 - DNA, 22 bp, synthetic construct
  misc_feature 1..22: note = chemically synthesized
  source 1..22: mol_type = other DNA
aaaaaaggaaacaaacctgtac

SEQ ID NO: 14218 - DNA, 22 bp, synthetic construct
  misc_feature 1..22: note = chemically synthesized
  source 1..22: mol_type = other DNA
aaaaaggaaacaaacctgtaca

SEQ ID NO: 14219 - DNA, 22 bp, synthetic construct
  misc_feature 1..22: note = chemically synthesized
  source 1..22: mol_type = other DNA
tacattcagcactgagtagata

SEQ ID NO: 14220 - DNA, 22 bp, synthetic construct
  misc_feature 1..22: note = chemically synthesized
  source 1..22: mol_type = other DNA
agcactgagtagatatcctaaa

SEQ ID NO: 14221 - DNA, 22 bp, synthetic construct
  misc_feature 1..22: note = chemically synthesized
  source 1..22: mol_type = other DNA
agtagatatcctaaaaggcaga

SEQ ID NO: 14222 - DNA, 22 bp, synthetic construct
  misc_feature 1..22: note = chemically synthesized
  source 1..22: mol_type = other DNA
aaaggcagatggtgatgaggcc

SEQ ID NO: 14223 - DNA, 22 bp, synthetic construct
  misc_feature 1..22: note = chemically synthesized
  source 1..22: mol_type = other DNA
gtgattctgccatgatcatgtt

SEQ ID NO: 14224 - DNA, 22 bp, synthetic construct
  misc_feature 1..22: note = chemically synthesized
  source 1..22: mol_type = other DNA
tgccatgatcatgttcacgcgc

SEQ ID NO: 14225 - DNA, 22 bp, synthetic construct
  misc_feature 1..22: note = chemically synthesized
  source 1..22: mol_type = other DNA
ccatgatcatgttcacgcgctg

SEQ ID NO: 14226 - DNA, 22 bp, synthetic construct
  misc_feature 1..22: note = chemically synthesized
  source 1..22: mol_type = other DNA
acgcgctgcataacctttgcta

SEQ ID NO: 14227 - DNA, 22 bp, synthetic construct
  misc_feature 1..22: note = chemically synthesized
  source 1..22: mol_type = other DNA
cataacctttgctagcagattg

SEQ ID NO: 14228 - DNA, 22 bp, synthetic construct
  misc_feature 1..22: note = chemically synthesized
  source 1..22: mol_type = other DNA
tgctagcagattgtgaaagtgg

SEQ ID NO: 14229 - DNA, 22 bp, synthetic construct
  misc_feature 1..22: note = chemically synthesized
  source 1..22: mol_type = other DNA
gctagcagattgtgaaagtggt

SEQ ID NO: 14230 - DNA, 20 bp, synthetic construct
  misc_feature 1..20: note = chemically synthesized
  source 1..20: mol_type = other DNA
tttagacaaacgtggttttt

SEQ ID NO: 14231 - DNA, 20 bp, synthetic construct
  misc_feature 1..20: note = chemically synthesized
  source 1..20: mol_type = other DNA
aaacgtggtttttgagtcca

SEQ ID NO: 14232 - DNA, 20 bp, synthetic construct
  misc_feature 1..20: note = chemically synthesized
  source 1..20: mol_type = other DNA
tggtttttgagtccaaagat

SEQ ID NO: 14233 - DNA, 20 bp, synthetic construct
  misc_feature 1..20: note = chemically synthesized
  source 1..20: mol_type = other DNA
ggtttttgagtccaaagatc

SEQ ID NO: 14234 - DNA, 20 bp, synthetic construct
  misc_feature 1..20: note = chemically synthesized
  source 1..20: mol_type = other DNA
gtttttgagtccaaagatca

SEQ ID NO: 14235 - DNA, 20 bp, synthetic construct
  misc_feature 1..20: note = chemically synthesized
  source 1..20: mol_type = other DNA
ttgagtccaaagatcagggc

SEQ ID NO: 14236 - DNA, 20 bp, synthetic construct
  misc_feature 1..20: note = chemically synthesized
  source 1..20: mol_type = other DNA
tgagtccaaagatcagggct

SEQ ID NO: 14237 - DNA, 20 bp, synthetic construct
  misc_feature 1..20: note = chemically synthesized
  source 1..20: mol_type = other DNA
ggctgggttgacctgaatac

SEQ ID NO: 14238 - DNA, 20 bp, synthetic construct
  misc_feature 1..20: note = chemically synthesized
  source 1..20: mol_type = other DNA
gttgacctgaatactggata

SEQ ID NO: 14239 - DNA, 20 bp, synthetic construct
  misc_feature 1..20: note = chemically synthesized
  source 1..20: mol_type = other DNA
ttgacctgaatactggatac

SEQ ID NO: 14240 - DNA, 20 bp, synthetic construct
  misc_feature 1..20: note = chemically synthesized
  source 1..20: mol_type = other DNA
tgacctgaatactggataca

SEQ ID NO: 14241 - DNA, 20 bp, synthetic construct
  misc_feature 1..20: note = chemically synthesized
  source 1..20: mol_type = other DNA
tggatacagggcatataaaa

SEQ ID NO: 14242 - DNA, 20 bp, synthetic construct
  misc_feature 1..20: note = chemically synthesized
  source 1..20: mol_type = other DNA
ggatacagggcatataaaac

SEQ ID NO: 14243 - DNA, 20 bp, synthetic construct
  misc_feature 1..20: note = chemically synthesized
  source 1..20: mol_type = other DNA
gatacagggcatataaaaca

SEQ ID NO: 14244 - DNA, 20 bp, synthetic construct
  misc_feature 1..20: note = chemically synthesized
  source 1..20: mol_type = other DNA
atacagggcatataaaacag

SEQ ID NO: 14245 - DNA, 20 bp, synthetic construct
  misc_feature 1..20: note = chemically synthesized
  source 1..20: mol_type = other DNA
agggcatataaaacaggggc

SEQ ID NO: 14246 - DNA, 20 bp, synthetic construct
  misc_feature 1..20: note = chemically synthesized
  source 1..20: mol_type = other DNA
gggcatataaaacaggggca

SEQ ID NO: 14247 - DNA, 20 bp, synthetic construct
  misc_feature 1..20: note = chemically synthesized
  source 1..20: mol_type = other DNA
tataaaacaggggcaaggca

SEQ ID NO: 14248 - DNA, 20 bp, synthetic construct
  misc_feature 1..20: note = chemically synthesized
  source 1..20: mol_type = other DNA
aggggcaaggcacagactca

SEQ ID NO: 14249 - DNA, 20 bp, synthetic construct
  misc_feature 1..20: note = chemically synthesized
  source 1..20: mol_type = other DNA
ggcaaggcacagactcatag

SEQ ID NO: 14250 - DNA, 20 bp, synthetic construct
  misc_feature 1..20: note = chemically synthesized
  source 1..20: mol_type = other DNA
caaggcacagactcatagca

SEQ ID NO: 14251 - DNA, 20 bp, synthetic construct
  misc_feature 1..20: note = chemically synthesized
  source 1..20: mol_type = other DNA
atagcagagcaatcaccacc

SEQ ID NO: 14252 - DNA, 20 bp, synthetic construct
  misc_feature 1..20: note = chemically synthesized
  source 1..20: mol_type = other DNA
agagcaatcaccaccaagcc

SEQ ID NO: 14253 - DNA, 20 bp, synthetic construct
  misc_feature 1..20: note = chemically synthesized
  source 1..20: mol_type = other DNA
accaagcctggaataactgc

SEQ ID NO: 14254 - DNA, 20 bp, synthetic construct
  misc_feature 1..20: note = chemically synthesized
  source 1..20: mol_type = other DNA
ccaagcctggaataactgca

SEQ ID NO: 14255 - DNA, 20 bp, synthetic construct
  misc_feature 1..20: note = chemically synthesized
  source 1..20: mol_type = other DNA
caagcctggaataactgcaa

SEQ ID NO: 14256 - DNA, 20 bp, synthetic construct
  misc_feature 1..20: note = chemically synthesized
  source 1..20: mol_type = other DNA
ggctctgctgacatcttcct

SEQ ID NO: 14257 - DNA, 20 bp, synthetic construct
  misc_feature 1..20: note = chemically synthesized
  source 1..20: mol_type = other DNA
gctctgctgacatcttcctg

SEQ ID NO: 14258 - DNA, 20 bp, synthetic construct
  misc_feature 1..20: note = chemically synthesized
  source 1..20: mol_type = other DNA
tgacatcttcctgaggtgcc

SEQ ID NO: 14259 - DNA, 20 bp, synthetic construct
  misc_feature 1..20: note = chemically synthesized
  source 1..20: mol_type = other DNA
gacatcttcctgaggtgcca

SEQ ID NO: 14260 - DNA, 20 bp, synthetic construct
  misc_feature 1..20: note = chemically synthesized
  source 1..20: mol_type = other DNA
tcctgaggtgccaaggaaat

SEQ ID NO: 14261 - DNA, 20 bp, synthetic construct
  misc_feature 1..20: note = chemically synthesized
  source 1..20: mol_type = other DNA
cctgaggtgccaaggaaatg

SEQ ID NO: 14262 - DNA, 20 bp, synthetic construct
  misc_feature 1..20: note = chemically synthesized
  source 1..20: mol_type = other DNA
aggtgccaaggaaatgagga

SEQ ID NO: 14263 - DNA, 20 bp, synthetic construct
  misc_feature 1..20: note = chemically synthesized
  source 1..20: mol_type = other DNA
gtgccaaggaaatgaggatg

SEQ ID NO: 14264 - DNA, 20 bp, synthetic construct
  misc_feature 1..20: note = chemically synthesized
  source 1..20: mol_type = other DNA
tgccaaggaaatgaggatgg

SEQ ID NO: 14265 - DNA, 20 bp, synthetic construct
  misc_feature 1..20: note = chemically synthesized
  source 1..20: mol_type = other DNA
caaggaaatgaggatggagg

SEQ ID NO: 14266 - DNA, 20 bp, synthetic construct
  misc_feature 1..20: note = chemically synthesized
  source 1..20: mol_type = other DNA
aaggaaatgaggatggagga

SEQ ID NO: 14267 - DNA, 20 bp, synthetic construct
  misc_feature 1..20: note = chemically synthesized
  source 1..20: mol_type = other DNA
atgaatgttctccatgactt

SEQ ID NO: 14268 - DNA, 20 bp, synthetic construct
  misc_feature 1..20: note = chemically synthesized
  source 1..20: mol_type = other DNA
tgaatgttctccatgacttt

SEQ ID NO: 14269 - DNA, 20 bp, synthetic construct
  misc_feature 1..20: note = chemically synthesized
  source 1..20: mol_type = other DNA
ttctccatgactttgggatc

SEQ ID NO: 14270 - DNA, 20 bp, synthetic construct
  misc_feature 1..20: note = chemically synthesized
  source 1..20: mol_type = other DNA
tccagtcaacacattacctc

SEQ ID NO: 14271 - DNA, 20 bp, synthetic construct
  misc_feature 1..20: note = chemically synthesized
  source 1..20: mol_type = other DNA
ccagtcaacacattacctcc

SEQ ID NO: 14272 - DNA, 20 bp, synthetic construct
  misc_feature 1..20: note = chemically synthesized
  source 1..20: mol_type = other DNA
ttacctccaggtgaattacc

SEQ ID NO: 14273 - DNA, 20 bp, synthetic construct
  misc_feature 1..20: note = chemically synthesized
  source 1..20: mol_type = other DNA
aggtgaattaccaagactcc

SEQ ID NO: 14274 - DNA, 20 bp, synthetic construct
  misc_feature 1..20: note = chemically synthesized
  source 1..20: mol_type = other DNA
ggtgaattaccaagactccc

SEQ ID NO: 14275 - DNA, 20 bp, synthetic construct
  misc_feature 1..20: note = chemically synthesized
  source 1..20: mol_type = other DNA
attaccaagactcccaggac

SEQ ID NO: 14276 - DNA, 20 bp, synthetic construct
  misc_feature 1..20: note = chemically synthesized
  source 1..20: mol_type = other DNA
ctcccaggactggttcatct

SEQ ID NO: 14277 - DNA, 20 bp, synthetic construct
  misc_feature 1..20: note = chemically synthesized
  source 1..20: mol_type = other DNA
catcttggtgtccgtgatcg

SEQ ID NO: 14278 - DNA, 20 bp, synthetic construct
  misc_feature 1..20: note = chemically synthesized
  source 1..20: mol_type = other DNA
gtgtccgtgatcgcagacct

SEQ ID NO: 14279 - DNA, 20 bp, synthetic construct
  misc_feature 1..20: note = chemically synthesized
  source 1..20: mol_type = other DNA
tgtccgtgatcgcagacctc

SEQ ID NO: 14280 - DNA, 20 bp, synthetic construct
  misc_feature 1..20: note = chemically synthesized
  source 1..20: mol_type = other DNA
tctacgtcctcttccccatc

SEQ ID NO: 14281 - DNA, 20 bp, synthetic construct
  misc_feature 1..20: note = chemically synthesized
  source 1..20: mol_type = other DNA
tccccatctggttccatctt

SEQ ID NO: 14282 - DNA, 20 bp, synthetic construct
  misc_feature 1..20: note = chemically synthesized
  source 1..20: mol_type = other DNA
ccccatctggttccatcttc

SEQ ID NO: 14283 - DNA, 20 bp, synthetic construct
  misc_feature 1..20: note = chemically synthesized
  source 1..20: mol_type = other DNA
catctggttccatcttcagg

SEQ ID NO: 14284 - DNA, 20 bp, synthetic construct
  misc_feature 1..20: note = chemically synthesized
  source 1..20: mol_type = other DNA
gttccatcttcaggaagctg

SEQ ID NO: 14285 - DNA, 20 bp, synthetic construct
  misc_feature 1..20: note = chemically synthesized
  source 1..20: mol_type = other DNA
ttccatcttcaggaagctgt

SEQ ID NO: 14286 - DNA, 20 bp, synthetic construct
  misc_feature 1..20: note = chemically synthesized
  source 1..20: mol_type = other DNA
ctgtgggcattaaactcctt

SEQ ID NO: 14287 - DNA, 20 bp, synthetic construct
  misc_feature 1..20: note = chemically synthesized
  source 1..20: mol_type = other DNA
tgtgggcattaaactccttt

SEQ ID NO: 14288 - DNA, 20 bp, synthetic construct
  misc_feature 1..20: note = chemically synthesized
  source 1..20: mol_type = other DNA
gggcattaaactcctttggg

SEQ ID NO: 14289 - DNA, 20 bp, synthetic construct
  misc_feature 1..20: note = chemically synthesized
  source 1..20: mol_type = other DNA
ctcctttgggtagctgtgat

SEQ ID NO: 14290 - DNA, 20 bp, synthetic construct
  misc_feature 1..20: note = chemically synthesized
  source 1..20: mol_type = other DNA
cctttgggtagctgtgattg

SEQ ID NO: 14291 - DNA, 20 bp, synthetic construct
  misc_feature 1..20: note = chemically synthesized
  source 1..20: mol_type = other DNA
gggtagctgtgattggagac

SEQ ID NO: 14292 - DNA, 20 bp, synthetic construct
  misc_feature 1..20: note = chemically synthesized
  source 1..20: mol_type = other DNA
actggctcaacctcgtcttt

SEQ ID NO: 14293 - DNA, 20 bp, synthetic construct
  misc_feature 1..20: note = chemically synthesized
  source 1..20: mol_type = other DNA
ggctcaacctcgtctttaag

SEQ ID NO: 14294 - DNA, 20 bp, synthetic construct
  misc_feature 1..20: note = chemically synthesized
  source 1..20: mol_type = other DNA
caacctcgtctttaagtggt

SEQ ID NO: 14295 - DNA, 20 bp, synthetic construct
  misc_feature 1..20: note = chemically synthesized
  source 1..20: mol_type = other DNA
tttaagtggtaagaaccata

SEQ ID NO: 14296 - DNA, 20 bp, synthetic construct
  misc_feature 1..20: note = chemically synthesized
  source 1..20: mol_type = other DNA
taagtggtaagaaccatata

SEQ ID NO: 14297 - DNA, 20 bp, synthetic construct
  misc_feature 1..20: note = chemically synthesized
  source 1..20: mol_type = other DNA
agtggtaagaaccatataga

SEQ ID NO: 14298 - DNA, 20 bp, synthetic construct
  misc_feature 1..20: note = chemically synthesized
  source 1..20: mol_type = other DNA
gtggtaagaaccatatagag

SEQ ID NO: 14299 - DNA, 20 bp, synthetic construct
  misc_feature 1..20: note = chemically synthesized
  source 1..20: mol_type = other DNA
ggtaagaaccatatagagag

SEQ ID NO: 14300 - DNA, 20 bp, synthetic construct
  misc_feature 1..20: note = chemically synthesized
  source 1..20: mol_type = other DNA
gaaccatatagagaggagat

SEQ ID NO: 14301 - DNA, 20 bp, synthetic construct
  misc_feature 1..20: note = chemically synthesized
  source 1..20: mol_type = other DNA
catatagagaggagatcagc

SEQ ID NO: 14302 - DNA, 20 bp, synthetic construct
  misc_feature 1..20: note = chemically synthesized
  source 1..20: mol_type = other DNA
agagaggagatcagcaagaa

SEQ ID NO: 14303 - DNA, 20 bp, synthetic construct
  misc_feature 1..20: note = chemically synthesized
  source 1..20: mol_type = other DNA
agaggagatcagcaagaaaa

SEQ ID NO: 14304 - DNA, 20 bp, synthetic construct
  misc_feature 1..20: note = chemically synthesized
  source 1..20: mol_type = other DNA
gaggagatcagcaagaaaag

SEQ ID NO: 14305 - DNA, 20 bp, synthetic construct
  misc_feature 1..20: note = chemically synthesized
  source 1..20: mol_type = other DNA
agatcagcaagaaaagaggc

SEQ ID NO: 14306 - DNA, 20 bp, synthetic construct
  misc_feature 1..20: note = chemically synthesized
  source 1..20: mol_type = other DNA
ctctcgcaatgtctgtccat

SEQ ID NO: 14307 - DNA, 20 bp, synthetic construct
  misc_feature 1..20: note = chemically synthesized
  source 1..20: mol_type = other DNA
tcgcaatgtctgtccatcag

SEQ ID NO: 14308 - DNA, 20 bp, synthetic construct
  misc_feature 1..20: note = chemically synthesized
  source 1..20: mol_type = other DNA
ccatcagaagttgctttccc

SEQ ID NO: 14309 - DNA, 20 bp, synthetic construct
  misc_feature 1..20: note = chemically synthesized
  source 1..20: mol_type = other DNA
catcagaagttgctttcccc

SEQ ID NO: 14310 - DNA, 20 bp, synthetic construct
  misc_feature 1..20: note = chemically synthesized
  source 1..20: mol_type = other DNA
gttgctttccccaggctatt

SEQ ID NO: 14311 - DNA, 20 bp, synthetic construct
  misc_feature 1..20: note = chemically synthesized
  source 1..20: mol_type = other DNA
ttgctttccccaggctattc

SEQ ID NO: 14312 - DNA, 20 bp, synthetic construct
  misc_feature 1..20: note = chemically synthesized
  source 1..20: mol_type = other DNA
ctttccccaggctattcagg

SEQ ID NO: 14313 - DNA, 20 bp, synthetic construct
  misc_feature 1..20: note = chemically synthesized
  source 1..20: mol_type = other DNA
ccaggctattcaggaagcca

SEQ ID NO: 14314 - DNA, 20 bp, synthetic construct
  misc_feature 1..20: note = chemically synthesized
  source 1..20: mol_type = other DNA
caggctattcaggaagccac

SEQ ID NO: 14315 - DNA, 20 bp, synthetic construct
  misc_feature 1..20: note = chemically synthesized
  source 1..20: mol_type = other DNA
ccaacccctctctctgactt

SEQ ID NO: 14316 - DNA, 20 bp, synthetic construct
  misc_feature 1..20: note = chemically synthesized
  source 1..20: mol_type = other DNA
gactttggatcatctacata

SEQ ID NO: 14317 - DNA, 20 bp, synthetic construct
  misc_feature 1..20: note = chemically synthesized
  source 1..20: mol_type = other DNA
actttggatcatctacataa

SEQ ID NO: 14318 - DNA, 20 bp, synthetic construct
  misc_feature 1..20: note = chemically synthesized
  source 1..20: mol_type = other DNA
ctttggatcatctacataaa

SEQ ID NO: 14319 - DNA, 20 bp, synthetic construct
  misc_feature 1..20: note = chemically synthesized
  source 1..20: mol_type = other DNA
tttggatcatctacataaag

SEQ ID NO: 14320 - DNA, 20 bp, synthetic construct
  misc_feature 1..20: note = chemically synthesized
  source 1..20: mol_type = other DNA
ttggatcatctacataaagg

SEQ ID NO: 14321 - DNA, 20 bp, synthetic construct
  misc_feature 1..20: note = chemically synthesized
  source 1..20: mol_type = other DNA
gatcatctacataaaggggg

SEQ ID NO: 14322 - DNA, 20 bp, synthetic construct
  misc_feature 1..20: note = chemically synthesized
  source 1..20: mol_type = other DNA
atctacataaagggggaaga

SEQ ID NO: 14323 - DNA, 20 bp, synthetic construct
  misc_feature 1..20: note = chemically synthesized
  source 1..20: mol_type = other DNA
gaagacagaaaaaatcctac

SEQ ID NO: 14324 - DNA, 20 bp, synthetic construct
  misc_feature 1..20: note = chemically synthesized
  source 1..20: mol_type = other DNA
acagaaaaaatcctaccagt

SEQ ID NO: 14325 - DNA, 20 bp, synthetic construct
  misc_feature 1..20: note = chemically synthesized
  source 1..20: mol_type = other DNA
ctaccagtgagttgaaaata

SEQ ID NO: 14326 - DNA, 20 bp, synthetic construct
  misc_feature 1..20: note = chemically synthesized
  source 1..20: mol_type = other DNA
taccagtgagttgaaaatac

SEQ ID NO: 14327 - DNA, 20 bp, synthetic construct
  misc_feature 1..20: note = chemically synthesized
  source 1..20: mol_type = other DNA
agtgagttgaaaatacagga

SEQ ID NO: 14328 - DNA, 20 bp, synthetic construct
  misc_feature 1..20: note = chemically synthesized
  source 1..20: mol_type = other DNA
acaggaaagcctatttcata

SEQ ID NO: 14329 - DNA, 20 bp, synthetic construct
  misc_feature 1..20: note = chemically synthesized
  source 1..20: mol_type = other DNA
caggaaagcctatttcatat

SEQ ID NO: 14330 - DNA, 20 bp, synthetic construct
  misc_feature 1..20: note = chemically synthesized
  source 1..20: mol_type = other DNA
agcctatttcatatgggtta

SEQ ID NO: 14331 - DNA, 20 bp, synthetic construct
  misc_feature 1..20: note = chemically synthesized
  source 1..20: mol_type = other DNA
gcctatttcatatgggttaa

SEQ ID NO: 14332 - DNA, 20 bp, synthetic construct
  misc_feature 1..20: note = chemically synthesized
  source 1..20: mol_type = other DNA
cctatttcatatgggttaaa

SEQ ID NO: 14333 - DNA, 20 bp, synthetic construct
  misc_feature 1..20: note = chemically synthesized
  source 1..20: mol_type = other DNA
atttcatatgggttaaaggg

SEQ ID NO: 14334 - DNA, 20 bp, synthetic construct
  misc_feature 1..20: note = chemically synthesized
  source 1..20: mol_type = other DNA
tttcatatgggttaaagggt

SEQ ID NO: 14335 - DNA, 20 bp, synthetic construct
  misc_feature 1..20: note = chemically synthesized
  source 1..20: mol_type = other DNA
atatgggttaaagggtagga

SEQ ID NO: 14336 - DNA, 20 bp, synthetic construct
  misc_feature 1..20: note = chemically synthesized
  source 1..20: mol_type = other DNA
ggacagttgaatttcgtgaa

SEQ ID NO: 14337 - DNA, 20 bp, synthetic construct
  misc_feature 1..20: note = chemically synthesized
  source 1..20: mol_type = other DNA
ttgaatttcgtgaaaagtct

SEQ ID NO: 14338 - DNA, 20 bp, synthetic construct
  misc_feature 1..20: note = chemically synthesized
  source 1..20: mol_type = other DNA
cgtgaaaagtctgagttata

SEQ ID NO: 14339 - DNA, 20 bp, synthetic construct
  misc_feature 1..20: note = chemically synthesized
  source 1..20: mol_type = other DNA
gtgaaaagtctgagttatat

SEQ ID NO: 14340 - DNA, 20 bp, synthetic construct
  misc_feature 1..20: note = chemically synthesized
  source 1..20: mol_type = other DNA
gtctgagttatataggcttt

SEQ ID NO: 14341 - DNA, 20 bp, synthetic construct
  misc_feature 1..20: note = chemically synthesized
  source 1..20: mol_type = other DNA
agttatataggctttgagca

SEQ ID NO: 14342 - DNA, 20 bp, synthetic construct
  misc_feature 1..20: note = chemically synthesized
  source 1..20: mol_type = other DNA
ttatataggctttgagcaaa

SEQ ID NO: 14343 - DNA, 20 bp, synthetic construct
  misc_feature 1..20: note = chemically synthesized
  source 1..20: mol_type = other DNA
ctttgagcaaagagttttat

SEQ ID NO: 14344 - DNA, 20 bp, synthetic construct
  misc_feature 1..20: note = chemically synthesized
  source 1..20: mol_type = other DNA
caaagagttttattagtatg

SEQ ID NO: 14345 - DNA, 20 bp, synthetic construct
  misc_feature 1..20: note = chemically synthesized
  source 1..20: mol_type = other DNA
agagttttattagtatgaag

SEQ ID NO: 14346 - DNA, 20 bp, synthetic construct
  misc_feature 1..20: note = chemically synthesized
  source 1..20: mol_type = other DNA
gttttattagtatgaagcag

SEQ ID NO: 14347 - DNA, 20 bp, synthetic construct
  misc_feature 1..20: note = chemically synthesized
  source 1..20: mol_type = other DNA
tttattagtatgaagcagaa

SEQ ID NO: 14348 - DNA, 20 bp, synthetic construct
  misc_feature 1..20: note = chemically synthesized
  source 1..20: mol_type = other DNA
ttattagtatgaagcagaag

SEQ ID NO: 14349 - DNA, 20 bp, synthetic construct
  misc_feature 1..20: note = chemically synthesized
  source 1..20: mol_type = other DNA
gaagcagaagaggtaacata

SEQ ID NO: 14350 - DNA, 20 bp, synthetic construct
  misc_feature 1..20: note = chemically synthesized
  source 1..20: mol_type = other DNA
cagaagaggtaacataaaga

SEQ ID NO: 14351 - DNA, 20 bp, synthetic construct
  misc_feature 1..20: note = chemically synthesized
  source 1..20: mol_type = other DNA
gtaacataaagaaagatgta

SEQ ID NO: 14352 - DNA, 20 bp, synthetic construct
  misc_feature 1..20: note = chemically synthesized
  source 1..20: mol_type = other DNA
taacataaagaaagatgtat

SEQ ID NO: 14353 - DNA, 20 bp, synthetic construct
  misc_feature 1..20: note = chemically synthesized
  source 1..20: mol_type = other DNA
aacataaagaaagatgtatg

SEQ ID NO: 14354 - DNA, 20 bp, synthetic construct
  misc_feature 1..20: note = chemically synthesized
  source 1..20: mol_type = other DNA
taaagaaagatgtatggggc

SEQ ID NO: 14355 - DNA, 20 bp, synthetic construct
  misc_feature 1..20: note = chemically synthesized
  source 1..20: mol_type = other DNA
aaagaaagatgtatggggcc

SEQ ID NO: 14356 - DNA, 20 bp, synthetic construct
  misc_feature 1..20: note = chemically synthesized
  source 1..20: mol_type = other DNA
aagatgtatggggccaggca

SEQ ID NO: 14357 - DNA, 20 bp, synthetic construct
  misc_feature 1..20: note = chemically synthesized
  source 1..20: mol_type = other DNA
atgtatggggccaggcatgg

SEQ ID NO: 14358 - DNA, 20 bp, synthetic construct
  misc_feature 1..20: note = chemically synthesized
  source 1..20: mol_type = other DNA
gtggctcacacctgtaatcc

SEQ ID NO: 14359 - DNA, 20 bp, synthetic construct
  misc_feature 1..20: note = chemically synthesized
  source 1..20: mol_type = other DNA
cacctgtaatcccagcactt

SEQ ID NO: 14360 - DNA, 20 bp, synthetic construct
  misc_feature 1..20: note = chemically synthesized
  source 1..20: mol_type = other DNA
acctgtaatcccagcacttt

SEQ ID NO: 14361 - DNA, 20 bp, synthetic construct
  misc_feature 1..20: note = chemically synthesized
  source 1..20: mol_type = other DNA
ctgtaatcccagcactttgg

SEQ ID NO: 14362 - DNA, 20 bp, synthetic construct
  misc_feature 1..20: note = chemically synthesized
  source 1..20: mol_type = other DNA
tgtaatcccagcactttggg

SEQ ID NO: 14363 - DNA, 20 bp, synthetic construct
  misc_feature 1..20: note = chemically synthesized
  source 1..20: mol_type = other DNA
tcccagcactttgggaggcc

SEQ ID NO: 14364 - DNA, 20 bp, synthetic construct
  misc_feature 1..20: note = chemically synthesized
  source 1..20: mol_type = other DNA
cccagcactttgggaggccg

SEQ ID NO: 14365 - DNA, 20 bp, synthetic construct
  misc_feature 1..20: note = chemically synthesized
  source 1..20: mol_type = other DNA
agcactttgggaggccgagg

SEQ ID NO: 14366 - DNA, 20 bp, synthetic construct
  misc_feature 1..20: note = chemically synthesized
  source 1..20: mol_type = other DNA
gcactttgggaggccgaggt

SEQ ID NO: 14367 - DNA, 20 bp, synthetic construct
  misc_feature 1..20: note = chemically synthesized
  source 1..20: mol_type = other DNA
cgaggtgggcgaatcactcc

SEQ ID NO: 14368 - DNA, 20 bp, synthetic construct
  misc_feature 1..20: note = chemically synthesized
  source 1..20: mol_type = other DNA
gaggtgggcgaatcactcct

SEQ ID NO: 14369 - DNA, 20 bp, synthetic construct
  misc_feature 1..20: note = chemically synthesized
  source 1..20: mol_type = other DNA
gaatcactcctgggtgaact

SEQ ID NO: 14370 - DNA, 20 bp, synthetic construct
  misc_feature 1..20: note = chemically synthesized
  source 1..20: mol_type = other DNA
aatcactcctgggtgaactc

SEQ ID NO: 14371 - DNA, 20 bp, synthetic construct
  misc_feature 1..20: note = chemically synthesized
  source 1..20: mol_type = other DNA
tcactcctgggtgaactcag

SEQ ID NO: 14372 - DNA, 20 bp, synthetic construct
  misc_feature 1..20: note = chemically synthesized
  source 1..20: mol_type = other DNA
ctgggtgaactcaggagttc

SEQ ID NO: 14373 - DNA, 20 bp, synthetic construct
  misc_feature 1..20: note = chemically synthesized
  source 1..20: mol_type = other DNA
tgaactcaggagttcaagac

SEQ ID NO: 14374 - DNA, 20 bp, synthetic construct
  misc_feature 1..20: note = chemically synthesized
  source 1..20: mol_type = other DNA
tcaggagttcaagaccagcc

SEQ ID NO: 14375 - DNA, 20 bp, synthetic construct
  misc_feature 1..20: note = chemically synthesized
  source 1..20: mol_type = other DNA
caggagttcaagaccagcct

SEQ ID NO: 14376 - DNA, 20 bp, synthetic construct
  misc_feature 1..20: note = chemically synthesized
  source 1..20: mol_type = other DNA
caagaccagcctgggcaaca

SEQ ID NO: 14377 - DNA, 20 bp, synthetic construct
  misc_feature 1..20: note = chemically synthesized
  source 1..20: mol_type = other DNA
tacaaaaacattacgaaaat

SEQ ID NO: 14378 - DNA, 20 bp, synthetic construct
  misc_feature 1..20: note = chemically synthesized
  source 1..20: mol_type = other DNA
aaaacattacgaaaattagc

SEQ ID NO: 14379 - DNA, 20 bp, synthetic construct
  misc_feature 1..20: note = chemically synthesized
  source 1..20: mol_type = other DNA
aaacattacgaaaattagct

SEQ ID NO: 14380 - DNA, 20 bp, synthetic construct
  misc_feature 1..20: note = chemically synthesized
  source 1..20: mol_type = other DNA
cgaaaattagctgggcgtgt

SEQ ID NO: 14381 - DNA, 20 bp, synthetic construct
  misc_feature 1..20: note = chemically synthesized
  source 1..20: mol_type = other DNA
agctgggcgtgttggtgctg

SEQ ID NO: 14382 - DNA, 20 bp, synthetic construct
  misc_feature 1..20: note = chemically synthesized
  source 1..20: mol_type = other DNA
gcgtgttggtgctgtagtcc

SEQ ID NO: 14383 - DNA, 20 bp, synthetic construct
  misc_feature 1..20: note = chemically synthesized
  source 1..20: mol_type = other DNA
gtgctgtagtcccagctact

SEQ ID NO: 14384 - DNA, 20 bp, synthetic construct
  misc_feature 1..20: note = chemically synthesized
  source 1..20: mol_type = other DNA
tgctgtagtcccagctactc

SEQ ID NO: 14385 - DNA, 20 bp, synthetic construct
  misc_feature 1..20: note = chemically synthesized
  source 1..20: mol_type = other DNA
ctgtagtcccagctactcag

SEQ ID NO: 14386 - DNA, 20 bp, synthetic construct
  misc_feature 1..20: note = chemically synthesized
  source 1..20: mol_type = other DNA
tgtagtcccagctactcagg

SEQ ID NO: 14387 - DNA, 20 bp, synthetic construct
  misc_feature 1..20: note = chemically synthesized
  source 1..20: mol_type = other DNA
tcccagctactcaggaggct

SEQ ID NO: 14388 - DNA, 20 bp, synthetic construct
  misc_feature 1..20: note = chemically synthesized
  source 1..20: mol_type = other DNA
cccagctactcaggaggctg

SEQ ID NO: 14389 - DNA, 20 bp, synthetic construct
  misc_feature 1..20: note = chemically synthesized
  source 1..20: mol_type = other DNA
gctactcaggaggctgaggt

SEQ ID NO: 14390 - DNA, 20 bp, synthetic construct
  misc_feature 1..20: note = chemically synthesized
  source 1..20: mol_type = other DNA
tactcaggaggctgaggtga

SEQ ID NO: 14391 - DNA, 20 bp, synthetic construct
  misc_feature 1..20: note = chemically synthesized
  source 1..20: mol_type = other DNA
actcaggaggctgaggtgag

SEQ ID NO: 14392 - DNA, 20 bp, synthetic construct
  misc_feature 1..20: note = chemically synthesized
  source 1..20: mol_type = other DNA
caggaggctgaggtgagagg

SEQ ID NO: 14393 - DNA, 20 bp, synthetic construct
  misc_feature 1..20: note = chemically synthesized
  source 1..20: mol_type = other DNA
ggaggctgaggtgagaggcg

SEQ ID NO: 14394 - DNA, 20 bp, synthetic construct
  misc_feature 1..20: note = chemically synthesized
  source 1..20: mol_type = other DNA
gaggctgaggtgagaggcgg

SEQ ID NO: 14395 - DNA, 20 bp, synthetic construct
  misc_feature 1..20: note = chemically synthesized
  source 1..20: mol_type = other DNA
ggctgaggtgagaggcggag

SEQ ID NO: 14396 - DNA, 20 bp, synthetic construct
  misc_feature 1..20: note = chemically synthesized
  source 1..20: mol_type = other DNA
gctgaggtgagaggcggagg

SEQ ID NO: 14397 - DNA, 20 bp, synthetic construct
  misc_feature 1..20: note = chemically synthesized
  source 1..20: mol_type = other DNA
gtgagaggcggaggaggttg

SEQ ID NO: 14398 - DNA, 20 bp, synthetic construct
  misc_feature 1..20: note = chemically synthesized
  source 1..20: mol_type = other DNA
gaggcggaggaggttgcagt

SEQ ID NO: 14399 - DNA, 20 bp, synthetic construct
  misc_feature 1..20: note = chemically synthesized
  source 1..20: mol_type = other DNA
ggaggaggttgcagtgagtc

SEQ ID NO: 14400 - DNA, 20 bp, synthetic construct
  misc_feature 1..20: note = chemically synthesized
  source 1..20: mol_type = other DNA
aagatcatgccactgcactc

SEQ ID NO: 14401 - DNA, 20 bp, synthetic construct
  misc_feature 1..20: note = chemically synthesized
  source 1..20: mol_type = other DNA
catgccactgcactccagcc

SEQ ID NO: 14402 - DNA, 20 bp, synthetic construct
  misc_feature 1..20: note = chemically synthesized
  source 1..20: mol_type = other DNA
atgccactgcactccagcct

SEQ ID NO: 14403 - DNA, 20 bp, synthetic construct
  misc_feature 1..20: note = chemically synthesized
  source 1..20: mol_type = other DNA
ctgcactccagcctgggcaa

SEQ ID NO: 14404 - DNA, 20 bp, synthetic construct
  misc_feature 1..20: note = chemically synthesized
  source 1..20: mol_type = other DNA
gcactccagcctgggcaaca

SEQ ID NO: 14405 - DNA, 20 bp, synthetic construct
  misc_feature 1..20: note = chemically synthesized
  source 1..20: mol_type = other DNA
tccagcctgggcaacagagt

SEQ ID NO: 14406 - DNA, 20 bp, synthetic construct
  misc_feature 1..20: note = chemically synthesized
  source 1..20: mol_type = other DNA
cctgtctcaaaaaaaaaaaa

SEQ ID NO: 14407 - DNA, 20 bp, synthetic construct
  misc_feature 1..20: note = chemically synthesized
  source 1..20: mol_type = other DNA
tctcaaaaaaaaaaaaaaga

SEQ ID NO: 14408 - DNA, 20 bp, synthetic construct
  misc_feature 1..20: note = chemically synthesized
  source 1..20: mol_type = other DNA
tgatgtatgctgtatgaaaa

SEQ ID NO: 14409 - DNA, 20 bp, synthetic construct
  misc_feature 1..20: note = chemically synthesized
  source 1..20: mol_type = other DNA
gatgtatgctgtatgaaaaa

SEQ ID NO: 14410 - DNA, 20 bp, synthetic construct
  misc_feature 1..20: note = chemically synthesized
  source 1..20: mol_type = other DNA
gtatgaaaaaaggaaacaca

SEQ ID NO: 14411 - DNA, 20 bp, synthetic construct
  misc_feature 1..20: note = chemically synthesized
  source 1..20: mol_type = other DNA
gaaacacacagatgattcaa

SEQ ID NO: 14412 - DNA, 20 bp, synthetic construct
  misc_feature 1..20: note = chemically synthesized
  source 1..20: mol_type = other DNA
tgattcaacagcctgttttg

SEQ ID NO: 14413 - DNA, 20 bp, synthetic construct
  misc_feature 1..20: note = chemically synthesized
  source 1..20: mol_type = other DNA
gattcaacagcctgttttgt

SEQ ID NO: 14414 - DNA, 20 bp, synthetic construct
  misc_feature 1..20: note = chemically synthesized
  source 1..20: mol_type = other DNA
attcaacagcctgttttgtg

SEQ ID NO: 14415 - DNA, 20 bp, synthetic construct
  misc_feature 1..20: note = chemically synthesized
  source 1..20: mol_type = other DNA
ctgttttgtggggtaatgaa

SEQ ID NO: 14416 - DNA, 20 bp, synthetic construct
  misc_feature 1..20: note = chemically synthesized
  source 1..20: mol_type = other DNA
ggggtaatgaaaagtcaccc

SEQ ID NO: 14417 - DNA, 20 bp, synthetic construct
  misc_feature 1..20: note = chemically synthesized
  source 1..20: mol_type = other DNA
gggtaatgaaaagtcaccct

SEQ ID NO: 14418 - DNA, 20 bp, synthetic construct
  misc_feature 1..20: note = chemically synthesized
  source 1..20: mol_type = other DNA
tgaaaagtcaccctgggaac

SEQ ID NO: 14419 - DNA, 20 bp, synthetic construct
  misc_feature 1..20: note = chemically synthesized
  source 1..20: mol_type = other DNA
gaaaagtcaccctgggaact

SEQ ID NO: 14420 - DNA, 20 bp, synthetic construct
  misc_feature 1..20: note = chemically synthesized
  source 1..20: mol_type = other DNA
tcaccctgggaactgggctc

SEQ ID NO: 14421 - DNA, 20 bp, synthetic construct
  misc_feature 1..20: note = chemically synthesized
  source 1..20: mol_type = other DNA
acccaccaactacatgtcct

SEQ ID NO: 14422 - DNA, 20 bp, synthetic construct
  misc_feature 1..20: note = chemically synthesized
  source 1..20: mol_type = other DNA
accaactacatgtccttggc

SEQ ID NO: 14423 - DNA, 20 bp, synthetic construct
  misc_feature 1..20: note = chemically synthesized
  source 1..20: mol_type = other DNA
gcaagtcatatcaattatct

SEQ ID NO: 14424 - DNA, 20 bp, synthetic construct
  misc_feature 1..20: note = chemically synthesized
  source 1..20: mol_type = other DNA
tctgttttataatctacaaa

SEQ ID NO: 14425 - DNA, 20 bp, synthetic construct
  misc_feature 1..20: note = chemically synthesized
  source 1..20: mol_type = other DNA
ctgttttataatctacaaat

SEQ ID NO: 14426 - DNA, 20 bp, synthetic construct
  misc_feature 1..20: note = chemically synthesized
  source 1..20: mol_type = other DNA
atctacaaataggttatctc

SEQ ID NO: 14427 - DNA, 20 bp, synthetic construct
  misc_feature 1..20: note = chemically synthesized
  source 1..20: mol_type = other DNA
tacaaataggttatctctgg

SEQ ID NO: 14428 - DNA, 20 bp, synthetic construct
  misc_feature 1..20: note = chemically synthesized
  source 1..20: mol_type = other DNA
tctggcagcttaataataat

SEQ ID NO: 14429 - DNA, 20 bp, synthetic construct
  misc_feature 1..20: note = chemically synthesized
  source 1..20: mol_type = other DNA
ctggcagcttaataataatc

SEQ ID NO: 14430 - DNA, 20 bp, synthetic construct
  misc_feature 1..20: note = chemically synthesized
  source 1..20: mol_type = other DNA
tggcagcttaataataatca

SEQ ID NO: 14431 - DNA, 20 bp, synthetic construct
  misc_feature 1..20: note = chemically synthesized
  source 1..20: mol_type = other DNA
cagggttaacatttattaaa

SEQ ID NO: 14432 - DNA, 20 bp, synthetic construct
  misc_feature 1..20: note = chemically synthesized
  source 1..20: mol_type = other DNA
atttattaaacagtgtgtgc

SEQ ID NO: 14433 - DNA, 20 bp, synthetic construct
  misc_feature 1..20: note = chemically synthesized
  source 1..20: mol_type = other DNA
tgtgctatgtgcttttctgt

SEQ ID NO: 14434 - DNA, 20 bp, synthetic construct
  misc_feature 1..20: note = chemically synthesized
  source 1..20: mol_type = other DNA
gtgctatgtgcttttctgtg

SEQ ID NO: 14435 - DNA, 20 bp, synthetic construct
  misc_feature 1..20: note = chemically synthesized
  source 1..20: mol_type = other DNA
ctatgtgcttttctgtgagg

SEQ ID NO: 14436 - DNA, 20 bp, synthetic construct
  misc_feature 1..20: note = chemically synthesized
  source 1..20: mol_type = other DNA
gaggtagttactgctattta

SEQ ID NO: 14437 - DNA, 20 bp, synthetic construct
  misc_feature 1..20: note = chemically synthesized
  source 1..20: mol_type = other DNA
gttactgctatttacagaaa

SEQ ID NO: 14438 - DNA, 20 bp, synthetic construct
  misc_feature 1..20: note = chemically synthesized
  source 1..20: mol_type = other DNA
actgctatttacagaaacag

SEQ ID NO: 14439 - DNA, 20 bp, synthetic construct
  misc_feature 1..20: note = chemically synthesized
  source 1..20: mol_type = other DNA
atttacagaaacagtagatg

SEQ ID NO: 14440 - DNA, 20 bp, synthetic construct
  misc_feature 1..20: note = chemically synthesized
  source 1..20: mol_type = other DNA
ttacagaaacagtagatgca

SEQ ID NO: 14441 - DNA, 20 bp, synthetic construct
  misc_feature 1..20: note = chemically synthesized
  source 1..20: mol_type = other DNA
aaacagtagatgcagagacc

SEQ ID NO: 14442 - DNA, 20 bp, synthetic construct
  misc_feature 1..20: note = chemically synthesized
  source 1..20: mol_type = other DNA
aacagtagatgcagagacca

SEQ ID NO: 14443 - DNA, 20 bp, synthetic construct
  misc_feature 1..20: note = chemically synthesized
  source 1..20: mol_type = other DNA
gatgcagagaccaaggtgct

SEQ ID NO: 14444 - DNA, 20 bp, synthetic construct
  misc_feature 1..20: note = chemically synthesized
  source 1..20: mol_type = other DNA
aaggtgctgagttaaatgat

SEQ ID NO: 14445 - DNA, 20 bp, synthetic construct
  misc_feature 1..20: note = chemically synthesized
  source 1..20: mol_type = other DNA
aggtgctgagttaaatgatt

SEQ ID NO: 14446 - DNA, 20 bp, synthetic construct
  misc_feature 1..20: note = chemically synthesized
  source 1..20: mol_type = other DNA
agttaaatgattaggccaac

SEQ ID NO: 14447 - DNA, 20 bp, synthetic construct
  misc_feature 1..20: note = chemically synthesized
  source 1..20: mol_type = other DNA
gttaaatgattaggccaaca

SEQ ID NO: 14448 - DNA, 20 bp, synthetic construct
  misc_feature 1..20: note = chemically synthesized
  source 1..20: mol_type = other DNA
aatgattaggccaacaaggt

SEQ ID NO: 14449 - DNA, 20 bp, synthetic construct
  misc_feature 1..20: note = chemically synthesized
  source 1..20: mol_type = other DNA
caacaaggttagtacatgcc

SEQ ID NO: 14450 - DNA, 20 bp, synthetic construct
  misc_feature 1..20: note = chemically synthesized
  source 1..20: mol_type = other DNA
aaggttagtacatgccgagc

SEQ ID NO: 14451 - DNA, 20 bp, synthetic construct
  misc_feature 1..20: note = chemically synthesized
  source 1..20: mol_type = other DNA
aggttagtacatgccgagcc

SEQ ID NO: 14452 - DNA, 20 bp, synthetic construct
  misc_feature 1..20: note = chemically synthesized
  source 1..20: mol_type = other DNA
tagtacatgccgagccagga

SEQ ID NO: 14453 - DNA, 20 bp, synthetic construct
  misc_feature 1..20: note = chemically synthesized
  source 1..20: mol_type = other DNA
tacatgccgagccaggatgg

SEQ ID NO: 14454 - DNA, 20 bp, synthetic construct
  misc_feature 1..20: note = chemically synthesized
  source 1..20: mol_type = other DNA
gccgagccaggatggaagcc

SEQ ID NO: 14455 - DNA, 20 bp, synthetic construct
  misc_feature 1..20: note = chemically synthesized
  source 1..20: mol_type = other DNA
ccgagccaggatggaagccc

SEQ ID NO: 14456 - DNA, 20 bp, synthetic construct
  misc_feature 1..20: note = chemically synthesized
  source 1..20: mol_type = other DNA
agccaggatggaagcccagg

SEQ ID NO: 14457 - DNA, 20 bp, synthetic construct
  misc_feature 1..20: note = chemically synthesized
  source 1..20: mol_type = other DNA
gccaggatggaagcccaggt

SEQ ID NO: 14458 - DNA, 20 bp, synthetic construct
  misc_feature 1..20: note = chemically synthesized
  source 1..20: mol_type = other DNA
aggatggaagcccaggtagg

SEQ ID NO: 14459 - DNA, 20 bp, synthetic construct
  misc_feature 1..20: note = chemically synthesized
  source 1..20: mol_type = other DNA
ggatggaagcccaggtaggc

SEQ ID NO: 14460 - DNA, 20 bp, synthetic construct
  misc_feature 1..20: note = chemically synthesized
  source 1..20: mol_type = other DNA
ggaagcccaggtaggcaggc

SEQ ID NO: 14461 - DNA, 20 bp, synthetic construct
  misc_feature 1..20: note = chemically synthesized
  source 1..20: mol_type = other DNA
ggtaggcaggctggcttccg

SEQ ID NO: 14462 - DNA, 20 bp, synthetic construct
  misc_feature 1..20: note = chemically synthesized
  source 1..20: mol_type = other DNA
cttatgaactatgttacgtc

SEQ ID NO: 14463 - DNA, 20 bp, synthetic construct
  misc_feature 1..20: note = chemically synthesized
  source 1..20: mol_type = other DNA
gtgctgataaactgactctc

SEQ ID NO: 14464 - DNA, 20 bp, synthetic construct
  misc_feature 1..20: note = chemically synthesized
  source 1..20: mol_type = other DNA
tgctgataaactgactctct

SEQ ID NO: 14465 - DNA, 20 bp, synthetic construct
  misc_feature 1..20: note = chemically synthesized
  source 1..20: mol_type = other DNA
gctgataaactgactctctg

SEQ ID NO: 14466 - DNA, 20 bp, synthetic construct
  misc_feature 1..20: note = chemically synthesized
  source 1..20: mol_type = other DNA
tgataaactgactctctggg

SEQ ID NO: 14467 - DNA, 20 bp, synthetic construct
  misc_feature 1..20: note = chemically synthesized
  source 1..20: mol_type = other DNA
taaactgactctctggggag

SEQ ID NO: 14468 - DNA, 20 bp, synthetic construct
  misc_feature 1..20: note = chemically synthesized
  source 1..20: mol_type = other DNA
aaactgactctctggggagc

SEQ ID NO: 14469 - DNA, 20 bp, synthetic construct
  misc_feature 1..20: note = chemically synthesized
  source 1..20: mol_type = other DNA
aactgactctctggggagca

SEQ ID NO: 14470 - DNA, 20 bp, synthetic construct
  misc_feature 1..20: note = chemically synthesized
  source 1..20: mol_type = other DNA
actgactctctggggagcag

SEQ ID NO: 14471 - DNA, 20 bp, synthetic construct
  misc_feature 1..20: note = chemically synthesized
  source 1..20: mol_type = other DNA
actctctggggagcagggga

SEQ ID NO: 14472 - DNA, 20 bp, synthetic construct
  misc_feature 1..20: note = chemically synthesized
  source 1..20: mol_type = other DNA
ggggagcaggggaaagccct

SEQ ID NO: 14473 - DNA, 20 bp, synthetic construct
  misc_feature 1..20: note = chemically synthesized
  source 1..20: mol_type = other DNA
gcaggggaaagccctgagtt

SEQ ID NO: 14474 - DNA, 20 bp, synthetic construct
  misc_feature 1..20: note = chemically synthesized
  source 1..20: mol_type = other DNA
tcacgtaaacattcccattc

SEQ ID NO: 14475 - DNA, 20 bp, synthetic construct
  misc_feature 1..20: note = chemically synthesized
  source 1..20: mol_type = other DNA
tttcttttgtttgtttgttt

SEQ ID NO: 14476 - DNA, 20 bp, synthetic construct
  misc_feature 1..20: note = chemically synthesized
  source 1..20: mol_type = other DNA
ttttgtttgtttgtttgaga

SEQ ID NO: 14477 - DNA, 20 bp, synthetic construct
  misc_feature 1..20: note = chemically synthesized
  source 1..20: mol_type = other DNA
ttgtttgtttgtttgagatg

SEQ ID NO: 14478 - DNA, 20 bp, synthetic construct
  misc_feature 1..20: note = chemically synthesized
  source 1..20: mol_type = other DNA
tggagtctcgcactgttgcc

SEQ ID NO: 14479 - DNA, 20 bp, synthetic construct
  misc_feature 1..20: note = chemically synthesized
  source 1..20: mol_type = other DNA
gtctcgcactgttgcctggc

SEQ ID NO: 14480 - DNA, 20 bp, synthetic construct
  misc_feature 1..20: note = chemically synthesized
  source 1..20: mol_type = other DNA
ctcgcactgttgcctggctg

SEQ ID NO: 14481 - DNA, 20 bp, synthetic construct
  misc_feature 1..20: note = chemically synthesized
  source 1..20: mol_type = other DNA
gttgcctggctggagtgcaa

SEQ ID NO: 14482 - DNA, 20 bp, synthetic construct
  misc_feature 1..20: note = chemically synthesized
  source 1..20: mol_type = other DNA
ggagtgcaatggtgcaatct

SEQ ID NO: 14483 - DNA, 20 bp, synthetic construct
  misc_feature 1..20: note = chemically synthesized
  source 1..20: mol_type = other DNA
cactgcaacctctgcctctc

SEQ ID NO: 14484 - DNA, 20 bp, synthetic construct
  misc_feature 1..20: note = chemically synthesized
  source 1..20: mol_type = other DNA
aacctctgcctctccggttc

SEQ ID NO: 14485 - DNA, 20 bp, synthetic construct
  misc_feature 1..20: note = chemically synthesized
  source 1..20: mol_type = other DNA
ttcaagtgattctcctgcct

SEQ ID NO: 14486 - DNA, 20 bp, synthetic construct
  misc_feature 1..20: note = chemically synthesized
  source 1..20: mol_type = other DNA
ttctcctgcctcagcctccc

SEQ ID NO: 14487 - DNA, 20 bp, synthetic construct
  misc_feature 1..20: note = chemically synthesized
  source 1..20: mol_type = other DNA
tcctgcctcagcctcccaag

SEQ ID NO: 14488 - DNA, 20 bp, synthetic construct
  misc_feature 1..20: note = chemically synthesized
  source 1..20: mol_type = other DNA
gcctcagcctcccaagtagc

SEQ ID NO: 14489 - DNA, 20 bp, synthetic construct
  misc_feature 1..20: note = chemically synthesized
  source 1..20: mol_type = other DNA
cctcagcctcccaagtagct

SEQ ID NO: 14490 - DNA, 20 bp, synthetic construct
  misc_feature 1..20: note = chemically synthesized
  source 1..20: mol_type = other DNA
ctcccaagtagctgggatta

SEQ ID NO: 14491 - DNA, 20 bp, synthetic construct
  misc_feature 1..20: note = chemically synthesized
  source 1..20: mol_type = other DNA
tcccaagtagctgggattac

SEQ ID NO: 14492 - DNA, 20 bp, synthetic construct
  misc_feature 1..20: note = chemically synthesized
  source 1..20: mol_type = other DNA
caggtgcccgccaccatgcc

SEQ ID NO: 14493 - DNA, 20 bp, synthetic construct
  misc_feature 1..20: note = chemically synthesized
  source 1..20: mol_type = other DNA
gctaattttttttgtatttt

SEQ ID NO: 14494 - DNA, 20 bp, synthetic construct
  misc_feature 1..20: note = chemically synthesized
  source 1..20: mol_type = other DNA
aattttttttgtatttttag

SEQ ID NO: 14495 - DNA, 20 bp, synthetic construct
  misc_feature 1..20: note = chemically synthesized
  source 1..20: mol_type = other DNA
ttttttttgtatttttagta

SEQ ID NO: 14496 - DNA, 20 bp, synthetic construct
  misc_feature 1..20: note = chemically synthesized
  source 1..20: mol_type = other DNA
ttgtatttttagtagagaca

SEQ ID NO: 14497 - DNA, 20 bp, synthetic construct
  misc_feature 1..20: note = chemically synthesized
  source 1..20: mol_type = other DNA
catggtttcactatgttgac

SEQ ID NO: 14498 - DNA, 20 bp, synthetic construct
  misc_feature 1..20: note = chemically synthesized
  source 1..20: mol_type = other DNA
atggtttcactatgttgact

SEQ ID NO: 14499 - DNA, 20 bp, synthetic construct
  misc_feature 1..20: note = chemically synthesized
  source 1..20: mol_type = other DNA
tttcactatgttgactaggc

SEQ ID NO: 14500 - DNA, 20 bp, synthetic construct
  misc_feature 1..20: note = chemically synthesized
  source 1..20: mol_type = other DNA
acctcatgatctgcctgcct

SEQ ID NO: 14501 - DNA, 20 bp, synthetic construct
  misc_feature 1..20: note = chemically synthesized
  source 1..20: mol_type = other DNA
ctgcctgccttggcctccct

SEQ ID NO: 14502 - DNA, 20 bp, synthetic construct
  misc_feature 1..20: note = chemically synthesized
  source 1..20: mol_type = other DNA
gccttggcctccctaagtgc

SEQ ID NO: 14503 - DNA, 20 bp, synthetic construct
  misc_feature 1..20: note = chemically synthesized
  source 1..20: mol_type = other DNA
ccttggcctccctaagtgct

SEQ ID NO: 14504 - DNA, 20 bp, synthetic construct
  misc_feature 1..20: note = chemically synthesized
  source 1..20: mol_type = other DNA
ctccctaagtgctaggatta

SEQ ID NO: 14505 - DNA, 20 bp, synthetic construct
  misc_feature 1..20: note = chemically synthesized
  source 1..20: mol_type = other DNA
tccctaagtgctaggattac

SEQ ID NO: 14506 - DNA, 20 bp, synthetic construct
  misc_feature 1..20: note = chemically synthesized
  source 1..20: mol_type = other DNA
agtgctaggattacaggcgt

SEQ ID NO: 14507 - DNA, 20 bp, synthetic construct
  misc_feature 1..20: note = chemically synthesized
  source 1..20: mol_type = other DNA
caggcgtgagccactacacc

SEQ ID NO: 14508 - DNA, 20 bp, synthetic construct
  misc_feature 1..20: note = chemically synthesized
  source 1..20: mol_type = other DNA
gcatgattctaaaaaataaa

SEQ ID NO: 14509 - DNA, 20 bp, synthetic construct
  misc_feature 1..20: note = chemically synthesized
  source 1..20: mol_type = other DNA
ttctaaaaaataaaaagatg

SEQ ID NO: 14510 - DNA, 20 bp, synthetic construct
  misc_feature 1..20: note = chemically synthesized
  source 1..20: mol_type = other DNA
caaacatctgatctccattg

SEQ ID NO: 14511 - DNA, 20 bp, synthetic construct
  misc_feature 1..20: note = chemically synthesized
  source 1..20: mol_type = other DNA
gaagaaccatgcaatctctc

SEQ ID NO: 14512 - DNA, 20 bp, synthetic construct
  misc_feature 1..20: note = chemically synthesized
  source 1..20: mol_type = other DNA
aagaaccatgcaatctctct

SEQ ID NO: 14513 - DNA, 20 bp, synthetic construct
  misc_feature 1..20: note = chemically synthesized
  source 1..20: mol_type = other DNA
atgcaatctctctgggttga

SEQ ID NO: 14514 - DNA, 20 bp, synthetic construct
  misc_feature 1..20: note = chemically synthesized
  source 1..20: mol_type = other DNA
gcaatctctctgggttgata

SEQ ID NO: 14515 - DNA, 20 bp, synthetic construct
  misc_feature 1..20: note = chemically synthesized
  source 1..20: mol_type = other DNA
caatctctctgggttgatag

SEQ ID NO: 14516 - DNA, 20 bp, synthetic construct
  misc_feature 1..20: note = chemically synthesized
  source 1..20: mol_type = other DNA
ctctctgggttgatagaggc

SEQ ID NO: 14517 - DNA, 20 bp, synthetic construct
  misc_feature 1..20: note = chemically synthesized
  source 1..20: mol_type = other DNA
ctctgggttgatagaggcca

SEQ ID NO: 14518 - DNA, 20 bp, synthetic construct
  misc_feature 1..20: note = chemically synthesized
  source 1..20: mol_type = other DNA
gggttgatagaggccagagt

SEQ ID NO: 14519 - DNA, 20 bp, synthetic construct
  misc_feature 1..20: note = chemically synthesized
  source 1..20: mol_type = other DNA
ttgatagaggccagagttag

SEQ ID NO: 14520 - DNA, 20 bp, synthetic construct
  misc_feature 1..20: note = chemically synthesized
  source 1..20: mol_type = other DNA
ttagtggctctccctgattt

SEQ ID NO: 14521 - DNA, 20 bp, synthetic construct
  misc_feature 1..20: note = chemically synthesized
  source 1..20: mol_type = other DNA
tggctctccctgatttcggt

SEQ ID NO: 14522 - DNA, 20 bp, synthetic construct
  misc_feature 1..20: note = chemically synthesized
  source 1..20: mol_type = other DNA
aaatcactattccaccatca

SEQ ID NO: 14523 - DNA, 20 bp, synthetic construct
  misc_feature 1..20: note = chemically synthesized
  source 1..20: mol_type = other DNA
aatcactattccaccatcac

SEQ ID NO: 14524 - DNA, 20 bp, synthetic construct
  misc_feature 1..20: note = chemically synthesized
  source 1..20: mol_type = other DNA
attccaccatcacgggataa

SEQ ID NO: 14525 - DNA, 20 bp, synthetic construct
  misc_feature 1..20: note = chemically synthesized
  source 1..20: mol_type = other DNA
ttccaccatcacgggataaa

SEQ ID NO: 14526 - DNA, 20 bp, synthetic construct
  misc_feature 1..20: note = chemically synthesized
  source 1..20: mol_type = other DNA
gggataaaaggcatcctgac

SEQ ID NO: 14527 - DNA, 20 bp, synthetic construct
  misc_feature 1..20: note = chemically synthesized
  source 1..20: mol_type = other DNA
ataaaaggcatcctgactgg

SEQ ID NO: 14528 - DNA, 20 bp, synthetic construct
  misc_feature 1..20: note = chemically synthesized
  source 1..20: mol_type = other DNA
gcggttgacacctatttcca

SEQ ID NO: 14529 - DNA, 20 bp, synthetic construct
  misc_feature 1..20: note = chemically synthesized
  source 1..20: mol_type = other DNA
gacacctatttccacagtga

SEQ ID NO: 14530 - DNA, 20 bp, synthetic construct
  misc_feature 1..20: note = chemically synthesized
  source 1..20: mol_type = other DNA
tccacagtgaaagatatatc

SEQ ID NO: 14531 - DNA, 20 bp, synthetic construct
  misc_feature 1..20: note = chemically synthesized
  source 1..20: mol_type = other DNA
agatatatctagtactttta

SEQ ID NO: 14532 - DNA, 20 bp, synthetic construct
  misc_feature 1..20: note = chemically synthesized
  source 1..20: mol_type = other DNA
gatatatctagtacttttaa

SEQ ID NO: 14533 - DNA, 20 bp, synthetic construct
  misc_feature 1..20: note = chemically synthesized
  source 1..20: mol_type = other DNA
atatatctagtacttttaaa

SEQ ID NO: 14534 - DNA, 20 bp, synthetic construct
  misc_feature 1..20: note = chemically synthesized
  source 1..20: mol_type = other DNA
tatatctagtacttttaaag

SEQ ID NO: 14535 - DNA, 20 bp, synthetic construct
  misc_feature 1..20: note = chemically synthesized
  source 1..20: mol_type = other DNA
atctagtacttttaaagggg

SEQ ID NO: 14536 - DNA, 20 bp, synthetic construct
  misc_feature 1..20: note = chemically synthesized
  source 1..20: mol_type = other DNA
tagtacttttaaaggggaag

SEQ ID NO: 14537 - DNA, 20 bp, synthetic construct
  misc_feature 1..20: note = chemically synthesized
  source 1..20: mol_type = other DNA
aaaggggaagtggtttgtct

SEQ ID NO: 14538 - DNA, 20 bp, synthetic construct
  misc_feature 1..20: note = chemically synthesized
  source 1..20: mol_type = other DNA
gtctgagatactctgtttca

SEQ ID NO: 14539 - DNA, 20 bp, synthetic construct
  misc_feature 1..20: note = chemically synthesized
  source 1..20: mol_type = other DNA
tgagatactctgtttcaaag

SEQ ID NO: 14540 - DNA, 20 bp, synthetic construct
  misc_feature 1..20: note = chemically synthesized
  source 1..20: mol_type = other DNA
agatactctgtttcaaagta

SEQ ID NO: 14541 - DNA, 20 bp, synthetic construct
  misc_feature 1..20: note = chemically synthesized
  source 1..20: mol_type = other DNA
atactctgtttcaaagtaga

SEQ ID NO: 14542 - DNA, 20 bp, synthetic construct
  misc_feature 1..20: note = chemically synthesized
  source 1..20: mol_type = other DNA
tactctgtttcaaagtagag

SEQ ID NO: 14543 - DNA, 20 bp, synthetic construct
  misc_feature 1..20: note = chemically synthesized
  source 1..20: mol_type = other DNA
gtttcaaagtagagaggata

SEQ ID NO: 14544 - DNA, 20 bp, synthetic construct
  misc_feature 1..20: note = chemically synthesized
  source 1..20: mol_type = other DNA
aagtagagaggatacagaac

SEQ ID NO: 14545 - DNA, 20 bp, synthetic construct
  misc_feature 1..20: note = chemically synthesized
  source 1..20: mol_type = other DNA
ggatacagaacaagcatctg

SEQ ID NO: 14546 - DNA, 20 bp, synthetic construct
  misc_feature 1..20: note = chemically synthesized
  source 1..20: mol_type = other DNA
tgaagctatatacatcctta

SEQ ID NO: 14547 - DNA, 20 bp, synthetic construct
  misc_feature 1..20: note = chemically synthesized
  source 1..20: mol_type = other DNA
aagctatatacatccttaca

SEQ ID NO: 14548 - DNA, 20 bp, synthetic construct
  misc_feature 1..20: note = chemically synthesized
  source 1..20: mol_type = other DNA
gctatatacatccttacaga

SEQ ID NO: 14549 - DNA, 20 bp, synthetic construct
  misc_feature 1..20: note = chemically synthesized
  source 1..20: mol_type = other DNA
cttacagagagcaattctga

SEQ ID NO: 14550 - DNA, 20 bp, synthetic construct
  misc_feature 1..20: note = chemically synthesized
  source 1..20: mol_type = other DNA
gagcaattctgatggaaatg

SEQ ID NO: 14551 - DNA, 20 bp, synthetic construct
  misc_feature 1..20: note = chemically synthesized
  source 1..20: mol_type = other DNA
agcaattctgatggaaatgc

SEQ ID NO: 14552 - DNA, 20 bp, synthetic construct
  misc_feature 1..20: note = chemically synthesized
  source 1..20: mol_type = other DNA
aaatgcaggccatgtttccc

SEQ ID NO: 14553 - DNA, 20 bp, synthetic construct
  misc_feature 1..20: note = chemically synthesized
  source 1..20: mol_type = other DNA
aatgcaggccatgtttccct

SEQ ID NO: 14554 - DNA, 20 bp, synthetic construct
  misc_feature 1..20: note = chemically synthesized
  source 1..20: mol_type = other DNA
atgcaggccatgtttccctg

SEQ ID NO: 14555 - DNA, 20 bp, synthetic construct
  misc_feature 1..20: note = chemically synthesized
  source 1..20: mol_type = other DNA
tgcaggccatgtttccctgg

SEQ ID NO: 14556 - DNA, 20 bp, synthetic construct
  misc_feature 1..20: note = chemically synthesized
  source 1..20: mol_type = other DNA
gcaggccatgtttccctggg

SEQ ID NO: 14557 - DNA, 20 bp, synthetic construct
  misc_feature 1..20: note = chemically synthesized
  source 1..20: mol_type = other DNA
caggccatgtttccctgggg

SEQ ID NO: 14558 - DNA, 20 bp, synthetic construct
  misc_feature 1..20: note = chemically synthesized
  source 1..20: mol_type = other DNA
aggccatgtttccctggggg

SEQ ID NO: 14559 - DNA, 20 bp, synthetic construct
  misc_feature 1..20: note = chemically synthesized
  source 1..20: mol_type = other DNA
tccctggggggggctcgtcc

SEQ ID NO: 14560 - DNA, 20 bp, synthetic construct
  misc_feature 1..20: note = chemically synthesized
  source 1..20: mol_type = other DNA
ccctggggggggctcgtcct

SEQ ID NO: 14561 - DNA, 20 bp, synthetic construct
  misc_feature 1..20: note = chemically synthesized
  source 1..20: mol_type = other DNA
cctggggggggctcgtccta

SEQ ID NO: 14562 - DNA, 20 bp, synthetic construct
  misc_feature 1..20: note = chemically synthesized
  source 1..20: mol_type = other DNA
ctggggggggctcgtcctag

SEQ ID NO: 14563 - DNA, 20 bp, synthetic construct
  misc_feature 1..20: note = chemically synthesized
  source 1..20: mol_type = other DNA
ggggggctcgtcctaggggc

SEQ ID NO: 14564 - DNA, 20 bp, synthetic construct
  misc_feature 1..20: note = chemically synthesized
  source 1..20: mol_type = other DNA
ggggctcgtcctaggggctg

SEQ ID NO: 14565 - DNA, 20 bp, synthetic construct
  misc_feature 1..20: note = chemically synthesized
  source 1..20: mol_type = other DNA
tggagtgcattctctgatgt

SEQ ID NO: 14566 - DNA, 20 bp, synthetic construct
  misc_feature 1..20: note = chemically synthesized
  source 1..20: mol_type = other DNA
gagtgcattctctgatgtca

SEQ ID NO: 14567 - DNA, 20 bp, synthetic construct
  misc_feature 1..20: note = chemically synthesized
  source 1..20: mol_type = other DNA
agtgcattctctgatgtcag

SEQ ID NO: 14568 - DNA, 20 bp, synthetic construct
  misc_feature 1..20: note = chemically synthesized
  source 1..20: mol_type = other DNA
tctgatgtcagaggaaatgc

SEQ ID NO: 14569 - DNA, 20 bp, synthetic construct
  misc_feature 1..20: note = chemically synthesized
  source 1..20: mol_type = other DNA
gaggaaatgcaagattccct

SEQ ID NO: 14570 - DNA, 20 bp, synthetic construct
  misc_feature 1..20: note = chemically synthesized
  source 1..20: mol_type = other DNA
aggaaatgcaagattccctg

SEQ ID NO: 14571 - DNA, 20 bp, synthetic construct
  misc_feature 1..20: note = chemically synthesized
  source 1..20: mol_type = other DNA
tgcaagattccctgaggcct

SEQ ID NO: 14572 - DNA, 20 bp, synthetic construct
  misc_feature 1..20: note = chemically synthesized
  source 1..20: mol_type = other DNA
gcaagattccctgaggcctg

SEQ ID NO: 14573 - DNA, 20 bp, synthetic construct
  misc_feature 1..20: note = chemically synthesized
  source 1..20: mol_type = other DNA
caagattccctgaggcctga

SEQ ID NO: 14574 - DNA, 20 bp, synthetic construct
  misc_feature 1..20: note = chemically synthesized
  source 1..20: mol_type = other DNA
ctgaggcctgagggaaccca

SEQ ID NO: 14575 - DNA, 20 bp, synthetic construct
  misc_feature 1..20: note = chemically synthesized
  source 1..20: mol_type = other DNA
agggaacccatggtatatgc

SEQ ID NO: 14576 - DNA, 20 bp, synthetic construct
  misc_feature 1..20: note = chemically synthesized
  source 1..20: mol_type = other DNA
cccatggtatatgcaagtcc

SEQ ID NO: 14577 - DNA, 20 bp, synthetic construct
  misc_feature 1..20: note = chemically synthesized
  source 1..20: mol_type = other DNA
caagtccaagtttcaaactg

SEQ ID NO: 14578 - DNA, 20 bp, synthetic construct
  misc_feature 1..20: note = chemically synthesized
  source 1..20: mol_type = other DNA
tagttccatatgcattcttc

SEQ ID NO: 14579 - DNA, 20 bp, synthetic construct
  misc_feature 1..20: note = chemically synthesized
  source 1..20: mol_type = other DNA
agttccatatgcattcttcc

SEQ ID NO: 14580 - DNA, 20 bp, synthetic construct
  misc_feature 1..20: note = chemically synthesized
  source 1..20: mol_type = other DNA
ttccaggacaaatacttctt

SEQ ID NO: 14581 - DNA, 20 bp, synthetic construct
  misc_feature 1..20: note = chemically synthesized
  source 1..20: mol_type = other DNA
tccaggacaaatacttcttg

SEQ ID NO: 14582 - DNA, 20 bp, synthetic construct
  misc_feature 1..20: note = chemically synthesized
  source 1..20: mol_type = other DNA
ttcttgaggttaaaaaaaaa

SEQ ID NO: 14583 - DNA, 20 bp, synthetic construct
  misc_feature 1..20: note = chemically synthesized
  source 1..20: mol_type = other DNA
gttaaaaaaaaaaagtcaca

SEQ ID NO: 14584 - DNA, 20 bp, synthetic construct
  misc_feature 1..20: note = chemically synthesized
  source 1..20: mol_type = other DNA
gtcacatagctgccatttta

SEQ ID NO: 14585 - DNA, 20 bp, synthetic construct
  misc_feature 1..20: note = chemically synthesized
  source 1..20: mol_type = other DNA
agctgccattttatggattt

SEQ ID NO: 14586 - DNA, 20 bp, synthetic construct
  misc_feature 1..20: note = chemically synthesized
  source 1..20: mol_type = other DNA
gctgccattttatggatttc

SEQ ID NO: 14587 - DNA, 20 bp, synthetic construct
  misc_feature 1..20: note = chemically synthesized
  source 1..20: mol_type = other DNA
attttttttttttttttttt

SEQ ID NO: 14588 - DNA, 20 bp, synthetic construct
  misc_feature 1..20: note = chemically synthesized
  source 1..20: mol_type = other DNA
ttttttttttttttttgaga

SEQ ID NO: 14589 - DNA, 20 bp, synthetic construct
  misc_feature 1..20: note = chemically synthesized
  source 1..20: mol_type = other DNA
ttttttttttttttgagatg

SEQ ID NO: 14590 - DNA, 20 bp, synthetic construct
  misc_feature 1..20: note = chemically synthesized
  source 1..20: mol_type = other DNA
tggagtcttgctctgtcacc

SEQ ID NO: 14591 - DNA, 20 bp, synthetic construct
  misc_feature 1..20: note = chemically synthesized
  source 1..20: mol_type = other DNA
ttgctctgtcacccagcctg

SEQ ID NO: 14592 - DNA, 20 bp, synthetic construct
  misc_feature 1..20: note = chemically synthesized
  source 1..20: mol_type = other DNA
ctgtcacccagcctgtagtg

SEQ ID NO: 14593 - DNA, 20 bp, synthetic construct
  misc_feature 1..20: note = chemically synthesized
  source 1..20: mol_type = other DNA
tcacccagcctgtagtgcag

SEQ ID NO: 14594 - DNA, 20 bp, synthetic construct
  misc_feature 1..20: note = chemically synthesized
  source 1..20: mol_type = other DNA
gtagtgcagtggcataatct

SEQ ID NO: 14595 - DNA, 20 bp, synthetic construct
  misc_feature 1..20: note = chemically synthesized
  source 1..20: mol_type = other DNA
agtggcataatctcggctca

SEQ ID NO: 14596 - DNA, 20 bp, synthetic construct
  misc_feature 1..20: note = chemically synthesized
  source 1..20: mol_type = other DNA
tcacggcaacctccgcctcc

SEQ ID NO: 14597 - DNA, 20 bp, synthetic construct
  misc_feature 1..20: note = chemically synthesized
  source 1..20: mol_type = other DNA
cacggcaacctccgcctccc

SEQ ID NO: 14598 - DNA, 20 bp, synthetic construct
  misc_feature 1..20: note = chemically synthesized
  source 1..20: mol_type = other DNA
aacctccgcctcccaggttc

SEQ ID NO: 14599 - DNA, 20 bp, synthetic construct
  misc_feature 1..20: note = chemically synthesized
  source 1..20: mol_type = other DNA
ttcaagcgattctcttgcct

SEQ ID NO: 14600 - DNA, 20 bp, synthetic construct
  misc_feature 1..20: note = chemically synthesized
  source 1..20: mol_type = other DNA
ttctcttgccttagcctccc

SEQ ID NO: 14601 - DNA, 20 bp, synthetic construct
  misc_feature 1..20: note = chemically synthesized
  source 1..20: mol_type = other DNA
tcttgccttagcctcccgag

SEQ ID NO: 14602 - DNA, 20 bp, synthetic construct
  misc_feature 1..20: note = chemically synthesized
  source 1..20: mol_type = other DNA
gccttagcctcccgagtagc

SEQ ID NO: 14603 - DNA, 20 bp, synthetic construct
  misc_feature 1..20: note = chemically synthesized
  source 1..20: mol_type = other DNA
ccttagcctcccgagtagct

SEQ ID NO: 14604 - DNA, 20 bp, synthetic construct
  misc_feature 1..20: note = chemically synthesized
  source 1..20: mol_type = other DNA
ctcccgagtagctgggatta

SEQ ID NO: 14605 - DNA, 20 bp, synthetic construct
  misc_feature 1..20: note = chemically synthesized
  source 1..20: mol_type = other DNA
cagtcacgcaccaccacatc

SEQ ID NO: 14606 - DNA, 20 bp, synthetic construct
  misc_feature 1..20: note = chemically synthesized
  source 1..20: mol_type = other DNA
ggctaattctttatattttt

SEQ ID NO: 14607 - DNA, 20 bp, synthetic construct
  misc_feature 1..20: note = chemically synthesized
  source 1..20: mol_type = other DNA
taattctttatattttttgg

SEQ ID NO: 14608 - DNA, 20 bp, synthetic construct
  misc_feature 1..20: note = chemically synthesized
  source 1..20: mol_type = other DNA
tttatattttttggtagaaa

SEQ ID NO: 14609 - DNA, 20 bp, synthetic construct
  misc_feature 1..20: note = chemically synthesized
  source 1..20: mol_type = other DNA
gaaacggtgtttcaccatgt

SEQ ID NO: 14610 - DNA, 20 bp, synthetic construct
  misc_feature 1..20: note = chemically synthesized
  source 1..20: mol_type = other DNA
cggtgtttcaccatgttggc

SEQ ID NO: 14611 - DNA, 20 bp, synthetic construct
  misc_feature 1..20: note = chemically synthesized
  source 1..20: mol_type = other DNA
ggtgtttcaccatgttggcc

SEQ ID NO: 14612 - DNA, 20 bp, synthetic construct
  misc_feature 1..20: note = chemically synthesized
  source 1..20: mol_type = other DNA
tttcaccatgttggccaggc

SEQ ID NO: 14613 - DNA, 20 bp, synthetic construct
  misc_feature 1..20: note = chemically synthesized
  source 1..20: mol_type = other DNA
ctcatgtgatctgcctgcct

SEQ ID NO: 14614 - DNA, 20 bp, synthetic construct
  misc_feature 1..20: note = chemically synthesized
  source 1..20: mol_type = other DNA
ctgcctgccttggcctccca

SEQ ID NO: 14615 - DNA, 20 bp, synthetic construct
  misc_feature 1..20: note = chemically synthesized
  source 1..20: mol_type = other DNA
ccttggcctcccaaagtgct

SEQ ID NO: 14616 - DNA, 20 bp, synthetic construct
  misc_feature 1..20: note = chemically synthesized
  source 1..20: mol_type = other DNA
ctcccaaagtgctgagatta

SEQ ID NO: 14617 - DNA, 20 bp, synthetic construct
  misc_feature 1..20: note = chemically synthesized
  source 1..20: mol_type = other DNA
tcccaaagtgctgagattac

SEQ ID NO: 14618 - DNA, 20 bp, synthetic construct
  misc_feature 1..20: note = chemically synthesized
  source 1..20: mol_type = other DNA
agtgctgagattacaggtgt

SEQ ID NO: 14619 - DNA, 20 bp, synthetic construct
  misc_feature 1..20: note = chemically synthesized
  source 1..20: mol_type = other DNA
tgtgagccaccgcgcctgcc

SEQ ID NO: 14620 - DNA, 20 bp, synthetic construct
  misc_feature 1..20: note = chemically synthesized
  source 1..20: mol_type = other DNA
tgagccaccgcgcctgcctg

SEQ ID NO: 14621 - DNA, 20 bp, synthetic construct
  misc_feature 1..20: note = chemically synthesized
  source 1..20: mol_type = other DNA
caccgcgcctgcctggagtt

SEQ ID NO: 14622 - DNA, 20 bp, synthetic construct
  misc_feature 1..20: note = chemically synthesized
  source 1..20: mol_type = other DNA
ctgcctggagttcagaatct

SEQ ID NO: 14623 - DNA, 20 bp, synthetic construct
  misc_feature 1..20: note = chemically synthesized
  source 1..20: mol_type = other DNA
tgcctggagttcagaatctt

SEQ ID NO: 14624 - DNA, 20 bp, synthetic construct
  misc_feature 1..20: note = chemically synthesized
  source 1..20: mol_type = other DNA
cttcattatttgtgtttaaa

SEQ ID NO: 14625 - DNA, 20 bp, synthetic construct
  misc_feature 1..20: note = chemically synthesized
  source 1..20: mol_type = other DNA
ttgtgtttaaatagatcata

SEQ ID NO: 14626 - DNA, 20 bp, synthetic construct
  misc_feature 1..20: note = chemically synthesized
  source 1..20: mol_type = other DNA
gtttaaatagatcatacagt

SEQ ID NO: 14627 - DNA, 20 bp, synthetic construct
  misc_feature 1..20: note = chemically synthesized
  source 1..20: mol_type = other DNA
tttaaatagatcatacagtc

SEQ ID NO: 14628 - DNA, 20 bp, synthetic construct
  misc_feature 1..20: note = chemically synthesized
  source 1..20: mol_type = other DNA
atagatcatacagtcaggca

SEQ ID NO: 14629 - DNA, 20 bp, synthetic construct
  misc_feature 1..20: note = chemically synthesized
  source 1..20: mol_type = other DNA
gatcatacagtcaggcacgg

SEQ ID NO: 14630 - DNA, 20 bp, synthetic construct
  misc_feature 1..20: note = chemically synthesized
  source 1..20: mol_type = other DNA
gtggctcatgcctgtaatcc

SEQ ID NO: 14631 - DNA, 20 bp, synthetic construct
  misc_feature 1..20: note = chemically synthesized
  source 1..20: mol_type = other DNA
tgcctgtaatcccagcactt

SEQ ID NO: 14632 - DNA, 20 bp, synthetic construct
  misc_feature 1..20: note = chemically synthesized
  source 1..20: mol_type = other DNA
gcctgtaatcccagcacttt

SEQ ID NO: 14633 - DNA, 20 bp, synthetic construct
  misc_feature 1..20: note = chemically synthesized
  source 1..20: mol_type = other DNA
ctgtaatcccagcactttgg

SEQ ID NO: 14634 - DNA, 20 bp, synthetic construct
  misc_feature 1..20: note = chemically synthesized
  source 1..20: mol_type = other DNA
tgtaatcccagcactttggg

SEQ ID NO: 14635 - DNA, 20 bp, synthetic construct
  misc_feature 1..20: note = chemically synthesized
  source 1..20: mol_type = other DNA
tcccagcactttgggaggct

SEQ ID NO: 14636 - DNA, 20 bp, synthetic construct
  misc_feature 1..20: note = chemically synthesized
  source 1..20: mol_type = other DNA
cccagcactttgggaggctg

SEQ ID NO: 14637 - DNA, 20 bp, synthetic construct
  misc_feature 1..20: note = chemically synthesized
  source 1..20: mol_type = other DNA
agcactttgggaggctgagg

SEQ ID NO: 14638 - DNA, 20 bp, synthetic construct
  misc_feature 1..20: note = chemically synthesized
  source 1..20: mol_type = other DNA
gcactttgggaggctgaggt

SEQ ID NO: 14639 - DNA, 20 bp, synthetic construct
  misc_feature 1..20: note = chemically synthesized
  source 1..20: mol_type = other DNA
actttgggaggctgaggtgg

SEQ ID NO: 14640 - DNA, 20 bp, synthetic construct
  misc_feature 1..20: note = chemically synthesized
  source 1..20: mol_type = other DNA
ctttgggaggctgaggtggg

SEQ ID NO: 14641 - DNA, 20 bp, synthetic construct
  misc_feature 1..20: note = chemically synthesized
  source 1..20: mol_type = other DNA
ctgaggtgggaggattgcct

SEQ ID NO: 14642 - DNA, 20 bp, synthetic construct
  misc_feature 1..20: note = chemically synthesized
  source 1..20: mol_type = other DNA
gtgggaggattgcctgagtt

SEQ ID NO: 14643 - DNA, 20 bp, synthetic construct
  misc_feature 1..20: note = chemically synthesized
  source 1..20: mol_type = other DNA
tgggaggattgcctgagttc

SEQ ID NO: 14644 - DNA, 20 bp, synthetic construct
  misc_feature 1..20: note = chemically synthesized
  source 1..20: mol_type = other DNA
ggaggattgcctgagttcag

SEQ ID NO: 14645 - DNA, 20 bp, synthetic construct
  misc_feature 1..20: note = chemically synthesized
  source 1..20: mol_type = other DNA
gattgcctgagttcaggaga

SEQ ID NO: 14646 - DNA, 20 bp, synthetic construct
  misc_feature 1..20: note = chemically synthesized
  source 1..20: mol_type = other DNA
ttgcctgagttcaggagatg

SEQ ID NO: 14647 - DNA, 20 bp, synthetic construct
  misc_feature 1..20: note = chemically synthesized
  source 1..20: mol_type = other DNA
tgagttcaggagatggagac

SEQ ID NO: 14648 - DNA, 20 bp, synthetic construct
  misc_feature 1..20: note = chemically synthesized
  source 1..20: mol_type = other DNA
tcaggagatggagaccagcc

SEQ ID NO: 14649 - DNA, 20 bp, synthetic construct
  misc_feature 1..20: note = chemically synthesized
  source 1..20: mol_type = other DNA
caggagatggagaccagcct

SEQ ID NO: 14650 - DNA, 20 bp, synthetic construct
  misc_feature 1..20: note = chemically synthesized
  source 1..20: mol_type = other DNA
ggagaccagcctgggcaaca

SEQ ID NO: 14651 - DNA, 20 bp, synthetic construct
  misc_feature 1..20: note = chemically synthesized
  source 1..20: mol_type = other DNA
tctactaaaaatacaaaaac

SEQ ID NO: 14652 - DNA, 20 bp, synthetic construct
  misc_feature 1..20: note = chemically synthesized
  source 1..20: mol_type = other DNA
ctaaaaatacaaaaactagc

SEQ ID NO: 14653 - DNA, 20 bp, synthetic construct
  misc_feature 1..20: note = chemically synthesized
  source 1..20: mol_type = other DNA
atacaaaaactagctggatg

SEQ ID NO: 14654 - DNA, 20 bp, synthetic construct
  misc_feature 1..20: note = chemically synthesized
  source 1..20: mol_type = other DNA
caaaaactagctggatgtgg

SEQ ID NO: 14655 - DNA, 20 bp, synthetic construct
  misc_feature 1..20: note = chemically synthesized
  source 1..20: mol_type = other DNA
gatgtggtggcacacacctg

SEQ ID NO: 14656 - DNA, 20 bp, synthetic construct
  misc_feature 1..20: note = chemically synthesized
  source 1..20: mol_type = other DNA
gtggcacacacctgtagtcc

SEQ ID NO: 14657 - DNA, 20 bp, synthetic construct
  misc_feature 1..20: note = chemically synthesized
  source 1..20: mol_type = other DNA
cacctgtagtcccagctatt

SEQ ID NO: 14658 - DNA, 20 bp, synthetic construct
  misc_feature 1..20: note = chemically synthesized
  source 1..20: mol_type = other DNA
acctgtagtcccagctattc

SEQ ID NO: 14659 - DNA, 20 bp, synthetic construct
  misc_feature 1..20: note = chemically synthesized
  source 1..20: mol_type = other DNA
ctgtagtcccagctattcag

SEQ ID NO: 14660 - DNA, 20 bp, synthetic construct
  misc_feature 1..20: note = chemically synthesized
  source 1..20: mol_type = other DNA
tgtagtcccagctattcagg

SEQ ID NO: 14661 - DNA, 20 bp, synthetic construct
  misc_feature 1..20: note = chemically synthesized
  source 1..20: mol_type = other DNA
tcccagctattcaggaggct

SEQ ID NO: 14662 - DNA, 20 bp, synthetic construct
  misc_feature 1..20: note = chemically synthesized
  source 1..20: mol_type = other DNA
cccagctattcaggaggctg

SEQ ID NO: 14663 - DNA, 20 bp, synthetic construct
  misc_feature 1..20: note = chemically synthesized
  source 1..20: mol_type = other DNA
agctattcaggaggctgagg

SEQ ID NO: 14664 - DNA, 20 bp, synthetic construct
  misc_feature 1..20: note = chemically synthesized
  source 1..20: mol_type = other DNA
gctattcaggaggctgaggt

SEQ ID NO: 14665 - DNA, 20 bp, synthetic construct
  misc_feature 1..20: note = chemically synthesized
  source 1..20: mol_type = other DNA
tattcaggaggctgaggtgg

SEQ ID NO: 14666 - DNA, 20 bp, synthetic construct
  misc_feature 1..20: note = chemically synthesized
  source 1..20: mol_type = other DNA
attcaggaggctgaggtggg

SEQ ID NO: 14667 - DNA, 20 bp, synthetic construct
  misc_feature 1..20: note = chemically synthesized
  source 1..20: mol_type = other DNA
aggctgaggtgggaggatcc

SEQ ID NO: 14668 - DNA, 20 bp, synthetic construct
  misc_feature 1..20: note = chemically synthesized
  source 1..20: mol_type = other DNA
ggctgaggtgggaggatccc

SEQ ID NO: 14669 - DNA, 20 bp, synthetic construct
  misc_feature 1..20: note = chemically synthesized
  source 1..20: mol_type = other DNA
ctgaggtgggaggatcccag

SEQ ID NO: 14670 - DNA, 20 bp, synthetic construct
  misc_feature 1..20: note = chemically synthesized
  source 1..20: mol_type = other DNA
tgaggtgggaggatcccagg

SEQ ID NO: 14671 - DNA, 20 bp, synthetic construct
  misc_feature 1..20: note = chemically synthesized
  source 1..20: mol_type = other DNA
ggtgggaggatcccaggagg

SEQ ID NO: 14672 - DNA, 20 bp, synthetic construct
  misc_feature 1..20: note = chemically synthesized
  source 1..20: mol_type = other DNA
tgggaggatcccaggaggta

SEQ ID NO: 14673 - DNA, 20 bp, synthetic construct
  misc_feature 1..20: note = chemically synthesized
  source 1..20: mol_type = other DNA
gggaggatcccaggaggtag

SEQ ID NO: 14674 - DNA, 20 bp, synthetic construct
  misc_feature 1..20: note = chemically synthesized
  source 1..20: mol_type = other DNA
caggaggtagaggtcacaat

SEQ ID NO: 14675 - DNA, 20 bp, synthetic construct
  misc_feature 1..20: note = chemically synthesized
  source 1..20: mol_type = other DNA
ggtagaggtcacaatgagcc

SEQ ID NO: 14676 - DNA, 20 bp, synthetic construct
  misc_feature 1..20: note = chemically synthesized
  source 1..20: mol_type = other DNA
gagattgcgccactgcactc

SEQ ID NO: 14677 - DNA, 20 bp, synthetic construct
  misc_feature 1..20: note = chemically synthesized
  source 1..20: mol_type = other DNA
agattgcgccactgcactcc

SEQ ID NO: 14678 - DNA, 20 bp, synthetic construct
  misc_feature 1..20: note = chemically synthesized
  source 1..20: mol_type = other DNA
tgcgccactgcactccaggc

SEQ ID NO: 14679 - DNA, 20 bp, synthetic construct
  misc_feature 1..20: note = chemically synthesized
  source 1..20: mol_type = other DNA
gcgccactgcactccaggct

SEQ ID NO: 14680 - DNA, 20 bp, synthetic construct
  misc_feature 1..20: note = chemically synthesized
  source 1..20: mol_type = other DNA
gcactccaggctgggttact

SEQ ID NO: 14681 - DNA, 20 bp, synthetic construct
  misc_feature 1..20: note = chemically synthesized
  source 1..20: mol_type = other DNA
tccaggctgggttactgagc

SEQ ID NO: 14682 - DNA, 20 bp, synthetic construct
  misc_feature 1..20: note = chemically synthesized
  source 1..20: mol_type = other DNA
atcctgtctcaaaaaaaaaa

SEQ ID NO: 14683 - DNA, 20 bp, synthetic construct
  misc_feature 1..20: note = chemically synthesized
  source 1..20: mol_type = other DNA
aaaaagataatacattcaaa

SEQ ID NO: 14684 - DNA, 20 bp, synthetic construct
  misc_feature 1..20: note = chemically synthesized
  source 1..20: mol_type = other DNA
tcaaacagttcaaaatgcaa

SEQ ID NO: 14685 - DNA, 20 bp, synthetic construct
  misc_feature 1..20: note = chemically synthesized
  source 1..20: mol_type = other DNA
aatgcaaaagttacatacat

SEQ ID NO: 14686 - DNA, 20 bp, synthetic construct
  misc_feature 1..20: note = chemically synthesized
  source 1..20: mol_type = other DNA
atgcaaaagttacatacata

SEQ ID NO: 14687 - DNA, 20 bp, synthetic construct
  misc_feature 1..20: note = chemically synthesized
  source 1..20: mol_type = other DNA
caaaagttacatacataagg

SEQ ID NO: 14688 - DNA, 20 bp, synthetic construct
  misc_feature 1..20: note = chemically synthesized
  source 1..20: mol_type = other DNA
ctccctctcacacttctccc

SEQ ID NO: 14689 - DNA, 20 bp, synthetic construct
  misc_feature 1..20: note = chemically synthesized
  source 1..20: mol_type = other DNA
cacacttctccccagccacc

SEQ ID NO: 14690 - DNA, 20 bp, synthetic construct
  misc_feature 1..20: note = chemically synthesized
  source 1..20: mol_type = other DNA
agccacccagttctcccttc

SEQ ID NO: 14691 - DNA, 20 bp, synthetic construct
  misc_feature 1..20: note = chemically synthesized
  source 1..20: mol_type = other DNA
ccacccagttctcccttcta

SEQ ID NO: 14692 - DNA, 20 bp, synthetic construct
  misc_feature 1..20: note = chemically synthesized
  source 1..20: mol_type = other DNA
cacccagttctcccttctag

SEQ ID NO: 14693 - DNA, 20 bp, synthetic construct
  misc_feature 1..20: note = chemically synthesized
  source 1..20: mol_type = other DNA
gcaacatgtgaaatccttct

SEQ ID NO: 14694 - DNA, 20 bp, synthetic construct
  misc_feature 1..20: note = chemically synthesized
  source 1..20: mol_type = other DNA
caacatgtgaaatccttctc

SEQ ID NO: 14695 - DNA, 20 bp, synthetic construct
  misc_feature 1..20: note = chemically synthesized
  source 1..20: mol_type = other DNA
ctcaggctacactcttcttg

SEQ ID NO: 14696 - DNA, 20 bp, synthetic construct
  misc_feature 1..20: note = chemically synthesized
  source 1..20: mol_type = other DNA
tcaggctacactcttcttga

SEQ ID NO: 14697 - DNA, 20 bp, synthetic construct
  misc_feature 1..20: note = chemically synthesized
  source 1..20: mol_type = other DNA
ctacactcttcttgaaggtg

SEQ ID NO: 14698 - DNA, 20 bp, synthetic construct
  misc_feature 1..20: note = chemically synthesized
  source 1..20: mol_type = other DNA
tacactcttcttgaaggtgt

SEQ ID NO: 14699 - DNA, 20 bp, synthetic construct
  misc_feature 1..20: note = chemically synthesized
  source 1..20: mol_type = other DNA
cttcttgaaggtgtaggctt

SEQ ID NO: 14700 - DNA, 20 bp, synthetic construct
  misc_feature 1..20: note = chemically synthesized
  source 1..20: mol_type = other DNA
ttcttgaaggtgtaggcttt

SEQ ID NO: 14701 - DNA, 20 bp, synthetic construct
  misc_feature 1..20: note = chemically synthesized
  source 1..20: mol_type = other DNA
aaggtgtaggctttgggcaa

SEQ ID NO: 14702 - DNA, 20 bp, synthetic construct
  misc_feature 1..20: note = chemically synthesized
  source 1..20: mol_type = other DNA
tttgggcaaaagcattcatt

SEQ ID NO: 14703 - DNA, 20 bp, synthetic construct
  misc_feature 1..20: note = chemically synthesized
  source 1..20: mol_type = other DNA
aagcattcattcagtaaccc

SEQ ID NO: 14704 - DNA, 20 bp, synthetic construct
  misc_feature 1..20: note = chemically synthesized
  source 1..20: mol_type = other DNA
aaacttgttctgtttttcca

SEQ ID NO: 14705 - DNA, 20 bp, synthetic construct
  misc_feature 1..20: note = chemically synthesized
  source 1..20: mol_type = other DNA
aacttgttctgtttttccat

SEQ ID NO: 14706 - DNA, 20 bp, synthetic construct
  misc_feature 1..20: note = chemically synthesized
  source 1..20: mol_type = other DNA
tttttccataggattctctt

SEQ ID NO: 14707 - DNA, 20 bp, synthetic construct
  misc_feature 1..20: note = chemically synthesized
  source 1..20: mol_type = other DNA
tccataggattctctttgga

SEQ ID NO: 14708 - DNA, 20 bp, synthetic construct
  misc_feature 1..20: note = chemically synthesized
  source 1..20: mol_type = other DNA
tctttggacagcgtccatac

SEQ ID NO: 14709 - DNA, 20 bp, synthetic construct
  misc_feature 1..20: note = chemically synthesized
  source 1..20: mol_type = other DNA
ttggacagcgtccatactgg

SEQ ID NO: 14710 - DNA, 20 bp, synthetic construct
  misc_feature 1..20: note = chemically synthesized
  source 1..20: mol_type = other DNA
tggacagcgtccatactggt

SEQ ID NO: 14711 - DNA, 20 bp, synthetic construct
  misc_feature 1..20: note = chemically synthesized
  source 1..20: mol_type = other DNA
gcgtccatactggtgggttt

SEQ ID NO: 14712 - DNA, 20 bp, synthetic construct
  misc_feature 1..20: note = chemically synthesized
  source 1..20: mol_type = other DNA
gttttggatactgactacta

SEQ ID NO: 14713 - DNA, 20 bp, synthetic construct
  misc_feature 1..20: note = chemically synthesized
  source 1..20: mol_type = other DNA
acacttccgtgcccctgata

SEQ ID NO: 14714 - DNA, 20 bp, synthetic construct
  misc_feature 1..20: note = chemically synthesized
  source 1..20: mol_type = other DNA
cttccgtgcccctgataaag

SEQ ID NO: 14715 - DNA, 20 bp, synthetic construct
  misc_feature 1..20: note = chemically synthesized
  source 1..20: mol_type = other DNA
agcagttccctgtaacctgt

SEQ ID NO: 14716 - DNA, 20 bp, synthetic construct
  misc_feature 1..20: note = chemically synthesized
  source 1..20: mol_type = other DNA
ttccctgtaacctgtgagac

SEQ ID NO: 14717 - DNA, 20 bp, synthetic construct
  misc_feature 1..20: note = chemically synthesized
  source 1..20: mol_type = other DNA
tgtaacctgtgagactggac

SEQ ID NO: 14718 - DNA, 20 bp, synthetic construct
  misc_feature 1..20: note = chemically synthesized
  source 1..20: mol_type = other DNA
gtaacctgtgagactggacc

SEQ ID NO: 14719 - DNA, 20 bp, synthetic construct
  misc_feature 1..20: note = chemically synthesized
  source 1..20: mol_type = other DNA
cctgtgagactggaccaggt

SEQ ID NO: 14720 - DNA, 20 bp, synthetic construct
  misc_feature 1..20: note = chemically synthesized
  source 1..20: mol_type = other DNA
actggaccaggtaagcgtcc

SEQ ID NO: 14721 - DNA, 20 bp, synthetic construct
  misc_feature 1..20: note = chemically synthesized
  source 1..20: mol_type = other DNA
ggtaagcgtcccagcccctg

SEQ ID NO: 14722 - DNA, 20 bp, synthetic construct
  misc_feature 1..20: note = chemically synthesized
  source 1..20: mol_type = other DNA
agcgtcccagcccctgcaga

SEQ ID NO: 14723 - DNA, 20 bp, synthetic construct
  misc_feature 1..20: note = chemically synthesized
  source 1..20: mol_type = other DNA
gtcccagcccctgcagacag

SEQ ID NO: 14724 - DNA, 20 bp, synthetic construct
  misc_feature 1..20: note = chemically synthesized
  source 1..20: mol_type = other DNA
agcccctgcagacagaagct

SEQ ID NO: 14725 - DNA, 20 bp, synthetic construct
  misc_feature 1..20: note = chemically synthesized
  source 1..20: mol_type = other DNA
ccctgcagacagaagctgag

SEQ ID NO: 14726 - DNA, 20 bp, synthetic construct
  misc_feature 1..20: note = chemically synthesized
  source 1..20: mol_type = other DNA
tggacctcgtttacctgtta

SEQ ID NO: 14727 - DNA, 20 bp, synthetic construct
  misc_feature 1..20: note = chemically synthesized
  source 1..20: mol_type = other DNA
ttatggatgaaactgacctt

SEQ ID NO: 14728 - DNA, 20 bp, synthetic construct
  misc_feature 1..20: note = chemically synthesized
  source 1..20: mol_type = other DNA
tatggatgaaactgaccttg

SEQ ID NO: 14729 - DNA, 20 bp, synthetic construct
  misc_feature 1..20: note = chemically synthesized
  source 1..20: mol_type = other DNA
atggatgaaactgaccttga

SEQ ID NO: 14730 - DNA, 20 bp, synthetic construct
  misc_feature 1..20: note = chemically synthesized
  source 1..20: mol_type = other DNA
tggatgaaactgaccttgag

SEQ ID NO: 14731 - DNA, 20 bp, synthetic construct
  misc_feature 1..20: note = chemically synthesized
  source 1..20: mol_type = other DNA
aactgaccttgaggggacat

SEQ ID NO: 14732 - DNA, 20 bp, synthetic construct
  misc_feature 1..20: note = chemically synthesized
  source 1..20: mol_type = other DNA
actgaccttgaggggacatg

SEQ ID NO: 14733 - DNA, 20 bp, synthetic construct
  misc_feature 1..20: note = chemically synthesized
  source 1..20: mol_type = other DNA
tgaccttgaggggacatgag

SEQ ID NO: 14734 - DNA, 20 bp, synthetic construct
  misc_feature 1..20: note = chemically synthesized
  source 1..20: mol_type = other DNA
accttgaggggacatgagga

SEQ ID NO: 14735 - DNA, 20 bp, synthetic construct
  misc_feature 1..20: note = chemically synthesized
  source 1..20: mol_type = other DNA
cttttgtcatgctcttcaat

SEQ ID NO: 14736 - DNA, 20 bp, synthetic construct
  misc_feature 1..20: note = chemically synthesized
  source 1..20: mol_type = other DNA
ttctgcaatactttcctgaa

SEQ ID NO: 14737 - DNA, 20 bp, synthetic construct
  misc_feature 1..20: note = chemically synthesized
  source 1..20: mol_type = other DNA
caatactttcctgaatagca

SEQ ID NO: 14738 - DNA, 20 bp, synthetic construct
  misc_feature 1..20: note = chemically synthesized
  source 1..20: mol_type = other DNA
tactttcctgaatagcacag

SEQ ID NO: 14739 - DNA, 20 bp, synthetic construct
  misc_feature 1..20: note = chemically synthesized
  source 1..20: mol_type = other DNA
cctgaatagcacagtagtat

SEQ ID NO: 14740 - DNA, 20 bp, synthetic construct
  misc_feature 1..20: note = chemically synthesized
  source 1..20: mol_type = other DNA
tattggaaatctgcctatta

SEQ ID NO: 14741 - DNA, 20 bp, synthetic construct
  misc_feature 1..20: note = chemically synthesized
  source 1..20: mol_type = other DNA
aatctgcctattacagaacc

SEQ ID NO: 14742 - DNA, 20 bp, synthetic construct
  misc_feature 1..20: note = chemically synthesized
  source 1..20: mol_type = other DNA
tgcctattacagaacctgga

SEQ ID NO: 14743 - DNA, 20 bp, synthetic construct
  misc_feature 1..20: note = chemically synthesized
  source 1..20: mol_type = other DNA
cctattacagaacctggatg

SEQ ID NO: 14744 - DNA, 20 bp, synthetic construct
  misc_feature 1..20: note = chemically synthesized
  source 1..20: mol_type = other DNA
tacagaacctggatggagtc

SEQ ID NO: 14745 - DNA, 20 bp, synthetic construct
  misc_feature 1..20: note = chemically synthesized
  source 1..20: mol_type = other DNA
cagaacctggatggagtcca

SEQ ID NO: 14746 - DNA, 20 bp, synthetic construct
  misc_feature 1..20: note = chemically synthesized
  source 1..20: mol_type = other DNA
gaacctggatggagtccaga

SEQ ID NO: 14747 - DNA, 20 bp, synthetic construct
  misc_feature 1..20: note = chemically synthesized
  source 1..20: mol_type = other DNA
aacctggatggagtccagag

SEQ ID NO: 14748 - DNA, 20 bp, synthetic construct
  misc_feature 1..20: note = chemically synthesized
  source 1..20: mol_type = other DNA
ggatggagtccagagaggca

SEQ ID NO: 14749 - DNA, 20 bp, synthetic construct
  misc_feature 1..20: note = chemically synthesized
  source 1..20: mol_type = other DNA
gatggagtccagagaggcac

SEQ ID NO: 14750 - DNA, 20 bp, synthetic construct
  misc_feature 1..20: note = chemically synthesized
  source 1..20: mol_type = other DNA
cagagaggcacgggcatcca

SEQ ID NO: 14751 - DNA, 20 bp, synthetic construct
  misc_feature 1..20: note = chemically synthesized
  source 1..20: mol_type = other DNA
agagaggcacgggcatccat

SEQ ID NO: 14752 - DNA, 20 bp, synthetic construct
  misc_feature 1..20: note = chemically synthesized
  source 1..20: mol_type = other DNA
ggcacgggcatccatgggca

SEQ ID NO: 14753 - DNA, 20 bp, synthetic construct
  misc_feature 1..20: note = chemically synthesized
  source 1..20: mol_type = other DNA
gcacgggcatccatgggcaa

SEQ ID NO: 14754 - DNA, 20 bp, synthetic construct
  misc_feature 1..20: note = chemically synthesized
  source 1..20: mol_type = other DNA
cacgggcatccatgggcaaa

SEQ ID NO: 14755 - DNA, 20 bp, synthetic construct
  misc_feature 1..20: note = chemically synthesized
  source 1..20: mol_type = other DNA
tccatgggcaaagggctcgt

SEQ ID NO: 14756 - DNA, 20 bp, synthetic construct
  misc_feature 1..20: note = chemically synthesized
  source 1..20: mol_type = other DNA
catgggcaaagggctcgtga

SEQ ID NO: 14757 - DNA, 20 bp, synthetic construct
  misc_feature 1..20: note = chemically synthesized
  source 1..20: mol_type = other DNA
tcgtgagagtcaccgccctg

SEQ ID NO: 14758 - DNA, 20 bp, synthetic construct
  misc_feature 1..20: note = chemically synthesized
  source 1..20: mol_type = other DNA
tgcagggcggtgactctcac

SEQ ID NO: 14759 - DNA, 20 bp, synthetic construct
  misc_feature 1..20: note = chemically synthesized
  source 1..20: mol_type = other DNA
tctcacgagccctttgccca

SEQ ID NO: 14760 - DNA, 20 bp, synthetic construct
  misc_feature 1..20: note = chemically synthesized
  source 1..20: mol_type = other DNA
catggatgcccgtgcctctc

SEQ ID NO: 14761 - DNA, 20 bp, synthetic construct
  misc_feature 1..20: note = chemically synthesized
  source 1..20: mol_type = other DNA
gtgcctctctggactccatc

SEQ ID NO: 14762 - DNA, 20 bp, synthetic construct
  misc_feature 1..20: note = chemically synthesized
  source 1..20: mol_type = other DNA
tgcctctctggactccatcc

SEQ ID NO: 14763 - DNA, 20 bp, synthetic construct
  misc_feature 1..20: note = chemically synthesized
  source 1..20: mol_type = other DNA
actccatccaggttctgtaa

SEQ ID NO: 14764 - DNA, 20 bp, synthetic construct
  misc_feature 1..20: note = chemically synthesized
  source 1..20: mol_type = other DNA
ctccatccaggttctgtaat

SEQ ID NO: 14765 - DNA, 20 bp, synthetic construct
  misc_feature 1..20: note = chemically synthesized
  source 1..20: mol_type = other DNA
catccaggttctgtaatagg

SEQ ID NO: 14766 - DNA, 20 bp, synthetic construct
  misc_feature 1..20: note = chemically synthesized
  source 1..20: mol_type = other DNA
tccaatactactgtgctatt

SEQ ID NO: 14767 - DNA, 20 bp, synthetic construct
  misc_feature 1..20: note = chemically synthesized
  source 1..20: mol_type = other DNA
ccaatactactgtgctattc

SEQ ID NO: 14768 - DNA, 20 bp, synthetic construct
  misc_feature 1..20: note = chemically synthesized
  source 1..20: mol_type = other DNA
tactactgtgctattcagga

SEQ ID NO: 14769 - DNA, 20 bp, synthetic construct
  misc_feature 1..20: note = chemically synthesized
  source 1..20: mol_type = other DNA
tgctattcaggaaagtattg

SEQ ID NO: 14770 - DNA, 20 bp, synthetic construct
  misc_feature 1..20: note = chemically synthesized
  source 1..20: mol_type = other DNA
tattcaggaaagtattgcag

SEQ ID NO: 14771 - DNA, 20 bp, synthetic construct
  misc_feature 1..20: note = chemically synthesized
  source 1..20: mol_type = other DNA
gaattaatttgtgccaattg

SEQ ID NO: 14772 - DNA, 20 bp, synthetic construct
  misc_feature 1..20: note = chemically synthesized
  source 1..20: mol_type = other DNA
attaatttgtgccaattgaa

SEQ ID NO: 14773 - DNA, 20 bp, synthetic construct
  misc_feature 1..20: note = chemically synthesized
  source 1..20: mol_type = other DNA
ccaattgaagagcatgacaa

SEQ ID NO: 14774 - DNA, 20 bp, synthetic construct
  misc_feature 1..20: note = chemically synthesized
  source 1..20: mol_type = other DNA
aagagcatgacaaaagtaca

SEQ ID NO: 14775 - DNA, 20 bp, synthetic construct
  misc_feature 1..20: note = chemically synthesized
  source 1..20: mol_type = other DNA
agagcatgacaaaagtacaa

SEQ ID NO: 14776 - DNA, 20 bp, synthetic construct
  misc_feature 1..20: note = chemically synthesized
  source 1..20: mol_type = other DNA
atgacaaaagtacaaaggaa

SEQ ID NO: 14777 - DNA, 20 bp, synthetic construct
  misc_feature 1..20: note = chemically synthesized
  source 1..20: mol_type = other DNA
ggctctcctcatgtcccctc

SEQ ID NO: 14778 - DNA, 20 bp, synthetic construct
  misc_feature 1..20: note = chemically synthesized
  source 1..20: mol_type = other DNA
gctctcctcatgtcccctca

SEQ ID NO: 14779 - DNA, 20 bp, synthetic construct
  misc_feature 1..20: note = chemically synthesized
  source 1..20: mol_type = other DNA
tcctcatgtcccctcaaggt

SEQ ID NO: 14780 - DNA, 20 bp, synthetic construct
  misc_feature 1..20: note = chemically synthesized
  source 1..20: mol_type = other DNA
aaggtcagtttcatccataa

SEQ ID NO: 14781 - DNA, 20 bp, synthetic construct
  misc_feature 1..20: note = chemically synthesized
  source 1..20: mol_type = other DNA
aggtcagtttcatccataac

SEQ ID NO: 14782 - DNA, 20 bp, synthetic construct
  misc_feature 1..20: note = chemically synthesized
  source 1..20: mol_type = other DNA
ttcatccataacaggtaaac

SEQ ID NO: 14783 - DNA, 20 bp, synthetic construct
  misc_feature 1..20: note = chemically synthesized
  source 1..20: mol_type = other DNA
tcatccataacaggtaaacg

SEQ ID NO: 14784 - DNA, 20 bp, synthetic construct
  misc_feature 1..20: note = chemically synthesized
  source 1..20: mol_type = other DNA
acaggtaaacgaggtccact

SEQ ID NO: 14785 - DNA, 20 bp, synthetic construct
  misc_feature 1..20: note = chemically synthesized
  source 1..20: mol_type = other DNA
gtccactcagcttctgtctg

SEQ ID NO: 14786 - DNA, 20 bp, synthetic construct
  misc_feature 1..20: note = chemically synthesized
  source 1..20: mol_type = other DNA
tccactcagcttctgtctgc

SEQ ID NO: 14787 - DNA, 20 bp, synthetic construct
  misc_feature 1..20: note = chemically synthesized
  source 1..20: mol_type = other DNA
ccactcagcttctgtctgca

SEQ ID NO: 14788 - DNA, 20 bp, synthetic construct
  misc_feature 1..20: note = chemically synthesized
  source 1..20: mol_type = other DNA
cactcagcttctgtctgcag

SEQ ID NO: 14789 - DNA, 20 bp, synthetic construct
  misc_feature 1..20: note = chemically synthesized
  source 1..20: mol_type = other DNA
cagcttctgtctgcaggggc

SEQ ID NO: 14790 - DNA, 20 bp, synthetic construct
  misc_feature 1..20: note = chemically synthesized
  source 1..20: mol_type = other DNA
agcttctgtctgcaggggct

SEQ ID NO: 14791 - DNA, 20 bp, synthetic construct
  misc_feature 1..20: note = chemically synthesized
  source 1..20: mol_type = other DNA
caggggctgggacgcttacc

SEQ ID NO: 14792 - DNA, 20 bp, synthetic construct
  misc_feature 1..20: note = chemically synthesized
  source 1..20: mol_type = other DNA
gctgggacgcttacctggtc

SEQ ID NO: 14793 - DNA, 20 bp, synthetic construct
  misc_feature 1..20: note = chemically synthesized
  source 1..20: mol_type = other DNA
gcttacctggtccagtctca

SEQ ID NO: 14794 - DNA, 20 bp, synthetic construct
  misc_feature 1..20: note = chemically synthesized
  source 1..20: mol_type = other DNA
cttacctggtccagtctcac

SEQ ID NO: 14795 - DNA, 20 bp, synthetic construct
  misc_feature 1..20: note = chemically synthesized
  source 1..20: mol_type = other DNA
tggtccagtctcacaggtta

SEQ ID NO: 14796 - DNA, 20 bp, synthetic construct
  misc_feature 1..20: note = chemically synthesized
  source 1..20: mol_type = other DNA
ggtccagtctcacaggttac

SEQ ID NO: 14797 - DNA, 20 bp, synthetic construct
  misc_feature 1..20: note = chemically synthesized
  source 1..20: mol_type = other DNA
gtccagtctcacaggttaca

SEQ ID NO: 14798 - DNA, 20 bp, synthetic construct
  misc_feature 1..20: note = chemically synthesized
  source 1..20: mol_type = other DNA
gttacagggaactgctttat

SEQ ID NO: 14799 - DNA, 20 bp, synthetic construct
  misc_feature 1..20: note = chemically synthesized
  source 1..20: mol_type = other DNA
ttacagggaactgctttatc

SEQ ID NO: 14800 - DNA, 20 bp, synthetic construct
  misc_feature 1..20: note = chemically synthesized
  source 1..20: mol_type = other DNA
tacagggaactgctttatca

SEQ ID NO: 14801 - DNA, 20 bp, synthetic construct
  misc_feature 1..20: note = chemically synthesized
  source 1..20: mol_type = other DNA
acagggaactgctttatcag

SEQ ID NO: 14802 - DNA, 20 bp, synthetic construct
  misc_feature 1..20: note = chemically synthesized
  source 1..20: mol_type = other DNA
gaactgctttatcaggggca

SEQ ID NO: 14803 - DNA, 20 bp, synthetic construct
  misc_feature 1..20: note = chemically synthesized
  source 1..20: mol_type = other DNA
ctgctttatcaggggcacgg

SEQ ID NO: 14804 - DNA, 20 bp, synthetic construct
  misc_feature 1..20: note = chemically synthesized
  source 1..20: mol_type = other DNA
ggggcacggaagtgttgctg

SEQ ID NO: 14805 - DNA, 20 bp, synthetic construct
  misc_feature 1..20: note = chemically synthesized
  source 1..20: mol_type = other DNA
gcacggaagtgttgctgtag

SEQ ID NO: 14806 - DNA, 20 bp, synthetic construct
  misc_feature 1..20: note = chemically synthesized
  source 1..20: mol_type = other DNA
ggaagtgttgctgtagtagt

SEQ ID NO: 14807 - DNA, 20 bp, synthetic construct
  misc_feature 1..20: note = chemically synthesized
  source 1..20: mol_type = other DNA
agtcagtatccaaaacccac

SEQ ID NO: 14808 - DNA, 20 bp, synthetic construct
  misc_feature 1..20: note = chemically synthesized
  source 1..20: mol_type = other DNA
gtatccaaaacccaccagta

SEQ ID NO: 14809 - DNA, 20 bp, synthetic construct
  misc_feature 1..20: note = chemically synthesized
  source 1..20: mol_type = other DNA
accagtatggacgctgtcca

SEQ ID NO: 14810 - DNA, 20 bp, synthetic construct
  misc_feature 1..20: note = chemically synthesized
  source 1..20: mol_type = other DNA
cagtatggacgctgtccaaa

SEQ ID NO: 14811 - DNA, 20 bp, synthetic construct
  misc_feature 1..20: note = chemically synthesized
  source 1..20: mol_type = other DNA
gctgtccaaagagaatccta

SEQ ID NO: 14812 - DNA, 20 bp, synthetic construct
  misc_feature 1..20: note = chemically synthesized
  source 1..20: mol_type = other DNA
aagagaatcctatggaaaaa

SEQ ID NO: 14813 - DNA, 20 bp, synthetic construct
  misc_feature 1..20: note = chemically synthesized
  source 1..20: mol_type = other DNA
atcctatggaaaaacagaac

SEQ ID NO: 14814 - DNA, 20 bp, synthetic construct
  misc_feature 1..20: note = chemically synthesized
  source 1..20: mol_type = other DNA
ggaaaaacagaacaagtttc

SEQ ID NO: 14815 - DNA, 20 bp, synthetic construct
  misc_feature 1..20: note = chemically synthesized
  source 1..20: mol_type = other DNA
gaaaaacagaacaagtttct

SEQ ID NO: 14816 - DNA, 20 bp, synthetic construct
  misc_feature 1..20: note = chemically synthesized
  source 1..20: mol_type = other DNA
aaaaacagaacaagtttctg

SEQ ID NO: 14817 - DNA, 20 bp, synthetic construct
  misc_feature 1..20: note = chemically synthesized
  source 1..20: mol_type = other DNA
tgaatgaatgcttttgccca

SEQ ID NO: 14818 - DNA, 20 bp, synthetic construct
  misc_feature 1..20: note = chemically synthesized
  source 1..20: mol_type = other DNA
tgcccaaagcctacaccttc

SEQ ID NO: 14819 - DNA, 20 bp, synthetic construct
  misc_feature 1..20: note = chemically synthesized
  source 1..20: mol_type = other DNA
ccaaagcctacaccttcaag

SEQ ID NO: 14820 - DNA, 20 bp, synthetic construct
  misc_feature 1..20: note = chemically synthesized
  source 1..20: mol_type = other DNA
aaagcctacaccttcaagaa

SEQ ID NO: 14821 - DNA, 20 bp, synthetic construct
  misc_feature 1..20: note = chemically synthesized
  source 1..20: mol_type = other DNA
ctacaccttcaagaagagtg

SEQ ID NO: 14822 - DNA, 20 bp, synthetic construct
  misc_feature 1..20: note = chemically synthesized
  source 1..20: mol_type = other DNA
cttcaagaagagtgtagcct

SEQ ID NO: 14823 - DNA, 20 bp, synthetic construct
  misc_feature 1..20: note = chemically synthesized
  source 1..20: mol_type = other DNA
caagaagagtgtagcctgag

SEQ ID NO: 14824 - DNA, 20 bp, synthetic construct
  misc_feature 1..20: note = chemically synthesized
  source 1..20: mol_type = other DNA
aagaagagtgtagcctgaga

SEQ ID NO: 14825 - DNA, 20 bp, synthetic construct
  misc_feature 1..20: note = chemically synthesized
  source 1..20: mol_type = other DNA
aggatttcacatgttgcctc

SEQ ID NO: 14826 - DNA, 20 bp, synthetic construct
  misc_feature 1..20: note = chemically synthesized
  source 1..20: mol_type = other DNA
atttcacatgttgcctctag

SEQ ID NO: 14827 - DNA, 20 bp, synthetic construct
  misc_feature 1..20: note = chemically synthesized
  source 1..20: mol_type = other DNA
tttcacatgttgcctctaga

SEQ ID NO: 14828 - DNA, 20 bp, synthetic construct
  misc_feature 1..20: note = chemically synthesized
  source 1..20: mol_type = other DNA
ttcacatgttgcctctagaa

SEQ ID NO: 14829 - DNA, 20 bp, synthetic construct
  misc_feature 1..20: note = chemically synthesized
  source 1..20: mol_type = other DNA
cacatgttgcctctagaagg

SEQ ID NO: 14830 - DNA, 20 bp, synthetic construct
  misc_feature 1..20: note = chemically synthesized
  source 1..20: mol_type = other DNA
ttgcctctagaagggagaac

SEQ ID NO: 14831 - DNA, 20 bp, synthetic construct
  misc_feature 1..20: note = chemically synthesized
  source 1..20: mol_type = other DNA
tgcctctagaagggagaact

SEQ ID NO: 14832 - DNA, 20 bp, synthetic construct
  misc_feature 1..20: note = chemically synthesized
  source 1..20: mol_type = other DNA
ctctagaagggagaactggg

SEQ ID NO: 14833 - DNA, 20 bp, synthetic construct
  misc_feature 1..20: note = chemically synthesized
  source 1..20: mol_type = other DNA
agaagggagaactgggtggc

SEQ ID NO: 14834 - DNA, 20 bp, synthetic construct
  misc_feature 1..20: note = chemically synthesized
  source 1..20: mol_type = other DNA
gaagggagaactgggtggct

SEQ ID NO: 14835 - DNA, 20 bp, synthetic construct
  misc_feature 1..20: note = chemically synthesized
  source 1..20: mol_type = other DNA
aagggagaactgggtggctg

SEQ ID NO: 14836 - DNA, 20 bp, synthetic construct
  misc_feature 1..20: note = chemically synthesized
  source 1..20: mol_type = other DNA
gggagaactgggtggctggg

SEQ ID NO: 14837 - DNA, 20 bp, synthetic construct
  misc_feature 1..20: note = chemically synthesized
  source 1..20: mol_type = other DNA
agaactgggtggctggggag

SEQ ID NO: 14838 - DNA, 20 bp, synthetic construct
  misc_feature 1..20: note = chemically synthesized
  source 1..20: mol_type = other DNA
gggtggctggggagaagtgt

SEQ ID NO: 14839 - DNA, 20 bp, synthetic construct
  misc_feature 1..20: note = chemically synthesized
  source 1..20: mol_type = other DNA
gtggctggggagaagtgtga

SEQ ID NO: 14840 - DNA, 20 bp, synthetic construct
  misc_feature 1..20: note = chemically synthesized
  source 1..20: mol_type = other DNA
tggctggggagaagtgtgag

SEQ ID NO: 14841 - DNA, 20 bp, synthetic construct
  misc_feature 1..20: note = chemically synthesized
  source 1..20: mol_type = other DNA
ggctggggagaagtgtgaga

SEQ ID NO: 14842 - DNA, 20 bp, synthetic construct
  misc_feature 1..20: note = chemically synthesized
  source 1..20: mol_type = other DNA
ctggggagaagtgtgagagg

SEQ ID NO: 14843 - DNA, 20 bp, synthetic construct
  misc_feature 1..20: note = chemically synthesized
  source 1..20: mol_type = other DNA
gtattatctttttttttttt

SEQ ID NO: 14844 - DNA, 20 bp, synthetic construct
  misc_feature 1..20: note = chemically synthesized
  source 1..20: mol_type = other DNA
tatcttttttttttttgaga

SEQ ID NO: 14845 - DNA, 20 bp, synthetic construct
  misc_feature 1..20: note = chemically synthesized
  source 1..20: mol_type = other DNA
atcttttttttttttgagac

SEQ ID NO: 14846 - DNA, 20 bp, synthetic construct
  misc_feature 1..20: note = chemically synthesized
  source 1..20: mol_type = other DNA
tttttttttgagacaggatc

SEQ ID NO: 14847 - DNA, 20 bp, synthetic construct
  misc_feature 1..20: note = chemically synthesized
  source 1..20: mol_type = other DNA
ttttgagacaggatctggct

SEQ ID NO: 14848 - DNA, 20 bp, synthetic construct
  misc_feature 1..20: note = chemically synthesized
  source 1..20: mol_type = other DNA
caggatctggctcagtaacc

SEQ ID NO: 14849 - DNA, 20 bp, synthetic construct
  misc_feature 1..20: note = chemically synthesized
  source 1..20: mol_type = other DNA
tctggctcagtaacccagcc

SEQ ID NO: 14850 - DNA, 20 bp, synthetic construct
  misc_feature 1..20: note = chemically synthesized
  source 1..20: mol_type = other DNA
tggctcagtaacccagcctg

SEQ ID NO: 14851 - DNA, 20 bp, synthetic construct
  misc_feature 1..20: note = chemically synthesized
  source 1..20: mol_type = other DNA
cagtaacccagcctggagtg

SEQ ID NO: 14852 - DNA, 20 bp, synthetic construct
  misc_feature 1..20: note = chemically synthesized
  source 1..20: mol_type = other DNA
taacccagcctggagtgcag

SEQ ID NO: 14853 - DNA, 20 bp, synthetic construct
  misc_feature 1..20: note = chemically synthesized
  source 1..20: mol_type = other DNA
ggagtgcagtggcgcaatct

SEQ ID NO: 14854 - DNA, 20 bp, synthetic construct
  misc_feature 1..20: note = chemically synthesized
  source 1..20: mol_type = other DNA
tcattgtgacctctacctcc

SEQ ID NO: 14855 - DNA, 20 bp, synthetic construct
  misc_feature 1..20: note = chemically synthesized
  source 1..20: mol_type = other DNA
cattgtgacctctacctcct

SEQ ID NO: 14856 - DNA, 20 bp, synthetic construct
  misc_feature 1..20: note = chemically synthesized
  source 1..20: mol_type = other DNA
ctcctgggatcctcccacct

SEQ ID NO: 14857 - DNA, 20 bp, synthetic construct
  misc_feature 1..20: note = chemically synthesized
  source 1..20: mol_type = other DNA
tcccacctcagcctcctgaa

SEQ ID NO: 14858 - DNA, 20 bp, synthetic construct
  misc_feature 1..20: note = chemically synthesized
  source 1..20: mol_type = other DNA
acctcagcctcctgaatagc

SEQ ID NO: 14859 - DNA, 20 bp, synthetic construct
  misc_feature 1..20: note = chemically synthesized
  source 1..20: mol_type = other DNA
cctcagcctcctgaatagct

SEQ ID NO: 14860 - DNA, 20 bp, synthetic construct
  misc_feature 1..20: note = chemically synthesized
  source 1..20: mol_type = other DNA
ctcctgaatagctgggacta

SEQ ID NO: 14861 - DNA, 20 bp, synthetic construct
  misc_feature 1..20: note = chemically synthesized
  source 1..20: mol_type = other DNA
tcctgaatagctgggactac

SEQ ID NO: 14862 - DNA, 20 bp, synthetic construct
  misc_feature 1..20: note = chemically synthesized
  source 1..20: mol_type = other DNA
caggtgtgtgccaccacatc

SEQ ID NO: 14863 - DNA, 20 bp, synthetic construct
  misc_feature 1..20: note = chemically synthesized
  source 1..20: mol_type = other DNA
tgtgtgccaccacatccagc

SEQ ID NO: 14864 - DNA, 20 bp, synthetic construct
  misc_feature 1..20: note = chemically synthesized
  source 1..20: mol_type = other DNA
ccagctagtttttgtatttt

SEQ ID NO: 14865 - DNA, 20 bp, synthetic construct
  misc_feature 1..20: note = chemically synthesized
  source 1..20: mol_type = other DNA
gctagtttttgtatttttag

SEQ ID NO: 14866 - DNA, 20 bp, synthetic construct
  misc_feature 1..20: note = chemically synthesized
  source 1..20: mol_type = other DNA
tagtttttgtatttttagta

SEQ ID NO: 14867 - DNA, 20 bp, synthetic construct
  misc_feature 1..20: note = chemically synthesized
  source 1..20: mol_type = other DNA
ttttgtatttttagtagaga

SEQ ID NO: 14868 - DNA, 20 bp, synthetic construct
  misc_feature 1..20: note = chemically synthesized
  source 1..20: mol_type = other DNA
tttgtatttttagtagagac

SEQ ID NO: 14869 - DNA, 20 bp, synthetic construct
  misc_feature 1..20: note = chemically synthesized
  source 1..20: mol_type = other DNA
ttgtatttttagtagagacg

SEQ ID NO: 14870 - DNA, 20 bp, synthetic construct
  misc_feature 1..20: note = chemically synthesized
  source 1..20: mol_type = other DNA
cggggtttcaccatgttgcc

SEQ ID NO: 14871 - DNA, 20 bp, synthetic construct
  misc_feature 1..20: note = chemically synthesized
  source 1..20: mol_type = other DNA
ggggtttcaccatgttgccc

SEQ ID NO: 14872 - DNA, 20 bp, synthetic construct
  misc_feature 1..20: note = chemically synthesized
  source 1..20: mol_type = other DNA
tttcaccatgttgcccaggc

SEQ ID NO: 14873 - DNA, 20 bp, synthetic construct
  misc_feature 1..20: note = chemically synthesized
  source 1..20: mol_type = other DNA
tggtctccatctcctgaact

SEQ ID NO: 14874 - DNA, 20 bp, synthetic construct
  misc_feature 1..20: note = chemically synthesized
  source 1..20: mol_type = other DNA
ggtctccatctcctgaactc

SEQ ID NO: 14875 - DNA, 20 bp, synthetic construct
  misc_feature 1..20: note = chemically synthesized
  source 1..20: mol_type = other DNA
ctcaggcaatcctcccacct

SEQ ID NO: 14876 - DNA, 20 bp, synthetic construct
  misc_feature 1..20: note = chemically synthesized
  source 1..20: mol_type = other DNA
cctcccacctcagcctccca

SEQ ID NO: 14877 - DNA, 20 bp, synthetic construct
  misc_feature 1..20: note = chemically synthesized
  source 1..20: mol_type = other DNA
acctcagcctcccaaagtgc

SEQ ID NO: 14878 - DNA, 20 bp, synthetic construct
  misc_feature 1..20: note = chemically synthesized
  source 1..20: mol_type = other DNA
cctcagcctcccaaagtgct

SEQ ID NO: 14879 - DNA, 20 bp, synthetic construct
  misc_feature 1..20: note = chemically synthesized
  source 1..20: mol_type = other DNA
ctcccaaagtgctgggatta

SEQ ID NO: 14880 - DNA, 20 bp, synthetic construct
  misc_feature 1..20: note = chemically synthesized
  source 1..20: mol_type = other DNA
tcccaaagtgctgggattac

SEQ ID NO: 14881 - DNA, 20 bp, synthetic construct
  misc_feature 1..20: note = chemically synthesized
  source 1..20: mol_type = other DNA
agtgctgggattacaggcat

SEQ ID NO: 14882 - DNA, 20 bp, synthetic construct
  misc_feature 1..20: note = chemically synthesized
  source 1..20: mol_type = other DNA
ctatttaaacacaaataatg

SEQ ID NO: 14883 - DNA, 20 bp, synthetic construct
  misc_feature 1..20: note = chemically synthesized
  source 1..20: mol_type = other DNA
aaacacaaataatgaagccc

SEQ ID NO: 14884 - DNA, 20 bp, synthetic construct
  misc_feature 1..20: note = chemically synthesized
  source 1..20: mol_type = other DNA
aagcccaagattctgaactc

SEQ ID NO: 14885 - DNA, 20 bp, synthetic construct
  misc_feature 1..20: note = chemically synthesized
  source 1..20: mol_type = other DNA
agcccaagattctgaactcc

SEQ ID NO: 14886 - DNA, 20 bp, synthetic construct
  misc_feature 1..20: note = chemically synthesized
  source 1..20: mol_type = other DNA
ccaagattctgaactccagg

SEQ ID NO: 14887 - DNA, 20 bp, synthetic construct
  misc_feature 1..20: note = chemically synthesized
  source 1..20: mol_type = other DNA
caagattctgaactccaggc

SEQ ID NO: 14888 - DNA, 20 bp, synthetic construct
  misc_feature 1..20: note = chemically synthesized
  source 1..20: mol_type = other DNA
ttctgaactccaggcaggcg

SEQ ID NO: 14889 - DNA, 20 bp, synthetic construct
  misc_feature 1..20: note = chemically synthesized
  source 1..20: mol_type = other DNA
tgaactccaggcaggcgcgg

SEQ ID NO: 14890 - DNA, 20 bp, synthetic construct
  misc_feature 1..20: note = chemically synthesized
  source 1..20: mol_type = other DNA
gtggctcacacctgtaatct

SEQ ID NO: 14891 - DNA, 20 bp, synthetic construct
  misc_feature 1..20: note = chemically synthesized
  source 1..20: mol_type = other DNA
cacctgtaatctcagcactt

SEQ ID NO: 14892 - DNA, 20 bp, synthetic construct
  misc_feature 1..20: note = chemically synthesized
  source 1..20: mol_type = other DNA
acctgtaatctcagcacttt

SEQ ID NO: 14893 - DNA, 20 bp, synthetic construct
  misc_feature 1..20: note = chemically synthesized
  source 1..20: mol_type = other DNA
ctgtaatctcagcactttgg

SEQ ID NO: 14894 - DNA, 20 bp, synthetic construct
  misc_feature 1..20: note = chemically synthesized
  source 1..20: mol_type = other DNA
tgtaatctcagcactttggg

SEQ ID NO: 14895 - DNA, 20 bp, synthetic construct
  misc_feature 1..20: note = chemically synthesized
  source 1..20: mol_type = other DNA
tctcagcactttgggaggcc

SEQ ID NO: 14896 - DNA, 20 bp, synthetic construct
  misc_feature 1..20: note = chemically synthesized
  source 1..20: mol_type = other DNA
ctcagcactttgggaggcca

SEQ ID NO: 14897 - DNA, 20 bp, synthetic construct
  misc_feature 1..20: note = chemically synthesized
  source 1..20: mol_type = other DNA
agcactttgggaggccaagg

SEQ ID NO: 14898 - DNA, 20 bp, synthetic construct
  misc_feature 1..20: note = chemically synthesized
  source 1..20: mol_type = other DNA
gcactttgggaggccaaggc

SEQ ID NO: 14899 - DNA, 20 bp, synthetic construct
  misc_feature 1..20: note = chemically synthesized
  source 1..20: mol_type = other DNA
ctttgggaggccaaggcagg

SEQ ID NO: 14900 - DNA, 20 bp, synthetic construct
  misc_feature 1..20: note = chemically synthesized
  source 1..20: mol_type = other DNA
ccaaggcaggcagatcacat

SEQ ID NO: 14901 - DNA, 20 bp, synthetic construct
  misc_feature 1..20: note = chemically synthesized
  source 1..20: mol_type = other DNA
caaggcaggcagatcacatg

SEQ ID NO: 14902 - DNA, 20 bp, synthetic construct
  misc_feature 1..20: note = chemically synthesized
  source 1..20: mol_type = other DNA
gcaggcagatcacatgaggt

SEQ ID NO: 14903 - DNA, 20 bp, synthetic construct
  misc_feature 1..20: note = chemically synthesized
  source 1..20: mol_type = other DNA
caggcagatcacatgaggtc

SEQ ID NO: 14904 - DNA, 20 bp, synthetic construct
  misc_feature 1..20: note = chemically synthesized
  source 1..20: mol_type = other DNA
ggcagatcacatgaggtcag

SEQ ID NO: 14905 - DNA, 20 bp, synthetic construct
  misc_feature 1..20: note = chemically synthesized
  source 1..20: mol_type = other DNA
tcacatgaggtcaggagttt

SEQ ID NO: 14906 - DNA, 20 bp, synthetic construct
  misc_feature 1..20: note = chemically synthesized
  source 1..20: mol_type = other DNA
tgaggtcaggagtttgagac

SEQ ID NO: 14907 - DNA, 20 bp, synthetic construct
  misc_feature 1..20: note = chemically synthesized
  source 1..20: mol_type = other DNA
tcaggagtttgagaccagcc

SEQ ID NO: 14908 - DNA, 20 bp, synthetic construct
  misc_feature 1..20: note = chemically synthesized
  source 1..20: mol_type = other DNA
tgagaccagcctggccaaca

SEQ ID NO: 14909 - DNA, 20 bp, synthetic construct
  misc_feature 1..20: note = chemically synthesized
  source 1..20: mol_type = other DNA
cgtttctaccaaaaaatata

SEQ ID NO: 14910 - DNA, 20 bp, synthetic construct
  misc_feature 1..20: note = chemically synthesized
  source 1..20: mol_type = other DNA
taccaaaaaatataaagaat

SEQ ID NO: 14911 - DNA, 20 bp, synthetic construct
  misc_feature 1..20: note = chemically synthesized
  source 1..20: mol_type = other DNA
aaaaaatataaagaattagc

SEQ ID NO: 14912 - DNA, 20 bp, synthetic construct
  misc_feature 1..20: note = chemically synthesized
  source 1..20: mol_type = other DNA
tataaagaattagccagatg

SEQ ID NO: 14913 - DNA, 20 bp, synthetic construct
  misc_feature 1..20: note = chemically synthesized
  source 1..20: mol_type = other DNA
aaagaattagccagatgtgg

SEQ ID NO: 14914 - DNA, 20 bp, synthetic construct
  misc_feature 1..20: note = chemically synthesized
  source 1..20: mol_type = other DNA
gtggtgcgtgactgtaatcc

SEQ ID NO: 14915 - DNA, 20 bp, synthetic construct
  misc_feature 1..20: note = chemically synthesized
  source 1..20: mol_type = other DNA
tgactgtaatcccagctact

SEQ ID NO: 14916 - DNA, 20 bp, synthetic construct
  misc_feature 1..20: note = chemically synthesized
  source 1..20: mol_type = other DNA
gactgtaatcccagctactc

SEQ ID NO: 14917 - DNA, 20 bp, synthetic construct
  misc_feature 1..20: note = chemically synthesized
  source 1..20: mol_type = other DNA
ctgtaatcccagctactcgg

SEQ ID NO: 14918 - DNA, 20 bp, synthetic construct
  misc_feature 1..20: note = chemically synthesized
  source 1..20: mol_type = other DNA
tgtaatcccagctactcggg

SEQ ID NO: 14919 - DNA, 20 bp, synthetic construct
  misc_feature 1..20: note = chemically synthesized
  source 1..20: mol_type = other DNA
tcccagctactcgggaggct

SEQ ID NO: 14920 - DNA, 20 bp, synthetic construct
  misc_feature 1..20: note = chemically synthesized
  source 1..20: mol_type = other DNA
cccagctactcgggaggcta

SEQ ID NO: 14921 - DNA, 20 bp, synthetic construct
  misc_feature 1..20: note = chemically synthesized
  source 1..20: mol_type = other DNA
gctactcgggaggctaaggc

SEQ ID NO: 14922 - DNA, 20 bp, synthetic construct
  misc_feature 1..20: note = chemically synthesized
  source 1..20: mol_type = other DNA
tactcgggaggctaaggcaa

SEQ ID NO: 14923 - DNA, 20 bp, synthetic construct
  misc_feature 1..20: note = chemically synthesized
  source 1..20: mol_type = other DNA
gcaagagaatcgcttgaacc

SEQ ID NO: 14924 - DNA, 20 bp, synthetic construct
  misc_feature 1..20: note = chemically synthesized
  source 1..20: mol_type = other DNA
caagagaatcgcttgaacct

SEQ ID NO: 14925 - DNA, 20 bp, synthetic construct
  misc_feature 1..20: note = chemically synthesized
  source 1..20: mol_type = other DNA
agagaatcgcttgaacctgg

SEQ ID NO: 14926 - DNA, 20 bp, synthetic construct
  misc_feature 1..20: note = chemically synthesized
  source 1..20: mol_type = other DNA
gagaatcgcttgaacctggg

SEQ ID NO: 14927 - DNA, 20 bp, synthetic construct
  misc_feature 1..20: note = chemically synthesized
  source 1..20: mol_type = other DNA
aatcgcttgaacctgggagg

SEQ ID NO: 14928 - DNA, 20 bp, synthetic construct
  misc_feature 1..20: note = chemically synthesized
  source 1..20: mol_type = other DNA
tcgcttgaacctgggaggcg

SEQ ID NO: 14929 - DNA, 20 bp, synthetic construct
  misc_feature 1..20: note = chemically synthesized
  source 1..20: mol_type = other DNA
cgcttgaacctgggaggcgg

SEQ ID NO: 14930 - DNA, 20 bp, synthetic construct
  misc_feature 1..20: note = chemically synthesized
  source 1..20: mol_type = other DNA
tgggaggcggaggttgccgt

SEQ ID NO: 14931 - DNA, 20 bp, synthetic construct
  misc_feature 1..20: note = chemically synthesized
  source 1..20: mol_type = other DNA
ggcggaggttgccgtgagcc

SEQ ID NO: 14932 - DNA, 20 bp, synthetic construct
  misc_feature 1..20: note = chemically synthesized
  source 1..20: mol_type = other DNA
gagattatgccactgcacta

SEQ ID NO: 14933 - DNA, 20 bp, synthetic construct
  misc_feature 1..20: note = chemically synthesized
  source 1..20: mol_type = other DNA
agattatgccactgcactac

SEQ ID NO: 14934 - DNA, 20 bp, synthetic construct
  misc_feature 1..20: note = chemically synthesized
  source 1..20: mol_type = other DNA
tatgccactgcactacaggc

SEQ ID NO: 14935 - DNA, 20 bp, synthetic construct
  misc_feature 1..20: note = chemically synthesized
  source 1..20: mol_type = other DNA
atgccactgcactacaggct

SEQ ID NO: 14936 - DNA, 20 bp, synthetic construct
  misc_feature 1..20: note = chemically synthesized
  source 1..20: mol_type = other DNA
ctgcactacaggctgggtga

SEQ ID NO: 14937 - DNA, 20 bp, synthetic construct
  misc_feature 1..20: note = chemically synthesized
  source 1..20: mol_type = other DNA
gcactacaggctgggtgaca

SEQ ID NO: 14938 - DNA, 20 bp, synthetic construct
  misc_feature 1..20: note = chemically synthesized
  source 1..20: mol_type = other DNA
tacaggctgggtgacagagc

SEQ ID NO: 14939 - DNA, 20 bp, synthetic construct
  misc_feature 1..20: note = chemically synthesized
  source 1..20: mol_type = other DNA
aaatcctgaaatccataaaa

SEQ ID NO: 14940 - DNA, 20 bp, synthetic construct
  misc_feature 1..20: note = chemically synthesized
  source 1..20: mol_type = other DNA
tcctgaaatccataaaatgg

SEQ ID NO: 14941 - DNA, 20 bp, synthetic construct
  misc_feature 1..20: note = chemically synthesized
  source 1..20: mol_type = other DNA
gactttttttttttaacctc

SEQ ID NO: 14942 - DNA, 20 bp, synthetic construct
  misc_feature 1..20: note = chemically synthesized
  source 1..20: mol_type = other DNA
tttttttttttaacctcaag

SEQ ID NO: 14943 - DNA, 20 bp, synthetic construct
  misc_feature 1..20: note = chemically synthesized
  source 1..20: mol_type = other DNA
acctcaagaagtatttgtcc

SEQ ID NO: 14944 - DNA, 20 bp, synthetic construct
  misc_feature 1..20: note = chemically synthesized
  source 1..20: mol_type = other DNA
tcaagaagtatttgtcctgg

SEQ ID NO: 14945 - DNA, 20 bp, synthetic construct
  misc_feature 1..20: note = chemically synthesized
  source 1..20: mol_type = other DNA
ttgtcctggaagaatgcata

SEQ ID NO: 14946 - DNA, 20 bp, synthetic construct
  misc_feature 1..20: note = chemically synthesized
  source 1..20: mol_type = other DNA
gaagaatgcatatggaacta

SEQ ID NO: 14947 - DNA, 20 bp, synthetic construct
  misc_feature 1..20: note = chemically synthesized
  source 1..20: mol_type = other DNA
tggaactacagtttgaaact

SEQ ID NO: 14948 - DNA, 20 bp, synthetic construct
  misc_feature 1..20: note = chemically synthesized
  source 1..20: mol_type = other DNA
acttggacttgcatatacca

SEQ ID NO: 14949 - DNA, 20 bp, synthetic construct
  misc_feature 1..20: note = chemically synthesized
  source 1..20: mol_type = other DNA
cttggacttgcatataccat

SEQ ID NO: 14950 - DNA, 20 bp, synthetic construct
  misc_feature 1..20: note = chemically synthesized
  source 1..20: mol_type = other DNA
gcatataccatgggttccct

SEQ ID NO: 14951 - DNA, 20 bp, synthetic construct
  misc_feature 1..20: note = chemically synthesized
  source 1..20: mol_type = other DNA
catataccatgggttccctc

SEQ ID NO: 14952 - DNA, 20 bp, synthetic construct
  misc_feature 1..20: note = chemically synthesized
  source 1..20: mol_type = other DNA
ccatgggttccctcaggcct

SEQ ID NO: 14953 - DNA, 20 bp, synthetic construct
  misc_feature 1..20: note = chemically synthesized
  source 1..20: mol_type = other DNA
catgggttccctcaggcctc

SEQ ID NO: 14954 - DNA, 20 bp, synthetic construct
  misc_feature 1..20: note = chemically synthesized
  source 1..20: mol_type = other DNA
atgggttccctcaggcctca

SEQ ID NO: 14955 - DNA, 20 bp, synthetic construct
  misc_feature 1..20: note = chemically synthesized
  source 1..20: mol_type = other DNA
tcttgcatttcctctgacat

SEQ ID NO: 14956 - DNA, 20 bp, synthetic construct
  misc_feature 1..20: note = chemically synthesized
  source 1..20: mol_type = other DNA
ttgcatttcctctgacatca

SEQ ID NO: 14957 - DNA, 20 bp, synthetic construct
  misc_feature 1..20: note = chemically synthesized
  source 1..20: mol_type = other DNA
tgacatcagagaatgcactc

SEQ ID NO: 14958 - DNA, 20 bp, synthetic construct
  misc_feature 1..20: note = chemically synthesized
  source 1..20: mol_type = other DNA
agagaatgcactccagcccc

SEQ ID NO: 14959 - DNA, 20 bp, synthetic construct
  misc_feature 1..20: note = chemically synthesized
  source 1..20: mol_type = other DNA
gagaatgcactccagcccct

SEQ ID NO: 14960 - DNA, 20 bp, synthetic construct
  misc_feature 1..20: note = chemically synthesized
  source 1..20: mol_type = other DNA
tgcactccagcccctaggac

SEQ ID NO: 14961 - DNA, 20 bp, synthetic construct
  misc_feature 1..20: note = chemically synthesized
  source 1..20: mol_type = other DNA
cccctaggacgagccccccc

SEQ ID NO: 14962 - DNA, 20 bp, synthetic construct
  misc_feature 1..20: note = chemically synthesized
  source 1..20: mol_type = other DNA
ccctaggacgagcccccccc

SEQ ID NO: 14963 - DNA, 20 bp, synthetic construct
  misc_feature 1..20: note = chemically synthesized
  source 1..20: mol_type = other DNA
cctaggacgagcccccccca

SEQ ID NO: 14964 - DNA, 20 bp, synthetic construct
  misc_feature 1..20: note = chemically synthesized
  source 1..20: mol_type = other DNA
gagccccccccagggaaaca

SEQ ID NO: 14965 - DNA, 20 bp, synthetic construct
  misc_feature 1..20: note = chemically synthesized
  source 1..20: mol_type = other DNA
aacatggcctgcatttccat

SEQ ID NO: 14966 - DNA, 20 bp, synthetic construct
  misc_feature 1..20: note = chemically synthesized
  source 1..20: mol_type = other DNA
ccatcagaattgctctctgt

SEQ ID NO: 14967 - DNA, 20 bp, synthetic construct
  misc_feature 1..20: note = chemically synthesized
  source 1..20: mol_type = other DNA
catcagaattgctctctgta

SEQ ID NO: 14968 - DNA, 20 bp, synthetic construct
  misc_feature 1..20: note = chemically synthesized
  source 1..20: mol_type = other DNA
gctctctgtaaggatgtata

SEQ ID NO: 14969 - DNA, 20 bp, synthetic construct
  misc_feature 1..20: note = chemically synthesized
  source 1..20: mol_type = other DNA
tgtaaggatgtatatagctt

SEQ ID NO: 14970 - DNA, 20 bp, synthetic construct
  misc_feature 1..20: note = chemically synthesized
  source 1..20: mol_type = other DNA
gtatcctctctactttgaaa

SEQ ID NO: 14971 - DNA, 20 bp, synthetic construct
  misc_feature 1..20: note = chemically synthesized
  source 1..20: mol_type = other DNA
atcctctctactttgaaaca

SEQ ID NO: 14972 - DNA, 20 bp, synthetic construct
  misc_feature 1..20: note = chemically synthesized
  source 1..20: mol_type = other DNA
tactttgaaacagagtatct

SEQ ID NO: 14973 - DNA, 20 bp, synthetic construct
  misc_feature 1..20: note = chemically synthesized
  source 1..20: mol_type = other DNA
acaaaccacttcccctttaa

SEQ ID NO: 14974 - DNA, 20 bp, synthetic construct
  misc_feature 1..20: note = chemically synthesized
  source 1..20: mol_type = other DNA
cacttcccctttaaaagtac

SEQ ID NO: 14975 - DNA, 20 bp, synthetic construct
  misc_feature 1..20: note = chemically synthesized
  source 1..20: mol_type = other DNA
actagatatatctttcactg

SEQ ID NO: 14976 - DNA, 20 bp, synthetic construct
  misc_feature 1..20: note = chemically synthesized
  source 1..20: mol_type = other DNA
tatatctttcactgtggaaa

SEQ ID NO: 14977 - DNA, 20 bp, synthetic construct
  misc_feature 1..20: note = chemically synthesized
  source 1..20: mol_type = other DNA
atatctttcactgtggaaat

SEQ ID NO: 14978 - DNA, 20 bp, synthetic construct
  misc_feature 1..20: note = chemically synthesized
  source 1..20: mol_type = other DNA
tggaaataggtgtcaaccgc

SEQ ID NO: 14979 - DNA, 20 bp, synthetic construct
  misc_feature 1..20: note = chemically synthesized
  source 1..20: mol_type = other DNA
aataggtgtcaaccgccagt

SEQ ID NO: 14980 - DNA, 20 bp, synthetic construct
  misc_feature 1..20: note = chemically synthesized
  source 1..20: mol_type = other DNA
ataggtgtcaaccgccagtc

SEQ ID NO: 14981 - DNA, 20 bp, synthetic construct
  misc_feature 1..20: note = chemically synthesized
  source 1..20: mol_type = other DNA
ggatgccttttatcccgtga

SEQ ID NO: 14982 - DNA, 20 bp, synthetic construct
  misc_feature 1..20: note = chemically synthesized
  source 1..20: mol_type = other DNA
tgccttttatcccgtgatgg

SEQ ID NO: 14983 - DNA, 20 bp, synthetic construct
  misc_feature 1..20: note = chemically synthesized
  source 1..20: mol_type = other DNA
tttatcccgtgatggtggaa

SEQ ID NO: 14984 - DNA, 20 bp, synthetic construct
  misc_feature 1..20: note = chemically synthesized
  source 1..20: mol_type = other DNA
tagtgatttctcaccgaaat

SEQ ID NO: 14985 - DNA, 20 bp, synthetic construct
  misc_feature 1..20: note = chemically synthesized
  source 1..20: mol_type = other DNA
agtgatttctcaccgaaatc

SEQ ID NO: 14986 - DNA, 20 bp, synthetic construct
  misc_feature 1..20: note = chemically synthesized
  source 1..20: mol_type = other DNA
gtgatttctcaccgaaatca

SEQ ID NO: 14987 - DNA, 20 bp, synthetic construct
  misc_feature 1..20: note = chemically synthesized
  source 1..20: mol_type = other DNA
gatttctcaccgaaatcagg

SEQ ID NO: 14988 - DNA, 20 bp, synthetic construct
  misc_feature 1..20: note = chemically synthesized
  source 1..20: mol_type = other DNA
tttctcaccgaaatcaggga

SEQ ID NO: 14989 - DNA, 20 bp, synthetic construct
  misc_feature 1..20: note = chemically synthesized
  source 1..20: mol_type = other DNA
tcagggagagccactaactc

SEQ ID NO: 14990 - DNA, 20 bp, synthetic construct
  misc_feature 1..20: note = chemically synthesized
  source 1..20: mol_type = other DNA
aactctggcctctatcaacc

SEQ ID NO: 14991 - DNA, 20 bp, synthetic construct
  misc_feature 1..20: note = chemically synthesized
  source 1..20: mol_type = other DNA
ctctggcctctatcaaccca

SEQ ID NO: 14992 - DNA, 20 bp, synthetic construct
  misc_feature 1..20: note = chemically synthesized
  source 1..20: mol_type = other DNA
ctggcctctatcaacccaga

SEQ ID NO: 14993 - DNA, 20 bp, synthetic construct
  misc_feature 1..20: note = chemically synthesized
  source 1..20: mol_type = other DNA
atcaacccagagagattgca

SEQ ID NO: 14994 - DNA, 20 bp, synthetic construct
  misc_feature 1..20: note = chemically synthesized
  source 1..20: mol_type = other DNA
gagattgcatggttcttcaa

SEQ ID NO: 14995 - DNA, 20 bp, synthetic construct
  misc_feature 1..20: note = chemically synthesized
  source 1..20: mol_type = other DNA
gattgcatggttcttcaatg

SEQ ID NO: 14996 - DNA, 20 bp, synthetic construct
  misc_feature 1..20: note = chemically synthesized
  source 1..20: mol_type = other DNA
catggttcttcaatggagat

SEQ ID NO: 14997 - DNA, 20 bp, synthetic construct
  misc_feature 1..20: note = chemically synthesized
  source 1..20: mol_type = other DNA
ttcaatggagatcagatgtt

SEQ ID NO: 14998 - DNA, 20 bp, synthetic construct
  misc_feature 1..20: note = chemically synthesized
  source 1..20: mol_type = other DNA
cacttcatctttttattttt

SEQ ID NO: 14999 - DNA, 20 bp, synthetic construct
  misc_feature 1..20: note = chemically synthesized
  source 1..20: mol_type = other DNA
ttttattttttagaatcatg

SEQ ID NO: 15000 - DNA, 20 bp, synthetic construct
  misc_feature 1..20: note = chemically synthesized
  source 1..20: mol_type = other DNA
attttttagaatcatgcggc

SEQ ID NO: 15001 - DNA, 20 bp, synthetic construct
  misc_feature 1..20: note = chemically synthesized
  source 1..20: mol_type = other DNA
ttttttagaatcatgcggct

SEQ ID NO: 15002 - DNA, 20 bp, synthetic construct
  misc_feature 1..20: note = chemically synthesized
  source 1..20: mol_type = other DNA
tagaatcatgcggctgggtg

SEQ ID NO: 15003 - DNA, 20 bp, synthetic construct
  misc_feature 1..20: note = chemically synthesized
  source 1..20: mol_type = other DNA
aatcatgcggctgggtgtag

SEQ ID NO: 15004 - DNA, 20 bp, synthetic construct
  misc_feature 1..20: note = chemically synthesized
  source 1..20: mol_type = other DNA
gtggctcacgcctgtaatcc

SEQ ID NO: 15005 - DNA, 20 bp, synthetic construct
  misc_feature 1..20: note = chemically synthesized
  source 1..20: mol_type = other DNA
acgcctgtaatcctagcact

SEQ ID NO: 15006 - DNA, 20 bp, synthetic construct
  misc_feature 1..20: note = chemically synthesized
  source 1..20: mol_type = other DNA
cgcctgtaatcctagcactt

SEQ ID NO: 15007 - DNA, 20 bp, synthetic construct
  misc_feature 1..20: note = chemically synthesized
  source 1..20: mol_type = other DNA
gcctgtaatcctagcactta

SEQ ID NO: 15008 - DNA, 20 bp, synthetic construct
  misc_feature 1..20: note = chemically synthesized
  source 1..20: mol_type = other DNA
ctgtaatcctagcacttagg

SEQ ID NO: 15009 - DNA, 20 bp, synthetic construct
  misc_feature 1..20: note = chemically synthesized
  source 1..20: mol_type = other DNA
tgtaatcctagcacttaggg

SEQ ID NO: 15010 - DNA, 20 bp, synthetic construct
  misc_feature 1..20: note = chemically synthesized
  source 1..20: mol_type = other DNA
tcctagcacttagggaggcc

SEQ ID NO: 15011 - DNA, 20 bp, synthetic construct
  misc_feature 1..20: note = chemically synthesized
  source 1..20: mol_type = other DNA
cctagcacttagggaggcca

SEQ ID NO: 15012 - DNA, 20 bp, synthetic construct
  misc_feature 1..20: note = chemically synthesized
  source 1..20: mol_type = other DNA
agcacttagggaggccaagg

SEQ ID NO: 15013 - DNA, 20 bp, synthetic construct
  misc_feature 1..20: note = chemically synthesized
  source 1..20: mol_type = other DNA
gcacttagggaggccaaggc

SEQ ID NO: 15014 - DNA, 20 bp, synthetic construct
  misc_feature 1..20: note = chemically synthesized
  source 1..20: mol_type = other DNA
cttagggaggccaaggcagg

SEQ ID NO: 15015 - DNA, 20 bp, synthetic construct
  misc_feature 1..20: note = chemically synthesized
  source 1..20: mol_type = other DNA
ggccaaggcaggcagatcat

SEQ ID NO: 15016 - DNA, 20 bp, synthetic construct
  misc_feature 1..20: note = chemically synthesized
  source 1..20: mol_type = other DNA
gccaaggcaggcagatcatg

SEQ ID NO: 15017 - DNA, 20 bp, synthetic construct
  misc_feature 1..20: note = chemically synthesized
  source 1..20: mol_type = other DNA
aggcaggcagatcatgaggt

SEQ ID NO: 15018 - DNA, 20 bp, synthetic construct
  misc_feature 1..20: note = chemically synthesized
  source 1..20: mol_type = other DNA
ggcaggcagatcatgaggtc

SEQ ID NO: 15019 - DNA, 20 bp, synthetic construct
  misc_feature 1..20: note = chemically synthesized
  source 1..20: mol_type = other DNA
caggcagatcatgaggtcag

SEQ ID NO: 15020 - DNA, 20 bp, synthetic construct
  misc_feature 1..20: note = chemically synthesized
  source 1..20: mol_type = other DNA
gatcatgaggtcaggagttc

SEQ ID NO: 15021 - DNA, 20 bp, synthetic construct
  misc_feature 1..20: note = chemically synthesized
  source 1..20: mol_type = other DNA
tgaggtcaggagttcgagac

SEQ ID NO: 15022 - DNA, 20 bp, synthetic construct
  misc_feature 1..20: note = chemically synthesized
  source 1..20: mol_type = other DNA
tcaggagttcgagaccagcc

SEQ ID NO: 15023 - DNA, 20 bp, synthetic construct
  misc_feature 1..20: note = chemically synthesized
  source 1..20: mol_type = other DNA
cgagaccagcctagtcaaca

SEQ ID NO: 15024 - DNA, 20 bp, synthetic construct
  misc_feature 1..20: note = chemically synthesized
  source 1..20: mol_type = other DNA
actaaaaatacaaaaaaaat

SEQ ID NO: 15025 - DNA, 20 bp, synthetic construct
  misc_feature 1..20: note = chemically synthesized
  source 1..20: mol_type = other DNA
aaaatacaaaaaaaattagc

SEQ ID NO: 15026 - DNA, 20 bp, synthetic construct
  misc_feature 1..20: note = chemically synthesized
  source 1..20: mol_type = other DNA
aaatacaaaaaaaattagct

SEQ ID NO: 15027 - DNA, 20 bp, synthetic construct
  misc_feature 1..20: note = chemically synthesized
  source 1..20: mol_type = other DNA
caaaaaaaattagctgggca

SEQ ID NO: 15028 - DNA, 20 bp, synthetic construct
  misc_feature 1..20: note = chemically synthesized
  source 1..20: mol_type = other DNA
aaaaaattagctgggcatgg

SEQ ID NO: 15029 - DNA, 20 bp, synthetic construct
  misc_feature 1..20: note = chemically synthesized
  source 1..20: mol_type = other DNA
aaattagctgggcatggtgg

SEQ ID NO: 15030 - DNA, 20 bp, synthetic construct
  misc_feature 1..20: note = chemically synthesized
  source 1..20: mol_type = other DNA
aattagctgggcatggtggc

SEQ ID NO: 15031 - DNA, 20 bp, synthetic construct
  misc_feature 1..20: note = chemically synthesized
  source 1..20: mol_type = other DNA
gtggcgggcacctgtaatcc

SEQ ID NO: 15032 - DNA, 20 bp, synthetic construct
  misc_feature 1..20: note = chemically synthesized
  source 1..20: mol_type = other DNA
cacctgtaatcccagctact

SEQ ID NO: 15033 - DNA, 20 bp, synthetic construct
  misc_feature 1..20: note = chemically synthesized
  source 1..20: mol_type = other DNA
acctgtaatcccagctactt

SEQ ID NO: 15034 - DNA, 20 bp, synthetic construct
  misc_feature 1..20: note = chemically synthesized
  source 1..20: mol_type = other DNA
ctgtaatcccagctacttgg

SEQ ID NO: 15035 - DNA, 20 bp, synthetic construct
  misc_feature 1..20: note = chemically synthesized
  source 1..20: mol_type = other DNA
tgtaatcccagctacttggg

SEQ ID NO: 15036 - DNA, 20 bp, synthetic construct
  misc_feature 1..20: note = chemically synthesized
  source 1..20: mol_type = other DNA
tcccagctacttgggaggct

SEQ ID NO: 15037 - DNA, 20 bp, synthetic construct
  misc_feature 1..20: note = chemically synthesized
  source 1..20: mol_type = other DNA
cccagctacttgggaggctg

SEQ ID NO: 15038 - DNA, 20 bp, synthetic construct
  misc_feature 1..20: note = chemically synthesized
  source 1..20: mol_type = other DNA
agctacttgggaggctgagg

SEQ ID NO: 15039 - DNA, 20 bp, synthetic construct
  misc_feature 1..20: note = chemically synthesized
  source 1..20: mol_type = other DNA
gctacttgggaggctgaggc

SEQ ID NO: 15040 - DNA, 20 bp, synthetic construct
  misc_feature 1..20: note = chemically synthesized
  source 1..20: mol_type = other DNA
tacttgggaggctgaggcag

SEQ ID NO: 15041 - DNA, 20 bp, synthetic construct
  misc_feature 1..20: note = chemically synthesized
  source 1..20: mol_type = other DNA
ggcaggagaatcacttgaac

SEQ ID NO: 15042 - DNA, 20 bp, synthetic construct
  misc_feature 1..20: note = chemically synthesized
  source 1..20: mol_type = other DNA
caggagaatcacttgaaccg

SEQ ID NO: 15043 - DNA, 20 bp, synthetic construct
  misc_feature 1..20: note = chemically synthesized
  source 1..20: mol_type = other DNA
ggagaatcacttgaaccgga

SEQ ID NO: 15044 - DNA, 20 bp, synthetic construct
  misc_feature 1..20: note = chemically synthesized
  source 1..20: mol_type = other DNA
gagaatcacttgaaccggag

SEQ ID NO: 15045 - DNA, 20 bp, synthetic construct
  misc_feature 1..20: note = chemically synthesized
  source 1..20: mol_type = other DNA
aatcacttgaaccggagagg

SEQ ID NO: 15046 - DNA, 20 bp, synthetic construct
  misc_feature 1..20: note = chemically synthesized
  source 1..20: mol_type = other DNA
tcacttgaaccggagaggca

SEQ ID NO: 15047 - DNA, 20 bp, synthetic construct
  misc_feature 1..20: note = chemically synthesized
  source 1..20: mol_type = other DNA
cacttgaaccggagaggcag

SEQ ID NO: 15048 - DNA, 20 bp, synthetic construct
  misc_feature 1..20: note = chemically synthesized
  source 1..20: mol_type = other DNA
aaccggagaggcagaggttg

SEQ ID NO: 15049 - DNA, 20 bp, synthetic construct
  misc_feature 1..20: note = chemically synthesized
  source 1..20: mol_type = other DNA
ggagaggcagaggttgcagt

SEQ ID NO: 15050 - DNA, 20 bp, synthetic construct
  misc_feature 1..20: note = chemically synthesized
  source 1..20: mol_type = other DNA
ggcagaggttgcagtgagct

SEQ ID NO: 15051 - DNA, 20 bp, synthetic construct
  misc_feature 1..20: note = chemically synthesized
  source 1..20: mol_type = other DNA
gagattgcaccattgcactc

SEQ ID NO: 15052 - DNA, 20 bp, synthetic construct
  misc_feature 1..20: note = chemically synthesized
  source 1..20: mol_type = other DNA
ttgcaccattgcactccagc

SEQ ID NO: 15053 - DNA, 20 bp, synthetic construct
  misc_feature 1..20: note = chemically synthesized
  source 1..20: mol_type = other DNA
tgcaccattgcactccagcc

SEQ ID NO: 15054 - DNA, 20 bp, synthetic construct
  misc_feature 1..20: note = chemically synthesized
  source 1..20: mol_type = other DNA
attgcactccagccaggcaa

SEQ ID NO: 15055 - DNA, 20 bp, synthetic construct
  misc_feature 1..20: note = chemically synthesized
  source 1..20: mol_type = other DNA
ctccagccaggcaacagtgc

SEQ ID NO: 15056 - DNA, 20 bp, synthetic construct
  misc_feature 1..20: note = chemically synthesized
  source 1..20: mol_type = other DNA
catctcaaacaaacaaacaa

SEQ ID NO: 15057 - DNA, 20 bp, synthetic construct
  misc_feature 1..20: note = chemically synthesized
  source 1..20: mol_type = other DNA
tcaaacaaacaaacaaaaga

SEQ ID NO: 15058 - DNA, 20 bp, synthetic construct
  misc_feature 1..20: note = chemically synthesized
  source 1..20: mol_type = other DNA
acaaacaaacaaaagaaaga

SEQ ID NO: 15059 - DNA, 20 bp, synthetic construct
  misc_feature 1..20: note = chemically synthesized
  source 1..20: mol_type = other DNA
acaaacaaaagaaagaaaga

SEQ ID NO: 15060 - DNA, 20 bp, synthetic construct
  misc_feature 1..20: note = chemically synthesized
  source 1..20: mol_type = other DNA
acaaaagaaagaaagaaaga

SEQ ID NO: 15061 - DNA, 20 bp, synthetic construct
  misc_feature 1..20: note = chemically synthesized
  source 1..20: mol_type = other DNA
aaagaaagaaagaaagaaag

SEQ ID NO: 15062 - DNA, 20 bp, synthetic construct
  misc_feature 1..20: note = chemically synthesized
  source 1..20: mol_type = other DNA
aaagaaagaaagaaagtggc

SEQ ID NO: 15063 - DNA, 20 bp, synthetic construct
  misc_feature 1..20: note = chemically synthesized
  source 1..20: mol_type = other DNA
aagaaagaaagtggccagaa

SEQ ID NO: 15064 - DNA, 20 bp, synthetic construct
  misc_feature 1..20: note = chemically synthesized
  source 1..20: mol_type = other DNA
agaaagaaagtggccagaat

SEQ ID NO: 15065 - DNA, 20 bp, synthetic construct
  misc_feature 1..20: note = chemically synthesized
  source 1..20: mol_type = other DNA
gaatgggaatgtttacgtga

SEQ ID NO: 15066 - DNA, 20 bp, synthetic construct
  misc_feature 1..20: note = chemically synthesized
  source 1..20: mol_type = other DNA
aatgtttacgtgatagaaat

SEQ ID NO: 15067 - DNA, 20 bp, synthetic construct
  misc_feature 1..20: note = chemically synthesized
  source 1..20: mol_type = other DNA
aaattggcaaatgctaaact

SEQ ID NO: 15068 - DNA, 20 bp, synthetic construct
  misc_feature 1..20: note = chemically synthesized
  source 1..20: mol_type = other DNA
aattggcaaatgctaaactc

SEQ ID NO: 15069 - DNA, 20 bp, synthetic construct
  misc_feature 1..20: note = chemically synthesized
  source 1..20: mol_type = other DNA
attggcaaatgctaaactca

SEQ ID NO: 15070 - DNA, 20 bp, synthetic construct
  misc_feature 1..20: note = chemically synthesized
  source 1..20: mol_type = other DNA
cagggctttcccctgctccc

SEQ ID NO: 15071 - DNA, 20 bp, synthetic construct
  misc_feature 1..20: note = chemically synthesized
  source 1..20: mol_type = other DNA
gggctttcccctgctcccca

SEQ ID NO: 15072 - DNA, 20 bp, synthetic construct
  misc_feature 1..20: note = chemically synthesized
  source 1..20: mol_type = other DNA
gctttcccctgctccccaga

SEQ ID NO: 15073 - DNA, 20 bp, synthetic construct
  misc_feature 1..20: note = chemically synthesized
  source 1..20: mol_type = other DNA
tcccctgctccccagagagt

SEQ ID NO: 15074 - DNA, 20 bp, synthetic construct
  misc_feature 1..20: note = chemically synthesized
  source 1..20: mol_type = other DNA
tccccagagagtcagtttat

SEQ ID NO: 15075 - DNA, 20 bp, synthetic construct
  misc_feature 1..20: note = chemically synthesized
  source 1..20: mol_type = other DNA
gagagtcagtttatcagcac

SEQ ID NO: 15076 - DNA, 20 bp, synthetic construct
  misc_feature 1..20: note = chemically synthesized
  source 1..20: mol_type = other DNA
tatcagcactggacgtaaca

SEQ ID NO: 15077 - DNA, 20 bp, synthetic construct
  misc_feature 1..20: note = chemically synthesized
  source 1..20: mol_type = other DNA
ctggacgtaacatagttcat

SEQ ID NO: 15078 - DNA, 20 bp, synthetic construct
  misc_feature 1..20: note = chemically synthesized
  source 1..20: mol_type = other DNA
ggacgtaacatagttcataa

SEQ ID NO: 15079 - DNA, 20 bp, synthetic construct
  misc_feature 1..20: note = chemically synthesized
  source 1..20: mol_type = other DNA
agttcataagagcattgccg

SEQ ID NO: 15080 - DNA, 20 bp, synthetic construct
  misc_feature 1..20: note = chemically synthesized
  source 1..20: mol_type = other DNA
tcataagagcattgccgcgg

SEQ ID NO: 15081 - DNA, 20 bp, synthetic construct
  misc_feature 1..20: note = chemically synthesized
  source 1..20: mol_type = other DNA
aagagcattgccgcggaagc

SEQ ID NO: 15082 - DNA, 20 bp, synthetic construct
  misc_feature 1..20: note = chemically synthesized
  source 1..20: mol_type = other DNA
cggaagccagcctgcctacc

SEQ ID NO: 15083 - DNA, 20 bp, synthetic construct
  misc_feature 1..20: note = chemically synthesized
  source 1..20: mol_type = other DNA
ggaagccagcctgcctacct

SEQ ID NO: 15084 - DNA, 20 bp, synthetic construct
  misc_feature 1..20: note = chemically synthesized
  source 1..20: mol_type = other DNA
gcctacctgggcttccatcc

SEQ ID NO: 15085 - DNA, 20 bp, synthetic construct
  misc_feature 1..20: note = chemically synthesized
  source 1..20: mol_type = other DNA
cctgggcttccatcctggct

SEQ ID NO: 15086 - DNA, 20 bp, synthetic construct
  misc_feature 1..20: note = chemically synthesized
  source 1..20: mol_type = other DNA
tcggcatgtactaaccttgt

SEQ ID NO: 15087 - DNA, 20 bp, synthetic construct
  misc_feature 1..20: note = chemically synthesized
  source 1..20: mol_type = other DNA
gttggcctaatcatttaact

SEQ ID NO: 15088 - DNA, 20 bp, synthetic construct
  misc_feature 1..20: note = chemically synthesized
  source 1..20: mol_type = other DNA
aatcatttaactcagcacct

SEQ ID NO: 15089 - DNA, 20 bp, synthetic construct
  misc_feature 1..20: note = chemically synthesized
  source 1..20: mol_type = other DNA
gcatctactgtttctgtaaa

SEQ ID NO: 15090 - DNA, 20 bp, synthetic construct
  misc_feature 1..20: note = chemically synthesized
  source 1..20: mol_type = other DNA
tctactgtttctgtaaatag

SEQ ID NO: 15091 - DNA, 20 bp, synthetic construct
  misc_feature 1..20: note = chemically synthesized
  source 1..20: mol_type = other DNA
aaatagcagtaactacctca

SEQ ID NO: 15092 - DNA, 20 bp, synthetic construct
  misc_feature 1..20: note = chemically synthesized
  source 1..20: mol_type = other DNA
gcagtaactacctcacagaa

SEQ ID NO: 15093 - DNA, 20 bp, synthetic construct
  misc_feature 1..20: note = chemically synthesized
  source 1..20: mol_type = other DNA
ctacctcacagaaaagcaca

SEQ ID NO: 15094 - DNA, 20 bp, synthetic construct
  misc_feature 1..20: note = chemically synthesized
  source 1..20: mol_type = other DNA
acagaaaagcacatagcaca

SEQ ID NO: 15095 - DNA, 20 bp, synthetic construct
  misc_feature 1..20: note = chemically synthesized
  source 1..20: mol_type = other DNA
aaagcacatagcacatggac

SEQ ID NO: 15096 - DNA, 20 bp, synthetic construct
  misc_feature 1..20: note = chemically synthesized
  source 1..20: mol_type = other DNA
tgttaaccctgattattatt

SEQ ID NO: 15097 - DNA, 20 bp, synthetic construct
  misc_feature 1..20: note = chemically synthesized
  source 1..20: mol_type = other DNA
cctgattattattaagctgc

SEQ ID NO: 15098 - DNA, 20 bp, synthetic construct
  misc_feature 1..20: note = chemically synthesized
  source 1..20: mol_type = other DNA
tgattattattaagctgcca

SEQ ID NO: 15099 - DNA, 20 bp, synthetic construct
  misc_feature 1..20: note = chemically synthesized
  source 1..20: mol_type = other DNA
tgccagagataacctatttg

SEQ ID NO: 15100 - DNA, 20 bp, synthetic construct
  misc_feature 1..20: note = chemically synthesized
  source 1..20: mol_type = other DNA
cctatttgtagattataaaa

SEQ ID NO: 15101 - DNA, 20 bp, synthetic construct
  misc_feature 1..20: note = chemically synthesized
  source 1..20: mol_type = other DNA
tagattataaaacagaaact

SEQ ID NO: 15102 - DNA, 20 bp, synthetic construct
  misc_feature 1..20: note = chemically synthesized
  source 1..20: mol_type = other DNA
gataattgatatgacttgcc

SEQ ID NO: 15103 - DNA, 20 bp, synthetic construct
  misc_feature 1..20: note = chemically synthesized
  source 1..20: mol_type = other DNA
ataattgatatgacttgcca

SEQ ID NO: 15104 - DNA, 20 bp, synthetic construct
  misc_feature 1..20: note = chemically synthesized
  source 1..20: mol_type = other DNA
tatgacttgccaaggacatg

SEQ ID NO: 15105 - DNA, 20 bp, synthetic construct
  misc_feature 1..20: note = chemically synthesized
  source 1..20: mol_type = other DNA
acttgccaaggacatgtagt

SEQ ID NO: 15106 - DNA, 20 bp, synthetic construct
  misc_feature 1..20: note = chemically synthesized
  source 1..20: mol_type = other DNA
tgccaaggacatgtagttgg

SEQ ID NO: 15107 - DNA, 20 bp, synthetic construct
  misc_feature 1..20: note = chemically synthesized
  source 1..20: mol_type = other DNA
gccaaggacatgtagttggt

SEQ ID NO: 15108 - DNA, 20 bp, synthetic construct
  misc_feature 1..20: note = chemically synthesized
  source 1..20: mol_type = other DNA
aaggacatgtagttggtggg

SEQ ID NO: 15109 - DNA, 20 bp, synthetic construct
  misc_feature 1..20: note = chemically synthesized
  source 1..20: mol_type = other DNA
gacatgtagttggtgggtgg

SEQ ID NO: 15110 - DNA, 20 bp, synthetic construct
  misc_feature 1..20: note = chemically synthesized
  source 1..20: mol_type = other DNA
tagttggtgggtggcagaac

SEQ ID NO: 15111 - DNA, 20 bp, synthetic construct
  misc_feature 1..20: note = chemically synthesized
  source 1..20: mol_type = other DNA
agttggtgggtggcagaacg

SEQ ID NO: 15112 - DNA, 20 bp, synthetic construct
  misc_feature 1..20: note = chemically synthesized
  source 1..20: mol_type = other DNA
gttggtgggtggcagaacga

SEQ ID NO: 15113 - DNA, 20 bp, synthetic construct
  misc_feature 1..20: note = chemically synthesized
  source 1..20: mol_type = other DNA
gtgggtggcagaacgagggc

SEQ ID NO: 15114 - DNA, 20 bp, synthetic construct
  misc_feature 1..20: note = chemically synthesized
  source 1..20: mol_type = other DNA
gggtggcagaacgagggctg

SEQ ID NO: 15115 - DNA, 20 bp, synthetic construct
  misc_feature 1..20: note = chemically synthesized
  source 1..20: mol_type = other DNA
gcagaacgagggctggagcc

SEQ ID NO: 15116 - DNA, 20 bp, synthetic construct
  misc_feature 1..20: note = chemically synthesized
  source 1..20: mol_type = other DNA
gagggctggagcccagttcc

SEQ ID NO: 15117 - DNA, 20 bp, synthetic construct
  misc_feature 1..20: note = chemically synthesized
  source 1..20: mol_type = other DNA
agggctggagcccagttccc

SEQ ID NO: 15118 - DNA, 20 bp, synthetic construct
  misc_feature 1..20: note = chemically synthesized
  source 1..20: mol_type = other DNA
gggctggagcccagttccca

SEQ ID NO: 15119 - DNA, 20 bp, synthetic construct
  misc_feature 1..20: note = chemically synthesized
  source 1..20: mol_type = other DNA
cttttcattaccccacaaaa

SEQ ID NO: 15120 - DNA, 20 bp, synthetic construct
  misc_feature 1..20: note = chemically synthesized
  source 1..20: mol_type = other DNA
ttttcattaccccacaaaac

SEQ ID NO: 15121 - DNA, 20 bp, synthetic construct
  misc_feature 1..20: note = chemically synthesized
  source 1..20: mol_type = other DNA
gtgtgtttccttttttcata

SEQ ID NO: 15122 - DNA, 20 bp, synthetic construct
  misc_feature 1..20: note = chemically synthesized
  source 1..20: mol_type = other DNA
tctatctttttttttttttt

SEQ ID NO: 15123 - DNA, 20 bp, synthetic construct
  misc_feature 1..20: note = chemically synthesized
  source 1..20: mol_type = other DNA
tcttttttttttttttgaga

SEQ ID NO: 15124 - DNA, 20 bp, synthetic construct
  misc_feature 1..20: note = chemically synthesized
  source 1..20: mol_type = other DNA
cttttttttttttttgagac

SEQ ID NO: 15125 - DNA, 20 bp, synthetic construct
  misc_feature 1..20: note = chemically synthesized
  source 1..20: mol_type = other DNA
ttttttttttttttgagaca

SEQ ID NO: 15126 - DNA, 20 bp, synthetic construct
  misc_feature 1..20: note = chemically synthesized
  source 1..20: mol_type = other DNA
cagggtcttactctgttgcc

SEQ ID NO: 15127 - DNA, 20 bp, synthetic construct
  misc_feature 1..20: note = chemically synthesized
  source 1..20: mol_type = other DNA
agggtcttactctgttgccc

SEQ ID NO: 15128 - DNA, 20 bp, synthetic construct
  misc_feature 1..20: note = chemically synthesized
  source 1..20: mol_type = other DNA
tcttactctgttgcccaggc

SEQ ID NO: 15129 - DNA, 20 bp, synthetic construct
  misc_feature 1..20: note = chemically synthesized
  source 1..20: mol_type = other DNA
ttactctgttgcccaggctg

SEQ ID NO: 15130 - DNA, 20 bp, synthetic construct
  misc_feature 1..20: note = chemically synthesized
  source 1..20: mol_type = other DNA
ctgttgcccaggctggagtg

SEQ ID NO: 15131 - DNA, 20 bp, synthetic construct
  misc_feature 1..20: note = chemically synthesized
  source 1..20: mol_type = other DNA
ttgcccaggctggagtgcag

SEQ ID NO: 15132 - DNA, 20 bp, synthetic construct
  misc_feature 1..20: note = chemically synthesized
  source 1..20: mol_type = other DNA
acctcctccgcctctcacct

SEQ ID NO: 15133 - DNA, 20 bp, synthetic construct
  misc_feature 1..20: note = chemically synthesized
  source 1..20: mol_type = other DNA
gcctctcacctcagcctcct

SEQ ID NO: 15134 - DNA, 20 bp, synthetic construct
  misc_feature 1..20: note = chemically synthesized
  source 1..20: mol_type = other DNA
tctcacctcagcctcctgag

SEQ ID NO: 15135 - DNA, 20 bp, synthetic construct
  misc_feature 1..20: note = chemically synthesized
  source 1..20: mol_type = other DNA
acctcagcctcctgagtagc

SEQ ID NO: 15136 - DNA, 20 bp, synthetic construct
  misc_feature 1..20: note = chemically synthesized
  source 1..20: mol_type = other DNA
cctcagcctcctgagtagct

SEQ ID NO: 15137 - DNA, 20 bp, synthetic construct
  misc_feature 1..20: note = chemically synthesized
  source 1..20: mol_type = other DNA
ctcctgagtagctgggacta

SEQ ID NO: 15138 - DNA, 20 bp, synthetic construct
  misc_feature 1..20: note = chemically synthesized
  source 1..20: mol_type = other DNA
gactacagcaccaacacgcc

SEQ ID NO: 15139 - DNA, 20 bp, synthetic construct
  misc_feature 1..20: note = chemically synthesized
  source 1..20: mol_type = other DNA
taattttcgtaatgtttttg

SEQ ID NO: 15140 - DNA, 20 bp, synthetic construct
  misc_feature 1..20: note = chemically synthesized
  source 1..20: mol_type = other DNA
attttcgtaatgtttttgta

SEQ ID NO: 15141 - DNA, 20 bp, synthetic construct
  misc_feature 1..20: note = chemically synthesized
  source 1..20: mol_type = other DNA
tcgtaatgtttttgtagaga

SEQ ID NO: 15142 - DNA, 20 bp, synthetic construct
  misc_feature 1..20: note = chemically synthesized
  source 1..20: mol_type = other DNA
gtaatgtttttgtagagatg

SEQ ID NO: 15143 - DNA, 20 bp, synthetic construct
  misc_feature 1..20: note = chemically synthesized
  source 1..20: mol_type = other DNA
tggagtttcgccatgttgcc

SEQ ID NO: 15144 - DNA, 20 bp, synthetic construct
  misc_feature 1..20: note = chemically synthesized
  source 1..20: mol_type = other DNA
ggagtttcgccatgttgccc

SEQ ID NO: 15145 - DNA, 20 bp, synthetic construct
  misc_feature 1..20: note = chemically synthesized
  source 1..20: mol_type = other DNA
tttcgccatgttgcccaggc

SEQ ID NO: 15146 - DNA, 20 bp, synthetic construct
  misc_feature 1..20: note = chemically synthesized
  source 1..20: mol_type = other DNA
caggctggtcttgaactcct

SEQ ID NO: 15147 - DNA, 20 bp, synthetic construct
  misc_feature 1..20: note = chemically synthesized
  source 1..20: mol_type = other DNA
cttgaactcctgagttcacc

SEQ ID NO: 15148 - DNA, 20 bp, synthetic construct
  misc_feature 1..20: note = chemically synthesized
  source 1..20: mol_type = other DNA
ttgaactcctgagttcaccc

SEQ ID NO: 15149 - DNA, 20 bp, synthetic construct
  misc_feature 1..20: note = chemically synthesized
  source 1..20: mol_type = other DNA
gaactcctgagttcacccag

SEQ ID NO: 15150 - DNA, 20 bp, synthetic construct
  misc_feature 1..20: note = chemically synthesized
  source 1..20: mol_type = other DNA
caggagtgattcgcccacct

SEQ ID NO: 15151 - DNA, 20 bp, synthetic construct
  misc_feature 1..20: note = chemically synthesized
  source 1..20: mol_type = other DNA
tcgcccacctcggcctccca

SEQ ID NO: 15152 - DNA, 20 bp, synthetic construct
  misc_feature 1..20: note = chemically synthesized
  source 1..20: mol_type = other DNA
acctcggcctcccaaagtgc

SEQ ID NO: 15153 - DNA, 20 bp, synthetic construct
  misc_feature 1..20: note = chemically synthesized
  source 1..20: mol_type = other DNA
cctcggcctcccaaagtgct

SEQ ID NO: 15154 - DNA, 20 bp, synthetic construct
  misc_feature 1..20: note = chemically synthesized
  source 1..20: mol_type = other DNA
ctcccaaagtgctgggatta

SEQ ID NO: 15155 - DNA, 20 bp, synthetic construct
  misc_feature 1..20: note = chemically synthesized
  source 1..20: mol_type = other DNA
tcccaaagtgctgggattac

SEQ ID NO: 15156 - DNA, 20 bp, synthetic construct
  misc_feature 1..20: note = chemically synthesized
  source 1..20: mol_type = other DNA
agtgctgggattacaggtgt

SEQ ID NO: 15157 - DNA, 20 bp, synthetic construct
  misc_feature 1..20: note = chemically synthesized
  source 1..20: mol_type = other DNA
caggtgtgagccaccatgcc

SEQ ID NO: 15158 - DNA, 20 bp, synthetic construct
  misc_feature 1..20: note = chemically synthesized
  source 1..20: mol_type = other DNA
ctaataaaactctttgctca

SEQ ID NO: 15159 - DNA, 20 bp, synthetic construct
  misc_feature 1..20: note = chemically synthesized
  source 1..20: mol_type = other DNA
tgctcaaagcctatataact

SEQ ID NO: 15160 - DNA, 20 bp, synthetic construct
  misc_feature 1..20: note = chemically synthesized
  source 1..20: mol_type = other DNA
accctttaacccatatgaaa

SEQ ID NO: 15161 - DNA, 20 bp, synthetic construct
  misc_feature 1..20: note = chemically synthesized
  source 1..20: mol_type = other DNA
ccctttaacccatatgaaat

SEQ ID NO: 15162 - DNA, 20 bp, synthetic construct
  misc_feature 1..20: note = chemically synthesized
  source 1..20: mol_type = other DNA
ttcctgtattttcaactcac

SEQ ID NO: 15163 - DNA, 20 bp, synthetic construct
  misc_feature 1..20: note = chemically synthesized
  source 1..20: mol_type = other DNA
ctgtattttcaactcactgg

SEQ ID NO: 15164 - DNA, 20 bp, synthetic construct
  misc_feature 1..20: note = chemically synthesized
  source 1..20: mol_type = other DNA
tgtattttcaactcactggt

SEQ ID NO: 15165 - DNA, 20 bp, synthetic construct
  misc_feature 1..20: note = chemically synthesized
  source 1..20: mol_type = other DNA
ttctgtcttccccctttatg

SEQ ID NO: 15166 - DNA, 20 bp, synthetic construct
  misc_feature 1..20: note = chemically synthesized
  source 1..20: mol_type = other DNA
ccctttatgtagatgatcca

SEQ ID NO: 15167 - DNA, 20 bp, synthetic construct
  misc_feature 1..20: note = chemically synthesized
  source 1..20: mol_type = other DNA
ttatgtagatgatccaaagt

SEQ ID NO: 15168 - DNA, 20 bp, synthetic construct
  misc_feature 1..20: note = chemically synthesized
  source 1..20: mol_type = other DNA
atgtagatgatccaaagtca

SEQ ID NO: 15169 - DNA, 20 bp, synthetic construct
  misc_feature 1..20: note = chemically synthesized
  source 1..20: mol_type = other DNA
gtagatgatccaaagtcaga

SEQ ID NO: 15170 - DNA, 20 bp, synthetic construct
  misc_feature 1..20: note = chemically synthesized
  source 1..20: mol_type = other DNA
agatgatccaaagtcagaga

SEQ ID NO: 15171 - DNA, 20 bp, synthetic construct
  misc_feature 1..20: note = chemically synthesized
  source 1..20: mol_type = other DNA
gatgatccaaagtcagagag

SEQ ID NO: 15172 - DNA, 20 bp, synthetic construct
  misc_feature 1..20: note = chemically synthesized
  source 1..20: mol_type = other DNA
atgatccaaagtcagagaga

SEQ ID NO: 15173 - DNA, 20 bp, synthetic construct
  misc_feature 1..20: note = chemically synthesized
  source 1..20: mol_type = other DNA
tgatccaaagtcagagagag

SEQ ID NO: 15174 - DNA, 20 bp, synthetic construct
  misc_feature 1..20: note = chemically synthesized
  source 1..20: mol_type = other DNA
ccaaagtcagagagaggggt

SEQ ID NO: 15175 - DNA, 20 bp, synthetic construct
  misc_feature 1..20: note = chemically synthesized
  source 1..20: mol_type = other DNA
aagtcagagagaggggttgg

SEQ ID NO: 15176 - DNA, 20 bp, synthetic construct
  misc_feature 1..20: note = chemically synthesized
  source 1..20: mol_type = other DNA
gagagaggggttggaagcat

SEQ ID NO: 15177 - DNA, 20 bp, synthetic construct
  misc_feature 1..20: note = chemically synthesized
  source 1..20: mol_type = other DNA
agaggggttggaagcatgag

SEQ ID NO: 15178 - DNA, 20 bp, synthetic construct
  misc_feature 1..20: note = chemically synthesized
  source 1..20: mol_type = other DNA
ttggaagcatgagtagcccg

SEQ ID NO: 15179 - DNA, 20 bp, synthetic construct
  misc_feature 1..20: note = chemically synthesized
  source 1..20: mol_type = other DNA
gtagcccgtggcttcctgaa

SEQ ID NO: 15180 - DNA, 20 bp, synthetic construct
  misc_feature 1..20: note = chemically synthesized
  source 1..20: mol_type = other DNA
ccgtggcttcctgaatagcc

SEQ ID NO: 15181 - DNA, 20 bp, synthetic construct
  misc_feature 1..20: note = chemically synthesized
  source 1..20: mol_type = other DNA
cgtggcttcctgaatagcct

SEQ ID NO: 15182 - DNA, 20 bp, synthetic construct
  misc_feature 1..20: note = chemically synthesized
  source 1..20: mol_type = other DNA
gtggcttcctgaatagcctg

SEQ ID NO: 15183 - DNA, 20 bp, synthetic construct
  misc_feature 1..20: note = chemically synthesized
  source 1..20: mol_type = other DNA
cttcctgaatagcctgggga

SEQ ID NO: 15184 - DNA, 20 bp, synthetic construct
  misc_feature 1..20: note = chemically synthesized
  source 1..20: mol_type = other DNA
ctggggaaagcaacttctga

SEQ ID NO: 15185 - DNA, 20 bp, synthetic construct
  misc_feature 1..20: note = chemically synthesized
  source 1..20: mol_type = other DNA
ggaaagcaacttctgatgga

SEQ ID NO: 15186 - DNA, 20 bp, synthetic construct
  misc_feature 1..20: note = chemically synthesized
  source 1..20: mol_type = other DNA
ttctgatggacagacattgc

SEQ ID NO: 15187 - DNA, 20 bp, synthetic construct
  misc_feature 1..20: note = chemically synthesized
  source 1..20: mol_type = other DNA
ctgatggacagacattgcga

SEQ ID NO: 15188 - DNA, 20 bp, synthetic construct
  misc_feature 1..20: note = chemically synthesized
  source 1..20: mol_type = other DNA
gacattgcgagagcgaatgc

SEQ ID NO: 15189 - DNA, 20 bp, synthetic construct
  misc_feature 1..20: note = chemically synthesized
  source 1..20: mol_type = other DNA
ttgctgatctcctctctata

SEQ ID NO: 15190 - DNA, 20 bp, synthetic construct
  misc_feature 1..20: note = chemically synthesized
  source 1..20: mol_type = other DNA
tatatggttcttaccactta

SEQ ID NO: 15191 - DNA, 20 bp, synthetic construct
  misc_feature 1..20: note = chemically synthesized
  source 1..20: mol_type = other DNA
ggttcttaccacttaaagac

SEQ ID NO: 15192 - DNA, 20 bp, synthetic construct
  misc_feature 1..20: note = chemically synthesized
  source 1..20: mol_type = other DNA
gttcttaccacttaaagacg

SEQ ID NO: 15193 - DNA, 20 bp, synthetic construct
  misc_feature 1..20: note = chemically synthesized
  source 1..20: mol_type = other DNA
taccacttaaagacgaggtt

SEQ ID NO: 15194 - DNA, 20 bp, synthetic construct
  misc_feature 1..20: note = chemically synthesized
  source 1..20: mol_type = other DNA
acttaaagacgaggttgagc

SEQ ID NO: 15195 - DNA, 20 bp, synthetic construct
  misc_feature 1..20: note = chemically synthesized
  source 1..20: mol_type = other DNA
gttgagccagtctccaatca

SEQ ID NO: 15196 - DNA, 20 bp, synthetic construct
  misc_feature 1..20: note = chemically synthesized
  source 1..20: mol_type = other DNA
tctccaatcacagctaccca

SEQ ID NO: 15197 - DNA, 20 bp, synthetic construct
  misc_feature 1..20: note = chemically synthesized
  source 1..20: mol_type = other DNA
ctccaatcacagctacccaa

SEQ ID NO: 15198 - DNA, 20 bp, synthetic construct
  misc_feature 1..20: note = chemically synthesized
  source 1..20: mol_type = other DNA
ccaatcacagctacccaaag

SEQ ID NO: 15199 - DNA, 20 bp, synthetic construct
  misc_feature 1..20: note = chemically synthesized
  source 1..20: mol_type = other DNA
ccaaaggagtttaatgccca

SEQ ID NO: 15200 - DNA, 20 bp, synthetic construct
  misc_feature 1..20: note = chemically synthesized
  source 1..20: mol_type = other DNA
ttaatgcccacagcttcctg

SEQ ID NO: 15201 - DNA, 20 bp, synthetic construct
  misc_feature 1..20: note = chemically synthesized
  source 1..20: mol_type = other DNA
tgcccacagcttcctgaaga

SEQ ID NO: 15202 - DNA, 20 bp, synthetic construct
  misc_feature 1..20: note = chemically synthesized
  source 1..20: mol_type = other DNA
cagcttcctgaagatggaac

SEQ ID NO: 15203 - DNA, 20 bp, synthetic construct
  misc_feature 1..20: note = chemically synthesized
  source 1..20: mol_type = other DNA
ttcctgaagatggaaccaga

SEQ ID NO: 15204 - DNA, 20 bp, synthetic construct
  misc_feature 1..20: note = chemically synthesized
  source 1..20: mol_type = other DNA
tcctgaagatggaaccagat

SEQ ID NO: 15205 - DNA, 20 bp, synthetic construct
  misc_feature 1..20: note = chemically synthesized
  source 1..20: mol_type = other DNA
cctgaagatggaaccagatg

SEQ ID NO: 15206 - DNA, 20 bp, synthetic construct
  misc_feature 1..20: note = chemically synthesized
  source 1..20: mol_type = other DNA
gaagatggaaccagatgggg

SEQ ID NO: 15207 - DNA, 20 bp, synthetic construct
  misc_feature 1..20: note = chemically synthesized
  source 1..20: mol_type = other DNA
agatggaaccagatggggaa

SEQ ID NO: 15208 - DNA, 20 bp, synthetic construct
  misc_feature 1..20: note = chemically synthesized
  source 1..20: mol_type = other DNA
gatggaaccagatggggaag

SEQ ID NO: 15209 - DNA, 20 bp, synthetic construct
  misc_feature 1..20: note = chemically synthesized
  source 1..20: mol_type = other DNA
accagatggggaagaggacg

SEQ ID NO: 15210 - DNA, 20 bp, synthetic construct
  misc_feature 1..20: note = chemically synthesized
  source 1..20: mol_type = other DNA
agatggggaagaggacgtag

SEQ ID NO: 15211 - DNA, 20 bp, synthetic construct
  misc_feature 1..20: note = chemically synthesized
  source 1..20: mol_type = other DNA
gatggggaagaggacgtaga

SEQ ID NO: 15212 - DNA, 20 bp, synthetic construct
  misc_feature 1..20: note = chemically synthesized
  source 1..20: mol_type = other DNA
aggacgtagaaggcattcct

SEQ ID NO: 15213 - DNA, 20 bp, synthetic construct
  misc_feature 1..20: note = chemically synthesized
  source 1..20: mol_type = other DNA
ggacgtagaaggcattcctg

SEQ ID NO: 15214 - DNA, 20 bp, synthetic construct
  misc_feature 1..20: note = chemically synthesized
  source 1..20: mol_type = other DNA
attcctgaggtctgcgatca

SEQ ID NO: 15215 - DNA, 20 bp, synthetic construct
  misc_feature 1..20: note = chemically synthesized
  source 1..20: mol_type = other DNA
ggtctgcgatcacggacacc

SEQ ID NO: 15216 - DNA, 20 bp, synthetic construct
  misc_feature 1..20: note = chemically synthesized
  source 1..20: mol_type = other DNA
tcacggacaccaagatgaac

SEQ ID NO: 15217 - DNA, 20 bp, synthetic construct
  misc_feature 1..20: note = chemically synthesized
  source 1..20: mol_type = other DNA
acaccaagatgaaccagtcc

SEQ ID NO: 15218 - DNA, 20 bp, synthetic construct
  misc_feature 1..20: note = chemically synthesized
  source 1..20: mol_type = other DNA
caccaagatgaaccagtcct

SEQ ID NO: 15219 - DNA, 20 bp, synthetic construct
  misc_feature 1..20: note = chemically synthesized
  source 1..20: mol_type = other DNA
ccaagatgaaccagtcctgg

SEQ ID NO: 15220 - DNA, 20 bp, synthetic construct
  misc_feature 1..20: note = chemically synthesized
  source 1..20: mol_type = other DNA
tgaaccagtcctgggagtct

SEQ ID NO: 15221 - DNA, 20 bp, synthetic construct
  misc_feature 1..20: note = chemically synthesized
  source 1..20: mol_type = other DNA
gggagtcttggtaattcacc

SEQ ID NO: 15222 - DNA, 20 bp, synthetic construct
  misc_feature 1..20: note = chemically synthesized
  source 1..20: mol_type = other DNA
gagtcttggtaattcacctg

SEQ ID NO: 15223 - DNA, 20 bp, synthetic construct
  misc_feature 1..20: note = chemically synthesized
  source 1..20: mol_type = other DNA
agtcttggtaattcacctgg

SEQ ID NO: 15224 - DNA, 20 bp, synthetic construct
  misc_feature 1..20: note = chemically synthesized
  source 1..20: mol_type = other DNA
cctggaggtaatgtgttgac

SEQ ID NO: 15225 - DNA, 20 bp, synthetic construct
  misc_feature 1..20: note = chemically synthesized
  source 1..20: mol_type = other DNA
aatgtgttgactggatccca

SEQ ID NO: 15226 - DNA, 20 bp, synthetic construct
  misc_feature 1..20: note = chemically synthesized
  source 1..20: mol_type = other DNA
ttgactggatcccaaagtca

SEQ ID NO: 15227 - DNA, 20 bp, synthetic construct
  misc_feature 1..20: note = chemically synthesized
  source 1..20: mol_type = other DNA
gactggatcccaaagtcatg

SEQ ID NO: 15228 - DNA, 20 bp, synthetic construct
  misc_feature 1..20: note = chemically synthesized
  source 1..20: mol_type = other DNA
ttcctccatcctcatttcct

SEQ ID NO: 15229 - DNA, 20 bp, synthetic construct
  misc_feature 1..20: note = chemically synthesized
  source 1..20: mol_type = other DNA
tcctcatttccttggcacct

SEQ ID NO: 15230 - DNA, 20 bp, synthetic construct
  misc_feature 1..20: note = chemically synthesized
  source 1..20: mol_type = other DNA
cctcatttccttggcacctc

SEQ ID NO: 15231 - DNA, 20 bp, synthetic construct
  misc_feature 1..20: note = chemically synthesized
  source 1..20: mol_type = other DNA
catttccttggcacctcagg

SEQ ID NO: 15232 - DNA, 20 bp, synthetic construct
  misc_feature 1..20: note = chemically synthesized
  source 1..20: mol_type = other DNA
ttggcacctcaggaagatgt

SEQ ID NO: 15233 - DNA, 20 bp, synthetic construct
  misc_feature 1..20: note = chemically synthesized
  source 1..20: mol_type = other DNA
gcacctcaggaagatgtcag

SEQ ID NO: 15234 - DNA, 20 bp, synthetic construct
  misc_feature 1..20: note = chemically synthesized
  source 1..20: mol_type = other DNA
acctcaggaagatgtcagca

SEQ ID NO: 15235 - DNA, 20 bp, synthetic construct
  misc_feature 1..20: note = chemically synthesized
  source 1..20: mol_type = other DNA
agatgtcagcagagcccttg

SEQ ID NO: 15236 - DNA, 20 bp, synthetic construct
  misc_feature 1..20: note = chemically synthesized
  source 1..20: mol_type = other DNA
cagagcccttgcagttattc

SEQ ID NO: 15237 - DNA, 20 bp, synthetic construct
  misc_feature 1..20: note = chemically synthesized
  source 1..20: mol_type = other DNA
agagcccttgcagttattcc

SEQ ID NO: 15238 - DNA, 20 bp, synthetic construct
  misc_feature 1..20: note = chemically synthesized
  source 1..20: mol_type = other DNA
ccttgcagttattccaggct

SEQ ID NO: 15239 - DNA, 20 bp, synthetic construct
  misc_feature 1..20: note = chemically synthesized
  source 1..20: mol_type = other DNA
tgcagttattccaggcttgg

SEQ ID NO: 15240 - DNA, 20 bp, synthetic construct
  misc_feature 1..20: note = chemically synthesized
  source 1..20: mol_type = other DNA
ggtggtgattgctctgctat

SEQ ID NO: 15241 - DNA, 20 bp, synthetic construct
  misc_feature 1..20: note = chemically synthesized
  source 1..20: mol_type = other DNA
tgttttatatgccctgtatc

SEQ ID NO: 15242 - DNA, 20 bp, synthetic construct
  misc_feature 1..20: note = chemically synthesized
  source 1..20: mol_type = other DNA
tatgccctgtatccagtatt

SEQ ID NO: 15243 - DNA, 20 bp, synthetic construct
  misc_feature 1..20: note = chemically synthesized
  source 1..20: mol_type = other DNA
atgccctgtatccagtattc

SEQ ID NO: 15244 - DNA, 20 bp, synthetic construct
  misc_feature 1..20: note = chemically synthesized
  source 1..20: mol_type = other DNA
atccagtattcaggtcaacc

SEQ ID NO: 15245 - DNA, 20 bp, synthetic construct
  misc_feature 1..20: note = chemically synthesized
  source 1..20: mol_type = other DNA
gtcaacccagccctgatctt

SEQ ID NO: 15246 - DNA, 20 bp, synthetic construct
  misc_feature 1..20: note = chemically synthesized
  source 1..20: mol_type = other DNA
attttagacaaacgtggttt

SEQ ID NO: 15247 - DNA, 20 bp, synthetic construct
  misc_feature 1..20: note = chemically synthesized
  source 1..20: mol_type = other DNA
tttgagtccaaagatcaggg

SEQ ID NO: 15248 - DNA, 20 bp, synthetic construct
  misc_feature 1..20: note = chemically synthesized
  source 1..20: mol_type = other DNA
aagatcagggctgggttgac

SEQ ID NO: 15249 - DNA, 20 bp, synthetic construct
  misc_feature 1..20: note = chemically synthesized
  source 1..20: mol_type = other DNA
gggctgggttgacctgaata

SEQ ID NO: 15250 - DNA, 20 bp, synthetic construct
  misc_feature 1..20: note = chemically synthesized
  source 1..20: mol_type = other DNA
agagcaatcaccaccaagcc

SEQ ID NO: 15251 - DNA, 20 bp, synthetic construct
  misc_feature 1..20: note = chemically synthesized
  source 1..20: mol_type = other DNA
tcctgaggtgccaaggaaat

SEQ ID NO: 15252 - DNA, 20 bp, synthetic construct
  misc_feature 1..20: note = chemically synthesized
  source 1..20: mol_type = other DNA
aaggaaatgaggatggagga

SEQ ID NO: 15253 - DNA, 20 bp, synthetic construct
  misc_feature 1..20: note = chemically synthesized
  source 1..20: mol_type = other DNA
aaatgaggatggaggaagga

SEQ ID NO: 15254 - DNA, 20 bp, synthetic construct
  misc_feature 1..20: note = chemically synthesized
  source 1..20: mol_type = other DNA
atgaatgttctccatgactt

SEQ ID NO: 15255 - DNA, 20 bp, synthetic construct
  misc_feature 1..20: note = chemically synthesized
  source 1..20: mol_type = other DNA
agtcaacacattacctccag

SEQ ID NO: 15256 - DNA, 20 bp, synthetic construct
  misc_feature 1..20: note = chemically synthesized
  source 1..20: mol_type = other DNA
tgtccgtgatcgcagacctc

SEQ ID NO: 15257 - DNA, 20 bp, synthetic construct
  misc_feature 1..20: note = chemically synthesized
  source 1..20: mol_type = other DNA
gctgtgggcattaaactcct

SEQ ID NO: 15258 - DNA, 20 bp, synthetic construct
  misc_feature 1..20: note = chemically synthesized
  source 1..20: mol_type = other DNA
tccaacccctctctctgact

SEQ ID NO: 15259 - DNA, 20 bp, synthetic construct
  misc_feature 1..20: note = chemically synthesized
  source 1..20: mol_type = other DNA
agacagaaaaaatcctacca

SEQ ID NO: 15260 - DNA, 20 bp, synthetic construct
  misc_feature 1..20: note = chemically synthesized
  source 1..20: mol_type = other DNA
tacaggaaagcctatttcat

SEQ ID NO: 15261 - DNA, 20 bp, synthetic construct
  misc_feature 1..20: note = chemically synthesized
  source 1..20: mol_type = other DNA
agcctatttcatatgggtta

SEQ ID NO: 15262 - DNA, 20 bp, synthetic construct
  misc_feature 1..20: note = chemically synthesized
  source 1..20: mol_type = other DNA
tgggttaaagggtaggacag

SEQ ID NO: 15263 - DNA, 20 bp, synthetic construct
  misc_feature 1..20: note = chemically synthesized
  source 1..20: mol_type = other DNA
agttgaatttcgtgaaaagt

SEQ ID NO: 15264 - DNA, 20 bp, synthetic construct
  misc_feature 1..20: note = chemically synthesized
  source 1..20: mol_type = other DNA
agttatataggctttgagca

SEQ ID NO: 15265 - DNA, 20 bp, synthetic construct
  misc_feature 1..20: note = chemically synthesized
  source 1..20: mol_type = other DNA
actttgggaggccgaggtgg

SEQ ID NO: 15266 - DNA, 20 bp, synthetic construct
  misc_feature 1..20: note = chemically synthesized
  source 1..20: mol_type = other DNA
ccgaggtgggcgaatcactc

SEQ ID NO: 15267 - DNA, 20 bp, synthetic construct
  misc_feature 1..20: note = chemically synthesized
  source 1..20: mol_type = other DNA
aatcactcctgggtgaactc

SEQ ID NO: 15268 - DNA, 20 bp, synthetic construct
  misc_feature 1..20: note = chemically synthesized
  source 1..20: mol_type = other DNA
gagaggcggaggaggttgca

SEQ ID NO: 15269 - DNA, 20 bp, synthetic construct
  misc_feature 1..20: note = chemically synthesized
  source 1..20: mol_type = other DNA
ctgcactccagcctgggcaa

SEQ ID NO: 15270 - DNA, 20 bp, synthetic construct
  misc_feature 1..20: note = chemically synthesized
  source 1..20: mol_type = other DNA
tgattcaacagcctgttttg

SEQ ID NO: 15271 - DNA, 20 bp, synthetic construct
  misc_feature 1..20: note = chemically synthesized
  source 1..20: mol_type = other DNA
tggcaagtcatatcaattat

SEQ ID NO: 15272 - DNA, 20 bp, synthetic construct
  misc_feature 1..20: note = chemically synthesized
  source 1..20: mol_type = other DNA
tctggcagcttaataataat

SEQ ID NO: 15273 - DNA, 20 bp, synthetic construct
  misc_feature 1..20: note = chemically synthesized
  source 1..20: mol_type = other DNA
tagatgcagagaccaaggtg

SEQ ID NO: 15274 - DNA, 20 bp, synthetic construct
  misc_feature 1..20: note = chemically synthesized
  source 1..20: mol_type = other DNA
aaggttagtacatgccgagc

SEQ ID NO: 15275 - DNA, 20 bp, synthetic construct
  misc_feature 1..20: note = chemically synthesized
  source 1..20: mol_type = other DNA
ctggggagcaggggaaagcc

SEQ ID NO: 15276 - DNA, 20 bp, synthetic construct
  misc_feature 1..20: note = chemically synthesized
  source 1..20: mol_type = other DNA
ttttgtttgtttgtttgaga

SEQ ID NO: 15277 - DNA, 20 bp, synthetic construct
  misc_feature 1..20: note = chemically synthesized
  source 1..20: mol_type = other DNA
gtctcgcactgttgcctggc

SEQ ID NO: 15278 - DNA, 20 bp, synthetic construct
  misc_feature 1..20: note = chemically synthesized
  source 1..20: mol_type = other DNA
gcctcagcctcccaagtagc

SEQ ID NO: 15279 - DNA, 20 bp, synthetic construct
  misc_feature 1..20: note = chemically synthesized
  source 1..20: mol_type = other DNA
gccttggcctccctaagtgc

SEQ ID NO: 15280 - DNA, 20 bp, synthetic construct
  misc_feature 1..20: note = chemically synthesized
  source 1..20: mol_type = other DNA
tgaagaaccatgcaatctct

SEQ ID NO: 15281 - DNA, 20 bp, synthetic construct
  misc_feature 1..20: note = chemically synthesized
  source 1..20: mol_type = other DNA
ctctctgggttgatagaggc

SEQ ID NO: 15282 - DNA, 20 bp, synthetic construct
  misc_feature 1..20: note = chemically synthesized
  source 1..20: mol_type = other DNA
aaatcactattccaccatca

SEQ ID NO: 15283 - DNA, 20 bp, synthetic construct
  misc_feature 1..20: note = chemically synthesized
  source 1..20: mol_type = other DNA
atactctgtttcaaagtaga

SEQ ID NO: 15284 - DNA, 20 bp, synthetic construct
  misc_feature 1..20: note = chemically synthesized
  source 1..20: mol_type = other DNA
ggggggctcgtcctaggggc

SEQ ID NO: 15285 - DNA, 20 bp, synthetic construct
  misc_feature 1..20: note = chemically synthesized
  source 1..20: mol_type = other DNA
agtcacatagctgccatttt

SEQ ID NO: 15286 - DNA, 20 bp, synthetic construct
  misc_feature 1..20: note = chemically synthesized
  source 1..20: mol_type = other DNA
agctgccattttatggattt

SEQ ID NO: 15287 - DNA, 20 bp, synthetic construct
  misc_feature 1..20: note = chemically synthesized
  source 1..20: mol_type = other DNA
ttttttttttttttttgaga

SEQ ID NO: 15288 - DNA, 20 bp, synthetic construct
  misc_feature 1..20: note = chemically synthesized
  source 1..20: mol_type = other DNA
gattctcttgccttagcctc

SEQ ID NO: 15289 - DNA, 20 bp, synthetic construct
  misc_feature 1..20: note = chemically synthesized
  source 1..20: mol_type = other DNA
gccttagcctcccgagtagc

SEQ ID NO: 15290 - DNA, 20 bp, synthetic construct
  misc_feature 1..20: note = chemically synthesized
  source 1..20: mol_type = other DNA
tgtgagccaccgcgcctgcc

SEQ ID NO: 15291 - DNA, 20 bp, synthetic construct
  misc_feature 1..20: note = chemically synthesized
  source 1..20: mol_type = other DNA
caccgcgcctgcctggagtt

SEQ ID NO: 15292 - DNA, 20 bp, synthetic construct
  misc_feature 1..20: note = chemically synthesized
  source 1..20: mol_type = other DNA
actttgggaggctgaggtgg

SEQ ID NO: 15293 - DNA, 20 bp, synthetic construct
  misc_feature 1..20: note = chemically synthesized
  source 1..20: mol_type = other DNA
ggctgaggtgggaggattgc

SEQ ID NO: 15294 - DNA, 20 bp, synthetic construct
  misc_feature 1..20: note = chemically synthesized
  source 1..20: mol_type = other DNA
actaaaaatacaaaaactag

SEQ ID NO: 15295 - DNA, 20 bp, synthetic construct
  misc_feature 1..20: note = chemically synthesized
  source 1..20: mol_type = other DNA
tattcaggaggctgaggtgg

SEQ ID NO: 15296 - DNA, 20 bp, synthetic construct
  misc_feature 1..20: note = chemically synthesized
  source 1..20: mol_type = other DNA
ttgcgccactgcactccagg

SEQ ID NO: 15297 - DNA, 20 bp, synthetic construct
  misc_feature 1..20: note = chemically synthesized
  source 1..20: mol_type = other DNA
aaacttgttctgtttttcca

SEQ ID NO: 15298 - DNA, 20 bp, synthetic construct
  misc_feature 1..20: note = chemically synthesized
  source 1..20: mol_type = other DNA
tttggacagcgtccatactg

SEQ ID NO: 15299 - DNA, 20 bp, synthetic construct
  misc_feature 1..20: note = chemically synthesized
  source 1..20: mol_type = other DNA
agcgtccatactggtgggtt

SEQ ID NO: 15300 - DNA, 20 bp, synthetic construct
  misc_feature 1..20: note = chemically synthesized
  source 1..20: mol_type = other DNA
ccagcccctgcagacagaag

SEQ ID NO: 15301 - DNA, 20 bp, synthetic construct
  misc_feature 1..20: note = chemically synthesized
  source 1..20: mol_type = other DNA
gtggacctcgtttacctgtt

SEQ ID NO: 15302 - DNA, 20 bp, synthetic construct
  misc_feature 1..20: note = chemically synthesized
  source 1..20: mol_type = other DNA
ttcacttctgcaatactttc

SEQ ID NO: 15303 - DNA, 20 bp, synthetic construct
  misc_feature 1..20: note = chemically synthesized
  source 1..20: mol_type = other DNA
aaatctgcctattacagaac

SEQ ID NO: 15304 - DNA, 20 bp, synthetic construct
  misc_feature 1..20: note = chemically synthesized
  source 1..20: mol_type = other DNA
tgcctattacagaacctgga

SEQ ID NO: 15305 - DNA, 20 bp, synthetic construct
  misc_feature 1..20: note = chemically synthesized
  source 1..20: mol_type = other DNA
tccatgggcaaagggctcgt

SEQ ID NO: 15306 - DNA, 20 bp, synthetic construct
  misc_feature 1..20: note = chemically synthesized
  source 1..20: mol_type = other DNA
ctctcacgagccctttgccc

SEQ ID NO: 15307 - DNA, 20 bp, synthetic construct
  misc_feature 1..20: note = chemically synthesized
  source 1..20: mol_type = other DNA
ttcaggaaagtattgcagaa

SEQ ID NO: 15308 - DNA, 20 bp, synthetic construct
  misc_feature 1..20: note = chemically synthesized
  source 1..20: mol_type = other DNA
agagcatgacaaaagtacaa

SEQ ID NO: 15309 - DNA, 20 bp, synthetic construct
  misc_feature 1..20: note = chemically synthesized
  source 1..20: mol_type = other DNA
cagtatggacgctgtccaaa

SEQ ID NO: 15310 - DNA, 20 bp, synthetic construct
  misc_feature 1..20: note = chemically synthesized
  source 1..20: mol_type = other DNA
ggaaaaacagaacaagtttc

SEQ ID NO: 15311 - DNA, 20 bp, synthetic construct
  misc_feature 1..20: note = chemically synthesized
  source 1..20: mol_type = other DNA
agaacaagtttctggggtta

SEQ ID NO: 15312 - DNA, 20 bp, synthetic construct
  misc_feature 1..20: note = chemically synthesized
  source 1..20: mol_type = other DNA
caagtttctggggttactga

SEQ ID NO: 15313 - DNA, 20 bp, synthetic construct
  misc_feature 1..20: note = chemically synthesized
  source 1..20: mol_type = other DNA
ccaaagcctacaccttcaag

SEQ ID NO: 15314 - DNA, 20 bp, synthetic construct
  misc_feature 1..20: note = chemically synthesized
  source 1..20: mol_type = other DNA
caagaagagtgtagcctgag

SEQ ID NO: 15315 - DNA, 20 bp, synthetic construct
  misc_feature 1..20: note = chemically synthesized
  source 1..20: mol_type = other DNA
gttgcctctagaagggagaa

SEQ ID NO: 15316 - DNA, 20 bp, synthetic construct
  misc_feature 1..20: note = chemically synthesized
  source 1..20: mol_type = other DNA
acttttgcattttgaactgt

SEQ ID NO: 15317 - DNA, 20 bp, synthetic construct
  misc_feature 1..20: note = chemically synthesized
  source 1..20: mol_type = other DNA
tatcttttttttttttgaga

SEQ ID NO: 15318 - DNA, 20 bp, synthetic construct
  misc_feature 1..20: note = chemically synthesized
  source 1..20: mol_type = other DNA
tctggctcagtaacccagcc

SEQ ID NO: 15319 - DNA, 20 bp, synthetic construct
  misc_feature 1..20: note = chemically synthesized
  source 1..20: mol_type = other DNA
tcattgtgacctctacctcc

SEQ ID NO: 15320 - DNA, 20 bp, synthetic construct
  misc_feature 1..20: note = chemically synthesized
  source 1..20: mol_type = other DNA
gatcctcccacctcagcctc

SEQ ID NO: 15321 - DNA, 20 bp, synthetic construct
  misc_feature 1..20: note = chemically synthesized
  source 1..20: mol_type = other DNA
ttttgtatttttagtagaga

SEQ ID NO: 15322 - DNA, 20 bp, synthetic construct
  misc_feature 1..20: note = chemically synthesized
  source 1..20: mol_type = other DNA
acctcagcctcccaaagtgc

SEQ ID NO: 15323 - DNA, 20 bp, synthetic construct
  misc_feature 1..20: note = chemically synthesized
  source 1..20: mol_type = other DNA
caggcagatcacatgaggtc

SEQ ID NO: 15324 - DNA, 20 bp, synthetic construct
  misc_feature 1..20: note = chemically synthesized
  source 1..20: mol_type = other DNA
cgtttctaccaaaaaatata

SEQ ID NO: 15325 - DNA, 20 bp, synthetic construct
  misc_feature 1..20: note = chemically synthesized
  source 1..20: mol_type = other DNA
tactcgggaggctaaggcaa

SEQ ID NO: 15326 - DNA, 20 bp, synthetic construct
  misc_feature 1..20: note = chemically synthesized
  source 1..20: mol_type = other DNA
ttatgccactgcactacagg

SEQ ID NO: 15327 - DNA, 20 bp, synthetic construct
  misc_feature 1..20: note = chemically synthesized
  source 1..20: mol_type = other DNA
tcaagaagtatttgtcctgg

SEQ ID NO: 15328 - DNA, 20 bp, synthetic construct
  misc_feature 1..20: note = chemically synthesized
  source 1..20: mol_type = other DNA
aacttggacttgcatatacc

SEQ ID NO: 15329 - DNA, 20 bp, synthetic construct
  misc_feature 1..20: note = chemically synthesized
  source 1..20: mol_type = other DNA
atgggttccctcaggcctca

SEQ ID NO: 15330 - DNA, 20 bp, synthetic construct
  misc_feature 1..20: note = chemically synthesized
  source 1..20: mol_type = other DNA
ttgcatttcctctgacatca

SEQ ID NO: 15331 - DNA, 20 bp, synthetic construct
  misc_feature 1..20: note = chemically synthesized
  source 1..20: mol_type = other DNA
aacatggcctgcatttccat

SEQ ID NO: 15332 - DNA, 20 bp, synthetic construct
  misc_feature 1..20: note = chemically synthesized
  source 1..20: mol_type = other DNA
ccatcagaattgctctctgt

SEQ ID NO: 15333 - DNA, 20 bp, synthetic construct
  misc_feature 1..20: note = chemically synthesized
  source 1..20: mol_type = other DNA
gtatcctctctactttgaaa

SEQ ID NO: 15334 - DNA, 20 bp, synthetic construct
  misc_feature 1..20: note = chemically synthesized
  source 1..20: mol_type = other DNA
aataggtgtcaaccgccagt

SEQ ID NO: 15335 - DNA, 20 bp, synthetic construct
  misc_feature 1..20: note = chemically synthesized
  source 1..20: mol_type = other DNA
tgccttttatcccgtgatgg

SEQ ID NO: 15336 - DNA, 20 bp, synthetic construct
  misc_feature 1..20: note = chemically synthesized
  source 1..20: mol_type = other DNA
ttcaatggagatcagatgtt

SEQ ID NO: 15337 - DNA, 20 bp, synthetic construct
  misc_feature 1..20: note = chemically synthesized
  source 1..20: mol_type = other DNA
cacttcatctttttattttt

SEQ ID NO: 15338 - DNA, 20 bp, synthetic construct
  misc_feature 1..20: note = chemically synthesized
  source 1..20: mol_type = other DNA
tattttttagaatcatgcgg

SEQ ID NO: 15339 - DNA, 20 bp, synthetic construct
  misc_feature 1..20: note = chemically synthesized
  source 1..20: mol_type = other DNA
ggcaggcagatcatgaggtc

SEQ ID NO: 15340 - DNA, 20 bp, synthetic construct
  misc_feature 1..20: note = chemically synthesized
  source 1..20: mol_type = other DNA
tacttgggaggctgaggcag

SEQ ID NO: 15341 - DNA, 20 bp, synthetic construct
  misc_feature 1..20: note = chemically synthesized
  source 1..20: mol_type = other DNA
aaagaaagaaagaaagtggc

SEQ ID NO: 15342 - DNA, 20 bp, synthetic construct
  misc_feature 1..20: note = chemically synthesized
  source 1..20: mol_type = other DNA
agaaagaaagtggccagaat

SEQ ID NO: 15343 - DNA, 20 bp, synthetic construct
  misc_feature 1..20: note = chemically synthesized
  source 1..20: mol_type = other DNA
gggctttcccctgctcccca

SEQ ID NO: 15344 - DNA, 20 bp, synthetic construct
  misc_feature 1..20: note = chemically synthesized
  source 1..20: mol_type = other DNA
ttgccaaggacatgtagttg

SEQ ID NO: 15345 - DNA, 20 bp, synthetic construct
  misc_feature 1..20: note = chemically synthesized
  source 1..20: mol_type = other DNA
gagggctggagcccagttcc

SEQ ID NO: 15346 - DNA, 20 bp, synthetic construct
  misc_feature 1..20: note = chemically synthesized
  source 1..20: mol_type = other DNA
ttaccccacaaaacaggctg

SEQ ID NO: 15347 - DNA, 20 bp, synthetic construct
  misc_feature 1..20: note = chemically synthesized
  source 1..20: mol_type = other DNA
tcttttttttttttttgaga

SEQ ID NO: 15348 - DNA, 20 bp, synthetic construct
  misc_feature 1..20: note = chemically synthesized
  source 1..20: mol_type = other DNA
tcttactctgttgcccaggc

SEQ ID NO: 15349 - DNA, 20 bp, synthetic construct
  misc_feature 1..20: note = chemically synthesized
  source 1..20: mol_type = other DNA
ccgcctctcacctcagcctc

SEQ ID NO: 15350 - DNA, 20 bp, synthetic construct
  misc_feature 1..20: note = chemically synthesized
  source 1..20: mol_type = other DNA
tcgtaatgtttttgtagaga

SEQ ID NO: 15351 - DNA, 20 bp, synthetic construct
  misc_feature 1..20: note = chemically synthesized
  source 1..20: mol_type = other DNA
cccaggctggtcttgaactc

SEQ ID NO: 15352 - DNA, 20 bp, synthetic construct
  misc_feature 1..20: note = chemically synthesized
  source 1..20: mol_type = other DNA
ttgaactcctgagttcaccc

SEQ ID NO: 15353 - DNA, 20 bp, synthetic construct
  misc_feature 1..20: note = chemically synthesized
  source 1..20: mol_type = other DNA
acctcggcctcccaaagtgc

SEQ ID NO: 15354 - DNA, 20 bp, synthetic construct
  misc_feature 1..20: note = chemically synthesized
  source 1..20: mol_type = other DNA
ctgtattttcaactcactgg

SEQ ID NO: 15355 - DNA, 20 bp, synthetic construct
  misc_feature 1..20: note = chemically synthesized
  source 1..20: mol_type = other DNA
gatgatccaaagtcagagag

SEQ ID NO: 15356 - DNA, 20 bp, synthetic construct
  misc_feature 1..20: note = chemically synthesized
  source 1..20: mol_type = other DNA
cagagagaggggttggaagc

SEQ ID NO: 15357 - DNA, 20 bp, synthetic construct
  misc_feature 1..20: note = chemically synthesized
  source 1..20: mol_type = other DNA
catgagtagcccgtggcttc

SEQ ID NO: 15358 - DNA, 20 bp, synthetic construct
  misc_feature 1..20: note = chemically synthesized
  source 1..20: mol_type = other DNA
gatggacagacattgcgaga

SEQ ID NO: 15359 - DNA, 20 bp, synthetic construct
  misc_feature 1..20: note = chemically synthesized
  source 1..20: mol_type = other DNA
ctccaatcacagctacccaa

SEQ ID NO: 15360 - DNA, 20 bp, synthetic construct
  misc_feature 1..20: note = chemically synthesized
  source 1..20: mol_type = other DNA
caccaagatgaaccagtcct

SEQ ID NO: 15361 - DNA, 20 bp, synthetic construct
  misc_feature 1..20: note = chemically synthesized
  source 1..20: mol_type = other DNA
acctggaggtaatgtgttga

SEQ ID NO: 15362 - DNA, 20 bp, synthetic construct
  misc_feature 1..20: note = chemically synthesized
  source 1..20: mol_type = other DNA
ttggtggtgattgctctgct

SEQ ID NO: 15363 - DNA, 20 bp, synthetic construct
  misc_feature 1..20: note = chemically synthesized
  source 1..20: mol_type = other DNA
ccatatagagaggagatcag

SEQ ID NO: 15364 - DNA, 20 bp, synthetic construct
  misc_feature 1..20: note = chemically synthesized
  source 1..20: mol_type = other DNA
catctacataaagggggaag

SEQ ID NO: 15365 - DNA, 20 bp, synthetic construct
  misc_feature 1..20: note = chemically synthesized
  source 1..20: mol_type = other DNA
tgaagcagaagaggtaacat

SEQ ID NO: 15366 - DNA, 20 bp, synthetic construct
  misc_feature 1..20: note = chemically synthesized
  source 1..20: mol_type = other DNA
tgaggtagttactgctattt

SEQ ID NO: 15367 - DNA, 20 bp, synthetic construct
  misc_feature 1..20: note = chemically synthesized
  source 1..20: mol_type = other DNA
gtggctctccctgatttcgg

SEQ ID NO: 15368 - DNA, 20 bp, synthetic construct
  misc_feature 1..20: note = chemically synthesized
  source 1..20: mol_type = other DNA
ctaattctttatattttttg

SEQ ID NO: 15369 - DNA, 20 bp, synthetic construct
  misc_feature 1..20: note = chemically synthesized
  source 1..20: mol_type = other DNA
ccaccgcgcctgcctggagt

SEQ ID NO: 15370 - DNA, 20 bp, synthetic construct
  misc_feature 1..20: note = chemically synthesized
  source 1..20: mol_type = other DNA
aaagcattcattcagtaacc

SEQ ID NO: 15371 - DNA, 20 bp, synthetic construct
  misc_feature 1..20: note = chemically synthesized
  source 1..20: mol_type = other DNA
ccagtatggacgctgtccaa

SEQ ID NO: 15372 - DNA, 20 bp, synthetic construct
  misc_feature 1..20: note = chemically synthesized
  source 1..20: mol_type = other DNA
ccgtttctaccaaaaaatat

SEQ ID NO: 15373 - DNA, 20 bp, synthetic construct
  misc_feature 1..20: note = chemically synthesized
  source 1..20: mol_type = other DNA
ctactcgggaggctaaggca

SEQ ID NO: 15374 - DNA, 20 bp, synthetic construct
  misc_feature 1..20: note = chemically synthesized
  source 1..20: mol_type = other DNA
ctcaagaagtatttgtcctg

SEQ ID NO: 15375 - DNA, 20 bp, synthetic construct
  misc_feature 1..20: note = chemically synthesized
  source 1..20: mol_type = other DNA
cttgcatttcctctgacatc

SEQ ID NO: 15376 - DNA, 20 bp, synthetic construct
  misc_feature 1..20: note = chemically synthesized
  source 1..20: mol_type = other DNA
aaacatggcctgcatttcca

SEQ ID NO: 15377 - DNA, 20 bp, synthetic construct
  misc_feature 1..20: note = chemically synthesized
  source 1..20: mol_type = other DNA
acacttcatctttttatttt

SEQ ID NO: 15378 - DNA, 20 bp, synthetic construct
  misc_feature 1..20: note = chemically synthesized
  source 1..20: mol_type = other DNA
ctacttgggaggctgaggca

SEQ ID NO: 15379 - DNA, 20 bp, synthetic construct
  misc_feature 1..20: note = chemically synthesized
  source 1..20: mol_type = other DNA
ccatctcaaacaaacaaaca

SEQ ID NO: 15380 - DNA, 20 bp, synthetic construct
  misc_feature 1..20: note = chemically synthesized
  source 1..20: mol_type = other DNA
ctcaaacaaacaaacaaaag

SEQ ID NO: 15381 - DNA, 20 bp, synthetic construct
  misc_feature 1..20: note = chemically synthesized
  source 1..20: mol_type = other DNA
aacaaacaaacaaaagaaag

SEQ ID NO: 15382 - DNA, 20 bp, synthetic construct
  misc_feature 1..20: note = chemically synthesized
  source 1..20: mol_type = other DNA
aacaaacaaaagaaagaaag

SEQ ID NO: 15383 - DNA, 20 bp, synthetic construct
  misc_feature 1..20: note = chemically synthesized
  source 1..20: mol_type = other DNA
gaaagaaagaaagaaagtgg

SEQ ID NO: 15384 - DNA, 20 bp, synthetic construct
  misc_feature 1..20: note = chemically synthesized
  source 1..20: mol_type = other DNA
agaatgggaatgtttacgtg

SEQ ID NO: 15385 - DNA, 20 bp, synthetic construct
  misc_feature 1..20: note = chemically synthesized
  source 1..20: mol_type = other DNA
taaatagcagtaactacctc

SEQ ID NO: 15386 - DNA, 20 bp, synthetic construct
  misc_feature 1..20: note = chemically synthesized
  source 1..20: mol_type = other DNA
acctatttgtagattataaa

SEQ ID NO: 15387 - DNA, 20 bp, synthetic construct
  misc_feature 1..20: note = chemically synthesized
  source 1..20: mol_type = other DNA
aatactggatacagggcata

SEQ ID NO: 15388 - DNA, 20 bp, synthetic construct
  misc_feature 1..20: note = chemically synthesized
  source 1..20: mol_type = other DNA
tggcgaaactccatctctac

SEQ ID NO: 15389 - DNA, 20 bp, synthetic construct
  misc_feature 1..20: note = chemically synthesized
  source 1..20: mol_type = other DNA
cccgtctctactaaaaatac

SEQ ID NO: 15390 - DNA, 20 bp, synthetic construct
  misc_feature 1..20: note = chemically synthesized
  source 1..20: mol_type = other DNA
ttgctgtagtagtcagtatc

SEQ ID NO: 15391 - DNA, 20 bp, synthetic construct
  misc_feature 1..20: note = chemically synthesized
  source 1..20: mol_type = other DNA
gtccaaagagaatcctatgg

SEQ ID NO: 15392 - DNA, 20 bp, synthetic construct
  misc_feature 1..20: note = chemically synthesized
  source 1..20: mol_type = other DNA
gataacctatttgtagatta

SEQ ID NO: 15393 - DNA, 20 bp, synthetic construct
  misc_feature 1..20: note = chemically synthesized
  source 1..20: mol_type = other DNA
ggtgacttttcattacccca

SEQ ID NO: 15394 - DNA, 20 bp, synthetic construct
  misc_feature 1..20: note = chemically synthesized
  source 1..20: mol_type = other DNA
cctcttctgcttcatactaa

SEQ ID NO: 15395 - DNA, 20 bp, synthetic construct
  misc_feature 1..20: note = chemically synthesized
  source 1..20: mol_type = other DNA
cagccctgatctttggactc

SEQ ID NO: 15396 - DNA, 20 bp, synthetic construct
  misc_feature 1..20: note = chemically synthesized
  source 1..20: mol_type = other DNA
cattaaactcctttgggtag

SEQ ID NO: 15397 - DNA, 20 bp, synthetic construct
  misc_feature 1..20: note = chemically synthesized
  source 1..20: mol_type = other DNA
cgcaatgtctgtccatcaga

SEQ ID NO: 15398 - DNA, 20 bp, synthetic construct
  misc_feature 1..20: note = chemically synthesized
  source 1..20: mol_type = other DNA
ttcaggaagccacgggctac

SEQ ID NO: 15399 - DNA, 20 bp, synthetic construct
  misc_feature 1..20: note = chemically synthesized
  source 1..20: mol_type = other DNA
tcgtgaaaagtctgagttat

SEQ ID NO: 15400 - DNA, 20 bp, synthetic construct
  misc_feature 1..20: note = chemically synthesized
  source 1..20: mol_type = other DNA
agttatataggctttgagca

SEQ ID NO: 15401 - DNA, 20 bp, synthetic construct
  misc_feature 1..20: note = chemically synthesized
  source 1..20: mol_type = other DNA
tatgaaaaaaggaaacacac

SEQ ID NO: 15402 - DNA, 20 bp, synthetic construct
  misc_feature 1..20: note = chemically synthesized
  source 1..20: mol_type = other DNA
aacacacagatgattcaaca

SEQ ID NO: 15403 - DNA, 20 bp, synthetic construct
  misc_feature 1..20: note = chemically synthesized
  source 1..20: mol_type = other DNA
tggcaagtcatatcaattat

SEQ ID NO: 15404 - DNA, 20 bp, synthetic construct
  misc_feature 1..20: note = chemically synthesized
  source 1..20: mol_type = other DNA
gtcatatcaattatctgagt

SEQ ID NO: 15405 - DNA, 20 bp, synthetic construct
  misc_feature 1..20: note = chemically synthesized
  source 1..20: mol_type = other DNA
tctacaaataggttatctct

SEQ ID NO: 15406 - DNA, 20 bp, synthetic construct
  misc_feature 1..20: note = chemically synthesized
  source 1..20: mol_type = other DNA
tgtgtgccagtccatgtgct

SEQ ID NO: 15407 - DNA, 20 bp, synthetic construct
  misc_feature 1..20: note = chemically synthesized
  source 1..20: mol_type = other DNA
agagaccaaggtgctgagtt

SEQ ID NO: 15408 - DNA, 20 bp, synthetic construct
  misc_feature 1..20: note = chemically synthesized
  source 1..20: mol_type = other DNA
atggaagcccaggtaggcag

SEQ ID NO: 15409 - DNA, 20 bp, synthetic construct
  misc_feature 1..20: note = chemically synthesized
  source 1..20: mol_type = other DNA
ctggggagcaggggaaagcc

SEQ ID NO: 15410 - DNA, 20 bp, synthetic construct
  misc_feature 1..20: note = chemically synthesized
  source 1..20: mol_type = other DNA
ccactttctttctttctttc

SEQ ID NO: 15411 - DNA, 20 bp, synthetic construct
  misc_feature 1..20: note = chemically synthesized
  source 1..20: mol_type = other DNA
tttctttctttctttctttt

SEQ ID NO: 15412 - DNA, 20 bp, synthetic construct
  misc_feature 1..20: note = chemically synthesized
  source 1..20: mol_type = other DNA
tttctttctttcttttgttt

SEQ ID NO: 15413 - DNA, 20 bp, synthetic construct
  misc_feature 1..20: note = chemically synthesized
  source 1..20: mol_type = other DNA
aacctctgcctctccggttc

SEQ ID NO: 15414 - DNA, 20 bp, synthetic construct
  misc_feature 1..20: note = chemically synthesized
  source 1..20: mol_type = other DNA
tgcctcagcctcccaagtag

SEQ ID NO: 15415 - DNA, 20 bp, synthetic construct
  misc_feature 1..20: note = chemically synthesized
  source 1..20: mol_type = other DNA
ttttgtatttttagtagaga

SEQ ID NO: 15416 - DNA, 20 bp, synthetic construct
  misc_feature 1..20: note = chemically synthesized
  source 1..20: mol_type = other DNA
tgccttggcctccctaagtg

SEQ ID NO: 15417 - DNA, 20 bp, synthetic construct
  misc_feature 1..20: note = chemically synthesized
  source 1..20: mol_type = other DNA
gtgagccactacacccagcc

SEQ ID NO: 15418 - DNA, 20 bp, synthetic construct
  misc_feature 1..20: note = chemically synthesized
  source 1..20: mol_type = other DNA
aggccagagttagtggctct

SEQ ID NO: 15419 - DNA, 20 bp, synthetic construct
  misc_feature 1..20: note = chemically synthesized
  source 1..20: mol_type = other DNA
tctagtacttttaaagggga

SEQ ID NO: 15420 - DNA, 20 bp, synthetic construct
  misc_feature 1..20: note = chemically synthesized
  source 1..20: mol_type = other DNA
gaagtggtttgtctgagata

SEQ ID NO: 15421 - DNA, 20 bp, synthetic construct
  misc_feature 1..20: note = chemically synthesized
  source 1..20: mol_type = other DNA
aattctgatggaaatgcagg

SEQ ID NO: 15422 - DNA, 20 bp, synthetic construct
  misc_feature 1..20: note = chemically synthesized
  source 1..20: mol_type = other DNA
tctctgatgtcagaggaaat

SEQ ID NO: 15423 - DNA, 20 bp, synthetic construct
  misc_feature 1..20: note = chemically synthesized
  source 1..20: mol_type = other DNA
aacccatggtatatgcaagt

SEQ ID NO: 15424 - DNA, 20 bp, synthetic construct
  misc_feature 1..20: note = chemically synthesized
  source 1..20: mol_type = other DNA
aagtcacatagctgccattt

SEQ ID NO: 15425 - DNA, 20 bp, synthetic construct
  misc_feature 1..20: note = chemically synthesized
  source 1..20: mol_type = other DNA
tagctgccattttatggatt

SEQ ID NO: 15426 - DNA, 20 bp, synthetic construct
  misc_feature 1..20: note = chemically synthesized
  source 1..20: mol_type = other DNA
aacctccgcctcccaggttc

SEQ ID NO: 15427 - DNA, 20 bp, synthetic construct
  misc_feature 1..20: note = chemically synthesized
  source 1..20: mol_type = other DNA
tgccttagcctcccgagtag

SEQ ID NO: 15428 - DNA, 20 bp, synthetic construct
  misc_feature 1..20: note = chemically synthesized
  source 1..20: mol_type = other DNA
tttatattttttggtagaaa

SEQ ID NO: 15429 - DNA, 20 bp, synthetic construct
  misc_feature 1..20: note = chemically synthesized
  source 1..20: mol_type = other DNA
tgccttggcctcccaaagtg

SEQ ID NO: 15430 - DNA, 20 bp, synthetic construct
  misc_feature 1..20: note = chemically synthesized
  source 1..20: mol_type = other DNA
cctgcctggagttcagaatc

SEQ ID NO: 15431 - DNA, 20 bp, synthetic construct
  misc_feature 1..20: note = chemically synthesized
  source 1..20: mol_type = other DNA
agaatcttgggcttcattat

SEQ ID NO: 15432 - DNA, 20 bp, synthetic construct
  misc_feature 1..20: note = chemically synthesized
  source 1..20: mol_type = other DNA
cactttgggaggctgaggtg

SEQ ID NO: 15433 - DNA, 20 bp, synthetic construct
  misc_feature 1..20: note = chemically synthesized
  source 1..20: mol_type = other DNA
gaggtagaggtcacaatgag

SEQ ID NO: 15434 - DNA, 20 bp, synthetic construct
  misc_feature 1..20: note = chemically synthesized
  source 1..20: mol_type = other DNA
gctacactcttcttgaaggt

SEQ ID NO: 15435 - DNA, 20 bp, synthetic construct
  misc_feature 1..20: note = chemically synthesized
  source 1..20: mol_type = other DNA
tcagtaaccccagaaacttg

SEQ ID NO: 15436 - DNA, 20 bp, synthetic construct
  misc_feature 1..20: note = chemically synthesized
  source 1..20: mol_type = other DNA
gaaacttgttctgtttttcc

SEQ ID NO: 15437 - DNA, 20 bp, synthetic construct
  misc_feature 1..20: note = chemically synthesized
  source 1..20: mol_type = other DNA
tttggacagcgtccatactg

SEQ ID NO: 15438 - DNA, 20 bp, synthetic construct
  misc_feature 1..20: note = chemically synthesized
  source 1..20: mol_type = other DNA
gcagacagaagctgagtgga

SEQ ID NO: 15439 - DNA, 20 bp, synthetic construct
  misc_feature 1..20: note = chemically synthesized
  source 1..20: mol_type = other DNA
tccatccaggttctgtaata

SEQ ID NO: 15440 - DNA, 20 bp, synthetic construct
  misc_feature 1..20: note = chemically synthesized
  source 1..20: mol_type = other DNA
tctcctcatgtcccctcaag

SEQ ID NO: 15441 - DNA, 20 bp, synthetic construct
  misc_feature 1..20: note = chemically synthesized
  source 1..20: mol_type = other DNA
taacaggtaaacgaggtcca

SEQ ID NO: 15442 - DNA, 20 bp, synthetic construct
  misc_feature 1..20: note = chemically synthesized
  source 1..20: mol_type = other DNA
gcttctgtctgcaggggctg

SEQ ID NO: 15443 - DNA, 20 bp, synthetic construct
  misc_feature 1..20: note = chemically synthesized
  source 1..20: mol_type = other DNA
cagtctcacaggttacaggg

SEQ ID NO: 15444 - DNA, 20 bp, synthetic construct
  misc_feature 1..20: note = chemically synthesized
  source 1..20: mol_type = other DNA
gaatcctatggaaaaacaga

SEQ ID NO: 15445 - DNA, 20 bp, synthetic construct
  misc_feature 1..20: note = chemically synthesized
  source 1..20: mol_type = other DNA
agtttctggggttactgaat

SEQ ID NO: 15446 - DNA, 20 bp, synthetic construct
  misc_feature 1..20: note = chemically synthesized
  source 1..20: mol_type = other DNA
tcaagaagagtgtagcctga

SEQ ID NO: 15447 - DNA, 20 bp, synthetic construct
  misc_feature 1..20: note = chemically synthesized
  source 1..20: mol_type = other DNA
tatgtaacttttgcattttg

SEQ ID NO: 15448 - DNA, 20 bp, synthetic construct
  misc_feature 1..20: note = chemically synthesized
  source 1..20: mol_type = other DNA
ggtgtgtgccaccacatcca

SEQ ID NO: 15449 - DNA, 20 bp, synthetic construct
  misc_feature 1..20: note = chemically synthesized
  source 1..20: mol_type = other DNA
ttttgtatttttagtagaga

SEQ ID NO: 15450 - DNA, 20 bp, synthetic construct
  misc_feature 1..20: note = chemically synthesized
  source 1..20: mol_type = other DNA
cacctcagcctcccaaagtg

SEQ ID NO: 15451 - DNA, 20 bp, synthetic construct
  misc_feature 1..20: note = chemically synthesized
  source 1..20: mol_type = other DNA
ttaaacacaaataatgaagc

SEQ ID NO: 15452 - DNA, 20 bp, synthetic construct
  misc_feature 1..20: note = chemically synthesized
  source 1..20: mol_type = other DNA
caggcagatcacatgaggtc

SEQ ID NO: 15453 - DNA, 20 bp, synthetic construct
  misc_feature 1..20: note = chemically synthesized
  source 1..20: mol_type = other DNA
gcctggccaacatggtgaaa

SEQ ID NO: 15454 - DNA, 20 bp, synthetic construct
  misc_feature 1..20: note = chemically synthesized
  source 1..20: mol_type = other DNA
tcgggaggctaaggcaagag

SEQ ID NO: 15455 - DNA, 20 bp, synthetic construct
  misc_feature 1..20: note = chemically synthesized
  source 1..20: mol_type = other DNA
gaggcggaggttgccgtgag

SEQ ID NO: 15456 - DNA, 20 bp, synthetic construct
  misc_feature 1..20: note = chemically synthesized
  source 1..20: mol_type = other DNA
tggaagaatgcatatggaac

SEQ ID NO: 15457 - DNA, 20 bp, synthetic construct
  misc_feature 1..20: note = chemically synthesized
  source 1..20: mol_type = other DNA
ttgctctctgtaaggatgta

SEQ ID NO: 15458 - DNA, 20 bp, synthetic construct
  misc_feature 1..20: note = chemically synthesized
  source 1..20: mol_type = other DNA
gtaaggatgtatatagcttc

SEQ ID NO: 15459 - DNA, 20 bp, synthetic construct
  misc_feature 1..20: note = chemically synthesized
  source 1..20: mol_type = other DNA
tttatcccgtgatggtggaa

SEQ ID NO: 15460 - DNA, 20 bp, synthetic construct
  misc_feature 1..20: note = chemically synthesized
  source 1..20: mol_type = other DNA
ctctggcctctatcaaccca

SEQ ID NO: 15461 - DNA, 20 bp, synthetic construct
  misc_feature 1..20: note = chemically synthesized
  source 1..20: mol_type = other DNA
atggttcttcaatggagatc

SEQ ID NO: 15462 - DNA, 20 bp, synthetic construct
  misc_feature 1..20: note = chemically synthesized
  source 1..20: mol_type = other DNA
gaggcagaggttgcagtgag

SEQ ID NO: 15463 - DNA, 20 bp, synthetic construct
  misc_feature 1..20: note = chemically synthesized
  source 1..20: mol_type = other DNA
aaagaaagtggccagaatgg

SEQ ID NO: 15464 - DNA, 20 bp, synthetic construct
  misc_feature 1..20: note = chemically synthesized
  source 1..20: mol_type = other DNA
aaattggcaaatgctaaact

SEQ ID NO: 15465 - DNA, 20 bp, synthetic construct
  misc_feature 1..20: note = chemically synthesized
  source 1..20: mol_type = other DNA
tttcccctgctccccagaga

SEQ ID NO: 15466 - DNA, 20 bp, synthetic construct
  misc_feature 1..20: note = chemically synthesized
  source 1..20: mol_type = other DNA
gcggaagccagcctgcctac

SEQ ID NO: 15467 - DNA, 20 bp, synthetic construct
  misc_feature 1..20: note = chemically synthesized
  source 1..20: mol_type = other DNA
agcaccttggtctctgcatc

SEQ ID NO: 15468 - DNA, 20 bp, synthetic construct
  misc_feature 1..20: note = chemically synthesized
  source 1..20: mol_type = other DNA
atagcacatggactggcaca

SEQ ID NO: 15469 - DNA, 20 bp, synthetic construct
  misc_feature 1..20: note = chemically synthesized
  source 1..20: mol_type = other DNA
cactgtttaataaatgttaa

SEQ ID NO: 15470 - DNA, 20 bp, synthetic construct
  misc_feature 1..20: note = chemically synthesized
  source 1..20: mol_type = other DNA
gctgccagagataacctatt

SEQ ID NO: 15471 - DNA, 20 bp, synthetic construct
  misc_feature 1..20: note = chemically synthesized
  source 1..20: mol_type = other DNA
aacaggctgttgaatcatct

SEQ ID NO: 15472 - DNA, 20 bp, synthetic construct
  misc_feature 1..20: note = chemically synthesized
  source 1..20: mol_type = other DNA
acacgcccagctaattttcg

SEQ ID NO: 15473 - DNA, 20 bp, synthetic construct
  misc_feature 1..20: note = chemically synthesized
  source 1..20: mol_type = other DNA
tcgtaatgtttttgtagaga

SEQ ID NO: 15474 - DNA, 20 bp, synthetic construct
  misc_feature 1..20: note = chemically synthesized
  source 1..20: mol_type = other DNA
gaactcctgagttcacccag

SEQ ID NO: 15475 - DNA, 20 bp, synthetic construct
  misc_feature 1..20: note = chemically synthesized
  source 1..20: mol_type = other DNA
cacctcggcctcccaaagtg

SEQ ID NO: 15476 - DNA, 20 bp, synthetic construct
  misc_feature 1..20: note = chemically synthesized
  source 1..20: mol_type = other DNA
atctttctttatgttacctc

SEQ ID NO: 15477 - DNA, 20 bp, synthetic construct
  misc_feature 1..20: note = chemically synthesized
  source 1..20: mol_type = other DNA
taccctttaacccatatgaa

SEQ ID NO: 15478 - DNA, 20 bp, synthetic construct
  misc_feature 1..20: note = chemically synthesized
  source 1..20: mol_type = other DNA
cctgtattttcaactcactg

SEQ ID NO: 15479 - DNA, 20 bp, synthetic construct
  misc_feature 1..20: note = chemically synthesized
  source 1..20: mol_type = other DNA
ggttggaagcatgagtagcc

SEQ ID NO: 15480 - DNA, 20 bp, synthetic construct
  misc_feature 1..20: note = chemically synthesized
  source 1..20: mol_type = other DNA
ctccaatcacagctacccaa

SEQ ID NO: 15481 - DNA, 20 bp, synthetic construct
  misc_feature 1..20: note = chemically synthesized
  source 1..20: mol_type = other DNA
acccaaaggagtttaatgcc

SEQ ID NO: 15482 - DNA, 20 bp, synthetic construct
  misc_feature 1..20: note = chemically synthesized
  source 1..20: mol_type = other DNA
gcagagcccttgcagttatt

SEQ ID NO: 15483 - DNA, 20 bp, synthetic construct
  misc_feature 1..20: note = chemically synthesized
  source 1..20: mol_type = other DNA
tgcagttattccaggcttgg

SEQ ID NO: 15484 - DNA, 20 bp, synthetic construct
  misc_feature 1..20: note = chemically synthesized
  source 1..20: mol_type = other DNA
gctatgagtctgtgccttgc

SEQ ID NO: 15485 - DNA, 20 bp, synthetic construct
  misc_feature 1..20: note = chemically synthesized
  source 1..20: mol_type = other DNA
ctgatctttggactcaaaaa

SEQ ID NO: 15486 - DNA, 22 bp, synthetic construct
  misc_feature 1..22: note = chemically synthesized
  source 1..22: mol_type = other DNA
tagacaaacgtggtttttgagt

SEQ ID NO: 15487 - DNA, 22 bp, synthetic construct
  misc_feature 1..22: note = chemically synthesized
  source 1..22: mol_type = other DNA
agacaaacgtggtttttgagtc

SEQ ID NO: 15488 - DNA, 22 bp, synthetic construct
  misc_feature 1..22: note = chemically synthesized
  source 1..22: mol_type = other DNA
gacaaacgtggtttttgagtcc

SEQ ID NO: 15489 - DNA, 22 bp, synthetic construct
  misc_feature 1..22: note = chemically synthesized
  source 1..22: mol_type = other DNA
ttgagtccaaagatcagggctg

SEQ ID NO: 15490 - DNA, 22 bp, synthetic construct
  misc_feature 1..22: note = chemically synthesized
  source 1..22: mol_type = other DNA
tgagtccaaagatcagggctgg

SEQ ID NO: 15491 - DNA, 22 bp, synthetic construct
  misc_feature 1..22: note = chemically synthesized
  source 1..22: mol_type = other DNA
gagtccaaagatcagggctggg

SEQ ID NO: 15492 - DNA, 22 bp, synthetic construct
  misc_feature 1..22: note = chemically synthesized
  source 1..22: mol_type = other DNA
agtccaaagatcagggctgggt

SEQ ID NO: 15493 - DNA, 22 bp, synthetic construct
  misc_feature 1..22: note = chemically synthesized
  source 1..22: mol_type = other DNA
ggttgacctgaatactggatac

SEQ ID NO: 15494 - DNA, 22 bp, synthetic construct
  misc_feature 1..22: note = chemically synthesized
  source 1..22: mol_type = other DNA
acctgaatactggatacagggc

SEQ ID NO: 15495 - DNA, 22 bp, synthetic construct
  misc_feature 1..22: note = chemically synthesized
  source 1..22: mol_type = other DNA
aatactggatacagggcatata

SEQ ID NO: 15496 - DNA, 22 bp, synthetic construct
  misc_feature 1..22: note = chemically synthesized
  source 1..22: mol_type = other DNA
gatacagggcatataaaacagg

SEQ ID NO: 15497 - DNA, 22 bp, synthetic construct
  misc_feature 1..22: note = chemically synthesized
  source 1..22: mol_type = other DNA
atagcagagcaatcaccaccaa

SEQ ID NO: 15498 - DNA, 22 bp, synthetic construct
  misc_feature 1..22: note = chemically synthesized
  source 1..22: mol_type = other DNA
gaataactgcaagggctctgct

SEQ ID NO: 15499 - DNA, 22 bp, synthetic construct
  misc_feature 1..22: note = chemically synthesized
  source 1..22: mol_type = other DNA
caagggctctgctgacatcttc

SEQ ID NO: 15500 - DNA, 22 bp, synthetic construct
  misc_feature 1..22: note = chemically synthesized
  source 1..22: mol_type = other DNA
tgctgacatcttcctgaggtgc

SEQ ID NO: 15501 - DNA, 22 bp, synthetic construct
  misc_feature 1..22: note = chemically synthesized
  source 1..22: mol_type = other DNA
ctgacatcttcctgaggtgcca

SEQ ID NO: 15502 - DNA, 22 bp, synthetic construct
  misc_feature 1..22: note = chemically synthesized
  source 1..22: mol_type = other DNA
acatcttcctgaggtgccaagg

SEQ ID NO: 15503 - DNA, 22 bp, synthetic construct
  misc_feature 1..22: note = chemically synthesized
  source 1..22: mol_type = other DNA
cctgaggtgccaaggaaatgag

SEQ ID NO: 15504 - DNA, 22 bp, synthetic construct
  misc_feature 1..22: note = chemically synthesized
  source 1..22: mol_type = other DNA
ctgaggtgccaaggaaatgagg

SEQ ID NO: 15505 - DNA, 22 bp, synthetic construct
  misc_feature 1..22: note = chemically synthesized
  source 1..22: mol_type = other DNA
aggtgccaaggaaatgaggatg

SEQ ID NO: 15506 - DNA, 22 bp, synthetic construct
  misc_feature 1..22: note = chemically synthesized
  source 1..22: mol_type = other DNA
tccatgactttgggatccagtc

SEQ ID NO: 15507 - DNA, 22 bp, synthetic construct
  misc_feature 1..22: note = chemically synthesized
  source 1..22: mol_type = other DNA
catgactttgggatccagtcaa

SEQ ID NO: 15508 - DNA, 22 bp, synthetic construct
  misc_feature 1..22: note = chemically synthesized
  source 1..22: mol_type = other DNA
tgggatccagtcaacacattac

SEQ ID NO: 15509 - DNA, 22 bp, synthetic construct
  misc_feature 1..22: note = chemically synthesized
  source 1..22: mol_type = other DNA
gggatccagtcaacacattacc

SEQ ID NO: 15510 - DNA, 22 bp, synthetic construct
  misc_feature 1..22: note = chemically synthesized
  source 1..22: mol_type = other DNA
ggatccagtcaacacattacct

SEQ ID NO: 15511 - DNA, 22 bp, synthetic construct
  misc_feature 1..22: note = chemically synthesized
  source 1..22: mol_type = other DNA
cctccaggtgaattaccaagac

SEQ ID NO: 15512 - DNA, 22 bp, synthetic construct
  misc_feature 1..22: note = chemically synthesized
  source 1..22: mol_type = other DNA
caggtgaattaccaagactccc

SEQ ID NO: 15513 - DNA, 22 bp, synthetic construct
  misc_feature 1..22: note = chemically synthesized
  source 1..22: mol_type = other DNA
ccaagactcccaggactggttc

SEQ ID NO: 15514 - DNA, 22 bp, synthetic construct
  misc_feature 1..22: note = chemically synthesized
  source 1..22: mol_type = other DNA
ccaggactggttcatcttggtg

SEQ ID NO: 15515 - DNA, 22 bp, synthetic construct
  misc_feature 1..22: note = chemically synthesized
  source 1..22: mol_type = other DNA
gttcatcttggtgtccgtgatc

SEQ ID NO: 15516 - DNA, 22 bp, synthetic construct
  misc_feature 1..22: note = chemically synthesized
  source 1..22: mol_type = other DNA
atcttggtgtccgtgatcgcag

SEQ ID NO: 15517 - DNA, 22 bp, synthetic construct
  misc_feature 1..22: note = chemically synthesized
  source 1..22: mol_type = other DNA
ggtgtccgtgatcgcagacctc

SEQ ID NO: 15518 - DNA, 22 bp, synthetic construct
  misc_feature 1..22: note = chemically synthesized
  source 1..22: mol_type = other DNA
gtgtccgtgatcgcagacctca

SEQ ID NO: 15519 - DNA, 22 bp, synthetic construct
  misc_feature 1..22: note = chemically synthesized
  source 1..22: mol_type = other DNA
aggaatgccttctacgtcctct

SEQ ID NO: 15520 - DNA, 22 bp, synthetic construct
  misc_feature 1..22: note = chemically synthesized
  source 1..22: mol_type = other DNA
ctacgtcctcttccccatctgg

SEQ ID NO: 15521 - DNA, 22 bp, synthetic construct
  misc_feature 1..22: note = chemically synthesized
  source 1..22: mol_type = other DNA
tacgtcctcttccccatctggt

SEQ ID NO: 15522 - DNA, 22 bp, synthetic construct
  misc_feature 1..22: note = chemically synthesized
  source 1..22: mol_type = other DNA
cgtcctcttccccatctggttc

SEQ ID NO: 15523 - DNA, 22 bp, synthetic construct
  misc_feature 1..22: note = chemically synthesized
  source 1..22: mol_type = other DNA
ttccccatctggttccatcttc

SEQ ID NO: 15524 - DNA, 22 bp, synthetic construct
  misc_feature 1..22: note = chemically synthesized
  source 1..22: mol_type = other DNA
ccccatctggttccatcttcag

SEQ ID NO: 15525 - DNA, 22 bp, synthetic construct
  misc_feature 1..22: note = chemically synthesized
  source 1..22: mol_type = other DNA
cccatctggttccatcttcagg

SEQ ID NO: 15526 - DNA, 22 bp, synthetic construct
  misc_feature 1..22: note = chemically synthesized
  source 1..22: mol_type = other DNA
gttccatcttcaggaagctgtg

SEQ ID NO: 15527 - DNA, 22 bp, synthetic construct
  misc_feature 1..22: note = chemically synthesized
  source 1..22: mol_type = other DNA
catcttcaggaagctgtgggca

SEQ ID NO: 15528 - DNA, 22 bp, synthetic construct
  misc_feature 1..22: note = chemically synthesized
  source 1..22: mol_type = other DNA
caggaagctgtgggcattaaac

SEQ ID NO: 15529 - DNA, 22 bp, synthetic construct
  misc_feature 1..22: note = chemically synthesized
  source 1..22: mol_type = other DNA
aggaagctgtgggcattaaact

SEQ ID NO: 15530 - DNA, 22 bp, synthetic construct
  misc_feature 1..22: note = chemically synthesized
  source 1..22: mol_type = other DNA
tgggcattaaactcctttgggt

SEQ ID NO: 15531 - DNA, 22 bp, synthetic construct
  misc_feature 1..22: note = chemically synthesized
  source 1..22: mol_type = other DNA
aactcctttgggtagctgtgat

SEQ ID NO: 15532 - DNA, 22 bp, synthetic construct
  misc_feature 1..22: note = chemically synthesized
  source 1..22: mol_type = other DNA
ctttgggtagctgtgattggag

SEQ ID NO: 15533 - DNA, 22 bp, synthetic construct
  misc_feature 1..22: note = chemically synthesized
  source 1..22: mol_type = other DNA
tgggtagctgtgattggagact

SEQ ID NO: 15534 - DNA, 22 bp, synthetic construct
  misc_feature 1..22: note = chemically synthesized
  source 1..22: mol_type = other DNA
gggtagctgtgattggagactg

SEQ ID NO: 15535 - DNA, 22 bp, synthetic construct
  misc_feature 1..22: note = chemically synthesized
  source 1..22: mol_type = other DNA
ggtagctgtgattggagactgg

SEQ ID NO: 15536 - DNA, 22 bp, synthetic construct
  misc_feature 1..22: note = chemically synthesized
  source 1..22: mol_type = other DNA
tgattggagactggctcaacct

SEQ ID NO: 15537 - DNA, 22 bp, synthetic construct
  misc_feature 1..22: note = chemically synthesized
  source 1..22: mol_type = other DNA
gagactggctcaacctcgtctt

SEQ ID NO: 15538 - DNA, 22 bp, synthetic construct
  misc_feature 1..22: note = chemically synthesized
  source 1..22: mol_type = other DNA
gctcaacctcgtctttaagtgg

SEQ ID NO: 15539 - DNA, 22 bp, synthetic construct
  misc_feature 1..22: note = chemically synthesized
  source 1..22: mol_type = other DNA
aacctcgtctttaagtggtaag

SEQ ID NO: 15540 - DNA, 22 bp, synthetic construct
  misc_feature 1..22: note = chemically synthesized
  source 1..22: mol_type = other DNA
gtctttaagtggtaagaaccat

SEQ ID NO: 15541 - DNA, 22 bp, synthetic construct
  misc_feature 1..22: note = chemically synthesized
  source 1..22: mol_type = other DNA
taagtggtaagaaccatataga

SEQ ID NO: 15542 - DNA, 22 bp, synthetic construct
  misc_feature 1..22: note = chemically synthesized
  source 1..22: mol_type = other DNA
aagtggtaagaaccatatagag

SEQ ID NO: 15543 - DNA, 22 bp, synthetic construct
  misc_feature 1..22: note = chemically synthesized
  source 1..22: mol_type = other DNA
agtggtaagaaccatatagaga

SEQ ID NO: 15544 - DNA, 22 bp, synthetic construct
  misc_feature 1..22: note = chemically synthesized
  source 1..22: mol_type = other DNA
gcattcgctctcgcaatgtctg

SEQ ID NO: 15545 - DNA, 22 bp, synthetic construct
  misc_feature 1..22: note = chemically synthesized
  source 1..22: mol_type = other DNA
gctctcgcaatgtctgtccatc

SEQ ID NO: 15546 - DNA, 22 bp, synthetic construct
  misc_feature 1..22: note = chemically synthesized
  source 1..22: mol_type = other DNA
tcgcaatgtctgtccatcagaa

SEQ ID NO: 15547 - DNA, 22 bp, synthetic construct
  misc_feature 1..22: note = chemically synthesized
  source 1..22: mol_type = other DNA
gcaatgtctgtccatcagaagt

SEQ ID NO: 15548 - DNA, 22 bp, synthetic construct
  misc_feature 1..22: note = chemically synthesized
  source 1..22: mol_type = other DNA
tccatcagaagttgctttcccc

SEQ ID NO: 15549 - DNA, 22 bp, synthetic construct
  misc_feature 1..22: note = chemically synthesized
  source 1..22: mol_type = other DNA
ctttccccaggctattcaggaa

SEQ ID NO: 15550 - DNA, 22 bp, synthetic construct
  misc_feature 1..22: note = chemically synthesized
  source 1..22: mol_type = other DNA
tccccaggctattcaggaagcc

SEQ ID NO: 15551 - DNA, 22 bp, synthetic construct
  misc_feature 1..22: note = chemically synthesized
  source 1..22: mol_type = other DNA
ccccaggctattcaggaagcca

SEQ ID NO: 15552 - DNA, 22 bp, synthetic construct
  misc_feature 1..22: note = chemically synthesized
  source 1..22: mol_type = other DNA
cccaggctattcaggaagccac

SEQ ID NO: 15553 - DNA, 22 bp, synthetic construct
  misc_feature 1..22: note = chemically synthesized
  source 1..22: mol_type = other DNA
ttcaggaagccacgggctactc

SEQ ID NO: 15554 - DNA, 22 bp, synthetic construct
  misc_feature 1..22: note = chemically synthesized
  source 1..22: mol_type = other DNA
aggaagccacgggctactcatg

SEQ ID NO: 15555 - DNA, 22 bp, synthetic construct
  misc_feature 1..22: note = chemically synthesized
  source 1..22: mol_type = other DNA
ctcatgcttccaacccctctct

SEQ ID NO: 15556 - DNA, 22 bp, synthetic construct
  misc_feature 1..22: note = chemically synthesized
  source 1..22: mol_type = other DNA
atgcttccaacccctctctctg

SEQ ID NO: 15557 - DNA, 22 bp, synthetic construct
  misc_feature 1..22: note = chemically synthesized
  source 1..22: mol_type = other DNA
ccaacccctctctctgactttg

SEQ ID NO: 15558 - DNA, 22 bp, synthetic construct
  misc_feature 1..22: note = chemically synthesized
  source 1..22: mol_type = other DNA
caacccctctctctgactttgg

SEQ ID NO: 15559 - DNA, 22 bp, synthetic construct
  misc_feature 1..22: note = chemically synthesized
  source 1..22: mol_type = other DNA
tctctgactttggatcatctac

SEQ ID NO: 15560 - DNA, 22 bp, synthetic construct
  misc_feature 1..22: note = chemically synthesized
  source 1..22: mol_type = other DNA
tctgactttggatcatctacat

SEQ ID NO: 15561 - DNA, 22 bp, synthetic construct
  misc_feature 1..22: note = chemically synthesized
  source 1..22: mol_type = other DNA
tgactttggatcatctacataa

SEQ ID NO: 15562 - DNA, 22 bp, synthetic construct
  misc_feature 1..22: note = chemically synthesized
  source 1..22: mol_type = other DNA
actttggatcatctacataaag

SEQ ID NO: 15563 - DNA, 22 bp, synthetic construct
  misc_feature 1..22: note = chemically synthesized
  source 1..22: mol_type = other DNA
tggatcatctacataaaggggg

SEQ ID NO: 15564 - DNA, 22 bp, synthetic construct
  misc_feature 1..22: note = chemically synthesized
  source 1..22: mol_type = other DNA
ggatcatctacataaaggggga

SEQ ID NO: 15565 - DNA, 22 bp, synthetic construct
  misc_feature 1..22: note = chemically synthesized
  source 1..22: mol_type = other DNA
gatcatctacataaagggggaa

SEQ ID NO: 15566 - DNA, 22 bp, synthetic construct
  misc_feature 1..22: note = chemically synthesized
  source 1..22: mol_type = other DNA
cataaagggggaagacagaaaa

SEQ ID NO: 15567 - DNA, 22 bp, synthetic construct
  misc_feature 1..22: note = chemically synthesized
  source 1..22: mol_type = other DNA
ccagtgagttgaaaatacagga

SEQ ID NO: 15568 - DNA, 22 bp, synthetic construct
  misc_feature 1..22: note = chemically synthesized
  source 1..22: mol_type = other DNA
aaaatacaggaaagcctatttc

SEQ ID NO: 15569 - DNA, 22 bp, synthetic construct
  misc_feature 1..22: note = chemically synthesized
  source 1..22: mol_type = other DNA
tttcatatgggttaaagggtag

SEQ ID NO: 15570 - DNA, 22 bp, synthetic construct
  misc_feature 1..22: note = chemically synthesized
  source 1..22: mol_type = other DNA
catatgggttaaagggtaggac

SEQ ID NO: 15571 - DNA, 22 bp, synthetic construct
  misc_feature 1..22: note = chemically synthesized
  source 1..22: mol_type = other DNA
atatgggttaaagggtaggaca

SEQ ID NO: 15572 - DNA, 22 bp, synthetic construct
  misc_feature 1..22: note = chemically synthesized
  source 1..22: mol_type = other DNA
aagggtaggacagttgaatttc

SEQ ID NO: 15573 - DNA, 22 bp, synthetic construct
  misc_feature 1..22: note = chemically synthesized
  source 1..22: mol_type = other DNA
aatttcgtgaaaagtctgagtt

SEQ ID NO: 15574 - DNA, 22 bp, synthetic construct
  misc_feature 1..22: note = chemically synthesized
  source 1..22: mol_type = other DNA
cgtgaaaagtctgagttatata

SEQ ID NO: 15575 - DNA, 22 bp, synthetic construct
  misc_feature 1..22: note = chemically synthesized
  source 1..22: mol_type = other DNA
gtgaaaagtctgagttatatag

SEQ ID NO: 15576 - DNA, 22 bp, synthetic construct
  misc_feature 1..22: note = chemically synthesized
  source 1..22: mol_type = other DNA
agttatataggctttgagcaaa

SEQ ID NO: 15577 - DNA, 22 bp, synthetic construct
  misc_feature 1..22: note = chemically synthesized
  source 1..22: mol_type = other DNA
tataggctttgagcaaagagtt

SEQ ID NO: 15578 - DNA, 22 bp, synthetic construct
  misc_feature 1..22: note = chemically synthesized
  source 1..22: mol_type = other DNA
tgagcaaagagttttattagta

SEQ ID NO: 15579 - DNA, 22 bp, synthetic construct
  misc_feature 1..22: note = chemically synthesized
  source 1..22: mol_type = other DNA
gagcaaagagttttattagtat

SEQ ID NO: 15580 - DNA, 22 bp, synthetic construct
  misc_feature 1..22: note = chemically synthesized
  source 1..22: mol_type = other DNA
agcaaagagttttattagtatg

SEQ ID NO: 15581 - DNA, 22 bp, synthetic construct
  misc_feature 1..22: note = chemically synthesized
  source 1..22: mol_type = other DNA
tattagtatgaagcagaagagg

SEQ ID NO: 15582 - DNA, 22 bp, synthetic construct
  misc_feature 1..22: note = chemically synthesized
  source 1..22: mol_type = other DNA
attagtatgaagcagaagaggt

SEQ ID NO: 15583 - DNA, 22 bp, synthetic construct
  misc_feature 1..22: note = chemically synthesized
  source 1..22: mol_type = other DNA
ttagtatgaagcagaagaggta

SEQ ID NO: 15584 - DNA, 22 bp, synthetic construct
  misc_feature 1..22: note = chemically synthesized
  source 1..22: mol_type = other DNA
gtatgaagcagaagaggtaaca

SEQ ID NO: 15585 - DNA, 22 bp, synthetic construct
  misc_feature 1..22: note = chemically synthesized
  source 1..22: mol_type = other DNA
acacctgtaatcccagcacttt

SEQ ID NO: 15586 - DNA, 22 bp, synthetic construct
  misc_feature 1..22: note = chemically synthesized
  source 1..22: mol_type = other DNA
taatcccagcactttgggaggc

SEQ ID NO: 15587 - DNA, 22 bp, synthetic construct
  misc_feature 1..22: note = chemically synthesized
  source 1..22: mol_type = other DNA
tgggaggccgaggtgggcgaat

SEQ ID NO: 15588 - DNA, 22 bp, synthetic construct
  misc_feature 1..22: note = chemically synthesized
  source 1..22: mol_type = other DNA
gggaggccgaggtgggcgaatc

SEQ ID NO: 15589 - DNA, 22 bp, synthetic construct
  misc_feature 1..22: note = chemically synthesized
  source 1..22: mol_type = other DNA
ggaggccgaggtgggcgaatca

SEQ ID NO: 15590 - DNA, 22 bp, synthetic construct
  misc_feature 1..22: note = chemically synthesized
  source 1..22: mol_type = other DNA
ctgggtgaactcaggagttcaa

SEQ ID NO: 15591 - DNA, 22 bp, synthetic construct
  misc_feature 1..22: note = chemically synthesized
  source 1..22: mol_type = other DNA
ggtgaactcaggagttcaagac

SEQ ID NO: 15592 - DNA, 22 bp, synthetic construct
  misc_feature 1..22: note = chemically synthesized
  source 1..22: mol_type = other DNA
aggagttcaagaccagcctggg

SEQ ID NO: 15593 - DNA, 22 bp, synthetic construct
  misc_feature 1..22: note = chemically synthesized
  source 1..22: mol_type = other DNA
aagaccagcctgggcaacatgg

SEQ ID NO: 15594 - DNA, 22 bp, synthetic construct
  misc_feature 1..22: note = chemically synthesized
  source 1..22: mol_type = other DNA
ggcaacatggcgaaactccatc

SEQ ID NO: 15595 - DNA, 22 bp, synthetic construct
  misc_feature 1..22: note = chemically synthesized
  source 1..22: mol_type = other DNA
catctctacaaaaacattacga

SEQ ID NO: 15596 - DNA, 22 bp, synthetic construct
  misc_feature 1..22: note = chemically synthesized
  source 1..22: mol_type = other DNA
tacaaaaacattacgaaaatta

SEQ ID NO: 15597 - DNA, 22 bp, synthetic construct
  misc_feature 1..22: note = chemically synthesized
  source 1..22: mol_type = other DNA
caaaaacattacgaaaattagc

SEQ ID NO: 15598 - DNA, 22 bp, synthetic construct
  misc_feature 1..22: note = chemically synthesized
  source 1..22: mol_type = other DNA
cgaaaattagctgggcgtgttg

SEQ ID NO: 15599 - DNA, 22 bp, synthetic construct
  misc_feature 1..22: note = chemically synthesized
  source 1..22: mol_type = other DNA
gctgggcgtgttggtgctgtag

SEQ ID NO: 15600 - DNA, 22 bp, synthetic construct
  misc_feature 1..22: note = chemically synthesized
  source 1..22: mol_type = other DNA
ggcgtgttggtgctgtagtccc

SEQ ID NO: 15601 - DNA, 22 bp, synthetic construct
  misc_feature 1..22: note = chemically synthesized
  source 1..22: mol_type = other DNA
gtgctgtagtcccagctactca

SEQ ID NO: 15602 - DNA, 22 bp, synthetic construct
  misc_feature 1..22: note = chemically synthesized
  source 1..22: mol_type = other DNA
tagtcccagctactcaggaggc

SEQ ID NO: 15603 - DNA, 22 bp, synthetic construct
  misc_feature 1..22: note = chemically synthesized
  source 1..22: mol_type = other DNA
ctcaggaggctgaggtgagagg

SEQ ID NO: 15604 - DNA, 22 bp, synthetic construct
  misc_feature 1..22: note = chemically synthesized
  source 1..22: mol_type = other DNA
aggaggctgaggtgagaggcgg

SEQ ID NO: 15605 - DNA, 22 bp, synthetic construct
  misc_feature 1..22: note = chemically synthesized
  source 1..22: mol_type = other DNA
aggtgagaggcggaggaggttg

SEQ ID NO: 15606 - DNA, 22 bp, synthetic construct
  misc_feature 1..22: note = chemically synthesized
  source 1..22: mol_type = other DNA
cagtgagtcaagatcatgccac

SEQ ID NO: 15607 - DNA, 22 bp, synthetic construct
  misc_feature 1..22: note = chemically synthesized
  source 1..22: mol_type = other DNA
cactccagcctgggcaacagag

SEQ ID NO: 15608 - DNA, 22 bp, synthetic construct
  misc_feature 1..22: note = chemically synthesized
  source 1..22: mol_type = other DNA
cagcctgggcaacagagtaaga

SEQ ID NO: 15609 - DNA, 22 bp, synthetic construct
  misc_feature 1..22: note = chemically synthesized
  source 1..22: mol_type = other DNA
ggcaacagagtaagaccctgtc

SEQ ID NO: 15610 - DNA, 22 bp, synthetic construct
  misc_feature 1..22: note = chemically synthesized
  source 1..22: mol_type = other DNA
tctcaaaaaaaaaaaaaagata

SEQ ID NO: 15611 - DNA, 22 bp, synthetic construct
  misc_feature 1..22: note = chemically synthesized
  source 1..22: mol_type = other DNA
aaaaaaaaaaaaaagatagatg

SEQ ID NO: 15612 - DNA, 22 bp, synthetic construct
  misc_feature 1..22: note = chemically synthesized
  source 1..22: mol_type = other DNA
tatgaaaaaaggaaacacacag

SEQ ID NO: 15613 - DNA, 22 bp, synthetic construct
  misc_feature 1..22: note = chemically synthesized
  source 1..22: mol_type = other DNA
aacagcctgttttgtggggtaa

SEQ ID NO: 15614 - DNA, 22 bp, synthetic construct
  misc_feature 1..22: note = chemically synthesized
  source 1..22: mol_type = other DNA
ttttgtggggtaatgaaaagtc

SEQ ID NO: 15615 - DNA, 22 bp, synthetic construct
  misc_feature 1..22: note = chemically synthesized
  source 1..22: mol_type = other DNA
tgtggggtaatgaaaagtcacc

SEQ ID NO: 15616 - DNA, 22 bp, synthetic construct
  misc_feature 1..22: note = chemically synthesized
  source 1..22: mol_type = other DNA
gtggggtaatgaaaagtcaccc

SEQ ID NO: 15617 - DNA, 22 bp, synthetic construct
  misc_feature 1..22: note = chemically synthesized
  source 1..22: mol_type = other DNA
tggggtaatgaaaagtcaccct

SEQ ID NO: 15618 - DNA, 22 bp, synthetic construct
  misc_feature 1..22: note = chemically synthesized
  source 1..22: mol_type = other DNA
ggaactgggctccagccctcgt

SEQ ID NO: 15619 - DNA, 22 bp, synthetic construct
  misc_feature 1..22: note = chemically synthesized
  source 1..22: mol_type = other DNA
ggctccagccctcgttctgcca

SEQ ID NO: 15620 - DNA, 22 bp, synthetic construct
  misc_feature 1..22: note = chemically synthesized
  source 1..22: mol_type = other DNA
cagccctcgttctgccacccac

SEQ ID NO: 15621 - DNA, 22 bp, synthetic construct
  misc_feature 1..22: note = chemically synthesized
  source 1..22: mol_type = other DNA
gttctgccacccaccaactaca

SEQ ID NO: 15622 - DNA, 22 bp, synthetic construct
  misc_feature 1..22: note = chemically synthesized
  source 1..22: mol_type = other DNA
tgccacccaccaactacatgtc

SEQ ID NO: 15623 - DNA, 22 bp, synthetic construct
  misc_feature 1..22: note = chemically synthesized
  source 1..22: mol_type = other DNA
ccacccaccaactacatgtcct

SEQ ID NO: 15624 - DNA, 22 bp, synthetic construct
  misc_feature 1..22: note = chemically synthesized
  source 1..22: mol_type = other DNA
catgtccttggcaagtcatatc

SEQ ID NO: 15625 - DNA, 22 bp, synthetic construct
  misc_feature 1..22: note = chemically synthesized
  source 1..22: mol_type = other DNA
ggcaagtcatatcaattatctg

SEQ ID NO: 15626 - DNA, 22 bp, synthetic construct
  misc_feature 1..22: note = chemically synthesized
  source 1..22: mol_type = other DNA
gcaagtcatatcaattatctga

SEQ ID NO: 15627 - DNA, 22 bp, synthetic construct
  misc_feature 1..22: note = chemically synthesized
  source 1..22: mol_type = other DNA
tctgagtttctgttttataatc

SEQ ID NO: 15628 - DNA, 22 bp, synthetic construct
  misc_feature 1..22: note = chemically synthesized
  source 1..22: mol_type = other DNA
agtttctgttttataatctaca

SEQ ID NO: 15629 - DNA, 22 bp, synthetic construct
  misc_feature 1..22: note = chemically synthesized
  source 1..22: mol_type = other DNA
ctgttttataatctacaaatag

SEQ ID NO: 15630 - DNA, 22 bp, synthetic construct
  misc_feature 1..22: note = chemically synthesized
  source 1..22: mol_type = other DNA
tgttttataatctacaaatagg

SEQ ID NO: 15631 - DNA, 22 bp, synthetic construct
  misc_feature 1..22: note = chemically synthesized
  source 1..22: mol_type = other DNA
ttttataatctacaaataggtt

SEQ ID NO: 15632 - DNA, 22 bp, synthetic construct
  misc_feature 1..22: note = chemically synthesized
  source 1..22: mol_type = other DNA
tataatctacaaataggttatc

SEQ ID NO: 15633 - DNA, 22 bp, synthetic construct
  misc_feature 1..22: note = chemically synthesized
  source 1..22: mol_type = other DNA
ataatctacaaataggttatct

SEQ ID NO: 15634 - DNA, 22 bp, synthetic construct
  misc_feature 1..22: note = chemically synthesized
  source 1..22: mol_type = other DNA
taatctacaaataggttatctc

SEQ ID NO: 15635 - DNA, 22 bp, synthetic construct
  misc_feature 1..22: note = chemically synthesized
  source 1..22: mol_type = other DNA
caaataggttatctctggcagc

SEQ ID NO: 15636 - DNA, 22 bp, synthetic construct
  misc_feature 1..22: note = chemically synthesized
  source 1..22: mol_type = other DNA
tctctggcagcttaataataat

SEQ ID NO: 15637 - DNA, 22 bp, synthetic construct
  misc_feature 1..22: note = chemically synthesized
  source 1..22: mol_type = other DNA
tggcagcttaataataatcagg

SEQ ID NO: 15638 - DNA, 22 bp, synthetic construct
  misc_feature 1..22: note = chemically synthesized
  source 1..22: mol_type = other DNA
gcagcttaataataatcagggt

SEQ ID NO: 15639 - DNA, 22 bp, synthetic construct
  misc_feature 1..22: note = chemically synthesized
  source 1..22: mol_type = other DNA
aataataatcagggttaacatt

SEQ ID NO: 15640 - DNA, 22 bp, synthetic construct
  misc_feature 1..22: note = chemically synthesized
  source 1..22: mol_type = other DNA
ataataatcagggttaacattt

SEQ ID NO: 15641 - DNA, 22 bp, synthetic construct
  misc_feature 1..22: note = chemically synthesized
  source 1..22: mol_type = other DNA
acatttattaaacagtgtgtgc

SEQ ID NO: 15642 - DNA, 22 bp, synthetic construct
  misc_feature 1..22: note = chemically synthesized
  source 1..22: mol_type = other DNA
attaaacagtgtgtgccagtcc

SEQ ID NO: 15643 - DNA, 22 bp, synthetic construct
  misc_feature 1..22: note = chemically synthesized
  source 1..22: mol_type = other DNA
ttaaacagtgtgtgccagtcca

SEQ ID NO: 15644 - DNA, 22 bp, synthetic construct
  misc_feature 1..22: note = chemically synthesized
  source 1..22: mol_type = other DNA
aacagtgtgtgccagtccatgt

SEQ ID NO: 15645 - DNA, 22 bp, synthetic construct
  misc_feature 1..22: note = chemically synthesized
  source 1..22: mol_type = other DNA
tgtgcttttctgtgaggtagtt

SEQ ID NO: 15646 - DNA, 22 bp, synthetic construct
  misc_feature 1..22: note = chemically synthesized
  source 1..22: mol_type = other DNA
ttctgtgaggtagttactgcta

SEQ ID NO: 15647 - DNA, 22 bp, synthetic construct
  misc_feature 1..22: note = chemically synthesized
  source 1..22: mol_type = other DNA
tctgtgaggtagttactgctat

SEQ ID NO: 15648 - DNA, 22 bp, synthetic construct
  misc_feature 1..22: note = chemically synthesized
  source 1..22: mol_type = other DNA
ctgtgaggtagttactgctatt

SEQ ID NO: 15649 - DNA, 22 bp, synthetic construct
  misc_feature 1..22: note = chemically synthesized
  source 1..22: mol_type = other DNA
tgtgaggtagttactgctattt

SEQ ID NO: 15650 - DNA, 22 bp, synthetic construct
  misc_feature 1..22: note = chemically synthesized
  source 1..22: mol_type = other DNA
tgaggtagttactgctatttac

SEQ ID NO: 15651 - DNA, 22 bp, synthetic construct
  misc_feature 1..22: note = chemically synthesized
  source 1..22: mol_type = other DNA
ctgctatttacagaaacagtag

SEQ ID NO: 15652 - DNA, 22 bp, synthetic construct
  misc_feature 1..22: note = chemically synthesized
  source 1..22: mol_type = other DNA
ctatttacagaaacagtagatg

SEQ ID NO: 15653 - DNA, 22 bp, synthetic construct
  misc_feature 1..22: note = chemically synthesized
  source 1..22: mol_type = other DNA
tttacagaaacagtagatgcag

SEQ ID NO: 15654 - DNA, 22 bp, synthetic construct
  misc_feature 1..22: note = chemically synthesized
  source 1..22: mol_type = other DNA
acagaaacagtagatgcagaga

SEQ ID NO: 15655 - DNA, 22 bp, synthetic construct
  misc_feature 1..22: note = chemically synthesized
  source 1..22: mol_type = other DNA
cagaaacagtagatgcagagac

SEQ ID NO: 15656 - DNA, 22 bp, synthetic construct
  misc_feature 1..22: note = chemically synthesized
  source 1..22: mol_type = other DNA
agttaaatgattaggccaacaa

SEQ ID NO: 15657 - DNA, 22 bp, synthetic construct
  misc_feature 1..22: note = chemically synthesized
  source 1..22: mol_type = other DNA
aatgattaggccaacaaggtta

SEQ ID NO: 15658 - DNA, 22 bp, synthetic construct
  misc_feature 1..22: note = chemically synthesized
  source 1..22: mol_type = other DNA
ggccaacaaggttagtacatgc

SEQ ID NO: 15659 - DNA, 22 bp, synthetic construct
  misc_feature 1..22: note = chemically synthesized
  source 1..22: mol_type = other DNA
gtacatgccgagccaggatgga

SEQ ID NO: 15660 - DNA, 22 bp, synthetic construct
  misc_feature 1..22: note = chemically synthesized
  source 1..22: mol_type = other DNA
gcttccgcggcaatgctcttat

SEQ ID NO: 15661 - DNA, 22 bp, synthetic construct
  misc_feature 1..22: note = chemically synthesized
  source 1..22: mol_type = other DNA
ccgcggcaatgctcttatgaac

SEQ ID NO: 15662 - DNA, 22 bp, synthetic construct
  misc_feature 1..22: note = chemically synthesized
  source 1..22: mol_type = other DNA
cgcggcaatgctcttatgaact

SEQ ID NO: 15663 - DNA, 22 bp, synthetic construct
  misc_feature 1..22: note = chemically synthesized
  source 1..22: mol_type = other DNA
ttatgaactatgttacgtccag

SEQ ID NO: 15664 - DNA, 22 bp, synthetic construct
  misc_feature 1..22: note = chemically synthesized
  source 1..22: mol_type = other DNA
atgaactatgttacgtccagtg

SEQ ID NO: 15665 - DNA, 22 bp, synthetic construct
  misc_feature 1..22: note = chemically synthesized
  source 1..22: mol_type = other DNA
tgaactatgttacgtccagtgc

SEQ ID NO: 15666 - DNA, 22 bp, synthetic construct
  misc_feature 1..22: note = chemically synthesized
  source 1..22: mol_type = other DNA
tgttacgtccagtgctgataaa

SEQ ID NO: 15667 - DNA, 22 bp, synthetic construct
  misc_feature 1..22: note = chemically synthesized
  source 1..22: mol_type = other DNA
cgtccagtgctgataaactgac

SEQ ID NO: 15668 - DNA, 22 bp, synthetic construct
  misc_feature 1..22: note = chemically synthesized
  source 1..22: mol_type = other DNA
ataaactgactctctggggagc

SEQ ID NO: 15669 - DNA, 22 bp, synthetic construct
  misc_feature 1..22: note = chemically synthesized
  source 1..22: mol_type = other DNA
actctctggggagcaggggaaa

SEQ ID NO: 15670 - DNA, 22 bp, synthetic construct
  misc_feature 1..22: note = chemically synthesized
  source 1..22: mol_type = other DNA
tctggggagcaggggaaagccc

SEQ ID NO: 15671 - DNA, 22 bp, synthetic construct
  misc_feature 1..22: note = chemically synthesized
  source 1..22: mol_type = other DNA
tggggagcaggggaaagccctg

SEQ ID NO: 15672 - DNA, 22 bp, synthetic construct
  misc_feature 1..22: note = chemically synthesized
  source 1..22: mol_type = other DNA
gggagcaggggaaagccctgag

SEQ ID NO: 15673 - DNA, 22 bp, synthetic construct
  misc_feature 1..22: note = chemically synthesized
  source 1..22: mol_type = other DNA
agtttagcatttgccaatttct

SEQ ID NO: 15674 - DNA, 22 bp, synthetic construct
  misc_feature 1..22: note = chemically synthesized
  source 1..22: mol_type = other DNA
agcatttgccaatttctatcac

SEQ ID NO: 15675 - DNA, 22 bp, synthetic construct
  misc_feature 1..22: note = chemically synthesized
  source 1..22: mol_type = other DNA
gcatttgccaatttctatcacg

SEQ ID NO: 15676 - DNA, 22 bp, synthetic construct
  misc_feature 1..22: note = chemically synthesized
  source 1..22: mol_type = other DNA
gccaatttctatcacgtaaaca

SEQ ID NO: 15677 - DNA, 22 bp, synthetic construct
  misc_feature 1..22: note = chemically synthesized
  source 1..22: mol_type = other DNA
ccaatttctatcacgtaaacat

SEQ ID NO: 15678 - DNA, 22 bp, synthetic construct
  misc_feature 1..22: note = chemically synthesized
  source 1..22: mol_type = other DNA
ctatcacgtaaacattcccatt

SEQ ID NO: 15679 - DNA, 22 bp, synthetic construct
  misc_feature 1..22: note = chemically synthesized
  source 1..22: mol_type = other DNA
tatcacgtaaacattcccattc

SEQ ID NO: 15680 - DNA, 22 bp, synthetic construct
  misc_feature 1..22: note = chemically synthesized
  source 1..22: mol_type = other DNA
tcacgtaaacattcccattctg

SEQ ID NO: 15681 - DNA, 22 bp, synthetic construct
  misc_feature 1..22: note = chemically synthesized
  source 1..22: mol_type = other DNA
ccattctggccactttctttct

SEQ ID NO: 15682 - DNA, 22 bp, synthetic construct
  misc_feature 1..22: note = chemically synthesized
  source 1..22: mol_type = other DNA
tggccactttctttctttcttt

SEQ ID NO: 15683 - DNA, 22 bp, synthetic construct
  misc_feature 1..22: note = chemically synthesized
  source 1..22: mol_type = other DNA
gccactttctttctttctttct

SEQ ID NO: 15684 - DNA, 22 bp, synthetic construct
  misc_feature 1..22: note = chemically synthesized
  source 1..22: mol_type = other DNA
tctttctttctttcttttgttt

SEQ ID NO: 15685 - DNA, 22 bp, synthetic construct
  misc_feature 1..22: note = chemically synthesized
  source 1..22: mol_type = other DNA
ctttctttctttcttttgtttg

SEQ ID NO: 15686 - DNA, 22 bp, synthetic construct
  misc_feature 1..22: note = chemically synthesized
  source 1..22: mol_type = other DNA
tttctttctttcttttgtttgt

SEQ ID NO: 15687 - DNA, 22 bp, synthetic construct
  misc_feature 1..22: note = chemically synthesized
  source 1..22: mol_type = other DNA
tctttctttcttttgtttgttt

SEQ ID NO: 15688 - DNA, 22 bp, synthetic construct
  misc_feature 1..22: note = chemically synthesized
  source 1..22: mol_type = other DNA
ctttctttcttttgtttgtttg

SEQ ID NO: 15689 - DNA, 22 bp, synthetic construct
  misc_feature 1..22: note = chemically synthesized
  source 1..22: mol_type = other DNA
tttctttcttttgtttgtttgt

SEQ ID NO: 15690 - DNA, 22 bp, synthetic construct
  misc_feature 1..22: note = chemically synthesized
  source 1..22: mol_type = other DNA
tctttcttttgtttgtttgttt

SEQ ID NO: 15691 - DNA, 22 bp, synthetic construct
  misc_feature 1..22: note = chemically synthesized
  source 1..22: mol_type = other DNA
ctttcttttgtttgtttgtttg

SEQ ID NO: 15692 - DNA, 22 bp, synthetic construct
  misc_feature 1..22: note = chemically synthesized
  source 1..22: mol_type = other DNA
tttcttttgtttgtttgtttga

SEQ ID NO: 15693 - DNA, 22 bp, synthetic construct
  misc_feature 1..22: note = chemically synthesized
  source 1..22: mol_type = other DNA
tcttttgtttgtttgtttgaga

SEQ ID NO: 15694 - DNA, 22 bp, synthetic construct
  misc_feature 1..22: note = chemically synthesized
  source 1..22: mol_type = other DNA
cttttgtttgtttgtttgagat

SEQ ID NO: 15695 - DNA, 22 bp, synthetic construct
  misc_feature 1..22: note = chemically synthesized
  source 1..22: mol_type = other DNA
ttttgtttgtttgtttgagatg

SEQ ID NO: 15696 - DNA, 22 bp, synthetic construct
  misc_feature 1..22: note = chemically synthesized
  source 1..22: mol_type = other DNA
ttgtttgtttgtttgagatgga

SEQ ID NO: 15697 - DNA, 22 bp, synthetic construct
  misc_feature 1..22: note = chemically synthesized
  source 1..22: mol_type = other DNA
tgtttgtttgtttgagatggag

SEQ ID NO: 15698 - DNA, 22 bp, synthetic construct
  misc_feature 1..22: note = chemically synthesized
  source 1..22: mol_type = other DNA
gtttgtttgtttgagatggagt

SEQ ID NO: 15699 - DNA, 22 bp, synthetic construct
  misc_feature 1..22: note = chemically synthesized
  source 1..22: mol_type = other DNA
tttgtttgtttgagatggagtc

SEQ ID NO: 15700 - DNA, 22 bp, synthetic construct
  misc_feature 1..22: note = chemically synthesized
  source 1..22: mol_type = other DNA
gtttgtttgagatggagtctcg

SEQ ID NO: 15701 - DNA, 22 bp, synthetic construct
  misc_feature 1..22: note = chemically synthesized
  source 1..22: mol_type = other DNA
tttgtttgagatggagtctcgc

SEQ ID NO: 15702 - DNA, 22 bp, synthetic construct
  misc_feature 1..22: note = chemically synthesized
  source 1..22: mol_type = other DNA
gtttgagatggagtctcgcact

SEQ ID NO: 15703 - DNA, 22 bp, synthetic construct
  misc_feature 1..22: note = chemically synthesized
  source 1..22: mol_type = other DNA
tttgagatggagtctcgcactg

SEQ ID NO: 15704 - DNA, 22 bp, synthetic construct
  misc_feature 1..22: note = chemically synthesized
  source 1..22: mol_type = other DNA
gagatggagtctcgcactgttg

SEQ ID NO: 15705 - DNA, 22 bp, synthetic construct
  misc_feature 1..22: note = chemically synthesized
  source 1..22: mol_type = other DNA
agatggagtctcgcactgttgc

SEQ ID NO: 15706 - DNA, 22 bp, synthetic construct
  misc_feature 1..22: note = chemically synthesized
  source 1..22: mol_type = other DNA
gcactgttgcctggctggagtg

SEQ ID NO: 15707 - DNA, 22 bp, synthetic construct
  misc_feature 1..22: note = chemically synthesized
  source 1..22: mol_type = other DNA
ttgcctggctggagtgcaatgg

SEQ ID NO: 15708 - DNA, 22 bp, synthetic construct
  misc_feature 1..22: note = chemically synthesized
  source 1..22: mol_type = other DNA
cctggctggagtgcaatggtgc

SEQ ID NO: 15709 - DNA, 22 bp, synthetic construct
  misc_feature 1..22: note = chemically synthesized
  source 1..22: mol_type = other DNA
gctggagtgcaatggtgcaatc

SEQ ID NO: 15710 - DNA, 22 bp, synthetic construct
  misc_feature 1..22: note = chemically synthesized
  source 1..22: mol_type = other DNA
gagtgcaatggtgcaatctcag

SEQ ID NO: 15711 - DNA, 22 bp, synthetic construct
  misc_feature 1..22: note = chemically synthesized
  source 1..22: mol_type = other DNA
agctcactgcaacctctgcctc

SEQ ID NO: 15712 - DNA, 22 bp, synthetic construct
  misc_feature 1..22: note = chemically synthesized
  source 1..22: mol_type = other DNA
actgcaacctctgcctctccgg

SEQ ID NO: 15713 - DNA, 22 bp, synthetic construct
  misc_feature 1..22: note = chemically synthesized
  source 1..22: mol_type = other DNA
caacctctgcctctccggttca

SEQ ID NO: 15714 - DNA, 22 bp, synthetic construct
  misc_feature 1..22: note = chemically synthesized
  source 1..22: mol_type = other DNA
tgcctctccggttcaagtgatt

SEQ ID NO: 15715 - DNA, 22 bp, synthetic construct
  misc_feature 1..22: note = chemically synthesized
  source 1..22: mol_type = other DNA
cctctccggttcaagtgattct

SEQ ID NO: 15716 - DNA, 22 bp, synthetic construct
  misc_feature 1..22: note = chemically synthesized
  source 1..22: mol_type = other DNA
tccggttcaagtgattctcctg

SEQ ID NO: 15717 - DNA, 22 bp, synthetic construct
  misc_feature 1..22: note = chemically synthesized
  source 1..22: mol_type = other DNA
cggttcaagtgattctcctgcc

SEQ ID NO: 15718 - DNA, 22 bp, synthetic construct
  misc_feature 1..22: note = chemically synthesized
  source 1..22: mol_type = other DNA
aagtgattctcctgcctcagcc

SEQ ID NO: 15719 - DNA, 22 bp, synthetic construct
  misc_feature 1..22: note = chemically synthesized
  source 1..22: mol_type = other DNA
tcctgcctcagcctcccaagta

SEQ ID NO: 15720 - DNA, 22 bp, synthetic construct
  misc_feature 1..22: note = chemically synthesized
  source 1..22: mol_type = other DNA
ctgcctcagcctcccaagtagc

SEQ ID NO: 15721 - DNA, 22 bp, synthetic construct
  misc_feature 1..22: note = chemically synthesized
  source 1..22: mol_type = other DNA
cctcagcctcccaagtagctgg

SEQ ID NO: 15722 - DNA, 22 bp, synthetic construct
  misc_feature 1..22: note = chemically synthesized
  source 1..22: mol_type = other DNA
agcctcccaagtagctgggatt

SEQ ID NO: 15723 - DNA, 22 bp, synthetic construct
  misc_feature 1..22: note = chemically synthesized
  source 1..22: mol_type = other DNA
ccaagtagctgggattacaggt

SEQ ID NO: 15724 - DNA, 22 bp, synthetic construct
  misc_feature 1..22: note = chemically synthesized
  source 1..22: mol_type = other DNA
ggattacaggtgcccgccacca

SEQ ID NO: 15725 - DNA, 22 bp, synthetic construct
  misc_feature 1..22: note = chemically synthesized
  source 1..22: mol_type = other DNA
caggtgcccgccaccatgccca

SEQ ID NO: 15726 - DNA, 22 bp, synthetic construct
  misc_feature 1..22: note = chemically synthesized
  source 1..22: mol_type = other DNA
attttttttgtatttttagtag

SEQ ID NO: 15727 - DNA, 22 bp, synthetic construct
  misc_feature 1..22: note = chemically synthesized
  source 1..22: mol_type = other DNA
tttttgtatttttagtagagac

SEQ ID NO: 15728 - DNA, 22 bp, synthetic construct
  misc_feature 1..22: note = chemically synthesized
  source 1..22: mol_type = other DNA
ttttgtatttttagtagagaca

SEQ ID NO: 15729 - DNA, 22 bp, synthetic construct
  misc_feature 1..22: note = chemically synthesized
  source 1..22: mol_type = other DNA
tttgtatttttagtagagacat

SEQ ID NO: 15730 - DNA, 22 bp, synthetic construct
  misc_feature 1..22: note = chemically synthesized
  source 1..22: mol_type = other DNA
ttgtatttttagtagagacatg

SEQ ID NO: 15731 - DNA, 22 bp, synthetic construct
  misc_feature 1..22: note = chemically synthesized
  source 1..22: mol_type = other DNA
tgtatttttagtagagacatgg

SEQ ID NO: 15732 - DNA, 22 bp, synthetic construct
  misc_feature 1..22: note = chemically synthesized
  source 1..22: mol_type = other DNA
gtatttttagtagagacatggt

SEQ ID NO: 15733 - DNA, 22 bp, synthetic construct
  misc_feature 1..22: note = chemically synthesized
  source 1..22: mol_type = other DNA
tatttttagtagagacatggtt

SEQ ID NO: 15734 - DNA, 22 bp, synthetic construct
  misc_feature 1..22: note = chemically synthesized
  source 1..22: mol_type = other DNA
ttagtagagacatggtttcact

SEQ ID NO: 15735 - DNA, 22 bp, synthetic construct
  misc_feature 1..22: note = chemically synthesized
  source 1..22: mol_type = other DNA
tagtagagacatggtttcacta

SEQ ID NO: 15736 - DNA, 22 bp, synthetic construct
  misc_feature 1..22: note = chemically synthesized
  source 1..22: mol_type = other DNA
agtagagacatggtttcactat

SEQ ID NO: 15737 - DNA, 22 bp, synthetic construct
  misc_feature 1..22: note = chemically synthesized
  source 1..22: mol_type = other DNA
gtagagacatggtttcactatg

SEQ ID NO: 15738 - DNA, 22 bp, synthetic construct
  misc_feature 1..22: note = chemically synthesized
  source 1..22: mol_type = other DNA
cactatgttgactaggctggtc

SEQ ID NO: 15739 - DNA, 22 bp, synthetic construct
  misc_feature 1..22: note = chemically synthesized
  source 1..22: mol_type = other DNA
actatgttgactaggctggtct

SEQ ID NO: 15740 - DNA, 22 bp, synthetic construct
  misc_feature 1..22: note = chemically synthesized
  source 1..22: mol_type = other DNA
tgttgactaggctggtctcgaa

SEQ ID NO: 15741 - DNA, 22 bp, synthetic construct
  misc_feature 1..22: note = chemically synthesized
  source 1..22: mol_type = other DNA
actaggctggtctcgaactcct

SEQ ID NO: 15742 - DNA, 22 bp, synthetic construct
  misc_feature 1..22: note = chemically synthesized
  source 1..22: mol_type = other DNA
ggctggtctcgaactcctgacc

SEQ ID NO: 15743 - DNA, 22 bp, synthetic construct
  misc_feature 1..22: note = chemically synthesized
  source 1..22: mol_type = other DNA
gtctcgaactcctgacctcatg

SEQ ID NO: 15744 - DNA, 22 bp, synthetic construct
  misc_feature 1..22: note = chemically synthesized
  source 1..22: mol_type = other DNA
gaactcctgacctcatgatctg

SEQ ID NO: 15745 - DNA, 22 bp, synthetic construct
  misc_feature 1..22: note = chemically synthesized
  source 1..22: mol_type = other DNA
ctgacctcatgatctgcctgcc

SEQ ID NO: 15746 - DNA, 22 bp, synthetic construct
  misc_feature 1..22: note = chemically synthesized
  source 1..22: mol_type = other DNA
acctcatgatctgcctgccttg

SEQ ID NO: 15747 - DNA, 22 bp, synthetic construct
  misc_feature 1..22: note = chemically synthesized
  source 1..22: mol_type = other DNA
atgatctgcctgccttggcctc

SEQ ID NO: 15748 - DNA, 22 bp, synthetic construct
  misc_feature 1..22: note = chemically synthesized
  source 1..22: mol_type = other DNA
cctgccttggcctccctaagtg

SEQ ID NO: 15749 - DNA, 22 bp, synthetic construct
  misc_feature 1..22: note = chemically synthesized
  source 1..22: mol_type = other DNA
ccttggcctccctaagtgctag

SEQ ID NO: 15750 - DNA, 22 bp, synthetic construct
  misc_feature 1..22: note = chemically synthesized
  source 1..22: mol_type = other DNA
ggcctccctaagtgctaggatt

SEQ ID NO: 15751 - DNA, 22 bp, synthetic construct
  misc_feature 1..22: note = chemically synthesized
  source 1..22: mol_type = other DNA
gcctccctaagtgctaggatta

SEQ ID NO: 15752 - DNA, 22 bp, synthetic construct
  misc_feature 1..22: note = chemically synthesized
  source 1..22: mol_type = other DNA
cctaagtgctaggattacaggc

SEQ ID NO: 15753 - DNA, 22 bp, synthetic construct
  misc_feature 1..22: note = chemically synthesized
  source 1..22: mol_type = other DNA
agtgctaggattacaggcgtga

SEQ ID NO: 15754 - DNA, 22 bp, synthetic construct
  misc_feature 1..22: note = chemically synthesized
  source 1..22: mol_type = other DNA
ggattacaggcgtgagccacta

SEQ ID NO: 15755 - DNA, 22 bp, synthetic construct
  misc_feature 1..22: note = chemically synthesized
  source 1..22: mol_type = other DNA
caggcgtgagccactacaccca

SEQ ID NO: 15756 - DNA, 22 bp, synthetic construct
  misc_feature 1..22: note = chemically synthesized
  source 1..22: mol_type = other DNA
cacccagccgcatgattctaaa

SEQ ID NO: 15757 - DNA, 22 bp, synthetic construct
  misc_feature 1..22: note = chemically synthesized
  source 1..22: mol_type = other DNA
taaaaaataaaaagatgaagtg

SEQ ID NO: 15758 - DNA, 22 bp, synthetic construct
  misc_feature 1..22: note = chemically synthesized
  source 1..22: mol_type = other DNA
aaaaataaaaagatgaagtgtt

SEQ ID NO: 15759 - DNA, 22 bp, synthetic construct
  misc_feature 1..22: note = chemically synthesized
  source 1..22: mol_type = other DNA
ttccaaacatctgatctccatt

SEQ ID NO: 15760 - DNA, 22 bp, synthetic construct
  misc_feature 1..22: note = chemically synthesized
  source 1..22: mol_type = other DNA
caaacatctgatctccattgaa

SEQ ID NO: 15761 - DNA, 22 bp, synthetic construct
  misc_feature 1..22: note = chemically synthesized
  source 1..22: mol_type = other DNA
atctccattgaagaaccatgca

SEQ ID NO: 15762 - DNA, 22 bp, synthetic construct
  misc_feature 1..22: note = chemically synthesized
  source 1..22: mol_type = other DNA
cattgaagaaccatgcaatctc

SEQ ID NO: 15763 - DNA, 22 bp, synthetic construct
  misc_feature 1..22: note = chemically synthesized
  source 1..22: mol_type = other DNA
aagaaccatgcaatctctctgg

SEQ ID NO: 15764 - DNA, 22 bp, synthetic construct
  misc_feature 1..22: note = chemically synthesized
  source 1..22: mol_type = other DNA
tctgggttgatagaggccagag

SEQ ID NO: 15765 - DNA, 22 bp, synthetic construct
  misc_feature 1..22: note = chemically synthesized
  source 1..22: mol_type = other DNA
tgggttgatagaggccagagtt

SEQ ID NO: 15766 - DNA, 22 bp, synthetic construct
  misc_feature 1..22: note = chemically synthesized
  source 1..22: mol_type = other DNA
ggttgatagaggccagagttag

SEQ ID NO: 15767 - DNA, 22 bp, synthetic construct
  misc_feature 1..22: note = chemically synthesized
  source 1..22: mol_type = other DNA
atagaggccagagttagtggct

SEQ ID NO: 15768 - DNA, 22 bp, synthetic construct
  misc_feature 1..22: note = chemically synthesized
  source 1..22: mol_type = other DNA
gtggctctccctgatttcggtg

SEQ ID NO: 15769 - DNA, 22 bp, synthetic construct
  misc_feature 1..22: note = chemically synthesized
  source 1..22: mol_type = other DNA
tccctgatttcggtgagaaatc

SEQ ID NO: 15770 - DNA, 22 bp, synthetic construct
  misc_feature 1..22: note = chemically synthesized
  source 1..22: mol_type = other DNA
cctgatttcggtgagaaatcac

SEQ ID NO: 15771 - DNA, 22 bp, synthetic construct
  misc_feature 1..22: note = chemically synthesized
  source 1..22: mol_type = other DNA
atttcggtgagaaatcactatt

SEQ ID NO: 15772 - DNA, 22 bp, synthetic construct
  misc_feature 1..22: note = chemically synthesized
  source 1..22: mol_type = other DNA
cggtgagaaatcactattccac

SEQ ID NO: 15773 - DNA, 22 bp, synthetic construct
  misc_feature 1..22: note = chemically synthesized
  source 1..22: mol_type = other DNA
ggtgagaaatcactattccacc

SEQ ID NO: 15774 - DNA, 22 bp, synthetic construct
  misc_feature 1..22: note = chemically synthesized
  source 1..22: mol_type = other DNA
ttccaccatcacgggataaaag

SEQ ID NO: 15775 - DNA, 22 bp, synthetic construct
  misc_feature 1..22: note = chemically synthesized
  source 1..22: mol_type = other DNA
caccatcacgggataaaaggca

SEQ ID NO: 15776 - DNA, 22 bp, synthetic construct
  misc_feature 1..22: note = chemically synthesized
  source 1..22: mol_type = other DNA
actggcggttgacacctatttc

SEQ ID NO: 15777 - DNA, 22 bp, synthetic construct
  misc_feature 1..22: note = chemically synthesized
  source 1..22: mol_type = other DNA
gcggttgacacctatttccaca

SEQ ID NO: 15778 - DNA, 22 bp, synthetic construct
  misc_feature 1..22: note = chemically synthesized
  source 1..22: mol_type = other DNA
acacctatttccacagtgaaag

SEQ ID NO: 15779 - DNA, 22 bp, synthetic construct
  misc_feature 1..22: note = chemically synthesized
  source 1..22: mol_type = other DNA
tttccacagtgaaagatatatc

SEQ ID NO: 15780 - DNA, 22 bp, synthetic construct
  misc_feature 1..22: note = chemically synthesized
  source 1..22: mol_type = other DNA
ccacagtgaaagatatatctag

SEQ ID NO: 15781 - DNA, 22 bp, synthetic construct
  misc_feature 1..22: note = chemically synthesized
  source 1..22: mol_type = other DNA
cacagtgaaagatatatctagt

SEQ ID NO: 15782 - DNA, 22 bp, synthetic construct
  misc_feature 1..22: note = chemically synthesized
  source 1..22: mol_type = other DNA
gtacttttaaaggggaagtggt

SEQ ID NO: 15783 - DNA, 22 bp, synthetic construct
  misc_feature 1..22: note = chemically synthesized
  source 1..22: mol_type = other DNA
ttaaaggggaagtggtttgtct

SEQ ID NO: 15784 - DNA, 22 bp, synthetic construct
  misc_feature 1..22: note = chemically synthesized
  source 1..22: mol_type = other DNA
taaaggggaagtggtttgtctg

SEQ ID NO: 15785 - DNA, 22 bp, synthetic construct
  misc_feature 1..22: note = chemically synthesized
  source 1..22: mol_type = other DNA
aaaggggaagtggtttgtctga

SEQ ID NO: 15786 - DNA, 22 bp, synthetic construct
  misc_feature 1..22: note = chemically synthesized
  source 1..22: mol_type = other DNA
aaggggaagtggtttgtctgag

SEQ ID NO: 15787 - DNA, 22 bp, synthetic construct
  misc_feature 1..22: note = chemically synthesized
  source 1..22: mol_type = other DNA
gtctgagatactctgtttcaaa

SEQ ID NO: 15788 - DNA, 22 bp, synthetic construct
  misc_feature 1..22: note = chemically synthesized
  source 1..22: mol_type = other DNA
tctgagatactctgtttcaaag

SEQ ID NO: 15789 - DNA, 22 bp, synthetic construct
  misc_feature 1..22: note = chemically synthesized
  source 1..22: mol_type = other DNA
agatactctgtttcaaagtaga

SEQ ID NO: 15790 - DNA, 22 bp, synthetic construct
  misc_feature 1..22: note = chemically synthesized
  source 1..22: mol_type = other DNA
tgtttcaaagtagagaggatac

SEQ ID NO: 15791 - DNA, 22 bp, synthetic construct
  misc_feature 1..22: note = chemically synthesized
  source 1..22: mol_type = other DNA
tttcaaagtagagaggatacag

SEQ ID NO: 15792 - DNA, 22 bp, synthetic construct
  misc_feature 1..22: note = chemically synthesized
  source 1..22: mol_type = other DNA
caaagtagagaggatacagaac

SEQ ID NO: 15793 - DNA, 22 bp, synthetic construct
  misc_feature 1..22: note = chemically synthesized
  source 1..22: mol_type = other DNA
aaagtagagaggatacagaaca

SEQ ID NO: 15794 - DNA, 22 bp, synthetic construct
  misc_feature 1..22: note = chemically synthesized
  source 1..22: mol_type = other DNA
aagctatatacatccttacaga

SEQ ID NO: 15795 - DNA, 22 bp, synthetic construct
  misc_feature 1..22: note = chemically synthesized
  source 1..22: mol_type = other DNA
tatacatccttacagagagcaa

SEQ ID NO: 15796 - DNA, 22 bp, synthetic construct
  misc_feature 1..22: note = chemically synthesized
  source 1..22: mol_type = other DNA
acagagagcaattctgatggaa

SEQ ID NO: 15797 - DNA, 22 bp, synthetic construct
  misc_feature 1..22: note = chemically synthesized
  source 1..22: mol_type = other DNA
cagagagcaattctgatggaaa

SEQ ID NO: 15798 - DNA, 22 bp, synthetic construct
  misc_feature 1..22: note = chemically synthesized
  source 1..22: mol_type = other DNA
tgatggaaatgcaggccatgtt

SEQ ID NO: 15799 - DNA, 22 bp, synthetic construct
  misc_feature 1..22: note = chemically synthesized
  source 1..22: mol_type = other DNA
atggaaatgcaggccatgtttc

SEQ ID NO: 15800 - DNA, 22 bp, synthetic construct
  misc_feature 1..22: note = chemically synthesized
  source 1..22: mol_type = other DNA
ccctggggggggctcgtcctag

SEQ ID NO: 15801 - DNA, 22 bp, synthetic construct
  misc_feature 1..22: note = chemically synthesized
  source 1..22: mol_type = other DNA
cctggggggggctcgtcctagg

SEQ ID NO: 15802 - DNA, 22 bp, synthetic construct
  misc_feature 1..22: note = chemically synthesized
  source 1..22: mol_type = other DNA
gggggggctcgtcctaggggct

SEQ ID NO: 15803 - DNA, 22 bp, synthetic construct
  misc_feature 1..22: note = chemically synthesized
  source 1..22: mol_type = other DNA
gtcctaggggctggagtgcatt

SEQ ID NO: 15804 - DNA, 22 bp, synthetic construct
  misc_feature 1..22: note = chemically synthesized
  source 1..22: mol_type = other DNA
ggggctggagtgcattctctga

SEQ ID NO: 15805 - DNA, 22 bp, synthetic construct
  misc_feature 1..22: note = chemically synthesized
  source 1..22: mol_type = other DNA
gagtgcattctctgatgtcaga

SEQ ID NO: 15806 - DNA, 22 bp, synthetic construct
  misc_feature 1..22: note = chemically synthesized
  source 1..22: mol_type = other DNA
tctgatgtcagaggaaatgcaa

SEQ ID NO: 15807 - DNA, 22 bp, synthetic construct
  misc_feature 1..22: note = chemically synthesized
  source 1..22: mol_type = other DNA
tgatgtcagaggaaatgcaaga

SEQ ID NO: 15808 - DNA, 22 bp, synthetic construct
  misc_feature 1..22: note = chemically synthesized
  source 1..22: mol_type = other DNA
atgtcagaggaaatgcaagatt

SEQ ID NO: 15809 - DNA, 22 bp, synthetic construct
  misc_feature 1..22: note = chemically synthesized
  source 1..22: mol_type = other DNA
cctgaggcctgagggaacccat

SEQ ID NO: 15810 - DNA, 22 bp, synthetic construct
  misc_feature 1..22: note = chemically synthesized
  source 1..22: mol_type = other DNA
aggcctgagggaacccatggta

SEQ ID NO: 15811 - DNA, 22 bp, synthetic construct
  misc_feature 1..22: note = chemically synthesized
  source 1..22: mol_type = other DNA
agggaacccatggtatatgcaa

SEQ ID NO: 15812 - DNA, 22 bp, synthetic construct
  misc_feature 1..22: note = chemically synthesized
  source 1..22: mol_type = other DNA
caaactgtagttccatatgcat

SEQ ID NO: 15813 - DNA, 22 bp, synthetic construct
  misc_feature 1..22: note = chemically synthesized
  source 1..22: mol_type = other DNA
aaactgtagttccatatgcatt

SEQ ID NO: 15814 - DNA, 22 bp, synthetic construct
  misc_feature 1..22: note = chemically synthesized
  source 1..22: mol_type = other DNA
tagttccatatgcattcttcca

SEQ ID NO: 15815 - DNA, 22 bp, synthetic construct
  misc_feature 1..22: note = chemically synthesized
  source 1..22: mol_type = other DNA
catatgcattcttccaggacaa

SEQ ID NO: 15816 - DNA, 22 bp, synthetic construct
  misc_feature 1..22: note = chemically synthesized
  source 1..22: mol_type = other DNA
ttccaggacaaatacttcttga

SEQ ID NO: 15817 - DNA, 22 bp, synthetic construct
  misc_feature 1..22: note = chemically synthesized
  source 1..22: mol_type = other DNA
ccaggacaaatacttcttgagg

SEQ ID NO: 15818 - DNA, 22 bp, synthetic construct
  misc_feature 1..22: note = chemically synthesized
  source 1..22: mol_type = other DNA
caggacaaatacttcttgaggt

SEQ ID NO: 15819 - DNA, 22 bp, synthetic construct
  misc_feature 1..22: note = chemically synthesized
  source 1..22: mol_type = other DNA
cttgaggttaaaaaaaaaaagt

SEQ ID NO: 15820 - DNA, 22 bp, synthetic construct
  misc_feature 1..22: note = chemically synthesized
  source 1..22: mol_type = other DNA
ttgaggttaaaaaaaaaaagtc

SEQ ID NO: 15821 - DNA, 22 bp, synthetic construct
  misc_feature 1..22: note = chemically synthesized
  source 1..22: mol_type = other DNA
gaggttaaaaaaaaaaagtcac

SEQ ID NO: 15822 - DNA, 22 bp, synthetic construct
  misc_feature 1..22: note = chemically synthesized
  source 1..22: mol_type = other DNA
aggttaaaaaaaaaaagtcaca

SEQ ID NO: 15823 - DNA, 22 bp, synthetic construct
  misc_feature 1..22: note = chemically synthesized
  source 1..22: mol_type = other DNA
aaaaaaaaaagtcacatagctg

SEQ ID NO: 15824 - DNA, 22 bp, synthetic construct
  misc_feature 1..22: note = chemically synthesized
  source 1..22: mol_type = other DNA
ccattttatggatttcaggatt

SEQ ID NO: 15825 - DNA, 22 bp, synthetic construct
  misc_feature 1..22: note = chemically synthesized
  source 1..22: mol_type = other DNA
tatggatttcaggatttttttt

SEQ ID NO: 15826 - DNA, 22 bp, synthetic construct
  misc_feature 1..22: note = chemically synthesized
  source 1..22: mol_type = other DNA
atggatttcaggattttttttt

SEQ ID NO: 15827 - DNA, 22 bp, synthetic construct
  misc_feature 1..22: note = chemically synthesized
  source 1..22: mol_type = other DNA
tggatttcaggatttttttttt

SEQ ID NO: 15828 - DNA, 22 bp, synthetic construct
  misc_feature 1..22: note = chemically synthesized
  source 1..22: mol_type = other DNA
caggattttttttttttttttt

SEQ ID NO: 15829 - DNA, 22 bp, synthetic construct
  misc_feature 1..22: note = chemically synthesized
  source 1..22: mol_type = other DNA
aggatttttttttttttttttt

SEQ ID NO: 15830 - DNA, 22 bp, synthetic construct
  misc_feature 1..22: note = chemically synthesized
  source 1..22: mol_type = other DNA
ttttttttttttttttgagatg

SEQ ID NO: 15831 - DNA, 22 bp, synthetic construct
  misc_feature 1..22: note = chemically synthesized
  source 1..22: mol_type = other DNA
tttttttttttttttgagatgg

SEQ ID NO: 15832 - DNA, 22 bp, synthetic construct
  misc_feature 1..22: note = chemically synthesized
  source 1..22: mol_type = other DNA
ttttttttttttttgagatgga

SEQ ID NO: 15833 - DNA, 22 bp, synthetic construct
  misc_feature 1..22: note = chemically synthesized
  source 1..22: mol_type = other DNA
tttttttttttttgagatggag

SEQ ID NO: 15834 - DNA, 22 bp, synthetic construct
  misc_feature 1..22: note = chemically synthesized
  source 1..22: mol_type = other DNA
ttttttttttttgagatggagt

SEQ ID NO: 15835 - DNA, 22 bp, synthetic construct
  misc_feature 1..22: note = chemically synthesized
  source 1..22: mol_type = other DNA
tttttttttttgagatggagtc

SEQ ID NO: 15836 - DNA, 22 bp, synthetic construct
  misc_feature 1..22: note = chemically synthesized
  source 1..22: mol_type = other DNA
ttttttttttgagatggagtct

SEQ ID NO: 15837 - DNA, 22 bp, synthetic construct
  misc_feature 1..22: note = chemically synthesized
  source 1..22: mol_type = other DNA
tttttttttgagatggagtctt

SEQ ID NO: 15838 - DNA, 22 bp, synthetic construct
  misc_feature 1..22: note = chemically synthesized
  source 1..22: mol_type = other DNA
ttttttttgagatggagtcttg

SEQ ID NO: 15839 - DNA, 22 bp, synthetic construct
  misc_feature 1..22: note = chemically synthesized
  source 1..22: mol_type = other DNA
tttttttgagatggagtcttgc

SEQ ID NO: 15840 - DNA, 22 bp, synthetic construct
  misc_feature 1..22: note = chemically synthesized
  source 1..22: mol_type = other DNA
ttttttgagatggagtcttgct

SEQ ID NO: 15841 - DNA, 22 bp, synthetic construct
  misc_feature 1..22: note = chemically synthesized
  source 1..22: mol_type = other DNA
tttttgagatggagtcttgctc

SEQ ID NO: 15842 - DNA, 22 bp, synthetic construct
  misc_feature 1..22: note = chemically synthesized
  source 1..22: mol_type = other DNA
ttttgagatggagtcttgctct

SEQ ID NO: 15843 - DNA, 22 bp, synthetic construct
  misc_feature 1..22: note = chemically synthesized
  source 1..22: mol_type = other DNA
tttgagatggagtcttgctctg

SEQ ID NO: 15844 - DNA, 22 bp, synthetic construct
  misc_feature 1..22: note = chemically synthesized
  source 1..22: mol_type = other DNA
ttgagatggagtcttgctctgt

SEQ ID NO: 15845 - DNA, 22 bp, synthetic construct
  misc_feature 1..22: note = chemically synthesized
  source 1..22: mol_type = other DNA
tgagatggagtcttgctctgtc

SEQ ID NO: 15846 - DNA, 22 bp, synthetic construct
  misc_feature 1..22: note = chemically synthesized
  source 1..22: mol_type = other DNA
gagatggagtcttgctctgtca

SEQ ID NO: 15847 - DNA, 22 bp, synthetic construct
  misc_feature 1..22: note = chemically synthesized
  source 1..22: mol_type = other DNA
agatggagtcttgctctgtcac

SEQ ID NO: 15848 - DNA, 22 bp, synthetic construct
  misc_feature 1..22: note = chemically synthesized
  source 1..22: mol_type = other DNA
gctctgtcacccagcctgtagt

SEQ ID NO: 15849 - DNA, 22 bp, synthetic construct
  misc_feature 1..22: note = chemically synthesized
  source 1..22: mol_type = other DNA
ctctgtcacccagcctgtagtg

SEQ ID NO: 15850 - DNA, 22 bp, synthetic construct
  misc_feature 1..22: note = chemically synthesized
  source 1..22: mol_type = other DNA
tgtcacccagcctgtagtgcag

SEQ ID NO: 15851 - DNA, 22 bp, synthetic construct
  misc_feature 1..22: note = chemically synthesized
  source 1..22: mol_type = other DNA
tcacccagcctgtagtgcagtg

SEQ ID NO: 15852 - DNA, 22 bp, synthetic construct
  misc_feature 1..22: note = chemically synthesized
  source 1..22: mol_type = other DNA
tagtgcagtggcataatctcgg

SEQ ID NO: 15853 - DNA, 22 bp, synthetic construct
  misc_feature 1..22: note = chemically synthesized
  source 1..22: mol_type = other DNA
ggctcacggcaacctccgcctc

SEQ ID NO: 15854 - DNA, 22 bp, synthetic construct
  misc_feature 1..22: note = chemically synthesized
  source 1..22: mol_type = other DNA
acggcaacctccgcctcccagg

SEQ ID NO: 15855 - DNA, 22 bp, synthetic construct
  misc_feature 1..22: note = chemically synthesized
  source 1..22: mol_type = other DNA
cgcctcccaggttcaagcgatt

SEQ ID NO: 15856 - DNA, 22 bp, synthetic construct
  misc_feature 1..22: note = chemically synthesized
  source 1..22: mol_type = other DNA
ccaggttcaagcgattctcttg

SEQ ID NO: 15857 - DNA, 22 bp, synthetic construct
  misc_feature 1..22: note = chemically synthesized
  source 1..22: mol_type = other DNA
aagcgattctcttgccttagcc

SEQ ID NO: 15858 - DNA, 22 bp, synthetic construct
  misc_feature 1..22: note = chemically synthesized
  source 1..22: mol_type = other DNA
tcttgccttagcctcccgagta

SEQ ID NO: 15859 - DNA, 22 bp, synthetic construct
  misc_feature 1..22: note = chemically synthesized
  source 1..22: mol_type = other DNA
ttgccttagcctcccgagtagc

SEQ ID NO: 15860 - DNA, 22 bp, synthetic construct
  misc_feature 1..22: note = chemically synthesized
  source 1..22: mol_type = other DNA
gccttagcctcccgagtagctg

SEQ ID NO: 15861 - DNA, 22 bp, synthetic construct
  misc_feature 1..22: note = chemically synthesized
  source 1..22: mol_type = other DNA
ccttagcctcccgagtagctgg

SEQ ID NO: 15862 - DNA, 22 bp, synthetic construct
  misc_feature 1..22: note = chemically synthesized
  source 1..22: mol_type = other DNA
agcctcccgagtagctgggatt

SEQ ID NO: 15863 - DNA, 22 bp, synthetic construct
  misc_feature 1..22: note = chemically synthesized
  source 1..22: mol_type = other DNA
gcctcccgagtagctgggatta

SEQ ID NO: 15864 - DNA, 22 bp, synthetic construct
  misc_feature 1..22: note = chemically synthesized
  source 1..22: mol_type = other DNA
ccgagtagctgggattacagtc

SEQ ID NO: 15865 - DNA, 22 bp, synthetic construct
  misc_feature 1..22: note = chemically synthesized
  source 1..22: mol_type = other DNA
ggattacagtcacgcaccacca

SEQ ID NO: 15866 - DNA, 22 bp, synthetic construct
  misc_feature 1..22: note = chemically synthesized
  source 1..22: mol_type = other DNA
cagtcacgcaccaccacatctg

SEQ ID NO: 15867 - DNA, 22 bp, synthetic construct
  misc_feature 1..22: note = chemically synthesized
  source 1..22: mol_type = other DNA
gctaattctttatattttttgg

SEQ ID NO: 15868 - DNA, 22 bp, synthetic construct
  misc_feature 1..22: note = chemically synthesized
  source 1..22: mol_type = other DNA
attctttatattttttggtaga

SEQ ID NO: 15869 - DNA, 22 bp, synthetic construct
  misc_feature 1..22: note = chemically synthesized
  source 1..22: mol_type = other DNA
tttatattttttggtagaaacg

SEQ ID NO: 15870 - DNA, 22 bp, synthetic construct
  misc_feature 1..22: note = chemically synthesized
  source 1..22: mol_type = other DNA
tatattttttggtagaaacggt

SEQ ID NO: 15871 - DNA, 22 bp, synthetic construct
  misc_feature 1..22: note = chemically synthesized
  source 1..22: mol_type = other DNA
atattttttggtagaaacggtg

SEQ ID NO: 15872 - DNA, 22 bp, synthetic construct
  misc_feature 1..22: note = chemically synthesized
  source 1..22: mol_type = other DNA
tattttttggtagaaacggtgt

SEQ ID NO: 15873 - DNA, 22 bp, synthetic construct
  misc_feature 1..22: note = chemically synthesized
  source 1..22: mol_type = other DNA
tttggtagaaacggtgtttcac

SEQ ID NO: 15874 - DNA, 22 bp, synthetic construct
  misc_feature 1..22: note = chemically synthesized
  source 1..22: mol_type = other DNA
ttggtagaaacggtgtttcacc

SEQ ID NO: 15875 - DNA, 22 bp, synthetic construct
  misc_feature 1..22: note = chemically synthesized
  source 1..22: mol_type = other DNA
tggtagaaacggtgtttcacca

SEQ ID NO: 15876 - DNA, 22 bp, synthetic construct
  misc_feature 1..22: note = chemically synthesized
  source 1..22: mol_type = other DNA
ggtagaaacggtgtttcaccat

SEQ ID NO: 15877 - DNA, 22 bp, synthetic construct
  misc_feature 1..22: note = chemically synthesized
  source 1..22: mol_type = other DNA
gtagaaacggtgtttcaccatg

SEQ ID NO: 15878 - DNA, 22 bp, synthetic construct
  misc_feature 1..22: note = chemically synthesized
  source 1..22: mol_type = other DNA
caccatgttggccaggctggtc

SEQ ID NO: 15879 - DNA, 22 bp, synthetic construct
  misc_feature 1..22: note = chemically synthesized
  source 1..22: mol_type = other DNA
accatgttggccaggctggtct

SEQ ID NO: 15880 - DNA, 22 bp, synthetic construct
  misc_feature 1..22: note = chemically synthesized
  source 1..22: mol_type = other DNA
gccaggctggtctcaaactcct

SEQ ID NO: 15881 - DNA, 22 bp, synthetic construct
  misc_feature 1..22: note = chemically synthesized
  source 1..22: mol_type = other DNA
gtctcaaactcctgacctcatg

SEQ ID NO: 15882 - DNA, 22 bp, synthetic construct
  misc_feature 1..22: note = chemically synthesized
  source 1..22: mol_type = other DNA
aaactcctgacctcatgtgatc

SEQ ID NO: 15883 - DNA, 22 bp, synthetic construct
  misc_feature 1..22: note = chemically synthesized
  source 1..22: mol_type = other DNA
ctgacctcatgtgatctgcctg

SEQ ID NO: 15884 - DNA, 22 bp, synthetic construct
  misc_feature 1..22: note = chemically synthesized
  source 1..22: mol_type = other DNA
acctcatgtgatctgcctgcct

SEQ ID NO: 15885 - DNA, 22 bp, synthetic construct
  misc_feature 1..22: note = chemically synthesized
  source 1..22: mol_type = other DNA
atgtgatctgcctgccttggcc

SEQ ID NO: 15886 - DNA, 22 bp, synthetic construct
  misc_feature 1..22: note = chemically synthesized
  source 1..22: mol_type = other DNA
cctgccttggcctcccaaagtg

SEQ ID NO: 15887 - DNA, 22 bp, synthetic construct
  misc_feature 1..22: note = chemically synthesized
  source 1..22: mol_type = other DNA
ccttggcctcccaaagtgctga

SEQ ID NO: 15888 - DNA, 22 bp, synthetic construct
  misc_feature 1..22: note = chemically synthesized
  source 1..22: mol_type = other DNA
ggcctcccaaagtgctgagatt

SEQ ID NO: 15889 - DNA, 22 bp, synthetic construct
  misc_feature 1..22: note = chemically synthesized
  source 1..22: mol_type = other DNA
gcctcccaaagtgctgagatta

SEQ ID NO: 15890 - DNA, 22 bp, synthetic construct
  misc_feature 1..22: note = chemically synthesized
  source 1..22: mol_type = other DNA
ccaaagtgctgagattacaggt

SEQ ID NO: 15891 - DNA, 22 bp, synthetic construct
  misc_feature 1..22: note = chemically synthesized
  source 1..22: mol_type = other DNA
agattacaggtgtgagccaccg

SEQ ID NO: 15892 - DNA, 22 bp, synthetic construct
  misc_feature 1..22: note = chemically synthesized
  source 1..22: mol_type = other DNA
caggtgtgagccaccgcgcctg

SEQ ID NO: 15893 - DNA, 22 bp, synthetic construct
  misc_feature 1..22: note = chemically synthesized
  source 1..22: mol_type = other DNA
cctggagttcagaatcttgggc

SEQ ID NO: 15894 - DNA, 22 bp, synthetic construct
  misc_feature 1..22: note = chemically synthesized
  source 1..22: mol_type = other DNA
gagttcagaatcttgggcttca

SEQ ID NO: 15895 - DNA, 22 bp, synthetic construct
  misc_feature 1..22: note = chemically synthesized
  source 1..22: mol_type = other DNA
agaatcttgggcttcattattt

SEQ ID NO: 15896 - DNA, 22 bp, synthetic construct
  misc_feature 1..22: note = chemically synthesized
  source 1..22: mol_type = other DNA
gggcttcattatttgtgtttaa

SEQ ID NO: 15897 - DNA, 22 bp, synthetic construct
  misc_feature 1..22: note = chemically synthesized
  source 1..22: mol_type = other DNA
ggcttcattatttgtgtttaaa

SEQ ID NO: 15898 - DNA, 22 bp, synthetic construct
  misc_feature 1..22: note = chemically synthesized
  source 1..22: mol_type = other DNA
cattatttgtgtttaaatagat

SEQ ID NO: 15899 - DNA, 22 bp, synthetic construct
  misc_feature 1..22: note = chemically synthesized
  source 1..22: mol_type = other DNA
attatttgtgtttaaatagatc

SEQ ID NO: 15900 - DNA, 22 bp, synthetic construct
  misc_feature 1..22: note = chemically synthesized
  source 1..22: mol_type = other DNA
tttgtgtttaaatagatcatac

SEQ ID NO: 15901 - DNA, 22 bp, synthetic construct
  misc_feature 1..22: note = chemically synthesized
  source 1..22: mol_type = other DNA
gtgtttaaatagatcatacagt

SEQ ID NO: 15902 - DNA, 22 bp, synthetic construct
  misc_feature 1..22: note = chemically synthesized
  source 1..22: mol_type = other DNA
tgtttaaatagatcatacagtc

SEQ ID NO: 15903 - DNA, 22 bp, synthetic construct
  misc_feature 1..22: note = chemically synthesized
  source 1..22: mol_type = other DNA
aaatagatcatacagtcaggca

SEQ ID NO: 15904 - DNA, 22 bp, synthetic construct
  misc_feature 1..22: note = chemically synthesized
  source 1..22: mol_type = other DNA
aatagatcatacagtcaggcac

SEQ ID NO: 15905 - DNA, 22 bp, synthetic construct
  misc_feature 1..22: note = chemically synthesized
  source 1..22: mol_type = other DNA
atgcctgtaatcccagcacttt

SEQ ID NO: 15906 - DNA, 22 bp, synthetic construct
  misc_feature 1..22: note = chemically synthesized
  source 1..22: mol_type = other DNA
taatcccagcactttgggaggc

SEQ ID NO: 15907 - DNA, 22 bp, synthetic construct
  misc_feature 1..22: note = chemically synthesized
  source 1..22: mol_type = other DNA
tgggaggctgaggtgggaggat

SEQ ID NO: 15908 - DNA, 22 bp, synthetic construct
  misc_feature 1..22: note = chemically synthesized
  source 1..22: mol_type = other DNA
gggaggctgaggtgggaggatt

SEQ ID NO: 15909 - DNA, 22 bp, synthetic construct
  misc_feature 1..22: note = chemically synthesized
  source 1..22: mol_type = other DNA
ggaggctgaggtgggaggattg

SEQ ID NO: 15910 - DNA, 22 bp, synthetic construct
  misc_feature 1..22: note = chemically synthesized
  source 1..22: mol_type = other DNA
aggtgggaggattgcctgagtt

SEQ ID NO: 15911 - DNA, 22 bp, synthetic construct
  misc_feature 1..22: note = chemically synthesized
  source 1..22: mol_type = other DNA
cctgagttcaggagatggagac

SEQ ID NO: 15912 - DNA, 22 bp, synthetic construct
  misc_feature 1..22: note = chemically synthesized
  source 1..22: mol_type = other DNA
agttcaggagatggagaccagc

SEQ ID NO: 15913 - DNA, 22 bp, synthetic construct
  misc_feature 1..22: note = chemically synthesized
  source 1..22: mol_type = other DNA
aggagatggagaccagcctggg

SEQ ID NO: 15914 - DNA, 22 bp, synthetic construct
  misc_feature 1..22: note = chemically synthesized
  source 1..22: mol_type = other DNA
ggcaacatggtgaaaccccgtc

SEQ ID NO: 15915 - DNA, 22 bp, synthetic construct
  misc_feature 1..22: note = chemically synthesized
  source 1..22: mol_type = other DNA
tactaaaaatacaaaaactagc

SEQ ID NO: 15916 - DNA, 22 bp, synthetic construct
  misc_feature 1..22: note = chemically synthesized
  source 1..22: mol_type = other DNA
ctaaaaatacaaaaactagctg

SEQ ID NO: 15917 - DNA, 22 bp, synthetic construct
  misc_feature 1..22: note = chemically synthesized
  source 1..22: mol_type = other DNA
aaaatacaaaaactagctggat

SEQ ID NO: 15918 - DNA, 22 bp, synthetic construct
  misc_feature 1..22: note = chemically synthesized
  source 1..22: mol_type = other DNA
gctggatgtggtggcacacacc

SEQ ID NO: 15919 - DNA, 22 bp, synthetic construct
  misc_feature 1..22: note = chemically synthesized
  source 1..22: mol_type = other DNA
gatgtggtggcacacacctgta

SEQ ID NO: 15920 - DNA, 22 bp, synthetic construct
  misc_feature 1..22: note = chemically synthesized
  source 1..22: mol_type = other DNA
tagtcccagctattcaggaggc

SEQ ID NO: 15921 - DNA, 22 bp, synthetic construct
  misc_feature 1..22: note = chemically synthesized
  source 1..22: mol_type = other DNA
ttcaggaggctgaggtgggagg

SEQ ID NO: 15922 - DNA, 22 bp, synthetic construct
  misc_feature 1..22: note = chemically synthesized
  source 1..22: mol_type = other DNA
aggaggctgaggtgggaggatc

SEQ ID NO: 15923 - DNA, 22 bp, synthetic construct
  misc_feature 1..22: note = chemically synthesized
  source 1..22: mol_type = other DNA
aggtgggaggatcccaggaggt

SEQ ID NO: 15924 - DNA, 22 bp, synthetic construct
  misc_feature 1..22: note = chemically synthesized
  source 1..22: mol_type = other DNA
cgccactgcactccaggctggg

SEQ ID NO: 15925 - DNA, 22 bp, synthetic construct
  misc_feature 1..22: note = chemically synthesized
  source 1..22: mol_type = other DNA
cactccaggctgggttactgag

SEQ ID NO: 15926 - DNA, 22 bp, synthetic construct
  misc_feature 1..22: note = chemically synthesized
  source 1..22: mol_type = other DNA
caggctgggttactgagccaga

SEQ ID NO: 15927 - DNA, 22 bp, synthetic construct
  misc_feature 1..22: note = chemically synthesized
  source 1..22: mol_type = other DNA
ggttactgagccagatcctgtc

SEQ ID NO: 15928 - DNA, 22 bp, synthetic construct
  misc_feature 1..22: note = chemically synthesized
  source 1..22: mol_type = other DNA
ctgagccagatcctgtctcaaa

SEQ ID NO: 15929 - DNA, 22 bp, synthetic construct
  misc_feature 1..22: note = chemically synthesized
  source 1..22: mol_type = other DNA
agccagatcctgtctcaaaaaa

SEQ ID NO: 15930 - DNA, 22 bp, synthetic construct
  misc_feature 1..22: note = chemically synthesized
  source 1..22: mol_type = other DNA
tctcaaaaaaaaaaaagataat

SEQ ID NO: 15931 - DNA, 22 bp, synthetic construct
  misc_feature 1..22: note = chemically synthesized
  source 1..22: mol_type = other DNA
aaaaaaaaaaaagataatacat

SEQ ID NO: 15932 - DNA, 22 bp, synthetic construct
  misc_feature 1..22: note = chemically synthesized
  source 1..22: mol_type = other DNA
aaacagttcaaaatgcaaaagt

SEQ ID NO: 15933 - DNA, 22 bp, synthetic construct
  misc_feature 1..22: note = chemically synthesized
  source 1..22: mol_type = other DNA
aaaatgcaaaagttacatacat

SEQ ID NO: 15934 - DNA, 22 bp, synthetic construct
  misc_feature 1..22: note = chemically synthesized
  source 1..22: mol_type = other DNA
catacataaggaagtgtcatga

SEQ ID NO: 15935 - DNA, 22 bp, synthetic construct
  misc_feature 1..22: note = chemically synthesized
  source 1..22: mol_type = other DNA
cctctcacacttctccccagcc

SEQ ID NO: 15936 - DNA, 22 bp, synthetic construct
  misc_feature 1..22: note = chemically synthesized
  source 1..22: mol_type = other DNA
tcacacttctccccagccaccc

SEQ ID NO: 15937 - DNA, 22 bp, synthetic construct
  misc_feature 1..22: note = chemically synthesized
  source 1..22: mol_type = other DNA
acacttctccccagccacccag

SEQ ID NO: 15938 - DNA, 22 bp, synthetic construct
  misc_feature 1..22: note = chemically synthesized
  source 1..22: mol_type = other DNA
ctccccagccacccagttctcc

SEQ ID NO: 15939 - DNA, 22 bp, synthetic construct
  misc_feature 1..22: note = chemically synthesized
  source 1..22: mol_type = other DNA
tccccagccacccagttctccc

SEQ ID NO: 15940 - DNA, 22 bp, synthetic construct
  misc_feature 1..22: note = chemically synthesized
  source 1..22: mol_type = other DNA
cccagccacccagttctccctt

SEQ ID NO: 15941 - DNA, 22 bp, synthetic construct
  misc_feature 1..22: note = chemically synthesized
  source 1..22: mol_type = other DNA
tcccttctagaggcaacatgtg

SEQ ID NO: 15942 - DNA, 22 bp, synthetic construct
  misc_feature 1..22: note = chemically synthesized
  source 1..22: mol_type = other DNA
ccttctagaggcaacatgtgaa

SEQ ID NO: 15943 - DNA, 22 bp, synthetic construct
  misc_feature 1..22: note = chemically synthesized
  source 1..22: mol_type = other DNA
ctagaggcaacatgtgaaatcc

SEQ ID NO: 15944 - DNA, 22 bp, synthetic construct
  misc_feature 1..22: note = chemically synthesized
  source 1..22: mol_type = other DNA
tagaggcaacatgtgaaatcct

SEQ ID NO: 15945 - DNA, 22 bp, synthetic construct
  misc_feature 1..22: note = chemically synthesized
  source 1..22: mol_type = other DNA
gaggcaacatgtgaaatccttc

SEQ ID NO: 15946 - DNA, 22 bp, synthetic construct
  misc_feature 1..22: note = chemically synthesized
  source 1..22: mol_type = other DNA
ctcaggctacactcttcttgaa

SEQ ID NO: 15947 - DNA, 22 bp, synthetic construct
  misc_feature 1..22: note = chemically synthesized
  source 1..22: mol_type = other DNA
tcaggctacactcttcttgaag

SEQ ID NO: 15948 - DNA, 22 bp, synthetic construct
  misc_feature 1..22: note = chemically synthesized
  source 1..22: mol_type = other DNA
aggctacactcttcttgaaggt

SEQ ID NO: 15949 - DNA, 22 bp, synthetic construct
  misc_feature 1..22: note = chemically synthesized
  source 1..22: mol_type = other DNA
cactcttcttgaaggtgtaggc

SEQ ID NO: 15950 - DNA, 22 bp, synthetic construct
  misc_feature 1..22: note = chemically synthesized
  source 1..22: mol_type = other DNA
ttcttgaaggtgtaggctttgg

SEQ ID NO: 15951 - DNA, 22 bp, synthetic construct
  misc_feature 1..22: note = chemically synthesized
  source 1..22: mol_type = other DNA
cttgaaggtgtaggctttgggc

SEQ ID NO: 15952 - DNA, 22 bp, synthetic construct
  misc_feature 1..22: note = chemically synthesized
  source 1..22: mol_type = other DNA
ttgaaggtgtaggctttgggca

SEQ ID NO: 15953 - DNA, 22 bp, synthetic construct
  misc_feature 1..22: note = chemically synthesized
  source 1..22: mol_type = other DNA
gaaggtgtaggctttgggcaaa

SEQ ID NO: 15954 - DNA, 22 bp, synthetic construct
  misc_feature 1..22: note = chemically synthesized
  source 1..22: mol_type = other DNA
aaggtgtaggctttgggcaaaa

SEQ ID NO: 15955 - DNA, 22 bp, synthetic construct
  misc_feature 1..22: note = chemically synthesized
  source 1..22: mol_type = other DNA
tgggcaaaagcattcattcagt

SEQ ID NO: 15956 - DNA, 22 bp, synthetic construct
  misc_feature 1..22: note = chemically synthesized
  source 1..22: mol_type = other DNA
gggcaaaagcattcattcagta

SEQ ID NO: 15957 - DNA, 22 bp, synthetic construct
  misc_feature 1..22: note = chemically synthesized
  source 1..22: mol_type = other DNA
ggcaaaagcattcattcagtaa

SEQ ID NO: 15958 - DNA, 22 bp, synthetic construct
  misc_feature 1..22: note = chemically synthesized
  source 1..22: mol_type = other DNA
attcagtaaccccagaaacttg

SEQ ID NO: 15959 - DNA, 22 bp, synthetic construct
  misc_feature 1..22: note = chemically synthesized
  source 1..22: mol_type = other DNA
agtaaccccagaaacttgttct

SEQ ID NO: 15960 - DNA, 22 bp, synthetic construct
  misc_feature 1..22: note = chemically synthesized
  source 1..22: mol_type = other DNA
gttctgtttttccataggattc

SEQ ID NO: 15961 - DNA, 22 bp, synthetic construct
  misc_feature 1..22: note = chemically synthesized
  source 1..22: mol_type = other DNA
ttctgtttttccataggattct

SEQ ID NO: 15962 - DNA, 22 bp, synthetic construct
  misc_feature 1..22: note = chemically synthesized
  source 1..22: mol_type = other DNA
tgtttttccataggattctctt

SEQ ID NO: 15963 - DNA, 22 bp, synthetic construct
  misc_feature 1..22: note = chemically synthesized
  source 1..22: mol_type = other DNA
tttttccataggattctctttg

SEQ ID NO: 15964 - DNA, 22 bp, synthetic construct
  misc_feature 1..22: note = chemically synthesized
  source 1..22: mol_type = other DNA
ttccataggattctctttggac

SEQ ID NO: 15965 - DNA, 22 bp, synthetic construct
  misc_feature 1..22: note = chemically synthesized
  source 1..22: mol_type = other DNA
tccataggattctctttggaca

SEQ ID NO: 15966 - DNA, 22 bp, synthetic construct
  misc_feature 1..22: note = chemically synthesized
  source 1..22: mol_type = other DNA
ccataggattctctttggacag

SEQ ID NO: 15967 - DNA, 22 bp, synthetic construct
  misc_feature 1..22: note = chemically synthesized
  source 1..22: mol_type = other DNA
cataggattctctttggacagc

SEQ ID NO: 15968 - DNA, 22 bp, synthetic construct
  misc_feature 1..22: note = chemically synthesized
  source 1..22: mol_type = other DNA
tctttggacagcgtccatactg

SEQ ID NO: 15969 - DNA, 22 bp, synthetic construct
  misc_feature 1..22: note = chemically synthesized
  source 1..22: mol_type = other DNA
tttggacagcgtccatactggt

SEQ ID NO: 15970 - DNA, 22 bp, synthetic construct
  misc_feature 1..22: note = chemically synthesized
  source 1..22: mol_type = other DNA
tggacagcgtccatactggtgg

SEQ ID NO: 15971 - DNA, 22 bp, synthetic construct
  misc_feature 1..22: note = chemically synthesized
  source 1..22: mol_type = other DNA
ggacagcgtccatactggtggg

SEQ ID NO: 15972 - DNA, 22 bp, synthetic construct
  misc_feature 1..22: note = chemically synthesized
  source 1..22: mol_type = other DNA
gacagcgtccatactggtgggt

SEQ ID NO: 15973 - DNA, 22 bp, synthetic construct
  misc_feature 1..22: note = chemically synthesized
  source 1..22: mol_type = other DNA
gtgggttttggatactgactac

SEQ ID NO: 15974 - DNA, 22 bp, synthetic construct
  misc_feature 1..22: note = chemically synthesized
  source 1..22: mol_type = other DNA
tggatactgactactacagcaa

SEQ ID NO: 15975 - DNA, 22 bp, synthetic construct
  misc_feature 1..22: note = chemically synthesized
  source 1..22: mol_type = other DNA
ggatactgactactacagcaac

SEQ ID NO: 15976 - DNA, 22 bp, synthetic construct
  misc_feature 1..22: note = chemically synthesized
  source 1..22: mol_type = other DNA
gatactgactactacagcaaca

SEQ ID NO: 15977 - DNA, 22 bp, synthetic construct
  misc_feature 1..22: note = chemically synthesized
  source 1..22: mol_type = other DNA
actactacagcaacacttccgt

SEQ ID NO: 15978 - DNA, 22 bp, synthetic construct
  misc_feature 1..22: note = chemically synthesized
  source 1..22: mol_type = other DNA
ctacagcaacacttccgtgccc

SEQ ID NO: 15979 - DNA, 22 bp, synthetic construct
  misc_feature 1..22: note = chemically synthesized
  source 1..22: mol_type = other DNA
cagcaacacttccgtgcccctg

SEQ ID NO: 15980 - DNA, 22 bp, synthetic construct
  misc_feature 1..22: note = chemically synthesized
  source 1..22: mol_type = other DNA
ccgtgcccctgataaagcagtt

SEQ ID NO: 15981 - DNA, 22 bp, synthetic construct
  misc_feature 1..22: note = chemically synthesized
  source 1..22: mol_type = other DNA
cgtgcccctgataaagcagttc

SEQ ID NO: 15982 - DNA, 22 bp, synthetic construct
  misc_feature 1..22: note = chemically synthesized
  source 1..22: mol_type = other DNA
ataaagcagttccctgtaacct

SEQ ID NO: 15983 - DNA, 22 bp, synthetic construct
  misc_feature 1..22: note = chemically synthesized
  source 1..22: mol_type = other DNA
cctgtaacctgtgagactggac

SEQ ID NO: 15984 - DNA, 22 bp, synthetic construct
  misc_feature 1..22: note = chemically synthesized
  source 1..22: mol_type = other DNA
taacctgtgagactggaccagg

SEQ ID NO: 15985 - DNA, 22 bp, synthetic construct
  misc_feature 1..22: note = chemically synthesized
  source 1..22: mol_type = other DNA
tgagactggaccaggtaagcgt

SEQ ID NO: 15986 - DNA, 22 bp, synthetic construct
  misc_feature 1..22: note = chemically synthesized
  source 1..22: mol_type = other DNA
gaccaggtaagcgtcccagccc

SEQ ID NO: 15987 - DNA, 22 bp, synthetic construct
  misc_feature 1..22: note = chemically synthesized
  source 1..22: mol_type = other DNA
cagacagaagctgagtggacct

SEQ ID NO: 15988 - DNA, 22 bp, synthetic construct
  misc_feature 1..22: note = chemically synthesized
  source 1..22: mol_type = other DNA
agtggacctcgtttacctgtta

SEQ ID NO: 15989 - DNA, 22 bp, synthetic construct
  misc_feature 1..22: note = chemically synthesized
  source 1..22: mol_type = other DNA
gtttacctgttatggatgaaac

SEQ ID NO: 15990 - DNA, 22 bp, synthetic construct
  misc_feature 1..22: note = chemically synthesized
  source 1..22: mol_type = other DNA
acctgttatggatgaaactgac

SEQ ID NO: 15991 - DNA, 22 bp, synthetic construct
  misc_feature 1..22: note = chemically synthesized
  source 1..22: mol_type = other DNA
cctgttatggatgaaactgacc

SEQ ID NO: 15992 - DNA, 22 bp, synthetic construct
  misc_feature 1..22: note = chemically synthesized
  source 1..22: mol_type = other DNA
ttatggatgaaactgaccttga

SEQ ID NO: 15993 - DNA, 22 bp, synthetic construct
  misc_feature 1..22: note = chemically synthesized
  source 1..22: mol_type = other DNA
tggatgaaactgaccttgaggg

SEQ ID NO: 15994 - DNA, 22 bp, synthetic construct
  misc_feature 1..22: note = chemically synthesized
  source 1..22: mol_type = other DNA
accttgaggggacatgaggaga

SEQ ID NO: 15995 - DNA, 22 bp, synthetic construct
  misc_feature 1..22: note = chemically synthesized
  source 1..22: mol_type = other DNA
gaggggacatgaggagagccat

SEQ ID NO: 15996 - DNA, 22 bp, synthetic construct
  misc_feature 1..22: note = chemically synthesized
  source 1..22: mol_type = other DNA
aggggacatgaggagagccatt

SEQ ID NO: 15997 - DNA, 22 bp, synthetic construct
  misc_feature 1..22: note = chemically synthesized
  source 1..22: mol_type = other DNA
ctttgtacttttgtcatgctct

SEQ ID NO: 15998 - DNA, 22 bp, synthetic construct
  misc_feature 1..22: note = chemically synthesized
  source 1..22: mol_type = other DNA
tgtacttttgtcatgctcttca

SEQ ID NO: 15999 - DNA, 22 bp, synthetic construct
  misc_feature 1..22: note = chemically synthesized
  source 1..22: mol_type = other DNA
gtacttttgtcatgctcttcaa

SEQ ID NO: 16000 - DNA, 22 bp, synthetic construct
  misc_feature 1..22: note = chemically synthesized
  source 1..22: mol_type = other DNA
tacttttgtcatgctcttcaat

SEQ ID NO: 16001 - DNA, 22 bp, synthetic construct
  misc_feature 1..22: note = chemically synthesized
  source 1..22: mol_type = other DNA
ttgtcatgctcttcaattggca

SEQ ID NO: 16002 - DNA, 22 bp, synthetic construct
  misc_feature 1..22: note = chemically synthesized
  source 1..22: mol_type = other DNA
tgtcatgctcttcaattggcac

SEQ ID NO: 16003 - DNA, 22 bp, synthetic construct
  misc_feature 1..22: note = chemically synthesized
  source 1..22: mol_type = other DNA
gtcatgctcttcaattggcaca

SEQ ID NO: 16004 - DNA, 22 bp, synthetic construct
  misc_feature 1..22: note = chemically synthesized
  source 1..22: mol_type = other DNA
tcatgctcttcaattggcacaa

SEQ ID NO: 16005 - DNA, 22 bp, synthetic construct
  misc_feature 1..22: note = chemically synthesized
  source 1..22: mol_type = other DNA
ttcaattggcacaaattaattc

SEQ ID NO: 16006 - DNA, 22 bp, synthetic construct
  misc_feature 1..22: note = chemically synthesized
  source 1..22: mol_type = other DNA
caattggcacaaattaattcac

SEQ ID NO: 16007 - DNA, 22 bp, synthetic construct
  misc_feature 1..22: note = chemically synthesized
  source 1..22: mol_type = other DNA
aattggcacaaattaattcact

SEQ ID NO: 16008 - DNA, 22 bp, synthetic construct
  misc_feature 1..22: note = chemically synthesized
  source 1..22: mol_type = other DNA
gcacaaattaattcacttctgc

SEQ ID NO: 16009 - DNA, 22 bp, synthetic construct
  misc_feature 1..22: note = chemically synthesized
  source 1..22: mol_type = other DNA
attcacttctgcaatactttcc

SEQ ID NO: 16010 - DNA, 22 bp, synthetic construct
  misc_feature 1..22: note = chemically synthesized
  source 1..22: mol_type = other DNA
acttctgcaatactttcctgaa

SEQ ID NO: 16011 - DNA, 22 bp, synthetic construct
  misc_feature 1..22: note = chemically synthesized
  source 1..22: mol_type = other DNA
ctgcaatactttcctgaatagc

SEQ ID NO: 16012 - DNA, 22 bp, synthetic construct
  misc_feature 1..22: note = chemically synthesized
  source 1..22: mol_type = other DNA
tgcaatactttcctgaatagca

SEQ ID NO: 16013 - DNA, 22 bp, synthetic construct
  misc_feature 1..22: note = chemically synthesized
  source 1..22: mol_type = other DNA
caatactttcctgaatagcaca

SEQ ID NO: 16014 - DNA, 22 bp, synthetic construct
  misc_feature 1..22: note = chemically synthesized
  source 1..22: mol_type = other DNA
tcctgaatagcacagtagtatt

SEQ ID NO: 16015 - DNA, 22 bp, synthetic construct
  misc_feature 1..22: note = chemically synthesized
  source 1..22: mol_type = other DNA
cctgaatagcacagtagtattg

SEQ ID NO: 16016 - DNA, 22 bp, synthetic construct
  misc_feature 1..22: note = chemically synthesized
  source 1..22: mol_type = other DNA
ctgaatagcacagtagtattgg

SEQ ID NO: 16017 - DNA, 22 bp, synthetic construct
  misc_feature 1..22: note = chemically synthesized
  source 1..22: mol_type = other DNA
aatagcacagtagtattggaaa

SEQ ID NO: 16018 - DNA, 22 bp, synthetic construct
  misc_feature 1..22: note = chemically synthesized
  source 1..22: mol_type = other DNA
gaaatctgcctattacagaacc

SEQ ID NO: 16019 - DNA, 22 bp, synthetic construct
  misc_feature 1..22: note = chemically synthesized
  source 1..22: mol_type = other DNA
cctattacagaacctggatgga

SEQ ID NO: 16020 - DNA, 22 bp, synthetic construct
  misc_feature 1..22: note = chemically synthesized
  source 1..22: mol_type = other DNA
ttacagaacctggatggagtcc

SEQ ID NO: 16021 - DNA, 22 bp, synthetic construct
  misc_feature 1..22: note = chemically synthesized
  source 1..22: mol_type = other DNA
cagaacctggatggagtccaga

SEQ ID NO: 16022 - DNA, 22 bp, synthetic construct
  misc_feature 1..22: note = chemically synthesized
  source 1..22: mol_type = other DNA
gatggagtccagagaggcacgg

SEQ ID NO: 16023 - DNA, 22 bp, synthetic construct
  misc_feature 1..22: note = chemically synthesized
  source 1..22: mol_type = other DNA
gtgagagtcaccgccctgcagc

SEQ ID NO: 16024 - DNA, 22 bp, synthetic construct
  misc_feature 1..22: note = chemically synthesized
  source 1..22: mol_type = other DNA
cagggcggtgactctcacgagc

SEQ ID NO: 16025 - DNA, 22 bp, synthetic construct
  misc_feature 1..22: note = chemically synthesized
  source 1..22: mol_type = other DNA
tcacgagccctttgcccatgga

SEQ ID NO: 16026 - DNA, 22 bp, synthetic construct
  misc_feature 1..22: note = chemically synthesized
  source 1..22: mol_type = other DNA
acgagccctttgcccatggatg

SEQ ID NO: 16027 - DNA, 22 bp, synthetic construct
  misc_feature 1..22: note = chemically synthesized
  source 1..22: mol_type = other DNA
tgcccatggatgcccgtgcctc

SEQ ID NO: 16028 - DNA, 22 bp, synthetic construct
  misc_feature 1..22: note = chemically synthesized
  source 1..22: mol_type = other DNA
gcccatggatgcccgtgcctct

SEQ ID NO: 16029 - DNA, 22 bp, synthetic construct
  misc_feature 1..22: note = chemically synthesized
  source 1..22: mol_type = other DNA
cccatggatgcccgtgcctctc

SEQ ID NO: 16030 - DNA, 22 bp, synthetic construct
  misc_feature 1..22: note = chemically synthesized
  source 1..22: mol_type = other DNA
tctggactccatccaggttctg

SEQ ID NO: 16031 - DNA, 22 bp, synthetic construct
  misc_feature 1..22: note = chemically synthesized
  source 1..22: mol_type = other DNA
tggactccatccaggttctgta

SEQ ID NO: 16032 - DNA, 22 bp, synthetic construct
  misc_feature 1..22: note = chemically synthesized
  source 1..22: mol_type = other DNA
gactccatccaggttctgtaat

SEQ ID NO: 16033 - DNA, 22 bp, synthetic construct
  misc_feature 1..22: note = chemically synthesized
  source 1..22: mol_type = other DNA
catccaggttctgtaataggca

SEQ ID NO: 16034 - DNA, 22 bp, synthetic construct
  misc_feature 1..22: note = chemically synthesized
  source 1..22: mol_type = other DNA
tgtaataggcagatttccaata

SEQ ID NO: 16035 - DNA, 22 bp, synthetic construct
  misc_feature 1..22: note = chemically synthesized
  source 1..22: mol_type = other DNA
taataggcagatttccaatact

SEQ ID NO: 16036 - DNA, 22 bp, synthetic construct
  misc_feature 1..22: note = chemically synthesized
  source 1..22: mol_type = other DNA
ccaatactactgtgctattcag

SEQ ID NO: 16037 - DNA, 22 bp, synthetic construct
  misc_feature 1..22: note = chemically synthesized
  source 1..22: mol_type = other DNA
caatactactgtgctattcagg

SEQ ID NO: 16038 - DNA, 22 bp, synthetic construct
  misc_feature 1..22: note = chemically synthesized
  source 1..22: mol_type = other DNA
ctgtgctattcaggaaagtatt

SEQ ID NO: 16039 - DNA, 22 bp, synthetic construct
  misc_feature 1..22: note = chemically synthesized
  source 1..22: mol_type = other DNA
tgctattcaggaaagtattgca

SEQ ID NO: 16040 - DNA, 22 bp, synthetic construct
  misc_feature 1..22: note = chemically synthesized
  source 1..22: mol_type = other DNA
ttcaggaaagtattgcagaagt

SEQ ID NO: 16041 - DNA, 22 bp, synthetic construct
  misc_feature 1..22: note = chemically synthesized
  source 1..22: mol_type = other DNA
aggaaagtattgcagaagtgaa

SEQ ID NO: 16042 - DNA, 22 bp, synthetic construct
  misc_feature 1..22: note = chemically synthesized
  source 1..22: mol_type = other DNA
cagaagtgaattaatttgtgcc

SEQ ID NO: 16043 - DNA, 22 bp, synthetic construct
  misc_feature 1..22: note = chemically synthesized
  source 1..22: mol_type = other DNA
atttgtgccaattgaagagcat

SEQ ID NO: 16044 - DNA, 22 bp, synthetic construct
  misc_feature 1..22: note = chemically synthesized
  source 1..22: mol_type = other DNA
gtgccaattgaagagcatgaca

SEQ ID NO: 16045 - DNA, 22 bp, synthetic construct
  misc_feature 1..22: note = chemically synthesized
  source 1..22: mol_type = other DNA
tgccaattgaagagcatgacaa

SEQ ID NO: 16046 - DNA, 22 bp, synthetic construct
  misc_feature 1..22: note = chemically synthesized
  source 1..22: mol_type = other DNA
aagagcatgacaaaagtacaaa

SEQ ID NO: 16047 - DNA, 22 bp, synthetic construct
  misc_feature 1..22: note = chemically synthesized
  source 1..22: mol_type = other DNA
tcctcatgtcccctcaaggtca

SEQ ID NO: 16048 - DNA, 22 bp, synthetic construct
  misc_feature 1..22: note = chemically synthesized
  source 1..22: mol_type = other DNA
ctcatgtcccctcaaggtcagt

SEQ ID NO: 16049 - DNA, 22 bp, synthetic construct
  misc_feature 1..22: note = chemically synthesized
  source 1..22: mol_type = other DNA
atgtcccctcaaggtcagtttc

SEQ ID NO: 16050 - DNA, 22 bp, synthetic construct
  misc_feature 1..22: note = chemically synthesized
  source 1..22: mol_type = other DNA
aaggtcagtttcatccataaca

SEQ ID NO: 16051 - DNA, 22 bp, synthetic construct
  misc_feature 1..22: note = chemically synthesized
  source 1..22: mol_type = other DNA
catccataacaggtaaacgagg

SEQ ID NO: 16052 - DNA, 22 bp, synthetic construct
  misc_feature 1..22: note = chemically synthesized
  source 1..22: mol_type = other DNA
atccataacaggtaaacgaggt

SEQ ID NO: 16053 - DNA, 22 bp, synthetic construct
  misc_feature 1..22: note = chemically synthesized
  source 1..22: mol_type = other DNA
agcttctgtctgcaggggctgg

SEQ ID NO: 16054 - DNA, 22 bp, synthetic construct
  misc_feature 1..22: note = chemically synthesized
  source 1..22: mol_type = other DNA
ctgtctgcaggggctgggacgc

SEQ ID NO: 16055 - DNA, 22 bp, synthetic construct
  misc_feature 1..22: note = chemically synthesized
  source 1..22: mol_type = other DNA
tgtctgcaggggctgggacgct

SEQ ID NO: 16056 - DNA, 22 bp, synthetic construct
  misc_feature 1..22: note = chemically synthesized
  source 1..22: mol_type = other DNA
tctgcaggggctgggacgctta

SEQ ID NO: 16057 - DNA, 22 bp, synthetic construct
  misc_feature 1..22: note = chemically synthesized
  source 1..22: mol_type = other DNA
caggggctgggacgcttacctg

SEQ ID NO: 16058 - DNA, 22 bp, synthetic construct
  misc_feature 1..22: note = chemically synthesized
  source 1..22: mol_type = other DNA
ggacgcttacctggtccagtct

SEQ ID NO: 16059 - DNA, 22 bp, synthetic construct
  misc_feature 1..22: note = chemically synthesized
  source 1..22: mol_type = other DNA
acctggtccagtctcacaggtt

SEQ ID NO: 16060 - DNA, 22 bp, synthetic construct
  misc_feature 1..22: note = chemically synthesized
  source 1..22: mol_type = other DNA
cctggtccagtctcacaggtta

SEQ ID NO: 16061 - DNA, 22 bp, synthetic construct
  misc_feature 1..22: note = chemically synthesized
  source 1..22: mol_type = other DNA
gtccagtctcacaggttacagg

SEQ ID NO: 16062 - DNA, 22 bp, synthetic construct
  misc_feature 1..22: note = chemically synthesized
  source 1..22: mol_type = other DNA
acaggttacagggaactgcttt

SEQ ID NO: 16063 - DNA, 22 bp, synthetic construct
  misc_feature 1..22: note = chemically synthesized
  source 1..22: mol_type = other DNA
cagggaactgctttatcagggg

SEQ ID NO: 16064 - DNA, 22 bp, synthetic construct
  misc_feature 1..22: note = chemically synthesized
  source 1..22: mol_type = other DNA
ctttatcaggggcacggaagtg

SEQ ID NO: 16065 - DNA, 22 bp, synthetic construct
  misc_feature 1..22: note = chemically synthesized
  source 1..22: mol_type = other DNA
tatcaggggcacggaagtgttg

SEQ ID NO: 16066 - DNA, 22 bp, synthetic construct
  misc_feature 1..22: note = chemically synthesized
  source 1..22: mol_type = other DNA
atcaggggcacggaagtgttgc

SEQ ID NO: 16067 - DNA, 22 bp, synthetic construct
  misc_feature 1..22: note = chemically synthesized
  source 1..22: mol_type = other DNA
tcaggggcacggaagtgttgct

SEQ ID NO: 16068 - DNA, 22 bp, synthetic construct
  misc_feature 1..22: note = chemically synthesized
  source 1..22: mol_type = other DNA
ctgtagtagtcagtatccaaaa

SEQ ID NO: 16069 - DNA, 22 bp, synthetic construct
  misc_feature 1..22: note = chemically synthesized
  source 1..22: mol_type = other DNA
tagtagtcagtatccaaaaccc

SEQ ID NO: 16070 - DNA, 22 bp, synthetic construct
  misc_feature 1..22: note = chemically synthesized
  source 1..22: mol_type = other DNA
tccaaagagaatcctatggaaa

SEQ ID NO: 16071 - DNA, 22 bp, synthetic construct
  misc_feature 1..22: note = chemically synthesized
  source 1..22: mol_type = other DNA
tggaaaaacagaacaagtttct

SEQ ID NO: 16072 - DNA, 22 bp, synthetic construct
  misc_feature 1..22: note = chemically synthesized
  source 1..22: mol_type = other DNA
ctggggttactgaatgaatgct

SEQ ID NO: 16073 - DNA, 22 bp, synthetic construct
  misc_feature 1..22: note = chemically synthesized
  source 1..22: mol_type = other DNA
tggggttactgaatgaatgctt

SEQ ID NO: 16074 - DNA, 22 bp, synthetic construct
  misc_feature 1..22: note = chemically synthesized
  source 1..22: mol_type = other DNA
gggttactgaatgaatgctttt

SEQ ID NO: 16075 - DNA, 22 bp, synthetic construct
  misc_feature 1..22: note = chemically synthesized
  source 1..22: mol_type = other DNA
ctgaatgaatgcttttgcccaa

SEQ ID NO: 16076 - DNA, 22 bp, synthetic construct
  misc_feature 1..22: note = chemically synthesized
  source 1..22: mol_type = other DNA
aatgaatgcttttgcccaaagc

SEQ ID NO: 16077 - DNA, 22 bp, synthetic construct
  misc_feature 1..22: note = chemically synthesized
  source 1..22: mol_type = other DNA
ttgcccaaagcctacaccttca

SEQ ID NO: 16078 - DNA, 22 bp, synthetic construct
  misc_feature 1..22: note = chemically synthesized
  source 1..22: mol_type = other DNA
tgcccaaagcctacaccttcaa

SEQ ID NO: 16079 - DNA, 22 bp, synthetic construct
  misc_feature 1..22: note = chemically synthesized
  source 1..22: mol_type = other DNA
gcccaaagcctacaccttcaag

SEQ ID NO: 16080 - DNA, 22 bp, synthetic construct
  misc_feature 1..22: note = chemically synthesized
  source 1..22: mol_type = other DNA
cccaaagcctacaccttcaaga

SEQ ID NO: 16081 - DNA, 22 bp, synthetic construct
  misc_feature 1..22: note = chemically synthesized
  source 1..22: mol_type = other DNA
caccttcaagaagagtgtagcc

SEQ ID NO: 16082 - DNA, 22 bp, synthetic construct
  misc_feature 1..22: note = chemically synthesized
  source 1..22: mol_type = other DNA
caagaagagtgtagcctgagaa

SEQ ID NO: 16083 - DNA, 22 bp, synthetic construct
  misc_feature 1..22: note = chemically synthesized
  source 1..22: mol_type = other DNA
aagaagagtgtagcctgagaag

SEQ ID NO: 16084 - DNA, 22 bp, synthetic construct
  misc_feature 1..22: note = chemically synthesized
  source 1..22: mol_type = other DNA
agaaggatttcacatgttgcct

SEQ ID NO: 16085 - DNA, 22 bp, synthetic construct
  misc_feature 1..22: note = chemically synthesized
  source 1..22: mol_type = other DNA
cacatgttgcctctagaaggga

SEQ ID NO: 16086 - DNA, 22 bp, synthetic construct
  misc_feature 1..22: note = chemically synthesized
  source 1..22: mol_type = other DNA
acatgttgcctctagaagggag

SEQ ID NO: 16087 - DNA, 22 bp, synthetic construct
  misc_feature 1..22: note = chemically synthesized
  source 1..22: mol_type = other DNA
cctctagaagggagaactgggt

SEQ ID NO: 16088 - DNA, 22 bp, synthetic construct
  misc_feature 1..22: note = chemically synthesized
  source 1..22: mol_type = other DNA
tagaagggagaactgggtggct

SEQ ID NO: 16089 - DNA, 22 bp, synthetic construct
  misc_feature 1..22: note = chemically synthesized
  source 1..22: mol_type = other DNA
gaagggagaactgggtggctgg

SEQ ID NO: 16090 - DNA, 22 bp, synthetic construct
  misc_feature 1..22: note = chemically synthesized
  source 1..22: mol_type = other DNA
ggtggctggggagaagtgtgag

SEQ ID NO: 16091 - DNA, 22 bp, synthetic construct
  misc_feature 1..22: note = chemically synthesized
  source 1..22: mol_type = other DNA
gggagaagtgtgagagggagat

SEQ ID NO: 16092 - DNA, 22 bp, synthetic construct
  misc_feature 1..22: note = chemically synthesized
  source 1..22: mol_type = other DNA
catgacacttccttatgtatgt

SEQ ID NO: 16093 - DNA, 22 bp, synthetic construct
  misc_feature 1..22: note = chemically synthesized
  source 1..22: mol_type = other DNA
atgacacttccttatgtatgta

SEQ ID NO: 16094 - DNA, 22 bp, synthetic construct
  misc_feature 1..22: note = chemically synthesized
  source 1..22: mol_type = other DNA
ccttatgtatgtaacttttgca

SEQ ID NO: 16095 - DNA, 22 bp, synthetic construct
  misc_feature 1..22: note = chemically synthesized
  source 1..22: mol_type = other DNA
cttatgtatgtaacttttgcat

SEQ ID NO: 16096 - DNA, 22 bp, synthetic construct
  misc_feature 1..22: note = chemically synthesized
  source 1..22: mol_type = other DNA
atgtatgtaacttttgcatttt

SEQ ID NO: 16097 - DNA, 22 bp, synthetic construct
  misc_feature 1..22: note = chemically synthesized
  source 1..22: mol_type = other DNA
tgtatgtaacttttgcattttg

SEQ ID NO: 16098 - DNA, 22 bp, synthetic construct
  misc_feature 1..22: note = chemically synthesized
  source 1..22: mol_type = other DNA
ttgcattttgaactgtttgaat

SEQ ID NO: 16099 - DNA, 22 bp, synthetic construct
  misc_feature 1..22: note = chemically synthesized
  source 1..22: mol_type = other DNA
tgcattttgaactgtttgaatg

SEQ ID NO: 16100 - DNA, 22 bp, synthetic construct
  misc_feature 1..22: note = chemically synthesized
  source 1..22: mol_type = other DNA
gcattttgaactgtttgaatgt

SEQ ID NO: 16101 - DNA, 22 bp, synthetic construct
  misc_feature 1..22: note = chemically synthesized
  source 1..22: mol_type = other DNA
cattttgaactgtttgaatgta

SEQ ID NO: 16102 - DNA, 22 bp, synthetic construct
  misc_feature 1..22: note = chemically synthesized
  source 1..22: mol_type = other DNA
tgaactgtttgaatgtattatc

SEQ ID NO: 16103 - DNA, 22 bp, synthetic construct
  misc_feature 1..22: note = chemically synthesized
  source 1..22: mol_type = other DNA
gaactgtttgaatgtattatct

SEQ ID NO: 16104 - DNA, 22 bp, synthetic construct
  misc_feature 1..22: note = chemically synthesized
  source 1..22: mol_type = other DNA
aactgtttgaatgtattatctt

SEQ ID NO: 16105 - DNA, 22 bp, synthetic construct
  misc_feature 1..22: note = chemically synthesized
  source 1..22: mol_type = other DNA
tttgaatgtattatcttttttt

SEQ ID NO: 16106 - DNA, 22 bp, synthetic construct
  misc_feature 1..22: note = chemically synthesized
  source 1..22: mol_type = other DNA
gaatgtattatctttttttttt

SEQ ID NO: 16107 - DNA, 22 bp, synthetic construct
  misc_feature 1..22: note = chemically synthesized
  source 1..22: mol_type = other DNA
aatgtattatcttttttttttt

SEQ ID NO: 16108 - DNA, 22 bp, synthetic construct
  misc_feature 1..22: note = chemically synthesized
  source 1..22: mol_type = other DNA
tcttttttttttttgagacagg

SEQ ID NO: 16109 - DNA, 22 bp, synthetic construct
  misc_feature 1..22: note = chemically synthesized
  source 1..22: mol_type = other DNA
ttttttttttgagacaggatct

SEQ ID NO: 16110 - DNA, 22 bp, synthetic construct
  misc_feature 1..22: note = chemically synthesized
  source 1..22: mol_type = other DNA
tttttttttgagacaggatctg

SEQ ID NO: 16111 - DNA, 22 bp, synthetic construct
  misc_feature 1..22: note = chemically synthesized
  source 1..22: mol_type = other DNA
ttttttttgagacaggatctgg

SEQ ID NO: 16112 - DNA, 22 bp, synthetic construct
  misc_feature 1..22: note = chemically synthesized
  source 1..22: mol_type = other DNA
tttttttgagacaggatctggc

SEQ ID NO: 16113 - DNA, 22 bp, synthetic construct
  misc_feature 1..22: note = chemically synthesized
  source 1..22: mol_type = other DNA
ttttttgagacaggatctggct

SEQ ID NO: 16114 - DNA, 22 bp, synthetic construct
  misc_feature 1..22: note = chemically synthesized
  source 1..22: mol_type = other DNA
tttttgagacaggatctggctc

SEQ ID NO: 16115 - DNA, 22 bp, synthetic construct
  misc_feature 1..22: note = chemically synthesized
  source 1..22: mol_type = other DNA
ttttgagacaggatctggctca

SEQ ID NO: 16116 - DNA, 22 bp, synthetic construct
  misc_feature 1..22: note = chemically synthesized
  source 1..22: mol_type = other DNA
tttgagacaggatctggctcag

SEQ ID NO: 16117 - DNA, 22 bp, synthetic construct
  misc_feature 1..22: note = chemically synthesized
  source 1..22: mol_type = other DNA
ttgagacaggatctggctcagt

SEQ ID NO: 16118 - DNA, 22 bp, synthetic construct
  misc_feature 1..22: note = chemically synthesized
  source 1..22: mol_type = other DNA
tgagacaggatctggctcagta

SEQ ID NO: 16119 - DNA, 22 bp, synthetic construct
  misc_feature 1..22: note = chemically synthesized
  source 1..22: mol_type = other DNA
gagacaggatctggctcagtaa

SEQ ID NO: 16120 - DNA, 22 bp, synthetic construct
  misc_feature 1..22: note = chemically synthesized
  source 1..22: mol_type = other DNA
agacaggatctggctcagtaac

SEQ ID NO: 16121 - DNA, 22 bp, synthetic construct
  misc_feature 1..22: note = chemically synthesized
  source 1..22: mol_type = other DNA
gctcagtaacccagcctggagt

SEQ ID NO: 16122 - DNA, 22 bp, synthetic construct
  misc_feature 1..22: note = chemically synthesized
  source 1..22: mol_type = other DNA
agtaacccagcctggagtgcag

SEQ ID NO: 16123 - DNA, 22 bp, synthetic construct
  misc_feature 1..22: note = chemically synthesized
  source 1..22: mol_type = other DNA
gagtgcagtggcgcaatctcgg

SEQ ID NO: 16124 - DNA, 22 bp, synthetic construct
  misc_feature 1..22: note = chemically synthesized
  source 1..22: mol_type = other DNA
ggctcattgtgacctctacctc

SEQ ID NO: 16125 - DNA, 22 bp, synthetic construct
  misc_feature 1..22: note = chemically synthesized
  source 1..22: mol_type = other DNA
attgtgacctctacctcctggg

SEQ ID NO: 16126 - DNA, 22 bp, synthetic construct
  misc_feature 1..22: note = chemically synthesized
  source 1..22: mol_type = other DNA
tgacctctacctcctgggatcc

SEQ ID NO: 16127 - DNA, 22 bp, synthetic construct
  misc_feature 1..22: note = chemically synthesized
  source 1..22: mol_type = other DNA
tacctcctgggatcctcccacc

SEQ ID NO: 16128 - DNA, 22 bp, synthetic construct
  misc_feature 1..22: note = chemically synthesized
  source 1..22: mol_type = other DNA
cctcctgggatcctcccacctc

SEQ ID NO: 16129 - DNA, 22 bp, synthetic construct
  misc_feature 1..22: note = chemically synthesized
  source 1..22: mol_type = other DNA
ctgggatcctcccacctcagcc

SEQ ID NO: 16130 - DNA, 22 bp, synthetic construct
  misc_feature 1..22: note = chemically synthesized
  source 1..22: mol_type = other DNA
ggatcctcccacctcagcctcc

SEQ ID NO: 16131 - DNA, 22 bp, synthetic construct
  misc_feature 1..22: note = chemically synthesized
  source 1..22: mol_type = other DNA
ccacctcagcctcctgaatagc

SEQ ID NO: 16132 - DNA, 22 bp, synthetic construct
  misc_feature 1..22: note = chemically synthesized
  source 1..22: mol_type = other DNA
agcctcctgaatagctgggact

SEQ ID NO: 16133 - DNA, 22 bp, synthetic construct
  misc_feature 1..22: note = chemically synthesized
  source 1..22: mol_type = other DNA
ctgaatagctgggactacaggt

SEQ ID NO: 16134 - DNA, 22 bp, synthetic construct
  misc_feature 1..22: note = chemically synthesized
  source 1..22: mol_type = other DNA
aatagctgggactacaggtgtg

SEQ ID NO: 16135 - DNA, 22 bp, synthetic construct
  misc_feature 1..22: note = chemically synthesized
  source 1..22: mol_type = other DNA
ggactacaggtgtgtgccacca

SEQ ID NO: 16136 - DNA, 22 bp, synthetic construct
  misc_feature 1..22: note = chemically synthesized
  source 1..22: mol_type = other DNA
caggtgtgtgccaccacatcca

SEQ ID NO: 16137 - DNA, 22 bp, synthetic construct
  misc_feature 1..22: note = chemically synthesized
  source 1..22: mol_type = other DNA
gtttttgtatttttagtagaga

SEQ ID NO: 16138 - DNA, 22 bp, synthetic construct
  misc_feature 1..22: note = chemically synthesized
  source 1..22: mol_type = other DNA
ttgtatttttagtagagacggg

SEQ ID NO: 16139 - DNA, 22 bp, synthetic construct
  misc_feature 1..22: note = chemically synthesized
  source 1..22: mol_type = other DNA
tgtatttttagtagagacgggg

SEQ ID NO: 16140 - DNA, 22 bp, synthetic construct
  misc_feature 1..22: note = chemically synthesized
  source 1..22: mol_type = other DNA
gtatttttagtagagacggggt

SEQ ID NO: 16141 - DNA, 22 bp, synthetic construct
  misc_feature 1..22: note = chemically synthesized
  source 1..22: mol_type = other DNA
tatttttagtagagacggggtt

SEQ ID NO: 16142 - DNA, 22 bp, synthetic construct
  misc_feature 1..22: note = chemically synthesized
  source 1..22: mol_type = other DNA
ttagtagagacggggtttcacc

SEQ ID NO: 16143 - DNA, 22 bp, synthetic construct
  misc_feature 1..22: note = chemically synthesized
  source 1..22: mol_type = other DNA
tagtagagacggggtttcacca

SEQ ID NO: 16144 - DNA, 22 bp, synthetic construct
  misc_feature 1..22: note = chemically synthesized
  source 1..22: mol_type = other DNA
agtagagacggggtttcaccat

SEQ ID NO: 16145 - DNA, 22 bp, synthetic construct
  misc_feature 1..22: note = chemically synthesized
  source 1..22: mol_type = other DNA
gtagagacggggtttcaccatg

SEQ ID NO: 16146 - DNA, 22 bp, synthetic construct
  misc_feature 1..22: note = chemically synthesized
  source 1..22: mol_type = other DNA
caccatgttgcccaggctggtc

SEQ ID NO: 16147 - DNA, 22 bp, synthetic construct
  misc_feature 1..22: note = chemically synthesized
  source 1..22: mol_type = other DNA
accatgttgcccaggctggtct

SEQ ID NO: 16148 - DNA, 22 bp, synthetic construct
  misc_feature 1..22: note = chemically synthesized
  source 1..22: mol_type = other DNA
cccaggctggtctccatctcct

SEQ ID NO: 16149 - DNA, 22 bp, synthetic construct
  misc_feature 1..22: note = chemically synthesized
  source 1..22: mol_type = other DNA
gtctccatctcctgaactcagg

SEQ ID NO: 16150 - DNA, 22 bp, synthetic construct
  misc_feature 1..22: note = chemically synthesized
  source 1..22: mol_type = other DNA
catctcctgaactcaggcaatc

SEQ ID NO: 16151 - DNA, 22 bp, synthetic construct
  misc_feature 1..22: note = chemically synthesized
  source 1..22: mol_type = other DNA
ctgaactcaggcaatcctccca

SEQ ID NO: 16152 - DNA, 22 bp, synthetic construct
  misc_feature 1..22: note = chemically synthesized
  source 1..22: mol_type = other DNA
aactcaggcaatcctcccacct

SEQ ID NO: 16153 - DNA, 22 bp, synthetic construct
  misc_feature 1..22: note = chemically synthesized
  source 1..22: mol_type = other DNA
aggcaatcctcccacctcagcc

SEQ ID NO: 16154 - DNA, 22 bp, synthetic construct
  misc_feature 1..22: note = chemically synthesized
  source 1..22: mol_type = other DNA
ccacctcagcctcccaaagtgc

SEQ ID NO: 16155 - DNA, 22 bp, synthetic construct
  misc_feature 1..22: note = chemically synthesized
  source 1..22: mol_type = other DNA
agcctcccaaagtgctgggatt

SEQ ID NO: 16156 - DNA, 22 bp, synthetic construct
  misc_feature 1..22: note = chemically synthesized
  source 1..22: mol_type = other DNA
ccaaagtgctgggattacaggc

SEQ ID NO: 16157 - DNA, 22 bp, synthetic construct
  misc_feature 1..22: note = chemically synthesized
  source 1..22: mol_type = other DNA
ggattacaggcatgagccaccg

SEQ ID NO: 16158 - DNA, 22 bp, synthetic construct
  misc_feature 1..22: note = chemically synthesized
  source 1..22: mol_type = other DNA
caggcatgagccaccgtgcctg

SEQ ID NO: 16159 - DNA, 22 bp, synthetic construct
  misc_feature 1..22: note = chemically synthesized
  source 1..22: mol_type = other DNA
actgtatgatctatttaaacac

SEQ ID NO: 16160 - DNA, 22 bp, synthetic construct
  misc_feature 1..22: note = chemically synthesized
  source 1..22: mol_type = other DNA
tatgatctatttaaacacaaat

SEQ ID NO: 16161 - DNA, 22 bp, synthetic construct
  misc_feature 1..22: note = chemically synthesized
  source 1..22: mol_type = other DNA
tttaaacacaaataatgaagcc

SEQ ID NO: 16162 - DNA, 22 bp, synthetic construct
  misc_feature 1..22: note = chemically synthesized
  source 1..22: mol_type = other DNA
aaacacaaataatgaagcccaa

SEQ ID NO: 16163 - DNA, 22 bp, synthetic construct
  misc_feature 1..22: note = chemically synthesized
  source 1..22: mol_type = other DNA
aacacaaataatgaagcccaag

SEQ ID NO: 16164 - DNA, 22 bp, synthetic construct
  misc_feature 1..22: note = chemically synthesized
  source 1..22: mol_type = other DNA
tgaactccaggcaggcgcggtg

SEQ ID NO: 16165 - DNA, 22 bp, synthetic construct
  misc_feature 1..22: note = chemically synthesized
  source 1..22: mol_type = other DNA
aactccaggcaggcgcggtggc

SEQ ID NO: 16166 - DNA, 22 bp, synthetic construct
  misc_feature 1..22: note = chemically synthesized
  source 1..22: mol_type = other DNA
caggcaggcgcggtggctcaca

SEQ ID NO: 16167 - DNA, 22 bp, synthetic construct
  misc_feature 1..22: note = chemically synthesized
  source 1..22: mol_type = other DNA
acacctgtaatctcagcacttt

SEQ ID NO: 16168 - DNA, 22 bp, synthetic construct
  misc_feature 1..22: note = chemically synthesized
  source 1..22: mol_type = other DNA
taatctcagcactttgggaggc

SEQ ID NO: 16169 - DNA, 22 bp, synthetic construct
  misc_feature 1..22: note = chemically synthesized
  source 1..22: mol_type = other DNA
agcactttgggaggccaaggca

SEQ ID NO: 16170 - DNA, 22 bp, synthetic construct
  misc_feature 1..22: note = chemically synthesized
  source 1..22: mol_type = other DNA
tgggaggccaaggcaggcagat

SEQ ID NO: 16171 - DNA, 22 bp, synthetic construct
  misc_feature 1..22: note = chemically synthesized
  source 1..22: mol_type = other DNA
gggaggccaaggcaggcagatc

SEQ ID NO: 16172 - DNA, 22 bp, synthetic construct
  misc_feature 1..22: note = chemically synthesized
  source 1..22: mol_type = other DNA
ggaggccaaggcaggcagatca

SEQ ID NO: 16173 - DNA, 22 bp, synthetic construct
  misc_feature 1..22: note = chemically synthesized
  source 1..22: mol_type = other DNA
gagaccagcctggccaacatgg

SEQ ID NO: 16174 - DNA, 22 bp, synthetic construct
  misc_feature 1..22: note = chemically synthesized
  source 1..22: mol_type = other DNA
agaccagcctggccaacatggt

SEQ ID NO: 16175 - DNA, 22 bp, synthetic construct
  misc_feature 1..22: note = chemically synthesized
  source 1..22: mol_type = other DNA
gccaacatggtgaaacaccgtt

SEQ ID NO: 16176 - DNA, 22 bp, synthetic construct
  misc_feature 1..22: note = chemically synthesized
  source 1..22: mol_type = other DNA
ctaccaaaaaatataaagaatt

SEQ ID NO: 16177 - DNA, 22 bp, synthetic construct
  misc_feature 1..22: note = chemically synthesized
  source 1..22: mol_type = other DNA
taccaaaaaatataaagaatta

SEQ ID NO: 16178 - DNA, 22 bp, synthetic construct
  misc_feature 1..22: note = chemically synthesized
  source 1..22: mol_type = other DNA
ccaaaaaatataaagaattagc

SEQ ID NO: 16179 - DNA, 22 bp, synthetic construct
  misc_feature 1..22: note = chemically synthesized
  source 1..22: mol_type = other DNA
gccagatgtggtggtgcgtgac

SEQ ID NO: 16180 - DNA, 22 bp, synthetic construct
  misc_feature 1..22: note = chemically synthesized
  source 1..22: mol_type = other DNA
taatcccagctactcgggaggc

SEQ ID NO: 16181 - DNA, 22 bp, synthetic construct
  misc_feature 1..22: note = chemically synthesized
  source 1..22: mol_type = other DNA
ctcgggaggctaaggcaagaga

SEQ ID NO: 16182 - DNA, 22 bp, synthetic construct
  misc_feature 1..22: note = chemically synthesized
  source 1..22: mol_type = other DNA
gggaggctaaggcaagagaatc

SEQ ID NO: 16183 - DNA, 22 bp, synthetic construct
  misc_feature 1..22: note = chemically synthesized
  source 1..22: mol_type = other DNA
aggcaagagaatcgcttgaacc

SEQ ID NO: 16184 - DNA, 22 bp, synthetic construct
  misc_feature 1..22: note = chemically synthesized
  source 1..22: mol_type = other DNA
gaacctgggaggcggaggttgc

SEQ ID NO: 16185 - DNA, 22 bp, synthetic construct
  misc_feature 1..22: note = chemically synthesized
  source 1..22: mol_type = other DNA
aacctgggaggcggaggttgcc

SEQ ID NO: 16186 - DNA, 22 bp, synthetic construct
  misc_feature 1..22: note = chemically synthesized
  source 1..22: mol_type = other DNA
ggaggcggaggttgccgtgagc

SEQ ID NO: 16187 - DNA, 22 bp, synthetic construct
  misc_feature 1..22: note = chemically synthesized
  source 1..22: mol_type = other DNA
ccgtgagccgagattatgccac

SEQ ID NO: 16188 - DNA, 22 bp, synthetic construct
  misc_feature 1..22: note = chemically synthesized
  source 1..22: mol_type = other DNA
tgccactgcactacaggctggg

SEQ ID NO: 16189 - DNA, 22 bp, synthetic construct
  misc_feature 1..22: note = chemically synthesized
  source 1..22: mol_type = other DNA
cactacaggctgggtgacagag

SEQ ID NO: 16190 - DNA, 22 bp, synthetic construct
  misc_feature 1..22: note = chemically synthesized
  source 1..22: mol_type = other DNA
caggctgggtgacagagcaaga

SEQ ID NO: 16191 - DNA, 22 bp, synthetic construct
  misc_feature 1..22: note = chemically synthesized
  source 1..22: mol_type = other DNA
ggtgacagagcaagactccatc

SEQ ID NO: 16192 - DNA, 22 bp, synthetic construct
  misc_feature 1..22: note = chemically synthesized
  source 1..22: mol_type = other DNA
catctcaaaaaaaaaaaaaaaa

SEQ ID NO: 16193 - DNA, 22 bp, synthetic construct
  misc_feature 1..22: note = chemically synthesized
  source 1..22: mol_type = other DNA
aaaaaaaaaaaaaaaaaaatcc

SEQ ID NO: 16194 - DNA, 22 bp, synthetic construct
  misc_feature 1..22: note = chemically synthesized
  source 1..22: mol_type = other DNA
aaatccataaaatggcagctat

SEQ ID NO: 16195 - DNA, 22 bp, synthetic construct
  misc_feature 1..22: note = chemically synthesized
  source 1..22: mol_type = other DNA
tgtgactttttttttttaacct

SEQ ID NO: 16196 - DNA, 22 bp, synthetic construct
  misc_feature 1..22: note = chemically synthesized
  source 1..22: mol_type = other DNA
tttttttttaacctcaagaagt

SEQ ID NO: 16197 - DNA, 22 bp, synthetic construct
  misc_feature 1..22: note = chemically synthesized
  source 1..22: mol_type = other DNA
ttttttttaacctcaagaagta

SEQ ID NO: 16198 - DNA, 22 bp, synthetic construct
  misc_feature 1..22: note = chemically synthesized
  source 1..22: mol_type = other DNA
tttttttaacctcaagaagtat

SEQ ID NO: 16199 - DNA, 22 bp, synthetic construct
  misc_feature 1..22: note = chemically synthesized
  source 1..22: mol_type = other DNA
ttttttaacctcaagaagtatt

SEQ ID NO: 16200 - DNA, 22 bp, synthetic construct
  misc_feature 1..22: note = chemically synthesized
  source 1..22: mol_type = other DNA
tttttaacctcaagaagtattt

SEQ ID NO: 16201 - DNA, 22 bp, synthetic construct
  misc_feature 1..22: note = chemically synthesized
  source 1..22: mol_type = other DNA
ttttaacctcaagaagtatttg

SEQ ID NO: 16202 - DNA, 22 bp, synthetic construct
  misc_feature 1..22: note = chemically synthesized
  source 1..22: mol_type = other DNA
tttaacctcaagaagtatttgt

SEQ ID NO: 16203 - DNA, 22 bp, synthetic construct
  misc_feature 1..22: note = chemically synthesized
  source 1..22: mol_type = other DNA
ttaacctcaagaagtatttgtc

SEQ ID NO: 16204 - DNA, 22 bp, synthetic construct
  misc_feature 1..22: note = chemically synthesized
  source 1..22: mol_type = other DNA
taacctcaagaagtatttgtcc

SEQ ID NO: 16205 - DNA, 22 bp, synthetic construct
  misc_feature 1..22: note = chemically synthesized
  source 1..22: mol_type = other DNA
aacctcaagaagtatttgtcct

SEQ ID NO: 16206 - DNA, 22 bp, synthetic construct
  misc_feature 1..22: note = chemically synthesized
  source 1..22: mol_type = other DNA
acctcaagaagtatttgtcctg

SEQ ID NO: 16207 - DNA, 22 bp, synthetic construct
  misc_feature 1..22: note = chemically synthesized
  source 1..22: mol_type = other DNA
aagaagtatttgtcctggaaga

SEQ ID NO: 16208 - DNA, 22 bp, synthetic construct
  misc_feature 1..22: note = chemically synthesized
  source 1..22: mol_type = other DNA
gtcctggaagaatgcatatgga

SEQ ID NO: 16209 - DNA, 22 bp, synthetic construct
  misc_feature 1..22: note = chemically synthesized
  source 1..22: mol_type = other DNA
tcctggaagaatgcatatggaa

SEQ ID NO: 16210 - DNA, 22 bp, synthetic construct
  misc_feature 1..22: note = chemically synthesized
  source 1..22: mol_type = other DNA
gaagaatgcatatggaactaca

SEQ ID NO: 16211 - DNA, 22 bp, synthetic construct
  misc_feature 1..22: note = chemically synthesized
  source 1..22: mol_type = other DNA
cagtttgaaacttggacttgca

SEQ ID NO: 16212 - DNA, 22 bp, synthetic construct
  misc_feature 1..22: note = chemically synthesized
  source 1..22: mol_type = other DNA
gaaacttggacttgcatatacc

SEQ ID NO: 16213 - DNA, 22 bp, synthetic construct
  misc_feature 1..22: note = chemically synthesized
  source 1..22: mol_type = other DNA
aaacttggacttgcatatacca

SEQ ID NO: 16214 - DNA, 22 bp, synthetic construct
  misc_feature 1..22: note = chemically synthesized
  source 1..22: mol_type = other DNA
ggacttgcatataccatgggtt

SEQ ID NO: 16215 - DNA, 22 bp, synthetic construct
  misc_feature 1..22: note = chemically synthesized
  source 1..22: mol_type = other DNA
gacttgcatataccatgggttc

SEQ ID NO: 16216 - DNA, 22 bp, synthetic construct
  misc_feature 1..22: note = chemically synthesized
  source 1..22: mol_type = other DNA
gcatataccatgggttccctca

SEQ ID NO: 16217 - DNA, 22 bp, synthetic construct
  misc_feature 1..22: note = chemically synthesized
  source 1..22: mol_type = other DNA
catataccatgggttccctcag

SEQ ID NO: 16218 - DNA, 22 bp, synthetic construct
  misc_feature 1..22: note = chemically synthesized
  source 1..22: mol_type = other DNA
cctcaggcctcagggaatcttg

SEQ ID NO: 16219 - DNA, 22 bp, synthetic construct
  misc_feature 1..22: note = chemically synthesized
  source 1..22: mol_type = other DNA
aggcctcagggaatcttgcatt

SEQ ID NO: 16220 - DNA, 22 bp, synthetic construct
  misc_feature 1..22: note = chemically synthesized
  source 1..22: mol_type = other DNA
agggaatcttgcatttcctctg

SEQ ID NO: 16221 - DNA, 22 bp, synthetic construct
  misc_feature 1..22: note = chemically synthesized
  source 1..22: mol_type = other DNA
gcatttcctctgacatcagaga

SEQ ID NO: 16222 - DNA, 22 bp, synthetic construct
  misc_feature 1..22: note = chemically synthesized
  source 1..22: mol_type = other DNA
catttcctctgacatcagagaa

SEQ ID NO: 16223 - DNA, 22 bp, synthetic construct
  misc_feature 1..22: note = chemically synthesized
  source 1..22: mol_type = other DNA
cctctgacatcagagaatgcac

SEQ ID NO: 16224 - DNA, 22 bp, synthetic construct
  misc_feature 1..22: note = chemically synthesized
  source 1..22: mol_type = other DNA
ctctgacatcagagaatgcact

SEQ ID NO: 16225 - DNA, 22 bp, synthetic construct
  misc_feature 1..22: note = chemically synthesized
  source 1..22: mol_type = other DNA
tgacatcagagaatgcactcca

SEQ ID NO: 16226 - DNA, 22 bp, synthetic construct
  misc_feature 1..22: note = chemically synthesized
  source 1..22: mol_type = other DNA
acatcagagaatgcactccagc

SEQ ID NO: 16227 - DNA, 22 bp, synthetic construct
  misc_feature 1..22: note = chemically synthesized
  source 1..22: mol_type = other DNA
cagcccctaggacgagcccccc

SEQ ID NO: 16228 - DNA, 22 bp, synthetic construct
  misc_feature 1..22: note = chemically synthesized
  source 1..22: mol_type = other DNA
ggacgagccccccccagggaaa

SEQ ID NO: 16229 - DNA, 22 bp, synthetic construct
  misc_feature 1..22: note = chemically synthesized
  source 1..22: mol_type = other DNA
catttccatcagaattgctctc

SEQ ID NO: 16230 - DNA, 22 bp, synthetic construct
  misc_feature 1..22: note = chemically synthesized
  source 1..22: mol_type = other DNA
ccatcagaattgctctctgtaa

SEQ ID NO: 16231 - DNA, 22 bp, synthetic construct
  misc_feature 1..22: note = chemically synthesized
  source 1..22: mol_type = other DNA
catcagaattgctctctgtaag

SEQ ID NO: 16232 - DNA, 22 bp, synthetic construct
  misc_feature 1..22: note = chemically synthesized
  source 1..22: mol_type = other DNA
ctctctgtaaggatgtatatag

SEQ ID NO: 16233 - DNA, 22 bp, synthetic construct
  misc_feature 1..22: note = chemically synthesized
  source 1..22: mol_type = other DNA
tctgtaaggatgtatatagctt

SEQ ID NO: 16234 - DNA, 22 bp, synthetic construct
  misc_feature 1..22: note = chemically synthesized
  source 1..22: mol_type = other DNA
tgtaaggatgtatatagcttca

SEQ ID NO: 16235 - DNA, 22 bp, synthetic construct
  misc_feature 1..22: note = chemically synthesized
  source 1..22: mol_type = other DNA
taaggatgtatatagcttcaga

SEQ ID NO: 16236 - DNA, 22 bp, synthetic construct
  misc_feature 1..22: note = chemically synthesized
  source 1..22: mol_type = other DNA
cagatgcttgttctgtatcctc

SEQ ID NO: 16237 - DNA, 22 bp, synthetic construct
  misc_feature 1..22: note = chemically synthesized
  source 1..22: mol_type = other DNA
agatgcttgttctgtatcctct

SEQ ID NO: 16238 - DNA, 22 bp, synthetic construct
  misc_feature 1..22: note = chemically synthesized
  source 1..22: mol_type = other DNA
gttctgtatcctctctactttg

SEQ ID NO: 16239 - DNA, 22 bp, synthetic construct
  misc_feature 1..22: note = chemically synthesized
  source 1..22: mol_type = other DNA
ttctgtatcctctctactttga

SEQ ID NO: 16240 - DNA, 22 bp, synthetic construct
  misc_feature 1..22: note = chemically synthesized
  source 1..22: mol_type = other DNA
tgtatcctctctactttgaaac

SEQ ID NO: 16241 - DNA, 22 bp, synthetic construct
  misc_feature 1..22: note = chemically synthesized
  source 1..22: mol_type = other DNA
tatcctctctactttgaaacag

SEQ ID NO: 16242 - DNA, 22 bp, synthetic construct
  misc_feature 1..22: note = chemically synthesized
  source 1..22: mol_type = other DNA
tctactttgaaacagagtatct

SEQ ID NO: 16243 - DNA, 22 bp, synthetic construct
  misc_feature 1..22: note = chemically synthesized
  source 1..22: mol_type = other DNA
tactttgaaacagagtatctca

SEQ ID NO: 16244 - DNA, 22 bp, synthetic construct
  misc_feature 1..22: note = chemically synthesized
  source 1..22: mol_type = other DNA
ctttgaaacagagtatctcaga

SEQ ID NO: 16245 - DNA, 22 bp, synthetic construct
  misc_feature 1..22: note = chemically synthesized
  source 1..22: mol_type = other DNA
tgaaacagagtatctcagacaa

SEQ ID NO: 16246 - DNA, 22 bp, synthetic construct
  misc_feature 1..22: note = chemically synthesized
  source 1..22: mol_type = other DNA
gaaacagagtatctcagacaaa

SEQ ID NO: 16247 - DNA, 22 bp, synthetic construct
  misc_feature 1..22: note = chemically synthesized
  source 1..22: mol_type = other DNA
aaacagagtatctcagacaaac

SEQ ID NO: 16248 - DNA, 22 bp, synthetic construct
  misc_feature 1..22: note = chemically synthesized
  source 1..22: mol_type = other DNA
agacaaaccacttcccctttaa

SEQ ID NO: 16249 - DNA, 22 bp, synthetic construct
  misc_feature 1..22: note = chemically synthesized
  source 1..22: mol_type = other DNA
cccctttaaaagtactagatat

SEQ ID NO: 16250 - DNA, 22 bp, synthetic construct
  misc_feature 1..22: note = chemically synthesized
  source 1..22: mol_type = other DNA
ccctttaaaagtactagatata

SEQ ID NO: 16251 - DNA, 22 bp, synthetic construct
  misc_feature 1..22: note = chemically synthesized
  source 1..22: mol_type = other DNA
taaaagtactagatatatcttt

SEQ ID NO: 16252 - DNA, 22 bp, synthetic construct
  misc_feature 1..22: note = chemically synthesized
  source 1..22: mol_type = other DNA
aaaagtactagatatatctttc

SEQ ID NO: 16253 - DNA, 22 bp, synthetic construct
  misc_feature 1..22: note = chemically synthesized
  source 1..22: mol_type = other DNA
aaagtactagatatatctttca

SEQ ID NO: 16254 - DNA, 22 bp, synthetic construct
  misc_feature 1..22: note = chemically synthesized
  source 1..22: mol_type = other DNA
gatatatctttcactgtggaaa

SEQ ID NO: 16255 - DNA, 22 bp, synthetic construct
  misc_feature 1..22: note = chemically synthesized
  source 1..22: mol_type = other DNA
tcactgtggaaataggtgtcaa

SEQ ID NO: 16256 - DNA, 22 bp, synthetic construct
  misc_feature 1..22: note = chemically synthesized
  source 1..22: mol_type = other DNA
cactgtggaaataggtgtcaac

SEQ ID NO: 16257 - DNA, 22 bp, synthetic construct
  misc_feature 1..22: note = chemically synthesized
  source 1..22: mol_type = other DNA
actgtggaaataggtgtcaacc

SEQ ID NO: 16258 - DNA, 22 bp, synthetic construct
  misc_feature 1..22: note = chemically synthesized
  source 1..22: mol_type = other DNA
tggaaataggtgtcaaccgcca

SEQ ID NO: 16259 - DNA, 22 bp, synthetic construct
  misc_feature 1..22: note = chemically synthesized
  source 1..22: mol_type = other DNA
ttatcccgtgatggtggaatag

SEQ ID NO: 16260 - DNA, 22 bp, synthetic construct
  misc_feature 1..22: note = chemically synthesized
  source 1..22: mol_type = other DNA
tatcccgtgatggtggaatagt

SEQ ID NO: 16261 - DNA, 22 bp, synthetic construct
  misc_feature 1..22: note = chemically synthesized
  source 1..22: mol_type = other DNA
atcccgtgatggtggaatagtg

SEQ ID NO: 16262 - DNA, 22 bp, synthetic construct
  misc_feature 1..22: note = chemically synthesized
  source 1..22: mol_type = other DNA
tcccgtgatggtggaatagtga

SEQ ID NO: 16263 - DNA, 22 bp, synthetic construct
  misc_feature 1..22: note = chemically synthesized
  source 1..22: mol_type = other DNA
ctcaccgaaatcagggagagcc

SEQ ID NO: 16264 - DNA, 22 bp, synthetic construct
  misc_feature 1..22: note = chemically synthesized
  source 1..22: mol_type = other DNA
tcaccgaaatcagggagagcca

SEQ ID NO: 16265 - DNA, 22 bp, synthetic construct
  misc_feature 1..22: note = chemically synthesized
  source 1..22: mol_type = other DNA
accgaaatcagggagagccact

SEQ ID NO: 16266 - DNA, 22 bp, synthetic construct
  misc_feature 1..22: note = chemically synthesized
  source 1..22: mol_type = other DNA
actctggcctctatcaacccag

SEQ ID NO: 16267 - DNA, 22 bp, synthetic construct
  misc_feature 1..22: note = chemically synthesized
  source 1..22: mol_type = other DNA
tggcctctatcaacccagagag

SEQ ID NO: 16268 - DNA, 22 bp, synthetic construct
  misc_feature 1..22: note = chemically synthesized
  source 1..22: mol_type = other DNA
gcctctatcaacccagagagat

SEQ ID NO: 16269 - DNA, 22 bp, synthetic construct
  misc_feature 1..22: note = chemically synthesized
  source 1..22: mol_type = other DNA
tatcaacccagagagattgcat

SEQ ID NO: 16270 - DNA, 22 bp, synthetic construct
  misc_feature 1..22: note = chemically synthesized
  source 1..22: mol_type = other DNA
tcaacccagagagattgcatgg

SEQ ID NO: 16271 - DNA, 22 bp, synthetic construct
  misc_feature 1..22: note = chemically synthesized
  source 1..22: mol_type = other DNA
catggttcttcaatggagatca

SEQ ID NO: 16272 - DNA, 22 bp, synthetic construct
  misc_feature 1..22: note = chemically synthesized
  source 1..22: mol_type = other DNA
ttcaatggagatcagatgtttg

SEQ ID NO: 16273 - DNA, 22 bp, synthetic construct
  misc_feature 1..22: note = chemically synthesized
  source 1..22: mol_type = other DNA
caatggagatcagatgtttgga

SEQ ID NO: 16274 - DNA, 22 bp, synthetic construct
  misc_feature 1..22: note = chemically synthesized
  source 1..22: mol_type = other DNA
aatggagatcagatgtttggaa

SEQ ID NO: 16275 - DNA, 22 bp, synthetic construct
  misc_feature 1..22: note = chemically synthesized
  source 1..22: mol_type = other DNA
ggaataacacttcatcttttta

SEQ ID NO: 16276 - DNA, 22 bp, synthetic construct
  misc_feature 1..22: note = chemically synthesized
  source 1..22: mol_type = other DNA
gaataacacttcatctttttat

SEQ ID NO: 16277 - DNA, 22 bp, synthetic construct
  misc_feature 1..22: note = chemically synthesized
  source 1..22: mol_type = other DNA
catctttttattttttagaatc

SEQ ID NO: 16278 - DNA, 22 bp, synthetic construct
  misc_feature 1..22: note = chemically synthesized
  source 1..22: mol_type = other DNA
atctttttattttttagaatca

SEQ ID NO: 16279 - DNA, 22 bp, synthetic construct
  misc_feature 1..22: note = chemically synthesized
  source 1..22: mol_type = other DNA
tttattttttagaatcatgcgg

SEQ ID NO: 16280 - DNA, 22 bp, synthetic construct
  misc_feature 1..22: note = chemically synthesized
  source 1..22: mol_type = other DNA
ttattttttagaatcatgcggc

SEQ ID NO: 16281 - DNA, 22 bp, synthetic construct
  misc_feature 1..22: note = chemically synthesized
  source 1..22: mol_type = other DNA
tattttttagaatcatgcggct

SEQ ID NO: 16282 - DNA, 22 bp, synthetic construct
  misc_feature 1..22: note = chemically synthesized
  source 1..22: mol_type = other DNA
attttttagaatcatgcggctg

SEQ ID NO: 16283 - DNA, 22 bp, synthetic construct
  misc_feature 1..22: note = chemically synthesized
  source 1..22: mol_type = other DNA
ttttttagaatcatgcggctgg

SEQ ID NO: 16284 - DNA, 22 bp, synthetic construct
  misc_feature 1..22: note = chemically synthesized
  source 1..22: mol_type = other DNA
tttagaatcatgcggctgggtg

SEQ ID NO: 16285 - DNA, 22 bp, synthetic construct
  misc_feature 1..22: note = chemically synthesized
  source 1..22: mol_type = other DNA
ttagaatcatgcggctgggtgt

SEQ ID NO: 16286 - DNA, 22 bp, synthetic construct
  misc_feature 1..22: note = chemically synthesized
  source 1..22: mol_type = other DNA
tagaatcatgcggctgggtgta

SEQ ID NO: 16287 - DNA, 22 bp, synthetic construct
  misc_feature 1..22: note = chemically synthesized
  source 1..22: mol_type = other DNA
agaatcatgcggctgggtgtag

SEQ ID NO: 16288 - DNA, 22 bp, synthetic construct
  misc_feature 1..22: note = chemically synthesized
  source 1..22: mol_type = other DNA
gaatcatgcggctgggtgtagt

SEQ ID NO: 16289 - DNA, 22 bp, synthetic construct
  misc_feature 1..22: note = chemically synthesized
  source 1..22: mol_type = other DNA
ggtgtagtggctcacgcctgta

SEQ ID NO: 16290 - DNA, 22 bp, synthetic construct
  misc_feature 1..22: note = chemically synthesized
  source 1..22: mol_type = other DNA
acgcctgtaatcctagcactta

SEQ ID NO: 16291 - DNA, 22 bp, synthetic construct
  misc_feature 1..22: note = chemically synthesized
  source 1..22: mol_type = other DNA
taatcctagcacttagggaggc

SEQ ID NO: 16292 - DNA, 22 bp, synthetic construct
  misc_feature 1..22: note = chemically synthesized
  source 1..22: mol_type = other DNA
gcacttagggaggccaaggcag

SEQ ID NO: 16293 - DNA, 22 bp, synthetic construct
  misc_feature 1..22: note = chemically synthesized
  source 1..22: mol_type = other DNA
agggaggccaaggcaggcagat

SEQ ID NO: 16294 - DNA, 22 bp, synthetic construct
  misc_feature 1..22: note = chemically synthesized
  source 1..22: mol_type = other DNA
gggaggccaaggcaggcagatc

SEQ ID NO: 16295 - DNA, 22 bp, synthetic construct
  misc_feature 1..22: note = chemically synthesized
  source 1..22: mol_type = other DNA
gagaccagcctagtcaacatag

SEQ ID NO: 16296 - DNA, 22 bp, synthetic construct
  misc_feature 1..22: note = chemically synthesized
  source 1..22: mol_type = other DNA
gtcaacatagtgaaaccatgtc

SEQ ID NO: 16297 - DNA, 22 bp, synthetic construct
  misc_feature 1..22: note = chemically synthesized
  source 1..22: mol_type = other DNA
tactaaaaatacaaaaaaaatt

SEQ ID NO: 16298 - DNA, 22 bp, synthetic construct
  misc_feature 1..22: note = chemically synthesized
  source 1..22: mol_type = other DNA
ctaaaaatacaaaaaaaattag

SEQ ID NO: 16299 - DNA, 22 bp, synthetic construct
  misc_feature 1..22: note = chemically synthesized
  source 1..22: mol_type = other DNA
aaaatacaaaaaaaattagctg

SEQ ID NO: 16300 - DNA, 22 bp, synthetic construct
  misc_feature 1..22: note = chemically synthesized
  source 1..22: mol_type = other DNA
gctgggcatggtggcgggcacc

SEQ ID NO: 16301 - DNA, 22 bp, synthetic construct
  misc_feature 1..22: note = chemically synthesized
  source 1..22: mol_type = other DNA
ggcatggtggcgggcacctgta

SEQ ID NO: 16302 - DNA, 22 bp, synthetic construct
  misc_feature 1..22: note = chemically synthesized
  source 1..22: mol_type = other DNA
taatcccagctacttgggaggc

SEQ ID NO: 16303 - DNA, 22 bp, synthetic construct
  misc_feature 1..22: note = chemically synthesized
  source 1..22: mol_type = other DNA
cttgggaggctgaggcaggaga

SEQ ID NO: 16304 - DNA, 22 bp, synthetic construct
  misc_feature 1..22: note = chemically synthesized
  source 1..22: mol_type = other DNA
gggaggctgaggcaggagaatc

SEQ ID NO: 16305 - DNA, 22 bp, synthetic construct
  misc_feature 1..22: note = chemically synthesized
  source 1..22: mol_type = other DNA
ggaggctgaggcaggagaatca

SEQ ID NO: 16306 - DNA, 22 bp, synthetic construct
  misc_feature 1..22: note = chemically synthesized
  source 1..22: mol_type = other DNA
aggcaggagaatcacttgaacc

SEQ ID NO: 16307 - DNA, 22 bp, synthetic construct
  misc_feature 1..22: note = chemically synthesized
  source 1..22: mol_type = other DNA
gaaccggagaggcagaggttgc

SEQ ID NO: 16308 - DNA, 22 bp, synthetic construct
  misc_feature 1..22: note = chemically synthesized
  source 1..22: mol_type = other DNA
aaccggagaggcagaggttgca

SEQ ID NO: 16309 - DNA, 22 bp, synthetic construct
  misc_feature 1..22: note = chemically synthesized
  source 1..22: mol_type = other DNA
cagtgagctgagattgcaccat

SEQ ID NO: 16310 - DNA, 22 bp, synthetic construct
  misc_feature 1..22: note = chemically synthesized
  source 1..22: mol_type = other DNA
agattgcaccattgcactccag

SEQ ID NO: 16311 - DNA, 22 bp, synthetic construct
  misc_feature 1..22: note = chemically synthesized
  source 1..22: mol_type = other DNA
caccattgcactccagccaggc

SEQ ID NO: 16312 - DNA, 22 bp, synthetic construct
  misc_feature 1..22: note = chemically synthesized
  source 1..22: mol_type = other DNA
cactccagccaggcaacagtgc

SEQ ID NO: 16313 - DNA, 22 bp, synthetic construct
  misc_feature 1..22: note = chemically synthesized
  source 1..22: mol_type = other DNA
cagccaggcaacagtgcgagac

SEQ ID NO: 16314 - DNA, 22 bp, synthetic construct
  misc_feature 1..22: note = chemically synthesized
  source 1..22: mol_type = other DNA
catctcaaacaaacaaacaaaa

SEQ ID NO: 16315 - DNA, 22 bp, synthetic construct
  misc_feature 1..22: note = chemically synthesized
  source 1..22: mol_type = other DNA
aaacaaacaaacaaaagaaaga

SEQ ID NO: 16316 - DNA, 22 bp, synthetic construct
  misc_feature 1..22: note = chemically synthesized
  source 1..22: mol_type = other DNA
acgtgatagaaattggcaaatg

SEQ ID NO: 16317 - DNA, 22 bp, synthetic construct
  misc_feature 1..22: note = chemically synthesized
  source 1..22: mol_type = other DNA
cgtgatagaaattggcaaatgc

SEQ ID NO: 16318 - DNA, 22 bp, synthetic construct
  misc_feature 1..22: note = chemically synthesized
  source 1..22: mol_type = other DNA
gcaaatgctaaactcagggctt

SEQ ID NO: 16319 - DNA, 22 bp, synthetic construct
  misc_feature 1..22: note = chemically synthesized
  source 1..22: mol_type = other DNA
aactcagggctttcccctgctc

SEQ ID NO: 16320 - DNA, 22 bp, synthetic construct
  misc_feature 1..22: note = chemically synthesized
  source 1..22: mol_type = other DNA
agggctttcccctgctccccag

SEQ ID NO: 16321 - DNA, 22 bp, synthetic construct
  misc_feature 1..22: note = chemically synthesized
  source 1..22: mol_type = other DNA
tcccctgctccccagagagtca

SEQ ID NO: 16322 - DNA, 22 bp, synthetic construct
  misc_feature 1..22: note = chemically synthesized
  source 1..22: mol_type = other DNA
cccctgctccccagagagtcag

SEQ ID NO: 16323 - DNA, 22 bp, synthetic construct
  misc_feature 1..22: note = chemically synthesized
  source 1..22: mol_type = other DNA
ccctgctccccagagagtcagt

SEQ ID NO: 16324 - DNA, 22 bp, synthetic construct
  misc_feature 1..22: note = chemically synthesized
  source 1..22: mol_type = other DNA
ctccccagagagtcagtttatc

SEQ ID NO: 16325 - DNA, 22 bp, synthetic construct
  misc_feature 1..22: note = chemically synthesized
  source 1..22: mol_type = other DNA
cccagagagtcagtttatcagc

SEQ ID NO: 16326 - DNA, 22 bp, synthetic construct
  misc_feature 1..22: note = chemically synthesized
  source 1..22: mol_type = other DNA
atcagcactggacgtaacatag

SEQ ID NO: 16327 - DNA, 22 bp, synthetic construct
  misc_feature 1..22: note = chemically synthesized
  source 1..22: mol_type = other DNA
tcagcactggacgtaacatagt

SEQ ID NO: 16328 - DNA, 22 bp, synthetic construct
  misc_feature 1..22: note = chemically synthesized
  source 1..22: mol_type = other DNA
gacgtaacatagttcataagag

SEQ ID NO: 16329 - DNA, 22 bp, synthetic construct
  misc_feature 1..22: note = chemically synthesized
  source 1..22: mol_type = other DNA
ataagagcattgccgcggaagc

SEQ ID NO: 16330 - DNA, 22 bp, synthetic construct
  misc_feature 1..22: note = chemically synthesized
  source 1..22: mol_type = other DNA
ccgcggaagccagcctgcctac

SEQ ID NO: 16331 - DNA, 22 bp, synthetic construct
  misc_feature 1..22: note = chemically synthesized
  source 1..22: mol_type = other DNA
cctacctgggcttccatcctgg

SEQ ID NO: 16332 - DNA, 22 bp, synthetic construct
  misc_feature 1..22: note = chemically synthesized
  source 1..22: mol_type = other DNA
cctgggcttccatcctggctcg

SEQ ID NO: 16333 - DNA, 22 bp, synthetic construct
  misc_feature 1..22: note = chemically synthesized
  source 1..22: mol_type = other DNA
ggcttccatcctggctcggcat

SEQ ID NO: 16334 - DNA, 22 bp, synthetic construct
  misc_feature 1..22: note = chemically synthesized
  source 1..22: mol_type = other DNA
ccatcctggctcggcatgtact

SEQ ID NO: 16335 - DNA, 22 bp, synthetic construct
  misc_feature 1..22: note = chemically synthesized
  source 1..22: mol_type = other DNA
catcctggctcggcatgtacta

SEQ ID NO: 16336 - DNA, 22 bp, synthetic construct
  misc_feature 1..22: note = chemically synthesized
  source 1..22: mol_type = other DNA
gctcggcatgtactaaccttgt

SEQ ID NO: 16337 - DNA, 22 bp, synthetic construct
  misc_feature 1..22: note = chemically synthesized
  source 1..22: mol_type = other DNA
ggcatgtactaaccttgttggc

SEQ ID NO: 16338 - DNA, 22 bp, synthetic construct
  misc_feature 1..22: note = chemically synthesized
  source 1..22: mol_type = other DNA
accttgttggcctaatcattta

SEQ ID NO: 16339 - DNA, 22 bp, synthetic construct
  misc_feature 1..22: note = chemically synthesized
  source 1..22: mol_type = other DNA
gttggcctaatcatttaactca

SEQ ID NO: 16340 - DNA, 22 bp, synthetic construct
  misc_feature 1..22: note = chemically synthesized
  source 1..22: mol_type = other DNA
ttggcctaatcatttaactcag

SEQ ID NO: 16341 - DNA, 22 bp, synthetic construct
  misc_feature 1..22: note = chemically synthesized
  source 1..22: mol_type = other DNA
gcctaatcatttaactcagcac

SEQ ID NO: 16342 - DNA, 22 bp, synthetic construct
  misc_feature 1..22: note = chemically synthesized
  source 1..22: mol_type = other DNA
atcatttaactcagcaccttgg

SEQ ID NO: 16343 - DNA, 22 bp, synthetic construct
  misc_feature 1..22: note = chemically synthesized
  source 1..22: mol_type = other DNA
aactcagcaccttggtctctgc

SEQ ID NO: 16344 - DNA, 22 bp, synthetic construct
  misc_feature 1..22: note = chemically synthesized
  source 1..22: mol_type = other DNA
actcagcaccttggtctctgca

SEQ ID NO: 16345 - DNA, 22 bp, synthetic construct
  misc_feature 1..22: note = chemically synthesized
  source 1..22: mol_type = other DNA
agcaccttggtctctgcatcta

SEQ ID NO: 16346 - DNA, 22 bp, synthetic construct
  misc_feature 1..22: note = chemically synthesized
  source 1..22: mol_type = other DNA
ggtctctgcatctactgtttct

SEQ ID NO: 16347 - DNA, 22 bp, synthetic construct
  misc_feature 1..22: note = chemically synthesized
  source 1..22: mol_type = other DNA
gtctctgcatctactgtttctg

SEQ ID NO: 16348 - DNA, 22 bp, synthetic construct
  misc_feature 1..22: note = chemically synthesized
  source 1..22: mol_type = other DNA
tgcatctactgtttctgtaaat

SEQ ID NO: 16349 - DNA, 22 bp, synthetic construct
  misc_feature 1..22: note = chemically synthesized
  source 1..22: mol_type = other DNA
catctactgtttctgtaaatag

SEQ ID NO: 16350 - DNA, 22 bp, synthetic construct
  misc_feature 1..22: note = chemically synthesized
  source 1..22: mol_type = other DNA
ctgtttctgtaaatagcagtaa

SEQ ID NO: 16351 - DNA, 22 bp, synthetic construct
  misc_feature 1..22: note = chemically synthesized
  source 1..22: mol_type = other DNA
tttctgtaaatagcagtaacta

SEQ ID NO: 16352 - DNA, 22 bp, synthetic construct
  misc_feature 1..22: note = chemically synthesized
  source 1..22: mol_type = other DNA
ctgtaaatagcagtaactacct

SEQ ID NO: 16353 - DNA, 22 bp, synthetic construct
  misc_feature 1..22: note = chemically synthesized
  source 1..22: mol_type = other DNA
tgtaaatagcagtaactacctc

SEQ ID NO: 16354 - DNA, 22 bp, synthetic construct
  misc_feature 1..22: note = chemically synthesized
  source 1..22: mol_type = other DNA
taaatagcagtaactacctcac

SEQ ID NO: 16355 - DNA, 22 bp, synthetic construct
  misc_feature 1..22: note = chemically synthesized
  source 1..22: mol_type = other DNA
cctcacagaaaagcacatagca

SEQ ID NO: 16356 - DNA, 22 bp, synthetic construct
  misc_feature 1..22: note = chemically synthesized
  source 1..22: mol_type = other DNA
acagaaaagcacatagcacatg

SEQ ID NO: 16357 - DNA, 22 bp, synthetic construct
  misc_feature 1..22: note = chemically synthesized
  source 1..22: mol_type = other DNA
gcacacactgtttaataaatgt

SEQ ID NO: 16358 - DNA, 22 bp, synthetic construct
  misc_feature 1..22: note = chemically synthesized
  source 1..22: mol_type = other DNA
tttaataaatgttaaccctgat

SEQ ID NO: 16359 - DNA, 22 bp, synthetic construct
  misc_feature 1..22: note = chemically synthesized
  source 1..22: mol_type = other DNA
aataaatgttaaccctgattat

SEQ ID NO: 16360 - DNA, 22 bp, synthetic construct
  misc_feature 1..22: note = chemically synthesized
  source 1..22: mol_type = other DNA
ataaatgttaaccctgattatt

SEQ ID NO: 16361 - DNA, 22 bp, synthetic construct
  misc_feature 1..22: note = chemically synthesized
  source 1..22: mol_type = other DNA
accctgattattattaagctgc

SEQ ID NO: 16362 - DNA, 22 bp, synthetic construct
  misc_feature 1..22: note = chemically synthesized
  source 1..22: mol_type = other DNA
attattattaagctgccagaga

SEQ ID NO: 16363 - DNA, 22 bp, synthetic construct
  misc_feature 1..22: note = chemically synthesized
  source 1..22: mol_type = other DNA
ttattaagctgccagagataac

SEQ ID NO: 16364 - DNA, 22 bp, synthetic construct
  misc_feature 1..22: note = chemically synthesized
  source 1..22: mol_type = other DNA
ttaagctgccagagataaccta

SEQ ID NO: 16365 - DNA, 22 bp, synthetic construct
  misc_feature 1..22: note = chemically synthesized
  source 1..22: mol_type = other DNA
agctgccagagataacctattt

SEQ ID NO: 16366 - DNA, 22 bp, synthetic construct
  misc_feature 1..22: note = chemically synthesized
  source 1..22: mol_type = other DNA
ccagagataacctatttgtaga

SEQ ID NO: 16367 - DNA, 22 bp, synthetic construct
  misc_feature 1..22: note = chemically synthesized
  source 1..22: mol_type = other DNA
tttgtagattataaaacagaaa

SEQ ID NO: 16368 - DNA, 22 bp, synthetic construct
  misc_feature 1..22: note = chemically synthesized
  source 1..22: mol_type = other DNA
gtagattataaaacagaaactc

SEQ ID NO: 16369 - DNA, 22 bp, synthetic construct
  misc_feature 1..22: note = chemically synthesized
  source 1..22: mol_type = other DNA
tagattataaaacagaaactca

SEQ ID NO: 16370 - DNA, 22 bp, synthetic construct
  misc_feature 1..22: note = chemically synthesized
  source 1..22: mol_type = other DNA
taaaacagaaactcagataatt

SEQ ID NO: 16371 - DNA, 22 bp, synthetic construct
  misc_feature 1..22: note = chemically synthesized
  source 1..22: mol_type = other DNA
agataattgatatgacttgcca

SEQ ID NO: 16372 - DNA, 22 bp, synthetic construct
  misc_feature 1..22: note = chemically synthesized
  source 1..22: mol_type = other DNA
atatgacttgccaaggacatgt

SEQ ID NO: 16373 - DNA, 22 bp, synthetic construct
  misc_feature 1..22: note = chemically synthesized
  source 1..22: mol_type = other DNA
gccaaggacatgtagttggtgg

SEQ ID NO: 16374 - DNA, 22 bp, synthetic construct
  misc_feature 1..22: note = chemically synthesized
  source 1..22: mol_type = other DNA
ccaaggacatgtagttggtggg

SEQ ID NO: 16375 - DNA, 22 bp, synthetic construct
  misc_feature 1..22: note = chemically synthesized
  source 1..22: mol_type = other DNA
gtgggtggcagaacgagggctg

SEQ ID NO: 16376 - DNA, 22 bp, synthetic construct
  misc_feature 1..22: note = chemically synthesized
  source 1..22: mol_type = other DNA
gagcccagttcccagggtgact

SEQ ID NO: 16377 - DNA, 22 bp, synthetic construct
  misc_feature 1..22: note = chemically synthesized
  source 1..22: mol_type = other DNA
ccagggtgacttttcattaccc

SEQ ID NO: 16378 - DNA, 22 bp, synthetic construct
  misc_feature 1..22: note = chemically synthesized
  source 1..22: mol_type = other DNA
ttcattaccccacaaaacaggc

SEQ ID NO: 16379 - DNA, 22 bp, synthetic construct
  misc_feature 1..22: note = chemically synthesized
  source 1..22: mol_type = other DNA
tcattaccccacaaaacaggct

SEQ ID NO: 16380 - DNA, 22 bp, synthetic construct
  misc_feature 1..22: note = chemically synthesized
  source 1..22: mol_type = other DNA
cattaccccacaaaacaggctg

SEQ ID NO: 16381 - DNA, 22 bp, synthetic construct
  misc_feature 1..22: note = chemically synthesized
  source 1..22: mol_type = other DNA
attaccccacaaaacaggctgt

SEQ ID NO: 16382 - DNA, 22 bp, synthetic construct
  misc_feature 1..22: note = chemically synthesized
  source 1..22: mol_type = other DNA
ccccacaaaacaggctgttgaa

SEQ ID NO: 16383 - DNA, 22 bp, synthetic construct
  misc_feature 1..22: note = chemically synthesized
  source 1..22: mol_type = other DNA
ttgaatcatctgtgtgtttcct

SEQ ID NO: 16384 - DNA, 22 bp, synthetic construct
  misc_feature 1..22: note = chemically synthesized
  source 1..22: mol_type = other DNA
aatcatctgtgtgtttcctttt

SEQ ID NO: 16385 - DNA, 22 bp, synthetic construct
  misc_feature 1..22: note = chemically synthesized
  source 1..22: mol_type = other DNA
tgtgtttccttttttcatacag

SEQ ID NO: 16386 - DNA, 22 bp, synthetic construct
  misc_feature 1..22: note = chemically synthesized
  source 1..22: mol_type = other DNA
ccttttttcatacagcatacat

SEQ ID NO: 16387 - DNA, 22 bp, synthetic construct
  misc_feature 1..22: note = chemically synthesized
  source 1..22: mol_type = other DNA
cttttttcatacagcatacatc

SEQ ID NO: 16388 - DNA, 22 bp, synthetic construct
  misc_feature 1..22: note = chemically synthesized
  source 1..22: mol_type = other DNA
ttttcatacagcatacatcatc

SEQ ID NO: 16389 - DNA, 22 bp, synthetic construct
  misc_feature 1..22: note = chemically synthesized
  source 1..22: mol_type = other DNA
tttcatacagcatacatcatct

SEQ ID NO: 16390 - DNA, 22 bp, synthetic construct
  misc_feature 1..22: note = chemically synthesized
  source 1..22: mol_type = other DNA
ttcatacagcatacatcatcta

SEQ ID NO: 16391 - DNA, 22 bp, synthetic construct
  misc_feature 1..22: note = chemically synthesized
  source 1..22: mol_type = other DNA
tcatacagcatacatcatctat

SEQ ID NO: 16392 - DNA, 22 bp, synthetic construct
  misc_feature 1..22: note = chemically synthesized
  source 1..22: mol_type = other DNA
catacagcatacatcatctatc

SEQ ID NO: 16393 - DNA, 22 bp, synthetic construct
  misc_feature 1..22: note = chemically synthesized
  source 1..22: mol_type = other DNA
atacagcatacatcatctatct

SEQ ID NO: 16394 - DNA, 22 bp, synthetic construct
  misc_feature 1..22: note = chemically synthesized
  source 1..22: mol_type = other DNA
tcttttttttttttttgagaca

SEQ ID NO: 16395 - DNA, 22 bp, synthetic construct
  misc_feature 1..22: note = chemically synthesized
  source 1..22: mol_type = other DNA
ttttttttttttgagacagggt

SEQ ID NO: 16396 - DNA, 22 bp, synthetic construct
  misc_feature 1..22: note = chemically synthesized
  source 1..22: mol_type = other DNA
tttttttttttgagacagggtc

SEQ ID NO: 16397 - DNA, 22 bp, synthetic construct
  misc_feature 1..22: note = chemically synthesized
  source 1..22: mol_type = other DNA
ttttttttttgagacagggtct

SEQ ID NO: 16398 - DNA, 22 bp, synthetic construct
  misc_feature 1..22: note = chemically synthesized
  source 1..22: mol_type = other DNA
tttttttttgagacagggtctt

SEQ ID NO: 16399 - DNA, 22 bp, synthetic construct
  misc_feature 1..22: note = chemically synthesized
  source 1..22: mol_type = other DNA
ttttttttgagacagggtctta

SEQ ID NO: 16400 - DNA, 22 bp, synthetic construct
  misc_feature 1..22: note = chemically synthesized
  source 1..22: mol_type = other DNA
tttttttgagacagggtcttac

SEQ ID NO: 16401 - DNA, 22 bp, synthetic construct
  misc_feature 1..22: note = chemically synthesized
  source 1..22: mol_type = other DNA
ttttttgagacagggtcttact

SEQ ID NO: 16402 - DNA, 22 bp, synthetic construct
  misc_feature 1..22: note = chemically synthesized
  source 1..22: mol_type = other DNA
tttttgagacagggtcttactc

SEQ ID NO: 16403 - DNA, 22 bp, synthetic construct
  misc_feature 1..22: note = chemically synthesized
  source 1..22: mol_type = other DNA
ttttgagacagggtcttactct

SEQ ID NO: 16404 - DNA, 22 bp, synthetic construct
  misc_feature 1..22: note = chemically synthesized
  source 1..22: mol_type = other DNA
tttgagacagggtcttactctg

SEQ ID NO: 16405 - DNA, 22 bp, synthetic construct
  misc_feature 1..22: note = chemically synthesized
  source 1..22: mol_type = other DNA
ttgagacagggtcttactctgt

SEQ ID NO: 16406 - DNA, 22 bp, synthetic construct
  misc_feature 1..22: note = chemically synthesized
  source 1..22: mol_type = other DNA
tgagacagggtcttactctgtt

SEQ ID NO: 16407 - DNA, 22 bp, synthetic construct
  misc_feature 1..22: note = chemically synthesized
  source 1..22: mol_type = other DNA
gagacagggtcttactctgttg

SEQ ID NO: 16408 - DNA, 22 bp, synthetic construct
  misc_feature 1..22: note = chemically synthesized
  source 1..22: mol_type = other DNA
agacagggtcttactctgttgc

SEQ ID NO: 16409 - DNA, 22 bp, synthetic construct
  misc_feature 1..22: note = chemically synthesized
  source 1..22: mol_type = other DNA
actctgttgcccaggctggagt

SEQ ID NO: 16410 - DNA, 22 bp, synthetic construct
  misc_feature 1..22: note = chemically synthesized
  source 1..22: mol_type = other DNA
ctctgttgcccaggctggagtg

SEQ ID NO: 16411 - DNA, 22 bp, synthetic construct
  misc_feature 1..22: note = chemically synthesized
  source 1..22: mol_type = other DNA
tgttgcccaggctggagtgcag

SEQ ID NO: 16412 - DNA, 22 bp, synthetic construct
  misc_feature 1..22: note = chemically synthesized
  source 1..22: mol_type = other DNA
ttgcccaggctggagtgcagtg

SEQ ID NO: 16413 - DNA, 22 bp, synthetic construct
  misc_feature 1..22: note = chemically synthesized
  source 1..22: mol_type = other DNA
cccaggctggagtgcagtggca

SEQ ID NO: 16414 - DNA, 22 bp, synthetic construct
  misc_feature 1..22: note = chemically synthesized
  source 1..22: mol_type = other DNA
gagtgcagtggcatgatcttga

SEQ ID NO: 16415 - DNA, 22 bp, synthetic construct
  misc_feature 1..22: note = chemically synthesized
  source 1..22: mol_type = other DNA
gactcactgcaacctcctccgc

SEQ ID NO: 16416 - DNA, 22 bp, synthetic construct
  misc_feature 1..22: note = chemically synthesized
  source 1..22: mol_type = other DNA
actcactgcaacctcctccgcc

SEQ ID NO: 16417 - DNA, 22 bp, synthetic construct
  misc_feature 1..22: note = chemically synthesized
  source 1..22: mol_type = other DNA
actgcaacctcctccgcctctc

SEQ ID NO: 16418 - DNA, 22 bp, synthetic construct
  misc_feature 1..22: note = chemically synthesized
  source 1..22: mol_type = other DNA
caacctcctccgcctctcacct

SEQ ID NO: 16419 - DNA, 22 bp, synthetic construct
  misc_feature 1..22: note = chemically synthesized
  source 1..22: mol_type = other DNA
ctccgcctctcacctcagcctc

SEQ ID NO: 16420 - DNA, 22 bp, synthetic construct
  misc_feature 1..22: note = chemically synthesized
  source 1..22: mol_type = other DNA
cgcctctcacctcagcctcctg

SEQ ID NO: 16421 - DNA, 22 bp, synthetic construct
  misc_feature 1..22: note = chemically synthesized
  source 1..22: mol_type = other DNA
tcacctcagcctcctgagtagc

SEQ ID NO: 16422 - DNA, 22 bp, synthetic construct
  misc_feature 1..22: note = chemically synthesized
  source 1..22: mol_type = other DNA
acctcagcctcctgagtagctg

SEQ ID NO: 16423 - DNA, 22 bp, synthetic construct
  misc_feature 1..22: note = chemically synthesized
  source 1..22: mol_type = other DNA
agcctcctgagtagctgggact

SEQ ID NO: 16424 - DNA, 22 bp, synthetic construct
  misc_feature 1..22: note = chemically synthesized
  source 1..22: mol_type = other DNA
ctgagtagctgggactacagca

SEQ ID NO: 16425 - DNA, 22 bp, synthetic construct
  misc_feature 1..22: note = chemically synthesized
  source 1..22: mol_type = other DNA
agtagctgggactacagcacca

SEQ ID NO: 16426 - DNA, 22 bp, synthetic construct
  misc_feature 1..22: note = chemically synthesized
  source 1..22: mol_type = other DNA
ggactacagcaccaacacgccc

SEQ ID NO: 16427 - DNA, 22 bp, synthetic construct
  misc_feature 1..22: note = chemically synthesized
  source 1..22: mol_type = other DNA
cagcaccaacacgcccagctaa

SEQ ID NO: 16428 - DNA, 22 bp, synthetic construct
  misc_feature 1..22: note = chemically synthesized
  source 1..22: mol_type = other DNA
attttcgtaatgtttttgtaga

SEQ ID NO: 16429 - DNA, 22 bp, synthetic construct
  misc_feature 1..22: note = chemically synthesized
  source 1..22: mol_type = other DNA
tcgtaatgtttttgtagagatg

SEQ ID NO: 16430 - DNA, 22 bp, synthetic construct
  misc_feature 1..22: note = chemically synthesized
  source 1..22: mol_type = other DNA
cgtaatgtttttgtagagatgg

SEQ ID NO: 16431 - DNA, 22 bp, synthetic construct
  misc_feature 1..22: note = chemically synthesized
  source 1..22: mol_type = other DNA
gtaatgtttttgtagagatgga

SEQ ID NO: 16432 - DNA, 22 bp, synthetic construct
  misc_feature 1..22: note = chemically synthesized
  source 1..22: mol_type = other DNA
ttgtagagatggagtttcgcca

SEQ ID NO: 16433 - DNA, 22 bp, synthetic construct
  misc_feature 1..22: note = chemically synthesized
  source 1..22: mol_type = other DNA
tgtagagatggagtttcgccat

SEQ ID NO: 16434 - DNA, 22 bp, synthetic construct
  misc_feature 1..22: note = chemically synthesized
  source 1..22: mol_type = other DNA
gtagagatggagtttcgccatg

SEQ ID NO: 16435 - DNA, 22 bp, synthetic construct
  misc_feature 1..22: note = chemically synthesized
  source 1..22: mol_type = other DNA
tagagatggagtttcgccatgt

SEQ ID NO: 16436 - DNA, 22 bp, synthetic construct
  misc_feature 1..22: note = chemically synthesized
  source 1..22: mol_type = other DNA
cgccatgttgcccaggctggtc

SEQ ID NO: 16437 - DNA, 22 bp, synthetic construct
  misc_feature 1..22: note = chemically synthesized
  source 1..22: mol_type = other DNA
gccatgttgcccaggctggtct

SEQ ID NO: 16438 - DNA, 22 bp, synthetic construct
  misc_feature 1..22: note = chemically synthesized
  source 1..22: mol_type = other DNA
cccaggctggtcttgaactcct

SEQ ID NO: 16439 - DNA, 22 bp, synthetic construct
  misc_feature 1..22: note = chemically synthesized
  source 1..22: mol_type = other DNA
gtcttgaactcctgagttcacc

SEQ ID NO: 16440 - DNA, 22 bp, synthetic construct
  misc_feature 1..22: note = chemically synthesized
  source 1..22: mol_type = other DNA
gaactcctgagttcacccagga

SEQ ID NO: 16441 - DNA, 22 bp, synthetic construct
  misc_feature 1..22: note = chemically synthesized
  source 1..22: mol_type = other DNA
aactcctgagttcacccaggag

SEQ ID NO: 16442 - DNA, 22 bp, synthetic construct
  misc_feature 1..22: note = chemically synthesized
  source 1..22: mol_type = other DNA
ctgagttcacccaggagtgatt

SEQ ID NO: 16443 - DNA, 22 bp, synthetic construct
  misc_feature 1..22: note = chemically synthesized
  source 1..22: mol_type = other DNA
agttcacccaggagtgattcgc

SEQ ID NO: 16444 - DNA, 22 bp, synthetic construct
  misc_feature 1..22: note = chemically synthesized
  source 1..22: mol_type = other DNA
acccaggagtgattcgcccacc

SEQ ID NO: 16445 - DNA, 22 bp, synthetic construct
  misc_feature 1..22: note = chemically synthesized
  source 1..22: mol_type = other DNA
gcccacctcggcctcccaaagt

SEQ ID NO: 16446 - DNA, 22 bp, synthetic construct
  misc_feature 1..22: note = chemically synthesized
  source 1..22: mol_type = other DNA
ggcctcccaaagtgctgggatt

SEQ ID NO: 16447 - DNA, 22 bp, synthetic construct
  misc_feature 1..22: note = chemically synthesized
  source 1..22: mol_type = other DNA
ccaaagtgctgggattacaggt

SEQ ID NO: 16448 - DNA, 22 bp, synthetic construct
  misc_feature 1..22: note = chemically synthesized
  source 1..22: mol_type = other DNA
ggattacaggtgtgagccacca

SEQ ID NO: 16449 - DNA, 22 bp, synthetic construct
  misc_feature 1..22: note = chemically synthesized
  source 1..22: mol_type = other DNA
caggtgtgagccaccatgcctg

SEQ ID NO: 16450 - DNA, 22 bp, synthetic construct
  misc_feature 1..22: note = chemically synthesized
  source 1..22: mol_type = other DNA
gccccatacatctttctttatg

SEQ ID NO: 16451 - DNA, 22 bp, synthetic construct
  misc_feature 1..22: note = chemically synthesized
  source 1..22: mol_type = other DNA
tctttatgttacctcttctgct

SEQ ID NO: 16452 - DNA, 22 bp, synthetic construct
  misc_feature 1..22: note = chemically synthesized
  source 1..22: mol_type = other DNA
ctttatgttacctcttctgctt

SEQ ID NO: 16453 - DNA, 22 bp, synthetic construct
  misc_feature 1..22: note = chemically synthesized
  source 1..22: mol_type = other DNA
tttatgttacctcttctgcttc

SEQ ID NO: 16454 - DNA, 22 bp, synthetic construct
  misc_feature 1..22: note = chemically synthesized
  source 1..22: mol_type = other DNA
tatgttacctcttctgcttcat

SEQ ID NO: 16455 - DNA, 22 bp, synthetic construct
  misc_feature 1..22: note = chemically synthesized
  source 1..22: mol_type = other DNA
atgttacctcttctgcttcata

SEQ ID NO: 16456 - DNA, 22 bp, synthetic construct
  misc_feature 1..22: note = chemically synthesized
  source 1..22: mol_type = other DNA
tgttacctcttctgcttcatac

SEQ ID NO: 16457 - DNA, 22 bp, synthetic construct
  misc_feature 1..22: note = chemically synthesized
  source 1..22: mol_type = other DNA
cctcttctgcttcatactaata

SEQ ID NO: 16458 - DNA, 22 bp, synthetic construct
  misc_feature 1..22: note = chemically synthesized
  source 1..22: mol_type = other DNA
ttctgcttcatactaataaaac

SEQ ID NO: 16459 - DNA, 22 bp, synthetic construct
  misc_feature 1..22: note = chemically synthesized
  source 1..22: mol_type = other DNA
ctgcttcatactaataaaactc

SEQ ID NO: 16460 - DNA, 22 bp, synthetic construct
  misc_feature 1..22: note = chemically synthesized
  source 1..22: mol_type = other DNA
tgcttcatactaataaaactct

SEQ ID NO: 16461 - DNA, 22 bp, synthetic construct
  misc_feature 1..22: note = chemically synthesized
  source 1..22: mol_type = other DNA
cttcatactaataaaactcttt

SEQ ID NO: 16462 - DNA, 22 bp, synthetic construct
  misc_feature 1..22: note = chemically synthesized
  source 1..22: mol_type = other DNA
catactaataaaactctttgct

SEQ ID NO: 16463 - DNA, 22 bp, synthetic construct
  misc_feature 1..22: note = chemically synthesized
  source 1..22: mol_type = other DNA
atactaataaaactctttgctc

SEQ ID NO: 16464 - DNA, 22 bp, synthetic construct
  misc_feature 1..22: note = chemically synthesized
  source 1..22: mol_type = other DNA
ataaaactctttgctcaaagcc

SEQ ID NO: 16465 - DNA, 22 bp, synthetic construct
  misc_feature 1..22: note = chemically synthesized
  source 1..22: mol_type = other DNA
tttgctcaaagcctatataact

SEQ ID NO: 16466 - DNA, 22 bp, synthetic construct
  misc_feature 1..22: note = chemically synthesized
  source 1..22: mol_type = other DNA
tgctcaaagcctatataactca

SEQ ID NO: 16467 - DNA, 22 bp, synthetic construct
  misc_feature 1..22: note = chemically synthesized
  source 1..22: mol_type = other DNA
gctcaaagcctatataactcag

SEQ ID NO: 16468 - DNA, 22 bp, synthetic construct
  misc_feature 1..22: note = chemically synthesized
  source 1..22: mol_type = other DNA
ctcaaagcctatataactcaga

SEQ ID NO: 16469 - DNA, 22 bp, synthetic construct
  misc_feature 1..22: note = chemically synthesized
  source 1..22: mol_type = other DNA
aaagcctatataactcagactt

SEQ ID NO: 16470 - DNA, 22 bp, synthetic construct
  misc_feature 1..22: note = chemically synthesized
  source 1..22: mol_type = other DNA
tataactcagacttttcacgaa

SEQ ID NO: 16471 - DNA, 22 bp, synthetic construct
  misc_feature 1..22: note = chemically synthesized
  source 1..22: mol_type = other DNA
agacttttcacgaaattcaact

SEQ ID NO: 16472 - DNA, 22 bp, synthetic construct
  misc_feature 1..22: note = chemically synthesized
  source 1..22: mol_type = other DNA
ttcacgaaattcaactgtccta

SEQ ID NO: 16473 - DNA, 22 bp, synthetic construct
  misc_feature 1..22: note = chemically synthesized
  source 1..22: mol_type = other DNA
tcacgaaattcaactgtcctac

SEQ ID NO: 16474 - DNA, 22 bp, synthetic construct
  misc_feature 1..22: note = chemically synthesized
  source 1..22: mol_type = other DNA
cacgaaattcaactgtcctacc

SEQ ID NO: 16475 - DNA, 22 bp, synthetic construct
  misc_feature 1..22: note = chemically synthesized
  source 1..22: mol_type = other DNA
acgaaattcaactgtcctaccc

SEQ ID NO: 16476 - DNA, 22 bp, synthetic construct
  misc_feature 1..22: note = chemically synthesized
  source 1..22: mol_type = other DNA
aactgtcctaccctttaaccca

SEQ ID NO: 16477 - DNA, 22 bp, synthetic construct
  misc_feature 1..22: note = chemically synthesized
  source 1..22: mol_type = other DNA
tcctaccctttaacccatatga

SEQ ID NO: 16478 - DNA, 22 bp, synthetic construct
  misc_feature 1..22: note = chemically synthesized
  source 1..22: mol_type = other DNA
ccctttaacccatatgaaatag

SEQ ID NO: 16479 - DNA, 22 bp, synthetic construct
  misc_feature 1..22: note = chemically synthesized
  source 1..22: mol_type = other DNA
taacccatatgaaataggcttt

SEQ ID NO: 16480 - DNA, 22 bp, synthetic construct
  misc_feature 1..22: note = chemically synthesized
  source 1..22: mol_type = other DNA
aacccatatgaaataggctttc

SEQ ID NO: 16481 - DNA, 22 bp, synthetic construct
  misc_feature 1..22: note = chemically synthesized
  source 1..22: mol_type = other DNA
acccatatgaaataggctttcc

SEQ ID NO: 16482 - DNA, 22 bp, synthetic construct
  misc_feature 1..22: note = chemically synthesized
  source 1..22: mol_type = other DNA
tcctgtattttcaactcactgg

SEQ ID NO: 16483 - DNA, 22 bp, synthetic construct
  misc_feature 1..22: note = chemically synthesized
  source 1..22: mol_type = other DNA
cctgtattttcaactcactggt

SEQ ID NO: 16484 - DNA, 22 bp, synthetic construct
  misc_feature 1..22: note = chemically synthesized
  source 1..22: mol_type = other DNA
ctgtattttcaactcactggta

SEQ ID NO: 16485 - DNA, 22 bp, synthetic construct
  misc_feature 1..22: note = chemically synthesized
  source 1..22: mol_type = other DNA
tattttcaactcactggtagga

SEQ ID NO: 16486 - DNA, 22 bp, synthetic construct
  misc_feature 1..22: note = chemically synthesized
  source 1..22: mol_type = other DNA
tcaactcactggtaggattttt

SEQ ID NO: 16487 - DNA, 22 bp, synthetic construct
  misc_feature 1..22: note = chemically synthesized
  source 1..22: mol_type = other DNA
caactcactggtaggatttttt

SEQ ID NO: 16488 - DNA, 22 bp, synthetic construct
  misc_feature 1..22: note = chemically synthesized
  source 1..22: mol_type = other DNA
aactcactggtaggattttttc

SEQ ID NO: 16489 - DNA, 22 bp, synthetic construct
  misc_feature 1..22: note = chemically synthesized
  source 1..22: mol_type = other DNA
actggtaggattttttctgtct

SEQ ID NO: 16490 - DNA, 22 bp, synthetic construct
  misc_feature 1..22: note = chemically synthesized
  source 1..22: mol_type = other DNA
gtaggattttttctgtcttccc

SEQ ID NO: 16491 - DNA, 22 bp, synthetic construct
  misc_feature 1..22: note = chemically synthesized
  source 1..22: mol_type = other DNA
tttctgtcttccccctttatgt

SEQ ID NO: 16492 - DNA, 22 bp, synthetic construct
  misc_feature 1..22: note = chemically synthesized
  source 1..22: mol_type = other DNA
ttctgtcttccccctttatgta

SEQ ID NO: 16493 - DNA, 22 bp, synthetic construct
  misc_feature 1..22: note = chemically synthesized
  source 1..22: mol_type = other DNA
tctgtcttccccctttatgtag

SEQ ID NO: 16494 - DNA, 22 bp, synthetic construct
  misc_feature 1..22: note = chemically synthesized
  source 1..22: mol_type = other DNA
ctgtcttccccctttatgtaga

SEQ ID NO: 16495 - DNA, 22 bp, synthetic construct
  misc_feature 1..22: note = chemically synthesized
  source 1..22: mol_type = other DNA
tgtcttccccctttatgtagat

SEQ ID NO: 16496 - DNA, 22 bp, synthetic construct
  misc_feature 1..22: note = chemically synthesized
  source 1..22: mol_type = other DNA
tcttccccctttatgtagatga

SEQ ID NO: 16497 - DNA, 22 bp, synthetic construct
  misc_feature 1..22: note = chemically synthesized
  source 1..22: mol_type = other DNA
ccccctttatgtagatgatcca

SEQ ID NO: 16498 - DNA, 22 bp, synthetic construct
  misc_feature 1..22: note = chemically synthesized
  source 1..22: mol_type = other DNA
cccctttatgtagatgatccaa

SEQ ID NO: 16499 - DNA, 22 bp, synthetic construct
  misc_feature 1..22: note = chemically synthesized
  source 1..22: mol_type = other DNA
tatgtagatgatccaaagtcag

SEQ ID NO: 16500 - DNA, 22 bp, synthetic construct
  misc_feature 1..22: note = chemically synthesized
  source 1..22: mol_type = other DNA
atgtagatgatccaaagtcaga

SEQ ID NO: 16501 - DNA, 22 bp, synthetic construct
  misc_feature 1..22: note = chemically synthesized
  source 1..22: mol_type = other DNA
tgtagatgatccaaagtcagag

SEQ ID NO: 16502 - DNA, 22 bp, synthetic construct
  misc_feature 1..22: note = chemically synthesized
  source 1..22: mol_type = other DNA
gaagcatgagtagcccgtggct

SEQ ID NO: 16503 - DNA, 22 bp, synthetic construct
  misc_feature 1..22: note = chemically synthesized
  source 1..22: mol_type = other DNA
cctgaatagcctggggaaagca

SEQ ID NO: 16504 - DNA, 22 bp, synthetic construct
  misc_feature 1..22: note = chemically synthesized
  source 1..22: mol_type = other DNA
ctgaatagcctggggaaagcaa

SEQ ID NO: 16505 - DNA, 22 bp, synthetic construct
  misc_feature 1..22: note = chemically synthesized
  source 1..22: mol_type = other DNA
aatagcctggggaaagcaactt

SEQ ID NO: 16506 - DNA, 22 bp, synthetic construct
  misc_feature 1..22: note = chemically synthesized
  source 1..22: mol_type = other DNA
gggaaagcaacttctgatggac

SEQ ID NO: 16507 - DNA, 22 bp, synthetic construct
  misc_feature 1..22: note = chemically synthesized
  source 1..22: mol_type = other DNA
ctgatggacagacattgcgaga

SEQ ID NO: 16508 - DNA, 22 bp, synthetic construct
  misc_feature 1..22: note = chemically synthesized
  source 1..22: mol_type = other DNA
tgatggacagacattgcgagag

SEQ ID NO: 16509 - DNA, 22 bp, synthetic construct
  misc_feature 1..22: note = chemically synthesized
  source 1..22: mol_type = other DNA
atggacagacattgcgagagcg

SEQ ID NO: 16510 - DNA, 22 bp, synthetic construct
  misc_feature 1..22: note = chemically synthesized
  source 1..22: mol_type = other DNA
cgagagcgaatgccagcctctt

SEQ ID NO: 16511 - DNA, 22 bp, synthetic construct
  misc_feature 1..22: note = chemically synthesized
  source 1..22: mol_type = other DNA
ttttcttgctgatctcctctct

SEQ ID NO: 16512 - DNA, 22 bp, synthetic construct
  misc_feature 1..22: note = chemically synthesized
  source 1..22: mol_type = other DNA
ttcttgctgatctcctctctat

SEQ ID NO: 16513 - DNA, 22 bp, synthetic construct
  misc_feature 1..22: note = chemically synthesized
  source 1..22: mol_type = other DNA
tcttgctgatctcctctctata

SEQ ID NO: 16514 - DNA, 22 bp, synthetic construct
  misc_feature 1..22: note = chemically synthesized
  source 1..22: mol_type = other DNA
cttgctgatctcctctctatat

SEQ ID NO: 16515 - DNA, 22 bp, synthetic construct
  misc_feature 1..22: note = chemically synthesized
  source 1..22: mol_type = other DNA
ttgctgatctcctctctatatg

SEQ ID NO: 16516 - DNA, 22 bp, synthetic construct
  misc_feature 1..22: note = chemically synthesized
  source 1..22: mol_type = other DNA
gctgatctcctctctatatggt

SEQ ID NO: 16517 - DNA, 22 bp, synthetic construct
  misc_feature 1..22: note = chemically synthesized
  source 1..22: mol_type = other DNA
ctgatctcctctctatatggtt

SEQ ID NO: 16518 - DNA, 22 bp, synthetic construct
  misc_feature 1..22: note = chemically synthesized
  source 1..22: mol_type = other DNA
atctcctctctatatggttctt

SEQ ID NO: 16519 - DNA, 22 bp, synthetic construct
  misc_feature 1..22: note = chemically synthesized
  source 1..22: mol_type = other DNA
ctctctatatggttcttaccac

SEQ ID NO: 16520 - DNA, 22 bp, synthetic construct
  misc_feature 1..22: note = chemically synthesized
  source 1..22: mol_type = other DNA
tctatatggttcttaccactta

SEQ ID NO: 16521 - DNA, 22 bp, synthetic construct
  misc_feature 1..22: note = chemically synthesized
  source 1..22: mol_type = other DNA
tatatggttcttaccacttaaa

SEQ ID NO: 16522 - DNA, 22 bp, synthetic construct
  misc_feature 1..22: note = chemically synthesized
  source 1..22: mol_type = other DNA
tatggttcttaccacttaaaga

SEQ ID NO: 16523 - DNA, 22 bp, synthetic construct
  misc_feature 1..22: note = chemically synthesized
  source 1..22: mol_type = other DNA
ttaccacttaaagacgaggttg

SEQ ID NO: 16524 - DNA, 22 bp, synthetic construct
  misc_feature 1..22: note = chemically synthesized
  source 1..22: mol_type = other DNA
accacttaaagacgaggttgag

SEQ ID NO: 16525 - DNA, 22 bp, synthetic construct
  misc_feature 1..22: note = chemically synthesized
  source 1..22: mol_type = other DNA
ccacttaaagacgaggttgagc

SEQ ID NO: 16526 - DNA, 22 bp, synthetic construct
  misc_feature 1..22: note = chemically synthesized
  source 1..22: mol_type = other DNA
aaagacgaggttgagccagtct

SEQ ID NO: 16527 - DNA, 22 bp, synthetic construct
  misc_feature 1..22: note = chemically synthesized
  source 1..22: mol_type = other DNA
aagacgaggttgagccagtctc

SEQ ID NO: 16528 - DNA, 22 bp, synthetic construct
  misc_feature 1..22: note = chemically synthesized
  source 1..22: mol_type = other DNA
agccagtctccaatcacagcta

SEQ ID NO: 16529 - DNA, 22 bp, synthetic construct
  misc_feature 1..22: note = chemically synthesized
  source 1..22: mol_type = other DNA
caatcacagctacccaaaggag

SEQ ID NO: 16530 - DNA, 22 bp, synthetic construct
  misc_feature 1..22: note = chemically synthesized
  source 1..22: mol_type = other DNA
cccaaaggagtttaatgcccac

SEQ ID NO: 16531 - DNA, 22 bp, synthetic construct
  misc_feature 1..22: note = chemically synthesized
  source 1..22: mol_type = other DNA
aatgcccacagcttcctgaaga

SEQ ID NO: 16532 - DNA, 22 bp, synthetic construct
  misc_feature 1..22: note = chemically synthesized
  source 1..22: mol_type = other DNA
atgcccacagcttcctgaagat

SEQ ID NO: 16533 - DNA, 22 bp, synthetic construct
  misc_feature 1..22: note = chemically synthesized
  source 1..22: mol_type = other DNA
cctgaagatggaaccagatggg

SEQ ID NO: 16534 - DNA, 22 bp, synthetic construct
  misc_feature 1..22: note = chemically synthesized
  source 1..22: mol_type = other DNA
ctgaagatggaaccagatgggg

SEQ ID NO: 16535 - DNA, 22 bp, synthetic construct
  misc_feature 1..22: note = chemically synthesized
  source 1..22: mol_type = other DNA
aagatggaaccagatggggaag

SEQ ID NO: 16536 - DNA, 22 bp, synthetic construct
  misc_feature 1..22: note = chemically synthesized
  source 1..22: mol_type = other DNA
ctgaggtctgcgatcacggaca

SEQ ID NO: 16537 - DNA, 22 bp, synthetic construct
  misc_feature 1..22: note = chemically synthesized
  source 1..22: mol_type = other DNA
aggtctgcgatcacggacacca

SEQ ID NO: 16538 - DNA, 22 bp, synthetic construct
  misc_feature 1..22: note = chemically synthesized
  source 1..22: mol_type = other DNA
cgatcacggacaccaagatgaa

SEQ ID NO: 16539 - DNA, 22 bp, synthetic construct
  misc_feature 1..22: note = chemically synthesized
  source 1..22: mol_type = other DNA
ggagtcttggtaattcacctgg

SEQ ID NO: 16540 - DNA, 22 bp, synthetic construct
  misc_feature 1..22: note = chemically synthesized
  source 1..22: mol_type = other DNA
ggtaattcacctggaggtaatg

SEQ ID NO: 16541 - DNA, 22 bp, synthetic construct
  misc_feature 1..22: note = chemically synthesized
  source 1..22: mol_type = other DNA
gtaattcacctggaggtaatgt

SEQ ID NO: 16542 - DNA, 22 bp, synthetic construct
  misc_feature 1..22: note = chemically synthesized
  source 1..22: mol_type = other DNA
acctggaggtaatgtgttgact

SEQ ID NO: 16543 - DNA, 22 bp, synthetic construct
  misc_feature 1..22: note = chemically synthesized
  source 1..22: mol_type = other DNA
gaggtaatgtgttgactggatc

SEQ ID NO: 16544 - DNA, 22 bp, synthetic construct
  misc_feature 1..22: note = chemically synthesized
  source 1..22: mol_type = other DNA
actggatcccaaagtcatggag

SEQ ID NO: 16545 - DNA, 22 bp, synthetic construct
  misc_feature 1..22: note = chemically synthesized
  source 1..22: mol_type = other DNA
gatcccaaagtcatggagaaca

SEQ ID NO: 16546 - DNA, 22 bp, synthetic construct
  misc_feature 1..22: note = chemically synthesized
  source 1..22: mol_type = other DNA
attccttcctccatcctcattt

SEQ ID NO: 16547 - DNA, 22 bp, synthetic construct
  misc_feature 1..22: note = chemically synthesized
  source 1..22: mol_type = other DNA
cttcctccatcctcatttcctt

SEQ ID NO: 16548 - DNA, 22 bp, synthetic construct
  misc_feature 1..22: note = chemically synthesized
  source 1..22: mol_type = other DNA
cctccatcctcatttccttggc

SEQ ID NO: 16549 - DNA, 22 bp, synthetic construct
  misc_feature 1..22: note = chemically synthesized
  source 1..22: mol_type = other DNA
ctccatcctcatttccttggca

SEQ ID NO: 16550 - DNA, 22 bp, synthetic construct
  misc_feature 1..22: note = chemically synthesized
  source 1..22: mol_type = other DNA
catcctcatttccttggcacct

SEQ ID NO: 16551 - DNA, 22 bp, synthetic construct
  misc_feature 1..22: note = chemically synthesized
  source 1..22: mol_type = other DNA
atttccttggcacctcaggaag

SEQ ID NO: 16552 - DNA, 22 bp, synthetic construct
  misc_feature 1..22: note = chemically synthesized
  source 1..22: mol_type = other DNA
ccttggcacctcaggaagatgt

SEQ ID NO: 16553 - DNA, 22 bp, synthetic construct
  misc_feature 1..22: note = chemically synthesized
  source 1..22: mol_type = other DNA
cttggcacctcaggaagatgtc

SEQ ID NO: 16554 - DNA, 22 bp, synthetic construct
  misc_feature 1..22: note = chemically synthesized
  source 1..22: mol_type = other DNA
ggcacctcaggaagatgtcagc

SEQ ID NO: 16555 - DNA, 22 bp, synthetic construct
  misc_feature 1..22: note = chemically synthesized
  source 1..22: mol_type = other DNA
gcacctcaggaagatgtcagca

SEQ ID NO: 16556 - DNA, 22 bp, synthetic construct
  misc_feature 1..22: note = chemically synthesized
  source 1..22: mol_type = other DNA
aggaagatgtcagcagagccct

SEQ ID NO: 16557 - DNA, 22 bp, synthetic construct
  misc_feature 1..22: note = chemically synthesized
  source 1..22: mol_type = other DNA
gcagttattccaggcttggtgg

SEQ ID NO: 16558 - DNA, 22 bp, synthetic construct
  misc_feature 1..22: note = chemically synthesized
  source 1..22: mol_type = other DNA
cagttattccaggcttggtggt

SEQ ID NO: 16559 - DNA, 22 bp, synthetic construct
  misc_feature 1..22: note = chemically synthesized
  source 1..22: mol_type = other DNA
ttccaggcttggtggtgattgc

SEQ ID NO: 16560 - DNA, 22 bp, synthetic construct
  misc_feature 1..22: note = chemically synthesized
  source 1..22: mol_type = other DNA
caggcttggtggtgattgctct

SEQ ID NO: 16561 - DNA, 22 bp, synthetic construct
  misc_feature 1..22: note = chemically synthesized
  source 1..22: mol_type = other DNA
ggtggtgattgctctgctatga

SEQ ID NO: 16562 - DNA, 22 bp, synthetic construct
  misc_feature 1..22: note = chemically synthesized
  source 1..22: mol_type = other DNA
gtggtgattgctctgctatgag

SEQ ID NO: 16563 - DNA, 22 bp, synthetic construct
  misc_feature 1..22: note = chemically synthesized
  source 1..22: mol_type = other DNA
ctctgctatgagtctgtgcctt

SEQ ID NO: 16564 - DNA, 22 bp, synthetic construct
  misc_feature 1..22: note = chemically synthesized
  source 1..22: mol_type = other DNA
tgctatgagtctgtgccttgcc

SEQ ID NO: 16565 - DNA, 22 bp, synthetic construct
  misc_feature 1..22: note = chemically synthesized
  source 1..22: mol_type = other DNA
ctatgagtctgtgccttgcccc

SEQ ID NO: 16566 - DNA, 22 bp, synthetic construct
  misc_feature 1..22: note = chemically synthesized
  source 1..22: mol_type = other DNA
tgagtctgtgccttgcccctgt

SEQ ID NO: 16567 - DNA, 22 bp, synthetic construct
  misc_feature 1..22: note = chemically synthesized
  source 1..22: mol_type = other DNA
tgccttgcccctgttttatatg

SEQ ID NO: 16568 - DNA, 22 bp, synthetic construct
  misc_feature 1..22: note = chemically synthesized
  source 1..22: mol_type = other DNA
gcccctgttttatatgccctgt

SEQ ID NO: 16569 - DNA, 22 bp, synthetic construct
  misc_feature 1..22: note = chemically synthesized
  source 1..22: mol_type = other DNA
cccctgttttatatgccctgta

SEQ ID NO: 16570 - DNA, 22 bp, synthetic construct
  misc_feature 1..22: note = chemically synthesized
  source 1..22: mol_type = other DNA
ttttatatgccctgtatccagt

SEQ ID NO: 16571 - DNA, 22 bp, synthetic construct
  misc_feature 1..22: note = chemically synthesized
  source 1..22: mol_type = other DNA
tatatgccctgtatccagtatt

SEQ ID NO: 16572 - DNA, 22 bp, synthetic construct
  misc_feature 1..22: note = chemically synthesized
  source 1..22: mol_type = other DNA
atatgccctgtatccagtattc

SEQ ID NO: 16573 - DNA, 22 bp, synthetic construct
  misc_feature 1..22: note = chemically synthesized
  source 1..22: mol_type = other DNA
tatgccctgtatccagtattca

SEQ ID NO: 16574 - DNA, 22 bp, synthetic construct
  misc_feature 1..22: note = chemically synthesized
  source 1..22: mol_type = other DNA
tatccagtattcaggtcaaccc

SEQ ID NO: 16575 - DNA, 22 bp, synthetic construct
  misc_feature 1..22: note = chemically synthesized
  source 1..22: mol_type = other DNA
aggtcaacccagccctgatctt

SEQ ID NO: 16576 - DNA, 22 bp, synthetic construct
  misc_feature 1..22: note = chemically synthesized
  source 1..22: mol_type = other DNA
atctttggactcaaaaaccacg

SEQ ID NO: 16577 - DNA, 22 bp, synthetic construct
  misc_feature 1..22: note = chemically synthesized
  source 1..22: mol_type = other DNA
tggactcaaaaaccacgtttgt

SEQ ID NO: 16578 - DNA, 22 bp, synthetic construct
  misc_feature 1..22: note = chemically synthesized
  source 1..22: mol_type = other DNA
ggactcaaaaaccacgtttgtc

SEQ ID NO: 16579 - DNA, 22 bp, synthetic construct
  misc_feature 1..22: note = chemically synthesized
  source 1..22: mol_type = other DNA
gactcaaaaaccacgtttgtct

SEQ ID NO: 16580 - DNA, 22 bp, synthetic construct
  misc_feature 1..22: note = chemically synthesized
  source 1..22: mol_type = other DNA
aaaaaccacgtttgtctaaaat

SEQ ID NO: 16581 - DNA, 20 bp, synthetic construct
  misc_feature 1..20: note = chemically synthesized
  source 1..20: mol_type = other DNA
tgcgtccactgctcttctga

SEQ ID NO: 16582 - DNA, 20 bp, synthetic construct
  misc_feature 1..20: note = chemically synthesized
  source 1..20: mol_type = other DNA
tcttctgacagcatcattta

SEQ ID NO: 16583 - DNA, 20 bp, synthetic construct
  misc_feature 1..20: note = chemically synthesized
  source 1..20: mol_type = other DNA
cttctgacagcatcatttac

SEQ ID NO: 16584 - DNA, 20 bp, synthetic construct
  misc_feature 1..20: note = chemically synthesized
  source 1..20: mol_type = other DNA
aggttcacactgttccacct

SEQ ID NO: 16585 - DNA, 20 bp, synthetic construct
  misc_feature 1..20: note = chemically synthesized
  source 1..20: mol_type = other DNA
ttcatattatgctcaaaata

SEQ ID NO: 16586 - DNA, 20 bp, synthetic construct
  misc_feature 1..20: note = chemically synthesized
  source 1..20: mol_type = other DNA
tgctcaaaatatggacctat

SEQ ID NO: 16587 - DNA, 20 bp, synthetic construct
  misc_feature 1..20: note = chemically synthesized
  source 1..20: mol_type = other DNA
aatatggacctatcagaaaa

SEQ ID NO: 16588 - DNA, 20 bp, synthetic construct
  misc_feature 1..20: note = chemically synthesized
  source 1..20: mol_type = other DNA
ccattcatctgctgttgttt

SEQ ID NO: 16589 - DNA, 20 bp, synthetic construct
  misc_feature 1..20: note = chemically synthesized
  source 1..20: mol_type = other DNA
tttggcctttgtctgaatca

SEQ ID NO: 16590 - DNA, 20 bp, synthetic construct
  misc_feature 1..20: note = chemically synthesized
  source 1..20: mol_type = other DNA
cctttgtctgaatcacagta

SEQ ID NO: 16591 - DNA, 20 bp, synthetic construct
  misc_feature 1..20: note = chemically synthesized
  source 1..20: mol_type = other DNA
tagatgcctccaactgttaa

SEQ ID NO: 16592 - DNA, 20 bp, synthetic construct
  misc_feature 1..20: note = chemically synthesized
  source 1..20: mol_type = other DNA
agatgcctccaactgttaaa

SEQ ID NO: 16593 - DNA, 20 bp, synthetic construct
  misc_feature 1..20: note = chemically synthesized
  source 1..20: mol_type = other DNA
tccaactgttaaaaggaaaa

SEQ ID NO: 16594 - DNA, 20 bp, synthetic construct
  misc_feature 1..20: note = chemically synthesized
  source 1..20: mol_type = other DNA
aaaaagtttctattatcatt

SEQ ID NO: 16595 - DNA, 20 bp, synthetic construct
  misc_feature 1..20: note = chemically synthesized
  source 1..20: mol_type = other DNA
aaaagtttctattatcattc

SEQ ID NO: 16596 - DNA, 20 bp, synthetic construct
  misc_feature 1..20: note = chemically synthesized
  source 1..20: mol_type = other DNA
gtttctattatcattcaggt

SEQ ID NO: 16597 - DNA, 20 bp, synthetic construct
  misc_feature 1..20: note = chemically synthesized
  source 1..20: mol_type = other DNA
tcaggttagcaatttgttta

SEQ ID NO: 16598 - DNA, 20 bp, synthetic construct
  misc_feature 1..20: note = chemically synthesized
  source 1..20: mol_type = other DNA
agcaatttgtttaaagtaat

SEQ ID NO: 16599 - DNA, 20 bp, synthetic construct
  misc_feature 1..20: note = chemically synthesized
  source 1..20: mol_type = other DNA
gcaatttgtttaaagtaata

SEQ ID NO: 16600 - DNA, 20 bp, synthetic construct
  misc_feature 1..20: note = chemically synthesized
  source 1..20: mol_type = other DNA
caatttgtttaaagtaataa

SEQ ID NO: 16601 - DNA, 20 bp, synthetic construct
  misc_feature 1..20: note = chemically synthesized
  source 1..20: mol_type = other DNA
ttgtttaaagtaataaggga

SEQ ID NO: 16602 - DNA, 20 bp, synthetic construct
  misc_feature 1..20: note = chemically synthesized
  source 1..20: mol_type = other DNA
aagtaataagggatggaaat

SEQ ID NO: 16603 - DNA, 20 bp, synthetic construct
  misc_feature 1..20: note = chemically synthesized
  source 1..20: mol_type = other DNA
ataagggatggaaatgagtt

SEQ ID NO: 16604 - DNA, 20 bp, synthetic construct
  misc_feature 1..20: note = chemically synthesized
  source 1..20: mol_type = other DNA
atgagttcagatttttaaat

SEQ ID NO: 16605 - DNA, 20 bp, synthetic construct
  misc_feature 1..20: note = chemically synthesized
  source 1..20: mol_type = other DNA
cagatttttaaattagcatt

SEQ ID NO: 16606 - DNA, 20 bp, synthetic construct
  misc_feature 1..20: note = chemically synthesized
  source 1..20: mol_type = other DNA
agatttttaaattagcattt

SEQ ID NO: 16607 - DNA, 20 bp, synthetic construct
  misc_feature 1..20: note = chemically synthesized
  source 1..20: mol_type = other DNA
attagcatttaggatccact

SEQ ID NO: 16608 - DNA, 20 bp, synthetic construct
  misc_feature 1..20: note = chemically synthesized
  source 1..20: mol_type = other DNA
atttaggatccactaagccc

SEQ ID NO: 16609 - DNA, 20 bp, synthetic construct
  misc_feature 1..20: note = chemically synthesized
  source 1..20: mol_type = other DNA
tttaggatccactaagccca

SEQ ID NO: 16610 - DNA, 20 bp, synthetic construct
  misc_feature 1..20: note = chemically synthesized
  source 1..20: mol_type = other DNA
tatttacctttcaaaaataa

SEQ ID NO: 16611 - DNA, 20 bp, synthetic construct
  misc_feature 1..20: note = chemically synthesized
  source 1..20: mol_type = other DNA
atagtatttgacatattgtt

SEQ ID NO: 16612 - DNA, 20 bp, synthetic construct
  misc_feature 1..20: note = chemically synthesized
  source 1..20: mol_type = other DNA
tagtatttgacatattgtta

SEQ ID NO: 16613 - DNA, 20 bp, synthetic construct
  misc_feature 1..20: note = chemically synthesized
  source 1..20: mol_type = other DNA
agtatttgacatattgttaa

SEQ ID NO: 16614 - DNA, 20 bp, synthetic construct
  misc_feature 1..20: note = chemically synthesized
  source 1..20: mol_type = other DNA
tgttaagggacaccaacgaa

SEQ ID NO: 16615 - DNA, 20 bp, synthetic construct
  misc_feature 1..20: note = chemically synthesized
  source 1..20: mol_type = other DNA
tcaattctgtgcatgtttta

SEQ ID NO: 16616 - DNA, 20 bp, synthetic construct
  misc_feature 1..20: note = chemically synthesized
  source 1..20: mol_type = other DNA
gcatgttttaaagtcccttc

SEQ ID NO: 16617 - DNA, 20 bp, synthetic construct
  misc_feature 1..20: note = chemically synthesized
  source 1..20: mol_type = other DNA
catgttttaaagtcccttct

SEQ ID NO: 16618 - DNA, 20 bp, synthetic construct
  misc_feature 1..20: note = chemically synthesized
  source 1..20: mol_type = other DNA
ccttctaggtgcatgtgaaa

SEQ ID NO: 16619 - DNA, 20 bp, synthetic construct
  misc_feature 1..20: note = chemically synthesized
  source 1..20: mol_type = other DNA
tctaggtgcatgtgaaatag

SEQ ID NO: 16620 - DNA, 20 bp, synthetic construct
  misc_feature 1..20: note = chemically synthesized
  source 1..20: mol_type = other DNA
aggtgcatgtgaaatagcag

SEQ ID NO: 16621 - DNA, 20 bp, synthetic construct
  misc_feature 1..20: note = chemically synthesized
  source 1..20: mol_type = other DNA
ggtgcatgtgaaatagcagc

SEQ ID NO: 16622 - DNA, 20 bp, synthetic construct
  misc_feature 1..20: note = chemically synthesized
  source 1..20: mol_type = other DNA
agcagcaggctgatgccgca

SEQ ID NO: 16623 - DNA, 20 bp, synthetic construct
  misc_feature 1..20: note = chemically synthesized
  source 1..20: mol_type = other DNA
cagcaggctgatgccgcaaa

SEQ ID NO: 16624 - DNA, 20 bp, synthetic construct
  misc_feature 1..20: note = chemically synthesized
  source 1..20: mol_type = other DNA
agcaggctgatgccgcaaag

SEQ ID NO: 16625 - DNA, 20 bp, synthetic construct
  misc_feature 1..20: note = chemically synthesized
  source 1..20: mol_type = other DNA
aagaggtcaaatacctcaaa

SEQ ID NO: 16626 - DNA, 20 bp, synthetic construct
  misc_feature 1..20: note = chemically synthesized
  source 1..20: mol_type = other DNA
ggtcaaatacctcaaaaaga

SEQ ID NO: 16627 - DNA, 20 bp, synthetic construct
  misc_feature 1..20: note = chemically synthesized
  source 1..20: mol_type = other DNA
tcaaatacctcaaaaagaaa

SEQ ID NO: 16628 - DNA, 20 bp, synthetic construct
  misc_feature 1..20: note = chemically synthesized
  source 1..20: mol_type = other DNA
tcaaaaagaaagagtctgaa

SEQ ID NO: 16629 - DNA, 20 bp, synthetic construct
  misc_feature 1..20: note = chemically synthesized
  source 1..20: mol_type = other DNA
aaagagtctgaaaagacaat

SEQ ID NO: 16630 - DNA, 20 bp, synthetic construct
  misc_feature 1..20: note = chemically synthesized
  source 1..20: mol_type = other DNA
agagtctgaaaagacaattg

SEQ ID NO: 16631 - DNA, 20 bp, synthetic construct
  misc_feature 1..20: note = chemically synthesized
  source 1..20: mol_type = other DNA
ttggagtaactacttgccta

SEQ ID NO: 16632 - DNA, 20 bp, synthetic construct
  misc_feature 1..20: note = chemically synthesized
  source 1..20: mol_type = other DNA
taactacttgcctaaagctc

SEQ ID NO: 16633 - DNA, 20 bp, synthetic construct
  misc_feature 1..20: note = chemically synthesized
  source 1..20: mol_type = other DNA
ctaaagctccagtcactttg

SEQ ID NO: 16634 - DNA, 20 bp, synthetic construct
  misc_feature 1..20: note = chemically synthesized
  source 1..20: mol_type = other DNA
ccagtcactttgtagtgtca

SEQ ID NO: 16635 - DNA, 20 bp, synthetic construct
  misc_feature 1..20: note = chemically synthesized
  source 1..20: mol_type = other DNA
tcactttgtagtgtcaaagt

SEQ ID NO: 16636 - DNA, 20 bp, synthetic construct
  misc_feature 1..20: note = chemically synthesized
  source 1..20: mol_type = other DNA
cactttgtagtgtcaaagtt

SEQ ID NO: 16637 - DNA, 20 bp, synthetic construct
  misc_feature 1..20: note = chemically synthesized
  source 1..20: mol_type = other DNA
attgtcatcatacatgccct

SEQ ID NO: 16638 - DNA, 20 bp, synthetic construct
  misc_feature 1..20: note = chemically synthesized
  source 1..20: mol_type = other DNA
gtcatcatacatgccctcag

SEQ ID NO: 16639 - DNA, 20 bp, synthetic construct
  misc_feature 1..20: note = chemically synthesized
  source 1..20: mol_type = other DNA
atcatacatgccctcagcag

SEQ ID NO: 16640 - DNA, 20 bp, synthetic construct
  misc_feature 1..20: note = chemically synthesized
  source 1..20: mol_type = other DNA
ctctcttcctccttctccta

SEQ ID NO: 16641 - DNA, 20 bp, synthetic construct
  misc_feature 1..20: note = chemically synthesized
  source 1..20: mol_type = other DNA
tcttcctccttctcctacag

SEQ ID NO: 16642 - DNA, 20 bp, synthetic construct
  misc_feature 1..20: note = chemically synthesized
  source 1..20: mol_type = other DNA
ctccttctcctacagtggtc

SEQ ID NO: 16643 - DNA, 20 bp, synthetic construct
  misc_feature 1..20: note = chemically synthesized
  source 1..20: mol_type = other DNA
cttctcctacagtggtccag

SEQ ID NO: 16644 - DNA, 20 bp, synthetic construct
  misc_feature 1..20: note = chemically synthesized
  source 1..20: mol_type = other DNA
ttctcctacagtggtccaga

SEQ ID NO: 16645 - DNA, 20 bp, synthetic construct
  misc_feature 1..20: note = chemically synthesized
  source 1..20: mol_type = other DNA
tctcctacagtggtccagaa

SEQ ID NO: 16646 - DNA, 20 bp, synthetic construct
  misc_feature 1..20: note = chemically synthesized
  source 1..20: mol_type = other DNA
ctcctacagtggtccagaag

SEQ ID NO: 16647 - DNA, 20 bp, synthetic construct
  misc_feature 1..20: note = chemically synthesized
  source 1..20: mol_type = other DNA
acagtggtccagaaggggct

SEQ ID NO: 16648 - DNA, 20 bp, synthetic construct
  misc_feature 1..20: note = chemically synthesized
  source 1..20: mol_type = other DNA
cagtggtccagaaggggctc

SEQ ID NO: 16649 - DNA, 20 bp, synthetic construct
  misc_feature 1..20: note = chemically synthesized
  source 1..20: mol_type = other DNA
gctcaggtatgttcaaataa

SEQ ID NO: 16650 - DNA, 20 bp, synthetic construct
  misc_feature 1..20: note = chemically synthesized
  source 1..20: mol_type = other DNA
tgttcaaataacagctgctg

SEQ ID NO: 16651 - DNA, 20 bp, synthetic construct
  misc_feature 1..20: note = chemically synthesized
  source 1..20: mol_type = other DNA
tgctgtggttttcaattatg

SEQ ID NO: 16652 - DNA, 20 bp, synthetic construct
  misc_feature 1..20: note = chemically synthesized
  source 1..20: mol_type = other DNA
caattatgaagaaatctcct

SEQ ID NO: 16653 - DNA, 20 bp, synthetic construct
  misc_feature 1..20: note = chemically synthesized
  source 1..20: mol_type = other DNA
aagaaatctcctaagctaca

SEQ ID NO: 16654 - DNA, 20 bp, synthetic construct
  misc_feature 1..20: note = chemically synthesized
  source 1..20: mol_type = other DNA
acatagtcatttatctttta

SEQ ID NO: 16655 - DNA, 20 bp, synthetic construct
  misc_feature 1..20: note = chemically synthesized
  source 1..20: mol_type = other DNA
catttatcttttaaagcacc

SEQ ID NO: 16656 - DNA, 20 bp, synthetic construct
  misc_feature 1..20: note = chemically synthesized
  source 1..20: mol_type = other DNA
atcttttaaagcaccaagca

SEQ ID NO: 16657 - DNA, 20 bp, synthetic construct
  misc_feature 1..20: note = chemically synthesized
  source 1..20: mol_type = other DNA
caagcaaagtaccttttgat

SEQ ID NO: 16658 - DNA, 20 bp, synthetic construct
  misc_feature 1..20: note = chemically synthesized
  source 1..20: mol_type = other DNA
aagcaaagtaccttttgata

SEQ ID NO: 16659 - DNA, 20 bp, synthetic construct
  misc_feature 1..20: note = chemically synthesized
  source 1..20: mol_type = other DNA
gcaaagtaccttttgataag

SEQ ID NO: 16660 - DNA, 20 bp, synthetic construct
  misc_feature 1..20: note = chemically synthesized
  source 1..20: mol_type = other DNA
tgataaggagaacgtgctta

SEQ ID NO: 16661 - DNA, 20 bp, synthetic construct
  misc_feature 1..20: note = chemically synthesized
  source 1..20: mol_type = other DNA
aacgtgcttatagatgttca

SEQ ID NO: 16662 - DNA, 20 bp, synthetic construct
  misc_feature 1..20: note = chemically synthesized
  source 1..20: mol_type = other DNA
gtgcttatagatgttcatag

SEQ ID NO: 16663 - DNA, 20 bp, synthetic construct
  misc_feature 1..20: note = chemically synthesized
  source 1..20: mol_type = other DNA
agatgttcatagaagatgct

SEQ ID NO: 16664 - DNA, 20 bp, synthetic construct
  misc_feature 1..20: note = chemically synthesized
  source 1..20: mol_type = other DNA
atacgtatttcattctcaca

SEQ ID NO: 16665 - DNA, 20 bp, synthetic construct
  misc_feature 1..20: note = chemically synthesized
  source 1..20: mol_type = other DNA
acatggtatttctctcttcc

SEQ ID NO: 16666 - DNA, 20 bp, synthetic construct
  misc_feature 1..20: note = chemically synthesized
  source 1..20: mol_type = other DNA
ggtatttctctcttcctagt

SEQ ID NO: 16667 - DNA, 20 bp, synthetic construct
  misc_feature 1..20: note = chemically synthesized
  source 1..20: mol_type = other DNA
gtatttctctcttcctagta

SEQ ID NO: 16668 - DNA, 20 bp, synthetic construct
  misc_feature 1..20: note = chemically synthesized
  source 1..20: mol_type = other DNA
tatttctctcttcctagtaa

SEQ ID NO: 16669 - DNA, 20 bp, synthetic construct
  misc_feature 1..20: note = chemically synthesized
  source 1..20: mol_type = other DNA
tttctctcttcctagtaagg

SEQ ID NO: 16670 - DNA, 20 bp, synthetic construct
  misc_feature 1..20: note = chemically synthesized
  source 1..20: mol_type = other DNA
ttctctcttcctagtaaggg

SEQ ID NO: 16671 - DNA, 20 bp, synthetic construct
  misc_feature 1..20: note = chemically synthesized
  source 1..20: mol_type = other DNA
ctctcttcctagtaagggag

SEQ ID NO: 16672 - DNA, 20 bp, synthetic construct
  misc_feature 1..20: note = chemically synthesized
  source 1..20: mol_type = other DNA
atgcccaatttctgcctcca

SEQ ID NO: 16673 - DNA, 20 bp, synthetic construct
  misc_feature 1..20: note = chemically synthesized
  source 1..20: mol_type = other DNA
ccaatttctgcctccaaaga

SEQ ID NO: 16674 - DNA, 20 bp, synthetic construct
  misc_feature 1..20: note = chemically synthesized
  source 1..20: mol_type = other DNA
atttctgcctccaaagaaag

SEQ ID NO: 16675 - DNA, 20 bp, synthetic construct
  misc_feature 1..20: note = chemically synthesized
  source 1..20: mol_type = other DNA
tctgcctccaaagaaagaag

SEQ ID NO: 16676 - DNA, 20 bp, synthetic construct
  misc_feature 1..20: note = chemically synthesized
  source 1..20: mol_type = other DNA
aaagaagaagtaaaaactaa

SEQ ID NO: 16677 - DNA, 20 bp, synthetic construct
  misc_feature 1..20: note = chemically synthesized
  source 1..20: mol_type = other DNA
aagaagaagtaaaaactaaa

SEQ ID NO: 16678 - DNA, 20 bp, synthetic construct
  misc_feature 1..20: note = chemically synthesized
  source 1..20: mol_type = other DNA
aagaagtaaaaactaaaagg

SEQ ID NO: 16679 - DNA, 20 bp, synthetic construct
  misc_feature 1..20: note = chemically synthesized
  source 1..20: mol_type = other DNA
aaaggcagaaatgaaatcca

SEQ ID NO: 16680 - DNA, 20 bp, synthetic construct
  misc_feature 1..20: note = chemically synthesized
  source 1..20: mol_type = other DNA
aaggcagaaatgaaatccac

SEQ ID NO: 16681 - DNA, 20 bp, synthetic construct
  misc_feature 1..20: note = chemically synthesized
  source 1..20: mol_type = other DNA
aaatgaaatccacaggcaaa

SEQ ID NO: 16682 - DNA, 20 bp, synthetic construct
  misc_feature 1..20: note = chemically synthesized
  source 1..20: mol_type = other DNA
aatccacaggcaaacagcct

SEQ ID NO: 16683 - DNA, 20 bp, synthetic construct
  misc_feature 1..20: note = chemically synthesized
  source 1..20: mol_type = other DNA
aacagcctgagaccacatcc

SEQ ID NO: 16684 - DNA, 20 bp, synthetic construct
  misc_feature 1..20: note = chemically synthesized
  source 1..20: mol_type = other DNA
acagcctgagaccacatcct

SEQ ID NO: 16685 - DNA, 20 bp, synthetic construct
  misc_feature 1..20: note = chemically synthesized
  source 1..20: mol_type = other DNA
ctgagaccacatcctgggcc

SEQ ID NO: 16686 - DNA, 20 bp, synthetic construct
  misc_feature 1..20: note = chemically synthesized
  source 1..20: mol_type = other DNA
ccacatcctgggcctggtta

SEQ ID NO: 16687 - DNA, 20 bp, synthetic construct
  misc_feature 1..20: note = chemically synthesized
  source 1..20: mol_type = other DNA
atcctgggcctggttaaaga

SEQ ID NO: 16688 - DNA, 20 bp, synthetic construct
  misc_feature 1..20: note = chemically synthesized
  source 1..20: mol_type = other DNA
ttaaagatagacccctgacc

SEQ ID NO: 16689 - DNA, 20 bp, synthetic construct
  misc_feature 1..20: note = chemically synthesized
  source 1..20: mol_type = other DNA
agatagacccctgacctggc

SEQ ID NO: 16690 - DNA, 20 bp, synthetic construct
  misc_feature 1..20: note = chemically synthesized
  source 1..20: mol_type = other DNA
ctggccagttatgttatcta

SEQ ID NO: 16691 - DNA, 20 bp, synthetic construct
  misc_feature 1..20: note = chemically synthesized
  source 1..20: mol_type = other DNA
gttatgttatctatagattc

SEQ ID NO: 16692 - DNA, 20 bp, synthetic construct
  misc_feature 1..20: note = chemically synthesized
  source 1..20: mol_type = other DNA
tatagattccagacactgta

SEQ ID NO: 16693 - DNA, 20 bp, synthetic construct
  misc_feature 1..20: note = chemically synthesized
  source 1..20: mol_type = other DNA
attccagacactgtatggaa

SEQ ID NO: 16694 - DNA, 20 bp, synthetic construct
  misc_feature 1..20: note = chemically synthesized
  source 1..20: mol_type = other DNA
ccagacactgtatggaaaag

SEQ ID NO: 16695 - DNA, 20 bp, synthetic construct
  misc_feature 1..20: note = chemically synthesized
  source 1..20: mol_type = other DNA
ttctgttccattctgatgac

SEQ ID NO: 16696 - DNA, 20 bp, synthetic construct
  misc_feature 1..20: note = chemically synthesized
  source 1..20: mol_type = other DNA
attctgatgaccagtgcatg

SEQ ID NO: 16697 - DNA, 20 bp, synthetic construct
  misc_feature 1..20: note = chemically synthesized
  source 1..20: mol_type = other DNA
tgaccagtgcatgcagcccc

SEQ ID NO: 16698 - DNA, 20 bp, synthetic construct
  misc_feature 1..20: note = chemically synthesized
  source 1..20: mol_type = other DNA
cccccagtcatgtaccccct

SEQ ID NO: 16699 - DNA, 20 bp, synthetic construct
  misc_feature 1..20: note = chemically synthesized
  source 1..20: mol_type = other DNA
cccagtcatgtaccccctta

SEQ ID NO: 16700 - DNA, 20 bp, synthetic construct
  misc_feature 1..20: note = chemically synthesized
  source 1..20: mol_type = other DNA
atgtacccccttagagttgt

SEQ ID NO: 16701 - DNA, 20 bp, synthetic construct
  misc_feature 1..20: note = chemically synthesized
  source 1..20: mol_type = other DNA
ttagagttgtaagcccttaa

SEQ ID NO: 16702 - DNA, 20 bp, synthetic construct
  misc_feature 1..20: note = chemically synthesized
  source 1..20: mol_type = other DNA
tagagttgtaagcccttaaa

SEQ ID NO: 16703 - DNA, 20 bp, synthetic construct
  misc_feature 1..20: note = chemically synthesized
  source 1..20: mol_type = other DNA
agagttgtaagcccttaaaa

SEQ ID NO: 16704 - DNA, 20 bp, synthetic construct
  misc_feature 1..20: note = chemically synthesized
  source 1..20: mol_type = other DNA
ttgtaagcccttaaaaggga

SEQ ID NO: 16705 - DNA, 20 bp, synthetic construct
  misc_feature 1..20: note = chemically synthesized
  source 1..20: mol_type = other DNA
tgtaagcccttaaaagggac

SEQ ID NO: 16706 - DNA, 20 bp, synthetic construct
  misc_feature 1..20: note = chemically synthesized
  source 1..20: mol_type = other DNA
ggacaggaattgctcactct

SEQ ID NO: 16707 - DNA, 20 bp, synthetic construct
  misc_feature 1..20: note = chemically synthesized
  source 1..20: mol_type = other DNA
acaggaattgctcactctga

SEQ ID NO: 16708 - DNA, 20 bp, synthetic construct
  misc_feature 1..20: note = chemically synthesized
  source 1..20: mol_type = other DNA
aattgctcactctgagagct

SEQ ID NO: 16709 - DNA, 20 bp, synthetic construct
  misc_feature 1..20: note = chemically synthesized
  source 1..20: mol_type = other DNA
cactctgagagcttggttgt

SEQ ID NO: 16710 - DNA, 20 bp, synthetic construct
  misc_feature 1..20: note = chemically synthesized
  source 1..20: mol_type = other DNA
ctctgagagcttggttgttg

SEQ ID NO: 16711 - DNA, 20 bp, synthetic construct
  misc_feature 1..20: note = chemically synthesized
  source 1..20: mol_type = other DNA
agcttggttgttggagatgt

SEQ ID NO: 16712 - DNA, 20 bp, synthetic construct
  misc_feature 1..20: note = chemically synthesized
  source 1..20: mol_type = other DNA
tggagatgtgagtcttgccc

SEQ ID NO: 16713 - DNA, 20 bp, synthetic construct
  misc_feature 1..20: note = chemically synthesized
  source 1..20: mol_type = other DNA
gtgagtcttgcccaagctcc

SEQ ID NO: 16714 - DNA, 20 bp, synthetic construct
  misc_feature 1..20: note = chemically synthesized
  source 1..20: mol_type = other DNA
cccaagctcccagccgaata

SEQ ID NO: 16715 - DNA, 20 bp, synthetic construct
  misc_feature 1..20: note = chemically synthesized
  source 1..20: mol_type = other DNA
aagcccttccttctttaact

SEQ ID NO: 16716 - DNA, 20 bp, synthetic construct
  misc_feature 1..20: note = chemically synthesized
  source 1..20: mol_type = other DNA
ccttctttaactcggtgtct

SEQ ID NO: 16717 - DNA, 20 bp, synthetic construct
  misc_feature 1..20: note = chemically synthesized
  source 1..20: mol_type = other DNA
cttctttaactcggtgtctg

SEQ ID NO: 16718 - DNA, 20 bp, synthetic construct
  misc_feature 1..20: note = chemically synthesized
  source 1..20: mol_type = other DNA
ttctttaactcggtgtctga

SEQ ID NO: 16719 - DNA, 20 bp, synthetic construct
  misc_feature 1..20: note = chemically synthesized
  source 1..20: mol_type = other DNA
tctttaactcggtgtctgag

SEQ ID NO: 16720 - DNA, 20 bp, synthetic construct
  misc_feature 1..20: note = chemically synthesized
  source 1..20: mol_type = other DNA
tgtctgaggggttttgtatg

SEQ ID NO: 16721 - DNA, 20 bp, synthetic construct
  misc_feature 1..20: note = chemically synthesized
  source 1..20: mol_type = other DNA
tgcagcttgtcctgctacac

SEQ ID NO: 16722 - DNA, 20 bp, synthetic construct
  misc_feature 1..20: note = chemically synthesized
  source 1..20: mol_type = other DNA
gctacctctattaaaacaca

SEQ ID NO: 16723 - DNA, 20 bp, synthetic construct
  misc_feature 1..20: note = chemically synthesized
  source 1..20: mol_type = other DNA
aaacacaaagccacaatata

SEQ ID NO: 16724 - DNA, 20 bp, synthetic construct
  misc_feature 1..20: note = chemically synthesized
  source 1..20: mol_type = other DNA
ccacaatatatggatacatt

SEQ ID NO: 16725 - DNA, 20 bp, synthetic construct
  misc_feature 1..20: note = chemically synthesized
  source 1..20: mol_type = other DNA
tttggaaaatatgcacactt

SEQ ID NO: 16726 - DNA, 20 bp, synthetic construct
  misc_feature 1..20: note = chemically synthesized
  source 1..20: mol_type = other DNA
aaatatgcacactttggatc

SEQ ID NO: 16727 - DNA, 20 bp, synthetic construct
  misc_feature 1..20: note = chemically synthesized
  source 1..20: mol_type = other DNA
atgcacactttggatccagc

SEQ ID NO: 16728 - DNA, 20 bp, synthetic construct
  misc_feature 1..20: note = chemically synthesized
  source 1..20: mol_type = other DNA
ggatccagcaagtccacatc

SEQ ID NO: 16729 - DNA, 20 bp, synthetic construct
  misc_feature 1..20: note = chemically synthesized
  source 1..20: mol_type = other DNA
ccacatctagaaaaccatcc

SEQ ID NO: 16730 - DNA, 20 bp, synthetic construct
  misc_feature 1..20: note = chemically synthesized
  source 1..20: mol_type = other DNA
cacatctagaaaaccatcct

SEQ ID NO: 16731 - DNA, 20 bp, synthetic construct
  misc_feature 1..20: note = chemically synthesized
  source 1..20: mol_type = other DNA
acatctagaaaaccatcctg

SEQ ID NO: 16732 - DNA, 20 bp, synthetic construct
  misc_feature 1..20: note = chemically synthesized
  source 1..20: mol_type = other DNA
catctagaaaaccatcctgg

SEQ ID NO: 16733 - DNA, 20 bp, synthetic construct
  misc_feature 1..20: note = chemically synthesized
  source 1..20: mol_type = other DNA
aaccatcctgggggaaaatt

SEQ ID NO: 16734 - DNA, 20 bp, synthetic construct
  misc_feature 1..20: note = chemically synthesized
  source 1..20: mol_type = other DNA
accatcctgggggaaaatta

SEQ ID NO: 16735 - DNA, 20 bp, synthetic construct
  misc_feature 1..20: note = chemically synthesized
  source 1..20: mol_type = other DNA
catcctgggggaaaattaag

SEQ ID NO: 16736 - DNA, 20 bp, synthetic construct
  misc_feature 1..20: note = chemically synthesized
  source 1..20: mol_type = other DNA
tcctgggggaaaattaagga

SEQ ID NO: 16737 - DNA, 20 bp, synthetic construct
  misc_feature 1..20: note = chemically synthesized
  source 1..20: mol_type = other DNA
aaaattaaggagagtatgaa

SEQ ID NO: 16738 - DNA, 20 bp, synthetic construct
  misc_feature 1..20: note = chemically synthesized
  source 1..20: mol_type = other DNA
aaattaaggagagtatgaaa

SEQ ID NO: 16739 - DNA, 20 bp, synthetic construct
  misc_feature 1..20: note = chemically synthesized
  source 1..20: mol_type = other DNA
tatgaaaaggatgtttacta

SEQ ID NO: 16740 - DNA, 20 bp, synthetic construct
  misc_feature 1..20: note = chemically synthesized
  source 1..20: mol_type = other DNA
tgtttactaaagcattatga

SEQ ID NO: 16741 - DNA, 20 bp, synthetic construct
  misc_feature 1..20: note = chemically synthesized
  source 1..20: mol_type = other DNA
gcattatgatggcaaaaaat

SEQ ID NO: 16742 - DNA, 20 bp, synthetic construct
  misc_feature 1..20: note = chemically synthesized
  source 1..20: mol_type = other DNA
agaaacaacttacactgaac

SEQ ID NO: 16743 - DNA, 20 bp, synthetic construct
  misc_feature 1..20: note = chemically synthesized
  source 1..20: mol_type = other DNA
gaactagtcaacttacttaa

SEQ ID NO: 16744 - DNA, 20 bp, synthetic construct
  misc_feature 1..20: note = chemically synthesized
  source 1..20: mol_type = other DNA
tagtcaacttacttaacaga

SEQ ID NO: 16745 - DNA, 20 bp, synthetic construct
  misc_feature 1..20: note = chemically synthesized
  source 1..20: mol_type = other DNA
tcaacttacttaacagacag

SEQ ID NO: 16746 - DNA, 20 bp, synthetic construct
  misc_feature 1..20: note = chemically synthesized
  source 1..20: mol_type = other DNA
caacttacttaacagacaga

SEQ ID NO: 16747 - DNA, 20 bp, synthetic construct
  misc_feature 1..20: note = chemically synthesized
  source 1..20: mol_type = other DNA
taacagacagaaggctcaat

SEQ ID NO: 16748 - DNA, 20 bp, synthetic construct
  misc_feature 1..20: note = chemically synthesized
  source 1..20: mol_type = other DNA
caattagctcatgtgtcaaa

SEQ ID NO: 16749 - DNA, 20 bp, synthetic construct
  misc_feature 1..20: note = chemically synthesized
  source 1..20: mol_type = other DNA
aattagctcatgtgtcaaat

SEQ ID NO: 16750 - DNA, 20 bp, synthetic construct
  misc_feature 1..20: note = chemically synthesized
  source 1..20: mol_type = other DNA
attagctcatgtgtcaaatg

SEQ ID NO: 16751 - DNA, 20 bp, synthetic construct
  misc_feature 1..20: note = chemically synthesized
  source 1..20: mol_type = other DNA
ttagctcatgtgtcaaatgg

SEQ ID NO: 16752 - DNA, 20 bp, synthetic construct
  misc_feature 1..20: note = chemically synthesized
  source 1..20: mol_type = other DNA
aatgggggtaaaataatatt

SEQ ID NO: 16753 - DNA, 20 bp, synthetic construct
  misc_feature 1..20: note = chemically synthesized
  source 1..20: mol_type = other DNA
gggtaaaataatatttagtt

SEQ ID NO: 16754 - DNA, 20 bp, synthetic construct
  misc_feature 1..20: note = chemically synthesized
  source 1..20: mol_type = other DNA
gtaaaataatatttagtttg

SEQ ID NO: 16755 - DNA, 20 bp, synthetic construct
  misc_feature 1..20: note = chemically synthesized
  source 1..20: mol_type = other DNA
taaaataatatttagtttgg

SEQ ID NO: 16756 - DNA, 20 bp, synthetic construct
  misc_feature 1..20: note = chemically synthesized
  source 1..20: mol_type = other DNA
aaaataatatttagtttgga

SEQ ID NO: 16757 - DNA, 20 bp, synthetic construct
  misc_feature 1..20: note = chemically synthesized
  source 1..20: mol_type = other DNA
taatatttagtttggaggga

SEQ ID NO: 16758 - DNA, 20 bp, synthetic construct
  misc_feature 1..20: note = chemically synthesized
  source 1..20: mol_type = other DNA
atttagtttggagggaaaga

SEQ ID NO: 16759 - DNA, 20 bp, synthetic construct
  misc_feature 1..20: note = chemically synthesized
  source 1..20: mol_type = other DNA
tttagtttggagggaaagac

SEQ ID NO: 16760 - DNA, 20 bp, synthetic construct
  misc_feature 1..20: note = chemically synthesized
  source 1..20: mol_type = other DNA
gagggaaagacaggctctaa

SEQ ID NO: 16761 - DNA, 20 bp, synthetic construct
  misc_feature 1..20: note = chemically synthesized
  source 1..20: mol_type = other DNA
gggaaagacaggctctaaaa

SEQ ID NO: 16762 - DNA, 20 bp, synthetic construct
  misc_feature 1..20: note = chemically synthesized
  source 1..20: mol_type = other DNA
ggaaagacaggctctaaaag

SEQ ID NO: 16763 - DNA, 20 bp, synthetic construct
  misc_feature 1..20: note = chemically synthesized
  source 1..20: mol_type = other DNA
tctaaaagaggattaaaaat

SEQ ID NO: 16764 - DNA, 20 bp, synthetic construct
  misc_feature 1..20: note = chemically synthesized
  source 1..20: mol_type = other DNA
agaggattaaaaattagatg

SEQ ID NO: 16765 - DNA, 20 bp, synthetic construct
  misc_feature 1..20: note = chemically synthesized
  source 1..20: mol_type = other DNA
attaaaaattagatgtggcc

SEQ ID NO: 16766 - DNA, 20 bp, synthetic construct
  misc_feature 1..20: note = chemically synthesized
  source 1..20: mol_type = other DNA
ttaaaaattagatgtggcct

SEQ ID NO: 16767 - DNA, 20 bp, synthetic construct
  misc_feature 1..20: note = chemically synthesized
  source 1..20: mol_type = other DNA
aattagatgtggcctaggca

SEQ ID NO: 16768 - DNA, 20 bp, synthetic construct
  misc_feature 1..20: note = chemically synthesized
  source 1..20: mol_type = other DNA
taggcaaagaatttatgacc

SEQ ID NO: 16769 - DNA, 20 bp, synthetic construct
  misc_feature 1..20: note = chemically synthesized
  source 1..20: mol_type = other DNA
aaacacaacaaaaacaaaaa

SEQ ID NO: 16770 - DNA, 20 bp, synthetic construct
  misc_feature 1..20: note = chemically synthesized
  source 1..20: mol_type = other DNA
caaaaacaaaaacagacaaa

SEQ ID NO: 16771 - DNA, 20 bp, synthetic construct
  misc_feature 1..20: note = chemically synthesized
  source 1..20: mol_type = other DNA
aaaaacaaaaacagacaaat

SEQ ID NO: 16772 - DNA, 20 bp, synthetic construct
  misc_feature 1..20: note = chemically synthesized
  source 1..20: mol_type = other DNA
aaaatgcttctgcaccgcaa

SEQ ID NO: 16773 - DNA, 20 bp, synthetic construct
  misc_feature 1..20: note = chemically synthesized
  source 1..20: mol_type = other DNA
accgcaaaagaccgaatcaa

SEQ ID NO: 16774 - DNA, 20 bp, synthetic construct
  misc_feature 1..20: note = chemically synthesized
  source 1..20: mol_type = other DNA
cgcaaaagaccgaatcaaca

SEQ ID NO: 16775 - DNA, 20 bp, synthetic construct
  misc_feature 1..20: note = chemically synthesized
  source 1..20: mol_type = other DNA
gaccgaatcaacagagtaaa

SEQ ID NO: 16776 - DNA, 20 bp, synthetic construct
  misc_feature 1..20: note = chemically synthesized
  source 1..20: mol_type = other DNA
cagagtaaacggataaccta

SEQ ID NO: 16777 - DNA, 20 bp, synthetic construct
  misc_feature 1..20: note = chemically synthesized
  source 1..20: mol_type = other DNA
aaacggataacctacagaat

SEQ ID NO: 16778 - DNA, 20 bp, synthetic construct
  misc_feature 1..20: note = chemically synthesized
  source 1..20: mol_type = other DNA
gcaaactatgaatgcaacaa

SEQ ID NO: 16779 - DNA, 20 bp, synthetic construct
  misc_feature 1..20: note = chemically synthesized
  source 1..20: mol_type = other DNA
caaactatgaatgcaacaaa

SEQ ID NO: 16780 - DNA, 20 bp, synthetic construct
  misc_feature 1..20: note = chemically synthesized
  source 1..20: mol_type = other DNA
tgcaacaaaaggctaatata

SEQ ID NO: 16781 - DNA, 20 bp, synthetic construct
  misc_feature 1..20: note = chemically synthesized
  source 1..20: mol_type = other DNA
ggctaatatacagaatctac

SEQ ID NO: 16782 - DNA, 20 bp, synthetic construct
  misc_feature 1..20: note = chemically synthesized
  source 1..20: mol_type = other DNA
gctaatatacagaatctaca

SEQ ID NO: 16783 - DNA, 20 bp, synthetic construct
  misc_feature 1..20: note = chemically synthesized
  source 1..20: mol_type = other DNA
aacaaaaaaaccaacctcat

SEQ ID NO: 16784 - DNA, 20 bp, synthetic construct
  misc_feature 1..20: note = chemically synthesized
  source 1..20: mol_type = other DNA
aaaaaaccaacctcattaga

SEQ ID NO: 16785 - DNA, 20 bp, synthetic construct
  misc_feature 1..20: note = chemically synthesized
  source 1..20: mol_type = other DNA
tcattagaaagtgactgtga

SEQ ID NO: 16786 - DNA, 20 bp, synthetic construct
  misc_feature 1..20: note = chemically synthesized
  source 1..20: mol_type = other DNA
tgactgtgatggttaatact

SEQ ID NO: 16787 - DNA, 20 bp, synthetic construct
  misc_feature 1..20: note = chemically synthesized
  source 1..20: mol_type = other DNA
atactgagtgtcaacttgat

SEQ ID NO: 16788 - DNA, 20 bp, synthetic construct
  misc_feature 1..20: note = chemically synthesized
  source 1..20: mol_type = other DNA
gtgtcaacttgattggactg

SEQ ID NO: 16789 - DNA, 20 bp, synthetic construct
  misc_feature 1..20: note = chemically synthesized
  source 1..20: mol_type = other DNA
tgtcaacttgattggactga

SEQ ID NO: 16790 - DNA, 20 bp, synthetic construct
  misc_feature 1..20: note = chemically synthesized
  source 1..20: mol_type = other DNA
tgattggactgaaggatgca

SEQ ID NO: 16791 - DNA, 20 bp, synthetic construct
  misc_feature 1..20: note = chemically synthesized
  source 1..20: mol_type = other DNA
aggatgcaaagtaatgatct

SEQ ID NO: 16792 - DNA, 20 bp, synthetic construct
  misc_feature 1..20: note = chemically synthesized
  source 1..20: mol_type = other DNA
ggatgcaaagtaatgatctt

SEQ ID NO: 16793 - DNA, 20 bp, synthetic construct
  misc_feature 1..20: note = chemically synthesized
  source 1..20: mol_type = other DNA
atgatcttgggtgtgtctgt

SEQ ID NO: 16794 - DNA, 20 bp, synthetic construct
  misc_feature 1..20: note = chemically synthesized
  source 1..20: mol_type = other DNA
tgatcttgggtgtgtctgtg

SEQ ID NO: 16795 - DNA, 20 bp, synthetic construct
  misc_feature 1..20: note = chemically synthesized
  source 1..20: mol_type = other DNA
gatcttgggtgtgtctgtga

SEQ ID NO: 16796 - DNA, 20 bp, synthetic construct
  misc_feature 1..20: note = chemically synthesized
  source 1..20: mol_type = other DNA
tgtctgtgagggtgttacca

SEQ ID NO: 16797 - DNA, 20 bp, synthetic construct
  misc_feature 1..20: note = chemically synthesized
  source 1..20: mol_type = other DNA
gtctgtgagggtgttaccaa

SEQ ID NO: 16798 - DNA, 20 bp, synthetic construct
  misc_feature 1..20: note = chemically synthesized
  source 1..20: mol_type = other DNA
ctgtgagggtgttaccaaag

SEQ ID NO: 16799 - DNA, 20 bp, synthetic construct
  misc_feature 1..20: note = chemically synthesized
  source 1..20: mol_type = other DNA
accaaaggagattaatattt

SEQ ID NO: 16800 - DNA, 20 bp, synthetic construct
  misc_feature 1..20: note = chemically synthesized
  source 1..20: mol_type = other DNA
aaggagattaatatttcagt

SEQ ID NO: 16801 - DNA, 20 bp, synthetic construct
  misc_feature 1..20: note = chemically synthesized
  source 1..20: mol_type = other DNA
gagattaatatttcagtcag

SEQ ID NO: 16802 - DNA, 20 bp, synthetic construct
  misc_feature 1..20: note = chemically synthesized
  source 1..20: mol_type = other DNA
agattaatatttcagtcagt

SEQ ID NO: 16803 - DNA, 20 bp, synthetic construct
  misc_feature 1..20: note = chemically synthesized
  source 1..20: mol_type = other DNA
taatatttcagtcagtgggc

SEQ ID NO: 16804 - DNA, 20 bp, synthetic construct
  misc_feature 1..20: note = chemically synthesized
  source 1..20: mol_type = other DNA
aatatttcagtcagtgggct

SEQ ID NO: 16805 - DNA, 20 bp, synthetic construct
  misc_feature 1..20: note = chemically synthesized
  source 1..20: mol_type = other DNA
atatttcagtcagtgggctg

SEQ ID NO: 16806 - DNA, 20 bp, synthetic construct
  misc_feature 1..20: note = chemically synthesized
  source 1..20: mol_type = other DNA
tttcagtcagtgggctgggg

SEQ ID NO: 16807 - DNA, 20 bp, synthetic construct
  misc_feature 1..20: note = chemically synthesized
  source 1..20: mol_type = other DNA
ttcagtcagtgggctgggga

SEQ ID NO: 16808 - DNA, 20 bp, synthetic construct
  misc_feature 1..20: note = chemically synthesized
  source 1..20: mol_type = other DNA
agtcagtgggctggggaagg

SEQ ID NO: 16809 - DNA, 20 bp, synthetic construct
  misc_feature 1..20: note = chemically synthesized
  source 1..20: mol_type = other DNA
aggcagacccacccttaatc

SEQ ID NO: 16810 - DNA, 20 bp, synthetic construct
  misc_feature 1..20: note = chemically synthesized
  source 1..20: mol_type = other DNA
ggcagacccacccttaatct

SEQ ID NO: 16811 - DNA, 20 bp, synthetic construct
  misc_feature 1..20: note = chemically synthesized
  source 1..20: mol_type = other DNA
agacccacccttaatctggg

SEQ ID NO: 16812 - DNA, 20 bp, synthetic construct
  misc_feature 1..20: note = chemically synthesized
  source 1..20: mol_type = other DNA
gacccacccttaatctgggt

SEQ ID NO: 16813 - DNA, 20 bp, synthetic construct
  misc_feature 1..20: note = chemically synthesized
  source 1..20: mol_type = other DNA
ctgggtgggcaccatctaat

SEQ ID NO: 16814 - DNA, 20 bp, synthetic construct
  misc_feature 1..20: note = chemically synthesized
  source 1..20: mol_type = other DNA
ggcaccatctaatcagttgc

SEQ ID NO: 16815 - DNA, 20 bp, synthetic construct
  misc_feature 1..20: note = chemically synthesized
  source 1..20: mol_type = other DNA
catctaatcagttgccagca

SEQ ID NO: 16816 - DNA, 20 bp, synthetic construct
  misc_feature 1..20: note = chemically synthesized
  source 1..20: mol_type = other DNA
taatcagttgccagcacagc

SEQ ID NO: 16817 - DNA, 20 bp, synthetic construct
  misc_feature 1..20: note = chemically synthesized
  source 1..20: mol_type = other DNA
aatcagttgccagcacagcc

SEQ ID NO: 16818 - DNA, 20 bp, synthetic construct
  misc_feature 1..20: note = chemically synthesized
  source 1..20: mol_type = other DNA
gccagcacagccaggatata

SEQ ID NO: 16819 - DNA, 20 bp, synthetic construct
  misc_feature 1..20: note = chemically synthesized
  source 1..20: mol_type = other DNA
agcacagccaggatataaag

SEQ ID NO: 16820 - DNA, 20 bp, synthetic construct
  misc_feature 1..20: note = chemically synthesized
  source 1..20: mol_type = other DNA
gcacagccaggatataaagc

SEQ ID NO: 16821 - DNA, 20 bp, synthetic construct
  misc_feature 1..20: note = chemically synthesized
  source 1..20: mol_type = other DNA
cagccaggatataaagcagg

SEQ ID NO: 16822 - DNA, 20 bp, synthetic construct
  misc_feature 1..20: note = chemically synthesized
  source 1..20: mol_type = other DNA
agcaggcagaaaaatgtgaa

SEQ ID NO: 16823 - DNA, 20 bp, synthetic construct
  misc_feature 1..20: note = chemically synthesized
  source 1..20: mol_type = other DNA
gcaggcagaaaaatgtgaaa

SEQ ID NO: 16824 - DNA, 20 bp, synthetic construct
  misc_feature 1..20: note = chemically synthesized
  source 1..20: mol_type = other DNA
gcagaaaaatgtgaaaaggc

SEQ ID NO: 16825 - DNA, 20 bp, synthetic construct
  misc_feature 1..20: note = chemically synthesized
  source 1..20: mol_type = other DNA
aaaatgtgaaaaggctagat

SEQ ID NO: 16826 - DNA, 20 bp, synthetic construct
  misc_feature 1..20: note = chemically synthesized
  source 1..20: mol_type = other DNA
gtgaaaaggctagattggct

SEQ ID NO: 16827 - DNA, 20 bp, synthetic construct
  misc_feature 1..20: note = chemically synthesized
  source 1..20: mol_type = other DNA
gctagattggcttggcatcc

SEQ ID NO: 16828 - DNA, 20 bp, synthetic construct
  misc_feature 1..20: note = chemically synthesized
  source 1..20: mol_type = other DNA
cctacatttttctcccatgc

SEQ ID NO: 16829 - DNA, 20 bp, synthetic construct
  misc_feature 1..20: note = chemically synthesized
  source 1..20: mol_type = other DNA
atgctggattcttcctgccc

SEQ ID NO: 16830 - DNA, 20 bp, synthetic construct
  misc_feature 1..20: note = chemically synthesized
  source 1..20: mol_type = other DNA
tgccctggaacattgaactc

SEQ ID NO: 16831 - DNA, 20 bp, synthetic construct
  misc_feature 1..20: note = chemically synthesized
  source 1..20: mol_type = other DNA
gccctggaacattgaactcc

SEQ ID NO: 16832 - DNA, 20 bp, synthetic construct
  misc_feature 1..20: note = chemically synthesized
  source 1..20: mol_type = other DNA
acattgaactccaggttctt

SEQ ID NO: 16833 - DNA, 20 bp, synthetic construct
  misc_feature 1..20: note = chemically synthesized
  source 1..20: mol_type = other DNA
aactccaggttcttcagctt

SEQ ID NO: 16834 - DNA, 20 bp, synthetic construct
  misc_feature 1..20: note = chemically synthesized
  source 1..20: mol_type = other DNA
actccaggttcttcagcttt

SEQ ID NO: 16835 - DNA, 20 bp, synthetic construct
  misc_feature 1..20: note = chemically synthesized
  source 1..20: mol_type = other DNA
ttcagctttgggactccgac

SEQ ID NO: 16836 - DNA, 20 bp, synthetic construct
  misc_feature 1..20: note = chemically synthesized
  source 1..20: mol_type = other DNA
cgactagcttccttgttcct

SEQ ID NO: 16837 - DNA, 20 bp, synthetic construct
  misc_feature 1..20: note = chemically synthesized
  source 1..20: mol_type = other DNA
tagcttccttgttcctcagc

SEQ ID NO: 16838 - DNA, 20 bp, synthetic construct
  misc_feature 1..20: note = chemically synthesized
  source 1..20: mol_type = other DNA
cttccttgttcctcagctgg

SEQ ID NO: 16839 - DNA, 20 bp, synthetic construct
  misc_feature 1..20: note = chemically synthesized
  source 1..20: mol_type = other DNA
cttgttcctcagctggcaga

SEQ ID NO: 16840 - DNA, 20 bp, synthetic construct
  misc_feature 1..20: note = chemically synthesized
  source 1..20: mol_type = other DNA
agctggcagatggcctgttt

SEQ ID NO: 16841 - DNA, 20 bp, synthetic construct
  misc_feature 1..20: note = chemically synthesized
  source 1..20: mol_type = other DNA
gctggcagatggcctgtttt

SEQ ID NO: 16842 - DNA, 20 bp, synthetic construct
  misc_feature 1..20: note = chemically synthesized
  source 1..20: mol_type = other DNA
ttgggaccttgtgaacatgt

SEQ ID NO: 16843 - DNA, 20 bp, synthetic construct
  misc_feature 1..20: note = chemically synthesized
  source 1..20: mol_type = other DNA
ctacataataaactctcata

SEQ ID NO: 16844 - DNA, 20 bp, synthetic construct
  misc_feature 1..20: note = chemically synthesized
  source 1..20: mol_type = other DNA
aataaactctcatatagata

SEQ ID NO: 16845 - DNA, 20 bp, synthetic construct
  misc_feature 1..20: note = chemically synthesized
  source 1..20: mol_type = other DNA
ctctcatatagatatagata

SEQ ID NO: 16846 - DNA, 20 bp, synthetic construct
  misc_feature 1..20: note = chemically synthesized
  source 1..20: mol_type = other DNA
ctcatatagatatagatata

SEQ ID NO: 16847 - DNA, 20 bp, synthetic construct
  misc_feature 1..20: note = chemically synthesized
  source 1..20: mol_type = other DNA
tatagatatagatatagaga

SEQ ID NO: 16848 - DNA, 20 bp, synthetic construct
  misc_feature 1..20: note = chemically synthesized
  source 1..20: mol_type = other DNA
tatagatatagagatagata

SEQ ID NO: 16849 - DNA, 20 bp, synthetic construct
  misc_feature 1..20: note = chemically synthesized
  source 1..20: mol_type = other DNA
tagatatagagatagatata

SEQ ID NO: 16850 - DNA, 20 bp, synthetic construct
  misc_feature 1..20: note = chemically synthesized
  source 1..20: mol_type = other DNA
tatagagatagatatagaga

SEQ ID NO: 16851 - DNA, 20 bp, synthetic construct
  misc_feature 1..20: note = chemically synthesized
  source 1..20: mol_type = other DNA
gatagatatagagatagata

SEQ ID NO: 16852 - DNA, 20 bp, synthetic construct
  misc_feature 1..20: note = chemically synthesized
  source 1..20: mol_type = other DNA
tatagagatagatatagata

SEQ ID NO: 16853 - DNA, 20 bp, synthetic construct
  misc_feature 1..20: note = chemically synthesized
  source 1..20: mol_type = other DNA
gatagatatagatatagata

SEQ ID NO: 16854 - DNA, 20 bp, synthetic construct
  misc_feature 1..20: note = chemically synthesized
  source 1..20: mol_type = other DNA
tatagatatagatatagata

SEQ ID NO: 16855 - DNA, 20 bp, synthetic construct
  misc_feature 1..20: note = chemically synthesized
  source 1..20: mol_type = other DNA
tatagatatagatatagata

SEQ ID NO: 16856 - DNA, 20 bp, synthetic construct
  misc_feature 1..20: note = chemically synthesized
  source 1..20: mol_type = other DNA
tatagatatagatatagata

SEQ ID NO: 16857 - DNA, 20 bp, synthetic construct
  misc_feature 1..20: note = chemically synthesized
  source 1..20: mol_type = other DNA
ctattaattctgtttctctg

SEQ ID NO: 16858 - DNA, 20 bp, synthetic construct
  misc_feature 1..20: note = chemically synthesized
  source 1..20: mol_type = other DNA
ttctctgtagaaccctaata

SEQ ID NO: 16859 - DNA, 20 bp, synthetic construct
  misc_feature 1..20: note = chemically synthesized
  source 1..20: mol_type = other DNA
tagaaccctaatacagattt

SEQ ID NO: 16860 - DNA, 20 bp, synthetic construct
  misc_feature 1..20: note = chemically synthesized
  source 1..20: mol_type = other DNA
cctaatacagattttggtac

SEQ ID NO: 16861 - DNA, 20 bp, synthetic construct
  misc_feature 1..20: note = chemically synthesized
  source 1..20: mol_type = other DNA
ctaatacagattttggtacc

SEQ ID NO: 16862 - DNA, 20 bp, synthetic construct
  misc_feature 1..20: note = chemically synthesized
  source 1..20: mol_type = other DNA
aatacagattttggtaccag

SEQ ID NO: 16863 - DNA, 20 bp, synthetic construct
  misc_feature 1..20: note = chemically synthesized
  source 1..20: mol_type = other DNA
acagattttggtaccaggag

SEQ ID NO: 16864 - DNA, 20 bp, synthetic construct
  misc_feature 1..20: note = chemically synthesized
  source 1..20: mol_type = other DNA
tttggtaccaggagtggttc

SEQ ID NO: 16865 - DNA, 20 bp, synthetic construct
  misc_feature 1..20: note = chemically synthesized
  source 1..20: mol_type = other DNA
tggtaccaggagtggttcta

SEQ ID NO: 16866 - DNA, 20 bp, synthetic construct
  misc_feature 1..20: note = chemically synthesized
  source 1..20: mol_type = other DNA
ggtaccaggagtggttctag

SEQ ID NO: 16867 - DNA, 20 bp, synthetic construct
  misc_feature 1..20: note = chemically synthesized
  source 1..20: mol_type = other DNA
caggagtggttctagaggaa

SEQ ID NO: 16868 - DNA, 20 bp, synthetic construct
  misc_feature 1..20: note = chemically synthesized
  source 1..20: mol_type = other DNA
ttctagaggaacagaatatt

SEQ ID NO: 16869 - DNA, 20 bp, synthetic construct
  misc_feature 1..20: note = chemically synthesized
  source 1..20: mol_type = other DNA
tctagaggaacagaatatta

SEQ ID NO: 16870 - DNA, 20 bp, synthetic construct
  misc_feature 1..20: note = chemically synthesized
  source 1..20: mol_type = other DNA
gaggaacagaatattaagga

SEQ ID NO: 16871 - DNA, 20 bp, synthetic construct
  misc_feature 1..20: note = chemically synthesized
  source 1..20: mol_type = other DNA
ggaacagaatattaaggatg

SEQ ID NO: 16872 - DNA, 20 bp, synthetic construct
  misc_feature 1..20: note = chemically synthesized
  source 1..20: mol_type = other DNA
taaggatggagttctttcat

SEQ ID NO: 16873 - DNA, 20 bp, synthetic construct
  misc_feature 1..20: note = chemically synthesized
  source 1..20: mol_type = other DNA
tggagttctttcattggttt

SEQ ID NO: 16874 - DNA, 20 bp, synthetic construct
  misc_feature 1..20: note = chemically synthesized
  source 1..20: mol_type = other DNA
ggagttctttcattggtttt

SEQ ID NO: 16875 - DNA, 20 bp, synthetic construct
  misc_feature 1..20: note = chemically synthesized
  source 1..20: mol_type = other DNA
gagttctttcattggttttg

SEQ ID NO: 16876 - DNA, 20 bp, synthetic construct
  misc_feature 1..20: note = chemically synthesized
  source 1..20: mol_type = other DNA
ttcattggttttggggtttc

SEQ ID NO: 16877 - DNA, 20 bp, synthetic construct
  misc_feature 1..20: note = chemically synthesized
  source 1..20: mol_type = other DNA
cattggttttggggtttctg

SEQ ID NO: 16878 - DNA, 20 bp, synthetic construct
  misc_feature 1..20: note = chemically synthesized
  source 1..20: mol_type = other DNA
ggttttggggtttctggagt

SEQ ID NO: 16879 - DNA, 20 bp, synthetic construct
  misc_feature 1..20: note = chemically synthesized
  source 1..20: mol_type = other DNA
agttggctgcttaatatgat

SEQ ID NO: 16880 - DNA, 20 bp, synthetic construct
  misc_feature 1..20: note = chemically synthesized
  source 1..20: mol_type = other DNA
tgattagacccaaatatgct

SEQ ID NO: 16881 - DNA, 20 bp, synthetic construct
  misc_feature 1..20: note = chemically synthesized
  source 1..20: mol_type = other DNA
gattagacccaaatatgcta

SEQ ID NO: 16882 - DNA, 20 bp, synthetic construct
  misc_feature 1..20: note = chemically synthesized
  source 1..20: mol_type = other DNA
gctaaggactcttcttctaa

SEQ ID NO: 16883 - DNA, 20 bp, synthetic construct
  misc_feature 1..20: note = chemically synthesized
  source 1..20: mol_type = other DNA
ggactcttcttctaatggta

SEQ ID NO: 16884 - DNA, 20 bp, synthetic construct
  misc_feature 1..20: note = chemically synthesized
  source 1..20: mol_type = other DNA
actcttcttctaatggtatg

SEQ ID NO: 16885 - DNA, 20 bp, synthetic construct
  misc_feature 1..20: note = chemically synthesized
  source 1..20: mol_type = other DNA
tggagaacactgataatcct

SEQ ID NO: 16886 - DNA, 20 bp, synthetic construct
  misc_feature 1..20: note = chemically synthesized
  source 1..20: mol_type = other DNA
aatccttggcatcaattgtt

SEQ ID NO: 16887 - DNA, 20 bp, synthetic construct
  misc_feature 1..20: note = chemically synthesized
  source 1..20: mol_type = other DNA
tccttggcatcaattgttta

SEQ ID NO: 16888 - DNA, 20 bp, synthetic construct
  misc_feature 1..20: note = chemically synthesized
  source 1..20: mol_type = other DNA
cttggcatcaattgtttaga

SEQ ID NO: 16889 - DNA, 20 bp, synthetic construct
  misc_feature 1..20: note = chemically synthesized
  source 1..20: mol_type = other DNA
actcttgattcaacgcttgt

SEQ ID NO: 16890 - DNA, 20 bp, synthetic construct
  misc_feature 1..20: note = chemically synthesized
  source 1..20: mol_type = other DNA
tcttgattcaacgcttgtga

SEQ ID NO: 16891 - DNA, 20 bp, synthetic construct
  misc_feature 1..20: note = chemically synthesized
  source 1..20: mol_type = other DNA
cttgattcaacgcttgtgag

SEQ ID NO: 16892 - DNA, 20 bp, synthetic construct
  misc_feature 1..20: note = chemically synthesized
  source 1..20: mol_type = other DNA
attcaacgcttgtgagaggc

SEQ ID NO: 16893 - DNA, 20 bp, synthetic construct
  misc_feature 1..20: note = chemically synthesized
  source 1..20: mol_type = other DNA
ttcaacgcttgtgagaggca

SEQ ID NO: 16894 - DNA, 20 bp, synthetic construct
  misc_feature 1..20: note = chemically synthesized
  source 1..20: mol_type = other DNA
cttgtgagaggcaaggaatt

SEQ ID NO: 16895 - DNA, 20 bp, synthetic construct
  misc_feature 1..20: note = chemically synthesized
  source 1..20: mol_type = other DNA
ataatacttttgactatatg

SEQ ID NO: 16896 - DNA, 20 bp, synthetic construct
  misc_feature 1..20: note = chemically synthesized
  source 1..20: mol_type = other DNA
aatacttttgactatatgtg

SEQ ID NO: 16897 - DNA, 20 bp, synthetic construct
  misc_feature 1..20: note = chemically synthesized
  source 1..20: mol_type = other DNA
ttgactatatgtggagaatc

SEQ ID NO: 16898 - DNA, 20 bp, synthetic construct
  misc_feature 1..20: note = chemically synthesized
  source 1..20: mol_type = other DNA
tgactatatgtggagaatca

SEQ ID NO: 16899 - DNA, 20 bp, synthetic construct
  misc_feature 1..20: note = chemically synthesized
  source 1..20: mol_type = other DNA
atgtggagaatcaaggaaca

SEQ ID NO: 16900 - DNA, 20 bp, synthetic construct
  misc_feature 1..20: note = chemically synthesized
  source 1..20: mol_type = other DNA
gagaatcaaggaacatagtg

SEQ ID NO: 16901 - DNA, 20 bp, synthetic construct
  misc_feature 1..20: note = chemically synthesized
  source 1..20: mol_type = other DNA
atcaaggaacatagtgaagt

SEQ ID NO: 16902 - DNA, 20 bp, synthetic construct
  misc_feature 1..20: note = chemically synthesized
  source 1..20: mol_type = other DNA
aggaacatagtgaagttggt

SEQ ID NO: 16903 - DNA, 20 bp, synthetic construct
  misc_feature 1..20: note = chemically synthesized
  source 1..20: mol_type = other DNA
gaagttggttggttgcttgt

SEQ ID NO: 16904 - DNA, 20 bp, synthetic construct
  misc_feature 1..20: note = chemically synthesized
  source 1..20: mol_type = other DNA
ttggttgcttgtaagttcgc

SEQ ID NO: 16905 - DNA, 20 bp, synthetic construct
  misc_feature 1..20: note = chemically synthesized
  source 1..20: mol_type = other DNA
gcttgtaagttcgctggaca

SEQ ID NO: 16906 - DNA, 20 bp, synthetic construct
  misc_feature 1..20: note = chemically synthesized
  source 1..20: mol_type = other DNA
ttcgctggacaaagtgatga

SEQ ID NO: 16907 - DNA, 20 bp, synthetic construct
  misc_feature 1..20: note = chemically synthesized
  source 1..20: mol_type = other DNA
atgaaagaaaatgatgaact

SEQ ID NO: 16908 - DNA, 20 bp, synthetic construct
  misc_feature 1..20: note = chemically synthesized
  source 1..20: mol_type = other DNA
tgaaagaaaatgatgaactc

SEQ ID NO: 16909 - DNA, 20 bp, synthetic construct
  misc_feature 1..20: note = chemically synthesized
  source 1..20: mol_type = other DNA
aaagaaaatgatgaactcag

SEQ ID NO: 16910 - DNA, 20 bp, synthetic construct
  misc_feature 1..20: note = chemically synthesized
  source 1..20: mol_type = other DNA
tcaggagtatatcaactctc

SEQ ID NO: 16911 - DNA, 20 bp, synthetic construct
  misc_feature 1..20: note = chemically synthesized
  source 1..20: mol_type = other DNA
ctttgtgccataatcttatt

SEQ ID NO: 16912 - DNA, 20 bp, synthetic construct
  misc_feature 1..20: note = chemically synthesized
  source 1..20: mol_type = other DNA
ttgtgccataatcttatttg

SEQ ID NO: 16913 - DNA, 20 bp, synthetic construct
  misc_feature 1..20: note = chemically synthesized
  source 1..20: mol_type = other DNA
gtgccataatcttatttgga

SEQ ID NO: 16914 - DNA, 20 bp, synthetic construct
  misc_feature 1..20: note = chemically synthesized
  source 1..20: mol_type = other DNA
tgctcacctttcacttccac

SEQ ID NO: 16915 - DNA, 20 bp, synthetic construct
  misc_feature 1..20: note = chemically synthesized
  source 1..20: mol_type = other DNA
ttcacttccacaagatatca

SEQ ID NO: 16916 - DNA, 20 bp, synthetic construct
  misc_feature 1..20: note = chemically synthesized
  source 1..20: mol_type = other DNA
acttccacaagatatcacag

SEQ ID NO: 16917 - DNA, 20 bp, synthetic construct
  misc_feature 1..20: note = chemically synthesized
  source 1..20: mol_type = other DNA
tacattgatgacatgctgac

SEQ ID NO: 16918 - DNA, 20 bp, synthetic construct
  misc_feature 1..20: note = chemically synthesized
  source 1..20: mol_type = other DNA
gatgacatgctgactggaac

SEQ ID NO: 16919 - DNA, 20 bp, synthetic construct
  misc_feature 1..20: note = chemically synthesized
  source 1..20: mol_type = other DNA
acatgctgactggaactagt

SEQ ID NO: 16920 - DNA, 20 bp, synthetic construct
  misc_feature 1..20: note = chemically synthesized
  source 1..20: mol_type = other DNA
gctgactggaactagtgagc

SEQ ID NO: 16921 - DNA, 20 bp, synthetic construct
  misc_feature 1..20: note = chemically synthesized
  source 1..20: mol_type = other DNA
gactggaactagtgagcaag

SEQ ID NO: 16922 - DNA, 20 bp, synthetic construct
  misc_feature 1..20: note = chemically synthesized
  source 1..20: mol_type = other DNA
tggaactagtgagcaagaag

SEQ ID NO: 16923 - DNA, 20 bp, synthetic construct
  misc_feature 1..20: note = chemically synthesized
  source 1..20: mol_type = other DNA
gcaagaagtagcaaacacac

SEQ ID NO: 16924 - DNA, 20 bp, synthetic construct
  misc_feature 1..20: note = chemically synthesized
  source 1..20: mol_type = other DNA
aacacactggatttattgat

SEQ ID NO: 16925 - DNA, 20 bp, synthetic construct
  misc_feature 1..20: note = chemically synthesized
  source 1..20: mol_type = other DNA
atttattgatgagacatttg

SEQ ID NO: 16926 - DNA, 20 bp, synthetic construct
  misc_feature 1..20: note = chemically synthesized
  source 1..20: mol_type = other DNA
tttattgatgagacatttgt

SEQ ID NO: 16927 - DNA, 20 bp, synthetic construct
  misc_feature 1..20: note = chemically synthesized
  source 1..20: mol_type = other DNA
ttgatgagacatttgtggga

SEQ ID NO: 16928 - DNA, 20 bp, synthetic construct
  misc_feature 1..20: note = chemically synthesized
  source 1..20: mol_type = other DNA
gatgagacatttgtgggaca

SEQ ID NO: 16929 - DNA, 20 bp, synthetic construct
  misc_feature 1..20: note = chemically synthesized
  source 1..20: mol_type = other DNA
atgagacatttgtgggacag

SEQ ID NO: 16930 - DNA, 20 bp, synthetic construct
  misc_feature 1..20: note = chemically synthesized
  source 1..20: mol_type = other DNA
gacatttgtgggacagagga

SEQ ID NO: 16931 - DNA, 20 bp, synthetic construct
  misc_feature 1..20: note = chemically synthesized
  source 1..20: mol_type = other DNA
acatttgtgggacagaggat

SEQ ID NO: 16932 - DNA, 20 bp, synthetic construct
  misc_feature 1..20: note = chemically synthesized
  source 1..20: mol_type = other DNA
gaaataaatctgattaaatt

SEQ ID NO: 16933 - DNA, 20 bp, synthetic construct
  misc_feature 1..20: note = chemically synthesized
  source 1..20: mol_type = other DNA
aaataaatctgattaaattc

SEQ ID NO: 16934 - DNA, 20 bp, synthetic construct
  misc_feature 1..20: note = chemically synthesized
  source 1..20: mol_type = other DNA
aataaatctgattaaattca

SEQ ID NO: 16935 - DNA, 20 bp, synthetic construct
  misc_feature 1..20: note = chemically synthesized
  source 1..20: mol_type = other DNA
aattcagggaccttctacct

SEQ ID NO: 16936 - DNA, 20 bp, synthetic construct
  misc_feature 1..20: note = chemically synthesized
  source 1..20: mol_type = other DNA
ttctacctcagtaaaattta

SEQ ID NO: 16937 - DNA, 20 bp, synthetic construct
  misc_feature 1..20: note = chemically synthesized
  source 1..20: mol_type = other DNA
tctacctcagtaaaatttat

SEQ ID NO: 16938 - DNA, 20 bp, synthetic construct
  misc_feature 1..20: note = chemically synthesized
  source 1..20: mol_type = other DNA
ctacctcagtaaaatttata

SEQ ID NO: 16939 - DNA, 20 bp, synthetic construct
  misc_feature 1..20: note = chemically synthesized
  source 1..20: mol_type = other DNA
tacctcagtaaaatttatag

SEQ ID NO: 16940 - DNA, 20 bp, synthetic construct
  misc_feature 1..20: note = chemically synthesized
  source 1..20: mol_type = other DNA
taaaatttataggggtccaa

SEQ ID NO: 16941 - DNA, 20 bp, synthetic construct
  misc_feature 1..20: note = chemically synthesized
  source 1..20: mol_type = other DNA
tttataggggtccaatggtt

SEQ ID NO: 16942 - DNA, 20 bp, synthetic construct
  misc_feature 1..20: note = chemically synthesized
  source 1..20: mol_type = other DNA
ttataggggtccaatggttt

SEQ ID NO: 16943 - DNA, 20 bp, synthetic construct
  misc_feature 1..20: note = chemically synthesized
  source 1..20: mol_type = other DNA
tataggggtccaatggtttg

SEQ ID NO: 16944 - DNA, 20 bp, synthetic construct
  misc_feature 1..20: note = chemically synthesized
  source 1..20: mol_type = other DNA
ccaatggtttggggctcttt

SEQ ID NO: 16945 - DNA, 20 bp, synthetic construct
  misc_feature 1..20: note = chemically synthesized
  source 1..20: mol_type = other DNA
tctttgagatattccttcta

SEQ ID NO: 16946 - DNA, 20 bp, synthetic construct
  misc_feature 1..20: note = chemically synthesized
  source 1..20: mol_type = other DNA
gagatattccttctaaagtg

SEQ ID NO: 16947 - DNA, 20 bp, synthetic construct
  misc_feature 1..20: note = chemically synthesized
  source 1..20: mol_type = other DNA
agatattccttctaaagtga

SEQ ID NO: 16948 - DNA, 20 bp, synthetic construct
  misc_feature 1..20: note = chemically synthesized
  source 1..20: mol_type = other DNA
gaaggataatttgctgcatt

SEQ ID NO: 16949 - DNA, 20 bp, synthetic construct
  misc_feature 1..20: note = chemically synthesized
  source 1..20: mol_type = other DNA
atttggccactcttacaacc

SEQ ID NO: 16950 - DNA, 20 bp, synthetic construct
  misc_feature 1..20: note = chemically synthesized
  source 1..20: mol_type = other DNA
ccactcttacaaccaagaaa

SEQ ID NO: 16951 - DNA, 20 bp, synthetic construct
  misc_feature 1..20: note = chemically synthesized
  source 1..20: mol_type = other DNA
cactcttacaaccaagaaat

SEQ ID NO: 16952 - DNA, 20 bp, synthetic construct
  misc_feature 1..20: note = chemically synthesized
  source 1..20: mol_type = other DNA
caagaaataggcacaacgcc

SEQ ID NO: 16953 - DNA, 20 bp, synthetic construct
  misc_feature 1..20: note = chemically synthesized
  source 1..20: mol_type = other DNA
gaaataggcacaacgcctag

SEQ ID NO: 16954 - DNA, 20 bp, synthetic construct
  misc_feature 1..20: note = chemically synthesized
  source 1..20: mol_type = other DNA
aaataggcacaacgcctagt

SEQ ID NO: 16955 - DNA, 20 bp, synthetic construct
  misc_feature 1..20: note = chemically synthesized
  source 1..20: mol_type = other DNA
caacgcctagtgggcctatt

SEQ ID NO: 16956 - DNA, 20 bp, synthetic construct
  misc_feature 1..20: note = chemically synthesized
  source 1..20: mol_type = other DNA
tagtgggcctatttggattt

SEQ ID NO: 16957 - DNA, 20 bp, synthetic construct
  misc_feature 1..20: note = chemically synthesized
  source 1..20: mol_type = other DNA
gtgggcctatttggattttg

SEQ ID NO: 16958 - DNA, 20 bp, synthetic construct
  misc_feature 1..20: note = chemically synthesized
  source 1..20: mol_type = other DNA
tgggcctatttggattttgg

SEQ ID NO: 16959 - DNA, 20 bp, synthetic construct
  misc_feature 1..20: note = chemically synthesized
  source 1..20: mol_type = other DNA
gaggcaacatattcctgatt

SEQ ID NO: 16960 - DNA, 20 bp, synthetic construct
  misc_feature 1..20: note = chemically synthesized
  source 1..20: mol_type = other DNA
aggcaacatattcctgattt

SEQ ID NO: 16961 - DNA, 20 bp, synthetic construct
  misc_feature 1..20: note = chemically synthesized
  source 1..20: mol_type = other DNA
ctgatttgggtgtgttactc

SEQ ID NO: 16962 - DNA, 20 bp, synthetic construct
  misc_feature 1..20: note = chemically synthesized
  source 1..20: mol_type = other DNA
gttactctggcccatttatc

SEQ ID NO: 16963 - DNA, 20 bp, synthetic construct
  misc_feature 1..20: note = chemically synthesized
  source 1..20: mol_type = other DNA
ccatttatcgagtgatccaa

SEQ ID NO: 16964 - DNA, 20 bp, synthetic construct
  misc_feature 1..20: note = chemically synthesized
  source 1..20: mol_type = other DNA
catttatcgagtgatccaaa

SEQ ID NO: 16965 - DNA, 20 bp, synthetic construct
  misc_feature 1..20: note = chemically synthesized
  source 1..20: mol_type = other DNA
cgagtgatccaaaaggctgc

SEQ ID NO: 16966 - DNA, 20 bp, synthetic construct
  misc_feature 1..20: note = chemically synthesized
  source 1..20: mol_type = other DNA
tccaaaaggctgccagtttt

SEQ ID NO: 16967 - DNA, 20 bp, synthetic construct
  misc_feature 1..20: note = chemically synthesized
  source 1..20: mol_type = other DNA
aaaaggctgccagttttgag

SEQ ID NO: 16968 - DNA, 20 bp, synthetic construct
  misc_feature 1..20: note = chemically synthesized
  source 1..20: mol_type = other DNA
aaggctgccagttttgagtg

SEQ ID NO: 16969 - DNA, 20 bp, synthetic construct
  misc_feature 1..20: note = chemically synthesized
  source 1..20: mol_type = other DNA
tgccagttttgagtggagtc

SEQ ID NO: 16970 - DNA, 20 bp, synthetic construct
  misc_feature 1..20: note = chemically synthesized
  source 1..20: mol_type = other DNA
gttttgagtggagtccagaa

SEQ ID NO: 16971 - DNA, 20 bp, synthetic construct
  misc_feature 1..20: note = chemically synthesized
  source 1..20: mol_type = other DNA
ttgagtggagtccagaacag

SEQ ID NO: 16972 - DNA, 20 bp, synthetic construct
  misc_feature 1..20: note = chemically synthesized
  source 1..20: mol_type = other DNA
tgagtggagtccagaacaga

SEQ ID NO: 16973 - DNA, 20 bp, synthetic construct
  misc_feature 1..20: note = chemically synthesized
  source 1..20: mol_type = other DNA
cagaacagaaggctctgcca

SEQ ID NO: 16974 - DNA, 20 bp, synthetic construct
  misc_feature 1..20: note = chemically synthesized
  source 1..20: mol_type = other DNA
agaacagaaggctctgccac

SEQ ID NO: 16975 - DNA, 20 bp, synthetic construct
  misc_feature 1..20: note = chemically synthesized
  source 1..20: mol_type = other DNA
agaaggctctgccacaggtc

SEQ ID NO: 16976 - DNA, 20 bp, synthetic construct
  misc_feature 1..20: note = chemically synthesized
  source 1..20: mol_type = other DNA
gaaggctctgccacaggtcc

SEQ ID NO: 16977 - DNA, 20 bp, synthetic construct
  misc_feature 1..20: note = chemically synthesized
  source 1..20: mol_type = other DNA
acaggtccaggctgctgtgc

SEQ ID NO: 16978 - DNA, 20 bp, synthetic construct
  misc_feature 1..20: note = chemically synthesized
  source 1..20: mol_type = other DNA
gtgcaagctgctatgccact

SEQ ID NO: 16979 - DNA, 20 bp, synthetic construct
  misc_feature 1..20: note = chemically synthesized
  source 1..20: mol_type = other DNA
tgcaagctgctatgccactt

SEQ ID NO: 16980 - DNA, 20 bp, synthetic construct
  misc_feature 1..20: note = chemically synthesized
  source 1..20: mol_type = other DNA
gccacttgggccatatgacc

SEQ ID NO: 16981 - DNA, 20 bp, synthetic construct
  misc_feature 1..20: note = chemically synthesized
  source 1..20: mol_type = other DNA
acttgggccatatgacctag

SEQ ID NO: 16982 - DNA, 20 bp, synthetic construct
  misc_feature 1..20: note = chemically synthesized
  source 1..20: mol_type = other DNA
tagcagatccaatgatgctt

SEQ ID NO: 16983 - DNA, 20 bp, synthetic construct
  misc_feature 1..20: note = chemically synthesized
  source 1..20: mol_type = other DNA
agcagatccaatgatgcttg

SEQ ID NO: 16984 - DNA, 20 bp, synthetic construct
  misc_feature 1..20: note = chemically synthesized
  source 1..20: mol_type = other DNA
tccaatgatgcttgaggtgt

SEQ ID NO: 16985 - DNA, 20 bp, synthetic construct
  misc_feature 1..20: note = chemically synthesized
  source 1..20: mol_type = other DNA
gatgcttgaggtgtcagtgc

SEQ ID NO: 16986 - DNA, 20 bp, synthetic construct
  misc_feature 1..20: note = chemically synthesized
  source 1..20: mol_type = other DNA
cttgaggtgtcagtgccaga

SEQ ID NO: 16987 - DNA, 20 bp, synthetic construct
  misc_feature 1..20: note = chemically synthesized
  source 1..20: mol_type = other DNA
ttgaggtgtcagtgccagat

SEQ ID NO: 16988 - DNA, 20 bp, synthetic construct
  misc_feature 1..20: note = chemically synthesized
  source 1..20: mol_type = other DNA
tgaggtgtcagtgccagata

SEQ ID NO: 16989 - DNA, 20 bp, synthetic construct
  misc_feature 1..20: note = chemically synthesized
  source 1..20: mol_type = other DNA
tgccagatagggatgctgtt

SEQ ID NO: 16990 - DNA, 20 bp, synthetic construct
  misc_feature 1..20: note = chemically synthesized
  source 1..20: mol_type = other DNA
ccagatagggatgctgtttg

SEQ ID NO: 16991 - DNA, 20 bp, synthetic construct
  misc_feature 1..20: note = chemically synthesized
  source 1..20: mol_type = other DNA
gggatgctgtttggagcatt

SEQ ID NO: 16992 - DNA, 20 bp, synthetic construct
  misc_feature 1..20: note = chemically synthesized
  source 1..20: mol_type = other DNA
atgctgtttggagcatttgg

SEQ ID NO: 16993 - DNA, 20 bp, synthetic construct
  misc_feature 1..20: note = chemically synthesized
  source 1..20: mol_type = other DNA
tgctgtttggagcatttggc

SEQ ID NO: 16994 - DNA, 20 bp, synthetic construct
  misc_feature 1..20: note = chemically synthesized
  source 1..20: mol_type = other DNA
gcatttggcaggctgaatca

SEQ ID NO: 16995 - DNA, 20 bp, synthetic construct
  misc_feature 1..20: note = chemically synthesized
  source 1..20: mol_type = other DNA
tttggcaggctgaatcacag

SEQ ID NO: 16996 - DNA, 20 bp, synthetic construct
  misc_feature 1..20: note = chemically synthesized
  source 1..20: mol_type = other DNA
tggcaggctgaatcacagcg

SEQ ID NO: 16997 - DNA, 20 bp, synthetic construct
  misc_feature 1..20: note = chemically synthesized
  source 1..20: mol_type = other DNA
ggcaggctgaatcacagcgg

SEQ ID NO: 16998 - DNA, 20 bp, synthetic construct
  misc_feature 1..20: note = chemically synthesized
  source 1..20: mol_type = other DNA
tgaatcacagcggaggcctc

SEQ ID NO: 16999 - DNA, 20 bp, synthetic construct
  misc_feature 1..20: note = chemically synthesized
  source 1..20: mol_type = other DNA
gaatcacagcggaggcctct

SEQ ID NO: 17000 - DNA, 20 bp, synthetic construct
  misc_feature 1..20: note = chemically synthesized
  source 1..20: mol_type = other DNA
agcggaggcctctaggattt

SEQ ID NO: 17001 - DNA, 20 bp, synthetic construct
  misc_feature 1..20: note = chemically synthesized
  source 1..20: mol_type = other DNA
cggaggcctctaggattttg

SEQ ID NO: 17002 - DNA, 20 bp, synthetic construct
  misc_feature 1..20: note = chemically synthesized
  source 1..20: mol_type = other DNA
ggcctctaggattttggagc

SEQ ID NO: 17003 - DNA, 20 bp, synthetic construct
  misc_feature 1..20: note = chemically synthesized
  source 1..20: mol_type = other DNA
gcctctaggattttggagca

SEQ ID NO: 17004 - DNA, 20 bp, synthetic construct
  misc_feature 1..20: note = chemically synthesized
  source 1..20: mol_type = other DNA
caaggccctgccatcttctg

SEQ ID NO: 17005 - DNA, 20 bp, synthetic construct
  misc_feature 1..20: note = chemically synthesized
  source 1..20: mol_type = other DNA
tgcagataactactctcttt

SEQ ID NO: 17006 - DNA, 20 bp, synthetic construct
  misc_feature 1..20: note = chemically synthesized
  source 1..20: mol_type = other DNA
gcagataactactctctttt

SEQ ID NO: 17007 - DNA, 20 bp, synthetic construct
  misc_feature 1..20: note = chemically synthesized
  source 1..20: mol_type = other DNA
cagataactactctctttta

SEQ ID NO: 17008 - DNA, 20 bp, synthetic construct
  misc_feature 1..20: note = chemically synthesized
  source 1..20: mol_type = other DNA
gataactactctcttttagg

SEQ ID NO: 17009 - DNA, 20 bp, synthetic construct
  misc_feature 1..20: note = chemically synthesized
  source 1..20: mol_type = other DNA
actactctcttttagggaga

SEQ ID NO: 17010 - DNA, 20 bp, synthetic construct
  misc_feature 1..20: note = chemically synthesized
  source 1..20: mol_type = other DNA
tcttttagggagaaagctct

SEQ ID NO: 17011 - DNA, 20 bp, synthetic construct
  misc_feature 1..20: note = chemically synthesized
  source 1..20: mol_type = other DNA
gaaagctcttggcctgttac

SEQ ID NO: 17012 - DNA, 20 bp, synthetic construct
  misc_feature 1..20: note = chemically synthesized
  source 1..20: mol_type = other DNA
aaagctcttggcctgttact

SEQ ID NO: 17013 - DNA, 20 bp, synthetic construct
  misc_feature 1..20: note = chemically synthesized
  source 1..20: mol_type = other DNA
cttggcctgttactgggctt

SEQ ID NO: 17014 - DNA, 20 bp, synthetic construct
  misc_feature 1..20: note = chemically synthesized
  source 1..20: mol_type = other DNA
ggcctgttactgggctttgg

SEQ ID NO: 17015 - DNA, 20 bp, synthetic construct
  misc_feature 1..20: note = chemically synthesized
  source 1..20: mol_type = other DNA
gaaacgaaatatttgactat

SEQ ID NO: 17016 - DNA, 20 bp, synthetic construct
  misc_feature 1..20: note = chemically synthesized
  source 1..20: mol_type = other DNA
atatttgactatgagtcatc

SEQ ID NO: 17017 - DNA, 20 bp, synthetic construct
  misc_feature 1..20: note = chemically synthesized
  source 1..20: mol_type = other DNA
ctgaactgcctatcatgaac

SEQ ID NO: 17018 - DNA, 20 bp, synthetic construct
  misc_feature 1..20: note = chemically synthesized
  source 1..20: mol_type = other DNA
tgaactgcctatcatgaact

SEQ ID NO: 17019 - DNA, 20 bp, synthetic construct
  misc_feature 1..20: note = chemically synthesized
  source 1..20: mol_type = other DNA
tgggtgctttctgatccatc

SEQ ID NO: 17020 - DNA, 20 bp, synthetic construct
  misc_feature 1..20: note = chemically synthesized
  source 1..20: mol_type = other DNA
ttctgatccatctagccata

SEQ ID NO: 17021 - DNA, 20 bp, synthetic construct
  misc_feature 1..20: note = chemically synthesized
  source 1..20: mol_type = other DNA
tgatccatctagccataaag

SEQ ID NO: 17022 - DNA, 20 bp, synthetic construct
  misc_feature 1..20: note = chemically synthesized
  source 1..20: mol_type = other DNA
gatccatctagccataaagt

SEQ ID NO: 17023 - DNA, 20 bp, synthetic construct
  misc_feature 1..20: note = chemically synthesized
  source 1..20: mol_type = other DNA
gccataaagtgggctgtgca

SEQ ID NO: 17024 - DNA, 20 bp, synthetic construct
  misc_feature 1..20: note = chemically synthesized
  source 1..20: mol_type = other DNA
ataaagtgggctgtgcacag

SEQ ID NO: 17025 - DNA, 20 bp, synthetic construct
  misc_feature 1..20: note = chemically synthesized
  source 1..20: mol_type = other DNA
tgtgcacagcagcattgcat

SEQ ID NO: 17026 - DNA, 20 bp, synthetic construct
  misc_feature 1..20: note = chemically synthesized
  source 1..20: mol_type = other DNA
agcagcattgcatcagcaaa

SEQ ID NO: 17027 - DNA, 20 bp, synthetic construct
  misc_feature 1..20: note = chemically synthesized
  source 1..20: mol_type = other DNA
agcattgcatcagcaaatgg

SEQ ID NO: 17028 - DNA, 20 bp, synthetic construct
  misc_feature 1..20: note = chemically synthesized
  source 1..20: mol_type = other DNA
attgcatcagcaaatggaag

SEQ ID NO: 17029 - DNA, 20 bp, synthetic construct
  misc_feature 1..20: note = chemically synthesized
  source 1..20: mol_type = other DNA
ggaagtggtatatatgcgat

SEQ ID NO: 17030 - DNA, 20 bp, synthetic construct
  misc_feature 1..20: note = chemically synthesized
  source 1..20: mol_type = other DNA
gaagtggtatatatgcgatt

SEQ ID NO: 17031 - DNA, 20 bp, synthetic construct
  misc_feature 1..20: note = chemically synthesized
  source 1..20: mol_type = other DNA
gtatatatgcgattgggctt

SEQ ID NO: 17032 - DNA, 20 bp, synthetic construct
  misc_feature 1..20: note = chemically synthesized
  source 1..20: mol_type = other DNA
tatatgcgattgggcttgag

SEQ ID NO: 17033 - DNA, 20 bp, synthetic construct
  misc_feature 1..20: note = chemically synthesized
  source 1..20: mol_type = other DNA
ttgggcttgagcagatcctg

SEQ ID NO: 17034 - DNA, 20 bp, synthetic construct
  misc_feature 1..20: note = chemically synthesized
  source 1..20: mol_type = other DNA
tgggcttgagcagatcctga

SEQ ID NO: 17035 - DNA, 20 bp, synthetic construct
  misc_feature 1..20: note = chemically synthesized
  source 1..20: mol_type = other DNA
tgagcagatcctgaaggcac

SEQ ID NO: 17036 - DNA, 20 bp, synthetic construct
  misc_feature 1..20: note = chemically synthesized
  source 1..20: mol_type = other DNA
cagatcctgaaggcactagt

SEQ ID NO: 17037 - DNA, 20 bp, synthetic construct
  misc_feature 1..20: note = chemically synthesized
  source 1..20: mol_type = other DNA
aaggcactagtaagttacat

SEQ ID NO: 17038 - DNA, 20 bp, synthetic construct
  misc_feature 1..20: note = chemically synthesized
  source 1..20: mol_type = other DNA
cactagtaagttacatgaga

SEQ ID NO: 17039 - DNA, 20 bp, synthetic construct
  misc_feature 1..20: note = chemically synthesized
  source 1..20: mol_type = other DNA
actagtaagttacatgagaa

SEQ ID NO: 17040 - DNA, 20 bp, synthetic construct
  misc_feature 1..20: note = chemically synthesized
  source 1..20: mol_type = other DNA
ctagtaagttacatgagaaa

SEQ ID NO: 17041 - DNA, 20 bp, synthetic construct
  misc_feature 1..20: note = chemically synthesized
  source 1..20: mol_type = other DNA
tagtaagttacatgagaaag

SEQ ID NO: 17042 - DNA, 20 bp, synthetic construct
  misc_feature 1..20: note = chemically synthesized
  source 1..20: mol_type = other DNA
gaaaggggctcaaatgccca

SEQ ID NO: 17043 - DNA, 20 bp, synthetic construct
  misc_feature 1..20: note = chemically synthesized
  source 1..20: mol_type = other DNA
acacactgctttctctccct

SEQ ID NO: 17044 - DNA, 20 bp, synthetic construct
  misc_feature 1..20: note = chemically synthesized
  source 1..20: mol_type = other DNA
tctccctgagactgcaccga

SEQ ID NO: 17045 - DNA, 20 bp, synthetic construct
  misc_feature 1..20: note = chemically synthesized
  source 1..20: mol_type = other DNA
agactgcaccgatggtctca

SEQ ID NO: 17046 - DNA, 20 bp, synthetic construct
  misc_feature 1..20: note = chemically synthesized
  source 1..20: mol_type = other DNA
gactgcaccgatggtctcat

SEQ ID NO: 17047 - DNA, 20 bp, synthetic construct
  misc_feature 1..20: note = chemically synthesized
  source 1..20: mol_type = other DNA
actgcaccgatggtctcatg

SEQ ID NO: 17048 - DNA, 20 bp, synthetic construct
  misc_feature 1..20: note = chemically synthesized
  source 1..20: mol_type = other DNA
tgcaccgatggtctcatggg

SEQ ID NO: 17049 - DNA, 20 bp, synthetic construct
  misc_feature 1..20: note = chemically synthesized
  source 1..20: mol_type = other DNA
catggggagttccctatgat

SEQ ID NO: 17050 - DNA, 20 bp, synthetic construct
  misc_feature 1..20: note = chemically synthesized
  source 1..20: mol_type = other DNA
agttccctatgatcagctga

SEQ ID NO: 17051 - DNA, 20 bp, synthetic construct
  misc_feature 1..20: note = chemically synthesized
  source 1..20: mol_type = other DNA
ttccctatgatcagctgaca

SEQ ID NO: 17052 - DNA, 20 bp, synthetic construct
  misc_feature 1..20: note = chemically synthesized
  source 1..20: mol_type = other DNA
tccctatgatcagctgacag

SEQ ID NO: 17053 - DNA, 20 bp, synthetic construct
  misc_feature 1..20: note = chemically synthesized
  source 1..20: mol_type = other DNA
ctatgatcagctgacagagg

SEQ ID NO: 17054 - DNA, 20 bp, synthetic construct
  misc_feature 1..20: note = chemically synthesized
  source 1..20: mol_type = other DNA
atgatcagctgacagaggaa

SEQ ID NO: 17055 - DNA, 20 bp, synthetic construct
  misc_feature 1..20: note = chemically synthesized
  source 1..20: mol_type = other DNA
atcagctgacagaggaagag

SEQ ID NO: 17056 - DNA, 20 bp, synthetic construct
  misc_feature 1..20: note = chemically synthesized
  source 1..20: mol_type = other DNA
ctgacagaggaagagaagac

SEQ ID NO: 17057 - DNA, 20 bp, synthetic construct
  misc_feature 1..20: note = chemically synthesized
  source 1..20: mol_type = other DNA
tgacagaggaagagaagact

SEQ ID NO: 17058 - DNA, 20 bp, synthetic construct
  misc_feature 1..20: note = chemically synthesized
  source 1..20: mol_type = other DNA
aggaagagaagactaggtcc

SEQ ID NO: 17059 - DNA, 20 bp, synthetic construct
  misc_feature 1..20: note = chemically synthesized
  source 1..20: mol_type = other DNA
gaagactaggtcctggttca

SEQ ID NO: 17060 - DNA, 20 bp, synthetic construct
  misc_feature 1..20: note = chemically synthesized
  source 1..20: mol_type = other DNA
actaggtcctggttcacaga

SEQ ID NO: 17061 - DNA, 20 bp, synthetic construct
  misc_feature 1..20: note = chemically synthesized
  source 1..20: mol_type = other DNA
agatagttctgcacgatatg

SEQ ID NO: 17062 - DNA, 20 bp, synthetic construct
  misc_feature 1..20: note = chemically synthesized
  source 1..20: mol_type = other DNA
gatagttctgcacgatatgc

SEQ ID NO: 17063 - DNA, 20 bp, synthetic construct
  misc_feature 1..20: note = chemically synthesized
  source 1..20: mol_type = other DNA
gatatgcaggcaccacccaa

SEQ ID NO: 17064 - DNA, 20 bp, synthetic construct
  misc_feature 1..20: note = chemically synthesized
  source 1..20: mol_type = other DNA
atgcaggcaccacccaaaag

SEQ ID NO: 17065 - DNA, 20 bp, synthetic construct
  misc_feature 1..20: note = chemically synthesized
  source 1..20: mol_type = other DNA
aggcaccacccaaaagtgga

SEQ ID NO: 17066 - DNA, 20 bp, synthetic construct
  misc_feature 1..20: note = chemically synthesized
  source 1..20: mol_type = other DNA
cacccaaaagtggacagccg

SEQ ID NO: 17067 - DNA, 20 bp, synthetic construct
  misc_feature 1..20: note = chemically synthesized
  source 1..20: mol_type = other DNA
agtggacagccgcagcacta

SEQ ID NO: 17068 - DNA, 20 bp, synthetic construct
  misc_feature 1..20: note = chemically synthesized
  source 1..20: mol_type = other DNA
gcagcactacagcccctttc

SEQ ID NO: 17069 - DNA, 20 bp, synthetic construct
  misc_feature 1..20: note = chemically synthesized
  source 1..20: mol_type = other DNA
cagcactacagcccctttct

SEQ ID NO: 17070 - DNA, 20 bp, synthetic construct
  misc_feature 1..20: note = chemically synthesized
  source 1..20: mol_type = other DNA
ccctttctaggacatccctg

SEQ ID NO: 17071 - DNA, 20 bp, synthetic construct
  misc_feature 1..20: note = chemically synthesized
  source 1..20: mol_type = other DNA
cctttctaggacatccctga

SEQ ID NO: 17072 - DNA, 20 bp, synthetic construct
  misc_feature 1..20: note = chemically synthesized
  source 1..20: mol_type = other DNA
aggacatccctgaaggacaa

SEQ ID NO: 17073 - DNA, 20 bp, synthetic construct
  misc_feature 1..20: note = chemically synthesized
  source 1..20: mol_type = other DNA
atccctgaaggacaacggtg

SEQ ID NO: 17074 - DNA, 20 bp, synthetic construct
  misc_feature 1..20: note = chemically synthesized
  source 1..20: mol_type = other DNA
tccctgaaggacaacggtga

SEQ ID NO: 17075 - DNA, 20 bp, synthetic construct
  misc_feature 1..20: note = chemically synthesized
  source 1..20: mol_type = other DNA
ccctgaaggacaacggtgaa

SEQ ID NO: 17076 - DNA, 20 bp, synthetic construct
  misc_feature 1..20: note = chemically synthesized
  source 1..20: mol_type = other DNA
acggtgaagggaaatcttcc

SEQ ID NO: 17077 - DNA, 20 bp, synthetic construct
  misc_feature 1..20: note = chemically synthesized
  source 1..20: mol_type = other DNA
tgaagggaaatcttcctagt

SEQ ID NO: 17078 - DNA, 20 bp, synthetic construct
  misc_feature 1..20: note = chemically synthesized
  source 1..20: mol_type = other DNA
agggaaatcttcctagttgg

SEQ ID NO: 17079 - DNA, 20 bp, synthetic construct
  misc_feature 1..20: note = chemically synthesized
  source 1..20: mol_type = other DNA
ttcctagttggcagaacttt

SEQ ID NO: 17080 - DNA, 20 bp, synthetic construct
  misc_feature 1..20: note = chemically synthesized
  source 1..20: mol_type = other DNA
ctagttggcagaactttgag

SEQ ID NO: 17081 - DNA, 20 bp, synthetic construct
  misc_feature 1..20: note = chemically synthesized
  source 1..20: mol_type = other DNA
agaactttgagcagtgtgcc

SEQ ID NO: 17082 - DNA, 20 bp, synthetic construct
  misc_feature 1..20: note = chemically synthesized
  source 1..20: mol_type = other DNA
gcctggttgtgcactttgca

SEQ ID NO: 17083 - DNA, 20 bp, synthetic construct
  misc_feature 1..20: note = chemically synthesized
  source 1..20: mol_type = other DNA
tggttgtgcactttgcacag

SEQ ID NO: 17084 - DNA, 20 bp, synthetic construct
  misc_feature 1..20: note = chemically synthesized
  source 1..20: mol_type = other DNA
ggttgtgcactttgcacaga

SEQ ID NO: 17085 - DNA, 20 bp, synthetic construct
  misc_feature 1..20: note = chemically synthesized
  source 1..20: mol_type = other DNA
ttgtgcactttgcacagaag

SEQ ID NO: 17086 - DNA, 20 bp, synthetic construct
  misc_feature 1..20: note = chemically synthesized
  source 1..20: mol_type = other DNA
actttgcacagaaggagaaa

SEQ ID NO: 17087 - DNA, 20 bp, synthetic construct
  misc_feature 1..20: note = chemically synthesized
  source 1..20: mol_type = other DNA
tgcacagaaggagaaatggc

SEQ ID NO: 17088 - DNA, 20 bp, synthetic construct
  misc_feature 1..20: note = chemically synthesized
  source 1..20: mol_type = other DNA
tgcgattatatacttattca

SEQ ID NO: 17089 - DNA, 20 bp, synthetic construct
  misc_feature 1..20: note = chemically synthesized
  source 1..20: mol_type = other DNA
gcgattatatacttattcat

SEQ ID NO: 17090 - DNA, 20 bp, synthetic construct
  misc_feature 1..20: note = chemically synthesized
  source 1..20: mol_type = other DNA
atatacttattcatgggctg

SEQ ID NO: 17091 - DNA, 20 bp, synthetic construct
  misc_feature 1..20: note = chemically synthesized
  source 1..20: mol_type = other DNA
ttattcatgggctgtagcca

SEQ ID NO: 17092 - DNA, 20 bp, synthetic construct
  misc_feature 1..20: note = chemically synthesized
  source 1..20: mol_type = other DNA
tattcatgggctgtagccaa

SEQ ID NO: 17093 - DNA, 20 bp, synthetic construct
  misc_feature 1..20: note = chemically synthesized
  source 1..20: mol_type = other DNA
atgggctgtagccaaaggtt

SEQ ID NO: 17094 - DNA, 20 bp, synthetic construct
  misc_feature 1..20: note = chemically synthesized
  source 1..20: mol_type = other DNA
gctgtagccaaaggtttggc

SEQ ID NO: 17095 - DNA, 20 bp, synthetic construct
  misc_feature 1..20: note = chemically synthesized
  source 1..20: mol_type = other DNA
tagccaaaggtttggctaga

SEQ ID NO: 17096 - DNA, 20 bp, synthetic construct
  misc_feature 1..20: note = chemically synthesized
  source 1..20: mol_type = other DNA
caaaggtttggctagatggt

SEQ ID NO: 17097 - DNA, 20 bp, synthetic construct
  misc_feature 1..20: note = chemically synthesized
  source 1..20: mol_type = other DNA
aaaggtttggctagatggtc

SEQ ID NO: 17098 - DNA, 20 bp, synthetic construct
  misc_feature 1..20: note = chemically synthesized
  source 1..20: mol_type = other DNA
aaggtttggctagatggtca

SEQ ID NO: 17099 - DNA, 20 bp, synthetic construct
  misc_feature 1..20: note = chemically synthesized
  source 1..20: mol_type = other DNA
tggctagatggtcagggact

SEQ ID NO: 17100 - DNA, 20 bp, synthetic construct
  misc_feature 1..20: note = chemically synthesized
  source 1..20: mol_type = other DNA
gatggtcagggacttggaaa

SEQ ID NO: 17101 - DNA, 20 bp, synthetic construct
  misc_feature 1..20: note = chemically synthesized
  source 1..20: mol_type = other DNA
ggacttggaaaaagcatgac

SEQ ID NO: 17102 - DNA, 20 bp, synthetic construct
  misc_feature 1..20: note = chemically synthesized
  source 1..20: mol_type = other DNA
tgactggaaaattgatgaca

SEQ ID NO: 17103 - DNA, 20 bp, synthetic construct
  misc_feature 1..20: note = chemically synthesized
  source 1..20: mol_type = other DNA
aaattgatgacaaagaaatt

SEQ ID NO: 17104 - DNA, 20 bp, synthetic construct
  misc_feature 1..20: note = chemically synthesized
  source 1..20: mol_type = other DNA
aattgatgacaaagaaattt

SEQ ID NO: 17105 - DNA, 20 bp, synthetic construct
  misc_feature 1..20: note = chemically synthesized
  source 1..20: mol_type = other DNA
attgatgacaaagaaatttg

SEQ ID NO: 17106 - DNA, 20 bp, synthetic construct
  misc_feature 1..20: note = chemically synthesized
  source 1..20: mol_type = other DNA
gatgacaaagaaatttgggg

SEQ ID NO: 17107 - DNA, 20 bp, synthetic construct
  misc_feature 1..20: note = chemically synthesized
  source 1..20: mol_type = other DNA
tgacaaagaaatttggggaa

SEQ ID NO: 17108 - DNA, 20 bp, synthetic construct
  misc_feature 1..20: note = chemically synthesized
  source 1..20: mol_type = other DNA
gacaaagaaatttggggaag

SEQ ID NO: 17109 - DNA, 20 bp, synthetic construct
  misc_feature 1..20: note = chemically synthesized
  source 1..20: mol_type = other DNA
aaatttggggaagaggtatg

SEQ ID NO: 17110 - DNA, 20 bp, synthetic construct
  misc_feature 1..20: note = chemically synthesized
  source 1..20: mol_type = other DNA
ttggggaagaggtatgtgga

SEQ ID NO: 17111 - DNA, 20 bp, synthetic construct
  misc_feature 1..20: note = chemically synthesized
  source 1..20: mol_type = other DNA
tgtggatggacctctatgat

SEQ ID NO: 17112 - DNA, 20 bp, synthetic construct
  misc_feature 1..20: note = chemically synthesized
  source 1..20: mol_type = other DNA
atgattagtcaaaaactaca

SEQ ID NO: 17113 - DNA, 20 bp, synthetic construct
  misc_feature 1..20: note = chemically synthesized
  source 1..20: mol_type = other DNA
aagatattttcatcccatgt

SEQ ID NO: 17114 - DNA, 20 bp, synthetic construct
  misc_feature 1..20: note = chemically synthesized
  source 1..20: mol_type = other DNA
cccatgtgagtgctcaccaa

SEQ ID NO: 17115 - DNA, 20 bp, synthetic construct
  misc_feature 1..20: note = chemically synthesized
  source 1..20: mol_type = other DNA
ccatgtgagtgctcaccaat

SEQ ID NO: 17116 - DNA, 20 bp, synthetic construct
  misc_feature 1..20: note = chemically synthesized
  source 1..20: mol_type = other DNA
tgctcaccaatgggtgacct

SEQ ID NO: 17117 - DNA, 20 bp, synthetic construct
  misc_feature 1..20: note = chemically synthesized
  source 1..20: mol_type = other DNA
tcaccaatgggtgacctcag

SEQ ID NO: 17118 - DNA, 20 bp, synthetic construct
  misc_feature 1..20: note = chemically synthesized
  source 1..20: mol_type = other DNA
ccaatgggtgacctcagcag

SEQ ID NO: 17119 - DNA, 20 bp, synthetic construct
  misc_feature 1..20: note = chemically synthesized
  source 1..20: mol_type = other DNA
aatgggtgacctcagcagaa

SEQ ID NO: 17120 - DNA, 20 bp, synthetic construct
  misc_feature 1..20: note = chemically synthesized
  source 1..20: mol_type = other DNA
atgggtgacctcagcagaag

SEQ ID NO: 17121 - DNA, 20 bp, synthetic construct
  misc_feature 1..20: note = chemically synthesized
  source 1..20: mol_type = other DNA
agaagaggattttaataatc

SEQ ID NO: 17122 - DNA, 20 bp, synthetic construct
  misc_feature 1..20: note = chemically synthesized
  source 1..20: mol_type = other DNA
agaggattttaataatcaag

SEQ ID NO: 17123 - DNA, 20 bp, synthetic construct
  misc_feature 1..20: note = chemically synthesized
  source 1..20: mol_type = other DNA
gattttaataatcaagtgga

SEQ ID NO: 17124 - DNA, 20 bp, synthetic construct
  misc_feature 1..20: note = chemically synthesized
  source 1..20: mol_type = other DNA
attttaataatcaagtggat

SEQ ID NO: 17125 - DNA, 20 bp, synthetic construct
  misc_feature 1..20: note = chemically synthesized
  source 1..20: mol_type = other DNA
ggataggatgatcaattctg

SEQ ID NO: 17126 - DNA, 20 bp, synthetic construct
  misc_feature 1..20: note = chemically synthesized
  source 1..20: mol_type = other DNA
tcaattctgtggacaccact

SEQ ID NO: 17127 - DNA, 20 bp, synthetic construct
  misc_feature 1..20: note = chemically synthesized
  source 1..20: mol_type = other DNA
gacaccactcagccttttcc

SEQ ID NO: 17128 - DNA, 20 bp, synthetic construct
  misc_feature 1..20: note = chemically synthesized
  source 1..20: mol_type = other DNA
acaccactcagccttttccc

SEQ ID NO: 17129 - DNA, 20 bp, synthetic construct
  misc_feature 1..20: note = chemically synthesized
  source 1..20: mol_type = other DNA
ccactcatgtcatcgtccaa

SEQ ID NO: 17130 - DNA, 20 bp, synthetic construct
  misc_feature 1..20: note = chemically synthesized
  source 1..20: mol_type = other DNA
gtccaatggacccatgaaca

SEQ ID NO: 17131 - DNA, 20 bp, synthetic construct
  misc_feature 1..20: note = chemically synthesized
  source 1..20: mol_type = other DNA
caatggacccatgaacaaag

SEQ ID NO: 17132 - DNA, 20 bp, synthetic construct
  misc_feature 1..20: note = chemically synthesized
  source 1..20: mol_type = other DNA
acccatgaacaaagtggcca

SEQ ID NO: 17133 - DNA, 20 bp, synthetic construct
  misc_feature 1..20: note = chemically synthesized
  source 1..20: mol_type = other DNA
gaacaaagtggccacagttg

SEQ ID NO: 17134 - DNA, 20 bp, synthetic construct
  misc_feature 1..20: note = chemically synthesized
  source 1..20: mol_type = other DNA
aacaaagtggccacagttgc

SEQ ID NO: 17135 - DNA, 20 bp, synthetic construct
  misc_feature 1..20: note = chemically synthesized
  source 1..20: mol_type = other DNA
acaaagtggccacagttgca

SEQ ID NO: 17136 - DNA, 20 bp, synthetic construct
  misc_feature 1..20: note = chemically synthesized
  source 1..20: mol_type = other DNA
agtggccacagttgcaggga

SEQ ID NO: 17137 - DNA, 20 bp, synthetic construct
  misc_feature 1..20: note = chemically synthesized
  source 1..20: mol_type = other DNA
ggccacagttgcagggatgg

SEQ ID NO: 17138 - DNA, 20 bp, synthetic construct
  misc_feature 1..20: note = chemically synthesized
  source 1..20: mol_type = other DNA
gcagggatggaagttatgct

SEQ ID NO: 17139 - DNA, 20 bp, synthetic construct
  misc_feature 1..20: note = chemically synthesized
  source 1..20: mol_type = other DNA
cagggatggaagttatgctt

SEQ ID NO: 17140 - DNA, 20 bp, synthetic construct
  misc_feature 1..20: note = chemically synthesized
  source 1..20: mol_type = other DNA
atggaagttatgcttgggct

SEQ ID NO: 17141 - DNA, 20 bp, synthetic construct
  misc_feature 1..20: note = chemically synthesized
  source 1..20: mol_type = other DNA
tatgcttgggctcagcaaca

SEQ ID NO: 17142 - DNA, 20 bp, synthetic construct
  misc_feature 1..20: note = chemically synthesized
  source 1..20: mol_type = other DNA
acatggacttccactcacca

SEQ ID NO: 17143 - DNA, 20 bp, synthetic construct
  misc_feature 1..20: note = chemically synthesized
  source 1..20: mol_type = other DNA
tccactcaccaaagctgacc

SEQ ID NO: 17144 - DNA, 20 bp, synthetic construct
  misc_feature 1..20: note = chemically synthesized
  source 1..20: mol_type = other DNA
caccaaagctgacctggcca

SEQ ID NO: 17145 - DNA, 20 bp, synthetic construct
  misc_feature 1..20: note = chemically synthesized
  source 1..20: mol_type = other DNA
tggccacagccactgcttgc

SEQ ID NO: 17146 - DNA, 20 bp, synthetic construct
  misc_feature 1..20: note = chemically synthesized
  source 1..20: mol_type = other DNA
cagccactgcttgccagcat

SEQ ID NO: 17147 - DNA, 20 bp, synthetic construct
  misc_feature 1..20: note = chemically synthesized
  source 1..20: mol_type = other DNA
gccactgcttgccagcatca

SEQ ID NO: 17148 - DNA, 20 bp, synthetic construct
  misc_feature 1..20: note = chemically synthesized
  source 1..20: mol_type = other DNA
cagcatcagagaccaacact

SEQ ID NO: 17149 - DNA, 20 bp, synthetic construct
  misc_feature 1..20: note = chemically synthesized
  source 1..20: mol_type = other DNA
ccaacactaagcccttgata

SEQ ID NO: 17150 - DNA, 20 bp, synthetic construct
  misc_feature 1..20: note = chemically synthesized
  source 1..20: mol_type = other DNA
cttgatatggcaccattcct

SEQ ID NO: 17151 - DNA, 20 bp, synthetic construct
  misc_feature 1..20: note = chemically synthesized
  source 1..20: mol_type = other DNA
ttgatatggcaccattcctc

SEQ ID NO: 17152 - DNA, 20 bp, synthetic construct
  misc_feature 1..20: note = chemically synthesized
  source 1..20: mol_type = other DNA
tgatatggcaccattcctcg

SEQ ID NO: 17153 - DNA, 20 bp, synthetic construct
  misc_feature 1..20: note = chemically synthesized
  source 1..20: mol_type = other DNA
gcaccattcctcggggtgat

SEQ ID NO: 17154 - DNA, 20 bp, synthetic construct
  misc_feature 1..20: note = chemically synthesized
  source 1..20: mol_type = other DNA
cattcctcggggtgatcagc

SEQ ID NO: 17155 - DNA, 20 bp, synthetic construct
  misc_feature 1..20: note = chemically synthesized
  source 1..20: mol_type = other DNA
ggggtgatcagccagctacc

SEQ ID NO: 17156 - DNA, 20 bp, synthetic construct
  misc_feature 1..20: note = chemically synthesized
  source 1..20: mol_type = other DNA
gtgatcagccagctacctgg

SEQ ID NO: 17157 - DNA, 20 bp, synthetic construct
  misc_feature 1..20: note = chemically synthesized
  source 1..20: mol_type = other DNA
atcagccagctacctggtgg

SEQ ID NO: 17158 - DNA, 20 bp, synthetic construct
  misc_feature 1..20: note = chemically synthesized
  source 1..20: mol_type = other DNA
tcagccagctacctggtggc

SEQ ID NO: 17159 - DNA, 20 bp, synthetic construct
  misc_feature 1..20: note = chemically synthesized
  source 1..20: mol_type = other DNA
tggtggcaggttgattatat

SEQ ID NO: 17160 - DNA, 20 bp, synthetic construct
  misc_feature 1..20: note = chemically synthesized
  source 1..20: mol_type = other DNA
atattggacctcttccatca

SEQ ID NO: 17161 - DNA, 20 bp, synthetic construct
  misc_feature 1..20: note = chemically synthesized
  source 1..20: mol_type = other DNA
tggacctcttccatcatgga

SEQ ID NO: 17162 - DNA, 20 bp, synthetic construct
  misc_feature 1..20: note = chemically synthesized
  source 1..20: mol_type = other DNA
ggacctcttccatcatggaa

SEQ ID NO: 17163 - DNA, 20 bp, synthetic construct
  misc_feature 1..20: note = chemically synthesized
  source 1..20: mol_type = other DNA
gacctcttccatcatggaaa

SEQ ID NO: 17164 - DNA, 20 bp, synthetic construct
  misc_feature 1..20: note = chemically synthesized
  source 1..20: mol_type = other DNA
ctcttccatcatggaaaggg

SEQ ID NO: 17165 - DNA, 20 bp, synthetic construct
  misc_feature 1..20: note = chemically synthesized
  source 1..20: mol_type = other DNA
cttccatcatggaaagggca

SEQ ID NO: 17166 - DNA, 20 bp, synthetic construct
  misc_feature 1..20: note = chemically synthesized
  source 1..20: mol_type = other DNA
ttccatcatggaaagggcag

SEQ ID NO: 17167 - DNA, 20 bp, synthetic construct
  misc_feature 1..20: note = chemically synthesized
  source 1..20: mol_type = other DNA
gggcagaggcttgtcctcac

SEQ ID NO: 17168 - DNA, 20 bp, synthetic construct
  misc_feature 1..20: note = chemically synthesized
  source 1..20: mol_type = other DNA
gaggcttgtcctcactggaa

SEQ ID NO: 17169 - DNA, 20 bp, synthetic construct
  misc_feature 1..20: note = chemically synthesized
  source 1..20: mol_type = other DNA
actggaatagacacttactc

SEQ ID NO: 17170 - DNA, 20 bp, synthetic construct
  misc_feature 1..20: note = chemically synthesized
  source 1..20: mol_type = other DNA
atagacacttactctggata

SEQ ID NO: 17171 - DNA, 20 bp, synthetic construct
  misc_feature 1..20: note = chemically synthesized
  source 1..20: mol_type = other DNA
tagacacttactctggatat

SEQ ID NO: 17172 - DNA, 20 bp, synthetic construct
  misc_feature 1..20: note = chemically synthesized
  source 1..20: mol_type = other DNA
ctgaactcaatgcttatgcc

SEQ ID NO: 17173 - DNA, 20 bp, synthetic construct
  misc_feature 1..20: note = chemically synthesized
  source 1..20: mol_type = other DNA
tatgccaagactaccatcca

SEQ ID NO: 17174 - DNA, 20 bp, synthetic construct
  misc_feature 1..20: note = chemically synthesized
  source 1..20: mol_type = other DNA
gactaccatccatggaatca

SEQ ID NO: 17175 - DNA, 20 bp, synthetic construct
  misc_feature 1..20: note = chemically synthesized
  source 1..20: mol_type = other DNA
gaatgccgtatccactgtca

SEQ ID NO: 17176 - DNA, 20 bp, synthetic construct
  misc_feature 1..20: note = chemically synthesized
  source 1..20: mol_type = other DNA
cactgtcatggtattccaca

SEQ ID NO: 17177 - DNA, 20 bp, synthetic construct
  misc_feature 1..20: note = chemically synthesized
  source 1..20: mol_type = other DNA
acacagcattgcttctgacc

SEQ ID NO: 17178 - DNA, 20 bp, synthetic construct
  misc_feature 1..20: note = chemically synthesized
  source 1..20: mol_type = other DNA
tgaccaagccactcacttta

SEQ ID NO: 17179 - DNA, 20 bp, synthetic construct
  misc_feature 1..20: note = chemically synthesized
  source 1..20: mol_type = other DNA
agccactcactttatggcta

SEQ ID NO: 17180 - DNA, 20 bp, synthetic construct
  misc_feature 1..20: note = chemically synthesized
  source 1..20: mol_type = other DNA
cactcactttatggctaaag

SEQ ID NO: 17181 - DNA, 20 bp, synthetic construct
  misc_feature 1..20: note = chemically synthesized
  source 1..20: mol_type = other DNA
ttatggctaaagaagtgtga

SEQ ID NO: 17182 - DNA, 20 bp, synthetic construct
  misc_feature 1..20: note = chemically synthesized
  source 1..20: mol_type = other DNA
tggctaaagaagtgtgacag

SEQ ID NO: 17183 - DNA, 20 bp, synthetic construct
  misc_feature 1..20: note = chemically synthesized
  source 1..20: mol_type = other DNA
ggctaaagaagtgtgacagt

SEQ ID NO: 17184 - DNA, 20 bp, synthetic construct
  misc_feature 1..20: note = chemically synthesized
  source 1..20: mol_type = other DNA
tgacagtgggctcatgctca

SEQ ID NO: 17185 - DNA, 20 bp, synthetic construct
  misc_feature 1..20: note = chemically synthesized
  source 1..20: mol_type = other DNA
ctcatgctcatggaatttac

SEQ ID NO: 17186 - DNA, 20 bp, synthetic construct
  misc_feature 1..20: note = chemically synthesized
  source 1..20: mol_type = other DNA
ccatgatccctatcatcctg

SEQ ID NO: 17187 - DNA, 20 bp, synthetic construct
  misc_feature 1..20: note = chemically synthesized
  source 1..20: mol_type = other DNA
tgatccctatcatcctgaag

SEQ ID NO: 17188 - DNA, 20 bp, synthetic construct
  misc_feature 1..20: note = chemically synthesized
  source 1..20: mol_type = other DNA
atcctgaagcagcttttgaa

SEQ ID NO: 17189 - DNA, 20 bp, synthetic construct
  misc_feature 1..20: note = chemically synthesized
  source 1..20: mol_type = other DNA
agcttttgaatggccttttg

SEQ ID NO: 17190 - DNA, 20 bp, synthetic construct
  misc_feature 1..20: note = chemically synthesized
  source 1..20: mol_type = other DNA
gtcacgattacaatgccaac

SEQ ID NO: 17191 - DNA, 20 bp, synthetic construct
  misc_feature 1..20: note = chemically synthesized
  source 1..20: mol_type = other DNA
tcacgattacaatgccaact

SEQ ID NO: 17192 - DNA, 20 bp, synthetic construct
  misc_feature 1..20: note = chemically synthesized
  source 1..20: mol_type = other DNA
aactaggtgacaatactttg

SEQ ID NO: 17193 - DNA, 20 bp, synthetic construct
  misc_feature 1..20: note = chemically synthesized
  source 1..20: mol_type = other DNA
actaggtgacaatactttgc

SEQ ID NO: 17194 - DNA, 20 bp, synthetic construct
  misc_feature 1..20: note = chemically synthesized
  source 1..20: mol_type = other DNA
gtgacaatactttgcaggcc

SEQ ID NO: 17195 - DNA, 20 bp, synthetic construct
  misc_feature 1..20: note = chemically synthesized
  source 1..20: mol_type = other DNA
tgacaatactttgcaggcct

SEQ ID NO: 17196 - DNA, 20 bp, synthetic construct
  misc_feature 1..20: note = chemically synthesized
  source 1..20: mol_type = other DNA
gacaatactttgcaggcctg

SEQ ID NO: 17197 - DNA, 20 bp, synthetic construct
  misc_feature 1..20: note = chemically synthesized
  source 1..20: mol_type = other DNA
tactttgcaggcctggggca

SEQ ID NO: 17198 - DNA, 20 bp, synthetic construct
  misc_feature 1..20: note = chemically synthesized
  source 1..20: mol_type = other DNA
aggcctggggcaaagttctc

SEQ ID NO: 17199 - DNA, 20 bp, synthetic construct
  misc_feature 1..20: note = chemically synthesized
  source 1..20: mol_type = other DNA
cctggggcaaagttctccag

SEQ ID NO: 17200 - DNA, 20 bp, synthetic construct
  misc_feature 1..20: note = chemically synthesized
  source 1..20: mol_type = other DNA
ctggggcaaagttctccaga

SEQ ID NO: 17201 - DNA, 20 bp, synthetic construct
  misc_feature 1..20: note = chemically synthesized
  source 1..20: mol_type = other DNA
aggctgtgtatgctctgaat

SEQ ID NO: 17202 - DNA, 20 bp, synthetic construct
  misc_feature 1..20: note = chemically synthesized
  source 1..20: mol_type = other DNA
ctgaatcagtgtccaatata

SEQ ID NO: 17203 - DNA, 20 bp, synthetic construct
  misc_feature 1..20: note = chemically synthesized
  source 1..20: mol_type = other DNA
atatggtactgtttctccca

SEQ ID NO: 17204 - DNA, 20 bp, synthetic construct
  misc_feature 1..20: note = chemically synthesized
  source 1..20: mol_type = other DNA
ggtactgtttctcccataga

SEQ ID NO: 17205 - DNA, 20 bp, synthetic construct
  misc_feature 1..20: note = chemically synthesized
  source 1..20: mol_type = other DNA
gtactgtttctcccatagac

SEQ ID NO: 17206 - DNA, 20 bp, synthetic construct
  misc_feature 1..20: note = chemically synthesized
  source 1..20: mol_type = other DNA
tctcccatagacaggattca

SEQ ID NO: 17207 - DNA, 20 bp, synthetic construct
  misc_feature 1..20: note = chemically synthesized
  source 1..20: mol_type = other DNA
ctcccatagacaggattcac

SEQ ID NO: 17208 - DNA, 20 bp, synthetic construct
  misc_feature 1..20: note = chemically synthesized
  source 1..20: mol_type = other DNA
atagacaggattcacgggtc

SEQ ID NO: 17209 - DNA, 20 bp, synthetic construct
  misc_feature 1..20: note = chemically synthesized
  source 1..20: mol_type = other DNA
tagacaggattcacgggtcc

SEQ ID NO: 17210 - DNA, 20 bp, synthetic construct
  misc_feature 1..20: note = chemically synthesized
  source 1..20: mol_type = other DNA
attcacgggtccaggaatca

SEQ ID NO: 17211 - DNA, 20 bp, synthetic construct
  misc_feature 1..20: note = chemically synthesized
  source 1..20: mol_type = other DNA
ttcacgggtccaggaatcaa

SEQ ID NO: 17212 - DNA, 20 bp, synthetic construct
  misc_feature 1..20: note = chemically synthesized
  source 1..20: mol_type = other DNA
tcacgggtccaggaatcaaa

SEQ ID NO: 17213 - DNA, 20 bp, synthetic construct
  misc_feature 1..20: note = chemically synthesized
  source 1..20: mol_type = other DNA
cgggtccaggaatcaaaggg

SEQ ID NO: 17214 - DNA, 20 bp, synthetic construct
  misc_feature 1..20: note = chemically synthesized
  source 1..20: mol_type = other DNA
gtccaggaatcaaagggtgg

SEQ ID NO: 17215 - DNA, 20 bp, synthetic construct
  misc_feature 1..20: note = chemically synthesized
  source 1..20: mol_type = other DNA
caggaatcaaagggtggaag

SEQ ID NO: 17216 - DNA, 20 bp, synthetic construct
  misc_feature 1..20: note = chemically synthesized
  source 1..20: mol_type = other DNA
gaatcaaagggtggaagtgg

SEQ ID NO: 17217 - DNA, 20 bp, synthetic construct
  misc_feature 1..20: note = chemically synthesized
  source 1..20: mol_type = other DNA
tcaaagggtggaagtggaag

SEQ ID NO: 17218 - DNA, 20 bp, synthetic construct
  misc_feature 1..20: note = chemically synthesized
  source 1..20: mol_type = other DNA
aagggtggaagtggaagtgg

SEQ ID NO: 17219 - DNA, 20 bp, synthetic construct
  misc_feature 1..20: note = chemically synthesized
  source 1..20: mol_type = other DNA
ggtggaagtggaagtggaag

SEQ ID NO: 17220 - DNA, 20 bp, synthetic construct
  misc_feature 1..20: note = chemically synthesized
  source 1..20: mol_type = other DNA
gcaccactcaccatcacccc

SEQ ID NO: 17221 - DNA, 20 bp, synthetic construct
  misc_feature 1..20: note = chemically synthesized
  source 1..20: mol_type = other DNA
catcacccctagtgttccac

SEQ ID NO: 17222 - DNA, 20 bp, synthetic construct
  misc_feature 1..20: note = chemically synthesized
  source 1..20: mol_type = other DNA
atttttgcttcctgttccca

SEQ ID NO: 17223 - DNA, 20 bp, synthetic construct
  misc_feature 1..20: note = chemically synthesized
  source 1..20: mol_type = other DNA
cccatggcattatgttctgc

SEQ ID NO: 17224 - DNA, 20 bp, synthetic construct
  misc_feature 1..20: note = chemically synthesized
  source 1..20: mol_type = other DNA
ggcattatgttctgctggct

SEQ ID NO: 17225 - DNA, 20 bp, synthetic construct
  misc_feature 1..20: note = chemically synthesized
  source 1..20: mol_type = other DNA
cattatgttctgctggctta

SEQ ID NO: 17226 - DNA, 20 bp, synthetic construct
  misc_feature 1..20: note = chemically synthesized
  source 1..20: mol_type = other DNA
attatgttctgctggcttag

SEQ ID NO: 17227 - DNA, 20 bp, synthetic construct
  misc_feature 1..20: note = chemically synthesized
  source 1..20: mol_type = other DNA
ttctgctggcttagaggtct

SEQ ID NO: 17228 - DNA, 20 bp, synthetic construct
  misc_feature 1..20: note = chemically synthesized
  source 1..20: mol_type = other DNA
tggcttagaggtcttagttc

SEQ ID NO: 17229 - DNA, 20 bp, synthetic construct
  misc_feature 1..20: note = chemically synthesized
  source 1..20: mol_type = other DNA
gcttagaggtcttagttcca

SEQ ID NO: 17230 - DNA, 20 bp, synthetic construct
  misc_feature 1..20: note = chemically synthesized
  source 1..20: mol_type = other DNA
cttagaggtcttagttccag

SEQ ID NO: 17231 - DNA, 20 bp, synthetic construct
  misc_feature 1..20: note = chemically synthesized
  source 1..20: mol_type = other DNA
ttagaggtcttagttccaga

SEQ ID NO: 17232 - DNA, 20 bp, synthetic construct
  misc_feature 1..20: note = chemically synthesized
  source 1..20: mol_type = other DNA
agaggtcttagttccagagg

SEQ ID NO: 17233 - DNA, 20 bp, synthetic construct
  misc_feature 1..20: note = chemically synthesized
  source 1..20: mol_type = other DNA
gaggtcttagttccagaggg

SEQ ID NO: 17234 - DNA, 20 bp, synthetic construct
  misc_feature 1..20: note = chemically synthesized
  source 1..20: mol_type = other DNA
agagggaggaacactgccgc

SEQ ID NO: 17235 - DNA, 20 bp, synthetic construct
  misc_feature 1..20: note = chemically synthesized
  source 1..20: mol_type = other DNA
gagggaggaacactgccgcc

SEQ ID NO: 17236 - DNA, 20 bp, synthetic construct
  misc_feature 1..20: note = chemically synthesized
  source 1..20: mol_type = other DNA
attccattaaactgcaaatt

SEQ ID NO: 17237 - DNA, 20 bp, synthetic construct
  misc_feature 1..20: note = chemically synthesized
  source 1..20: mol_type = other DNA
tgcaaattaagattgccacc

SEQ ID NO: 17238 - DNA, 20 bp, synthetic construct
  misc_feature 1..20: note = chemically synthesized
  source 1..20: mol_type = other DNA
agattgccacctggacactt

SEQ ID NO: 17239 - DNA, 20 bp, synthetic construct
  misc_feature 1..20: note = chemically synthesized
  source 1..20: mol_type = other DNA
gattgccacctggacacttt

SEQ ID NO: 17240 - DNA, 20 bp, synthetic construct
  misc_feature 1..20: note = chemically synthesized
  source 1..20: mol_type = other DNA
tttgggctcctcccaccttt

SEQ ID NO: 17241 - DNA, 20 bp, synthetic construct
  misc_feature 1..20: note = chemically synthesized
  source 1..20: mol_type = other DNA
tcctcccacctttaagtcaa

SEQ ID NO: 17242 - DNA, 20 bp, synthetic construct
  misc_feature 1..20: note = chemically synthesized
  source 1..20: mol_type = other DNA
cctcccacctttaagtcaac

SEQ ID NO: 17243 - DNA, 20 bp, synthetic construct
  misc_feature 1..20: note = chemically synthesized
  source 1..20: mol_type = other DNA
cacctttaagtcaacaggct

SEQ ID NO: 17244 - DNA, 20 bp, synthetic construct
  misc_feature 1..20: note = chemically synthesized
  source 1..20: mol_type = other DNA
ctttaagtcaacaggctaag

SEQ ID NO: 17245 - DNA, 20 bp, synthetic construct
  misc_feature 1..20: note = chemically synthesized
  source 1..20: mol_type = other DNA
ttaagtcaacaggctaagaa

SEQ ID NO: 17246 - DNA, 20 bp, synthetic construct
  misc_feature 1..20: note = chemically synthesized
  source 1..20: mol_type = other DNA
aagtcaacaggctaagaaga

SEQ ID NO: 17247 - DNA, 20 bp, synthetic construct
  misc_feature 1..20: note = chemically synthesized
  source 1..20: mol_type = other DNA
acaggctaagaagagagtta

SEQ ID NO: 17248 - DNA, 20 bp, synthetic construct
  misc_feature 1..20: note = chemically synthesized
  source 1..20: mol_type = other DNA
taagaagagagttacagtgt

SEQ ID NO: 17249 - DNA, 20 bp, synthetic construct
  misc_feature 1..20: note = chemically synthesized
  source 1..20: mol_type = other DNA
gagagttacagtgttggctg

SEQ ID NO: 17250 - DNA, 20 bp, synthetic construct
  misc_feature 1..20: note = chemically synthesized
  source 1..20: mol_type = other DNA
gttggctgcggtgattaacc

SEQ ID NO: 17251 - DNA, 20 bp, synthetic construct
  misc_feature 1..20: note = chemically synthesized
  source 1..20: mol_type = other DNA
ggtgattaacccagactatc

SEQ ID NO: 17252 - DNA, 20 bp, synthetic construct
  misc_feature 1..20: note = chemically synthesized
  source 1..20: mol_type = other DNA
ccagactatcaagatgaaat

SEQ ID NO: 17253 - DNA, 20 bp, synthetic construct
  misc_feature 1..20: note = chemically synthesized
  source 1..20: mol_type = other DNA
atcagtctacaactccacaa

SEQ ID NO: 17254 - DNA, 20 bp, synthetic construct
  misc_feature 1..20: note = chemically synthesized
  source 1..20: mol_type = other DNA
cagtctacaactccacaatg

SEQ ID NO: 17255 - DNA, 20 bp, synthetic construct
  misc_feature 1..20: note = chemically synthesized
  source 1..20: mol_type = other DNA
agtctacaactccacaatgg

SEQ ID NO: 17256 - DNA, 20 bp, synthetic construct
  misc_feature 1..20: note = chemically synthesized
  source 1..20: mol_type = other DNA
tacaactccacaatggaggt

SEQ ID NO: 17257 - DNA, 20 bp, synthetic construct
  misc_feature 1..20: note = chemically synthesized
  source 1..20: mol_type = other DNA
acaactccacaatggaggta

SEQ ID NO: 17258 - DNA, 20 bp, synthetic construct
  misc_feature 1..20: note = chemically synthesized
  source 1..20: mol_type = other DNA
actccacaatggaggtaagg

SEQ ID NO: 17259 - DNA, 20 bp, synthetic construct
  misc_feature 1..20: note = chemically synthesized
  source 1..20: mol_type = other DNA
gaggtaaggaagcgtatgca

SEQ ID NO: 17260 - DNA, 20 bp, synthetic construct
  misc_feature 1..20: note = chemically synthesized
  source 1..20: mol_type = other DNA
ggaagcgtatgcatggaata

SEQ ID NO: 17261 - DNA, 20 bp, synthetic construct
  misc_feature 1..20: note = chemically synthesized
  source 1..20: mol_type = other DNA
gaagcgtatgcatggaatat

SEQ ID NO: 17262 - DNA, 20 bp, synthetic construct
  misc_feature 1..20: note = chemically synthesized
  source 1..20: mol_type = other DNA
agcgtatgcatggaatatag

SEQ ID NO: 17263 - DNA, 20 bp, synthetic construct
  misc_feature 1..20: note = chemically synthesized
  source 1..20: mol_type = other DNA
atggaatataggagatccat

SEQ ID NO: 17264 - DNA, 20 bp, synthetic construct
  misc_feature 1..20: note = chemically synthesized
  source 1..20: mol_type = other DNA
tggaatataggagatccatt

SEQ ID NO: 17265 - DNA, 20 bp, synthetic construct
  misc_feature 1..20: note = chemically synthesized
  source 1..20: mol_type = other DNA
ggaatataggagatccatta

SEQ ID NO: 17266 - DNA, 20 bp, synthetic construct
  misc_feature 1..20: note = chemically synthesized
  source 1..20: mol_type = other DNA
agatccattagggtgtctct

SEQ ID NO: 17267 - DNA, 20 bp, synthetic construct
  misc_feature 1..20: note = chemically synthesized
  source 1..20: mol_type = other DNA
ctcttagttttaccatgtcc

SEQ ID NO: 17268 - DNA, 20 bp, synthetic construct
  misc_feature 1..20: note = chemically synthesized
  source 1..20: mol_type = other DNA
ttttaccatgtcctggaatt

SEQ ID NO: 17269 - DNA, 20 bp, synthetic construct
  misc_feature 1..20: note = chemically synthesized
  source 1..20: mol_type = other DNA
tttaccatgtcctggaatta

SEQ ID NO: 17270 - DNA, 20 bp, synthetic construct
  misc_feature 1..20: note = chemically synthesized
  source 1..20: mol_type = other DNA
ccatgtcctggaattaaggt

SEQ ID NO: 17271 - DNA, 20 bp, synthetic construct
  misc_feature 1..20: note = chemically synthesized
  source 1..20: mol_type = other DNA
tgtcctggaattaaggtcag

SEQ ID NO: 17272 - DNA, 20 bp, synthetic construct
  misc_feature 1..20: note = chemically synthesized
  source 1..20: mol_type = other DNA
gtcctggaattaaggtcagt

SEQ ID NO: 17273 - DNA, 20 bp, synthetic construct
  misc_feature 1..20: note = chemically synthesized
  source 1..20: mol_type = other DNA
aggtcagtgggaaactacta

SEQ ID NO: 17274 - DNA, 20 bp, synthetic construct
  misc_feature 1..20: note = chemically synthesized
  source 1..20: mol_type = other DNA
ggtcagtgggaaactactac

SEQ ID NO: 17275 - DNA, 20 bp, synthetic construct
  misc_feature 1..20: note = chemically synthesized
  source 1..20: mol_type = other DNA
gaaactactacaggccattc

SEQ ID NO: 17276 - DNA, 20 bp, synthetic construct
  misc_feature 1..20: note = chemically synthesized
  source 1..20: mol_type = other DNA
aaactactacaggccattcc

SEQ ID NO: 17277 - DNA, 20 bp, synthetic construct
  misc_feature 1..20: note = chemically synthesized
  source 1..20: mol_type = other DNA
ctactacaggccattccagg

SEQ ID NO: 17278 - DNA, 20 bp, synthetic construct
  misc_feature 1..20: note = chemically synthesized
  source 1..20: mol_type = other DNA
tactacaggccattccaggc

SEQ ID NO: 17279 - DNA, 20 bp, synthetic construct
  misc_feature 1..20: note = chemically synthesized
  source 1..20: mol_type = other DNA
tccaggcaggactacaaata

SEQ ID NO: 17280 - DNA, 20 bp, synthetic construct
  misc_feature 1..20: note = chemically synthesized
  source 1..20: mol_type = other DNA
ccaggcaggactacaaataa

SEQ ID NO: 17281 - DNA, 20 bp, synthetic construct
  misc_feature 1..20: note = chemically synthesized
  source 1..20: mol_type = other DNA
caggactacaaataaaggtt

SEQ ID NO: 17282 - DNA, 20 bp, synthetic construct
  misc_feature 1..20: note = chemically synthesized
  source 1..20: mol_type = other DNA
aggactacaaataaaggttt

SEQ ID NO: 17283 - DNA, 20 bp, synthetic construct
  misc_feature 1..20: note = chemically synthesized
  source 1..20: mol_type = other DNA
aaaggtttgggtcactccac

SEQ ID NO: 17284 - DNA, 20 bp, synthetic construct
  misc_feature 1..20: note = chemically synthesized
  source 1..20: mol_type = other DNA
aaggtttgggtcactccacc

SEQ ID NO: 17285 - DNA, 20 bp, synthetic construct
  misc_feature 1..20: note = chemically synthesized
  source 1..20: mol_type = other DNA
caggaaaaaaaaaaaaaaaa

SEQ ID NO: 17286 - DNA, 20 bp, synthetic construct
  misc_feature 1..20: note = chemically synthesized
  source 1..20: mol_type = other DNA
aaaaaaaaaaaaaaaaagac

SEQ ID NO: 17287 - DNA, 20 bp, synthetic construct
  misc_feature 1..20: note = chemically synthesized
  source 1..20: mol_type = other DNA
aaaaaaagacaagacctgct

SEQ ID NO: 17288 - DNA, 20 bp, synthetic construct
  misc_feature 1..20: note = chemically synthesized
  source 1..20: mol_type = other DNA
aaaaaagacaagacctgctg

SEQ ID NO: 17289 - DNA, 20 bp, synthetic construct
  misc_feature 1..20: note = chemically synthesized
  source 1..20: mol_type = other DNA
gacctgctgaggtgcttgct

SEQ ID NO: 17290 - DNA, 20 bp, synthetic construct
  misc_feature 1..20: note = chemically synthesized
  source 1..20: mol_type = other DNA
acctgctgaggtgcttgctg

SEQ ID NO: 17291 - DNA, 20 bp, synthetic construct
  misc_feature 1..20: note = chemically synthesized
  source 1..20: mol_type = other DNA
cctgctgaggtgcttgctga

SEQ ID NO: 17292 - DNA, 20 bp, synthetic construct
  misc_feature 1..20: note = chemically synthesized
  source 1..20: mol_type = other DNA
tgaggtgcttgctgagggca

SEQ ID NO: 17293 - DNA, 20 bp, synthetic construct
  misc_feature 1..20: note = chemically synthesized
  source 1..20: mol_type = other DNA
gaggtgcttgctgagggcaa

SEQ ID NO: 17294 - DNA, 20 bp, synthetic construct
  misc_feature 1..20: note = chemically synthesized
  source 1..20: mol_type = other DNA
aggtgcttgctgagggcaaa

SEQ ID NO: 17295 - DNA, 20 bp, synthetic construct
  misc_feature 1..20: note = chemically synthesized
  source 1..20: mol_type = other DNA
tgctgagggcaaagggaata

SEQ ID NO: 17296 - DNA, 20 bp, synthetic construct
  misc_feature 1..20: note = chemically synthesized
  source 1..20: mol_type = other DNA
caaagggaatacagaatatg

SEQ ID NO: 17297 - DNA, 20 bp, synthetic construct
  misc_feature 1..20: note = chemically synthesized
  source 1..20: mol_type = other DNA
agggaatacagaatatgtag

SEQ ID NO: 17298 - DNA, 20 bp, synthetic construct
  misc_feature 1..20: note = chemically synthesized
  source 1..20: mol_type = other DNA
gaatacagaatatgtagcag

SEQ ID NO: 17299 - DNA, 20 bp, synthetic construct
  misc_feature 1..20: note = chemically synthesized
  source 1..20: mol_type = other DNA
tacagaatatgtagcagaag

SEQ ID NO: 17300 - DNA, 20 bp, synthetic construct
  misc_feature 1..20: note = chemically synthesized
  source 1..20: mol_type = other DNA
acagaatatgtagcagaaga

SEQ ID NO: 17301 - DNA, 20 bp, synthetic construct
  misc_feature 1..20: note = chemically synthesized
  source 1..20: mol_type = other DNA
gaatatgtagcagaagaagg

SEQ ID NO: 17302 - DNA, 20 bp, synthetic construct
  misc_feature 1..20: note = chemically synthesized
  source 1..20: mol_type = other DNA
aagaaggtagtcatcaatac

SEQ ID NO: 17303 - DNA, 20 bp, synthetic construct
  misc_feature 1..20: note = chemically synthesized
  source 1..20: mol_type = other DNA
tacgatcacgtgaccaattg

SEQ ID NO: 17304 - DNA, 20 bp, synthetic construct
  misc_feature 1..20: note = chemically synthesized
  source 1..20: mol_type = other DNA
acgtgaccaattgcagatac

SEQ ID NO: 17305 - DNA, 20 bp, synthetic construct
  misc_feature 1..20: note = chemically synthesized
  source 1..20: mol_type = other DNA
cgtgaccaattgcagataca

SEQ ID NO: 17306 - DNA, 20 bp, synthetic construct
  misc_feature 1..20: note = chemically synthesized
  source 1..20: mol_type = other DNA
acaaggactgtaattgtcat

SEQ ID NO: 17307 - DNA, 20 bp, synthetic construct
  misc_feature 1..20: note = chemically synthesized
  source 1..20: mol_type = other DNA
tgtctgtatacacttgtact

SEQ ID NO: 17308 - DNA, 20 bp, synthetic construct
  misc_feature 1..20: note = chemically synthesized
  source 1..20: mol_type = other DNA
tttcctttatcatgtgacat

SEQ ID NO: 17309 - DNA, 20 bp, synthetic construct
  misc_feature 1..20: note = chemically synthesized
  source 1..20: mol_type = other DNA
aagatttattgacttcatat

SEQ ID NO: 17310 - DNA, 20 bp, synthetic construct
  misc_feature 1..20: note = chemically synthesized
  source 1..20: mol_type = other DNA
ttgacttcatatcagcattt

SEQ ID NO: 17311 - DNA, 20 bp, synthetic construct
  misc_feature 1..20: note = chemically synthesized
  source 1..20: mol_type = other DNA
atcagcatttaagtattgtt

SEQ ID NO: 17312 - DNA, 20 bp, synthetic construct
  misc_feature 1..20: note = chemically synthesized
  source 1..20: mol_type = other DNA
gtattgttaagtttatgtaa

SEQ ID NO: 17313 - DNA, 20 bp, synthetic construct
  misc_feature 1..20: note = chemically synthesized
  source 1..20: mol_type = other DNA
ttatgtaatagcatttgcaa

SEQ ID NO: 17314 - DNA, 20 bp, synthetic construct
  misc_feature 1..20: note = chemically synthesized
  source 1..20: mol_type = other DNA
tatgtaatagcatttgcaat

SEQ ID NO: 17315 - DNA, 20 bp, synthetic construct
  misc_feature 1..20: note = chemically synthesized
  source 1..20: mol_type = other DNA
atgtaatagcatttgcaatg

SEQ ID NO: 17316 - DNA, 20 bp, synthetic construct
  misc_feature 1..20: note = chemically synthesized
  source 1..20: mol_type = other DNA
atagcatttgcaatggggat

SEQ ID NO: 17317 - DNA, 20 bp, synthetic construct
  misc_feature 1..20: note = chemically synthesized
  source 1..20: mol_type = other DNA
ggtgcattttcaattgcacg

SEQ ID NO: 17318 - DNA, 20 bp, synthetic construct
  misc_feature 1..20: note = chemically synthesized
  source 1..20: mol_type = other DNA
gtgcattttcaattgcacga

SEQ ID NO: 17319 - DNA, 20 bp, synthetic construct
  misc_feature 1..20: note = chemically synthesized
  source 1..20: mol_type = other DNA
attttcaattgcacgaagga

SEQ ID NO: 17320 - DNA, 20 bp, synthetic construct
  misc_feature 1..20: note = chemically synthesized
  source 1..20: mol_type = other DNA
aattgcacgaaggatagttt

SEQ ID NO: 17321 - DNA, 20 bp, synthetic construct
  misc_feature 1..20: note = chemically synthesized
  source 1..20: mol_type = other DNA
gaaggatagttttagtatgt

SEQ ID NO: 17322 - DNA, 20 bp, synthetic construct
  misc_feature 1..20: note = chemically synthesized
  source 1..20: mol_type = other DNA
aaggatagttttagtatgtt

SEQ ID NO: 17323 - DNA, 20 bp, synthetic construct
  misc_feature 1..20: note = chemically synthesized
  source 1..20: mol_type = other DNA
cttattgttgtctttatttg

SEQ ID NO: 17324 - DNA, 20 bp, synthetic construct
  misc_feature 1..20: note = chemically synthesized
  source 1..20: mol_type = other DNA
ttgaagataatgtatgacct

SEQ ID NO: 17325 - DNA, 20 bp, synthetic construct
  misc_feature 1..20: note = chemically synthesized
  source 1..20: mol_type = other DNA
tgaagataatgtatgacctc

SEQ ID NO: 17326 - DNA, 20 bp, synthetic construct
  misc_feature 1..20: note = chemically synthesized
  source 1..20: mol_type = other DNA
gaagataatgtatgacctca

SEQ ID NO: 17327 - DNA, 20 bp, synthetic construct
  misc_feature 1..20: note = chemically synthesized
  source 1..20: mol_type = other DNA
aagataatgtatgacctcag

SEQ ID NO: 17328 - DNA, 20 bp, synthetic construct
  misc_feature 1..20: note = chemically synthesized
  source 1..20: mol_type = other DNA
atgacctcaggggatgtgta

SEQ ID NO: 17329 - DNA, 20 bp, synthetic construct
  misc_feature 1..20: note = chemically synthesized
  source 1..20: mol_type = other DNA
tgacctcaggggatgtgtat

SEQ ID NO: 17330 - DNA, 20 bp, synthetic construct
  misc_feature 1..20: note = chemically synthesized
  source 1..20: mol_type = other DNA
caggggatgtgtataggctc

SEQ ID NO: 17331 - DNA, 20 bp, synthetic construct
  misc_feature 1..20: note = chemically synthesized
  source 1..20: mol_type = other DNA
gtgtataggctcaagttgac

SEQ ID NO: 17332 - DNA, 20 bp, synthetic construct
  misc_feature 1..20: note = chemically synthesized
  source 1..20: mol_type = other DNA
aggctcaagttgacaagcga

SEQ ID NO: 17333 - DNA, 20 bp, synthetic construct
  misc_feature 1..20: note = chemically synthesized
  source 1..20: mol_type = other DNA
gacaagcgatggacttgtga

SEQ ID NO: 17334 - DNA, 20 bp, synthetic construct
  misc_feature 1..20: note = chemically synthesized
  source 1..20: mol_type = other DNA
gacttgtgatggttaatact

SEQ ID NO: 17335 - DNA, 20 bp, synthetic construct
  misc_feature 1..20: note = chemically synthesized
  source 1..20: mol_type = other DNA
atactgagtgtcaacttgat

SEQ ID NO: 17336 - DNA, 20 bp, synthetic construct
  misc_feature 1..20: note = chemically synthesized
  source 1..20: mol_type = other DNA
gtgtcaacttgattggattg

SEQ ID NO: 17337 - DNA, 20 bp, synthetic construct
  misc_feature 1..20: note = chemically synthesized
  source 1..20: mol_type = other DNA
tgattggattgaagtgtgca

SEQ ID NO: 17338 - DNA, 20 bp, synthetic construct
  misc_feature 1..20: note = chemically synthesized
  source 1..20: mol_type = other DNA
gtgtgcaaagtattgatcct

SEQ ID NO: 17339 - DNA, 20 bp, synthetic construct
  misc_feature 1..20: note = chemically synthesized
  source 1..20: mol_type = other DNA
ttgatcctgagtgtgtctgt

SEQ ID NO: 17340 - DNA, 20 bp, synthetic construct
  misc_feature 1..20: note = chemically synthesized
  source 1..20: mol_type = other DNA
tgatcctgagtgtgtctgtg

SEQ ID NO: 17341 - DNA, 20 bp, synthetic construct
  misc_feature 1..20: note = chemically synthesized
  source 1..20: mol_type = other DNA
gatcctgagtgtgtctgtga

SEQ ID NO: 17342 - DNA, 20 bp, synthetic construct
  misc_feature 1..20: note = chemically synthesized
  source 1..20: mol_type = other DNA
tgtctgtgagggtattgcca

SEQ ID NO: 17343 - DNA, 20 bp, synthetic construct
  misc_feature 1..20: note = chemically synthesized
  source 1..20: mol_type = other DNA
gtctgtgagggtattgccaa

SEQ ID NO: 17344 - DNA, 20 bp, synthetic construct
  misc_feature 1..20: note = chemically synthesized
  source 1..20: mol_type = other DNA
ctgtgagggtattgccaaag

SEQ ID NO: 17345 - DNA, 20 bp, synthetic construct
  misc_feature 1..20: note = chemically synthesized
  source 1..20: mol_type = other DNA
gccaaaggagattaacattt

SEQ ID NO: 17346 - DNA, 20 bp, synthetic construct
  misc_feature 1..20: note = chemically synthesized
  source 1..20: mol_type = other DNA
aaggagattaacattttagt

SEQ ID NO: 17347 - DNA, 20 bp, synthetic construct
  misc_feature 1..20: note = chemically synthesized
  source 1..20: mol_type = other DNA
gagattaacattttagtcag

SEQ ID NO: 17348 - DNA, 20 bp, synthetic construct
  misc_feature 1..20: note = chemically synthesized
  source 1..20: mol_type = other DNA
agattaacattttagtcagt

SEQ ID NO: 17349 - DNA, 20 bp, synthetic construct
  misc_feature 1..20: note = chemically synthesized
  source 1..20: mol_type = other DNA
taacattttagtcagtgggc

SEQ ID NO: 17350 - DNA, 20 bp, synthetic construct
  misc_feature 1..20: note = chemically synthesized
  source 1..20: mol_type = other DNA
aacattttagtcagtgggct

SEQ ID NO: 17351 - DNA, 20 bp, synthetic construct
  misc_feature 1..20: note = chemically synthesized
  source 1..20: mol_type = other DNA
ttttagtcagtgggctggga

SEQ ID NO: 17352 - DNA, 20 bp, synthetic construct
  misc_feature 1..20: note = chemically synthesized
  source 1..20: mol_type = other DNA
tttagtcagtgggctgggaa

SEQ ID NO: 17353 - DNA, 20 bp, synthetic construct
  misc_feature 1..20: note = chemically synthesized
  source 1..20: mol_type = other DNA
agtcagtgggctgggaaagg

SEQ ID NO: 17354 - DNA, 20 bp, synthetic construct
  misc_feature 1..20: note = chemically synthesized
  source 1..20: mol_type = other DNA
aggcagacccacccttaatc

SEQ ID NO: 17355 - DNA, 20 bp, synthetic construct
  misc_feature 1..20: note = chemically synthesized
  source 1..20: mol_type = other DNA
ggcagacccacccttaatct

SEQ ID NO: 17356 - DNA, 20 bp, synthetic construct
  misc_feature 1..20: note = chemically synthesized
  source 1..20: mol_type = other DNA
agacccacccttaatctggg

SEQ ID NO: 17357 - DNA, 20 bp, synthetic construct
  misc_feature 1..20: note = chemically synthesized
  source 1..20: mol_type = other DNA
gacccacccttaatctgggt

SEQ ID NO: 17358 - DNA, 20 bp, synthetic construct
  misc_feature 1..20: note = chemically synthesized
  source 1..20: mol_type = other DNA
ctgggtgggcaccatctaat

SEQ ID NO: 17359 - DNA, 20 bp, synthetic construct
  misc_feature 1..20: note = chemically synthesized
  source 1..20: mol_type = other DNA
ggcaccatctaatcagttgc

SEQ ID NO: 17360 - DNA, 20 bp, synthetic construct
  misc_feature 1..20: note = chemically synthesized
  source 1..20: mol_type = other DNA
catctaatcagttgccagtg

SEQ ID NO: 17361 - DNA, 20 bp, synthetic construct
  misc_feature 1..20: note = chemically synthesized
  source 1..20: mol_type = other DNA
taatcagttgccagtgtggc

SEQ ID NO: 17362 - DNA, 20 bp, synthetic construct
  misc_feature 1..20: note = chemically synthesized
  source 1..20: mol_type = other DNA
aatcagttgccagtgtggcc

SEQ ID NO: 17363 - DNA, 20 bp, synthetic construct
  misc_feature 1..20: note = chemically synthesized
  source 1..20: mol_type = other DNA
gccagtgtggccaggatata

SEQ ID NO: 17364 - DNA, 20 bp, synthetic construct
  misc_feature 1..20: note = chemically synthesized
  source 1..20: mol_type = other DNA
agtgtggccaggatataaag

SEQ ID NO: 17365 - DNA, 20 bp, synthetic construct
  misc_feature 1..20: note = chemically synthesized
  source 1..20: mol_type = other DNA
gtgtggccaggatataaagc

SEQ ID NO: 17366 - DNA, 20 bp, synthetic construct
  misc_feature 1..20: note = chemically synthesized
  source 1..20: mol_type = other DNA
tggccaggatataaagcagg

SEQ ID NO: 17367 - DNA, 20 bp, synthetic construct
  misc_feature 1..20: note = chemically synthesized
  source 1..20: mol_type = other DNA
aaaaaaacatgtgaaaatcc

SEQ ID NO: 17368 - DNA, 20 bp, synthetic construct
  misc_feature 1..20: note = chemically synthesized
  source 1..20: mol_type = other DNA
aacatgtgaaaatcctggac

SEQ ID NO: 17369 - DNA, 20 bp, synthetic construct
  misc_feature 1..20: note = chemically synthesized
  source 1..20: mol_type = other DNA
gtgaaaatcctggactggct

SEQ ID NO: 17370 - DNA, 20 bp, synthetic construct
  misc_feature 1..20: note = chemically synthesized
  source 1..20: mol_type = other DNA
cctggactggcttagcctcc

SEQ ID NO: 17371 - DNA, 20 bp, synthetic construct
  misc_feature 1..20: note = chemically synthesized
  source 1..20: mol_type = other DNA
cctacatctttctcccatgc

SEQ ID NO: 17372 - DNA, 20 bp, synthetic construct
  misc_feature 1..20: note = chemically synthesized
  source 1..20: mol_type = other DNA
tgcttcctgccctcaaacat

SEQ ID NO: 17373 - DNA, 20 bp, synthetic construct
  misc_feature 1..20: note = chemically synthesized
  source 1..20: mol_type = other DNA
gccctcaaacattggactcc

SEQ ID NO: 17374 - DNA, 20 bp, synthetic construct
  misc_feature 1..20: note = chemically synthesized
  source 1..20: mol_type = other DNA
acattggactccaagtcctt

SEQ ID NO: 17375 - DNA, 20 bp, synthetic construct
  misc_feature 1..20: note = chemically synthesized
  source 1..20: mol_type = other DNA
gactccaagtccttcagctt

SEQ ID NO: 17376 - DNA, 20 bp, synthetic construct
  misc_feature 1..20: note = chemically synthesized
  source 1..20: mol_type = other DNA
actccaagtccttcagcttt

SEQ ID NO: 17377 - DNA, 20 bp, synthetic construct
  misc_feature 1..20: note = chemically synthesized
  source 1..20: mol_type = other DNA
agtccttcagctttgggact

SEQ ID NO: 17378 - DNA, 20 bp, synthetic construct
  misc_feature 1..20: note = chemically synthesized
  source 1..20: mol_type = other DNA
ttcagctttgggacttggac

SEQ ID NO: 17379 - DNA, 20 bp, synthetic construct
  misc_feature 1..20: note = chemically synthesized
  source 1..20: mol_type = other DNA
cttccttgctcctctgcttg

SEQ ID NO: 17380 - DNA, 20 bp, synthetic construct
  misc_feature 1..20: note = chemically synthesized
  source 1..20: mol_type = other DNA
cttgctcctctgcttgcaga

SEQ ID NO: 17381 - DNA, 20 bp, synthetic construct
  misc_feature 1..20: note = chemically synthesized
  source 1..20: mol_type = other DNA
tgcttgcagatggcctattg

SEQ ID NO: 17382 - DNA, 20 bp, synthetic construct
  misc_feature 1..20: note = chemically synthesized
  source 1..20: mol_type = other DNA
gcttgcagatggcctattgt

SEQ ID NO: 17383 - DNA, 20 bp, synthetic construct
  misc_feature 1..20: note = chemically synthesized
  source 1..20: mol_type = other DNA
gtgggaccttgtgattgtgt

SEQ ID NO: 17384 - DNA, 20 bp, synthetic construct
  misc_feature 1..20: note = chemically synthesized
  source 1..20: mol_type = other DNA
tctatctatctatctcctat

SEQ ID NO: 17385 - DNA, 20 bp, synthetic construct
  misc_feature 1..20: note = chemically synthesized
  source 1..20: mol_type = other DNA
tcctattagttctgtctctc

SEQ ID NO: 17386 - DNA, 20 bp, synthetic construct
  misc_feature 1..20: note = chemically synthesized
  source 1..20: mol_type = other DNA
cctattagttctgtctctct

SEQ ID NO: 17387 - DNA, 20 bp, synthetic construct
  misc_feature 1..20: note = chemically synthesized
  source 1..20: mol_type = other DNA
ctattagttctgtctctcta

SEQ ID NO: 17388 - DNA, 20 bp, synthetic construct
  misc_feature 1..20: note = chemically synthesized
  source 1..20: mol_type = other DNA
ctagggaaccctgacaaata

SEQ ID NO: 17389 - DNA, 20 bp, synthetic construct
  misc_feature 1..20: note = chemically synthesized
  source 1..20: mol_type = other DNA
ggaaccctgacaaatacagt

SEQ ID NO: 17390 - DNA, 20 bp, synthetic construct
  misc_feature 1..20: note = chemically synthesized
  source 1..20: mol_type = other DNA
cctgacaaatacagtgagct

SEQ ID NO: 17391 - DNA, 20 bp, synthetic construct
  misc_feature 1..20: note = chemically synthesized
  source 1..20: mol_type = other DNA
ctgacaaatacagtgagctc

SEQ ID NO: 17392 - DNA, 20 bp, synthetic construct
  misc_feature 1..20: note = chemically synthesized
  source 1..20: mol_type = other DNA
atacagtgagctcaggtcct

SEQ ID NO: 17393 - DNA, 20 bp, synthetic construct
  misc_feature 1..20: note = chemically synthesized
  source 1..20: mol_type = other DNA
cagtgagctcaggtcctgag

SEQ ID NO: 17394 - DNA, 20 bp, synthetic construct
  misc_feature 1..20: note = chemically synthesized
  source 1..20: mol_type = other DNA
cctgagcagacattttccaa

SEQ ID NO: 17395 - DNA, 20 bp, synthetic construct
  misc_feature 1..20: note = chemically synthesized
  source 1..20: mol_type = other DNA
gagcagacattttccaaaag

SEQ ID NO: 17396 - DNA, 20 bp, synthetic construct
  misc_feature 1..20: note = chemically synthesized
  source 1..20: mol_type = other DNA
ttttccaaaagaagacatac

SEQ ID NO: 17397 - DNA, 20 bp, synthetic construct
  misc_feature 1..20: note = chemically synthesized
  source 1..20: mol_type = other DNA
tccaaaagaagacatacaag

SEQ ID NO: 17398 - DNA, 20 bp, synthetic construct
  misc_feature 1..20: note = chemically synthesized
  source 1..20: mol_type = other DNA
ggccaataaacgtcaaaaaa

SEQ ID NO: 17399 - DNA, 20 bp, synthetic construct
  misc_feature 1..20: note = chemically synthesized
  source 1..20: mol_type = other DNA
agttcaacatcactaataat

SEQ ID NO: 17400 - DNA, 20 bp, synthetic construct
  misc_feature 1..20: note = chemically synthesized
  source 1..20: mol_type = other DNA
ttcaacatcactaataatca

SEQ ID NO: 17401 - DNA, 20 bp, synthetic construct
  misc_feature 1..20: note = chemically synthesized
  source 1..20: mol_type = other DNA
catatgatacctccttatgc

SEQ ID NO: 17402 - DNA, 20 bp, synthetic construct
  misc_feature 1..20: note = chemically synthesized
  source 1..20: mol_type = other DNA
tgatacctccttatgccagt

SEQ ID NO: 17403 - DNA, 20 bp, synthetic construct
  misc_feature 1..20: note = chemically synthesized
  source 1..20: mol_type = other DNA
cctccttatgccagtcagaa

SEQ ID NO: 17404 - DNA, 20 bp, synthetic construct
  misc_feature 1..20: note = chemically synthesized
  source 1..20: mol_type = other DNA
tcagaatggctatcattata

SEQ ID NO: 17405 - DNA, 20 bp, synthetic construct
  misc_feature 1..20: note = chemically synthesized
  source 1..20: mol_type = other DNA
atcattataaagttcaaaaa

SEQ ID NO: 17406 - DNA, 20 bp, synthetic construct
  misc_feature 1..20: note = chemically synthesized
  source 1..20: mol_type = other DNA
attataaagttcaaaaacag

SEQ ID NO: 17407 - DNA, 20 bp, synthetic construct
  misc_feature 1..20: note = chemically synthesized
  source 1..20: mol_type = other DNA
agttcaaaaacagcagatgt

SEQ ID NO: 17408 - DNA, 20 bp, synthetic construct
  misc_feature 1..20: note = chemically synthesized
  source 1..20: mol_type = other DNA
caaaaacagcagatgttggt

SEQ ID NO: 17409 - DNA, 20 bp, synthetic construct
  misc_feature 1..20: note = chemically synthesized
  source 1..20: mol_type = other DNA
aaaaacagcagatgttggtg

SEQ ID NO: 17410 - DNA, 20 bp, synthetic construct
  misc_feature 1..20: note = chemically synthesized
  source 1..20: mol_type = other DNA
agcagatgttggtgaggatg

SEQ ID NO: 17411 - DNA, 20 bp, synthetic construct
  misc_feature 1..20: note = chemically synthesized
  source 1..20: mol_type = other DNA
cagatgttggtgaggatgtg

SEQ ID NO: 17412 - DNA, 20 bp, synthetic construct
  misc_feature 1..20: note = chemically synthesized
  source 1..20: mol_type = other DNA
gttggtgaggatgtggagac

SEQ ID NO: 17413 - DNA, 20 bp, synthetic construct
  misc_feature 1..20: note = chemically synthesized
  source 1..20: mol_type = other DNA
agaaaatgcttatacactgt

SEQ ID NO: 17414 - DNA, 20 bp, synthetic construct
  misc_feature 1..20: note = chemically synthesized
  source 1..20: mol_type = other DNA
aatgcttatacactgttggt

SEQ ID NO: 17415 - DNA, 20 bp, synthetic construct
  misc_feature 1..20: note = chemically synthesized
  source 1..20: mol_type = other DNA
ctgttggtaagaatgtaaat

SEQ ID NO: 17416 - DNA, 20 bp, synthetic construct
  misc_feature 1..20: note = chemically synthesized
  source 1..20: mol_type = other DNA
gtaaattagtacaaacttta

SEQ ID NO: 17417 - DNA, 20 bp, synthetic construct
  misc_feature 1..20: note = chemically synthesized
  source 1..20: mol_type = other DNA
aattagtacaaactttatgg

SEQ ID NO: 17418 - DNA, 20 bp, synthetic construct
  misc_feature 1..20: note = chemically synthesized
  source 1..20: mol_type = other DNA
agtacaaactttatggaaga

SEQ ID NO: 17419 - DNA, 20 bp, synthetic construct
  misc_feature 1..20: note = chemically synthesized
  source 1..20: mol_type = other DNA
actttatggaagacagcatg

SEQ ID NO: 17420 - DNA, 20 bp, synthetic construct
  misc_feature 1..20: note = chemically synthesized
  source 1..20: mol_type = other DNA
gacagcatgaagatttctta

SEQ ID NO: 17421 - DNA, 20 bp, synthetic construct
  misc_feature 1..20: note = chemically synthesized
  source 1..20: mol_type = other DNA
atgaagatttcttaaagaac

SEQ ID NO: 17422 - DNA, 20 bp, synthetic construct
  misc_feature 1..20: note = chemically synthesized
  source 1..20: mol_type = other DNA
atttcttaaagaactagaaa

SEQ ID NO: 17423 - DNA, 20 bp, synthetic construct
  misc_feature 1..20: note = chemically synthesized
  source 1..20: mol_type = other DNA
caatcctgcaatcccactac

SEQ ID NO: 17424 - DNA, 20 bp, synthetic construct
  misc_feature 1..20: note = chemically synthesized
  source 1..20: mol_type = other DNA
aatcctgcaatcccactact

SEQ ID NO: 17425 - DNA, 20 bp, synthetic construct
  misc_feature 1..20: note = chemically synthesized
  source 1..20: mol_type = other DNA
tgcaatcccactactgggta

SEQ ID NO: 17426 - DNA, 20 bp, synthetic construct
  misc_feature 1..20: note = chemically synthesized
  source 1..20: mol_type = other DNA
cactactgggtatggaccca

SEQ ID NO: 17427 - DNA, 20 bp, synthetic construct
  misc_feature 1..20: note = chemically synthesized
  source 1..20: mol_type = other DNA
tgggtatggacccaaagtga

SEQ ID NO: 17428 - DNA, 20 bp, synthetic construct
  misc_feature 1..20: note = chemically synthesized
  source 1..20: mol_type = other DNA
ggtatggacccaaagtgaaa

SEQ ID NO: 17429 - DNA, 20 bp, synthetic construct
  misc_feature 1..20: note = chemically synthesized
  source 1..20: mol_type = other DNA
tgaaagagatcatattaaaa

SEQ ID NO: 17430 - DNA, 20 bp, synthetic construct
  misc_feature 1..20: note = chemically synthesized
  source 1..20: mol_type = other DNA
attaaaaaagatatctgcat

SEQ ID NO: 17431 - DNA, 20 bp, synthetic construct
  misc_feature 1..20: note = chemically synthesized
  source 1..20: mol_type = other DNA
tatctgcattagtatgttca

SEQ ID NO: 17432 - DNA, 20 bp, synthetic construct
  misc_feature 1..20: note = chemically synthesized
  source 1..20: mol_type = other DNA
ctgcattagtatgttcaaag

SEQ ID NO: 17433 - DNA, 20 bp, synthetic construct
  misc_feature 1..20: note = chemically synthesized
  source 1..20: mol_type = other DNA
caaagtagcactgttcccaa

SEQ ID NO: 17434 - DNA, 20 bp, synthetic construct
  misc_feature 1..20: note = chemically synthesized
  source 1..20: mol_type = other DNA
tagcactgttcccaatagca

SEQ ID NO: 17435 - DNA, 20 bp, synthetic construct
  misc_feature 1..20: note = chemically synthesized
  source 1..20: mol_type = other DNA
tgttcccaatagcaaagata

SEQ ID NO: 17436 - DNA, 20 bp, synthetic construct
  misc_feature 1..20: note = chemically synthesized
  source 1..20: mol_type = other DNA
tcaacctaaatgtctaccaa

SEQ ID NO: 17437 - DNA, 20 bp, synthetic construct
  misc_feature 1..20: note = chemically synthesized
  source 1..20: mol_type = other DNA
aatgtctaccaatggacgat

SEQ ID NO: 17438 - DNA, 20 bp, synthetic construct
  misc_feature 1..20: note = chemically synthesized
  source 1..20: mol_type = other DNA
taccaatggacgattggata

SEQ ID NO: 17439 - DNA, 20 bp, synthetic construct
  misc_feature 1..20: note = chemically synthesized
  source 1..20: mol_type = other DNA
acgattggataaagaaaatg

SEQ ID NO: 17440 - DNA, 20 bp, synthetic construct
  misc_feature 1..20: note = chemically synthesized
  source 1..20: mol_type = other DNA
ttatatacatatatattact

SEQ ID NO: 17441 - DNA, 20 bp, synthetic construct
  misc_feature 1..20: note = chemically synthesized
  source 1..20: mol_type = other DNA
tatattactcagccataaaa

SEQ ID NO: 17442 - DNA, 20 bp, synthetic construct
  misc_feature 1..20: note = chemically synthesized
  source 1..20: mol_type = other DNA
gaatgaaatcatgtcttctc

SEQ ID NO: 17443 - DNA, 20 bp, synthetic construct
  misc_feature 1..20: note = chemically synthesized
  source 1..20: mol_type = other DNA
tcatgtcttctctagaaaca

SEQ ID NO: 17444 - DNA, 20 bp, synthetic construct
  misc_feature 1..20: note = chemically synthesized
  source 1..20: mol_type = other DNA
gtcttctctagaaacatggt

SEQ ID NO: 17445 - DNA, 20 bp, synthetic construct
  misc_feature 1..20: note = chemically synthesized
  source 1..20: mol_type = other DNA
tctagaaacatggttagaac

SEQ ID NO: 17446 - DNA, 20 bp, synthetic construct
  misc_feature 1..20: note = chemically synthesized
  source 1..20: mol_type = other DNA
tagaaacatggttagaactg

SEQ ID NO: 17447 - DNA, 20 bp, synthetic construct
  misc_feature 1..20: note = chemically synthesized
  source 1..20: mol_type = other DNA
agaaacatggttagaactgg

SEQ ID NO: 17448 - DNA, 20 bp, synthetic construct
  misc_feature 1..20: note = chemically synthesized
  source 1..20: mol_type = other DNA
gaactggaggacattatcct

SEQ ID NO: 17449 - DNA, 20 bp, synthetic construct
  misc_feature 1..20: note = chemically synthesized
  source 1..20: mol_type = other DNA
ttatcctcagtgaaataact

SEQ ID NO: 17450 - DNA, 20 bp, synthetic construct
  misc_feature 1..20: note = chemically synthesized
  source 1..20: mol_type = other DNA
tcagtgaaataactcagaaa

SEQ ID NO: 17451 - DNA, 20 bp, synthetic construct
  misc_feature 1..20: note = chemically synthesized
  source 1..20: mol_type = other DNA
tgaaataactcagaaacaga

SEQ ID NO: 17452 - DNA, 20 bp, synthetic construct
  misc_feature 1..20: note = chemically synthesized
  source 1..20: mol_type = other DNA
cagaaacagaaagtcaaaca

SEQ ID NO: 17453 - DNA, 20 bp, synthetic construct
  misc_feature 1..20: note = chemically synthesized
  source 1..20: mol_type = other DNA
aaacacagtatgttctcatt

SEQ ID NO: 17454 - DNA, 20 bp, synthetic construct
  misc_feature 1..20: note = chemically synthesized
  source 1..20: mol_type = other DNA
acagtatgttctcatttagt

SEQ ID NO: 17455 - DNA, 20 bp, synthetic construct
  misc_feature 1..20: note = chemically synthesized
  source 1..20: mol_type = other DNA
agtatgttctcatttagtga

SEQ ID NO: 17456 - DNA, 20 bp, synthetic construct
  misc_feature 1..20: note = chemically synthesized
  source 1..20: mol_type = other DNA
gttctcatttagtgagagcc

SEQ ID NO: 17457 - DNA, 20 bp, synthetic construct
  misc_feature 1..20: note = chemically synthesized
  source 1..20: mol_type = other DNA
ctcatttagtgagagccaag

SEQ ID NO: 17458 - DNA, 20 bp, synthetic construct
  misc_feature 1..20: note = chemically synthesized
  source 1..20: mol_type = other DNA
tcatttagtgagagccaagt

SEQ ID NO: 17459 - DNA, 20 bp, synthetic construct
  misc_feature 1..20: note = chemically synthesized
  source 1..20: mol_type = other DNA
atttagtgagagccaagtgg

SEQ ID NO: 17460 - DNA, 20 bp, synthetic construct
  misc_feature 1..20: note = chemically synthesized
  source 1..20: mol_type = other DNA
ccaagtgggagctaaacgat

SEQ ID NO: 17461 - DNA, 20 bp, synthetic construct
  misc_feature 1..20: note = chemically synthesized
  source 1..20: mol_type = other DNA
gtgggagctaaacgatgagt

SEQ ID NO: 17462 - DNA, 20 bp, synthetic construct
  misc_feature 1..20: note = chemically synthesized
  source 1..20: mol_type = other DNA
agctaaacgatgagtaagca

SEQ ID NO: 17463 - DNA, 20 bp, synthetic construct
  misc_feature 1..20: note = chemically synthesized
  source 1..20: mol_type = other DNA
gatgagtaagcatagacata

SEQ ID NO: 17464 - DNA, 20 bp, synthetic construct
  misc_feature 1..20: note = chemically synthesized
  source 1..20: mol_type = other DNA
agacatatagaatgaaataa

SEQ ID NO: 17465 - DNA, 20 bp, synthetic construct
  misc_feature 1..20: note = chemically synthesized
  source 1..20: mol_type = other DNA
gaatgaaataatagacactt

SEQ ID NO: 17466 - DNA, 20 bp, synthetic construct
  misc_feature 1..20: note = chemically synthesized
  source 1..20: mol_type = other DNA
aaataatagacacttgagac

SEQ ID NO: 17467 - DNA, 20 bp, synthetic construct
  misc_feature 1..20: note = chemically synthesized
  source 1..20: mol_type = other DNA
ataatagacacttgagacta

SEQ ID NO: 17468 - DNA, 20 bp, synthetic construct
  misc_feature 1..20: note = chemically synthesized
  source 1..20: mol_type = other DNA
tagacacttgagactagaga

SEQ ID NO: 17469 - DNA, 20 bp, synthetic construct
  misc_feature 1..20: note = chemically synthesized
  source 1..20: mol_type = other DNA
agacacttgagactagagaa

SEQ ID NO: 17470 - DNA, 20 bp, synthetic construct
  misc_feature 1..20: note = chemically synthesized
  source 1..20: mol_type = other DNA
cacttgagactagagaaagg

SEQ ID NO: 17471 - DNA, 20 bp, synthetic construct
  misc_feature 1..20: note = chemically synthesized
  source 1..20: mol_type = other DNA
acttgagactagagaaaggt

SEQ ID NO: 17472 - DNA, 20 bp, synthetic construct
  misc_feature 1..20: note = chemically synthesized
  source 1..20: mol_type = other DNA
ttgagactagagaaaggtgg

SEQ ID NO: 17473 - DNA, 20 bp, synthetic construct
  misc_feature 1..20: note = chemically synthesized
  source 1..20: mol_type = other DNA
tgagactagagaaaggtggg

SEQ ID NO: 17474 - DNA, 20 bp, synthetic construct
  misc_feature 1..20: note = chemically synthesized
  source 1..20: mol_type = other DNA
actagagaaaggtgggagga

SEQ ID NO: 17475 - DNA, 20 bp, synthetic construct
  misc_feature 1..20: note = chemically synthesized
  source 1..20: mol_type = other DNA
ctagagaaaggtgggaggat

SEQ ID NO: 17476 - DNA, 20 bp, synthetic construct
  misc_feature 1..20: note = chemically synthesized
  source 1..20: mol_type = other DNA
agagaaaggtgggaggatag

SEQ ID NO: 17477 - DNA, 20 bp, synthetic construct
  misc_feature 1..20: note = chemically synthesized
  source 1..20: mol_type = other DNA
aaggtgggaggataggagta

SEQ ID NO: 17478 - DNA, 20 bp, synthetic construct
  misc_feature 1..20: note = chemically synthesized
  source 1..20: mol_type = other DNA
tgggaggataggagtatggt

SEQ ID NO: 17479 - DNA, 20 bp, synthetic construct
  misc_feature 1..20: note = chemically synthesized
  source 1..20: mol_type = other DNA
gggaggataggagtatggtg

SEQ ID NO: 17480 - DNA, 20 bp, synthetic construct
  misc_feature 1..20: note = chemically synthesized
  source 1..20: mol_type = other DNA
tggtgaggactgaaaaacta

SEQ ID NO: 17481 - DNA, 20 bp, synthetic construct
  misc_feature 1..20: note = chemically synthesized
  source 1..20: mol_type = other DNA
aggactgaaaaactacggat

SEQ ID NO: 17482 - DNA, 20 bp, synthetic construct
  misc_feature 1..20: note = chemically synthesized
  source 1..20: mol_type = other DNA
tggatacaacattcactttt

SEQ ID NO: 17483 - DNA, 20 bp, synthetic construct
  misc_feature 1..20: note = chemically synthesized
  source 1..20: mol_type = other DNA
ggatacaacattcacttttc

SEQ ID NO: 17484 - DNA, 20 bp, synthetic construct
  misc_feature 1..20: note = chemically synthesized
  source 1..20: mol_type = other DNA
aacattcacttttcaggtga

SEQ ID NO: 17485 - DNA, 20 bp, synthetic construct
  misc_feature 1..20: note = chemically synthesized
  source 1..20: mol_type = other DNA
ttcaggtgatggtccactaa

SEQ ID NO: 17486 - DNA, 20 bp, synthetic construct
  misc_feature 1..20: note = chemically synthesized
  source 1..20: mol_type = other DNA
gtgatggtccactaaaagct

SEQ ID NO: 17487 - DNA, 20 bp, synthetic construct
  misc_feature 1..20: note = chemically synthesized
  source 1..20: mol_type = other DNA
actatgcaacatacatatgt

SEQ ID NO: 17488 - DNA, 20 bp, synthetic construct
  misc_feature 1..20: note = chemically synthesized
  source 1..20: mol_type = other DNA
ctatgcaacatacatatgta

SEQ ID NO: 17489 - DNA, 20 bp, synthetic construct
  misc_feature 1..20: note = chemically synthesized
  source 1..20: mol_type = other DNA
catacatatgtaaggaaccc

SEQ ID NO: 17490 - DNA, 20 bp, synthetic construct
  misc_feature 1..20: note = chemically synthesized
  source 1..20: mol_type = other DNA
cccgagcttgtaccctgata

SEQ ID NO: 17491 - DNA, 20 bp, synthetic construct
  misc_feature 1..20: note = chemically synthesized
  source 1..20: mol_type = other DNA
ccaaatctcatcttgaattg

SEQ ID NO: 17492 - DNA, 20 bp, synthetic construct
  misc_feature 1..20: note = chemically synthesized
  source 1..20: mol_type = other DNA
cccataatcctcacgtgttg

SEQ ID NO: 17493 - DNA, 20 bp, synthetic construct
  misc_feature 1..20: note = chemically synthesized
  source 1..20: mol_type = other DNA
ccataatcctcacgtgttgt

SEQ ID NO: 17494 - DNA, 20 bp, synthetic construct
  misc_feature 1..20: note = chemically synthesized
  source 1..20: mol_type = other DNA
ataatcctcacgtgttgtgg

SEQ ID NO: 17495 - DNA, 20 bp, synthetic construct
  misc_feature 1..20: note = chemically synthesized
  source 1..20: mol_type = other DNA
taatcctcacgtgttgtggg

SEQ ID NO: 17496 - DNA, 20 bp, synthetic construct
  misc_feature 1..20: note = chemically synthesized
  source 1..20: mol_type = other DNA
aatcctcacgtgttgtggga

SEQ ID NO: 17497 - DNA, 20 bp, synthetic construct
  misc_feature 1..20: note = chemically synthesized
  source 1..20: mol_type = other DNA
cacgtgttgtgggagggatt

SEQ ID NO: 17498 - DNA, 20 bp, synthetic construct
  misc_feature 1..20: note = chemically synthesized
  source 1..20: mol_type = other DNA
cgtgttgtgggagggatttg

SEQ ID NO: 17499 - DNA, 20 bp, synthetic construct
  misc_feature 1..20: note = chemically synthesized
  source 1..20: mol_type = other DNA
gtgttgtgggagggatttgg

SEQ ID NO: 17500 - DNA, 20 bp, synthetic construct
  misc_feature 1..20: note = chemically synthesized
  source 1..20: mol_type = other DNA
tgttgtgggagggatttgga

SEQ ID NO: 17501 - DNA, 20 bp, synthetic construct
  misc_feature 1..20: note = chemically synthesized
  source 1..20: mol_type = other DNA
ttgtgggagggatttggagg

SEQ ID NO: 17502 - DNA, 20 bp, synthetic construct
  misc_feature 1..20: note = chemically synthesized
  source 1..20: mol_type = other DNA
tgtgggagggatttggaggg

SEQ ID NO: 17503 - DNA, 20 bp, synthetic construct
  misc_feature 1..20: note = chemically synthesized
  source 1..20: mol_type = other DNA
ggagggaggtaattgaatca

SEQ ID NO: 17504 - DNA, 20 bp, synthetic construct
  misc_feature 1..20: note = chemically synthesized
  source 1..20: mol_type = other DNA
agggaggtaattgaatcata

SEQ ID NO: 17505 - DNA, 20 bp, synthetic construct
  misc_feature 1..20: note = chemically synthesized
  source 1..20: mol_type = other DNA
gggaggtaattgaatcatag

SEQ ID NO: 17506 - DNA, 20 bp, synthetic construct
  misc_feature 1..20: note = chemically synthesized
  source 1..20: mol_type = other DNA
gaggtaattgaatcatagag

SEQ ID NO: 17507 - DNA, 20 bp, synthetic construct
  misc_feature 1..20: note = chemically synthesized
  source 1..20: mol_type = other DNA
aggtaattgaatcatagagg

SEQ ID NO: 17508 - DNA, 20 bp, synthetic construct
  misc_feature 1..20: note = chemically synthesized
  source 1..20: mol_type = other DNA
ctctcatgctcttctcgtga

SEQ ID NO: 17509 - DNA, 20 bp, synthetic construct
  misc_feature 1..20: note = chemically synthesized
  source 1..20: mol_type = other DNA
catgctcttctcgtgatagt

SEQ ID NO: 17510 - DNA, 20 bp, synthetic construct
  misc_feature 1..20: note = chemically synthesized
  source 1..20: mol_type = other DNA
tcgtgatagtgagttcttac

SEQ ID NO: 17511 - DNA, 20 bp, synthetic construct
  misc_feature 1..20: note = chemically synthesized
  source 1..20: mol_type = other DNA
tgagttcttacaagatctga

SEQ ID NO: 17512 - DNA, 20 bp, synthetic construct
  misc_feature 1..20: note = chemically synthesized
  source 1..20: mol_type = other DNA
acaagatctgatggttttat

SEQ ID NO: 17513 - DNA, 20 bp, synthetic construct
  misc_feature 1..20: note = chemically synthesized
  source 1..20: mol_type = other DNA
agatctgatggttttataag

SEQ ID NO: 17514 - DNA, 20 bp, synthetic construct
  misc_feature 1..20: note = chemically synthesized
  source 1..20: mol_type = other DNA
cggcttttcccccttttgct

SEQ ID NO: 17515 - DNA, 20 bp, synthetic construct
  misc_feature 1..20: note = chemically synthesized
  source 1..20: mol_type = other DNA
ctacttgctgctgccatgtg

SEQ ID NO: 17516 - DNA, 20 bp, synthetic construct
  misc_feature 1..20: note = chemically synthesized
  source 1..20: mol_type = other DNA
cttgctgctgccatgtgaag

SEQ ID NO: 17517 - DNA, 20 bp, synthetic construct
  misc_feature 1..20: note = chemically synthesized
  source 1..20: mol_type = other DNA
ttgctgctgccatgtgaaga

SEQ ID NO: 17518 - DNA, 20 bp, synthetic construct
  misc_feature 1..20: note = chemically synthesized
  source 1..20: mol_type = other DNA
tcttcttctgccatgattgt

SEQ ID NO: 17519 - DNA, 20 bp, synthetic construct
  misc_feature 1..20: note = chemically synthesized
  source 1..20: mol_type = other DNA
gccatgattgtaagtttccc

SEQ ID NO: 17520 - DNA, 20 bp, synthetic construct
  misc_feature 1..20: note = chemically synthesized
  source 1..20: mol_type = other DNA
ccatgattgtaagtttcccg

SEQ ID NO: 17521 - DNA, 20 bp, synthetic construct
  misc_feature 1..20: note = chemically synthesized
  source 1..20: mol_type = other DNA
taagtttcccgaggcctccc

SEQ ID NO: 17522 - DNA, 20 bp, synthetic construct
  misc_feature 1..20: note = chemically synthesized
  source 1..20: mol_type = other DNA
ccgaggcctccccagccctg

SEQ ID NO: 17523 - DNA, 20 bp, synthetic construct
  misc_feature 1..20: note = chemically synthesized
  source 1..20: mol_type = other DNA
ccccagccctgtggaactgt

SEQ ID NO: 17524 - DNA, 20 bp, synthetic construct
  misc_feature 1..20: note = chemically synthesized
  source 1..20: mol_type = other DNA
ttttttccttataaattacc

SEQ ID NO: 17525 - DNA, 20 bp, synthetic construct
  misc_feature 1..20: note = chemically synthesized
  source 1..20: mol_type = other DNA
ccttataaattacccagtct

SEQ ID NO: 17526 - DNA, 20 bp, synthetic construct
  misc_feature 1..20: note = chemically synthesized
  source 1..20: mol_type = other DNA
cttataaattacccagtctc

SEQ ID NO: 17527 - DNA, 20 bp, synthetic construct
  misc_feature 1..20: note = chemically synthesized
  source 1..20: mol_type = other DNA
agtctcaggtatgtctttat

SEQ ID NO: 17528 - DNA, 20 bp, synthetic construct
  misc_feature 1..20: note = chemically synthesized
  source 1..20: mol_type = other DNA
ctcaggtatgtctttataag

SEQ ID NO: 17529 - DNA, 20 bp, synthetic construct
  misc_feature 1..20: note = chemically synthesized
  source 1..20: mol_type = other DNA
taagcagcatgataacgaac

SEQ ID NO: 17530 - DNA, 20 bp, synthetic construct
  misc_feature 1..20: note = chemically synthesized
  source 1..20: mol_type = other DNA
tttaaaaatataaaataaat

SEQ ID NO: 17531 - DNA, 20 bp, synthetic construct
  misc_feature 1..20: note = chemically synthesized
  source 1..20: mol_type = other DNA
ataaattagatctgattgaa

SEQ ID NO: 17532 - DNA, 20 bp, synthetic construct
  misc_feature 1..20: note = chemically synthesized
  source 1..20: mol_type = other DNA
taaattagatctgattgaaa

SEQ ID NO: 17533 - DNA, 20 bp, synthetic construct
  misc_feature 1..20: note = chemically synthesized
  source 1..20: mol_type = other DNA
tgattgaaaaggcaaaaatt

SEQ ID NO: 17534 - DNA, 20 bp, synthetic construct
  misc_feature 1..20: note = chemically synthesized
  source 1..20: mol_type = other DNA
tgaaaaggcaaaaattgagc

SEQ ID NO: 17535 - DNA, 20 bp, synthetic construct
  misc_feature 1..20: note = chemically synthesized
  source 1..20: mol_type = other DNA
gcaagcaaaatatcacttaa

SEQ ID NO: 17536 - DNA, 20 bp, synthetic construct
  misc_feature 1..20: note = chemically synthesized
  source 1..20: mol_type = other DNA
caagcaaaatatcacttaat

SEQ ID NO: 17537 - DNA, 20 bp, synthetic construct
  misc_feature 1..20: note = chemically synthesized
  source 1..20: mol_type = other DNA
aagcaaaatatcacttaatg

SEQ ID NO: 17538 - DNA, 20 bp, synthetic construct
  misc_feature 1..20: note = chemically synthesized
  source 1..20: mol_type = other DNA
tcacttaatggggtaattaa

SEQ ID NO: 17539 - DNA, 20 bp, synthetic construct
  misc_feature 1..20: note = chemically synthesized
  source 1..20: mol_type = other DNA
cacttaatggggtaattaaa

SEQ ID NO: 17540 - DNA, 20 bp, synthetic construct
  misc_feature 1..20: note = chemically synthesized
  source 1..20: mol_type = other DNA
acttaatggggtaattaaaa

SEQ ID NO: 17541 - DNA, 20 bp, synthetic construct
  misc_feature 1..20: note = chemically synthesized
  source 1..20: mol_type = other DNA
atggggtaattaaaagggtg

SEQ ID NO: 17542 - DNA, 20 bp, synthetic construct
  misc_feature 1..20: note = chemically synthesized
  source 1..20: mol_type = other DNA
aattaaaagggtgaagaaat

SEQ ID NO: 17543 - DNA, 20 bp, synthetic construct
  misc_feature 1..20: note = chemically synthesized
  source 1..20: mol_type = other DNA
attaaaagggtgaagaaatt

SEQ ID NO: 17544 - DNA, 20 bp, synthetic construct
  misc_feature 1..20: note = chemically synthesized
  source 1..20: mol_type = other DNA
gggtgaagaaattgggcaaa

SEQ ID NO: 17545 - DNA, 20 bp, synthetic construct
  misc_feature 1..20: note = chemically synthesized
  source 1..20: mol_type = other DNA
attgggcaaatggatgtcat

SEQ ID NO: 17546 - DNA, 20 bp, synthetic construct
  misc_feature 1..20: note = chemically synthesized
  source 1..20: mol_type = other DNA
ttgggcaaatggatgtcatg

SEQ ID NO: 17547 - DNA, 20 bp, synthetic construct
  misc_feature 1..20: note = chemically synthesized
  source 1..20: mol_type = other DNA
gggcaaatggatgtcatgag

SEQ ID NO: 17548 - DNA, 20 bp, synthetic construct
  misc_feature 1..20: note = chemically synthesized
  source 1..20: mol_type = other DNA
ggcaaatggatgtcatgagg

SEQ ID NO: 17549 - DNA, 20 bp, synthetic construct
  misc_feature 1..20: note = chemically synthesized
  source 1..20: mol_type = other DNA
atgtcatgaggaggaatttt

SEQ ID NO: 17550 - DNA, 20 bp, synthetic construct
  misc_feature 1..20: note = chemically synthesized
  source 1..20: mol_type = other DNA
tgtcatgaggaggaattttt

SEQ ID NO: 17551 - DNA, 20 bp, synthetic construct
  misc_feature 1..20: note = chemically synthesized
  source 1..20: mol_type = other DNA
catgaggaggaatttttagg

SEQ ID NO: 17552 - DNA, 20 bp, synthetic construct
  misc_feature 1..20: note = chemically synthesized
  source 1..20: mol_type = other DNA
tgaggaggaatttttaggca

SEQ ID NO: 17553 - DNA, 20 bp, synthetic construct
  misc_feature 1..20: note = chemically synthesized
  source 1..20: mol_type = other DNA
gaggaggaatttttaggcag

SEQ ID NO: 17554 - DNA, 20 bp, synthetic construct
  misc_feature 1..20: note = chemically synthesized
  source 1..20: mol_type = other DNA
gaatttttaggcagaggtaa

SEQ ID NO: 17555 - DNA, 20 bp, synthetic construct
  misc_feature 1..20: note = chemically synthesized
  source 1..20: mol_type = other DNA
ttttaggcagaggtaatggt

SEQ ID NO: 17556 - DNA, 20 bp, synthetic construct
  misc_feature 1..20: note = chemically synthesized
  source 1..20: mol_type = other DNA
ttaggcagaggtaatggtca

SEQ ID NO: 17557 - DNA, 20 bp, synthetic construct
  misc_feature 1..20: note = chemically synthesized
  source 1..20: mol_type = other DNA
cagaggtaatggtcagagcc

SEQ ID NO: 17558 - DNA, 20 bp, synthetic construct
  misc_feature 1..20: note = chemically synthesized
  source 1..20: mol_type = other DNA
agaggtaatggtcagagccc

SEQ ID NO: 17559 - DNA, 20 bp, synthetic construct
  misc_feature 1..20: note = chemically synthesized
  source 1..20: mol_type = other DNA
atggtcagagcccaggccct

SEQ ID NO: 17560 - DNA, 20 bp, synthetic construct
  misc_feature 1..20: note = chemically synthesized
  source 1..20: mol_type = other DNA
tcagagcccaggccctaagc

SEQ ID NO: 17561 - DNA, 20 bp, synthetic construct
  misc_feature 1..20: note = chemically synthesized
  source 1..20: mol_type = other DNA
agagcccaggccctaagctg

SEQ ID NO: 17562 - DNA, 20 bp, synthetic construct
  misc_feature 1..20: note = chemically synthesized
  source 1..20: mol_type = other DNA
gcccaggccctaagctggag

SEQ ID NO: 17563 - DNA, 20 bp, synthetic construct
  misc_feature 1..20: note = chemically synthesized
  source 1..20: mol_type = other DNA
ccaggccctaagctggagta

SEQ ID NO: 17564 - DNA, 20 bp, synthetic construct
  misc_feature 1..20: note = chemically synthesized
  source 1..20: mol_type = other DNA
taagctggagtagagtgtgc

SEQ ID NO: 17565 - DNA, 20 bp, synthetic construct
  misc_feature 1..20: note = chemically synthesized
  source 1..20: mol_type = other DNA
aagctggagtagagtgtgca

SEQ ID NO: 17566 - DNA, 20 bp, synthetic construct
  misc_feature 1..20: note = chemically synthesized
  source 1..20: mol_type = other DNA
tggagtagagtgtgcaagga

SEQ ID NO: 17567 - DNA, 20 bp, synthetic construct
  misc_feature 1..20: note = chemically synthesized
  source 1..20: mol_type = other DNA
gagtagagtgtgcaaggaaa

SEQ ID NO: 17568 - DNA, 20 bp, synthetic construct
  misc_feature 1..20: note = chemically synthesized
  source 1..20: mol_type = other DNA
agtgtgcaaggaaagagtaa

SEQ ID NO: 17569 - DNA, 20 bp, synthetic construct
  misc_feature 1..20: note = chemically synthesized
  source 1..20: mol_type = other DNA
gtgtgcaaggaaagagtaat

SEQ ID NO: 17570 - DNA, 20 bp, synthetic construct
  misc_feature 1..20: note = chemically synthesized
  source 1..20: mol_type = other DNA
gaaagagtaataggattgaa

SEQ ID NO: 17571 - DNA, 20 bp, synthetic construct
  misc_feature 1..20: note = chemically synthesized
  source 1..20: mol_type = other DNA
aaagagtaataggattgaaa

SEQ ID NO: 17572 - DNA, 20 bp, synthetic construct
  misc_feature 1..20: note = chemically synthesized
  source 1..20: mol_type = other DNA
ataggattgaaaaggataac

SEQ ID NO: 17573 - DNA, 20 bp, synthetic construct
  misc_feature 1..20: note = chemically synthesized
  source 1..20: mol_type = other DNA
taggattgaaaaggataacc

SEQ ID NO: 17574 - DNA, 20 bp, synthetic construct
  misc_feature 1..20: note = chemically synthesized
  source 1..20: mol_type = other DNA
gattgaaaaggataaccagg

SEQ ID NO: 17575 - DNA, 20 bp, synthetic construct
  misc_feature 1..20: note = chemically synthesized
  source 1..20: mol_type = other DNA
attgaaaaggataaccaggt

SEQ ID NO: 17576 - DNA, 20 bp, synthetic construct
  misc_feature 1..20: note = chemically synthesized
  source 1..20: mol_type = other DNA
tgaaaaggataaccaggtag

SEQ ID NO: 17577 - DNA, 20 bp, synthetic construct
  misc_feature 1..20: note = chemically synthesized
  source 1..20: mol_type = other DNA
gaaaaggataaccaggtagg

SEQ ID NO: 17578 - DNA, 20 bp, synthetic construct
  misc_feature 1..20: note = chemically synthesized
  source 1..20: mol_type = other DNA
gataaccaggtaggaggaca

SEQ ID NO: 17579 - DNA, 20 bp, synthetic construct
  misc_feature 1..20: note = chemically synthesized
  source 1..20: mol_type = other DNA
ataaccaggtaggaggacat

SEQ ID NO: 17580 - DNA, 20 bp, synthetic construct
  misc_feature 1..20: note = chemically synthesized
  source 1..20: mol_type = other DNA
taaccaggtaggaggacata

SEQ ID NO: 17581 - DNA, 20 bp, synthetic construct
  misc_feature 1..20: note = chemically synthesized
  source 1..20: mol_type = other DNA
accaggtaggaggacatagg

SEQ ID NO: 17582 - DNA, 20 bp, synthetic construct
  misc_feature 1..20: note = chemically synthesized
  source 1..20: mol_type = other DNA
ccaggtaggaggacataggg

SEQ ID NO: 17583 - DNA, 20 bp, synthetic construct
  misc_feature 1..20: note = chemically synthesized
  source 1..20: mol_type = other DNA
caggtaggaggacataggga

SEQ ID NO: 17584 - DNA, 20 bp, synthetic construct
  misc_feature 1..20: note = chemically synthesized
  source 1..20: mol_type = other DNA
aggtaggaggacatagggag

SEQ ID NO: 17585 - DNA, 20 bp, synthetic construct
  misc_feature 1..20: note = chemically synthesized
  source 1..20: mol_type = other DNA
aggaggacatagggaggggt

SEQ ID NO: 17586 - DNA, 20 bp, synthetic construct
  misc_feature 1..20: note = chemically synthesized
  source 1..20: mol_type = other DNA
ggaggacatagggaggggta

SEQ ID NO: 17587 - DNA, 20 bp, synthetic construct
  misc_feature 1..20: note = chemically synthesized
  source 1..20: mol_type = other DNA
gaggacatagggaggggtaa

SEQ ID NO: 17588 - DNA, 20 bp, synthetic construct
  misc_feature 1..20: note = chemically synthesized
  source 1..20: mol_type = other DNA
aggacatagggaggggtaag

SEQ ID NO: 17589 - DNA, 20 bp, synthetic construct
  misc_feature 1..20: note = chemically synthesized
  source 1..20: mol_type = other DNA
gacatagggaggggtaaggg

SEQ ID NO: 17590 - DNA, 20 bp, synthetic construct
  misc_feature 1..20: note = chemically synthesized
  source 1..20: mol_type = other DNA
acatagggaggggtaagggg

SEQ ID NO: 17591 - DNA, 20 bp, synthetic construct
  misc_feature 1..20: note = chemically synthesized
  source 1..20: mol_type = other DNA
tagggaggggtaaggggagg

SEQ ID NO: 17592 - DNA, 20 bp, synthetic construct
  misc_feature 1..20: note = chemically synthesized
  source 1..20: mol_type = other DNA
ggtaaggggaggaagacctc

SEQ ID NO: 17593 - DNA, 20 bp, synthetic construct
  misc_feature 1..20: note = chemically synthesized
  source 1..20: mol_type = other DNA
aggaagacctccagtaaact

SEQ ID NO: 17594 - DNA, 20 bp, synthetic construct
  misc_feature 1..20: note = chemically synthesized
  source 1..20: mol_type = other DNA
ggaagacctccagtaaactt

SEQ ID NO: 17595 - DNA, 20 bp, synthetic construct
  misc_feature 1..20: note = chemically synthesized
  source 1..20: mol_type = other DNA
agacctccagtaaacttagg

SEQ ID NO: 17596 - DNA, 20 bp, synthetic construct
  misc_feature 1..20: note = chemically synthesized
  source 1..20: mol_type = other DNA
gacctccagtaaacttaggc

SEQ ID NO: 17597 - DNA, 20 bp, synthetic construct
  misc_feature 1..20: note = chemically synthesized
  source 1..20: mol_type = other DNA
aggcaggatatttcccgtga

SEQ ID NO: 17598 - DNA, 20 bp, synthetic construct
  misc_feature 1..20: note = chemically synthesized
  source 1..20: mol_type = other DNA
actaaataataatcacatgt

SEQ ID NO: 17599 - DNA, 20 bp, synthetic construct
  misc_feature 1..20: note = chemically synthesized
  source 1..20: mol_type = other DNA
aaataatctgtcgattactt

SEQ ID NO: 17600 - DNA, 20 bp, synthetic construct
  misc_feature 1..20: note = chemically synthesized
  source 1..20: mol_type = other DNA
ttgagcaatactttgttcat

SEQ ID NO: 17601 - DNA, 20 bp, synthetic construct
  misc_feature 1..20: note = chemically synthesized
  source 1..20: mol_type = other DNA
gcaatactttgttcatgagc

SEQ ID NO: 17602 - DNA, 20 bp, synthetic construct
  misc_feature 1..20: note = chemically synthesized
  source 1..20: mol_type = other DNA
aatactttgttcatgagcta

SEQ ID NO: 17603 - DNA, 20 bp, synthetic construct
  misc_feature 1..20: note = chemically synthesized
  source 1..20: mol_type = other DNA
ctttgttcatgagctagagc

SEQ ID NO: 17604 - DNA, 20 bp, synthetic construct
  misc_feature 1..20: note = chemically synthesized
  source 1..20: mol_type = other DNA
tttgttcatgagctagagca

SEQ ID NO: 17605 - DNA, 20 bp, synthetic construct
  misc_feature 1..20: note = chemically synthesized
  source 1..20: mol_type = other DNA
ttgttcatgagctagagcaa

SEQ ID NO: 17606 - DNA, 20 bp, synthetic construct
  misc_feature 1..20: note = chemically synthesized
  source 1..20: mol_type = other DNA
tgttcatgagctagagcaag

SEQ ID NO: 17607 - DNA, 20 bp, synthetic construct
  misc_feature 1..20: note = chemically synthesized
  source 1..20: mol_type = other DNA
ctagagcaaggggatgactc

SEQ ID NO: 17608 - DNA, 20 bp, synthetic construct
  misc_feature 1..20: note = chemically synthesized
  source 1..20: mol_type = other DNA
agaaatcctttgtgaaatcc

SEQ ID NO: 17609 - DNA, 20 bp, synthetic construct
  misc_feature 1..20: note = chemically synthesized
  source 1..20: mol_type = other DNA
aaatcctttgtgaaatcctg

SEQ ID NO: 17610 - DNA, 20 bp, synthetic construct
  misc_feature 1..20: note = chemically synthesized
  source 1..20: mol_type = other DNA
aatcctttgtgaaatcctgg

SEQ ID NO: 17611 - DNA, 20 bp, synthetic construct
  misc_feature 1..20: note = chemically synthesized
  source 1..20: mol_type = other DNA
tgtgaaatcctggaggtaat

SEQ ID NO: 17612 - DNA, 20 bp, synthetic construct
  misc_feature 1..20: note = chemically synthesized
  source 1..20: mol_type = other DNA
tcctggaggtaataagatcc

SEQ ID NO: 17613 - DNA, 20 bp, synthetic construct
  misc_feature 1..20: note = chemically synthesized
  source 1..20: mol_type = other DNA
atcttcaactcaattgcaaa

SEQ ID NO: 17614 - DNA, 20 bp, synthetic construct
  misc_feature 1..20: note = chemically synthesized
  source 1..20: mol_type = other DNA
caaaacatattccatttcat

SEQ ID NO: 17615 - DNA, 20 bp, synthetic construct
  misc_feature 1..20: note = chemically synthesized
  source 1..20: mol_type = other DNA
tattccatttcatcagacta

SEQ ID NO: 17616 - DNA, 20 bp, synthetic construct
  misc_feature 1..20: note = chemically synthesized
  source 1..20: mol_type = other DNA
attccatttcatcagactac

SEQ ID NO: 17617 - DNA, 20 bp, synthetic construct
  misc_feature 1..20: note = chemically synthesized
  source 1..20: mol_type = other DNA
catcagactacaggttttaa

SEQ ID NO: 17618 - DNA, 20 bp, synthetic construct
  misc_feature 1..20: note = chemically synthesized
  source 1..20: mol_type = other DNA
atttcttaaatgtattattc

SEQ ID NO: 17619 - DNA, 20 bp, synthetic construct
  misc_feature 1..20: note = chemically synthesized
  source 1..20: mol_type = other DNA
ccagtaacttatactttaca

SEQ ID NO: 17620 - DNA, 20 bp, synthetic construct
  misc_feature 1..20: note = chemically synthesized
  source 1..20: mol_type = other DNA
tacatagtaaatcttatcaa

SEQ ID NO: 17621 - DNA, 20 bp, synthetic construct
  misc_feature 1..20: note = chemically synthesized
  source 1..20: mol_type = other DNA
ttatcaatagtcacaatcaa

SEQ ID NO: 17622 - DNA, 20 bp, synthetic construct
  misc_feature 1..20: note = chemically synthesized
  source 1..20: mol_type = other DNA
agtcacaatcaatggtcaca

SEQ ID NO: 17623 - DNA, 20 bp, synthetic construct
  misc_feature 1..20: note = chemically synthesized
  source 1..20: mol_type = other DNA
cacaatcaatggtcacaaag

SEQ ID NO: 17624 - DNA, 20 bp, synthetic construct
  misc_feature 1..20: note = chemically synthesized
  source 1..20: mol_type = other DNA
tcacaaagtagaacttcatc

SEQ ID NO: 17625 - DNA, 20 bp, synthetic construct
  misc_feature 1..20: note = chemically synthesized
  source 1..20: mol_type = other DNA
acaaagtagaacttcatctg

SEQ ID NO: 17626 - DNA, 20 bp, synthetic construct
  misc_feature 1..20: note = chemically synthesized
  source 1..20: mol_type = other DNA
tcatctggagacattacttt

SEQ ID NO: 17627 - DNA, 20 bp, synthetic construct
  misc_feature 1..20: note = chemically synthesized
  source 1..20: mol_type = other DNA
ggagacattacttttagcct

SEQ ID NO: 17628 - DNA, 20 bp, synthetic construct
  misc_feature 1..20: note = chemically synthesized
  source 1..20: mol_type = other DNA
gccatgcaaaatatactttt

SEQ ID NO: 17629 - DNA, 20 bp, synthetic construct
  misc_feature 1..20: note = chemically synthesized
  source 1..20: mol_type = other DNA
tttggaaaattgccctttga

SEQ ID NO: 17630 - DNA, 20 bp, synthetic construct
  misc_feature 1..20: note = chemically synthesized
  source 1..20: mol_type = other DNA
ttggaaaattgccctttgaa

SEQ ID NO: 17631 - DNA, 20 bp, synthetic construct
  misc_feature 1..20: note = chemically synthesized
  source 1..20: mol_type = other DNA
aaaattgccctttgaaaggc

SEQ ID NO: 17632 - DNA, 20 bp, synthetic construct
  misc_feature 1..20: note = chemically synthesized
  source 1..20: mol_type = other DNA
ctttgaaaggcgagacacaa

SEQ ID NO: 17633 - DNA, 20 bp, synthetic construct
  misc_feature 1..20: note = chemically synthesized
  source 1..20: mol_type = other DNA
tttgaaaggcgagacacaaa

SEQ ID NO: 17634 - DNA, 20 bp, synthetic construct
  misc_feature 1..20: note = chemically synthesized
  source 1..20: mol_type = other DNA
caaatgttgatgctattata

SEQ ID NO: 17635 - DNA, 20 bp, synthetic construct
  misc_feature 1..20: note = chemically synthesized
  source 1..20: mol_type = other DNA
atgctattatatggtaccaa

SEQ ID NO: 17636 - DNA, 20 bp, synthetic construct
  misc_feature 1..20: note = chemically synthesized
  source 1..20: mol_type = other DNA
tgctattatatggtaccaat

SEQ ID NO: 17637 - DNA, 20 bp, synthetic construct
  misc_feature 1..20: note = chemically synthesized
  source 1..20: mol_type = other DNA
ataggattcattaatttata

SEQ ID NO: 17638 - DNA, 20 bp, synthetic construct
  misc_feature 1..20: note = chemically synthesized
  source 1..20: mol_type = other DNA
taggattcattaatttataa

SEQ ID NO: 17639 - DNA, 20 bp, synthetic construct
  misc_feature 1..20: note = chemically synthesized
  source 1..20: mol_type = other DNA
ggattcattaatttataaag

SEQ ID NO: 17640 - DNA, 20 bp, synthetic construct
  misc_feature 1..20: note = chemically synthesized
  source 1..20: mol_type = other DNA
ttcattaatttataaaggag

SEQ ID NO: 17641 - DNA, 20 bp, synthetic construct
  misc_feature 1..20: note = chemically synthesized
  source 1..20: mol_type = other DNA
cattaatttataaaggagaa

SEQ ID NO: 17642 - DNA, 20 bp, synthetic construct
  misc_feature 1..20: note = chemically synthesized
  source 1..20: mol_type = other DNA
ctaatgtaactccaaaatgc

SEQ ID NO: 17643 - DNA, 20 bp, synthetic construct
  misc_feature 1..20: note = chemically synthesized
  source 1..20: mol_type = other DNA
aatgcaagcaattttcatat

SEQ ID NO: 17644 - DNA, 20 bp, synthetic construct
  misc_feature 1..20: note = chemically synthesized
  source 1..20: mol_type = other DNA
attttcatatgagtctacac

SEQ ID NO: 17645 - DNA, 20 bp, synthetic construct
  misc_feature 1..20: note = chemically synthesized
  source 1..20: mol_type = other DNA
tacacaagctaattgtcctt

SEQ ID NO: 17646 - DNA, 20 bp, synthetic construct
  misc_feature 1..20: note = chemically synthesized
  source 1..20: mol_type = other DNA
tccttaagaatttcatcttt

SEQ ID NO: 17647 - DNA, 20 bp, synthetic construct
  misc_feature 1..20: note = chemically synthesized
  source 1..20: mol_type = other DNA
ccttaagaatttcatcttta

SEQ ID NO: 17648 - DNA, 20 bp, synthetic construct
  misc_feature 1..20: note = chemically synthesized
  source 1..20: mol_type = other DNA
agaatttcatctttaaggaa

SEQ ID NO: 17649 - DNA, 20 bp, synthetic construct
  misc_feature 1..20: note = chemically synthesized
  source 1..20: mol_type = other DNA
aagttttttactgtatcaaa

SEQ ID NO: 17650 - DNA, 20 bp, synthetic construct
  misc_feature 1..20: note = chemically synthesized
  source 1..20: mol_type = other DNA
ttttttactgtatcaaaaag

SEQ ID NO: 17651 - DNA, 20 bp, synthetic construct
  misc_feature 1..20: note = chemically synthesized
  source 1..20: mol_type = other DNA
aagaagtttaaactgtcatt

SEQ ID NO: 17652 - DNA, 20 bp, synthetic construct
  misc_feature 1..20: note = chemically synthesized
  source 1..20: mol_type = other DNA
aagtttaaactgtcattgag

SEQ ID NO: 17653 - DNA, 20 bp, synthetic construct
  misc_feature 1..20: note = chemically synthesized
  source 1..20: mol_type = other DNA
gtttaaactgtcattgagca

SEQ ID NO: 17654 - DNA, 20 bp, synthetic construct
  misc_feature 1..20: note = chemically synthesized
  source 1..20: mol_type = other DNA
attgagcagagtctgataat

SEQ ID NO: 17655 - DNA, 20 bp, synthetic construct
  misc_feature 1..20: note = chemically synthesized
  source 1..20: mol_type = other DNA
ttgagcagagtctgataata

SEQ ID NO: 17656 - DNA, 20 bp, synthetic construct
  misc_feature 1..20: note = chemically synthesized
  source 1..20: mol_type = other DNA
ataaggacactgtcaaatca

SEQ ID NO: 17657 - DNA, 20 bp, synthetic construct
  misc_feature 1..20: note = chemically synthesized
  source 1..20: mol_type = other DNA
gacactgtcaaatcacagtt

SEQ ID NO: 17658 - DNA, 20 bp, synthetic construct
  misc_feature 1..20: note = chemically synthesized
  source 1..20: mol_type = other DNA
cagttcagatgttatgtgat

SEQ ID NO: 17659 - DNA, 20 bp, synthetic construct
  misc_feature 1..20: note = chemically synthesized
  source 1..20: mol_type = other DNA
agttcagatgttatgtgatg

SEQ ID NO: 17660 - DNA, 20 bp, synthetic construct
  misc_feature 1..20: note = chemically synthesized
  source 1..20: mol_type = other DNA
cagatgttatgtgatgagga

SEQ ID NO: 17661 - DNA, 20 bp, synthetic construct
  misc_feature 1..20: note = chemically synthesized
  source 1..20: mol_type = other DNA
gttatgtgatgaggacagaa

SEQ ID NO: 17662 - DNA, 20 bp, synthetic construct
  misc_feature 1..20: note = chemically synthesized
  source 1..20: mol_type = other DNA
gaggacagaatagaacacat

SEQ ID NO: 17663 - DNA, 20 bp, synthetic construct
  misc_feature 1..20: note = chemically synthesized
  source 1..20: mol_type = other DNA
aggacagaatagaacacatg

SEQ ID NO: 17664 - DNA, 20 bp, synthetic construct
  misc_feature 1..20: note = chemically synthesized
  source 1..20: mol_type = other DNA
gacagaatagaacacatgag

SEQ ID NO: 17665 - DNA, 20 bp, synthetic construct
  misc_feature 1..20: note = chemically synthesized
  source 1..20: mol_type = other DNA
acagaatagaacacatgagg

SEQ ID NO: 17666 - DNA, 20 bp, synthetic construct
  misc_feature 1..20: note = chemically synthesized
  source 1..20: mol_type = other DNA
gaatagaacacatgaggagg

SEQ ID NO: 17667 - DNA, 20 bp, synthetic construct
  misc_feature 1..20: note = chemically synthesized
  source 1..20: mol_type = other DNA
tagaacacatgaggaggaag

SEQ ID NO: 17668 - DNA, 20 bp, synthetic construct
  misc_feature 1..20: note = chemically synthesized
  source 1..20: mol_type = other DNA
gaggaggaagcagaaacttc

SEQ ID NO: 17669 - DNA, 20 bp, synthetic construct
  misc_feature 1..20: note = chemically synthesized
  source 1..20: mol_type = other DNA
ggaagcagaaacttctagac

SEQ ID NO: 17670 - DNA, 20 bp, synthetic construct
  misc_feature 1..20: note = chemically synthesized
  source 1..20: mol_type = other DNA
cagaaacttctagactggac

SEQ ID NO: 17671 - DNA, 20 bp, synthetic construct
  misc_feature 1..20: note = chemically synthesized
  source 1..20: mol_type = other DNA
acttctagactggacaagaa

SEQ ID NO: 17672 - DNA, 20 bp, synthetic construct
  misc_feature 1..20: note = chemically synthesized
  source 1..20: mol_type = other DNA
aaccatccaacaataaatct

SEQ ID NO: 17673 - DNA, 20 bp, synthetic construct
  misc_feature 1..20: note = chemically synthesized
  source 1..20: mol_type = other DNA
tgatgtcatctactacatct

SEQ ID NO: 17674 - DNA, 20 bp, synthetic construct
  misc_feature 1..20: note = chemically synthesized
  source 1..20: mol_type = other DNA
ctaagtatttcctcaaattc

SEQ ID NO: 17675 - DNA, 20 bp, synthetic construct
  misc_feature 1..20: note = chemically synthesized
  source 1..20: mol_type = other DNA
cctcaaattctggacaattt

SEQ ID NO: 17676 - DNA, 20 bp, synthetic construct
  misc_feature 1..20: note = chemically synthesized
  source 1..20: mol_type = other DNA
aaccatcaaaattatttgtt

SEQ ID NO: 17677 - DNA, 20 bp, synthetic construct
  misc_feature 1..20: note = chemically synthesized
  source 1..20: mol_type = other DNA
accatcaaaattatttgttg

SEQ ID NO: 17678 - DNA, 20 bp, synthetic construct
  misc_feature 1..20: note = chemically synthesized
  source 1..20: mol_type = other DNA
ttgttgaggaaaaataaact

SEQ ID NO: 17679 - DNA, 20 bp, synthetic construct
  misc_feature 1..20: note = chemically synthesized
  source 1..20: mol_type = other DNA
aataaacttagccaatttgc

SEQ ID NO: 17680 - DNA, 20 bp, synthetic construct
  misc_feature 1..20: note = chemically synthesized
  source 1..20: mol_type = other DNA
ataaacttagccaatttgca

SEQ ID NO: 17681 - DNA, 20 bp, synthetic construct
  misc_feature 1..20: note = chemically synthesized
  source 1..20: mol_type = other DNA
taaacttagccaatttgcaa

SEQ ID NO: 17682 - DNA, 20 bp, synthetic construct
  misc_feature 1..20: note = chemically synthesized
  source 1..20: mol_type = other DNA
ttgcaagggcaactaaaatg

SEQ ID NO: 17683 - DNA, 20 bp, synthetic construct
  misc_feature 1..20: note = chemically synthesized
  source 1..20: mol_type = other DNA
aaatgaagaacttttcttta

SEQ ID NO: 17684 - DNA, 20 bp, synthetic construct
  misc_feature 1..20: note = chemically synthesized
  source 1..20: mol_type = other DNA
aagaacttttctttaaagtg

SEQ ID NO: 17685 - DNA, 20 bp, synthetic construct
  misc_feature 1..20: note = chemically synthesized
  source 1..20: mol_type = other DNA
agaacttttctttaaagtgt

SEQ ID NO: 17686 - DNA, 20 bp, synthetic construct
  misc_feature 1..20: note = chemically synthesized
  source 1..20: mol_type = other DNA
aacttttctttaaagtgtgg

SEQ ID NO: 17687 - DNA, 20 bp, synthetic construct
  misc_feature 1..20: note = chemically synthesized
  source 1..20: mol_type = other DNA
aaagtgtgggagtcacatct

SEQ ID NO: 17688 - DNA, 20 bp, synthetic construct
  misc_feature 1..20: note = chemically synthesized
  source 1..20: mol_type = other DNA
caacatatttaaatatatct

SEQ ID NO: 17689 - DNA, 20 bp, synthetic construct
  misc_feature 1..20: note = chemically synthesized
  source 1..20: mol_type = other DNA
acaaaaatgcaaaatttcca

SEQ ID NO: 17690 - DNA, 20 bp, synthetic construct
  misc_feature 1..20: note = chemically synthesized
  source 1..20: mol_type = other DNA
aaagaatttctcctcttctg

SEQ ID NO: 17691 - DNA, 20 bp, synthetic construct
  misc_feature 1..20: note = chemically synthesized
  source 1..20: mol_type = other DNA
ttcttcatcttcatcttttc

SEQ ID NO: 17692 - DNA, 20 bp, synthetic construct
  misc_feature 1..20: note = chemically synthesized
  source 1..20: mol_type = other DNA
tcttcatcttcatcttttcc

SEQ ID NO: 17693 - DNA, 20 bp, synthetic construct
  misc_feature 1..20: note = chemically synthesized
  source 1..20: mol_type = other DNA
ttcatcttcatcttttccag

SEQ ID NO: 17694 - DNA, 20 bp, synthetic construct
  misc_feature 1..20: note = chemically synthesized
  source 1..20: mol_type = other DNA
tttccaggagaatataccat

SEQ ID NO: 17695 - DNA, 20 bp, synthetic construct
  misc_feature 1..20: note = chemically synthesized
  source 1..20: mol_type = other DNA
aatataccataagtttctga

SEQ ID NO: 17696 - DNA, 20 bp, synthetic construct
  misc_feature 1..20: note = chemically synthesized
  source 1..20: mol_type = other DNA
ttctgatggtacacatttat

SEQ ID NO: 17697 - DNA, 20 bp, synthetic construct
  misc_feature 1..20: note = chemically synthesized
  source 1..20: mol_type = other DNA
ttgcaactatgcatcttact

SEQ ID NO: 17698 - DNA, 20 bp, synthetic construct
  misc_feature 1..20: note = chemically synthesized
  source 1..20: mol_type = other DNA
gcaactatgcatcttactca

SEQ ID NO: 17699 - DNA, 20 bp, synthetic construct
  misc_feature 1..20: note = chemically synthesized
  source 1..20: mol_type = other DNA
cttaaaacatccttgtttgt

SEQ ID NO: 17700 - DNA, 20 bp, synthetic construct
  misc_feature 1..20: note = chemically synthesized
  source 1..20: mol_type = other DNA
tttcaaattcatatacactt

SEQ ID NO: 17701 - DNA, 20 bp, synthetic construct
  misc_feature 1..20: note = chemically synthesized
  source 1..20: mol_type = other DNA
caaattcatatacactttgg

SEQ ID NO: 17702 - DNA, 20 bp, synthetic construct
  misc_feature 1..20: note = chemically synthesized
  source 1..20: mol_type = other DNA
gcaaacatttttatttgctg

SEQ ID NO: 17703 - DNA, 20 bp, synthetic construct
  misc_feature 1..20: note = chemically synthesized
  source 1..20: mol_type = other DNA
ttttatttgctgaagaacat

SEQ ID NO: 17704 - DNA, 20 bp, synthetic construct
  misc_feature 1..20: note = chemically synthesized
  source 1..20: mol_type = other DNA
tttatttgctgaagaacata

SEQ ID NO: 17705 - DNA, 20 bp, synthetic construct
  misc_feature 1..20: note = chemically synthesized
  source 1..20: mol_type = other DNA
ttatttgctgaagaacataa

SEQ ID NO: 17706 - DNA, 20 bp, synthetic construct
  misc_feature 1..20: note = chemically synthesized
  source 1..20: mol_type = other DNA
tatttgctgaagaacataag

SEQ ID NO: 17707 - DNA, 20 bp, synthetic construct
  misc_feature 1..20: note = chemically synthesized
  source 1..20: mol_type = other DNA
atttgctgaagaacataagg

SEQ ID NO: 17708 - DNA, 20 bp, synthetic construct
  misc_feature 1..20: note = chemically synthesized
  source 1..20: mol_type = other DNA
tgaagaacataagggggaaa

SEQ ID NO: 17709 - DNA, 20 bp, synthetic construct
  misc_feature 1..20: note = chemically synthesized
  source 1..20: mol_type = other DNA
aagaacataagggggaaata

SEQ ID NO: 17710 - DNA, 20 bp, synthetic construct
  misc_feature 1..20: note = chemically synthesized
  source 1..20: mol_type = other DNA
aaatagagattctttatttg

SEQ ID NO: 17711 - DNA, 20 bp, synthetic construct
  misc_feature 1..20: note = chemically synthesized
  source 1..20: mol_type = other DNA
aagaaacaaatgatttgatt

SEQ ID NO: 17712 - DNA, 20 bp, synthetic construct
  misc_feature 1..20: note = chemically synthesized
  source 1..20: mol_type = other DNA
agaaacaaatgatttgattt

SEQ ID NO: 17713 - DNA, 20 bp, synthetic construct
  misc_feature 1..20: note = chemically synthesized
  source 1..20: mol_type = other DNA
gatttgggaaatgaaatgaa

SEQ ID NO: 17714 - DNA, 20 bp, synthetic construct
  misc_feature 1..20: note = chemically synthesized
  source 1..20: mol_type = other DNA
atgaaatgaaaagaaaaaca

SEQ ID NO: 17715 - DNA, 20 bp, synthetic construct
  misc_feature 1..20: note = chemically synthesized
  source 1..20: mol_type = other DNA
gctacttcttttactcatct

SEQ ID NO: 17716 - DNA, 20 bp, synthetic construct
  misc_feature 1..20: note = chemically synthesized
  source 1..20: mol_type = other DNA
ctacttcttttactcatctg

SEQ ID NO: 17717 - DNA, 20 bp, synthetic construct
  misc_feature 1..20: note = chemically synthesized
  source 1..20: mol_type = other DNA
ttttactcatctgaggcctt

SEQ ID NO: 17718 - DNA, 20 bp, synthetic construct
  misc_feature 1..20: note = chemically synthesized
  source 1..20: mol_type = other DNA
actcatctgaggccttcaga

SEQ ID NO: 17719 - DNA, 20 bp, synthetic construct
  misc_feature 1..20: note = chemically synthesized
  source 1..20: mol_type = other DNA
ccttcagatagtcccccata

SEQ ID NO: 17720 - DNA, 20 bp, synthetic construct
  misc_feature 1..20: note = chemically synthesized
  source 1..20: mol_type = other DNA
gatagtcccccatatagcct

SEQ ID NO: 17721 - DNA, 20 bp, synthetic construct
  misc_feature 1..20: note = chemically synthesized
  source 1..20: mol_type = other DNA
tagtcccccatatagcctta

SEQ ID NO: 17722 - DNA, 20 bp, synthetic construct
  misc_feature 1..20: note = chemically synthesized
  source 1..20: mol_type = other DNA
aaaatatgattatgctcttt

SEQ ID NO: 17723 - DNA, 20 bp, synthetic construct
  misc_feature 1..20: note = chemically synthesized
  source 1..20: mol_type = other DNA
attatgctctttcagtctat

SEQ ID NO: 17724 - DNA, 20 bp, synthetic construct
  misc_feature 1..20: note = chemically synthesized
  source 1..20: mol_type = other DNA
ctattagaaataaaaacata

SEQ ID NO: 17725 - DNA, 20 bp, synthetic construct
  misc_feature 1..20: note = chemically synthesized
  source 1..20: mol_type = other DNA
cataaagcttaaaaaatttc

SEQ ID NO: 17726 - DNA, 20 bp, synthetic construct
  misc_feature 1..20: note = chemically synthesized
  source 1..20: mol_type = other DNA
ataaagcttaaaaaatttca

SEQ ID NO: 17727 - DNA, 20 bp, synthetic construct
  misc_feature 1..20: note = chemically synthesized
  source 1..20: mol_type = other DNA
taaagcttaaaaaatttcaa

SEQ ID NO: 17728 - DNA, 20 bp, synthetic construct
  misc_feature 1..20: note = chemically synthesized
  source 1..20: mol_type = other DNA
agcttaaaaaatttcaaggg

SEQ ID NO: 17729 - DNA, 20 bp, synthetic construct
  misc_feature 1..20: note = chemically synthesized
  source 1..20: mol_type = other DNA
gcttaaaaaatttcaaggga

SEQ ID NO: 17730 - DNA, 20 bp, synthetic construct
  misc_feature 1..20: note = chemically synthesized
  source 1..20: mol_type = other DNA
cttaaaaaatttcaagggaa

SEQ ID NO: 17731 - DNA, 20 bp, synthetic construct
  misc_feature 1..20: note = chemically synthesized
  source 1..20: mol_type = other DNA
ttaaaaaatttcaagggaag

SEQ ID NO: 17732 - DNA, 20 bp, synthetic construct
  misc_feature 1..20: note = chemically synthesized
  source 1..20: mol_type = other DNA
atttcaagggaaggggcttg

SEQ ID NO: 17733 - DNA, 20 bp, synthetic construct
  misc_feature 1..20: note = chemically synthesized
  source 1..20: mol_type = other DNA
gggcttgaagattactgact

SEQ ID NO: 17734 - DNA, 20 bp, synthetic construct
  misc_feature 1..20: note = chemically synthesized
  source 1..20: mol_type = other DNA
ggcttgaagattactgacta

SEQ ID NO: 17735 - DNA, 20 bp, synthetic construct
  misc_feature 1..20: note = chemically synthesized
  source 1..20: mol_type = other DNA
gcttgaagattactgactaa

SEQ ID NO: 17736 - DNA, 20 bp, synthetic construct
  misc_feature 1..20: note = chemically synthesized
  source 1..20: mol_type = other DNA
tgaagattactgactaaggg

SEQ ID NO: 17737 - DNA, 20 bp, synthetic construct
  misc_feature 1..20: note = chemically synthesized
  source 1..20: mol_type = other DNA
tgacactcacctcctccaca

SEQ ID NO: 17738 - DNA, 20 bp, synthetic construct
  misc_feature 1..20: note = chemically synthesized
  source 1..20: mol_type = other DNA
tcctccacaaagaaccaaaa

SEQ ID NO: 17739 - DNA, 20 bp, synthetic construct
  misc_feature 1..20: note = chemically synthesized
  source 1..20: mol_type = other DNA
ccacaaagaaccaaaatagt

SEQ ID NO: 17740 - DNA, 20 bp, synthetic construct
  misc_feature 1..20: note = chemically synthesized
  source 1..20: mol_type = other DNA
caaagaaccaaaatagtaag

SEQ ID NO: 17741 - DNA, 20 bp, synthetic construct
  misc_feature 1..20: note = chemically synthesized
  source 1..20: mol_type = other DNA
gtaagtagaaaatcccacat

SEQ ID NO: 17742 - DNA, 20 bp, synthetic construct
  misc_feature 1..20: note = chemically synthesized
  source 1..20: mol_type = other DNA
aagtagaaaatcccacataa

SEQ ID NO: 17743 - DNA, 20 bp, synthetic construct
  misc_feature 1..20: note = chemically synthesized
  source 1..20: mol_type = other DNA
gtagaaaatcccacataaga

SEQ ID NO: 17744 - DNA, 20 bp, synthetic construct
  misc_feature 1..20: note = chemically synthesized
  source 1..20: mol_type = other DNA
tcccacataagagagaattc

SEQ ID NO: 17745 - DNA, 20 bp, synthetic construct
  misc_feature 1..20: note = chemically synthesized
  source 1..20: mol_type = other DNA
gagagaattctggaattcaa

SEQ ID NO: 17746 - DNA, 20 bp, synthetic construct
  misc_feature 1..20: note = chemically synthesized
  source 1..20: mol_type = other DNA
gagaattctggaattcaaca

SEQ ID NO: 17747 - DNA, 20 bp, synthetic construct
  misc_feature 1..20: note = chemically synthesized
  source 1..20: mol_type = other DNA
aattctggaattcaacagag

SEQ ID NO: 17748 - DNA, 20 bp, synthetic construct
  misc_feature 1..20: note = chemically synthesized
  source 1..20: mol_type = other DNA
ggaattcaacagagaagtga

SEQ ID NO: 17749 - DNA, 20 bp, synthetic construct
  misc_feature 1..20: note = chemically synthesized
  source 1..20: mol_type = other DNA
gaattcaacagagaagtgac

SEQ ID NO: 17750 - DNA, 20 bp, synthetic construct
  misc_feature 1..20: note = chemically synthesized
  source 1..20: mol_type = other DNA
ttcaacagagaagtgacagg

SEQ ID NO: 17751 - DNA, 20 bp, synthetic construct
  misc_feature 1..20: note = chemically synthesized
  source 1..20: mol_type = other DNA
agaagtgacaggaagcatct

SEQ ID NO: 17752 - DNA, 20 bp, synthetic construct
  misc_feature 1..20: note = chemically synthesized
  source 1..20: mol_type = other DNA
gaagtgacaggaagcatcta

SEQ ID NO: 17753 - DNA, 20 bp, synthetic construct
  misc_feature 1..20: note = chemically synthesized
  source 1..20: mol_type = other DNA
aggaagcatctaaggcaatg

SEQ ID NO: 17754 - DNA, 20 bp, synthetic construct
  misc_feature 1..20: note = chemically synthesized
  source 1..20: mol_type = other DNA
ggaagcatctaaggcaatga

SEQ ID NO: 17755 - DNA, 20 bp, synthetic construct
  misc_feature 1..20: note = chemically synthesized
  source 1..20: mol_type = other DNA
gaagcatctaaggcaatgaa

SEQ ID NO: 17756 - DNA, 20 bp, synthetic construct
  misc_feature 1..20: note = chemically synthesized
  source 1..20: mol_type = other DNA
aagcatctaaggcaatgaag

SEQ ID NO: 17757 - DNA, 20 bp, synthetic construct
  misc_feature 1..20: note = chemically synthesized
  source 1..20: mol_type = other DNA
gcatctaaggcaatgaaggg

SEQ ID NO: 17758 - DNA, 20 bp, synthetic construct
  misc_feature 1..20: note = chemically synthesized
  source 1..20: mol_type = other DNA
catctaaggcaatgaagggg

SEQ ID NO: 17759 - DNA, 20 bp, synthetic construct
  misc_feature 1..20: note = chemically synthesized
  source 1..20: mol_type = other DNA
atctaaggcaatgaagggga

SEQ ID NO: 17760 - DNA, 20 bp, synthetic construct
  misc_feature 1..20: note = chemically synthesized
  source 1..20: mol_type = other DNA
taaggcaatgaaggggaggg

SEQ ID NO: 17761 - DNA, 20 bp, synthetic construct
  misc_feature 1..20: note = chemically synthesized
  source 1..20: mol_type = other DNA
gcaatgaaggggagggaagc

SEQ ID NO: 17762 - DNA, 20 bp, synthetic construct
  misc_feature 1..20: note = chemically synthesized
  source 1..20: mol_type = other DNA
caatgaaggggagggaagca

SEQ ID NO: 17763 - DNA, 20 bp, synthetic construct
  misc_feature 1..20: note = chemically synthesized
  source 1..20: mol_type = other DNA
tgaaggggagggaagcaagg

SEQ ID NO: 17764 - DNA, 20 bp, synthetic construct
  misc_feature 1..20: note = chemically synthesized
  source 1..20: mol_type = other DNA
gggaagcaaggaagcctacc

SEQ ID NO: 17765 - DNA, 20 bp, synthetic construct
  misc_feature 1..20: note = chemically synthesized
  source 1..20: mol_type = other DNA
aagcaaggaagcctacccag

SEQ ID NO: 17766 - DNA, 20 bp, synthetic construct
  misc_feature 1..20: note = chemically synthesized
  source 1..20: mol_type = other DNA
agcaaggaagcctacccagt

SEQ ID NO: 17767 - DNA, 20 bp, synthetic construct
  misc_feature 1..20: note = chemically synthesized
  source 1..20: mol_type = other DNA
gcaaggaagcctacccagta

SEQ ID NO: 17768 - DNA, 20 bp, synthetic construct
  misc_feature 1..20: note = chemically synthesized
  source 1..20: mol_type = other DNA
acccagtagggatcctctgt

SEQ ID NO: 17769 - DNA, 20 bp, synthetic construct
  misc_feature 1..20: note = chemically synthesized
  source 1..20: mol_type = other DNA
cccagtagggatcctctgtg

SEQ ID NO: 17770 - DNA, 20 bp, synthetic construct
  misc_feature 1..20: note = chemically synthesized
  source 1..20: mol_type = other DNA
gtagggatcctctgtgaggc

SEQ ID NO: 17771 - DNA, 20 bp, synthetic construct
  misc_feature 1..20: note = chemically synthesized
  source 1..20: mol_type = other DNA
agggatcctctgtgaggcca

SEQ ID NO: 17772 - DNA, 20 bp, synthetic construct
  misc_feature 1..20: note = chemically synthesized
  source 1..20: mol_type = other DNA
ggatcctctgtgaggccaga

SEQ ID NO: 17773 - DNA, 20 bp, synthetic construct
  misc_feature 1..20: note = chemically synthesized
  source 1..20: mol_type = other DNA
gatcctctgtgaggccagag

SEQ ID NO: 17774 - DNA, 20 bp, synthetic construct
  misc_feature 1..20: note = chemically synthesized
  source 1..20: mol_type = other DNA
gtgaggccagagaggctccc

SEQ ID NO: 17775 - DNA, 20 bp, synthetic construct
  misc_feature 1..20: note = chemically synthesized
  source 1..20: mol_type = other DNA
gaggctccccagtgcatcga

SEQ ID NO: 17776 - DNA, 20 bp, synthetic construct
  misc_feature 1..20: note = chemically synthesized
  source 1..20: mol_type = other DNA
tccccagtgcatcgaaagtt

SEQ ID NO: 17777 - DNA, 20 bp, synthetic construct
  misc_feature 1..20: note = chemically synthesized
  source 1..20: mol_type = other DNA
aaagttaagtgactgactcc

SEQ ID NO: 17778 - DNA, 20 bp, synthetic construct
  misc_feature 1..20: note = chemically synthesized
  source 1..20: mol_type = other DNA
gttaagtgactgactcccag

SEQ ID NO: 17779 - DNA, 20 bp, synthetic construct
  misc_feature 1..20: note = chemically synthesized
  source 1..20: mol_type = other DNA
agtggtccacatctgcatta

SEQ ID NO: 17780 - DNA, 20 bp, synthetic construct
  misc_feature 1..20: note = chemically synthesized
  source 1..20: mol_type = other DNA
cacatctgcattatggactc

SEQ ID NO: 17781 - DNA, 20 bp, synthetic construct
  misc_feature 1..20: note = chemically synthesized
  source 1..20: mol_type = other DNA
acatctgcattatggactcc

SEQ ID NO: 17782 - DNA, 20 bp, synthetic construct
  misc_feature 1..20: note = chemically synthesized
  source 1..20: mol_type = other DNA
attatggactccaggaatcc

SEQ ID NO: 17783 - DNA, 20 bp, synthetic construct
  misc_feature 1..20: note = chemically synthesized
  source 1..20: mol_type = other DNA
gactccaggaatcctagcca

SEQ ID NO: 17784 - DNA, 20 bp, synthetic construct
  misc_feature 1..20: note = chemically synthesized
  source 1..20: mol_type = other DNA
actccaggaatcctagccac

SEQ ID NO: 17785 - DNA, 20 bp, synthetic construct
  misc_feature 1..20: note = chemically synthesized
  source 1..20: mol_type = other DNA
tccaggaatcctagccacag

SEQ ID NO: 17786 - DNA, 20 bp, synthetic construct
  misc_feature 1..20: note = chemically synthesized
  source 1..20: mol_type = other DNA
caggaatcctagccacagga

SEQ ID NO: 17787 - DNA, 20 bp, synthetic construct
  misc_feature 1..20: note = chemically synthesized
  source 1..20: mol_type = other DNA
aggagagtcccttgaccatg

SEQ ID NO: 17788 - DNA, 20 bp, synthetic construct
  misc_feature 1..20: note = chemically synthesized
  source 1..20: mol_type = other DNA
ggagagtcccttgaccatgc

SEQ ID NO: 17789 - DNA, 20 bp, synthetic construct
  misc_feature 1..20: note = chemically synthesized
  source 1..20: mol_type = other DNA
cccttgaccatgcaggcctt

SEQ ID NO: 17790 - DNA, 20 bp, synthetic construct
  misc_feature 1..20: note = chemically synthesized
  source 1..20: mol_type = other DNA
gcaggccttgagactatcat

SEQ ID NO: 17791 - DNA, 20 bp, synthetic construct
  misc_feature 1..20: note = chemically synthesized
  source 1..20: mol_type = other DNA
caggccttgagactatcata

SEQ ID NO: 17792 - DNA, 20 bp, synthetic construct
  misc_feature 1..20: note = chemically synthesized
  source 1..20: mol_type = other DNA
gactatcataaggaactgcc

SEQ ID NO: 17793 - DNA, 20 bp, synthetic construct
  misc_feature 1..20: note = chemically synthesized
  source 1..20: mol_type = other DNA
aactgcccagcaatcgcaca

SEQ ID NO: 17794 - DNA, 20 bp, synthetic construct
  misc_feature 1..20: note = chemically synthesized
  source 1..20: mol_type = other DNA
actgcccagcaatcgcacaa

SEQ ID NO: 17795 - DNA, 20 bp, synthetic construct
  misc_feature 1..20: note = chemically synthesized
  source 1..20: mol_type = other DNA
atcgcacaaaggcattgctc

SEQ ID NO: 17796 - DNA, 20 bp, synthetic construct
  misc_feature 1..20: note = chemically synthesized
  source 1..20: mol_type = other DNA
cgcacaaaggcattgctcca

SEQ ID NO: 17797 - DNA, 20 bp, synthetic construct
  misc_feature 1..20: note = chemically synthesized
  source 1..20: mol_type = other DNA
acaaaggcattgctccagag

SEQ ID NO: 17798 - DNA, 20 bp, synthetic construct
  misc_feature 1..20: note = chemically synthesized
  source 1..20: mol_type = other DNA
caaaggcattgctccagaga

SEQ ID NO: 17799 - DNA, 20 bp, synthetic construct
  misc_feature 1..20: note = chemically synthesized
  source 1..20: mol_type = other DNA
aaggcattgctccagagaag

SEQ ID NO: 17800 - DNA, 20 bp, synthetic construct
  misc_feature 1..20: note = chemically synthesized
  source 1..20: mol_type = other DNA
tccagagaaggagctctcac

SEQ ID NO: 17801 - DNA, 20 bp, synthetic construct
  misc_feature 1..20: note = chemically synthesized
  source 1..20: mol_type = other DNA
ccagagaaggagctctcact

SEQ ID NO: 17802 - DNA, 20 bp, synthetic construct
  misc_feature 1..20: note = chemically synthesized
  source 1..20: mol_type = other DNA
cccctgccatccccattact

SEQ ID NO: 17803 - DNA, 20 bp, synthetic construct
  misc_feature 1..20: note = chemically synthesized
  source 1..20: mol_type = other DNA
ctgccatccccattactgag

SEQ ID NO: 17804 - DNA, 20 bp, synthetic construct
  misc_feature 1..20: note = chemically synthesized
  source 1..20: mol_type = other DNA
catccccattactgagcagc

SEQ ID NO: 17805 - DNA, 20 bp, synthetic construct
  misc_feature 1..20: note = chemically synthesized
  source 1..20: mol_type = other DNA
atccccattactgagcagca

SEQ ID NO: 17806 - DNA, 20 bp, synthetic construct
  misc_feature 1..20: note = chemically synthesized
  source 1..20: mol_type = other DNA
gagcagcaaggtgccatttt

SEQ ID NO: 17807 - DNA, 20 bp, synthetic construct
  misc_feature 1..20: note = chemically synthesized
  source 1..20: mol_type = other DNA
gcagcaaggtgccattttga

SEQ ID NO: 17808 - DNA, 20 bp, synthetic construct
  misc_feature 1..20: note = chemically synthesized
  source 1..20: mol_type = other DNA
tttgagagcccaacacccac

SEQ ID NO: 17809 - DNA, 20 bp, synthetic construct
  misc_feature 1..20: note = chemically synthesized
  source 1..20: mol_type = other DNA
caccagatgacatcgttcct

SEQ ID NO: 17810 - DNA, 20 bp, synthetic construct
  misc_feature 1..20: note = chemically synthesized
  source 1..20: mol_type = other DNA
tctgcatctctacatccctg

SEQ ID NO: 17811 - DNA, 20 bp, synthetic construct
  misc_feature 1..20: note = chemically synthesized
  source 1..20: mol_type = other DNA
ctgctgacatcccccaccca

SEQ ID NO: 17812 - DNA, 20 bp, synthetic construct
  misc_feature 1..20: note = chemically synthesized
  source 1..20: mol_type = other DNA
gacatcccccacccacagct

SEQ ID NO: 17813 - DNA, 20 bp, synthetic construct
  misc_feature 1..20: note = chemically synthesized
  source 1..20: mol_type = other DNA
ccacagctgagtgctactgc

SEQ ID NO: 17814 - DNA, 20 bp, synthetic construct
  misc_feature 1..20: note = chemically synthesized
  source 1..20: mol_type = other DNA
ctactgctggctgctgtcac

SEQ ID NO: 17815 - DNA, 20 bp, synthetic construct
  misc_feature 1..20: note = chemically synthesized
  source 1..20: mol_type = other DNA
tactgctggctgctgtcacc

SEQ ID NO: 17816 - DNA, 20 bp, synthetic construct
  misc_feature 1..20: note = chemically synthesized
  source 1..20: mol_type = other DNA
actgctggctgctgtcacca

SEQ ID NO: 17817 - DNA, 20 bp, synthetic construct
  misc_feature 1..20: note = chemically synthesized
  source 1..20: mol_type = other DNA
ggctgctgtcaccagggata

SEQ ID NO: 17818 - DNA, 20 bp, synthetic construct
  misc_feature 1..20: note = chemically synthesized
  source 1..20: mol_type = other DNA
ccagggataaagtgtgtcat

SEQ ID NO: 17819 - DNA, 20 bp, synthetic construct
  misc_feature 1..20: note = chemically synthesized
  source 1..20: mol_type = other DNA
gggataaagtgtgtcattag

SEQ ID NO: 17820 - DNA, 20 bp, synthetic construct
  misc_feature 1..20: note = chemically synthesized
  source 1..20: mol_type = other DNA
ataaagtgtgtcattagaag

SEQ ID NO: 17821 - DNA, 20 bp, synthetic construct
  misc_feature 1..20: note = chemically synthesized
  source 1..20: mol_type = other DNA
gaagtggactcccccacccc

SEQ ID NO: 17822 - DNA, 20 bp, synthetic construct
  misc_feature 1..20: note = chemically synthesized
  source 1..20: mol_type = other DNA
gtggactcccccacccccag

SEQ ID NO: 17823 - DNA, 20 bp, synthetic construct
  misc_feature 1..20: note = chemically synthesized
  source 1..20: mol_type = other DNA
gactcccccacccccagtag

SEQ ID NO: 17824 - DNA, 20 bp, synthetic construct
  misc_feature 1..20: note = chemically synthesized
  source 1..20: mol_type = other DNA
actcccccacccccagtagc

SEQ ID NO: 17825 - DNA, 20 bp, synthetic construct
  misc_feature 1..20: note = chemically synthesized
  source 1..20: mol_type = other DNA
ctcccccacccccagtagca

SEQ ID NO: 17826 - DNA, 20 bp, synthetic construct
  misc_feature 1..20: note = chemically synthesized
  source 1..20: mol_type = other DNA
cagggctgctacacatttat

SEQ ID NO: 17827 - DNA, 20 bp, synthetic construct
  misc_feature 1..20: note = chemically synthesized
  source 1..20: mol_type = other DNA
tacacatttataagctccct

SEQ ID NO: 17828 - DNA, 20 bp, synthetic construct
  misc_feature 1..20: note = chemically synthesized
  source 1..20: mol_type = other DNA
agaaaatgctaccccacttg

SEQ ID NO: 17829 - DNA, 20 bp, synthetic construct
  misc_feature 1..20: note = chemically synthesized
  source 1..20: mol_type = other DNA
ccccacttgcagccaccatc

SEQ ID NO: 17830 - DNA, 20 bp, synthetic construct
  misc_feature 1..20: note = chemically synthesized
  source 1..20: mol_type = other DNA
cccacttgcagccaccatct

SEQ ID NO: 17831 - DNA, 20 bp, synthetic construct
  misc_feature 1..20: note = chemically synthesized
  source 1..20: mol_type = other DNA
ccacttgcagccaccatctg

SEQ ID NO: 17832 - DNA, 20 bp, synthetic construct
  misc_feature 1..20: note = chemically synthesized
  source 1..20: mol_type = other DNA
gggctgaaacacatgcccac

SEQ ID NO: 17833 - DNA, 20 bp, synthetic construct
  misc_feature 1..20: note = chemically synthesized
  source 1..20: mol_type = other DNA
gcccaccagcaacccattta

SEQ ID NO: 17834 - DNA, 20 bp, synthetic construct
  misc_feature 1..20: note = chemically synthesized
  source 1..20: mol_type = other DNA
tttatagctgctgccactga

SEQ ID NO: 17835 - DNA, 20 bp, synthetic construct
  misc_feature 1..20: note = chemically synthesized
  source 1..20: mol_type = other DNA
aacacaccccgcaccccttc

SEQ ID NO: 17836 - DNA, 20 bp, synthetic construct
  misc_feature 1..20: note = chemically synthesized
  source 1..20: mol_type = other DNA
cacaccccgcaccccttcaa

SEQ ID NO: 17837 - DNA, 20 bp, synthetic construct
  misc_feature 1..20: note = chemically synthesized
  source 1..20: mol_type = other DNA
accccgcaccccttcaagag

SEQ ID NO: 17838 - DNA, 20 bp, synthetic construct
  misc_feature 1..20: note = chemically synthesized
  source 1..20: mol_type = other DNA
ccccgcaccccttcaagagc

SEQ ID NO: 17839 - DNA, 20 bp, synthetic construct
  misc_feature 1..20: note = chemically synthesized
  source 1..20: mol_type = other DNA
cccgcaccccttcaagagca

SEQ ID NO: 17840 - DNA, 20 bp, synthetic construct
  misc_feature 1..20: note = chemically synthesized
  source 1..20: mol_type = other DNA
tcaagagcagggcaacaatg

SEQ ID NO: 17841 - DNA, 20 bp, synthetic construct
  misc_feature 1..20: note = chemically synthesized
  source 1..20: mol_type = other DNA
agagcagggcaacaatgcag

SEQ ID NO: 17842 - DNA, 20 bp, synthetic construct
  misc_feature 1..20: note = chemically synthesized
  source 1..20: mol_type = other DNA
gcagtagctgctaattcact

SEQ ID NO: 17843 - DNA, 20 bp, synthetic construct
  misc_feature 1..20: note = chemically synthesized
  source 1..20: mol_type = other DNA
cagtagctgctaattcactc

SEQ ID NO: 17844 - DNA, 20 bp, synthetic construct
  misc_feature 1..20: note = chemically synthesized
  source 1..20: mol_type = other DNA
aattcactcaggcattctgc

SEQ ID NO: 17845 - DNA, 20 bp, synthetic construct
  misc_feature 1..20: note = chemically synthesized
  source 1..20: mol_type = other DNA
attcactcaggcattctgct

SEQ ID NO: 17846 - DNA, 20 bp, synthetic construct
  misc_feature 1..20: note = chemically synthesized
  source 1..20: mol_type = other DNA
ttcactcaggcattctgctg

SEQ ID NO: 17847 - DNA, 20 bp, synthetic construct
  misc_feature 1..20: note = chemically synthesized
  source 1..20: mol_type = other DNA
tcactcaggcattctgctgg

SEQ ID NO: 17848 - DNA, 20 bp, synthetic construct
  misc_feature 1..20: note = chemically synthesized
  source 1..20: mol_type = other DNA
aggcattctgctgggggcct

SEQ ID NO: 17849 - DNA, 20 bp, synthetic construct
  misc_feature 1..20: note = chemically synthesized
  source 1..20: mol_type = other DNA
ggcattctgctgggggcctg

SEQ ID NO: 17850 - DNA, 20 bp, synthetic construct
  misc_feature 1..20: note = chemically synthesized
  source 1..20: mol_type = other DNA
gcctgaggatcactccactc

SEQ ID NO: 17851 - DNA, 20 bp, synthetic construct
  misc_feature 1..20: note = chemically synthesized
  source 1..20: mol_type = other DNA
cactccactccagcctatga

SEQ ID NO: 17852 - DNA, 20 bp, synthetic construct
  misc_feature 1..20: note = chemically synthesized
  source 1..20: mol_type = other DNA
ccactccagcctatgatagc

SEQ ID NO: 17853 - DNA, 20 bp, synthetic construct
  misc_feature 1..20: note = chemically synthesized
  source 1..20: mol_type = other DNA
cggtgtccacacacaccact

SEQ ID NO: 17854 - DNA, 20 bp, synthetic construct
  misc_feature 1..20: note = chemically synthesized
  source 1..20: mol_type = other DNA
tgtccacacacaccactgag

SEQ ID NO: 17855 - DNA, 20 bp, synthetic construct
  misc_feature 1..20: note = chemically synthesized
  source 1..20: mol_type = other DNA
cacacaccactgagtggcct

SEQ ID NO: 17856 - DNA, 20 bp, synthetic construct
  misc_feature 1..20: note = chemically synthesized
  source 1..20: mol_type = other DNA
acacaccactgagtggcctg

SEQ ID NO: 17857 - DNA, 20 bp, synthetic construct
  misc_feature 1..20: note = chemically synthesized
  source 1..20: mol_type = other DNA
accactgagtggcctgaggt

SEQ ID NO: 17858 - DNA, 20 bp, synthetic construct
  misc_feature 1..20: note = chemically synthesized
  source 1..20: mol_type = other DNA
ccactgagtggcctgaggtc

SEQ ID NO: 17859 - DNA, 20 bp, synthetic construct
  misc_feature 1..20: note = chemically synthesized
  source 1..20: mol_type = other DNA
ggcctgaggtcaggaacacc

SEQ ID NO: 17860 - DNA, 20 bp, synthetic construct
  misc_feature 1..20: note = chemically synthesized
  source 1..20: mol_type = other DNA
gaggtcaggaacacccagcc

SEQ ID NO: 17861 - DNA, 20 bp, synthetic construct
  misc_feature 1..20: note = chemically synthesized
  source 1..20: mol_type = other DNA
ctttgccttcctcaatgcct

SEQ ID NO: 17862 - DNA, 20 bp, synthetic construct
  misc_feature 1..20: note = chemically synthesized
  source 1..20: mol_type = other DNA
gccttcctcaatgcctaagc

SEQ ID NO: 17863 - DNA, 20 bp, synthetic construct
  misc_feature 1..20: note = chemically synthesized
  source 1..20: mol_type = other DNA
caatgcctaagcaagttgtc

SEQ ID NO: 17864 - DNA, 20 bp, synthetic construct
  misc_feature 1..20: note = chemically synthesized
  source 1..20: mol_type = other DNA
aatgcctaagcaagttgtct

SEQ ID NO: 17865 - DNA, 20 bp, synthetic construct
  misc_feature 1..20: note = chemically synthesized
  source 1..20: mol_type = other DNA
aagcaagttgtctgggaacc

SEQ ID NO: 17866 - DNA, 20 bp, synthetic construct
  misc_feature 1..20: note = chemically synthesized
  source 1..20: mol_type = other DNA
gcaagttgtctgggaaccca

SEQ ID NO: 17867 - DNA, 20 bp, synthetic construct
  misc_feature 1..20: note = chemically synthesized
  source 1..20: mol_type = other DNA
gttgtctgggaacccagaga

SEQ ID NO: 17868 - DNA, 20 bp, synthetic construct
  misc_feature 1..20: note = chemically synthesized
  source 1..20: mol_type = other DNA
cttgtgccatccaccatgac

SEQ ID NO: 17869 - DNA, 20 bp, synthetic construct
  misc_feature 1..20: note = chemically synthesized
  source 1..20: mol_type = other DNA
atccaccatgactggtacct

SEQ ID NO: 17870 - DNA, 20 bp, synthetic construct
  misc_feature 1..20: note = chemically synthesized
  source 1..20: mol_type = other DNA
tggtacctaagcaaccctcc

SEQ ID NO: 17871 - DNA, 20 bp, synthetic construct
  misc_feature 1..20: note = chemically synthesized
  source 1..20: mol_type = other DNA
tacctaagcaaccctcccag

SEQ ID NO: 17872 - DNA, 20 bp, synthetic construct
  misc_feature 1..20: note = chemically synthesized
  source 1..20: mol_type = other DNA
ccctcccagaagcctgatga

SEQ ID NO: 17873 - DNA, 20 bp, synthetic construct
  misc_feature 1..20: note = chemically synthesized
  source 1..20: mol_type = other DNA
cctcccagaagcctgatgat

SEQ ID NO: 17874 - DNA, 20 bp, synthetic construct
  misc_feature 1..20: note = chemically synthesized
  source 1..20: mol_type = other DNA
tctgccactgccatcacaac

SEQ ID NO: 17875 - DNA, 20 bp, synthetic construct
  misc_feature 1..20: note = chemically synthesized
  source 1..20: mol_type = other DNA
cctcctgcatgtgccacctg

SEQ ID NO: 17876 - DNA, 20 bp, synthetic construct
  misc_feature 1..20: note = chemically synthesized
  source 1..20: mol_type = other DNA
ctcctgcatgtgccacctgt

SEQ ID NO: 17877 - DNA, 20 bp, synthetic construct
  misc_feature 1..20: note = chemically synthesized
  source 1..20: mol_type = other DNA
atgtgccacctgtgggtctg

SEQ ID NO: 17878 - DNA, 20 bp, synthetic construct
  misc_feature 1..20: note = chemically synthesized
  source 1..20: mol_type = other DNA
ccacctgtgggtctgaagac

SEQ ID NO: 17879 - DNA, 20 bp, synthetic construct
  misc_feature 1..20: note = chemically synthesized
  source 1..20: mol_type = other DNA
ggtctgaagactggctcatt

SEQ ID NO: 17880 - DNA, 20 bp, synthetic construct
  misc_feature 1..20: note = chemically synthesized
  source 1..20: mol_type = other DNA
actggctcattcagcccttg

SEQ ID NO: 17881 - DNA, 20 bp, synthetic construct
  misc_feature 1..20: note = chemically synthesized
  source 1..20: mol_type = other DNA
cttgcagccaccaccaacac

SEQ ID NO: 17882 - DNA, 20 bp, synthetic construct
  misc_feature 1..20: note = chemically synthesized
  source 1..20: mol_type = other DNA
agccaccaccaacaccagtg

SEQ ID NO: 17883 - DNA, 20 bp, synthetic construct
  misc_feature 1..20: note = chemically synthesized
  source 1..20: mol_type = other DNA
caacaccagtgcagactgct

SEQ ID NO: 17884 - DNA, 20 bp, synthetic construct
  misc_feature 1..20: note = chemically synthesized
  source 1..20: mol_type = other DNA
aacaccagtgcagactgctt

SEQ ID NO: 17885 - DNA, 20 bp, synthetic construct
  misc_feature 1..20: note = chemically synthesized
  source 1..20: mol_type = other DNA
caccagtgcagactgcttgg

SEQ ID NO: 17886 - DNA, 20 bp, synthetic construct
  misc_feature 1..20: note = chemically synthesized
  source 1..20: mol_type = other DNA
agtgcagactgcttgggagc

SEQ ID NO: 17887 - DNA, 20 bp, synthetic construct
  misc_feature 1..20: note = chemically synthesized
  source 1..20: mol_type = other DNA
tgcagactgcttgggagcca

SEQ ID NO: 17888 - DNA, 20 bp, synthetic construct
  misc_feature 1..20: note = chemically synthesized
  source 1..20: mol_type = other DNA
gcagactgcttgggagccag

SEQ ID NO: 17889 - DNA, 20 bp, synthetic construct
  misc_feature 1..20: note = chemically synthesized
  source 1..20: mol_type = other DNA
cagactgcttgggagccaga

SEQ ID NO: 17890 - DNA, 20 bp, synthetic construct
  misc_feature 1..20: note = chemically synthesized
  source 1..20: mol_type = other DNA
ggagccagagggttgtcctg

SEQ ID NO: 17891 - DNA, 20 bp, synthetic construct
  misc_feature 1..20: note = chemically synthesized
  source 1..20: mol_type = other DNA
gggttgtcctgcagttgcta

SEQ ID NO: 17892 - DNA, 20 bp, synthetic construct
  misc_feature 1..20: note = chemically synthesized
  source 1..20: mol_type = other DNA
cccacaccacacccactgtc

SEQ ID NO: 17893 - DNA, 20 bp, synthetic construct
  misc_feature 1..20: note = chemically synthesized
  source 1..20: mol_type = other DNA
acaccacacccactgtccag

SEQ ID NO: 17894 - DNA, 20 bp, synthetic construct
  misc_feature 1..20: note = chemically synthesized
  source 1..20: mol_type = other DNA
cacccactgtccagaagcct

SEQ ID NO: 17895 - DNA, 20 bp, synthetic construct
  misc_feature 1..20: note = chemically synthesized
  source 1..20: mol_type = other DNA
acccactgtccagaagcctg

SEQ ID NO: 17896 - DNA, 20 bp, synthetic construct
  misc_feature 1..20: note = chemically synthesized
  source 1..20: mol_type = other DNA
aagcctgaggacccacacac

SEQ ID NO: 17897 - DNA, 20 bp, synthetic construct
  misc_feature 1..20: note = chemically synthesized
  source 1..20: mol_type = other DNA
tgaggacccacacaccagcc

SEQ ID NO: 17898 - DNA, 20 bp, synthetic construct
  misc_feature 1..20: note = chemically synthesized
  source 1..20: mol_type = other DNA
cacaccagcccagtctacta

SEQ ID NO: 17899 - DNA, 20 bp, synthetic construct
  misc_feature 1..20: note = chemically synthesized
  source 1..20: mol_type = other DNA
tatggccactactgacaccc

SEQ ID NO: 17900 - DNA, 20 bp, synthetic construct
  misc_feature 1..20: note = chemically synthesized
  source 1..20: mol_type = other DNA
acacccaagcaaactgcctg

SEQ ID NO: 17901 - DNA, 20 bp, synthetic construct
  misc_feature 1..20: note = chemically synthesized
  source 1..20: mol_type = other DNA
cacccaagcaaactgcctga

SEQ ID NO: 17902 - DNA, 20 bp, synthetic construct
  misc_feature 1..20: note = chemically synthesized
  source 1..20: mol_type = other DNA
agcaaactgcctgaaggcca

SEQ ID NO: 17903 - DNA, 20 bp, synthetic construct
  misc_feature 1..20: note = chemically synthesized
  source 1..20: mol_type = other DNA
ggccaaagaatcaacccaac

SEQ ID NO: 17904 - DNA, 20 bp, synthetic construct
  misc_feature 1..20: note = chemically synthesized
  source 1..20: mol_type = other DNA
ccaactagactcattaccat

SEQ ID NO: 17905 - DNA, 20 bp, synthetic construct
  misc_feature 1..20: note = chemically synthesized
  source 1..20: mol_type = other DNA
accatcagtgccaatgtaca

SEQ ID NO: 17906 - DNA, 20 bp, synthetic construct
  misc_feature 1..20: note = chemically synthesized
  source 1..20: mol_type = other DNA
agtgccaatgtacacagcca

SEQ ID NO: 17907 - DNA, 20 bp, synthetic construct
  misc_feature 1..20: note = chemically synthesized
  source 1..20: mol_type = other DNA
gtgccaatgtacacagccat

SEQ ID NO: 17908 - DNA, 20 bp, synthetic construct
  misc_feature 1..20: note = chemically synthesized
  source 1..20: mol_type = other DNA
tgccaatgtacacagccatg

SEQ ID NO: 17909 - DNA, 20 bp, synthetic construct
  misc_feature 1..20: note = chemically synthesized
  source 1..20: mol_type = other DNA
tgtacacagccatggggccc

SEQ ID NO: 17910 - DNA, 20 bp, synthetic construct
  misc_feature 1..20: note = chemically synthesized
  source 1..20: mol_type = other DNA
gtacacagccatggggccca

SEQ ID NO: 17911 - DNA, 20 bp, synthetic construct
  misc_feature 1..20: note = chemically synthesized
  source 1..20: mol_type = other DNA
acagccatggggcccaagga

SEQ ID NO: 17912 - DNA, 20 bp, synthetic construct
  misc_feature 1..20: note = chemically synthesized
  source 1..20: mol_type = other DNA
cagccatggggcccaaggac

SEQ ID NO: 17913 - DNA, 20 bp, synthetic construct
  misc_feature 1..20: note = chemically synthesized
  source 1..20: mol_type = other DNA
gggcccaaggacaggaatgc

SEQ ID NO: 17914 - DNA, 20 bp, synthetic construct
  misc_feature 1..20: note = chemically synthesized
  source 1..20: mol_type = other DNA
ggcccaaggacaggaatgct

SEQ ID NO: 17915 - DNA, 20 bp, synthetic construct
  misc_feature 1..20: note = chemically synthesized
  source 1..20: mol_type = other DNA
gctaggcccaccaccaccac

SEQ ID NO: 17916 - DNA, 20 bp, synthetic construct
  misc_feature 1..20: note = chemically synthesized
  source 1..20: mol_type = other DNA
ctaggcccaccaccaccact

SEQ ID NO: 17917 - DNA, 20 bp, synthetic construct
  misc_feature 1..20: note = chemically synthesized
  source 1..20: mol_type = other DNA
taggcccaccaccaccactg

SEQ ID NO: 17918 - DNA, 20 bp, synthetic construct
  misc_feature 1..20: note = chemically synthesized
  source 1..20: mol_type = other DNA
ccaccaccaccactggggcc

SEQ ID NO: 17919 - DNA, 20 bp, synthetic construct
  misc_feature 1..20: note = chemically synthesized
  source 1..20: mol_type = other DNA
caccaccaccactggggcca

SEQ ID NO: 17920 - DNA, 20 bp, synthetic construct
  misc_feature 1..20: note = chemically synthesized
  source 1..20: mol_type = other DNA
ccaccactggggccaaggac

SEQ ID NO: 17921 - DNA, 20 bp, synthetic construct
  misc_feature 1..20: note = chemically synthesized
  source 1..20: mol_type = other DNA
ccacttgatattcttgtctc

SEQ ID NO: 17922 - DNA, 20 bp, synthetic construct
  misc_feature 1..20: note = chemically synthesized
  source 1..20: mol_type = other DNA
ttcactaacaaatgcaccct

SEQ ID NO: 17923 - DNA, 20 bp, synthetic construct
  misc_feature 1..20: note = chemically synthesized
  source 1..20: mol_type = other DNA
ctaagccactgaaaaaatca

SEQ ID NO: 17924 - DNA, 20 bp, synthetic construct
  misc_feature 1..20: note = chemically synthesized
  source 1..20: mol_type = other DNA
acagacactgatgatactgt

SEQ ID NO: 17925 - DNA, 20 bp, synthetic construct
  misc_feature 1..20: note = chemically synthesized
  source 1..20: mol_type = other DNA
gacactgatgatactgttgg

SEQ ID NO: 17926 - DNA, 20 bp, synthetic construct
  misc_feature 1..20: note = chemically synthesized
  source 1..20: mol_type = other DNA
agctgaaaaaaaataatatg

SEQ ID NO: 17927 - DNA, 20 bp, synthetic construct
  misc_feature 1..20: note = chemically synthesized
  source 1..20: mol_type = other DNA
actatgctgctgtatgcacc

SEQ ID NO: 17928 - DNA, 20 bp, synthetic construct
  misc_feature 1..20: note = chemically synthesized
  source 1..20: mol_type = other DNA
gcacctagaaatcaaaatca

SEQ ID NO: 17929 - DNA, 20 bp, synthetic construct
  misc_feature 1..20: note = chemically synthesized
  source 1..20: mol_type = other DNA
tgccctactcaatcaacacc

SEQ ID NO: 17930 - DNA, 20 bp, synthetic construct
  misc_feature 1..20: note = chemically synthesized
  source 1..20: mol_type = other DNA
tcaacaccaagatacatctt

SEQ ID NO: 17931 - DNA, 20 bp, synthetic construct
  misc_feature 1..20: note = chemically synthesized
  source 1..20: mol_type = other DNA
caagatacatcttcagaaaa

SEQ ID NO: 17932 - DNA, 20 bp, synthetic construct
  misc_feature 1..20: note = chemically synthesized
  source 1..20: mol_type = other DNA
caaaaacaaatttacaaaac

SEQ ID NO: 17933 - DNA, 20 bp, synthetic construct
  misc_feature 1..20: note = chemically synthesized
  source 1..20: mol_type = other DNA
aaacaaatttacaaaactgg

SEQ ID NO: 17934 - DNA, 20 bp, synthetic construct
  misc_feature 1..20: note = chemically synthesized
  source 1..20: mol_type = other DNA
caaatttacaaaactggaag

SEQ ID NO: 17935 - DNA, 20 bp, synthetic construct
  misc_feature 1..20: note = chemically synthesized
  source 1..20: mol_type = other DNA
ggaagcagcaatcattacac

SEQ ID NO: 17936 - DNA, 20 bp, synthetic construct
  misc_feature 1..20: note = chemically synthesized
  source 1..20: mol_type = other DNA
agcaatcattacaccagatg

SEQ ID NO: 17937 - DNA, 20 bp, synthetic construct
  misc_feature 1..20: note = chemically synthesized
  source 1..20: mol_type = other DNA
caatcattacaccagatgca

SEQ ID NO: 17938 - DNA, 20 bp, synthetic construct
  misc_feature 1..20: note = chemically synthesized
  source 1..20: mol_type = other DNA
agatgcagagatatcaatgc

SEQ ID NO: 17939 - DNA, 20 bp, synthetic construct
  misc_feature 1..20: note = chemically synthesized
  source 1..20: mol_type = other DNA
aagaacaaaataaacataaa

SEQ ID NO: 17940 - DNA, 20 bp, synthetic construct
  misc_feature 1..20: note = chemically synthesized
  source 1..20: mol_type = other DNA
agaacaaaataaacataaaa

SEQ ID NO: 17941 - DNA, 20 bp, synthetic construct
  misc_feature 1..20: note = chemically synthesized
  source 1..20: mol_type = other DNA
aaaataaacataaaaaggtg

SEQ ID NO: 17942 - DNA, 20 bp, synthetic construct
  misc_feature 1..20: note = chemically synthesized
  source 1..20: mol_type = other DNA
gaagaaatatgacacttcca

SEQ ID NO: 17943 - DNA, 20 bp, synthetic construct
  misc_feature 1..20: note = chemically synthesized
  source 1..20: mol_type = other DNA
aagaaatatgacacttccaa

SEQ ID NO: 17944 - DNA, 20 bp, synthetic construct
  misc_feature 1..20: note = chemically synthesized
  source 1..20: mol_type = other DNA
aaaggaatttaataattctt

SEQ ID NO: 17945 - DNA, 20 bp, synthetic construct
  misc_feature 1..20: note = chemically synthesized
  source 1..20: mol_type = other DNA
taataattcttcagcaacat

SEQ ID NO: 17946 - DNA, 20 bp, synthetic construct
  misc_feature 1..20: note = chemically synthesized
  source 1..20: mol_type = other DNA
aattcttcagcaacataagc

SEQ ID NO: 17947 - DNA, 20 bp, synthetic construct
  misc_feature 1..20: note = chemically synthesized
  source 1..20: mol_type = other DNA
tcttcagcaacataagccag

SEQ ID NO: 17948 - DNA, 20 bp, synthetic construct
  misc_feature 1..20: note = chemically synthesized
  source 1..20: mol_type = other DNA
acataagccagtggaaaaaa

SEQ ID NO: 17949 - DNA, 20 bp, synthetic construct
  misc_feature 1..20: note = chemically synthesized
  source 1..20: mol_type = other DNA
aaaagacatttataaaattc

SEQ ID NO: 17950 - DNA, 20 bp, synthetic construct
  misc_feature 1..20: note = chemically synthesized
  source 1..20: mol_type = other DNA
atttataaaattctggaaaa

SEQ ID NO: 17951 - DNA, 20 bp, synthetic construct
  misc_feature 1..20: note = chemically synthesized
  source 1..20: mol_type = other DNA
gaatccaaaatgttgatatt

SEQ ID NO: 17952 - DNA, 20 bp, synthetic construct
  misc_feature 1..20: note = chemically synthesized
  source 1..20: mol_type = other DNA
aatccaaaatgttgatatta

SEQ ID NO: 17953 - DNA, 20 bp, synthetic construct
  misc_feature 1..20: note = chemically synthesized
  source 1..20: mol_type = other DNA
ccaaaatgttgatattaagg

SEQ ID NO: 17954 - DNA, 20 bp, synthetic construct
  misc_feature 1..20: note = chemically synthesized
  source 1..20: mol_type = other DNA
atgttgatattaaggaagct

SEQ ID NO: 17955 - DNA, 20 bp, synthetic construct
  misc_feature 1..20: note = chemically synthesized
  source 1..20: mol_type = other DNA
tgatattaaggaagctcagt

SEQ ID NO: 17956 - DNA, 20 bp, synthetic construct
  misc_feature 1..20: note = chemically synthesized
  source 1..20: mol_type = other DNA
aaggaagctcagtgagacac

SEQ ID NO: 17957 - DNA, 20 bp, synthetic construct
  misc_feature 1..20: note = chemically synthesized
  source 1..20: mol_type = other DNA
ggaagctcagtgagacacaa

SEQ ID NO: 17958 - DNA, 20 bp, synthetic construct
  misc_feature 1..20: note = chemically synthesized
  source 1..20: mol_type = other DNA
cagtgagacacaagagaact

SEQ ID NO: 17959 - DNA, 20 bp, synthetic construct
  misc_feature 1..20: note = chemically synthesized
  source 1..20: mol_type = other DNA
gaactcagataaacaataaa

SEQ ID NO: 17960 - DNA, 20 bp, synthetic construct
  misc_feature 1..20: note = chemically synthesized
  source 1..20: mol_type = other DNA
gataaacaataaaaagaaat

SEQ ID NO: 17961 - DNA, 20 bp, synthetic construct
  misc_feature 1..20: note = chemically synthesized
  source 1..20: mol_type = other DNA
aagaaatcagaaaaacaatt

SEQ ID NO: 17962 - DNA, 20 bp, synthetic construct
  misc_feature 1..20: note = chemically synthesized
  source 1..20: mol_type = other DNA
agaaatcagaaaaacaattc

SEQ ID NO: 17963 - DNA, 20 bp, synthetic construct
  misc_feature 1..20: note = chemically synthesized
  source 1..20: mol_type = other DNA
aaacaattcaggatatgaat

SEQ ID NO: 17964 - DNA, 20 bp, synthetic construct
  misc_feature 1..20: note = chemically synthesized
  source 1..20: mol_type = other DNA
tatgaatgagaaatttaccc

SEQ ID NO: 17965 - DNA, 20 bp, synthetic construct
  misc_feature 1..20: note = chemically synthesized
  source 1..20: mol_type = other DNA
tgaatgagaaatttacccaa

SEQ ID NO: 17966 - DNA, 20 bp, synthetic construct
  misc_feature 1..20: note = chemically synthesized
  source 1..20: mol_type = other DNA
tgagaaatttacccaagaga

SEQ ID NO: 17967 - DNA, 20 bp, synthetic construct
  misc_feature 1..20: note = chemically synthesized
  source 1..20: mol_type = other DNA
acccaagagatagatacaac

SEQ ID NO: 17968 - DNA, 20 bp, synthetic construct
  misc_feature 1..20: note = chemically synthesized
  source 1..20: mol_type = other DNA
tacaacaagaatgaaccaaa

SEQ ID NO: 17969 - DNA, 20 bp, synthetic construct
  misc_feature 1..20: note = chemically synthesized
  source 1..20: mol_type = other DNA
aaacagaaattctgtaactg

SEQ ID NO: 17970 - DNA, 20 bp, synthetic construct
  misc_feature 1..20: note = chemically synthesized
  source 1..20: mol_type = other DNA
acagaaattctgtaactgaa

SEQ ID NO: 17971 - DNA, 20 bp, synthetic construct
  misc_feature 1..20: note = chemically synthesized
  source 1..20: mol_type = other DNA
gtaactgaagagtttattga

SEQ ID NO: 17972 - DNA, 20 bp, synthetic construct
  misc_feature 1..20: note = chemically synthesized
  source 1..20: mol_type = other DNA
acattcaaaaacttcaacaa

SEQ ID NO: 17973 - DNA, 20 bp, synthetic construct
  misc_feature 1..20: note = chemically synthesized
  source 1..20: mol_type = other DNA
caaaaacttcaacaatagat

SEQ ID NO: 17974 - DNA, 20 bp, synthetic construct
  misc_feature 1..20: note = chemically synthesized
  source 1..20: mol_type = other DNA
cttcaacaatagatcagatc

SEQ ID NO: 17975 - DNA, 20 bp, synthetic construct
  misc_feature 1..20: note = chemically synthesized
  source 1..20: mol_type = other DNA
caacaatagatcagatcaag

SEQ ID NO: 17976 - DNA, 20 bp, synthetic construct
  misc_feature 1..20: note = chemically synthesized
  source 1..20: mol_type = other DNA
caatagatcagatcaagcag

SEQ ID NO: 17977 - DNA, 20 bp, synthetic construct
  misc_feature 1..20: note = chemically synthesized
  source 1..20: mol_type = other DNA
atcaagcagaagaaaaattt

SEQ ID NO: 17978 - DNA, 20 bp, synthetic construct
  misc_feature 1..20: note = chemically synthesized
  source 1..20: mol_type = other DNA
aagaaaaatttcagaacttg

SEQ ID NO: 17979 - DNA, 20 bp, synthetic construct
  misc_feature 1..20: note = chemically synthesized
  source 1..20: mol_type = other DNA
aaaatttcagaacttgaaga

SEQ ID NO: 17980 - DNA, 20 bp, synthetic construct
  misc_feature 1..20: note = chemically synthesized
  source 1..20: mol_type = other DNA
aaatttcagaacttgaagac

SEQ ID NO: 17981 - DNA, 20 bp, synthetic construct
  misc_feature 1..20: note = chemically synthesized
  source 1..20: mol_type = other DNA
gaagacaggtcttttaaaat

SEQ ID NO: 17982 - DNA, 20 bp, synthetic construct
  misc_feature 1..20: note = chemically synthesized
  source 1..20: mol_type = other DNA
acaggtcttttaaaattagc

SEQ ID NO: 17983 - DNA, 20 bp, synthetic construct
  misc_feature 1..20: note = chemically synthesized
  source 1..20: mol_type = other DNA
aaaattagctggtcaaatga

SEQ ID NO: 17984 - DNA, 20 bp, synthetic construct
  misc_feature 1..20: note = chemically synthesized
  source 1..20: mol_type = other DNA
ttagctggtcaaatgataga

SEQ ID NO: 17985 - DNA, 20 bp, synthetic construct
  misc_feature 1..20: note = chemically synthesized
  source 1..20: mol_type = other DNA
tagctggtcaaatgatagaa

SEQ ID NO: 17986 - DNA, 20 bp, synthetic construct
  misc_feature 1..20: note = chemically synthesized
  source 1..20: mol_type = other DNA
aatgatagaaaggaaaaaaa

SEQ ID NO: 17987 - DNA, 20 bp, synthetic construct
  misc_feature 1..20: note = chemically synthesized
  source 1..20: mol_type = other DNA
ggaaaaaaaaagaatgaaca

SEQ ID NO: 17988 - DNA, 20 bp, synthetic construct
  misc_feature 1..20: note = chemically synthesized
  source 1..20: mol_type = other DNA
acaaagtgtatgtgacatat

SEQ ID NO: 17989 - DNA, 20 bp, synthetic construct
  misc_feature 1..20: note = chemically synthesized
  source 1..20: mol_type = other DNA
caaagtgtatgtgacatatg

SEQ ID NO: 17990 - DNA, 20 bp, synthetic construct
  misc_feature 1..20: note = chemically synthesized
  source 1..20: mol_type = other DNA
gtgacatatgaggcactata

SEQ ID NO: 17991 - DNA, 20 bp, synthetic construct
  misc_feature 1..20: note = chemically synthesized
  source 1..20: mol_type = other DNA
tgaacaaatattcaaatttg

SEQ ID NO: 17992 - DNA, 20 bp, synthetic construct
  misc_feature 1..20: note = chemically synthesized
  source 1..20: mol_type = other DNA
tattcaaatttgcagtttcc

SEQ ID NO: 17993 - DNA, 20 bp, synthetic construct
  misc_feature 1..20: note = chemically synthesized
  source 1..20: mol_type = other DNA
tcaaatttgcagtttcccag

SEQ ID NO: 17994 - DNA, 20 bp, synthetic construct
  misc_feature 1..20: note = chemically synthesized
  source 1..20: mol_type = other DNA
caaatttgcagtttcccaga

SEQ ID NO: 17995 - DNA, 20 bp, synthetic construct
  misc_feature 1..20: note = chemically synthesized
  source 1..20: mol_type = other DNA
ttgcagtttcccagaaggta

SEQ ID NO: 17996 - DNA, 20 bp, synthetic construct
  misc_feature 1..20: note = chemically synthesized
  source 1..20: mol_type = other DNA
gcagtttcccagaaggtaaa

SEQ ID NO: 17997 - DNA, 20 bp, synthetic construct
  misc_feature 1..20: note = chemically synthesized
  source 1..20: mol_type = other DNA
agaaggtaaagagaacatga

SEQ ID NO: 17998 - DNA, 20 bp, synthetic construct
  misc_feature 1..20: note = chemically synthesized
  source 1..20: mol_type = other DNA
gaaggtaaagagaacatgaa

SEQ ID NO: 17999 - DNA, 20 bp, synthetic construct
  misc_feature 1..20: note = chemically synthesized
  source 1..20: mol_type = other DNA
taaagagaacatgaaaggtg

SEQ ID NO: 18000 - DNA, 20 bp, synthetic construct
  misc_feature 1..20: note = chemically synthesized
  source 1..20: mol_type = other DNA
aaagagaacatgaaaggtgt

SEQ ID NO: 18001 - DNA, 20 bp, synthetic construct
  misc_feature 1..20: note = chemically synthesized
  source 1..20: mol_type = other DNA
aaacctacgtaacaacacaa

SEQ ID NO: 18002 - DNA, 20 bp, synthetic construct
  misc_feature 1..20: note = chemically synthesized
  source 1..20: mol_type = other DNA
acaatagctgaaaacttgtc

SEQ ID NO: 18003 - DNA, 20 bp, synthetic construct
  misc_feature 1..20: note = chemically synthesized
  source 1..20: mol_type = other DNA
agctgaaaacttgtcaagtc

SEQ ID NO: 18004 - DNA, 20 bp, synthetic construct
  misc_feature 1..20: note = chemically synthesized
  source 1..20: mol_type = other DNA
gaaaacttgtcaagtctagc

SEQ ID NO: 18005 - DNA, 20 bp, synthetic construct
  misc_feature 1..20: note = chemically synthesized
  source 1..20: mol_type = other DNA
gtcaagtctagcaagaaatg

SEQ ID NO: 18006 - DNA, 20 bp, synthetic construct
  misc_feature 1..20: note = chemically synthesized
  source 1..20: mol_type = other DNA
tagcaagaaatgtagacatc

SEQ ID NO: 18007 - DNA, 20 bp, synthetic construct
  misc_feature 1..20: note = chemically synthesized
  source 1..20: mol_type = other DNA
acatccagacaaatgaaaat

SEQ ID NO: 18008 - DNA, 20 bp, synthetic construct
  misc_feature 1..20: note = chemically synthesized
  source 1..20: mol_type = other DNA
cccaaataatataatgcaaa

SEQ ID NO: 18009 - DNA, 20 bp, synthetic construct
  misc_feature 1..20: note = chemically synthesized
  source 1..20: mol_type = other DNA
atgcaaaaagctcttctcca

SEQ ID NO: 18010 - DNA, 20 bp, synthetic construct
  misc_feature 1..20: note = chemically synthesized
  source 1..20: mol_type = other DNA
ctcttctccacagcacatta

SEQ ID NO: 18011 - DNA, 20 bp, synthetic construct
  misc_feature 1..20: note = chemically synthesized
  source 1..20: mol_type = other DNA
cattatagtcaaactgtcaa

SEQ ID NO: 18012 - DNA, 20 bp, synthetic construct
  misc_feature 1..20: note = chemically synthesized
  source 1..20: mol_type = other DNA
agtcaaactgtcaaaagcca

SEQ ID NO: 18013 - DNA, 20 bp, synthetic construct
  misc_feature 1..20: note = chemically synthesized
  source 1..20: mol_type = other DNA
tcaaactgtcaaaagccaaa

SEQ ID NO: 18014 - DNA, 20 bp, synthetic construct
  misc_feature 1..20: note = chemically synthesized
  source 1..20: mol_type = other DNA
actgtcaaaagccaaagagt

SEQ ID NO: 18015 - DNA, 20 bp, synthetic construct
  misc_feature 1..20: note = chemically synthesized
  source 1..20: mol_type = other DNA
aaagagtaagaactctaaaa

SEQ ID NO: 18016 - DNA, 20 bp, synthetic construct
  misc_feature 1..20: note = chemically synthesized
  source 1..20: mol_type = other DNA
agtaagaactctaaaacagc

SEQ ID NO: 18017 - DNA, 20 bp, synthetic construct
  misc_feature 1..20: note = chemically synthesized
  source 1..20: mol_type = other DNA
aaaacagcaagcaaaatgtc

SEQ ID NO: 18018 - DNA, 20 bp, synthetic construct
  misc_feature 1..20: note = chemically synthesized
  source 1..20: mol_type = other DNA
caaaatgtctagtcacttat

SEQ ID NO: 18019 - DNA, 20 bp, synthetic construct
  misc_feature 1..20: note = chemically synthesized
  source 1..20: mol_type = other DNA
aaaatgtctagtcacttata

SEQ ID NO: 18020 - DNA, 20 bp, synthetic construct
  misc_feature 1..20: note = chemically synthesized
  source 1..20: mol_type = other DNA
aaatgtctagtcacttataa

SEQ ID NO: 18021 - DNA, 20 bp, synthetic construct
  misc_feature 1..20: note = chemically synthesized
  source 1..20: mol_type = other DNA
acttataagggaacttccac

SEQ ID NO: 18022 - DNA, 20 bp, synthetic construct
  misc_feature 1..20: note = chemically synthesized
  source 1..20: mol_type = other DNA
gggaacttccacaagattaa

SEQ ID NO: 18023 - DNA, 20 bp, synthetic construct
  misc_feature 1..20: note = chemically synthesized
  source 1..20: mol_type = other DNA
ccacaagattaacagattaa

SEQ ID NO: 18024 - DNA, 20 bp, synthetic construct
  misc_feature 1..20: note = chemically synthesized
  source 1..20: mol_type = other DNA
caagattaacagattaacag

SEQ ID NO: 18025 - DNA, 20 bp, synthetic construct
  misc_feature 1..20: note = chemically synthesized
  source 1..20: mol_type = other DNA
cagattaacagcagatttct

SEQ ID NO: 18026 - DNA, 20 bp, synthetic construct
  misc_feature 1..20: note = chemically synthesized
  source 1..20: mol_type = other DNA
attaacagcagatttctcag

SEQ ID NO: 18027 - DNA, 20 bp, synthetic construct
  misc_feature 1..20: note = chemically synthesized
  source 1..20: mol_type = other DNA
atttctcagcagaaacctca

SEQ ID NO: 18028 - DNA, 20 bp, synthetic construct
  misc_feature 1..20: note = chemically synthesized
  source 1..20: mol_type = other DNA
tttctcagcagaaacctcac

SEQ ID NO: 18029 - DNA, 20 bp, synthetic construct
  misc_feature 1..20: note = chemically synthesized
  source 1..20: mol_type = other DNA
tcagcagaaacctcacaggc

SEQ ID NO: 18030 - DNA, 20 bp, synthetic construct
  misc_feature 1..20: note = chemically synthesized
  source 1..20: mol_type = other DNA
cagcagaaacctcacaggcc

SEQ ID NO: 18031 - DNA, 20 bp, synthetic construct
  misc_feature 1..20: note = chemically synthesized
  source 1..20: mol_type = other DNA
gcagaaacctcacaggccag

SEQ ID NO: 18032 - DNA, 20 bp, synthetic construct
  misc_feature 1..20: note = chemically synthesized
  source 1..20: mol_type = other DNA
gaaacctcacaggccaggag

SEQ ID NO: 18033 - DNA, 20 bp, synthetic construct
  misc_feature 1..20: note = chemically synthesized
  source 1..20: mol_type = other DNA
cctcacaggccaggagaaga

SEQ ID NO: 18034 - DNA, 20 bp, synthetic construct
  misc_feature 1..20: note = chemically synthesized
  source 1..20: mol_type = other DNA
ctcacaggccaggagaagat

SEQ ID NO: 18035 - DNA, 20 bp, synthetic construct
  misc_feature 1..20: note = chemically synthesized
  source 1..20: mol_type = other DNA
atgggatgatatattcaaaa

SEQ ID NO: 18036 - DNA, 20 bp, synthetic construct
  misc_feature 1..20: note = chemically synthesized
  source 1..20: mol_type = other DNA
tgatatattcaaaatagtga

SEQ ID NO: 18037 - DNA, 20 bp, synthetic construct
  misc_feature 1..20: note = chemically synthesized
  source 1..20: mol_type = other DNA
tgaaagaaaaaaatgacacc

SEQ ID NO: 18038 - DNA, 20 bp, synthetic construct
  misc_feature 1..20: note = chemically synthesized
  source 1..20: mol_type = other DNA
gaaagaaaaaaatgacacca

SEQ ID NO: 18039 - DNA, 20 bp, synthetic construct
  misc_feature 1..20: note = chemically synthesized
  source 1..20: mol_type = other DNA
gacaccaaggatgttatacc

SEQ ID NO: 18040 - DNA, 20 bp, synthetic construct
  misc_feature 1..20: note = chemically synthesized
  source 1..20: mol_type = other DNA
aacattgttcttcaaaaatg

SEQ ID NO: 18041 - DNA, 20 bp, synthetic construct
  misc_feature 1..20: note = chemically synthesized
  source 1..20: mol_type = other DNA
acattgttcttcaaaaatga

SEQ ID NO: 18042 - DNA, 20 bp, synthetic construct
  misc_feature 1..20: note = chemically synthesized
  source 1..20: mol_type = other DNA
aggataaataaaatcttttc

SEQ ID NO: 18043 - DNA, 20 bp, synthetic construct
  misc_feature 1..20: note = chemically synthesized
  source 1..20: mol_type = other DNA
ggataaataaaatcttttct

SEQ ID NO: 18044 - DNA, 20 bp, synthetic construct
  misc_feature 1..20: note = chemically synthesized
  source 1..20: mol_type = other DNA
aaataaaatcttttctgggc

SEQ ID NO: 18045 - DNA, 20 bp, synthetic construct
  misc_feature 1..20: note = chemically synthesized
  source 1..20: mol_type = other DNA
ttctgggcaagaaaaatttg

SEQ ID NO: 18046 - DNA, 20 bp, synthetic construct
  misc_feature 1..20: note = chemically synthesized
  source 1..20: mol_type = other DNA
tctgggcaagaaaaatttga

SEQ ID NO: 18047 - DNA, 20 bp, synthetic construct
  misc_feature 1..20: note = chemically synthesized
  source 1..20: mol_type = other DNA
ttgaaggaattcactatcac

SEQ ID NO: 18048 - DNA, 20 bp, synthetic construct
  misc_feature 1..20: note = chemically synthesized
  source 1..20: mol_type = other DNA
ggaattcactatcactagac

SEQ ID NO: 18049 - DNA, 20 bp, synthetic construct
  misc_feature 1..20: note = chemically synthesized
  source 1..20: mol_type = other DNA
tatcactagactggctttac

SEQ ID NO: 18050 - DNA, 20 bp, synthetic construct
  misc_feature 1..20: note = chemically synthesized
  source 1..20: mol_type = other DNA
tggctttacaagaaatattt

SEQ ID NO: 18051 - DNA, 20 bp, synthetic construct
  misc_feature 1..20: note = chemically synthesized
  source 1..20: mol_type = other DNA
ggctttacaagaaatattta

SEQ ID NO: 18052 - DNA, 20 bp, synthetic construct
  misc_feature 1..20: note = chemically synthesized
  source 1..20: mol_type = other DNA
gctttacaagaaatatttaa

SEQ ID NO: 18053 - DNA, 20 bp, synthetic construct
  misc_feature 1..20: note = chemically synthesized
  source 1..20: mol_type = other DNA
tttacaagaaatatttaagg

SEQ ID NO: 18054 - DNA, 20 bp, synthetic construct
  misc_feature 1..20: note = chemically synthesized
  source 1..20: mol_type = other DNA
taagggagtcctacacatga

SEQ ID NO: 18055 - DNA, 20 bp, synthetic construct
  misc_feature 1..20: note = chemically synthesized
  source 1..20: mol_type = other DNA
agtcctacacatgaaagtga

SEQ ID NO: 18056 - DNA, 20 bp, synthetic construct
  misc_feature 1..20: note = chemically synthesized
  source 1..20: mol_type = other DNA
gtcctacacatgaaagtgac

SEQ ID NO: 18057 - DNA, 20 bp, synthetic construct
  misc_feature 1..20: note = chemically synthesized
  source 1..20: mol_type = other DNA
gacaggacactgccattatg

SEQ ID NO: 18058 - DNA, 20 bp, synthetic construct
  misc_feature 1..20: note = chemically synthesized
  source 1..20: mol_type = other DNA
tgccattatgaagacacaca

SEQ ID NO: 18059 - DNA, 20 bp, synthetic construct
  misc_feature 1..20: note = chemically synthesized
  source 1..20: mol_type = other DNA
gccattatgaagacacacaa

SEQ ID NO: 18060 - DNA, 20 bp, synthetic construct
  misc_feature 1..20: note = chemically synthesized
  source 1..20: mol_type = other DNA
cacaaaggtatacaactaac

SEQ ID NO: 18061 - DNA, 20 bp, synthetic construct
  misc_feature 1..20: note = chemically synthesized
  source 1..20: mol_type = other DNA
aaaggtatacaactaactgg

SEQ ID NO: 18062 - DNA, 20 bp, synthetic construct
  misc_feature 1..20: note = chemically synthesized
  source 1..20: mol_type = other DNA
aggtatacaactaactggta

SEQ ID NO: 18063 - DNA, 20 bp, synthetic construct
  misc_feature 1..20: note = chemically synthesized
  source 1..20: mol_type = other DNA
ggtagagcaaaacacaaata

SEQ ID NO: 18064 - DNA, 20 bp, synthetic construct
  misc_feature 1..20: note = chemically synthesized
  source 1..20: mol_type = other DNA
agagcaaaacacaaataaag

SEQ ID NO: 18065 - DNA, 20 bp, synthetic construct
  misc_feature 1..20: note = chemically synthesized
  source 1..20: mol_type = other DNA
agcaaaacacaaataaagaa

SEQ ID NO: 18066 - DNA, 20 bp, synthetic construct
  misc_feature 1..20: note = chemically synthesized
  source 1..20: mol_type = other DNA
aaacacaaataaagaagaga

SEQ ID NO: 18067 - DNA, 20 bp, synthetic construct
  misc_feature 1..20: note = chemically synthesized
  source 1..20: mol_type = other DNA
gaactcaaacgttaccacta

SEQ ID NO: 18068 - DNA, 20 bp, synthetic construct
  misc_feature 1..20: note = chemically synthesized
  source 1..20: mol_type = other DNA
aaaccacaatcataaataat

SEQ ID NO: 18069 - DNA, 20 bp, synthetic construct
  misc_feature 1..20: note = chemically synthesized
  source 1..20: mol_type = other DNA
cacaatcataaataataaga

SEQ ID NO: 18070 - DNA, 20 bp, synthetic construct
  misc_feature 1..20: note = chemically synthesized
  source 1..20: mol_type = other DNA
atcataaataataagaaaga

SEQ ID NO: 18071 - DNA, 20 bp, synthetic construct
  misc_feature 1..20: note = chemically synthesized
  source 1..20: mol_type = other DNA
taaataataagaaagaaaga

SEQ ID NO: 18072 - DNA, 20 bp, synthetic construct
  misc_feature 1..20: note = chemically synthesized
  source 1..20: mol_type = other DNA
taataagaaagaaagaaaga

SEQ ID NO: 18073 - DNA, 20 bp, synthetic construct
  misc_feature 1..20: note = chemically synthesized
  source 1..20: mol_type = other DNA
aagaaagaaagaaagaaaga

SEQ ID NO: 18074 - DNA, 20 bp, synthetic construct
  misc_feature 1..20: note = chemically synthesized
  source 1..20: mol_type = other DNA
gaaagaaagaaagaaagaaa

SEQ ID NO: 18075 - DNA, 20 bp, synthetic construct
  misc_feature 1..20: note = chemically synthesized
  source 1..20: mol_type = other DNA
aagaaagaaagaaagaaaga

SEQ ID NO: 18076 - DNA, 20 bp, synthetic construct
  misc_feature 1..20: note = chemically synthesized
  source 1..20: mol_type = other DNA
gaaagaaagaaagaaagaga

SEQ ID NO: 18077 - DNA, 20 bp, synthetic construct
  misc_feature 1..20: note = chemically synthesized
  source 1..20: mol_type = other DNA
aagaaagaaagaaagagaga

SEQ ID NO: 18078 - DNA, 20 bp, synthetic construct
  misc_feature 1..20: note = chemically synthesized
  source 1..20: mol_type = other DNA
gaaagaaagaaagagagaga

SEQ ID NO: 18079 - DNA, 20 bp, synthetic construct
  misc_feature 1..20: note = chemically synthesized
  source 1..20: mol_type = other DNA
aagaaagaaagagagagaga

SEQ ID NO: 18080 - DNA, 20 bp, synthetic construct
  misc_feature 1..20: note = chemically synthesized
  source 1..20: mol_type = other DNA
gaaagaaagagagagagaga

SEQ ID NO: 18081 - DNA, 20 bp, synthetic construct
  misc_feature 1..20: note = chemically synthesized
  source 1..20: mol_type = other DNA
gagagagagagagagaatga

SEQ ID NO: 18082 - DNA, 20 bp, synthetic construct
  misc_feature 1..20: note = chemically synthesized
  source 1..20: mol_type = other DNA
gagagagagagaatgaaaga

SEQ ID NO: 18083 - DNA, 20 bp, synthetic construct
  misc_feature 1..20: note = chemically synthesized
  source 1..20: mol_type = other DNA
agagagaatgaaagaaagaa

SEQ ID NO: 18084 - DNA, 20 bp, synthetic construct
  misc_feature 1..20: note = chemically synthesized
  source 1..20: mol_type = other DNA
gagagaatgaaagaaagaaa

SEQ ID NO: 18085 - DNA, 20 bp, synthetic construct
  misc_feature 1..20: note = chemically synthesized
  source 1..20: mol_type = other DNA
agaatgaaagaaagaaaagg

SEQ ID NO: 18086 - DNA, 20 bp, synthetic construct
  misc_feature 1..20: note = chemically synthesized
  source 1..20: mol_type = other DNA
gaatgaaagaaagaaaagga

SEQ ID NO: 18087 - DNA, 20 bp, synthetic construct
  misc_feature 1..20: note = chemically synthesized
  source 1..20: mol_type = other DNA
tgaaagaaagaaaaggaagg

SEQ ID NO: 18088 - DNA, 20 bp, synthetic construct
  misc_feature 1..20: note = chemically synthesized
  source 1..20: mol_type = other DNA
gaaagaaagaaaaggaagga

SEQ ID NO: 18089 - DNA, 20 bp, synthetic construct
  misc_feature 1..20: note = chemically synthesized
  source 1..20: mol_type = other DNA
agaaagaaaaggaaggaagg

SEQ ID NO: 18090 - DNA, 20 bp, synthetic construct
  misc_feature 1..20: note = chemically synthesized
  source 1..20: mol_type = other DNA
taaaaaaaaaacaaaacaac

SEQ ID NO: 18091 - DNA, 20 bp, synthetic construct
  misc_feature 1..20: note = chemically synthesized
  source 1..20: mol_type = other DNA
aaaaaaaaaacaaaacaacc

SEQ ID NO: 18092 - DNA, 20 bp, synthetic construct
  misc_feature 1..20: note = chemically synthesized
  source 1..20: mol_type = other DNA
ccaggaatcaattaacaaaa

SEQ ID NO: 18093 - DNA, 20 bp, synthetic construct
  misc_feature 1..20: note = chemically synthesized
  source 1..20: mol_type = other DNA
ggaatcaattaacaaaatgg

SEQ ID NO: 18094 - DNA, 20 bp, synthetic construct
  misc_feature 1..20: note = chemically synthesized
  source 1..20: mol_type = other DNA
gaatcaattaacaaaatggc

SEQ ID NO: 18095 - DNA, 20 bp, synthetic construct
  misc_feature 1..20: note = chemically synthesized
  source 1..20: mol_type = other DNA
attaacaaaatggcaggaat

SEQ ID NO: 18096 - DNA, 20 bp, synthetic construct
  misc_feature 1..20: note = chemically synthesized
  source 1..20: mol_type = other DNA
aagctctcacatgtcaataa

SEQ ID NO: 18097 - DNA, 20 bp, synthetic construct
  misc_feature 1..20: note = chemically synthesized
  source 1..20: mol_type = other DNA
ataatagccttgcatgtaaa

SEQ ID NO: 18098 - DNA, 20 bp, synthetic construct
  misc_feature 1..20: note = chemically synthesized
  source 1..20: mol_type = other DNA
tggattaaattgttacttga

SEQ ID NO: 18099 - DNA, 20 bp, synthetic construct
  misc_feature 1..20: note = chemically synthesized
  source 1..20: mol_type = other DNA
aaattgttacttgaaagata

SEQ ID NO: 18100 - DNA, 20 bp, synthetic construct
  misc_feature 1..20: note = chemically synthesized
  source 1..20: mol_type = other DNA
gttacttgaaagatatagac

SEQ ID NO: 18101 - DNA, 20 bp, synthetic construct
  misc_feature 1..20: note = chemically synthesized
  source 1..20: mol_type = other DNA
aaagatatagactggctaaa

SEQ ID NO: 18102 - DNA, 20 bp, synthetic construct
  misc_feature 1..20: note = chemically synthesized
  source 1..20: mol_type = other DNA
tttaaaacaaaaatatgacc

SEQ ID NO: 18103 - DNA, 20 bp, synthetic construct
  misc_feature 1..20: note = chemically synthesized
  source 1..20: mol_type = other DNA
caaaaatatgacccagttgt

SEQ ID NO: 18104 - DNA, 20 bp, synthetic construct
  misc_feature 1..20: note = chemically synthesized
  source 1..20: mol_type = other DNA
cccagttgtaagctgcctat

SEQ ID NO: 18105 - DNA, 20 bp, synthetic construct
  misc_feature 1..20: note = chemically synthesized
  source 1..20: mol_type = other DNA
agaaacttatctcacttgta

SEQ ID NO: 18106 - DNA, 20 bp, synthetic construct
  misc_feature 1..20: note = chemically synthesized
  source 1..20: mol_type = other DNA
ctcacttgtaaagataaata

SEQ ID NO: 18107 - DNA, 20 bp, synthetic construct
  misc_feature 1..20: note = chemically synthesized
  source 1..20: mol_type = other DNA
taaagataaatatagactga

SEQ ID NO: 18108 - DNA, 20 bp, synthetic construct
  misc_feature 1..20: note = chemically synthesized
  source 1..20: mol_type = other DNA
aaatatagactgaaagtaaa

SEQ ID NO: 18109 - DNA, 20 bp, synthetic construct
  misc_feature 1..20: note = chemically synthesized
  source 1..20: mol_type = other DNA
gactgaaagtaaaaagatga

SEQ ID NO: 18110 - DNA, 20 bp, synthetic construct
  misc_feature 1..20: note = chemically synthesized
  source 1..20: mol_type = other DNA
gatgaaagatcttccataca

SEQ ID NO: 18111 - DNA, 20 bp, synthetic construct
  misc_feature 1..20: note = chemically synthesized
  source 1..20: mol_type = other DNA
tgaaagatcttccatacaaa

SEQ ID NO: 18112 - DNA, 20 bp, synthetic construct
  misc_feature 1..20: note = chemically synthesized
  source 1..20: mol_type = other DNA
tacaaagagaaaccaaaaat

SEQ ID NO: 18113 - DNA, 20 bp, synthetic construct
  misc_feature 1..20: note = chemically synthesized
  source 1..20: mol_type = other DNA
gagaaaccaaaaatgagcaa

SEQ ID NO: 18114 - DNA, 20 bp, synthetic construct
  misc_feature 1..20: note = chemically synthesized
  source 1..20: mol_type = other DNA
aaaccaaaaatgagcaaaag

SEQ ID NO: 18115 - DNA, 20 bp, synthetic construct
  misc_feature 1..20: note = chemically synthesized
  source 1..20: mol_type = other DNA
aaaagtagttatacctataa

SEQ ID NO: 18116 - DNA, 20 bp, synthetic construct
  misc_feature 1..20: note = chemically synthesized
  source 1..20: mol_type = other DNA
gactttaaataaaaaacact

SEQ ID NO: 18117 - DNA, 20 bp, synthetic construct
  misc_feature 1..20: note = chemically synthesized
  source 1..20: mol_type = other DNA
ctttaaataaaaaacactaa

SEQ ID NO: 18118 - DNA, 20 bp, synthetic construct
  misc_feature 1..20: note = chemically synthesized
  source 1..20: mol_type = other DNA
taaaaaacactaagagacaa

SEQ ID NO: 18119 - DNA, 20 bp, synthetic construct
  misc_feature 1..20: note = chemically synthesized
  source 1..20: mol_type = other DNA
aagtcattacataatgataa

SEQ ID NO: 18120 - DNA, 20 bp, synthetic construct
  misc_feature 1..20: note = chemically synthesized
  source 1..20: mol_type = other DNA
agtcattacataatgataaa

SEQ ID NO: 18121 - DNA, 20 bp, synthetic construct
  misc_feature 1..20: note = chemically synthesized
  source 1..20: mol_type = other DNA
taatgataaaaggaacaatt

SEQ ID NO: 18122 - DNA, 20 bp, synthetic construct
  misc_feature 1..20: note = chemically synthesized
  source 1..20: mol_type = other DNA
gataaaaggaacaattcagc

SEQ ID NO: 18123 - DNA, 20 bp, synthetic construct
  misc_feature 1..20: note = chemically synthesized
  source 1..20: mol_type = other DNA
taaaaggaacaattcagcaa

SEQ ID NO: 18124 - DNA, 20 bp, synthetic construct
  misc_feature 1..20: note = chemically synthesized
  source 1..20: mol_type = other DNA
taaacattcacactcaacac

SEQ ID NO: 18125 - DNA, 20 bp, synthetic construct
  misc_feature 1..20: note = chemically synthesized
  source 1..20: mol_type = other DNA
aacattcacactcaacacca

SEQ ID NO: 18126 - DNA, 20 bp, synthetic construct
  misc_feature 1..20: note = chemically synthesized
  source 1..20: mol_type = other DNA
acactcaacaccagagcatc

SEQ ID NO: 18127 - DNA, 20 bp, synthetic construct
  misc_feature 1..20: note = chemically synthesized
  source 1..20: mol_type = other DNA
ccagagcatccagatatgta

SEQ ID NO: 18128 - DNA, 20 bp, synthetic construct
  misc_feature 1..20: note = chemically synthesized
  source 1..20: mol_type = other DNA
atatgtaaagcaaatgttat

SEQ ID NO: 18129 - DNA, 20 bp, synthetic construct
  misc_feature 1..20: note = chemically synthesized
  source 1..20: mol_type = other DNA
agcaaatgttattagatata

SEQ ID NO: 18130 - DNA, 20 bp, synthetic construct
  misc_feature 1..20: note = chemically synthesized
  source 1..20: mol_type = other DNA
gcaaatgttattagatataa

SEQ ID NO: 18131 - DNA, 20 bp, synthetic construct
  misc_feature 1..20: note = chemically synthesized
  source 1..20: mol_type = other DNA
caaatgttattagatataaa

SEQ ID NO: 18132 - DNA, 20 bp, synthetic construct
  misc_feature 1..20: note = chemically synthesized
  source 1..20: mol_type = other DNA
attagatataaagggtgaaa

SEQ ID NO: 18133 - DNA, 20 bp, synthetic construct
  misc_feature 1..20: note = chemically synthesized
  source 1..20: mol_type = other DNA
aatagaatccaatacaataa

SEQ ID NO: 18134 - DNA, 20 bp, synthetic construct
  misc_feature 1..20: note = chemically synthesized
  source 1..20: mol_type = other DNA
gaatccaatacaataatagt

SEQ ID NO: 18135 - DNA, 20 bp, synthetic construct
  misc_feature 1..20: note = chemically synthesized
  source 1..20: mol_type = other DNA
aatccaatacaataatagtt

SEQ ID NO: 18136 - DNA, 20 bp, synthetic construct
  misc_feature 1..20: note = chemically synthesized
  source 1..20: mol_type = other DNA
atccaatacaataatagttg

SEQ ID NO: 18137 - DNA, 20 bp, synthetic construct
  misc_feature 1..20: note = chemically synthesized
  source 1..20: mol_type = other DNA
ggatttcaacattctaatct

SEQ ID NO: 18138 - DNA, 20 bp, synthetic construct
  misc_feature 1..20: note = chemically synthesized
  source 1..20: mol_type = other DNA
caacattctaatctcagcat

SEQ ID NO: 18139 - DNA, 20 bp, synthetic construct
  misc_feature 1..20: note = chemically synthesized
  source 1..20: mol_type = other DNA
attctaatctcagcatcaga

SEQ ID NO: 18140 - DNA, 20 bp, synthetic construct
  misc_feature 1..20: note = chemically synthesized
  source 1..20: mol_type = other DNA
tcagcatcagatagatcatc

SEQ ID NO: 18141 - DNA, 20 bp, synthetic construct
  misc_feature 1..20: note = chemically synthesized
  source 1..20: mol_type = other DNA
catcagatagatcatctaga

SEQ ID NO: 18142 - DNA, 20 bp, synthetic construct
  misc_feature 1..20: note = chemically synthesized
  source 1..20: mol_type = other DNA
atctagacagaaaattaaca

SEQ ID NO: 18143 - DNA, 20 bp, synthetic construct
  misc_feature 1..20: note = chemically synthesized
  source 1..20: mol_type = other DNA
gaaaattaacaaagaaacat

SEQ ID NO: 18144 - DNA, 20 bp, synthetic construct
  misc_feature 1..20: note = chemically synthesized
  source 1..20: mol_type = other DNA
attggatttaaacttgactt

SEQ ID NO: 18145 - DNA, 20 bp, synthetic construct
  misc_feature 1..20: note = chemically synthesized
  source 1..20: mol_type = other DNA
aaacttgactttagaccaaa

SEQ ID NO: 18146 - DNA, 20 bp, synthetic construct
  misc_feature 1..20: note = chemically synthesized
  source 1..20: mol_type = other DNA
ttacacaatatttcatccaa

SEQ ID NO: 18147 - DNA, 20 bp, synthetic construct
  misc_feature 1..20: note = chemically synthesized
  source 1..20: mol_type = other DNA
aatatttcatccaacagcta

SEQ ID NO: 18148 - DNA, 20 bp, synthetic construct
  misc_feature 1..20: note = chemically synthesized
  source 1..20: mol_type = other DNA
acagaatatatttatctcat

SEQ ID NO: 18149 - DNA, 20 bp, synthetic construct
  misc_feature 1..20: note = chemically synthesized
  source 1..20: mol_type = other DNA
tcagcacatgacgcattccc

SEQ ID NO: 18150 - DNA, 20 bp, synthetic construct
  misc_feature 1..20: note = chemically synthesized
  source 1..20: mol_type = other DNA
cagcacatgacgcattcccc

SEQ ID NO: 18151 - DNA, 20 bp, synthetic construct
  misc_feature 1..20: note = chemically synthesized
  source 1..20: mol_type = other DNA
ccccaggatacaccatatgt

SEQ ID NO: 18152 - DNA, 20 bp, synthetic construct
  misc_feature 1..20: note = chemically synthesized
  source 1..20: mol_type = other DNA
caccatatgttagaacacaa

SEQ ID NO: 18153 - DNA, 20 bp, synthetic construct
  misc_feature 1..20: note = chemically synthesized
  source 1..20: mol_type = other DNA
catatgttagaacacaaaag

SEQ ID NO: 18154 - DNA, 20 bp, synthetic construct
  misc_feature 1..20: note = chemically synthesized
  source 1..20: mol_type = other DNA
gaaatatttgaaatcatatt

SEQ ID NO: 18155 - DNA, 20 bp, synthetic construct
  misc_feature 1..20: note = chemically synthesized
  source 1..20: mol_type = other DNA
aatcatattaagcatcttct

SEQ ID NO: 18156 - DNA, 20 bp, synthetic construct
  misc_feature 1..20: note = chemically synthesized
  source 1..20: mol_type = other DNA
agcatcttctcagaccacaa

SEQ ID NO: 18157 - DNA, 20 bp, synthetic construct
  misc_feature 1..20: note = chemically synthesized
  source 1..20: mol_type = other DNA
agaccacaatggaataaaac

SEQ ID NO: 18158 - DNA, 20 bp, synthetic construct
  misc_feature 1..20: note = chemically synthesized
  source 1..20: mol_type = other DNA
taaaactagaaatcaataac

SEQ ID NO: 18159 - DNA, 20 bp, synthetic construct
  misc_feature 1..20: note = chemically synthesized
  source 1..20: mol_type = other DNA
ttaaaacctatacaaataca

SEQ ID NO: 18160 - DNA, 20 bp, synthetic construct
  misc_feature 1..20: note = chemically synthesized
  source 1..20: mol_type = other DNA
tcctgaatgaacgttatgtc

SEQ ID NO: 18161 - DNA, 20 bp, synthetic construct
  misc_feature 1..20: note = chemically synthesized
  source 1..20: mol_type = other DNA
tgaatgaacgttatgtcaag

SEQ ID NO: 18162 - DNA, 20 bp, synthetic construct
  misc_feature 1..20: note = chemically synthesized
  source 1..20: mol_type = other DNA
gttatgtcaagaagaaaatt

SEQ ID NO: 18163 - DNA, 20 bp, synthetic construct
  misc_feature 1..20: note = chemically synthesized
  source 1..20: mol_type = other DNA
atgtcaagaagaaaattaag

SEQ ID NO: 18164 - DNA, 20 bp, synthetic construct
  misc_feature 1..20: note = chemically synthesized
  source 1..20: mol_type = other DNA
tgtcaagaagaaaattaaga

SEQ ID NO: 18165 - DNA, 20 bp, synthetic construct
  misc_feature 1..20: note = chemically synthesized
  source 1..20: mol_type = other DNA
atgaaaattgaaatacaaca

SEQ ID NO: 18166 - DNA, 20 bp, synthetic construct
  misc_feature 1..20: note = chemically synthesized
  source 1..20: mol_type = other DNA
tgaaaattgaaatacaacat

SEQ ID NO: 18167 - DNA, 20 bp, synthetic construct
  misc_feature 1..20: note = chemically synthesized
  source 1..20: mol_type = other DNA
attgaaatacaacataggaa

SEQ ID NO: 18168 - DNA, 20 bp, synthetic construct
  misc_feature 1..20: note = chemically synthesized
  source 1..20: mol_type = other DNA
atacaacataggaaaagcca

SEQ ID NO: 18169 - DNA, 20 bp, synthetic construct
  misc_feature 1..20: note = chemically synthesized
  source 1..20: mol_type = other DNA
tacaacataggaaaagccat

SEQ ID NO: 18170 - DNA, 20 bp, synthetic construct
  misc_feature 1..20: note = chemically synthesized
  source 1..20: mol_type = other DNA
ataggaaaagccatgggata

SEQ ID NO: 18171 - DNA, 20 bp, synthetic construct
  misc_feature 1..20: note = chemically synthesized
  source 1..20: mol_type = other DNA
aaagccatgggatacagcaa

SEQ ID NO: 18172 - DNA, 20 bp, synthetic construct
  misc_feature 1..20: note = chemically synthesized
  source 1..20: mol_type = other DNA
gccatgggatacagcaaaag

SEQ ID NO: 18173 - DNA, 20 bp, synthetic construct
  misc_feature 1..20: note = chemically synthesized
  source 1..20: mol_type = other DNA
gatacagcaaaagcagtgct

SEQ ID NO: 18174 - DNA, 20 bp, synthetic construct
  misc_feature 1..20: note = chemically synthesized
  source 1..20: mol_type = other DNA
tacagcaaaagcagtgctaa

SEQ ID NO: 18175 - DNA, 20 bp, synthetic construct
  misc_feature 1..20: note = chemically synthesized
  source 1..20: mol_type = other DNA
cagcaaaagcagtgctaaga

SEQ ID NO: 18176 - DNA, 20 bp, synthetic construct
  misc_feature 1..20: note = chemically synthesized
  source 1..20: mol_type = other DNA
caaaagcagtgctaagagag

SEQ ID NO: 18177 - DNA, 20 bp, synthetic construct
  misc_feature 1..20: note = chemically synthesized
  source 1..20: mol_type = other DNA
aaacacttaaattaaaaaca

SEQ ID NO: 18178 - DNA, 20 bp, synthetic construct
  misc_feature 1..20: note = chemically synthesized
  source 1..20: mol_type = other DNA
acttaaattaaaaacataga

SEQ ID NO: 18179 - DNA, 20 bp, synthetic construct
  misc_feature 1..20: note = chemically synthesized
  source 1..20: mol_type = other DNA
atctaatcatgtacctcaac

SEQ ID NO: 18180 - DNA, 20 bp, synthetic construct
  misc_feature 1..20: note = chemically synthesized
  source 1..20: mol_type = other DNA
aatcatgtacctcaacaagc

SEQ ID NO: 18181 - DNA, 20 bp, synthetic construct
  misc_feature 1..20: note = chemically synthesized
  source 1..20: mol_type = other DNA
tgtacctcaacaagctagaa

SEQ ID NO: 18182 - DNA, 20 bp, synthetic construct
  misc_feature 1..20: note = chemically synthesized
  source 1..20: mol_type = other DNA
cctcaacaagctagaaaagc

SEQ ID NO: 18183 - DNA, 20 bp, synthetic construct
  misc_feature 1..20: note = chemically synthesized
  source 1..20: mol_type = other DNA
gcaagaacaaaacccaaaac

SEQ ID NO: 18184 - DNA, 20 bp, synthetic construct
  misc_feature 1..20: note = chemically synthesized
  source 1..20: mol_type = other DNA
agaacaaaacccaaaactag

SEQ ID NO: 18185 - DNA, 20 bp, synthetic construct
  misc_feature 1..20: note = chemically synthesized
  source 1..20: mol_type = other DNA
acaaaacccaaaactagcag

SEQ ID NO: 18186 - DNA, 20 bp, synthetic construct
  misc_feature 1..20: note = chemically synthesized
  source 1..20: mol_type = other DNA
caaaacccaaaactagcaga

SEQ ID NO: 18187 - DNA, 20 bp, synthetic construct
  misc_feature 1..20: note = chemically synthesized
  source 1..20: mol_type = other DNA
acccaaaactagcagaagga

SEQ ID NO: 18188 - DNA, 20 bp, synthetic construct
  misc_feature 1..20: note = chemically synthesized
  source 1..20: mol_type = other DNA
gcagaaggaaagaaaaaatg

SEQ ID NO: 18189 - DNA, 20 bp, synthetic construct
  misc_feature 1..20: note = chemically synthesized
  source 1..20: mol_type = other DNA
aggaaagaaaaaatgaagaa

SEQ ID NO: 18190 - DNA, 20 bp, synthetic construct
  misc_feature 1..20: note = chemically synthesized
  source 1..20: mol_type = other DNA
aaagaaaaaatgaagaacag

SEQ ID NO: 18191 - DNA, 20 bp, synthetic construct
  misc_feature 1..20: note = chemically synthesized
  source 1..20: mol_type = other DNA
aacagaagaacttaatgaaa

SEQ ID NO: 18192 - DNA, 20 bp, synthetic construct
  misc_feature 1..20: note = chemically synthesized
  source 1..20: mol_type = other DNA
cagaagaacttaatgaaata

SEQ ID NO: 18193 - DNA, 20 bp, synthetic construct
  misc_feature 1..20: note = chemically synthesized
  source 1..20: mol_type = other DNA
aaatagagaaaaacaacaac

SEQ ID NO: 18194 - DNA, 20 bp, synthetic construct
  misc_feature 1..20: note = chemically synthesized
  source 1..20: mol_type = other DNA
aatagagaaaaacaacaaca

SEQ ID NO: 18195 - DNA, 20 bp, synthetic construct
  misc_feature 1..20: note = chemically synthesized
  source 1..20: mol_type = other DNA
atagagaaaaacaacaacaa

SEQ ID NO: 18196 - DNA, 20 bp, synthetic construct
  misc_feature 1..20: note = chemically synthesized
  source 1..20: mol_type = other DNA
gaaaaacaacaacaagggat

SEQ ID NO: 18197 - DNA, 20 bp, synthetic construct
  misc_feature 1..20: note = chemically synthesized
  source 1..20: mol_type = other DNA
caagggattagcaaaatgaa

SEQ ID NO: 18198 - DNA, 20 bp, synthetic construct
  misc_feature 1..20: note = chemically synthesized
  source 1..20: mol_type = other DNA
tgaaaagttgttatttaaaa

SEQ ID NO: 18199 - DNA, 20 bp, synthetic construct
  misc_feature 1..20: note = chemically synthesized
  source 1..20: mol_type = other DNA
gttatttaaaaaagataaaa

SEQ ID NO: 18200 - DNA, 20 bp, synthetic construct
  misc_feature 1..20: note = chemically synthesized
  source 1..20: mol_type = other DNA
taaaaaagataaaatggata

SEQ ID NO: 18201 - DNA, 20 bp, synthetic construct
  misc_feature 1..20: note = chemically synthesized
  source 1..20: mol_type = other DNA
agataaaatggatatagctc

SEQ ID NO: 18202 - DNA, 20 bp, synthetic construct
  misc_feature 1..20: note = chemically synthesized
  source 1..20: mol_type = other DNA
aaaatggatatagctctagc

SEQ ID NO: 18203 - DNA, 20 bp, synthetic construct
  misc_feature 1..20: note = chemically synthesized
  source 1..20: mol_type = other DNA
tagctctagctagactaacc

SEQ ID NO: 18204 - DNA, 20 bp, synthetic construct
  misc_feature 1..20: note = chemically synthesized
  source 1..20: mol_type = other DNA
tagctagactaaccaagaaa

SEQ ID NO: 18205 - DNA, 20 bp, synthetic construct
  misc_feature 1..20: note = chemically synthesized
  source 1..20: mol_type = other DNA
gctagactaaccaagaaaaa

SEQ ID NO: 18206 - DNA, 20 bp, synthetic construct
  misc_feature 1..20: note = chemically synthesized
  source 1..20: mol_type = other DNA
agactaaccaagaaaaagag

SEQ ID NO: 18207 - DNA, 20 bp, synthetic construct
  misc_feature 1..20: note = chemically synthesized
  source 1..20: mol_type = other DNA
actaaccaagaaaaagagaa

SEQ ID NO: 18208 - DNA, 20 bp, synthetic construct
  misc_feature 1..20: note = chemically synthesized
  source 1..20: mol_type = other DNA
aaagagaagagactgaaata

SEQ ID NO: 18209 - DNA, 20 bp, synthetic construct
  misc_feature 1..20: note = chemically synthesized
  source 1..20: mol_type = other DNA
gagactgaaataaagaaaat

SEQ ID NO: 18210 - DNA, 20 bp, synthetic construct
  misc_feature 1..20: note = chemically synthesized
  source 1..20: mol_type = other DNA
aaagaaaatcagaaataaaa

SEQ ID NO: 18211 - DNA, 20 bp, synthetic construct
  misc_feature 1..20: note = chemically synthesized
  source 1..20: mol_type = other DNA
atatattacaaccgatacca

SEQ ID NO: 18212 - DNA, 20 bp, synthetic construct
  misc_feature 1..20: note = chemically synthesized
  source 1..20: mol_type = other DNA
tacaaccgataccacagaaa

SEQ ID NO: 18213 - DNA, 20 bp, synthetic construct
  misc_feature 1..20: note = chemically synthesized
  source 1..20: mol_type = other DNA
ccgataccacagaaatagaa

SEQ ID NO: 18214 - DNA, 20 bp, synthetic construct
  misc_feature 1..20: note = chemically synthesized
  source 1..20: mol_type = other DNA
acagaaatagaaaagattat

SEQ ID NO: 18215 - DNA, 20 bp, synthetic construct
  misc_feature 1..20: note = chemically synthesized
  source 1..20: mol_type = other DNA
agaaatagaaaagattatca

SEQ ID NO: 18216 - DNA, 20 bp, synthetic construct
  misc_feature 1..20: note = chemically synthesized
  source 1..20: mol_type = other DNA
cactaaaaaactgaaaaatc

SEQ ID NO: 18217 - DNA, 20 bp, synthetic construct
  misc_feature 1..20: note = chemically synthesized
  source 1..20: mol_type = other DNA
ctaaaaaactgaaaaatcta

SEQ ID NO: 18218 - DNA, 20 bp, synthetic construct
  misc_feature 1..20: note = chemically synthesized
  source 1..20: mol_type = other DNA
taaaaaactgaaaaatctag

SEQ ID NO: 18219 - DNA, 20 bp, synthetic construct
  misc_feature 1..20: note = chemically synthesized
  source 1..20: mol_type = other DNA
agaggaaattaataaatttc

SEQ ID NO: 18220 - DNA, 20 bp, synthetic construct
  misc_feature 1..20: note = chemically synthesized
  source 1..20: mol_type = other DNA
ctggacacataccacctacc

SEQ ID NO: 18221 - DNA, 20 bp, synthetic construct
  misc_feature 1..20: note = chemically synthesized
  source 1..20: mol_type = other DNA
ccacctaccaagattgaatt

SEQ ID NO: 18222 - DNA, 20 bp, synthetic construct
  misc_feature 1..20: note = chemically synthesized
  source 1..20: mol_type = other DNA
ctaccaagattgaattaaga

SEQ ID NO: 18223 - DNA, 20 bp, synthetic construct
  misc_feature 1..20: note = chemically synthesized
  source 1..20: mol_type = other DNA
aagattgaattaagaaagaa

SEQ ID NO: 18224 - DNA, 20 bp, synthetic construct
  misc_feature 1..20: note = chemically synthesized
  source 1..20: mol_type = other DNA
gaaagaatagaaaacctgaa

SEQ ID NO: 18225 - DNA, 20 bp, synthetic construct
  misc_feature 1..20: note = chemically synthesized
  source 1..20: mol_type = other DNA
aatagaaaacctgaacagac

SEQ ID NO: 18226 - DNA, 20 bp, synthetic construct
  misc_feature 1..20: note = chemically synthesized
  source 1..20: mol_type = other DNA
aatgaataatgaaattgaat

SEQ ID NO: 18227 - DNA, 20 bp, synthetic construct
  misc_feature 1..20: note = chemically synthesized
  source 1..20: mol_type = other DNA
gaataatgaaattgaatcag

SEQ ID NO: 18228 - DNA, 20 bp, synthetic construct
  misc_feature 1..20: note = chemically synthesized
  source 1..20: mol_type = other DNA
gaaattgaatcagtagtaaa

SEQ ID NO: 18229 - DNA, 20 bp, synthetic construct
  misc_feature 1..20: note = chemically synthesized
  source 1..20: mol_type = other DNA
tagtaaaaagtctcccaaaa

SEQ ID NO: 18230 - DNA, 20 bp, synthetic construct
  misc_feature 1..20: note = chemically synthesized
  source 1..20: mol_type = other DNA
ctcccaaaaaagaaaatttc

SEQ ID NO: 18231 - DNA, 20 bp, synthetic construct
  misc_feature 1..20: note = chemically synthesized
  source 1..20: mol_type = other DNA
aaaaaagaaaatttcaagac

SEQ ID NO: 18232 - DNA, 20 bp, synthetic construct
  misc_feature 1..20: note = chemically synthesized
  source 1..20: mol_type = other DNA
aagaaaatttcaagaccaga

SEQ ID NO: 18233 - DNA, 20 bp, synthetic construct
  misc_feature 1..20: note = chemically synthesized
  source 1..20: mol_type = other DNA
caaattttaccaaactttca

SEQ ID NO: 18234 - DNA, 20 bp, synthetic construct
  misc_feature 1..20: note = chemically synthesized
  source 1..20: mol_type = other DNA
aactttcaaagaaaactaac

SEQ ID NO: 18235 - DNA, 20 bp, synthetic construct
  misc_feature 1..20: note = chemically synthesized
  source 1..20: mol_type = other DNA
aaattcttttaaaaattaaa

SEQ ID NO: 18236 - DNA, 20 bp, synthetic construct
  misc_feature 1..20: note = chemically synthesized
  source 1..20: mol_type = other DNA
aattcttttaaaaattaaac

SEQ ID NO: 18237 - DNA, 20 bp, synthetic construct
  misc_feature 1..20: note = chemically synthesized
  source 1..20: mol_type = other DNA
tcttttaaaaattaaacagg

SEQ ID NO: 18238 - DNA, 20 bp, synthetic construct
  misc_feature 1..20: note = chemically synthesized
  source 1..20: mol_type = other DNA
cttttaaaaattaaacagga

SEQ ID NO: 18239 - DNA, 20 bp, synthetic construct
  misc_feature 1..20: note = chemically synthesized
  source 1..20: mol_type = other DNA
ttctccctaactcattctct

SEQ ID NO: 18240 - DNA, 20 bp, synthetic construct
  misc_feature 1..20: note = chemically synthesized
  source 1..20: mol_type = other DNA
tctccctaactcattctctg

SEQ ID NO: 18241 - DNA, 20 bp, synthetic construct
  misc_feature 1..20: note = chemically synthesized
  source 1..20: mol_type = other DNA
cctaactcattctctgaggc

SEQ ID NO: 18242 - DNA, 20 bp, synthetic construct
  misc_feature 1..20: note = chemically synthesized
  source 1..20: mol_type = other DNA
tattatcctgattccataac

SEQ ID NO: 18243 - DNA, 20 bp, synthetic construct
  misc_feature 1..20: note = chemically synthesized
  source 1..20: mol_type = other DNA
tcctgattccataaccagac

SEQ ID NO: 18244 - DNA, 20 bp, synthetic construct
  misc_feature 1..20: note = chemically synthesized
  source 1..20: mol_type = other DNA
cctgattccataaccagaca

SEQ ID NO: 18245 - DNA, 20 bp, synthetic construct
  misc_feature 1..20: note = chemically synthesized
  source 1..20: mol_type = other DNA
ccataaccagacaaggatgc

SEQ ID NO: 18246 - DNA, 20 bp, synthetic construct
  misc_feature 1..20: note = chemically synthesized
  source 1..20: mol_type = other DNA
tgcaagtaaaaataaaactg

SEQ ID NO: 18247 - DNA, 20 bp, synthetic construct
  misc_feature 1..20: note = chemically synthesized
  source 1..20: mol_type = other DNA
gcaagtaaaaataaaactgc

SEQ ID NO: 18248 - DNA, 20 bp, synthetic construct
  misc_feature 1..20: note = chemically synthesized
  source 1..20: mol_type = other DNA
ctgcaggtcaatatccctga

SEQ ID NO: 18249 - DNA, 20 bp, synthetic construct
  misc_feature 1..20: note = chemically synthesized
  source 1..20: mol_type = other DNA
tcaatatccctgatggaaca

SEQ ID NO: 18250 - DNA, 20 bp, synthetic construct
  misc_feature 1..20: note = chemically synthesized
  source 1..20: mol_type = other DNA
caatatccctgatggaacat

SEQ ID NO: 18251 - DNA, 20 bp, synthetic construct
  misc_feature 1..20: note = chemically synthesized
  source 1..20: mol_type = other DNA
gaaaatcctcaacaaaatac

SEQ ID NO: 18252 - DNA, 20 bp, synthetic construct
  misc_feature 1..20: note = chemically synthesized
  source 1..20: mol_type = other DNA
tactagcaaactgaatccaa

SEQ ID NO: 18253 - DNA, 20 bp, synthetic construct
  misc_feature 1..20: note = chemically synthesized
  source 1..20: mol_type = other DNA
gaatccaacagtacatccaa

SEQ ID NO: 18254 - DNA, 20 bp, synthetic construct
  misc_feature 1..20: note = chemically synthesized
  source 1..20: mol_type = other DNA
aaagataatacaccatgatc

SEQ ID NO: 18255 - DNA, 20 bp, synthetic construct
  misc_feature 1..20: note = chemically synthesized
  source 1..20: mol_type = other DNA
gataatacaccatgatcaag

SEQ ID NO: 18256 - DNA, 20 bp, synthetic construct
  misc_feature 1..20: note = chemically synthesized
  source 1..20: mol_type = other DNA
ataatacaccatgatcaagt

SEQ ID NO: 18257 - DNA, 20 bp, synthetic construct
  misc_feature 1..20: note = chemically synthesized
  source 1..20: mol_type = other DNA
tgatcaagtgggatttatac

SEQ ID NO: 18258 - DNA, 20 bp, synthetic construct
  misc_feature 1..20: note = chemically synthesized
  source 1..20: mol_type = other DNA
gatcaagtgggatttatact

SEQ ID NO: 18259 - DNA, 20 bp, synthetic construct
  misc_feature 1..20: note = chemically synthesized
  source 1..20: mol_type = other DNA
atcaagtgggatttatacta

SEQ ID NO: 18260 - DNA, 20 bp, synthetic construct
  misc_feature 1..20: note = chemically synthesized
  source 1..20: mol_type = other DNA
gggatttatactagggttgc

SEQ ID NO: 18261 - DNA, 20 bp, synthetic construct
  misc_feature 1..20: note = chemically synthesized
  source 1..20: mol_type = other DNA
ttatactagggttgcaagaa

SEQ ID NO: 18262 - DNA, 20 bp, synthetic construct
  misc_feature 1..20: note = chemically synthesized
  source 1..20: mol_type = other DNA
tgatacatcacatcaacaaa

SEQ ID NO: 18263 - DNA, 20 bp, synthetic construct
  misc_feature 1..20: note = chemically synthesized
  source 1..20: mol_type = other DNA
aaaccatatgatcatctcaa

SEQ ID NO: 18264 - DNA, 20 bp, synthetic construct
  misc_feature 1..20: note = chemically synthesized
  source 1..20: mol_type = other DNA
tatgatcatctcaatagata

SEQ ID NO: 18265 - DNA, 20 bp, synthetic construct
  misc_feature 1..20: note = chemically synthesized
  source 1..20: mol_type = other DNA
catctcaatagatacagaaa

SEQ ID NO: 18266 - DNA, 20 bp, synthetic construct
  misc_feature 1..20: note = chemically synthesized
  source 1..20: mol_type = other DNA
ttcatgataaaaactatctg

SEQ ID NO: 18267 - DNA, 20 bp, synthetic construct
  misc_feature 1..20: note = chemically synthesized
  source 1..20: mol_type = other DNA
aaactatctgcagccaatca

SEQ ID NO: 18268 - DNA, 20 bp, synthetic construct
  misc_feature 1..20: note = chemically synthesized
  source 1..20: mol_type = other DNA
ctatctgcagccaatcatag

SEQ ID NO: 18269 - DNA, 20 bp, synthetic construct
  misc_feature 1..20: note = chemically synthesized
  source 1..20: mol_type = other DNA
tatctgcagccaatcataga

SEQ ID NO: 18270 - DNA, 20 bp, synthetic construct
  misc_feature 1..20: note = chemically synthesized
  source 1..20: mol_type = other DNA
aacatatctcaatataataa

SEQ ID NO: 18271 - DNA, 20 bp, synthetic construct
  misc_feature 1..20: note = chemically synthesized
  source 1..20: mol_type = other DNA
agtcatatatgacaaaccca

SEQ ID NO: 18272 - DNA, 20 bp, synthetic construct
  misc_feature 1..20: note = chemically synthesized
  source 1..20: mol_type = other DNA
cagctaacatcatactgaat

SEQ ID NO: 18273 - DNA, 20 bp, synthetic construct
  misc_feature 1..20: note = chemically synthesized
  source 1..20: mol_type = other DNA
agctaacatcatactgaatt

SEQ ID NO: 18274 - DNA, 20 bp, synthetic construct
  misc_feature 1..20: note = chemically synthesized
  source 1..20: mol_type = other DNA
acatcatactgaattgggaa

SEQ ID NO: 18275 - DNA, 20 bp, synthetic construct
  misc_feature 1..20: note = chemically synthesized
  source 1..20: mol_type = other DNA
catactgaattgggaaaagc

SEQ ID NO: 18276 - DNA, 20 bp, synthetic construct
  misc_feature 1..20: note = chemically synthesized
  source 1..20: mol_type = other DNA
actgaattgggaaaagctgg

SEQ ID NO: 18277 - DNA, 20 bp, synthetic construct
  misc_feature 1..20: note = chemically synthesized
  source 1..20: mol_type = other DNA
aagctggaagcctttcctct

SEQ ID NO: 18278 - DNA, 20 bp, synthetic construct
  misc_feature 1..20: note = chemically synthesized
  source 1..20: mol_type = other DNA
tctaagaactgaaacaaaat

SEQ ID NO: 18279 - DNA, 20 bp, synthetic construct
  misc_feature 1..20: note = chemically synthesized
  source 1..20: mol_type = other DNA
ctaagaactgaaacaaaata

SEQ ID NO: 18280 - DNA, 20 bp, synthetic construct
  misc_feature 1..20: note = chemically synthesized
  source 1..20: mol_type = other DNA
actcctattcaatataatac

SEQ ID NO: 18281 - DNA, 20 bp, synthetic construct
  misc_feature 1..20: note = chemically synthesized
  source 1..20: mol_type = other DNA
cctattcaatataatactgg

SEQ ID NO: 18282 - DNA, 20 bp, synthetic construct
  misc_feature 1..20: note = chemically synthesized
  source 1..20: mol_type = other DNA
caatataatactggaagtcc

SEQ ID NO: 18283 - DNA, 20 bp, synthetic construct
  misc_feature 1..20: note = chemically synthesized
  source 1..20: mol_type = other DNA
aatactggaagtcctagcca

SEQ ID NO: 18284 - DNA, 20 bp, synthetic construct
  misc_feature 1..20: note = chemically synthesized
  source 1..20: mol_type = other DNA
gaagtcctagccacagcttt

SEQ ID NO: 18285 - DNA, 20 bp, synthetic construct
  misc_feature 1..20: note = chemically synthesized
  source 1..20: mol_type = other DNA
aagtcctagccacagctttc

SEQ ID NO: 18286 - DNA, 20 bp, synthetic construct
  misc_feature 1..20: note = chemically synthesized
  source 1..20: mol_type = other DNA
cctagccacagctttcaggt

SEQ ID NO: 18287 - DNA, 20 bp, synthetic construct
  misc_feature 1..20: note = chemically synthesized
  source 1..20: mol_type = other DNA
tagccacagctttcaggtca

SEQ ID NO: 18288 - DNA, 20 bp, synthetic construct
  misc_feature 1..20: note = chemically synthesized
  source 1..20: mol_type = other DNA
cacagctttcaggtcagaga

SEQ ID NO: 18289 - DNA, 20 bp, synthetic construct
  misc_feature 1..20: note = chemically synthesized
  source 1..20: mol_type = other DNA
gctttcaggtcagagaaaga

SEQ ID NO: 18290 - DNA, 20 bp, synthetic construct
  misc_feature 1..20: note = chemically synthesized
  source 1..20: mol_type = other DNA
tcaggtcagagaaagaaaga

SEQ ID NO: 18291 - DNA, 20 bp, synthetic construct
  misc_feature 1..20: note = chemically synthesized
  source 1..20: mol_type = other DNA
tcagagaaagaaagaaagaa

SEQ ID NO: 18292 - DNA, 20 bp, synthetic construct
  misc_feature 1..20: note = chemically synthesized
  source 1..20: mol_type = other DNA
cagagaaagaaagaaagaaa

SEQ ID NO: 18293 - DNA, 20 bp, synthetic construct
  misc_feature 1..20: note = chemically synthesized
  source 1..20: mol_type = other DNA
agaaagaaaaggcatgcaaa

SEQ ID NO: 18294 - DNA, 20 bp, synthetic construct
  misc_feature 1..20: note = chemically synthesized
  source 1..20: mol_type = other DNA
gaaagaaaaggcatgcaaat

SEQ ID NO: 18295 - DNA, 20 bp, synthetic construct
  misc_feature 1..20: note = chemically synthesized
  source 1..20: mol_type = other DNA
aaaaggcatgcaaataggaa

SEQ ID NO: 18296 - DNA, 20 bp, synthetic construct
  misc_feature 1..20: note = chemically synthesized
  source 1..20: mol_type = other DNA
catgcaaataggaaaagatg

SEQ ID NO: 18297 - DNA, 20 bp, synthetic construct
  misc_feature 1..20: note = chemically synthesized
  source 1..20: mol_type = other DNA
agtcaaactgtccatctttc

SEQ ID NO: 18298 - DNA, 20 bp, synthetic construct
  misc_feature 1..20: note = chemically synthesized
  source 1..20: mol_type = other DNA
agatgacatgattttatacc

SEQ ID NO: 18299 - DNA, 20 bp, synthetic construct
  misc_feature 1..20: note = chemically synthesized
  source 1..20: mol_type = other DNA
attttatacctagaaaaacc

SEQ ID NO: 18300 - DNA, 20 bp, synthetic construct
  misc_feature 1..20: note = chemically synthesized
  source 1..20: mol_type = other DNA
gaaaaaccaagactccacca

SEQ ID NO: 18301 - DNA, 20 bp, synthetic construct
  misc_feature 1..20: note = chemically synthesized
  source 1..20: mol_type = other DNA
agactccaccaaagcactct

SEQ ID NO: 18302 - DNA, 20 bp, synthetic construct
  misc_feature 1..20: note = chemically synthesized
  source 1..20: mol_type = other DNA
ttagcgctgaaaaataaatt

SEQ ID NO: 18303 - DNA, 20 bp, synthetic construct
  misc_feature 1..20: note = chemically synthesized
  source 1..20: mol_type = other DNA
gctgaaaaataaattcagta

SEQ ID NO: 18304 - DNA, 20 bp, synthetic construct
  misc_feature 1..20: note = chemically synthesized
  source 1..20: mol_type = other DNA
aaataaattcagtaaagtta

SEQ ID NO: 18305 - DNA, 20 bp, synthetic construct
  misc_feature 1..20: note = chemically synthesized
  source 1..20: mol_type = other DNA
aataaattcagtaaagttac

SEQ ID NO: 18306 - DNA, 20 bp, synthetic construct
  misc_feature 1..20: note = chemically synthesized
  source 1..20: mol_type = other DNA
taaattcagtaaagttacag

SEQ ID NO: 18307 - DNA, 20 bp, synthetic construct
  misc_feature 1..20: note = chemically synthesized
  source 1..20: mol_type = other DNA
aaagttacaggagacaaaat

SEQ ID NO: 18308 - DNA, 20 bp, synthetic construct
  misc_feature 1..20: note = chemically synthesized
  source 1..20: mol_type = other DNA
acaaaatcagcatatgaaac

SEQ ID NO: 18309 - DNA, 20 bp, synthetic construct
  misc_feature 1..20: note = chemically synthesized
  source 1..20: mol_type = other DNA
tctacacaccaataataaac

SEQ ID NO: 18310 - DNA, 20 bp, synthetic construct
  misc_feature 1..20: note = chemically synthesized
  source 1..20: mol_type = other DNA
acaccaataataaactagct

SEQ ID NO: 18311 - DNA, 20 bp, synthetic construct
  misc_feature 1..20: note = chemically synthesized
  source 1..20: mol_type = other DNA
ccaataataaactagctgag

SEQ ID NO: 18312 - DNA, 20 bp, synthetic construct
  misc_feature 1..20: note = chemically synthesized
  source 1..20: mol_type = other DNA
caataataaactagctgaga

SEQ ID NO: 18313 - DNA, 20 bp, synthetic construct
  misc_feature 1..20: note = chemically synthesized
  source 1..20: mol_type = other DNA
aactagctgagaaggaaatt

SEQ ID NO: 18314 - DNA, 20 bp, synthetic construct
  misc_feature 1..20: note = chemically synthesized
  source 1..20: mol_type = other DNA
tagctgagaaggaaattaag

SEQ ID NO: 18315 - DNA, 20 bp, synthetic construct
  misc_feature 1..20: note = chemically synthesized
  source 1..20: mol_type = other DNA
agctgagaaggaaattaaga

SEQ ID NO: 18316 - DNA, 20 bp, synthetic construct
  misc_feature 1..20: note = chemically synthesized
  source 1..20: mol_type = other DNA
gaaggcaatcccatttacaa

SEQ ID NO: 18317 - DNA, 20 bp, synthetic construct
  misc_feature 1..20: note = chemically synthesized
  source 1..20: mol_type = other DNA
tagctaaaaaataaaatatt

SEQ ID NO: 18318 - DNA, 20 bp, synthetic construct
  misc_feature 1..20: note = chemically synthesized
  source 1..20: mol_type = other DNA
agctaaaaaataaaatattt

SEQ ID NO: 18319 - DNA, 20 bp, synthetic construct
  misc_feature 1..20: note = chemically synthesized
  source 1..20: mol_type = other DNA
gctaaaaaataaaatattta

SEQ ID NO: 18320 - DNA, 20 bp, synthetic construct
  misc_feature 1..20: note = chemically synthesized
  source 1..20: mol_type = other DNA
atttagggataaatttaacc

SEQ ID NO: 18321 - DNA, 20 bp, synthetic construct
  misc_feature 1..20: note = chemically synthesized
  source 1..20: mol_type = other DNA
tttagggataaatttaacca

SEQ ID NO: 18322 - DNA, 20 bp, synthetic construct
  misc_feature 1..20: note = chemically synthesized
  source 1..20: mol_type = other DNA
ggaaccgaaaaacctctatt

SEQ ID NO: 18323 - DNA, 20 bp, synthetic construct
  misc_feature 1..20: note = chemically synthesized
  source 1..20: mol_type = other DNA
aaactacaaaacactgataa

SEQ ID NO: 18324 - DNA, 20 bp, synthetic construct
  misc_feature 1..20: note = chemically synthesized
  source 1..20: mol_type = other DNA
acactgataaaagaattgaa

SEQ ID NO: 18325 - DNA, 20 bp, synthetic construct
  misc_feature 1..20: note = chemically synthesized
  source 1..20: mol_type = other DNA
cactgataaaagaattgaaa

SEQ ID NO: 18326 - DNA, 20 bp, synthetic construct
  misc_feature 1..20: note = chemically synthesized
  source 1..20: mol_type = other DNA
gataaaagaattgaaaagga

SEQ ID NO: 18327 - DNA, 20 bp, synthetic construct
  misc_feature 1..20: note = chemically synthesized
  source 1..20: mol_type = other DNA
ttgaaaaggacagaaacaaa

SEQ ID NO: 18328 - DNA, 20 bp, synthetic construct
  misc_feature 1..20: note = chemically synthesized
  source 1..20: mol_type = other DNA
gaaaaggacagaaacaaatg

SEQ ID NO: 18329 - DNA, 20 bp, synthetic construct
  misc_feature 1..20: note = chemically synthesized
  source 1..20: mol_type = other DNA
aaaggacagaaacaaatgga

SEQ ID NO: 18330 - DNA, 20 bp, synthetic construct
  misc_feature 1..20: note = chemically synthesized
  source 1..20: mol_type = other DNA
ggagagatatcctatgttca

SEQ ID NO: 18331 - DNA, 20 bp, synthetic construct
  misc_feature 1..20: note = chemically synthesized
  source 1..20: mol_type = other DNA
gatatcctatgttcatggat

SEQ ID NO: 18332 - DNA, 20 bp, synthetic construct
  misc_feature 1..20: note = chemically synthesized
  source 1..20: mol_type = other DNA
aaaaattaatattgttaaaa

SEQ ID NO: 18333 - DNA, 20 bp, synthetic construct
  misc_feature 1..20: note = chemically synthesized
  source 1..20: mol_type = other DNA
taaaatggccatactaccca

SEQ ID NO: 18334 - DNA, 20 bp, synthetic construct
  misc_feature 1..20: note = chemically synthesized
  source 1..20: mol_type = other DNA
atactacccaaagcaatcta

SEQ ID NO: 18335 - DNA, 20 bp, synthetic construct
  misc_feature 1..20: note = chemically synthesized
  source 1..20: mol_type = other DNA
ctatatgaccgctatcaaaa

SEQ ID NO: 18336 - DNA, 20 bp, synthetic construct
  misc_feature 1..20: note = chemically synthesized
  source 1..20: mol_type = other DNA
aatagcaatgtcatttttca

SEQ ID NO: 18337 - DNA, 20 bp, synthetic construct
  misc_feature 1..20: note = chemically synthesized
  source 1..20: mol_type = other DNA
aatgtcatttttcacagaaa

SEQ ID NO: 18338 - DNA, 20 bp, synthetic construct
  misc_feature 1..20: note = chemically synthesized
  source 1..20: mol_type = other DNA
atttgtatgaaattaaaaaa

SEQ ID NO: 18339 - DNA, 20 bp, synthetic construct
  misc_feature 1..20: note = chemically synthesized
  source 1..20: mol_type = other DNA
atgaaattaaaaaatagctc

SEQ ID NO: 18340 - DNA, 20 bp, synthetic construct
  misc_feature 1..20: note = chemically synthesized
  source 1..20: mol_type = other DNA
aaattaaaaaatagctccag

SEQ ID NO: 18341 - DNA, 20 bp, synthetic construct
  misc_feature 1..20: note = chemically synthesized
  source 1..20: mol_type = other DNA
aaaaatagctccagtagcca

SEQ ID NO: 18342 - DNA, 20 bp, synthetic construct
  misc_feature 1..20: note = chemically synthesized
  source 1..20: mol_type = other DNA
ccaaagtcatcctgtgaaaa

SEQ ID NO: 18343 - DNA, 20 bp, synthetic construct
  misc_feature 1..20: note = chemically synthesized
  source 1..20: mol_type = other DNA
ctgtgaaaaaagaacaatgc

SEQ ID NO: 18344 - DNA, 20 bp, synthetic construct
  misc_feature 1..20: note = chemically synthesized
  source 1..20: mol_type = other DNA
gtgaaaaaagaacaatgcta

SEQ ID NO: 18345 - DNA, 20 bp, synthetic construct
  misc_feature 1..20: note = chemically synthesized
  source 1..20: mol_type = other DNA
tgaaaaaagaacaatgctag

SEQ ID NO: 18346 - DNA, 20 bp, synthetic construct
  misc_feature 1..20: note = chemically synthesized
  source 1..20: mol_type = other DNA
tatcatactacctgatttca

SEQ ID NO: 18347 - DNA, 20 bp, synthetic construct
  misc_feature 1..20: note = chemically synthesized
  source 1..20: mol_type = other DNA
gatttcaaagtatattacaa

SEQ ID NO: 18348 - DNA, 20 bp, synthetic construct
  misc_feature 1..20: note = chemically synthesized
  source 1..20: mol_type = other DNA
caaagtatattacaaaagta

SEQ ID NO: 18349 - DNA, 20 bp, synthetic construct
  misc_feature 1..20: note = chemically synthesized
  source 1..20: mol_type = other DNA
aaagtatattacaaaagtat

SEQ ID NO: 18350 - DNA, 20 bp, synthetic construct
  misc_feature 1..20: note = chemically synthesized
  source 1..20: mol_type = other DNA
caaaagtataggaacctaaa

SEQ ID NO: 18351 - DNA, 20 bp, synthetic construct
  misc_feature 1..20: note = chemically synthesized
  source 1..20: mol_type = other DNA
aaacagcatgatactgacat

SEQ ID NO: 18352 - DNA, 20 bp, synthetic construct
  misc_feature 1..20: note = chemically synthesized
  source 1..20: mol_type = other DNA
gcatgatactgacattagaa

SEQ ID NO: 18353 - DNA, 20 bp, synthetic construct
  misc_feature 1..20: note = chemically synthesized
  source 1..20: mol_type = other DNA
ctgacattagaacagacact

SEQ ID NO: 18354 - DNA, 20 bp, synthetic construct
  misc_feature 1..20: note = chemically synthesized
  source 1..20: mol_type = other DNA
agaacagacacttagaccaa

SEQ ID NO: 18355 - DNA, 20 bp, synthetic construct
  misc_feature 1..20: note = chemically synthesized
  source 1..20: mol_type = other DNA
acagacacttagaccaatgg

SEQ ID NO: 18356 - DNA, 20 bp, synthetic construct
  misc_feature 1..20: note = chemically synthesized
  source 1..20: mol_type = other DNA
agacacttagaccaatggaa

SEQ ID NO: 18357 - DNA, 20 bp, synthetic construct
  misc_feature 1..20: note = chemically synthesized
  source 1..20: mol_type = other DNA
cttagaccaatggaagagaa

SEQ ID NO: 18358 - DNA, 20 bp, synthetic construct
  misc_feature 1..20: note = chemically synthesized
  source 1..20: mol_type = other DNA
tagaccaatggaagagaata

SEQ ID NO: 18359 - DNA, 20 bp, synthetic construct
  misc_feature 1..20: note = chemically synthesized
  source 1..20: mol_type = other DNA
atggaagagaatagagaacc

SEQ ID NO: 18360 - DNA, 20 bp, synthetic construct
  misc_feature 1..20: note = chemically synthesized
  source 1..20: mol_type = other DNA
gaaatgcatccacatattta

SEQ ID NO: 18361 - DNA, 20 bp, synthetic construct
  misc_feature 1..20: note = chemically synthesized
  source 1..20: mol_type = other DNA
atccacatatttatagccaa

SEQ ID NO: 18362 - DNA, 20 bp, synthetic construct
  misc_feature 1..20: note = chemically synthesized
  source 1..20: mol_type = other DNA
tagccaacagattttcaaca

SEQ ID NO: 18363 - DNA, 20 bp, synthetic construct
  misc_feature 1..20: note = chemically synthesized
  source 1..20: mol_type = other DNA
agccaacagattttcaacaa

SEQ ID NO: 18364 - DNA, 20 bp, synthetic construct
  misc_feature 1..20: note = chemically synthesized
  source 1..20: mol_type = other DNA
agattttcaacaaaggtgac

SEQ ID NO: 18365 - DNA, 20 bp, synthetic construct
  misc_feature 1..20: note = chemically synthesized
  source 1..20: mol_type = other DNA
aggtgacaagaatatacatt

SEQ ID NO: 18366 - DNA, 20 bp, synthetic construct
  misc_feature 1..20: note = chemically synthesized
  source 1..20: mol_type = other DNA
ggtgacaagaatatacattg

SEQ ID NO: 18367 - DNA, 20 bp, synthetic construct
  misc_feature 1..20: note = chemically synthesized
  source 1..20: mol_type = other DNA
acaagaatatacattgagga

SEQ ID NO: 18368 - DNA, 20 bp, synthetic construct
  misc_feature 1..20: note = chemically synthesized
  source 1..20: mol_type = other DNA
caagaatatacattgaggaa

SEQ ID NO: 18369 - DNA, 20 bp, synthetic construct
  misc_feature 1..20: note = chemically synthesized
  source 1..20: mol_type = other DNA
tatacattgaggaaaggaca

SEQ ID NO: 18370 - DNA, 20 bp, synthetic construct
  misc_feature 1..20: note = chemically synthesized
  source 1..20: mol_type = other DNA
gaggaaaggacacagtgttc

SEQ ID NO: 18371 - DNA, 20 bp, synthetic construct
  misc_feature 1..20: note = chemically synthesized
  source 1..20: mol_type = other DNA
aggacacagtgttcaagaaa

SEQ ID NO: 18372 - DNA, 20 bp, synthetic construct
  misc_feature 1..20: note = chemically synthesized
  source 1..20: mol_type = other DNA
agaaatggtgctgaaaaaat

SEQ ID NO: 18373 - DNA, 20 bp, synthetic construct
  misc_feature 1..20: note = chemically synthesized
  source 1..20: mol_type = other DNA
tgaaaaaattggatatccat

SEQ ID NO: 18374 - DNA, 20 bp, synthetic construct
  misc_feature 1..20: note = chemically synthesized
  source 1..20: mol_type = other DNA
cattggatatccatgtgcaa

SEQ ID NO: 18375 - DNA, 20 bp, synthetic construct
  misc_feature 1..20: note = chemically synthesized
  source 1..20: mol_type = other DNA
catgtgcaaaagaataaaac

SEQ ID NO: 18376 - DNA, 20 bp, synthetic construct
  misc_feature 1..20: note = chemically synthesized
  source 1..20: mol_type = other DNA
ataaaactggactgctgata

SEQ ID NO: 18377 - DNA, 20 bp, synthetic construct
  misc_feature 1..20: note = chemically synthesized
  source 1..20: mol_type = other DNA
actggactgctgatatggtt

SEQ ID NO: 18378 - DNA, 20 bp, synthetic construct
  misc_feature 1..20: note = chemically synthesized
  source 1..20: mol_type = other DNA
aaatataatccccaacttct

SEQ ID NO: 18379 - DNA, 20 bp, synthetic construct
  misc_feature 1..20: note = chemically synthesized
  source 1..20: mol_type = other DNA
aatataatccccaacttctc

SEQ ID NO: 18380 - DNA, 20 bp, synthetic construct
  misc_feature 1..20: note = chemically synthesized
  source 1..20: mol_type = other DNA
tccccaacttctcaggatct

SEQ ID NO: 18381 - DNA, 20 bp, synthetic construct
  misc_feature 1..20: note = chemically synthesized
  source 1..20: mol_type = other DNA
ccaacttctcaggatcttgg

SEQ ID NO: 18382 - DNA, 20 bp, synthetic construct
  misc_feature 1..20: note = chemically synthesized
  source 1..20: mol_type = other DNA
cttctcaggatcttggcgga

SEQ ID NO: 18383 - DNA, 20 bp, synthetic construct
  misc_feature 1..20: note = chemically synthesized
  source 1..20: mol_type = other DNA
ttctcaggatcttggcggat

SEQ ID NO: 18384 - DNA, 20 bp, synthetic construct
  misc_feature 1..20: note = chemically synthesized
  source 1..20: mol_type = other DNA
ctcaggatcttggcggatgg

SEQ ID NO: 18385 - DNA, 20 bp, synthetic construct
  misc_feature 1..20: note = chemically synthesized
  source 1..20: mol_type = other DNA
tcaggatcttggcggatggg

SEQ ID NO: 18386 - DNA, 20 bp, synthetic construct
  misc_feature 1..20: note = chemically synthesized
  source 1..20: mol_type = other DNA
ggatcttggcggatgggagg

SEQ ID NO: 18387 - DNA, 20 bp, synthetic construct
  misc_feature 1..20: note = chemically synthesized
  source 1..20: mol_type = other DNA
gatcttggcggatgggaggt

SEQ ID NO: 18388 - DNA, 20 bp, synthetic construct
  misc_feature 1..20: note = chemically synthesized
  source 1..20: mol_type = other DNA
tggcggatgggaggtaggcc

SEQ ID NO: 18389 - DNA, 20 bp, synthetic construct
  misc_feature 1..20: note = chemically synthesized
  source 1..20: mol_type = other DNA
tgggaggtaggcctagattg

SEQ ID NO: 18390 - DNA, 20 bp, synthetic construct
  misc_feature 1..20: note = chemically synthesized
  source 1..20: mol_type = other DNA
cctagattgcagctccaact

SEQ ID NO: 18391 - DNA, 20 bp, synthetic construct
  misc_feature 1..20: note = chemically synthesized
  source 1..20: mol_type = other DNA
gattgcagctccaactcaga

SEQ ID NO: 18392 - DNA, 20 bp, synthetic construct
  misc_feature 1..20: note = chemically synthesized
  source 1..20: mol_type = other DNA
gcagctccaactcagatgga

SEQ ID NO: 18393 - DNA, 20 bp, synthetic construct
  misc_feature 1..20: note = chemically synthesized
  source 1..20: mol_type = other DNA
agctccaactcagatggaca

SEQ ID NO: 18394 - DNA, 20 bp, synthetic construct
  misc_feature 1..20: note = chemically synthesized
  source 1..20: mol_type = other DNA
tccaactcagatggacagag

SEQ ID NO: 18395 - DNA, 20 bp, synthetic construct
  misc_feature 1..20: note = chemically synthesized
  source 1..20: mol_type = other DNA
cagatggacagagcagcatg

SEQ ID NO: 18396 - DNA, 20 bp, synthetic construct
  misc_feature 1..20: note = chemically synthesized
  source 1..20: mol_type = other DNA
gatggacagagcagcatgtg

SEQ ID NO: 18397 - DNA, 20 bp, synthetic construct
  misc_feature 1..20: note = chemically synthesized
  source 1..20: mol_type = other DNA
atggacagagcagcatgtgg

SEQ ID NO: 18398 - DNA, 20 bp, synthetic construct
  misc_feature 1..20: note = chemically synthesized
  source 1..20: mol_type = other DNA
gaggctcgcattgtgaattt

SEQ ID NO: 18399 - DNA, 20 bp, synthetic construct
  misc_feature 1..20: note = chemically synthesized
  source 1..20: mol_type = other DNA
cgcattgtgaattttagctg

SEQ ID NO: 18400 - DNA, 20 bp, synthetic construct
  misc_feature 1..20: note = chemically synthesized
  source 1..20: mol_type = other DNA
ttgtgaattttagctgcaga

SEQ ID NO: 18401 - DNA, 20 bp, synthetic construct
  misc_feature 1..20: note = chemically synthesized
  source 1..20: mol_type = other DNA
tttagctgcagatagactgc

SEQ ID NO: 18402 - DNA, 20 bp, synthetic construct
  misc_feature 1..20: note = chemically synthesized
  source 1..20: mol_type = other DNA
gatagactgcaagaacaaac

SEQ ID NO: 18403 - DNA, 20 bp, synthetic construct
  misc_feature 1..20: note = chemically synthesized
  source 1..20: mol_type = other DNA
aagaacaaaccagcaatcct

SEQ ID NO: 18404 - DNA, 20 bp, synthetic construct
  misc_feature 1..20: note = chemically synthesized
  source 1..20: mol_type = other DNA
gaacaaaccagcaatcctga

SEQ ID NO: 18405 - DNA, 20 bp, synthetic construct
  misc_feature 1..20: note = chemically synthesized
  source 1..20: mol_type = other DNA
aacaaaccagcaatcctgag

SEQ ID NO: 18406 - DNA, 20 bp, synthetic construct
  misc_feature 1..20: note = chemically synthesized
  source 1..20: mol_type = other DNA
agcaatcctgagaggaccca

SEQ ID NO: 18407 - DNA, 20 bp, synthetic construct
  misc_feature 1..20: note = chemically synthesized
  source 1..20: mol_type = other DNA
gaggacccacagaccctctg

SEQ ID NO: 18408 - DNA, 20 bp, synthetic construct
  misc_feature 1..20: note = chemically synthesized
  source 1..20: mol_type = other DNA
aggacccacagaccctctga

SEQ ID NO: 18409 - DNA, 20 bp, synthetic construct
  misc_feature 1..20: note = chemically synthesized
  source 1..20: mol_type = other DNA
acccacagaccctctgaagg

SEQ ID NO: 18410 - DNA, 20 bp, synthetic construct
  misc_feature 1..20: note = chemically synthesized
  source 1..20: mol_type = other DNA
cacagaccctctgaaggaag

SEQ ID NO: 18411 - DNA, 20 bp, synthetic construct
  misc_feature 1..20: note = chemically synthesized
  source 1..20: mol_type = other DNA
aaggaagtagattgctcctg

SEQ ID NO: 18412 - DNA, 20 bp, synthetic construct
  misc_feature 1..20: note = chemically synthesized
  source 1..20: mol_type = other DNA
aggaagtagattgctcctgc

SEQ ID NO: 18413 - DNA, 20 bp, synthetic construct
  misc_feature 1..20: note = chemically synthesized
  source 1..20: mol_type = other DNA
tagattgctcctgcaggacc

SEQ ID NO: 18414 - DNA, 20 bp, synthetic construct
  misc_feature 1..20: note = chemically synthesized
  source 1..20: mol_type = other DNA
agattgctcctgcaggaccc

SEQ ID NO: 18415 - DNA, 20 bp, synthetic construct
  misc_feature 1..20: note = chemically synthesized
  source 1..20: mol_type = other DNA
attgctcctgcaggacccag

SEQ ID NO: 18416 - DNA, 20 bp, synthetic construct
  misc_feature 1..20: note = chemically synthesized
  source 1..20: mol_type = other DNA
ggagacaccccaaatactgt

SEQ ID NO: 18417 - DNA, 20 bp, synthetic construct
  misc_feature 1..20: note = chemically synthesized
  source 1..20: mol_type = other DNA
tactgtgagtgccccaactg

SEQ ID NO: 18418 - DNA, 20 bp, synthetic construct
  misc_feature 1..20: note = chemically synthesized
  source 1..20: mol_type = other DNA
tgtgagtgccccaactgcgg

SEQ ID NO: 18419 - DNA, 20 bp, synthetic construct
  misc_feature 1..20: note = chemically synthesized
  source 1..20: mol_type = other DNA
gagtgccccaactgcggaag

SEQ ID NO: 18420 - DNA, 20 bp, synthetic construct
  misc_feature 1..20: note = chemically synthesized
  source 1..20: mol_type = other DNA
agtgccccaactgcggaagt

SEQ ID NO: 18421 - DNA, 20 bp, synthetic construct
  misc_feature 1..20: note = chemically synthesized
  source 1..20: mol_type = other DNA
ccccaactgcggaagtggga

SEQ ID NO: 18422 - DNA, 20 bp, synthetic construct
  misc_feature 1..20: note = chemically synthesized
  source 1..20: mol_type = other DNA
cccaactgcggaagtgggaa

SEQ ID NO: 18423 - DNA, 20 bp, synthetic construct
  misc_feature 1..20: note = chemically synthesized
  source 1..20: mol_type = other DNA
ccaactgcggaagtgggaaa

SEQ ID NO: 18424 - DNA, 20 bp, synthetic construct
  misc_feature 1..20: note = chemically synthesized
  source 1..20: mol_type = other DNA
aactgcggaagtgggaaagg

SEQ ID NO: 18425 - DNA, 20 bp, synthetic construct
  misc_feature 1..20: note = chemically synthesized
  source 1..20: mol_type = other DNA
tcctaaacacacactcccac

SEQ ID NO: 18426 - DNA, 20 bp, synthetic construct
  misc_feature 1..20: note = chemically synthesized
  source 1..20: mol_type = other DNA
ctaaacacacactcccactg

SEQ ID NO: 18427 - DNA, 20 bp, synthetic construct
  misc_feature 1..20: note = chemically synthesized
  source 1..20: mol_type = other DNA
cactcccactggagaaactg

SEQ ID NO: 18428 - DNA, 20 bp, synthetic construct
  misc_feature 1..20: note = chemically synthesized
  source 1..20: mol_type = other DNA
actcccactggagaaactga

SEQ ID NO: 18429 - DNA, 20 bp, synthetic construct
  misc_feature 1..20: note = chemically synthesized
  source 1..20: mol_type = other DNA
agaaactgaaggtctgtttg

SEQ ID NO: 18430 - DNA, 20 bp, synthetic construct
  misc_feature 1..20: note = chemically synthesized
  source 1..20: mol_type = other DNA
gaaactgaaggtctgtttgt

SEQ ID NO: 18431 - DNA, 20 bp, synthetic construct
  misc_feature 1..20: note = chemically synthesized
  source 1..20: mol_type = other DNA
aactgaaggtctgtttgtgg

SEQ ID NO: 18432 - DNA, 20 bp, synthetic construct
  misc_feature 1..20: note = chemically synthesized
  source 1..20: mol_type = other DNA
tgaaggtctgtttgtgggag

SEQ ID NO: 18433 - DNA, 20 bp, synthetic construct
  misc_feature 1..20: note = chemically synthesized
  source 1..20: mol_type = other DNA
gagaagtttctgaccttacc

SEQ ID NO: 18434 - DNA, 20 bp, synthetic construct
  misc_feature 1..20: note = chemically synthesized
  source 1..20: mol_type = other DNA
gaagtttctgaccttacctg

SEQ ID NO: 18435 - DNA, 20 bp, synthetic construct
  misc_feature 1..20: note = chemically synthesized
  source 1..20: mol_type = other DNA
ttctgaccttacctggagtt

SEQ ID NO: 18436 - DNA, 20 bp, synthetic construct
  misc_feature 1..20: note = chemically synthesized
  source 1..20: mol_type = other DNA
tacctggagttgagttaact

SEQ ID NO: 18437 - DNA, 20 bp, synthetic construct
  misc_feature 1..20: note = chemically synthesized
  source 1..20: mol_type = other DNA
cctggagttgagttaactta

SEQ ID NO: 18438 - DNA, 20 bp, synthetic construct
  misc_feature 1..20: note = chemically synthesized
  source 1..20: mol_type = other DNA
tggagttgagttaacttaga

SEQ ID NO: 18439 - DNA, 20 bp, synthetic construct
  misc_feature 1..20: note = chemically synthesized
  source 1..20: mol_type = other DNA
ttgagttaacttagagagct

SEQ ID NO: 18440 - DNA, 20 bp, synthetic construct
  misc_feature 1..20: note = chemically synthesized
  source 1..20: mol_type = other DNA
ttagagagctgagcaaaata

SEQ ID NO: 18441 - DNA, 20 bp, synthetic construct
  misc_feature 1..20: note = chemically synthesized
  source 1..20: mol_type = other DNA
tagagagctgagcaaaatac

SEQ ID NO: 18442 - DNA, 20 bp, synthetic construct
  misc_feature 1..20: note = chemically synthesized
  source 1..20: mol_type = other DNA
agctgagcaaaatacaggtg

SEQ ID NO: 18443 - DNA, 20 bp, synthetic construct
  misc_feature 1..20: note = chemically synthesized
  source 1..20: mol_type = other DNA
ctgagcaaaatacaggtgta

SEQ ID NO: 18444 - DNA, 20 bp, synthetic construct
  misc_feature 1..20: note = chemically synthesized
  source 1..20: mol_type = other DNA
tgagcaaaatacaggtgtag

SEQ ID NO: 18445 - DNA, 20 bp, synthetic construct
  misc_feature 1..20: note = chemically synthesized
  source 1..20: mol_type = other DNA
gcaaaatacaggtgtagagg

SEQ ID NO: 18446 - DNA, 20 bp, synthetic construct
  misc_feature 1..20: note = chemically synthesized
  source 1..20: mol_type = other DNA
aaatacaggtgtagaggaag

SEQ ID NO: 18447 - DNA, 20 bp, synthetic construct
  misc_feature 1..20: note = chemically synthesized
  source 1..20: mol_type = other DNA
acaggtgtagaggaagcagt

SEQ ID NO: 18448 - DNA, 20 bp, synthetic construct
  misc_feature 1..20: note = chemically synthesized
  source 1..20: mol_type = other DNA
gtgtagaggaagcagtgaga

SEQ ID NO: 18449 - DNA, 20 bp, synthetic construct
  misc_feature 1..20: note = chemically synthesized
  source 1..20: mol_type = other DNA
tgtagaggaagcagtgagaa

SEQ ID NO: 18450 - DNA, 20 bp, synthetic construct
  misc_feature 1..20: note = chemically synthesized
  source 1..20: mol_type = other DNA
ggaagcagtgagaaaggccc

SEQ ID NO: 18451 - DNA, 20 bp, synthetic construct
  misc_feature 1..20: note = chemically synthesized
  source 1..20: mol_type = other DNA
gaagcagtgagaaaggccct

SEQ ID NO: 18452 - DNA, 20 bp, synthetic construct
  misc_feature 1..20: note = chemically synthesized
  source 1..20: mol_type = other DNA
agcagtgagaaaggccctgg

SEQ ID NO: 18453 - DNA, 20 bp, synthetic construct
  misc_feature 1..20: note = chemically synthesized
  source 1..20: mol_type = other DNA
gaaaggccctgggagctcac

SEQ ID NO: 18454 - DNA, 20 bp, synthetic construct
  misc_feature 1..20: note = chemically synthesized
  source 1..20: mol_type = other DNA
aaaggccctgggagctcact

SEQ ID NO: 18455 - DNA, 20 bp, synthetic construct
  misc_feature 1..20: note = chemically synthesized
  source 1..20: mol_type = other DNA
tgggagctcactgggtccct

SEQ ID NO: 18456 - DNA, 20 bp, synthetic construct
  misc_feature 1..20: note = chemically synthesized
  source 1..20: mol_type = other DNA
gagctcactgggtccctgag

SEQ ID NO: 18457 - DNA, 20 bp, synthetic construct
  misc_feature 1..20: note = chemically synthesized
  source 1..20: mol_type = other DNA
agctcactgggtccctgagc

SEQ ID NO: 18458 - DNA, 20 bp, synthetic construct
  misc_feature 1..20: note = chemically synthesized
  source 1..20: mol_type = other DNA
ctgagcaggccattcctgcc

SEQ ID NO: 18459 - DNA, 20 bp, synthetic construct
  misc_feature 1..20: note = chemically synthesized
  source 1..20: mol_type = other DNA
caggccattcctgcctggca

SEQ ID NO: 18460 - DNA, 20 bp, synthetic construct
  misc_feature 1..20: note = chemically synthesized
  source 1..20: mol_type = other DNA
ccattcctgcctggcatagc

SEQ ID NO: 18461 - DNA, 20 bp, synthetic construct
  misc_feature 1..20: note = chemically synthesized
  source 1..20: mol_type = other DNA
cattcctgcctggcatagcc

SEQ ID NO: 18462 - DNA, 20 bp, synthetic construct
  misc_feature 1..20: note = chemically synthesized
  source 1..20: mol_type = other DNA
ttactaacattgaatgtaaa

SEQ ID NO: 18463 - DNA, 20 bp, synthetic construct
  misc_feature 1..20: note = chemically synthesized
  source 1..20: mol_type = other DNA
ggcctaaatgctccacttaa

SEQ ID NO: 18464 - DNA, 20 bp, synthetic construct
  misc_feature 1..20: note = chemically synthesized
  source 1..20: mol_type = other DNA
gcctaaatgctccacttaaa

SEQ ID NO: 18465 - DNA, 20 bp, synthetic construct
  misc_feature 1..20: note = chemically synthesized
  source 1..20: mol_type = other DNA
cctaaatgctccacttaaaa

SEQ ID NO: 18466 - DNA, 20 bp, synthetic construct
  misc_feature 1..20: note = chemically synthesized
  source 1..20: mol_type = other DNA
ctccacttaaaagggtgaaa

SEQ ID NO: 18467 - DNA, 20 bp, synthetic construct
  misc_feature 1..20: note = chemically synthesized
  source 1..20: mol_type = other DNA
tccacttaaaagggtgaaaa

SEQ ID NO: 18468 - DNA, 20 bp, synthetic construct
  misc_feature 1..20: note = chemically synthesized
  source 1..20: mol_type = other DNA
aaaaaggtatttcatgcaaa

SEQ ID NO: 18469 - DNA, 20 bp, synthetic construct
  misc_feature 1..20: note = chemically synthesized
  source 1..20: mol_type = other DNA
ttcatgcaaatggccaccaa

SEQ ID NO: 18470 - DNA, 20 bp, synthetic construct
  misc_feature 1..20: note = chemically synthesized
  source 1..20: mol_type = other DNA
tgcaaatggccaccaaaagt

SEQ ID NO: 18471 - DNA, 20 bp, synthetic construct
  misc_feature 1..20: note = chemically synthesized
  source 1..20: mol_type = other DNA
aaatggccaccaaaagtgag

SEQ ID NO: 18472 - DNA, 20 bp, synthetic construct
  misc_feature 1..20: note = chemically synthesized
  source 1..20: mol_type = other DNA
aatggccaccaaaagtgagt

SEQ ID NO: 18473 - DNA, 20 bp, synthetic construct
  misc_feature 1..20: note = chemically synthesized
  source 1..20: mol_type = other DNA
agtaggcaaaacaaacttta

SEQ ID NO: 18474 - DNA, 20 bp, synthetic construct
  misc_feature 1..20: note = chemically synthesized
  source 1..20: mol_type = other DNA
caaaacaaactttaaagcaa

SEQ ID NO: 18475 - DNA, 20 bp, synthetic construct
  misc_feature 1..20: note = chemically synthesized
  source 1..20: mol_type = other DNA
aacaaactttaaagcaacag

SEQ ID NO: 18476 - DNA, 20 bp, synthetic construct
  misc_feature 1..20: note = chemically synthesized
  source 1..20: mol_type = other DNA
tttaaagcaacagcagttaa

SEQ ID NO: 18477 - DNA, 20 bp, synthetic construct
  misc_feature 1..20: note = chemically synthesized
  source 1..20: mol_type = other DNA
taaagcaacagcagttaaaa

SEQ ID NO: 18478 - DNA, 20 bp, synthetic construct
  misc_feature 1..20: note = chemically synthesized
  source 1..20: mol_type = other DNA
aacagcagttaaaagagaca

SEQ ID NO: 18479 - DNA, 20 bp, synthetic construct
  misc_feature 1..20: note = chemically synthesized
  source 1..20: mol_type = other DNA
cagcagttaaaagagacaaa

SEQ ID NO: 18480 - DNA, 20 bp, synthetic construct
  misc_feature 1..20: note = chemically synthesized
  source 1..20: mol_type = other DNA
agcagttaaaagagacaaag

SEQ ID NO: 18481 - DNA, 20 bp, synthetic construct
  misc_feature 1..20: note = chemically synthesized
  source 1..20: mol_type = other DNA
gcagttaaaagagacaaaga

SEQ ID NO: 18482 - DNA, 20 bp, synthetic construct
  misc_feature 1..20: note = chemically synthesized
  source 1..20: mol_type = other DNA
caaagagggacattatataa

SEQ ID NO: 18483 - DNA, 20 bp, synthetic construct
  misc_feature 1..20: note = chemically synthesized
  source 1..20: mol_type = other DNA
gggacattatataatggtaa

SEQ ID NO: 18484 - DNA, 20 bp, synthetic construct
  misc_feature 1..20: note = chemically synthesized
  source 1..20: mol_type = other DNA
ggacattatataatggtaaa

SEQ ID NO: 18485 - DNA, 20 bp, synthetic construct
  misc_feature 1..20: note = chemically synthesized
  source 1..20: mol_type = other DNA
tggtaaaaggccttgtccaa

SEQ ID NO: 18486 - DNA, 20 bp, synthetic construct
  misc_feature 1..20: note = chemically synthesized
  source 1..20: mol_type = other DNA
ggtaaaaggccttgtccaac

SEQ ID NO: 18487 - DNA, 20 bp, synthetic construct
  misc_feature 1..20: note = chemically synthesized
  source 1..20: mol_type = other DNA
aacatatatgcacctaacac

SEQ ID NO: 18488 - DNA, 20 bp, synthetic construct
  misc_feature 1..20: note = chemically synthesized
  source 1..20: mol_type = other DNA
catatatgcacctaacactg

SEQ ID NO: 18489 - DNA, 20 bp, synthetic construct
  misc_feature 1..20: note = chemically synthesized
  source 1..20: mol_type = other DNA
cactggagctcccaaattta

SEQ ID NO: 18490 - DNA, 20 bp, synthetic construct
  misc_feature 1..20: note = chemically synthesized
  source 1..20: mol_type = other DNA
atttatagaacaattactaa

SEQ ID NO: 18491 - DNA, 20 bp, synthetic construct
  misc_feature 1..20: note = chemically synthesized
  source 1..20: mol_type = other DNA
gaacaattactaatagacct

SEQ ID NO: 18492 - DNA, 20 bp, synthetic construct
  misc_feature 1..20: note = chemically synthesized
  source 1..20: mol_type = other DNA
tactaatagacctaagaaat

SEQ ID NO: 18493 - DNA, 20 bp, synthetic construct
  misc_feature 1..20: note = chemically synthesized
  source 1..20: mol_type = other DNA
aatagacctaagaaatgaga

SEQ ID NO: 18494 - DNA, 20 bp, synthetic construct
  misc_feature 1..20: note = chemically synthesized
  source 1..20: mol_type = other DNA
gacctaagaaatgagataga

SEQ ID NO: 18495 - DNA, 20 bp, synthetic construct
  misc_feature 1..20: note = chemically synthesized
  source 1..20: mol_type = other DNA
gatagacagcaacacaataa

SEQ ID NO: 18496 - DNA, 20 bp, synthetic construct
  misc_feature 1..20: note = chemically synthesized
  source 1..20: mol_type = other DNA
agacagcaacacaataatag

SEQ ID NO: 18497 - DNA, 20 bp, synthetic construct
  misc_feature 1..20: note = chemically synthesized
  source 1..20: mol_type = other DNA
gacagcaacacaataatagt

SEQ ID NO: 18498 - DNA, 20 bp, synthetic construct
  misc_feature 1..20: note = chemically synthesized
  source 1..20: mol_type = other DNA
acagcaacacaataatagtg

SEQ ID NO: 18499 - DNA, 20 bp, synthetic construct
  misc_feature 1..20: note = chemically synthesized
  source 1..20: mol_type = other DNA
cagcaacacaataatagtgg

SEQ ID NO: 18500 - DNA, 20 bp, synthetic construct
  misc_feature 1..20: note = chemically synthesized
  source 1..20: mol_type = other DNA
ggacttcaatacttcattga

SEQ ID NO: 18501 - DNA, 20 bp, synthetic construct
  misc_feature 1..20: note = chemically synthesized
  source 1..20: mol_type = other DNA
caatacttcattgacagcac

SEQ ID NO: 18502 - DNA, 20 bp, synthetic construct
  misc_feature 1..20: note = chemically synthesized
  source 1..20: mol_type = other DNA
acttcattgacagcactaga

SEQ ID NO: 18503 - DNA, 20 bp, synthetic construct
  misc_feature 1..20: note = chemically synthesized
  source 1..20: mol_type = other DNA
acagcactagacagttcatc

SEQ ID NO: 18504 - DNA, 20 bp, synthetic construct
  misc_feature 1..20: note = chemically synthesized
  source 1..20: mol_type = other DNA
cactagacagttcatcaaga

SEQ ID NO: 18505 - DNA, 20 bp, synthetic construct
  misc_feature 1..20: note = chemically synthesized
  source 1..20: mol_type = other DNA
agacagttcatcaagacaga

SEQ ID NO: 18506 - DNA, 20 bp, synthetic construct
  misc_feature 1..20: note = chemically synthesized
  source 1..20: mol_type = other DNA
gaaagtcaacaaaaaaataa

SEQ ID NO: 18507 - DNA, 20 bp, synthetic construct
  misc_feature 1..20: note = chemically synthesized
  source 1..20: mol_type = other DNA
aatggatttaaattatacct

SEQ ID NO: 18508 - DNA, 20 bp, synthetic construct
  misc_feature 1..20: note = chemically synthesized
  source 1..20: mol_type = other DNA
aaattataccttagaacaaa

SEQ ID NO: 18509 - DNA, 20 bp, synthetic construct
  misc_feature 1..20: note = chemically synthesized
  source 1..20: mol_type = other DNA
cttagaacaaatggacttaa

SEQ ID NO: 18510 - DNA, 20 bp, synthetic construct
  misc_feature 1..20: note = chemically synthesized
  source 1..20: mol_type = other DNA
atggacttaacagttatata

SEQ ID NO: 18511 - DNA, 20 bp, synthetic construct
  misc_feature 1..20: note = chemically synthesized
  source 1..20: mol_type = other DNA
aacatttcatccaataacca

SEQ ID NO: 18512 - DNA, 20 bp, synthetic construct
  misc_feature 1..20: note = chemically synthesized
  source 1..20: mol_type = other DNA
agaacacacattctattcaa

SEQ ID NO: 18513 - DNA, 20 bp, synthetic construct
  misc_feature 1..20: note = chemically synthesized
  source 1..20: mol_type = other DNA
acattctattcaacagcgcg

SEQ ID NO: 18514 - DNA, 20 bp, synthetic construct
  misc_feature 1..20: note = chemically synthesized
  source 1..20: mol_type = other DNA
cagcgcgtggaaatttctcc

SEQ ID NO: 18515 - DNA, 20 bp, synthetic construct
  misc_feature 1..20: note = chemically synthesized
  source 1..20: mol_type = other DNA
agcgcgtggaaatttctcca

SEQ ID NO: 18516 - DNA, 20 bp, synthetic construct
  misc_feature 1..20: note = chemically synthesized
  source 1..20: mol_type = other DNA
gcgtggaaatttctccaagg

SEQ ID NO: 18517 - DNA, 20 bp, synthetic construct
  misc_feature 1..20: note = chemically synthesized
  source 1..20: mol_type = other DNA
ctccaaggtagaccatatga

SEQ ID NO: 18518 - DNA, 20 bp, synthetic construct
  misc_feature 1..20: note = chemically synthesized
  source 1..20: mol_type = other DNA
tccaaggtagaccatatgat

SEQ ID NO: 18519 - DNA, 20 bp, synthetic construct
  misc_feature 1..20: note = chemically synthesized
  source 1..20: mol_type = other DNA
catatgataggccatgaaat

SEQ ID NO: 18520 - DNA, 20 bp, synthetic construct
  misc_feature 1..20: note = chemically synthesized
  source 1..20: mol_type = other DNA
agcctcaataaatttactaa

SEQ ID NO: 18521 - DNA, 20 bp, synthetic construct
  misc_feature 1..20: note = chemically synthesized
  source 1..20: mol_type = other DNA
tttactaacagaccaataac

SEQ ID NO: 18522 - DNA, 20 bp, synthetic construct
  misc_feature 1..20: note = chemically synthesized
  source 1..20: mol_type = other DNA
actaacagaccaataacaag

SEQ ID NO: 18523 - DNA, 20 bp, synthetic construct
  misc_feature 1..20: note = chemically synthesized
  source 1..20: mol_type = other DNA
acagaccaataacaagcagt

SEQ ID NO: 18524 - DNA, 20 bp, synthetic construct
  misc_feature 1..20: note = chemically synthesized
  source 1..20: mol_type = other DNA
aacaagcagtgagatttaat

SEQ ID NO: 18525 - DNA, 20 bp, synthetic construct
  misc_feature 1..20: note = chemically synthesized
  source 1..20: mol_type = other DNA
aaaaattaccaaccaaaaaa

SEQ ID NO: 18526 - DNA, 20 bp, synthetic construct
  misc_feature 1..20: note = chemically synthesized
  source 1..20: mol_type = other DNA
ttaccaaccaaaaaaaagtt

SEQ ID NO: 18527 - DNA, 20 bp, synthetic construct
  misc_feature 1..20: note = chemically synthesized
  source 1..20: mol_type = other DNA
taccaaccaaaaaaaagttc

SEQ ID NO: 18528 - DNA, 20 bp, synthetic construct
  misc_feature 1..20: note = chemically synthesized
  source 1..20: mol_type = other DNA
accaaaaaaaagttcaggac

SEQ ID NO: 18529 - DNA, 20 bp, synthetic construct
  misc_feature 1..20: note = chemically synthesized
  source 1..20: mol_type = other DNA
aaaaaaagttcaggaccaga

SEQ ID NO: 18530 - DNA, 20 bp, synthetic construct
  misc_feature 1..20: note = chemically synthesized
  source 1..20: mol_type = other DNA
aggaccagatggattcacaa

SEQ ID NO: 18531 - DNA, 20 bp, synthetic construct
  misc_feature 1..20: note = chemically synthesized
  source 1..20: mol_type = other DNA
gattcacaacagaattctac

SEQ ID NO: 18532 - DNA, 20 bp, synthetic construct
  misc_feature 1..20: note = chemically synthesized
  source 1..20: mol_type = other DNA
agaattctactagacattca

SEQ ID NO: 18533 - DNA, 20 bp, synthetic construct
  misc_feature 1..20: note = chemically synthesized
  source 1..20: mol_type = other DNA
aattctactagacattcaaa

SEQ ID NO: 18534 - DNA, 20 bp, synthetic construct
  misc_feature 1..20: note = chemically synthesized
  source 1..20: mol_type = other DNA
attctactagacattcaaag

SEQ ID NO: 18535 - DNA, 20 bp, synthetic construct
  misc_feature 1..20: note = chemically synthesized
  source 1..20: mol_type = other DNA
ctagacattcaaagaggaat

SEQ ID NO: 18536 - DNA, 20 bp, synthetic construct
  misc_feature 1..20: note = chemically synthesized
  source 1..20: mol_type = other DNA
tctttttgacactattctac

SEQ ID NO: 18537 - DNA, 20 bp, synthetic construct
  misc_feature 1..20: note = chemically synthesized
  source 1..20: mol_type = other DNA
tttgacactattctacaaga

SEQ ID NO: 18538 - DNA, 20 bp, synthetic construct
  misc_feature 1..20: note = chemically synthesized
  source 1..20: mol_type = other DNA
actattctacaagacagata

SEQ ID NO: 18539 - DNA, 20 bp, synthetic construct
  misc_feature 1..20: note = chemically synthesized
  source 1..20: mol_type = other DNA
attctacaagacagataaag

SEQ ID NO: 18540 - DNA, 20 bp, synthetic construct
  misc_feature 1..20: note = chemically synthesized
  source 1..20: mol_type = other DNA
ttctacaagacagataaaga

SEQ ID NO: 18541 - DNA, 20 bp, synthetic construct
  misc_feature 1..20: note = chemically synthesized
  source 1..20: mol_type = other DNA
ctgccctaattcattctatg

SEQ ID NO: 18542 - DNA, 20 bp, synthetic construct
  misc_feature 1..20: note = chemically synthesized
  source 1..20: mol_type = other DNA
cctaattcattctatgaagc

SEQ ID NO: 18543 - DNA, 20 bp, synthetic construct
  misc_feature 1..20: note = chemically synthesized
  source 1..20: mol_type = other DNA
agccagcatcacaccaaaac

SEQ ID NO: 18544 - DNA, 20 bp, synthetic construct
  misc_feature 1..20: note = chemically synthesized
  source 1..20: mol_type = other DNA
gccagcatcacaccaaaacc

SEQ ID NO: 18545 - DNA, 20 bp, synthetic construct
  misc_feature 1..20: note = chemically synthesized
  source 1..20: mol_type = other DNA
ccagcatcacaccaaaacca

SEQ ID NO: 18546 - DNA, 20 bp, synthetic construct
  misc_feature 1..20: note = chemically synthesized
  source 1..20: mol_type = other DNA
gcatcacaccaaaaccaggg

SEQ ID NO: 18547 - DNA, 20 bp, synthetic construct
  misc_feature 1..20: note = chemically synthesized
  source 1..20: mol_type = other DNA
catcacaccaaaaccaggga

SEQ ID NO: 18548 - DNA, 20 bp, synthetic construct
  misc_feature 1..20: note = chemically synthesized
  source 1..20: mol_type = other DNA
agggaaggacataaccaaaa

SEQ ID NO: 18549 - DNA, 20 bp, synthetic construct
  misc_feature 1..20: note = chemically synthesized
  source 1..20: mol_type = other DNA
ataaccaaaaaagaaaacta

SEQ ID NO: 18550 - DNA, 20 bp, synthetic construct
  misc_feature 1..20: note = chemically synthesized
  source 1..20: mol_type = other DNA
aaaagaaaactacagactga

SEQ ID NO: 18551 - DNA, 20 bp, synthetic construct
  misc_feature 1..20: note = chemically synthesized
  source 1..20: mol_type = other DNA
actgatagccttgatgaaca

SEQ ID NO: 18552 - DNA, 20 bp, synthetic construct
  misc_feature 1..20: note = chemically synthesized
  source 1..20: mol_type = other DNA
taaaatccttaacaaaatac

SEQ ID NO: 18553 - DNA, 20 bp, synthetic construct
  misc_feature 1..20: note = chemically synthesized
  source 1..20: mol_type = other DNA
aaattcaacaacataacaaa

SEQ ID NO: 18554 - DNA, 20 bp, synthetic construct
  misc_feature 1..20: note = chemically synthesized
  source 1..20: mol_type = other DNA
aaagataatccaccatgatc

SEQ ID NO: 18555 - DNA, 20 bp, synthetic construct
  misc_feature 1..20: note = chemically synthesized
  source 1..20: mol_type = other DNA
gataatccaccatgatcaag

SEQ ID NO: 18556 - DNA, 20 bp, synthetic construct
  misc_feature 1..20: note = chemically synthesized
  source 1..20: mol_type = other DNA
ataatccaccatgatcaagc

SEQ ID NO: 18557 - DNA, 20 bp, synthetic construct
  misc_feature 1..20: note = chemically synthesized
  source 1..20: mol_type = other DNA
tgatcaagcaggttccatgc

SEQ ID NO: 18558 - DNA, 20 bp, synthetic construct
  misc_feature 1..20: note = chemically synthesized
  source 1..20: mol_type = other DNA
gatcaagcaggttccatgcc

SEQ ID NO: 18559 - DNA, 20 bp, synthetic construct
  misc_feature 1..20: note = chemically synthesized
  source 1..20: mol_type = other DNA
atcaagcaggttccatgcca

SEQ ID NO: 18560 - DNA, 20 bp, synthetic construct
  misc_feature 1..20: note = chemically synthesized
  source 1..20: mol_type = other DNA
caggttccatgccagggatg

SEQ ID NO: 18561 - DNA, 20 bp, synthetic construct
  misc_feature 1..20: note = chemically synthesized
  source 1..20: mol_type = other DNA
aggttccatgccagggatgc

SEQ ID NO: 18562 - DNA, 20 bp, synthetic construct
  misc_feature 1..20: note = chemically synthesized
  source 1..20: mol_type = other DNA
ggttccatgccagggatgca

SEQ ID NO: 18563 - DNA, 20 bp, synthetic construct
  misc_feature 1..20: note = chemically synthesized
  source 1..20: mol_type = other DNA
ccatgccagggatgcagggt

SEQ ID NO: 18564 - DNA, 20 bp, synthetic construct
  misc_feature 1..20: note = chemically synthesized
  source 1..20: mol_type = other DNA
agggttggtttgacatctgc

SEQ ID NO: 18565 - DNA, 20 bp, synthetic construct
  misc_feature 1..20: note = chemically synthesized
  source 1..20: mol_type = other DNA
tttgacatctgcaagtcaat

SEQ ID NO: 18566 - DNA, 20 bp, synthetic construct
  misc_feature 1..20: note = chemically synthesized
  source 1..20: mol_type = other DNA
agtgtgatacaccacataaa

SEQ ID NO: 18567 - DNA, 20 bp, synthetic construct
  misc_feature 1..20: note = chemically synthesized
  source 1..20: mol_type = other DNA
aaattacatgatcatctcaa

SEQ ID NO: 18568 - DNA, 20 bp, synthetic construct
  misc_feature 1..20: note = chemically synthesized
  source 1..20: mol_type = other DNA
catgatcatctcaatagatg

SEQ ID NO: 18569 - DNA, 20 bp, synthetic construct
  misc_feature 1..20: note = chemically synthesized
  source 1..20: mol_type = other DNA
catctcaatagatgcagaaa

SEQ ID NO: 18570 - DNA, 20 bp, synthetic construct
  misc_feature 1..20: note = chemically synthesized
  source 1..20: mol_type = other DNA
aaaaagcattcaacaaaatc

SEQ ID NO: 18571 - DNA, 20 bp, synthetic construct
  misc_feature 1..20: note = chemically synthesized
  source 1..20: mol_type = other DNA
acatttatgattaaaatgct

SEQ ID NO: 18572 - DNA, 20 bp, synthetic construct
  misc_feature 1..20: note = chemically synthesized
  source 1..20: mol_type = other DNA
attaaaatgctcagcaaaat

SEQ ID NO: 18573 - DNA, 20 bp, synthetic construct
  misc_feature 1..20: note = chemically synthesized
  source 1..20: mol_type = other DNA
gctcagcaaaatcagcatac

SEQ ID NO: 18574 - DNA, 20 bp, synthetic construct
  misc_feature 1..20: note = chemically synthesized
  source 1..20: mol_type = other DNA
tcagcaaaatcagcatacaa

SEQ ID NO: 18575 - DNA, 20 bp, synthetic construct
  misc_feature 1..20: note = chemically synthesized
  source 1..20: mol_type = other DNA
agcatacaagagacatacct

SEQ ID NO: 18576 - DNA, 20 bp, synthetic construct
  misc_feature 1..20: note = chemically synthesized
  source 1..20: mol_type = other DNA
gacatacctcagtgtaataa

SEQ ID NO: 18577 - DNA, 20 bp, synthetic construct
  misc_feature 1..20: note = chemically synthesized
  source 1..20: mol_type = other DNA
agccatctgtgacaaaccca

SEQ ID NO: 18578 - DNA, 20 bp, synthetic construct
  misc_feature 1..20: note = chemically synthesized
  source 1..20: mol_type = other DNA
acagccaacataatattgaa

SEQ ID NO: 18579 - DNA, 20 bp, synthetic construct
  misc_feature 1..20: note = chemically synthesized
  source 1..20: mol_type = other DNA
cagccaacataatattgaat

SEQ ID NO: 18580 - DNA, 20 bp, synthetic construct
  misc_feature 1..20: note = chemically synthesized
  source 1..20: mol_type = other DNA
agccaacataatattgaatg

SEQ ID NO: 18581 - DNA, 20 bp, synthetic construct
  misc_feature 1..20: note = chemically synthesized
  source 1..20: mol_type = other DNA
acataatattgaatggggaa

SEQ ID NO: 18582 - DNA, 20 bp, synthetic construct
  misc_feature 1..20: note = chemically synthesized
  source 1..20: mol_type = other DNA
attgaatggggaaaagttga

SEQ ID NO: 18583 - DNA, 20 bp, synthetic construct
  misc_feature 1..20: note = chemically synthesized
  source 1..20: mol_type = other DNA
aagttgaaagcattccctct

SEQ ID NO: 18584 - DNA, 20 bp, synthetic construct
  misc_feature 1..20: note = chemically synthesized
  source 1..20: mol_type = other DNA
aaagcattccctctgagaac

SEQ ID NO: 18585 - DNA, 20 bp, synthetic construct
  misc_feature 1..20: note = chemically synthesized
  source 1..20: mol_type = other DNA
ttccctctgagaactggaac

SEQ ID NO: 18586 - DNA, 20 bp, synthetic construct
  misc_feature 1..20: note = chemically synthesized
  source 1..20: mol_type = other DNA
tctgagaactggaacaagac

SEQ ID NO: 18587 - DNA, 20 bp, synthetic construct
  misc_feature 1..20: note = chemically synthesized
  source 1..20: mol_type = other DNA
ctgagaactggaacaagaca

SEQ ID NO: 18588 - DNA, 20 bp, synthetic construct
  misc_feature 1..20: note = chemically synthesized
  source 1..20: mol_type = other DNA
ctcaccactcctcttcaaca

SEQ ID NO: 18589 - DNA, 20 bp, synthetic construct
  misc_feature 1..20: note = chemically synthesized
  source 1..20: mol_type = other DNA
actcctcttcaacatagtac

SEQ ID NO: 18590 - DNA, 20 bp, synthetic construct
  misc_feature 1..20: note = chemically synthesized
  source 1..20: mol_type = other DNA
cctcttcaacatagtactgg

SEQ ID NO: 18591 - DNA, 20 bp, synthetic construct
  misc_feature 1..20: note = chemically synthesized
  source 1..20: mol_type = other DNA
caacatagtactggaagtcc

SEQ ID NO: 18592 - DNA, 20 bp, synthetic construct
  misc_feature 1..20: note = chemically synthesized
  source 1..20: mol_type = other DNA
atagtactggaagtcctagc

SEQ ID NO: 18593 - DNA, 20 bp, synthetic construct
  misc_feature 1..20: note = chemically synthesized
  source 1..20: mol_type = other DNA
tagtactggaagtcctagcc

SEQ ID NO: 18594 - DNA, 20 bp, synthetic construct
  misc_feature 1..20: note = chemically synthesized
  source 1..20: mol_type = other DNA
agtactggaagtcctagcca

SEQ ID NO: 18595 - DNA, 20 bp, synthetic construct
  misc_feature 1..20: note = chemically synthesized
  source 1..20: mol_type = other DNA
gaagtcctagccagggcaat

SEQ ID NO: 18596 - DNA, 20 bp, synthetic construct
  misc_feature 1..20: note = chemically synthesized
  source 1..20: mol_type = other DNA
cagggcaatcagacaaaaca

SEQ ID NO: 18597 - DNA, 20 bp, synthetic construct
  misc_feature 1..20: note = chemically synthesized
  source 1..20: mol_type = other DNA
tcagacaaaacaaagaaata

SEQ ID NO: 18598 - DNA, 20 bp, synthetic construct
  misc_feature 1..20: note = chemically synthesized
  source 1..20: mol_type = other DNA
cagacaaaacaaagaaataa

SEQ ID NO: 18599 - DNA, 20 bp, synthetic construct
  misc_feature 1..20: note = chemically synthesized
  source 1..20: mol_type = other DNA
agacaaaacaaagaaataaa

SEQ ID NO: 18600 - DNA, 20 bp, synthetic construct
  misc_feature 1..20: note = chemically synthesized
  source 1..20: mol_type = other DNA
gaaataaagggcattcaaat

SEQ ID NO: 18601 - DNA, 20 bp, synthetic construct
  misc_feature 1..20: note = chemically synthesized
  source 1..20: mol_type = other DNA
aaagggcattcaaatcagta

SEQ ID NO: 18602 - DNA, 20 bp, synthetic construct
  misc_feature 1..20: note = chemically synthesized
  source 1..20: mol_type = other DNA
agggcattcaaatcagtaaa

SEQ ID NO: 18603 - DNA, 20 bp, synthetic construct
  misc_feature 1..20: note = chemically synthesized
  source 1..20: mol_type = other DNA
gggcattcaaatcagtaaag

SEQ ID NO: 18604 - DNA, 20 bp, synthetic construct
  misc_feature 1..20: note = chemically synthesized
  source 1..20: mol_type = other DNA
cattcaaatcagtaaagagg

SEQ ID NO: 18605 - DNA, 20 bp, synthetic construct
  misc_feature 1..20: note = chemically synthesized
  source 1..20: mol_type = other DNA
catttacctttaaaacccta

SEQ ID NO: 18606 - DNA, 20 bp, synthetic construct
  misc_feature 1..20: note = chemically synthesized
  source 1..20: mol_type = other DNA
taaaaccctaaagactcctc

SEQ ID NO: 18607 - DNA, 20 bp, synthetic construct
  misc_feature 1..20: note = chemically synthesized
  source 1..20: mol_type = other DNA
accctaaagactcctccaga

SEQ ID NO: 18608 - DNA, 20 bp, synthetic construct
  misc_feature 1..20: note = chemically synthesized
  source 1..20: mol_type = other DNA
agactcctccagaaagctcc

SEQ ID NO: 18609 - DNA, 20 bp, synthetic construct
  misc_feature 1..20: note = chemically synthesized
  source 1..20: mol_type = other DNA
ctagaactgataaaataatt

SEQ ID NO: 18610 - DNA, 20 bp, synthetic construct
  misc_feature 1..20: note = chemically synthesized
  source 1..20: mol_type = other DNA
actgataaaataattcagca

SEQ ID NO: 18611 - DNA, 20 bp, synthetic construct
  misc_feature 1..20: note = chemically synthesized
  source 1..20: mol_type = other DNA
aaataattcagcaaagtttc

SEQ ID NO: 18612 - DNA, 20 bp, synthetic construct
  misc_feature 1..20: note = chemically synthesized
  source 1..20: mol_type = other DNA
tcagcaaagtttccagatac

SEQ ID NO: 18613 - DNA, 20 bp, synthetic construct
  misc_feature 1..20: note = chemically synthesized
  source 1..20: mol_type = other DNA
caagatgaatgcacacaaat

SEQ ID NO: 18614 - DNA, 20 bp, synthetic construct
  misc_feature 1..20: note = chemically synthesized
  source 1..20: mol_type = other DNA
gtaactcttctatacaccaa

SEQ ID NO: 18615 - DNA, 20 bp, synthetic construct
  misc_feature 1..20: note = chemically synthesized
  source 1..20: mol_type = other DNA
atacaccaacagcaaccaaa

SEQ ID NO: 18616 - DNA, 20 bp, synthetic construct
  misc_feature 1..20: note = chemically synthesized
  source 1..20: mol_type = other DNA
acaccaacagcaaccaaatg

SEQ ID NO: 18617 - DNA, 20 bp, synthetic construct
  misc_feature 1..20: note = chemically synthesized
  source 1..20: mol_type = other DNA
accaaatggagaatcaaatc

SEQ ID NO: 18618 - DNA, 20 bp, synthetic construct
  misc_feature 1..20: note = chemically synthesized
  source 1..20: mol_type = other DNA
gaactcaaccccttgtacaa

SEQ ID NO: 18619 - DNA, 20 bp, synthetic construct
  misc_feature 1..20: note = chemically synthesized
  source 1..20: mol_type = other DNA
ttgtacaatagatgcaaaaa

SEQ ID NO: 18620 - DNA, 20 bp, synthetic construct
  misc_feature 1..20: note = chemically synthesized
  source 1..20: mol_type = other DNA
gccatataaaacgtactctc

SEQ ID NO: 18621 - DNA, 20 bp, synthetic construct
  misc_feature 1..20: note = chemically synthesized
  source 1..20: mol_type = other DNA
tataaaacgtactctcaaga

SEQ ID NO: 18622 - DNA, 20 bp, synthetic construct
  misc_feature 1..20: note = chemically synthesized
  source 1..20: mol_type = other DNA
cgtactctcaagatggatta

SEQ ID NO: 18623 - DNA, 20 bp, synthetic construct
  misc_feature 1..20: note = chemically synthesized
  source 1..20: mol_type = other DNA
taaaactataaaactactaa

SEQ ID NO: 18624 - DNA, 20 bp, synthetic construct
  misc_feature 1..20: note = chemically synthesized
  source 1..20: mol_type = other DNA
aaactactaaaagaaaacat

SEQ ID NO: 18625 - DNA, 20 bp, synthetic construct
  misc_feature 1..20: note = chemically synthesized
  source 1..20: mol_type = other DNA
aactactaaaagaaaacata

SEQ ID NO: 18626 - DNA, 20 bp, synthetic construct
  misc_feature 1..20: note = chemically synthesized
  source 1..20: mol_type = other DNA
actactaaaagaaaacataa

SEQ ID NO: 18627 - DNA, 20 bp, synthetic construct
  misc_feature 1..20: note = chemically synthesized
  source 1..20: mol_type = other DNA
tactaaaagaaaacataagg

SEQ ID NO: 18628 - DNA, 20 bp, synthetic construct
  misc_feature 1..20: note = chemically synthesized
  source 1..20: mol_type = other DNA
aaacataagggagacacttc

SEQ ID NO: 18629 - DNA, 20 bp, synthetic construct
  misc_feature 1..20: note = chemically synthesized
  source 1..20: mol_type = other DNA
aagggagacacttcaagaca

SEQ ID NO: 18630 - DNA, 20 bp, synthetic construct
  misc_feature 1..20: note = chemically synthesized
  source 1..20: mol_type = other DNA
gacacttcaagacatggctt

SEQ ID NO: 18631 - DNA, 20 bp, synthetic construct
  misc_feature 1..20: note = chemically synthesized
  source 1..20: mol_type = other DNA
acacttcaagacatggcttt

SEQ ID NO: 18632 - DNA, 20 bp, synthetic construct
  misc_feature 1..20: note = chemically synthesized
  source 1..20: mol_type = other DNA
tcaagacatggctttgggca

SEQ ID NO: 18633 - DNA, 20 bp, synthetic construct
  misc_feature 1..20: note = chemically synthesized
  source 1..20: mol_type = other DNA
ggctttgggcaaagatttta

SEQ ID NO: 18634 - DNA, 20 bp, synthetic construct
  misc_feature 1..20: note = chemically synthesized
  source 1..20: mol_type = other DNA
tgggcaaagattttatggcc

SEQ ID NO: 18635 - DNA, 20 bp, synthetic construct
  misc_feature 1..20: note = chemically synthesized
  source 1..20: mol_type = other DNA
ttttatggccaagacctcaa

SEQ ID NO: 18636 - DNA, 20 bp, synthetic construct
  misc_feature 1..20: note = chemically synthesized
  source 1..20: mol_type = other DNA
tggccaagacctcaaaagca

SEQ ID NO: 18637 - DNA, 20 bp, synthetic construct
  misc_feature 1..20: note = chemically synthesized
  source 1..20: mol_type = other DNA
ggccaagacctcaaaagcac

SEQ ID NO: 18638 - DNA, 20 bp, synthetic construct
  misc_feature 1..20: note = chemically synthesized
  source 1..20: mol_type = other DNA
ctcaaaagcacaggcaacaa

SEQ ID NO: 18639 - DNA, 20 bp, synthetic construct
  misc_feature 1..20: note = chemically synthesized
  source 1..20: mol_type = other DNA
acaggcaacaaaagcaaaaa

SEQ ID NO: 18640 - DNA, 20 bp, synthetic construct
  misc_feature 1..20: note = chemically synthesized
  source 1..20: mol_type = other DNA
caaaagcaaaaatagacaaa

SEQ ID NO: 18641 - DNA, 20 bp, synthetic construct
  misc_feature 1..20: note = chemically synthesized
  source 1..20: mol_type = other DNA
aaaagcaaaaatagacaaat

SEQ ID NO: 18642 - DNA, 20 bp, synthetic construct
  misc_feature 1..20: note = chemically synthesized
  source 1..20: mol_type = other DNA
tagacaaatgggactatatt

SEQ ID NO: 18643 - DNA, 20 bp, synthetic construct
  misc_feature 1..20: note = chemically synthesized
  source 1..20: mol_type = other DNA
taagctaaaatacatctgca

SEQ ID NO: 18644 - DNA, 20 bp, synthetic construct
  misc_feature 1..20: note = chemically synthesized
  source 1..20: mol_type = other DNA
taaaatacatctgcacagta

SEQ ID NO: 18645 - DNA, 20 bp, synthetic construct
  misc_feature 1..20: note = chemically synthesized
  source 1..20: mol_type = other DNA
aaaatacatctgcacagtaa

SEQ ID NO: 18646 - DNA, 20 bp, synthetic construct
  misc_feature 1..20: note = chemically synthesized
  source 1..20: mol_type = other DNA
agtaaaggaaacaatcaaca

SEQ ID NO: 18647 - DNA, 20 bp, synthetic construct
  misc_feature 1..20: note = chemically synthesized
  source 1..20: mol_type = other DNA
aggaaacaatcaacacagtg

SEQ ID NO: 18648 - DNA, 20 bp, synthetic construct
  misc_feature 1..20: note = chemically synthesized
  source 1..20: mol_type = other DNA
gaaacaatcaacacagtgaa

SEQ ID NO: 18649 - DNA, 20 bp, synthetic construct
  misc_feature 1..20: note = chemically synthesized
  source 1..20: mol_type = other DNA
aatcaacacagtgaagagac

SEQ ID NO: 18650 - DNA, 20 bp, synthetic construct
  misc_feature 1..20: note = chemically synthesized
  source 1..20: mol_type = other DNA
agagacaagctgttgaatgc

SEQ ID NO: 18651 - DNA, 20 bp, synthetic construct
  misc_feature 1..20: note = chemically synthesized
  source 1..20: mol_type = other DNA
aatatttgcatacatttgac

SEQ ID NO: 18652 - DNA, 20 bp, synthetic construct
  misc_feature 1..20: note = chemically synthesized
  source 1..20: mol_type = other DNA
atatttgcatacatttgaca

SEQ ID NO: 18653 - DNA, 20 bp, synthetic construct
  misc_feature 1..20: note = chemically synthesized
  source 1..20: mol_type = other DNA
tttgacaaggaattaatctc

SEQ ID NO: 18654 - DNA, 20 bp, synthetic construct
  misc_feature 1..20: note = chemically synthesized
  source 1..20: mol_type = other DNA
aattaatctccagaatatat

SEQ ID NO: 18655 - DNA, 20 bp, synthetic construct
  misc_feature 1..20: note = chemically synthesized
  source 1..20: mol_type = other DNA
aagaaactcaaacaactcaa

SEQ ID NO: 18656 - DNA, 20 bp, synthetic construct
  misc_feature 1..20: note = chemically synthesized
  source 1..20: mol_type = other DNA
aaactcaaacaactcaacag

SEQ ID NO: 18657 - DNA, 20 bp, synthetic construct
  misc_feature 1..20: note = chemically synthesized
  source 1..20: mol_type = other DNA
aaataatctcattaaaaaat

SEQ ID NO: 18658 - DNA, 20 bp, synthetic construct
  misc_feature 1..20: note = chemically synthesized
  source 1..20: mol_type = other DNA
atctcattaaaaaattggca

SEQ ID NO: 18659 - DNA, 20 bp, synthetic construct
  misc_feature 1..20: note = chemically synthesized
  source 1..20: mol_type = other DNA
tctcattaaaaaattggcaa

SEQ ID NO: 18660 - DNA, 20 bp, synthetic construct
  misc_feature 1..20: note = chemically synthesized
  source 1..20: mol_type = other DNA
tggcaaaggatatttttcaa

SEQ ID NO: 18661 - DNA, 20 bp, synthetic construct
  misc_feature 1..20: note = chemically synthesized
  source 1..20: mol_type = other DNA
caaaggatatttttcaaaag

SEQ ID NO: 18662 - DNA, 20 bp, synthetic construct
  misc_feature 1..20: note = chemically synthesized
  source 1..20: mol_type = other DNA
gaagacatacaaatgcacaa

SEQ ID NO: 18663 - DNA, 20 bp, synthetic construct
  misc_feature 1..20: note = chemically synthesized
  source 1..20: mol_type = other DNA
aagacatacaaatgcacaat

SEQ ID NO: 18664 - DNA, 20 bp, synthetic construct
  misc_feature 1..20: note = chemically synthesized
  source 1..20: mol_type = other DNA
atacaaatgcacaatgggta

SEQ ID NO: 18665 - DNA, 20 bp, synthetic construct
  misc_feature 1..20: note = chemically synthesized
  source 1..20: mol_type = other DNA
tacaaatgcacaatgggtat

SEQ ID NO: 18666 - DNA, 20 bp, synthetic construct
  misc_feature 1..20: note = chemically synthesized
  source 1..20: mol_type = other DNA
acaaatgcacaatgggtatg

SEQ ID NO: 18667 - DNA, 20 bp, synthetic construct
  misc_feature 1..20: note = chemically synthesized
  source 1..20: mol_type = other DNA
tgctcaacattactaatcat

SEQ ID NO: 18668 - DNA, 20 bp, synthetic construct
  misc_feature 1..20: note = chemically synthesized
  source 1..20: mol_type = other DNA
ctcaacattactaatcatca

SEQ ID NO: 18669 - DNA, 20 bp, synthetic construct
  misc_feature 1..20: note = chemically synthesized
  source 1..20: mol_type = other DNA
atgcaaatcaaaaccacaat

SEQ ID NO: 18670 - DNA, 20 bp, synthetic construct
  misc_feature 1..20: note = chemically synthesized
  source 1..20: mol_type = other DNA
aatgagatatcatcttatgc

SEQ ID NO: 18671 - DNA, 20 bp, synthetic construct
  misc_feature 1..20: note = chemically synthesized
  source 1..20: mol_type = other DNA
agatatcatcttatgccagt

SEQ ID NO: 18672 - DNA, 20 bp, synthetic construct
  misc_feature 1..20: note = chemically synthesized
  source 1..20: mol_type = other DNA
aataaataaataacacatgc

SEQ ID NO: 18673 - DNA, 20 bp, synthetic construct
  misc_feature 1..20: note = chemically synthesized
  source 1..20: mol_type = other DNA
aataaataacacatgctggc

SEQ ID NO: 18674 - DNA, 20 bp, synthetic construct
  misc_feature 1..20: note = chemically synthesized
  source 1..20: mol_type = other DNA
ataaataacacatgctggca

SEQ ID NO: 18675 - DNA, 20 bp, synthetic construct
  misc_feature 1..20: note = chemically synthesized
  source 1..20: mol_type = other DNA
cacatgctggcaaggatgtg

SEQ ID NO: 18676 - DNA, 20 bp, synthetic construct
  misc_feature 1..20: note = chemically synthesized
  source 1..20: mol_type = other DNA
acatgctggcaaggatgtga

SEQ ID NO: 18677 - DNA, 20 bp, synthetic construct
  misc_feature 1..20: note = chemically synthesized
  source 1..20: mol_type = other DNA
ctggcaaggatgtgaaggaa

SEQ ID NO: 18678 - DNA, 20 bp, synthetic construct
  misc_feature 1..20: note = chemically synthesized
  source 1..20: mol_type = other DNA
tggcaaggatgtgaaggaaa

SEQ ID NO: 18679 - DNA, 20 bp, synthetic construct
  misc_feature 1..20: note = chemically synthesized
  source 1..20: mol_type = other DNA
tgtgaaggaaaaggcactcg

SEQ ID NO: 18680 - DNA, 20 bp, synthetic construct
  misc_feature 1..20: note = chemically synthesized
  source 1..20: mol_type = other DNA
gtgaaggaaaaggcactcgt

SEQ ID NO: 18681 - DNA, 20 bp, synthetic construct
  misc_feature 1..20: note = chemically synthesized
  source 1..20: mol_type = other DNA
aaggcactcgtaggcactat

SEQ ID NO: 18682 - DNA, 20 bp, synthetic construct
  misc_feature 1..20: note = chemically synthesized
  source 1..20: mol_type = other DNA
cactcgtaggcactattggt

SEQ ID NO: 18683 - DNA, 20 bp, synthetic construct
  misc_feature 1..20: note = chemically synthesized
  source 1..20: mol_type = other DNA
ctattggtaagcatgcaaat

SEQ ID NO: 18684 - DNA, 20 bp, synthetic construct
  misc_feature 1..20: note = chemically synthesized
  source 1..20: mol_type = other DNA
ggtaagcatgcaaattagta

SEQ ID NO: 18685 - DNA, 20 bp, synthetic construct
  misc_feature 1..20: note = chemically synthesized
  source 1..20: mol_type = other DNA
gcaaattagtatagccacta

SEQ ID NO: 18686 - DNA, 20 bp, synthetic construct
  misc_feature 1..20: note = chemically synthesized
  source 1..20: mol_type = other DNA
ccactatggaaaacaatatg

SEQ ID NO: 18687 - DNA, 20 bp, synthetic construct
  misc_feature 1..20: note = chemically synthesized
  source 1..20: mol_type = other DNA
caatatgtagatttaccaaa

SEQ ID NO: 18688 - DNA, 20 bp, synthetic construct
  misc_feature 1..20: note = chemically synthesized
  source 1..20: mol_type = other DNA
gctaaaaattgaactatcat

SEQ ID NO: 18689 - DNA, 20 bp, synthetic construct
  misc_feature 1..20: note = chemically synthesized
  source 1..20: mol_type = other DNA
aattgaactatcataagatc

SEQ ID NO: 18690 - DNA, 20 bp, synthetic construct
  misc_feature 1..20: note = chemically synthesized
  source 1..20: mol_type = other DNA
agatccagcaatcttattac

SEQ ID NO: 18691 - DNA, 20 bp, synthetic construct
  misc_feature 1..20: note = chemically synthesized
  source 1..20: mol_type = other DNA
gatccagcaatcttattact

SEQ ID NO: 18692 - DNA, 20 bp, synthetic construct
  misc_feature 1..20: note = chemically synthesized
  source 1..20: mol_type = other DNA
tattactgggtatttatcca

SEQ ID NO: 18693 - DNA, 20 bp, synthetic construct
  misc_feature 1..20: note = chemically synthesized
  source 1..20: mol_type = other DNA
attactgggtatttatccaa

SEQ ID NO: 18694 - DNA, 20 bp, synthetic construct
  misc_feature 1..20: note = chemically synthesized
  source 1..20: mol_type = other DNA
tgggtatttatccaaaggaa

SEQ ID NO: 18695 - DNA, 20 bp, synthetic construct
  misc_feature 1..20: note = chemically synthesized
  source 1..20: mol_type = other DNA
ttatccaaaggaaaagaatt

SEQ ID NO: 18696 - DNA, 20 bp, synthetic construct
  misc_feature 1..20: note = chemically synthesized
  source 1..20: mol_type = other DNA
aaagaattcagaataataaa

SEQ ID NO: 18697 - DNA, 20 bp, synthetic construct
  misc_feature 1..20: note = chemically synthesized
  source 1..20: mol_type = other DNA
tcagaataataaacagatac

SEQ ID NO: 18698 - DNA, 20 bp, synthetic construct
  misc_feature 1..20: note = chemically synthesized
  source 1..20: mol_type = other DNA
tggtaccacactgtttattg

SEQ ID NO: 18699 - DNA, 20 bp, synthetic construct
  misc_feature 1..20: note = chemically synthesized
  source 1..20: mol_type = other DNA
tattgcagcacgattcacat

SEQ ID NO: 18700 - DNA, 20 bp, synthetic construct
  misc_feature 1..20: note = chemically synthesized
  source 1..20: mol_type = other DNA
cagcacgattcacattagca

SEQ ID NO: 18701 - DNA, 20 bp, synthetic construct
  misc_feature 1..20: note = chemically synthesized
  source 1..20: mol_type = other DNA
gattcacattagcaaagata

SEQ ID NO: 18702 - DNA, 20 bp, synthetic construct
  misc_feature 1..20: note = chemically synthesized
  source 1..20: mol_type = other DNA
caaagatatggaatcaacct

SEQ ID NO: 18703 - DNA, 20 bp, synthetic construct
  misc_feature 1..20: note = chemically synthesized
  source 1..20: mol_type = other DNA
tcaacctaagtgtccatcaa

SEQ ID NO: 18704 - DNA, 20 bp, synthetic construct
  misc_feature 1..20: note = chemically synthesized
  source 1..20: mol_type = other DNA
tgtccatcaatggatgaatg

SEQ ID NO: 18705 - DNA, 20 bp, synthetic construct
  misc_feature 1..20: note = chemically synthesized
  source 1..20: mol_type = other DNA
atggatgaatgaagaaaatg

SEQ ID NO: 18706 - DNA, 20 bp, synthetic construct
  misc_feature 1..20: note = chemically synthesized
  source 1..20: mol_type = other DNA
atataaaatcatttcatttg

SEQ ID NO: 18707 - DNA, 20 bp, synthetic construct
  misc_feature 1..20: note = chemically synthesized
  source 1..20: mol_type = other DNA
tcatttcatttgcagcaaca

SEQ ID NO: 18708 - DNA, 20 bp, synthetic construct
  misc_feature 1..20: note = chemically synthesized
  source 1..20: mol_type = other DNA
tgcagcaacatggatgaaac

SEQ ID NO: 18709 - DNA, 20 bp, synthetic construct
  misc_feature 1..20: note = chemically synthesized
  source 1..20: mol_type = other DNA
agcaacatggatgaaactgg

SEQ ID NO: 18710 - DNA, 20 bp, synthetic construct
  misc_feature 1..20: note = chemically synthesized
  source 1..20: mol_type = other DNA
gtcattatgttaaacgaaat

SEQ ID NO: 18711 - DNA, 20 bp, synthetic construct
  misc_feature 1..20: note = chemically synthesized
  source 1..20: mol_type = other DNA
ttatgttaaacgaaataagc

SEQ ID NO: 18712 - DNA, 20 bp, synthetic construct
  misc_feature 1..20: note = chemically synthesized
  source 1..20: mol_type = other DNA
tatgttaaacgaaataagcc

SEQ ID NO: 18713 - DNA, 20 bp, synthetic construct
  misc_feature 1..20: note = chemically synthesized
  source 1..20: mol_type = other DNA
taaacgaaataagccaggca

SEQ ID NO: 18714 - DNA, 20 bp, synthetic construct
  misc_feature 1..20: note = chemically synthesized
  source 1..20: mol_type = other DNA
cgaaataagccaggcataga

SEQ ID NO: 18715 - DNA, 20 bp, synthetic construct
  misc_feature 1..20: note = chemically synthesized
  source 1..20: mol_type = other DNA
tgcatgttctcactgatatg

SEQ ID NO: 18716 - DNA, 20 bp, synthetic construct
  misc_feature 1..20: note = chemically synthesized
  source 1..20: mol_type = other DNA
gcatgttctcactgatatgt

SEQ ID NO: 18717 - DNA, 20 bp, synthetic construct
  misc_feature 1..20: note = chemically synthesized
  source 1..20: mol_type = other DNA
atgttctcactgatatgtgg

SEQ ID NO: 18718 - DNA, 20 bp, synthetic construct
  misc_feature 1..20: note = chemically synthesized
  source 1..20: mol_type = other DNA
ctgatatgtgggagctaaaa

SEQ ID NO: 18719 - DNA, 20 bp, synthetic construct
  misc_feature 1..20: note = chemically synthesized
  source 1..20: mol_type = other DNA
ctaaaaaagttaatatcatg

SEQ ID NO: 18720 - DNA, 20 bp, synthetic construct
  misc_feature 1..20: note = chemically synthesized
  source 1..20: mol_type = other DNA
taaaaaagttaatatcatgt

SEQ ID NO: 18721 - DNA, 20 bp, synthetic construct
  misc_feature 1..20: note = chemically synthesized
  source 1..20: mol_type = other DNA
aaaagttaatatcatgtagg

SEQ ID NO: 18722 - DNA, 20 bp, synthetic construct
  misc_feature 1..20: note = chemically synthesized
  source 1..20: mol_type = other DNA
aagttaatatcatgtaggta

SEQ ID NO: 18723 - DNA, 20 bp, synthetic construct
  misc_feature 1..20: note = chemically synthesized
  source 1..20: mol_type = other DNA
gttaatatcatgtaggtaga

SEQ ID NO: 18724 - DNA, 20 bp, synthetic construct
  misc_feature 1..20: note = chemically synthesized
  source 1..20: mol_type = other DNA
aatatcatgtaggtagagag

SEQ ID NO: 18725 - DNA, 20 bp, synthetic construct
  misc_feature 1..20: note = chemically synthesized
  source 1..20: mol_type = other DNA
gtaggtagagagtagaatga

SEQ ID NO: 18726 - DNA, 20 bp, synthetic construct
  misc_feature 1..20: note = chemically synthesized
  source 1..20: mol_type = other DNA
gagagtagaatgacagaaac

SEQ ID NO: 18727 - DNA, 20 bp, synthetic construct
  misc_feature 1..20: note = chemically synthesized
  source 1..20: mol_type = other DNA
gagtagaatgacagaaacca

SEQ ID NO: 18728 - DNA, 20 bp, synthetic construct
  misc_feature 1..20: note = chemically synthesized
  source 1..20: mol_type = other DNA
agtagaatgacagaaaccag

SEQ ID NO: 18729 - DNA, 20 bp, synthetic construct
  misc_feature 1..20: note = chemically synthesized
  source 1..20: mol_type = other DNA
agaatgacagaaaccagagg

SEQ ID NO: 18730 - DNA, 20 bp, synthetic construct
  misc_feature 1..20: note = chemically synthesized
  source 1..20: mol_type = other DNA
aatgacagaaaccagaggta

SEQ ID NO: 18731 - DNA, 20 bp, synthetic construct
  misc_feature 1..20: note = chemically synthesized
  source 1..20: mol_type = other DNA
acagaaaccagaggtagaga

SEQ ID NO: 18732 - DNA, 20 bp, synthetic construct
  misc_feature 1..20: note = chemically synthesized
  source 1..20: mol_type = other DNA
cagaaaccagaggtagagaa

SEQ ID NO: 18733 - DNA, 20 bp, synthetic construct
  misc_feature 1..20: note = chemically synthesized
  source 1..20: mol_type = other DNA
agagaaaggtgtgtacgtta

SEQ ID NO: 18734 - DNA, 20 bp, synthetic construct
  misc_feature 1..20: note = chemically synthesized
  source 1..20: mol_type = other DNA
gagaaaggtgtgtacgttat

SEQ ID NO: 18735 - DNA, 20 bp, synthetic construct
  misc_feature 1..20: note = chemically synthesized
  source 1..20: mol_type = other DNA
gaaaggtgtgtacgttatgg

SEQ ID NO: 18736 - DNA, 20 bp, synthetic construct
  misc_feature 1..20: note = chemically synthesized
  source 1..20: mol_type = other DNA
aaaggtgtgtacgttatggg

SEQ ID NO: 18737 - DNA, 20 bp, synthetic construct
  misc_feature 1..20: note = chemically synthesized
  source 1..20: mol_type = other DNA
ggtgtgtacgttatgggagg

SEQ ID NO: 18738 - DNA, 20 bp, synthetic construct
  misc_feature 1..20: note = chemically synthesized
  source 1..20: mol_type = other DNA
gtgtgtacgttatgggagga

SEQ ID NO: 18739 - DNA, 20 bp, synthetic construct
  misc_feature 1..20: note = chemically synthesized
  source 1..20: mol_type = other DNA
tgtgtacgttatgggaggaa

SEQ ID NO: 18740 - DNA, 20 bp, synthetic construct
  misc_feature 1..20: note = chemically synthesized
  source 1..20: mol_type = other DNA
tgtacgttatgggaggaagg

SEQ ID NO: 18741 - DNA, 20 bp, synthetic construct
  misc_feature 1..20: note = chemically synthesized
  source 1..20: mol_type = other DNA
ttatgggaggaagggagacg

SEQ ID NO: 18742 - DNA, 20 bp, synthetic construct
  misc_feature 1..20: note = chemically synthesized
  source 1..20: mol_type = other DNA
atgggaggaagggagacgaa

SEQ ID NO: 18743 - DNA, 20 bp, synthetic construct
  misc_feature 1..20: note = chemically synthesized
  source 1..20: mol_type = other DNA
ggaggaagggagacgaagag

SEQ ID NO: 18744 - DNA, 20 bp, synthetic construct
  misc_feature 1..20: note = chemically synthesized
  source 1..20: mol_type = other DNA
gaagggagacgaagagaagt

SEQ ID NO: 18745 - DNA, 20 bp, synthetic construct
  misc_feature 1..20: note = chemically synthesized
  source 1..20: mol_type = other DNA
gacgaagagaagttggttaa

SEQ ID NO: 18746 - DNA, 20 bp, synthetic construct
  misc_feature 1..20: note = chemically synthesized
  source 1..20: mol_type = other DNA
gagaagttggttaatggaaa

SEQ ID NO: 18747 - DNA, 20 bp, synthetic construct
  misc_feature 1..20: note = chemically synthesized
  source 1..20: mol_type = other DNA
agaagttggttaatggaaac

SEQ ID NO: 18748 - DNA, 20 bp, synthetic construct
  misc_feature 1..20: note = chemically synthesized
  source 1..20: mol_type = other DNA
agttggttaatggaaacagg

SEQ ID NO: 18749 - DNA, 20 bp, synthetic construct
  misc_feature 1..20: note = chemically synthesized
  source 1..20: mol_type = other DNA
ggttaatggaaacaggcagt

SEQ ID NO: 18750 - DNA, 20 bp, synthetic construct
  misc_feature 1..20: note = chemically synthesized
  source 1..20: mol_type = other DNA
aatggaaacaggcagttaga

SEQ ID NO: 18751 - DNA, 20 bp, synthetic construct
  misc_feature 1..20: note = chemically synthesized
  source 1..20: mol_type = other DNA
ggaaacaggcagttagatag

SEQ ID NO: 18752 - DNA, 20 bp, synthetic construct
  misc_feature 1..20: note = chemically synthesized
  source 1..20: mol_type = other DNA
gaaacaggcagttagataga

SEQ ID NO: 18753 - DNA, 20 bp, synthetic construct
  misc_feature 1..20: note = chemically synthesized
  source 1..20: mol_type = other DNA
gaatatgttctgatgttcaa

SEQ ID NO: 18754 - DNA, 20 bp, synthetic construct
  misc_feature 1..20: note = chemically synthesized
  source 1..20: mol_type = other DNA
tgttctgatgttcaatagca

SEQ ID NO: 18755 - DNA, 20 bp, synthetic construct
  misc_feature 1..20: note = chemically synthesized
  source 1..20: mol_type = other DNA
tctgatgttcaatagcaaag

SEQ ID NO: 18756 - DNA, 20 bp, synthetic construct
  misc_feature 1..20: note = chemically synthesized
  source 1..20: mol_type = other DNA
ctgatgttcaatagcaaagt

SEQ ID NO: 18757 - DNA, 20 bp, synthetic construct
  misc_feature 1..20: note = chemically synthesized
  source 1..20: mol_type = other DNA
tgatgttcaatagcaaagta

SEQ ID NO: 18758 - DNA, 20 bp, synthetic construct
  misc_feature 1..20: note = chemically synthesized
  source 1..20: mol_type = other DNA
atagcaaagtagggtgatta

SEQ ID NO: 18759 - DNA, 20 bp, synthetic construct
  misc_feature 1..20: note = chemically synthesized
  source 1..20: mol_type = other DNA
atatattgtatatttcaaaa

SEQ ID NO: 18760 - DNA, 20 bp, synthetic construct
  misc_feature 1..20: note = chemically synthesized
  source 1..20: mol_type = other DNA
tattgtatatttcaaaatag

SEQ ID NO: 18761 - DNA, 20 bp, synthetic construct
  misc_feature 1..20: note = chemically synthesized
  source 1..20: mol_type = other DNA
tgtatatttcaaaatagtag

SEQ ID NO: 18762 - DNA, 20 bp, synthetic construct
  misc_feature 1..20: note = chemically synthesized
  source 1..20: mol_type = other DNA
tatttcaaaatagtagaaga

SEQ ID NO: 18763 - DNA, 20 bp, synthetic construct
  misc_feature 1..20: note = chemically synthesized
  source 1..20: mol_type = other DNA
atttcaaaatagtagaagaa

SEQ ID NO: 18764 - DNA, 20 bp, synthetic construct
  misc_feature 1..20: note = chemically synthesized
  source 1..20: mol_type = other DNA
cttgaaatgttcctaacaca

SEQ ID NO: 18765 - DNA, 20 bp, synthetic construct
  misc_feature 1..20: note = chemically synthesized
  source 1..20: mol_type = other DNA
catagaaacgataaatactt

SEQ ID NO: 18766 - DNA, 20 bp, synthetic construct
  misc_feature 1..20: note = chemically synthesized
  source 1..20: mol_type = other DNA
atagaaacgataaatacttg

SEQ ID NO: 18767 - DNA, 20 bp, synthetic construct
  misc_feature 1..20: note = chemically synthesized
  source 1..20: mol_type = other DNA
aacacgtcatatatcaataa

SEQ ID NO: 18768 - DNA, 20 bp, synthetic construct
  misc_feature 1..20: note = chemically synthesized
  source 1..20: mol_type = other DNA
cgtcatatatcaataaaaga

SEQ ID NO: 18769 - DNA, 20 bp, synthetic construct
  misc_feature 1..20: note = chemically synthesized
  source 1..20: mol_type = other DNA
aaagaaagtcgatctcatat

SEQ ID NO: 18770 - DNA, 20 bp, synthetic construct
  misc_feature 1..20: note = chemically synthesized
  source 1..20: mol_type = other DNA
aagtcgatctcatattggtt

SEQ ID NO: 18771 - DNA, 20 bp, synthetic construct
  misc_feature 1..20: note = chemically synthesized
  source 1..20: mol_type = other DNA
agtcgatctcatattggttg

SEQ ID NO: 18772 - DNA, 20 bp, synthetic construct
  misc_feature 1..20: note = chemically synthesized
  source 1..20: mol_type = other DNA
attggttgaggcctgattgt

SEQ ID NO: 18773 - DNA, 20 bp, synthetic construct
  misc_feature 1..20: note = chemically synthesized
  source 1..20: mol_type = other DNA
taagtaaatctttgtccctc

SEQ ID NO: 18774 - DNA, 20 bp, synthetic construct
  misc_feature 1..20: note = chemically synthesized
  source 1..20: mol_type = other DNA
tccctgtactgtcttgctgt

SEQ ID NO: 18775 - DNA, 20 bp, synthetic construct
  misc_feature 1..20: note = chemically synthesized
  source 1..20: mol_type = other DNA
ccctgtactgtcttgctgtg

SEQ ID NO: 18776 - DNA, 20 bp, synthetic construct
  misc_feature 1..20: note = chemically synthesized
  source 1..20: mol_type = other DNA
ctgtactgtcttgctgtgag

SEQ ID NO: 18777 - DNA, 20 bp, synthetic construct
  misc_feature 1..20: note = chemically synthesized
  source 1..20: mol_type = other DNA
cttatattccaacaccattt

SEQ ID NO: 18778 - DNA, 20 bp, synthetic construct
  misc_feature 1..20: note = chemically synthesized
  source 1..20: mol_type = other DNA
tcctccccatatttttacct

SEQ ID NO: 18779 - DNA, 20 bp, synthetic construct
  misc_feature 1..20: note = chemically synthesized
  source 1..20: mol_type = other DNA
ctcggtttttactgtttata

SEQ ID NO: 18780 - DNA, 20 bp, synthetic construct
  misc_feature 1..20: note = chemically synthesized
  source 1..20: mol_type = other DNA
atatagcacactttgtgcta

SEQ ID NO: 18781 - DNA, 20 bp, synthetic construct
  misc_feature 1..20: note = chemically synthesized
  source 1..20: mol_type = other DNA
ctttgtgctatagtttacct

SEQ ID NO: 18782 - DNA, 20 bp, synthetic construct
  misc_feature 1..20: note = chemically synthesized
  source 1..20: mol_type = other DNA
ctcagtttttactatttata

SEQ ID NO: 18783 - DNA, 20 bp, synthetic construct
  misc_feature 1..20: note = chemically synthesized
  source 1..20: mol_type = other DNA
ccccaaacttctctcttaac

SEQ ID NO: 18784 - DNA, 20 bp, synthetic construct
  misc_feature 1..20: note = chemically synthesized
  source 1..20: mol_type = other DNA
aaacttctctcttaacaagc

SEQ ID NO: 18785 - DNA, 20 bp, synthetic construct
  misc_feature 1..20: note = chemically synthesized
  source 1..20: mol_type = other DNA
ctcttaacaagctagaatat

SEQ ID NO: 18786 - DNA, 20 bp, synthetic construct
  misc_feature 1..20: note = chemically synthesized
  source 1..20: mol_type = other DNA
gctagaatataagtgaatgc

SEQ ID NO: 18787 - DNA, 20 bp, synthetic construct
  misc_feature 1..20: note = chemically synthesized
  source 1..20: mol_type = other DNA
tagaatataagtgaatgcaa

SEQ ID NO: 18788 - DNA, 20 bp, synthetic construct
  misc_feature 1..20: note = chemically synthesized
  source 1..20: mol_type = other DNA
tataagtgaatgcaagagca

SEQ ID NO: 18789 - DNA, 20 bp, synthetic construct
  misc_feature 1..20: note = chemically synthesized
  source 1..20: mol_type = other DNA
taagtgaatgcaagagcata

SEQ ID NO: 18790 - DNA, 20 bp, synthetic construct
  misc_feature 1..20: note = chemically synthesized
  source 1..20: mol_type = other DNA
tgaatgcaagagcatagaga

SEQ ID NO: 18791 - DNA, 20 bp, synthetic construct
  misc_feature 1..20: note = chemically synthesized
  source 1..20: mol_type = other DNA
gaatgcaagagcatagagac

SEQ ID NO: 18792 - DNA, 20 bp, synthetic construct
  misc_feature 1..20: note = chemically synthesized
  source 1..20: mol_type = other DNA
aatgcaagagcatagagaca

SEQ ID NO: 18793 - DNA, 20 bp, synthetic construct
  misc_feature 1..20: note = chemically synthesized
  source 1..20: mol_type = other DNA
tcattcctattttcatattt

SEQ ID NO: 18794 - DNA, 20 bp, synthetic construct
  misc_feature 1..20: note = chemically synthesized
  source 1..20: mol_type = other DNA
cattcctattttcatatttg

SEQ ID NO: 18795 - DNA, 20 bp, synthetic construct
  misc_feature 1..20: note = chemically synthesized
  source 1..20: mol_type = other DNA
tcatatttgaggtataaacc

SEQ ID NO: 18796 - DNA, 20 bp, synthetic construct
  misc_feature 1..20: note = chemically synthesized
  source 1..20: mol_type = other DNA
catatttgaggtataaacca

SEQ ID NO: 18797 - DNA, 20 bp, synthetic construct
  misc_feature 1..20: note = chemically synthesized
  source 1..20: mol_type = other DNA
tatttgaggtataaaccaag

SEQ ID NO: 18798 - DNA, 20 bp, synthetic construct
  misc_feature 1..20: note = chemically synthesized
  source 1..20: mol_type = other DNA
tttttaaatctgcaaataaa

SEQ ID NO: 18799 - DNA, 20 bp, synthetic construct
  misc_feature 1..20: note = chemically synthesized
  source 1..20: mol_type = other DNA
gttttattctgacattaaaa

SEQ ID NO: 18800 - DNA, 20 bp, synthetic construct
  misc_feature 1..20: note = chemically synthesized
  source 1..20: mol_type = other DNA
aatgaatgatcgttttacca

SEQ ID NO: 18801 - DNA, 20 bp, synthetic construct
  misc_feature 1..20: note = chemically synthesized
  source 1..20: mol_type = other DNA
atgatcgttttaccacagcg

SEQ ID NO: 18802 - DNA, 20 bp, synthetic construct
  misc_feature 1..20: note = chemically synthesized
  source 1..20: mol_type = other DNA
tgatcgttttaccacagcgt

SEQ ID NO: 18803 - DNA, 20 bp, synthetic construct
  misc_feature 1..20: note = chemically synthesized
  source 1..20: mol_type = other DNA
cttaaccttcactttcaaac

SEQ ID NO: 18804 - DNA, 20 bp, synthetic construct
  misc_feature 1..20: note = chemically synthesized
  source 1..20: mol_type = other DNA
tttattgatctctattttcc

SEQ ID NO: 18805 - DNA, 20 bp, synthetic construct
  misc_feature 1..20: note = chemically synthesized
  source 1..20: mol_type = other DNA
tctattttcctggaacaaca

SEQ ID NO: 18806 - DNA, 20 bp, synthetic construct
  misc_feature 1..20: note = chemically synthesized
  source 1..20: mol_type = other DNA
ctattttcctggaacaacat

SEQ ID NO: 18807 - DNA, 20 bp, synthetic construct
  misc_feature 1..20: note = chemically synthesized
  source 1..20: mol_type = other DNA
tattttcctggaacaacatg

SEQ ID NO: 18808 - DNA, 20 bp, synthetic construct
  misc_feature 1..20: note = chemically synthesized
  source 1..20: mol_type = other DNA
attttcctggaacaacatgg

SEQ ID NO: 18809 - DNA, 20 bp, synthetic construct
  misc_feature 1..20: note = chemically synthesized
  source 1..20: mol_type = other DNA
aacaacatgggggctatgtt

SEQ ID NO: 18810 - DNA, 20 bp, synthetic construct
  misc_feature 1..20: note = chemically synthesized
  source 1..20: mol_type = other DNA
atgggggctatgtttagcgt

SEQ ID NO: 18811 - DNA, 20 bp, synthetic construct
  misc_feature 1..20: note = chemically synthesized
  source 1..20: mol_type = other DNA
tgggggctatgtttagcgtg

SEQ ID NO: 18812 - DNA, 20 bp, synthetic construct
  misc_feature 1..20: note = chemically synthesized
  source 1..20: mol_type = other DNA
ctatgtttagcgtgaggaca

SEQ ID NO: 18813 - DNA, 20 bp, synthetic construct
  misc_feature 1..20: note = chemically synthesized
  source 1..20: mol_type = other DNA
gtatcacaactttcacctga

SEQ ID NO: 18814 - DNA, 20 bp, synthetic construct
  misc_feature 1..20: note = chemically synthesized
  source 1..20: mol_type = other DNA
acaactttcacctgaaagaa

SEQ ID NO: 18815 - DNA, 20 bp, synthetic construct
  misc_feature 1..20: note = chemically synthesized
  source 1..20: mol_type = other DNA
tttcacctgaaagaaaagat

SEQ ID NO: 18816 - DNA, 20 bp, synthetic construct
  misc_feature 1..20: note = chemically synthesized
  source 1..20: mol_type = other DNA
aaagaaaagatgagctacca

SEQ ID NO: 18817 - DNA, 20 bp, synthetic construct
  misc_feature 1..20: note = chemically synthesized
  source 1..20: mol_type = other DNA
accatggtacatataacaat

SEQ ID NO: 18818 - DNA, 20 bp, synthetic construct
  misc_feature 1..20: note = chemically synthesized
  source 1..20: mol_type = other DNA
ccatggtacatataacaatg

SEQ ID NO: 18819 - DNA, 20 bp, synthetic construct
  misc_feature 1..20: note = chemically synthesized
  source 1..20: mol_type = other DNA
tggtacatataacaatgagg

SEQ ID NO: 18820 - DNA, 20 bp, synthetic construct
  misc_feature 1..20: note = chemically synthesized
  source 1..20: mol_type = other DNA
aatgaggtggttaaaactct

SEQ ID NO: 18821 - DNA, 20 bp, synthetic construct
  misc_feature 1..20: note = chemically synthesized
  source 1..20: mol_type = other DNA
taaaactctaagtcgtcatc

SEQ ID NO: 18822 - DNA, 20 bp, synthetic construct
  misc_feature 1..20: note = chemically synthesized
  source 1..20: mol_type = other DNA
tactaaaaatcactatttca

SEQ ID NO: 18823 - DNA, 20 bp, synthetic construct
  misc_feature 1..20: note = chemically synthesized
  source 1..20: mol_type = other DNA
taaaaatcactatttcaaag

SEQ ID NO: 18824 - DNA, 20 bp, synthetic construct
  misc_feature 1..20: note = chemically synthesized
  source 1..20: mol_type = other DNA
atcactatttcaaagaagta

SEQ ID NO: 18825 - DNA, 20 bp, synthetic construct
  misc_feature 1..20: note = chemically synthesized
  source 1..20: mol_type = other DNA
tatttcaaagaagtatagaa

SEQ ID NO: 18826 - DNA, 20 bp, synthetic construct
  misc_feature 1..20: note = chemically synthesized
  source 1..20: mol_type = other DNA
aagaagtatagaatagatat

SEQ ID NO: 18827 - DNA, 20 bp, synthetic construct
  misc_feature 1..20: note = chemically synthesized
  source 1..20: mol_type = other DNA
gaatagatatcagccaaaat

SEQ ID NO: 18828 - DNA, 20 bp, synthetic construct
  misc_feature 1..20: note = chemically synthesized
  source 1..20: mol_type = other DNA
aatagatatcagccaaaata

SEQ ID NO: 18829 - DNA, 20 bp, synthetic construct
  misc_feature 1..20: note = chemically synthesized
  source 1..20: mol_type = other DNA
atatacatattatacacata

SEQ ID NO: 18830 - DNA, 20 bp, synthetic construct
  misc_feature 1..20: note = chemically synthesized
  source 1..20: mol_type = other DNA
atacatattatacacatatg

SEQ ID NO: 18831 - DNA, 20 bp, synthetic construct
  misc_feature 1..20: note = chemically synthesized
  source 1..20: mol_type = other DNA
ttgtatatgcttaaaaatta

SEQ ID NO: 18832 - DNA, 20 bp, synthetic construct
  misc_feature 1..20: note = chemically synthesized
  source 1..20: mol_type = other DNA
tgcttaaaaattacagactt

SEQ ID NO: 18833 - DNA, 20 bp, synthetic construct
  misc_feature 1..20: note = chemically synthesized
  source 1..20: mol_type = other DNA
ttaaaaattacagactttgg

SEQ ID NO: 18834 - DNA, 20 bp, synthetic construct
  misc_feature 1..20: note = chemically synthesized
  source 1..20: mol_type = other DNA
tggaagtcatatgactattt

SEQ ID NO: 18835 - DNA, 20 bp, synthetic construct
  misc_feature 1..20: note = chemically synthesized
  source 1..20: mol_type = other DNA
tatgactatttcagtgtgtg

SEQ ID NO: 18836 - DNA, 20 bp, synthetic construct
  misc_feature 1..20: note = chemically synthesized
  source 1..20: mol_type = other DNA
caccctcctgttccaaaaca

SEQ ID NO: 18837 - DNA, 20 bp, synthetic construct
  misc_feature 1..20: note = chemically synthesized
  source 1..20: mol_type = other DNA
cctgttccaaaacacagttg

SEQ ID NO: 18838 - DNA, 20 bp, synthetic construct
  misc_feature 1..20: note = chemically synthesized
  source 1..20: mol_type = other DNA
gttccaaaacacagttgcag

SEQ ID NO: 18839 - DNA, 20 bp, synthetic construct
  misc_feature 1..20: note = chemically synthesized
  source 1..20: mol_type = other DNA
ccaaaacacagttgcagaag

SEQ ID NO: 18840 - DNA, 20 bp, synthetic construct
  misc_feature 1..20: note = chemically synthesized
  source 1..20: mol_type = other DNA
aaaacacagttgcagaagca

SEQ ID NO: 18841 - DNA, 20 bp, synthetic construct
  misc_feature 1..20: note = chemically synthesized
  source 1..20: mol_type = other DNA
aaacacagttgcagaagcag

SEQ ID NO: 18842 - DNA, 20 bp, synthetic construct
  misc_feature 1..20: note = chemically synthesized
  source 1..20: mol_type = other DNA
cacagttgcagaagcagagg

SEQ ID NO: 18843 - DNA, 20 bp, synthetic construct
  misc_feature 1..20: note = chemically synthesized
  source 1..20: mol_type = other DNA
agaggaagtcattatacact

SEQ ID NO: 18844 - DNA, 20 bp, synthetic construct
  misc_feature 1..20: note = chemically synthesized
  source 1..20: mol_type = other DNA
cacttagaacatcattttat

SEQ ID NO: 18845 - DNA, 20 bp, synthetic construct
  misc_feature 1..20: note = chemically synthesized
  source 1..20: mol_type = other DNA
acttagaacatcattttata

SEQ ID NO: 18846 - DNA, 20 bp, synthetic construct
  misc_feature 1..20: note = chemically synthesized
  source 1..20: mol_type = other DNA
tagaacatcattttataagg

SEQ ID NO: 18847 - DNA, 20 bp, synthetic construct
  misc_feature 1..20: note = chemically synthesized
  source 1..20: mol_type = other DNA
aacatcattttataaggcag

SEQ ID NO: 18848 - DNA, 20 bp, synthetic construct
  misc_feature 1..20: note = chemically synthesized
  source 1..20: mol_type = other DNA
acatcattttataaggcagc

SEQ ID NO: 18849 - DNA, 20 bp, synthetic construct
  misc_feature 1..20: note = chemically synthesized
  source 1..20: mol_type = other DNA
attttataaggcagcaggtc

SEQ ID NO: 18850 - DNA, 20 bp, synthetic construct
  misc_feature 1..20: note = chemically synthesized
  source 1..20: mol_type = other DNA
ttataaggcagcaggtctgg

SEQ ID NO: 18851 - DNA, 20 bp, synthetic construct
  misc_feature 1..20: note = chemically synthesized
  source 1..20: mol_type = other DNA
tataaggcagcaggtctggt

SEQ ID NO: 18852 - DNA, 20 bp, synthetic construct
  misc_feature 1..20: note = chemically synthesized
  source 1..20: mol_type = other DNA
aaggcagcaggtctggtagg

SEQ ID NO: 18853 - DNA, 20 bp, synthetic construct
  misc_feature 1..20: note = chemically synthesized
  source 1..20: mol_type = other DNA
aggcagcaggtctggtagga

SEQ ID NO: 18854 - DNA, 20 bp, synthetic construct
  misc_feature 1..20: note = chemically synthesized
  source 1..20: mol_type = other DNA
gcagcaggtctggtaggaag

SEQ ID NO: 18855 - DNA, 20 bp, synthetic construct
  misc_feature 1..20: note = chemically synthesized
  source 1..20: mol_type = other DNA
aggtctggtaggaaggagat

SEQ ID NO: 18856 - DNA, 20 bp, synthetic construct
  misc_feature 1..20: note = chemically synthesized
  source 1..20: mol_type = other DNA
ggtctggtaggaaggagatt

SEQ ID NO: 18857 - DNA, 20 bp, synthetic construct
  misc_feature 1..20: note = chemically synthesized
  source 1..20: mol_type = other DNA
attaggtgctacttgtgaca

SEQ ID NO: 18858 - DNA, 20 bp, synthetic construct
  misc_feature 1..20: note = chemically synthesized
  source 1..20: mol_type = other DNA
ttaggtgctacttgtgacaa

SEQ ID NO: 18859 - DNA, 20 bp, synthetic construct
  misc_feature 1..20: note = chemically synthesized
  source 1..20: mol_type = other DNA
gtgctacttgtgacaaaggt

SEQ ID NO: 18860 - DNA, 20 bp, synthetic construct
  misc_feature 1..20: note = chemically synthesized
  source 1..20: mol_type = other DNA
tcagcaaatatttgtgttcc

SEQ ID NO: 18861 - DNA, 20 bp, synthetic construct
  misc_feature 1..20: note = chemically synthesized
  source 1..20: mol_type = other DNA
ttgtgttcccagcacttttc

SEQ ID NO: 18862 - DNA, 20 bp, synthetic construct
  misc_feature 1..20: note = chemically synthesized
  source 1..20: mol_type = other DNA
ccagcacttttctagatcct

SEQ ID NO: 18863 - DNA, 20 bp, synthetic construct
  misc_feature 1..20: note = chemically synthesized
  source 1..20: mol_type = other DNA
tagatcctcagttaaaatca

SEQ ID NO: 18864 - DNA, 20 bp, synthetic construct
  misc_feature 1..20: note = chemically synthesized
  source 1..20: mol_type = other DNA
atcctcagttaaaatcaaag

SEQ ID NO: 18865 - DNA, 20 bp, synthetic construct
  misc_feature 1..20: note = chemically synthesized
  source 1..20: mol_type = other DNA
agttaaaatcaaagcagctg

SEQ ID NO: 18866 - DNA, 20 bp, synthetic construct
  misc_feature 1..20: note = chemically synthesized
  source 1..20: mol_type = other DNA
aatcaaagcagctgcagtct

SEQ ID NO: 18867 - DNA, 20 bp, synthetic construct
  misc_feature 1..20: note = chemically synthesized
  source 1..20: mol_type = other DNA
caaagcagctgcagtcttgg

SEQ ID NO: 18868 - DNA, 20 bp, synthetic construct
  misc_feature 1..20: note = chemically synthesized
  source 1..20: mol_type = other DNA
agcagctgcagtcttggcag

SEQ ID NO: 18869 - DNA, 20 bp, synthetic construct
  misc_feature 1..20: note = chemically synthesized
  source 1..20: mol_type = other DNA
gcagctgcagtcttggcagt

SEQ ID NO: 18870 - DNA, 20 bp, synthetic construct
  misc_feature 1..20: note = chemically synthesized
  source 1..20: mol_type = other DNA
agctgcagtcttggcagtgg

SEQ ID NO: 18871 - DNA, 20 bp, synthetic construct
  misc_feature 1..20: note = chemically synthesized
  source 1..20: mol_type = other DNA
gctgcagtcttggcagtggg

SEQ ID NO: 18872 - DNA, 20 bp, synthetic construct
  misc_feature 1..20: note = chemically synthesized
  source 1..20: mol_type = other DNA
gtgatactcacactttgaac

SEQ ID NO: 18873 - DNA, 20 bp, synthetic construct
  misc_feature 1..20: note = chemically synthesized
  source 1..20: mol_type = other DNA
accacctgcactacctacaa

SEQ ID NO: 18874 - DNA, 20 bp, synthetic construct
  misc_feature 1..20: note = chemically synthesized
  source 1..20: mol_type = other DNA
acctgcactacctacaatgg

SEQ ID NO: 18875 - DNA, 20 bp, synthetic construct
  misc_feature 1..20: note = chemically synthesized
  source 1..20: mol_type = other DNA
gctccaaatattttatatga

SEQ ID NO: 18876 - DNA, 20 bp, synthetic construct
  misc_feature 1..20: note = chemically synthesized
  source 1..20: mol_type = other DNA
ctccaaatattttatatgaa

SEQ ID NO: 18877 - DNA, 20 bp, synthetic construct
  misc_feature 1..20: note = chemically synthesized
  source 1..20: mol_type = other DNA
tccaaatattttatatgaaa

SEQ ID NO: 18878 - DNA, 20 bp, synthetic construct
  misc_feature 1..20: note = chemically synthesized
  source 1..20: mol_type = other DNA
ccaaatattttatatgaaag

SEQ ID NO: 18879 - DNA, 20 bp, synthetic construct
  misc_feature 1..20: note = chemically synthesized
  source 1..20: mol_type = other DNA
tattttatatgaaaggggcc

SEQ ID NO: 18880 - DNA, 20 bp, synthetic construct
  misc_feature 1..20: note = chemically synthesized
  source 1..20: mol_type = other DNA
atatgaaaggggcctagaca

SEQ ID NO: 18881 - DNA, 20 bp, synthetic construct
  misc_feature 1..20: note = chemically synthesized
  source 1..20: mol_type = other DNA
gacatagcatgctgaatgaa

SEQ ID NO: 18882 - DNA, 20 bp, synthetic construct
  misc_feature 1..20: note = chemically synthesized
  source 1..20: mol_type = other DNA
acatagcatgctgaatgaaa

SEQ ID NO: 18883 - DNA, 20 bp, synthetic construct
  misc_feature 1..20: note = chemically synthesized
  source 1..20: mol_type = other DNA
tagcatgctgaatgaaaagg

SEQ ID NO: 18884 - DNA, 20 bp, synthetic construct
  misc_feature 1..20: note = chemically synthesized
  source 1..20: mol_type = other DNA
atgctgaatgaaaaggaagt

SEQ ID NO: 18885 - DNA, 20 bp, synthetic construct
  misc_feature 1..20: note = chemically synthesized
  source 1..20: mol_type = other DNA
ctgaatgaaaaggaagtgag

SEQ ID NO: 18886 - DNA, 20 bp, synthetic construct
  misc_feature 1..20: note = chemically synthesized
  source 1..20: mol_type = other DNA
tgaaaaggaagtgagtagac

SEQ ID NO: 18887 - DNA, 20 bp, synthetic construct
  misc_feature 1..20: note = chemically synthesized
  source 1..20: mol_type = other DNA
gtagactagtgctttccttg

SEQ ID NO: 18888 - DNA, 20 bp, synthetic construct
  misc_feature 1..20: note = chemically synthesized
  source 1..20: mol_type = other DNA
ttccttgaagctgtgcaacc

SEQ ID NO: 18889 - DNA, 20 bp, synthetic construct
  misc_feature 1..20: note = chemically synthesized
  source 1..20: mol_type = other DNA
tgaagctgtgcaaccaagca

SEQ ID NO: 18890 - DNA, 20 bp, synthetic construct
  misc_feature 1..20: note = chemically synthesized
  source 1..20: mol_type = other DNA
aaccaagcatagtttttaca

SEQ ID NO: 18891 - DNA, 20 bp, synthetic construct
  misc_feature 1..20: note = chemically synthesized
  source 1..20: mol_type = other DNA
catagatcgtgtgtttcaca

SEQ ID NO: 18892 - DNA, 20 bp, synthetic construct
  misc_feature 1..20: note = chemically synthesized
  source 1..20: mol_type = other DNA
tgtttcacatggtgtgataa

SEQ ID NO: 18893 - DNA, 20 bp, synthetic construct
  misc_feature 1..20: note = chemically synthesized
  source 1..20: mol_type = other DNA
acatggtgtgataacagctt

SEQ ID NO: 18894 - DNA, 20 bp, synthetic construct
  misc_feature 1..20: note = chemically synthesized
  source 1..20: mol_type = other DNA
agcttgagatgccattgaca

SEQ ID NO: 18895 - DNA, 20 bp, synthetic construct
  misc_feature 1..20: note = chemically synthesized
  source 1..20: mol_type = other DNA
atgccattgacatggcccac

SEQ ID NO: 18896 - DNA, 20 bp, synthetic construct
  misc_feature 1..20: note = chemically synthesized
  source 1..20: mol_type = other DNA
gcccaccggcttatccacat

SEQ ID NO: 18897 - DNA, 20 bp, synthetic construct
  misc_feature 1..20: note = chemically synthesized
  source 1..20: mol_type = other DNA
ggcttatccacatcagtaat

SEQ ID NO: 18898 - DNA, 20 bp, synthetic construct
  misc_feature 1..20: note = chemically synthesized
  source 1..20: mol_type = other DNA
gcttatccacatcagtaatt

SEQ ID NO: 18899 - DNA, 20 bp, synthetic construct
  misc_feature 1..20: note = chemically synthesized
  source 1..20: mol_type = other DNA
cttatccacatcagtaatta

SEQ ID NO: 18900 - DNA, 20 bp, synthetic construct
  misc_feature 1..20: note = chemically synthesized
  source 1..20: mol_type = other DNA
ccacatcagtaattagggca

SEQ ID NO: 18901 - DNA, 20 bp, synthetic construct
  misc_feature 1..20: note = chemically synthesized
  source 1..20: mol_type = other DNA
tactatgcatcccgtgattg

SEQ ID NO: 18902 - DNA, 20 bp, synthetic construct
  misc_feature 1..20: note = chemically synthesized
  source 1..20: mol_type = other DNA
tgtgtttaaaaatgcaatta

SEQ ID NO: 18903 - DNA, 20 bp, synthetic construct
  misc_feature 1..20: note = chemically synthesized
  source 1..20: mol_type = other DNA
tgcaattatggactcattca

SEQ ID NO: 18904 - DNA, 20 bp, synthetic construct
  misc_feature 1..20: note = chemically synthesized
  source 1..20: mol_type = other DNA
tatggactcattcaaagtga

SEQ ID NO: 18905 - DNA, 20 bp, synthetic construct
  misc_feature 1..20: note = chemically synthesized
  source 1..20: mol_type = other DNA
gactcattcaaagtgaaagc

SEQ ID NO: 18906 - DNA, 20 bp, synthetic construct
  misc_feature 1..20: note = chemically synthesized
  source 1..20: mol_type = other DNA
aagctggtatgacaatacat

SEQ ID NO: 18907 - DNA, 20 bp, synthetic construct
  misc_feature 1..20: note = chemically synthesized
  source 1..20: mol_type = other DNA
ttttatgaataaattttata

SEQ ID NO: 18908 - DNA, 20 bp, synthetic construct
  misc_feature 1..20: note = chemically synthesized
  source 1..20: mol_type = other DNA
aataaattttataaagaaat

SEQ ID NO: 18909 - DNA, 20 bp, synthetic construct
  misc_feature 1..20: note = chemically synthesized
  source 1..20: mol_type = other DNA
aagaaataagctaataccta

SEQ ID NO: 18910 - DNA, 20 bp, synthetic construct
  misc_feature 1..20: note = chemically synthesized
  source 1..20: mol_type = other DNA
gaaataagctaatacctaca

SEQ ID NO: 18911 - DNA, 20 bp, synthetic construct
  misc_feature 1..20: note = chemically synthesized
  source 1..20: mol_type = other DNA
acagagtgtttattaaatgc

SEQ ID NO: 18912 - DNA, 20 bp, synthetic construct
  misc_feature 1..20: note = chemically synthesized
  source 1..20: mol_type = other DNA
cagagtgtttattaaatgct

SEQ ID NO: 18913 - DNA, 20 bp, synthetic construct
  misc_feature 1..20: note = chemically synthesized
  source 1..20: mol_type = other DNA
tgtttattaaatgctaggca

SEQ ID NO: 18914 - DNA, 20 bp, synthetic construct
  misc_feature 1..20: note = chemically synthesized
  source 1..20: mol_type = other DNA
taaatgctaggcacagttct

SEQ ID NO: 18915 - DNA, 20 bp, synthetic construct
  misc_feature 1..20: note = chemically synthesized
  source 1..20: mol_type = other DNA
agttctgagtgatttacaac

SEQ ID NO: 18916 - DNA, 20 bp, synthetic construct
  misc_feature 1..20: note = chemically synthesized
  source 1..20: mol_type = other DNA
taattttcacaacattatta

SEQ ID NO: 18917 - DNA, 20 bp, synthetic construct
  misc_feature 1..20: note = chemically synthesized
  source 1..20: mol_type = other DNA
aattttcacaacattattac

SEQ ID NO: 18918 - DNA, 20 bp, synthetic construct
  misc_feature 1..20: note = chemically synthesized
  source 1..20: mol_type = other DNA
tttcacaacattattacagg

SEQ ID NO: 18919 - DNA, 20 bp, synthetic construct
  misc_feature 1..20: note = chemically synthesized
  source 1..20: mol_type = other DNA
ttacaggtagattttatata

SEQ ID NO: 18920 - DNA, 20 bp, synthetic construct
  misc_feature 1..20: note = chemically synthesized
  source 1..20: mol_type = other DNA
acaggtagattttatatatg

SEQ ID NO: 18921 - DNA, 20 bp, synthetic construct
  misc_feature 1..20: note = chemically synthesized
  source 1..20: mol_type = other DNA
attttatatatggagaaact

SEQ ID NO: 18922 - DNA, 20 bp, synthetic construct
  misc_feature 1..20: note = chemically synthesized
  source 1..20: mol_type = other DNA
ttttatatatggagaaactg

SEQ ID NO: 18923 - DNA, 20 bp, synthetic construct
  misc_feature 1..20: note = chemically synthesized
  source 1..20: mol_type = other DNA
tatatggagaaactgaggca

SEQ ID NO: 18924 - DNA, 20 bp, synthetic construct
  misc_feature 1..20: note = chemically synthesized
  source 1..20: mol_type = other DNA
tatggagaaactgaggcaca

SEQ ID NO: 18925 - DNA, 20 bp, synthetic construct
  misc_feature 1..20: note = chemically synthesized
  source 1..20: mol_type = other DNA
taataaatctcaacattacc

SEQ ID NO: 18926 - DNA, 20 bp, synthetic construct
  misc_feature 1..20: note = chemically synthesized
  source 1..20: mol_type = other DNA
aataaatctcaacattaccc

SEQ ID NO: 18927 - DNA, 20 bp, synthetic construct
  misc_feature 1..20: note = chemically synthesized
  source 1..20: mol_type = other DNA
tctcaacattacccaggtga

SEQ ID NO: 18928 - DNA, 20 bp, synthetic construct
  misc_feature 1..20: note = chemically synthesized
  source 1..20: mol_type = other DNA
caacattacccaggtgatgg

SEQ ID NO: 18929 - DNA, 20 bp, synthetic construct
  misc_feature 1..20: note = chemically synthesized
  source 1..20: mol_type = other DNA
acattacccaggtgatggtg

SEQ ID NO: 18930 - DNA, 20 bp, synthetic construct
  misc_feature 1..20: note = chemically synthesized
  source 1..20: mol_type = other DNA
tacccaggtgatggtggagt

SEQ ID NO: 18931 - DNA, 20 bp, synthetic construct
  misc_feature 1..20: note = chemically synthesized
  source 1..20: mol_type = other DNA
agttggaattccaaatcatg

SEQ ID NO: 18932 - DNA, 20 bp, synthetic construct
  misc_feature 1..20: note = chemically synthesized
  source 1..20: mol_type = other DNA
caaatcatgcagtctgactt

SEQ ID NO: 18933 - DNA, 20 bp, synthetic construct
  misc_feature 1..20: note = chemically synthesized
  source 1..20: mol_type = other DNA
atgcagtctgactttagctg

SEQ ID NO: 18934 - DNA, 20 bp, synthetic construct
  misc_feature 1..20: note = chemically synthesized
  source 1..20: mol_type = other DNA
agtctgactttagctgtaga

SEQ ID NO: 18935 - DNA, 20 bp, synthetic construct
  misc_feature 1..20: note = chemically synthesized
  source 1..20: mol_type = other DNA
tgactttagctgtagacagc

SEQ ID NO: 18936 - DNA, 20 bp, synthetic construct
  misc_feature 1..20: note = chemically synthesized
  source 1..20: mol_type = other DNA
tttagctgtagacagcaaga

SEQ ID NO: 18937 - DNA, 20 bp, synthetic construct
  misc_feature 1..20: note = chemically synthesized
  source 1..20: mol_type = other DNA
gctgtagacagcaagatagt

SEQ ID NO: 18938 - DNA, 20 bp, synthetic construct
  misc_feature 1..20: note = chemically synthesized
  source 1..20: mol_type = other DNA
agacagcaagatagtaagta

SEQ ID NO: 18939 - DNA, 20 bp, synthetic construct
  misc_feature 1..20: note = chemically synthesized
  source 1..20: mol_type = other DNA
gacagcaagatagtaagtaa

SEQ ID NO: 18940 - DNA, 20 bp, synthetic construct
  misc_feature 1..20: note = chemically synthesized
  source 1..20: mol_type = other DNA
caagatagtaagtaaaggaa

SEQ ID NO: 18941 - DNA, 20 bp, synthetic construct
  misc_feature 1..20: note = chemically synthesized
  source 1..20: mol_type = other DNA
agatagtaagtaaaggaatg

SEQ ID NO: 18942 - DNA, 20 bp, synthetic construct
  misc_feature 1..20: note = chemically synthesized
  source 1..20: mol_type = other DNA
ggaatggagcaacaaattga

SEQ ID NO: 18943 - DNA, 20 bp, synthetic construct
  misc_feature 1..20: note = chemically synthesized
  source 1..20: mol_type = other DNA
ttttgcttgtttgtttgaaa

SEQ ID NO: 18944 - DNA, 20 bp, synthetic construct
  misc_feature 1..20: note = chemically synthesized
  source 1..20: mol_type = other DNA
tttgcttgtttgtttgaaac

SEQ ID NO: 18945 - DNA, 20 bp, synthetic construct
  misc_feature 1..20: note = chemically synthesized
  source 1..20: mol_type = other DNA
ttgcttgtttgtttgaaaca

SEQ ID NO: 18946 - DNA, 20 bp, synthetic construct
  misc_feature 1..20: note = chemically synthesized
  source 1..20: mol_type = other DNA
agggtctcactctgtcaccc

SEQ ID NO: 18947 - DNA, 20 bp, synthetic construct
  misc_feature 1..20: note = chemically synthesized
  source 1..20: mol_type = other DNA
tctcactctgtcaccccggc

SEQ ID NO: 18948 - DNA, 20 bp, synthetic construct
  misc_feature 1..20: note = chemically synthesized
  source 1..20: mol_type = other DNA
tcactctgtcaccccggctg

SEQ ID NO: 18949 - DNA, 20 bp, synthetic construct
  misc_feature 1..20: note = chemically synthesized
  source 1..20: mol_type = other DNA
tcaccccggctggagtgcaa

SEQ ID NO: 18950 - DNA, 20 bp, synthetic construct
  misc_feature 1..20: note = chemically synthesized
  source 1..20: mol_type = other DNA
tggtgcaatcttgctcactg

SEQ ID NO: 18951 - DNA, 20 bp, synthetic construct
  misc_feature 1..20: note = chemically synthesized
  source 1..20: mol_type = other DNA
cttgctcactgaagcctcac

SEQ ID NO: 18952 - DNA, 20 bp, synthetic construct
  misc_feature 1..20: note = chemically synthesized
  source 1..20: mol_type = other DNA
tgaagcctcactagaacgcc

SEQ ID NO: 18953 - DNA, 20 bp, synthetic construct
  misc_feature 1..20: note = chemically synthesized
  source 1..20: mol_type = other DNA
ttcaattgatcctcctgctt

SEQ ID NO: 18954 - DNA, 20 bp, synthetic construct
  misc_feature 1..20: note = chemically synthesized
  source 1..20: mol_type = other DNA
atcctcctgctttagcctct

SEQ ID NO: 18955 - DNA, 20 bp, synthetic construct
  misc_feature 1..20: note = chemically synthesized
  source 1..20: mol_type = other DNA
tcctcctgctttagcctctc

SEQ ID NO: 18956 - DNA, 20 bp, synthetic construct
  misc_feature 1..20: note = chemically synthesized
  source 1..20: mol_type = other DNA
tcctgctttagcctctcagg

SEQ ID NO: 18957 - DNA, 20 bp, synthetic construct
  misc_feature 1..20: note = chemically synthesized
  source 1..20: mol_type = other DNA
gctttagcctctcaggtagc

SEQ ID NO: 18958 - DNA, 20 bp, synthetic construct
  misc_feature 1..20: note = chemically synthesized
  source 1..20: mol_type = other DNA
ctttagcctctcaggtagct

SEQ ID NO: 18959 - DNA, 20 bp, synthetic construct
  misc_feature 1..20: note = chemically synthesized
  source 1..20: mol_type = other DNA
ctctcaggtagctaggacta

SEQ ID NO: 18960 - DNA, 20 bp, synthetic construct
  misc_feature 1..20: note = chemically synthesized
  source 1..20: mol_type = other DNA
tctcaggtagctaggactac

SEQ ID NO: 18961 - DNA, 20 bp, synthetic construct
  misc_feature 1..20: note = chemically synthesized
  source 1..20: mol_type = other DNA
gtagctaggactacaggtgt

SEQ ID NO: 18962 - DNA, 20 bp, synthetic construct
  misc_feature 1..20: note = chemically synthesized
  source 1..20: mol_type = other DNA
actacaggtgtgagcctcca

SEQ ID NO: 18963 - DNA, 20 bp, synthetic construct
  misc_feature 1..20: note = chemically synthesized
  source 1..20: mol_type = other DNA
caggtgtgagcctccatggc

SEQ ID NO: 18964 - DNA, 20 bp, synthetic construct
  misc_feature 1..20: note = chemically synthesized
  source 1..20: mol_type = other DNA
tgtgagcctccatggccagc

SEQ ID NO: 18965 - DNA, 20 bp, synthetic construct
  misc_feature 1..20: note = chemically synthesized
  source 1..20: mol_type = other DNA
tgagcctccatggccagcta

SEQ ID NO: 18966 - DNA, 20 bp, synthetic construct
  misc_feature 1..20: note = chemically synthesized
  source 1..20: mol_type = other DNA
agaaattttttaaatttctg

SEQ ID NO: 18967 - DNA, 20 bp, synthetic construct
  misc_feature 1..20: note = chemically synthesized
  source 1..20: mol_type = other DNA
tttttaaatttctgtagaaa

SEQ ID NO: 18968 - DNA, 20 bp, synthetic construct
  misc_feature 1..20: note = chemically synthesized
  source 1..20: mol_type = other DNA
ttttaaatttctgtagaaac

SEQ ID NO: 18969 - DNA, 20 bp, synthetic construct
  misc_feature 1..20: note = chemically synthesized
  source 1..20: mol_type = other DNA
tttaaatttctgtagaaaca

SEQ ID NO: 18970 - DNA, 20 bp, synthetic construct
  misc_feature 1..20: note = chemically synthesized
  source 1..20: mol_type = other DNA
cagggtctccctatgttccc

SEQ ID NO: 18971 - DNA, 20 bp, synthetic construct
  misc_feature 1..20: note = chemically synthesized
  source 1..20: mol_type = other DNA
agggtctccctatgttcccc

SEQ ID NO: 18972 - DNA, 20 bp, synthetic construct
  misc_feature 1..20: note = chemically synthesized
  source 1..20: mol_type = other DNA
tctccctatgttccccaggc

SEQ ID NO: 18973 - DNA, 20 bp, synthetic construct
  misc_feature 1..20: note = chemically synthesized
  source 1..20: mol_type = other DNA
ccaggctggtatccaactct

SEQ ID NO: 18974 - DNA, 20 bp, synthetic construct
  misc_feature 1..20: note = chemically synthesized
  source 1..20: mol_type = other DNA
ctcaaacaattctcccacct

SEQ ID NO: 18975 - DNA, 20 bp, synthetic construct
  misc_feature 1..20: note = chemically synthesized
  source 1..20: mol_type = other DNA
tctcccacctcagccttgaa

SEQ ID NO: 18976 - DNA, 20 bp, synthetic construct
  misc_feature 1..20: note = chemically synthesized
  source 1..20: mol_type = other DNA
cctcagccttgaaaagtgtt

SEQ ID NO: 18977 - DNA, 20 bp, synthetic construct
  misc_feature 1..20: note = chemically synthesized
  source 1..20: mol_type = other DNA
cttgaaaagtgttgagatta

SEQ ID NO: 18978 - DNA, 20 bp, synthetic construct
  misc_feature 1..20: note = chemically synthesized
  source 1..20: mol_type = other DNA
ttgaaaagtgttgagattac

SEQ ID NO: 18979 - DNA, 20 bp, synthetic construct
  misc_feature 1..20: note = chemically synthesized
  source 1..20: mol_type = other DNA
acaggtgtgaatcaccatgc

SEQ ID NO: 18980 - DNA, 20 bp, synthetic construct
  misc_feature 1..20: note = chemically synthesized
  source 1..20: mol_type = other DNA
caggtgtgaatcaccatgct

SEQ ID NO: 18981 - DNA, 20 bp, synthetic construct
  misc_feature 1..20: note = chemically synthesized
  source 1..20: mol_type = other DNA
atcaccatgctgggccttga

SEQ ID NO: 18982 - DNA, 20 bp, synthetic construct
  misc_feature 1..20: note = chemically synthesized
  source 1..20: mol_type = other DNA
gggccttgatggatctttaa

SEQ ID NO: 18983 - DNA, 20 bp, synthetic construct
  misc_feature 1..20: note = chemically synthesized
  source 1..20: mol_type = other DNA
ccttgatggatctttaaaag

SEQ ID NO: 18984 - DNA, 20 bp, synthetic construct
  misc_feature 1..20: note = chemically synthesized
  source 1..20: mol_type = other DNA
tgatggatctttaaaagtgg

SEQ ID NO: 18985 - DNA, 20 bp, synthetic construct
  misc_feature 1..20: note = chemically synthesized
  source 1..20: mol_type = other DNA
gatggatctttaaaagtggt

SEQ ID NO: 18986 - DNA, 20 bp, synthetic construct
  misc_feature 1..20: note = chemically synthesized
  source 1..20: mol_type = other DNA
atggatctttaaaagtggtg

SEQ ID NO: 18987 - DNA, 20 bp, synthetic construct
  misc_feature 1..20: note = chemically synthesized
  source 1..20: mol_type = other DNA
tggatctttaaaagtggtgg

SEQ ID NO: 18988 - DNA, 20 bp, synthetic construct
  misc_feature 1..20: note = chemically synthesized
  source 1..20: mol_type = other DNA
ggatctttaaaagtggtggg

SEQ ID NO: 18989 - DNA, 20 bp, synthetic construct
  misc_feature 1..20: note = chemically synthesized
  source 1..20: mol_type = other DNA
tctttaaaagtggtgggggg

SEQ ID NO: 18990 - DNA, 20 bp, synthetic construct
  misc_feature 1..20: note = chemically synthesized
  source 1..20: mol_type = other DNA
ctttaaaagtggtggggggt

SEQ ID NO: 18991 - DNA, 20 bp, synthetic construct
  misc_feature 1..20: note = chemically synthesized
  source 1..20: mol_type = other DNA
ttaaaagtggtggggggtag

SEQ ID NO: 18992 - DNA, 20 bp, synthetic construct
  misc_feature 1..20: note = chemically synthesized
  source 1..20: mol_type = other DNA
gtggtggggggtaggagaaa

SEQ ID NO: 18993 - DNA, 20 bp, synthetic construct
  misc_feature 1..20: note = chemically synthesized
  source 1..20: mol_type = other DNA
ggtggggggtaggagaaaaa

SEQ ID NO: 18994 - DNA, 20 bp, synthetic construct
  misc_feature 1..20: note = chemically synthesized
  source 1..20: mol_type = other DNA
gtggggggtaggagaaaaag

SEQ ID NO: 18995 - DNA, 20 bp, synthetic construct
  misc_feature 1..20: note = chemically synthesized
  source 1..20: mol_type = other DNA
gggggtaggagaaaaagagg

SEQ ID NO: 18996 - DNA, 20 bp, synthetic construct
  misc_feature 1..20: note = chemically synthesized
  source 1..20: mol_type = other DNA
aaaaagaggaagaacaaaaa

SEQ ID NO: 18997 - DNA, 20 bp, synthetic construct
  misc_feature 1..20: note = chemically synthesized
  source 1..20: mol_type = other DNA
gaacaaaaacagtatcacga

SEQ ID NO: 18998 - DNA, 20 bp, synthetic construct
  misc_feature 1..20: note = chemically synthesized
  source 1..20: mol_type = other DNA
tcacgaaagataaacatcgt

SEQ ID NO: 18999 - DNA, 20 bp, synthetic construct
  misc_feature 1..20: note = chemically synthesized
  source 1..20: mol_type = other DNA
cacgaaagataaacatcgtt

SEQ ID NO: 19000 - DNA, 20 bp, synthetic construct
  misc_feature 1..20: note = chemically synthesized
  source 1..20: mol_type = other DNA
agataaacatcgttaggtct

SEQ ID NO: 19001 - DNA, 20 bp, synthetic construct
  misc_feature 1..20: note = chemically synthesized
  source 1..20: mol_type = other DNA
gataaacatcgttaggtctc

SEQ ID NO: 19002 - DNA, 20 bp, synthetic construct
  misc_feature 1..20: note = chemically synthesized
  source 1..20: mol_type = other DNA
aaacatcgttaggtctcggg

SEQ ID NO: 19003 - DNA, 20 bp, synthetic construct
  misc_feature 1..20: note = chemically synthesized
  source 1..20: mol_type = other DNA
aacatcgttaggtctcggga

SEQ ID NO: 19004 - DNA, 20 bp, synthetic construct
  misc_feature 1..20: note = chemically synthesized
  source 1..20: mol_type = other DNA
tcgttaggtctcgggaagga

SEQ ID NO: 19005 - DNA, 20 bp, synthetic construct
  misc_feature 1..20: note = chemically synthesized
  source 1..20: mol_type = other DNA
cgttaggtctcgggaaggat

SEQ ID NO: 19006 - DNA, 20 bp, synthetic construct
  misc_feature 1..20: note = chemically synthesized
  source 1..20: mol_type = other DNA
ggatccttttcattttgctc

SEQ ID NO: 19007 - DNA, 20 bp, synthetic construct
  misc_feature 1..20: note = chemically synthesized
  source 1..20: mol_type = other DNA
atccttttcattttgctcta

SEQ ID NO: 19008 - DNA, 20 bp, synthetic construct
  misc_feature 1..20: note = chemically synthesized
  source 1..20: mol_type = other DNA
tttcattttgctctagagaa

SEQ ID NO: 19009 - DNA, 20 bp, synthetic construct
  misc_feature 1..20: note = chemically synthesized
  source 1..20: mol_type = other DNA
tgctctagagaaaagccatt

SEQ ID NO: 19010 - DNA, 20 bp, synthetic construct
  misc_feature 1..20: note = chemically synthesized
  source 1..20: mol_type = other DNA
acttctgtgttaacaaaaaa

SEQ ID NO: 19011 - DNA, 20 bp, synthetic construct
  misc_feature 1..20: note = chemically synthesized
  source 1..20: mol_type = other DNA
tgtgttaacaaaaaacagcc

SEQ ID NO: 19012 - DNA, 20 bp, synthetic construct
  misc_feature 1..20: note = chemically synthesized
  source 1..20: mol_type = other DNA
gttaacaaaaaacagccgag

SEQ ID NO: 19013 - DNA, 20 bp, synthetic construct
  misc_feature 1..20: note = chemically synthesized
  source 1..20: mol_type = other DNA
caaaaaacagccgagtagcc

SEQ ID NO: 19014 - DNA, 20 bp, synthetic construct
  misc_feature 1..20: note = chemically synthesized
  source 1..20: mol_type = other DNA
agtagcctagtattaaactt

SEQ ID NO: 19015 - DNA, 20 bp, synthetic construct
  misc_feature 1..20: note = chemically synthesized
  source 1..20: mol_type = other DNA
tagcctagtattaaacttta

SEQ ID NO: 19016 - DNA, 20 bp, synthetic construct
  misc_feature 1..20: note = chemically synthesized
  source 1..20: mol_type = other DNA
cctagtattaaactttagag

SEQ ID NO: 19017 - DNA, 20 bp, synthetic construct
  misc_feature 1..20: note = chemically synthesized
  source 1..20: mol_type = other DNA
tttagagcagttgttcttta

SEQ ID NO: 19018 - DNA, 20 bp, synthetic construct
  misc_feature 1..20: note = chemically synthesized
  source 1..20: mol_type = other DNA
gttgttctttacggcaatta

SEQ ID NO: 19019 - DNA, 20 bp, synthetic construct
  misc_feature 1..20: note = chemically synthesized
  source 1..20: mol_type = other DNA
ttgttctttacggcaattac

SEQ ID NO: 19020 - DNA, 20 bp, synthetic construct
  misc_feature 1..20: note = chemically synthesized
  source 1..20: mol_type = other DNA
tgttctttacggcaattaca

SEQ ID NO: 19021 - DNA, 20 bp, synthetic construct
  misc_feature 1..20: note = chemically synthesized
  source 1..20: mol_type = other DNA
gttctttacggcaattacag

SEQ ID NO: 19022 - DNA, 20 bp, synthetic construct
  misc_feature 1..20: note = chemically synthesized
  source 1..20: mol_type = other DNA
acggcaattacaggggcctt

SEQ ID NO: 19023 - DNA, 20 bp, synthetic construct
  misc_feature 1..20: note = chemically synthesized
  source 1..20: mol_type = other DNA
cggcaattacaggggccttc

SEQ ID NO: 19024 - DNA, 20 bp, synthetic construct
  misc_feature 1..20: note = chemically synthesized
  source 1..20: mol_type = other DNA
caattacaggggccttcagg

SEQ ID NO: 19025 - DNA, 20 bp, synthetic construct
  misc_feature 1..20: note = chemically synthesized
  source 1..20: mol_type = other DNA
aggggccttcaggaagctga

SEQ ID NO: 19026 - DNA, 20 bp, synthetic construct
  misc_feature 1..20: note = chemically synthesized
  source 1..20: mol_type = other DNA
ggccttcaggaagctgatgg

SEQ ID NO: 19027 - DNA, 20 bp, synthetic construct
  misc_feature 1..20: note = chemically synthesized
  source 1..20: mol_type = other DNA
aggaagctgatggaagtgtg

SEQ ID NO: 19028 - DNA, 20 bp, synthetic construct
  misc_feature 1..20: note = chemically synthesized
  source 1..20: mol_type = other DNA
gaagtgtgaagtcctcttct

SEQ ID NO: 19029 - DNA, 20 bp, synthetic construct
  misc_feature 1..20: note = chemically synthesized
  source 1..20: mol_type = other DNA
agtgtgaagtcctcttctca

SEQ ID NO: 19030 - DNA, 20 bp, synthetic construct
  misc_feature 1..20: note = chemically synthesized
  source 1..20: mol_type = other DNA
gaagtcctcttctcagagaa

SEQ ID NO: 19031 - DNA, 20 bp, synthetic construct
  misc_feature 1..20: note = chemically synthesized
  source 1..20: mol_type = other DNA
atatacgtgcacctaatttt

SEQ ID NO: 19032 - DNA, 20 bp, synthetic construct
  misc_feature 1..20: note = chemically synthesized
  source 1..20: mol_type = other DNA
atttttagatataatttctg

SEQ ID NO: 19033 - DNA, 20 bp, synthetic construct
  misc_feature 1..20: note = chemically synthesized
  source 1..20: mol_type = other DNA
tttttagatataatttctga

SEQ ID NO: 19034 - DNA, 20 bp, synthetic construct
  misc_feature 1..20: note = chemically synthesized
  source 1..20: mol_type = other DNA
agatataatttctgaaggtt

SEQ ID NO: 19035 - DNA, 20 bp, synthetic construct
  misc_feature 1..20: note = chemically synthesized
  source 1..20: mol_type = other DNA
tgaaggtttagaaactcctt

SEQ ID NO: 19036 - DNA, 20 bp, synthetic construct
  misc_feature 1..20: note = chemically synthesized
  source 1..20: mol_type = other DNA
ccttgagttcacttatatca

SEQ ID NO: 19037 - DNA, 20 bp, synthetic construct
  misc_feature 1..20: note = chemically synthesized
  source 1..20: mol_type = other DNA
tatatcaaagtcctcacctt

SEQ ID NO: 19038 - DNA, 20 bp, synthetic construct
  misc_feature 1..20: note = chemically synthesized
  source 1..20: mol_type = other DNA
cacctttagaactcctgtcc

SEQ ID NO: 19039 - DNA, 20 bp, synthetic construct
  misc_feature 1..20: note = chemically synthesized
  source 1..20: mol_type = other DNA
ctttagaactcctgtcctag

SEQ ID NO: 19040 - DNA, 20 bp, synthetic construct
  misc_feature 1..20: note = chemically synthesized
  source 1..20: mol_type = other DNA
ttagaactcctgtcctagaa

SEQ ID NO: 19041 - DNA, 20 bp, synthetic construct
  misc_feature 1..20: note = chemically synthesized
  source 1..20: mol_type = other DNA
gaactcctgtcctagaagag

SEQ ID NO: 19042 - DNA, 20 bp, synthetic construct
  misc_feature 1..20: note = chemically synthesized
  source 1..20: mol_type = other DNA
ttccataaccactttgactc

SEQ ID NO: 19043 - DNA, 20 bp, synthetic construct
  misc_feature 1..20: note = chemically synthesized
  source 1..20: mol_type = other DNA
gccacttgtaccatgtaatt

SEQ ID NO: 19044 - DNA, 20 bp, synthetic construct
  misc_feature 1..20: note = chemically synthesized
  source 1..20: mol_type = other DNA
cacttgtaccatgtaattca

SEQ ID NO: 19045 - DNA, 20 bp, synthetic construct
  misc_feature 1..20: note = chemically synthesized
  source 1..20: mol_type = other DNA
acttgtaccatgtaattcag

SEQ ID NO: 19046 - DNA, 20 bp, synthetic construct
  misc_feature 1..20: note = chemically synthesized
  source 1..20: mol_type = other DNA
taccatgtaattcagaggtg

SEQ ID NO: 19047 - DNA, 20 bp, synthetic construct
  misc_feature 1..20: note = chemically synthesized
  source 1..20: mol_type = other DNA
taattcagaggtgtagtgtc

SEQ ID NO: 19048 - DNA, 20 bp, synthetic construct
  misc_feature 1..20: note = chemically synthesized
  source 1..20: mol_type = other DNA
agaggtgtagtgtcaagact

SEQ ID NO: 19049 - DNA, 20 bp, synthetic construct
  misc_feature 1..20: note = chemically synthesized
  source 1..20: mol_type = other DNA
gaggtgtagtgtcaagactg

SEQ ID NO: 19050 - DNA, 20 bp, synthetic construct
  misc_feature 1..20: note = chemically synthesized
  source 1..20: mol_type = other DNA
ggtgtagtgtcaagactgag

SEQ ID NO: 19051 - DNA, 20 bp, synthetic construct
  misc_feature 1..20: note = chemically synthesized
  source 1..20: mol_type = other DNA
gtgtagtgtcaagactgagg

SEQ ID NO: 19052 - DNA, 20 bp, synthetic construct
  misc_feature 1..20: note = chemically synthesized
  source 1..20: mol_type = other DNA
tagtgtcaagactgaggagg

SEQ ID NO: 19053 - DNA, 20 bp, synthetic construct
  misc_feature 1..20: note = chemically synthesized
  source 1..20: mol_type = other DNA
tgtcaagactgaggaggaag

SEQ ID NO: 19054 - DNA, 20 bp, synthetic construct
  misc_feature 1..20: note = chemically synthesized
  source 1..20: mol_type = other DNA
gtcaagactgaggaggaagc

SEQ ID NO: 19055 - DNA, 20 bp, synthetic construct
  misc_feature 1..20: note = chemically synthesized
  source 1..20: mol_type = other DNA
ggaagcaggtaaattatgtc

SEQ ID NO: 19056 - DNA, 20 bp, synthetic construct
  misc_feature 1..20: note = chemically synthesized
  source 1..20: mol_type = other DNA
aattatgtccagcaatacgt

SEQ ID NO: 19057 - DNA, 20 bp, synthetic construct
  misc_feature 1..20: note = chemically synthesized
  source 1..20: mol_type = other DNA
tgtccagcaatacgttggct

SEQ ID NO: 19058 - DNA, 20 bp, synthetic construct
  misc_feature 1..20: note = chemically synthesized
  source 1..20: mol_type = other DNA
gtccagcaatacgttggctt

SEQ ID NO: 19059 - DNA, 20 bp, synthetic construct
  misc_feature 1..20: note = chemically synthesized
  source 1..20: mol_type = other DNA
aggcaaaaacaaattgtttc

SEQ ID NO: 19060 - DNA, 20 bp, synthetic construct
  misc_feature 1..20: note = chemically synthesized
  source 1..20: mol_type = other DNA
aattgtttctagtccatttt

SEQ ID NO: 19061 - DNA, 20 bp, synthetic construct
  misc_feature 1..20: note = chemically synthesized
  source 1..20: mol_type = other DNA
ttgtttctagtccattttaa

SEQ ID NO: 19062 - DNA, 20 bp, synthetic construct
  misc_feature 1..20: note = chemically synthesized
  source 1..20: mol_type = other DNA
tgtttctagtccattttaag

SEQ ID NO: 19063 - DNA, 20 bp, synthetic construct
  misc_feature 1..20: note = chemically synthesized
  source 1..20: mol_type = other DNA
gtttctagtccattttaaga

SEQ ID NO: 19064 - DNA, 20 bp, synthetic construct
  misc_feature 1..20: note = chemically synthesized
  source 1..20: mol_type = other DNA
tctagtccattttaagaggg

SEQ ID NO: 19065 - DNA, 20 bp, synthetic construct
  misc_feature 1..20: note = chemically synthesized
  source 1..20: mol_type = other DNA
ttaagagggaagcatttatt

SEQ ID NO: 19066 - DNA, 20 bp, synthetic construct
  misc_feature 1..20: note = chemically synthesized
  source 1..20: mol_type = other DNA
taagagggaagcatttattt

SEQ ID NO: 19067 - DNA, 20 bp, synthetic construct
  misc_feature 1..20: note = chemically synthesized
  source 1..20: mol_type = other DNA
aagagggaagcatttattta

SEQ ID NO: 19068 - DNA, 20 bp, synthetic construct
  misc_feature 1..20: note = chemically synthesized
  source 1..20: mol_type = other DNA
atttagggactacatcgctc

SEQ ID NO: 19069 - DNA, 20 bp, synthetic construct
  misc_feature 1..20: note = chemically synthesized
  source 1..20: mol_type = other DNA
ccttaacatgttaatttctc

SEQ ID NO: 19070 - DNA, 20 bp, synthetic construct
  misc_feature 1..20: note = chemically synthesized
  source 1..20: mol_type = other DNA
ttaacatgttaatttctcca

SEQ ID NO: 19071 - DNA, 20 bp, synthetic construct
  misc_feature 1..20: note = chemically synthesized
  source 1..20: mol_type = other DNA
tccagagtttgtaatgttct

SEQ ID NO: 19072 - DNA, 20 bp, synthetic construct
  misc_feature 1..20: note = chemically synthesized
  source 1..20: mol_type = other DNA
gagtttgtaatgttctgagc

SEQ ID NO: 19073 - DNA, 20 bp, synthetic construct
  misc_feature 1..20: note = chemically synthesized
  source 1..20: mol_type = other DNA
atgttctgagcaagtgtgtg

SEQ ID NO: 19074 - DNA, 20 bp, synthetic construct
  misc_feature 1..20: note = chemically synthesized
  source 1..20: mol_type = other DNA
ttctgagcaagtgtgtgcag

SEQ ID NO: 19075 - DNA, 20 bp, synthetic construct
  misc_feature 1..20: note = chemically synthesized
  source 1..20: mol_type = other DNA
gtgtgcagaagaaatgattg

SEQ ID NO: 19076 - DNA, 20 bp, synthetic construct
  misc_feature 1..20: note = chemically synthesized
  source 1..20: mol_type = other DNA
gcagaagaaatgattgtagt

SEQ ID NO: 19077 - DNA, 20 bp, synthetic construct
  misc_feature 1..20: note = chemically synthesized
  source 1..20: mol_type = other DNA
gaaatgattgtagtaagacc

SEQ ID NO: 19078 - DNA, 20 bp, synthetic construct
  misc_feature 1..20: note = chemically synthesized
  source 1..20: mol_type = other DNA
aaatgattgtagtaagacct

SEQ ID NO: 19079 - DNA, 20 bp, synthetic construct
  misc_feature 1..20: note = chemically synthesized
  source 1..20: mol_type = other DNA
attgtagtaagacctgggca

SEQ ID NO: 19080 - DNA, 20 bp, synthetic construct
  misc_feature 1..20: note = chemically synthesized
  source 1..20: mol_type = other DNA
ttgtagtaagacctgggcaa

SEQ ID NO: 19081 - DNA, 20 bp, synthetic construct
  misc_feature 1..20: note = chemically synthesized
  source 1..20: mol_type = other DNA
gtagtaagacctgggcaaag

SEQ ID NO: 19082 - DNA, 20 bp, synthetic construct
  misc_feature 1..20: note = chemically synthesized
  source 1..20: mol_type = other DNA
agtaagacctgggcaaagga

SEQ ID NO: 19083 - DNA, 20 bp, synthetic construct
  misc_feature 1..20: note = chemically synthesized
  source 1..20: mol_type = other DNA
taagacctgggcaaaggaga

SEQ ID NO: 19084 - DNA, 20 bp, synthetic construct
  misc_feature 1..20: note = chemically synthesized
  source 1..20: mol_type = other DNA
aaacatttttcccccacatt

SEQ ID NO: 19085 - DNA, 20 bp, synthetic construct
  misc_feature 1..20: note = chemically synthesized
  source 1..20: mol_type = other DNA
aacatttttcccccacattt

SEQ ID NO: 19086 - DNA, 20 bp, synthetic construct
  misc_feature 1..20: note = chemically synthesized
  source 1..20: mol_type = other DNA
ttgggcaaaactttccatcc

SEQ ID NO: 19087 - DNA, 20 bp, synthetic construct
  misc_feature 1..20: note = chemically synthesized
  source 1..20: mol_type = other DNA
tgggcaaaactttccatcct

SEQ ID NO: 19088 - DNA, 20 bp, synthetic construct
  misc_feature 1..20: note = chemically synthesized
  source 1..20: mol_type = other DNA
ttccatcctgggtcacacca

SEQ ID NO: 19089 - DNA, 20 bp, synthetic construct
  misc_feature 1..20: note = chemically synthesized
  source 1..20: mol_type = other DNA
ctcctctcctctccctcaac

SEQ ID NO: 19090 - DNA, 20 bp, synthetic construct
  misc_feature 1..20: note = chemically synthesized
  source 1..20: mol_type = other DNA
tcctctccctcaactggtaa

SEQ ID NO: 19091 - DNA, 20 bp, synthetic construct
  misc_feature 1..20: note = chemically synthesized
  source 1..20: mol_type = other DNA
ccaaaacatacctgactact

SEQ ID NO: 19092 - DNA, 20 bp, synthetic construct
  misc_feature 1..20: note = chemically synthesized
  source 1..20: mol_type = other DNA
cttagtacttcccactactg

SEQ ID NO: 19093 - DNA, 20 bp, synthetic construct
  misc_feature 1..20: note = chemically synthesized
  source 1..20: mol_type = other DNA
gtacttcccactactgtgga

SEQ ID NO: 19094 - DNA, 20 bp, synthetic construct
  misc_feature 1..20: note = chemically synthesized
  source 1..20: mol_type = other DNA
cactactgtggatagaattt

SEQ ID NO: 19095 - DNA, 20 bp, synthetic construct
  misc_feature 1..20: note = chemically synthesized
  source 1..20: mol_type = other DNA
ctcattcattgttcataccc

SEQ ID NO: 19096 - DNA, 20 bp, synthetic construct
  misc_feature 1..20: note = chemically synthesized
  source 1..20: mol_type = other DNA
cattcattgttcataccctg

SEQ ID NO: 19097 - DNA, 20 bp, synthetic construct
  misc_feature 1..20: note = chemically synthesized
  source 1..20: mol_type = other DNA
ccctggagacaaaactcctt

SEQ ID NO: 19098 - DNA, 20 bp, synthetic construct
  misc_feature 1..20: note = chemically synthesized
  source 1..20: mol_type = other DNA
cctggagacaaaactcctta

SEQ ID NO: 19099 - DNA, 20 bp, synthetic construct
  misc_feature 1..20: note = chemically synthesized
  source 1..20: mol_type = other DNA
taaggctattaactccccct

SEQ ID NO: 19100 - DNA, 20 bp, synthetic construct
  misc_feature 1..20: note = chemically synthesized
  source 1..20: mol_type = other DNA
tccccctgagcttcacaatc

SEQ ID NO: 19101 - DNA, 20 bp, synthetic construct
  misc_feature 1..20: note = chemically synthesized
  source 1..20: mol_type = other DNA
gcttcacaatctagtccctg

SEQ ID NO: 19102 - DNA, 20 bp, synthetic construct
  misc_feature 1..20: note = chemically synthesized
  source 1..20: mol_type = other DNA
cttcacaatctagtccctgc

SEQ ID NO: 19103 - DNA, 20 bp, synthetic construct
  misc_feature 1..20: note = chemically synthesized
  source 1..20: mol_type = other DNA
tcctctccttttccctctct

SEQ ID NO: 19104 - DNA, 20 bp, synthetic construct
  misc_feature 1..20: note = chemically synthesized
  source 1..20: mol_type = other DNA
ttccctctctgagccccgct

SEQ ID NO: 19105 - DNA, 20 bp, synthetic construct
  misc_feature 1..20: note = chemically synthesized
  source 1..20: mol_type = other DNA
gccccgctcagatcttcgaa

SEQ ID NO: 19106 - DNA, 20 bp, synthetic construct
  misc_feature 1..20: note = chemically synthesized
  source 1..20: mol_type = other DNA
cccgctcagatcttcgaaca

SEQ ID NO: 19107 - DNA, 20 bp, synthetic construct
  misc_feature 1..20: note = chemically synthesized
  source 1..20: mol_type = other DNA
cagagaacacttctgcatct

SEQ ID NO: 19108 - DNA, 20 bp, synthetic construct
  misc_feature 1..20: note = chemically synthesized
  source 1..20: mol_type = other DNA
cttctgcatcttggcatata

SEQ ID NO: 19109 - DNA, 20 bp, synthetic construct
  misc_feature 1..20: note = chemically synthesized
  source 1..20: mol_type = other DNA
gcatatatagttctctcaca

SEQ ID NO: 19110 - DNA, 20 bp, synthetic construct
  misc_feature 1..20: note = chemically synthesized
  source 1..20: mol_type = other DNA
atagaacgctttctcccctt

SEQ ID NO: 19111 - DNA, 20 bp, synthetic construct
  misc_feature 1..20: note = chemically synthesized
  source 1..20: mol_type = other DNA
cctttagctatttatccttc

SEQ ID NO: 19112 - DNA, 20 bp, synthetic construct
  misc_feature 1..20: note = chemically synthesized
  source 1..20: mol_type = other DNA
gctatttatccttcaagtgt

SEQ ID NO: 19113 - DNA, 20 bp, synthetic construct
  misc_feature 1..20: note = chemically synthesized
  source 1..20: mol_type = other DNA
cagctcaaacatctcatcat

SEQ ID NO: 19114 - DNA, 20 bp, synthetic construct
  misc_feature 1..20: note = chemically synthesized
  source 1..20: mol_type = other DNA
gctcaaacatctcatcatta

SEQ ID NO: 19115 - DNA, 20 bp, synthetic construct
  misc_feature 1..20: note = chemically synthesized
  source 1..20: mol_type = other DNA
tcaaacatctcatcattaga

SEQ ID NO: 19116 - DNA, 20 bp, synthetic construct
  misc_feature 1..20: note = chemically synthesized
  source 1..20: mol_type = other DNA
caaacatctcatcattagag

SEQ ID NO: 19117 - DNA, 20 bp, synthetic construct
  misc_feature 1..20: note = chemically synthesized
  source 1..20: mol_type = other DNA
agaggtttttcccaaacctc

SEQ ID NO: 19118 - DNA, 20 bp, synthetic construct
  misc_feature 1..20: note = chemically synthesized
  source 1..20: mol_type = other DNA
gaggtttttcccaaacctct

SEQ ID NO: 19119 - DNA, 20 bp, synthetic construct
  misc_feature 1..20: note = chemically synthesized
  source 1..20: mol_type = other DNA
ttcccaaacctctaggtaac

SEQ ID NO: 19120 - DNA, 20 bp, synthetic construct
  misc_feature 1..20: note = chemically synthesized
  source 1..20: mol_type = other DNA
tcccaaacctctaggtaact

SEQ ID NO: 19121 - DNA, 20 bp, synthetic construct
  misc_feature 1..20: note = chemically synthesized
  source 1..20: mol_type = other DNA
aaacctctaggtaactaggt

SEQ ID NO: 19122 - DNA, 20 bp, synthetic construct
  misc_feature 1..20: note = chemically synthesized
  source 1..20: mol_type = other DNA
agaaaccactccccattcca

SEQ ID NO: 19123 - DNA, 20 bp, synthetic construct
  misc_feature 1..20: note = chemically synthesized
  source 1..20: mol_type = other DNA
ccattccacggtacactgta

SEQ ID NO: 19124 - DNA, 20 bp, synthetic construct
  misc_feature 1..20: note = chemically synthesized
  source 1..20: mol_type = other DNA
cacggtacactgtatagtct

SEQ ID NO: 19125 - DNA, 20 bp, synthetic construct
  misc_feature 1..20: note = chemically synthesized
  source 1..20: mol_type = other DNA
acggtacactgtatagtctt

SEQ ID NO: 19126 - DNA, 20 bp, synthetic construct
  misc_feature 1..20: note = chemically synthesized
  source 1..20: mol_type = other DNA
ctgtatagtcttaggacacc

SEQ ID NO: 19127 - DNA, 20 bp, synthetic construct
  misc_feature 1..20: note = chemically synthesized
  source 1..20: mol_type = other DNA
cttaggacacctggttccct

SEQ ID NO: 19128 - DNA, 20 bp, synthetic construct
  misc_feature 1..20: note = chemically synthesized
  source 1..20: mol_type = other DNA
tacaaatttgtcaattcttg

SEQ ID NO: 19129 - DNA, 20 bp, synthetic construct
  misc_feature 1..20: note = chemically synthesized
  source 1..20: mol_type = other DNA
tttgtcaattcttgaagatt

SEQ ID NO: 19130 - DNA, 20 bp, synthetic construct
  misc_feature 1..20: note = chemically synthesized
  source 1..20: mol_type = other DNA
aattcttgaagattaagaat

SEQ ID NO: 19131 - DNA, 20 bp, synthetic construct
  misc_feature 1..20: note = chemically synthesized
  source 1..20: mol_type = other DNA
actctatctccctcgcctct

SEQ ID NO: 19132 - DNA, 20 bp, synthetic construct
  misc_feature 1..20: note = chemically synthesized
  source 1..20: mol_type = other DNA
tctcagtgcctgatacctaa

SEQ ID NO: 19133 - DNA, 20 bp, synthetic construct
  misc_feature 1..20: note = chemically synthesized
  source 1..20: mol_type = other DNA
atccttactgaataataaaa

SEQ ID NO: 19134 - DNA, 20 bp, synthetic construct
  misc_feature 1..20: note = chemically synthesized
  source 1..20: mol_type = other DNA
taaaatggattaatgaataa

SEQ ID NO: 19135 - DNA, 20 bp, synthetic construct
  misc_feature 1..20: note = chemically synthesized
  source 1..20: mol_type = other DNA
gaataaaagcaataaatttc

SEQ ID NO: 19136 - DNA, 20 bp, synthetic construct
  misc_feature 1..20: note = chemically synthesized
  source 1..20: mol_type = other DNA
aataaaagcaataaatttca

SEQ ID NO: 19137 - DNA, 20 bp, synthetic construct
  misc_feature 1..20: note = chemically synthesized
  source 1..20: mol_type = other DNA
gttaatattaataaattaaa

SEQ ID NO: 19138 - DNA, 20 bp, synthetic construct
  misc_feature 1..20: note = chemically synthesized
  source 1..20: mol_type = other DNA
ttaatattaataaattaaaa

SEQ ID NO: 19139 - DNA, 20 bp, synthetic construct
  misc_feature 1..20: note = chemically synthesized
  source 1..20: mol_type = other DNA
aaattaaaaaggttattttg

SEQ ID NO: 19140 - DNA, 20 bp, synthetic construct
  misc_feature 1..20: note = chemically synthesized
  source 1..20: mol_type = other DNA
aaaaggttattttgaagtct

SEQ ID NO: 19141 - DNA, 20 bp, synthetic construct
  misc_feature 1..20: note = chemically synthesized
  source 1..20: mol_type = other DNA
ttattttgaagtctgagaat

SEQ ID NO: 19142 - DNA, 20 bp, synthetic construct
  misc_feature 1..20: note = chemically synthesized
  source 1..20: mol_type = other DNA
tttcacgtttccattgttca

SEQ ID NO: 19143 - DNA, 20 bp, synthetic construct
  misc_feature 1..20: note = chemically synthesized
  source 1..20: mol_type = other DNA
ttcacgtttccattgttcat

SEQ ID NO: 19144 - DNA, 20 bp, synthetic construct
  misc_feature 1..20: note = chemically synthesized
  source 1..20: mol_type = other DNA
attgttcatgggcaaaattc

SEQ ID NO: 19145 - DNA, 20 bp, synthetic construct
  misc_feature 1..20: note = chemically synthesized
  source 1..20: mol_type = other DNA
gttcatgggcaaaattctgg

SEQ ID NO: 19146 - DNA, 20 bp, synthetic construct
  misc_feature 1..20: note = chemically synthesized
  source 1..20: mol_type = other DNA
atgggcaaaattctggcagc

SEQ ID NO: 19147 - DNA, 20 bp, synthetic construct
  misc_feature 1..20: note = chemically synthesized
  source 1..20: mol_type = other DNA
tgggcaaaattctggcagca

SEQ ID NO: 19148 - DNA, 20 bp, synthetic construct
  misc_feature 1..20: note = chemically synthesized
  source 1..20: mol_type = other DNA
gggcaaaattctggcagcaa

SEQ ID NO: 19149 - DNA, 20 bp, synthetic construct
  misc_feature 1..20: note = chemically synthesized
  source 1..20: mol_type = other DNA
cagcaagggattcttctcct

SEQ ID NO: 19150 - DNA, 20 bp, synthetic construct
  misc_feature 1..20: note = chemically synthesized
  source 1..20: mol_type = other DNA
taagaaaccttttgttttct

SEQ ID NO: 19151 - DNA, 20 bp, synthetic construct
  misc_feature 1..20: note = chemically synthesized
  source 1..20: mol_type = other DNA
gaatacatttccttgtttgc

SEQ ID NO: 19152 - DNA, 20 bp, synthetic construct
  misc_feature 1..20: note = chemically synthesized
  source 1..20: mol_type = other DNA
tccttgtttgccagaaaaca

SEQ ID NO: 19153 - DNA, 20 bp, synthetic construct
  misc_feature 1..20: note = chemically synthesized
  source 1..20: mol_type = other DNA
tgtttgccagaaaacatggt

SEQ ID NO: 19154 - DNA, 20 bp, synthetic construct
  misc_feature 1..20: note = chemically synthesized
  source 1..20: mol_type = other DNA
agaaaacatggtaagataac

SEQ ID NO: 19155 - DNA, 20 bp, synthetic construct
  misc_feature 1..20: note = chemically synthesized
  source 1..20: mol_type = other DNA
aaaacatggtaagataactg

SEQ ID NO: 19156 - DNA, 20 bp, synthetic construct
  misc_feature 1..20: note = chemically synthesized
  source 1..20: mol_type = other DNA
aacatggtaagataactgga

SEQ ID NO: 19157 - DNA, 20 bp, synthetic construct
  misc_feature 1..20: note = chemically synthesized
  source 1..20: mol_type = other DNA
taacattcattttattcatg

SEQ ID NO: 19158 - DNA, 20 bp, synthetic construct
  misc_feature 1..20: note = chemically synthesized
  source 1..20: mol_type = other DNA
ttcatgaagaaactgttatt

SEQ ID NO: 19159 - DNA, 20 bp, synthetic construct
  misc_feature 1..20: note = chemically synthesized
  source 1..20: mol_type = other DNA
aagaaactgttattcagttt

SEQ ID NO: 19160 - DNA, 20 bp, synthetic construct
  misc_feature 1..20: note = chemically synthesized
  source 1..20: mol_type = other DNA
agaaactgttattcagttta

SEQ ID NO: 19161 - DNA, 20 bp, synthetic construct
  misc_feature 1..20: note = chemically synthesized
  source 1..20: mol_type = other DNA
gaaactgttattcagtttaa

SEQ ID NO: 19162 - DNA, 20 bp, synthetic construct
  misc_feature 1..20: note = chemically synthesized
  source 1..20: mol_type = other DNA
aaactgttattcagtttaag

SEQ ID NO: 19163 - DNA, 20 bp, synthetic construct
  misc_feature 1..20: note = chemically synthesized
  source 1..20: mol_type = other DNA
cagtttaaggggttcttttt

SEQ ID NO: 19164 - DNA, 20 bp, synthetic construct
  misc_feature 1..20: note = chemically synthesized
  source 1..20: mol_type = other DNA
ttaaggggttctttttcaga

SEQ ID NO: 19165 - DNA, 20 bp, synthetic construct
  misc_feature 1..20: note = chemically synthesized
  source 1..20: mol_type = other DNA
ggttctttttcagaaagttt

SEQ ID NO: 19166 - DNA, 20 bp, synthetic construct
  misc_feature 1..20: note = chemically synthesized
  source 1..20: mol_type = other DNA
tcagaaagtttcagaaatcc

SEQ ID NO: 19167 - DNA, 20 bp, synthetic construct
  misc_feature 1..20: note = chemically synthesized
  source 1..20: mol_type = other DNA
aatccaagacctttgactgc

SEQ ID NO: 19168 - DNA, 20 bp, synthetic construct
  misc_feature 1..20: note = chemically synthesized
  source 1..20: mol_type = other DNA
gtactgtgttctttcatcta

SEQ ID NO: 19169 - DNA, 20 bp, synthetic construct
  misc_feature 1..20: note = chemically synthesized
  source 1..20: mol_type = other DNA
tactgtgttctttcatctat

SEQ ID NO: 19170 - DNA, 20 bp, synthetic construct
  misc_feature 1..20: note = chemically synthesized
  source 1..20: mol_type = other DNA
ggacatttcctttgaaaact

SEQ ID NO: 19171 - DNA, 20 bp, synthetic construct
  misc_feature 1..20: note = chemically synthesized
  source 1..20: mol_type = other DNA
gacatttcctttgaaaactg

SEQ ID NO: 19172 - DNA, 20 bp, synthetic construct
  misc_feature 1..20: note = chemically synthesized
  source 1..20: mol_type = other DNA
aatatttaattcttacataa

SEQ ID NO: 19173 - DNA, 20 bp, synthetic construct
  misc_feature 1..20: note = chemically synthesized
  source 1..20: mol_type = other DNA
attcttacataatagtaaaa

SEQ ID NO: 19174 - DNA, 20 bp, synthetic construct
  misc_feature 1..20: note = chemically synthesized
  source 1..20: mol_type = other DNA
ataatagtaaaaaagtgaat

SEQ ID NO: 19175 - DNA, 20 bp, synthetic construct
  misc_feature 1..20: note = chemically synthesized
  source 1..20: mol_type = other DNA
gtaaaaaagtgaattggcct

SEQ ID NO: 19176 - DNA, 20 bp, synthetic construct
  misc_feature 1..20: note = chemically synthesized
  source 1..20: mol_type = other DNA
aaagtgaattggccttggaa

SEQ ID NO: 19177 - DNA, 20 bp, synthetic construct
  misc_feature 1..20: note = chemically synthesized
  source 1..20: mol_type = other DNA
cttggaaaagacctaaatcc

SEQ ID NO: 19178 - DNA, 20 bp, synthetic construct
  misc_feature 1..20: note = chemically synthesized
  source 1..20: mol_type = other DNA
aatcaatttgctctatgaac

SEQ ID NO: 19179 - DNA, 20 bp, synthetic construct
  misc_feature 1..20: note = chemically synthesized
  source 1..20: mol_type = other DNA
tcaatttgctctatgaactg

SEQ ID NO: 19180 - DNA, 20 bp, synthetic construct
  misc_feature 1..20: note = chemically synthesized
  source 1..20: mol_type = other DNA
caatttgctctatgaactgg

SEQ ID NO: 19181 - DNA, 20 bp, synthetic construct
  misc_feature 1..20: note = chemically synthesized
  source 1..20: mol_type = other DNA
atttgctctatgaactggag

SEQ ID NO: 19182 - DNA, 20 bp, synthetic construct
  misc_feature 1..20: note = chemically synthesized
  source 1..20: mol_type = other DNA
tgctctatgaactggaggag

SEQ ID NO: 19183 - DNA, 20 bp, synthetic construct
  misc_feature 1..20: note = chemically synthesized
  source 1..20: mol_type = other DNA
gctctatgaactggaggagt

SEQ ID NO: 19184 - DNA, 20 bp, synthetic construct
  misc_feature 1..20: note = chemically synthesized
  source 1..20: mol_type = other DNA
gagtgggattcatgatctct

SEQ ID NO: 19185 - DNA, 20 bp, synthetic construct
  misc_feature 1..20: note = chemically synthesized
  source 1..20: mol_type = other DNA
catatcactactatgaaatg

SEQ ID NO: 19186 - DNA, 20 bp, synthetic construct
  misc_feature 1..20: note = chemically synthesized
  source 1..20: mol_type = other DNA
atatcactactatgaaatgc

SEQ ID NO: 19187 - DNA, 20 bp, synthetic construct
  misc_feature 1..20: note = chemically synthesized
  source 1..20: mol_type = other DNA
tatcactactatgaaatgca

SEQ ID NO: 19188 - DNA, 20 bp, synthetic construct
  misc_feature 1..20: note = chemically synthesized
  source 1..20: mol_type = other DNA
cactactatgaaatgcaggg

SEQ ID NO: 19189 - DNA, 20 bp, synthetic construct
  misc_feature 1..20: note = chemically synthesized
  source 1..20: mol_type = other DNA
aattcaaatcattaaattta

SEQ ID NO: 19190 - DNA, 20 bp, synthetic construct
  misc_feature 1..20: note = chemically synthesized
  source 1..20: mol_type = other DNA
cattaaatttaaagaaacta

SEQ ID NO: 19191 - DNA, 20 bp, synthetic construct
  misc_feature 1..20: note = chemically synthesized
  source 1..20: mol_type = other DNA
taaatttaaagaaactatag

SEQ ID NO: 19192 - DNA, 20 bp, synthetic construct
  misc_feature 1..20: note = chemically synthesized
  source 1..20: mol_type = other DNA
ctatagtggcaatgtattat

SEQ ID NO: 19193 - DNA, 20 bp, synthetic construct
  misc_feature 1..20: note = chemically synthesized
  source 1..20: mol_type = other DNA
tatagtggcaatgtattatt

SEQ ID NO: 19194 - DNA, 20 bp, synthetic construct
  misc_feature 1..20: note = chemically synthesized
  source 1..20: mol_type = other DNA
atgaaaatctcaaaccatac

SEQ ID NO: 19195 - DNA, 20 bp, synthetic construct
  misc_feature 1..20: note = chemically synthesized
  source 1..20: mol_type = other DNA
tgaaaatctcaaaccatacc

SEQ ID NO: 19196 - DNA, 20 bp, synthetic construct
  misc_feature 1..20: note = chemically synthesized
  source 1..20: mol_type = other DNA
gctatgataatattaaaata

SEQ ID NO: 19197 - DNA, 20 bp, synthetic construct
  misc_feature 1..20: note = chemically synthesized
  source 1..20: mol_type = other DNA
attaaaataaagatacattg

SEQ ID NO: 19198 - DNA, 20 bp, synthetic construct
  misc_feature 1..20: note = chemically synthesized
  source 1..20: mol_type = other DNA
aacttgtgtaaatcacattg

SEQ ID NO: 19199 - DNA, 20 bp, synthetic construct
  misc_feature 1..20: note = chemically synthesized
  source 1..20: mol_type = other DNA
acttgtgtaaatcacattgt

SEQ ID NO: 19200 - DNA, 20 bp, synthetic construct
  misc_feature 1..20: note = chemically synthesized
  source 1..20: mol_type = other DNA
cttgtgtaaatcacattgtg

SEQ ID NO: 19201 - DNA, 20 bp, synthetic construct
  misc_feature 1..20: note = chemically synthesized
  source 1..20: mol_type = other DNA
aacacttcccttccccttga

SEQ ID NO: 19202 - DNA, 20 bp, synthetic construct
  misc_feature 1..20: note = chemically synthesized
  source 1..20: mol_type = other DNA
acacttcccttccccttgaa

SEQ ID NO: 19203 - DNA, 20 bp, synthetic construct
  misc_feature 1..20: note = chemically synthesized
  source 1..20: mol_type = other DNA
cacttcccttccccttgaaa

SEQ ID NO: 19204 - DNA, 20 bp, synthetic construct
  misc_feature 1..20: note = chemically synthesized
  source 1..20: mol_type = other DNA
tccccttgaaagggaaatga

SEQ ID NO: 19205 - DNA, 20 bp, synthetic construct
  misc_feature 1..20: note = chemically synthesized
  source 1..20: mol_type = other DNA
aaagggaaatgatagaaaat

SEQ ID NO: 19206 - DNA, 20 bp, synthetic construct
  misc_feature 1..20: note = chemically synthesized
  source 1..20: mol_type = other DNA
atgatagaaaataagtatta

SEQ ID NO: 19207 - DNA, 20 bp, synthetic construct
  misc_feature 1..20: note = chemically synthesized
  source 1..20: mol_type = other DNA
tgatagaaaataagtattaa

SEQ ID NO: 19208 - DNA, 20 bp, synthetic construct
  misc_feature 1..20: note = chemically synthesized
  source 1..20: mol_type = other DNA
tagaaaataagtattaaagg

SEQ ID NO: 19209 - DNA, 20 bp, synthetic construct
  misc_feature 1..20: note = chemically synthesized
  source 1..20: mol_type = other DNA
aataagtattaaaggcagct

SEQ ID NO: 19210 - DNA, 20 bp, synthetic construct
  misc_feature 1..20: note = chemically synthesized
  source 1..20: mol_type = other DNA
ataagtattaaaggcagctt

SEQ ID NO: 19211 - DNA, 20 bp, synthetic construct
  misc_feature 1..20: note = chemically synthesized
  source 1..20: mol_type = other DNA
taagtattaaaggcagctta

SEQ ID NO: 19212 - DNA, 20 bp, synthetic construct
  misc_feature 1..20: note = chemically synthesized
  source 1..20: mol_type = other DNA
aagtattaaaggcagcttag

SEQ ID NO: 19213 - DNA, 20 bp, synthetic construct
  misc_feature 1..20: note = chemically synthesized
  source 1..20: mol_type = other DNA
ttttcaaaaaaaaatccatt

SEQ ID NO: 19214 - DNA, 20 bp, synthetic construct
  misc_feature 1..20: note = chemically synthesized
  source 1..20: mol_type = other DNA
attgagcattttctatgtac

SEQ ID NO: 19215 - DNA, 20 bp, synthetic construct
  misc_feature 1..20: note = chemically synthesized
  source 1..20: mol_type = other DNA
ttgagcattttctatgtacc

SEQ ID NO: 19216 - DNA, 20 bp, synthetic construct
  misc_feature 1..20: note = chemically synthesized
  source 1..20: mol_type = other DNA
ctatgtaccaggcactgttc

SEQ ID NO: 19217 - DNA, 20 bp, synthetic construct
  misc_feature 1..20: note = chemically synthesized
  source 1..20: mol_type = other DNA
caggcactgttctagaccct

SEQ ID NO: 19218 - DNA, 20 bp, synthetic construct
  misc_feature 1..20: note = chemically synthesized
  source 1..20: mol_type = other DNA
acacacatgctactgattat

SEQ ID NO: 19219 - DNA, 20 bp, synthetic construct
  misc_feature 1..20: note = chemically synthesized
  source 1..20: mol_type = other DNA
ataagatccataaaataact

SEQ ID NO: 19220 - DNA, 20 bp, synthetic construct
  misc_feature 1..20: note = chemically synthesized
  source 1..20: mol_type = other DNA
ataaaataacttagtttcac

SEQ ID NO: 19221 - DNA, 20 bp, synthetic construct
  misc_feature 1..20: note = chemically synthesized
  source 1..20: mol_type = other DNA
tagtttcactggcgtgttcc

SEQ ID NO: 19222 - DNA, 20 bp, synthetic construct
  misc_feature 1..20: note = chemically synthesized
  source 1..20: mol_type = other DNA
actggcgtgttcccagtgcc

SEQ ID NO: 19223 - DNA, 20 bp, synthetic construct
  misc_feature 1..20: note = chemically synthesized
  source 1..20: mol_type = other DNA
ctggcgtgttcccagtgccc

SEQ ID NO: 19224 - DNA, 20 bp, synthetic construct
  misc_feature 1..20: note = chemically synthesized
  source 1..20: mol_type = other DNA
tgttcccagtgcccaggtaa

SEQ ID NO: 19225 - DNA, 20 bp, synthetic construct
  misc_feature 1..20: note = chemically synthesized
  source 1..20: mol_type = other DNA
attaatgtttgttaaatgat

SEQ ID NO: 19226 - DNA, 20 bp, synthetic construct
  misc_feature 1..20: note = chemically synthesized
  source 1..20: mol_type = other DNA
tgtttgttaaatgatgagaa

SEQ ID NO: 19227 - DNA, 20 bp, synthetic construct
  misc_feature 1..20: note = chemically synthesized
  source 1..20: mol_type = other DNA
tttgttaaatgatgagaaaa

SEQ ID NO: 19228 - DNA, 20 bp, synthetic construct
  misc_feature 1..20: note = chemically synthesized
  source 1..20: mol_type = other DNA
ttgttaaatgatgagaaaag

SEQ ID NO: 19229 - DNA, 20 bp, synthetic construct
  misc_feature 1..20: note = chemically synthesized
  source 1..20: mol_type = other DNA
taaatgatgagaaaagagga

SEQ ID NO: 19230 - DNA, 20 bp, synthetic construct
  misc_feature 1..20: note = chemically synthesized
  source 1..20: mol_type = other DNA
atgatgagaaaagaggaaag

SEQ ID NO: 19231 - DNA, 20 bp, synthetic construct
  misc_feature 1..20: note = chemically synthesized
  source 1..20: mol_type = other DNA
atgagaaaagaggaaagcag

SEQ ID NO: 19232 - DNA, 20 bp, synthetic construct
  misc_feature 1..20: note = chemically synthesized
  source 1..20: mol_type = other DNA
tgagaaaagaggaaagcaga

SEQ ID NO: 19233 - DNA, 20 bp, synthetic construct
  misc_feature 1..20: note = chemically synthesized
  source 1..20: mol_type = other DNA
gagaaaagaggaaagcagaa

SEQ ID NO: 19234 - DNA, 20 bp, synthetic construct
  misc_feature 1..20: note = chemically synthesized
  source 1..20: mol_type = other DNA
agaaaagaggaaagcagaag

SEQ ID NO: 19235 - DNA, 20 bp, synthetic construct
  misc_feature 1..20: note = chemically synthesized
  source 1..20: mol_type = other DNA
aaagcagaaggggctctgct

SEQ ID NO: 19236 - DNA, 20 bp, synthetic construct
  misc_feature 1..20: note = chemically synthesized
  source 1..20: mol_type = other DNA
aagcagaaggggctctgctc

SEQ ID NO: 19237 - DNA, 20 bp, synthetic construct
  misc_feature 1..20: note = chemically synthesized
  source 1..20: mol_type = other DNA
gaaggggctctgctcaggtg

SEQ ID NO: 19238 - DNA, 20 bp, synthetic construct
  misc_feature 1..20: note = chemically synthesized
  source 1..20: mol_type = other DNA
aaggggctctgctcaggtgc

SEQ ID NO: 19239 - DNA, 20 bp, synthetic construct
  misc_feature 1..20: note = chemically synthesized
  source 1..20: mol_type = other DNA
ctcaggtgcaggaacttgtg

SEQ ID NO: 19240 - DNA, 20 bp, synthetic construct
  misc_feature 1..20: note = chemically synthesized
  source 1..20: mol_type = other DNA
caggtgcaggaacttgtgca

SEQ ID NO: 19241 - DNA, 20 bp, synthetic construct
  misc_feature 1..20: note = chemically synthesized
  source 1..20: mol_type = other DNA
gaacttgtgcagagatcttc

SEQ ID NO: 19242 - DNA, 20 bp, synthetic construct
  misc_feature 1..20: note = chemically synthesized
  source 1..20: mol_type = other DNA
agatcttctggactgattcc

SEQ ID NO: 19243 - DNA, 20 bp, synthetic construct
  misc_feature 1..20: note = chemically synthesized
  source 1..20: mol_type = other DNA
gactgattcccagtgctaac

SEQ ID NO: 19244 - DNA, 20 bp, synthetic construct
  misc_feature 1..20: note = chemically synthesized
  source 1..20: mol_type = other DNA
cagtgctaacaagtcccttc

SEQ ID NO: 19245 - DNA, 20 bp, synthetic construct
  misc_feature 1..20: note = chemically synthesized
  source 1..20: mol_type = other DNA
ttccagttttatccaccaat

SEQ ID NO: 19246 - DNA, 20 bp, synthetic construct
  misc_feature 1..20: note = chemically synthesized
  source 1..20: mol_type = other DNA
caccaataagctatgtcctt

SEQ ID NO: 19247 - DNA, 20 bp, synthetic construct
  misc_feature 1..20: note = chemically synthesized
  source 1..20: mol_type = other DNA
ttgagctcctgcccactctc

SEQ ID NO: 19248 - DNA, 20 bp, synthetic construct
  misc_feature 1..20: note = chemically synthesized
  source 1..20: mol_type = other DNA
gagctcctgcccactctcta

SEQ ID NO: 19249 - DNA, 20 bp, synthetic construct
  misc_feature 1..20: note = chemically synthesized
  source 1..20: mol_type = other DNA
ctagagaaaacttttatttc

SEQ ID NO: 19250 - DNA, 20 bp, synthetic construct
  misc_feature 1..20: note = chemically synthesized
  source 1..20: mol_type = other DNA
tagagaaaacttttatttca

SEQ ID NO: 19251 - DNA, 20 bp, synthetic construct
  misc_feature 1..20: note = chemically synthesized
  source 1..20: mol_type = other DNA
ttttatttcaaggcatactc

SEQ ID NO: 19252 - DNA, 20 bp, synthetic construct
  misc_feature 1..20: note = chemically synthesized
  source 1..20: mol_type = other DNA
tttatttcaaggcatactcc

SEQ ID NO: 19253 - DNA, 20 bp, synthetic construct
  misc_feature 1..20: note = chemically synthesized
  source 1..20: mol_type = other DNA
actccgggattcacatgtga

SEQ ID NO: 19254 - DNA, 20 bp, synthetic construct
  misc_feature 1..20: note = chemically synthesized
  source 1..20: mol_type = other DNA
tccgggattcacatgtgata

SEQ ID NO: 19255 - DNA, 20 bp, synthetic construct
  misc_feature 1..20: note = chemically synthesized
  source 1..20: mol_type = other DNA
ggattcacatgtgatagaga

SEQ ID NO: 19256 - DNA, 20 bp, synthetic construct
  misc_feature 1..20: note = chemically synthesized
  source 1..20: mol_type = other DNA
gatagagatggttctgttcc

SEQ ID NO: 19257 - DNA, 20 bp, synthetic construct
  misc_feature 1..20: note = chemically synthesized
  source 1..20: mol_type = other DNA
atagagatggttctgttccc

SEQ ID NO: 19258 - DNA, 20 bp, synthetic construct
  misc_feature 1..20: note = chemically synthesized
  source 1..20: mol_type = other DNA
ggttctgttcccaggaactt

SEQ ID NO: 19259 - DNA, 20 bp, synthetic construct
  misc_feature 1..20: note = chemically synthesized
  source 1..20: mol_type = other DNA
gttctgttcccaggaacttt

SEQ ID NO: 19260 - DNA, 20 bp, synthetic construct
  misc_feature 1..20: note = chemically synthesized
  source 1..20: mol_type = other DNA
ctttgggcatatttaaaaac

SEQ ID NO: 19261 - DNA, 20 bp, synthetic construct
  misc_feature 1..20: note = chemically synthesized
  source 1..20: mol_type = other DNA
ggcatatttaaaaactggac

SEQ ID NO: 19262 - DNA, 20 bp, synthetic construct
  misc_feature 1..20: note = chemically synthesized
  source 1..20: mol_type = other DNA
ggactggaaaaatttgtgac

SEQ ID NO: 19263 - DNA, 20 bp, synthetic construct
  misc_feature 1..20: note = chemically synthesized
  source 1..20: mol_type = other DNA
gaaaaatttgtgactagaaa

SEQ ID NO: 19264 - DNA, 20 bp, synthetic construct
  misc_feature 1..20: note = chemically synthesized
  source 1..20: mol_type = other DNA
aaaaatttgtgactagaaaa

SEQ ID NO: 19265 - DNA, 20 bp, synthetic construct
  misc_feature 1..20: note = chemically synthesized
  source 1..20: mol_type = other DNA
ttaaaaacacatgctcattt

SEQ ID NO: 19266 - DNA, 20 bp, synthetic construct
  misc_feature 1..20: note = chemically synthesized
  source 1..20: mol_type = other DNA
taaaaacacatgctcatttc

SEQ ID NO: 19267 - DNA, 20 bp, synthetic construct
  misc_feature 1..20: note = chemically synthesized
  source 1..20: mol_type = other DNA
cacatgctcatttcaggata

SEQ ID NO: 19268 - DNA, 20 bp, synthetic construct
  misc_feature 1..20: note = chemically synthesized
  source 1..20: mol_type = other DNA
atttcaggataaagatctct

SEQ ID NO: 19269 - DNA, 20 bp, synthetic construct
  misc_feature 1..20: note = chemically synthesized
  source 1..20: mol_type = other DNA
tttcaggataaagatctctg

SEQ ID NO: 19270 - DNA, 20 bp, synthetic construct
  misc_feature 1..20: note = chemically synthesized
  source 1..20: mol_type = other DNA
ggataaagatctctgaggaa

SEQ ID NO: 19271 - DNA, 20 bp, synthetic construct
  misc_feature 1..20: note = chemically synthesized
  source 1..20: mol_type = other DNA
agaatacaaaataatttaaa

SEQ ID NO: 19272 - DNA, 20 bp, synthetic construct
  misc_feature 1..20: note = chemically synthesized
  source 1..20: mol_type = other DNA
aataatttaaaaagaaacaa

SEQ ID NO: 19273 - DNA, 20 bp, synthetic construct
  misc_feature 1..20: note = chemically synthesized
  source 1..20: mol_type = other DNA
ttaaaaagaaacaacagaaa

SEQ ID NO: 19274 - DNA, 20 bp, synthetic construct
  misc_feature 1..20: note = chemically synthesized
  source 1..20: mol_type = other DNA
taaaaagaaacaacagaaac

SEQ ID NO: 19275 - DNA, 20 bp, synthetic construct
  misc_feature 1..20: note = chemically synthesized
  source 1..20: mol_type = other DNA
atacttcacttctctgtaat

SEQ ID NO: 19276 - DNA, 20 bp, synthetic construct
  misc_feature 1..20: note = chemically synthesized
  source 1..20: mol_type = other DNA
tacttcacttctctgtaata

SEQ ID NO: 19277 - DNA, 20 bp, synthetic construct
  misc_feature 1..20: note = chemically synthesized
  source 1..20: mol_type = other DNA
taataaggtttctgtcctcc

SEQ ID NO: 19278 - DNA, 20 bp, synthetic construct
  misc_feature 1..20: note = chemically synthesized
  source 1..20: mol_type = other DNA
gattctttctcactaaacta

SEQ ID NO: 19279 - DNA, 20 bp, synthetic construct
  misc_feature 1..20: note = chemically synthesized
  source 1..20: mol_type = other DNA
ttctttctcactaaactaca

SEQ ID NO: 19280 - DNA, 20 bp, synthetic construct
  misc_feature 1..20: note = chemically synthesized
  source 1..20: mol_type = other DNA
ctcactaaactacagagaat

SEQ ID NO: 19281 - DNA, 20 bp, synthetic construct
  misc_feature 1..20: note = chemically synthesized
  source 1..20: mol_type = other DNA
gcattctgtccacttctaca

SEQ ID NO: 19282 - DNA, 20 bp, synthetic construct
  misc_feature 1..20: note = chemically synthesized
  source 1..20: mol_type = other DNA
cattctgtccacttctacat

SEQ ID NO: 19283 - DNA, 20 bp, synthetic construct
  misc_feature 1..20: note = chemically synthesized
  source 1..20: mol_type = other DNA
ttttatgaatgcatacacac

SEQ ID NO: 19284 - DNA, 20 bp, synthetic construct
  misc_feature 1..20: note = chemically synthesized
  source 1..20: mol_type = other DNA
atacacacgagaactttgaa

SEQ ID NO: 19285 - DNA, 20 bp, synthetic construct
  misc_feature 1..20: note = chemically synthesized
  source 1..20: mol_type = other DNA
acacgagaactttgaacagt

SEQ ID NO: 19286 - DNA, 20 bp, synthetic construct
  misc_feature 1..20: note = chemically synthesized
  source 1..20: mol_type = other DNA
gaactttgaacagttagtat

SEQ ID NO: 19287 - DNA, 20 bp, synthetic construct
  misc_feature 1..20: note = chemically synthesized
  source 1..20: mol_type = other DNA
aactttgaacagttagtata

SEQ ID NO: 19288 - DNA, 20 bp, synthetic construct
  misc_feature 1..20: note = chemically synthesized
  source 1..20: mol_type = other DNA
taaggtgaattctgattttt

SEQ ID NO: 19289 - DNA, 20 bp, synthetic construct
  misc_feature 1..20: note = chemically synthesized
  source 1..20: mol_type = other DNA
tatataatgcatttaatttt

SEQ ID NO: 19290 - DNA, 20 bp, synthetic construct
  misc_feature 1..20: note = chemically synthesized
  source 1..20: mol_type = other DNA
atttaattttgagattatgc

SEQ ID NO: 19291 - DNA, 20 bp, synthetic construct
  misc_feature 1..20: note = chemically synthesized
  source 1..20: mol_type = other DNA
gagattatgctggctctgat

SEQ ID NO: 19292 - DNA, 20 bp, synthetic construct
  misc_feature 1..20: note = chemically synthesized
  source 1..20: mol_type = other DNA
tgctggctctgattagccaa

SEQ ID NO: 19293 - DNA, 20 bp, synthetic construct
  misc_feature 1..20: note = chemically synthesized
  source 1..20: mol_type = other DNA
tggctctgattagccaaaag

SEQ ID NO: 19294 - DNA, 20 bp, synthetic construct
  misc_feature 1..20: note = chemically synthesized
  source 1..20: mol_type = other DNA
ggctctgattagccaaaaga

SEQ ID NO: 19295 - DNA, 20 bp, synthetic construct
  misc_feature 1..20: note = chemically synthesized
  source 1..20: mol_type = other DNA
tctgattagccaaaagaagg

SEQ ID NO: 19296 - DNA, 20 bp, synthetic construct
  misc_feature 1..20: note = chemically synthesized
  source 1..20: mol_type = other DNA
ggaagtaatatatcacattc

SEQ ID NO: 19297 - DNA, 20 bp, synthetic construct
  misc_feature 1..20: note = chemically synthesized
  source 1..20: mol_type = other DNA
tcacattctggttattattt

SEQ ID NO: 19298 - DNA, 20 bp, synthetic construct
  misc_feature 1..20: note = chemically synthesized
  source 1..20: mol_type = other DNA
ggttattatttcagatcctt

SEQ ID NO: 19299 - DNA, 20 bp, synthetic construct
  misc_feature 1..20: note = chemically synthesized
  source 1..20: mol_type = other DNA
gatcctttagattactgtaa

SEQ ID NO: 19300 - DNA, 20 bp, synthetic construct
  misc_feature 1..20: note = chemically synthesized
  source 1..20: mol_type = other DNA
ttactgtaatagacatgaaa

SEQ ID NO: 19301 - DNA, 20 bp, synthetic construct
  misc_feature 1..20: note = chemically synthesized
  source 1..20: mol_type = other DNA
cacaacacatgacataattt

SEQ ID NO: 19302 - DNA, 20 bp, synthetic construct
  misc_feature 1..20: note = chemically synthesized
  source 1..20: mol_type = other DNA
tcagatcgtttaaatcacac

SEQ ID NO: 19303 - DNA, 20 bp, synthetic construct
  misc_feature 1..20: note = chemically synthesized
  source 1..20: mol_type = other DNA
agtcatcactgccatttacc

SEQ ID NO: 19304 - DNA, 20 bp, synthetic construct
  misc_feature 1..20: note = chemically synthesized
  source 1..20: mol_type = other DNA
actgccatttacccagcaat

SEQ ID NO: 19305 - DNA, 20 bp, synthetic construct
  misc_feature 1..20: note = chemically synthesized
  source 1..20: mol_type = other DNA
ccatttacccagcaatcagt

SEQ ID NO: 19306 - DNA, 20 bp, synthetic construct
  misc_feature 1..20: note = chemically synthesized
  source 1..20: mol_type = other DNA
atcagttggcttgattcttc

SEQ ID NO: 19307 - DNA, 20 bp, synthetic construct
  misc_feature 1..20: note = chemically synthesized
  source 1..20: mol_type = other DNA
gcttgattcttcaagatctt

SEQ ID NO: 19308 - DNA, 20 bp, synthetic construct
  misc_feature 1..20: note = chemically synthesized
  source 1..20: mol_type = other DNA
cttgattcttcaagatcttg

SEQ ID NO: 19309 - DNA, 20 bp, synthetic construct
  misc_feature 1..20: note = chemically synthesized
  source 1..20: mol_type = other DNA
cttcaagatcttgaggaact

SEQ ID NO: 19310 - DNA, 20 bp, synthetic construct
  misc_feature 1..20: note = chemically synthesized
  source 1..20: mol_type = other DNA
ctttgctaatgttccttcaa

SEQ ID NO: 19311 - DNA, 20 bp, synthetic construct
  misc_feature 1..20: note = chemically synthesized
  source 1..20: mol_type = other DNA
tagtcttgacacttttaaac

SEQ ID NO: 19312 - DNA, 20 bp, synthetic construct
  misc_feature 1..20: note = chemically synthesized
  source 1..20: mol_type = other DNA
gtcttgacacttttaaacta

SEQ ID NO: 19313 - DNA, 20 bp, synthetic construct
  misc_feature 1..20: note = chemically synthesized
  source 1..20: mol_type = other DNA
cttgacacttttaaactaga

SEQ ID NO: 19314 - DNA, 20 bp, synthetic construct
  misc_feature 1..20: note = chemically synthesized
  source 1..20: mol_type = other DNA
actagagagtataaacccac

SEQ ID NO: 19315 - DNA, 20 bp, synthetic construct
  misc_feature 1..20: note = chemically synthesized
  source 1..20: mol_type = other DNA
ctagagagtataaacccaca

SEQ ID NO: 19316 - DNA, 20 bp, synthetic construct
  misc_feature 1..20: note = chemically synthesized
  source 1..20: mol_type = other DNA
ggaattgttttataatttta

SEQ ID NO: 19317 - DNA, 20 bp, synthetic construct
  misc_feature 1..20: note = chemically synthesized
  source 1..20: mol_type = other DNA
tttcaaaatcatttacattg

SEQ ID NO: 19318 - DNA, 20 bp, synthetic construct
  misc_feature 1..20: note = chemically synthesized
  source 1..20: mol_type = other DNA
ctaccttgccttctcttacc

SEQ ID NO: 19319 - DNA, 20 bp, synthetic construct
  misc_feature 1..20: note = chemically synthesized
  source 1..20: mol_type = other DNA
ttgccttctcttacccagca

SEQ ID NO: 19320 - DNA, 20 bp, synthetic construct
  misc_feature 1..20: note = chemically synthesized
  source 1..20: mol_type = other DNA
ttctcttacccagcacagat

SEQ ID NO: 19321 - DNA, 20 bp, synthetic construct
  misc_feature 1..20: note = chemically synthesized
  source 1..20: mol_type = other DNA
tctcttacccagcacagatg

SEQ ID NO: 19322 - DNA, 20 bp, synthetic construct
  misc_feature 1..20: note = chemically synthesized
  source 1..20: mol_type = other DNA
ttattttataattcctacat

SEQ ID NO: 19323 - DNA, 20 bp, synthetic construct
  misc_feature 1..20: note = chemically synthesized
  source 1..20: mol_type = other DNA
ttataattcctacataagca

SEQ ID NO: 19324 - DNA, 20 bp, synthetic construct
  misc_feature 1..20: note = chemically synthesized
  source 1..20: mol_type = other DNA
cctacataagcatagcattg

SEQ ID NO: 19325 - DNA, 20 bp, synthetic construct
  misc_feature 1..20: note = chemically synthesized
  source 1..20: mol_type = other DNA
aaaaattactttcattctga

SEQ ID NO: 19326 - DNA, 20 bp, synthetic construct
  misc_feature 1..20: note = chemically synthesized
  source 1..20: mol_type = other DNA
aaaattactttcattctgaa

SEQ ID NO: 19327 - DNA, 20 bp, synthetic construct
  misc_feature 1..20: note = chemically synthesized
  source 1..20: mol_type = other DNA
aattactttcattctgaaag

SEQ ID NO: 19328 - DNA, 20 bp, synthetic construct
  misc_feature 1..20: note = chemically synthesized
  source 1..20: mol_type = other DNA
ctttcattctgaaaggagca

SEQ ID NO: 19329 - DNA, 20 bp, synthetic construct
  misc_feature 1..20: note = chemically synthesized
  source 1..20: mol_type = other DNA
agcacagtattttgcctttt

SEQ ID NO: 19330 - DNA, 20 bp, synthetic construct
  misc_feature 1..20: note = chemically synthesized
  source 1..20: mol_type = other DNA
acagtattttgccttttgag

SEQ ID NO: 19331 - DNA, 20 bp, synthetic construct
  misc_feature 1..20: note = chemically synthesized
  source 1..20: mol_type = other DNA
tgaattaaaacattaattcc

SEQ ID NO: 19332 - DNA, 20 bp, synthetic construct
  misc_feature 1..20: note = chemically synthesized
  source 1..20: mol_type = other DNA
tgtgaatatgaaacattctt

SEQ ID NO: 19333 - DNA, 20 bp, synthetic construct
  misc_feature 1..20: note = chemically synthesized
  source 1..20: mol_type = other DNA
gcatttcatataattactaa

SEQ ID NO: 19334 - DNA, 20 bp, synthetic construct
  misc_feature 1..20: note = chemically synthesized
  source 1..20: mol_type = other DNA
atataattactaacagaatg

SEQ ID NO: 19335 - DNA, 20 bp, synthetic construct
  misc_feature 1..20: note = chemically synthesized
  source 1..20: mol_type = other DNA
ataattactaacagaatgta

SEQ ID NO: 19336 - DNA, 20 bp, synthetic construct
  misc_feature 1..20: note = chemically synthesized
  source 1..20: mol_type = other DNA
tactaacagaatgtagagtt

SEQ ID NO: 19337 - DNA, 20 bp, synthetic construct
  misc_feature 1..20: note = chemically synthesized
  source 1..20: mol_type = other DNA
actaacagaatgtagagttg

SEQ ID NO: 19338 - DNA, 20 bp, synthetic construct
  misc_feature 1..20: note = chemically synthesized
  source 1..20: mol_type = other DNA
gtagagttgaggtttccaac

SEQ ID NO: 19339 - DNA, 20 bp, synthetic construct
  misc_feature 1..20: note = chemically synthesized
  source 1..20: mol_type = other DNA
tttaattatactattttgct

SEQ ID NO: 19340 - DNA, 20 bp, synthetic construct
  misc_feature 1..20: note = chemically synthesized
  source 1..20: mol_type = other DNA
atttctatgttgtcataata

SEQ ID NO: 19341 - DNA, 20 bp, synthetic construct
  misc_feature 1..20: note = chemically synthesized
  source 1..20: mol_type = other DNA
taatttaaatgcacattcca

SEQ ID NO: 19342 - DNA, 20 bp, synthetic construct
  misc_feature 1..20: note = chemically synthesized
  source 1..20: mol_type = other DNA
aaatgcacattccatggcaa

SEQ ID NO: 19343 - DNA, 20 bp, synthetic construct
  misc_feature 1..20: note = chemically synthesized
  source 1..20: mol_type = other DNA
tccctcttcaacacatacac

SEQ ID NO: 19344 - DNA, 20 bp, synthetic construct
  misc_feature 1..20: note = chemically synthesized
  source 1..20: mol_type = other DNA
catacacaagtctgtattca

SEQ ID NO: 19345 - DNA, 20 bp, synthetic construct
  misc_feature 1..20: note = chemically synthesized
  source 1..20: mol_type = other DNA
gtattcatagcctgttgtaa

SEQ ID NO: 19346 - DNA, 20 bp, synthetic construct
  misc_feature 1..20: note = chemically synthesized
  source 1..20: mol_type = other DNA
catagcctgttgtaatagac

SEQ ID NO: 19347 - DNA, 20 bp, synthetic construct
  misc_feature 1..20: note = chemically synthesized
  source 1..20: mol_type = other DNA
atagcctgttgtaatagaca

SEQ ID NO: 19348 - DNA, 20 bp, synthetic construct
  misc_feature 1..20: note = chemically synthesized
  source 1..20: mol_type = other DNA
gtaatagacaaggttaaatg

SEQ ID NO: 19349 - DNA, 20 bp, synthetic construct
  misc_feature 1..20: note = chemically synthesized
  source 1..20: mol_type = other DNA
taaatgctttcctcactcac

SEQ ID NO: 19350 - DNA, 20 bp, synthetic construct
  misc_feature 1..20: note = chemically synthesized
  source 1..20: mol_type = other DNA
tttcctcactcactagcaat

SEQ ID NO: 19351 - DNA, 20 bp, synthetic construct
  misc_feature 1..20: note = chemically synthesized
  source 1..20: mol_type = other DNA
cactagcaattggttatcac

SEQ ID NO: 19352 - DNA, 20 bp, synthetic construct
  misc_feature 1..20: note = chemically synthesized
  source 1..20: mol_type = other DNA
ctagcaattggttatcacta

SEQ ID NO: 19353 - DNA, 20 bp, synthetic construct
  misc_feature 1..20: note = chemically synthesized
  source 1..20: mol_type = other DNA
agcaattggttatcactaga

SEQ ID NO: 19354 - DNA, 20 bp, synthetic construct
  misc_feature 1..20: note = chemically synthesized
  source 1..20: mol_type = other DNA
aaatcttactctacattcct

SEQ ID NO: 19355 - DNA, 20 bp, synthetic construct
  misc_feature 1..20: note = chemically synthesized
  source 1..20: mol_type = other DNA
ctctacattcctcagtcacc

SEQ ID NO: 19356 - DNA, 20 bp, synthetic construct
  misc_feature 1..20: note = chemically synthesized
  source 1..20: mol_type = other DNA
cattcctcagtcacctagtg

SEQ ID NO: 19357 - DNA, 20 bp, synthetic construct
  misc_feature 1..20: note = chemically synthesized
  source 1..20: mol_type = other DNA
attcctcagtcacctagtga

SEQ ID NO: 19358 - DNA, 20 bp, synthetic construct
  misc_feature 1..20: note = chemically synthesized
  source 1..20: mol_type = other DNA
aaggtgtactgatccacctt

SEQ ID NO: 19359 - DNA, 20 bp, synthetic construct
  misc_feature 1..20: note = chemically synthesized
  source 1..20: mol_type = other DNA
aggtgtactgatccaccttc

SEQ ID NO: 19360 - DNA, 20 bp, synthetic construct
  misc_feature 1..20: note = chemically synthesized
  source 1..20: mol_type = other DNA
gtgtactgatccaccttcag

SEQ ID NO: 19361 - DNA, 20 bp, synthetic construct
  misc_feature 1..20: note = chemically synthesized
  source 1..20: mol_type = other DNA
tactgatccaccttcaggag

SEQ ID NO: 19362 - DNA, 20 bp, synthetic construct
  misc_feature 1..20: note = chemically synthesized
  source 1..20: mol_type = other DNA
ggagcagtacaaacctttat

SEQ ID NO: 19363 - DNA, 20 bp, synthetic construct
  misc_feature 1..20: note = chemically synthesized
  source 1..20: mol_type = other DNA
acctttattggtcacttccc

SEQ ID NO: 19364 - DNA, 20 bp, synthetic construct
  misc_feature 1..20: note = chemically synthesized
  source 1..20: mol_type = other DNA
tcacttcccaagcaacttca

SEQ ID NO: 19365 - DNA, 20 bp, synthetic construct
  misc_feature 1..20: note = chemically synthesized
  source 1..20: mol_type = other DNA
acttcccaagcaacttcaaa

SEQ ID NO: 19366 - DNA, 20 bp, synthetic construct
  misc_feature 1..20: note = chemically synthesized
  source 1..20: mol_type = other DNA
tcccaagcaacttcaaagag

SEQ ID NO: 19367 - DNA, 20 bp, synthetic construct
  misc_feature 1..20: note = chemically synthesized
  source 1..20: mol_type = other DNA
aaagagcagtaactcctcca

SEQ ID NO: 19368 - DNA, 20 bp, synthetic construct
  misc_feature 1..20: note = chemically synthesized
  source 1..20: mol_type = other DNA
aagagcagtaactcctccac

SEQ ID NO: 19369 - DNA, 20 bp, synthetic construct
  misc_feature 1..20: note = chemically synthesized
  source 1..20: mol_type = other DNA
agcagtaactcctccacagg

SEQ ID NO: 19370 - DNA, 20 bp, synthetic construct
  misc_feature 1..20: note = chemically synthesized
  source 1..20: mol_type = other DNA
gaagttcttcgacttcccac

SEQ ID NO: 19371 - DNA, 20 bp, synthetic construct
  misc_feature 1..20: note = chemically synthesized
  source 1..20: mol_type = other DNA
aagttcttcgacttcccact

SEQ ID NO: 19372 - DNA, 20 bp, synthetic construct
  misc_feature 1..20: note = chemically synthesized
  source 1..20: mol_type = other DNA
agttcttcgacttcccactg

SEQ ID NO: 19373 - DNA, 20 bp, synthetic construct
  misc_feature 1..20: note = chemically synthesized
  source 1..20: mol_type = other DNA
tcttcgacttcccactgggg

SEQ ID NO: 19374 - DNA, 20 bp, synthetic construct
  misc_feature 1..20: note = chemically synthesized
  source 1..20: mol_type = other DNA
tcccactggggaagcccacc

SEQ ID NO: 19375 - DNA, 20 bp, synthetic construct
  misc_feature 1..20: note = chemically synthesized
  source 1..20: mol_type = other DNA
cccactggggaagcccaccc

SEQ ID NO: 19376 - DNA, 20 bp, synthetic construct
  misc_feature 1..20: note = chemically synthesized
  source 1..20: mol_type = other DNA
ccactggggaagcccaccca

SEQ ID NO: 19377 - DNA, 20 bp, synthetic construct
  misc_feature 1..20: note = chemically synthesized
  source 1..20: mol_type = other DNA
aagcccacccagggatgtta

SEQ ID NO: 19378 - DNA, 20 bp, synthetic construct
  misc_feature 1..20: note = chemically synthesized
  source 1..20: mol_type = other DNA
gcccacccagggatgttaca

SEQ ID NO: 19379 - DNA, 20 bp, synthetic construct
  misc_feature 1..20: note = chemically synthesized
  source 1..20: mol_type = other DNA
ccacccagggatgttacaga

SEQ ID NO: 19380 - DNA, 20 bp, synthetic construct
  misc_feature 1..20: note = chemically synthesized
  source 1..20: mol_type = other DNA
cacccagggatgttacagag

SEQ ID NO: 19381 - DNA, 20 bp, synthetic construct
  misc_feature 1..20: note = chemically synthesized
  source 1..20: mol_type = other DNA
acccagggatgttacagaga

SEQ ID NO: 19382 - DNA, 20 bp, synthetic construct
  misc_feature 1..20: note = chemically synthesized
  source 1..20: mol_type = other DNA
gggatgttacagagagggat

SEQ ID NO: 19383 - DNA, 20 bp, synthetic construct
  misc_feature 1..20: note = chemically synthesized
  source 1..20: mol_type = other DNA
acagagagggatcggcctcg

SEQ ID NO: 19384 - DNA, 20 bp, synthetic construct
  misc_feature 1..20: note = chemically synthesized
  source 1..20: mol_type = other DNA
gcctcgaagcattcttctta

SEQ ID NO: 19385 - DNA, 20 bp, synthetic construct
  misc_feature 1..20: note = chemically synthesized
  source 1..20: mol_type = other DNA
cattcttcttacagtcctcc

SEQ ID NO: 19386 - DNA, 20 bp, synthetic construct
  misc_feature 1..20: note = chemically synthesized
  source 1..20: mol_type = other DNA
ctttgaattcctgtttcaat

SEQ ID NO: 19387 - DNA, 20 bp, synthetic construct
  misc_feature 1..20: note = chemically synthesized
  source 1..20: mol_type = other DNA
gtttcaattagttgtaatcc

SEQ ID NO: 19388 - DNA, 20 bp, synthetic construct
  misc_feature 1..20: note = chemically synthesized
  source 1..20: mol_type = other DNA
tttcaattagttgtaatccc

SEQ ID NO: 19389 - DNA, 20 bp, synthetic construct
  misc_feature 1..20: note = chemically synthesized
  source 1..20: mol_type = other DNA
tcaattagttgtaatcccag

SEQ ID NO: 19390 - DNA, 20 bp, synthetic construct
  misc_feature 1..20: note = chemically synthesized
  source 1..20: mol_type = other DNA
attagttgtaatcccaggag

SEQ ID NO: 19391 - DNA, 20 bp, synthetic construct
  misc_feature 1..20: note = chemically synthesized
  source 1..20: mol_type = other DNA
tagttgtaatcccaggagaa

SEQ ID NO: 19392 - DNA, 20 bp, synthetic construct
  misc_feature 1..20: note = chemically synthesized
  source 1..20: mol_type = other DNA
tcccaggagaagagaactta

SEQ ID NO: 19393 - DNA, 20 bp, synthetic construct
  misc_feature 1..20: note = chemically synthesized
  source 1..20: mol_type = other DNA
cccaggagaagagaacttac

SEQ ID NO: 19394 - DNA, 20 bp, synthetic construct
  misc_feature 1..20: note = chemically synthesized
  source 1..20: mol_type = other DNA
aagagaacttacaggcacaa

SEQ ID NO: 19395 - DNA, 20 bp, synthetic construct
  misc_feature 1..20: note = chemically synthesized
  source 1..20: mol_type = other DNA
gaacttacaggcacaaaagt

SEQ ID NO: 19396 - DNA, 20 bp, synthetic construct
  misc_feature 1..20: note = chemically synthesized
  source 1..20: mol_type = other DNA
acttacaggcacaaaagtta

SEQ ID NO: 19397 - DNA, 20 bp, synthetic construct
  misc_feature 1..20: note = chemically synthesized
  source 1..20: mol_type = other DNA
acaggcacaaaagttagagt

SEQ ID NO: 19398 - DNA, 20 bp, synthetic construct
  misc_feature 1..20: note = chemically synthesized
  source 1..20: mol_type = other DNA
ggcacaaaagttagagttgg

SEQ ID NO: 19399 - DNA, 20 bp, synthetic construct
  misc_feature 1..20: note = chemically synthesized
  source 1..20: mol_type = other DNA
cacaaaagttagagttggta

SEQ ID NO: 19400 - DNA, 20 bp, synthetic construct
  misc_feature 1..20: note = chemically synthesized
  source 1..20: mol_type = other DNA
gttagagttggtagagttac

SEQ ID NO: 19401 - DNA, 20 bp, synthetic construct
  misc_feature 1..20: note = chemically synthesized
  source 1..20: mol_type = other DNA
ttagagttggtagagttacc

SEQ ID NO: 19402 - DNA, 20 bp, synthetic construct
  misc_feature 1..20: note = chemically synthesized
  source 1..20: mol_type = other DNA
ttggtagagttaccaggctt

SEQ ID NO: 19403 - DNA, 20 bp, synthetic construct
  misc_feature 1..20: note = chemically synthesized
  source 1..20: mol_type = other DNA
gtagagttaccaggctttgg

SEQ ID NO: 19404 - DNA, 20 bp, synthetic construct
  misc_feature 1..20: note = chemically synthesized
  source 1..20: mol_type = other DNA
caggctttggtagcttctct

SEQ ID NO: 19405 - DNA, 20 bp, synthetic construct
  misc_feature 1..20: note = chemically synthesized
  source 1..20: mol_type = other DNA
aggctttggtagcttctctt

SEQ ID NO: 19406 - DNA, 20 bp, synthetic construct
  misc_feature 1..20: note = chemically synthesized
  source 1..20: mol_type = other DNA
agcttctcttgggaataaac

SEQ ID NO: 19407 - DNA, 20 bp, synthetic construct
  misc_feature 1..20: note = chemically synthesized
  source 1..20: mol_type = other DNA
ttctcttgggaataaactag

SEQ ID NO: 19408 - DNA, 20 bp, synthetic construct
  misc_feature 1..20: note = chemically synthesized
  source 1..20: mol_type = other DNA
gaaatcttatgtgcttccca

SEQ ID NO: 19409 - DNA, 20 bp, synthetic construct
  misc_feature 1..20: note = chemically synthesized
  source 1..20: mol_type = other DNA
tgtgcttcccacagaattcc

SEQ ID NO: 19410 - DNA, 20 bp, synthetic construct
  misc_feature 1..20: note = chemically synthesized
  source 1..20: mol_type = other DNA
gcttcccacagaattcctgg

SEQ ID NO: 19411 - DNA, 20 bp, synthetic construct
  misc_feature 1..20: note = chemically synthesized
  source 1..20: mol_type = other DNA
tcccacagaattcctggtgg

SEQ ID NO: 19412 - DNA, 20 bp, synthetic construct
  misc_feature 1..20: note = chemically synthesized
  source 1..20: mol_type = other DNA
cccacagaattcctggtgga

SEQ ID NO: 19413 - DNA, 20 bp, synthetic construct
  misc_feature 1..20: note = chemically synthesized
  source 1..20: mol_type = other DNA
cacagaattcctggtggaag

SEQ ID NO: 19414 - DNA, 20 bp, synthetic construct
  misc_feature 1..20: note = chemically synthesized
  source 1..20: mol_type = other DNA
acagaattcctggtggaagg

SEQ ID NO: 19415 - DNA, 20 bp, synthetic construct
  misc_feature 1..20: note = chemically synthesized
  source 1..20: mol_type = other DNA
cctcctctttctcgtctttc

SEQ ID NO: 19416 - DNA, 20 bp, synthetic construct
  misc_feature 1..20: note = chemically synthesized
  source 1..20: mol_type = other DNA
ctcctctttctcgtctttct

SEQ ID NO: 19417 - DNA, 20 bp, synthetic construct
  misc_feature 1..20: note = chemically synthesized
  source 1..20: mol_type = other DNA
ctctttctcgtctttctggg

SEQ ID NO: 19418 - DNA, 20 bp, synthetic construct
  misc_feature 1..20: note = chemically synthesized
  source 1..20: mol_type = other DNA
tctttctcgtctttctgggc

SEQ ID NO: 19419 - DNA, 20 bp, synthetic construct
  misc_feature 1..20: note = chemically synthesized
  source 1..20: mol_type = other DNA
tctttctgggcaggtattgt

SEQ ID NO: 19420 - DNA, 20 bp, synthetic construct
  misc_feature 1..20: note = chemically synthesized
  source 1..20: mol_type = other DNA
ctttctgggcaggtattgtg

SEQ ID NO: 19421 - DNA, 20 bp, synthetic construct
  misc_feature 1..20: note = chemically synthesized
  source 1..20: mol_type = other DNA
ctgggcaggtattgtgagga

SEQ ID NO: 19422 - DNA, 20 bp, synthetic construct
  misc_feature 1..20: note = chemically synthesized
  source 1..20: mol_type = other DNA
gaggacggtatctgccctgt

SEQ ID NO: 19423 - DNA, 20 bp, synthetic construct
  misc_feature 1..20: note = chemically synthesized
  source 1..20: mol_type = other DNA
ccgtcctcacaatacctgcc

SEQ ID NO: 19424 - DNA, 20 bp, synthetic construct
  misc_feature 1..20: note = chemically synthesized
  source 1..20: mol_type = other DNA
cctcacaatacctgcccaga

SEQ ID NO: 19425 - DNA, 20 bp, synthetic construct
  misc_feature 1..20: note = chemically synthesized
  source 1..20: mol_type = other DNA
caatacctgcccagaaagac

SEQ ID NO: 19426 - DNA, 20 bp, synthetic construct
  misc_feature 1..20: note = chemically synthesized
  source 1..20: mol_type = other DNA
acctgcccagaaagacgaga

SEQ ID NO: 19427 - DNA, 20 bp, synthetic construct
  misc_feature 1..20: note = chemically synthesized
  source 1..20: mol_type = other DNA
ctgcccagaaagacgagaaa

SEQ ID NO: 19428 - DNA, 20 bp, synthetic construct
  misc_feature 1..20: note = chemically synthesized
  source 1..20: mol_type = other DNA
tgcccagaaagacgagaaag

SEQ ID NO: 19429 - DNA, 20 bp, synthetic construct
  misc_feature 1..20: note = chemically synthesized
  source 1..20: mol_type = other DNA
cccagaaagacgagaaagag

SEQ ID NO: 19430 - DNA, 20 bp, synthetic construct
  misc_feature 1..20: note = chemically synthesized
  source 1..20: mol_type = other DNA
ccagaaagacgagaaagagg

SEQ ID NO: 19431 - DNA, 20 bp, synthetic construct
  misc_feature 1..20: note = chemically synthesized
  source 1..20: mol_type = other DNA
gaaagacgagaaagaggagg

SEQ ID NO: 19432 - DNA, 20 bp, synthetic construct
  misc_feature 1..20: note = chemically synthesized
  source 1..20: mol_type = other DNA
ggaagaattcctccttccac

SEQ ID NO: 19433 - DNA, 20 bp, synthetic construct
  misc_feature 1..20: note = chemically synthesized
  source 1..20: mol_type = other DNA
gaagaattcctccttccacc

SEQ ID NO: 19434 - DNA, 20 bp, synthetic construct
  misc_feature 1..20: note = chemically synthesized
  source 1..20: mol_type = other DNA
tccttccaccaggaattctg

SEQ ID NO: 19435 - DNA, 20 bp, synthetic construct
  misc_feature 1..20: note = chemically synthesized
  source 1..20: mol_type = other DNA
ccttccaccaggaattctgt

SEQ ID NO: 19436 - DNA, 20 bp, synthetic construct
  misc_feature 1..20: note = chemically synthesized
  source 1..20: mol_type = other DNA
tccaccaggaattctgtggg

SEQ ID NO: 19437 - DNA, 20 bp, synthetic construct
  misc_feature 1..20: note = chemically synthesized
  source 1..20: mol_type = other DNA
gaattctgtgggaagcacat

SEQ ID NO: 19438 - DNA, 20 bp, synthetic construct
  misc_feature 1..20: note = chemically synthesized
  source 1..20: mol_type = other DNA
cacataagatttcatgctac

SEQ ID NO: 19439 - DNA, 20 bp, synthetic construct
  misc_feature 1..20: note = chemically synthesized
  source 1..20: mol_type = other DNA
catgctactagtttattccc

SEQ ID NO: 19440 - DNA, 20 bp, synthetic construct
  misc_feature 1..20: note = chemically synthesized
  source 1..20: mol_type = other DNA
tgctactagtttattcccaa

SEQ ID NO: 19441 - DNA, 20 bp, synthetic construct
  misc_feature 1..20: note = chemically synthesized
  source 1..20: mol_type = other DNA
tactagtttattcccaagag

SEQ ID NO: 19442 - DNA, 20 bp, synthetic construct
  misc_feature 1..20: note = chemically synthesized
  source 1..20: mol_type = other DNA
attcccaagagaagctacca

SEQ ID NO: 19443 - DNA, 20 bp, synthetic construct
  misc_feature 1..20: note = chemically synthesized
  source 1..20: mol_type = other DNA
caagagaagctaccaaagcc

SEQ ID NO: 19444 - DNA, 20 bp, synthetic construct
  misc_feature 1..20: note = chemically synthesized
  source 1..20: mol_type = other DNA
actctaacttttgtgcctgt

SEQ ID NO: 19445 - DNA, 20 bp, synthetic construct
  misc_feature 1..20: note = chemically synthesized
  source 1..20: mol_type = other DNA
gcctgtaagttctcttctcc

SEQ ID NO: 19446 - DNA, 20 bp, synthetic construct
  misc_feature 1..20: note = chemically synthesized
  source 1..20: mol_type = other DNA
cctgtaagttctcttctcct

SEQ ID NO: 19447 - DNA, 20 bp, synthetic construct
  misc_feature 1..20: note = chemically synthesized
  source 1..20: mol_type = other DNA
gggattacaactaattgaaa

SEQ ID NO: 19448 - DNA, 20 bp, synthetic construct
  misc_feature 1..20: note = chemically synthesized
  source 1..20: mol_type = other DNA
ggattacaactaattgaaac

SEQ ID NO: 19449 - DNA, 20 bp, synthetic construct
  misc_feature 1..20: note = chemically synthesized
  source 1..20: mol_type = other DNA
ctaattgaaacaggaattca

SEQ ID NO: 19450 - DNA, 20 bp, synthetic construct
  misc_feature 1..20: note = chemically synthesized
  source 1..20: mol_type = other DNA
taattgaaacaggaattcaa

SEQ ID NO: 19451 - DNA, 20 bp, synthetic construct
  misc_feature 1..20: note = chemically synthesized
  source 1..20: mol_type = other DNA
attgaaacaggaattcaaag

SEQ ID NO: 19452 - DNA, 20 bp, synthetic construct
  misc_feature 1..20: note = chemically synthesized
  source 1..20: mol_type = other DNA
acaggaattcaaaggagtct

SEQ ID NO: 19453 - DNA, 20 bp, synthetic construct
  misc_feature 1..20: note = chemically synthesized
  source 1..20: mol_type = other DNA
aggaattcaaaggagtctcg

SEQ ID NO: 19454 - DNA, 20 bp, synthetic construct
  misc_feature 1..20: note = chemically synthesized
  source 1..20: mol_type = other DNA
ggaattcaaaggagtctcgg

SEQ ID NO: 19455 - DNA, 20 bp, synthetic construct
  misc_feature 1..20: note = chemically synthesized
  source 1..20: mol_type = other DNA
aaggagtctcggaggactgt

SEQ ID NO: 19456 - DNA, 20 bp, synthetic construct
  misc_feature 1..20: note = chemically synthesized
  source 1..20: mol_type = other DNA
gagtctcggaggactgtaag

SEQ ID NO: 19457 - DNA, 20 bp, synthetic construct
  misc_feature 1..20: note = chemically synthesized
  source 1..20: mol_type = other DNA
gactgtaagaagaatgcttc

SEQ ID NO: 19458 - DNA, 20 bp, synthetic construct
  misc_feature 1..20: note = chemically synthesized
  source 1..20: mol_type = other DNA
actgtaagaagaatgcttcg

SEQ ID NO: 19459 - DNA, 20 bp, synthetic construct
  misc_feature 1..20: note = chemically synthesized
  source 1..20: mol_type = other DNA
atccctctctgtaacatccc

SEQ ID NO: 19460 - DNA, 20 bp, synthetic construct
  misc_feature 1..20: note = chemically synthesized
  source 1..20: mol_type = other DNA
tccctctctgtaacatccct

SEQ ID NO: 19461 - DNA, 20 bp, synthetic construct
  misc_feature 1..20: note = chemically synthesized
  source 1..20: mol_type = other DNA
ctctctgtaacatccctggg

SEQ ID NO: 19462 - DNA, 20 bp, synthetic construct
  misc_feature 1..20: note = chemically synthesized
  source 1..20: mol_type = other DNA
tctctgtaacatccctgggt

SEQ ID NO: 19463 - DNA, 20 bp, synthetic construct
  misc_feature 1..20: note = chemically synthesized
  source 1..20: mol_type = other DNA
catccctgggtgggcttccc

SEQ ID NO: 19464 - DNA, 20 bp, synthetic construct
  misc_feature 1..20: note = chemically synthesized
  source 1..20: mol_type = other DNA
ccctgggtgggcttccccag

SEQ ID NO: 19465 - DNA, 20 bp, synthetic construct
  misc_feature 1..20: note = chemically synthesized
  source 1..20: mol_type = other DNA
cctgggtgggcttccccagt

SEQ ID NO: 19466 - DNA, 20 bp, synthetic construct
  misc_feature 1..20: note = chemically synthesized
  source 1..20: mol_type = other DNA
gggtgggcttccccagtggg

SEQ ID NO: 19467 - DNA, 20 bp, synthetic construct
  misc_feature 1..20: note = chemically synthesized
  source 1..20: mol_type = other DNA
gcttccccagtgggaagtcg

SEQ ID NO: 19468 - DNA, 20 bp, synthetic construct
  misc_feature 1..20: note = chemically synthesized
  source 1..20: mol_type = other DNA
ggaagtcgaagaacttcctg

SEQ ID NO: 19469 - DNA, 20 bp, synthetic construct
  misc_feature 1..20: note = chemically synthesized
  source 1..20: mol_type = other DNA
aagtcgaagaacttcctgtg

SEQ ID NO: 19470 - DNA, 20 bp, synthetic construct
  misc_feature 1..20: note = chemically synthesized
  source 1..20: mol_type = other DNA
agtcgaagaacttcctgtgg

SEQ ID NO: 19471 - DNA, 20 bp, synthetic construct
  misc_feature 1..20: note = chemically synthesized
  source 1..20: mol_type = other DNA
tcgaagaacttcctgtggag

SEQ ID NO: 19472 - DNA, 20 bp, synthetic construct
  misc_feature 1..20: note = chemically synthesized
  source 1..20: mol_type = other DNA
ggaggagttactgctctttg

SEQ ID NO: 19473 - DNA, 20 bp, synthetic construct
  misc_feature 1..20: note = chemically synthesized
  source 1..20: mol_type = other DNA
tactgctctttgaagttgct

SEQ ID NO: 19474 - DNA, 20 bp, synthetic construct
  misc_feature 1..20: note = chemically synthesized
  source 1..20: mol_type = other DNA
actgctctttgaagttgctt

SEQ ID NO: 19475 - DNA, 20 bp, synthetic construct
  misc_feature 1..20: note = chemically synthesized
  source 1..20: mol_type = other DNA
gctctttgaagttgcttggg

SEQ ID NO: 19476 - DNA, 20 bp, synthetic construct
  misc_feature 1..20: note = chemically synthesized
  source 1..20: mol_type = other DNA
tgcttgggaagtgaccaata

SEQ ID NO: 19477 - DNA, 20 bp, synthetic construct
  misc_feature 1..20: note = chemically synthesized
  source 1..20: mol_type = other DNA
gcttgggaagtgaccaataa

SEQ ID NO: 19478 - DNA, 20 bp, synthetic construct
  misc_feature 1..20: note = chemically synthesized
  source 1..20: mol_type = other DNA
aaaggtttgtactgctcctg

SEQ ID NO: 19479 - DNA, 20 bp, synthetic construct
  misc_feature 1..20: note = chemically synthesized
  source 1..20: mol_type = other DNA
aaggtttgtactgctcctga

SEQ ID NO: 19480 - DNA, 20 bp, synthetic construct
  misc_feature 1..20: note = chemically synthesized
  source 1..20: mol_type = other DNA
gtttgtactgctcctgaagg

SEQ ID NO: 19481 - DNA, 20 bp, synthetic construct
  misc_feature 1..20: note = chemically synthesized
  source 1..20: mol_type = other DNA
tactgctcctgaaggtggat

SEQ ID NO: 19482 - DNA, 20 bp, synthetic construct
  misc_feature 1..20: note = chemically synthesized
  source 1..20: mol_type = other DNA
gtggatcagtacaccttcac

SEQ ID NO: 19483 - DNA, 20 bp, synthetic construct
  misc_feature 1..20: note = chemically synthesized
  source 1..20: mol_type = other DNA
tggatcagtacaccttcact

SEQ ID NO: 19484 - DNA, 20 bp, synthetic construct
  misc_feature 1..20: note = chemically synthesized
  source 1..20: mol_type = other DNA
tacaccttcactaggtgact

SEQ ID NO: 19485 - DNA, 20 bp, synthetic construct
  misc_feature 1..20: note = chemically synthesized
  source 1..20: mol_type = other DNA
acaccttcactaggtgactg

SEQ ID NO: 19486 - DNA, 20 bp, synthetic construct
  misc_feature 1..20: note = chemically synthesized
  source 1..20: mol_type = other DNA
cactaggtgactgaggaatg

SEQ ID NO: 19487 - DNA, 20 bp, synthetic construct
  misc_feature 1..20: note = chemically synthesized
  source 1..20: mol_type = other DNA
ctaggtgactgaggaatgta

SEQ ID NO: 19488 - DNA, 20 bp, synthetic construct
  misc_feature 1..20: note = chemically synthesized
  source 1..20: mol_type = other DNA
gtgactgaggaatgtagagt

SEQ ID NO: 19489 - DNA, 20 bp, synthetic construct
  misc_feature 1..20: note = chemically synthesized
  source 1..20: mol_type = other DNA
gaatgtagagtaagatttca

SEQ ID NO: 19490 - DNA, 20 bp, synthetic construct
  misc_feature 1..20: note = chemically synthesized
  source 1..20: mol_type = other DNA
agatttcacagataactctc

SEQ ID NO: 19491 - DNA, 20 bp, synthetic construct
  misc_feature 1..20: note = chemically synthesized
  source 1..20: mol_type = other DNA
ctctagtgataaccaattgc

SEQ ID NO: 19492 - DNA, 20 bp, synthetic construct
  misc_feature 1..20: note = chemically synthesized
  source 1..20: mol_type = other DNA
agtgataaccaattgctagt

SEQ ID NO: 19493 - DNA, 20 bp, synthetic construct
  misc_feature 1..20: note = chemically synthesized
  source 1..20: mol_type = other DNA
ataaccaattgctagtgagt

SEQ ID NO: 19494 - DNA, 20 bp, synthetic construct
  misc_feature 1..20: note = chemically synthesized
  source 1..20: mol_type = other DNA
taaccaattgctagtgagtg

SEQ ID NO: 19495 - DNA, 20 bp, synthetic construct
  misc_feature 1..20: note = chemically synthesized
  source 1..20: mol_type = other DNA
caattgctagtgagtgagga

SEQ ID NO: 19496 - DNA, 20 bp, synthetic construct
  misc_feature 1..20: note = chemically synthesized
  source 1..20: mol_type = other DNA
gagtgaggaaagcatttaaa

SEQ ID NO: 19497 - DNA, 20 bp, synthetic construct
  misc_feature 1..20: note = chemically synthesized
  source 1..20: mol_type = other DNA
atttaaacggaatatatatt

SEQ ID NO: 19498 - DNA, 20 bp, synthetic construct
  misc_feature 1..20: note = chemically synthesized
  source 1..20: mol_type = other DNA
tttaaacggaatatatattt

SEQ ID NO: 19499 - DNA, 20 bp, synthetic construct
  misc_feature 1..20: note = chemically synthesized
  source 1..20: mol_type = other DNA
tttaaccttgtctattacaa

SEQ ID NO: 19500 - DNA, 20 bp, synthetic construct
  misc_feature 1..20: note = chemically synthesized
  source 1..20: mol_type = other DNA
ttaaccttgtctattacaac

SEQ ID NO: 19501 - DNA, 20 bp, synthetic construct
  misc_feature 1..20: note = chemically synthesized
  source 1..20: mol_type = other DNA
attacaacaggctatgaata

SEQ ID NO: 19502 - DNA, 20 bp, synthetic construct
  misc_feature 1..20: note = chemically synthesized
  source 1..20: mol_type = other DNA
acagacttgtgtatgtgttg

SEQ ID NO: 19503 - DNA, 20 bp, synthetic construct
  misc_feature 1..20: note = chemically synthesized
  source 1..20: mol_type = other DNA
agacttgtgtatgtgttgaa

SEQ ID NO: 19504 - DNA, 20 bp, synthetic construct
  misc_feature 1..20: note = chemically synthesized
  source 1..20: mol_type = other DNA
gacttgtgtatgtgttgaag

SEQ ID NO: 19505 - DNA, 20 bp, synthetic construct
  misc_feature 1..20: note = chemically synthesized
  source 1..20: mol_type = other DNA
acttgtgtatgtgttgaaga

SEQ ID NO: 19506 - DNA, 20 bp, synthetic construct
  misc_feature 1..20: note = chemically synthesized
  source 1..20: mol_type = other DNA
ttgtgtatgtgttgaagagg

SEQ ID NO: 19507 - DNA, 20 bp, synthetic construct
  misc_feature 1..20: note = chemically synthesized
  source 1..20: mol_type = other DNA
gtatgtgttgaagagggaga

SEQ ID NO: 19508 - DNA, 20 bp, synthetic construct
  misc_feature 1..20: note = chemically synthesized
  source 1..20: mol_type = other DNA
agggagaaagttgaaaatat

SEQ ID NO: 19509 - DNA, 20 bp, synthetic construct
  misc_feature 1..20: note = chemically synthesized
  source 1..20: mol_type = other DNA
gaaaatattagccattgcca

SEQ ID NO: 19510 - DNA, 20 bp, synthetic construct
  misc_feature 1..20: note = chemically synthesized
  source 1..20: mol_type = other DNA
aaatccatattatgacaaca

SEQ ID NO: 19511 - DNA, 20 bp, synthetic construct
  misc_feature 1..20: note = chemically synthesized
  source 1..20: mol_type = other DNA
tatgacaacatagaaataaa

SEQ ID NO: 19512 - DNA, 20 bp, synthetic construct
  misc_feature 1..20: note = chemically synthesized
  source 1..20: mol_type = other DNA
ttttgttttaaaatttttct

SEQ ID NO: 19513 - DNA, 20 bp, synthetic construct
  misc_feature 1..20: note = chemically synthesized
  source 1..20: mol_type = other DNA
taaaatttttctcagcaaaa

SEQ ID NO: 19514 - DNA, 20 bp, synthetic construct
  misc_feature 1..20: note = chemically synthesized
  source 1..20: mol_type = other DNA
tataattaaacattttattt

SEQ ID NO: 19515 - DNA, 20 bp, synthetic construct
  misc_feature 1..20: note = chemically synthesized
  source 1..20: mol_type = other DNA
ataattaaacattttatttt

SEQ ID NO: 19516 - DNA, 20 bp, synthetic construct
  misc_feature 1..20: note = chemically synthesized
  source 1..20: mol_type = other DNA
attaaacattttattttagg

SEQ ID NO: 19517 - DNA, 20 bp, synthetic construct
  misc_feature 1..20: note = chemically synthesized
  source 1..20: mol_type = other DNA
taggaagatgtatatgtgat

SEQ ID NO: 19518 - DNA, 20 bp, synthetic construct
  misc_feature 1..20: note = chemically synthesized
  source 1..20: mol_type = other DNA
gatgtatatgtgattagaac

SEQ ID NO: 19519 - DNA, 20 bp, synthetic construct
  misc_feature 1..20: note = chemically synthesized
  source 1..20: mol_type = other DNA
tatatgtgattagaaccagt

SEQ ID NO: 19520 - DNA, 20 bp, synthetic construct
  misc_feature 1..20: note = chemically synthesized
  source 1..20: mol_type = other DNA
acctcaactctacattctgt

SEQ ID NO: 19521 - DNA, 20 bp, synthetic construct
  misc_feature 1..20: note = chemically synthesized
  source 1..20: mol_type = other DNA
agtaattatatgaaatgctt

SEQ ID NO: 19522 - DNA, 20 bp, synthetic construct
  misc_feature 1..20: note = chemically synthesized
  source 1..20: mol_type = other DNA
gaatgtttcatattcacaat

SEQ ID NO: 19523 - DNA, 20 bp, synthetic construct
  misc_feature 1..20: note = chemically synthesized
  source 1..20: mol_type = other DNA
tttcatattcacaattagct

SEQ ID NO: 19524 - DNA, 20 bp, synthetic construct
  misc_feature 1..20: note = chemically synthesized
  source 1..20: mol_type = other DNA
ttggaattaatgttttaatt

SEQ ID NO: 19525 - DNA, 20 bp, synthetic construct
  misc_feature 1..20: note = chemically synthesized
  source 1..20: mol_type = other DNA
tggaattaatgttttaattc

SEQ ID NO: 19526 - DNA, 20 bp, synthetic construct
  misc_feature 1..20: note = chemically synthesized
  source 1..20: mol_type = other DNA
gaattaatgttttaattcag

SEQ ID NO: 19527 - DNA, 20 bp, synthetic construct
  misc_feature 1..20: note = chemically synthesized
  source 1..20: mol_type = other DNA
ttaattcaggagcttctcaa

SEQ ID NO: 19528 - DNA, 20 bp, synthetic construct
  misc_feature 1..20: note = chemically synthesized
  source 1..20: mol_type = other DNA
taattcaggagcttctcaaa

SEQ ID NO: 19529 - DNA, 20 bp, synthetic construct
  misc_feature 1..20: note = chemically synthesized
  source 1..20: mol_type = other DNA
gcaaaatactgtgctccttt

SEQ ID NO: 19530 - DNA, 20 bp, synthetic construct
  misc_feature 1..20: note = chemically synthesized
  source 1..20: mol_type = other DNA
ctgtgctcctttcagaatga

SEQ ID NO: 19531 - DNA, 20 bp, synthetic construct
  misc_feature 1..20: note = chemically synthesized
  source 1..20: mol_type = other DNA
tcttcaatgctatgcttatg

SEQ ID NO: 19532 - DNA, 20 bp, synthetic construct
  misc_feature 1..20: note = chemically synthesized
  source 1..20: mol_type = other DNA
cttcaatgctatgcttatgt

SEQ ID NO: 19533 - DNA, 20 bp, synthetic construct
  misc_feature 1..20: note = chemically synthesized
  source 1..20: mol_type = other DNA
tatgtaggaattataaaata

SEQ ID NO: 19534 - DNA, 20 bp, synthetic construct
  misc_feature 1..20: note = chemically synthesized
  source 1..20: mol_type = other DNA
aaattgataaaacaatttgc

SEQ ID NO: 19535 - DNA, 20 bp, synthetic construct
  misc_feature 1..20: note = chemically synthesized
  source 1..20: mol_type = other DNA
tgataaaacaatttgcgagt

SEQ ID NO: 19536 - DNA, 20 bp, synthetic construct
  misc_feature 1..20: note = chemically synthesized
  source 1..20: mol_type = other DNA
gataaaacaatttgcgagtg

SEQ ID NO: 19537 - DNA, 20 bp, synthetic construct
  misc_feature 1..20: note = chemically synthesized
  source 1..20: mol_type = other DNA
aggtataacctcatctgtgc

SEQ ID NO: 19538 - DNA, 20 bp, synthetic construct
  misc_feature 1..20: note = chemically synthesized
  source 1..20: mol_type = other DNA
ggtataacctcatctgtgct

SEQ ID NO: 19539 - DNA, 20 bp, synthetic construct
  misc_feature 1..20: note = chemically synthesized
  source 1..20: mol_type = other DNA
taacctcatctgtgctgggt

SEQ ID NO: 19540 - DNA, 20 bp, synthetic construct
  misc_feature 1..20: note = chemically synthesized
  source 1..20: mol_type = other DNA
acctcatctgtgctgggtaa

SEQ ID NO: 19541 - DNA, 20 bp, synthetic construct
  misc_feature 1..20: note = chemically synthesized
  source 1..20: mol_type = other DNA
tcatctgtgctgggtaagag

SEQ ID NO: 19542 - DNA, 20 bp, synthetic construct
  misc_feature 1..20: note = chemically synthesized
  source 1..20: mol_type = other DNA
catctgtgctgggtaagaga

SEQ ID NO: 19543 - DNA, 20 bp, synthetic construct
  misc_feature 1..20: note = chemically synthesized
  source 1..20: mol_type = other DNA
tgtgctgggtaagagaaggc

SEQ ID NO: 19544 - DNA, 20 bp, synthetic construct
  misc_feature 1..20: note = chemically synthesized
  source 1..20: mol_type = other DNA
gtgctgggtaagagaaggca

SEQ ID NO: 19545 - DNA, 20 bp, synthetic construct
  misc_feature 1..20: note = chemically synthesized
  source 1..20: mol_type = other DNA
ctgggtaagagaaggcaagg

SEQ ID NO: 19546 - DNA, 20 bp, synthetic construct
  misc_feature 1..20: note = chemically synthesized
  source 1..20: mol_type = other DNA
gggtaagagaaggcaaggta

SEQ ID NO: 19547 - DNA, 20 bp, synthetic construct
  misc_feature 1..20: note = chemically synthesized
  source 1..20: mol_type = other DNA
tgtaaatgattttgaaaata

SEQ ID NO: 19548 - DNA, 20 bp, synthetic construct
  misc_feature 1..20: note = chemically synthesized
  source 1..20: mol_type = other DNA
aattataaaacaattccttg

SEQ ID NO: 19549 - DNA, 20 bp, synthetic construct
  misc_feature 1..20: note = chemically synthesized
  source 1..20: mol_type = other DNA
attataaaacaattccttgt

SEQ ID NO: 19550 - DNA, 20 bp, synthetic construct
  misc_feature 1..20: note = chemically synthesized
  source 1..20: mol_type = other DNA
ccttgtgggtttatactctc

SEQ ID NO: 19551 - DNA, 20 bp, synthetic construct
  misc_feature 1..20: note = chemically synthesized
  source 1..20: mol_type = other DNA
gtttatactctctagtttaa

SEQ ID NO: 19552 - DNA, 20 bp, synthetic construct
  misc_feature 1..20: note = chemically synthesized
  source 1..20: mol_type = other DNA
ctctctagtttaaaagtgtc

SEQ ID NO: 19553 - DNA, 20 bp, synthetic construct
  misc_feature 1..20: note = chemically synthesized
  source 1..20: mol_type = other DNA
taaaagtgtcaagactattg

SEQ ID NO: 19554 - DNA, 20 bp, synthetic construct
  misc_feature 1..20: note = chemically synthesized
  source 1..20: mol_type = other DNA
aaaagtgtcaagactattga

SEQ ID NO: 19555 - DNA, 20 bp, synthetic construct
  misc_feature 1..20: note = chemically synthesized
  source 1..20: mol_type = other DNA
caagactattgaaggaacat

SEQ ID NO: 19556 - DNA, 20 bp, synthetic construct
  misc_feature 1..20: note = chemically synthesized
  source 1..20: mol_type = other DNA
ctattgaaggaacattagca

SEQ ID NO: 19557 - DNA, 20 bp, synthetic construct
  misc_feature 1..20: note = chemically synthesized
  source 1..20: mol_type = other DNA
aaggaacattagcaaagaaa

SEQ ID NO: 19558 - DNA, 20 bp, synthetic construct
  misc_feature 1..20: note = chemically synthesized
  source 1..20: mol_type = other DNA
cattagcaaagaaaaagtca

SEQ ID NO: 19559 - DNA, 20 bp, synthetic construct
  misc_feature 1..20: note = chemically synthesized
  source 1..20: mol_type = other DNA
aagaaaaagtcatggttttg

SEQ ID NO: 19560 - DNA, 20 bp, synthetic construct
  misc_feature 1..20: note = chemically synthesized
  source 1..20: mol_type = other DNA
agaaaaagtcatggttttga

SEQ ID NO: 19561 - DNA, 20 bp, synthetic construct
  misc_feature 1..20: note = chemically synthesized
  source 1..20: mol_type = other DNA
aagtcatggttttgaaggct

SEQ ID NO: 19562 - DNA, 20 bp, synthetic construct
  misc_feature 1..20: note = chemically synthesized
  source 1..20: mol_type = other DNA
ttttgaaggctgagttcctc

SEQ ID NO: 19563 - DNA, 20 bp, synthetic construct
  misc_feature 1..20: note = chemically synthesized
  source 1..20: mol_type = other DNA
ctgagttcctcaagatcttg

SEQ ID NO: 19564 - DNA, 20 bp, synthetic construct
  misc_feature 1..20: note = chemically synthesized
  source 1..20: mol_type = other DNA
cctcaagatcttgaagaatc

SEQ ID NO: 19565 - DNA, 20 bp, synthetic construct
  misc_feature 1..20: note = chemically synthesized
  source 1..20: mol_type = other DNA
gaatcaagccaactgattgc

SEQ ID NO: 19566 - DNA, 20 bp, synthetic construct
  misc_feature 1..20: note = chemically synthesized
  source 1..20: mol_type = other DNA
aatcaagccaactgattgct

SEQ ID NO: 19567 - DNA, 20 bp, synthetic construct
  misc_feature 1..20: note = chemically synthesized
  source 1..20: mol_type = other DNA
ccaactgattgctgggtaaa

SEQ ID NO: 19568 - DNA, 20 bp, synthetic construct
  misc_feature 1..20: note = chemically synthesized
  source 1..20: mol_type = other DNA
actgattgctgggtaaatgg

SEQ ID NO: 19569 - DNA, 20 bp, synthetic construct
  misc_feature 1..20: note = chemically synthesized
  source 1..20: mol_type = other DNA
ttactatttcatgtctatta

SEQ ID NO: 19570 - DNA, 20 bp, synthetic construct
  misc_feature 1..20: note = chemically synthesized
  source 1..20: mol_type = other DNA
atgtctattacagtaatcta

SEQ ID NO: 19571 - DNA, 20 bp, synthetic construct
  misc_feature 1..20: note = chemically synthesized
  source 1..20: mol_type = other DNA
tgtctattacagtaatctaa

SEQ ID NO: 19572 - DNA, 20 bp, synthetic construct
  misc_feature 1..20: note = chemically synthesized
  source 1..20: mol_type = other DNA
aaaggatctgaaataataac

SEQ ID NO: 19573 - DNA, 20 bp, synthetic construct
  misc_feature 1..20: note = chemically synthesized
  source 1..20: mol_type = other DNA
gatatattacttccttcttt

SEQ ID NO: 19574 - DNA, 20 bp, synthetic construct
  misc_feature 1..20: note = chemically synthesized
  source 1..20: mol_type = other DNA
acttccttcttttggctaat

SEQ ID NO: 19575 - DNA, 20 bp, synthetic construct
  misc_feature 1..20: note = chemically synthesized
  source 1..20: mol_type = other DNA
ttccttcttttggctaatca

SEQ ID NO: 19576 - DNA, 20 bp, synthetic construct
  misc_feature 1..20: note = chemically synthesized
  source 1..20: mol_type = other DNA
ttcttttggctaatcagagc

SEQ ID NO: 19577 - DNA, 20 bp, synthetic construct
  misc_feature 1..20: note = chemically synthesized
  source 1..20: mol_type = other DNA
aaaattaaatgcattatata

SEQ ID NO: 19578 - DNA, 20 bp, synthetic construct
  misc_feature 1..20: note = chemically synthesized
  source 1..20: mol_type = other DNA
tggcatgcattctgaaaaat

SEQ ID NO: 19579 - DNA, 20 bp, synthetic construct
  misc_feature 1..20: note = chemically synthesized
  source 1..20: mol_type = other DNA
caccttatactaactgttca

SEQ ID NO: 19580 - DNA, 20 bp, synthetic construct
  misc_feature 1..20: note = chemically synthesized
  source 1..20: mol_type = other DNA
attcataaaatcaaaattaa

SEQ ID NO: 19581 - DNA, 20 bp, synthetic construct
  misc_feature 1..20: note = chemically synthesized
  source 1..20: mol_type = other DNA
aaaagtcaattttgcctatg

SEQ ID NO: 19582 - DNA, 20 bp, synthetic construct
  misc_feature 1..20: note = chemically synthesized
  source 1..20: mol_type = other DNA
agtcaattttgcctatgtag

SEQ ID NO: 19583 - DNA, 20 bp, synthetic construct
  misc_feature 1..20: note = chemically synthesized
  source 1..20: mol_type = other DNA
caattttgcctatgtagaag

SEQ ID NO: 19584 - DNA, 20 bp, synthetic construct
  misc_feature 1..20: note = chemically synthesized
  source 1..20: mol_type = other DNA
tttgcctatgtagaagtgga

SEQ ID NO: 19585 - DNA, 20 bp, synthetic construct
  misc_feature 1..20: note = chemically synthesized
  source 1..20: mol_type = other DNA
gaagtggacagaatgcatat

SEQ ID NO: 19586 - DNA, 20 bp, synthetic construct
  misc_feature 1..20: note = chemically synthesized
  source 1..20: mol_type = other DNA
agtggacagaatgcatataa

SEQ ID NO: 19587 - DNA, 20 bp, synthetic construct
  misc_feature 1..20: note = chemically synthesized
  source 1..20: mol_type = other DNA
agaatgcatataagagaaca

SEQ ID NO: 19588 - DNA, 20 bp, synthetic construct
  misc_feature 1..20: note = chemically synthesized
  source 1..20: mol_type = other DNA
gcatataagagaacaaagca

SEQ ID NO: 19589 - DNA, 20 bp, synthetic construct
  misc_feature 1..20: note = chemically synthesized
  source 1..20: mol_type = other DNA
aagcacggtcttattctctg

SEQ ID NO: 19590 - DNA, 20 bp, synthetic construct
  misc_feature 1..20: note = chemically synthesized
  source 1..20: mol_type = other DNA
cggtcttattctctgtagtt

SEQ ID NO: 19591 - DNA, 20 bp, synthetic construct
  misc_feature 1..20: note = chemically synthesized
  source 1..20: mol_type = other DNA
cttattctctgtagtttagt

SEQ ID NO: 19592 - DNA, 20 bp, synthetic construct
  misc_feature 1..20: note = chemically synthesized
  source 1..20: mol_type = other DNA
ttctctgtagtttagtgaga

SEQ ID NO: 19593 - DNA, 20 bp, synthetic construct
  misc_feature 1..20: note = chemically synthesized
  source 1..20: mol_type = other DNA
tagtttagtgagaaagaatc

SEQ ID NO: 19594 - DNA, 20 bp, synthetic construct
  misc_feature 1..20: note = chemically synthesized
  source 1..20: mol_type = other DNA
agtttagtgagaaagaatct

SEQ ID NO: 19595 - DNA, 20 bp, synthetic construct
  misc_feature 1..20: note = chemically synthesized
  source 1..20: mol_type = other DNA
tttagtgagaaagaatctag

SEQ ID NO: 19596 - DNA, 20 bp, synthetic construct
  misc_feature 1..20: note = chemically synthesized
  source 1..20: mol_type = other DNA
ttagtgagaaagaatctagg

SEQ ID NO: 19597 - DNA, 20 bp, synthetic construct
  misc_feature 1..20: note = chemically synthesized
  source 1..20: mol_type = other DNA
tgagaaagaatctaggagga

SEQ ID NO: 19598 - DNA, 20 bp, synthetic construct
  misc_feature 1..20: note = chemically synthesized
  source 1..20: mol_type = other DNA
ggaggacagaaaccttatta

SEQ ID NO: 19599 - DNA, 20 bp, synthetic construct
  misc_feature 1..20: note = chemically synthesized
  source 1..20: mol_type = other DNA
aggacagaaaccttattaca

SEQ ID NO: 19600 - DNA, 20 bp, synthetic construct
  misc_feature 1..20: note = chemically synthesized
  source 1..20: mol_type = other DNA
acagaaaccttattacagag

SEQ ID NO: 19601 - DNA, 20 bp, synthetic construct
  misc_feature 1..20: note = chemically synthesized
  source 1..20: mol_type = other DNA
aaccttattacagagaagtg

SEQ ID NO: 19602 - DNA, 20 bp, synthetic construct
  misc_feature 1..20: note = chemically synthesized
  source 1..20: mol_type = other DNA
ttattttgtattcttttcct

SEQ ID NO: 19603 - DNA, 20 bp, synthetic construct
  misc_feature 1..20: note = chemically synthesized
  source 1..20: mol_type = other DNA
attttgtattcttttcctca

SEQ ID NO: 19604 - DNA, 20 bp, synthetic construct
  misc_feature 1..20: note = chemically synthesized
  source 1..20: mol_type = other DNA
agagatctttatcctgaaat

SEQ ID NO: 19605 - DNA, 20 bp, synthetic construct
  misc_feature 1..20: note = chemically synthesized
  source 1..20: mol_type = other DNA
tgtttttaatgtcctttttc

SEQ ID NO: 19606 - DNA, 20 bp, synthetic construct
  misc_feature 1..20: note = chemically synthesized
  source 1..20: mol_type = other DNA
tttctagtcacaaatttttc

SEQ ID NO: 19607 - DNA, 20 bp, synthetic construct
  misc_feature 1..20: note = chemically synthesized
  source 1..20: mol_type = other DNA
agtcacaaatttttccagtc

SEQ ID NO: 19608 - DNA, 20 bp, synthetic construct
  misc_feature 1..20: note = chemically synthesized
  source 1..20: mol_type = other DNA
ccagtttttaaatatgccca

SEQ ID NO: 19609 - DNA, 20 bp, synthetic construct
  misc_feature 1..20: note = chemically synthesized
  source 1..20: mol_type = other DNA
ttaaatatgcccaaagttcc

SEQ ID NO: 19610 - DNA, 20 bp, synthetic construct
  misc_feature 1..20: note = chemically synthesized
  source 1..20: mol_type = other DNA
taaatatgcccaaagttcct

SEQ ID NO: 19611 - DNA, 20 bp, synthetic construct
  misc_feature 1..20: note = chemically synthesized
  source 1..20: mol_type = other DNA
atgcccaaagttcctgggaa

SEQ ID NO: 19612 - DNA, 20 bp, synthetic construct
  misc_feature 1..20: note = chemically synthesized
  source 1..20: mol_type = other DNA
tctctatcacatgtgaatcc

SEQ ID NO: 19613 - DNA, 20 bp, synthetic construct
  misc_feature 1..20: note = chemically synthesized
  source 1..20: mol_type = other DNA
tctatcacatgtgaatcccg

SEQ ID NO: 19614 - DNA, 20 bp, synthetic construct
  misc_feature 1..20: note = chemically synthesized
  source 1..20: mol_type = other DNA
cggagtatgccttgaaataa

SEQ ID NO: 19615 - DNA, 20 bp, synthetic construct
  misc_feature 1..20: note = chemically synthesized
  source 1..20: mol_type = other DNA
cttgaaataaaagttttctc

SEQ ID NO: 19616 - DNA, 20 bp, synthetic construct
  misc_feature 1..20: note = chemically synthesized
  source 1..20: mol_type = other DNA
tgaaataaaagttttctcta

SEQ ID NO: 19617 - DNA, 20 bp, synthetic construct
  misc_feature 1..20: note = chemically synthesized
  source 1..20: mol_type = other DNA
aaataaaagttttctctaga

SEQ ID NO: 19618 - DNA, 20 bp, synthetic construct
  misc_feature 1..20: note = chemically synthesized
  source 1..20: mol_type = other DNA
taaaagttttctctagagag

SEQ ID NO: 19619 - DNA, 20 bp, synthetic construct
  misc_feature 1..20: note = chemically synthesized
  source 1..20: mol_type = other DNA
aaaagttttctctagagagt

SEQ ID NO: 19620 - DNA, 20 bp, synthetic construct
  misc_feature 1..20: note = chemically synthesized
  source 1..20: mol_type = other DNA
agttttctctagagagtggg

SEQ ID NO: 19621 - DNA, 20 bp, synthetic construct
  misc_feature 1..20: note = chemically synthesized
  source 1..20: mol_type = other DNA
gttttctctagagagtgggc

SEQ ID NO: 19622 - DNA, 20 bp, synthetic construct
  misc_feature 1..20: note = chemically synthesized
  source 1..20: mol_type = other DNA
tttctctagagagtgggcag

SEQ ID NO: 19623 - DNA, 20 bp, synthetic construct
  misc_feature 1..20: note = chemically synthesized
  source 1..20: mol_type = other DNA
tagagagtgggcaggagctc

SEQ ID NO: 19624 - DNA, 20 bp, synthetic construct
  misc_feature 1..20: note = chemically synthesized
  source 1..20: mol_type = other DNA
agagagtgggcaggagctca

SEQ ID NO: 19625 - DNA, 20 bp, synthetic construct
  misc_feature 1..20: note = chemically synthesized
  source 1..20: mol_type = other DNA
tgggcaggagctcaaggaca

SEQ ID NO: 19626 - DNA, 20 bp, synthetic construct
  misc_feature 1..20: note = chemically synthesized
  source 1..20: mol_type = other DNA
agctcaaggacatagcttat

SEQ ID NO: 19627 - DNA, 20 bp, synthetic construct
  misc_feature 1..20: note = chemically synthesized
  source 1..20: mol_type = other DNA
tcaaggacatagcttattgg

SEQ ID NO: 19628 - DNA, 20 bp, synthetic construct
  misc_feature 1..20: note = chemically synthesized
  source 1..20: mol_type = other DNA
agcttattggtggataaaac

SEQ ID NO: 19629 - DNA, 20 bp, synthetic construct
  misc_feature 1..20: note = chemically synthesized
  source 1..20: mol_type = other DNA
ttattggtggataaaactgg

SEQ ID NO: 19630 - DNA, 20 bp, synthetic construct
  misc_feature 1..20: note = chemically synthesized
  source 1..20: mol_type = other DNA
tattggtggataaaactgga

SEQ ID NO: 19631 - DNA, 20 bp, synthetic construct
  misc_feature 1..20: note = chemically synthesized
  source 1..20: mol_type = other DNA
attggtggataaaactggaa

SEQ ID NO: 19632 - DNA, 20 bp, synthetic construct
  misc_feature 1..20: note = chemically synthesized
  source 1..20: mol_type = other DNA
taaaactggaagggacttgt

SEQ ID NO: 19633 - DNA, 20 bp, synthetic construct
  misc_feature 1..20: note = chemically synthesized
  source 1..20: mol_type = other DNA
tggaagggacttgttagcac

SEQ ID NO: 19634 - DNA, 20 bp, synthetic construct
  misc_feature 1..20: note = chemically synthesized
  source 1..20: mol_type = other DNA
ggaagggacttgttagcact

SEQ ID NO: 19635 - DNA, 20 bp, synthetic construct
  misc_feature 1..20: note = chemically synthesized
  source 1..20: mol_type = other DNA
gacttgttagcactgggaat

SEQ ID NO: 19636 - DNA, 20 bp, synthetic construct
  misc_feature 1..20: note = chemically synthesized
  source 1..20: mol_type = other DNA
gttagcactgggaatcagtc

SEQ ID NO: 19637 - DNA, 20 bp, synthetic construct
  misc_feature 1..20: note = chemically synthesized
  source 1..20: mol_type = other DNA
agcactgggaatcagtccag

SEQ ID NO: 19638 - DNA, 20 bp, synthetic construct
  misc_feature 1..20: note = chemically synthesized
  source 1..20: mol_type = other DNA
agtccagaagatctctgcac

SEQ ID NO: 19639 - DNA, 20 bp, synthetic construct
  misc_feature 1..20: note = chemically synthesized
  source 1..20: mol_type = other DNA
ctgcacaagttcctgcacct

SEQ ID NO: 19640 - DNA, 20 bp, synthetic construct
  misc_feature 1..20: note = chemically synthesized
  source 1..20: mol_type = other DNA
cacaagttcctgcacctgag

SEQ ID NO: 19641 - DNA, 20 bp, synthetic construct
  misc_feature 1..20: note = chemically synthesized
  source 1..20: mol_type = other DNA
caagttcctgcacctgagca

SEQ ID NO: 19642 - DNA, 20 bp, synthetic construct
  misc_feature 1..20: note = chemically synthesized
  source 1..20: mol_type = other DNA
catcatttaacaaacattaa

SEQ ID NO: 19643 - DNA, 20 bp, synthetic construct
  misc_feature 1..20: note = chemically synthesized
  source 1..20: mol_type = other DNA
tcatttaacaaacattaatg

SEQ ID NO: 19644 - DNA, 20 bp, synthetic construct
  misc_feature 1..20: note = chemically synthesized
  source 1..20: mol_type = other DNA
attaatggagcactgttacc

SEQ ID NO: 19645 - DNA, 20 bp, synthetic construct
  misc_feature 1..20: note = chemically synthesized
  source 1..20: mol_type = other DNA
ttaatggagcactgttacct

SEQ ID NO: 19646 - DNA, 20 bp, synthetic construct
  misc_feature 1..20: note = chemically synthesized
  source 1..20: mol_type = other DNA
gagcactgttacctgggcac

SEQ ID NO: 19647 - DNA, 20 bp, synthetic construct
  misc_feature 1..20: note = chemically synthesized
  source 1..20: mol_type = other DNA
agcactgttacctgggcact

SEQ ID NO: 19648 - DNA, 20 bp, synthetic construct
  misc_feature 1..20: note = chemically synthesized
  source 1..20: mol_type = other DNA
cctgggcactgggaacacgc

SEQ ID NO: 19649 - DNA, 20 bp, synthetic construct
  misc_feature 1..20: note = chemically synthesized
  source 1..20: mol_type = other DNA
gggaacacgccagtgaaact

SEQ ID NO: 19650 - DNA, 20 bp, synthetic construct
  misc_feature 1..20: note = chemically synthesized
  source 1..20: mol_type = other DNA
agtgaaactaagttatttta

SEQ ID NO: 19651 - DNA, 20 bp, synthetic construct
  misc_feature 1..20: note = chemically synthesized
  source 1..20: mol_type = other DNA
tattttatggatcttataat

SEQ ID NO: 19652 - DNA, 20 bp, synthetic construct
  misc_feature 1..20: note = chemically synthesized
  source 1..20: mol_type = other DNA
tttatggatcttataatcag

SEQ ID NO: 19653 - DNA, 20 bp, synthetic construct
  misc_feature 1..20: note = chemically synthesized
  source 1..20: mol_type = other DNA
agtagcatgtgtgttgatct

SEQ ID NO: 19654 - DNA, 20 bp, synthetic construct
  misc_feature 1..20: note = chemically synthesized
  source 1..20: mol_type = other DNA
gtagcatgtgtgttgatctc

SEQ ID NO: 19655 - DNA, 20 bp, synthetic construct
  misc_feature 1..20: note = chemically synthesized
  source 1..20: mol_type = other DNA
tagcatgtgtgttgatctca

SEQ ID NO: 19656 - DNA, 20 bp, synthetic construct
  misc_feature 1..20: note = chemically synthesized
  source 1..20: mol_type = other DNA
tgtgtgttgatctcagggtc

SEQ ID NO: 19657 - DNA, 20 bp, synthetic construct
  misc_feature 1..20: note = chemically synthesized
  source 1..20: mol_type = other DNA
gttgatctcagggtctagaa

SEQ ID NO: 19658 - DNA, 20 bp, synthetic construct
  misc_feature 1..20: note = chemically synthesized
  source 1..20: mol_type = other DNA
tcagggtctagaacagtgcc

SEQ ID NO: 19659 - DNA, 20 bp, synthetic construct
  misc_feature 1..20: note = chemically synthesized
  source 1..20: mol_type = other DNA
ctagaacagtgcctggtaca

SEQ ID NO: 19660 - DNA, 20 bp, synthetic construct
  misc_feature 1..20: note = chemically synthesized
  source 1..20: mol_type = other DNA
ggtacatagaaaatgctcaa

SEQ ID NO: 19661 - DNA, 20 bp, synthetic construct
  misc_feature 1..20: note = chemically synthesized
  source 1..20: mol_type = other DNA
aaatttgtttttcaacccct

SEQ ID NO: 19662 - DNA, 20 bp, synthetic construct
  misc_feature 1..20: note = chemically synthesized
  source 1..20: mol_type = other DNA
ttttctatcatttccctttc

SEQ ID NO: 19663 - DNA, 20 bp, synthetic construct
  misc_feature 1..20: note = chemically synthesized
  source 1..20: mol_type = other DNA
tttctatcatttccctttca

SEQ ID NO: 19664 - DNA, 20 bp, synthetic construct
  misc_feature 1..20: note = chemically synthesized
  source 1..20: mol_type = other DNA
ttctatcatttccctttcaa

SEQ ID NO: 19665 - DNA, 20 bp, synthetic construct
  misc_feature 1..20: note = chemically synthesized
  source 1..20: mol_type = other DNA
tctatcatttccctttcaag

SEQ ID NO: 19666 - DNA, 20 bp, synthetic construct
  misc_feature 1..20: note = chemically synthesized
  source 1..20: mol_type = other DNA
atcatttccctttcaagggg

SEQ ID NO: 19667 - DNA, 20 bp, synthetic construct
  misc_feature 1..20: note = chemically synthesized
  source 1..20: mol_type = other DNA
tcatttccctttcaagggga

SEQ ID NO: 19668 - DNA, 20 bp, synthetic construct
  misc_feature 1..20: note = chemically synthesized
  source 1..20: mol_type = other DNA
catttccctttcaaggggaa

SEQ ID NO: 19669 - DNA, 20 bp, synthetic construct
  misc_feature 1..20: note = chemically synthesized
  source 1..20: mol_type = other DNA
ttccctttcaaggggaaggg

SEQ ID NO: 19670 - DNA, 20 bp, synthetic construct
  misc_feature 1..20: note = chemically synthesized
  source 1..20: mol_type = other DNA
ggggaagggaagtgtttttg

SEQ ID NO: 19671 - DNA, 20 bp, synthetic construct
  misc_feature 1..20: note = chemically synthesized
  source 1..20: mol_type = other DNA
ggaagggaagtgtttttgtg

SEQ ID NO: 19672 - DNA, 20 bp, synthetic construct
  misc_feature 1..20: note = chemically synthesized
  source 1..20: mol_type = other DNA
aagggaagtgtttttgtgga

SEQ ID NO: 19673 - DNA, 20 bp, synthetic construct
  misc_feature 1..20: note = chemically synthesized
  source 1..20: mol_type = other DNA
agggaagtgtttttgtggag

SEQ ID NO: 19674 - DNA, 20 bp, synthetic construct
  misc_feature 1..20: note = chemically synthesized
  source 1..20: mol_type = other DNA
ccccacaatgtgatttacac

SEQ ID NO: 19675 - DNA, 20 bp, synthetic construct
  misc_feature 1..20: note = chemically synthesized
  source 1..20: mol_type = other DNA
tctttattttaatattatca

SEQ ID NO: 19676 - DNA, 20 bp, synthetic construct
  misc_feature 1..20: note = chemically synthesized
  source 1..20: mol_type = other DNA
attttaatattatcatagcc

SEQ ID NO: 19677 - DNA, 20 bp, synthetic construct
  misc_feature 1..20: note = chemically synthesized
  source 1..20: mol_type = other DNA
aatattatcatagcctggta

SEQ ID NO: 19678 - DNA, 20 bp, synthetic construct
  misc_feature 1..20: note = chemically synthesized
  source 1..20: mol_type = other DNA
atcatagcctggtatggttt

SEQ ID NO: 19679 - DNA, 20 bp, synthetic construct
  misc_feature 1..20: note = chemically synthesized
  source 1..20: mol_type = other DNA
tatggtttgagattttcata

SEQ ID NO: 19680 - DNA, 20 bp, synthetic construct
  misc_feature 1..20: note = chemically synthesized
  source 1..20: mol_type = other DNA
gtttgagattttcatataga

SEQ ID NO: 19681 - DNA, 20 bp, synthetic construct
  misc_feature 1..20: note = chemically synthesized
  source 1..20: mol_type = other DNA
ctaataatacattgccacta

SEQ ID NO: 19682 - DNA, 20 bp, synthetic construct
  misc_feature 1..20: note = chemically synthesized
  source 1..20: mol_type = other DNA
ttttacttccctgcatttca

SEQ ID NO: 19683 - DNA, 20 bp, synthetic construct
  misc_feature 1..20: note = chemically synthesized
  source 1..20: mol_type = other DNA
tacttccctgcatttcatag

SEQ ID NO: 19684 - DNA, 20 bp, synthetic construct
  misc_feature 1..20: note = chemically synthesized
  source 1..20: mol_type = other DNA
gcatttcatagtagtgatat

SEQ ID NO: 19685 - DNA, 20 bp, synthetic construct
  misc_feature 1..20: note = chemically synthesized
  source 1..20: mol_type = other DNA
catttcatagtagtgatatg

SEQ ID NO: 19686 - DNA, 20 bp, synthetic construct
  misc_feature 1..20: note = chemically synthesized
  source 1..20: mol_type = other DNA
agtagtgatatgaggtatct

SEQ ID NO: 19687 - DNA, 20 bp, synthetic construct
  misc_feature 1..20: note = chemically synthesized
  source 1..20: mol_type = other DNA
tagtgatatgaggtatctta

SEQ ID NO: 19688 - DNA, 20 bp, synthetic construct
  misc_feature 1..20: note = chemically synthesized
  source 1..20: mol_type = other DNA
gatcatgaatcccactcctc

SEQ ID NO: 19689 - DNA, 20 bp, synthetic construct
  misc_feature 1..20: note = chemically synthesized
  source 1..20: mol_type = other DNA
aatcccactcctccagttca

SEQ ID NO: 19690 - DNA, 20 bp, synthetic construct
  misc_feature 1..20: note = chemically synthesized
  source 1..20: mol_type = other DNA
tcccactcctccagttcata

SEQ ID NO: 19691 - DNA, 20 bp, synthetic construct
  misc_feature 1..20: note = chemically synthesized
  source 1..20: mol_type = other DNA
tcatagagcaaattgattcg

SEQ ID NO: 19692 - DNA, 20 bp, synthetic construct
  misc_feature 1..20: note = chemically synthesized
  source 1..20: mol_type = other DNA
atagagcaaattgattcgta

SEQ ID NO: 19693 - DNA, 20 bp, synthetic construct
  misc_feature 1..20: note = chemically synthesized
  source 1..20: mol_type = other DNA
tagagcaaattgattcgtag

SEQ ID NO: 19694 - DNA, 20 bp, synthetic construct
  misc_feature 1..20: note = chemically synthesized
  source 1..20: mol_type = other DNA
cgtagaggtatttaatgatc

SEQ ID NO: 19695 - DNA, 20 bp, synthetic construct
  misc_feature 1..20: note = chemically synthesized
  source 1..20: mol_type = other DNA
gtatttaatgatcaagcaaa

SEQ ID NO: 19696 - DNA, 20 bp, synthetic construct
  misc_feature 1..20: note = chemically synthesized
  source 1..20: mol_type = other DNA
tttaatgatcaagcaaatgg

SEQ ID NO: 19697 - DNA, 20 bp, synthetic construct
  misc_feature 1..20: note = chemically synthesized
  source 1..20: mol_type = other DNA
taatgatcaagcaaatggca

SEQ ID NO: 19698 - DNA, 20 bp, synthetic construct
  misc_feature 1..20: note = chemically synthesized
  source 1..20: mol_type = other DNA
gatcaagcaaatggcagagt

SEQ ID NO: 19699 - DNA, 20 bp, synthetic construct
  misc_feature 1..20: note = chemically synthesized
  source 1..20: mol_type = other DNA
atcaagcaaatggcagagtt

SEQ ID NO: 19700 - DNA, 20 bp, synthetic construct
  misc_feature 1..20: note = chemically synthesized
  source 1..20: mol_type = other DNA
gcaaatggcagagttaggac

SEQ ID NO: 19701 - DNA, 20 bp, synthetic construct
  misc_feature 1..20: note = chemically synthesized
  source 1..20: mol_type = other DNA
caaatggcagagttaggacc

SEQ ID NO: 19702 - DNA, 20 bp, synthetic construct
  misc_feature 1..20: note = chemically synthesized
  source 1..20: mol_type = other DNA
gcagagttaggaccaggatt

SEQ ID NO: 19703 - DNA, 20 bp, synthetic construct
  misc_feature 1..20: note = chemically synthesized
  source 1..20: mol_type = other DNA
cagagttaggaccaggattt

SEQ ID NO: 19704 - DNA, 20 bp, synthetic construct
  misc_feature 1..20: note = chemically synthesized
  source 1..20: mol_type = other DNA
ccaggatttaggtcttttcc

SEQ ID NO: 19705 - DNA, 20 bp, synthetic construct
  misc_feature 1..20: note = chemically synthesized
  source 1..20: mol_type = other DNA
caggatttaggtcttttcca

SEQ ID NO: 19706 - DNA, 20 bp, synthetic construct
  misc_feature 1..20: note = chemically synthesized
  source 1..20: mol_type = other DNA
tcacttttttactattatgt

SEQ ID NO: 19707 - DNA, 20 bp, synthetic construct
  misc_feature 1..20: note = chemically synthesized
  source 1..20: mol_type = other DNA
agaattaaatattaaaacct

SEQ ID NO: 19708 - DNA, 20 bp, synthetic construct
  misc_feature 1..20: note = chemically synthesized
  source 1..20: mol_type = other DNA
tattaaaacctcagttttca

SEQ ID NO: 19709 - DNA, 20 bp, synthetic construct
  misc_feature 1..20: note = chemically synthesized
  source 1..20: mol_type = other DNA
attaaaacctcagttttcaa

SEQ ID NO: 19710 - DNA, 20 bp, synthetic construct
  misc_feature 1..20: note = chemically synthesized
  source 1..20: mol_type = other DNA
ttttcaaaggaaatgtccta

SEQ ID NO: 19711 - DNA, 20 bp, synthetic construct
  misc_feature 1..20: note = chemically synthesized
  source 1..20: mol_type = other DNA
aggaaatgtcctatagatga

SEQ ID NO: 19712 - DNA, 20 bp, synthetic construct
  misc_feature 1..20: note = chemically synthesized
  source 1..20: mol_type = other DNA
gtcctatagatgaaagaaca

SEQ ID NO: 19713 - DNA, 20 bp, synthetic construct
  misc_feature 1..20: note = chemically synthesized
  source 1..20: mol_type = other DNA
atgaaagaacacagtacttg

SEQ ID NO: 19714 - DNA, 20 bp, synthetic construct
  misc_feature 1..20: note = chemically synthesized
  source 1..20: mol_type = other DNA
gaacacagtacttgcagtca

SEQ ID NO: 19715 - DNA, 20 bp, synthetic construct
  misc_feature 1..20: note = chemically synthesized
  source 1..20: mol_type = other DNA
aacacagtacttgcagtcaa

SEQ ID NO: 19716 - DNA, 20 bp, synthetic construct
  misc_feature 1..20: note = chemically synthesized
  source 1..20: mol_type = other DNA
gtacttgcagtcaaaggtct

SEQ ID NO: 19717 - DNA, 20 bp, synthetic construct
  misc_feature 1..20: note = chemically synthesized
  source 1..20: mol_type = other DNA
atttctgaaactttctgaaa

SEQ ID NO: 19718 - DNA, 20 bp, synthetic construct
  misc_feature 1..20: note = chemically synthesized
  source 1..20: mol_type = other DNA
gaaccccttaaactgaataa

SEQ ID NO: 19719 - DNA, 20 bp, synthetic construct
  misc_feature 1..20: note = chemically synthesized
  source 1..20: mol_type = other DNA
aaaatgaatgttatactctc

SEQ ID NO: 19720 - DNA, 20 bp, synthetic construct
  misc_feature 1..20: note = chemically synthesized
  source 1..20: mol_type = other DNA
agttatcttaccatgttttc

SEQ ID NO: 19721 - DNA, 20 bp, synthetic construct
  misc_feature 1..20: note = chemically synthesized
  source 1..20: mol_type = other DNA
taccatgttttctggcaaac

SEQ ID NO: 19722 - DNA, 20 bp, synthetic construct
  misc_feature 1..20: note = chemically synthesized
  source 1..20: mol_type = other DNA
accatgttttctggcaaaca

SEQ ID NO: 19723 - DNA, 20 bp, synthetic construct
  misc_feature 1..20: note = chemically synthesized
  source 1..20: mol_type = other DNA
aaggaaatgtattcacatcc

SEQ ID NO: 19724 - DNA, 20 bp, synthetic construct
  misc_feature 1..20: note = chemically synthesized
  source 1..20: mol_type = other DNA
attcacatccaagaaaacaa

SEQ ID NO: 19725 - DNA, 20 bp, synthetic construct
  misc_feature 1..20: note = chemically synthesized
  source 1..20: mol_type = other DNA
ttcacatccaagaaaacaaa

SEQ ID NO: 19726 - DNA, 20 bp, synthetic construct
  misc_feature 1..20: note = chemically synthesized
  source 1..20: mol_type = other DNA
caagaaaacaaaaggtttct

SEQ ID NO: 19727 - DNA, 20 bp, synthetic construct
  misc_feature 1..20: note = chemically synthesized
  source 1..20: mol_type = other DNA
aagaaaacaaaaggtttctt

SEQ ID NO: 19728 - DNA, 20 bp, synthetic construct
  misc_feature 1..20: note = chemically synthesized
  source 1..20: mol_type = other DNA
gaaaacaaaaggtttcttag

SEQ ID NO: 19729 - DNA, 20 bp, synthetic construct
  misc_feature 1..20: note = chemically synthesized
  source 1..20: mol_type = other DNA
aacaaaaggtttcttaggag

SEQ ID NO: 19730 - DNA, 20 bp, synthetic construct
  misc_feature 1..20: note = chemically synthesized
  source 1..20: mol_type = other DNA
ggagaagaatcccttgctgc

SEQ ID NO: 19731 - DNA, 20 bp, synthetic construct
  misc_feature 1..20: note = chemically synthesized
  source 1..20: mol_type = other DNA
agaattttgcccatgaacaa

SEQ ID NO: 19732 - DNA, 20 bp, synthetic construct
  misc_feature 1..20: note = chemically synthesized
  source 1..20: mol_type = other DNA
tggaaacgtgaaaaacataa

SEQ ID NO: 19733 - DNA, 20 bp, synthetic construct
  misc_feature 1..20: note = chemically synthesized
  source 1..20: mol_type = other DNA
acgtgaaaaacataacagat

SEQ ID NO: 19734 - DNA, 20 bp, synthetic construct
  misc_feature 1..20: note = chemically synthesized
  source 1..20: mol_type = other DNA
gtgaaaaacataacagatga

SEQ ID NO: 19735 - DNA, 20 bp, synthetic construct
  misc_feature 1..20: note = chemically synthesized
  source 1..20: mol_type = other DNA
gaaaaacataacagatgaga

SEQ ID NO: 19736 - DNA, 20 bp, synthetic construct
  misc_feature 1..20: note = chemically synthesized
  source 1..20: mol_type = other DNA
cataacagatgagagagtca

SEQ ID NO: 19737 - DNA, 20 bp, synthetic construct
  misc_feature 1..20: note = chemically synthesized
  source 1..20: mol_type = other DNA
acagatgagagagtcacagt

SEQ ID NO: 19738 - DNA, 20 bp, synthetic construct
  misc_feature 1..20: note = chemically synthesized
  source 1..20: mol_type = other DNA
gagagagtcacagttagttt

SEQ ID NO: 19739 - DNA, 20 bp, synthetic construct
  misc_feature 1..20: note = chemically synthesized
  source 1..20: mol_type = other DNA
agagagtcacagttagtttt

SEQ ID NO: 19740 - DNA, 20 bp, synthetic construct
  misc_feature 1..20: note = chemically synthesized
  source 1..20: mol_type = other DNA
tagttttgggtactaattct

SEQ ID NO: 19741 - DNA, 20 bp, synthetic construct
  misc_feature 1..20: note = chemically synthesized
  source 1..20: mol_type = other DNA
cattaatccattttattatt

SEQ ID NO: 19742 - DNA, 20 bp, synthetic construct
  misc_feature 1..20: note = chemically synthesized
  source 1..20: mol_type = other DNA
aatccattttattattcagt

SEQ ID NO: 19743 - DNA, 20 bp, synthetic construct
  misc_feature 1..20: note = chemically synthesized
  source 1..20: mol_type = other DNA
atccattttattattcagta

SEQ ID NO: 19744 - DNA, 20 bp, synthetic construct
  misc_feature 1..20: note = chemically synthesized
  source 1..20: mol_type = other DNA
ttattcagtaaggattcatc

SEQ ID NO: 19745 - DNA, 20 bp, synthetic construct
  misc_feature 1..20: note = chemically synthesized
  source 1..20: mol_type = other DNA
aggattcatcaagtgtctat

SEQ ID NO: 19746 - DNA, 20 bp, synthetic construct
  misc_feature 1..20: note = chemically synthesized
  source 1..20: mol_type = other DNA
ggattcatcaagtgtctatt

SEQ ID NO: 19747 - DNA, 20 bp, synthetic construct
  misc_feature 1..20: note = chemically synthesized
  source 1..20: mol_type = other DNA
atcaagtgtctattaggtat

SEQ ID NO: 19748 - DNA, 20 bp, synthetic construct
  misc_feature 1..20: note = chemically synthesized
  source 1..20: mol_type = other DNA
tcaagtgtctattaggtatc

SEQ ID NO: 19749 - DNA, 20 bp, synthetic construct
  misc_feature 1..20: note = chemically synthesized
  source 1..20: mol_type = other DNA
tctattaggtatcaggcact

SEQ ID NO: 19750 - DNA, 20 bp, synthetic construct
  misc_feature 1..20: note = chemically synthesized
  source 1..20: mol_type = other DNA
tattaggtatcaggcactga

SEQ ID NO: 19751 - DNA, 20 bp, synthetic construct
  misc_feature 1..20: note = chemically synthesized
  source 1..20: mol_type = other DNA
attaggtatcaggcactgag

SEQ ID NO: 19752 - DNA, 20 bp, synthetic construct
  misc_feature 1..20: note = chemically synthesized
  source 1..20: mol_type = other DNA
ggtatcaggcactgagaggc

SEQ ID NO: 19753 - DNA, 20 bp, synthetic construct
  misc_feature 1..20: note = chemically synthesized
  source 1..20: mol_type = other DNA
gtatcaggcactgagaggcg

SEQ ID NO: 19754 - DNA, 20 bp, synthetic construct
  misc_feature 1..20: note = chemically synthesized
  source 1..20: mol_type = other DNA
tatcaggcactgagaggcga

SEQ ID NO: 19755 - DNA, 20 bp, synthetic construct
  misc_feature 1..20: note = chemically synthesized
  source 1..20: mol_type = other DNA
tcaggcactgagaggcgagg

SEQ ID NO: 19756 - DNA, 20 bp, synthetic construct
  misc_feature 1..20: note = chemically synthesized
  source 1..20: mol_type = other DNA
gcactgagaggcgagggaga

SEQ ID NO: 19757 - DNA, 20 bp, synthetic construct
  misc_feature 1..20: note = chemically synthesized
  source 1..20: mol_type = other DNA
actgagaggcgagggagata

SEQ ID NO: 19758 - DNA, 20 bp, synthetic construct
  misc_feature 1..20: note = chemically synthesized
  source 1..20: mol_type = other DNA
gaggcgagggagatagagtt

SEQ ID NO: 19759 - DNA, 20 bp, synthetic construct
  misc_feature 1..20: note = chemically synthesized
  source 1..20: mol_type = other DNA
gggagatagagttaagaata

SEQ ID NO: 19760 - DNA, 20 bp, synthetic construct
  misc_feature 1..20: note = chemically synthesized
  source 1..20: mol_type = other DNA
agaactgattcttaatcttc

SEQ ID NO: 19761 - DNA, 20 bp, synthetic construct
  misc_feature 1..20: note = chemically synthesized
  source 1..20: mol_type = other DNA
ttcaagaattgacaaatttg

SEQ ID NO: 19762 - DNA, 20 bp, synthetic construct
  misc_feature 1..20: note = chemically synthesized
  source 1..20: mol_type = other DNA
aagaattgacaaatttgtag

SEQ ID NO: 19763 - DNA, 20 bp, synthetic construct
  misc_feature 1..20: note = chemically synthesized
  source 1..20: mol_type = other DNA
agaattgacaaatttgtaga

SEQ ID NO: 19764 - DNA, 20 bp, synthetic construct
  misc_feature 1..20: note = chemically synthesized
  source 1..20: mol_type = other DNA
attgacaaatttgtagaagg

SEQ ID NO: 19765 - DNA, 20 bp, synthetic construct
  misc_feature 1..20: note = chemically synthesized
  source 1..20: mol_type = other DNA
tagacattgaacatacaata

SEQ ID NO: 19766 - DNA, 20 bp, synthetic construct
  misc_feature 1..20: note = chemically synthesized
  source 1..20: mol_type = other DNA
acaatacagtcaaatgtgat

SEQ ID NO: 19767 - DNA, 20 bp, synthetic construct
  misc_feature 1..20: note = chemically synthesized
  source 1..20: mol_type = other DNA
cagtcaaatgtgatgagtgt

SEQ ID NO: 19768 - DNA, 20 bp, synthetic construct
  misc_feature 1..20: note = chemically synthesized
  source 1..20: mol_type = other DNA
aatgtgatgagtgtgagact

SEQ ID NO: 19769 - DNA, 20 bp, synthetic construct
  misc_feature 1..20: note = chemically synthesized
  source 1..20: mol_type = other DNA
atgtgatgagtgtgagacta

SEQ ID NO: 19770 - DNA, 20 bp, synthetic construct
  misc_feature 1..20: note = chemically synthesized
  source 1..20: mol_type = other DNA
tgtgatgagtgtgagactaa

SEQ ID NO: 19771 - DNA, 20 bp, synthetic construct
  misc_feature 1..20: note = chemically synthesized
  source 1..20: mol_type = other DNA
gagtgtgagactaagggaac

SEQ ID NO: 19772 - DNA, 20 bp, synthetic construct
  misc_feature 1..20: note = chemically synthesized
  source 1..20: mol_type = other DNA
agtgtgagactaagggaacc

SEQ ID NO: 19773 - DNA, 20 bp, synthetic construct
  misc_feature 1..20: note = chemically synthesized
  source 1..20: mol_type = other DNA
ctaagggaaccaggtgtcct

SEQ ID NO: 19774 - DNA, 20 bp, synthetic construct
  misc_feature 1..20: note = chemically synthesized
  source 1..20: mol_type = other DNA
ccaggtgtcctaagactata

SEQ ID NO: 19775 - DNA, 20 bp, synthetic construct
  misc_feature 1..20: note = chemically synthesized
  source 1..20: mol_type = other DNA
taagactatacagtgtaccg

SEQ ID NO: 19776 - DNA, 20 bp, synthetic construct
  misc_feature 1..20: note = chemically synthesized
  source 1..20: mol_type = other DNA
ctatacagtgtaccgtggaa

SEQ ID NO: 19777 - DNA, 20 bp, synthetic construct
  misc_feature 1..20: note = chemically synthesized
  source 1..20: mol_type = other DNA
tatacagtgtaccgtggaat

SEQ ID NO: 19778 - DNA, 20 bp, synthetic construct
  misc_feature 1..20: note = chemically synthesized
  source 1..20: mol_type = other DNA
atacagtgtaccgtggaatg

SEQ ID NO: 19779 - DNA, 20 bp, synthetic construct
  misc_feature 1..20: note = chemically synthesized
  source 1..20: mol_type = other DNA
acagtgtaccgtggaatggg

SEQ ID NO: 19780 - DNA, 20 bp, synthetic construct
  misc_feature 1..20: note = chemically synthesized
  source 1..20: mol_type = other DNA
gtgtaccgtggaatggggag

SEQ ID NO: 19781 - DNA, 20 bp, synthetic construct
  misc_feature 1..20: note = chemically synthesized
  source 1..20: mol_type = other DNA
atggggagtggtttctaacc

SEQ ID NO: 19782 - DNA, 20 bp, synthetic construct
  misc_feature 1..20: note = chemically synthesized
  source 1..20: mol_type = other DNA
tggtttctaacctagttacc

SEQ ID NO: 19783 - DNA, 20 bp, synthetic construct
  misc_feature 1..20: note = chemically synthesized
  source 1..20: mol_type = other DNA
gtttctaacctagttaccta

SEQ ID NO: 19784 - DNA, 20 bp, synthetic construct
  misc_feature 1..20: note = chemically synthesized
  source 1..20: mol_type = other DNA
tttctaacctagttacctag

SEQ ID NO: 19785 - DNA, 20 bp, synthetic construct
  misc_feature 1..20: note = chemically synthesized
  source 1..20: mol_type = other DNA
aacctagttacctagaggtt

SEQ ID NO: 19786 - DNA, 20 bp, synthetic construct
  misc_feature 1..20: note = chemically synthesized
  source 1..20: mol_type = other DNA
acctagttacctagaggttt

SEQ ID NO: 19787 - DNA, 20 bp, synthetic construct
  misc_feature 1..20: note = chemically synthesized
  source 1..20: mol_type = other DNA
ggaaaaacctctctaatgat

SEQ ID NO: 19788 - DNA, 20 bp, synthetic construct
  misc_feature 1..20: note = chemically synthesized
  source 1..20: mol_type = other DNA
tctctaatgatgagatgttt

SEQ ID NO: 19789 - DNA, 20 bp, synthetic construct
  misc_feature 1..20: note = chemically synthesized
  source 1..20: mol_type = other DNA
gatgtttgagctgacacttg

SEQ ID NO: 19790 - DNA, 20 bp, synthetic construct
  misc_feature 1..20: note = chemically synthesized
  source 1..20: mol_type = other DNA
atgtttgagctgacacttga

SEQ ID NO: 19791 - DNA, 20 bp, synthetic construct
  misc_feature 1..20: note = chemically synthesized
  source 1..20: mol_type = other DNA
gctgacacttgaaggataaa

SEQ ID NO: 19792 - DNA, 20 bp, synthetic construct
  misc_feature 1..20: note = chemically synthesized
  source 1..20: mol_type = other DNA
acttgaaggataaatagcta

SEQ ID NO: 19793 - DNA, 20 bp, synthetic construct
  misc_feature 1..20: note = chemically synthesized
  source 1..20: mol_type = other DNA
cttgaaggataaatagctaa

SEQ ID NO: 19794 - DNA, 20 bp, synthetic construct
  misc_feature 1..20: note = chemically synthesized
  source 1..20: mol_type = other DNA
ttgaaggataaatagctaaa

SEQ ID NO: 19795 - DNA, 20 bp, synthetic construct
  misc_feature 1..20: note = chemically synthesized
  source 1..20: mol_type = other DNA
tgaaggataaatagctaaag

SEQ ID NO: 19796 - DNA, 20 bp, synthetic construct
  misc_feature 1..20: note = chemically synthesized
  source 1..20: mol_type = other DNA
aaggataaatagctaaaggg

SEQ ID NO: 19797 - DNA, 20 bp, synthetic construct
  misc_feature 1..20: note = chemically synthesized
  source 1..20: mol_type = other DNA
ataaatagctaaaggggaga

SEQ ID NO: 19798 - DNA, 20 bp, synthetic construct
  misc_feature 1..20: note = chemically synthesized
  source 1..20: mol_type = other DNA
ggggagaaagcgttctatgt

SEQ ID NO: 19799 - DNA, 20 bp, synthetic construct
  misc_feature 1..20: note = chemically synthesized
  source 1..20: mol_type = other DNA
ggagaaagcgttctatgtga

SEQ ID NO: 19800 - DNA, 20 bp, synthetic construct
  misc_feature 1..20: note = chemically synthesized
  source 1..20: mol_type = other DNA
gtgagagaactatatatgcc

SEQ ID NO: 19801 - DNA, 20 bp, synthetic construct
  misc_feature 1..20: note = chemically synthesized
  source 1..20: mol_type = other DNA
gaactatatatgccaagatg

SEQ ID NO: 19802 - DNA, 20 bp, synthetic construct
  misc_feature 1..20: note = chemically synthesized
  source 1..20: mol_type = other DNA
ctatatatgccaagatgcag

SEQ ID NO: 19803 - DNA, 20 bp, synthetic construct
  misc_feature 1..20: note = chemically synthesized
  source 1..20: mol_type = other DNA
gcagaagtgttctctgttcg

SEQ ID NO: 19804 - DNA, 20 bp, synthetic construct
  misc_feature 1..20: note = chemically synthesized
  source 1..20: mol_type = other DNA
tgttctctgttcgaagatct

SEQ ID NO: 19805 - DNA, 20 bp, synthetic construct
  misc_feature 1..20: note = chemically synthesized
  source 1..20: mol_type = other DNA
tctctgttcgaagatctgag

SEQ ID NO: 19806 - DNA, 20 bp, synthetic construct
  misc_feature 1..20: note = chemically synthesized
  source 1..20: mol_type = other DNA
ctctgttcgaagatctgagc

SEQ ID NO: 19807 - DNA, 20 bp, synthetic construct
  misc_feature 1..20: note = chemically synthesized
  source 1..20: mol_type = other DNA
tctgttcgaagatctgagcg

SEQ ID NO: 19808 - DNA, 20 bp, synthetic construct
  misc_feature 1..20: note = chemically synthesized
  source 1..20: mol_type = other DNA
tcgaagatctgagcggggct

SEQ ID NO: 19809 - DNA, 20 bp, synthetic construct
  misc_feature 1..20: note = chemically synthesized
  source 1..20: mol_type = other DNA
gaagatctgagcggggctca

SEQ ID NO: 19810 - DNA, 20 bp, synthetic construct
  misc_feature 1..20: note = chemically synthesized
  source 1..20: mol_type = other DNA
agatctgagcggggctcaga

SEQ ID NO: 19811 - DNA, 20 bp, synthetic construct
  misc_feature 1..20: note = chemically synthesized
  source 1..20: mol_type = other DNA
gatctgagcggggctcagag

SEQ ID NO: 19812 - DNA, 20 bp, synthetic construct
  misc_feature 1..20: note = chemically synthesized
  source 1..20: mol_type = other DNA
atctgagcggggctcagaga

SEQ ID NO: 19813 - DNA, 20 bp, synthetic construct
  misc_feature 1..20: note = chemically synthesized
  source 1..20: mol_type = other DNA
agcggggctcagagagggaa

SEQ ID NO: 19814 - DNA, 20 bp, synthetic construct
  misc_feature 1..20: note = chemically synthesized
  source 1..20: mol_type = other DNA
gcggggctcagagagggaaa

SEQ ID NO: 19815 - DNA, 20 bp, synthetic construct
  misc_feature 1..20: note = chemically synthesized
  source 1..20: mol_type = other DNA
ggggctcagagagggaaaag

SEQ ID NO: 19816 - DNA, 20 bp, synthetic construct
  misc_feature 1..20: note = chemically synthesized
  source 1..20: mol_type = other DNA
ggctcagagagggaaaagga

SEQ ID NO: 19817 - DNA, 20 bp, synthetic construct
  misc_feature 1..20: note = chemically synthesized
  source 1..20: mol_type = other DNA
gctcagagagggaaaaggag

SEQ ID NO: 19818 - DNA, 20 bp, synthetic construct
  misc_feature 1..20: note = chemically synthesized
  source 1..20: mol_type = other DNA
tcagagagggaaaaggagag

SEQ ID NO: 19819 - DNA, 20 bp, synthetic construct
  misc_feature 1..20: note = chemically synthesized
  source 1..20: mol_type = other DNA
agggaaaaggagaggagtat

SEQ ID NO: 19820 - DNA, 20 bp, synthetic construct
  misc_feature 1..20: note = chemically synthesized
  source 1..20: mol_type = other DNA
ggaaaaggagaggagtatga

SEQ ID NO: 19821 - DNA, 20 bp, synthetic construct
  misc_feature 1..20: note = chemically synthesized
  source 1..20: mol_type = other DNA
aaaggagaggagtatgagag

SEQ ID NO: 19822 - DNA, 20 bp, synthetic construct
  misc_feature 1..20: note = chemically synthesized
  source 1..20: mol_type = other DNA
gagaggagtatgagagaaga

SEQ ID NO: 19823 - DNA, 20 bp, synthetic construct
  misc_feature 1..20: note = chemically synthesized
  source 1..20: mol_type = other DNA
agaggagtatgagagaagat

SEQ ID NO: 19824 - DNA, 20 bp, synthetic construct
  misc_feature 1..20: note = chemically synthesized
  source 1..20: mol_type = other DNA
aggagtatgagagaagatgg

SEQ ID NO: 19825 - DNA, 20 bp, synthetic construct
  misc_feature 1..20: note = chemically synthesized
  source 1..20: mol_type = other DNA
gagtatgagagaagatggga

SEQ ID NO: 19826 - DNA, 20 bp, synthetic construct
  misc_feature 1..20: note = chemically synthesized
  source 1..20: mol_type = other DNA
gagaagatgggagagacctg

SEQ ID NO: 19827 - DNA, 20 bp, synthetic construct
  misc_feature 1..20: note = chemically synthesized
  source 1..20: mol_type = other DNA
agaagatgggagagacctgc

SEQ ID NO: 19828 - DNA, 20 bp, synthetic construct
  misc_feature 1..20: note = chemically synthesized
  source 1..20: mol_type = other DNA
gaagatgggagagacctgca

SEQ ID NO: 19829 - DNA, 20 bp, synthetic construct
  misc_feature 1..20: note = chemically synthesized
  source 1..20: mol_type = other DNA
tgggagagacctgcagggac

SEQ ID NO: 19830 - DNA, 20 bp, synthetic construct
  misc_feature 1..20: note = chemically synthesized
  source 1..20: mol_type = other DNA
cctgcagggactagattgtg

SEQ ID NO: 19831 - DNA, 20 bp, synthetic construct
  misc_feature 1..20: note = chemically synthesized
  source 1..20: mol_type = other DNA
agggactagattgtgaagct

SEQ ID NO: 19832 - DNA, 20 bp, synthetic construct
  misc_feature 1..20: note = chemically synthesized
  source 1..20: mol_type = other DNA
gggactagattgtgaagctc

SEQ ID NO: 19833 - DNA, 20 bp, synthetic construct
  misc_feature 1..20: note = chemically synthesized
  source 1..20: mol_type = other DNA
ggactagattgtgaagctca

SEQ ID NO: 19834 - DNA, 20 bp, synthetic construct
  misc_feature 1..20: note = chemically synthesized
  source 1..20: mol_type = other DNA
gactagattgtgaagctcag

SEQ ID NO: 19835 - DNA, 20 bp, synthetic construct
  misc_feature 1..20: note = chemically synthesized
  source 1..20: mol_type = other DNA
actagattgtgaagctcagg

SEQ ID NO: 19836 - DNA, 20 bp, synthetic construct
  misc_feature 1..20: note = chemically synthesized
  source 1..20: mol_type = other DNA
tagattgtgaagctcagggg

SEQ ID NO: 19837 - DNA, 20 bp, synthetic construct
  misc_feature 1..20: note = chemically synthesized
  source 1..20: mol_type = other DNA
tgaagctcagggggagttaa

SEQ ID NO: 19838 - DNA, 20 bp, synthetic construct
  misc_feature 1..20: note = chemically synthesized
  source 1..20: mol_type = other DNA
cagggggagttaatagcctt

SEQ ID NO: 19839 - DNA, 20 bp, synthetic construct
  misc_feature 1..20: note = chemically synthesized
  source 1..20: mol_type = other DNA
agggggagttaatagcctta

SEQ ID NO: 19840 - DNA, 20 bp, synthetic construct
  misc_feature 1..20: note = chemically synthesized
  source 1..20: mol_type = other DNA
ggggagttaatagccttaag

SEQ ID NO: 19841 - DNA, 20 bp, synthetic construct
  misc_feature 1..20: note = chemically synthesized
  source 1..20: mol_type = other DNA
gccttaaggagttttgtctc

SEQ ID NO: 19842 - DNA, 20 bp, synthetic construct
  misc_feature 1..20: note = chemically synthesized
  source 1..20: mol_type = other DNA
ccttaaggagttttgtctcc

SEQ ID NO: 19843 - DNA, 20 bp, synthetic construct
  misc_feature 1..20: note = chemically synthesized
  source 1..20: mol_type = other DNA
cttaaggagttttgtctcca

SEQ ID NO: 19844 - DNA, 20 bp, synthetic construct
  misc_feature 1..20: note = chemically synthesized
  source 1..20: mol_type = other DNA
ccagggtatgaacaatgaat

SEQ ID NO: 19845 - DNA, 20 bp, synthetic construct
  misc_feature 1..20: note = chemically synthesized
  source 1..20: mol_type = other DNA
cagggtatgaacaatgaatg

SEQ ID NO: 19846 - DNA, 20 bp, synthetic construct
  misc_feature 1..20: note = chemically synthesized
  source 1..20: mol_type = other DNA
gggtatgaacaatgaatgag

SEQ ID NO: 19847 - DNA, 20 bp, synthetic construct
  misc_feature 1..20: note = chemically synthesized
  source 1..20: mol_type = other DNA
agtcactgaaattctatcca

SEQ ID NO: 19848 - DNA, 20 bp, synthetic construct
  misc_feature 1..20: note = chemically synthesized
  source 1..20: mol_type = other DNA
cactgaaattctatccacag

SEQ ID NO: 19849 - DNA, 20 bp, synthetic construct
  misc_feature 1..20: note = chemically synthesized
  source 1..20: mol_type = other DNA
tgaaattctatccacagtag

SEQ ID NO: 19850 - DNA, 20 bp, synthetic construct
  misc_feature 1..20: note = chemically synthesized
  source 1..20: mol_type = other DNA
gaaattctatccacagtagt

SEQ ID NO: 19851 - DNA, 20 bp, synthetic construct
  misc_feature 1..20: note = chemically synthesized
  source 1..20: mol_type = other DNA
attctatccacagtagtggg

SEQ ID NO: 19852 - DNA, 20 bp, synthetic construct
  misc_feature 1..20: note = chemically synthesized
  source 1..20: mol_type = other DNA
ccacagtagtgggaagtact

SEQ ID NO: 19853 - DNA, 20 bp, synthetic construct
  misc_feature 1..20: note = chemically synthesized
  source 1..20: mol_type = other DNA
cagtagtgggaagtactaag

SEQ ID NO: 19854 - DNA, 20 bp, synthetic construct
  misc_feature 1..20: note = chemically synthesized
  source 1..20: mol_type = other DNA
agtgggaagtactaagtagt

SEQ ID NO: 19855 - DNA, 20 bp, synthetic construct
  misc_feature 1..20: note = chemically synthesized
  source 1..20: mol_type = other DNA
gtgggaagtactaagtagtc

SEQ ID NO: 19856 - DNA, 20 bp, synthetic construct
  misc_feature 1..20: note = chemically synthesized
  source 1..20: mol_type = other DNA
ctaagtagtcaggtatgttt

SEQ ID NO: 19857 - DNA, 20 bp, synthetic construct
  misc_feature 1..20: note = chemically synthesized
  source 1..20: mol_type = other DNA
agtagtcaggtatgttttgg

SEQ ID NO: 19858 - DNA, 20 bp, synthetic construct
  misc_feature 1..20: note = chemically synthesized
  source 1..20: mol_type = other DNA
agtcaggtatgttttggaag

SEQ ID NO: 19859 - DNA, 20 bp, synthetic construct
  misc_feature 1..20: note = chemically synthesized
  source 1..20: mol_type = other DNA
tttggaagaagcactgttac

SEQ ID NO: 19860 - DNA, 20 bp, synthetic construct
  misc_feature 1..20: note = chemically synthesized
  source 1..20: mol_type = other DNA
aagaagcactgttaccagtt

SEQ ID NO: 19861 - DNA, 20 bp, synthetic construct
  misc_feature 1..20: note = chemically synthesized
  source 1..20: mol_type = other DNA
agaagcactgttaccagttg

SEQ ID NO: 19862 - DNA, 20 bp, synthetic construct
  misc_feature 1..20: note = chemically synthesized
  source 1..20: mol_type = other DNA
gaagcactgttaccagttga

SEQ ID NO: 19863 - DNA, 20 bp, synthetic construct
  misc_feature 1..20: note = chemically synthesized
  source 1..20: mol_type = other DNA
agcactgttaccagttgagg

SEQ ID NO: 19864 - DNA, 20 bp, synthetic construct
  misc_feature 1..20: note = chemically synthesized
  source 1..20: mol_type = other DNA
cactgttaccagttgaggga

SEQ ID NO: 19865 - DNA, 20 bp, synthetic construct
  misc_feature 1..20: note = chemically synthesized
  source 1..20: mol_type = other DNA
actgttaccagttgagggag

SEQ ID NO: 19866 - DNA, 20 bp, synthetic construct
  misc_feature 1..20: note = chemically synthesized
  source 1..20: mol_type = other DNA
tgttaccagttgagggagag

SEQ ID NO: 19867 - DNA, 20 bp, synthetic construct
  misc_feature 1..20: note = chemically synthesized
  source 1..20: mol_type = other DNA
ttaccagttgagggagagga

SEQ ID NO: 19868 - DNA, 20 bp, synthetic construct
  misc_feature 1..20: note = chemically synthesized
  source 1..20: mol_type = other DNA
taccagttgagggagaggag

SEQ ID NO: 19869 - DNA, 20 bp, synthetic construct
  misc_feature 1..20: note = chemically synthesized
  source 1..20: mol_type = other DNA
ccagttgagggagaggagag

SEQ ID NO: 19870 - DNA, 20 bp, synthetic construct
  misc_feature 1..20: note = chemically synthesized
  source 1..20: mol_type = other DNA
cagttgagggagaggagagg

SEQ ID NO: 19871 - DNA, 20 bp, synthetic construct
  misc_feature 1..20: note = chemically synthesized
  source 1..20: mol_type = other DNA
agttgagggagaggagagga

SEQ ID NO: 19872 - DNA, 20 bp, synthetic construct
  misc_feature 1..20: note = chemically synthesized
  source 1..20: mol_type = other DNA
ggagaggagaggagggaaat

SEQ ID NO: 19873 - DNA, 20 bp, synthetic construct
  misc_feature 1..20: note = chemically synthesized
  source 1..20: mol_type = other DNA
agaggagggaaattagactg

SEQ ID NO: 19874 - DNA, 20 bp, synthetic construct
  misc_feature 1..20: note = chemically synthesized
  source 1..20: mol_type = other DNA
aattagactgtggtgtgacc

SEQ ID NO: 19875 - DNA, 20 bp, synthetic construct
  misc_feature 1..20: note = chemically synthesized
  source 1..20: mol_type = other DNA
attagactgtggtgtgaccc

SEQ ID NO: 19876 - DNA, 20 bp, synthetic construct
  misc_feature 1..20: note = chemically synthesized
  source 1..20: mol_type = other DNA
gactgtggtgtgacccagga

SEQ ID NO: 19877 - DNA, 20 bp, synthetic construct
  misc_feature 1..20: note = chemically synthesized
  source 1..20: mol_type = other DNA
gtggtgtgacccaggatgga

SEQ ID NO: 19878 - DNA, 20 bp, synthetic construct
  misc_feature 1..20: note = chemically synthesized
  source 1..20: mol_type = other DNA
tggaaagttttgcccaaatg

SEQ ID NO: 19879 - DNA, 20 bp, synthetic construct
  misc_feature 1..20: note = chemically synthesized
  source 1..20: mol_type = other DNA
ggaaagttttgcccaaatgt

SEQ ID NO: 19880 - DNA, 20 bp, synthetic construct
  misc_feature 1..20: note = chemically synthesized
  source 1..20: mol_type = other DNA
gaaagttttgcccaaatgtg

SEQ ID NO: 19881 - DNA, 20 bp, synthetic construct
  misc_feature 1..20: note = chemically synthesized
  source 1..20: mol_type = other DNA
aaagttttgcccaaatgtgg

SEQ ID NO: 19882 - DNA, 20 bp, synthetic construct
  misc_feature 1..20: note = chemically synthesized
  source 1..20: mol_type = other DNA
tgtttactctctcctttgcc

SEQ ID NO: 19883 - DNA, 20 bp, synthetic construct
  misc_feature 1..20: note = chemically synthesized
  source 1..20: mol_type = other DNA
gtttactctctcctttgccc

SEQ ID NO: 19884 - DNA, 20 bp, synthetic construct
  misc_feature 1..20: note = chemically synthesized
  source 1..20: mol_type = other DNA
ttcttctgcacacacttgct

SEQ ID NO: 19885 - DNA, 20 bp, synthetic construct
  misc_feature 1..20: note = chemically synthesized
  source 1..20: mol_type = other DNA
gctcagaacattacaaactc

SEQ ID NO: 19886 - DNA, 20 bp, synthetic construct
  misc_feature 1..20: note = chemically synthesized
  source 1..20: mol_type = other DNA
tcagaacattacaaactctg

SEQ ID NO: 19887 - DNA, 20 bp, synthetic construct
  misc_feature 1..20: note = chemically synthesized
  source 1..20: mol_type = other DNA
tctggagaaattaacatgtt

SEQ ID NO: 19888 - DNA, 20 bp, synthetic construct
  misc_feature 1..20: note = chemically synthesized
  source 1..20: mol_type = other DNA
ctggagaaattaacatgtta

SEQ ID NO: 19889 - DNA, 20 bp, synthetic construct
  misc_feature 1..20: note = chemically synthesized
  source 1..20: mol_type = other DNA
attaacatgttaaggatatt

SEQ ID NO: 19890 - DNA, 20 bp, synthetic construct
  misc_feature 1..20: note = chemically synthesized
  source 1..20: mol_type = other DNA
ttaacatgttaaggatattt

SEQ ID NO: 19891 - DNA, 20 bp, synthetic construct
  misc_feature 1..20: note = chemically synthesized
  source 1..20: mol_type = other DNA
gatatttaggatcattaaaa

SEQ ID NO: 19892 - DNA, 20 bp, synthetic construct
  misc_feature 1..20: note = chemically synthesized
  source 1..20: mol_type = other DNA
aatgttgtcacacataatga

SEQ ID NO: 19893 - DNA, 20 bp, synthetic construct
  misc_feature 1..20: note = chemically synthesized
  source 1..20: mol_type = other DNA
cacataatgaaagttaattt

SEQ ID NO: 19894 - DNA, 20 bp, synthetic construct
  misc_feature 1..20: note = chemically synthesized
  source 1..20: mol_type = other DNA
aagttaatttaagaattgta

SEQ ID NO: 19895 - DNA, 20 bp, synthetic construct
  misc_feature 1..20: note = chemically synthesized
  source 1..20: mol_type = other DNA
tttaagaattgtaaagactt

SEQ ID NO: 19896 - DNA, 20 bp, synthetic construct
  misc_feature 1..20: note = chemically synthesized
  source 1..20: mol_type = other DNA
ttgtaaagacttgagcgatg

SEQ ID NO: 19897 - DNA, 20 bp, synthetic construct
  misc_feature 1..20: note = chemically synthesized
  source 1..20: mol_type = other DNA
taaatgcttccctcttaaaa

SEQ ID NO: 19898 - DNA, 20 bp, synthetic construct
  misc_feature 1..20: note = chemically synthesized
  source 1..20: mol_type = other DNA
gcttccctcttaaaatggac

SEQ ID NO: 19899 - DNA, 20 bp, synthetic construct
  misc_feature 1..20: note = chemically synthesized
  source 1..20: mol_type = other DNA
gaaacaatttgtttttgcct

SEQ ID NO: 19900 - DNA, 20 bp, synthetic construct
  misc_feature 1..20: note = chemically synthesized
  source 1..20: mol_type = other DNA
tgcctaagccaacgtattgc

SEQ ID NO: 19901 - DNA, 20 bp, synthetic construct
  misc_feature 1..20: note = chemically synthesized
  source 1..20: mol_type = other DNA
taatttacctgcttcctcct

SEQ ID NO: 19902 - DNA, 20 bp, synthetic construct
  misc_feature 1..20: note = chemically synthesized
  source 1..20: mol_type = other DNA
cactacacctctgaattaca

SEQ ID NO: 19903 - DNA, 20 bp, synthetic construct
  misc_feature 1..20: note = chemically synthesized
  source 1..20: mol_type = other DNA
acctctgaattacatggtac

SEQ ID NO: 19904 - DNA, 20 bp, synthetic construct
  misc_feature 1..20: note = chemically synthesized
  source 1..20: mol_type = other DNA
tctgaattacatggtacaag

SEQ ID NO: 19905 - DNA, 20 bp, synthetic construct
  misc_feature 1..20: note = chemically synthesized
  source 1..20: mol_type = other DNA
attacatggtacaagtggca

SEQ ID NO: 19906 - DNA, 20 bp, synthetic construct
  misc_feature 1..20: note = chemically synthesized
  source 1..20: mol_type = other DNA
ttacatggtacaagtggcac

SEQ ID NO: 19907 - DNA, 20 bp, synthetic construct
  misc_feature 1..20: note = chemically synthesized
  source 1..20: mol_type = other DNA
tacatggtacaagtggcaca

SEQ ID NO: 19908 - DNA, 20 bp, synthetic construct
  misc_feature 1..20: note = chemically synthesized
  source 1..20: mol_type = other DNA
atggtacaagtggcacaggg

SEQ ID NO: 19909 - DNA, 20 bp, synthetic construct
  misc_feature 1..20: note = chemically synthesized
  source 1..20: mol_type = other DNA
aagtggcacagggaagaatt

SEQ ID NO: 19910 - DNA, 20 bp, synthetic construct
  misc_feature 1..20: note = chemically synthesized
  source 1..20: mol_type = other DNA
cagggaagaattcagaaaac

SEQ ID NO: 19911 - DNA, 20 bp, synthetic construct
  misc_feature 1..20: note = chemically synthesized
  source 1..20: mol_type = other DNA
gggaagaattcagaaaacta

SEQ ID NO: 19912 - DNA, 20 bp, synthetic construct
  misc_feature 1..20: note = chemically synthesized
  source 1..20: mol_type = other DNA
aattcagaaaactagagtca

SEQ ID NO: 19913 - DNA, 20 bp, synthetic construct
  misc_feature 1..20: note = chemically synthesized
  source 1..20: mol_type = other DNA
tcagaaaactagagtcaaag

SEQ ID NO: 19914 - DNA, 20 bp, synthetic construct
  misc_feature 1..20: note = chemically synthesized
  source 1..20: mol_type = other DNA
aactagagtcaaagtggtta

SEQ ID NO: 19915 - DNA, 20 bp, synthetic construct
  misc_feature 1..20: note = chemically synthesized
  source 1..20: mol_type = other DNA
tagagtcaaagtggttatgg

SEQ ID NO: 19916 - DNA, 20 bp, synthetic construct
  misc_feature 1..20: note = chemically synthesized
  source 1..20: mol_type = other DNA
atggaagaaattataataat

SEQ ID NO: 19917 - DNA, 20 bp, synthetic construct
  misc_feature 1..20: note = chemically synthesized
  source 1..20: mol_type = other DNA
taataatgagtccactcttc

SEQ ID NO: 19918 - DNA, 20 bp, synthetic construct
  misc_feature 1..20: note = chemically synthesized
  source 1..20: mol_type = other DNA
aataatgagtccactcttct

SEQ ID NO: 19919 - DNA, 20 bp, synthetic construct
  misc_feature 1..20: note = chemically synthesized
  source 1..20: mol_type = other DNA
atgagtccactcttctagga

SEQ ID NO: 19920 - DNA, 20 bp, synthetic construct
  misc_feature 1..20: note = chemically synthesized
  source 1..20: mol_type = other DNA
tgagtccactcttctaggac

SEQ ID NO: 19921 - DNA, 20 bp, synthetic construct
  misc_feature 1..20: note = chemically synthesized
  source 1..20: mol_type = other DNA
agtccactcttctaggacag

SEQ ID NO: 19922 - DNA, 20 bp, synthetic construct
  misc_feature 1..20: note = chemically synthesized
  source 1..20: mol_type = other DNA
cttctaggacaggagttcta

SEQ ID NO: 19923 - DNA, 20 bp, synthetic construct
  misc_feature 1..20: note = chemically synthesized
  source 1..20: mol_type = other DNA
ttctaggacaggagttctaa

SEQ ID NO: 19924 - DNA, 20 bp, synthetic construct
  misc_feature 1..20: note = chemically synthesized
  source 1..20: mol_type = other DNA
aggacaggagttctaaaggt

SEQ ID NO: 19925 - DNA, 20 bp, synthetic construct
  misc_feature 1..20: note = chemically synthesized
  source 1..20: mol_type = other DNA
ggacaggagttctaaaggtg

SEQ ID NO: 19926 - DNA, 20 bp, synthetic construct
  misc_feature 1..20: note = chemically synthesized
  source 1..20: mol_type = other DNA
aaaggtgaggactttgatat

SEQ ID NO: 19927 - DNA, 20 bp, synthetic construct
  misc_feature 1..20: note = chemically synthesized
  source 1..20: mol_type = other DNA
actttgatataagtgaactc

SEQ ID NO: 19928 - DNA, 20 bp, synthetic construct
  misc_feature 1..20: note = chemically synthesized
  source 1..20: mol_type = other DNA
ctttgatataagtgaactca

SEQ ID NO: 19929 - DNA, 20 bp, synthetic construct
  misc_feature 1..20: note = chemically synthesized
  source 1..20: mol_type = other DNA
ttgatataagtgaactcaag

SEQ ID NO: 19930 - DNA, 20 bp, synthetic construct
  misc_feature 1..20: note = chemically synthesized
  source 1..20: mol_type = other DNA
tcaaggagtttctaaacctt

SEQ ID NO: 19931 - DNA, 20 bp, synthetic construct
  misc_feature 1..20: note = chemically synthesized
  source 1..20: mol_type = other DNA
cagaaattatatctaaaaat

SEQ ID NO: 19932 - DNA, 20 bp, synthetic construct
  misc_feature 1..20: note = chemically synthesized
  source 1..20: mol_type = other DNA
agaaattatatctaaaaatt

SEQ ID NO: 19933 - DNA, 20 bp, synthetic construct
  misc_feature 1..20: note = chemically synthesized
  source 1..20: mol_type = other DNA
aaaaattaggtgcacgtata

SEQ ID NO: 19934 - DNA, 20 bp, synthetic construct
  misc_feature 1..20: note = chemically synthesized
  source 1..20: mol_type = other DNA
aattaggtgcacgtatatag

SEQ ID NO: 19935 - DNA, 20 bp, synthetic construct
  misc_feature 1..20: note = chemically synthesized
  source 1..20: mol_type = other DNA
atatagaagtacttttctct

SEQ ID NO: 19936 - DNA, 20 bp, synthetic construct
  misc_feature 1..20: note = chemically synthesized
  source 1..20: mol_type = other DNA
tagaagtacttttctctgag

SEQ ID NO: 19937 - DNA, 20 bp, synthetic construct
  misc_feature 1..20: note = chemically synthesized
  source 1..20: mol_type = other DNA
gaagtacttttctctgagaa

SEQ ID NO: 19938 - DNA, 20 bp, synthetic construct
  misc_feature 1..20: note = chemically synthesized
  source 1..20: mol_type = other DNA
aagtacttttctctgagaag

SEQ ID NO: 19939 - DNA, 20 bp, synthetic construct
  misc_feature 1..20: note = chemically synthesized
  source 1..20: mol_type = other DNA
agaggacttcacacttccat

SEQ ID NO: 19940 - DNA, 20 bp, synthetic construct
  misc_feature 1..20: note = chemically synthesized
  source 1..20: mol_type = other DNA
acacttccatcagcttcctg

SEQ ID NO: 19941 - DNA, 20 bp, synthetic construct
  misc_feature 1..20: note = chemically synthesized
  source 1..20: mol_type = other DNA
cacttccatcagcttcctga

SEQ ID NO: 19942 - DNA, 20 bp, synthetic construct
  misc_feature 1..20: note = chemically synthesized
  source 1..20: mol_type = other DNA
aggcccctgtaattgccgta

SEQ ID NO: 19943 - DNA, 20 bp, synthetic construct
  misc_feature 1..20: note = chemically synthesized
  source 1..20: mol_type = other DNA
cgtaaagaacaactgctcta

SEQ ID NO: 19944 - DNA, 20 bp, synthetic construct
  misc_feature 1..20: note = chemically synthesized
  source 1..20: mol_type = other DNA
actgctctaaagtttaatac

SEQ ID NO: 19945 - DNA, 20 bp, synthetic construct
  misc_feature 1..20: note = chemically synthesized
  source 1..20: mol_type = other DNA
ctgctctaaagtttaatact

SEQ ID NO: 19946 - DNA, 20 bp, synthetic construct
  misc_feature 1..20: note = chemically synthesized
  source 1..20: mol_type = other DNA
aagtttaatactaggctact

SEQ ID NO: 19947 - DNA, 20 bp, synthetic construct
  misc_feature 1..20: note = chemically synthesized
  source 1..20: mol_type = other DNA
tcggctgttttttgttaaca

SEQ ID NO: 19948 - DNA, 20 bp, synthetic construct
  misc_feature 1..20: note = chemically synthesized
  source 1..20: mol_type = other DNA
gctgttttttgttaacacag

SEQ ID NO: 19949 - DNA, 20 bp, synthetic construct
  misc_feature 1..20: note = chemically synthesized
  source 1..20: mol_type = other DNA
taacacagaagttttccaaa

SEQ ID NO: 19950 - DNA, 20 bp, synthetic construct
  misc_feature 1..20: note = chemically synthesized
  source 1..20: mol_type = other DNA
ttttccaaatggcttttctc

SEQ ID NO: 19951 - DNA, 20 bp, synthetic construct
  misc_feature 1..20: note = chemically synthesized
  source 1..20: mol_type = other DNA
ttccaaatggcttttctcta

SEQ ID NO: 19952 - DNA, 20 bp, synthetic construct
  misc_feature 1..20: note = chemically synthesized
  source 1..20: mol_type = other DNA
tttctctagagcaaaatgaa

SEQ ID NO: 19953 - DNA, 20 bp, synthetic construct
  misc_feature 1..20: note = chemically synthesized
  source 1..20: mol_type = other DNA
ttctctagagcaaaatgaaa

SEQ ID NO: 19954 - DNA, 20 bp, synthetic construct
  misc_feature 1..20: note = chemically synthesized
  source 1..20: mol_type = other DNA
aaaaggatcccatccttccc

SEQ ID NO: 19955 - DNA, 20 bp, synthetic construct
  misc_feature 1..20: note = chemically synthesized
  source 1..20: mol_type = other DNA
cctaccccccaccactttta

SEQ ID NO: 19956 - DNA, 20 bp, synthetic construct
  misc_feature 1..20: note = chemically synthesized
  source 1..20: mol_type = other DNA
accacttttaaagatccatc

SEQ ID NO: 19957 - DNA, 20 bp, synthetic construct
  misc_feature 1..20: note = chemically synthesized
  source 1..20: mol_type = other DNA
ccacttttaaagatccatca

SEQ ID NO: 19958 - DNA, 20 bp, synthetic construct
  misc_feature 1..20: note = chemically synthesized
  source 1..20: mol_type = other DNA
tttaaagatccatcaaggcc

SEQ ID NO: 19959 - DNA, 20 bp, synthetic construct
  misc_feature 1..20: note = chemically synthesized
  source 1..20: mol_type = other DNA
agatccatcaaggcccagca

SEQ ID NO: 19960 - DNA, 20 bp, synthetic construct
  misc_feature 1..20: note = chemically synthesized
  source 1..20: mol_type = other DNA
ctgtaatctcaacacttttc

SEQ ID NO: 19961 - DNA, 20 bp, synthetic construct
  misc_feature 1..20: note = chemically synthesized
  source 1..20: mol_type = other DNA
tgtaatctcaacacttttca

SEQ ID NO: 19962 - DNA, 20 bp, synthetic construct
  misc_feature 1..20: note = chemically synthesized
  source 1..20: mol_type = other DNA
tctcaacacttttcaaggct

SEQ ID NO: 19963 - DNA, 20 bp, synthetic construct
  misc_feature 1..20: note = chemically synthesized
  source 1..20: mol_type = other DNA
ctcaacacttttcaaggctg

SEQ ID NO: 19964 - DNA, 20 bp, synthetic construct
  misc_feature 1..20: note = chemically synthesized
  source 1..20: mol_type = other DNA
aacacttttcaaggctgagg

SEQ ID NO: 19965 - DNA, 20 bp, synthetic construct
  misc_feature 1..20: note = chemically synthesized
  source 1..20: mol_type = other DNA
acacttttcaaggctgaggt

SEQ ID NO: 19966 - DNA, 20 bp, synthetic construct
  misc_feature 1..20: note = chemically synthesized
  source 1..20: mol_type = other DNA
acttttcaaggctgaggtgg

SEQ ID NO: 19967 - DNA, 20 bp, synthetic construct
  misc_feature 1..20: note = chemically synthesized
  source 1..20: mol_type = other DNA
ctgaggtgggagaattgttt

SEQ ID NO: 19968 - DNA, 20 bp, synthetic construct
  misc_feature 1..20: note = chemically synthesized
  source 1..20: mol_type = other DNA
tgggagaattgtttgagacc

SEQ ID NO: 19969 - DNA, 20 bp, synthetic construct
  misc_feature 1..20: note = chemically synthesized
  source 1..20: mol_type = other DNA
ggagaattgtttgagaccaa

SEQ ID NO: 19970 - DNA, 20 bp, synthetic construct
  misc_feature 1..20: note = chemically synthesized
  source 1..20: mol_type = other DNA
aattgtttgagaccaagagt

SEQ ID NO: 19971 - DNA, 20 bp, synthetic construct
  misc_feature 1..20: note = chemically synthesized
  source 1..20: mol_type = other DNA
tgagaccaagagttggatac

SEQ ID NO: 19972 - DNA, 20 bp, synthetic construct
  misc_feature 1..20: note = chemically synthesized
  source 1..20: mol_type = other DNA
ccaagagttggataccagcc

SEQ ID NO: 19973 - DNA, 20 bp, synthetic construct
  misc_feature 1..20: note = chemically synthesized
  source 1..20: mol_type = other DNA
caagagttggataccagcct

SEQ ID NO: 19974 - DNA, 20 bp, synthetic construct
  misc_feature 1..20: note = chemically synthesized
  source 1..20: mol_type = other DNA
aagagttggataccagcctg

SEQ ID NO: 19975 - DNA, 20 bp, synthetic construct
  misc_feature 1..20: note = chemically synthesized
  source 1..20: mol_type = other DNA
ggataccagcctggggaaca

SEQ ID NO: 19976 - DNA, 20 bp, synthetic construct
  misc_feature 1..20: note = chemically synthesized
  source 1..20: mol_type = other DNA
gataccagcctggggaacat

SEQ ID NO: 19977 - DNA, 20 bp, synthetic construct
  misc_feature 1..20: note = chemically synthesized
  source 1..20: mol_type = other DNA
ataccagcctggggaacata

SEQ ID NO: 19978 - DNA, 20 bp, synthetic construct
  misc_feature 1..20: note = chemically synthesized
  source 1..20: mol_type = other DNA
accagcctggggaacatagg

SEQ ID NO: 19979 - DNA, 20 bp, synthetic construct
  misc_feature 1..20: note = chemically synthesized
  source 1..20: mol_type = other DNA
atagggagaccctgtttcta

SEQ ID NO: 19980 - DNA, 20 bp, synthetic construct
  misc_feature 1..20: note = chemically synthesized
  source 1..20: mol_type = other DNA
agaaatttaaaaaatttctc

SEQ ID NO: 19981 - DNA, 20 bp, synthetic construct
  misc_feature 1..20: note = chemically synthesized
  source 1..20: mol_type = other DNA
atttaaaaaatttctctagc

SEQ ID NO: 19982 - DNA, 20 bp, synthetic construct
  misc_feature 1..20: note = chemically synthesized
  source 1..20: mol_type = other DNA
aaaatttctctagctggcca

SEQ ID NO: 19983 - DNA, 20 bp, synthetic construct
  misc_feature 1..20: note = chemically synthesized
  source 1..20: mol_type = other DNA
aatttctctagctggccatg

SEQ ID NO: 19984 - DNA, 20 bp, synthetic construct
  misc_feature 1..20: note = chemically synthesized
  source 1..20: mol_type = other DNA
atttctctagctggccatgg

SEQ ID NO: 19985 - DNA, 20 bp, synthetic construct
  misc_feature 1..20: note = chemically synthesized
  source 1..20: mol_type = other DNA
gccatggaggctcacacctg

SEQ ID NO: 19986 - DNA, 20 bp, synthetic construct
  misc_feature 1..20: note = chemically synthesized
  source 1..20: mol_type = other DNA
gaggctcacacctgtagtcc

SEQ ID NO: 19987 - DNA, 20 bp, synthetic construct
  misc_feature 1..20: note = chemically synthesized
  source 1..20: mol_type = other DNA
acctgtagtcctagctacct

SEQ ID NO: 19988 - DNA, 20 bp, synthetic construct
  misc_feature 1..20: note = chemically synthesized
  source 1..20: mol_type = other DNA
ctgtagtcctagctacctga

SEQ ID NO: 19989 - DNA, 20 bp, synthetic construct
  misc_feature 1..20: note = chemically synthesized
  source 1..20: mol_type = other DNA
tgtagtcctagctacctgag

SEQ ID NO: 19990 - DNA, 20 bp, synthetic construct
  misc_feature 1..20: note = chemically synthesized
  source 1..20: mol_type = other DNA
cctagctacctgagaggcta

SEQ ID NO: 19991 - DNA, 20 bp, synthetic construct
  misc_feature 1..20: note = chemically synthesized
  source 1..20: mol_type = other DNA
agctacctgagaggctaaag

SEQ ID NO: 19992 - DNA, 20 bp, synthetic construct
  misc_feature 1..20: note = chemically synthesized
  source 1..20: mol_type = other DNA
gctacctgagaggctaaagc

SEQ ID NO: 19993 - DNA, 20 bp, synthetic construct
  misc_feature 1..20: note = chemically synthesized
  source 1..20: mol_type = other DNA
tacctgagaggctaaagcag

SEQ ID NO: 19994 - DNA, 20 bp, synthetic construct
  misc_feature 1..20: note = chemically synthesized
  source 1..20: mol_type = other DNA
acctgagaggctaaagcagg

SEQ ID NO: 19995 - DNA, 20 bp, synthetic construct
  misc_feature 1..20: note = chemically synthesized
  source 1..20: mol_type = other DNA
gcaggaggatcaattgaatc

SEQ ID NO: 19996 - DNA, 20 bp, synthetic construct
  misc_feature 1..20: note = chemically synthesized
  source 1..20: mol_type = other DNA
caggaggatcaattgaatcc

SEQ ID NO: 19997 - DNA, 20 bp, synthetic construct
  misc_feature 1..20: note = chemically synthesized
  source 1..20: mol_type = other DNA
tcaattgaatccaggcgttc

SEQ ID NO: 19998 - DNA, 20 bp, synthetic construct
  misc_feature 1..20: note = chemically synthesized
  source 1..20: mol_type = other DNA
ttgaatccaggcgttctagt

SEQ ID NO: 19999 - DNA, 20 bp, synthetic construct
  misc_feature 1..20: note = chemically synthesized
  source 1..20: mol_type = other DNA
tgaatccaggcgttctagtg

SEQ ID NO: 20000 - DNA, 20 bp, synthetic construct
  misc_feature 1..20: note = chemically synthesized
  source 1..20: mol_type = other DNA
caggcgttctagtgaggctt

SEQ ID NO: 20001 - DNA, 20 bp, synthetic construct
  misc_feature 1..20: note = chemically synthesized
  source 1..20: mol_type = other DNA
cgttctagtgaggcttcagt

SEQ ID NO: 20002 - DNA, 20 bp, synthetic construct
  misc_feature 1..20: note = chemically synthesized
  source 1..20: mol_type = other DNA
ctagtgaggcttcagtgagc

SEQ ID NO: 20003 - DNA, 20 bp, synthetic construct
  misc_feature 1..20: note = chemically synthesized
  source 1..20: mol_type = other DNA
aagattgcaccattgcactc

SEQ ID NO: 20004 - DNA, 20 bp, synthetic construct
  misc_feature 1..20: note = chemically synthesized
  source 1..20: mol_type = other DNA
ttgcaccattgcactccagc

SEQ ID NO: 20005 - DNA, 20 bp, synthetic construct
  misc_feature 1..20: note = chemically synthesized
  source 1..20: mol_type = other DNA
tgcaccattgcactccagcc

SEQ ID NO: 20006 - DNA, 20 bp, synthetic construct
  misc_feature 1..20: note = chemically synthesized
  source 1..20: mol_type = other DNA
gcaccattgcactccagccg

SEQ ID NO: 20007 - DNA, 20 bp, synthetic construct
  misc_feature 1..20: note = chemically synthesized
  source 1..20: mol_type = other DNA
ttgcactccagccggggtga

SEQ ID NO: 20008 - DNA, 20 bp, synthetic construct
  misc_feature 1..20: note = chemically synthesized
  source 1..20: mol_type = other DNA
gcactccagccggggtgaca

SEQ ID NO: 20009 - DNA, 20 bp, synthetic construct
  misc_feature 1..20: note = chemically synthesized
  source 1..20: mol_type = other DNA
tccagccggggtgacagagt

SEQ ID NO: 20010 - DNA, 20 bp, synthetic construct
  misc_feature 1..20: note = chemically synthesized
  source 1..20: mol_type = other DNA
agaccctgtttcaaacaaac

SEQ ID NO: 20011 - DNA, 20 bp, synthetic construct
  misc_feature 1..20: note = chemically synthesized
  source 1..20: mol_type = other DNA
tgtttcaaacaaacaagcaa

SEQ ID NO: 20012 - DNA, 20 bp, synthetic construct
  misc_feature 1..20: note = chemically synthesized
  source 1..20: mol_type = other DNA
aacaaacaagcaaaagcaaa

SEQ ID NO: 20013 - DNA, 20 bp, synthetic construct
  misc_feature 1..20: note = chemically synthesized
  source 1..20: mol_type = other DNA
acttactatcttgctgtcta

SEQ ID NO: 20014 - DNA, 20 bp, synthetic construct
  misc_feature 1..20: note = chemically synthesized
  source 1..20: mol_type = other DNA
tatcttgctgtctacagcta

SEQ ID NO: 20015 - DNA, 20 bp, synthetic construct
  misc_feature 1..20: note = chemically synthesized
  source 1..20: mol_type = other DNA
ttgctgtctacagctaaagt

SEQ ID NO: 20016 - DNA, 20 bp, synthetic construct
  misc_feature 1..20: note = chemically synthesized
  source 1..20: mol_type = other DNA
taaagtcagactgcatgatt

SEQ ID NO: 20017 - DNA, 20 bp, synthetic construct
  misc_feature 1..20: note = chemically synthesized
  source 1..20: mol_type = other DNA
attccaactccaccatcacc

SEQ ID NO: 20018 - DNA, 20 bp, synthetic construct
  misc_feature 1..20: note = chemically synthesized
  source 1..20: mol_type = other DNA
ttccaactccaccatcacct

SEQ ID NO: 20019 - DNA, 20 bp, synthetic construct
  misc_feature 1..20: note = chemically synthesized
  source 1..20: mol_type = other DNA
accatcacctgggtaatgtt

SEQ ID NO: 20020 - DNA, 20 bp, synthetic construct
  misc_feature 1..20: note = chemically synthesized
  source 1..20: mol_type = other DNA
taatgttgagatttattaca

SEQ ID NO: 20021 - DNA, 20 bp, synthetic construct
  misc_feature 1..20: note = chemically synthesized
  source 1..20: mol_type = other DNA
tacatagcatctctgtgcct

SEQ ID NO: 20022 - DNA, 20 bp, synthetic construct
  misc_feature 1..20: note = chemically synthesized
  source 1..20: mol_type = other DNA
aataatgttgtgaaaattaa

SEQ ID NO: 20023 - DNA, 20 bp, synthetic construct
  misc_feature 1..20: note = chemically synthesized
  source 1..20: mol_type = other DNA
gtgaaaattaaaagaaatac

SEQ ID NO: 20024 - DNA, 20 bp, synthetic construct
  misc_feature 1..20: note = chemically synthesized
  source 1..20: mol_type = other DNA
aataccagttgtaaatcact

SEQ ID NO: 20025 - DNA, 20 bp, synthetic construct
  misc_feature 1..20: note = chemically synthesized
  source 1..20: mol_type = other DNA
aaatcactcagaactgtgcc

SEQ ID NO: 20026 - DNA, 20 bp, synthetic construct
  misc_feature 1..20: note = chemically synthesized
  source 1..20: mol_type = other DNA
agcatttaataaacactctg

SEQ ID NO: 20027 - DNA, 20 bp, synthetic construct
  misc_feature 1..20: note = chemically synthesized
  source 1..20: mol_type = other DNA
gcatttaataaacactctgt

SEQ ID NO: 20028 - DNA, 20 bp, synthetic construct
  misc_feature 1..20: note = chemically synthesized
  source 1..20: mol_type = other DNA
aataaacactctgtaggtat

SEQ ID NO: 20029 - DNA, 20 bp, synthetic construct
  misc_feature 1..20: note = chemically synthesized
  source 1..20: mol_type = other DNA
ataaaatttattcataaaat

SEQ ID NO: 20030 - DNA, 20 bp, synthetic construct
  misc_feature 1..20: note = chemically synthesized
  source 1..20: mol_type = other DNA
taaaatttattcataaaatg

SEQ ID NO: 20031 - DNA, 20 bp, synthetic construct
  misc_feature 1..20: note = chemically synthesized
  source 1..20: mol_type = other DNA
aatttattcataaaatgagg

SEQ ID NO: 20032 - DNA, 20 bp, synthetic construct
  misc_feature 1..20: note = chemically synthesized
  source 1..20: mol_type = other DNA
tattcataaaatgaggaagt

SEQ ID NO: 20033 - DNA, 20 bp, synthetic construct
  misc_feature 1..20: note = chemically synthesized
  source 1..20: mol_type = other DNA
tagctcatgtattgtcatac

SEQ ID NO: 20034 - DNA, 20 bp, synthetic construct
  misc_feature 1..20: note = chemically synthesized
  source 1..20: mol_type = other DNA
taccagctttcactttgaat

SEQ ID NO: 20035 - DNA, 20 bp, synthetic construct
  misc_feature 1..20: note = chemically synthesized
  source 1..20: mol_type = other DNA
attgcatttttaaacacaaa

SEQ ID NO: 20036 - DNA, 20 bp, synthetic construct
  misc_feature 1..20: note = chemically synthesized
  source 1..20: mol_type = other DNA
tgcatttttaaacacaaaaa

SEQ ID NO: 20037 - DNA, 20 bp, synthetic construct
  misc_feature 1..20: note = chemically synthesized
  source 1..20: mol_type = other DNA
aaacacaaaaagagaaataa

SEQ ID NO: 20038 - DNA, 20 bp, synthetic construct
  misc_feature 1..20: note = chemically synthesized
  source 1..20: mol_type = other DNA
aacacaaaaagagaaataat

SEQ ID NO: 20039 - DNA, 20 bp, synthetic construct
  misc_feature 1..20: note = chemically synthesized
  source 1..20: mol_type = other DNA
catcaatgttacttcaatca

SEQ ID NO: 20040 - DNA, 20 bp, synthetic construct
  misc_feature 1..20: note = chemically synthesized
  source 1..20: mol_type = other DNA
atcaatgttacttcaatcac

SEQ ID NO: 20041 - DNA, 20 bp, synthetic construct
  misc_feature 1..20: note = chemically synthesized
  source 1..20: mol_type = other DNA
tacttcaatcacgggatgca

SEQ ID NO: 20042 - DNA, 20 bp, synthetic construct
  misc_feature 1..20: note = chemically synthesized
  source 1..20: mol_type = other DNA
atcacgggatgcatagtaat

SEQ ID NO: 20043 - DNA, 20 bp, synthetic construct
  misc_feature 1..20: note = chemically synthesized
  source 1..20: mol_type = other DNA
tcacgggatgcatagtaatt

SEQ ID NO: 20044 - DNA, 20 bp, synthetic construct
  misc_feature 1..20: note = chemically synthesized
  source 1..20: mol_type = other DNA
ctttgccctaattactgatg

SEQ ID NO: 20045 - DNA, 20 bp, synthetic construct
  misc_feature 1..20: note = chemically synthesized
  source 1..20: mol_type = other DNA
ccctaattactgatgtggat

SEQ ID NO: 20046 - DNA, 20 bp, synthetic construct
  misc_feature 1..20: note = chemically synthesized
  source 1..20: mol_type = other DNA
aattactgatgtggataagc

SEQ ID NO: 20047 - DNA, 20 bp, synthetic construct
  misc_feature 1..20: note = chemically synthesized
  source 1..20: mol_type = other DNA
tactgatgtggataagccgg

SEQ ID NO: 20048 - DNA, 20 bp, synthetic construct
  misc_feature 1..20: note = chemically synthesized
  source 1..20: mol_type = other DNA
actgatgtggataagccggt

SEQ ID NO: 20049 - DNA, 20 bp, synthetic construct
  misc_feature 1..20: note = chemically synthesized
  source 1..20: mol_type = other DNA
aagccggtgggccatgtcaa

SEQ ID NO: 20050 - DNA, 20 bp, synthetic construct
  misc_feature 1..20: note = chemically synthesized
  source 1..20: mol_type = other DNA
ggccatgtcaatggcatctc

SEQ ID NO: 20051 - DNA, 20 bp, synthetic construct
  misc_feature 1..20: note = chemically synthesized
  source 1..20: mol_type = other DNA
atctatgtaaaaactatgct

SEQ ID NO: 20052 - DNA, 20 bp, synthetic construct
  misc_feature 1..20: note = chemically synthesized
  source 1..20: mol_type = other DNA
aaaaactatgcttggttgca

SEQ ID NO: 20053 - DNA, 20 bp, synthetic construct
  misc_feature 1..20: note = chemically synthesized
  source 1..20: mol_type = other DNA
atgcttggttgcacagcttc

SEQ ID NO: 20054 - DNA, 20 bp, synthetic construct
  misc_feature 1..20: note = chemically synthesized
  source 1..20: mol_type = other DNA
tgcttggttgcacagcttca

SEQ ID NO: 20055 - DNA, 20 bp, synthetic construct
  misc_feature 1..20: note = chemically synthesized
  source 1..20: mol_type = other DNA
tggttgcacagcttcaagga

SEQ ID NO: 20056 - DNA, 20 bp, synthetic construct
  misc_feature 1..20: note = chemically synthesized
  source 1..20: mol_type = other DNA
cacagcttcaaggaaagcac

SEQ ID NO: 20057 - DNA, 20 bp, synthetic construct
  misc_feature 1..20: note = chemically synthesized
  source 1..20: mol_type = other DNA
ctactcacttccttttcatt

SEQ ID NO: 20058 - DNA, 20 bp, synthetic construct
  misc_feature 1..20: note = chemically synthesized
  source 1..20: mol_type = other DNA
ttcattcagcatgctatgtc

SEQ ID NO: 20059 - DNA, 20 bp, synthetic construct
  misc_feature 1..20: note = chemically synthesized
  source 1..20: mol_type = other DNA
tcattcagcatgctatgtct

SEQ ID NO: 20060 - DNA, 20 bp, synthetic construct
  misc_feature 1..20: note = chemically synthesized
  source 1..20: mol_type = other DNA
cccctttcatataaaatatt

SEQ ID NO: 20061 - DNA, 20 bp, synthetic construct
  misc_feature 1..20: note = chemically synthesized
  source 1..20: mol_type = other DNA
cctttcatataaaatatttg

SEQ ID NO: 20062 - DNA, 20 bp, synthetic construct
  misc_feature 1..20: note = chemically synthesized
  source 1..20: mol_type = other DNA
aatatttggagctgccattg

SEQ ID NO: 20063 - DNA, 20 bp, synthetic construct
  misc_feature 1..20: note = chemically synthesized
  source 1..20: mol_type = other DNA
atatttggagctgccattgt

SEQ ID NO: 20064 - DNA, 20 bp, synthetic construct
  misc_feature 1..20: note = chemically synthesized
  source 1..20: mol_type = other DNA
tttggagctgccattgtagg

SEQ ID NO: 20065 - DNA, 20 bp, synthetic construct
  misc_feature 1..20: note = chemically synthesized
  source 1..20: mol_type = other DNA
agctgccattgtaggtagtg

SEQ ID NO: 20066 - DNA, 20 bp, synthetic construct
  misc_feature 1..20: note = chemically synthesized
  source 1..20: mol_type = other DNA
gctgccattgtaggtagtgc

SEQ ID NO: 20067 - DNA, 20 bp, synthetic construct
  misc_feature 1..20: note = chemically synthesized
  source 1..20: mol_type = other DNA
gccattgtaggtagtgcagg

SEQ ID NO: 20068 - DNA, 20 bp, synthetic construct
  misc_feature 1..20: note = chemically synthesized
  source 1..20: mol_type = other DNA
agtgcaggtggtcttgttca

SEQ ID NO: 20069 - DNA, 20 bp, synthetic construct
  misc_feature 1..20: note = chemically synthesized
  source 1..20: mol_type = other DNA
ggtggtcttgttcaaagtgt

SEQ ID NO: 20070 - DNA, 20 bp, synthetic construct
  misc_feature 1..20: note = chemically synthesized
  source 1..20: mol_type = other DNA
gagtatcacctcccactgcc

SEQ ID NO: 20071 - DNA, 20 bp, synthetic construct
  misc_feature 1..20: note = chemically synthesized
  source 1..20: mol_type = other DNA
acctcccactgccaagactg

SEQ ID NO: 20072 - DNA, 20 bp, synthetic construct
  misc_feature 1..20: note = chemically synthesized
  source 1..20: mol_type = other DNA
cagctgctttgattttaact

SEQ ID NO: 20073 - DNA, 20 bp, synthetic construct
  misc_feature 1..20: note = chemically synthesized
  source 1..20: mol_type = other DNA
agctgctttgattttaactg

SEQ ID NO: 20074 - DNA, 20 bp, synthetic construct
  misc_feature 1..20: note = chemically synthesized
  source 1..20: mol_type = other DNA
tttgattttaactgaggatc

SEQ ID NO: 20075 - DNA, 20 bp, synthetic construct
  misc_feature 1..20: note = chemically synthesized
  source 1..20: mol_type = other DNA
ttttaactgaggatctagaa

SEQ ID NO: 20076 - DNA, 20 bp, synthetic construct
  misc_feature 1..20: note = chemically synthesized
  source 1..20: mol_type = other DNA
ctgaggatctagaaaagtgc

SEQ ID NO: 20077 - DNA, 20 bp, synthetic construct
  misc_feature 1..20: note = chemically synthesized
  source 1..20: mol_type = other DNA
tgaggatctagaaaagtgct

SEQ ID NO: 20078 - DNA, 20 bp, synthetic construct
  misc_feature 1..20: note = chemically synthesized
  source 1..20: mol_type = other DNA
tatttgctgacctttgtcac

SEQ ID NO: 20079 - DNA, 20 bp, synthetic construct
  misc_feature 1..20: note = chemically synthesized
  source 1..20: mol_type = other DNA
ttgctgacctttgtcacaag

SEQ ID NO: 20080 - DNA, 20 bp, synthetic construct
  misc_feature 1..20: note = chemically synthesized
  source 1..20: mol_type = other DNA
gcacctaatctccttcctac

SEQ ID NO: 20081 - DNA, 20 bp, synthetic construct
  misc_feature 1..20: note = chemically synthesized
  source 1..20: mol_type = other DNA
gccttataaaatgatgttct

SEQ ID NO: 20082 - DNA, 20 bp, synthetic construct
  misc_feature 1..20: note = chemically synthesized
  source 1..20: mol_type = other DNA
ctgcttctgcaactgtgttt

SEQ ID NO: 20083 - DNA, 20 bp, synthetic construct
  misc_feature 1..20: note = chemically synthesized
  source 1..20: mol_type = other DNA
tctgcaactgtgttttggaa

SEQ ID NO: 20084 - DNA, 20 bp, synthetic construct
  misc_feature 1..20: note = chemically synthesized
  source 1..20: mol_type = other DNA
ctgcaactgtgttttggaac

SEQ ID NO: 20085 - DNA, 20 bp, synthetic construct
  misc_feature 1..20: note = chemically synthesized
  source 1..20: mol_type = other DNA
gcaactgtgttttggaacag

SEQ ID NO: 20086 - DNA, 20 bp, synthetic construct
  misc_feature 1..20: note = chemically synthesized
  source 1..20: mol_type = other DNA
caactgtgttttggaacagg

SEQ ID NO: 20087 - DNA, 20 bp, synthetic construct
  misc_feature 1..20: note = chemically synthesized
  source 1..20: mol_type = other DNA
aactgtgttttggaacagga

SEQ ID NO: 20088 - DNA, 20 bp, synthetic construct
  misc_feature 1..20: note = chemically synthesized
  source 1..20: mol_type = other DNA
gtgttttggaacaggagggt

SEQ ID NO: 20089 - DNA, 20 bp, synthetic construct
  misc_feature 1..20: note = chemically synthesized
  source 1..20: mol_type = other DNA
ttggaacaggagggtgagat

SEQ ID NO: 20090 - DNA, 20 bp, synthetic construct
  misc_feature 1..20: note = chemically synthesized
  source 1..20: mol_type = other DNA
gaacaggagggtgagattag

SEQ ID NO: 20091 - DNA, 20 bp, synthetic construct
  misc_feature 1..20: note = chemically synthesized
  source 1..20: mol_type = other DNA
agtagccacacacactgaaa

SEQ ID NO: 20092 - DNA, 20 bp, synthetic construct
  misc_feature 1..20: note = chemically synthesized
  source 1..20: mol_type = other DNA
aaatagtcatatgacttcca

SEQ ID NO: 20093 - DNA, 20 bp, synthetic construct
  misc_feature 1..20: note = chemically synthesized
  source 1..20: mol_type = other DNA
ttccaaagtctgtaattttt

SEQ ID NO: 20094 - DNA, 20 bp, synthetic construct
  misc_feature 1..20: note = chemically synthesized
  source 1..20: mol_type = other DNA
atttttaagcatatacaaaa

SEQ ID NO: 20095 - DNA, 20 bp, synthetic construct
  misc_feature 1..20: note = chemically synthesized
  source 1..20: mol_type = other DNA
tatgtgtgtatacatatata

SEQ ID NO: 20096 - DNA, 20 bp, synthetic construct
  misc_feature 1..20: note = chemically synthesized
  source 1..20: mol_type = other DNA
tgtgtgtatacatatatata

SEQ ID NO: 20097 - DNA, 20 bp, synthetic construct
  misc_feature 1..20: note = chemically synthesized
  source 1..20: mol_type = other DNA
tgtgtatacatatatataga

SEQ ID NO: 20098 - DNA, 20 bp, synthetic construct
  misc_feature 1..20: note = chemically synthesized
  source 1..20: mol_type = other DNA
tgtatacatatatatagaga

SEQ ID NO: 20099 - DNA, 20 bp, synthetic construct
  misc_feature 1..20: note = chemically synthesized
  source 1..20: mol_type = other DNA
tatacatatatatagagaga

SEQ ID NO: 20100 - DNA, 20 bp, synthetic construct
  misc_feature 1..20: note = chemically synthesized
  source 1..20: mol_type = other DNA
catatatatagagagagaga

SEQ ID NO: 20101 - DNA, 20 bp, synthetic construct
  misc_feature 1..20: note = chemically synthesized
  source 1..20: mol_type = other DNA
tatatatagagagagagaca

SEQ ID NO: 20102 - DNA, 20 bp, synthetic construct
  misc_feature 1..20: note = chemically synthesized
  source 1..20: mol_type = other DNA
tatatagagagagagacaga

SEQ ID NO: 20103 - DNA, 20 bp, synthetic construct
  misc_feature 1..20: note = chemically synthesized
  source 1..20: mol_type = other DNA
tatagagagagagacagaga

SEQ ID NO: 20104 - DNA, 20 bp, synthetic construct
  misc_feature 1..20: note = chemically synthesized
  source 1..20: mol_type = other DNA
gagagagagacagagagaga

SEQ ID NO: 20105 - DNA, 20 bp, synthetic construct
  misc_feature 1..20: note = chemically synthesized
  source 1..20: mol_type = other DNA
agagagagacagagagagat

SEQ ID NO: 20106 - DNA, 20 bp, synthetic construct
  misc_feature 1..20: note = chemically synthesized
  source 1..20: mol_type = other DNA
gagagagacagagagagatg

SEQ ID NO: 20107 - DNA, 20 bp, synthetic construct
  misc_feature 1..20: note = chemically synthesized
  source 1..20: mol_type = other DNA
agagagacagagagagatgg

SEQ ID NO: 20108 - DNA, 20 bp, synthetic construct
  misc_feature 1..20: note = chemically synthesized
  source 1..20: mol_type = other DNA
agagacagagagagatgggg

SEQ ID NO: 20109 - DNA, 20 bp, synthetic construct
  misc_feature 1..20: note = chemically synthesized
  source 1..20: mol_type = other DNA
agacagagagagatggggga

SEQ ID NO: 20110 - DNA, 20 bp, synthetic construct
  misc_feature 1..20: note = chemically synthesized
  source 1..20: mol_type = other DNA
acagagagagatgggggaga

SEQ ID NO: 20111 - DNA, 20 bp, synthetic construct
  misc_feature 1..20: note = chemically synthesized
  source 1..20: mol_type = other DNA
agagagagatgggggagaga

SEQ ID NO: 20112 - DNA, 20 bp, synthetic construct
  misc_feature 1..20: note = chemically synthesized
  source 1..20: mol_type = other DNA
agagagatgggggagagaga

SEQ ID NO: 20113 - DNA, 20 bp, synthetic construct
  misc_feature 1..20: note = chemically synthesized
  source 1..20: mol_type = other DNA
agagatgggggagagagaga

SEQ ID NO: 20114 - DNA, 20 bp, synthetic construct
  misc_feature 1..20: note = chemically synthesized
  source 1..20: mol_type = other DNA
agatgggggagagagagaga

SEQ ID NO: 20115 - DNA, 20 bp, synthetic construct
  misc_feature 1..20: note = chemically synthesized
  source 1..20: mol_type = other DNA
atgggggagagagagagaga

SEQ ID NO: 20116 - DNA, 20 bp, synthetic construct
  misc_feature 1..20: note = chemically synthesized
  source 1..20: mol_type = other DNA
gggagagagagagagagagc

SEQ ID NO: 20117 - DNA, 20 bp, synthetic construct
  misc_feature 1..20: note = chemically synthesized
  source 1..20: mol_type = other DNA
gagagagagagagagagcga

SEQ ID NO: 20118 - DNA, 20 bp, synthetic construct
  misc_feature 1..20: note = chemically synthesized
  source 1..20: mol_type = other DNA
gagagagagagagagcgaga

SEQ ID NO: 20119 - DNA, 20 bp, synthetic construct
  misc_feature 1..20: note = chemically synthesized
  source 1..20: mol_type = other DNA
gagagagagagagcgagaga

SEQ ID NO: 20120 - DNA, 20 bp, synthetic construct
  misc_feature 1..20: note = chemically synthesized
  source 1..20: mol_type = other DNA
agagagagagagcgagagag

SEQ ID NO: 20121 - DNA, 20 bp, synthetic construct
  misc_feature 1..20: note = chemically synthesized
  source 1..20: mol_type = other DNA
gagagagagcgagagagagg

SEQ ID NO: 20122 - DNA, 20 bp, synthetic construct
  misc_feature 1..20: note = chemically synthesized
  source 1..20: mol_type = other DNA
gagagagcgagagagaggca

SEQ ID NO: 20123 - DNA, 20 bp, synthetic construct
  misc_feature 1..20: note = chemically synthesized
  source 1..20: mol_type = other DNA
gagcgagagagaggcagaga

SEQ ID NO: 20124 - DNA, 20 bp, synthetic construct
  misc_feature 1..20: note = chemically synthesized
  source 1..20: mol_type = other DNA
gcgagagagaggcagagaaa

SEQ ID NO: 20125 - DNA, 20 bp, synthetic construct
  misc_feature 1..20: note = chemically synthesized
  source 1..20: mol_type = other DNA
agagaaagagatccttattt

SEQ ID NO: 20126 - DNA, 20 bp, synthetic construct
  misc_feature 1..20: note = chemically synthesized
  source 1..20: mol_type = other DNA
tattctatacttctttgaaa

SEQ ID NO: 20127 - DNA, 20 bp, synthetic construct
  misc_feature 1..20: note = chemically synthesized
  source 1..20: mol_type = other DNA
ttctttgaaatagtgatttt

SEQ ID NO: 20128 - DNA, 20 bp, synthetic construct
  misc_feature 1..20: note = chemically synthesized
  source 1..20: mol_type = other DNA
aatagtgatttttagtaaat

SEQ ID NO: 20129 - DNA, 20 bp, synthetic construct
  misc_feature 1..20: note = chemically synthesized
  source 1..20: mol_type = other DNA
agtgatttttagtaaattgg

SEQ ID NO: 20130 - DNA, 20 bp, synthetic construct
  misc_feature 1..20: note = chemically synthesized
  source 1..20: mol_type = other DNA
tagtaaattggcagtgttgc

SEQ ID NO: 20131 - DNA, 20 bp, synthetic construct
  misc_feature 1..20: note = chemically synthesized
  source 1..20: mol_type = other DNA
agtgttgccagatgacgact

SEQ ID NO: 20132 - DNA, 20 bp, synthetic construct
  misc_feature 1..20: note = chemically synthesized
  source 1..20: mol_type = other DNA
tgttgccagatgacgactta

SEQ ID NO: 20133 - DNA, 20 bp, synthetic construct
  misc_feature 1..20: note = chemically synthesized
  source 1..20: mol_type = other DNA
cctcattgttatatgtacca

SEQ ID NO: 20134 - DNA, 20 bp, synthetic construct
  misc_feature 1..20: note = chemically synthesized
  source 1..20: mol_type = other DNA
cattgttatatgtaccatgg

SEQ ID NO: 20135 - DNA, 20 bp, synthetic construct
  misc_feature 1..20: note = chemically synthesized
  source 1..20: mol_type = other DNA
tggtagctcatcttttcttt

SEQ ID NO: 20136 - DNA, 20 bp, synthetic construct
  misc_feature 1..20: note = chemically synthesized
  source 1..20: mol_type = other DNA
ggtagctcatcttttctttc

SEQ ID NO: 20137 - DNA, 20 bp, synthetic construct
  misc_feature 1..20: note = chemically synthesized
  source 1..20: mol_type = other DNA
tcatcttttctttcaggtga

SEQ ID NO: 20138 - DNA, 20 bp, synthetic construct
  misc_feature 1..20: note = chemically synthesized
  source 1..20: mol_type = other DNA
ctttgtcctcacgctaaaca

SEQ ID NO: 20139 - DNA, 20 bp, synthetic construct
  misc_feature 1..20: note = chemically synthesized
  source 1..20: mol_type = other DNA
acatagcccccatgttgttc

SEQ ID NO: 20140 - DNA, 20 bp, synthetic construct
  misc_feature 1..20: note = chemically synthesized
  source 1..20: mol_type = other DNA
catagcccccatgttgttcc

SEQ ID NO: 20141 - DNA, 20 bp, synthetic construct
  misc_feature 1..20: note = chemically synthesized
  source 1..20: mol_type = other DNA
cccatgttgttccaggaaaa

SEQ ID NO: 20142 - DNA, 20 bp, synthetic construct
  misc_feature 1..20: note = chemically synthesized
  source 1..20: mol_type = other DNA
catgttgttccaggaaaata

SEQ ID NO: 20143 - DNA, 20 bp, synthetic construct
  misc_feature 1..20: note = chemically synthesized
  source 1..20: mol_type = other DNA
atagagatcaataaaataca

SEQ ID NO: 20144 - DNA, 20 bp, synthetic construct
  misc_feature 1..20: note = chemically synthesized
  source 1..20: mol_type = other DNA
aatacaaagtacttgtttga

SEQ ID NO: 20145 - DNA, 20 bp, synthetic construct
  misc_feature 1..20: note = chemically synthesized
  source 1..20: mol_type = other DNA
aaagtacttgtttgaaagtg

SEQ ID NO: 20146 - DNA, 20 bp, synthetic construct
  misc_feature 1..20: note = chemically synthesized
  source 1..20: mol_type = other DNA
aagtacttgtttgaaagtga

SEQ ID NO: 20147 - DNA, 20 bp, synthetic construct
  misc_feature 1..20: note = chemically synthesized
  source 1..20: mol_type = other DNA
cttgtttgaaagtgaaggtt

SEQ ID NO: 20148 - DNA, 20 bp, synthetic construct
  misc_feature 1..20: note = chemically synthesized
  source 1..20: mol_type = other DNA
aaattcaatgacctacgctg

SEQ ID NO: 20149 - DNA, 20 bp, synthetic construct
  misc_feature 1..20: note = chemically synthesized
  source 1..20: mol_type = other DNA
gatcattcattaatgatatt

SEQ ID NO: 20150 - DNA, 20 bp, synthetic construct
  misc_feature 1..20: note = chemically synthesized
  source 1..20: mol_type = other DNA
agtattttcttttttaatgt

SEQ ID NO: 20151 - DNA, 20 bp, synthetic construct
  misc_feature 1..20: note = chemically synthesized
  source 1..20: mol_type = other DNA
agaataaaaccatttatttg

SEQ ID NO: 20152 - DNA, 20 bp, synthetic construct
  misc_feature 1..20: note = chemically synthesized
  source 1..20: mol_type = other DNA
tatgtgtatgtaaatctcct

SEQ ID NO: 20153 - DNA, 20 bp, synthetic construct
  misc_feature 1..20: note = chemically synthesized
  source 1..20: mol_type = other DNA
ttatacctcaaatatgaaaa

SEQ ID NO: 20154 - DNA, 20 bp, synthetic construct
  misc_feature 1..20: note = chemically synthesized
  source 1..20: mol_type = other DNA
tatacctcaaatatgaaaat

SEQ ID NO: 20155 - DNA, 20 bp, synthetic construct
  misc_feature 1..20: note = chemically synthesized
  source 1..20: mol_type = other DNA
tcttgcattcacttatattc

SEQ ID NO: 20156 - DNA, 20 bp, synthetic construct
  misc_feature 1..20: note = chemically synthesized
  source 1..20: mol_type = other DNA
cacttatattctagcttgtt

SEQ ID NO: 20157 - DNA, 20 bp, synthetic construct
  misc_feature 1..20: note = chemically synthesized
  source 1..20: mol_type = other DNA
cttatattctagcttgttaa

SEQ ID NO: 20158 - DNA, 20 bp, synthetic construct
  misc_feature 1..20: note = chemically synthesized
  source 1..20: mol_type = other DNA
tatattctagcttgttaaga

SEQ ID NO: 20159 - DNA, 20 bp, synthetic construct
  misc_feature 1..20: note = chemically synthesized
  source 1..20: mol_type = other DNA
attctagcttgttaagagag

SEQ ID NO: 20160 - DNA, 20 bp, synthetic construct
  misc_feature 1..20: note = chemically synthesized
  source 1..20: mol_type = other DNA
agcttgttaagagagaagtt

SEQ ID NO: 20161 - DNA, 20 bp, synthetic construct
  misc_feature 1..20: note = chemically synthesized
  source 1..20: mol_type = other DNA
gcttgttaagagagaagttt

SEQ ID NO: 20162 - DNA, 20 bp, synthetic construct
  misc_feature 1..20: note = chemically synthesized
  source 1..20: mol_type = other DNA
cttgttaagagagaagtttg

SEQ ID NO: 20163 - DNA, 20 bp, synthetic construct
  misc_feature 1..20: note = chemically synthesized
  source 1..20: mol_type = other DNA
ggcaaaatgtgctttataaa

SEQ ID NO: 20164 - DNA, 20 bp, synthetic construct
  misc_feature 1..20: note = chemically synthesized
  source 1..20: mol_type = other DNA
ctttataaatagtaaaaact

SEQ ID NO: 20165 - DNA, 20 bp, synthetic construct
  misc_feature 1..20: note = chemically synthesized
  source 1..20: mol_type = other DNA
tttataaatagtaaaaactg

SEQ ID NO: 20166 - DNA, 20 bp, synthetic construct
  misc_feature 1..20: note = chemically synthesized
  source 1..20: mol_type = other DNA
gtaaaaactgaggtaaacta

SEQ ID NO: 20167 - DNA, 20 bp, synthetic construct
  misc_feature 1..20: note = chemically synthesized
  source 1..20: mol_type = other DNA
ctgaggtaaactatagcaca

SEQ ID NO: 20168 - DNA, 20 bp, synthetic construct
  misc_feature 1..20: note = chemically synthesized
  source 1..20: mol_type = other DNA
cacaaagtgtgctatataaa

SEQ ID NO: 20169 - DNA, 20 bp, synthetic construct
  misc_feature 1..20: note = chemically synthesized
  source 1..20: mol_type = other DNA
ctatataaacagtaaaaacc

SEQ ID NO: 20170 - DNA, 20 bp, synthetic construct
  misc_feature 1..20: note = chemically synthesized
  source 1..20: mol_type = other DNA
tatataaacagtaaaaaccg

SEQ ID NO: 20171 - DNA, 20 bp, synthetic construct
  misc_feature 1..20: note = chemically synthesized
  source 1..20: mol_type = other DNA
taaaaaccgaggtaaaaata

SEQ ID NO: 20172 - DNA, 20 bp, synthetic construct
  misc_feature 1..20: note = chemically synthesized
  source 1..20: mol_type = other DNA
aaaaaccgaggtaaaaatat

SEQ ID NO: 20173 - DNA, 20 bp, synthetic construct
  misc_feature 1..20: note = chemically synthesized
  source 1..20: mol_type = other DNA
aaaaccgaggtaaaaatatg

SEQ ID NO: 20174 - DNA, 20 bp, synthetic construct
  misc_feature 1..20: note = chemically synthesized
  source 1..20: mol_type = other DNA
aaccgaggtaaaaatatggg

SEQ ID NO: 20175 - DNA, 20 bp, synthetic construct
  misc_feature 1..20: note = chemically synthesized
  source 1..20: mol_type = other DNA
accgaggtaaaaatatgggg

SEQ ID NO: 20176 - DNA, 20 bp, synthetic construct
  misc_feature 1..20: note = chemically synthesized
  source 1..20: mol_type = other DNA
aaaatatggggaggacaaaa

SEQ ID NO: 20177 - DNA, 20 bp, synthetic construct
  misc_feature 1..20: note = chemically synthesized
  source 1..20: mol_type = other DNA
aaatatggggaggacaaaaa

SEQ ID NO: 20178 - DNA, 20 bp, synthetic construct
  misc_feature 1..20: note = chemically synthesized
  source 1..20: mol_type = other DNA
aatatggggaggacaaaaaa

SEQ ID NO: 20179 - DNA, 20 bp, synthetic construct
  misc_feature 1..20: note = chemically synthesized
  source 1..20: mol_type = other DNA
aggacaaaaaagggctaaaa

SEQ ID NO: 20180 - DNA, 20 bp, synthetic construct
  misc_feature 1..20: note = chemically synthesized
  source 1..20: mol_type = other DNA
aaaaagggctaaaatggtgt

SEQ ID NO: 20181 - DNA, 20 bp, synthetic construct
  misc_feature 1..20: note = chemically synthesized
  source 1..20: mol_type = other DNA
ctaaaatggtgttggaatat

SEQ ID NO: 20182 - DNA, 20 bp, synthetic construct
  misc_feature 1..20: note = chemically synthesized
  source 1..20: mol_type = other DNA
tggtgttggaatataagaaa

SEQ ID NO: 20183 - DNA, 20 bp, synthetic construct
  misc_feature 1..20: note = chemically synthesized
  source 1..20: mol_type = other DNA
tgttggaatataagaaatag

SEQ ID NO: 20184 - DNA, 20 bp, synthetic construct
  misc_feature 1..20: note = chemically synthesized
  source 1..20: mol_type = other DNA
aatataagaaatagcagtaa

SEQ ID NO: 20185 - DNA, 20 bp, synthetic construct
  misc_feature 1..20: note = chemically synthesized
  source 1..20: mol_type = other DNA
ataagaaatagcagtaaaag

SEQ ID NO: 20186 - DNA, 20 bp, synthetic construct
  misc_feature 1..20: note = chemically synthesized
  source 1..20: mol_type = other DNA
gcagtaaaagaagctcctca

SEQ ID NO: 20187 - DNA, 20 bp, synthetic construct
  misc_feature 1..20: note = chemically synthesized
  source 1..20: mol_type = other DNA
taaaagaagctcctcacagc

SEQ ID NO: 20188 - DNA, 20 bp, synthetic construct
  misc_feature 1..20: note = chemically synthesized
  source 1..20: mol_type = other DNA
agaagctcctcacagcaaga

SEQ ID NO: 20189 - DNA, 20 bp, synthetic construct
  misc_feature 1..20: note = chemically synthesized
  source 1..20: mol_type = other DNA
ctcctcacagcaagacagta

SEQ ID NO: 20190 - DNA, 20 bp, synthetic construct
  misc_feature 1..20: note = chemically synthesized
  source 1..20: mol_type = other DNA
tcctcacagcaagacagtac

SEQ ID NO: 20191 - DNA, 20 bp, synthetic construct
  misc_feature 1..20: note = chemically synthesized
  source 1..20: mol_type = other DNA
cctcacagcaagacagtaca

SEQ ID NO: 20192 - DNA, 20 bp, synthetic construct
  misc_feature 1..20: note = chemically synthesized
  source 1..20: mol_type = other DNA
agacagtacagggaaatgtc

SEQ ID NO: 20193 - DNA, 20 bp, synthetic construct
  misc_feature 1..20: note = chemically synthesized
  source 1..20: mol_type = other DNA
acagtacagggaaatgtctg

SEQ ID NO: 20194 - DNA, 20 bp, synthetic construct
  misc_feature 1..20: note = chemically synthesized
  source 1..20: mol_type = other DNA
cagtacagggaaatgtctgg

SEQ ID NO: 20195 - DNA, 20 bp, synthetic construct
  misc_feature 1..20: note = chemically synthesized
  source 1..20: mol_type = other DNA
agtacagggaaatgtctgga

SEQ ID NO: 20196 - DNA, 20 bp, synthetic construct
  misc_feature 1..20: note = chemically synthesized
  source 1..20: mol_type = other DNA
gggaaatgtctggagggaca

SEQ ID NO: 20197 - DNA, 20 bp, synthetic construct
  misc_feature 1..20: note = chemically synthesized
  source 1..20: mol_type = other DNA
gacaaagatttacttacaat

SEQ ID NO: 20198 - DNA, 20 bp, synthetic construct
  misc_feature 1..20: note = chemically synthesized
  source 1..20: mol_type = other DNA
acaaagatttacttacaatc

SEQ ID NO: 20199 - DNA, 20 bp, synthetic construct
  misc_feature 1..20: note = chemically synthesized
  source 1..20: mol_type = other DNA
aatcaggcctcaaccaatat

SEQ ID NO: 20200 - DNA, 20 bp, synthetic construct
  misc_feature 1..20: note = chemically synthesized
  source 1..20: mol_type = other DNA
tatgacgtgtttatatgtat

SEQ ID NO: 20201 - DNA, 20 bp, synthetic construct
  misc_feature 1..20: note = chemically synthesized
  source 1..20: mol_type = other DNA
atgacgtgtttatatgtatc

SEQ ID NO: 20202 - DNA, 20 bp, synthetic construct
  misc_feature 1..20: note = chemically synthesized
  source 1..20: mol_type = other DNA
gcatataatgtataatgatc

SEQ ID NO: 20203 - DNA, 20 bp, synthetic construct
  misc_feature 1..20: note = chemically synthesized
  source 1..20: mol_type = other DNA
ataatgtataatgatcaagt

SEQ ID NO: 20204 - DNA, 20 bp, synthetic construct
  misc_feature 1..20: note = chemically synthesized
  source 1..20: mol_type = other DNA
taatgtataatgatcaagtc

SEQ ID NO: 20205 - DNA, 20 bp, synthetic construct
  misc_feature 1..20: note = chemically synthesized
  source 1..20: mol_type = other DNA
taatgatcaagtcaggtatt

SEQ ID NO: 20206 - DNA, 20 bp, synthetic construct
  misc_feature 1..20: note = chemically synthesized
  source 1..20: mol_type = other DNA
aatgatcaagtcaggtattt

SEQ ID NO: 20207 - DNA, 20 bp, synthetic construct
  misc_feature 1..20: note = chemically synthesized
  source 1..20: mol_type = other DNA
atgatcaagtcaggtatttg

SEQ ID NO: 20208 - DNA, 20 bp, synthetic construct
  misc_feature 1..20: note = chemically synthesized
  source 1..20: mol_type = other DNA
tttggggtattcatcacctc

SEQ ID NO: 20209 - DNA, 20 bp, synthetic construct
  misc_feature 1..20: note = chemically synthesized
  source 1..20: mol_type = other DNA
tatttatcgtttctatgtgt

SEQ ID NO: 20210 - DNA, 20 bp, synthetic construct
  misc_feature 1..20: note = chemically synthesized
  source 1..20: mol_type = other DNA
atttatcgtttctatgtgtt

SEQ ID NO: 20211 - DNA, 20 bp, synthetic construct
  misc_feature 1..20: note = chemically synthesized
  source 1..20: mol_type = other DNA
ctatgtgttaggaacatttc

SEQ ID NO: 20212 - DNA, 20 bp, synthetic construct
  misc_feature 1..20: note = chemically synthesized
  source 1..20: mol_type = other DNA
cctactttgctattgaacat

SEQ ID NO: 20213 - DNA, 20 bp, synthetic construct
  misc_feature 1..20: note = chemically synthesized
  source 1..20: mol_type = other DNA
tacacacctttctctacctc

SEQ ID NO: 20214 - DNA, 20 bp, synthetic construct
  misc_feature 1..20: note = chemically synthesized
  source 1..20: mol_type = other DNA
ctacatgatattaacttttt

SEQ ID NO: 20215 - DNA, 20 bp, synthetic construct
  misc_feature 1..20: note = chemically synthesized
  source 1..20: mol_type = other DNA
cttttttagctcccacatat

SEQ ID NO: 20216 - DNA, 20 bp, synthetic construct
  misc_feature 1..20: note = chemically synthesized
  source 1..20: mol_type = other DNA
tttagctcccacatatcagt

SEQ ID NO: 20217 - DNA, 20 bp, synthetic construct
  misc_feature 1..20: note = chemically synthesized
  source 1..20: mol_type = other DNA
aaaatttgtctttctatgcc

SEQ ID NO: 20218 - DNA, 20 bp, synthetic construct
  misc_feature 1..20: note = chemically synthesized
  source 1..20: mol_type = other DNA
tcgtttaacataatgacttc

SEQ ID NO: 20219 - DNA, 20 bp, synthetic construct
  misc_feature 1..20: note = chemically synthesized
  source 1..20: mol_type = other DNA
gaaatgattttatatttgta

SEQ ID NO: 20220 - DNA, 20 bp, synthetic construct
  misc_feature 1..20: note = chemically synthesized
  source 1..20: mol_type = other DNA
tttcttcattcatccattga

SEQ ID NO: 20221 - DNA, 20 bp, synthetic construct
  misc_feature 1..20: note = chemically synthesized
  source 1..20: mol_type = other DNA
ttcatccattgatggacact

SEQ ID NO: 20222 - DNA, 20 bp, synthetic construct
  misc_feature 1..20: note = chemically synthesized
  source 1..20: mol_type = other DNA
tcatccattgatggacactt

SEQ ID NO: 20223 - DNA, 20 bp, synthetic construct
  misc_feature 1..20: note = chemically synthesized
  source 1..20: mol_type = other DNA
gtgaatcgtgctgcaataaa

SEQ ID NO: 20224 - DNA, 20 bp, synthetic construct
  misc_feature 1..20: note = chemically synthesized
  source 1..20: mol_type = other DNA
tcgtgctgcaataaacagtg

SEQ ID NO: 20225 - DNA, 20 bp, synthetic construct
  misc_feature 1..20: note = chemically synthesized
  source 1..20: mol_type = other DNA
tgcaataaacagtgtggtac

SEQ ID NO: 20226 - DNA, 20 bp, synthetic construct
  misc_feature 1..20: note = chemically synthesized
  source 1..20: mol_type = other DNA
tattctgaattcttttcctt

SEQ ID NO: 20227 - DNA, 20 bp, synthetic construct
  misc_feature 1..20: note = chemically synthesized
  source 1..20: mol_type = other DNA
ttttcctttggataaatacc

SEQ ID NO: 20228 - DNA, 20 bp, synthetic construct
  misc_feature 1..20: note = chemically synthesized
  source 1..20: mol_type = other DNA
ttggataaatacccagtaat

SEQ ID NO: 20229 - DNA, 20 bp, synthetic construct
  misc_feature 1..20: note = chemically synthesized
  source 1..20: mol_type = other DNA
atacccagtaataagattgc

SEQ ID NO: 20230 - DNA, 20 bp, synthetic construct
  misc_feature 1..20: note = chemically synthesized
  source 1..20: mol_type = other DNA
aagattgctggatcttatga

SEQ ID NO: 20231 - DNA, 20 bp, synthetic construct
  misc_feature 1..20: note = chemically synthesized
  source 1..20: mol_type = other DNA
tcttatgatagttcaatttt

SEQ ID NO: 20232 - DNA, 20 bp, synthetic construct
  misc_feature 1..20: note = chemically synthesized
  source 1..20: mol_type = other DNA
tagttcaatttttagctttt

SEQ ID NO: 20233 - DNA, 20 bp, synthetic construct
  misc_feature 1..20: note = chemically synthesized
  source 1..20: mol_type = other DNA
aatctacatattgttttcca

SEQ ID NO: 20234 - DNA, 20 bp, synthetic construct
  misc_feature 1..20: note = chemically synthesized
  source 1..20: mol_type = other DNA
ctacatattgttttccatag

SEQ ID NO: 20235 - DNA, 20 bp, synthetic construct
  misc_feature 1..20: note = chemically synthesized
  source 1..20: mol_type = other DNA
ctaatttgcatgcttaccaa

SEQ ID NO: 20236 - DNA, 20 bp, synthetic construct
  misc_feature 1..20: note = chemically synthesized
  source 1..20: mol_type = other DNA
tgcttaccaatagtgcctac

SEQ ID NO: 20237 - DNA, 20 bp, synthetic construct
  misc_feature 1..20: note = chemically synthesized
  source 1..20: mol_type = other DNA
cttttccttcacatccttgc

SEQ ID NO: 20238 - DNA, 20 bp, synthetic construct
  misc_feature 1..20: note = chemically synthesized
  source 1..20: mol_type = other DNA
taaatcatgatgattctaac

SEQ ID NO: 20239 - DNA, 20 bp, synthetic construct
  misc_feature 1..20: note = chemically synthesized
  source 1..20: mol_type = other DNA
atgatgattctaactggcat

SEQ ID NO: 20240 - DNA, 20 bp, synthetic construct
  misc_feature 1..20: note = chemically synthesized
  source 1..20: mol_type = other DNA
cataagatgatatctcattg

SEQ ID NO: 20241 - DNA, 20 bp, synthetic construct
  misc_feature 1..20: note = chemically synthesized
  source 1..20: mol_type = other DNA
atttgcatttctctgatgat

SEQ ID NO: 20242 - DNA, 20 bp, synthetic construct
  misc_feature 1..20: note = chemically synthesized
  source 1..20: mol_type = other DNA
ctctgatgattagtaatgtt

SEQ ID NO: 20243 - DNA, 20 bp, synthetic construct
  misc_feature 1..20: note = chemically synthesized
  source 1..20: mol_type = other DNA
tcctttgccaattttttaat

SEQ ID NO: 20244 - DNA, 20 bp, synthetic construct
  misc_feature 1..20: note = chemically synthesized
  source 1..20: mol_type = other DNA
ttatttgtttttccactgtt

SEQ ID NO: 20245 - DNA, 20 bp, synthetic construct
  misc_feature 1..20: note = chemically synthesized
  source 1..20: mol_type = other DNA
tttccactgttgagttgttt

SEQ ID NO: 20246 - DNA, 20 bp, synthetic construct
  misc_feature 1..20: note = chemically synthesized
  source 1..20: mol_type = other DNA
tttgagtttcttatatattc

SEQ ID NO: 20247 - DNA, 20 bp, synthetic construct
  misc_feature 1..20: note = chemically synthesized
  source 1..20: mol_type = other DNA
tgagtttcttatatattctg

SEQ ID NO: 20248 - DNA, 20 bp, synthetic construct
  misc_feature 1..20: note = chemically synthesized
  source 1..20: mol_type = other DNA
aaatattttctcgcattcaa

SEQ ID NO: 20249 - DNA, 20 bp, synthetic construct
  misc_feature 1..20: note = chemically synthesized
  source 1..20: mol_type = other DNA
tgattgtttcctttactgtg

SEQ ID NO: 20250 - DNA, 20 bp, synthetic construct
  misc_feature 1..20: note = chemically synthesized
  source 1..20: mol_type = other DNA
tttactgtgcagatgtattt

SEQ ID NO: 20251 - DNA, 20 bp, synthetic construct
  misc_feature 1..20: note = chemically synthesized
  source 1..20: mol_type = other DNA
agatgtattttagcttaata

SEQ ID NO: 20252 - DNA, 20 bp, synthetic construct
  misc_feature 1..20: note = chemically synthesized
  source 1..20: mol_type = other DNA
cttttgttgcctgtgctttt

SEQ ID NO: 20253 - DNA, 20 bp, synthetic construct
  misc_feature 1..20: note = chemically synthesized
  source 1..20: mol_type = other DNA
ttttgttgcctgtgcttttg

SEQ ID NO: 20254 - DNA, 20 bp, synthetic construct
  misc_feature 1..20: note = chemically synthesized
  source 1..20: mol_type = other DNA
tgcctgtgcttttgaggtct

SEQ ID NO: 20255 - DNA, 20 bp, synthetic construct
  misc_feature 1..20: note = chemically synthesized
  source 1..20: mol_type = other DNA
ggccataaaatctttgccca

SEQ ID NO: 20256 - DNA, 20 bp, synthetic construct
  misc_feature 1..20: note = chemically synthesized
  source 1..20: mol_type = other DNA
ttgcccaaagccatgtcttg

SEQ ID NO: 20257 - DNA, 20 bp, synthetic construct
  misc_feature 1..20: note = chemically synthesized
  source 1..20: mol_type = other DNA
gtctcccttatgttttcttt

SEQ ID NO: 20258 - DNA, 20 bp, synthetic construct
  misc_feature 1..20: note = chemically synthesized
  source 1..20: mol_type = other DNA
tcccttatgttttcttttag

SEQ ID NO: 20259 - DNA, 20 bp, synthetic construct
  misc_feature 1..20: note = chemically synthesized
  source 1..20: mol_type = other DNA
gttttcttttagtagtttta

SEQ ID NO: 20260 - DNA, 20 bp, synthetic construct
  misc_feature 1..20: note = chemically synthesized
  source 1..20: mol_type = other DNA
tttagtagttttatagtttt

SEQ ID NO: 20261 - DNA, 20 bp, synthetic construct
  misc_feature 1..20: note = chemically synthesized
  source 1..20: mol_type = other DNA
tagttttaagttttatattt

SEQ ID NO: 20262 - DNA, 20 bp, synthetic construct
  misc_feature 1..20: note = chemically synthesized
  source 1..20: mol_type = other DNA
ttaagtctttaatccatctt

SEQ ID NO: 20263 - DNA, 20 bp, synthetic construct
  misc_feature 1..20: note = chemically synthesized
  source 1..20: mol_type = other DNA
aagtctttaatccatcttga

SEQ ID NO: 20264 - DNA, 20 bp, synthetic construct
  misc_feature 1..20: note = chemically synthesized
  source 1..20: mol_type = other DNA
tcttgagagtacgttttata

SEQ ID NO: 20265 - DNA, 20 bp, synthetic construct
  misc_feature 1..20: note = chemically synthesized
  source 1..20: mol_type = other DNA
acgttttatatggcaataaa

SEQ ID NO: 20266 - DNA, 20 bp, synthetic construct
  misc_feature 1..20: note = chemically synthesized
  source 1..20: mol_type = other DNA
cgttttatatggcaataaat

SEQ ID NO: 20267 - DNA, 20 bp, synthetic construct
  misc_feature 1..20: note = chemically synthesized
  source 1..20: mol_type = other DNA
gttttatatggcaataaata

SEQ ID NO: 20268 - DNA, 20 bp, synthetic construct
  misc_feature 1..20: note = chemically synthesized
  source 1..20: mol_type = other DNA
ttttatatggcaataaatag

SEQ ID NO: 20269 - DNA, 20 bp, synthetic construct
  misc_feature 1..20: note = chemically synthesized
  source 1..20: mol_type = other DNA
gcaataaataggggttgtat

SEQ ID NO: 20270 - DNA, 20 bp, synthetic construct
  misc_feature 1..20: note = chemically synthesized
  source 1..20: mol_type = other DNA
caataaataggggttgtatt

SEQ ID NO: 20271 - DNA, 20 bp, synthetic construct
  misc_feature 1..20: note = chemically synthesized
  source 1..20: mol_type = other DNA
catttttgcatctattgtac

SEQ ID NO: 20272 - DNA, 20 bp, synthetic construct
  misc_feature 1..20: note = chemically synthesized
  source 1..20: mol_type = other DNA
atttttgcatctattgtaca

SEQ ID NO: 20273 - DNA, 20 bp, synthetic construct
  misc_feature 1..20: note = chemically synthesized
  source 1..20: mol_type = other DNA
tttttgcatctattgtacaa

SEQ ID NO: 20274 - DNA, 20 bp, synthetic construct
  misc_feature 1..20: note = chemically synthesized
  source 1..20: mol_type = other DNA
ttttgcatctattgtacaag

SEQ ID NO: 20275 - DNA, 20 bp, synthetic construct
  misc_feature 1..20: note = chemically synthesized
  source 1..20: mol_type = other DNA
catctattgtacaaggggtt

SEQ ID NO: 20276 - DNA, 20 bp, synthetic construct
  misc_feature 1..20: note = chemically synthesized
  source 1..20: mol_type = other DNA
tcttgatttgattctccatt

SEQ ID NO: 20277 - DNA, 20 bp, synthetic construct
  misc_feature 1..20: note = chemically synthesized
  source 1..20: mol_type = other DNA
attctccatttggttgctgt

SEQ ID NO: 20278 - DNA, 20 bp, synthetic construct
  misc_feature 1..20: note = chemically synthesized
  source 1..20: mol_type = other DNA
atttggttgctgttggtgta

SEQ ID NO: 20279 - DNA, 20 bp, synthetic construct
  misc_feature 1..20: note = chemically synthesized
  source 1..20: mol_type = other DNA
tggttgctgttggtgtatag

SEQ ID NO: 20280 - DNA, 20 bp, synthetic construct
  misc_feature 1..20: note = chemically synthesized
  source 1..20: mol_type = other DNA
gttgctgttggtgtatagaa

SEQ ID NO: 20281 - DNA, 20 bp, synthetic construct
  misc_feature 1..20: note = chemically synthesized
  source 1..20: mol_type = other DNA
gtgtgcattcatcttgtatc

SEQ ID NO: 20282 - DNA, 20 bp, synthetic construct
  misc_feature 1..20: note = chemically synthesized
  source 1..20: mol_type = other DNA
actttgctgaattattttat

SEQ ID NO: 20283 - DNA, 20 bp, synthetic construct
  misc_feature 1..20: note = chemically synthesized
  source 1..20: mol_type = other DNA
ctgaattattttatcagttc

SEQ ID NO: 20284 - DNA, 20 bp, synthetic construct
  misc_feature 1..20: note = chemically synthesized
  source 1..20: mol_type = other DNA
tgaattattttatcagttct

SEQ ID NO: 20285 - DNA, 20 bp, synthetic construct
  misc_feature 1..20: note = chemically synthesized
  source 1..20: mol_type = other DNA
aattattttatcagttctag

SEQ ID NO: 20286 - DNA, 20 bp, synthetic construct
  misc_feature 1..20: note = chemically synthesized
  source 1..20: mol_type = other DNA
tatcagttctaggagctttc

SEQ ID NO: 20287 - DNA, 20 bp, synthetic construct
  misc_feature 1..20: note = chemically synthesized
  source 1..20: mol_type = other DNA
tcagttctaggagctttctg

SEQ ID NO: 20288 - DNA, 20 bp, synthetic construct
  misc_feature 1..20: note = chemically synthesized
  source 1..20: mol_type = other DNA
cagttctaggagctttctgg

SEQ ID NO: 20289 - DNA, 20 bp, synthetic construct
  misc_feature 1..20: note = chemically synthesized
  source 1..20: mol_type = other DNA
gttctaggagctttctggag

SEQ ID NO: 20290 - DNA, 20 bp, synthetic construct
  misc_feature 1..20: note = chemically synthesized
  source 1..20: mol_type = other DNA
gagctttctggaggagtctt

SEQ ID NO: 20291 - DNA, 20 bp, synthetic construct
  misc_feature 1..20: note = chemically synthesized
  source 1..20: mol_type = other DNA
agctttctggaggagtcttt

SEQ ID NO: 20292 - DNA, 20 bp, synthetic construct
  misc_feature 1..20: note = chemically synthesized
  source 1..20: mol_type = other DNA
gctttctggaggagtcttta

SEQ ID NO: 20293 - DNA, 20 bp, synthetic construct
  misc_feature 1..20: note = chemically synthesized
  source 1..20: mol_type = other DNA
gaggagtctttagggtttta

SEQ ID NO: 20294 - DNA, 20 bp, synthetic construct
  misc_feature 1..20: note = chemically synthesized
  source 1..20: mol_type = other DNA
aggagtctttagggttttaa

SEQ ID NO: 20295 - DNA, 20 bp, synthetic construct
  misc_feature 1..20: note = chemically synthesized
  source 1..20: mol_type = other DNA
aaggtaaatgatcatatcat

SEQ ID NO: 20296 - DNA, 20 bp, synthetic construct
  misc_feature 1..20: note = chemically synthesized
  source 1..20: mol_type = other DNA
atgatcatatcatcagcaaa

SEQ ID NO: 20297 - DNA, 20 bp, synthetic construct
  misc_feature 1..20: note = chemically synthesized
  source 1..20: mol_type = other DNA
atatcatcagcaaacagtga

SEQ ID NO: 20298 - DNA, 20 bp, synthetic construct
  misc_feature 1..20: note = chemically synthesized
  source 1..20: mol_type = other DNA
tttgttttgtctgattgccc

SEQ ID NO: 20299 - DNA, 20 bp, synthetic construct
  misc_feature 1..20: note = chemically synthesized
  source 1..20: mol_type = other DNA
ttttgtctgattgccctggc

SEQ ID NO: 20300 - DNA, 20 bp, synthetic construct
  misc_feature 1..20: note = chemically synthesized
  source 1..20: mol_type = other DNA
tttgtctgattgccctggct

SEQ ID NO: 20301 - DNA, 20 bp, synthetic construct
  misc_feature 1..20: note = chemically synthesized
  source 1..20: mol_type = other DNA
attgccctggctaggacttc

SEQ ID NO: 20302 - DNA, 20 bp, synthetic construct
  misc_feature 1..20: note = chemically synthesized
  source 1..20: mol_type = other DNA
ggacttccagtactatgttg

SEQ ID NO: 20303 - DNA, 20 bp, synthetic construct
  misc_feature 1..20: note = chemically synthesized
  source 1..20: mol_type = other DNA
acttccagtactatgttgaa

SEQ ID NO: 20304 - DNA, 20 bp, synthetic construct
  misc_feature 1..20: note = chemically synthesized
  source 1..20: mol_type = other DNA
cttccagtactatgttgaag

SEQ ID NO: 20305 - DNA, 20 bp, synthetic construct
  misc_feature 1..20: note = chemically synthesized
  source 1..20: mol_type = other DNA
tccagtactatgttgaagag

SEQ ID NO: 20306 - DNA, 20 bp, synthetic construct
  misc_feature 1..20: note = chemically synthesized
  source 1..20: mol_type = other DNA
agtactatgttgaagaggag

SEQ ID NO: 20307 - DNA, 20 bp, synthetic construct
  misc_feature 1..20: note = chemically synthesized
  source 1..20: mol_type = other DNA
ctatgttgaagaggagtggt

SEQ ID NO: 20308 - DNA, 20 bp, synthetic construct
  misc_feature 1..20: note = chemically synthesized
  source 1..20: mol_type = other DNA
atgttgaagaggagtggtga

SEQ ID NO: 20309 - DNA, 20 bp, synthetic construct
  misc_feature 1..20: note = chemically synthesized
  source 1..20: mol_type = other DNA
ttgaagaggagtggtgagag

SEQ ID NO: 20310 - DNA, 20 bp, synthetic construct
  misc_feature 1..20: note = chemically synthesized
  source 1..20: mol_type = other DNA
tgaagaggagtggtgagagt

SEQ ID NO: 20311 - DNA, 20 bp, synthetic construct
  misc_feature 1..20: note = chemically synthesized
  source 1..20: mol_type = other DNA
tgggcatccttgtcttgttc

SEQ ID NO: 20312 - DNA, 20 bp, synthetic construct
  misc_feature 1..20: note = chemically synthesized
  source 1..20: mol_type = other DNA
ccttgtcttgttccagttct

SEQ ID NO: 20313 - DNA, 20 bp, synthetic construct
  misc_feature 1..20: note = chemically synthesized
  source 1..20: mol_type = other DNA
ttgtcttgttccagttctca

SEQ ID NO: 20314 - DNA, 20 bp, synthetic construct
  misc_feature 1..20: note = chemically synthesized
  source 1..20: mol_type = other DNA
tgtcttgttccagttctcag

SEQ ID NO: 20315 - DNA, 20 bp, synthetic construct
  misc_feature 1..20: note = chemically synthesized
  source 1..20: mol_type = other DNA
gtcttgttccagttctcaga

SEQ ID NO: 20316 - DNA, 20 bp, synthetic construct
  misc_feature 1..20: note = chemically synthesized
  source 1..20: mol_type = other DNA
ttccccattcaatattatgt

SEQ ID NO: 20317 - DNA, 20 bp, synthetic construct
  misc_feature 1..20: note = chemically synthesized
  source 1..20: mol_type = other DNA
attcaatattatgttggctg

SEQ ID NO: 20318 - DNA, 20 bp, synthetic construct
  misc_feature 1..20: note = chemically synthesized
  source 1..20: mol_type = other DNA
ttcaatattatgttggctgt

SEQ ID NO: 20319 - DNA, 20 bp, synthetic construct
  misc_feature 1..20: note = chemically synthesized
  source 1..20: mol_type = other DNA
tgttggctgtgggtttgtca

SEQ ID NO: 20320 - DNA, 20 bp, synthetic construct
  misc_feature 1..20: note = chemically synthesized
  source 1..20: mol_type = other DNA
ggctgtgggtttgtcacaga

SEQ ID NO: 20321 - DNA, 20 bp, synthetic construct
  misc_feature 1..20: note = chemically synthesized
  source 1..20: mol_type = other DNA
cagatggcttttattacact

SEQ ID NO: 20322 - DNA, 20 bp, synthetic construct
  misc_feature 1..20: note = chemically synthesized
  source 1..20: mol_type = other DNA
agatggcttttattacactg

SEQ ID NO: 20323 - DNA, 20 bp, synthetic construct
  misc_feature 1..20: note = chemically synthesized
  source 1..20: mol_type = other DNA
tcttgtatgctgattttgct

SEQ ID NO: 20324 - DNA, 20 bp, synthetic construct
  misc_feature 1..20: note = chemically synthesized
  source 1..20: mol_type = other DNA
ttttaatcataaatgtatgc

SEQ ID NO: 20325 - DNA, 20 bp, synthetic construct
  misc_feature 1..20: note = chemically synthesized
  source 1..20: mol_type = other DNA
atgctttttctgcatctatt

SEQ ID NO: 20326 - DNA, 20 bp, synthetic construct
  misc_feature 1..20: note = chemically synthesized
  source 1..20: mol_type = other DNA
tgtttttaaatctgtttatg

SEQ ID NO: 20327 - DNA, 20 bp, synthetic construct
  misc_feature 1..20: note = chemically synthesized
  source 1..20: mol_type = other DNA
gtatcacacttattgacttg

SEQ ID NO: 20328 - DNA, 20 bp, synthetic construct
  misc_feature 1..20: note = chemically synthesized
  source 1..20: mol_type = other DNA
tcaaaccaaccctgcatccc

SEQ ID NO: 20329 - DNA, 20 bp, synthetic construct
  misc_feature 1..20: note = chemically synthesized
  source 1..20: mol_type = other DNA
ccaaccctgcatccctggca

SEQ ID NO: 20330 - DNA, 20 bp, synthetic construct
  misc_feature 1..20: note = chemically synthesized
  source 1..20: mol_type = other DNA
gcatggaacctgcttgatca

SEQ ID NO: 20331 - DNA, 20 bp, synthetic construct
  misc_feature 1..20: note = chemically synthesized
  source 1..20: mol_type = other DNA
tggaacctgcttgatcatgg

SEQ ID NO: 20332 - DNA, 20 bp, synthetic construct
  misc_feature 1..20: note = chemically synthesized
  source 1..20: mol_type = other DNA
ttttgttatgttgttgaatt

SEQ ID NO: 20333 - DNA, 20 bp, synthetic construct
  misc_feature 1..20: note = chemically synthesized
  source 1..20: mol_type = other DNA
tgttgttgaatttggttatc

SEQ ID NO: 20334 - DNA, 20 bp, synthetic construct
  misc_feature 1..20: note = chemically synthesized
  source 1..20: mol_type = other DNA
tggttatctagtattttgtt

SEQ ID NO: 20335 - DNA, 20 bp, synthetic construct
  misc_feature 1..20: note = chemically synthesized
  source 1..20: mol_type = other DNA
ggttatctagtattttgtta

SEQ ID NO: 20336 - DNA, 20 bp, synthetic construct
  misc_feature 1..20: note = chemically synthesized
  source 1..20: mol_type = other DNA
tagtattttgttaaggattt

SEQ ID NO: 20337 - DNA, 20 bp, synthetic construct
  misc_feature 1..20: note = chemically synthesized
  source 1..20: mol_type = other DNA
ttttagcatctatgttcatc

SEQ ID NO: 20338 - DNA, 20 bp, synthetic construct
  misc_feature 1..20: note = chemically synthesized
  source 1..20: mol_type = other DNA
tttagcatctatgttcatca

SEQ ID NO: 20339 - DNA, 20 bp, synthetic construct
  misc_feature 1..20: note = chemically synthesized
  source 1..20: mol_type = other DNA
tctatgttcatcaaggctat

SEQ ID NO: 20340 - DNA, 20 bp, synthetic construct
  misc_feature 1..20: note = chemically synthesized
  source 1..20: mol_type = other DNA
tcatcaaggctatcagtctg

SEQ ID NO: 20341 - DNA, 20 bp, synthetic construct
  misc_feature 1..20: note = chemically synthesized
  source 1..20: mol_type = other DNA
cagtctgtagttttcttttt

SEQ ID NO: 20342 - DNA, 20 bp, synthetic construct
  misc_feature 1..20: note = chemically synthesized
  source 1..20: mol_type = other DNA
tttttggttatgtccttccc

SEQ ID NO: 20343 - DNA, 20 bp, synthetic construct
  misc_feature 1..20: note = chemically synthesized
  source 1..20: mol_type = other DNA
gttatgtccttccctggttt

SEQ ID NO: 20344 - DNA, 20 bp, synthetic construct
  misc_feature 1..20: note = chemically synthesized
  source 1..20: mol_type = other DNA
ccctggttttggtgtgatgc

SEQ ID NO: 20345 - DNA, 20 bp, synthetic construct
  misc_feature 1..20: note = chemically synthesized
  source 1..20: mol_type = other DNA
ttggtgtgatgctggcttca

SEQ ID NO: 20346 - DNA, 20 bp, synthetic construct
  misc_feature 1..20: note = chemically synthesized
  source 1..20: mol_type = other DNA
gctggcttcatagaatgaat

SEQ ID NO: 20347 - DNA, 20 bp, synthetic construct
  misc_feature 1..20: note = chemically synthesized
  source 1..20: mol_type = other DNA
ctggcttcatagaatgaatt

SEQ ID NO: 20348 - DNA, 20 bp, synthetic construct
  misc_feature 1..20: note = chemically synthesized
  source 1..20: mol_type = other DNA
tggcttcatagaatgaatta

SEQ ID NO: 20349 - DNA, 20 bp, synthetic construct
  misc_feature 1..20: note = chemically synthesized
  source 1..20: mol_type = other DNA
cttcatagaatgaattaggg

SEQ ID NO: 20350 - DNA, 20 bp, synthetic construct
  misc_feature 1..20: note = chemically synthesized
  source 1..20: mol_type = other DNA
ttcatagaatgaattagggc

SEQ ID NO: 20351 - DNA, 20 bp, synthetic construct
  misc_feature 1..20: note = chemically synthesized
  source 1..20: mol_type = other DNA
ttccttctttatctgtcttg

SEQ ID NO: 20352 - DNA, 20 bp, synthetic construct
  misc_feature 1..20: note = chemically synthesized
  source 1..20: mol_type = other DNA
tctttatctgtcttgtagaa

SEQ ID NO: 20353 - DNA, 20 bp, synthetic construct
  misc_feature 1..20: note = chemically synthesized
  source 1..20: mol_type = other DNA
tcttgtagaatagtgtcaaa

SEQ ID NO: 20354 - DNA, 20 bp, synthetic construct
  misc_feature 1..20: note = chemically synthesized
  source 1..20: mol_type = other DNA
gtagaatagtgtcaaaaaga

SEQ ID NO: 20355 - DNA, 20 bp, synthetic construct
  misc_feature 1..20: note = chemically synthesized
  source 1..20: mol_type = other DNA
tagaatagtgtcaaaaagat

SEQ ID NO: 20356 - DNA, 20 bp, synthetic construct
  misc_feature 1..20: note = chemically synthesized
  source 1..20: mol_type = other DNA
agaatagtgtcaaaaagatg

SEQ ID NO: 20357 - DNA, 20 bp, synthetic construct
  misc_feature 1..20: note = chemically synthesized
  source 1..20: mol_type = other DNA
ccaattcctctttgaatgtc

SEQ ID NO: 20358 - DNA, 20 bp, synthetic construct
  misc_feature 1..20: note = chemically synthesized
  source 1..20: mol_type = other DNA
attcctctttgaatgtctag

SEQ ID NO: 20359 - DNA, 20 bp, synthetic construct
  misc_feature 1..20: note = chemically synthesized
  source 1..20: mol_type = other DNA
aattctgttgtgaatccatc

SEQ ID NO: 20360 - DNA, 20 bp, synthetic construct
  misc_feature 1..20: note = chemically synthesized
  source 1..20: mol_type = other DNA
tctggtcctgaacttttttt

SEQ ID NO: 20361 - DNA, 20 bp, synthetic construct
  misc_feature 1..20: note = chemically synthesized
  source 1..20: mol_type = other DNA
gtcctgaacttttttttggt

SEQ ID NO: 20362 - DNA, 20 bp, synthetic construct
  misc_feature 1..20: note = chemically synthesized
  source 1..20: mol_type = other DNA
taaatctcactgcttgttat

SEQ ID NO: 20363 - DNA, 20 bp, synthetic construct
  misc_feature 1..20: note = chemically synthesized
  source 1..20: mol_type = other DNA
actgcttgttattggtctgt

SEQ ID NO: 20364 - DNA, 20 bp, synthetic construct
  misc_feature 1..20: note = chemically synthesized
  source 1..20: mol_type = other DNA
ggtctgttagtaaatttatt

SEQ ID NO: 20365 - DNA, 20 bp, synthetic construct
  misc_feature 1..20: note = chemically synthesized
  source 1..20: mol_type = other DNA
gtctgttagtaaatttattg

SEQ ID NO: 20366 - DNA, 20 bp, synthetic construct
  misc_feature 1..20: note = chemically synthesized
  source 1..20: mol_type = other DNA
atttattgaggctcatttca

SEQ ID NO: 20367 - DNA, 20 bp, synthetic construct
  misc_feature 1..20: note = chemically synthesized
  source 1..20: mol_type = other DNA
tcatttcatggcctatcata

SEQ ID NO: 20368 - DNA, 20 bp, synthetic construct
  misc_feature 1..20: note = chemically synthesized
  source 1..20: mol_type = other DNA
gcctatcatatggtctacct

SEQ ID NO: 20369 - DNA, 20 bp, synthetic construct
  misc_feature 1..20: note = chemically synthesized
  source 1..20: mol_type = other DNA
ctatcatatggtctaccttg

SEQ ID NO: 20370 - DNA, 20 bp, synthetic construct
  misc_feature 1..20: note = chemically synthesized
  source 1..20: mol_type = other DNA
aatttccacgcgctgttgaa

SEQ ID NO: 20371 - DNA, 20 bp, synthetic construct
  misc_feature 1..20: note = chemically synthesized
  source 1..20: mol_type = other DNA
tgaatagaatgtgtgttctg

SEQ ID NO: 20372 - DNA, 20 bp, synthetic construct
  misc_feature 1..20: note = chemically synthesized
  source 1..20: mol_type = other DNA
aatgtgtgttctgtggttat

SEQ ID NO: 20373 - DNA, 20 bp, synthetic construct
  misc_feature 1..20: note = chemically synthesized
  source 1..20: mol_type = other DNA
atgttctgtatataactgtt

SEQ ID NO: 20374 - DNA, 20 bp, synthetic construct
  misc_feature 1..20: note = chemically synthesized
  source 1..20: mol_type = other DNA
ctgttaagtccatttgttct

SEQ ID NO: 20375 - DNA, 20 bp, synthetic construct
  misc_feature 1..20: note = chemically synthesized
  source 1..20: mol_type = other DNA
tgttaagtccatttgttcta

SEQ ID NO: 20376 - DNA, 20 bp, synthetic construct
  misc_feature 1..20: note = chemically synthesized
  source 1..20: mol_type = other DNA
ttctgtcttgatgaactgtc

SEQ ID NO: 20377 - DNA, 20 bp, synthetic construct
  misc_feature 1..20: note = chemically synthesized
  source 1..20: mol_type = other DNA
actgtctagtgctgtcaatg

SEQ ID NO: 20378 - DNA, 20 bp, synthetic construct
  misc_feature 1..20: note = chemically synthesized
  source 1..20: mol_type = other DNA
gtgctgtcaatgaagtattg

SEQ ID NO: 20379 - DNA, 20 bp, synthetic construct
  misc_feature 1..20: note = chemically synthesized
  source 1..20: mol_type = other DNA
ttgctgtctatctcatttct

SEQ ID NO: 20380 - DNA, 20 bp, synthetic construct
  misc_feature 1..20: note = chemically synthesized
  source 1..20: mol_type = other DNA
tgctgtctatctcatttctt

SEQ ID NO: 20381 - DNA, 20 bp, synthetic construct
  misc_feature 1..20: note = chemically synthesized
  source 1..20: mol_type = other DNA
atctcatttcttaggtctat

SEQ ID NO: 20382 - DNA, 20 bp, synthetic construct
  misc_feature 1..20: note = chemically synthesized
  source 1..20: mol_type = other DNA
tagtaattgttctataaatt

SEQ ID NO: 20383 - DNA, 20 bp, synthetic construct
  misc_feature 1..20: note = chemically synthesized
  source 1..20: mol_type = other DNA
agtaattgttctataaattt

SEQ ID NO: 20384 - DNA, 20 bp, synthetic construct
  misc_feature 1..20: note = chemically synthesized
  source 1..20: mol_type = other DNA
taattgttctataaatttgg

SEQ ID NO: 20385 - DNA, 20 bp, synthetic construct
  misc_feature 1..20: note = chemically synthesized
  source 1..20: mol_type = other DNA
ttctataaatttgggagctc

SEQ ID NO: 20386 - DNA, 20 bp, synthetic construct
  misc_feature 1..20: note = chemically synthesized
  source 1..20: mol_type = other DNA
aaatttgggagctccagtgt

SEQ ID NO: 20387 - DNA, 20 bp, synthetic construct
  misc_feature 1..20: note = chemically synthesized
  source 1..20: mol_type = other DNA
aatttgggagctccagtgtt

SEQ ID NO: 20388 - DNA, 20 bp, synthetic construct
  misc_feature 1..20: note = chemically synthesized
  source 1..20: mol_type = other DNA
tgttaggtgcatatatgttt

SEQ ID NO: 20389 - DNA, 20 bp, synthetic construct
  misc_feature 1..20: note = chemically synthesized
  source 1..20: mol_type = other DNA
agattgtgatattttcctgt

SEQ ID NO: 20390 - DNA, 20 bp, synthetic construct
  misc_feature 1..20: note = chemically synthesized
  source 1..20: mol_type = other DNA
gtgatattttcctgttggac

SEQ ID NO: 20391 - DNA, 20 bp, synthetic construct
  misc_feature 1..20: note = chemically synthesized
  source 1..20: mol_type = other DNA
tgatattttcctgttggaca

SEQ ID NO: 20392 - DNA, 20 bp, synthetic construct
  misc_feature 1..20: note = chemically synthesized
  source 1..20: mol_type = other DNA
ttttaactgctgttgcttta

SEQ ID NO: 20393 - DNA, 20 bp, synthetic construct
  misc_feature 1..20: note = chemically synthesized
  source 1..20: mol_type = other DNA
ttgttttgcctactcacttt

SEQ ID NO: 20394 - DNA, 20 bp, synthetic construct
  misc_feature 1..20: note = chemically synthesized
  source 1..20: mol_type = other DNA
ttttgcctactcacttttgg

SEQ ID NO: 20395 - DNA, 20 bp, synthetic construct
  misc_feature 1..20: note = chemically synthesized
  source 1..20: mol_type = other DNA
aatacctttttcaccctttt

SEQ ID NO: 20396 - DNA, 20 bp, synthetic construct
  misc_feature 1..20: note = chemically synthesized
  source 1..20: mol_type = other DNA
acctttttcacccttttaag

SEQ ID NO: 20397 - DNA, 20 bp, synthetic construct
  misc_feature 1..20: note = chemically synthesized
  source 1..20: mol_type = other DNA
ctttttcacccttttaagtg

SEQ ID NO: 20398 - DNA, 20 bp, synthetic construct
  misc_feature 1..20: note = chemically synthesized
  source 1..20: mol_type = other DNA
acccttttaagtggagcatt

SEQ ID NO: 20399 - DNA, 20 bp, synthetic construct
  misc_feature 1..20: note = chemically synthesized
  source 1..20: mol_type = other DNA
cccttttaagtggagcattt

SEQ ID NO: 20400 - DNA, 20 bp, synthetic construct
  misc_feature 1..20: note = chemically synthesized
  source 1..20: mol_type = other DNA
aggccatttacattcaatgt

SEQ ID NO: 20401 - DNA, 20 bp, synthetic construct
  misc_feature 1..20: note = chemically synthesized
  source 1..20: mol_type = other DNA
atgttagtaatgtaaatgcc

SEQ ID NO: 20402 - DNA, 20 bp, synthetic construct
  misc_feature 1..20: note = chemically synthesized
  source 1..20: mol_type = other DNA
atgtaaatgcctggctatgc

SEQ ID NO: 20403 - DNA, 20 bp, synthetic construct
  misc_feature 1..20: note = chemically synthesized
  source 1..20: mol_type = other DNA
tgtaaatgcctggctatgcc

SEQ ID NO: 20404 - DNA, 20 bp, synthetic construct
  misc_feature 1..20: note = chemically synthesized
  source 1..20: mol_type = other DNA
aaatgcctggctatgccagg

SEQ ID NO: 20405 - DNA, 20 bp, synthetic construct
  misc_feature 1..20: note = chemically synthesized
  source 1..20: mol_type = other DNA
aatgcctggctatgccaggc

SEQ ID NO: 20406 - DNA, 20 bp, synthetic construct
  misc_feature 1..20: note = chemically synthesized
  source 1..20: mol_type = other DNA
ctggctatgccaggcaggaa

SEQ ID NO: 20407 - DNA, 20 bp, synthetic construct
  misc_feature 1..20: note = chemically synthesized
  source 1..20: mol_type = other DNA
ccaggcaggaatggcctgct

SEQ ID NO: 20408 - DNA, 20 bp, synthetic construct
  misc_feature 1..20: note = chemically synthesized
  source 1..20: mol_type = other DNA
caggcaggaatggcctgctc

SEQ ID NO: 20409 - DNA, 20 bp, synthetic construct
  misc_feature 1..20: note = chemically synthesized
  source 1..20: mol_type = other DNA
aggcaggaatggcctgctca

SEQ ID NO: 20410 - DNA, 20 bp, synthetic construct
  misc_feature 1..20: note = chemically synthesized
  source 1..20: mol_type = other DNA
gaatggcctgctcagggacc

SEQ ID NO: 20411 - DNA, 20 bp, synthetic construct
  misc_feature 1..20: note = chemically synthesized
  source 1..20: mol_type = other DNA
ggcctgctcagggacccagt

SEQ ID NO: 20412 - DNA, 20 bp, synthetic construct
  misc_feature 1..20: note = chemically synthesized
  source 1..20: mol_type = other DNA
tcagggacccagtgagctcc

SEQ ID NO: 20413 - DNA, 20 bp, synthetic construct
  misc_feature 1..20: note = chemically synthesized
  source 1..20: mol_type = other DNA
cagggacccagtgagctccc

SEQ ID NO: 20414 - DNA, 20 bp, synthetic construct
  misc_feature 1..20: note = chemically synthesized
  source 1..20: mol_type = other DNA
agggacccagtgagctccca

SEQ ID NO: 20415 - DNA, 20 bp, synthetic construct
  misc_feature 1..20: note = chemically synthesized
  source 1..20: mol_type = other DNA
ctctacacctgtattttgct

SEQ ID NO: 20416 - DNA, 20 bp, synthetic construct
  misc_feature 1..20: note = chemically synthesized
  source 1..20: mol_type = other DNA
tgtattttgctcagctctct

SEQ ID NO: 20417 - DNA, 20 bp, synthetic construct
  misc_feature 1..20: note = chemically synthesized
  source 1..20: mol_type = other DNA
tctctaagttaactcaactc

SEQ ID NO: 20418 - DNA, 20 bp, synthetic construct
  misc_feature 1..20: note = chemically synthesized
  source 1..20: mol_type = other DNA
ctctaagttaactcaactcc

SEQ ID NO: 20419 - DNA, 20 bp, synthetic construct
  misc_feature 1..20: note = chemically synthesized
  source 1..20: mol_type = other DNA
aagttaactcaactccaggt

SEQ ID NO: 20420 - DNA, 20 bp, synthetic construct
  misc_feature 1..20: note = chemically synthesized
  source 1..20: mol_type = other DNA
agttaactcaactccaggta

SEQ ID NO: 20421 - DNA, 20 bp, synthetic construct
  misc_feature 1..20: note = chemically synthesized
  source 1..20: mol_type = other DNA
aactcaactccaggtaaggt

SEQ ID NO: 20422 - DNA, 20 bp, synthetic construct
  misc_feature 1..20: note = chemically synthesized
  source 1..20: mol_type = other DNA
tcagaaacttctcccacaaa

SEQ ID NO: 20423 - DNA, 20 bp, synthetic construct
  misc_feature 1..20: note = chemically synthesized
  source 1..20: mol_type = other DNA
ttctcccacaaacagacctt

SEQ ID NO: 20424 - DNA, 20 bp, synthetic construct
  misc_feature 1..20: note = chemically synthesized
  source 1..20: mol_type = other DNA
aaacagaccttcagtttctc

SEQ ID NO: 20425 - DNA, 20 bp, synthetic construct
  misc_feature 1..20: note = chemically synthesized
  source 1..20: mol_type = other DNA
cagaccttcagtttctccag

SEQ ID NO: 20426 - DNA, 20 bp, synthetic construct
  misc_feature 1..20: note = chemically synthesized
  source 1..20: mol_type = other DNA
agaccttcagtttctccagt

SEQ ID NO: 20427 - DNA, 20 bp, synthetic construct
  misc_feature 1..20: note = chemically synthesized
  source 1..20: mol_type = other DNA
accttcagtttctccagtgg

SEQ ID NO: 20428 - DNA, 20 bp, synthetic construct
  misc_feature 1..20: note = chemically synthesized
  source 1..20: mol_type = other DNA
ctccagtgggagtgtgtgtt

SEQ ID NO: 20429 - DNA, 20 bp, synthetic construct
  misc_feature 1..20: note = chemically synthesized
  source 1..20: mol_type = other DNA
tccagtgggagtgtgtgttt

SEQ ID NO: 20430 - DNA, 20 bp, synthetic construct
  misc_feature 1..20: note = chemically synthesized
  source 1..20: mol_type = other DNA
cagtgggagtgtgtgtttag

SEQ ID NO: 20431 - DNA, 20 bp, synthetic construct
  misc_feature 1..20: note = chemically synthesized
  source 1..20: mol_type = other DNA
gtgggagtgtgtgtttagga

SEQ ID NO: 20432 - DNA, 20 bp, synthetic construct
  misc_feature 1..20: note = chemically synthesized
  source 1..20: mol_type = other DNA
tgggagtgtgtgtttaggag

SEQ ID NO: 20433 - DNA, 20 bp, synthetic construct
  misc_feature 1..20: note = chemically synthesized
  source 1..20: mol_type = other DNA
ggagtgtgtgtttaggagag

SEQ ID NO: 20434 - DNA, 20 bp, synthetic construct
  misc_feature 1..20: note = chemically synthesized
  source 1..20: mol_type = other DNA
gagtgtgtgtttaggagagg

SEQ ID NO: 20435 - DNA, 20 bp, synthetic construct
  misc_feature 1..20: note = chemically synthesized
  source 1..20: mol_type = other DNA
atctccctttcccacttccg

SEQ ID NO: 20436 - DNA, 20 bp, synthetic construct
  misc_feature 1..20: note = chemically synthesized
  source 1..20: mol_type = other DNA
ccctttcccacttccgcagt

SEQ ID NO: 20437 - DNA, 20 bp, synthetic construct
  misc_feature 1..20: note = chemically synthesized
  source 1..20: mol_type = other DNA
cctttcccacttccgcagtt

SEQ ID NO: 20438 - DNA, 20 bp, synthetic construct
  misc_feature 1..20: note = chemically synthesized
  source 1..20: mol_type = other DNA
ctttcccacttccgcagttg

SEQ ID NO: 20439 - DNA, 20 bp, synthetic construct
  misc_feature 1..20: note = chemically synthesized
  source 1..20: mol_type = other DNA
ttccgcagttggggcactca

SEQ ID NO: 20440 - DNA, 20 bp, synthetic construct
  misc_feature 1..20: note = chemically synthesized
  source 1..20: mol_type = other DNA
gttggggcactcacagtatt

SEQ ID NO: 20441 - DNA, 20 bp, synthetic construct
  misc_feature 1..20: note = chemically synthesized
  source 1..20: mol_type = other DNA
ttggggcactcacagtattt

SEQ ID NO: 20442 - DNA, 20 bp, synthetic construct
  misc_feature 1..20: note = chemically synthesized
  source 1..20: mol_type = other DNA
tggggcactcacagtatttg

SEQ ID NO: 20443 - DNA, 20 bp, synthetic construct
  misc_feature 1..20: note = chemically synthesized
  source 1..20: mol_type = other DNA
acagtatttggggtgtctcc

SEQ ID NO: 20444 - DNA, 20 bp, synthetic construct
  misc_feature 1..20: note = chemically synthesized
  source 1..20: mol_type = other DNA
cagtatttggggtgtctcct

SEQ ID NO: 20445 - DNA, 20 bp, synthetic construct
  misc_feature 1..20: note = chemically synthesized
  source 1..20: mol_type = other DNA
ggggtgtctcctgggtcctg

SEQ ID NO: 20446 - DNA, 20 bp, synthetic construct
  misc_feature 1..20: note = chemically synthesized
  source 1..20: mol_type = other DNA
gggtgtctcctgggtcctgc

SEQ ID NO: 20447 - DNA, 20 bp, synthetic construct
  misc_feature 1..20: note = chemically synthesized
  source 1..20: mol_type = other DNA
gtgtctcctgggtcctgcag

SEQ ID NO: 20448 - DNA, 20 bp, synthetic construct
  misc_feature 1..20: note = chemically synthesized
  source 1..20: mol_type = other DNA
caggagcaatctacttcctt

SEQ ID NO: 20449 - DNA, 20 bp, synthetic construct
  misc_feature 1..20: note = chemically synthesized
  source 1..20: mol_type = other DNA
ggagcaatctacttccttca

SEQ ID NO: 20450 - DNA, 20 bp, synthetic construct
  misc_feature 1..20: note = chemically synthesized
  source 1..20: mol_type = other DNA
gagcaatctacttccttcag

SEQ ID NO: 20451 - DNA, 20 bp, synthetic construct
  misc_feature 1..20: note = chemically synthesized
  source 1..20: mol_type = other DNA
agcaatctacttccttcaga

SEQ ID NO: 20452 - DNA, 20 bp, synthetic construct
  misc_feature 1..20: note = chemically synthesized
  source 1..20: mol_type = other DNA
tacttccttcagagggtctg

SEQ ID NO: 20453 - DNA, 20 bp, synthetic construct
  misc_feature 1..20: note = chemically synthesized
  source 1..20: mol_type = other DNA
acttccttcagagggtctgt

SEQ ID NO: 20454 - DNA, 20 bp, synthetic construct
  misc_feature 1..20: note = chemically synthesized
  source 1..20: mol_type = other DNA
agagggtctgtgggtcctct

SEQ ID NO: 20455 - DNA, 20 bp, synthetic construct
  misc_feature 1..20: note = chemically synthesized
  source 1..20: mol_type = other DNA
gagggtctgtgggtcctctc

SEQ ID NO: 20456 - DNA, 20 bp, synthetic construct
  misc_feature 1..20: note = chemically synthesized
  source 1..20: mol_type = other DNA
gtgggtcctctcaggattgc

SEQ ID NO: 20457 - DNA, 20 bp, synthetic construct
  misc_feature 1..20: note = chemically synthesized
  source 1..20: mol_type = other DNA
ggattgctggtttgttcttg

SEQ ID NO: 20458 - DNA, 20 bp, synthetic construct
  misc_feature 1..20: note = chemically synthesized
  source 1..20: mol_type = other DNA
ttgttcttgcagtctatctg

SEQ ID NO: 20459 - DNA, 20 bp, synthetic construct
  misc_feature 1..20: note = chemically synthesized
  source 1..20: mol_type = other DNA
gcagctaaaattcacaatgc

SEQ ID NO: 20460 - DNA, 20 bp, synthetic construct
  misc_feature 1..20: note = chemically synthesized
  source 1..20: mol_type = other DNA
acatgctgctctgtccatct

SEQ ID NO: 20461 - DNA, 20 bp, synthetic construct
  misc_feature 1..20: note = chemically synthesized
  source 1..20: mol_type = other DNA
gctgctctgtccatctgagt

SEQ ID NO: 20462 - DNA, 20 bp, synthetic construct
  misc_feature 1..20: note = chemically synthesized
  source 1..20: mol_type = other DNA
tgctctgtccatctgagttg

SEQ ID NO: 20463 - DNA, 20 bp, synthetic construct
  misc_feature 1..20: note = chemically synthesized
  source 1..20: mol_type = other DNA
tctgagttggagctgcaatc

SEQ ID NO: 20464 - DNA, 20 bp, synthetic construct
  misc_feature 1..20: note = chemically synthesized
  source 1..20: mol_type = other DNA
ctgagttggagctgcaatct

SEQ ID NO: 20465 - DNA, 20 bp, synthetic construct
  misc_feature 1..20: note = chemically synthesized
  source 1..20: mol_type = other DNA
aggcctacctcccatccgcc

SEQ ID NO: 20466 - DNA, 20 bp, synthetic construct
  misc_feature 1..20: note = chemically synthesized
  source 1..20: mol_type = other DNA
ctcccatccgccaagatcct

SEQ ID NO: 20467 - DNA, 20 bp, synthetic construct
  misc_feature 1..20: note = chemically synthesized
  source 1..20: mol_type = other DNA
ccatccgccaagatcctgag

SEQ ID NO: 20468 - DNA, 20 bp, synthetic construct
  misc_feature 1..20: note = chemically synthesized
  source 1..20: mol_type = other DNA
ccgccaagatcctgagaagt

SEQ ID NO: 20469 - DNA, 20 bp, synthetic construct
  misc_feature 1..20: note = chemically synthesized
  source 1..20: mol_type = other DNA
cgccaagatcctgagaagtt

SEQ ID NO: 20470 - DNA, 20 bp, synthetic construct
  misc_feature 1..20: note = chemically synthesized
  source 1..20: mol_type = other DNA
gccaagatcctgagaagttg

SEQ ID NO: 20471 - DNA, 20 bp, synthetic construct
  misc_feature 1..20: note = chemically synthesized
  source 1..20: mol_type = other DNA
tggggattatatttcaacat

SEQ ID NO: 20472 - DNA, 20 bp, synthetic construct
  misc_feature 1..20: note = chemically synthesized
  source 1..20: mol_type = other DNA
ttatatttcaacatgagatt

SEQ ID NO: 20473 - DNA, 20 bp, synthetic construct
  misc_feature 1..20: note = chemically synthesized
  source 1..20: mol_type = other DNA
atatttcaacatgagatttg

SEQ ID NO: 20474 - DNA, 20 bp, synthetic construct
  misc_feature 1..20: note = chemically synthesized
  source 1..20: mol_type = other DNA
tatttcaacatgagatttgg

SEQ ID NO: 20475 - DNA, 20 bp, synthetic construct
  misc_feature 1..20: note = chemically synthesized
  source 1..20: mol_type = other DNA
atttcaacatgagatttgga

SEQ ID NO: 20476 - DNA, 20 bp, synthetic construct
  misc_feature 1..20: note = chemically synthesized
  source 1..20: mol_type = other DNA
aacaaacatccaaaccatat

SEQ ID NO: 20477 - DNA, 20 bp, synthetic construct
  misc_feature 1..20: note = chemically synthesized
  source 1..20: mol_type = other DNA
aaacatccaaaccatatcag

SEQ ID NO: 20478 - DNA, 20 bp, synthetic construct
  misc_feature 1..20: note = chemically synthesized
  source 1..20: mol_type = other DNA
tccaaaccatatcagcagtc

SEQ ID NO: 20479 - DNA, 20 bp, synthetic construct
  misc_feature 1..20: note = chemically synthesized
  source 1..20: mol_type = other DNA
cagttttattcttttgcaca

SEQ ID NO: 20480 - DNA, 20 bp, synthetic construct
  misc_feature 1..20: note = chemically synthesized
  source 1..20: mol_type = other DNA
ttttgcacatggatatccaa

SEQ ID NO: 20481 - DNA, 20 bp, synthetic construct
  misc_feature 1..20: note = chemically synthesized
  source 1..20: mol_type = other DNA
caatggatatccaatttttt

SEQ ID NO: 20482 - DNA, 20 bp, synthetic construct
  misc_feature 1..20: note = chemically synthesized
  source 1..20: mol_type = other DNA
cacctttgttgaaaatctgt

SEQ ID NO: 20483 - DNA, 20 bp, synthetic construct
  misc_feature 1..20: note = chemically synthesized
  source 1..20: mol_type = other DNA
atctgttggctataaatatg

SEQ ID NO: 20484 - DNA, 20 bp, synthetic construct
  misc_feature 1..20: note = chemically synthesized
  source 1..20: mol_type = other DNA
taaatatgtggatgcatttc

SEQ ID NO: 20485 - DNA, 20 bp, synthetic construct
  misc_feature 1..20: note = chemically synthesized
  source 1..20: mol_type = other DNA
aaatatgtggatgcatttct

SEQ ID NO: 20486 - DNA, 20 bp, synthetic construct
  misc_feature 1..20: note = chemically synthesized
  source 1..20: mol_type = other DNA
ggttctctattctcttccat

SEQ ID NO: 20487 - DNA, 20 bp, synthetic construct
  misc_feature 1..20: note = chemically synthesized
  source 1..20: mol_type = other DNA
ctattctcttccattggtct

SEQ ID NO: 20488 - DNA, 20 bp, synthetic construct
  misc_feature 1..20: note = chemically synthesized
  source 1..20: mol_type = other DNA
ctaagtgtctgttctaatgt

SEQ ID NO: 20489 - DNA, 20 bp, synthetic construct
  misc_feature 1..20: note = chemically synthesized
  source 1..20: mol_type = other DNA
aatgtcagtatcatgctgtt

SEQ ID NO: 20490 - DNA, 20 bp, synthetic construct
  misc_feature 1..20: note = chemically synthesized
  source 1..20: mol_type = other DNA
atgtcagtatcatgctgttt

SEQ ID NO: 20491 - DNA, 20 bp, synthetic construct
  misc_feature 1..20: note = chemically synthesized
  source 1..20: mol_type = other DNA
tttgtaatatactttgaaat

SEQ ID NO: 20492 - DNA, 20 bp, synthetic construct
  misc_feature 1..20: note = chemically synthesized
  source 1..20: mol_type = other DNA
ttgtaatatactttgaaatc

SEQ ID NO: 20493 - DNA, 20 bp, synthetic construct
  misc_feature 1..20: note = chemically synthesized
  source 1..20: mol_type = other DNA
taatatactttgaaatcagg

SEQ ID NO: 20494 - DNA, 20 bp, synthetic construct
  misc_feature 1..20: note = chemically synthesized
  source 1..20: mol_type = other DNA
atcaggtagtatgatacctc

SEQ ID NO: 20495 - DNA, 20 bp, synthetic construct
  misc_feature 1..20: note = chemically synthesized
  source 1..20: mol_type = other DNA
ctagcattgttcttttttca

SEQ ID NO: 20496 - DNA, 20 bp, synthetic construct
  misc_feature 1..20: note = chemically synthesized
  source 1..20: mol_type = other DNA
tagcattgttcttttttcac

SEQ ID NO: 20497 - DNA, 20 bp, synthetic construct
  misc_feature 1..20: note = chemically synthesized
  source 1..20: mol_type = other DNA
cttttttcacaggatgactt

SEQ ID NO: 20498 - DNA, 20 bp, synthetic construct
  misc_feature 1..20: note = chemically synthesized
  source 1..20: mol_type = other DNA
cacaggatgactttggctac

SEQ ID NO: 20499 - DNA, 20 bp, synthetic construct
  misc_feature 1..20: note = chemically synthesized
  source 1..20: mol_type = other DNA
caggatgactttggctactg

SEQ ID NO: 20500 - DNA, 20 bp, synthetic construct
  misc_feature 1..20: note = chemically synthesized
  source 1..20: mol_type = other DNA
ttttaatttcatacaaattt

SEQ ID NO: 20501 - DNA, 20 bp, synthetic construct
  misc_feature 1..20: note = chemically synthesized
  source 1..20: mol_type = other DNA
atttcatacaaattttagat

SEQ ID NO: 20502 - DNA, 20 bp, synthetic construct
  misc_feature 1..20: note = chemically synthesized
  source 1..20: mol_type = other DNA
aaatgacattgctattttga

SEQ ID NO: 20503 - DNA, 20 bp, synthetic construct
  misc_feature 1..20: note = chemically synthesized
  source 1..20: mol_type = other DNA
tgacattgctattttgatag

SEQ ID NO: 20504 - DNA, 20 bp, synthetic construct
  misc_feature 1..20: note = chemically synthesized
  source 1..20: mol_type = other DNA
ctattttgatagcggtcata

SEQ ID NO: 20505 - DNA, 20 bp, synthetic construct
  misc_feature 1..20: note = chemically synthesized
  source 1..20: mol_type = other DNA
tagcggtcatatagaatctg

SEQ ID NO: 20506 - DNA, 20 bp, synthetic construct
  misc_feature 1..20: note = chemically synthesized
  source 1..20: mol_type = other DNA
atagaatctgtagattgctt

SEQ ID NO: 20507 - DNA, 20 bp, synthetic construct
  misc_feature 1..20: note = chemically synthesized
  source 1..20: mol_type = other DNA
tagaatctgtagattgcttt

SEQ ID NO: 20508 - DNA, 20 bp, synthetic construct
  misc_feature 1..20: note = chemically synthesized
  source 1..20: mol_type = other DNA
aatctgtagattgctttggg

SEQ ID NO: 20509 - DNA, 20 bp, synthetic construct
  misc_feature 1..20: note = chemically synthesized
  source 1..20: mol_type = other DNA
gtagattgctttgggtagta

SEQ ID NO: 20510 - DNA, 20 bp, synthetic construct
  misc_feature 1..20: note = chemically synthesized
  source 1..20: mol_type = other DNA
atttttctgatccatgaaca

SEQ ID NO: 20511 - DNA, 20 bp, synthetic construct
  misc_feature 1..20: note = chemically synthesized
  source 1..20: mol_type = other DNA
tttttctgatccatgaacat

SEQ ID NO: 20512 - DNA, 20 bp, synthetic construct
  misc_feature 1..20: note = chemically synthesized
  source 1..20: mol_type = other DNA
gtccttttcaattcttttat

SEQ ID NO: 20513 - DNA, 20 bp, synthetic construct
  misc_feature 1..20: note = chemically synthesized
  source 1..20: mol_type = other DNA
attcttttatcagtgttttg

SEQ ID NO: 20514 - DNA, 20 bp, synthetic construct
  misc_feature 1..20: note = chemically synthesized
  source 1..20: mol_type = other DNA
gtgttttgtagttttccgaa

SEQ ID NO: 20515 - DNA, 20 bp, synthetic construct
  misc_feature 1..20: note = chemically synthesized
  source 1..20: mol_type = other DNA
gttttgtagttttccgaata

SEQ ID NO: 20516 - DNA, 20 bp, synthetic construct
  misc_feature 1..20: note = chemically synthesized
  source 1..20: mol_type = other DNA
ttttgtagttttccgaatag

SEQ ID NO: 20517 - DNA, 20 bp, synthetic construct
  misc_feature 1..20: note = chemically synthesized
  source 1..20: mol_type = other DNA
ttttccgaatagaggttttt

SEQ ID NO: 20518 - DNA, 20 bp, synthetic construct
  misc_feature 1..20: note = chemically synthesized
  source 1..20: mol_type = other DNA
atagaggtttttcggttcct

SEQ ID NO: 20519 - DNA, 20 bp, synthetic construct
  misc_feature 1..20: note = chemically synthesized
  source 1..20: mol_type = other DNA
tccctaaatattttattttt

SEQ ID NO: 20520 - DNA, 20 bp, synthetic construct
  misc_feature 1..20: note = chemically synthesized
  source 1..20: mol_type = other DNA
tattttttagctattgtaaa

SEQ ID NO: 20521 - DNA, 20 bp, synthetic construct
  misc_feature 1..20: note = chemically synthesized
  source 1..20: mol_type = other DNA
attttttagctattgtaaat

SEQ ID NO: 20522 - DNA, 20 bp, synthetic construct
  misc_feature 1..20: note = chemically synthesized
  source 1..20: mol_type = other DNA
tgccttcttaatttccttct

SEQ ID NO: 20523 - DNA, 20 bp, synthetic construct
  misc_feature 1..20: note = chemically synthesized
  source 1..20: mol_type = other DNA
ttcttaatttccttctcagc

SEQ ID NO: 20524 - DNA, 20 bp, synthetic construct
  misc_feature 1..20: note = chemically synthesized
  source 1..20: mol_type = other DNA
cttctcagctagtttattat

SEQ ID NO: 20525 - DNA, 20 bp, synthetic construct
  misc_feature 1..20: note = chemically synthesized
  source 1..20: mol_type = other DNA
gctagtttattattggtgtg

SEQ ID NO: 20526 - DNA, 20 bp, synthetic construct
  misc_feature 1..20: note = chemically synthesized
  source 1..20: mol_type = other DNA
actttactgaatttattttt

SEQ ID NO: 20527 - DNA, 20 bp, synthetic construct
  misc_feature 1..20: note = chemically synthesized
  source 1..20: mol_type = other DNA
tgaatttatttttcagcgct

SEQ ID NO: 20528 - DNA, 20 bp, synthetic construct
  misc_feature 1..20: note = chemically synthesized
  source 1..20: mol_type = other DNA
aatttatttttcagcgctaa

SEQ ID NO: 20529 - DNA, 20 bp, synthetic construct
  misc_feature 1..20: note = chemically synthesized
  source 1..20: mol_type = other DNA
tttcagcgctaagagtgctt

SEQ ID NO: 20530 - DNA, 20 bp, synthetic construct
  misc_feature 1..20: note = chemically synthesized
  source 1..20: mol_type = other DNA
cagcgctaagagtgctttgg

SEQ ID NO: 20531 - DNA, 20 bp, synthetic construct
  misc_feature 1..20: note = chemically synthesized
  source 1..20: mol_type = other DNA
gcgctaagagtgctttggtg

SEQ ID NO: 20532 - DNA, 20 bp, synthetic construct
  misc_feature 1..20: note = chemically synthesized
  source 1..20: mol_type = other DNA
agagtgctttggtggagtct

SEQ ID NO: 20533 - DNA, 20 bp, synthetic construct
  misc_feature 1..20: note = chemically synthesized
  source 1..20: mol_type = other DNA
tggtggagtcttggtttttc

SEQ ID NO: 20534 - DNA, 20 bp, synthetic construct
  misc_feature 1..20: note = chemically synthesized
  source 1..20: mol_type = other DNA
ggtggagtcttggtttttct

SEQ ID NO: 20535 - DNA, 20 bp, synthetic construct
  misc_feature 1..20: note = chemically synthesized
  source 1..20: mol_type = other DNA
aggtataaaatcatgtcatc

SEQ ID NO: 20536 - DNA, 20 bp, synthetic construct
  misc_feature 1..20: note = chemically synthesized
  source 1..20: mol_type = other DNA
ataaaatcatgtcatctgga

SEQ ID NO: 20537 - DNA, 20 bp, synthetic construct
  misc_feature 1..20: note = chemically synthesized
  source 1..20: mol_type = other DNA
aatcatgtcatctggaaaga

SEQ ID NO: 20538 - DNA, 20 bp, synthetic construct
  misc_feature 1..20: note = chemically synthesized
  source 1..20: mol_type = other DNA
atgtcatctggaaagatgga

SEQ ID NO: 20539 - DNA, 20 bp, synthetic construct
  misc_feature 1..20: note = chemically synthesized
  source 1..20: mol_type = other DNA
tctttctttctctgacctga

SEQ ID NO: 20540 - DNA, 20 bp, synthetic construct
  misc_feature 1..20: note = chemically synthesized
  source 1..20: mol_type = other DNA
tttctctgacctgaaagctg

SEQ ID NO: 20541 - DNA, 20 bp, synthetic construct
  misc_feature 1..20: note = chemically synthesized
  source 1..20: mol_type = other DNA
tctgacctgaaagctgtggc

SEQ ID NO: 20542 - DNA, 20 bp, synthetic construct
  misc_feature 1..20: note = chemically synthesized
  source 1..20: mol_type = other DNA
ctgacctgaaagctgtggct

SEQ ID NO: 20543 - DNA, 20 bp, synthetic construct
  misc_feature 1..20: note = chemically synthesized
  source 1..20: mol_type = other DNA
aaagctgtggctaggacttc

SEQ ID NO: 20544 - DNA, 20 bp, synthetic construct
  misc_feature 1..20: note = chemically synthesized
  source 1..20: mol_type = other DNA
acttccagtattatattgaa

SEQ ID NO: 20545 - DNA, 20 bp, synthetic construct
  misc_feature 1..20: note = chemically synthesized
  source 1..20: mol_type = other DNA
cttccagtattatattgaat

SEQ ID NO: 20546 - DNA, 20 bp, synthetic construct
  misc_feature 1..20: note = chemically synthesized
  source 1..20: mol_type = other DNA
tccagtattatattgaatag

SEQ ID NO: 20547 - DNA, 20 bp, synthetic construct
  misc_feature 1..20: note = chemically synthesized
  source 1..20: mol_type = other DNA
attatattgaataggagtga

SEQ ID NO: 20548 - DNA, 20 bp, synthetic construct
  misc_feature 1..20: note = chemically synthesized
  source 1..20: mol_type = other DNA
atattgaataggagtgatgg

SEQ ID NO: 20549 - DNA, 20 bp, synthetic construct
  misc_feature 1..20: note = chemically synthesized
  source 1..20: mol_type = other DNA
ttgaataggagtgatggaag

SEQ ID NO: 20550 - DNA, 20 bp, synthetic construct
  misc_feature 1..20: note = chemically synthesized
  source 1..20: mol_type = other DNA
tgaataggagtgatggaagt

SEQ ID NO: 20551 - DNA, 20 bp, synthetic construct
  misc_feature 1..20: note = chemically synthesized
  source 1..20: mol_type = other DNA
tgggcatccttattttgttt

SEQ ID NO: 20552 - DNA, 20 bp, synthetic construct
  misc_feature 1..20: note = chemically synthesized
  source 1..20: mol_type = other DNA
ccttattttgtttcagttct

SEQ ID NO: 20553 - DNA, 20 bp, synthetic construct
  misc_feature 1..20: note = chemically synthesized
  source 1..20: mol_type = other DNA
ttattttgtttcagttctta

SEQ ID NO: 20554 - DNA, 20 bp, synthetic construct
  misc_feature 1..20: note = chemically synthesized
  source 1..20: mol_type = other DNA
tattttgtttcagttcttag

SEQ ID NO: 20555 - DNA, 20 bp, synthetic construct
  misc_feature 1..20: note = chemically synthesized
  source 1..20: mol_type = other DNA
ttgtttcagttcttagagga

SEQ ID NO: 20556 - DNA, 20 bp, synthetic construct
  misc_feature 1..20: note = chemically synthesized
  source 1..20: mol_type = other DNA
tgtttcagttcttagaggaa

SEQ ID NO: 20557 - DNA, 20 bp, synthetic construct
  misc_feature 1..20: note = chemically synthesized
  source 1..20: mol_type = other DNA
gttcttagaggaaaggcttc

SEQ ID NO: 20558 - DNA, 20 bp, synthetic construct
  misc_feature 1..20: note = chemically synthesized
  source 1..20: mol_type = other DNA
gcttccagcttttcccaatt

SEQ ID NO: 20559 - DNA, 20 bp, synthetic construct
  misc_feature 1..20: note = chemically synthesized
  source 1..20: mol_type = other DNA
ttcccaattcagtatgatgt

SEQ ID NO: 20560 - DNA, 20 bp, synthetic construct
  misc_feature 1..20: note = chemically synthesized
  source 1..20: mol_type = other DNA
attcagtatgatgttagctg

SEQ ID NO: 20561 - DNA, 20 bp, synthetic construct
  misc_feature 1..20: note = chemically synthesized
  source 1..20: mol_type = other DNA
ttcagtatgatgttagctgt

SEQ ID NO: 20562 - DNA, 20 bp, synthetic construct
  misc_feature 1..20: note = chemically synthesized
  source 1..20: mol_type = other DNA
tatatgacttttattatatt

SEQ ID NO: 20563 - DNA, 20 bp, synthetic construct
  misc_feature 1..20: note = chemically synthesized
  source 1..20: mol_type = other DNA
agatatgttccttctatgat

SEQ ID NO: 20564 - DNA, 20 bp, synthetic construct
  misc_feature 1..20: note = chemically synthesized
  source 1..20: mol_type = other DNA
gttccttctatgattggctg

SEQ ID NO: 20565 - DNA, 20 bp, synthetic construct
  misc_feature 1..20: note = chemically synthesized
  source 1..20: mol_type = other DNA
cttctatgattggctgcaga

SEQ ID NO: 20566 - DNA, 20 bp, synthetic construct
  misc_feature 1..20: note = chemically synthesized
  source 1..20: mol_type = other DNA
tgcagatagtttttatcatg

SEQ ID NO: 20567 - DNA, 20 bp, synthetic construct
  misc_feature 1..20: note = chemically synthesized
  source 1..20: mol_type = other DNA
gcagatagtttttatcatga

SEQ ID NO: 20568 - DNA, 20 bp, synthetic construct
  misc_feature 1..20: note = chemically synthesized
  source 1..20: mol_type = other DNA
atactttttctgtatctatt

SEQ ID NO: 20569 - DNA, 20 bp, synthetic construct
  misc_feature 1..20: note = chemically synthesized
  source 1..20: mol_type = other DNA
tatctattgagatgatcata

SEQ ID NO: 20570 - DNA, 20 bp, synthetic construct
  misc_feature 1..20: note = chemically synthesized
  source 1..20: mol_type = other DNA
ttgaactgttcttgcaaccc

SEQ ID NO: 20571 - DNA, 20 bp, synthetic construct
  misc_feature 1..20: note = chemically synthesized
  source 1..20: mol_type = other DNA
gtataaatcccacttgatca

SEQ ID NO: 20572 - DNA, 20 bp, synthetic construct
  misc_feature 1..20: note = chemically synthesized
  source 1..20: mol_type = other DNA
gatcatggtgtattatcttt

SEQ ID NO: 20573 - DNA, 20 bp, synthetic construct
  misc_feature 1..20: note = chemically synthesized
  source 1..20: mol_type = other DNA
ttatcttttggatgtactgt

SEQ ID NO: 20574 - DNA, 20 bp, synthetic construct
  misc_feature 1..20: note = chemically synthesized
  source 1..20: mol_type = other DNA
tttggatgtactgttggatt

SEQ ID NO: 20575 - DNA, 20 bp, synthetic construct
  misc_feature 1..20: note = chemically synthesized
  source 1..20: mol_type = other DNA
tactgttggattcagtttgc

SEQ ID NO: 20576 - DNA, 20 bp, synthetic construct
  misc_feature 1..20: note = chemically synthesized
  source 1..20: mol_type = other DNA
cagtttgctagtattttgtt

SEQ ID NO: 20577 - DNA, 20 bp, synthetic construct
  misc_feature 1..20: note = chemically synthesized
  source 1..20: mol_type = other DNA
agtttgctagtattttgttg

SEQ ID NO: 20578 - DNA, 20 bp, synthetic construct
  misc_feature 1..20: note = chemically synthesized
  source 1..20: mol_type = other DNA
ttttcacacctatgttccat

SEQ ID NO: 20579 - DNA, 20 bp, synthetic construct
  misc_feature 1..20: note = chemically synthesized
  source 1..20: mol_type = other DNA
tttcacacctatgttccatc

SEQ ID NO: 20580 - DNA, 20 bp, synthetic construct
  misc_feature 1..20: note = chemically synthesized
  source 1..20: mol_type = other DNA
ttcacacctatgttccatca

SEQ ID NO: 20581 - DNA, 20 bp, synthetic construct
  misc_feature 1..20: note = chemically synthesized
  source 1..20: mol_type = other DNA
ccatcagggatattgacctg

SEQ ID NO: 20582 - DNA, 20 bp, synthetic construct
  misc_feature 1..20: note = chemically synthesized
  source 1..20: mol_type = other DNA
tttttacttgcatccttgtc

SEQ ID NO: 20583 - DNA, 20 bp, synthetic construct
  misc_feature 1..20: note = chemically synthesized
  source 1..20: mol_type = other DNA
cttgcatccttgtctggtta

SEQ ID NO: 20584 - DNA, 20 bp, synthetic construct
  misc_feature 1..20: note = chemically synthesized
  source 1..20: mol_type = other DNA
tccttgtctggttatggaat

SEQ ID NO: 20585 - DNA, 20 bp, synthetic construct
  misc_feature 1..20: note = chemically synthesized
  source 1..20: mol_type = other DNA
ccttgtctggttatggaatc

SEQ ID NO: 20586 - DNA, 20 bp, synthetic construct
  misc_feature 1..20: note = chemically synthesized
  source 1..20: mol_type = other DNA
ttatggaatcaggataatac

SEQ ID NO: 20587 - DNA, 20 bp, synthetic construct
  misc_feature 1..20: note = chemically synthesized
  source 1..20: mol_type = other DNA
aatcaggataatactggcct

SEQ ID NO: 20588 - DNA, 20 bp, synthetic construct
  misc_feature 1..20: note = chemically synthesized
  source 1..20: mol_type = other DNA
tcaggataatactggcctca

SEQ ID NO: 20589 - DNA, 20 bp, synthetic construct
  misc_feature 1..20: note = chemically synthesized
  source 1..20: mol_type = other DNA
taatactggcctcagagaat

SEQ ID NO: 20590 - DNA, 20 bp, synthetic construct
  misc_feature 1..20: note = chemically synthesized
  source 1..20: mol_type = other DNA
actggcctcagagaatgagt

SEQ ID NO: 20591 - DNA, 20 bp, synthetic construct
  misc_feature 1..20: note = chemically synthesized
  source 1..20: mol_type = other DNA
ctggcctcagagaatgagtt

SEQ ID NO: 20592 - DNA, 20 bp, synthetic construct
  misc_feature 1..20: note = chemically synthesized
  source 1..20: mol_type = other DNA
tggcctcagagaatgagtta

SEQ ID NO: 20593 - DNA, 20 bp, synthetic construct
  misc_feature 1..20: note = chemically synthesized
  source 1..20: mol_type = other DNA
gcctcagagaatgagttagg

SEQ ID NO: 20594 - DNA, 20 bp, synthetic construct
  misc_feature 1..20: note = chemically synthesized
  source 1..20: mol_type = other DNA
ccttcctgtttaatttttaa

SEQ ID NO: 20595 - DNA, 20 bp, synthetic construct
  misc_feature 1..20: note = chemically synthesized
  source 1..20: mol_type = other DNA
tttaatttttaaaagaattt

SEQ ID NO: 20596 - DNA, 20 bp, synthetic construct
  misc_feature 1..20: note = chemically synthesized
  source 1..20: mol_type = other DNA
ttaatttttaaaagaattta

SEQ ID NO: 20597 - DNA, 20 bp, synthetic construct
  misc_feature 1..20: note = chemically synthesized
  source 1..20: mol_type = other DNA
aatttttaaaagaatttaag

SEQ ID NO: 20598 - DNA, 20 bp, synthetic construct
  misc_feature 1..20: note = chemically synthesized
  source 1..20: mol_type = other DNA
aagaatttaaggagacttgt

SEQ ID NO: 20599 - DNA, 20 bp, synthetic construct
  misc_feature 1..20: note = chemically synthesized
  source 1..20: mol_type = other DNA
gacttgttagttttctttga

SEQ ID NO: 20600 - DNA, 20 bp, synthetic construct
  misc_feature 1..20: note = chemically synthesized
  source 1..20: mol_type = other DNA
gttagttttctttgaaagtt

SEQ ID NO: 20601 - DNA, 20 bp, synthetic construct
  misc_feature 1..20: note = chemically synthesized
  source 1..20: mol_type = other DNA
gaaagtttggtaaaatttga

SEQ ID NO: 20602 - DNA, 20 bp, synthetic construct
  misc_feature 1..20: note = chemically synthesized
  source 1..20: mol_type = other DNA
tttggtaaaatttgacagta

SEQ ID NO: 20603 - DNA, 20 bp, synthetic construct
  misc_feature 1..20: note = chemically synthesized
  source 1..20: mol_type = other DNA
aatttgacagtaaagccatc

SEQ ID NO: 20604 - DNA, 20 bp, synthetic construct
  misc_feature 1..20: note = chemically synthesized
  source 1..20: mol_type = other DNA
ggtcttgaaattttcttttt

SEQ ID NO: 20605 - DNA, 20 bp, synthetic construct
  misc_feature 1..20: note = chemically synthesized
  source 1..20: mol_type = other DNA
gtcttgaaattttctttttt

SEQ ID NO: 20606 - DNA, 20 bp, synthetic construct
  misc_feature 1..20: note = chemically synthesized
  source 1..20: mol_type = other DNA
cttgaaattttcttttttgg

SEQ ID NO: 20607 - DNA, 20 bp, synthetic construct
  misc_feature 1..20: note = chemically synthesized
  source 1..20: mol_type = other DNA
tcaatttcattattcattac

SEQ ID NO: 20608 - DNA, 20 bp, synthetic construct
  misc_feature 1..20: note = chemically synthesized
  source 1..20: mol_type = other DNA
ttattcattactggtctgtt

SEQ ID NO: 20609 - DNA, 20 bp, synthetic construct
  misc_feature 1..20: note = chemically synthesized
  source 1..20: mol_type = other DNA
tattcattactggtctgttc

SEQ ID NO: 20610 - DNA, 20 bp, synthetic construct
  misc_feature 1..20: note = chemically synthesized
  source 1..20: mol_type = other DNA
attctttcttaattcaatct

SEQ ID NO: 20611 - DNA, 20 bp, synthetic construct
  misc_feature 1..20: note = chemically synthesized
  source 1..20: mol_type = other DNA
ctttcttaattcaatcttgg

SEQ ID NO: 20612 - DNA, 20 bp, synthetic construct
  misc_feature 1..20: note = chemically synthesized
  source 1..20: mol_type = other DNA
tttcttaattcaatcttggt

SEQ ID NO: 20613 - DNA, 20 bp, synthetic construct
  misc_feature 1..20: note = chemically synthesized
  source 1..20: mol_type = other DNA
cttaattcaatcttggtagg

SEQ ID NO: 20614 - DNA, 20 bp, synthetic construct
  misc_feature 1..20: note = chemically synthesized
  source 1..20: mol_type = other DNA
cttggtaggtggtatgtgtc

SEQ ID NO: 20615 - DNA, 20 bp, synthetic construct
  misc_feature 1..20: note = chemically synthesized
  source 1..20: mol_type = other DNA
agaaatttattaatttcctc

SEQ ID NO: 20616 - DNA, 20 bp, synthetic construct
  misc_feature 1..20: note = chemically synthesized
  source 1..20: mol_type = other DNA
ttaatttcctctagattttt

SEQ ID NO: 20617 - DNA, 20 bp, synthetic construct
  misc_feature 1..20: note = chemically synthesized
  source 1..20: mol_type = other DNA
ctctagatttttcagttttt

SEQ ID NO: 20618 - DNA, 20 bp, synthetic construct
  misc_feature 1..20: note = chemically synthesized
  source 1..20: mol_type = other DNA
tttttcagttttttagtgta

SEQ ID NO: 20619 - DNA, 20 bp, synthetic construct
  misc_feature 1..20: note = chemically synthesized
  source 1..20: mol_type = other DNA
tagtgtatggttgttcataa

SEQ ID NO: 20620 - DNA, 20 bp, synthetic construct
  misc_feature 1..20: note = chemically synthesized
  source 1..20: mol_type = other DNA
gataatcttttctatttctg

SEQ ID NO: 20621 - DNA, 20 bp, synthetic construct
  misc_feature 1..20: note = chemically synthesized
  source 1..20: mol_type = other DNA
cttttctatttctgtggtat

SEQ ID NO: 20622 - DNA, 20 bp, synthetic construct
  misc_feature 1..20: note = chemically synthesized
  source 1..20: mol_type = other DNA
atttctgattttctttattt

SEQ ID NO: 20623 - DNA, 20 bp, synthetic construct
  misc_feature 1..20: note = chemically synthesized
  source 1..20: mol_type = other DNA
tcagtctcttctctttttct

SEQ ID NO: 20624 - DNA, 20 bp, synthetic construct
  misc_feature 1..20: note = chemically synthesized
  source 1..20: mol_type = other DNA
tctcttctctttttcttggt

SEQ ID NO: 20625 - DNA, 20 bp, synthetic construct
  misc_feature 1..20: note = chemically synthesized
  source 1..20: mol_type = other DNA
tctctttttcttggttagtc

SEQ ID NO: 20626 - DNA, 20 bp, synthetic construct
  misc_feature 1..20: note = chemically synthesized
  source 1..20: mol_type = other DNA
tttttcttggttagtctagc

SEQ ID NO: 20627 - DNA, 20 bp, synthetic construct
  misc_feature 1..20: note = chemically synthesized
  source 1..20: mol_type = other DNA
tttcttggttagtctagcta

SEQ ID NO: 20628 - DNA, 20 bp, synthetic construct
  misc_feature 1..20: note = chemically synthesized
  source 1..20: mol_type = other DNA
ttgtttttctctatttcatt

SEQ ID NO: 20629 - DNA, 20 bp, synthetic construct
  misc_feature 1..20: note = chemically synthesized
  source 1..20: mol_type = other DNA
cattttttctttccttctgc

SEQ ID NO: 20630 - DNA, 20 bp, synthetic construct
  misc_feature 1..20: note = chemically synthesized
  source 1..20: mol_type = other DNA
ttctttccttctgctagttt

SEQ ID NO: 20631 - DNA, 20 bp, synthetic construct
  misc_feature 1..20: note = chemically synthesized
  source 1..20: mol_type = other DNA
tctttccttctgctagtttt

SEQ ID NO: 20632 - DNA, 20 bp, synthetic construct
  misc_feature 1..20: note = chemically synthesized
  source 1..20: mol_type = other DNA
gggttttgttcttgcttttc

SEQ ID NO: 20633 - DNA, 20 bp, synthetic construct
  misc_feature 1..20: note = chemically synthesized
  source 1..20: mol_type = other DNA
tcttgcttttctagcttgtt

SEQ ID NO: 20634 - DNA, 20 bp, synthetic construct
  misc_feature 1..20: note = chemically synthesized
  source 1..20: mol_type = other DNA
cttgcttttctagcttgttg

SEQ ID NO: 20635 - DNA, 20 bp, synthetic construct
  misc_feature 1..20: note = chemically synthesized
  source 1..20: mol_type = other DNA
agcttgttgaggtacatgat

SEQ ID NO: 20636 - DNA, 20 bp, synthetic construct
  misc_feature 1..20: note = chemically synthesized
  source 1..20: mol_type = other DNA
tctttctatgtttttaattt

SEQ ID NO: 20637 - DNA, 20 bp, synthetic construct
  misc_feature 1..20: note = chemically synthesized
  source 1..20: mol_type = other DNA
taatttaagtgtttattgat

SEQ ID NO: 20638 - DNA, 20 bp, synthetic construct
  misc_feature 1..20: note = chemically synthesized
  source 1..20: mol_type = other DNA
ttattgataagcttctctct

SEQ ID NO: 20639 - DNA, 20 bp, synthetic construct
  misc_feature 1..20: note = chemically synthesized
  source 1..20: mol_type = other DNA
actgcttttgctgtatccca

SEQ ID NO: 20640 - DNA, 20 bp, synthetic construct
  misc_feature 1..20: note = chemically synthesized
  source 1..20: mol_type = other DNA
ttcttgacataacgttcatt

SEQ ID NO: 20641 - DNA, 20 bp, synthetic construct
  misc_feature 1..20: note = chemically synthesized
  source 1..20: mol_type = other DNA
tcttgacataacgttcattc

SEQ ID NO: 20642 - DNA, 20 bp, synthetic construct
  misc_feature 1..20: note = chemically synthesized
  source 1..20: mol_type = other DNA
ttgacataacgttcattcag

SEQ ID NO: 20643 - DNA, 20 bp, synthetic construct
  misc_feature 1..20: note = chemically synthesized
  source 1..20: mol_type = other DNA
ttaatttccatgtatttgta

SEQ ID NO: 20644 - DNA, 20 bp, synthetic construct
  misc_feature 1..20: note = chemically synthesized
  source 1..20: mol_type = other DNA
taatttccatgtatttgtat

SEQ ID NO: 20645 - DNA, 20 bp, synthetic construct
  misc_feature 1..20: note = chemically synthesized
  source 1..20: mol_type = other DNA
atgtatttgtataggtttta

SEQ ID NO: 20646 - DNA, 20 bp, synthetic construct
  misc_feature 1..20: note = chemically synthesized
  source 1..20: mol_type = other DNA
tttttcttgttattgatttc

SEQ ID NO: 20647 - DNA, 20 bp, synthetic construct
  misc_feature 1..20: note = chemically synthesized
  source 1..20: mol_type = other DNA
tttctagttttattccattg

SEQ ID NO: 20648 - DNA, 20 bp, synthetic construct
  misc_feature 1..20: note = chemically synthesized
  source 1..20: mol_type = other DNA
gttttattccattgtggtct

SEQ ID NO: 20649 - DNA, 20 bp, synthetic construct
  misc_feature 1..20: note = chemically synthesized
  source 1..20: mol_type = other DNA
ttattccattgtggtctgag

SEQ ID NO: 20650 - DNA, 20 bp, synthetic construct
  misc_feature 1..20: note = chemically synthesized
  source 1..20: mol_type = other DNA
tgatttcaaatatttcaaat

SEQ ID NO: 20651 - DNA, 20 bp, synthetic construct
  misc_feature 1..20: note = chemically synthesized
  source 1..20: mol_type = other DNA
tcaaatatttcaaattagtt

SEQ ID NO: 20652 - DNA, 20 bp, synthetic construct
  misc_feature 1..20: note = chemically synthesized
  source 1..20: mol_type = other DNA
ttcttttgtgttctaacata

SEQ ID NO: 20653 - DNA, 20 bp, synthetic construct
  misc_feature 1..20: note = chemically synthesized
  source 1..20: mol_type = other DNA
ttctaacatatggtgtatcc

SEQ ID NO: 20654 - DNA, 20 bp, synthetic construct
  misc_feature 1..20: note = chemically synthesized
  source 1..20: mol_type = other DNA
tctaacatatggtgtatcct

SEQ ID NO: 20655 - DNA, 20 bp, synthetic construct
  misc_feature 1..20: note = chemically synthesized
  source 1..20: mol_type = other DNA
ctaacatatggtgtatcctg

SEQ ID NO: 20656 - DNA, 20 bp, synthetic construct
  misc_feature 1..20: note = chemically synthesized
  source 1..20: mol_type = other DNA
ggaatgcgtcatgtgctgat

SEQ ID NO: 20657 - DNA, 20 bp, synthetic construct
  misc_feature 1..20: note = chemically synthesized
  source 1..20: mol_type = other DNA
gatgagataaatatattctg

SEQ ID NO: 20658 - DNA, 20 bp, synthetic construct
  misc_feature 1..20: note = chemically synthesized
  source 1..20: mol_type = other DNA
taaatatattctgtagctgt

SEQ ID NO: 20659 - DNA, 20 bp, synthetic construct
  misc_feature 1..20: note = chemically synthesized
  source 1..20: mol_type = other DNA
atgaaatattgtgtaaatgt

SEQ ID NO: 20660 - DNA, 20 bp, synthetic construct
  misc_feature 1..20: note = chemically synthesized
  source 1..20: mol_type = other DNA
gtgtaaatgttagatccatt

SEQ ID NO: 20661 - DNA, 20 bp, synthetic construct
  misc_feature 1..20: note = chemically synthesized
  source 1..20: mol_type = other DNA
tgttagatccatttggtcta

SEQ ID NO: 20662 - DNA, 20 bp, synthetic construct
  misc_feature 1..20: note = chemically synthesized
  source 1..20: mol_type = other DNA
gatccatttggtctaaagtc

SEQ ID NO: 20663 - DNA, 20 bp, synthetic construct
  misc_feature 1..20: note = chemically synthesized
  source 1..20: mol_type = other DNA
ttctttgttaattttctgtc

SEQ ID NO: 20664 - DNA, 20 bp, synthetic construct
  misc_feature 1..20: note = chemically synthesized
  source 1..20: mol_type = other DNA
tagatgatctatctgatgct

SEQ ID NO: 20665 - DNA, 20 bp, synthetic construct
  misc_feature 1..20: note = chemically synthesized
  source 1..20: mol_type = other DNA
gatctatctgatgctgagat

SEQ ID NO: 20666 - DNA, 20 bp, synthetic construct
  misc_feature 1..20: note = chemically synthesized
  source 1..20: mol_type = other DNA
atccccaactattattgtat

SEQ ID NO: 20667 - DNA, 20 bp, synthetic construct
  misc_feature 1..20: note = chemically synthesized
  source 1..20: mol_type = other DNA
taacatttgctttacatatc

SEQ ID NO: 20668 - DNA, 20 bp, synthetic construct
  misc_feature 1..20: note = chemically synthesized
  source 1..20: mol_type = other DNA
ctttacatatctggatgctc

SEQ ID NO: 20669 - DNA, 20 bp, synthetic construct
  misc_feature 1..20: note = chemically synthesized
  source 1..20: mol_type = other DNA
tatctggatgctctggtgtt

SEQ ID NO: 20670 - DNA, 20 bp, synthetic construct
  misc_feature 1..20: note = chemically synthesized
  source 1..20: mol_type = other DNA
tggtgttgagtgtgaatgtt

SEQ ID NO: 20671 - DNA, 20 bp, synthetic construct
  misc_feature 1..20: note = chemically synthesized
  source 1..20: mol_type = other DNA
atgtaatgacttttgtctct

SEQ ID NO: 20672 - DNA, 20 bp, synthetic construct
  misc_feature 1..20: note = chemically synthesized
  source 1..20: mol_type = other DNA
ctcttagtgttttttattta

SEQ ID NO: 20673 - DNA, 20 bp, synthetic construct
  misc_feature 1..20: note = chemically synthesized
  source 1..20: mol_type = other DNA
aaagtcaattttatctgtta

SEQ ID NO: 20674 - DNA, 20 bp, synthetic construct
  misc_feature 1..20: note = chemically synthesized
  source 1..20: mol_type = other DNA
aagtcaattttatctgttat

SEQ ID NO: 20675 - DNA, 20 bp, synthetic construct
  misc_feature 1..20: note = chemically synthesized
  source 1..20: mol_type = other DNA
taactacttttgctcatttt

SEQ ID NO: 20676 - DNA, 20 bp, synthetic construct
  misc_feature 1..20: note = chemically synthesized
  source 1..20: mol_type = other DNA
atttttggtttctctttgta

SEQ ID NO: 20677 - DNA, 20 bp, synthetic construct
  misc_feature 1..20: note = chemically synthesized
  source 1..20: mol_type = other DNA
tttggtttctctttgtatgg

SEQ ID NO: 20678 - DNA, 20 bp, synthetic construct
  misc_feature 1..20: note = chemically synthesized
  source 1..20: mol_type = other DNA
atctttcatctttttacttt

SEQ ID NO: 20679 - DNA, 20 bp, synthetic construct
  misc_feature 1..20: note = chemically synthesized
  source 1..20: mol_type = other DNA
cagtctatatttatctttac

SEQ ID NO: 20680 - DNA, 20 bp, synthetic construct
  misc_feature 1..20: note = chemically synthesized
  source 1..20: mol_type = other DNA
ctatatttatctttacaagt

SEQ ID NO: 20681 - DNA, 20 bp, synthetic construct
  misc_feature 1..20: note = chemically synthesized
  source 1..20: mol_type = other DNA
tttatctttacaagtgagat

SEQ ID NO: 20682 - DNA, 20 bp, synthetic construct
  misc_feature 1..20: note = chemically synthesized
  source 1..20: mol_type = other DNA
caagtgagataagtttctta

SEQ ID NO: 20683 - DNA, 20 bp, synthetic construct
  misc_feature 1..20: note = chemically synthesized
  source 1..20: mol_type = other DNA
aagtgagataagtttcttat

SEQ ID NO: 20684 - DNA, 20 bp, synthetic construct
  misc_feature 1..20: note = chemically synthesized
  source 1..20: mol_type = other DNA
tgagataagtttcttatagg

SEQ ID NO: 20685 - DNA, 20 bp, synthetic construct
  misc_feature 1..20: note = chemically synthesized
  source 1..20: mol_type = other DNA
tcttataggcagcttacaac

SEQ ID NO: 20686 - DNA, 20 bp, synthetic construct
  misc_feature 1..20: note = chemically synthesized
  source 1..20: mol_type = other DNA
cttataggcagcttacaact

SEQ ID NO: 20687 - DNA, 20 bp, synthetic construct
  misc_feature 1..20: note = chemically synthesized
  source 1..20: mol_type = other DNA
atttttgttttaaatctatt

SEQ ID NO: 20688 - DNA, 20 bp, synthetic construct
  misc_feature 1..20: note = chemically synthesized
  source 1..20: mol_type = other DNA
ttgttttaaatctatttagc

SEQ ID NO: 20689 - DNA, 20 bp, synthetic construct
  misc_feature 1..20: note = chemically synthesized
  source 1..20: mol_type = other DNA
ttagccagtctatatctttc

SEQ ID NO: 20690 - DNA, 20 bp, synthetic construct
  misc_feature 1..20: note = chemically synthesized
  source 1..20: mol_type = other DNA
aatttaatccatttacatgc

SEQ ID NO: 20691 - DNA, 20 bp, synthetic construct
  misc_feature 1..20: note = chemically synthesized
  source 1..20: mol_type = other DNA
atttaatccatttacatgca

SEQ ID NO: 20692 - DNA, 20 bp, synthetic construct
  misc_feature 1..20: note = chemically synthesized
  source 1..20: mol_type = other DNA
caaggctattattgacatgt

SEQ ID NO: 20693 - DNA, 20 bp, synthetic construct
  misc_feature 1..20: note = chemically synthesized
  source 1..20: mol_type = other DNA
aggctattattgacatgtga

SEQ ID NO: 20694 - DNA, 20 bp, synthetic construct
  misc_feature 1..20: note = chemically synthesized
  source 1..20: mol_type = other DNA
ccattttgttaattgattcc

SEQ ID NO: 20695 - DNA, 20 bp, synthetic construct
  misc_feature 1..20: note = chemically synthesized
  source 1..20: mol_type = other DNA
tggttgttttgttttttttt

SEQ ID NO: 20696 - DNA, 20 bp, synthetic construct
  misc_feature 1..20: note = chemically synthesized
  source 1..20: mol_type = other DNA
tttcttattatttatgattg

SEQ ID NO: 20697 - DNA, 20 bp, synthetic construct
  misc_feature 1..20: note = chemically synthesized
  source 1..20: mol_type = other DNA
tattatttatgattgtggtt

SEQ ID NO: 20698 - DNA, 20 bp, synthetic construct
  misc_feature 1..20: note = chemically synthesized
  source 1..20: mol_type = other DNA
tgtggtttggtgattttctg

SEQ ID NO: 20699 - DNA, 20 bp, synthetic construct
  misc_feature 1..20: note = chemically synthesized
  source 1..20: mol_type = other DNA
ggtttggtgattttctgtag

SEQ ID NO: 20700 - DNA, 20 bp, synthetic construct
  misc_feature 1..20: note = chemically synthesized
  source 1..20: mol_type = other DNA
tttctgtagtggtaacgttt

SEQ ID NO: 20701 - DNA, 20 bp, synthetic construct
  misc_feature 1..20: note = chemically synthesized
  source 1..20: mol_type = other DNA
ttatttgtgttttgctctac

SEQ ID NO: 20702 - DNA, 20 bp, synthetic construct
  misc_feature 1..20: note = chemically synthesized
  source 1..20: mol_type = other DNA
ttgtgttttgctctaccagt

SEQ ID NO: 20703 - DNA, 20 bp, synthetic construct
  misc_feature 1..20: note = chemically synthesized
  source 1..20: mol_type = other DNA
acctttgtgtgtcttcataa

SEQ ID NO: 20704 - DNA, 20 bp, synthetic construct
  misc_feature 1..20: note = chemically synthesized
  source 1..20: mol_type = other DNA
tttgtgtgtcttcataatgg

SEQ ID NO: 20705 - DNA, 20 bp, synthetic construct
  misc_feature 1..20: note = chemically synthesized
  source 1..20: mol_type = other DNA
tgtcctgtcactttcatgtg

SEQ ID NO: 20706 - DNA, 20 bp, synthetic construct
  misc_feature 1..20: note = chemically synthesized
  source 1..20: mol_type = other DNA
gtcctgtcactttcatgtgt

SEQ ID NO: 20707 - DNA, 20 bp, synthetic construct
  misc_feature 1..20: note = chemically synthesized
  source 1..20: mol_type = other DNA
tcccttaaatatttcttgta

SEQ ID NO: 20708 - DNA, 20 bp, synthetic construct
  misc_feature 1..20: note = chemically synthesized
  source 1..20: mol_type = other DNA
ttaaatatttcttgtaaagc

SEQ ID NO: 20709 - DNA, 20 bp, synthetic construct
  misc_feature 1..20: note = chemically synthesized
  source 1..20: mol_type = other DNA
tatttcttgtaaagccagtc

SEQ ID NO: 20710 - DNA, 20 bp, synthetic construct
  misc_feature 1..20: note = chemically synthesized
  source 1..20: mol_type = other DNA
ttgtaaagccagtctagtga

SEQ ID NO: 20711 - DNA, 20 bp, synthetic construct
  misc_feature 1..20: note = chemically synthesized
  source 1..20: mol_type = other DNA
tccttcaaatttttcttgcc

SEQ ID NO: 20712 - DNA, 20 bp, synthetic construct
  misc_feature 1..20: note = chemically synthesized
  source 1..20: mol_type = other DNA
caaatttttcttgcccagaa

SEQ ID NO: 20713 - DNA, 20 bp, synthetic construct
  misc_feature 1..20: note = chemically synthesized
  source 1..20: mol_type = other DNA
ttatttatccttcatttttg

SEQ ID NO: 20714 - DNA, 20 bp, synthetic construct
  misc_feature 1..20: note = chemically synthesized
  source 1..20: mol_type = other DNA
tttttgaagaacaatgttgc

SEQ ID NO: 20715 - DNA, 20 bp, synthetic construct
  misc_feature 1..20: note = chemically synthesized
  source 1..20: mol_type = other DNA
ttttgaagaacaatgttgct

SEQ ID NO: 20716 - DNA, 20 bp, synthetic construct
  misc_feature 1..20: note = chemically synthesized
  source 1..20: mol_type = other DNA
gttgctgggtataacatcct

SEQ ID NO: 20717 - DNA, 20 bp, synthetic construct
  misc_feature 1..20: note = chemically synthesized
  source 1..20: mol_type = other DNA
tatatcatcccatcttctcc

SEQ ID NO: 20718 - DNA, 20 bp, synthetic construct
  misc_feature 1..20: note = chemically synthesized
  source 1..20: mol_type = other DNA
cccatcttctcctggcctgt

SEQ ID NO: 20719 - DNA, 20 bp, synthetic construct
  misc_feature 1..20: note = chemically synthesized
  source 1..20: mol_type = other DNA
ccatcttctcctggcctgtg

SEQ ID NO: 20720 - DNA, 20 bp, synthetic construct
  misc_feature 1..20: note = chemically synthesized
  source 1..20: mol_type = other DNA
tggcctgtgaggtttctgct

SEQ ID NO: 20721 - DNA, 20 bp, synthetic construct
  misc_feature 1..20: note = chemically synthesized
  source 1..20: mol_type = other DNA
ctgttaatctgttaatcttg

SEQ ID NO: 20722 - DNA, 20 bp, synthetic construct
  misc_feature 1..20: note = chemically synthesized
  source 1..20: mol_type = other DNA
ttaatctgttaatcttgtgg

SEQ ID NO: 20723 - DNA, 20 bp, synthetic construct
  misc_feature 1..20: note = chemically synthesized
  source 1..20: mol_type = other DNA
tcttgtggaagttcccttat

SEQ ID NO: 20724 - DNA, 20 bp, synthetic construct
  misc_feature 1..20: note = chemically synthesized
  source 1..20: mol_type = other DNA
gaagttcccttataagtgac

SEQ ID NO: 20725 - DNA, 20 bp, synthetic construct
  misc_feature 1..20: note = chemically synthesized
  source 1..20: mol_type = other DNA
agacattttgcttgctgttt

SEQ ID NO: 20726 - DNA, 20 bp, synthetic construct
  misc_feature 1..20: note = chemically synthesized
  source 1..20: mol_type = other DNA
acattttgcttgctgtttta

SEQ ID NO: 20727 - DNA, 20 bp, synthetic construct
  misc_feature 1..20: note = chemically synthesized
  source 1..20: mol_type = other DNA
gttttagagttcttactctt

SEQ ID NO: 20728 - DNA, 20 bp, synthetic construct
  misc_feature 1..20: note = chemically synthesized
  source 1..20: mol_type = other DNA
tcttactctttggcttttga

SEQ ID NO: 20729 - DNA, 20 bp, synthetic construct
  misc_feature 1..20: note = chemically synthesized
  source 1..20: mol_type = other DNA
agtttgactataatgtgctg

SEQ ID NO: 20730 - DNA, 20 bp, synthetic construct
  misc_feature 1..20: note = chemically synthesized
  source 1..20: mol_type = other DNA
tttgactataatgtgctgtg

SEQ ID NO: 20731 - DNA, 20 bp, synthetic construct
  misc_feature 1..20: note = chemically synthesized
  source 1..20: mol_type = other DNA
gactataatgtgctgtggag

SEQ ID NO: 20732 - DNA, 20 bp, synthetic construct
  misc_feature 1..20: note = chemically synthesized
  source 1..20: mol_type = other DNA
ctataatgtgctgtggagaa

SEQ ID NO: 20733 - DNA, 20 bp, synthetic construct
  misc_feature 1..20: note = chemically synthesized
  source 1..20: mol_type = other DNA
gctttttgcattatattatt

SEQ ID NO: 20734 - DNA, 20 bp, synthetic construct
  misc_feature 1..20: note = chemically synthesized
  source 1..20: mol_type = other DNA
ctttttgcattatattattt

SEQ ID NO: 20735 - DNA, 20 bp, synthetic construct
  misc_feature 1..20: note = chemically synthesized
  source 1..20: mol_type = other DNA
atttctgattttcatttgtc

SEQ ID NO: 20736 - DNA, 20 bp, synthetic construct
  misc_feature 1..20: note = chemically synthesized
  source 1..20: mol_type = other DNA
tggatgtctacatttcttgc

SEQ ID NO: 20737 - DNA, 20 bp, synthetic construct
  misc_feature 1..20: note = chemically synthesized
  source 1..20: mol_type = other DNA
catttcttgctagacttgac

SEQ ID NO: 20738 - DNA, 20 bp, synthetic construct
  misc_feature 1..20: note = chemically synthesized
  source 1..20: mol_type = other DNA
tgctagacttgacaagtttt

SEQ ID NO: 20739 - DNA, 20 bp, synthetic construct
  misc_feature 1..20: note = chemically synthesized
  source 1..20: mol_type = other DNA
tcagctattgtgttgttacg

SEQ ID NO: 20740 - DNA, 20 bp, synthetic construct
  misc_feature 1..20: note = chemically synthesized
  source 1..20: mol_type = other DNA
cagctattgtgttgttacgt

SEQ ID NO: 20741 - DNA, 20 bp, synthetic construct
  misc_feature 1..20: note = chemically synthesized
  source 1..20: mol_type = other DNA
ttcatgttctctttaccttc

SEQ ID NO: 20742 - DNA, 20 bp, synthetic construct
  misc_feature 1..20: note = chemically synthesized
  source 1..20: mol_type = other DNA
tcatgttctctttaccttct

SEQ ID NO: 20743 - DNA, 20 bp, synthetic construct
  misc_feature 1..20: note = chemically synthesized
  source 1..20: mol_type = other DNA
ttgaatatttgttcacttta

SEQ ID NO: 20744 - DNA, 20 bp, synthetic construct
  misc_feature 1..20: note = chemically synthesized
  source 1..20: mol_type = other DNA
tttcctttctatcatttgac

SEQ ID NO: 20745 - DNA, 20 bp, synthetic construct
  misc_feature 1..20: note = chemically synthesized
  source 1..20: mol_type = other DNA
atttgaccagctaattttaa

SEQ ID NO: 20746 - DNA, 20 bp, synthetic construct
  misc_feature 1..20: note = chemically synthesized
  source 1..20: mol_type = other DNA
attttaaaagacctgtcttc

SEQ ID NO: 20747 - DNA, 20 bp, synthetic construct
  misc_feature 1..20: note = chemically synthesized
  source 1..20: mol_type = other DNA
cttgatctgatctattgttg

SEQ ID NO: 20748 - DNA, 20 bp, synthetic construct
  misc_feature 1..20: note = chemically synthesized
  source 1..20: mol_type = other DNA
atttctttcaataaactctt

SEQ ID NO: 20749 - DNA, 20 bp, synthetic construct
  misc_feature 1..20: note = chemically synthesized
  source 1..20: mol_type = other DNA
ttcaataaactcttcagtta

SEQ ID NO: 20750 - DNA, 20 bp, synthetic construct
  misc_feature 1..20: note = chemically synthesized
  source 1..20: mol_type = other DNA
tcagttacagaatttctgtt

SEQ ID NO: 20751 - DNA, 20 bp, synthetic construct
  misc_feature 1..20: note = chemically synthesized
  source 1..20: mol_type = other DNA
ttcttgttgtatctatctct

SEQ ID NO: 20752 - DNA, 20 bp, synthetic construct
  misc_feature 1..20: note = chemically synthesized
  source 1..20: mol_type = other DNA
tcttgttgtatctatctctt

SEQ ID NO: 20753 - DNA, 20 bp, synthetic construct
  misc_feature 1..20: note = chemically synthesized
  source 1..20: mol_type = other DNA
tttctttttattgtttatct

SEQ ID NO: 20754 - DNA, 20 bp, synthetic construct
  misc_feature 1..20: note = chemically synthesized
  source 1..20: mol_type = other DNA
gagttctcttgtgtctcact

SEQ ID NO: 20755 - DNA, 20 bp, synthetic construct
  misc_feature 1..20: note = chemically synthesized
  source 1..20: mol_type = other DNA
cttccttaatatcaacattt

SEQ ID NO: 20756 - DNA, 20 bp, synthetic construct
  misc_feature 1..20: note = chemically synthesized
  source 1..20: mol_type = other DNA
acattttggattcttttttc

SEQ ID NO: 20757 - DNA, 20 bp, synthetic construct
  misc_feature 1..20: note = chemically synthesized
  source 1..20: mol_type = other DNA
taaatgtcttttttttccac

SEQ ID NO: 20758 - DNA, 20 bp, synthetic construct
  misc_feature 1..20: note = chemically synthesized
  source 1..20: mol_type = other DNA
tccactggcttatgttgctg

SEQ ID NO: 20759 - DNA, 20 bp, synthetic construct
  misc_feature 1..20: note = chemically synthesized
  source 1..20: mol_type = other DNA
gaagaattattaaattcctt

SEQ ID NO: 20760 - DNA, 20 bp, synthetic construct
  misc_feature 1..20: note = chemically synthesized
  source 1..20: mol_type = other DNA
gaattattaaattcctttgg

SEQ ID NO: 20761 - DNA, 20 bp, synthetic construct
  misc_feature 1..20: note = chemically synthesized
  source 1..20: mol_type = other DNA
tgcattgatatctctgcatc

SEQ ID NO: 20762 - DNA, 20 bp, synthetic construct
  misc_feature 1..20: note = chemically synthesized
  source 1..20: mol_type = other DNA
ggtgtaatgattgctgcttc

SEQ ID NO: 20763 - DNA, 20 bp, synthetic construct
  misc_feature 1..20: note = chemically synthesized
  source 1..20: mol_type = other DNA
gttttgtaaatttgtttttg

SEQ ID NO: 20764 - DNA, 20 bp, synthetic construct
  misc_feature 1..20: note = chemically synthesized
  source 1..20: mol_type = other DNA
ttttgtaaatttgtttttgt

SEQ ID NO: 20765 - DNA, 20 bp, synthetic construct
  misc_feature 1..20: note = chemically synthesized
  source 1..20: mol_type = other DNA
tttgtaaatttgtttttgta

SEQ ID NO: 20766 - DNA, 20 bp, synthetic construct
  misc_feature 1..20: note = chemically synthesized
  source 1..20: mol_type = other DNA
ttgtaaatttgtttttgtag

SEQ ID NO: 20767 - DNA, 20 bp, synthetic construct
  misc_feature 1..20: note = chemically synthesized
  source 1..20: mol_type = other DNA
taaatttgtttttgtagggg

SEQ ID NO: 20768 - DNA, 20 bp, synthetic construct
  misc_feature 1..20: note = chemically synthesized
  source 1..20: mol_type = other DNA
taggggaagacttttttctg

SEQ ID NO: 20769 - DNA, 20 bp, synthetic construct
  misc_feature 1..20: note = chemically synthesized
  source 1..20: mol_type = other DNA
ttttttctgaagatgtatct

SEQ ID NO: 20770 - DNA, 20 bp, synthetic construct
  misc_feature 1..20: note = chemically synthesized
  source 1..20: mol_type = other DNA
gatgtatcttggtgttgatt

SEQ ID NO: 20771 - DNA, 20 bp, synthetic construct
  misc_feature 1..20: note = chemically synthesized
  source 1..20: mol_type = other DNA
gtatcttggtgttgattgag

SEQ ID NO: 20772 - DNA, 20 bp, synthetic construct
  misc_feature 1..20: note = chemically synthesized
  source 1..20: mol_type = other DNA
tatcttggtgttgattgagt

SEQ ID NO: 20773 - DNA, 20 bp, synthetic construct
  misc_feature 1..20: note = chemically synthesized
  source 1..20: mol_type = other DNA
atcttggtgttgattgagta

SEQ ID NO: 20774 - DNA, 20 bp, synthetic construct
  misc_feature 1..20: note = chemically synthesized
  source 1..20: mol_type = other DNA
ggcactttgattttgatttc

SEQ ID NO: 20775 - DNA, 20 bp, synthetic construct
  misc_feature 1..20: note = chemically synthesized
  source 1..20: mol_type = other DNA
gcactttgattttgatttct

SEQ ID NO: 20776 - DNA, 20 bp, synthetic construct
  misc_feature 1..20: note = chemically synthesized
  source 1..20: mol_type = other DNA
ttttgatttctaggtgcata

SEQ ID NO: 20777 - DNA, 20 bp, synthetic construct
  misc_feature 1..20: note = chemically synthesized
  source 1..20: mol_type = other DNA
tgatttctaggtgcatacag

SEQ ID NO: 20778 - DNA, 20 bp, synthetic construct
  misc_feature 1..20: note = chemically synthesized
  source 1..20: mol_type = other DNA
tctaggtgcatacagcagca

SEQ ID NO: 20779 - DNA, 20 bp, synthetic construct
  misc_feature 1..20: note = chemically synthesized
  source 1..20: mol_type = other DNA
gtcttcatattatttttttt

SEQ ID NO: 20780 - DNA, 20 bp, synthetic construct
  misc_feature 1..20: note = chemically synthesized
  source 1..20: mol_type = other DNA
tattttttttcagctgccaa

SEQ ID NO: 20781 - DNA, 20 bp, synthetic construct
  misc_feature 1..20: note = chemically synthesized
  source 1..20: mol_type = other DNA
tcagctgccaacagtatcat

SEQ ID NO: 20782 - DNA, 20 bp, synthetic construct
  misc_feature 1..20: note = chemically synthesized
  source 1..20: mol_type = other DNA
atcagtgtctgtgatttttt

SEQ ID NO: 20783 - DNA, 20 bp, synthetic construct
  misc_feature 1..20: note = chemically synthesized
  source 1..20: mol_type = other DNA
agtgtctgtgattttttcag

SEQ ID NO: 20784 - DNA, 20 bp, synthetic construct
  misc_feature 1..20: note = chemically synthesized
  source 1..20: mol_type = other DNA
ctgtgattttttcagtggct

SEQ ID NO: 20785 - DNA, 20 bp, synthetic construct
  misc_feature 1..20: note = chemically synthesized
  source 1..20: mol_type = other DNA
tgtgattttttcagtggctt

SEQ ID NO: 20786 - DNA, 20 bp, synthetic construct
  misc_feature 1..20: note = chemically synthesized
  source 1..20: mol_type = other DNA
gtgattttttcagtggctta

SEQ ID NO: 20787 - DNA, 20 bp, synthetic construct
  misc_feature 1..20: note = chemically synthesized
  source 1..20: mol_type = other DNA
gtggcttagggtgcatttgt

SEQ ID NO: 20788 - DNA, 20 bp, synthetic construct
  misc_feature 1..20: note = chemically synthesized
  source 1..20: mol_type = other DNA
ttagggtgcatttgttagtg

SEQ ID NO: 20789 - DNA, 20 bp, synthetic construct
  misc_feature 1..20: note = chemically synthesized
  source 1..20: mol_type = other DNA
tagggtgcatttgttagtga

SEQ ID NO: 20790 - DNA, 20 bp, synthetic construct
  misc_feature 1..20: note = chemically synthesized
  source 1..20: mol_type = other DNA
ggtgcatttgttagtgaagg

SEQ ID NO: 20791 - DNA, 20 bp, synthetic construct
  misc_feature 1..20: note = chemically synthesized
  source 1..20: mol_type = other DNA
ttgttagtgaaggtggtgat

SEQ ID NO: 20792 - DNA, 20 bp, synthetic construct
  misc_feature 1..20: note = chemically synthesized
  source 1..20: mol_type = other DNA
tgttagtgaaggtggtgatg

SEQ ID NO: 20793 - DNA, 20 bp, synthetic construct
  misc_feature 1..20: note = chemically synthesized
  source 1..20: mol_type = other DNA
aggtggtgatgaggttgtgc

SEQ ID NO: 20794 - DNA, 20 bp, synthetic construct
  misc_feature 1..20: note = chemically synthesized
  source 1..20: mol_type = other DNA
gtggtgatgaggttgtgctg

SEQ ID NO: 20795 - DNA, 20 bp, synthetic construct
  misc_feature 1..20: note = chemically synthesized
  source 1..20: mol_type = other DNA
gatgaggttgtgctggagac

SEQ ID NO: 20796 - DNA, 20 bp, synthetic construct
  misc_feature 1..20: note = chemically synthesized
  source 1..20: mol_type = other DNA
gtgctggagacaagaatatc

SEQ ID NO: 20797 - DNA, 20 bp, synthetic construct
  misc_feature 1..20: note = chemically synthesized
  source 1..20: mol_type = other DNA
ctggagacaagaatatcaag

SEQ ID NO: 20798 - DNA, 20 bp, synthetic construct
  misc_feature 1..20: note = chemically synthesized
  source 1..20: mol_type = other DNA
tggagacaagaatatcaagt

SEQ ID NO: 20799 - DNA, 20 bp, synthetic construct
  misc_feature 1..20: note = chemically synthesized
  source 1..20: mol_type = other DNA
gacaagaatatcaagtgggc

SEQ ID NO: 20800 - DNA, 20 bp, synthetic construct
  misc_feature 1..20: note = chemically synthesized
  source 1..20: mol_type = other DNA
atatcaagtgggccagtcct

SEQ ID NO: 20801 - DNA, 20 bp, synthetic construct
  misc_feature 1..20: note = chemically synthesized
  source 1..20: mol_type = other DNA
agtgggccagtccttggccc

SEQ ID NO: 20802 - DNA, 20 bp, synthetic construct
  misc_feature 1..20: note = chemically synthesized
  source 1..20: mol_type = other DNA
gggccagtccttggccccag

SEQ ID NO: 20803 - DNA, 20 bp, synthetic construct
  misc_feature 1..20: note = chemically synthesized
  source 1..20: mol_type = other DNA
ccagtccttggccccagtgg

SEQ ID NO: 20804 - DNA, 20 bp, synthetic construct
  misc_feature 1..20: note = chemically synthesized
  source 1..20: mol_type = other DNA
gtccttggccccagtggtgg

SEQ ID NO: 20805 - DNA, 20 bp, synthetic construct
  misc_feature 1..20: note = chemically synthesized
  source 1..20: mol_type = other DNA
cttggccccagtggtggtgg

SEQ ID NO: 20806 - DNA, 20 bp, synthetic construct
  misc_feature 1..20: note = chemically synthesized
  source 1..20: mol_type = other DNA
ttggccccagtggtggtggt

SEQ ID NO: 20807 - DNA, 20 bp, synthetic construct
  misc_feature 1..20: note = chemically synthesized
  source 1..20: mol_type = other DNA
cccagtggtggtggtgggcc

SEQ ID NO: 20808 - DNA, 20 bp, synthetic construct
  misc_feature 1..20: note = chemically synthesized
  source 1..20: mol_type = other DNA
gggcctagcattcctgtcct

SEQ ID NO: 20809 - DNA, 20 bp, synthetic construct
  misc_feature 1..20: note = chemically synthesized
  source 1..20: mol_type = other DNA
ggcctagcattcctgtcctt

SEQ ID NO: 20810 - DNA, 20 bp, synthetic construct
  misc_feature 1..20: note = chemically synthesized
  source 1..20: mol_type = other DNA
attcctgtccttgggcccca

SEQ ID NO: 20811 - DNA, 20 bp, synthetic construct
  misc_feature 1..20: note = chemically synthesized
  source 1..20: mol_type = other DNA
ggccccatggctgtgtacat

SEQ ID NO: 20812 - DNA, 20 bp, synthetic construct
  misc_feature 1..20: note = chemically synthesized
  source 1..20: mol_type = other DNA
gctgtgtacattggcactga

SEQ ID NO: 20813 - DNA, 20 bp, synthetic construct
  misc_feature 1..20: note = chemically synthesized
  source 1..20: mol_type = other DNA
acattggcactgatggtaat

SEQ ID NO: 20814 - DNA, 20 bp, synthetic construct
  misc_feature 1..20: note = chemically synthesized
  source 1..20: mol_type = other DNA
ggcactgatggtaatgagtc

SEQ ID NO: 20815 - DNA, 20 bp, synthetic construct
  misc_feature 1..20: note = chemically synthesized
  source 1..20: mol_type = other DNA
ctgatggtaatgagtctagt

SEQ ID NO: 20816 - DNA, 20 bp, synthetic construct
  misc_feature 1..20: note = chemically synthesized
  source 1..20: mol_type = other DNA
tgatggtaatgagtctagtt

SEQ ID NO: 20817 - DNA, 20 bp, synthetic construct
  misc_feature 1..20: note = chemically synthesized
  source 1..20: mol_type = other DNA
gtctagttgggttgattctt

SEQ ID NO: 20818 - DNA, 20 bp, synthetic construct
  misc_feature 1..20: note = chemically synthesized
  source 1..20: mol_type = other DNA
tgggttgattctttggcctt

SEQ ID NO: 20819 - DNA, 20 bp, synthetic construct
  misc_feature 1..20: note = chemically synthesized
  source 1..20: mol_type = other DNA
gggttgattctttggccttc

SEQ ID NO: 20820 - DNA, 20 bp, synthetic construct
  misc_feature 1..20: note = chemically synthesized
  source 1..20: mol_type = other DNA
ttgattctttggccttcagg

SEQ ID NO: 20821 - DNA, 20 bp, synthetic construct
  misc_feature 1..20: note = chemically synthesized
  source 1..20: mol_type = other DNA
tggccttcaggcagtttgct

SEQ ID NO: 20822 - DNA, 20 bp, synthetic construct
  misc_feature 1..20: note = chemically synthesized
  source 1..20: mol_type = other DNA
ggccttcaggcagtttgctt

SEQ ID NO: 20823 - DNA, 20 bp, synthetic construct
  misc_feature 1..20: note = chemically synthesized
  source 1..20: mol_type = other DNA
caggcagtttgcttgggtgt

SEQ ID NO: 20824 - DNA, 20 bp, synthetic construct
  misc_feature 1..20: note = chemically synthesized
  source 1..20: mol_type = other DNA
gcagtttgcttgggtgtcag

SEQ ID NO: 20825 - DNA, 20 bp, synthetic construct
  misc_feature 1..20: note = chemically synthesized
  source 1..20: mol_type = other DNA
gtttgcttgggtgtcagtag

SEQ ID NO: 20826 - DNA, 20 bp, synthetic construct
  misc_feature 1..20: note = chemically synthesized
  source 1..20: mol_type = other DNA
ttgggtgtcagtagtggcca

SEQ ID NO: 20827 - DNA, 20 bp, synthetic construct
  misc_feature 1..20: note = chemically synthesized
  source 1..20: mol_type = other DNA
ggtgtcagtagtggccatag

SEQ ID NO: 20828 - DNA, 20 bp, synthetic construct
  misc_feature 1..20: note = chemically synthesized
  source 1..20: mol_type = other DNA
cagtagtggccatagtagac

SEQ ID NO: 20829 - DNA, 20 bp, synthetic construct
  misc_feature 1..20: note = chemically synthesized
  source 1..20: mol_type = other DNA
agtagtggccatagtagact

SEQ ID NO: 20830 - DNA, 20 bp, synthetic construct
  misc_feature 1..20: note = chemically synthesized
  source 1..20: mol_type = other DNA
gtggccatagtagactgggc

SEQ ID NO: 20831 - DNA, 20 bp, synthetic construct
  misc_feature 1..20: note = chemically synthesized
  source 1..20: mol_type = other DNA
tagtagactgggctggtgtg

SEQ ID NO: 20832 - DNA, 20 bp, synthetic construct
  misc_feature 1..20: note = chemically synthesized
  source 1..20: mol_type = other DNA
agtagactgggctggtgtgt

SEQ ID NO: 20833 - DNA, 20 bp, synthetic construct
  misc_feature 1..20: note = chemically synthesized
  source 1..20: mol_type = other DNA
tgggctggtgtgtgggtcct

SEQ ID NO: 20834 - DNA, 20 bp, synthetic construct
  misc_feature 1..20: note = chemically synthesized
  source 1..20: mol_type = other DNA
gggctggtgtgtgggtcctc

SEQ ID NO: 20835 - DNA, 20 bp, synthetic construct
  misc_feature 1..20: note = chemically synthesized
  source 1..20: mol_type = other DNA
tgtgtgggtcctcaggcttc

SEQ ID NO: 20836 - DNA, 20 bp, synthetic construct
  misc_feature 1..20: note = chemically synthesized
  source 1..20: mol_type = other DNA
tgggtcctcaggcttctgga

SEQ ID NO: 20837 - DNA, 20 bp, synthetic construct
  misc_feature 1..20: note = chemically synthesized
  source 1..20: mol_type = other DNA
gtcctcaggcttctggacag

SEQ ID NO: 20838 - DNA, 20 bp, synthetic construct
  misc_feature 1..20: note = chemically synthesized
  source 1..20: mol_type = other DNA
tcctcaggcttctggacagt

SEQ ID NO: 20839 - DNA, 20 bp, synthetic construct
  misc_feature 1..20: note = chemically synthesized
  source 1..20: mol_type = other DNA
aggcttctggacagtgggtg

SEQ ID NO: 20840 - DNA, 20 bp, synthetic construct
  misc_feature 1..20: note = chemically synthesized
  source 1..20: mol_type = other DNA
tctggacagtgggtgtggtg

SEQ ID NO: 20841 - DNA, 20 bp, synthetic construct
  misc_feature 1..20: note = chemically synthesized
  source 1..20: mol_type = other DNA
ctggacagtgggtgtggtgt

SEQ ID NO: 20842 - DNA, 20 bp, synthetic construct
  misc_feature 1..20: note = chemically synthesized
  source 1..20: mol_type = other DNA
agtgggtgtggtgtgggtga

SEQ ID NO: 20843 - DNA, 20 bp, synthetic construct
  misc_feature 1..20: note = chemically synthesized
  source 1..20: mol_type = other DNA
tgtggtgtgggtgatggctg

SEQ ID NO: 20844 - DNA, 20 bp, synthetic construct
  misc_feature 1..20: note = chemically synthesized
  source 1..20: mol_type = other DNA
ggtgatggctgtagcaactg

SEQ ID NO: 20845 - DNA, 20 bp, synthetic construct
  misc_feature 1..20: note = chemically synthesized
  source 1..20: mol_type = other DNA
gtgatggctgtagcaactgc

SEQ ID NO: 20846 - DNA, 20 bp, synthetic construct
  misc_feature 1..20: note = chemically synthesized
  source 1..20: mol_type = other DNA
gcaactgcaggacaaccctc

SEQ ID NO: 20847 - DNA, 20 bp, synthetic construct
  misc_feature 1..20: note = chemically synthesized
  source 1..20: mol_type = other DNA
aggacaaccctctggctccc

SEQ ID NO: 20848 - DNA, 20 bp, synthetic construct
  misc_feature 1..20: note = chemically synthesized
  source 1..20: mol_type = other DNA
acaaccctctggctcccaag

SEQ ID NO: 20849 - DNA, 20 bp, synthetic construct
  misc_feature 1..20: note = chemically synthesized
  source 1..20: mol_type = other DNA
ggctcccaagcagtctgcac

SEQ ID NO: 20850 - DNA, 20 bp, synthetic construct
  misc_feature 1..20: note = chemically synthesized
  source 1..20: mol_type = other DNA
caagcagtctgcactggtgt

SEQ ID NO: 20851 - DNA, 20 bp, synthetic construct
  misc_feature 1..20: note = chemically synthesized
  source 1..20: mol_type = other DNA
gcagtctgcactggtgttgg

SEQ ID NO: 20852 - DNA, 20 bp, synthetic construct
  misc_feature 1..20: note = chemically synthesized
  source 1..20: mol_type = other DNA
gtctgcactggtgttggtgg

SEQ ID NO: 20853 - DNA, 20 bp, synthetic construct
  misc_feature 1..20: note = chemically synthesized
  source 1..20: mol_type = other DNA
ctggtgttggtggtggctgc

SEQ ID NO: 20854 - DNA, 20 bp, synthetic construct
  misc_feature 1..20: note = chemically synthesized
  source 1..20: mol_type = other DNA
tggtgttggtggtggctgca

SEQ ID NO: 20855 - DNA, 20 bp, synthetic construct
  misc_feature 1..20: note = chemically synthesized
  source 1..20: mol_type = other DNA
ggtgttggtggtggctgcaa

SEQ ID NO: 20856 - DNA, 20 bp, synthetic construct
  misc_feature 1..20: note = chemically synthesized
  source 1..20: mol_type = other DNA
ggtggctgcaagggctgaat

SEQ ID NO: 20857 - DNA, 20 bp, synthetic construct
  misc_feature 1..20: note = chemically synthesized
  source 1..20: mol_type = other DNA
gctgcaagggctgaatgagc

SEQ ID NO: 20858 - DNA, 20 bp, synthetic construct
  misc_feature 1..20: note = chemically synthesized
  source 1..20: mol_type = other DNA
gggctgaatgagccagtctt

SEQ ID NO: 20859 - DNA, 20 bp, synthetic construct
  misc_feature 1..20: note = chemically synthesized
  source 1..20: mol_type = other DNA
tgagccagtcttcagaccca

SEQ ID NO: 20860 - DNA, 20 bp, synthetic construct
  misc_feature 1..20: note = chemically synthesized
  source 1..20: mol_type = other DNA
gagccagtcttcagacccac

SEQ ID NO: 20861 - DNA, 20 bp, synthetic construct
  misc_feature 1..20: note = chemically synthesized
  source 1..20: mol_type = other DNA
ccagtcttcagacccacagg

SEQ ID NO: 20862 - DNA, 20 bp, synthetic construct
  misc_feature 1..20: note = chemically synthesized
  source 1..20: mol_type = other DNA
agacccacaggtggcacatg

SEQ ID NO: 20863 - DNA, 20 bp, synthetic construct
  misc_feature 1..20: note = chemically synthesized
  source 1..20: mol_type = other DNA
gacccacaggtggcacatgc

SEQ ID NO: 20864 - DNA, 20 bp, synthetic construct
  misc_feature 1..20: note = chemically synthesized
  source 1..20: mol_type = other DNA
cccacaggtggcacatgcag

SEQ ID NO: 20865 - DNA, 20 bp, synthetic construct
  misc_feature 1..20: note = chemically synthesized
  source 1..20: mol_type = other DNA
ccacaggtggcacatgcagg

SEQ ID NO: 20866 - DNA, 20 bp, synthetic construct
  misc_feature 1..20: note = chemically synthesized
  source 1..20: mol_type = other DNA
gtggcacatgcaggaggtgc

SEQ ID NO: 20867 - DNA, 20 bp, synthetic construct
  misc_feature 1..20: note = chemically synthesized
  source 1..20: mol_type = other DNA
gcaggaggtgccagttgtga

SEQ ID NO: 20868 - DNA, 20 bp, synthetic construct
  misc_feature 1..20: note = chemically synthesized
  source 1..20: mol_type = other DNA
ggaggtgccagttgtgatgg

SEQ ID NO: 20869 - DNA, 20 bp, synthetic construct
  misc_feature 1..20: note = chemically synthesized
  source 1..20: mol_type = other DNA
ggtgccagttgtgatggcag

SEQ ID NO: 20870 - DNA, 20 bp, synthetic construct
  misc_feature 1..20: note = chemically synthesized
  source 1..20: mol_type = other DNA
gccagttgtgatggcagtgg

SEQ ID NO: 20871 - DNA, 20 bp, synthetic construct
  misc_feature 1..20: note = chemically synthesized
  source 1..20: mol_type = other DNA
ttgtgatggcagtggcagat

SEQ ID NO: 20872 - DNA, 20 bp, synthetic construct
  misc_feature 1..20: note = chemically synthesized
  source 1..20: mol_type = other DNA
tgtgatggcagtggcagatt

SEQ ID NO: 20873 - DNA, 20 bp, synthetic construct
  misc_feature 1..20: note = chemically synthesized
  source 1..20: mol_type = other DNA
gatggcagtggcagattggg

SEQ ID NO: 20874 - DNA, 20 bp, synthetic construct
  misc_feature 1..20: note = chemically synthesized
  source 1..20: mol_type = other DNA
atggcagtggcagattgggt

SEQ ID NO: 20875 - DNA, 20 bp, synthetic construct
  misc_feature 1..20: note = chemically synthesized
  source 1..20: mol_type = other DNA
agattgggtaggcccatcat

SEQ ID NO: 20876 - DNA, 20 bp, synthetic construct
  misc_feature 1..20: note = chemically synthesized
  source 1..20: mol_type = other DNA
gattgggtaggcccatcatc

SEQ ID NO: 20877 - DNA, 20 bp, synthetic construct
  misc_feature 1..20: note = chemically synthesized
  source 1..20: mol_type = other DNA
taggcccatcatcaggcttc

SEQ ID NO: 20878 - DNA, 20 bp, synthetic construct
  misc_feature 1..20: note = chemically synthesized
  source 1..20: mol_type = other DNA
aggcccatcatcaggcttct

SEQ ID NO: 20879 - DNA, 20 bp, synthetic construct
  misc_feature 1..20: note = chemically synthesized
  source 1..20: mol_type = other DNA
gcccatcatcaggcttctgg

SEQ ID NO: 20880 - DNA, 20 bp, synthetic construct
  misc_feature 1..20: note = chemically synthesized
  source 1..20: mol_type = other DNA
cccatcatcaggcttctggg

SEQ ID NO: 20881 - DNA, 20 bp, synthetic construct
  misc_feature 1..20: note = chemically synthesized
  source 1..20: mol_type = other DNA
ccatcatcaggcttctggga

SEQ ID NO: 20882 - DNA, 20 bp, synthetic construct
  misc_feature 1..20: note = chemically synthesized
  source 1..20: mol_type = other DNA
aggcttctgggagggttgct

SEQ ID NO: 20883 - DNA, 20 bp, synthetic construct
  misc_feature 1..20: note = chemically synthesized
  source 1..20: mol_type = other DNA
ggcttctgggagggttgctt

SEQ ID NO: 20884 - DNA, 20 bp, synthetic construct
  misc_feature 1..20: note = chemically synthesized
  source 1..20: mol_type = other DNA
tgggagggttgcttaggtac

SEQ ID NO: 20885 - DNA, 20 bp, synthetic construct
  misc_feature 1..20: note = chemically synthesized
  source 1..20: mol_type = other DNA
ggttgcttaggtaccagtca

SEQ ID NO: 20886 - DNA, 20 bp, synthetic construct
  misc_feature 1..20: note = chemically synthesized
  source 1..20: mol_type = other DNA
tgcttaggtaccagtcatgg

SEQ ID NO: 20887 - DNA, 20 bp, synthetic construct
  misc_feature 1..20: note = chemically synthesized
  source 1..20: mol_type = other DNA
taggtaccagtcatggtgga

SEQ ID NO: 20888 - DNA, 20 bp, synthetic construct
  misc_feature 1..20: note = chemically synthesized
  source 1..20: mol_type = other DNA
ccagtcatggtggatggcac

SEQ ID NO: 20889 - DNA, 20 bp, synthetic construct
  misc_feature 1..20: note = chemically synthesized
  source 1..20: mol_type = other DNA
cagtcatggtggatggcaca

SEQ ID NO: 20890 - DNA, 20 bp, synthetic construct
  misc_feature 1..20: note = chemically synthesized
  source 1..20: mol_type = other DNA
ggatggcacaaggctgtctc

SEQ ID NO: 20891 - DNA, 20 bp, synthetic construct
  misc_feature 1..20: note = chemically synthesized
  source 1..20: mol_type = other DNA
gatggcacaaggctgtctct

SEQ ID NO: 20892 - DNA, 20 bp, synthetic construct
  misc_feature 1..20: note = chemically synthesized
  source 1..20: mol_type = other DNA
caaggctgtctctgggttcc

SEQ ID NO: 20893 - DNA, 20 bp, synthetic construct
  misc_feature 1..20: note = chemically synthesized
  source 1..20: mol_type = other DNA
gggttcccagacaacttgct

SEQ ID NO: 20894 - DNA, 20 bp, synthetic construct
  misc_feature 1..20: note = chemically synthesized
  source 1..20: mol_type = other DNA
ggttcccagacaacttgctt

SEQ ID NO: 20895 - DNA, 20 bp, synthetic construct
  misc_feature 1..20: note = chemically synthesized
  source 1..20: mol_type = other DNA
agacaacttgcttaggcatt

SEQ ID NO: 20896 - DNA, 20 bp, synthetic construct
  misc_feature 1..20: note = chemically synthesized
  source 1..20: mol_type = other DNA
gacaacttgcttaggcattg

SEQ ID NO: 20897 - DNA, 20 bp, synthetic construct
  misc_feature 1..20: note = chemically synthesized
  source 1..20: mol_type = other DNA
aacttgcttaggcattgagg

SEQ ID NO: 20898 - DNA, 20 bp, synthetic construct
  misc_feature 1..20: note = chemically synthesized
  source 1..20: mol_type = other DNA
acttgcttaggcattgagga

SEQ ID NO: 20899 - DNA, 20 bp, synthetic construct
  misc_feature 1..20: note = chemically synthesized
  source 1..20: mol_type = other DNA
cttaggcattgaggaaggca

SEQ ID NO: 20900 - DNA, 20 bp, synthetic construct
  misc_feature 1..20: note = chemically synthesized
  source 1..20: mol_type = other DNA
ggcattgaggaaggcaaagc

SEQ ID NO: 20901 - DNA, 20 bp, synthetic construct
  misc_feature 1..20: note = chemically synthesized
  source 1..20: mol_type = other DNA
gcattgaggaaggcaaagcc

SEQ ID NO: 20902 - DNA, 20 bp, synthetic construct
  misc_feature 1..20: note = chemically synthesized
  source 1..20: mol_type = other DNA
tgaggaaggcaaagccaggc

SEQ ID NO: 20903 - DNA, 20 bp, synthetic construct
  misc_feature 1..20: note = chemically synthesized
  source 1..20: mol_type = other DNA
gaggaaggcaaagccaggct

SEQ ID NO: 20904 - DNA, 20 bp, synthetic construct
  misc_feature 1..20: note = chemically synthesized
  source 1..20: mol_type = other DNA
aggctgggtgttcctgacct

SEQ ID NO: 20905 - DNA, 20 bp, synthetic construct
  misc_feature 1..20: note = chemically synthesized
  source 1..20: mol_type = other DNA
ggctgggtgttcctgacctc

SEQ ID NO: 20906 - DNA, 20 bp, synthetic construct
  misc_feature 1..20: note = chemically synthesized
  source 1..20: mol_type = other DNA
gttcctgacctcaggccact

SEQ ID NO: 20907 - DNA, 20 bp, synthetic construct
  misc_feature 1..20: note = chemically synthesized
  source 1..20: mol_type = other DNA
cctgacctcaggccactcag

SEQ ID NO: 20908 - DNA, 20 bp, synthetic construct
  misc_feature 1..20: note = chemically synthesized
  source 1..20: mol_type = other DNA
aggccactcagtggtgtgtg

SEQ ID NO: 20909 - DNA, 20 bp, synthetic construct
  misc_feature 1..20: note = chemically synthesized
  source 1..20: mol_type = other DNA
tcagtggtgtgtgtggacac

SEQ ID NO: 20910 - DNA, 20 bp, synthetic construct
  misc_feature 1..20: note = chemically synthesized
  source 1..20: mol_type = other DNA
tgtgtggacaccggctatca

SEQ ID NO: 20911 - DNA, 20 bp, synthetic construct
  misc_feature 1..20: note = chemically synthesized
  source 1..20: mol_type = other DNA
gtgtggacaccggctatcat

SEQ ID NO: 20912 - DNA, 20 bp, synthetic construct
  misc_feature 1..20: note = chemically synthesized
  source 1..20: mol_type = other DNA
ggacaccggctatcataggc

SEQ ID NO: 20913 - DNA, 20 bp, synthetic construct
  misc_feature 1..20: note = chemically synthesized
  source 1..20: mol_type = other DNA
acaccggctatcataggctg

SEQ ID NO: 20914 - DNA, 20 bp, synthetic construct
  misc_feature 1..20: note = chemically synthesized
  source 1..20: mol_type = other DNA
ccggctatcataggctggag

SEQ ID NO: 20915 - DNA, 20 bp, synthetic construct
  misc_feature 1..20: note = chemically synthesized
  source 1..20: mol_type = other DNA
ggctatcataggctggagtg

SEQ ID NO: 20916 - DNA, 20 bp, synthetic construct
  misc_feature 1..20: note = chemically synthesized
  source 1..20: mol_type = other DNA
ggctggagtggagtgatcct

SEQ ID NO: 20917 - DNA, 20 bp, synthetic construct
  misc_feature 1..20: note = chemically synthesized
  source 1..20: mol_type = other DNA
gctggagtggagtgatcctc

SEQ ID NO: 20918 - DNA, 20 bp, synthetic construct
  misc_feature 1..20: note = chemically synthesized
  source 1..20: mol_type = other DNA
tggagtgatcctcaggcccc

SEQ ID NO: 20919 - DNA, 20 bp, synthetic construct
  misc_feature 1..20: note = chemically synthesized
  source 1..20: mol_type = other DNA
agtgatcctcaggcccccag

SEQ ID NO: 20920 - DNA, 20 bp, synthetic construct
  misc_feature 1..20: note = chemically synthesized
  source 1..20: mol_type = other DNA
aggcccccagcagaatgcct

SEQ ID NO: 20921 - DNA, 20 bp, synthetic construct
  misc_feature 1..20: note = chemically synthesized
  source 1..20: mol_type = other DNA
agcagaatgcctgagtgaat

SEQ ID NO: 20922 - DNA, 20 bp, synthetic construct
  misc_feature 1..20: note = chemically synthesized
  source 1..20: mol_type = other DNA
agaatgcctgagtgaattag

SEQ ID NO: 20923 - DNA, 20 bp, synthetic construct
  misc_feature 1..20: note = chemically synthesized
  source 1..20: mol_type = other DNA
gcattgttgccctgctcttg

SEQ ID NO: 20924 - DNA, 20 bp, synthetic construct
  misc_feature 1..20: note = chemically synthesized
  source 1..20: mol_type = other DNA
cattgttgccctgctcttga

SEQ ID NO: 20925 - DNA, 20 bp, synthetic construct
  misc_feature 1..20: note = chemically synthesized
  source 1..20: mol_type = other DNA
attgttgccctgctcttgaa

SEQ ID NO: 20926 - DNA, 20 bp, synthetic construct
  misc_feature 1..20: note = chemically synthesized
  source 1..20: mol_type = other DNA
ttgttgccctgctcttgaag

SEQ ID NO: 20927 - DNA, 20 bp, synthetic construct
  misc_feature 1..20: note = chemically synthesized
  source 1..20: mol_type = other DNA
gccctgctcttgaaggggtg

SEQ ID NO: 20928 - DNA, 20 bp, synthetic construct
  misc_feature 1..20: note = chemically synthesized
  source 1..20: mol_type = other DNA
ccctgctcttgaaggggtgc

SEQ ID NO: 20929 - DNA, 20 bp, synthetic construct
  misc_feature 1..20: note = chemically synthesized
  source 1..20: mol_type = other DNA
cctgctcttgaaggggtgcg

SEQ ID NO: 20930 - DNA, 20 bp, synthetic construct
  misc_feature 1..20: note = chemically synthesized
  source 1..20: mol_type = other DNA
ggtgcggggtgtgttgcttt

SEQ ID NO: 20931 - DNA, 20 bp, synthetic construct
  misc_feature 1..20: note = chemically synthesized
  source 1..20: mol_type = other DNA
gcggggtgtgttgctttcag

SEQ ID NO: 20932 - DNA, 20 bp, synthetic construct
  misc_feature 1..20: note = chemically synthesized
  source 1..20: mol_type = other DNA
gggtgtgttgctttcagtgg

SEQ ID NO: 20933 - DNA, 20 bp, synthetic construct
  misc_feature 1..20: note = chemically synthesized
  source 1..20: mol_type = other DNA
tgtgttgctttcagtggcag

SEQ ID NO: 20934 - DNA, 20 bp, synthetic construct
  misc_feature 1..20: note = chemically synthesized
  source 1..20: mol_type = other DNA
tcagtggcagcagctataaa

SEQ ID NO: 20935 - DNA, 20 bp, synthetic construct
  misc_feature 1..20: note = chemically synthesized
  source 1..20: mol_type = other DNA
cagtggcagcagctataaat

SEQ ID NO: 20936 - DNA, 20 bp, synthetic construct
  misc_feature 1..20: note = chemically synthesized
  source 1..20: mol_type = other DNA
agcagctataaatgggttgc

SEQ ID NO: 20937 - DNA, 20 bp, synthetic construct
  misc_feature 1..20: note = chemically synthesized
  source 1..20: mol_type = other DNA
agctataaatgggttgctgg

SEQ ID NO: 20938 - DNA, 20 bp, synthetic construct
  misc_feature 1..20: note = chemically synthesized
  source 1..20: mol_type = other DNA
gctataaatgggttgctggt

SEQ ID NO: 20939 - DNA, 20 bp, synthetic construct
  misc_feature 1..20: note = chemically synthesized
  source 1..20: mol_type = other DNA
ttgctggtgggcatgtgttt

SEQ ID NO: 20940 - DNA, 20 bp, synthetic construct
  misc_feature 1..20: note = chemically synthesized
  source 1..20: mol_type = other DNA
gtgggcatgtgtttcagccc

SEQ ID NO: 20941 - DNA, 20 bp, synthetic construct
  misc_feature 1..20: note = chemically synthesized
  source 1..20: mol_type = other DNA
gcatgtgtttcagccccaga

SEQ ID NO: 20942 - DNA, 20 bp, synthetic construct
  misc_feature 1..20: note = chemically synthesized
  source 1..20: mol_type = other DNA
tgtgtttcagccccagatgg

SEQ ID NO: 20943 - DNA, 20 bp, synthetic construct
  misc_feature 1..20: note = chemically synthesized
  source 1..20: mol_type = other DNA
cagccccagatggtggctgc

SEQ ID NO: 20944 - DNA, 20 bp, synthetic construct
  misc_feature 1..20: note = chemically synthesized
  source 1..20: mol_type = other DNA
ccccagatggtggctgcaag

SEQ ID NO: 20945 - DNA, 20 bp, synthetic construct
  misc_feature 1..20: note = chemically synthesized
  source 1..20: mol_type = other DNA
cccagatggtggctgcaagt

SEQ ID NO: 20946 - DNA, 20 bp, synthetic construct
  misc_feature 1..20: note = chemically synthesized
  source 1..20: mol_type = other DNA
ccagatggtggctgcaagtg

SEQ ID NO: 20947 - DNA, 20 bp, synthetic construct
  misc_feature 1..20: note = chemically synthesized
  source 1..20: mol_type = other DNA
gatggtggctgcaagtgggg

SEQ ID NO: 20948 - DNA, 20 bp, synthetic construct
  misc_feature 1..20: note = chemically synthesized
  source 1..20: mol_type = other DNA
caagtggggtagcattttct

SEQ ID NO: 20949 - DNA, 20 bp, synthetic construct
  misc_feature 1..20: note = chemically synthesized
  source 1..20: mol_type = other DNA
aagtggggtagcattttctt

SEQ ID NO: 20950 - DNA, 20 bp, synthetic construct
  misc_feature 1..20: note = chemically synthesized
  source 1..20: mol_type = other DNA
agtggggtagcattttctta

SEQ ID NO: 20951 - DNA, 20 bp, synthetic construct
  misc_feature 1..20: note = chemically synthesized
  source 1..20: mol_type = other DNA
tggggtagcattttcttagg

SEQ ID NO: 20952 - DNA, 20 bp, synthetic construct
  misc_feature 1..20: note = chemically synthesized
  source 1..20: mol_type = other DNA
ttagggagcttataaatgtg

SEQ ID NO: 20953 - DNA, 20 bp, synthetic construct
  misc_feature 1..20: note = chemically synthesized
  source 1..20: mol_type = other DNA
gggagcttataaatgtgtag

SEQ ID NO: 20954 - DNA, 20 bp, synthetic construct
  misc_feature 1..20: note = chemically synthesized
  source 1..20: mol_type = other DNA
atgtgtagcagccctgctac

SEQ ID NO: 20955 - DNA, 20 bp, synthetic construct
  misc_feature 1..20: note = chemically synthesized
  source 1..20: mol_type = other DNA
tgtgtagcagccctgctact

SEQ ID NO: 20956 - DNA, 20 bp, synthetic construct
  misc_feature 1..20: note = chemically synthesized
  source 1..20: mol_type = other DNA
gtgtagcagccctgctactg

SEQ ID NO: 20957 - DNA, 20 bp, synthetic construct
  misc_feature 1..20: note = chemically synthesized
  source 1..20: mol_type = other DNA
tgtagcagccctgctactgg

SEQ ID NO: 20958 - DNA, 20 bp, synthetic construct
  misc_feature 1..20: note = chemically synthesized
  source 1..20: mol_type = other DNA
agcagccctgctactggggg

SEQ ID NO: 20959 - DNA, 20 bp, synthetic construct
  misc_feature 1..20: note = chemically synthesized
  source 1..20: mol_type = other DNA
gcagccctgctactgggggt

SEQ ID NO: 20960 - DNA, 20 bp, synthetic construct
  misc_feature 1..20: note = chemically synthesized
  source 1..20: mol_type = other DNA
cagccctgctactgggggtg

SEQ ID NO: 20961 - DNA, 20 bp, synthetic construct
  misc_feature 1..20: note = chemically synthesized
  source 1..20: mol_type = other DNA
agccctgctactgggggtgg

SEQ ID NO: 20962 - DNA, 20 bp, synthetic construct
  misc_feature 1..20: note = chemically synthesized
  source 1..20: mol_type = other DNA
ccctgctactgggggtgggg

SEQ ID NO: 20963 - DNA, 20 bp, synthetic construct
  misc_feature 1..20: note = chemically synthesized
  source 1..20: mol_type = other DNA
ctaatgacacactttatccc

SEQ ID NO: 20964 - DNA, 20 bp, synthetic construct
  misc_feature 1..20: note = chemically synthesized
  source 1..20: mol_type = other DNA
acacactttatccctggtga

SEQ ID NO: 20965 - DNA, 20 bp, synthetic construct
  misc_feature 1..20: note = chemically synthesized
  source 1..20: mol_type = other DNA
cactttatccctggtgacag

SEQ ID NO: 20966 - DNA, 20 bp, synthetic construct
  misc_feature 1..20: note = chemically synthesized
  source 1..20: mol_type = other DNA
ttatccctggtgacagcagc

SEQ ID NO: 20967 - DNA, 20 bp, synthetic construct
  misc_feature 1..20: note = chemically synthesized
  source 1..20: mol_type = other DNA
tccctggtgacagcagccag

SEQ ID NO: 20968 - DNA, 20 bp, synthetic construct
  misc_feature 1..20: note = chemically synthesized
  source 1..20: mol_type = other DNA
ctggtgacagcagccagcag

SEQ ID NO: 20969 - DNA, 20 bp, synthetic construct
  misc_feature 1..20: note = chemically synthesized
  source 1..20: mol_type = other DNA
cagcagccagcagtagcact

SEQ ID NO: 20970 - DNA, 20 bp, synthetic construct
  misc_feature 1..20: note = chemically synthesized
  source 1..20: mol_type = other DNA
ccagcagtagcactcagctg

SEQ ID NO: 20971 - DNA, 20 bp, synthetic construct
  misc_feature 1..20: note = chemically synthesized
  source 1..20: mol_type = other DNA
cagcagtagcactcagctgt

SEQ ID NO: 20972 - DNA, 20 bp, synthetic construct
  misc_feature 1..20: note = chemically synthesized
  source 1..20: mol_type = other DNA
cagtagcactcagctgtggg

SEQ ID NO: 20973 - DNA, 20 bp, synthetic construct
  misc_feature 1..20: note = chemically synthesized
  source 1..20: mol_type = other DNA
agtagcactcagctgtgggt

SEQ ID NO: 20974 - DNA, 20 bp, synthetic construct
  misc_feature 1..20: note = chemically synthesized
  source 1..20: mol_type = other DNA
gtagcactcagctgtgggtg

SEQ ID NO: 20975 - DNA, 20 bp, synthetic construct
  misc_feature 1..20: note = chemically synthesized
  source 1..20: mol_type = other DNA
tagcactcagctgtgggtgg

SEQ ID NO: 20976 - DNA, 20 bp, synthetic construct
  misc_feature 1..20: note = chemically synthesized
  source 1..20: mol_type = other DNA
cagctgtgggtgggggatgt

SEQ ID NO: 20977 - DNA, 20 bp, synthetic construct
  misc_feature 1..20: note = chemically synthesized
  source 1..20: mol_type = other DNA
ctgtgggtgggggatgtcag

SEQ ID NO: 20978 - DNA, 20 bp, synthetic construct
  misc_feature 1..20: note = chemically synthesized
  source 1..20: mol_type = other DNA
gtgggtgggggatgtcagca

SEQ ID NO: 20979 - DNA, 20 bp, synthetic construct
  misc_feature 1..20: note = chemically synthesized
  source 1..20: mol_type = other DNA
gggggatgtcagcagagctt

SEQ ID NO: 20980 - DNA, 20 bp, synthetic construct
  misc_feature 1..20: note = chemically synthesized
  source 1..20: mol_type = other DNA
ggggatgtcagcagagcttc

SEQ ID NO: 20981 - DNA, 20 bp, synthetic construct
  misc_feature 1..20: note = chemically synthesized
  source 1..20: mol_type = other DNA
gggatgtcagcagagcttca

SEQ ID NO: 20982 - DNA, 20 bp, synthetic construct
  misc_feature 1..20: note = chemically synthesized
  source 1..20: mol_type = other DNA
tcagcagagcttcagggatg

SEQ ID NO: 20983 - DNA, 20 bp, synthetic construct
  misc_feature 1..20: note = chemically synthesized
  source 1..20: mol_type = other DNA
agcagagcttcagggatgta

SEQ ID NO: 20984 - DNA, 20 bp, synthetic construct
  misc_feature 1..20: note = chemically synthesized
  source 1..20: mol_type = other DNA
gcttcagggatgtagagatg

SEQ ID NO: 20985 - DNA, 20 bp, synthetic construct
  misc_feature 1..20: note = chemically synthesized
  source 1..20: mol_type = other DNA
tgtagagatgcagatgatgt

SEQ ID NO: 20986 - DNA, 20 bp, synthetic construct
  misc_feature 1..20: note = chemically synthesized
  source 1..20: mol_type = other DNA
gtagagatgcagatgatgtt

SEQ ID NO: 20987 - DNA, 20 bp, synthetic construct
  misc_feature 1..20: note = chemically synthesized
  source 1..20: mol_type = other DNA
tagagatgcagatgatgttg

SEQ ID NO: 20988 - DNA, 20 bp, synthetic construct
  misc_feature 1..20: note = chemically synthesized
  source 1..20: mol_type = other DNA
tgcagatgatgttggggtct

SEQ ID NO: 20989 - DNA, 20 bp, synthetic construct
  misc_feature 1..20: note = chemically synthesized
  source 1..20: mol_type = other DNA
gcagatgatgttggggtctg

SEQ ID NO: 20990 - DNA, 20 bp, synthetic construct
  misc_feature 1..20: note = chemically synthesized
  source 1..20: mol_type = other DNA
gtctgaggaacgatgtcatc

SEQ ID NO: 20991 - DNA, 20 bp, synthetic construct
  misc_feature 1..20: note = chemically synthesized
  source 1..20: mol_type = other DNA
tgaggaacgatgtcatctgg

SEQ ID NO: 20992 - DNA, 20 bp, synthetic construct
  misc_feature 1..20: note = chemically synthesized
  source 1..20: mol_type = other DNA
gaggaacgatgtcatctggt

SEQ ID NO: 20993 - DNA, 20 bp, synthetic construct
  misc_feature 1..20: note = chemically synthesized
  source 1..20: mol_type = other DNA
cgatgtcatctggtgggtgt

SEQ ID NO: 20994 - DNA, 20 bp, synthetic construct
  misc_feature 1..20: note = chemically synthesized
  source 1..20: mol_type = other DNA
gatgtcatctggtgggtgtt

SEQ ID NO: 20995 - DNA, 20 bp, synthetic construct
  misc_feature 1..20: note = chemically synthesized
  source 1..20: mol_type = other DNA
tgggtgttgggctctcaaaa

SEQ ID NO: 20996 - DNA, 20 bp, synthetic construct
  misc_feature 1..20: note = chemically synthesized
  source 1..20: mol_type = other DNA
caaaatggcaccttgctgct

SEQ ID NO: 20997 - DNA, 20 bp, synthetic construct
  misc_feature 1..20: note = chemically synthesized
  source 1..20: mol_type = other DNA
ggcaccttgctgctcagtaa

SEQ ID NO: 20998 - DNA, 20 bp, synthetic construct
  misc_feature 1..20: note = chemically synthesized
  source 1..20: mol_type = other DNA
gcaccttgctgctcagtaat

SEQ ID NO: 20999 - DNA, 20 bp, synthetic construct
  misc_feature 1..20: note = chemically synthesized
  source 1..20: mol_type = other DNA
caccttgctgctcagtaatg

SEQ ID NO: 21000 - DNA, 20 bp, synthetic construct
  misc_feature 1..20: note = chemically synthesized
  source 1..20: mol_type = other DNA
ttgctgctcagtaatgggga

SEQ ID NO: 21001 - DNA, 20 bp, synthetic construct
  misc_feature 1..20: note = chemically synthesized
  source 1..20: mol_type = other DNA
ctgctcagtaatggggatgg

SEQ ID NO: 21002 - DNA, 20 bp, synthetic construct
  misc_feature 1..20: note = chemically synthesized
  source 1..20: mol_type = other DNA
tgctcagtaatggggatggc

SEQ ID NO: 21003 - DNA, 20 bp, synthetic construct
  misc_feature 1..20: note = chemically synthesized
  source 1..20: mol_type = other DNA
gctcagtaatggggatggca

SEQ ID NO: 21004 - DNA, 20 bp, synthetic construct
  misc_feature 1..20: note = chemically synthesized
  source 1..20: mol_type = other DNA
ctcagtaatggggatggcag

SEQ ID NO: 21005 - DNA, 20 bp, synthetic construct
  misc_feature 1..20: note = chemically synthesized
  source 1..20: mol_type = other DNA
agtaatggggatggcagggg

SEQ ID NO: 21006 - DNA, 20 bp, synthetic construct
  misc_feature 1..20: note = chemically synthesized
  source 1..20: mol_type = other DNA
gtaatggggatggcaggggt

SEQ ID NO: 21007 - DNA, 20 bp, synthetic construct
  misc_feature 1..20: note = chemically synthesized
  source 1..20: mol_type = other DNA
gggatggcaggggtgggacc

SEQ ID NO: 21008 - DNA, 20 bp, synthetic construct
  misc_feature 1..20: note = chemically synthesized
  source 1..20: mol_type = other DNA
tggcaggggtgggacccagt

SEQ ID NO: 21009 - DNA, 20 bp, synthetic construct
  misc_feature 1..20: note = chemically synthesized
  source 1..20: mol_type = other DNA
gcaggggtgggacccagtga

SEQ ID NO: 21010 - DNA, 20 bp, synthetic construct
  misc_feature 1..20: note = chemically synthesized
  source 1..20: mol_type = other DNA
cccagtgagagctccttctc

SEQ ID NO: 21011 - DNA, 20 bp, synthetic construct
  misc_feature 1..20: note = chemically synthesized
  source 1..20: mol_type = other DNA
cagtgagagctccttctctg

SEQ ID NO: 21012 - DNA, 20 bp, synthetic construct
  misc_feature 1..20: note = chemically synthesized
  source 1..20: mol_type = other DNA
caatgcctttgtgcgattgc

SEQ ID NO: 21013 - DNA, 20 bp, synthetic construct
  misc_feature 1..20: note = chemically synthesized
  source 1..20: mol_type = other DNA
aatgcctttgtgcgattgct

SEQ ID NO: 21014 - DNA, 20 bp, synthetic construct
  misc_feature 1..20: note = chemically synthesized
  source 1..20: mol_type = other DNA
gcctttgtgcgattgctggg

SEQ ID NO: 21015 - DNA, 20 bp, synthetic construct
  misc_feature 1..20: note = chemically synthesized
  source 1..20: mol_type = other DNA
tgctgggcagttccttatga

SEQ ID NO: 21016 - DNA, 20 bp, synthetic construct
  misc_feature 1..20: note = chemically synthesized
  source 1..20: mol_type = other DNA
cagttccttatgatagtctc

SEQ ID NO: 21017 - DNA, 20 bp, synthetic construct
  misc_feature 1..20: note = chemically synthesized
  source 1..20: mol_type = other DNA
agttccttatgatagtctca

SEQ ID NO: 21018 - DNA, 20 bp, synthetic construct
  misc_feature 1..20: note = chemically synthesized
  source 1..20: mol_type = other DNA
tgatagtctcaaggcctgca

SEQ ID NO: 21019 - DNA, 20 bp, synthetic construct
  misc_feature 1..20: note = chemically synthesized
  source 1..20: mol_type = other DNA
gtctcaaggcctgcatggtc

SEQ ID NO: 21020 - DNA, 20 bp, synthetic construct
  misc_feature 1..20: note = chemically synthesized
  source 1..20: mol_type = other DNA
tctcaaggcctgcatggtca

SEQ ID NO: 21021 - DNA, 20 bp, synthetic construct
  misc_feature 1..20: note = chemically synthesized
  source 1..20: mol_type = other DNA
ctcaaggcctgcatggtcaa

SEQ ID NO: 21022 - DNA, 20 bp, synthetic construct
  misc_feature 1..20: note = chemically synthesized
  source 1..20: mol_type = other DNA
atggtcaagggactctcctg

SEQ ID NO: 21023 - DNA, 20 bp, synthetic construct
  misc_feature 1..20: note = chemically synthesized
  source 1..20: mol_type = other DNA
tcaagggactctcctgtggc

SEQ ID NO: 21024 - DNA, 20 bp, synthetic construct
  misc_feature 1..20: note = chemically synthesized
  source 1..20: mol_type = other DNA
caagggactctcctgtggct

SEQ ID NO: 21025 - DNA, 20 bp, synthetic construct
  misc_feature 1..20: note = chemically synthesized
  source 1..20: mol_type = other DNA
tctcctgtggctaggattcc

SEQ ID NO: 21026 - DNA, 20 bp, synthetic construct
  misc_feature 1..20: note = chemically synthesized
  source 1..20: mol_type = other DNA
tcctgtggctaggattcctg

SEQ ID NO: 21027 - DNA, 20 bp, synthetic construct
  misc_feature 1..20: note = chemically synthesized
  source 1..20: mol_type = other DNA
gattcctggagtccataatg

SEQ ID NO: 21028 - DNA, 20 bp, synthetic construct
  misc_feature 1..20: note = chemically synthesized
  source 1..20: mol_type = other DNA
tggagtccataatgcagatg

SEQ ID NO: 21029 - DNA, 20 bp, synthetic construct
  misc_feature 1..20: note = chemically synthesized
  source 1..20: mol_type = other DNA
ataatgcagatgtggaccac

SEQ ID NO: 21030 - DNA, 20 bp, synthetic construct
  misc_feature 1..20: note = chemically synthesized
  source 1..20: mol_type = other DNA
taatgcagatgtggaccact

SEQ ID NO: 21031 - DNA, 20 bp, synthetic construct
  misc_feature 1..20: note = chemically synthesized
  source 1..20: mol_type = other DNA
atgcagatgtggaccactgg

SEQ ID NO: 21032 - DNA, 20 bp, synthetic construct
  misc_feature 1..20: note = chemically synthesized
  source 1..20: mol_type = other DNA
agatgtggaccactgggagt

SEQ ID NO: 21033 - DNA, 20 bp, synthetic construct
  misc_feature 1..20: note = chemically synthesized
  source 1..20: mol_type = other DNA
tcacttaactttcgatgcac

SEQ ID NO: 21034 - DNA, 20 bp, synthetic construct
  misc_feature 1..20: note = chemically synthesized
  source 1..20: mol_type = other DNA
cacttaactttcgatgcact

SEQ ID NO: 21035 - DNA, 20 bp, synthetic construct
  misc_feature 1..20: note = chemically synthesized
  source 1..20: mol_type = other DNA
acttaactttcgatgcactg

SEQ ID NO: 21036 - DNA, 20 bp, synthetic construct
  misc_feature 1..20: note = chemically synthesized
  source 1..20: mol_type = other DNA
ttaactttcgatgcactggg

SEQ ID NO: 21037 - DNA, 20 bp, synthetic construct
  misc_feature 1..20: note = chemically synthesized
  source 1..20: mol_type = other DNA
gatgcactggggagcctctc

SEQ ID NO: 21038 - DNA, 20 bp, synthetic construct
  misc_feature 1..20: note = chemically synthesized
  source 1..20: mol_type = other DNA
ggggagcctctctggcctca

SEQ ID NO: 21039 - DNA, 20 bp, synthetic construct
  misc_feature 1..20: note = chemically synthesized
  source 1..20: mol_type = other DNA
ggagcctctctggcctcaca

SEQ ID NO: 21040 - DNA, 20 bp, synthetic construct
  misc_feature 1..20: note = chemically synthesized
  source 1..20: mol_type = other DNA
gagcctctctggcctcacag

SEQ ID NO: 21041 - DNA, 20 bp, synthetic construct
  misc_feature 1..20: note = chemically synthesized
  source 1..20: mol_type = other DNA
gcctcacagaggatccctac

SEQ ID NO: 21042 - DNA, 20 bp, synthetic construct
  misc_feature 1..20: note = chemically synthesized
  source 1..20: mol_type = other DNA
cctcacagaggatccctact

SEQ ID NO: 21043 - DNA, 20 bp, synthetic construct
  misc_feature 1..20: note = chemically synthesized
  source 1..20: mol_type = other DNA
cacagaggatccctactggg

SEQ ID NO: 21044 - DNA, 20 bp, synthetic construct
  misc_feature 1..20: note = chemically synthesized
  source 1..20: mol_type = other DNA
acagaggatccctactgggt

SEQ ID NO: 21045 - DNA, 20 bp, synthetic construct
  misc_feature 1..20: note = chemically synthesized
  source 1..20: mol_type = other DNA
ttccctccccttcattgcct

SEQ ID NO: 21046 - DNA, 20 bp, synthetic construct
  misc_feature 1..20: note = chemically synthesized
  source 1..20: mol_type = other DNA
gtcacttctctgttgaattc

SEQ ID NO: 21047 - DNA, 20 bp, synthetic construct
  misc_feature 1..20: note = chemically synthesized
  source 1..20: mol_type = other DNA
ttccagaattctctcttatg

SEQ ID NO: 21048 - DNA, 20 bp, synthetic construct
  misc_feature 1..20: note = chemically synthesized
  source 1..20: mol_type = other DNA
tccagaattctctcttatgt

SEQ ID NO: 21049 - DNA, 20 bp, synthetic construct
  misc_feature 1..20: note = chemically synthesized
  source 1..20: mol_type = other DNA
ggattttctacttactattt

SEQ ID NO: 21050 - DNA, 20 bp, synthetic construct
  misc_feature 1..20: note = chemically synthesized
  source 1..20: mol_type = other DNA
cttactattttggttctttg

SEQ ID NO: 21051 - DNA, 20 bp, synthetic construct
  misc_feature 1..20: note = chemically synthesized
  source 1..20: mol_type = other DNA
tactattttggttctttgtg

SEQ ID NO: 21052 - DNA, 20 bp, synthetic construct
  misc_feature 1..20: note = chemically synthesized
  source 1..20: mol_type = other DNA
actattttggttctttgtgg

SEQ ID NO: 21053 - DNA, 20 bp, synthetic construct
  misc_feature 1..20: note = chemically synthesized
  source 1..20: mol_type = other DNA
tattttggttctttgtggag

SEQ ID NO: 21054 - DNA, 20 bp, synthetic construct
  misc_feature 1..20: note = chemically synthesized
  source 1..20: mol_type = other DNA
attttggttctttgtggagg

SEQ ID NO: 21055 - DNA, 20 bp, synthetic construct
  misc_feature 1..20: note = chemically synthesized
  source 1..20: mol_type = other DNA
tggttctttgtggaggaggt

SEQ ID NO: 21056 - DNA, 20 bp, synthetic construct
  misc_feature 1..20: note = chemically synthesized
  source 1..20: mol_type = other DNA
tttgtggaggaggtgagtgt

SEQ ID NO: 21057 - DNA, 20 bp, synthetic construct
  misc_feature 1..20: note = chemically synthesized
  source 1..20: mol_type = other DNA
aggtgagtgtcagctgccct

SEQ ID NO: 21058 - DNA, 20 bp, synthetic construct
  misc_feature 1..20: note = chemically synthesized
  source 1..20: mol_type = other DNA
gagtgtcagctgcccttagt

SEQ ID NO: 21059 - DNA, 20 bp, synthetic construct
  misc_feature 1..20: note = chemically synthesized
  source 1..20: mol_type = other DNA
gcccttagtcagtaatcttc

SEQ ID NO: 21060 - DNA, 20 bp, synthetic construct
  misc_feature 1..20: note = chemically synthesized
  source 1..20: mol_type = other DNA
cccttcccttgaaatttttt

SEQ ID NO: 21061 - DNA, 20 bp, synthetic construct
  misc_feature 1..20: note = chemically synthesized
  source 1..20: mol_type = other DNA
ctttatgtttttatttctaa

SEQ ID NO: 21062 - DNA, 20 bp, synthetic construct
  misc_feature 1..20: note = chemically synthesized
  source 1..20: mol_type = other DNA
ttttatttctaatagactga

SEQ ID NO: 21063 - DNA, 20 bp, synthetic construct
  misc_feature 1..20: note = chemically synthesized
  source 1..20: mol_type = other DNA
ttatttctaatagactgaaa

SEQ ID NO: 21064 - DNA, 20 bp, synthetic construct
  misc_feature 1..20: note = chemically synthesized
  source 1..20: mol_type = other DNA
aatcatattttaaacactct

SEQ ID NO: 21065 - DNA, 20 bp, synthetic construct
  misc_feature 1..20: note = chemically synthesized
  source 1..20: mol_type = other DNA
atcatattttaaacactcta

SEQ ID NO: 21066 - DNA, 20 bp, synthetic construct
  misc_feature 1..20: note = chemically synthesized
  source 1..20: mol_type = other DNA
ttaaacactctaaggctata

SEQ ID NO: 21067 - DNA, 20 bp, synthetic construct
  misc_feature 1..20: note = chemically synthesized
  source 1..20: mol_type = other DNA
taaacactctaaggctatat

SEQ ID NO: 21068 - DNA, 20 bp, synthetic construct
  misc_feature 1..20: note = chemically synthesized
  source 1..20: mol_type = other DNA
aaacactctaaggctatatg

SEQ ID NO: 21069 - DNA, 20 bp, synthetic construct
  misc_feature 1..20: note = chemically synthesized
  source 1..20: mol_type = other DNA
aacactctaaggctatatgg

SEQ ID NO: 21070 - DNA, 20 bp, synthetic construct
  misc_feature 1..20: note = chemically synthesized
  source 1..20: mol_type = other DNA
gctatatgggggactatctg

SEQ ID NO: 21071 - DNA, 20 bp, synthetic construct
  misc_feature 1..20: note = chemically synthesized
  source 1..20: mol_type = other DNA
ctatatgggggactatctga

SEQ ID NO: 21072 - DNA, 20 bp, synthetic construct
  misc_feature 1..20: note = chemically synthesized
  source 1..20: mol_type = other DNA
gggggactatctgaaggcct

SEQ ID NO: 21073 - DNA, 20 bp, synthetic construct
  misc_feature 1..20: note = chemically synthesized
  source 1..20: mol_type = other DNA
actatctgaaggcctcagat

SEQ ID NO: 21074 - DNA, 20 bp, synthetic construct
  misc_feature 1..20: note = chemically synthesized
  source 1..20: mol_type = other DNA
tgaaggcctcagatgagtaa

SEQ ID NO: 21075 - DNA, 20 bp, synthetic construct
  misc_feature 1..20: note = chemically synthesized
  source 1..20: mol_type = other DNA
aggcctcagatgagtaaaag

SEQ ID NO: 21076 - DNA, 20 bp, synthetic construct
  misc_feature 1..20: note = chemically synthesized
  source 1..20: mol_type = other DNA
cctcagatgagtaaaagaag

SEQ ID NO: 21077 - DNA, 20 bp, synthetic construct
  misc_feature 1..20: note = chemically synthesized
  source 1..20: mol_type = other DNA
gagtaaaagaagtagcgaat

SEQ ID NO: 21078 - DNA, 20 bp, synthetic construct
  misc_feature 1..20: note = chemically synthesized
  source 1..20: mol_type = other DNA
atcatttgtttcttcaaata

SEQ ID NO: 21079 - DNA, 20 bp, synthetic construct
  misc_feature 1..20: note = chemically synthesized
  source 1..20: mol_type = other DNA
tatttcccccttatgttctt

SEQ ID NO: 21080 - DNA, 20 bp, synthetic construct
  misc_feature 1..20: note = chemically synthesized
  source 1..20: mol_type = other DNA
aaaaatgtttgcatctacca

SEQ ID NO: 21081 - DNA, 20 bp, synthetic construct
  misc_feature 1..20: note = chemically synthesized
  source 1..20: mol_type = other DNA
aaatacgtaatctaacaaac

SEQ ID NO: 21082 - DNA, 20 bp, synthetic construct
  misc_feature 1..20: note = chemically synthesized
  source 1..20: mol_type = other DNA
aatacgtaatctaacaaaca

SEQ ID NO: 21083 - DNA, 20 bp, synthetic construct
  misc_feature 1..20: note = chemically synthesized
  source 1..20: mol_type = other DNA
ctaacaaacaaggatgtttt

SEQ ID NO: 21084 - DNA, 20 bp, synthetic construct
  misc_feature 1..20: note = chemically synthesized
  source 1..20: mol_type = other DNA
aaggatgttttaagatctct

SEQ ID NO: 21085 - DNA, 20 bp, synthetic construct
  misc_feature 1..20: note = chemically synthesized
  source 1..20: mol_type = other DNA
atgttttaagatctctgagt

SEQ ID NO: 21086 - DNA, 20 bp, synthetic construct
  misc_feature 1..20: note = chemically synthesized
  source 1..20: mol_type = other DNA
agatctctgagtaagatgca

SEQ ID NO: 21087 - DNA, 20 bp, synthetic construct
  misc_feature 1..20: note = chemically synthesized
  source 1..20: mol_type = other DNA
agatgcatagttgcaaataa

SEQ ID NO: 21088 - DNA, 20 bp, synthetic construct
  misc_feature 1..20: note = chemically synthesized
  source 1..20: mol_type = other DNA
gatgcatagttgcaaataaa

SEQ ID NO: 21089 - DNA, 20 bp, synthetic construct
  misc_feature 1..20: note = chemically synthesized
  source 1..20: mol_type = other DNA
tgcatagttgcaaataaaag

SEQ ID NO: 21090 - DNA, 20 bp, synthetic construct
  misc_feature 1..20: note = chemically synthesized
  source 1..20: mol_type = other DNA
tgcaaataaaaggagttttc

SEQ ID NO: 21091 - DNA, 20 bp, synthetic construct
  misc_feature 1..20: note = chemically synthesized
  source 1..20: mol_type = other DNA
gcaaataaaaggagttttca

SEQ ID NO: 21092 - DNA, 20 bp, synthetic construct
  misc_feature 1..20: note = chemically synthesized
  source 1..20: mol_type = other DNA
atctaataaatgtgtaccat

SEQ ID NO: 21093 - DNA, 20 bp, synthetic construct
  misc_feature 1..20: note = chemically synthesized
  source 1..20: mol_type = other DNA
tgtgtaccatcagaaactta

SEQ ID NO: 21094 - DNA, 20 bp, synthetic construct
  misc_feature 1..20: note = chemically synthesized
  source 1..20: mol_type = other DNA
aaacttatggtatattctcc

SEQ ID NO: 21095 - DNA, 20 bp, synthetic construct
  misc_feature 1..20: note = chemically synthesized
  source 1..20: mol_type = other DNA
tatggtatattctcctggaa

SEQ ID NO: 21096 - DNA, 20 bp, synthetic construct
  misc_feature 1..20: note = chemically synthesized
  source 1..20: mol_type = other DNA
atattctcctggaaaagatg

SEQ ID NO: 21097 - DNA, 20 bp, synthetic construct
  misc_feature 1..20: note = chemically synthesized
  source 1..20: mol_type = other DNA
tcctggaaaagatgaagatg

SEQ ID NO: 21098 - DNA, 20 bp, synthetic construct
  misc_feature 1..20: note = chemically synthesized
  source 1..20: mol_type = other DNA
aagatgaagatgaagaaaat

SEQ ID NO: 21099 - DNA, 20 bp, synthetic construct
  misc_feature 1..20: note = chemically synthesized
  source 1..20: mol_type = other DNA
agatgaagaaaataagtcta

SEQ ID NO: 21100 - DNA, 20 bp, synthetic construct
  misc_feature 1..20: note = chemically synthesized
  source 1..20: mol_type = other DNA
tgaagaaaataagtctacag

SEQ ID NO: 21101 - DNA, 20 bp, synthetic construct
  misc_feature 1..20: note = chemically synthesized
  source 1..20: mol_type = other DNA
aagaaaataagtctacagaa

SEQ ID NO: 21102 - DNA, 20 bp, synthetic construct
  misc_feature 1..20: note = chemically synthesized
  source 1..20: mol_type = other DNA
agaaaataagtctacagaag

SEQ ID NO: 21103 - DNA, 20 bp, synthetic construct
  misc_feature 1..20: note = chemically synthesized
  source 1..20: mol_type = other DNA
aaaataagtctacagaagag

SEQ ID NO: 21104 - DNA, 20 bp, synthetic construct
  misc_feature 1..20: note = chemically synthesized
  source 1..20: mol_type = other DNA
acagaagaggagaaattctt

SEQ ID NO: 21105 - DNA, 20 bp, synthetic construct
  misc_feature 1..20: note = chemically synthesized
  source 1..20: mol_type = other DNA
ttggaaattttgcatttttg

SEQ ID NO: 21106 - DNA, 20 bp, synthetic construct
  misc_feature 1..20: note = chemically synthesized
  source 1..20: mol_type = other DNA
aaattttgcatttttgtgga

SEQ ID NO: 21107 - DNA, 20 bp, synthetic construct
  misc_feature 1..20: note = chemically synthesized
  source 1..20: mol_type = other DNA
ttttgcatttttgtggatag

SEQ ID NO: 21108 - DNA, 20 bp, synthetic construct
  misc_feature 1..20: note = chemically synthesized
  source 1..20: mol_type = other DNA
ttttgtggatagtggttttg

SEQ ID NO: 21109 - DNA, 20 bp, synthetic construct
  misc_feature 1..20: note = chemically synthesized
  source 1..20: mol_type = other DNA
gtggatagtggttttgaaga

SEQ ID NO: 21110 - DNA, 20 bp, synthetic construct
  misc_feature 1..20: note = chemically synthesized
  source 1..20: mol_type = other DNA
tagtggttttgaagaaagct

SEQ ID NO: 21111 - DNA, 20 bp, synthetic construct
  misc_feature 1..20: note = chemically synthesized
  source 1..20: mol_type = other DNA
atatatttaaatatgttgct

SEQ ID NO: 21112 - DNA, 20 bp, synthetic construct
  misc_feature 1..20: note = chemically synthesized
  source 1..20: mol_type = other DNA
gatgtgactcccacacttta

SEQ ID NO: 21113 - DNA, 20 bp, synthetic construct
  misc_feature 1..20: note = chemically synthesized
  source 1..20: mol_type = other DNA
gactcccacactttaaagaa

SEQ ID NO: 21114 - DNA, 20 bp, synthetic construct
  misc_feature 1..20: note = chemically synthesized
  source 1..20: mol_type = other DNA
taaagaaaagttcttcattt

SEQ ID NO: 21115 - DNA, 20 bp, synthetic construct
  misc_feature 1..20: note = chemically synthesized
  source 1..20: mol_type = other DNA
ttttagttgcccttgcaaat

SEQ ID NO: 21116 - DNA, 20 bp, synthetic construct
  misc_feature 1..20: note = chemically synthesized
  source 1..20: mol_type = other DNA
gttgcccttgcaaattggct

SEQ ID NO: 21117 - DNA, 20 bp, synthetic construct
  misc_feature 1..20: note = chemically synthesized
  source 1..20: mol_type = other DNA
tcctcaacaaataattttga

SEQ ID NO: 21118 - DNA, 20 bp, synthetic construct
  misc_feature 1..20: note = chemically synthesized
  source 1..20: mol_type = other DNA
tgatggtttctaaaattgtc

SEQ ID NO: 21119 - DNA, 20 bp, synthetic construct
  misc_feature 1..20: note = chemically synthesized
  source 1..20: mol_type = other DNA
tctaaaattgtccagaattt

SEQ ID NO: 21120 - DNA, 20 bp, synthetic construct
  misc_feature 1..20: note = chemically synthesized
  source 1..20: mol_type = other DNA
ctaaaattgtccagaatttg

SEQ ID NO: 21121 - DNA, 20 bp, synthetic construct
  misc_feature 1..20: note = chemically synthesized
  source 1..20: mol_type = other DNA
ccagaatttgaggaaatact

SEQ ID NO: 21122 - DNA, 20 bp, synthetic construct
  misc_feature 1..20: note = chemically synthesized
  source 1..20: mol_type = other DNA
tttgaggaaatacttagatg

SEQ ID NO: 21123 - DNA, 20 bp, synthetic construct
  misc_feature 1..20: note = chemically synthesized
  source 1..20: mol_type = other DNA
gaggaaatacttagatgtag

SEQ ID NO: 21124 - DNA, 20 bp, synthetic construct
  misc_feature 1..20: note = chemically synthesized
  source 1..20: mol_type = other DNA
gacatcaatttatgttaact

SEQ ID NO: 21125 - DNA, 20 bp, synthetic construct
  misc_feature 1..20: note = chemically synthesized
  source 1..20: mol_type = other DNA
tgttaacttagatttattgt

SEQ ID NO: 21126 - DNA, 20 bp, synthetic construct
  misc_feature 1..20: note = chemically synthesized
  source 1..20: mol_type = other DNA
aacttagatttattgttgga

SEQ ID NO: 21127 - DNA, 20 bp, synthetic construct
  misc_feature 1..20: note = chemically synthesized
  source 1..20: mol_type = other DNA
agatttattgttggatggtt

SEQ ID NO: 21128 - DNA, 20 bp, synthetic construct
  misc_feature 1..20: note = chemically synthesized
  source 1..20: mol_type = other DNA
taatcatgtctgttcttgtc

SEQ ID NO: 21129 - DNA, 20 bp, synthetic construct
  misc_feature 1..20: note = chemically synthesized
  source 1..20: mol_type = other DNA
atgtctgttcttgtccagtc

SEQ ID NO: 21130 - DNA, 20 bp, synthetic construct
  misc_feature 1..20: note = chemically synthesized
  source 1..20: mol_type = other DNA
tctgttcttgtccagtctag

SEQ ID NO: 21131 - DNA, 20 bp, synthetic construct
  misc_feature 1..20: note = chemically synthesized
  source 1..20: mol_type = other DNA
acatctgaactgtgatttga

SEQ ID NO: 21132 - DNA, 20 bp, synthetic construct
  misc_feature 1..20: note = chemically synthesized
  source 1..20: mol_type = other DNA
tttgacagtgtccttattat

SEQ ID NO: 21133 - DNA, 20 bp, synthetic construct
  misc_feature 1..20: note = chemically synthesized
  source 1..20: mol_type = other DNA
tatcagactctgctcaatga

SEQ ID NO: 21134 - DNA, 20 bp, synthetic construct
  misc_feature 1..20: note = chemically synthesized
  source 1..20: mol_type = other DNA
gtttaaacttctttttgata

SEQ ID NO: 21135 - DNA, 20 bp, synthetic construct
  misc_feature 1..20: note = chemically synthesized
  source 1..20: mol_type = other DNA
cagtaaaaaacttttcctta

SEQ ID NO: 21136 - DNA, 20 bp, synthetic construct
  misc_feature 1..20: note = chemically synthesized
  source 1..20: mol_type = other DNA
tccttaaagatgaaattctt

SEQ ID NO: 21137 - DNA, 20 bp, synthetic construct
  misc_feature 1..20: note = chemically synthesized
  source 1..20: mol_type = other DNA
ccttaaagatgaaattctta

SEQ ID NO: 21138 - DNA, 20 bp, synthetic construct
  misc_feature 1..20: note = chemically synthesized
  source 1..20: mol_type = other DNA
atgaaattcttaaggacaat

SEQ ID NO: 21139 - DNA, 20 bp, synthetic construct
  misc_feature 1..20: note = chemically synthesized
  source 1..20: mol_type = other DNA
ttaaggacaattagcttgtg

SEQ ID NO: 21140 - DNA, 20 bp, synthetic construct
  misc_feature 1..20: note = chemically synthesized
  source 1..20: mol_type = other DNA
tatgaaaattgcttgcattt

SEQ ID NO: 21141 - DNA, 20 bp, synthetic construct
  misc_feature 1..20: note = chemically synthesized
  source 1..20: mol_type = other DNA
tgaaaattgcttgcattttg

SEQ ID NO: 21142 - DNA, 20 bp, synthetic construct
  misc_feature 1..20: note = chemically synthesized
  source 1..20: mol_type = other DNA
cttgcattttggagttacat

SEQ ID NO: 21143 - DNA, 20 bp, synthetic construct
  misc_feature 1..20: note = chemically synthesized
  source 1..20: mol_type = other DNA
tataaattaatgaatcctat

SEQ ID NO: 21144 - DNA, 20 bp, synthetic construct
  misc_feature 1..20: note = chemically synthesized
  source 1..20: mol_type = other DNA
atcctattggtaccatataa

SEQ ID NO: 21145 - DNA, 20 bp, synthetic construct
  misc_feature 1..20: note = chemically synthesized
  source 1..20: mol_type = other DNA
cttttgtgtctcgcctttca

SEQ ID NO: 21146 - DNA, 20 bp, synthetic construct
  misc_feature 1..20: note = chemically synthesized
  source 1..20: mol_type = other DNA
ttttgtgtctcgcctttcaa

SEQ ID NO: 21147 - DNA, 20 bp, synthetic construct
  misc_feature 1..20: note = chemically synthesized
  source 1..20: mol_type = other DNA
tttgtgtctcgcctttcaaa

SEQ ID NO: 21148 - DNA, 20 bp, synthetic construct
  misc_feature 1..20: note = chemically synthesized
  source 1..20: mol_type = other DNA
tcaaagggcaattttccaaa

SEQ ID NO: 21149 - DNA, 20 bp, synthetic construct
  misc_feature 1..20: note = chemically synthesized
  source 1..20: mol_type = other DNA
tccaaaaagtatattttgca

SEQ ID NO: 21150 - DNA, 20 bp, synthetic construct
  misc_feature 1..20: note = chemically synthesized
  source 1..20: mol_type = other DNA
aaagtatattttgcatggct

SEQ ID NO: 21151 - DNA, 20 bp, synthetic construct
  misc_feature 1..20: note = chemically synthesized
  source 1..20: mol_type = other DNA
aagtatattttgcatggctc

SEQ ID NO: 21152 - DNA, 20 bp, synthetic construct
  misc_feature 1..20: note = chemically synthesized
  source 1..20: mol_type = other DNA
ttttgcatggctcaggctaa

SEQ ID NO: 21153 - DNA, 20 bp, synthetic construct
  misc_feature 1..20: note = chemically synthesized
  source 1..20: mol_type = other DNA
caggctaaaagtaatgtctc

SEQ ID NO: 21154 - DNA, 20 bp, synthetic construct
  misc_feature 1..20: note = chemically synthesized
  source 1..20: mol_type = other DNA
aaaagtaatgtctccagatg

SEQ ID NO: 21155 - DNA, 20 bp, synthetic construct
  misc_feature 1..20: note = chemically synthesized
  source 1..20: mol_type = other DNA
cattgattgtgactattgat

SEQ ID NO: 21156 - DNA, 20 bp, synthetic construct
  misc_feature 1..20: note = chemically synthesized
  source 1..20: mol_type = other DNA
ttgataagatttactatgta

SEQ ID NO: 21157 - DNA, 20 bp, synthetic construct
  misc_feature 1..20: note = chemically synthesized
  source 1..20: mol_type = other DNA
agatttactatgtaaagtat

SEQ ID NO: 21158 - DNA, 20 bp, synthetic construct
  misc_feature 1..20: note = chemically synthesized
  source 1..20: mol_type = other DNA
ctatgtaaagtataagttac

SEQ ID NO: 21159 - DNA, 20 bp, synthetic construct
  misc_feature 1..20: note = chemically synthesized
  source 1..20: mol_type = other DNA
gttactggaataatacattt

SEQ ID NO: 21160 - DNA, 20 bp, synthetic construct
  misc_feature 1..20: note = chemically synthesized
  source 1..20: mol_type = other DNA
aataatacatttaagaaata

SEQ ID NO: 21161 - DNA, 20 bp, synthetic construct
  misc_feature 1..20: note = chemically synthesized
  source 1..20: mol_type = other DNA
aatacatttaagaaatatag

SEQ ID NO: 21162 - DNA, 20 bp, synthetic construct
  misc_feature 1..20: note = chemically synthesized
  source 1..20: mol_type = other DNA
atagtagctattaaaacctg

SEQ ID NO: 21163 - DNA, 20 bp, synthetic construct
  misc_feature 1..20: note = chemically synthesized
  source 1..20: mol_type = other DNA
aaacctgtagtctgatgaaa

SEQ ID NO: 21164 - DNA, 20 bp, synthetic construct
  misc_feature 1..20: note = chemically synthesized
  source 1..20: mol_type = other DNA
tgaaatggaatatgttttga

SEQ ID NO: 21165 - DNA, 20 bp, synthetic construct
  misc_feature 1..20: note = chemically synthesized
  source 1..20: mol_type = other DNA
atggaatatgttttgaaaga

SEQ ID NO: 21166 - DNA, 20 bp, synthetic construct
  misc_feature 1..20: note = chemically synthesized
  source 1..20: mol_type = other DNA
gaatatgttttgaaagacag

SEQ ID NO: 21167 - DNA, 20 bp, synthetic construct
  misc_feature 1..20: note = chemically synthesized
  source 1..20: mol_type = other DNA
gaaagacagcagtgaaaaat

SEQ ID NO: 21168 - DNA, 20 bp, synthetic construct
  misc_feature 1..20: note = chemically synthesized
  source 1..20: mol_type = other DNA
agacagcagtgaaaaatgag

SEQ ID NO: 21169 - DNA, 20 bp, synthetic construct
  misc_feature 1..20: note = chemically synthesized
  source 1..20: mol_type = other DNA
aaaaatgagaagtaatatat

SEQ ID NO: 21170 - DNA, 20 bp, synthetic construct
  misc_feature 1..20: note = chemically synthesized
  source 1..20: mol_type = other DNA
taaaattgctttttgcaatt

SEQ ID NO: 21171 - DNA, 20 bp, synthetic construct
  misc_feature 1..20: note = chemically synthesized
  source 1..20: mol_type = other DNA
tgctttttgcaattgagttg

SEQ ID NO: 21172 - DNA, 20 bp, synthetic construct
  misc_feature 1..20: note = chemically synthesized
  source 1..20: mol_type = other DNA
attgagttgaagattgatgc

SEQ ID NO: 21173 - DNA, 20 bp, synthetic construct
  misc_feature 1..20: note = chemically synthesized
  source 1..20: mol_type = other DNA
ttgagttgaagattgatgcc

SEQ ID NO: 21174 - DNA, 20 bp, synthetic construct
  misc_feature 1..20: note = chemically synthesized
  source 1..20: mol_type = other DNA
tgccaggatcttattacctc

SEQ ID NO: 21175 - DNA, 20 bp, synthetic construct
  misc_feature 1..20: note = chemically synthesized
  source 1..20: mol_type = other DNA
gccaggatcttattacctcc

SEQ ID NO: 21176 - DNA, 20 bp, synthetic construct
  misc_feature 1..20: note = chemically synthesized
  source 1..20: mol_type = other DNA
attacctccaggatttcaca

SEQ ID NO: 21177 - DNA, 20 bp, synthetic construct
  misc_feature 1..20: note = chemically synthesized
  source 1..20: mol_type = other DNA
ttacctccaggatttcacaa

SEQ ID NO: 21178 - DNA, 20 bp, synthetic construct
  misc_feature 1..20: note = chemically synthesized
  source 1..20: mol_type = other DNA
gatttcacaaaggatttctt

SEQ ID NO: 21179 - DNA, 20 bp, synthetic construct
  misc_feature 1..20: note = chemically synthesized
  source 1..20: mol_type = other DNA
cttgagtcatccccttgctc

SEQ ID NO: 21180 - DNA, 20 bp, synthetic construct
  misc_feature 1..20: note = chemically synthesized
  source 1..20: mol_type = other DNA
cttgctctagctcatgaaca

SEQ ID NO: 21181 - DNA, 20 bp, synthetic construct
  misc_feature 1..20: note = chemically synthesized
  source 1..20: mol_type = other DNA
tcatgaacaaagtattgctc

SEQ ID NO: 21182 - DNA, 20 bp, synthetic construct
  misc_feature 1..20: note = chemically synthesized
  source 1..20: mol_type = other DNA
agtattgctcaagtaatcga

SEQ ID NO: 21183 - DNA, 20 bp, synthetic construct
  misc_feature 1..20: note = chemically synthesized
  source 1..20: mol_type = other DNA
tctcacatgtgattattatt

SEQ ID NO: 21184 - DNA, 20 bp, synthetic construct
  misc_feature 1..20: note = chemically synthesized
  source 1..20: mol_type = other DNA
attattatttagtgctgtca

SEQ ID NO: 21185 - DNA, 20 bp, synthetic construct
  misc_feature 1..20: note = chemically synthesized
  source 1..20: mol_type = other DNA
ttattatttagtgctgtcac

SEQ ID NO: 21186 - DNA, 20 bp, synthetic construct
  misc_feature 1..20: note = chemically synthesized
  source 1..20: mol_type = other DNA
tcacgggaaatatcctgcct

SEQ ID NO: 21187 - DNA, 20 bp, synthetic construct
  misc_feature 1..20: note = chemically synthesized
  source 1..20: mol_type = other DNA
aatatcctgcctaagtttac

SEQ ID NO: 21188 - DNA, 20 bp, synthetic construct
  misc_feature 1..20: note = chemically synthesized
  source 1..20: mol_type = other DNA
tatcctgcctaagtttactg

SEQ ID NO: 21189 - DNA, 20 bp, synthetic construct
  misc_feature 1..20: note = chemically synthesized
  source 1..20: mol_type = other DNA
atcctgcctaagtttactgg

SEQ ID NO: 21190 - DNA, 20 bp, synthetic construct
  misc_feature 1..20: note = chemically synthesized
  source 1..20: mol_type = other DNA
cctccctatgtcctcctacc

SEQ ID NO: 21191 - DNA, 20 bp, synthetic construct
  misc_feature 1..20: note = chemically synthesized
  source 1..20: mol_type = other DNA
tttccttgcacactctactc

SEQ ID NO: 21192 - DNA, 20 bp, synthetic construct
  misc_feature 1..20: note = chemically synthesized
  source 1..20: mol_type = other DNA
ttgcacactctactccagct

SEQ ID NO: 21193 - DNA, 20 bp, synthetic construct
  misc_feature 1..20: note = chemically synthesized
  source 1..20: mol_type = other DNA
tgcacactctactccagctt

SEQ ID NO: 21194 - DNA, 20 bp, synthetic construct
  misc_feature 1..20: note = chemically synthesized
  source 1..20: mol_type = other DNA
gcacactctactccagctta

SEQ ID NO: 21195 - DNA, 20 bp, synthetic construct
  misc_feature 1..20: note = chemically synthesized
  source 1..20: mol_type = other DNA
ctctactccagcttagggcc

SEQ ID NO: 21196 - DNA, 20 bp, synthetic construct
  misc_feature 1..20: note = chemically synthesized
  source 1..20: mol_type = other DNA
tctactccagcttagggcct

SEQ ID NO: 21197 - DNA, 20 bp, synthetic construct
  misc_feature 1..20: note = chemically synthesized
  source 1..20: mol_type = other DNA
acccttttaattaccccatt

SEQ ID NO: 21198 - DNA, 20 bp, synthetic construct
  misc_feature 1..20: note = chemically synthesized
  source 1..20: mol_type = other DNA
tcaatttttgccttttcaat

SEQ ID NO: 21199 - DNA, 20 bp, synthetic construct
  misc_feature 1..20: note = chemically synthesized
  source 1..20: mol_type = other DNA
aaaatttatttatatatatt

SEQ ID NO: 21200 - DNA, 20 bp, synthetic construct
  misc_feature 1..20: note = chemically synthesized
  source 1..20: mol_type = other DNA
atttatttatatatatttag

SEQ ID NO: 21201 - DNA, 20 bp, synthetic construct
  misc_feature 1..20: note = chemically synthesized
  source 1..20: mol_type = other DNA
tttatttatatatatttaga

SEQ ID NO: 21202 - DNA, 20 bp, synthetic construct
  misc_feature 1..20: note = chemically synthesized
  source 1..20: mol_type = other DNA
tatatttagaaggtatgtac

SEQ ID NO: 21203 - DNA, 20 bp, synthetic construct
  misc_feature 1..20: note = chemically synthesized
  source 1..20: mol_type = other DNA
tcgttatcatgctgcttata

SEQ ID NO: 21204 - DNA, 20 bp, synthetic construct
  misc_feature 1..20: note = chemically synthesized
  source 1..20: mol_type = other DNA
ctgcttataaagacatacct

SEQ ID NO: 21205 - DNA, 20 bp, synthetic construct
  misc_feature 1..20: note = chemically synthesized
  source 1..20: mol_type = other DNA
tataaagacatacctgagac

SEQ ID NO: 21206 - DNA, 20 bp, synthetic construct
  misc_feature 1..20: note = chemically synthesized
  source 1..20: mol_type = other DNA
ataaagacatacctgagact

SEQ ID NO: 21207 - DNA, 20 bp, synthetic construct
  misc_feature 1..20: note = chemically synthesized
  source 1..20: mol_type = other DNA
cctgagactgggtaatttat

SEQ ID NO: 21208 - DNA, 20 bp, synthetic construct
  misc_feature 1..20: note = chemically synthesized
  source 1..20: mol_type = other DNA
ctgagactgggtaatttata

SEQ ID NO: 21209 - DNA, 20 bp, synthetic construct
  misc_feature 1..20: note = chemically synthesized
  source 1..20: mol_type = other DNA
aaaaacgtttaattgtctca

SEQ ID NO: 21210 - DNA, 20 bp, synthetic construct
  misc_feature 1..20: note = chemically synthesized
  source 1..20: mol_type = other DNA
ttaattgtctcacagttcca

SEQ ID NO: 21211 - DNA, 20 bp, synthetic construct
  misc_feature 1..20: note = chemically synthesized
  source 1..20: mol_type = other DNA
taattgtctcacagttccac

SEQ ID NO: 21212 - DNA, 20 bp, synthetic construct
  misc_feature 1..20: note = chemically synthesized
  source 1..20: mol_type = other DNA
aattgtctcacagttccaca

SEQ ID NO: 21213 - DNA, 20 bp, synthetic construct
  misc_feature 1..20: note = chemically synthesized
  source 1..20: mol_type = other DNA
gtctcacagttccacagggc

SEQ ID NO: 21214 - DNA, 20 bp, synthetic construct
  misc_feature 1..20: note = chemically synthesized
  source 1..20: mol_type = other DNA
tctcacagttccacagggct

SEQ ID NO: 21215 - DNA, 20 bp, synthetic construct
  misc_feature 1..20: note = chemically synthesized
  source 1..20: mol_type = other DNA
ctcacagttccacagggctg

SEQ ID NO: 21216 - DNA, 20 bp, synthetic construct
  misc_feature 1..20: note = chemically synthesized
  source 1..20: mol_type = other DNA
cacagttccacagggctggg

SEQ ID NO: 21217 - DNA, 20 bp, synthetic construct
  misc_feature 1..20: note = chemically synthesized
  source 1..20: mol_type = other DNA
acagttccacagggctgggg

SEQ ID NO: 21218 - DNA, 20 bp, synthetic construct
  misc_feature 1..20: note = chemically synthesized
  source 1..20: mol_type = other DNA
ccacagggctggggaggcct

SEQ ID NO: 21219 - DNA, 20 bp, synthetic construct
  misc_feature 1..20: note = chemically synthesized
  source 1..20: mol_type = other DNA
cacagggctggggaggcctc

SEQ ID NO: 21220 - DNA, 20 bp, synthetic construct
  misc_feature 1..20: note = chemically synthesized
  source 1..20: mol_type = other DNA
cctcgggaaacttacaatca

SEQ ID NO: 21221 - DNA, 20 bp, synthetic construct
  misc_feature 1..20: note = chemically synthesized
  source 1..20: mol_type = other DNA
cgggaaacttacaatcatgg

SEQ ID NO: 21222 - DNA, 20 bp, synthetic construct
  misc_feature 1..20: note = chemically synthesized
  source 1..20: mol_type = other DNA
gaaacttacaatcatggcag

SEQ ID NO: 21223 - DNA, 20 bp, synthetic construct
  misc_feature 1..20: note = chemically synthesized
  source 1..20: mol_type = other DNA
acttacaatcatggcagaag

SEQ ID NO: 21224 - DNA, 20 bp, synthetic construct
  misc_feature 1..20: note = chemically synthesized
  source 1..20: mol_type = other DNA
caaacatgtccttcttcaca

SEQ ID NO: 21225 - DNA, 20 bp, synthetic construct
  misc_feature 1..20: note = chemically synthesized
  source 1..20: mol_type = other DNA
acatgtccttcttcacatgg

SEQ ID NO: 21226 - DNA, 20 bp, synthetic construct
  misc_feature 1..20: note = chemically synthesized
  source 1..20: mol_type = other DNA
tgtccttcttcacatggcag

SEQ ID NO: 21227 - DNA, 20 bp, synthetic construct
  misc_feature 1..20: note = chemically synthesized
  source 1..20: mol_type = other DNA
cttcttcacatggcagcagc

SEQ ID NO: 21228 - DNA, 20 bp, synthetic construct
  misc_feature 1..20: note = chemically synthesized
  source 1..20: mol_type = other DNA
cttcacatggcagcagcaag

SEQ ID NO: 21229 - DNA, 20 bp, synthetic construct
  misc_feature 1..20: note = chemically synthesized
  source 1..20: mol_type = other DNA
cacatggcagcagcaagtag

SEQ ID NO: 21230 - DNA, 20 bp, synthetic construct
  misc_feature 1..20: note = chemically synthesized
  source 1..20: mol_type = other DNA
cagcagcaagtagaagtgcc

SEQ ID NO: 21231 - DNA, 20 bp, synthetic construct
  misc_feature 1..20: note = chemically synthesized
  source 1..20: mol_type = other DNA
caagtagaagtgccaagcaa

SEQ ID NO: 21232 - DNA, 20 bp, synthetic construct
  misc_feature 1..20: note = chemically synthesized
  source 1..20: mol_type = other DNA
aagtagaagtgccaagcaaa

SEQ ID NO: 21233 - DNA, 20 bp, synthetic construct
  misc_feature 1..20: note = chemically synthesized
  source 1..20: mol_type = other DNA
agtagaagtgccaagcaaaa

SEQ ID NO: 21234 - DNA, 20 bp, synthetic construct
  misc_feature 1..20: note = chemically synthesized
  source 1..20: mol_type = other DNA
gtagaagtgccaagcaaaag

SEQ ID NO: 21235 - DNA, 20 bp, synthetic construct
  misc_feature 1..20: note = chemically synthesized
  source 1..20: mol_type = other DNA
tagaagtgccaagcaaaagg

SEQ ID NO: 21236 - DNA, 20 bp, synthetic construct
  misc_feature 1..20: note = chemically synthesized
  source 1..20: mol_type = other DNA
gtgccaagcaaaagggggaa

SEQ ID NO: 21237 - DNA, 20 bp, synthetic construct
  misc_feature 1..20: note = chemically synthesized
  source 1..20: mol_type = other DNA
aaagccgcttataaaaccat

SEQ ID NO: 21238 - DNA, 20 bp, synthetic construct
  misc_feature 1..20: note = chemically synthesized
  source 1..20: mol_type = other DNA
ataaaaccatcagatcttgt

SEQ ID NO: 21239 - DNA, 20 bp, synthetic construct
  misc_feature 1..20: note = chemically synthesized
  source 1..20: mol_type = other DNA
ttgtaagaactcactatcac

SEQ ID NO: 21240 - DNA, 20 bp, synthetic construct
  misc_feature 1..20: note = chemically synthesized
  source 1..20: mol_type = other DNA
taagaactcactatcacgag

SEQ ID NO: 21241 - DNA, 20 bp, synthetic construct
  misc_feature 1..20: note = chemically synthesized
  source 1..20: mol_type = other DNA
agaactcactatcacgagaa

SEQ ID NO: 21242 - DNA, 20 bp, synthetic construct
  misc_feature 1..20: note = chemically synthesized
  source 1..20: mol_type = other DNA
cactatcacgagaagagcat

SEQ ID NO: 21243 - DNA, 20 bp, synthetic construct
  misc_feature 1..20: note = chemically synthesized
  source 1..20: mol_type = other DNA
ctatcacgagaagagcatga

SEQ ID NO: 21244 - DNA, 20 bp, synthetic construct
  misc_feature 1..20: note = chemically synthesized
  source 1..20: mol_type = other DNA
aaatccctcccacaacacgt

SEQ ID NO: 21245 - DNA, 20 bp, synthetic construct
  misc_feature 1..20: note = chemically synthesized
  source 1..20: mol_type = other DNA
aatccctcccacaacacgtg

SEQ ID NO: 21246 - DNA, 20 bp, synthetic construct
  misc_feature 1..20: note = chemically synthesized
  source 1..20: mol_type = other DNA
cccacaacacgtgaggatta

SEQ ID NO: 21247 - DNA, 20 bp, synthetic construct
  misc_feature 1..20: note = chemically synthesized
  source 1..20: mol_type = other DNA
ccacaacacgtgaggattat

SEQ ID NO: 21248 - DNA, 20 bp, synthetic construct
  misc_feature 1..20: note = chemically synthesized
  source 1..20: mol_type = other DNA
gattatgggaactacaattc

SEQ ID NO: 21249 - DNA, 20 bp, synthetic construct
  misc_feature 1..20: note = chemically synthesized
  source 1..20: mol_type = other DNA
tgggaactacaattcaagat

SEQ ID NO: 21250 - DNA, 20 bp, synthetic construct
  misc_feature 1..20: note = chemically synthesized
  source 1..20: mol_type = other DNA
ctacaattcaagatgagatt

SEQ ID NO: 21251 - DNA, 20 bp, synthetic construct
  misc_feature 1..20: note = chemically synthesized
  source 1..20: mol_type = other DNA
tacaattcaagatgagattt

SEQ ID NO: 21252 - DNA, 20 bp, synthetic construct
  misc_feature 1..20: note = chemically synthesized
  source 1..20: mol_type = other DNA
aattcaagatgagatttggg

SEQ ID NO: 21253 - DNA, 20 bp, synthetic construct
  misc_feature 1..20: note = chemically synthesized
  source 1..20: mol_type = other DNA
attcaagatgagatttgggt

SEQ ID NO: 21254 - DNA, 20 bp, synthetic construct
  misc_feature 1..20: note = chemically synthesized
  source 1..20: mol_type = other DNA
ttcaagatgagatttgggtg

SEQ ID NO: 21255 - DNA, 20 bp, synthetic construct
  misc_feature 1..20: note = chemically synthesized
  source 1..20: mol_type = other DNA
atgagatttgggtggggaca

SEQ ID NO: 21256 - DNA, 20 bp, synthetic construct
  misc_feature 1..20: note = chemically synthesized
  source 1..20: mol_type = other DNA
atttgggtggggacacagtc

SEQ ID NO: 21257 - DNA, 20 bp, synthetic construct
  misc_feature 1..20: note = chemically synthesized
  source 1..20: mol_type = other DNA
gggacacagtcaagctgtat

SEQ ID NO: 21258 - DNA, 20 bp, synthetic construct
  misc_feature 1..20: note = chemically synthesized
  source 1..20: mol_type = other DNA
ggacacagtcaagctgtatc

SEQ ID NO: 21259 - DNA, 20 bp, synthetic construct
  misc_feature 1..20: note = chemically synthesized
  source 1..20: mol_type = other DNA
gacacagtcaagctgtatca

SEQ ID NO: 21260 - DNA, 20 bp, synthetic construct
  misc_feature 1..20: note = chemically synthesized
  source 1..20: mol_type = other DNA
gtcaagctgtatcagggtac

SEQ ID NO: 21261 - DNA, 20 bp, synthetic construct
  misc_feature 1..20: note = chemically synthesized
  source 1..20: mol_type = other DNA
gctgtatcagggtacaagct

SEQ ID NO: 21262 - DNA, 20 bp, synthetic construct
  misc_feature 1..20: note = chemically synthesized
  source 1..20: mol_type = other DNA
ctgtatcagggtacaagctc

SEQ ID NO: 21263 - DNA, 20 bp, synthetic construct
  misc_feature 1..20: note = chemically synthesized
  source 1..20: mol_type = other DNA
ccttacatatgtatgttgca

SEQ ID NO: 21264 - DNA, 20 bp, synthetic construct
  misc_feature 1..20: note = chemically synthesized
  source 1..20: mol_type = other DNA
tacatatgtatgttgcatag

SEQ ID NO: 21265 - DNA, 20 bp, synthetic construct
  misc_feature 1..20: note = chemically synthesized
  source 1..20: mol_type = other DNA
atgtatgttgcatagtggtg

SEQ ID NO: 21266 - DNA, 20 bp, synthetic construct
  misc_feature 1..20: note = chemically synthesized
  source 1..20: mol_type = other DNA
gttgcatagtggtgaagtct

SEQ ID NO: 21267 - DNA, 20 bp, synthetic construct
  misc_feature 1..20: note = chemically synthesized
  source 1..20: mol_type = other DNA
agtggtgaagtctgagcttt

SEQ ID NO: 21268 - DNA, 20 bp, synthetic construct
  misc_feature 1..20: note = chemically synthesized
  source 1..20: mol_type = other DNA
ggtgaagtctgagcttttag

SEQ ID NO: 21269 - DNA, 20 bp, synthetic construct
  misc_feature 1..20: note = chemically synthesized
  source 1..20: mol_type = other DNA
ttagtggaccatcacctgaa

SEQ ID NO: 21270 - DNA, 20 bp, synthetic construct
  misc_feature 1..20: note = chemically synthesized
  source 1..20: mol_type = other DNA
tgaatgttgtatccaatccg

SEQ ID NO: 21271 - DNA, 20 bp, synthetic construct
  misc_feature 1..20: note = chemically synthesized
  source 1..20: mol_type = other DNA
gtatccaatccgtagttttt

SEQ ID NO: 21272 - DNA, 20 bp, synthetic construct
  misc_feature 1..20: note = chemically synthesized
  source 1..20: mol_type = other DNA
cctatcctcccacctttctc

SEQ ID NO: 21273 - DNA, 20 bp, synthetic construct
  misc_feature 1..20: note = chemically synthesized
  source 1..20: mol_type = other DNA
tcccacctttctctagtctc

SEQ ID NO: 21274 - DNA, 20 bp, synthetic construct
  misc_feature 1..20: note = chemically synthesized
  source 1..20: mol_type = other DNA
gtctatgcttactcatcgtt

SEQ ID NO: 21275 - DNA, 20 bp, synthetic construct
  misc_feature 1..20: note = chemically synthesized
  source 1..20: mol_type = other DNA
ctcatcgtttagctcccact

SEQ ID NO: 21276 - DNA, 20 bp, synthetic construct
  misc_feature 1..20: note = chemically synthesized
  source 1..20: mol_type = other DNA
ccacttggctctcactaaat

SEQ ID NO: 21277 - DNA, 20 bp, synthetic construct
  misc_feature 1..20: note = chemically synthesized
  source 1..20: mol_type = other DNA
gtgtttgactttctgtttct

SEQ ID NO: 21278 - DNA, 20 bp, synthetic construct
  misc_feature 1..20: note = chemically synthesized
  source 1..20: mol_type = other DNA
tgtttctgagttatttcact

SEQ ID NO: 21279 - DNA, 20 bp, synthetic construct
  misc_feature 1..20: note = chemically synthesized
  source 1..20: mol_type = other DNA
gtttctgagttatttcactg

SEQ ID NO: 21280 - DNA, 20 bp, synthetic construct
  misc_feature 1..20: note = chemically synthesized
  source 1..20: mol_type = other DNA
tcactgaggataatgtcctc

SEQ ID NO: 21281 - DNA, 20 bp, synthetic construct
  misc_feature 1..20: note = chemically synthesized
  source 1..20: mol_type = other DNA
tccagttctaaccatgtttc

SEQ ID NO: 21282 - DNA, 20 bp, synthetic construct
  misc_feature 1..20: note = chemically synthesized
  source 1..20: mol_type = other DNA
cagttctaaccatgtttcta

SEQ ID NO: 21283 - DNA, 20 bp, synthetic construct
  misc_feature 1..20: note = chemically synthesized
  source 1..20: mol_type = other DNA
ttctaaccatgtttctagag

SEQ ID NO: 21284 - DNA, 20 bp, synthetic construct
  misc_feature 1..20: note = chemically synthesized
  source 1..20: mol_type = other DNA
catgatttcattctttttta

SEQ ID NO: 21285 - DNA, 20 bp, synthetic construct
  misc_feature 1..20: note = chemically synthesized
  source 1..20: mol_type = other DNA
tttcattcttttttatggct

SEQ ID NO: 21286 - DNA, 20 bp, synthetic construct
  misc_feature 1..20: note = chemically synthesized
  source 1..20: mol_type = other DNA
ttctttatccaatcgtccat

SEQ ID NO: 21287 - DNA, 20 bp, synthetic construct
  misc_feature 1..20: note = chemically synthesized
  source 1..20: mol_type = other DNA
tttatccaatcgtccattgg

SEQ ID NO: 21288 - DNA, 20 bp, synthetic construct
  misc_feature 1..20: note = chemically synthesized
  source 1..20: mol_type = other DNA
atcgtccattggtagacatt

SEQ ID NO: 21289 - DNA, 20 bp, synthetic construct
  misc_feature 1..20: note = chemically synthesized
  source 1..20: mol_type = other DNA
tcgtccattggtagacattt

SEQ ID NO: 21290 - DNA, 20 bp, synthetic construct
  misc_feature 1..20: note = chemically synthesized
  source 1..20: mol_type = other DNA
tgattccatatctttgctat

SEQ ID NO: 21291 - DNA, 20 bp, synthetic construct
  misc_feature 1..20: note = chemically synthesized
  source 1..20: mol_type = other DNA
gattccatatctttgctatt

SEQ ID NO: 21292 - DNA, 20 bp, synthetic construct
  misc_feature 1..20: note = chemically synthesized
  source 1..20: mol_type = other DNA
catatctttgctattgggaa

SEQ ID NO: 21293 - DNA, 20 bp, synthetic construct
  misc_feature 1..20: note = chemically synthesized
  source 1..20: mol_type = other DNA
ctactttgaacatactaatg

SEQ ID NO: 21294 - DNA, 20 bp, synthetic construct
  misc_feature 1..20: note = chemically synthesized
  source 1..20: mol_type = other DNA
taatatgatctctttcactt

SEQ ID NO: 21295 - DNA, 20 bp, synthetic construct
  misc_feature 1..20: note = chemically synthesized
  source 1..20: mol_type = other DNA
aatatgatctctttcacttt

SEQ ID NO: 21296 - DNA, 20 bp, synthetic construct
  misc_feature 1..20: note = chemically synthesized
  source 1..20: mol_type = other DNA
tttcactttgggtccatacc

SEQ ID NO: 21297 - DNA, 20 bp, synthetic construct
  misc_feature 1..20: note = chemically synthesized
  source 1..20: mol_type = other DNA
cactttgggtccatacccag

SEQ ID NO: 21298 - DNA, 20 bp, synthetic construct
  misc_feature 1..20: note = chemically synthesized
  source 1..20: mol_type = other DNA
tttgggtccatacccagtag

SEQ ID NO: 21299 - DNA, 20 bp, synthetic construct
  misc_feature 1..20: note = chemically synthesized
  source 1..20: mol_type = other DNA
ttgggtccatacccagtagt

SEQ ID NO: 21300 - DNA, 20 bp, synthetic construct
  misc_feature 1..20: note = chemically synthesized
  source 1..20: mol_type = other DNA
catacccagtagtgggattg

SEQ ID NO: 21301 - DNA, 20 bp, synthetic construct
  misc_feature 1..20: note = chemically synthesized
  source 1..20: mol_type = other DNA
atacccagtagtgggattgc

SEQ ID NO: 21302 - DNA, 20 bp, synthetic construct
  misc_feature 1..20: note = chemically synthesized
  source 1..20: mol_type = other DNA
agtgggattgcaggattgaa

SEQ ID NO: 21303 - DNA, 20 bp, synthetic construct
  misc_feature 1..20: note = chemically synthesized
  source 1..20: mol_type = other DNA
gggattgcaggattgaatgg

SEQ ID NO: 21304 - DNA, 20 bp, synthetic construct
  misc_feature 1..20: note = chemically synthesized
  source 1..20: mol_type = other DNA
ttgaatggtagttctgtttc

SEQ ID NO: 21305 - DNA, 20 bp, synthetic construct
  misc_feature 1..20: note = chemically synthesized
  source 1..20: mol_type = other DNA
agttctgtttctagttcttt

SEQ ID NO: 21306 - DNA, 20 bp, synthetic construct
  misc_feature 1..20: note = chemically synthesized
  source 1..20: mol_type = other DNA
tcttcatgctgtcttccata

SEQ ID NO: 21307 - DNA, 20 bp, synthetic construct
  misc_feature 1..20: note = chemically synthesized
  source 1..20: mol_type = other DNA
ctaatttacattcttaccaa

SEQ ID NO: 21308 - DNA, 20 bp, synthetic construct
  misc_feature 1..20: note = chemically synthesized
  source 1..20: mol_type = other DNA
cattcttaccaacagtgtat

SEQ ID NO: 21309 - DNA, 20 bp, synthetic construct
  misc_feature 1..20: note = chemically synthesized
  source 1..20: mol_type = other DNA
gtttttgaactttataatga

SEQ ID NO: 21310 - DNA, 20 bp, synthetic construct
  misc_feature 1..20: note = chemically synthesized
  source 1..20: mol_type = other DNA
ataatgatagccattctgac

SEQ ID NO: 21311 - DNA, 20 bp, synthetic construct
  misc_feature 1..20: note = chemically synthesized
  source 1..20: mol_type = other DNA
atagccattctgactggcat

SEQ ID NO: 21312 - DNA, 20 bp, synthetic construct
  misc_feature 1..20: note = chemically synthesized
  source 1..20: mol_type = other DNA
tagccattctgactggcata

SEQ ID NO: 21313 - DNA, 20 bp, synthetic construct
  misc_feature 1..20: note = chemically synthesized
  source 1..20: mol_type = other DNA
gccattctgactggcataag

SEQ ID NO: 21314 - DNA, 20 bp, synthetic construct
  misc_feature 1..20: note = chemically synthesized
  source 1..20: mol_type = other DNA
ccattctgactggcataagg

SEQ ID NO: 21315 - DNA, 20 bp, synthetic construct
  misc_feature 1..20: note = chemically synthesized
  source 1..20: mol_type = other DNA
tggcataaggaggtatcata

SEQ ID NO: 21316 - DNA, 20 bp, synthetic construct
  misc_feature 1..20: note = chemically synthesized
  source 1..20: mol_type = other DNA
cataaggaggtatcatatgg

SEQ ID NO: 21317 - DNA, 20 bp, synthetic construct
  misc_feature 1..20: note = chemically synthesized
  source 1..20: mol_type = other DNA
aatttgcattctctgattat

SEQ ID NO: 21318 - DNA, 20 bp, synthetic construct
  misc_feature 1..20: note = chemically synthesized
  source 1..20: mol_type = other DNA
aacttttttttgacgtttat

SEQ ID NO: 21319 - DNA, 20 bp, synthetic construct
  misc_feature 1..20: note = chemically synthesized
  source 1..20: mol_type = other DNA
gccacttgtatgtcttcttt

SEQ ID NO: 21320 - DNA, 20 bp, synthetic construct
  misc_feature 1..20: note = chemically synthesized
  source 1..20: mol_type = other DNA
tcttttggaaaatgtctgct

SEQ ID NO: 21321 - DNA, 20 bp, synthetic construct
  misc_feature 1..20: note = chemically synthesized
  source 1..20: mol_type = other DNA
cttttggaaaatgtctgctc

SEQ ID NO: 21322 - DNA, 20 bp, synthetic construct
  misc_feature 1..20: note = chemically synthesized
  source 1..20: mol_type = other DNA
aaaatgtctgctcaggacct

SEQ ID NO: 21323 - DNA, 20 bp, synthetic construct
  misc_feature 1..20: note = chemically synthesized
  source 1..20: mol_type = other DNA
cctgagctcactgtatttgt

SEQ ID NO: 21324 - DNA, 20 bp, synthetic construct
  misc_feature 1..20: note = chemically synthesized
  source 1..20: mol_type = other DNA
ctgagctcactgtatttgtc

SEQ ID NO: 21325 - DNA, 20 bp, synthetic construct
  misc_feature 1..20: note = chemically synthesized
  source 1..20: mol_type = other DNA
tgagctcactgtatttgtca

SEQ ID NO: 21326 - DNA, 20 bp, synthetic construct
  misc_feature 1..20: note = chemically synthesized
  source 1..20: mol_type = other DNA
ctgtatttgtcagggttccc

SEQ ID NO: 21327 - DNA, 20 bp, synthetic construct
  misc_feature 1..20: note = chemically synthesized
  source 1..20: mol_type = other DNA
gtatttgtcagggttcccta

SEQ ID NO: 21328 - DNA, 20 bp, synthetic construct
  misc_feature 1..20: note = chemically synthesized
  source 1..20: mol_type = other DNA
atttgtcagggttccctaga

SEQ ID NO: 21329 - DNA, 20 bp, synthetic construct
  misc_feature 1..20: note = chemically synthesized
  source 1..20: mol_type = other DNA
gtcagggttccctagagaga

SEQ ID NO: 21330 - DNA, 20 bp, synthetic construct
  misc_feature 1..20: note = chemically synthesized
  source 1..20: mol_type = other DNA
ccctagagagacagaactaa

SEQ ID NO: 21331 - DNA, 20 bp, synthetic construct
  misc_feature 1..20: note = chemically synthesized
  source 1..20: mol_type = other DNA
cctagagagacagaactaat

SEQ ID NO: 21332 - DNA, 20 bp, synthetic construct
  misc_feature 1..20: note = chemically synthesized
  source 1..20: mol_type = other DNA
tagagagacagaactaatag

SEQ ID NO: 21333 - DNA, 20 bp, synthetic construct
  misc_feature 1..20: note = chemically synthesized
  source 1..20: mol_type = other DNA
gagacagaactaataggaga

SEQ ID NO: 21334 - DNA, 20 bp, synthetic construct
  misc_feature 1..20: note = chemically synthesized
  source 1..20: mol_type = other DNA
cagaactaataggagataga

SEQ ID NO: 21335 - DNA, 20 bp, synthetic construct
  misc_feature 1..20: note = chemically synthesized
  source 1..20: mol_type = other DNA
actaataggagatagataga

SEQ ID NO: 21336 - DNA, 20 bp, synthetic construct
  misc_feature 1..20: note = chemically synthesized
  source 1..20: mol_type = other DNA
ataggagatagatagataga

SEQ ID NO: 21337 - DNA, 20 bp, synthetic construct
  misc_feature 1..20: note = chemically synthesized
  source 1..20: mol_type = other DNA
gagatagatagatagataga

SEQ ID NO: 21338 - DNA, 20 bp, synthetic construct
  misc_feature 1..20: note = chemically synthesized
  source 1..20: mol_type = other DNA
tagatagatagatagataga

SEQ ID NO: 21339 - DNA, 20 bp, synthetic construct
  misc_feature 1..20: note = chemically synthesized
  source 1..20: mol_type = other DNA
tagatagatagatagataga

SEQ ID NO: 21340 - DNA, 20 bp, synthetic construct
  misc_feature 1..20: note = chemically synthesized
  source 1..20: mol_type = other DNA
tagatagatagatagataga

SEQ ID NO: 21341 - DNA, 20 bp, synthetic construct
  misc_feature 1..20: note = chemically synthesized
  source 1..20: mol_type = other DNA
tagatagatagatagataga

SEQ ID NO: 21342 - DNA, 20 bp, synthetic construct
  misc_feature 1..20: note = chemically synthesized
  source 1..20: mol_type = other DNA
tagatagatagatagataga

SEQ ID NO: 21343 - DNA, 20 bp, synthetic construct
  misc_feature 1..20: note = chemically synthesized
  source 1..20: mol_type = other DNA
gatagatagatagatagata

SEQ ID NO: 21344 - DNA, 20 bp, synthetic construct
  misc_feature 1..20: note = chemically synthesized
  source 1..20: mol_type = other DNA
tagatagatagatatagatt

SEQ ID NO: 21345 - DNA, 20 bp, synthetic construct
  misc_feature 1..20: note = chemically synthesized
  source 1..20: mol_type = other DNA
agatatagatttagatataa

SEQ ID NO: 21346 - DNA, 20 bp, synthetic construct
  misc_feature 1..20: note = chemically synthesized
  source 1..20: mol_type = other DNA
gatatagatttagatataaa

SEQ ID NO: 21347 - DNA, 20 bp, synthetic construct
  misc_feature 1..20: note = chemically synthesized
  source 1..20: mol_type = other DNA
atatagatttagatataaaa

SEQ ID NO: 21348 - DNA, 20 bp, synthetic construct
  misc_feature 1..20: note = chemically synthesized
  source 1..20: mol_type = other DNA
atagatttagatataaaagg

SEQ ID NO: 21349 - DNA, 20 bp, synthetic construct
  misc_feature 1..20: note = chemically synthesized
  source 1..20: mol_type = other DNA
gatataaaagggagtttatt

SEQ ID NO: 21350 - DNA, 20 bp, synthetic construct
  misc_feature 1..20: note = chemically synthesized
  source 1..20: mol_type = other DNA
ataaaagggagtttattaag

SEQ ID NO: 21351 - DNA, 20 bp, synthetic construct
  misc_feature 1..20: note = chemically synthesized
  source 1..20: mol_type = other DNA
gtgttaacttacacaatcac

SEQ ID NO: 21352 - DNA, 20 bp, synthetic construct
  misc_feature 1..20: note = chemically synthesized
  source 1..20: mol_type = other DNA
tgttaacttacacaatcaca

SEQ ID NO: 21353 - DNA, 20 bp, synthetic construct
  misc_feature 1..20: note = chemically synthesized
  source 1..20: mol_type = other DNA
acaatcacaaggtcccacaa

SEQ ID NO: 21354 - DNA, 20 bp, synthetic construct
  misc_feature 1..20: note = chemically synthesized
  source 1..20: mol_type = other DNA
caatcacaaggtcccacaat

SEQ ID NO: 21355 - DNA, 20 bp, synthetic construct
  misc_feature 1..20: note = chemically synthesized
  source 1..20: mol_type = other DNA
tcccacaataggccatctgc

SEQ ID NO: 21356 - DNA, 20 bp, synthetic construct
  misc_feature 1..20: note = chemically synthesized
  source 1..20: mol_type = other DNA
cacaataggccatctgcaag

SEQ ID NO: 21357 - DNA, 20 bp, synthetic construct
  misc_feature 1..20: note = chemically synthesized
  source 1..20: mol_type = other DNA
caataggccatctgcaagca

SEQ ID NO: 21358 - DNA, 20 bp, synthetic construct
  misc_feature 1..20: note = chemically synthesized
  source 1..20: mol_type = other DNA
aataggccatctgcaagcag

SEQ ID NO: 21359 - DNA, 20 bp, synthetic construct
  misc_feature 1..20: note = chemically synthesized
  source 1..20: mol_type = other DNA
taggccatctgcaagcagag

SEQ ID NO: 21360 - DNA, 20 bp, synthetic construct
  misc_feature 1..20: note = chemically synthesized
  source 1..20: mol_type = other DNA
ccatctgcaagcagaggagc

SEQ ID NO: 21361 - DNA, 20 bp, synthetic construct
  misc_feature 1..20: note = chemically synthesized
  source 1..20: mol_type = other DNA
catctgcaagcagaggagca

SEQ ID NO: 21362 - DNA, 20 bp, synthetic construct
  misc_feature 1..20: note = chemically synthesized
  source 1..20: mol_type = other DNA
ctgcaagcagaggagcaagg

SEQ ID NO: 21363 - DNA, 20 bp, synthetic construct
  misc_feature 1..20: note = chemically synthesized
  source 1..20: mol_type = other DNA
aagcagaggagcaaggaagc

SEQ ID NO: 21364 - DNA, 20 bp, synthetic construct
  misc_feature 1..20: note = chemically synthesized
  source 1..20: mol_type = other DNA
aggagcaaggaagccagtcc

SEQ ID NO: 21365 - DNA, 20 bp, synthetic construct
  misc_feature 1..20: note = chemically synthesized
  source 1..20: mol_type = other DNA
ggaagccagtccaagtccca

SEQ ID NO: 21366 - DNA, 20 bp, synthetic construct
  misc_feature 1..20: note = chemically synthesized
  source 1..20: mol_type = other DNA
cagtccaagtcccaaagctg

SEQ ID NO: 21367 - DNA, 20 bp, synthetic construct
  misc_feature 1..20: note = chemically synthesized
  source 1..20: mol_type = other DNA
agtccaagtcccaaagctga

SEQ ID NO: 21368 - DNA, 20 bp, synthetic construct
  misc_feature 1..20: note = chemically synthesized
  source 1..20: mol_type = other DNA
agtcccaaagctgaaggact

SEQ ID NO: 21369 - DNA, 20 bp, synthetic construct
  misc_feature 1..20: note = chemically synthesized
  source 1..20: mol_type = other DNA
tcccaaagctgaaggacttg

SEQ ID NO: 21370 - DNA, 20 bp, synthetic construct
  misc_feature 1..20: note = chemically synthesized
  source 1..20: mol_type = other DNA
ggacttggagtccaatgttt

SEQ ID NO: 21371 - DNA, 20 bp, synthetic construct
  misc_feature 1..20: note = chemically synthesized
  source 1..20: mol_type = other DNA
gacttggagtccaatgtttg

SEQ ID NO: 21372 - DNA, 20 bp, synthetic construct
  misc_feature 1..20: note = chemically synthesized
  source 1..20: mol_type = other DNA
acttggagtccaatgtttga

SEQ ID NO: 21373 - DNA, 20 bp, synthetic construct
  misc_feature 1..20: note = chemically synthesized
  source 1..20: mol_type = other DNA
tggagtccaatgtttgaggg

SEQ ID NO: 21374 - DNA, 20 bp, synthetic construct
  misc_feature 1..20: note = chemically synthesized
  source 1..20: mol_type = other DNA
ggagtccaatgtttgagggc

SEQ ID NO: 21375 - DNA, 20 bp, synthetic construct
  misc_feature 1..20: note = chemically synthesized
  source 1..20: mol_type = other DNA
gtccaatgtttgagggcagg

SEQ ID NO: 21376 - DNA, 20 bp, synthetic construct
  misc_feature 1..20: note = chemically synthesized
  source 1..20: mol_type = other DNA
gtttgagggcaggaagcatc

SEQ ID NO: 21377 - DNA, 20 bp, synthetic construct
  misc_feature 1..20: note = chemically synthesized
  source 1..20: mol_type = other DNA
agggcaggaagcatccagca

SEQ ID NO: 21378 - DNA, 20 bp, synthetic construct
  misc_feature 1..20: note = chemically synthesized
  source 1..20: mol_type = other DNA
gggcaggaagcatccagcat

SEQ ID NO: 21379 - DNA, 20 bp, synthetic construct
  misc_feature 1..20: note = chemically synthesized
  source 1..20: mol_type = other DNA
gcaggaagcatccagcatgg

SEQ ID NO: 21380 - DNA, 20 bp, synthetic construct
  misc_feature 1..20: note = chemically synthesized
  source 1..20: mol_type = other DNA
gaagcatccagcatgggaga

SEQ ID NO: 21381 - DNA, 20 bp, synthetic construct
  misc_feature 1..20: note = chemically synthesized
  source 1..20: mol_type = other DNA
tccagcatgggagaaagatg

SEQ ID NO: 21382 - DNA, 20 bp, synthetic construct
  misc_feature 1..20: note = chemically synthesized
  source 1..20: mol_type = other DNA
ccagcatgggagaaagatgt

SEQ ID NO: 21383 - DNA, 20 bp, synthetic construct
  misc_feature 1..20: note = chemically synthesized
  source 1..20: mol_type = other DNA
atgggagaaagatgtaggct

SEQ ID NO: 21384 - DNA, 20 bp, synthetic construct
  misc_feature 1..20: note = chemically synthesized
  source 1..20: mol_type = other DNA
gggagaaagatgtaggcttg

SEQ ID NO: 21385 - DNA, 20 bp, synthetic construct
  misc_feature 1..20: note = chemically synthesized
  source 1..20: mol_type = other DNA
ggagaaagatgtaggcttgg

SEQ ID NO: 21386 - DNA, 20 bp, synthetic construct
  misc_feature 1..20: note = chemically synthesized
  source 1..20: mol_type = other DNA
aagatgtaggcttggaggct

SEQ ID NO: 21387 - DNA, 20 bp, synthetic construct
  misc_feature 1..20: note = chemically synthesized
  source 1..20: mol_type = other DNA
tgtaggcttggaggctaagc

SEQ ID NO: 21388 - DNA, 20 bp, synthetic construct
  misc_feature 1..20: note = chemically synthesized
  source 1..20: mol_type = other DNA
gcttggaggctaagccagtc

SEQ ID NO: 21389 - DNA, 20 bp, synthetic construct
  misc_feature 1..20: note = chemically synthesized
  source 1..20: mol_type = other DNA
cttggaggctaagccagtcc

SEQ ID NO: 21390 - DNA, 20 bp, synthetic construct
  misc_feature 1..20: note = chemically synthesized
  source 1..20: mol_type = other DNA
tttctgcctgctttatatcc

SEQ ID NO: 21391 - DNA, 20 bp, synthetic construct
  misc_feature 1..20: note = chemically synthesized
  source 1..20: mol_type = other DNA
gctttatatcctggccacac

SEQ ID NO: 21392 - DNA, 20 bp, synthetic construct
  misc_feature 1..20: note = chemically synthesized
  source 1..20: mol_type = other DNA
tggccacactggcaactgat

SEQ ID NO: 21393 - DNA, 20 bp, synthetic construct
  misc_feature 1..20: note = chemically synthesized
  source 1..20: mol_type = other DNA
cacactggcaactgattaga

SEQ ID NO: 21394 - DNA, 20 bp, synthetic construct
  misc_feature 1..20: note = chemically synthesized
  source 1..20: mol_type = other DNA
ctgattagatggtgcccacc

SEQ ID NO: 21395 - DNA, 20 bp, synthetic construct
  misc_feature 1..20: note = chemically synthesized
  source 1..20: mol_type = other DNA
agatggtgcccacccagatt

SEQ ID NO: 21396 - DNA, 20 bp, synthetic construct
  misc_feature 1..20: note = chemically synthesized
  source 1..20: mol_type = other DNA
gatggtgcccacccagatta

SEQ ID NO: 21397 - DNA, 20 bp, synthetic construct
  misc_feature 1..20: note = chemically synthesized
  source 1..20: mol_type = other DNA
atggtgcccacccagattaa

SEQ ID NO: 21398 - DNA, 20 bp, synthetic construct
  misc_feature 1..20: note = chemically synthesized
  source 1..20: mol_type = other DNA
gtgcccacccagattaaggg

SEQ ID NO: 21399 - DNA, 20 bp, synthetic construct
  misc_feature 1..20: note = chemically synthesized
  source 1..20: mol_type = other DNA
tgcccacccagattaagggt

SEQ ID NO: 21400 - DNA, 20 bp, synthetic construct
  misc_feature 1..20: note = chemically synthesized
  source 1..20: mol_type = other DNA
aagggtgggtctgcctttcc

SEQ ID NO: 21401 - DNA, 20 bp, synthetic construct
  misc_feature 1..20: note = chemically synthesized
  source 1..20: mol_type = other DNA
actaaaatgttaatctcctt

SEQ ID NO: 21402 - DNA, 20 bp, synthetic construct
  misc_feature 1..20: note = chemically synthesized
  source 1..20: mol_type = other DNA
ctcctttggcaataccctca

SEQ ID NO: 21403 - DNA, 20 bp, synthetic construct
  misc_feature 1..20: note = chemically synthesized
  source 1..20: mol_type = other DNA
aataccctcacagacacact

SEQ ID NO: 21404 - DNA, 20 bp, synthetic construct
  misc_feature 1..20: note = chemically synthesized
  source 1..20: mol_type = other DNA
ataccctcacagacacactc

SEQ ID NO: 21405 - DNA, 20 bp, synthetic construct
  misc_feature 1..20: note = chemically synthesized
  source 1..20: mol_type = other DNA
ttgcacacttcaatccaatc

SEQ ID NO: 21406 - DNA, 20 bp, synthetic construct
  misc_feature 1..20: note = chemically synthesized
  source 1..20: mol_type = other DNA
aatccaatcaagttgacact

SEQ ID NO: 21407 - DNA, 20 bp, synthetic construct
  misc_feature 1..20: note = chemically synthesized
  source 1..20: mol_type = other DNA
cactcagtattaaccatcac

SEQ ID NO: 21408 - DNA, 20 bp, synthetic construct
  misc_feature 1..20: note = chemically synthesized
  source 1..20: mol_type = other DNA
agtccatcgcttgtcaactt

SEQ ID NO: 21409 - DNA, 20 bp, synthetic construct
  misc_feature 1..20: note = chemically synthesized
  source 1..20: mol_type = other DNA
tgagcctatacacatcccct

SEQ ID NO: 21410 - DNA, 20 bp, synthetic construct
  misc_feature 1..20: note = chemically synthesized
  source 1..20: mol_type = other DNA
gagcctatacacatcccctg

SEQ ID NO: 21411 - DNA, 20 bp, synthetic construct
  misc_feature 1..20: note = chemically synthesized
  source 1..20: mol_type = other DNA
tcatacattatcttcaaata

SEQ ID NO: 21412 - DNA, 20 bp, synthetic construct
  misc_feature 1..20: note = chemically synthesized
  source 1..20: mol_type = other DNA
cttcaaataaagacaacaat

SEQ ID NO: 21413 - DNA, 20 bp, synthetic construct
  misc_feature 1..20: note = chemically synthesized
  source 1..20: mol_type = other DNA
aatacttaaatgctgatatg

SEQ ID NO: 21414 - DNA, 20 bp, synthetic construct
  misc_feature 1..20: note = chemically synthesized
  source 1..20: mol_type = other DNA
aaatcttatgtcacatgata

SEQ ID NO: 21415 - DNA, 20 bp, synthetic construct
  misc_feature 1..20: note = chemically synthesized
  source 1..20: mol_type = other DNA
aatcttatgtcacatgataa

SEQ ID NO: 21416 - DNA, 20 bp, synthetic construct
  misc_feature 1..20: note = chemically synthesized
  source 1..20: mol_type = other DNA
atgtcacatgataaaggaaa

SEQ ID NO: 21417 - DNA, 20 bp, synthetic construct
  misc_feature 1..20: note = chemically synthesized
  source 1..20: mol_type = other DNA
tgtcacatgataaaggaaaa

SEQ ID NO: 21418 - DNA, 20 bp, synthetic construct
  misc_feature 1..20: note = chemically synthesized
  source 1..20: mol_type = other DNA
cacatgataaaggaaaaagg

SEQ ID NO: 21419 - DNA, 20 bp, synthetic construct
  misc_feature 1..20: note = chemically synthesized
  source 1..20: mol_type = other DNA
gtaaaatgtatatattttct

SEQ ID NO: 21420 - DNA, 20 bp, synthetic construct
  misc_feature 1..20: note = chemically synthesized
  source 1..20: mol_type = other DNA
tgtatatattttcttagtac

SEQ ID NO: 21421 - DNA, 20 bp, synthetic construct
  misc_feature 1..20: note = chemically synthesized
  source 1..20: mol_type = other DNA
tttcttagtacaagtgtata

SEQ ID NO: 21422 - DNA, 20 bp, synthetic construct
  misc_feature 1..20: note = chemically synthesized
  source 1..20: mol_type = other DNA
tacaagtgtatacagacacg

SEQ ID NO: 21423 - DNA, 20 bp, synthetic construct
  misc_feature 1..20: note = chemically synthesized
  source 1..20: mol_type = other DNA
acaagtgtatacagacacga

SEQ ID NO: 21424 - DNA, 20 bp, synthetic construct
  misc_feature 1..20: note = chemically synthesized
  source 1..20: mol_type = other DNA
cacgaaggtgtttttaacaa

SEQ ID NO: 21425 - DNA, 20 bp, synthetic construct
  misc_feature 1..20: note = chemically synthesized
  source 1..20: mol_type = other DNA
gaaggtgtttttaacaaaag

SEQ ID NO: 21426 - DNA, 20 bp, synthetic construct
  misc_feature 1..20: note = chemically synthesized
  source 1..20: mol_type = other DNA
aaggtgtttttaacaaaaga

SEQ ID NO: 21427 - DNA, 20 bp, synthetic construct
  misc_feature 1..20: note = chemically synthesized
  source 1..20: mol_type = other DNA
ggtgtttttaacaaaagaag

SEQ ID NO: 21428 - DNA, 20 bp, synthetic construct
  misc_feature 1..20: note = chemically synthesized
  source 1..20: mol_type = other DNA
gtgtttttaacaaaagaagg

SEQ ID NO: 21429 - DNA, 20 bp, synthetic construct
  misc_feature 1..20: note = chemically synthesized
  source 1..20: mol_type = other DNA
ggaaatactcatgacaatta

SEQ ID NO: 21430 - DNA, 20 bp, synthetic construct
  misc_feature 1..20: note = chemically synthesized
  source 1..20: mol_type = other DNA
acagtccttgtatctgcaat

SEQ ID NO: 21431 - DNA, 20 bp, synthetic construct
  misc_feature 1..20: note = chemically synthesized
  source 1..20: mol_type = other DNA
tgcaattggtcacgtgatcg

SEQ ID NO: 21432 - DNA, 20 bp, synthetic construct
  misc_feature 1..20: note = chemically synthesized
  source 1..20: mol_type = other DNA
attggtcacgtgatcgtagc

SEQ ID NO: 21433 - DNA, 20 bp, synthetic construct
  misc_feature 1..20: note = chemically synthesized
  source 1..20: mol_type = other DNA
ttctgtattccctttgccct

SEQ ID NO: 21434 - DNA, 20 bp, synthetic construct
  misc_feature 1..20: note = chemically synthesized
  source 1..20: mol_type = other DNA
gtattccctttgccctcagc

SEQ ID NO: 21435 - DNA, 20 bp, synthetic construct
  misc_feature 1..20: note = chemically synthesized
  source 1..20: mol_type = other DNA
tttgccctcagcaagcacct

SEQ ID NO: 21436 - DNA, 20 bp, synthetic construct
  misc_feature 1..20: note = chemically synthesized
  source 1..20: mol_type = other DNA
gccctcagcaagcacctcag

SEQ ID NO: 21437 - DNA, 20 bp, synthetic construct
  misc_feature 1..20: note = chemically synthesized
  source 1..20: mol_type = other DNA
ccctcagcaagcacctcagc

SEQ ID NO: 21438 - DNA, 20 bp, synthetic construct
  misc_feature 1..20: note = chemically synthesized
  source 1..20: mol_type = other DNA
ttttttttttttttttttcc

SEQ ID NO: 21439 - DNA, 20 bp, synthetic construct
  misc_feature 1..20: note = chemically synthesized
  source 1..20: mol_type = other DNA
tttttttttttttttcctgg

SEQ ID NO: 21440 - DNA, 20 bp, synthetic construct
  misc_feature 1..20: note = chemically synthesized
  source 1..20: mol_type = other DNA
tttttttttttttcctggtg

SEQ ID NO: 21441 - DNA, 20 bp, synthetic construct
  misc_feature 1..20: note = chemically synthesized
  source 1..20: mol_type = other DNA
gtgacccaaacctttatttg

SEQ ID NO: 21442 - DNA, 20 bp, synthetic construct
  misc_feature 1..20: note = chemically synthesized
  source 1..20: mol_type = other DNA
cctttatttgtagtcctgcc

SEQ ID NO: 21443 - DNA, 20 bp, synthetic construct
  misc_feature 1..20: note = chemically synthesized
  source 1..20: mol_type = other DNA
atttgtagtcctgcctggaa

SEQ ID NO: 21444 - DNA, 20 bp, synthetic construct
  misc_feature 1..20: note = chemically synthesized
  source 1..20: mol_type = other DNA
gtcctgcctggaatggcctg

SEQ ID NO: 21445 - DNA, 20 bp, synthetic construct
  misc_feature 1..20: note = chemically synthesized
  source 1..20: mol_type = other DNA
ctgcctggaatggcctgtag

SEQ ID NO: 21446 - DNA, 20 bp, synthetic construct
  misc_feature 1..20: note = chemically synthesized
  source 1..20: mol_type = other DNA
tttcccactgaccttaattc

SEQ ID NO: 21447 - DNA, 20 bp, synthetic construct
  misc_feature 1..20: note = chemically synthesized
  source 1..20: mol_type = other DNA
ttcccactgaccttaattcc

SEQ ID NO: 21448 - DNA, 20 bp, synthetic construct
  misc_feature 1..20: note = chemically synthesized
  source 1..20: mol_type = other DNA
ctgaccttaattccaggaca

SEQ ID NO: 21449 - DNA, 20 bp, synthetic construct
  misc_feature 1..20: note = chemically synthesized
  source 1..20: mol_type = other DNA
ttccaggacatggtaaaact

SEQ ID NO: 21450 - DNA, 20 bp, synthetic construct
  misc_feature 1..20: note = chemically synthesized
  source 1..20: mol_type = other DNA
ccaggacatggtaaaactaa

SEQ ID NO: 21451 - DNA, 20 bp, synthetic construct
  misc_feature 1..20: note = chemically synthesized
  source 1..20: mol_type = other DNA
aaaactaagagacaccctaa

SEQ ID NO: 21452 - DNA, 20 bp, synthetic construct
  misc_feature 1..20: note = chemically synthesized
  source 1..20: mol_type = other DNA
acgcttccttacctccattg

SEQ ID NO: 21453 - DNA, 20 bp, synthetic construct
  misc_feature 1..20: note = chemically synthesized
  source 1..20: mol_type = other DNA
gcttccttacctccattgtg

SEQ ID NO: 21454 - DNA, 20 bp, synthetic construct
  misc_feature 1..20: note = chemically synthesized
  source 1..20: mol_type = other DNA
ttacctccattgtggagttg

SEQ ID NO: 21455 - DNA, 20 bp, synthetic construct
  misc_feature 1..20: note = chemically synthesized
  source 1..20: mol_type = other DNA
gtagactgatttcatcttga

SEQ ID NO: 21456 - DNA, 20 bp, synthetic construct
  misc_feature 1..20: note = chemically synthesized
  source 1..20: mol_type = other DNA
ctgatttcatcttgatagtc

SEQ ID NO: 21457 - DNA, 20 bp, synthetic construct
  misc_feature 1..20: note = chemically synthesized
  source 1..20: mol_type = other DNA
tgatttcatcttgatagtct

SEQ ID NO: 21458 - DNA, 20 bp, synthetic construct
  misc_feature 1..20: note = chemically synthesized
  source 1..20: mol_type = other DNA
atagtctgggttaatcaccg

SEQ ID NO: 21459 - DNA, 20 bp, synthetic construct
  misc_feature 1..20: note = chemically synthesized
  source 1..20: mol_type = other DNA
caacactgtaactctcttct

SEQ ID NO: 21460 - DNA, 20 bp, synthetic construct
  misc_feature 1..20: note = chemically synthesized
  source 1..20: mol_type = other DNA
cttcttagcctgttgactta

SEQ ID NO: 21461 - DNA, 20 bp, synthetic construct
  misc_feature 1..20: note = chemically synthesized
  source 1..20: mol_type = other DNA
ttcttagcctgttgacttaa

SEQ ID NO: 21462 - DNA, 20 bp, synthetic construct
  misc_feature 1..20: note = chemically synthesized
  source 1..20: mol_type = other DNA
ttagcctgttgacttaaagg

SEQ ID NO: 21463 - DNA, 20 bp, synthetic construct
  misc_feature 1..20: note = chemically synthesized
  source 1..20: mol_type = other DNA
tagcctgttgacttaaaggt

SEQ ID NO: 21464 - DNA, 20 bp, synthetic construct
  misc_feature 1..20: note = chemically synthesized
  source 1..20: mol_type = other DNA
gcctgttgacttaaaggtgg

SEQ ID NO: 21465 - DNA, 20 bp, synthetic construct
  misc_feature 1..20: note = chemically synthesized
  source 1..20: mol_type = other DNA
cctgttgacttaaaggtggg

SEQ ID NO: 21466 - DNA, 20 bp, synthetic construct
  misc_feature 1..20: note = chemically synthesized
  source 1..20: mol_type = other DNA
tgttgacttaaaggtgggag

SEQ ID NO: 21467 - DNA, 20 bp, synthetic construct
  misc_feature 1..20: note = chemically synthesized
  source 1..20: mol_type = other DNA
ttaaaggtgggaggagccca

SEQ ID NO: 21468 - DNA, 20 bp, synthetic construct
  misc_feature 1..20: note = chemically synthesized
  source 1..20: mol_type = other DNA
tgggaggagcccaaagtgtc

SEQ ID NO: 21469 - DNA, 20 bp, synthetic construct
  misc_feature 1..20: note = chemically synthesized
  source 1..20: mol_type = other DNA
gggaggagcccaaagtgtcc

SEQ ID NO: 21470 - DNA, 20 bp, synthetic construct
  misc_feature 1..20: note = chemically synthesized
  source 1..20: mol_type = other DNA
aggagcccaaagtgtccagg

SEQ ID NO: 21471 - DNA, 20 bp, synthetic construct
  misc_feature 1..20: note = chemically synthesized
  source 1..20: mol_type = other DNA
caggtggcaatcttaatttg

SEQ ID NO: 21472 - DNA, 20 bp, synthetic construct
  misc_feature 1..20: note = chemically synthesized
  source 1..20: mol_type = other DNA
aatcttaatttgcagtttaa

SEQ ID NO: 21473 - DNA, 20 bp, synthetic construct
  misc_feature 1..20: note = chemically synthesized
  source 1..20: mol_type = other DNA
ggaatcattattgtgtcacc

SEQ ID NO: 21474 - DNA, 20 bp, synthetic construct
  misc_feature 1..20: note = chemically synthesized
  source 1..20: mol_type = other DNA
atcattattgtgtcacctgg

SEQ ID NO: 21475 - DNA, 20 bp, synthetic construct
  misc_feature 1..20: note = chemically synthesized
  source 1..20: mol_type = other DNA
attattgtgtcacctggcgg

SEQ ID NO: 21476 - DNA, 20 bp, synthetic construct
  misc_feature 1..20: note = chemically synthesized
  source 1..20: mol_type = other DNA
ggcggcagtgttcctccctc

SEQ ID NO: 21477 - DNA, 20 bp, synthetic construct
  misc_feature 1..20: note = chemically synthesized
  source 1..20: mol_type = other DNA
gtgttcctccctctggaact

SEQ ID NO: 21478 - DNA, 20 bp, synthetic construct
  misc_feature 1..20: note = chemically synthesized
  source 1..20: mol_type = other DNA
cctctggaactaagacctct

SEQ ID NO: 21479 - DNA, 20 bp, synthetic construct
  misc_feature 1..20: note = chemically synthesized
  source 1..20: mol_type = other DNA
tggaactaagacctctaagc

SEQ ID NO: 21480 - DNA, 20 bp, synthetic construct
  misc_feature 1..20: note = chemically synthesized
  source 1..20: mol_type = other DNA
aactaagacctctaagccag

SEQ ID NO: 21481 - DNA, 20 bp, synthetic construct
  misc_feature 1..20: note = chemically synthesized
  source 1..20: mol_type = other DNA
gccagcagaacataatgcca

SEQ ID NO: 21482 - DNA, 20 bp, synthetic construct
  misc_feature 1..20: note = chemically synthesized
  source 1..20: mol_type = other DNA
ccagcagaacataatgccat

SEQ ID NO: 21483 - DNA, 20 bp, synthetic construct
  misc_feature 1..20: note = chemically synthesized
  source 1..20: mol_type = other DNA
agaacataatgccatgggaa

SEQ ID NO: 21484 - DNA, 20 bp, synthetic construct
  misc_feature 1..20: note = chemically synthesized
  source 1..20: mol_type = other DNA
gaacataatgccatgggaac

SEQ ID NO: 21485 - DNA, 20 bp, synthetic construct
  misc_feature 1..20: note = chemically synthesized
  source 1..20: mol_type = other DNA
cataatgccatgggaacagg

SEQ ID NO: 21486 - DNA, 20 bp, synthetic construct
  misc_feature 1..20: note = chemically synthesized
  source 1..20: mol_type = other DNA
acaggaagcaaaaattttgc

SEQ ID NO: 21487 - DNA, 20 bp, synthetic construct
  misc_feature 1..20: note = chemically synthesized
  source 1..20: mol_type = other DNA
ggaagcaaaaattttgctag

SEQ ID NO: 21488 - DNA, 20 bp, synthetic construct
  misc_feature 1..20: note = chemically synthesized
  source 1..20: mol_type = other DNA
aaattttgctagtggaacac

SEQ ID NO: 21489 - DNA, 20 bp, synthetic construct
  misc_feature 1..20: note = chemically synthesized
  source 1..20: mol_type = other DNA
aattttgctagtggaacact

SEQ ID NO: 21490 - DNA, 20 bp, synthetic construct
  misc_feature 1..20: note = chemically synthesized
  source 1..20: mol_type = other DNA
attttgctagtggaacacta

SEQ ID NO: 21491 - DNA, 20 bp, synthetic construct
  misc_feature 1..20: note = chemically synthesized
  source 1..20: mol_type = other DNA
ttttgctagtggaacactag

SEQ ID NO: 21492 - DNA, 20 bp, synthetic construct
  misc_feature 1..20: note = chemically synthesized
  source 1..20: mol_type = other DNA
tagtggaacactaggggtga

SEQ ID NO: 21493 - DNA, 20 bp, synthetic construct
  misc_feature 1..20: note = chemically synthesized
  source 1..20: mol_type = other DNA
ggaacactaggggtgatggt

SEQ ID NO: 21494 - DNA, 20 bp, synthetic construct
  misc_feature 1..20: note = chemically synthesized
  source 1..20: mol_type = other DNA
acactaggggtgatggtgag

SEQ ID NO: 21495 - DNA, 20 bp, synthetic construct
  misc_feature 1..20: note = chemically synthesized
  source 1..20: mol_type = other DNA
cacttccaccctttgattcc

SEQ ID NO: 21496 - DNA, 20 bp, synthetic construct
  misc_feature 1..20: note = chemically synthesized
  source 1..20: mol_type = other DNA
ggacccgtgaatcctgtcta

SEQ ID NO: 21497 - DNA, 20 bp, synthetic construct
  misc_feature 1..20: note = chemically synthesized
  source 1..20: mol_type = other DNA
gacccgtgaatcctgtctat

SEQ ID NO: 21498 - DNA, 20 bp, synthetic construct
  misc_feature 1..20: note = chemically synthesized
  source 1..20: mol_type = other DNA
cccgtgaatcctgtctatgg

SEQ ID NO: 21499 - DNA, 20 bp, synthetic construct
  misc_feature 1..20: note = chemically synthesized
  source 1..20: mol_type = other DNA
aatcctgtctatgggagaaa

SEQ ID NO: 21500 - DNA, 20 bp, synthetic construct
  misc_feature 1..20: note = chemically synthesized
  source 1..20: mol_type = other DNA
ggagaaacagtaccatatat

SEQ ID NO: 21501 - DNA, 20 bp, synthetic construct
  misc_feature 1..20: note = chemically synthesized
  source 1..20: mol_type = other DNA
ccatatattggacactgatt

SEQ ID NO: 21502 - DNA, 20 bp, synthetic construct
  misc_feature 1..20: note = chemically synthesized
  source 1..20: mol_type = other DNA
atatattggacactgattca

SEQ ID NO: 21503 - DNA, 20 bp, synthetic construct
  misc_feature 1..20: note = chemically synthesized
  source 1..20: mol_type = other DNA
acactgattcagagcataca

SEQ ID NO: 21504 - DNA, 20 bp, synthetic construct
  misc_feature 1..20: note = chemically synthesized
  source 1..20: mol_type = other DNA
tcagagcatacacagccttc

SEQ ID NO: 21505 - DNA, 20 bp, synthetic construct
  misc_feature 1..20: note = chemically synthesized
  source 1..20: mol_type = other DNA
agagcatacacagccttctg

SEQ ID NO: 21506 - DNA, 20 bp, synthetic construct
  misc_feature 1..20: note = chemically synthesized
  source 1..20: mol_type = other DNA
ccttctggagaactttgccc

SEQ ID NO: 21507 - DNA, 20 bp, synthetic construct
  misc_feature 1..20: note = chemically synthesized
  source 1..20: mol_type = other DNA
cttctggagaactttgcccc

SEQ ID NO: 21508 - DNA, 20 bp, synthetic construct
  misc_feature 1..20: note = chemically synthesized
  source 1..20: mol_type = other DNA
aactttgccccaggcctgca

SEQ ID NO: 21509 - DNA, 20 bp, synthetic construct
  misc_feature 1..20: note = chemically synthesized
  source 1..20: mol_type = other DNA
gcctgcaaagtattgtcacc

SEQ ID NO: 21510 - DNA, 20 bp, synthetic construct
  misc_feature 1..20: note = chemically synthesized
  source 1..20: mol_type = other DNA
gcaaagtattgtcacctagt

SEQ ID NO: 21511 - DNA, 20 bp, synthetic construct
  misc_feature 1..20: note = chemically synthesized
  source 1..20: mol_type = other DNA
cattgtaatcgtgacttcaa

SEQ ID NO: 21512 - DNA, 20 bp, synthetic construct
  misc_feature 1..20: note = chemically synthesized
  source 1..20: mol_type = other DNA
attgtaatcgtgacttcaaa

SEQ ID NO: 21513 - DNA, 20 bp, synthetic construct
  misc_feature 1..20: note = chemically synthesized
  source 1..20: mol_type = other DNA
gacttcaaaaggccattcaa

SEQ ID NO: 21514 - DNA, 20 bp, synthetic construct
  misc_feature 1..20: note = chemically synthesized
  source 1..20: mol_type = other DNA
aggccattcaaaagctgctt

SEQ ID NO: 21515 - DNA, 20 bp, synthetic construct
  misc_feature 1..20: note = chemically synthesized
  source 1..20: mol_type = other DNA
ggccattcaaaagctgcttc

SEQ ID NO: 21516 - DNA, 20 bp, synthetic construct
  misc_feature 1..20: note = chemically synthesized
  source 1..20: mol_type = other DNA
caaaagctgcttcaggatga

SEQ ID NO: 21517 - DNA, 20 bp, synthetic construct
  misc_feature 1..20: note = chemically synthesized
  source 1..20: mol_type = other DNA
aaaagctgcttcaggatgat

SEQ ID NO: 21518 - DNA, 20 bp, synthetic construct
  misc_feature 1..20: note = chemically synthesized
  source 1..20: mol_type = other DNA
aaagctgcttcaggatgata

SEQ ID NO: 21519 - DNA, 20 bp, synthetic construct
  misc_feature 1..20: note = chemically synthesized
  source 1..20: mol_type = other DNA
cttcaggatgatagggatca

SEQ ID NO: 21520 - DNA, 20 bp, synthetic construct
  misc_feature 1..20: note = chemically synthesized
  source 1..20: mol_type = other DNA
aggatgatagggatcatggt

SEQ ID NO: 21521 - DNA, 20 bp, synthetic construct
  misc_feature 1..20: note = chemically synthesized
  source 1..20: mol_type = other DNA
gatagggatcatggtaagac

SEQ ID NO: 21522 - DNA, 20 bp, synthetic construct
  misc_feature 1..20: note = chemically synthesized
  source 1..20: mol_type = other DNA
gtaagaccagtaaattccat

SEQ ID NO: 21523 - DNA, 20 bp, synthetic construct
  misc_feature 1..20: note = chemically synthesized
  source 1..20: mol_type = other DNA
ccagtaaattccatgagcat

SEQ ID NO: 21524 - DNA, 20 bp, synthetic construct
  misc_feature 1..20: note = chemically synthesized
  source 1..20: mol_type = other DNA
agcccactgtcacacttctt

SEQ ID NO: 21525 - DNA, 20 bp, synthetic construct
  misc_feature 1..20: note = chemically synthesized
  source 1..20: mol_type = other DNA
gtcacacttctttagccata

SEQ ID NO: 21526 - DNA, 20 bp, synthetic construct
  misc_feature 1..20: note = chemically synthesized
  source 1..20: mol_type = other DNA
cacttctttagccataaagt

SEQ ID NO: 21527 - DNA, 20 bp, synthetic construct
  misc_feature 1..20: note = chemically synthesized
  source 1..20: mol_type = other DNA
ttctttagccataaagtgag

SEQ ID NO: 21528 - DNA, 20 bp, synthetic construct
  misc_feature 1..20: note = chemically synthesized
  source 1..20: mol_type = other DNA
tagccataaagtgagtggct

(The sequence listing continues in the following parts.)
